United States Patent Application Publication US 2017/0009304 A1 - sequence listing, part 23

SEQ ID NO: 474709 - DNA, 100 bp, Homo sapiens
agctaagacgctgtttcagagcgtttgggtcctctgaggccccttgaccaggagcttctacctggccctctacaagcagatgagcttcctggagaagcga

SEQ ID NO: 474710 - DNA, 75 bp, Homo sapiens
atatagatcagaaatttgtattacagcttatagttggctgcttcaccaggactctacaaattgctcagaacccaa

SEQ ID NO: 474711 - DNA, 100 bp, Homo sapiens
cccatgcttgtcaaaaatcagaggcaactaacactgcggcttcctgaggtgatgactgaaaaagggaaactgtgccactatttgtaccatcattttcacc

SEQ ID NO: 474712 - DNA, 100 bp, Homo sapiens
gcggctgcgcacggactgctggagatggtggagtccgtcatttgtttcgacgccggaccgcgtaagagacgatgatgttgggcacggaaggtggagaggg

SEQ ID NO: 474713 - DNA, 99 bp, Homo sapiens
gcgcgggaggcaggttccgcacggagaagaaatatcaggctctgatatcagtgggtcagaggaagatgatgatgaagagggtgaggttggagaagatgg

SEQ ID NO: 474714 - DNA, 100 bp, Homo sapiens
gagtaacggtggcctggggtcagagccaggttcagctgcgaggctgctggtggctgtggagaacatgaaaggctcccggagcagcgctgactcctccagg

SEQ ID NO: 474715 - DNA, 75 bp, Homo sapiens
aacttgactgtatacagaatcttgaatcagaaattgagaagctgggctctggtatcagttcctcttcagtattgc

SEQ ID NO: 474716 - DNA, 82 bp, Homo sapiens
gaaattctcatgatagcttccaagggacaaggtgtcaacaatgtgccggtctctaattaacagaagatggcaaagcccagcc

SEQ ID NO: 474717 - DNA, 100 bp, Homo sapiens
tcactttgaactgatgcctggaactgctggagccagttctgcttctcggcaaggagcgatttgctggtgtagacatccgtgtccgtgtaaagggtggtgg

SEQ ID NO: 474718 - DNA, 82 bp, Homo sapiens
tcggcagccaagcttgcacatgagtgcagctgctgcctcccgagatatcactctgggattccagcagaagttcaccttccac

SEQ ID NO: 474719 - DNA, 75 bp, Homo sapiens
ggaacgacctgtggaaacctgtgatccattctcattaaataaatctctggggttaccatccattgacccatcagg

SEQ ID NO: 474720 - DNA, 101 bp, Homo sapiens
agggtgattctgaagagggtctggaggagccttctcaagaacagagttggtaggaggacagtttgatctggaaatgaatttcattatccaagaaggtgaga

SEQ ID NO: 474721 - DNA, 100 bp, Homo sapiens
gatttctccagtgctcatcttgttctcgagttttctctgccatgttgctattgcaggacggaggaaggtggtctatggtgaacccatagcagccagtctt

SEQ ID NO: 474722 - DNA, 76 bp, Homo sapiens
ctgctgagcttcacggtgcatcccaagcccaagaaagatccccagcaggccctcaaggagctggctaagatgtgta

SEQ ID NO: 474723 - DNA, 98 bp, Homo sapiens
tgacagacccttctctgctctacctggaggtctccactctggtcagcaagtatccagacatcagcttcatcacgtttcgctcctgtgcctacctggac

SEQ ID NO: 474724 - DNA, 97 bp, Homo sapiens
tgagatgtttcatcccaacaaatgaaacagtgattcagagtgcatataaaagcctcatacaacacttggaagaaataagggttttagtattagcaac

SEQ ID NO: 474725 - DNA, 99 bp, Homo sapiens
gccgtggacacctgtgtcagcatgtgggacctggttctctccatcgccttgtctgtggggtgcactgaaaaggaacggctgtagtagatctctctggga

SEQ ID NO: 474726 - DNA, 82 bp, Homo sapiens
gttccactctgtgttgatatgtgtctcaattggttgctcaatgtctatgacacgtgatgatgaacagtctacacagatggct

SEQ ID NO: 474727 - DNA, 100 bp, Homo sapiens
ctacttccccaccaaaaagtggcacacactggagagatatcaaactcacaattttccagtacaggcgccacccctagagtttccagtacctcgacaccag

SEQ ID NO: 474728 - DNA, 74 bp, Homo sapiens
tttggattcacccacagcggggcggcggcggcggcggctgcggcccaatatagtaagactttgaccccgacgca

SEQ ID NO: 474729 - DNA, 100 bp, Homo sapiens
accagttattgaatatcaagaggaggagttgttggtgcgaaattcatccacacttctctttagtgccttgatcacaagaatttttggagttaaaagggca

SEQ ID NO: 474730 - DNA, 90 bp, Homo sapiens
tcctgatgacatccttctttttagagatcgttttgatggatatatcttccttgacagcaaagcaaccttggccatggaccagccggctgg

SEQ ID NO: 474731 - DNA, 92 bp, Homo sapiens
cccgagtatgcttcgtttttcgccgtcatgggcgcctcggccgccatggtcttcagcggaagctcttcgtgggcggtcttgactggagcacg

SEQ ID NO: 474732 - DNA, 83 bp, Homo sapiens
gaagaagtgcaagagcagaggccttctctagaccttgccaagatggcacagataacgaaggaggcccaacttcattcaataag

SEQ ID NO: 474733 - DNA, 82 bp, Homo sapiens
aaaaccatctccaaagccaaagggcagcccaatggatccaatggtgatgaagagacctcagttgtatggcatgggcagtaac

SEQ ID NO: 474734 - DNA, 101 bp, Homo sapiens
ccttcacaaccaaactggatattcctactgctgctaaatatgaggatgggaagcacaaaatgcaagaggaaaatgttaaactaaaaaagcccctggaagaa

SEQ ID NO: 474735 - DNA, 53 bp, Homo sapiens
tttggcagctgtcctccagtcttaaaagggccagcgggtgaggtaccccaggt

SEQ ID NO: 474736 - DNA, 75 bp, Homo sapiens
acctttatgaaccagtgtatcccaataacaaatgtggcaattattttggatctatcacctgtcatcataactggc

SEQ ID NO: 474737 - DNA, 100 bp, Homo sapiens
cagcagaggatgatgagggcttcagtgcagacgcagtggtggccctggagcagtatgccagcaagattttcggacaagcaaacaccacgctgaagcgatg

SEQ ID NO: 474738 - DNA, 76 bp, Homo sapiens
gtttgtaaagcctgtgggctttcattttcagtctttagaaagaagcaaaccagtccagctacgggggcccagccag

SEQ ID NO: 474739 - DNA, 120 bp, Homo sapiens
gcgctcctgtggggatgaaggccgagggcttcgtggatgccctgcaccgggtccggcaggtgctgttgggaacacagaggaagtgactggctgggggttcagggaaagctccgtagaaga

SEQ ID NO: 474740 - DNA, 98 bp, Homo sapiens
gcgaagatgataggggggaaacctcaagatataatcttcacttccgggggcactgaggagaagtgccagaaagcccggaagcaaggaaggaaagtgac

SEQ ID NO: 474741 - DNA, 100 bp, Homo sapiens
cttcccttcgctccggcccggtgaaactgaacttataatcgtcactggattgctctgcagaaggctttaaccaagcagataaggcaataaacaccgctgt

SEQ ID NO: 474742 - DNA, 100 bp, Homo sapiens
cgagcactacgttatttagaaacaagacgagaatgtaactccgttgaagcatttttcccctacatcctgctgctctttgcgatcctcctgtacctgcccc

SEQ ID NO: 474743 - DNA, 82 bp, Homo sapiens
cagcagccttgttagggcgtggcctgaggcttggataagtggggctccccacaggtgcaggaagccgccgcccagccatgga

SEQ ID NO: 474744 - DNA, 100 bp, Homo sapiens
tgagatccaggacatctatgagaacaggtatcacagcctgtacctgaaggtgaaggggaatgtgttcaaaaacaagcggattctcatggaacacatccac

SEQ ID NO: 474745 - DNA, 101 bp, Homo sapiens
gtcttccccagctctgcagccacatactatccgtttgttcaggaaccaccagtgacagatgcaggtaggtagatcgctgaccacatttgctcatttctgga

SEQ ID NO: 474746 - DNA, 100 bp, Homo sapiens
agatgatgtgcccatcatcctcgtgggcaacaagagcgacctggtgcgctctcgtgaggtctcggtggatgcgcgtggggacacacaaatcagaatcctg

SEQ ID NO: 474747 - DNA, 75 bp, Homo sapiens
gggagtggaccatcgggcggagacgaggcgttggagaccagggccagccctggccacaccccaggctgtgtcacc

SEQ ID NO: 474748 - DNA, 97 bp, Homo sapiens
tagacccacagctgttaaagcaacaggttgacaggactgaggtgattcgcacctgcataaacccagtgtactcaaaactgtttactgtggactttta

SEQ ID NO: 474749 - DNA, 83 bp, Homo sapiens
ctgtcttcggtggactccttcggcagtccacccaccgccgccgcctcccaggaaataatgcaaaaggtgtcccaaggctcctg

SEQ ID NO: 474750 - DNA, 75 bp, Homo sapiens
ggggaattcagctgcctcccagggtgaatacagatcttgagcaatgcccggttatttctggagaacctcatcaag

SEQ ID NO: 474751 - DNA, 100 bp, Homo sapiens
gggtgatggcctgcacaatttcagcgatggcctagcaattggagtacaagcgcaagctagccagagtttccctggtgcgcaaagaactcaggtcccggat

SEQ ID NO: 474752 - DNA, 74 bp, Homo sapiens
atcatccagctgcctcaaatcgtcgtagtgggaacgcaggcttgaagaaaatttgcctacacgttgtggatttt

SEQ ID NO: 474753 - DNA, 97 bp, Homo sapiens
gctactatgtcttcgtttcagggagagcttatggatggagaccaaacatccagatctggagtgccggcacaggtgagggttcagagtatggtgccag

SEQ ID NO: 474754 - DNA, 98 bp, Homo sapiens
taggagaaataagaatggctgtagaggaacttcagtctataataaagagatgtgttcaaaccttgtactactcagctgatcacaagctgcttgatggg

SEQ ID NO: 474755 - DNA, 98 bp, Homo sapiens
ttggattttcacgtgctcttgctaaagaggtagcaagaaagaaaattagagtgaatgtagttgcaccagggaggtatggaaacattggaacttcaaaa

SEQ ID NO: 474756 - DNA, 73 bp, Homo sapiens
tgacatcttccaaactgtggacctctgggaaggagaacgtcaactcgctgttgccagtattcgaggagttcct

SEQ ID NO: 474757 - DNA, 125 bp, Homo sapiens
gcccaggctgctttcttcggtagctaccgaaacgctctgaaaatcgagccggacctgtatgaggctggagagaagaaatgggggacagatgaggtgaaatttctaactgttctctgttcccggaa

SEQ ID NO: 474758 - DNA, 97 bp, Homo sapiens
agctgcttccagtgggaatccacattaagaagtacaatagcattcgcggattcatgcttaacaagtctagcatcatcatcacttaaacaaattcttg

SEQ ID NO: 474759 - DNA, 100 bp, Homo sapiens
gagggtccgagccagccgctgttttgccggaggagcccctcaggccgctgaagggtatgtgattggcagctgtattaaacacattccaatcgcaggacga

SEQ ID NO: 474760 - DNA, 75 bp, Homo sapiens
cctaaaccagaagaggaggttgcccagaagaaaaaggaggaactctctggaatgaaaaataaaatacaagtagtt

SEQ ID NO: 474761 - DNA, 98 bp, Homo sapiens
aacaccaaaaagctttctgctagggttggtgagtttgtaagtgatgcccttctcgttcctgacaagtgcaaattcttacaccaggagaggatggatgt

SEQ ID NO: 474762 - DNA, 82 bp, Homo sapiens
cagggcagggtggagagctgcagctgcagagatttacaaacgaggaccacctggcagttcataaacacaagcatgagatgac

SEQ ID NO: 474763 - DNA, 83 bp, Homo sapiens
ctgagatgcgcaaattcactccccagtacaaagtggctgaacacctgatagcacagcacagcgccatcaagatgctgcacagc

SEQ ID NO: 474764 - DNA, 51 bp, Homo sapiens
gaagtaccaggaggcgttggccaaggctaagtttggtgcgaacgccattct

SEQ ID NO: 474765 - DNA, 90 bp, Homo sapiens
cagagagggccagagcgtcggggaggcaagatgatccaccagcggttccatcctacacttgggctatttttatgattcccacaaatccac

SEQ ID NO: 474766 - DNA, 82 bp, Homo sapiens
cccagccgccatggatagcgacgacgagatggtggaggaggcggtggaaggaccatcagcacgtgcccatcgacatccagac

SEQ ID NO: 474767 - DNA, 89 bp, Homo sapiens
cttgggagtactcattcctgtaatagctgtgtcagagcaccataacatggtgtgggaagtgaagacaaatcagatgcctaatgcagtac

SEQ ID NO: 474768 - DNA, 116 bp, Homo sapiens
gaggtagctcacgcgatagaaacgtgttcgctgcccagaagaagggaaggcgcgagtgaggaaaggaggtactgtagtgagggccccaaggctgttgcagctcctcgacctgatcg

SEQ ID NO: 474769 - DNA, 76 bp, Homo sapiens
ctctcatacaaagctttctgcagaagacacatggaagagcaggaaaattcagattcgaaacatccctcctcacctg

SEQ ID NO: 474770 - DNA, 91 bp, Homo sapiens
gttgcccggagaggagccgctcttcaccatcccgcacactcaggaggccttccgcacccgggaatggcctcacctactgctattccatcga

SEQ ID NO: 474771 - DNA, 100 bp, Homo sapiens
tacaaccttcgatctcctgacgaatatggctcgtggacagcagaaaattcagtctcagcagaaaaatgccaaaaagcaagctggacaaaagaagaaacaa

SEQ ID NO: 474772 - DNA, 51 bp, Homo sapiens
gggtcgcgccgtggcggagcaggtttagaaacatcaactggaatcaatttg

SEQ ID NO: 474773 - DNA, 100 bp, Homo sapiens
acctgtttgacatcatccctccccaggccaggcagcagcgttcaacgtgaccttccggcgggccaagggctaccccatcgacctgtactatctgatggac

SEQ ID NO: 474774 - DNA, 75 bp, Homo sapiens
atggccgtcaacacctttgtgaagtgtgaagcagtattctggaaagtttttctaagactagtgaagaactgaagg

SEQ ID NO: 474775 - DNA, 123 bp, Homo sapiens
atcaactcacgctttgtaaaaggagacatcagcactaaatttctctccgatgtgtatcctgatggcttcaaagctgctctgttaaaagcgaaaatgaaacaattgcctgcggcaacagttcga

SEQ ID NO: 474776 - DNA, 82 bp, Homo sapiens
aatcatccatctaaagcaccagtaaaatatggtgaactcattgtcttagggatattagaaatggctactccccagtcaattt

SEQ ID NO: 474777 - DNA, 75 bp, Homo sapiens
gtgaatatatattatgtctgcctgttctcccctcgtcggtggctaagggaacccgagcgtcatgttagggtgaag

SEQ ID NO: 474778 - DNA, 100 bp, Homo sapiens
agaaactgaatactccttccttcctccccacccattcctttaaatccggagggggaaaaaatcccaaggtctgcaaaggatgctccaggatgaaacgcca

SEQ ID NO: 474779 - DNA, 50 bp, Homo sapiens
gggtttccgcaatgcccctgtttcatcagtgagttctgcctcagtcagct

SEQ ID NO: 474780 - DNA, 50 bp, Homo sapiens
gacagctgccatccactgactcgtaaagggctaaactgcacggtcaagaa

SEQ ID NO: 474781 - DNA, 83 bp, Homo sapiens
gcaccgacgtcatcatgctgaccaccaatcagatccgtaaggaagaggagcaggacttggatggtgagaaggggccatcatcg

SEQ ID NO: 474782 - DNA, 48 bp, Homo sapiens
cgaggtgttgcggacgctggccggtctcctctgagcctccggcctcca

SEQ ID NO: 474783 - DNA, 82 bp, Homo sapiens
ccatctttccaggaggctttggagcggctaaaaacctttggaatcgaagcctcttaaaatggcagatgacttggacttcgag

SEQ ID NO: 474784 - DNA, 90 bp, Homo sapiens
gcccgccctgggccggcacattgcatctctgggaaaggacctggggctggtgaggggcccggaggagcctttgcccgcgtgtcagactcc

SEQ ID NO: 474785 - DNA, 51 bp, Homo sapiens
gcagggcctggcactggccaaggagattgaatgagtctgcaggtcttaaac

SEQ ID NO: 474786 - DNA, 118 bp, Homo sapiens
ttgggtatcctgcaggaggaggaggaagaagagaagctggacgctctgcaggggatcctctctgctttcctggataatattggacaccgcttactccagaaacatgggtggaagctgg

SEQ ID NO: 474787 - DNA, 90 bp, Homo sapiens
tggcaatatgatactcagtgttcactggcaggagctatccagtcagttcgctgctattcccatgggtcacaggagacagatgaggagttt

SEQ ID NO: 474788 - DNA, 100 bp, Homo sapiens
gtccagatgaaagagaagtttctggtcactccccaggattatgcgcggtttctgctgatgtactccacggttctgtgcagctattacaattcagccctga

SEQ ID NO: 474789 - DNA, 125 bp, Homo sapiens
gtcagtgttaaaggaacctctacaacgaaggtgaagccacggaagataaggcctcattgctacgatttcagagtaccctggtaatagctgagcatgcaaatgattccctagcacccattacttta

SEQ ID NO: 474790 - DNA, 75 bp, Homo sapiens
tctttcctgcgaaaggatcaagggataaaccatggcttttctgatgtggatcacacctatgctcaaagaactcag

SEQ ID NO: 474791 - DNA, 75 bp, Homo sapiens
aaagaagcaacaacttcttagagcagcaacaggaaaggtgtatcaatattcagtttgaaagagattcagttgcaa

SEQ ID NO: 474792 - DNA, 83 bp, Homo sapiens
tcctggccctggccctgatcatcctgctgggcttcgtccagatcgggaaggacctgcctagagctggaacgttacctccagag

SEQ ID NO: 474793 - DNA, 74 bp, Homo sapiens
tggtttttcggatcatgtctggtggctccgcggattataacagctctattatcaagtcctaaattttggaatga

SEQ ID NO: 474794 - DNA, 82 bp, Homo sapiens
agctgggtcagtccgccgctcaccccgcggccgcaccttcccgccttctcaggtttacccaaggtccagcctagcccctagg

SEQ ID NO: 474795 - DNA, 150 bp, Homo sapiens
aaaagctgcgacacaaaaaggattcactgcagaaccagctcatcaacatccgcgtggagctgtctcaggcgaccacgcctcaaggcacttctaggacctgcctcttctcaccaagatgaactcactggtttcttggcagctactgctttt

SEQ ID NO: 474796 - DNA, 74 bp, Homo sapiens
gactccctcagatccagtgataattgacagacatatgtagagtgtgtcggtcagaaggaacacctgagaaaccg

SEQ ID NO: 474797 - DNA, 100 bp, Homo sapiens
agacactcctgcaacccagttttccagccaccagtgggatgatggacggtatgccctggtagttgcaggagatattgctgtatatgccacaggaaatgct

SEQ ID NO: 474798 - DNA, 75 bp, Homo sapiens
cgactgtgcaggaagaaaacgagccagtgatttacaatagagcaagatgcagcagcttttttatgagaattacga

SEQ ID NO: 474799 - DNA, 100 bp, Homo sapiens
atatccaggaccctcactctggtagaatccaattattattggacatctgtgaccaatgatgtcaaacagtgggtactgcataagccgaccacagtataag

SEQ ID NO: 474800 - DNA, 82 bp, Homo sapiens
ctgcaggcggcccactggcagttcgaggagtgtggccatctggggccgtgtggtatttgccactcaggagacatgtccctat

SEQ ID NO: 474801 - DNA, 101 bp, Homo sapiens
acgtgacatcaagaggaagcggaaaccagtggccacagcatctttgtctagccccagtgcagggatagctgggagtatggccaccctgctccacgatgcgg

SEQ ID NO: 474802 - DNA, 80 bp, Homo sapiens
atttcactggcctagtgggaggtcctgactttgcccactgtctgctgtgttcgaaagaatcctcaaaccaagaaaataca

SEQ ID NO: 474803 - DNA, 74 bp, Homo sapiens
gtcagacgcagccgtagacaccagctccgaaatcaccaccaagagaaccatggagtctggcagtaccgccgcca

SEQ ID NO: 474804 - DNA, 80 bp, Homo sapiens
caatgacaaaaagtttgtcattaaacccatcgacaagaaggcacctgaacaggcctttgagagcagccagaagtacaaag

SEQ ID NO: 474805 - DNA, 146 bp, Homo sapiens
catgaaacctgggaaggtggtgcttgtcctggctggacgctactccggacgcaaagctgtcatcgtgaagaggagcaggagcggcttcgcttggagcaggagcgagagcaggaacagaagaaggccaatagcctggccaggctggc

SEQ ID NO: 474806 - DNA, 75 bp, Homo sapiens
aaatgaggcaagttatcctttggaaatgtgctcacactgtgatgatgaacagtctacacagatggctgcaagttg

SEQ ID NO: 474807 - DNA, 95 bp, Homo sapiens
gcccacatcaggacagctgttccttggccatcccaaagctattctgggggcaacagagattccaacaatgtctcacccatcttggctgccaccca

SEQ ID NO: 474808 - DNA, 83 bp, Homo sapiens
cggctccggagcgagaacgcgcaaactggcgatggaatatgagaggagccctctggaaagaaaaggacagaccctgtgctttc

SEQ ID NO: 474809 - DNA, 75 bp, Homo sapiens
ctcccgcccggaaagctgcccagccaccagcaaccccccagccaaaccaaacaggaagcttacttttctctacct

SEQ ID NO: 474810 - DNA, 75 bp, Homo sapiens
aagtgattaagcagagaatggagaagaaggttgattccagagaaacagcacccaggactatcttccaaagagttc

SEQ ID NO: 474811 - DNA, 75 bp, Homo sapiens
gtcagaaacacaaagcagcccaaccaaagggctgcagttcatggagctcgtttcaaagggcaagatctaaaactg

SEQ ID NO: 474812 - DNA, 83 bp, Homo sapiens
ctcaatatctgtcttcggtggactccttcggcagtccacccaccgccgccgcctcccaggtcctcgaggccacacgggttaat

SEQ ID NO: 474813 - DNA, 139 bp, Homo sapiens
cgaggtgcggcctccgcacaggcggggggcgtaggcgcgcggggcccgccatggctgcgtcggagctctacacaaagccattttcaatgtggatgactccgtggttgatctggagaccctggcagccttatatgaaaac

SEQ ID NO: 474814 - DNA, 97 bp, Homo sapiens
gagcgtggtcacagcccccatcatcaaaggcaaccttggagccaaacttaattcagtgcacaaatgagatgaatgtgaacatcccacagttggcaga

SEQ ID NO: 474815 - DNA, 90 bp, Homo sapiens
atttcgttttatgaactttctgaaacaagaaggcgcagtgcacgtgttgcagttttgtttgactgtggatagggatgaggaagaaatgac

SEQ ID NO: 474816 - DNA, 88 bp, Homo sapiens
gaaaactcgcgtaatatacaaaggtgcggtcttgctctgttgcctaggctggagtacagtggtatgagtatggctcaatgcagcctca

SEQ ID NO: 474817 - DNA, 90 bp, Homo sapiens
ataaactcaagcagcgagtcatccagcctaaattatacagatctgtgattgaagatgtcattaatgatgtgagagacatctttctggatg

SEQ ID NO: 474818 - DNA, 83 bp, Homo sapiens
ccaaattctcagcctgataaggcaactggatgatgctcgcaacaaagctgacaatcaagaaaaggcaatacttaatattcaag

SEQ ID NO: 474819 - DNA, 50 bp, Homo sapiens
aatgtagagagaaagtacttcaagggaggtggggaagacagggctccagc

SEQ ID NO: 474820 - DNA, 90 bp, Homo sapiens
cttcggaagcccgttcggcctggaggagccgcagtgggtcccggacaaggaggaggccccgtgtgggccgcggcccggccctcaccatgg

SEQ ID NO: 474821 - DNA, 74 bp, Homo sapiens
cagggctcctgtctacgaccaggtcaaaatgcagatcttcgtgaaaacccttaccggcaagaccatcacccttg

SEQ ID NO: 474822 - DNA, 83 bp, Homo sapiens
ggagcagctggctggctttgataagtacaagacctgcctagagctggaacgttacctccagagcgagccctgctatgtttcag

SEQ ID NO: 474823 - DNA, 83 bp, Homo sapiens
aaaagaaggggaagaagatcaaaacccaccatgccccaggctttccttaaagtttcccatgtctcaatggactcctgaatata

SEQ ID NO: 474824 - DNA, 73 bp, Homo sapiens
agtgatggctcttctctggaagatcttgtggaacttgatgggaaacctgcttctcctactccggttattgtgg

SEQ ID NO: 474825 - DNA, 100 bp, Homo sapiens
gaatcgctgaggctctgatccacttctaagacaggaaggaaagtgaaggcagagtgagcagatcacatattctacaaattccagccttctgtggtcgctg

SEQ ID NO: 474826 - DNA, 98 bp, Homo sapiens
ttttctcagaactgcctgaccccctggtcccgtataacatgcagatcgacttggtggaagcacacagaacggagctttgactgtaagatctgtgggaa

SEQ ID NO: 474827 - DNA, 98 bp, Homo sapiens
agattatcacaagcagcatggggcgcaggaagcccctcccttctgcttccgaaatctcttttggtacaccagaaggccagaatggaacgacttcaaag

SEQ ID NO: 474828 - DNA, 75 bp, Homo sapiens
tgtcagaagaaagcagctggctcagaaaacaggactgggaattcccacatttcatgggagatgttgatgtaaatc

SEQ ID NO: 474829 - DNA, 50 bp, Homo sapiens
ctccaggccgcttccagggcgtgccggtggtggtgtgcacattgagcccc

SEQ ID NO: 474830 - DNA, 120 bp, Homo sapiens
ggagatggaaaaggagttcgagcagatcgacaagtccgggagctgggcggccatttaccagtgaacacctacctcttcatgatgcaagcccaaggcattctgatccgggacaacgtgaga

SEQ ID NO: 474831 - DNA, 90 bp, Homo sapiens
ggtacctctccttttccctctccctttccctaagagctcccctgaacagcagctgcagcagccatggccccgccctgggtgcccgccatg

SEQ ID NO: 474832 - DNA, 125 bp, Homo sapiens
aaactttgatggcccagcagcagagggtcaaccaggacagaagcaaagcaccgatatgggccctcacattttccaaacctgtccatctgctaactattttgactgcagagccatgtccattggag

SEQ ID NO: 474833 - DNA, 96 bp, Homo sapiens
ttttctaggaaacctaccctatgatgttacagaagagtcaattaaggaattctttcgaggattaaatgccaaggcagaggcttcctcaggagacca

SEQ ID NO: 474834 - DNA, 101 bp, Homo sapiens
gcaaatcatgcgctttgcaatgaaatctcgaaggggacctcatgtccctgtgggacacaatgcccccaagacagtgatctgacacaaacacagctgaagca

SEQ ID NO: 474835 - DNA, 89 bp, Homo sapiens
agagctggggctccgcgaggaaaacgagggcgtgtataatggaagctggggaggccggggagagaatccaagaaaacaggggcccgaaa

SEQ ID NO: 474836 - DNA, 74 bp, Homo sapiens
agtctgcatgtgcagttttcaggcctcagagaaccatggctactgccaagggaatcgccataggcatcgacctg

SEQ ID NO: 474837 - DNA, 75 bp, Homo sapiens
cgctgggctggccctgcagggaccatggaatccagagctgatgccccgatggacaccaacctcttgagcaatatc

SEQ ID NO: 474838 - DNA, 97 bp, Homo sapiens
ccatctgctggcaaggctaagattagaacagctcataggagagtcatgattttgaatcacccagataaagatcctgtggtattgtggaaattcccag

SEQ ID NO: 474839 - DNA, 90 bp, Homo sapiens
gcgacaggagcacgggtcatcttttccccagaggcgtcggaatggacctgtgccacccagatttggcagctgatcggaagctctttcgtc

SEQ ID NO: 474840 - DNA, 74 bp, Homo sapiens
ctgcatatttggcctagaaatacctttatgatgattgcacttcctaacatgccatcgagttgatcaaagacctg

SEQ ID NO: 474841 - DNA, 82 bp, Homo sapiens
atgcgcaggaataaggaagcgacctgcaaccgacggtgaaaggtgtagcagtcactcggcctacacccacagcatcgacctt

SEQ ID NO: 474842 - DNA, 83 bp, Homo sapiens
cgacgtcttgcctgtgtcccacttgttcgcggcctatagccatggccatgcagaaaatctttgcccgggaaatcttggactcc

SEQ ID NO: 474843 - DNA, 73 bp, Homo sapiens
cgggctgcgcctgctgcacttcctgttcatgtacgaccctaagaaaagggcgatgctggatcttttcttgtct

SEQ ID NO: 474844 - DNA, 100 bp, Homo sapiens
tagagcccgggcgcctcctggggggtggggaaacggtttcgtgaggagaatttgaggcctactctgtgtatgatgaagacattgggtactgtcaagggca

SEQ ID NO: 474845 - DNA, 82 bp, Homo sapiens
cctggcctggccgggaccatgggtccccagccccaccccagccccaaaggaggctgttcgagagggacgtcctccggagcca

SEQ ID NO: 474846 - DNA, 100 bp, Homo sapiens
aggggattgatctgctcctgcaggttctgaaaggtgtgatgaatgcagactctgctaccattttggctgtttggatcctcctttgaaaaagtctcctaaa

SEQ ID NO: 474847 - DNA, 100 bp, Homo sapiens
aggaaaaaaatttgctggatattgatgcgccagtcactggaacctgttttgttcactggaacaatgaggaaaaacctggatccctttaatgagcacacgg

SEQ ID NO: 474848 - DNA, 90 bp, Homo sapiens
tctttctgatctgcttctctctggtgagcccggcctccttcgagaatgttcgtgccaagtaatctatgccagcaattatgacaatgttag

SEQ ID NO: 474849 - DNA, 100 bp, Homo sapiens
cgggatgccgcccgcttccccatcatcgccagctgcacactcttggggctctacctctttttcaaagactgtcctttcattgtatgtatgacctatgcct

SEQ ID NO: 474850 - DNA, 100 bp, Homo sapiens
cgatggcagcggctgtgccgaggcgcccaactcaggtcaaaatgcagatcttcgtgaaaacccttaccggcaagaccatcacccttgaggtggagcccag

SEQ ID NO: 474851 - DNA, 89 bp, Homo sapiens
ttgaaagagttttggatggatgctaatagactgacttttattccagggttgagtcagcagatactggagttatttgaaacatgtcagca

SEQ ID NO: 474852 - DNA, 88 bp, Homo sapiens
ccgtgaggaggttgggggccctcgcggaggccgagaggcttaaggaggattaaccacaatgaacggttggaattcctgggtgatgctg

SEQ ID NO: 474853 - DNA, 100 bp, Homo sapiens
cacattcagggccaggggctcagtgggcaagggctctgtgcccgtgccctgtacgactaccaggcagagcccccaaagacacacgtgactcaccacccca

SEQ ID NO: 474854 - DNA, 100 bp, Homo sapiens
aatggattggagtgaaccggagaccccgaaaacggaagcgcagggagaaggaagaggtgtttgaaaagggggaaaaaaatagtggctttgatgtcctcta

SEQ ID NO: 474855 - DNA, 49 bp, Homo sapiens
agaacattgcacgatgcctcctgatccagacatttaatgtggatgcacc

SEQ ID NO: 474856 - DNA, 83 bp, Homo sapiens
ataacctgaaccaccccctagctatgggagctttctacgttatccttagcagttaaagccttccatctgaagtatgatgaagt

SEQ ID NO: 474857 - DNA, 75 bp, Homo sapiens
gggcaagccccgctccggccaacaagattggaggctgttgtcattggagaagttcatgagaatgttactctgcac

SEQ ID NO: 474858 - DNA, 74 bp, Homo sapiens
catgagccccctgaggccccagaactatcttttcgggaggactcaccaggcttgtggccaggggcaggtaccat

SEQ ID NO: 474859 - DNA, 90 bp, Homo sapiens
gtgttaccaagctgtttcctaccaggtcacacactgttgcagcgcagggagaagcagaatttgcccgcatcatgagcattgtggacccca

SEQ ID NO: 474860 - DNA, 123 bp, Homo sapiens
aagccagtcctgacaatgggcagaacgaattcagtgatatcattaagtccagatctgttgacggactggacaaagcttctatagcaaactcagatggccccacagcaggttcccaaacacctc

SEQ ID NO: 474861 - DNA, 76 bp, Homo sapiens
gccggcagcaccggctggaccaagacaagattgaagccctgagtagcaaggagctgtcccagatgcagacccatgt

SEQ ID NO: 474862 - DNA, 80 bp, Homo sapiens
agttcatcttcctccctgtgtactttccatttgccttcctggatccttacaataaatgaggatggatcacttggtttgaa

SEQ ID NO: 474863 - DNA, 50 bp, Homo sapiens
gagaaatgcttacacacagaaatgggatagctgggagtatggccaccctg

SEQ ID NO: 474864 - DNA, 101 bp, Homo sapiens
tgtggatatggatgagacagagagggaagtggaatatttcaaaaggggaggacgaggaagaaacgaacgtgatagttctcagctacccccagtactgccgg

SEQ ID NO: 474865 - DNA, 82 bp, Homo sapiens
gatccagcaaggtcggcagagcaaggggcttacgcagaaggacctggccacggtcgcaatggaagaagagatcgccgcgctg

SEQ ID NO: 474866 - DNA, 75 bp, Homo sapiens
tgaaattatcaactggcttgataagaatcagggccaattcctgtccccccagcagcatggcatcgtgtgctgaac

SEQ ID NO: 474867 - DNA, 74 bp, Homo sapiens
tagagatgtgatgttggagaactacagaaacctcgtctccctggagatggcagatcctgaggtagttgtgagta

SEQ ID NO: 474868 - DNA, 90 bp, Homo sapiens
gtgaactttcacggacaacctcagaggacaacgaagtgttcggttctggctccttggcagcaatggctgtatttgaagataagtttaggc

SEQ ID NO: 474869 - DNA, 76 bp, Homo sapiens
tcgaaaggattggattggcatctttagagccttggacaagattcgctatgagagcctgacagacccttcgaagttg

SEQ ID NO: 474870 - DNA, 75 bp, Homo sapiens
cggatgccctgcagtacctgcagaaggtctctggagacatcttcagcaggtggtaccatggccacatgtctggcg

SEQ ID NO: 474871 - DNA, 83 bp, Homo sapiens
ggaggagacatcggcctctgcaggcttgccgaagaagggagttgctcttcaaaaaatggactcaatgctttcctcagaagctg

SEQ ID NO: 474872 - DNA, 82 bp, Homo sapiens
gcctccggggacaagaaactagagcaaataaccgttttgaaattaggctcatccaaaatagaggaagcatgcgaaatctacg

SEQ ID NO: 474873 - DNA, 100 bp, Homo sapiens
ctcttctgcggaatctcagaaagtaaagttccatcctgagaatatttcacaaagaatttccttaagagctggactgggcacacaagccatgccccctctt

SEQ ID NO: 474874 - DNA, 100 bp, Homo sapiens
cgcggagcccctgcagtcctggcagccgccgcgggaggctgaatccctgcagcccatgacggtggtggacaagtggttcaagagcaacgatgaggaggcg

SEQ ID NO: 474875 - DNA, 75 bp, Homo sapiens
tcagcctcaagccgctgctcttcgggaaatcctcattgacgattcaatttgttgaaggccaatttgtggactcct

SEQ ID NO: 474876 - DNA, 75 bp, Homo sapiens
tcacggaaaccattgcacccaaaattgcaagacctttcatagagggagtaccctgacttctaccggaagctctac

SEQ ID NO: 474877 - DNA, 118 bp, Homo sapiens
aatatcctgtgggaatatcacagacaaaggcatcattgctttgcgtcatttaaggtaactcagcagttgaaggcgcgattcttaccaagtccagttgttattaagaaacgtattgaag

SEQ ID NO: 474878 - DNA, 100 bp, Homo sapiens
tttgaatgggacatggccaaatatcctgtcaagcagccgctcgtgagtgtggtggacacaatagccaaggacactgtctcagtgcatcgcccaggcttct

SEQ ID NO: 474879 - DNA, 75 bp, Homo sapiens
ttctggcatcagggaggctttcagccggagaagcgagtttcagctggaagcaagatttccagatgtagcaaatgg

SEQ ID NO: 474880 - DNA, 100 bp, Homo sapiens
ctgggacacccgggagtcaggaaatgggtgagaactctgtctcagtcgacgggaagtgcagtgactccacgctactgagcaacttgttagaagagatgaa

SEQ ID NO: 474881 - DNA, 100 bp, Homo sapiens
gggaatgaattcttgggacagaagttcagtcaaagagtgctgatcctttgaagtcaaaacatcagttggacttagagcgtgctcatttccttgttacaca

SEQ ID NO: 474882 - DNA, 100 bp, Homo sapiens
attggactgacttttcttatgctgggatgtgccttagaggattatggctcaaagcattcagcaaaccagggttccaaggtgaatgtatagattttacaga

SEQ ID NO: 474883 - DNA, 100 bp, Homo sapiens
tgtggatgcagcagataaccgcaagataactcctcttatggcagcatttagaaagcaagcccttgtgattcgaaatggtgagaaaatgagcataaatgcg

SEQ ID NO: 474884 - DNA, 100 bp, Homo sapiens
ctgggcgtggcggccgggatgacccacagaatgtacatggcaagtcaaagcaaacgatcgcaagtaccacgaacaacctcactttatgaacacaaaattc

SEQ ID NO: 474885 - DNA, 87 bp, Homo sapiens
ctgattactgcttattttactataaaggaatgggtaccacagaccatgtcatcgtcctggcgtccacgaaccgagctgacattttgg

SEQ ID NO: 474886 - DNA, 51 bp, Homo sapiens
atccggaggcgccagctcaacccattcagcctgtatatggagcacagcatc

SEQ ID NO: 474887 - DNA, 99 bp, Homo sapiens
gcagctggcgactttctccagtgactgggaaatccaggaagacagtaggcctcgtcacgtgttcaatatgctaaagaagtatgtccgcgcagaacagaa

SEQ ID NO: 474888 - DNA, 100 bp, Homo sapiens
ctttttgaagcctttgcaaaagcagagatcctacaagaatccaggatgatgatcccagattgccagcgcaggttggaagccgcatatttggatcttcaac

SEQ ID NO: 474889 - DNA, 100 bp, Homo sapiens
ctcctttcctccctcccagatcttctcacgctcgaaggtccatgtgttttgcaaattcaaaaaattcgcaatgttgctgcaccaaaggataatgaagaat

SEQ ID NO: 474890 - DNA, 100 bp, Homo sapiens
cagctacatgtgtgaatgtccaccaggcttcagtggtatggactgtgaggaggacattgatgactgccttgccaattcactggatgaaagaaagataaaa

SEQ ID NO: 474891 - DNA, 100 bp, Homo sapiens
aactggagagcttcatcaaaaatagtgatagctttgataaccaaaatgaagtttaatccctttgtgacttccgaccgaagcaagaatcgcaaaaggcatt

SEQ ID NO: 474892 - DNA, 95 bp, Homo sapiens
gcagcggtggaggaggcaactaccgaggaggcttccgaggaggcagaggaggaggaggtgaccacaagccacaaggaaagaagacgaagtttgaa

SEQ ID NO: 474893 - DNA, 100 bp, Homo sapiens
cttcttggctacctttgacgtctcccccaaggctgtcctgggagaccggctgcttctgacagccaatgtgagcaggacctgctgcagctacagtatgaag

SEQ ID NO: 474894 - DNA, 82 bp, Homo sapiens
gcctgcccaccggggacaggaccaggaggagctactacctcaatggtgtggaaacaggaagagaactagaactggaagtaaa

SEQ ID NO: 474895 - DNA, 83 bp, Homo sapiens
ccccgcgccgcctccccgcgccgctcgcgcagccatgtccgaggagaagcccaagccgagcctcttgaagccattcttacaga

SEQ ID NO: 474896 - DNA, 100 bp, Homo sapiens
agcgagctgagtggttgtgtggtcgcgtctcggaaaccggtagcgcttgcagcatggaaataatgcaaaaggtgtcccaaggctcctgaccagtgaacaa

SEQ ID NO: 474897 - DNA, 82 bp, Homo sapiens
cttgtgggagcaaaaccaacgcctggctcggagcagcagcctctgaggtgaagcaaaaaatttattgccatatcttggaccc

SEQ ID NO: 474898 - DNA, 50 bp, Homo sapiens
aagaagcaactgtacaaaccatagcctaatgggaggtgactggatcatgg

SEQ ID NO: 474899 - DNA, 100 bp, Homo sapiens
tgacctggcctatcagcttcaggccataggaaaaggatacagagtagagtttcatgaacctgaaacttggtggaaatttgatcctgaagaattagaaaag

SEQ ID NO: 474900 - DNA, 98 bp, Homo sapiens
tggttgcctaattttatggatgtcttcacgtggtctttaccgtttgttggagaaaaaggctgcagatgttcatgctcggtacattgaactacttacaa

SEQ ID NO: 474901 - DNA, 76 bp, Homo sapiens
tggtcatccgccagctggagtttgcagcccagtaccctcccacctttgaccggatggagtcttgctctgtccccca

SEQ ID NO: 474902 - DNA, 98 bp, Homo sapiens
gccagcggctgcggtcgggccaaggttccgcgccgggcgtggacggtgtggggcggtcccggccccgcagactgtgccctgtccacggtgcctcctgc

SEQ ID NO: 474903 - DNA, 130 bp, Homo sapiens
aacaacccgaggaggagcggcagcaagcgggtgctgctcatctgcctcgacctcttctgcctcttcatggattattcttggagaaaccctgtctgtttactgtaaccttttgcactcaaattcctttatc

SEQ ID NO: 474904 - DNA, 90 bp, Homo sapiens
gggaggtggaactagtcggacaaagccctcgcgtcggacccttgccagaacttgcccaccagaagtatgtccgacaagcctggcagaagg

SEQ ID NO: 474905 - DNA, 74 bp, Homo sapiens
caaagcctttgctatgatcattgacaaactggaagaggttcaaaccttgtactactcagctgatcacaagctgc

SEQ ID NO: 474906 - DNA, 122 bp, Homo sapiens
cagcgagcggcgcggagctggacgccgcgatcgtggggcccgcgaggcgggcagccggggcgtccaggagaactacgatgacccgcacaaaacccctgcctccccagttgtccacatcaggg

SEQ ID NO: 474907 - DNA, 97 bp, Homo sapiens
tccgcgtcccgctcgctgggagagaggtacctctccttttccctctccctttccctaagaaacaaatcattgtggaccccttgagcttcagcgagga

SEQ ID NO: 474908 - DNA, 90 bp, Homo sapiens
cgacatcgacgccgcctggcaggccctgcgcaccaggcctccccatggccacccatggaccagtcggcattcacttcctcccttctgcgg

SEQ ID NO: 474909 - DNA, 83 bp, Homo sapiens
gacatatccattttgataatgtcagtgtggtatctctacaggaaagttcacatccttggctccttccaaaatatcaagatggc

SEQ ID NO: 474910 - DNA, 88 bp, Homo sapiens
cttcttctggtcactccgccaccgtagacttaaaaggaattgtattcgtcatccagagtcaaagtaattcttttcatgcaaagagagc

SEQ ID NO: 474911 - DNA, 100 bp, Homo sapiens
ctccgcgtcccgctcgctgggagagaggtacctctccttttccctctccctttccctaagattttaacagcttctctgtggatgatgagtgcttagtgaa

SEQ ID NO: 474912 - DNA, 82 bp, Homo sapiens
cccgtccccggcacacgcgcagccccggcctctcggcctctgccggagaaacagtgttatagttttgccgctggactcttcc

SEQ ID NO: 474913 - DNA, 90 bp, Homo sapiens
cgcccccatcctcaacttcctgcgcaccaaagagttggatcccaggtcatctctgaatttgagcaatggtgaaacggaatctgtgaaaac

SEQ ID NO: 474914 - DNA, 100 bp, Homo sapiens
tcaggcctgagctccccagggaacaatgacagcaaacagtctgcctctgctgtgcagatatgtgtcacaaagatgtctacacggaactgccagggaatgg

SEQ ID NO: 474915 - DNA, 99 bp, Homo sapiens
agccaacaaaatattcatggttcttgaggtactggagattgagagcagttggcttctggaggtggctccccattattataaggccaaggagctagaaga

SEQ ID NO: 474916 - DNA, 100 bp, Homo sapiens
caagaagttgcttgaacacaaggagatcgacggccgtcttaaggagtggtgtccgcaatgttgccagtgtctgtctgcagattggctacccaactgttgc

SEQ ID NO: 474917 - DNA, 75 bp, Homo sapiens
cattgagttggaccttagcccatctactggcattgtgtctgagggaaaaggccataccaatgctggagatgcaat

SEQ ID NO: 474918 - DNA, 83 bp, Homo sapiens
cgaagctcggggacgcgaggagccggcgtggccctgggattctgtttcactgaggccatctatccgatttcaaggaagccaag

SEQ ID NO: 474919 - DNA, 74 bp, Homo sapiens
gacagagtacttcttggtggtcctggtagcttttattggcaaggaaaatgtttcaacgtgcgcaagagttgcgg

SEQ ID NO: 474920 - DNA, 75 bp, Homo sapiens
ttgccaacattgaccgtattacaaatttgcttgcctaaactggacttgaagcaatttaaactactggagatctgc

SEQ ID NO: 474921 - DNA, 73 bp, Homo sapiens
agctcactcaccagtattttgtagattttactactttagacggtgacagggaaagacgtgtcctgcacttcga

SEQ ID NO: 474922 - DNA, 142 bp, Homo sapiens
cgggctcggcgggggcggcccctccttgggcctgcggctctctacgtccctgcggagcagccgagctccgaccagccagcctggtggtcctgcccaggtcccttgctccagcttttgaaagattctgccaggtcaacactgg

SEQ ID NO: 474923 - DNA, 96 bp, Homo sapiens
tcggattaagacatcggagtcggagacctgagagatgttaaccaaattcgagaccaagagcgcgcgggtcaaagattgaaaaggaagatcaggcca

SEQ ID NO: 474924 - DNA, 85 bp, Homo sapiens
cgctcaggtgctgcaggcacagcccgagaaaccgcagcactacacgctcttgtcaggatggtgaagctgttcatcggaaacctgc

SEQ ID NO: 474925 - DNA, 82 bp, Homo sapiens
tacagagacagttatgacagttacggttcctgcacttggccatcatccatgaagaaaaggcactgaccatggaagtgatccg

SEQ ID NO: 474926 - DNA, 75 bp, Homo sapiens
ctgatgcagtcgtctctccgtcttccgctttcttaaggtctgcgctagtcctgctgatgggcaaagaaggtgtcc

SEQ ID NO: 474927 - DNA, 89 bp, Homo sapiens
tggagggcactaccagatggggcaagacatctgtatagattctgcttcatccgtgagagagaataagcaacctgaaggtttggaattaa

SEQ ID NO: 474928 - DNA, 100 bp, Homo sapiens
agtggaaccatcacacaaaagcacacaaagacctcctcctccacaggggagacagaggataagttctgaacgtcgaaaagaaaagtctcgagatgcagcc

SEQ ID NO: 474929 - DNA, 82 bp, Homo sapiens
cgagaagatgagctcagaggtggtggattcgaatccctacaggggttgtgtccactgtggtccccgactctgcccacaagct

SEQ ID NO: 474930 - DNA, 73 bp, Homo sapiens
gagagtgtgacggattccagcaggtcactcagctctatgtgccagcatccagacatgtgtggaggttccggcg

SEQ ID NO: 474931 - DNA, 97 bp, Homo sapiens
gtgtgtttgttcatcagactcttcaccaggtcccaggtgtgacaccttcagcaggtctcagggaagatggcagccctaggggacattcaggagtccc

SEQ ID NO: 474932 - DNA, 95 bp, Homo sapiens
aggaaatgaagaaggcatacaagcaagtgaagatcgaccagattgaggtccacccgtggctccaaaatggtctcctggtccgtgatagcaaagat

SEQ ID NO: 474933 - DNA, 82 bp, Homo sapiens
cgaggatttggcgctgcagaaccagatccgggagcacgtcatctccatcgaggccccactgcaggccccaccatggcgccgt

SEQ ID NO: 474934 - DNA, 100 bp, Homo sapiens
gtgaatttagatgcccctgaagacaaggacagccctttcgtgctgcatttgatacagttcttgggataaatgttgcagtcaagaaactaagccgtccttt

SEQ ID NO: 474935 - DNA, 100 bp, Homo sapiens
ggaaaacaccacttttaagtatcttacaggagaacagactgaaaaaatgtggcagcgcctgaaaggaatattaaagagtctattgttggggaaatcagac

SEQ ID NO: 474936 - DNA, 74 bp, Homo sapiens
ctacacacttctgatgacacctttattttaaaagctgatgttccaagattgctcgctgtaagcagctcatctgt

SEQ ID NO: 474937 - DNA, 121 bp, Homo sapiens
gcctttgtccgtgttcggtgaccgcagcactggggaaacgatccgctcccaaaacgatacctggcttggtgactttaaagaagctcccctgtgttagttttgctggtgttgatagcctgga

SEQ ID NO: 474938 - DNA, 99 bp, Homo sapiens
tttcgttttgcctccggttggggctgctgtttctcttcgccgacgtttaagtgctgtggggctgctaactacacagattgggagaaaatcccttccatg

SEQ ID NO: 474939 - DNA, 90 bp, Homo sapiens
gaatgcttgacagagatgagtttgcagttggtatcagcatggaagccatgagtgagaataaaatggtgccctctgagtttagcacaggac

SEQ ID NO: 474940 - DNA, 82 bp, Homo sapiens
caatcagctggcctggtttgatactgacctgtaaatcatcctttagatgtgtcttgctgaatcagggctctcttatccctgc

SEQ ID NO: 474941 - DNA, 99 bp, Homo sapiens
agtttattgtcccatgttttcttcaaacaggttggcgtgcagtggtgtgatctcagctcattgcaacctctgcctcccggactcaagcaatcctcccac

SEQ ID NO: 474942 - DNA, 100 bp, Homo sapiens
tgagcgcactctggagggattctggcatcagggaggctttcagccggagaagcgagtttcagctgagcctggcccaactagagaatctgtgcaaacagct

SEQ ID NO: 474943 - DNA, 89 bp, Homo sapiens
acgccacctactattacccccagtatctgcaagccaagactttgccttcaaaagaaacagcatttttaaacactacacaaatgccttgc

SEQ ID NO: 474944 - DNA, 100 bp, Homo sapiens
acgactatgacaagaaggtgaagcaggcggccaaggagaaggtctgaatttcctgctgctgttcacaaagatgctttttatctttaactttttgttttcc

SEQ ID NO: 474945 - DNA, 100 bp, Homo sapiens
ctctgagaagggagacgacgctgctgggtccgctgagcggggcgacccgagaattagacctttacgagaagcacagttttgtcttcagtttcctctcccc

SEQ ID NO: 474946 - DNA, 98 bp, Homo sapiens
caagcccccacagctactccaacccaaacaacaaccaagccagtttaatgattgaggaaacttgaatatttttgtatcctgaagggagaaatggatga

SEQ ID NO: 474947 - DNA, 98 bp, Homo sapiens
gcagctgcagctcattaccagtctgaaggagcaaggctgttaaattccaaaagtttcaagcctttgactggggaagcagtgccaagaattattttcat

SEQ ID NO: 474948 - DNA, 97 bp, Homo sapiens
gcacagaatcagatgtttcacaatctcagaattccagctgtggaaatacaaagaactctgaatcaacttggaacacctcaagattcacctgaattga

SEQ ID NO: 474949 - DNA, 100 bp, Homo sapiens
cagaagaagaccgaagggaagacttccagtagctccaaggaggttaaggatcgtaacagttttactttgaaactggaagatactgaaaattggttgtatg

SEQ ID NO: 474950 - DNA, 51 bp, Homo sapiens
ctggaagttacttgtggacatggatttgaagcctagcaacattgttgtgaa

SEQ ID NO: 474951 - DNA, 100 bp, Homo sapiens
aaaagagggactgccataacattcccaaaggtggtggaagatggatatgaattttttgctaaacgacagttggtaaccttattttcagccccaaattact

SEQ ID NO: 474952 - DNA, 50 bp, Homo sapiens
cttgaaccctggaggcggaggttgtgttcaaagaggaaatctcccggagg

SEQ ID NO: 474953 - DNA, 76 bp, Homo sapiens
gatagtccgttgatgtatcagccacaaaaaatggacttgactatgcactcaggccctccctatcctgaagacatta

SEQ ID NO: 474954 - DNA, 100 bp, Homo sapiens
gtttaattaatcaggaatgtgaagaaattctacagagtgcctgctctttggagagcaacctagaaggcttggctggtgttttggaagctgatcttcctaa

SEQ ID NO: 474955 - DNA, 100 bp, Homo sapiens
ccgagaatatggagatacaggtgaaatctgctgagatctgtatctgtggacctgaatgttgatccctcgcttcagattgacatacctgatgcgctcagtg

SEQ ID NO: 474956 - DNA, 100 bp, Homo sapiens
gctggcgcggcccctagctttctccttctggtgtggggcccgaggcttggaagcgtttgtgtctgctgccaagaagctaccacgagaagatgtgtatgat

SEQ ID NO: 474957 - DNA, 90 bp, Homo sapiens
gaccagcttagcttctgtcctaaaggaacacctttgtcctagaatattgtggagaggtactcgatcataaagagtttaaagctcgagtga

SEQ ID NO: 474958 - DNA, 100 bp, Homo sapiens
tgaagggggactacaggttcgagagtgtcatggagaaactccagctgggcccagagattctgcagcgggaaaatccaaggcttatttatgccaggctgag

SEQ ID NO: 474959 - DNA, 75 bp, Homo sapiens
ccggggcctggggctgcctgccgggcggccgggcgcggcgagcccagtgttatagttttgccgctggactcttcc

SEQ ID NO: 474960 - DNA, 97 bp, Homo sapiens
gcaggaagagaaaaaggctctggcaaaattgaagaagtagttcttgaagctagaactattgagagaaacacgaaaccttataggaaggatgagaatt

SEQ ID NO: 474961 - DNA, 75 bp, Homo sapiens
aaataattaagaagaccaagtagcatccaaggcgcttaaattcctagcgaagtgccgtaagaaaaagaaactatt

SEQ ID NO: 474962 - DNA, 99 bp, Homo sapiens
catctacaaccttcgatctcctgacgacaaacggggattcagcgtccgatcctttggaacagggactcacgtgaagcttccaggaccagctcccgacaa

SEQ ID NO: 474963 - DNA, 100 bp, Homo sapiens
aaagacgcctttcagaacgcctatttggagctggggggcctcggagaacgagtcctaggttaccgccacattcacctgctgtccaaagatggcatcagcc

SEQ ID NO: 474964 - DNA, 51 bp, Homo sapiens
aaccaaaggctattggatcagctcagcaggagcctggcccaactagagaat

SEQ ID NO: 474965 - DNA, 97 bp, Homo sapiens
cggacttccaggtatagctggacctcgtggtagccctggtgaccgtggtgagaccggccccgctggaccccctggtgctcctggtgctcctggtgcc

SEQ ID NO: 474966 - DNA, 82 bp, Homo sapiens
ctgaaataatgtttgagtccttcaatgttccaggcttgtacattgctgtgcagtgatgtcttggcattgcccattttcaagc

SEQ ID NO: 474967 - DNA, 73 bp, Homo sapiens
ttgcctttctggacacagaagtatttgtgacaggagggtgcatctgcccggaagactcagactcctgcagccc

SEQ ID NO: 474968 - DNA, 74 bp, Homo sapiens
ccgccgccgccaccaccaccgccgctgccccggctgcctcctccctgaggaagtaacagctagcagtcgccact

SEQ ID NO: 474969 - DNA, 100 bp, Homo sapiens
ggaagccacgtgcagacatctacaaccttcgatctcctgacgaggaattgcaacccagtgaagaagttacctggaagtaaagactggctagattatcgaa

SEQ ID NO: 474970 - DNA, 75 bp, Homo sapiens
cttattcctgttattggacccaggaatgtatcctgtcaggtataatgtcagtgaatggcaagaaagttcttcata

SEQ ID NO: 474971 - DNA, 80 bp, Homo sapiens
tagccactgctggctgcttccagtgttcgccgagaggtgaagctttgttctaagaatatttgtttcatctagtttatgag

SEQ ID NO: 474972 - DNA, 100 bp, Homo sapiens
gaccagtcacattgctttgtcattctctatggaatggaatttcgcctgaaaacgctgagcctgcaagaccaagttttacaggaaaactccagtgattttc

SEQ ID NO: 474973 - DNA, 82 bp, Homo sapiens
ttggctctcccacccaatggagatggctctaatggtgtgatgaatgcagactctgctaccattttggctgtttggatcctcc

SEQ ID NO: 474974 - DNA, 100 bp, Homo sapiens
cttaaatatcatccagataaaggaggtgatgaggttatgttcatgaggatagcaaaagcttatgctgctactatactggcaattgctggagaagattttg

SEQ ID NO: 474975 - DNA, 75 bp, Homo sapiens
ggcgatgcttgtgaccctgcagctcctcaaacacttgcacctcctgcgccgccgccccccatccaaggatatgcc

SEQ ID NO: 474976 - DNA, 100 bp, Homo sapiens
gtcctctatggcgctgtcaataaagaacggcagtttgaatcggtgctgaacaggtgaagccaaaaaccttccctcttacccggggccgagcaagatgagg

SEQ ID NO: 474977 - DNA, 82 bp, Homo sapiens
cgaggacatggacctgtacagcatcaactacctgcactttggggagcctaagtcctggcataatcaccagcaacacccggga

SEQ ID NO: 474978 - DNA, 90 bp, Homo sapiens
agatgtccaacagggagcagggactatcaatctggaactcagagacgaaaccatggagtgacagacaaatttacatgtattggagaccag

SEQ ID NO: 474979 - DNA, 75 bp, Homo sapiens
tgcacagccctgccatcgaggtcagacctgcctagagctggaacgttacctccagagcgagccctgctatgtttc

SEQ ID NO: 474980 - DNA, 83 bp, Homo sapiens
ccaaaagtggcatgatcctttgcagaaatgactacattagctggagaagaagcaggcgctccctccattccagccacagatca

SEQ ID NO: 474981 - DNA, 51 bp, Homo sapiens
aactagagcaaataaccgttttgaaattggcaaagcccaacaccttccccc

SEQ ID NO: 474982 - DNA, 106 bp, Homo sapiens
gaagccaccggcgtgtgccccgacggcgacgaggccatgaagcccccaggaggagaatcgagcaatctttttggaagtccagaagaagctactccttccagcaggc

SEQ ID NO: 474983 - DNA, 100 bp, Homo sapiens
agaagacttgcttcagcatttctcagttttaaatgcacagagagcaggatacaaggcagccatagttcacaatgttgattctgatgacctcattagcatg

SEQ ID NO: 474984 - DNA, 100 bp, Homo sapiens
ctgcagccccttgctgggaccccagaggccacctaccagatgactgtggagctcctgttcagctcttgaatgtcgtctctcaactagccaaacggaatct

SEQ ID NO: 474985 - DNA, 76 bp, Homo sapiens
ggtacttctgccactgctgctccgtggagatcgtcccgcgcctgccgggtgctttcttctgcgacctggtactcat

SEQ ID NO: 474986 - DNA, 100 bp, Homo sapiens
gcgttcgggccctcttctcccacctgttcgatggagtctcgccctgtcacccaggctggagtgcaatggcgtgatctcggcgcacttcaacctcgcctcc

SEQ ID NO: 474987 - DNA, 100 bp, Homo sapiens
ccaagaaggatgattctcactcagcaggcctccggtgtggctgtctctgatggtgtcatcaaggtgttcaacgacatgaaggtgcgtaagtcttcaacgc

SEQ ID NO: 474988 - DNA, 49 bp, Homo sapiens
tcggaattactggacagctgatggcgtttgcagtaagcattggctactg

SEQ ID NO: 474989 - DNA, 96 bp, Homo sapiens
tttaagtggacaggagataatatgttttttatcaaaggagacatggattcactagctttcggtggtggagggtaatttcatctgtgccaaagcctc

SEQ ID NO: 474990 - DNA, 106 bp, Homo sapiens
caagtgcaagctggccagggacctcaaggaagcttatgacagatgaagactggcccatttgcagagcactccaaccagctgtggaacatcagcgccgtcccttcct

SEQ ID NO: 474991 - DNA, 100 bp, Homo sapiens
ggacaggtcttccacctgaagactgtagtgtgtcatcgattactaaagacttaattcagtgcacaaatgagatgaatgtgaacatcccacagttggcaga

SEQ ID NO: 474992 - DNA, 104 bp, Homo sapiens
ccgggcccgggggtggtgacagcaggtctgaggctgaactcacgggaatcaaatggcgtaggtacaattttggagggcatggggactgtggacccataatttca

SEQ ID NO: 474993 - DNA, 100 bp, Homo sapiens
aatcccagaggaaactgacggagacgcagatgtggacttgaaagaagctgcagcggaggaaggcgaggcagaggcaaggctggcagcaaaacgggctgcc

SEQ ID NO: 474994 - DNA, 100 bp, Homo sapiens
agaagcacaagaaaaagagggttgtccccaaaaagcctcccccatcaccccaacctacaggttttgacaacttcgagcagctgctctcgggggctcactg

SEQ ID NO: 474995 - DNA, 100 bp, Homo sapiens
ctggacgcggatttttggcctcatactctgttatagataaacaaggacacattcagctaacgtattttagcaggtggagtgaggttgaagattcctgtga

SEQ ID NO: 474996 - DNA, 74 bp, Homo sapiens
gatggcctgaggagcttgaatgtgacaggaaagaatacccacctcatgtccaaaaagttgaaattaatcctgta

SEQ ID NO: 474997 - DNA, 106 bp, Homo sapiens
tgtcctgctagtcttgttcctgcatatcaagaacctgcctgcccaggctgcggacacatgtccagaaatgcactcggtgatggaaagagagccactattctgaaga

SEQ ID NO: 474998 - DNA, 75 bp, Homo sapiens
gaagacgccacagacagcagcgcagtaccaccttccagagatccacagcctggcagctctgatcaggaaagtgag

SEQ ID NO: 474999 - DNA, 96 bp, Homo sapiens
aagttgaaaaacgcttttcacgtcacctggagagatgcacaggaaaaatgctttctgaaagcagctcctttttgaagggtgtgatgcttggaagca

SEQ ID NO: 475000 - DNA, 50 bp, Homo sapiens
cctcatcaacaccaaggatctgcagagcagacaagatggagacaaattcc

SEQ ID NO: 475001 - DNA, 87 bp, Homo sapiens
ggacttggtgttcgctaagatgaagggctaccctcactggcctgccagggttcgtgctggccgtgggcagcgccgtctttgatgcca

SEQ ID NO: 475002 - DNA, 100 bp, Homo sapiens
tctccctggaaaacttcccttccctttcgatcggtcgcttggttatcggacagaatggaatcctctccacccctgctgtatcctgcatcattagaaaaat

SEQ ID NO: 475003 - DNA, 73 bp, Homo sapiens
gcaagaatacctcggcaaattccgacgtcttgaagacttccgagtagatgatccctgctgccttggtgatccc

SEQ ID NO: 475004 - DNA, 87 bp, Homo sapiens
ggacaaaggaacaggtatctcagcccatctacagcaagcagtcggtgttcttcgtctgggaactcaagtggacagaagagcctcccc

SEQ ID NO: 475005 - DNA, 88 bp, Homo sapiens
agaccatagagagttgcaaagcacaattaggtgaaggtgataaagtaaagtgctttcactgtggaggagggctaactgattggaagcc

SEQ ID NO: 475006 - DNA, 82 bp, Homo sapiens
gagtgtcacttccgtcaggagaggagggtgtgaagacagagaatgaccacatcaacctgaaggtggccgggcaggacggctc

SEQ ID NO: 475007 - DNA, 100 bp, Homo sapiens
ccgatcctattcccagtcgttggaaaagcgagattgtctttgaccatttgctatggacattgtcagggatggtgcagcctgaatgagaatgtctgcggta

SEQ ID NO: 475008 - DNA, 75 bp, Homo sapiens
gcgcgagtgaggaaaggaggtactgtagcctttccgctgtgcccattgccattactcctgcaacatatctggctc

SEQ ID NO: 475009 - DNA, 75 bp, Homo sapiens
taaaggacagtgtggacgagatactggtgccatgaaccaaggtgggaaagataagctccgaagaagtatgcctaa

SEQ ID NO: 475010 - DNA, 83 bp, Homo sapiens
ctgattccccatcctatccagagattagttttagttgcagcatggaacaattacaggcctggtactgtggcgctccgtgaaat

SEQ ID NO: 475011 - DNA, 51 bp, Homo sapiens
cggaactcgggcatcatggcctcagtgtggccagactccactgatgatagc

SEQ ID NO: 475012 - DNA, 98 bp, Homo sapiens
cggcgcccgggacggcggcggacctgtcgcgatgtcagggctgcgcctctctgcagcaggcaatgaatcgctccctggctaatgtgattcttggaggc

SEQ ID NO: 475013 - DNA, 100 bp, Homo sapiens
cgcggaggaagcccccaccgaggccccccggcaccgcgcctgctgccgggttgcgctccgtgcacctcttgcgggtgccatgcctctgcaactcctcctg

SEQ ID NO: 475014 - DNA, 75 bp, Homo sapiens
ggtcttccaggtcttcctggtccaaaggggctggagagacttcttcatgaaggaatacagggacagtcacaggag

SEQ ID NO: 475015 - DNA, 75 bp, Homo sapiens
gtgggcttttcacagtgggctttactgtgttgagatgtgtatatctcatgattgatatggagaaactagtcatgg

SEQ ID NO: 475016 - DNA, 73 bp, Homo sapiens
ggaggatatattggaggcaagaagtctcacaccattttgctggtacagcctaccaagaggccagaaggcagaa

SEQ ID NO: 475017 - DNA, 74 bp, Homo sapiens
ttgacagaaagggaatgggctgatgaatggaaacatcttgaccatgagtacgagagggcctccaaagtggacca

SEQ ID NO: 475018 - DNA, 80 bp, Homo sapiens
tgatgggagaccaccgggatgggcaggtggtctgtttttctggggggccaccaacacctcccgtgaatctaccatgtacc

SEQ ID NO: 475019 - DNA, 75 bp, Homo sapiens
gcaagaacagagagagaggtggacagatctgagagatactgaggactggactcgggccatatccgtggtgccgtc

SEQ ID NO: 475020 - DNA, 100 bp, Homo sapiens
tgaagcacatcgaccggcgacagcagccaggagtcatgagcgacagcggcgagcagaactacggcgagcggaatgctgagatgtataaactgtcttcaga

SEQ ID NO: 475021 - DNA, 87 bp, Homo sapiens
cgccgcagcggggcaccggaagttatggagagtgcctggaagagctgggatgtctggttgagtcctatggcatgaatgtttgccaac

SEQ ID NO: 475022 - DNA, 100 bp, Homo sapiens
gccaatgttggagccgtctgcaaagtgtccccggcaagaaggtgtctgacttccagcaactgctggcctgtgccagggtgcaagctgagcactggagtgg

SEQ ID NO: 475023 - DNA, 83 bp, Homo sapiens
cagaagacactccccagggcagaaatagcgaccatggcgaggatgatcggctgaatgtaacagaggaactaacgtccaacgac

SEQ ID NO: 475024 - DNA, 100 bp, Homo sapiens
ttccaaccagagcttgtgtagcgtcagatccttgagtgataaaggagtagagtcctcccaaaccgaaggaccctgtatctgcagctgtgccagcaccagg

SEQ ID NO: 475025 - DNA, 75 bp, Homo sapiens
ataaatgtctggctaatggcatttacaggagattctgtgtgagctgtgcccgtctggctgagatgaggcaaaaag

SEQ ID NO: 475026 - DNA, 83 bp, Homo sapiens
tctttcttcagccgaggccgccgccgcctctccttgctgcagccatggatttggtgccctggttgtcagatgttggaaagcag

SEQ ID NO: 475027 - DNA, 102 bp, Homo sapiens
cgccgtccgagtcgtttattgatatatccttcagaatttggaaaggagaggatgaaggaagagcaagttcaaggaccagtagagctattaagtattcctgaa

SEQ ID NO: 475028 - DNA, 101 bp, Homo sapiens
gagaaacttcttggccaagaggaagaccccaccagtgagatccactgctccaggctgagggtaaaaagctgggattggtaggctgggtccagaacactgac

SEQ ID NO: 475029 - DNA, 59 bp, Homo sapiens
agacacttcaacagcaggctcagcagctctactcggtcctaggcctacttacaagcctc

SEQ ID NO: 475030 - DNA, 74 bp, Homo sapiens
tgactctcggactgagaaacgcaagctgctctgttaaaagcgaaaatgaaacaattgcctgcggcaacagttcg

SEQ ID NO: 475031 - DNA, 74 bp, Homo sapiens
cgctgacaggggggcctggccgcgcagccgattttgctaaacatgttgactttctagaagccataagtagtgct

SEQ ID NO: 475032 - DNA, 101 bp, Homo sapiens
gtgagacatgtctgagactcctgctcagtgtagcattaaggatgctctggtccttttcaagctactcagctatgggatggtattattcactctcttcaggc

SEQ ID NO: 475033 - DNA, 100 bp, Homo sapiens
aaagcagtcgtaagaagaggtcccaatcccccactctttccgccctaatggaggtctccagtttcgaccctgtattcagtggatcagctggcaccaccca

SEQ ID NO: 475034 - DNA, 75 bp, Homo sapiens
ggtgctaatccagtggaaatcaggagaggtcatctaatacatgggagaaacatggattttggagtatttcttggg

SEQ ID NO: 475035 - DNA, 90 bp, Homo sapiens
gcccccgagaccccgtcggacccatggtttccagtgcagcgcggagtgggcgatgccagcgtgccagtttgaactaactggacacagtgt

SEQ ID NO: 475036 - DNA, 75 bp, Homo sapiens
attcacctgtccagcatccgaccaccgaggctggagggggagaacacccaggtctcagtggcccttagcagcagc

SEQ ID NO: 475037 - DNA, 83 bp, Homo sapiens
ctcggccccgccagcagcactgtggaggccgtcctcgagagcgcctgctcgctgtgcccccgggttatgacgacccccaataa

SEQ ID NO: 475038 - DNA, 98 bp, Homo sapiens
ctgaagctgccgccgttgcctccgccgccaagagtgagcgagcggacccgcgatgggctgaggctgaggtggcctccttgaaccgtaggatccagctg

SEQ ID NO: 475039 - DNA, 76 bp, Homo sapiens
attacaactactgcaatctcttcaactacattcttatgagtgtgtccgcttgaaaccaactgacatacagcccgac

SEQ ID NO: 475040 - DNA, 80 bp, Homo sapiens
atgacaacgccttacccttcgctcccagcccaggagtgcgccggtctcggggaaatgcccggttccttcgtgcccacggt

SEQ ID NO: 475041 - DNA, 75 bp, Homo sapiens
aacttaaaagatgccacctctaaggtttgaagatgccgcatttggattggatgaattccaaattctgcttgcttg

SEQ ID NO: 475042 - DNA, 100 bp, Homo sapiens
ctggcctggcgtgcactccgcacctcggggacattattgcgcgtggaacggctgcttttggaagcccagcgacttctccgtgtcccttaaagcgtcaggg

SEQ ID NO: 475043 - DNA, 75 bp, Homo sapiens
tgtaaacaaatcttgttatgaagatgaggagagcgccatgagtagcgaccgcatggactgtggccgcaaagtccg

SEQ ID NO: 475044 - DNA, 82 bp, Homo sapiens
cctcaatgagcacatgaccagcttagcttctgtcctaaaggccaaatttgagtttcatcatggtgactatgaaaaacagttt

SEQ ID NO: 475045 - DNA, 75 bp, Homo sapiens
cgtgtgttgggggagtccccgcttccagtttaaccagcatctcatggacagtctgagcttgaagatccaggagct

SEQ ID NO: 475046 - DNA, 100 bp, Homo sapiens
ctgtcccaagcattcatgttccctcaccagctgtaatggagtctcgccctgtcacccaggctggagtgcaatggcgtgatctcggcgcacttcaacctcg

SEQ ID NO: 475047 - DNA, 73 bp, Homo sapiens
tcccacgcccttcaccaatgccgtccagctgctgctgacgctgaagctgctggagccagttctgcttctcggc

SEQ ID NO: 475048 - DNA, 99 bp, Homo sapiens
gcgatggcttggcaacctcctggcccggcagtttgaaggatgaccaactcttggatgatggcaagacactgggcgagtgtggcttcaccagtcaaacag

SEQ ID NO: 475049 - DNA, 90 bp, Homo sapiens
ctgacggccaatgaaacccccaagatgggcatctattacattccagtgggatgtgtgtgggctgaaattccgagctgcggttgtgcatga

SEQ ID NO: 475050 - DNA, 100 bp, Homo sapiens
cgcgtcctcagccaccgctccctcttcccacggtgtacattccaagcagagtggccctcatccttcagaatgtggatctgccgaattgaagaggcctgat

SEQ ID NO: 475051 - DNA, 80 bp, Homo sapiens
gtggggagtggcagagagtatgcattaaaggaaatctggcattttttaaagtttgcgccccacaaagaggaaatattcca

SEQ ID NO: 475052 - DNA, 90 bp, Homo sapiens
gccaagagagaccttggagtaattcgtcgacagagctggagataagatgggtagactgctacttcccttttacacatccttcctttgaga

SEQ ID NO: 475053 - DNA, 75 bp, Homo sapiens
cagagacaggcgttcgaggagatcatcctgcagtgcggaggaagcgctggcggaccatcaagctgctgctgcgcc

SEQ ID NO: 475054 - DNA, 100 bp, Homo sapiens
tggtgtcactgaatccaggaggagacccttctacgcctggttacccaagtgtcgggaaatgatgtcactctgaaactcaggctggaatacactggcatgg

SEQ ID NO: 475055 - DNA, 113 bp, Homo sapiens
gccgcgaggagcgcactccgtggccccgatggagcggtacaaagcttagaccatgctcagcctccaagcagccttgtcatcgacaaagaatctgaagtttacaagatgcttca

SEQ ID NO: 475056 - DNA, 101 bp, Homo sapiens
ttctatggccgcttcaggcacttcttggatatcatcgaccctcgcacactctttgtcactgagataatgcagcaagtgaaggggtgttggccagcttcttc

SEQ ID NO: 475057 - DNA, 100 bp, Homo sapiens
agacaatgaccagtggctgagcaccgtctcccagtacgaccgggacaagtactggaaccgctttcgagacctccagcggcgccatgagcaaatgaaaaag

SEQ ID NO: 475058 - DNA, 90 bp, Homo sapiens
aactgcttgatcttcaggccaaaatgccccacaccagtgagaagcatcagcaccgtgaacttgtctgagaatagcagtgttgtcatcccc

SEQ ID NO: 475059 - DNA, 150 bp, Homo sapiens
aagcaaagaaggcactggcaggacagctgcctgcagtcgggaggtccatgtgtgtggagatttcacttaagacttctgagattatctcctgctgcatactacgcccagaggatgatccagtatctctcacggagagacagtattcgccag

SEQ ID NO: 475060 - DNA, 101 bp, Homo sapiens
tcctgtccttcatgcagtctctcattggcttctttgagactgaaatggcaggagaccaagacacattccaccccagtggggggtcccataccactcatgga

SEQ ID NO: 475061 - DNA, 111 bp, Homo sapiens
ccgggaggaaggaacgaggcaaggagctaaagcagcgtgcgttcagccctgggggaaagcaggcaggatgggagagtcgccgatagaaccacctcttccctgcctcctggg

SEQ ID NO: 475062 - DNA, 108 bp, Homo sapiens
cgggaccggcctggagatggagttcgactgcgagggcctgagacggctgcttggcaaggacttggcagatgaacttgctcttgttgatgtcatcgaagacaaattgaa

SEQ ID NO: 475063 - DNA, 100 bp, Homo sapiens
tcatcaggaagtcagactcccgaaccattgctccaaatatccgttgaagcaggtgtgggccatgtttgaggattgccccagcattcagttctatgagtaa

SEQ ID NO: 475064 - DNA, 83 bp, Homo sapiens
gtttaaggagctgaaagcgcgattcgagaaatgatggagtccttcgaaggccctcagcctgcggatgtgaggctgatgaagag

SEQ ID NO: 475065 - DNA, 82 bp, Homo sapiens
tcttcaactccttcaatgaggccaccatggttctggtctcctggatcatgtggttgctccttgagggcaggacagttcttat

SEQ ID NO: 475066 - DNA, 96 bp, Homo sapiens
aacaacctcttgaggatcgaatcttcactcccgctgtctcagcagtctacagcacggctttcatgagaaggacaagaagccatattgccgaaagga

SEQ ID NO: 475067 - DNA, 80 bp, Homo sapiens
cgctatggaggagctcgatggcgagccaacagtcactggagtgcatccgccccaacccttttccccctcgtctcctgtga

SEQ ID NO: 475068 - DNA, 98 bp, Homo sapiens
ggtgagcagcgctctggggctcgccttgtatctcaacaccctgagtgcggatttctgctatgatgacagggggtgaagccagccagttttgacaaagt

SEQ ID NO: 475069 - DNA, 75 bp, Homo sapiens
gagcgtcaacagcagcaccatggtgtaatgttcaagctcagaaatgccttatgtggatcgtcagaatcgcatttg

SEQ ID NO: 475070 - DNA, 83 bp, Homo sapiens
acctccatcaggaccccagatgtctgacagccctgtgtgacaccaagataagtaacgctctccctgcatgtcctatccaggcc

SEQ ID NO: 475071 - DNA, 100 bp, Homo sapiens
gaacatttacttaacacatcatgaaggctagtttggatgtggaggggaatagactccatctatccatatgaggtttattaatgcccggagaagaatagtg

SEQ ID NO: 475072 - DNA, 82 bp, Homo sapiens
ctgcgccgcaacgccgagcgcaccgacatctgcctgctcaaaggttcgagaacttgtcttggacaattgcaaatcaaatgat

SEQ ID NO: 475073 - DNA, 100 bp, Homo sapiens
ccatgctgccttcagcttcctttgccgctctgcatcatgttgaaggccagggatgtaccgcctacgacgtagctgtcaacagcgacttctaccggaggat

SEQ ID NO: 475074 - DNA, 98 bp, Homo sapiens
ctggtgatagaccggcgacgggacaaatggacctccgtgaaggcgtccgtcctgcgcatcgcatgtgcaggagaagagaattgggtggacagcaggac

SEQ ID NO: 475075 - DNA, 80 bp, Homo sapiens
ccttgaaaagcggcacgacaacattaaaccatcagatgaggaagctgcacaagccttaatttatgctgagatggcaggat

SEQ ID NO: 475076 - DNA, 82 bp, Homo sapiens
gactcttcagatactgaggaaaaagatgatgatgatgatgatgaggaagttccattacagcttatagaaagtgttgaatgcc

SEQ ID NO: 475077 - DNA, 100 bp, Homo sapiens
actcctcctgtgtgatagatgataaaatgattgtctttggtggctctttaggatcccggcaaattgggacctgatgcagaacatcatgaatgacatgccg

SEQ ID NO: 475078 - DNA, 100 bp, Homo sapiens
aggatgcaaccttgttctcaaccacttgctatctcgaggccagtgctgctgaggaagcagatgtgcacgtagctgtggtggtgagaccaggcaacgcagg

SEQ ID NO: 475079 - DNA, 74 bp, Homo sapiens
cgcagtcccagcgccaccgggcagcagcggcgccgtgctcgctccagacagcatgagtatctatgacgatattg

SEQ ID NO: 475080 - DNA, 100 bp, Homo sapiens
ttaagcattcagacgaagccctgaaaatcctagggggtgttggactcttctttagctttacagaggatgacacgtacacagagagctacatcagcaccat

SEQ ID NO: 475081 - DNA, 83 bp, Homo sapiens
ggacaagaccatcgagctcatgacttcccaagtaagaagcggaagaggagccgctggaaccaagacacaatggaacagaagac

SEQ ID NO: 475082 - DNA, 50 bp, Homo sapiens
tggcaagtggagcagagtcccaggacagggtctcactctgtcgcccaggc

SEQ ID NO: 475083 - DNA, 74 bp, Homo sapiens
ctccgagaagcttcaggcagcataacacttacaggatgtagagtcctacattcatcgatccgggcggacaggca

SEQ ID NO: 475084 - DNA, 75 bp, Homo sapiens
gctgaggatgatggtagattgccaggcaccatgactcctgtgaggatgcagcactccctggcaggtcagacctat

SEQ ID NO: 475085 - DNA, 74 bp, Homo sapiens
ttcaagcttctcgccagcattgtgaggaatcccgttctgcttccagaagtggaagtgctcacggatcggggaaa

SEQ ID NO: 475086 - DNA, 100 bp, Homo sapiens
ggttcttgttccagtatgacaactatgggtccacagctgaggacattgtggagtggctgaagaaagtcagtggcctttcccccttcatgggagacaacga

SEQ ID NO: 475087 - DNA, 82 bp, Homo sapiens
acgctgtcacaggttccagggtataccccgcgaatgaagtatgtccgtggttcagaccctgtattaaagcttttggacgaca

SEQ ID NO: 475088 - DNA, 98 bp, Homo sapiens
gcgaaggccgggacccggttccccggcccacagtgggggtgtgcaaacccgagagaactgggagctggaggagggaatgatattcagtggtgtttttc

SEQ ID NO: 475089 - DNA, 82 bp, Homo sapiens
ctcaaggccatgatcaaaacgtacaatgccagggagtactacgaccacctgcccgagctgaagcaggccgtggaccagatca

SEQ ID NO: 475090 - DNA, 100 bp, Homo sapiens
tggcacaagaatctgcctgtaacaatactcttcagcagcagaaacgatttctctatgaatcatcatcaagaactctgggagaacttttgaattcataacc

SEQ ID NO: 475091 - DNA, 100 bp, Homo sapiens
tgctagagtgtctagtgaatatcagctcctgggtcatttttctccctgaggacaacctgagatatccatgacgacattgaaaatgaattttttgtattca

SEQ ID NO: 475092 - DNA, 82 bp, Homo sapiens
gagggatccttcacccgtgtctggccacccttaagtacaatgttctcctacctaagaaggcatctggattttctctttcctt

SEQ ID NO: 475093 - DNA, 90 bp, Homo sapiens
cgtggggatcttggcagcgctgcagggggagcactatttaatctcttggtaattttaattagtgagcctcagattccaaaatcttgtcct

SEQ ID NO: 475094 - DNA, 82 bp, Homo sapiens
cgagcagagggacgtggagcgagcgggtggaaaccaggcggccagccagctggagggaatactcccccagttgcaagaggcg

SEQ ID NO: 475095 - DNA, 50 bp, Homo sapiens
atactctgcagagcttcagctggaatgatcattctcatcttggctgctgc

SEQ ID NO: 475096 - DNA, 74 bp, Homo sapiens
tttctgctccgtcatccatgccactgttatcaatactctggctgaccatcatcatcgtgggactgactttggtg

SEQ ID NO: 475097 - DNA, 83 bp, Homo sapiens
cctcaggacacggcctacaacaccaagagaggctgggaggcggcagaatgcagccagaggagggcacaggctggctgctggag

SEQ ID NO: 475098 - DNA, 75 bp, Homo sapiens
taagctgaataaagctgttttggaactgtcaggtacctcaaagcacaactactgagctatttcatagcaatgaag

SEQ ID NO: 475099 - DNA, 74 bp, Homo sapiens
cccgccgccggccctcggtgcgcccggccgcctgcacccccaggagcccccccatggaactgcagccccctgtc

SEQ ID NO: 475100 - DNA, 50 bp, Homo sapiens
ggatgtgcagtttgacttcaaggatccctccccgcggcggcgatggcccg

SEQ ID NO: 475101 - DNA, 125 bp, Homo sapiens
caccaatttacaaggtgtgtccgcagccagcagcggccgcatcgtggtagcagacagcaacaaccagtgtattcagggacccactactggcgtctggacaccagccgggatggctggcatagctg

SEQ ID NO: 475102 - DNA, 51 bp, Homo sapiens
aagcagatctggatcatcaaagacagggaagtgttcgccagttactacatg

SEQ ID NO: 475103 - DNA, 74 bp, Homo sapiens
ctaagaaggttcaaacaaatttgcaaatgatatacaacttctaaggtgatctgtgaaaatggttcgctattcac

SEQ ID NO: 475104 - DNA, 98 bp, Homo sapiens
agctatatactttggttacctatgtacctgttaccactttcaaaacttcttggacacttaatgattgttggcaagaaatgtgctgctgatctgggcct

SEQ ID NO: 475105 - DNA, 109 bp, Homo sapiens
atggggagcctgacgttttgaaggatgagcttcaactctatggaggttctgcttggattctgctagacagacccgacaaagactgtctatcaactggtccaattttagc

SEQ ID NO: 475106 - DNA, 97 bp, Homo sapiens
gaggacacgaccttcctgcccttcacgctccaggagctagtgtctcgactgcattgtgagagtgaatctttcaagatggatctaatcttagatgtaa

SEQ ID NO: 475107 - DNA, 82 bp, Homo sapiens
ctctagggaccccccccgcgcctgcacttagccccgcgcccgaggagcaggccgggctctcgccatgggtcactgtcgcctc

SEQ ID NO: 475108 - DNA, 90 bp, Homo sapiens
cggtgtgcttggagcagtgttcaatgccttgaactactggctgaccatgtttcgaatcaggtggacccaagtggagagattgtggaactg

SEQ ID NO: 475109 - DNA, 73 bp, Homo sapiens
tgaaattcagagaggggaagtgatttgcctcagcttgtactcctgcttagacgcctggtgactctcatttcgc

SEQ ID NO: 475110 - DNA, 90 bp, Homo sapiens
tggaagtgtctcttagcagcgcgcggagaagaacggggagccaggggaatgaattggaaataaccattatgatggtggtagaagcactat

SEQ ID NO: 475111 - DNA, 75 bp, Homo sapiens
tgaagagacaggaggcagtagccaaacacccagggctgaaaacacagttaaatcactttcaaagttaaaagacta

SEQ ID NO: 475112 - DNA, 136 bp, Homo sapiens
gtcgacctcctataaccacccggtcctgggaatgtacgacgccaaagatgacttccctcttaggaaaacagtgtcgtgtgggagccaatgggagatgggaagaaaatcatttccttggctgataaccatatcctgc

SEQ ID NO: 475113 - DNA, 100 bp, Homo sapiens
tagacttgctgcccgagaagctcataaccgaagatgtcagcctcccctgtcccgaacgcagtgtgtggaaaggctttccttaaagtttcccatgtctcaa

SEQ ID NO: 475114 - DNA, 90 bp, Homo sapiens
acctcagagaccagtgacatgccagagtctttcccagggaactccgatgaagtgttccaacaaaatgagcgagtgaaccaagaagaggat

SEQ ID NO: 475115 - DNA, 101 bp, Homo sapiens
aagtagggcttgccaccaacagaataaaataaaagatcttcaaaaggagcagaaaactttacaggtacgccgtcatgaaatacacaaatcgaagaatagag

SEQ ID NO: 475116 - DNA, 83 bp, Homo sapiens
cgctcggctgcgggaaatcgggctgaagcgactgagtccgcgatggaggttggacgtgataagtatgagcctgcagctgtttc

SEQ ID NO: 475117 - DNA, 104 bp, Homo sapiens
cagtatcataaaattcctctaaatgcagggttcaactagatatagcttcacaatctctggatcaagaaattttattaaaagttaaaactgaaattgaagaagag

SEQ ID NO: 475118 - DNA, 100 bp, Homo sapiens
aaagactgagtcgcagttaccaccaaacccaggaggagactctccctggaaaacttcccttccctttcggtgttggggaaccactgattcaagtatacac

SEQ ID NO: 475119 - DNA, 100 bp, Homo sapiens
gtggagaatctcttcatgtctgttcacaaggaagaggacacagacaccaagcaggtctatttctacctcttcaaggcctttccccctggtgctcttcatc

SEQ ID NO: 475120 - DNA, 97 bp, Homo sapiens
ggagtatttcctgaactgtgtgggtaggtgatgacaatgggaagaaggccaacaaccccaaccactgcaactgcatcatagaccagatcttcacagg

SEQ ID NO: 475121 - DNA, 100 bp, Homo sapiens
gtgggacgagcctaatgaagtgaaagaatcttcaagagggagacatagggaaaaggaagacataaaaatcactaaggaaagaactccagaaagtgaagaa

SEQ ID NO: 475122 - DNA, 80 bp, Homo sapiens
tttccctgagaaccgtttacttccagaagattggtggagcttgatctgaaggtaagaatgattgatgttggctgatattg

SEQ ID NO: 475123 - DNA, 98 bp, Homo sapiens
ttagttggagctttgtctatcttcttccttaggaaaccagccccaatcttcatctccttcttcattgctttgagagagatggccaaccttcctgtgcc

SEQ ID NO: 475124 - DNA, 75 bp, Homo sapiens
atagatattcagaagaaggatgctgttaaaagattggccatctgcaagcttcccttctccgtggagagcaggaag

SEQ ID NO: 475125 - DNA, 76 bp, Homo sapiens
aactgccaaagttcaccatcctccaaacaagtgaaagagacaagagagacacctccaacttcgacaaagagttcac

SEQ ID NO: 475126 - DNA, 98 bp, Homo sapiens
tgatgaggaggaagaggaggacgaggatgatgatgaaggaccgtacacaccattcgacaccccctgccctcgggaccaaggatcacgtcatgactccg

SEQ ID NO: 475127 - DNA, 83 bp, Homo sapiens
cttagacttccggaaggactttggcgagggtcttgaggaccggcccagctcaggctcctggggcagcggcgaccagagcagct

SEQ ID NO: 475128 - DNA, 89 bp, Homo sapiens
aaagaaggggttcctggtcatacaccagtactaccaaggacagcttttttcctgcaagaattaaacaaccaccatgtcgagcaaaaagg

SEQ ID NO: 475129 - DNA, 110 bp, Homo sapiens
cctgactgagcggaagtaggagctctcagaggctaagaaggtggagaccggagaagctgtgaggttgccataggaaaaggatacagagtagagtttcatgaacctgaaac

SEQ ID NO: 475130 - DNA, 75 bp, Homo sapiens
gcagggcctgcagcgggagctggacggcgagcgcgagcggcgcgagaaatttgtgaagtgtggatatgcaggctc

SEQ ID NO: 475131 - DNA, 74 bp, Homo sapiens
ggatccacgtgcttcatcatatgtctctgcccacccacgcaacccagactatgaagagtccggtgaaagcagca

SEQ ID NO: 475132 - DNA, 76 bp, Homo sapiens
gcacgtggatcagcgtcgccagggtctggaagatttcctcagaaaaagtctggaacgttttttcttagagttccag

SEQ ID NO: 475133 - DNA, 100 bp, Homo sapiens
acagagacagtgcctgccttttcagagcgtacctgtgccactgtcaccattggaggaatactatgtcttcagcagtggtgcagttatatgcagcagatcg

SEQ ID NO: 475134 - DNA, 89 bp, Homo sapiens
ggctgctcagctgctgactgatgaggcactgagcagtgtgacctttgaagacgtggctgtaaacttttccctggaggaatggagtcttc

SEQ ID NO: 475135 - DNA, 49 bp, Homo sapiens
tatgagctggatcccttcgacagatgaagacttccggggcaggcgtcag

SEQ ID NO: 475136 - DNA, 50 bp, Homo sapiens
gatcagtggccgaggccccagagatcacagctgggctggacccagtgggg

SEQ ID NO: 475137 - DNA, 75 bp, Homo sapiens
atttgtcatcagatcaaaataagtctgtttctgaaagggcttttttccagacttcaagctcccattccaacagta

SEQ ID NO: 475138 - DNA, 50 bp, Homo sapiens
gagagccaggccatgcaggcccacgtgagcatgcaagcggcaagatgtcc

SEQ ID NO: 475139 - DNA, 97 bp, Homo sapiens
tgaggatcgtgtgcattacaggagtcctccacttgccactggtgatggtggcctgcgttttggagaaatggaacgagattgtcagattgcccatgga

SEQ ID NO: 475140 - DNA, 100 bp, Homo sapiens
ccggcctagccgaagcctcctctgtggcgctcagcaactgcgatgggctggcgggtgccacgtctatgtgggcttcgtgctgtgggctgctgaatgaagt

SEQ ID NO: 475141 - DNA, 101 bp, Homo sapiens
cacggccatcattttctgtgtcgcgctcagcggctatgaccaggtgctccacgaagacgaaaccacgaacgacaaatcctccacccctgggctcaagtcca

SEQ ID NO: 475142 - DNA, 50 bp, Homo sapiens
agaagttgggtgcagattttcatgagggaagtgtaacatctcccattttt

SEQ ID NO: 475143 - DNA, 75 bp, Homo sapiens
ggagaagccgcccaaagaactgattgggctaatggatactacagacaacagagaaaacttgttgaagagattggc

SEQ ID NO: 475144 - DNA, 100 bp, Homo sapiens
cactgggacagaaacgacacaaacttaattcctaatggaagtagcataactgtcaaccagactaacaagatgctttcattggatttggaggaaatgtgat

SEQ ID NO: 475145 - DNA, 112 bp, Homo sapiens
taagaatgataatggcaaaccagattctgtgggactccgtggataattactgtaccttcctcatggaaaaagttttatttaaagtgttatttctcattgaatactatcaaaa

SEQ ID NO: 475146 - DNA, 108 bp, Homo sapiens
ctgaaaccctgggcggcggcaagctgtgcgacctcttctgcggccggcctgggcaggtgtcttcctcgagagactggtcaaacaaatggattttacagaggcttacgc

SEQ ID NO: 475147 - DNA, 101 bp, Homo sapiens
cccgctaagctgatctcctgtacagtagtgctacttaaaatatgctggggaccatcaccatcacagacttaattcagtgcacaaatgagatgaatgtgaac

SEQ ID NO: 475148 - DNA, 148 bp, Homo sapiens
acggccacccaccatggccgcagaccagcgcccgaaggccgacacgctggccctgaggcaacggctcatcagtagagacggggcttcatcaggttggccacgctgatctcaaactcctgagctcaagtgatccagccgcctcagcctc

SEQ ID NO: 475149 - DNA, 82 bp, Homo sapiens
tcatcaggtgccgcctgcccttccggaaggattttgtccctttcatcactaaggtgctgccttcacctgcctggagactgcc

SEQ ID NO: 475150 - DNA, 88 bp, Homo sapiens
gcaacttcagcattaattctgttgccagcacctattctgagtttgcgagcagcccgacggccatggaggctgaagagacgatggaatg

SEQ ID NO: 475151 - DNA, 76 bp, Homo sapiens
aaaacgctgattaaaagaagcacgctgaagaaatcaggggagaaacccctgcttggtggaagcctgatggaatatg

SEQ ID NO: 475152 - DNA, 51 bp, Homo sapiens
ttccagtacctgccagatacagagcaaggtccgtggtcctgtcagtggaag

SEQ ID NO: 475153 - DNA, 83 bp, Homo sapiens
caagaaccaaccctgccagcacctggaccttggacattcagacttcagaatgttcctaaggacggtctgaagagccaagagct

SEQ ID NO: 475154 - DNA, 74 bp, Homo sapiens
ctggttgctgaagaggaggcggaagccaaggtcacgagaagagaatgccttctagatgcaaaatcacctccaaa

SEQ ID NO: 475155 - DNA, 99 bp, Homo sapiens
gcacggagatttctggggctttggagggaatcgtgagcgggcgggaggaggccggggaccacacaggttaatttggagtggcccctggagtcagtttcc

SEQ ID NO: 475156 - DNA, 75 bp, Homo sapiens
gatggaaaaccagttattgaatatcaagaggaggagttgttggttctgacaacaaaggagattgtgacatattgc

SEQ ID NO: 475157 - DNA, 100 bp, Homo sapiens
tgttggcccaggaggtcagcaaggcctgagagctgatcagaagggcctgctgtgcgaacacggaaatgcctccagacgactgggtttggattcagaagag

SEQ ID NO: 475158 - DNA, 100 bp, Homo sapiens
atgatgctcagtttgatgcgtcacactacgacagtgagaaaggagaatgtcaggtgatgtgtcaccccaagtgctccacgtgcttgccagccacctgcgg

SEQ ID NO: 475159 - DNA, 74 bp, Homo sapiens
gggaacgattgggctgagcagaggacgacatgttgcttttcgtggaggcttgggtggcaaattttgaaagacct

SEQ ID NO: 475160 - DNA, 102 bp, Homo sapiens
aaaattctgaactcaggacttggcaagatgtacagttacccagcacgtgtacctcctcctcctcctattgctcgggctgtagtgccctcgaaacgtcagcgt

SEQ ID NO: 475161 - DNA, 90 bp, Homo sapiens
cgaatgttgagtctctggtgaacgagtatgatgataatggagatggtgaaatagggccttctaaacctgtggagaagtgagagatctgaa

SEQ ID NO: 475162 - DNA, 75 bp, Homo sapiens
aactgtcctccacatattgaaagtggcaaacttgaagataaatcttttgactccagctctttagaggatctaaag

SEQ ID NO: 475163 - DNA, 99 bp, Homo sapiens
gtgcggcgaaggaggcagaggcacttatgcttgtcaggacttggatgttgtgggtgatggtatgcagtgtcctccttcacctttgctttttgatccttc

SEQ ID NO: 475164 - DNA, 90 bp, Homo sapiens
cccgcaccaagctctgctccacactgccaaccggccagaggacgagtgtggaagctggagaagcttcgagagaaggagcgtaagaaggaa

SEQ ID NO: 475165 - DNA, 80 bp, Homo sapiens
ctgacagaactaaagtctcctgcaagatcttaattcatatcttgaagataaagtctaccttacagggtataactttacat

SEQ ID NO: 475166 - DNA, 102 bp, Homo sapiens
caagaatacctcggcaaattccgacgtcttgaagacttccgagtagatgtggtccagctgctcacctgtgacctgctactgtcgctacggacagcgctctgg

SEQ ID NO: 475167 - DNA, 100 bp, Homo sapiens
gaaaacttgaagaagattttccgggaagttcaaattatgaagatgctttgccacccccatatcatcaggctctaccagcttcagataaaccagtcgatca

SEQ ID NO: 475168 - DNA, 100 bp, Homo sapiens
gtggcaagcgagcccggggtagaggtaaatcaacagactgggaagatgatggttggggagcatgggaagaaaatgaaccacaagaacctgtaagtcttta

SEQ ID NO: 475169 - DNA, 82 bp, Homo sapiens
tgcgaaccccgggcagcccgggaaatctccaagtcagaaaggaacacagccaggacacagacgcggatgatggggccttgca

SEQ ID NO: 475170 - DNA, 137 bp, Homo sapiens
ctgccacacctagactgatgcttattagtcatcaccgttattcctactaacgtcctgtgtcactgaggattcgataccagcatcttgccaatttgcaaggactcacttggctggatgtttaacagacttgatacaaa

SEQ ID NO: 475171 - DNA, 75 bp, Homo sapiens
aagccacgtgcagacatctacaaccttcgatctcctgacgagagtgtcatgggccggcagacatgcctggagtgc

SEQ ID NO: 475172 - DNA, 98 bp, Homo sapiens
cggcgcccgcggccccgctgaggggccgcaaggacgaggacgcctttctgggagaccccgacaccgatcgaagcaaagctgagatggatttgaaggag

SEQ ID NO: 475173 - DNA, 97 bp, Homo sapiens
agccgaaggcggcgggagccagagtcgccgccggcgtcggcgccgctctgcttatgataatgtcaacaaagttcgagtagctatcaagaaaatcagc

SEQ ID NO: 475174 - DNA, 82 bp, Homo sapiens
tcgtgccggcgccgcccggaccgccagagcaacttgctggatgtgaatcagatcatcaaggacttggcctccatggtgtcag

SEQ ID NO: 475175 - DNA, 75 bp, Homo sapiens
ggagcgcatggctgaggtcttggtcaccggggaacagctacggttttgacctgtagcagagaaccaattctggag

SEQ ID NO: 475176 - DNA, 90 bp, Homo sapiens
tggtcacacagacgctgccatatatgtcacagtacactgaaaaggagccagcagatgtgttcagagcaacattgttttgttgacacaagc

SEQ ID NO: 475177 - DNA, 83 bp, Homo sapiens
cggcgcaccgactggaccgggaaggagcatcccaggacctaccagaatctgatgggactgagtatgggctgagtgaagctgac

SEQ ID NO: 475178 - DNA, 96 bp, Homo sapiens
cgcctcacagagcccgtcgtgcccaaggattggcagcaggagtgccagctggcaagcggtcctgcagacacagaactctactacgatcgcgggaac

SEQ ID NO: 475179 - DNA, 82 bp, Homo sapiens
aaagcgaggctgaagaaggccaaggctgcagaagccaaagccacggagccttcacgtaaatgggtccagtcatgcctcccag

SEQ ID NO: 475180 - DNA, 109 bp, Homo sapiens
ggacaggcagagtgctgatgtgaaaaataccacgacaaaaccaccctaacaatgcagatcttcgtgaagactctgactggtaagaccatcaccctcgaggttgagccca

SEQ ID NO: 475181 - DNA, 100 bp, Homo sapiens
gctgaagctgtgcaccgaggtccgtgtggccaacgagctcaacgccaggcgccgctcctttacaggtagcccagccatgacccataggaatctgacttcc

SEQ ID NO: 475182 - DNA, 90 bp, Homo sapiens
ccaccgtttcctccaggacagcacctagtcgtggccggaggagtctcagagctgtcagaaaggtacgagtgcttccatatccatttaccc

SEQ ID NO: 475183 - DNA, 100 bp, Homo sapiens
cgagcccctgttattggaggaggaggtaaacaggagcagtggtgcactctgctggcctttctctgtagaaacaagttgaggagctcaagcttgggaaaat

SEQ ID NO: 475184 - DNA, 50 bp, Homo sapiens
agatatagccgttggtacaaaggtgattgtgtccaggggggggcgctttc

SEQ ID NO: 475185 - DNA, 75 bp, Homo sapiens
gccttcttgggaactgccatctcctgcatcgtcataggggatcgcttacacctgagacgaactacagaacagcac

SEQ ID NO: 475186 - DNA, 100 bp, Homo sapiens
ggaaggaggagattctgaagataaggagctctcttatttagtgcaacttttcggaagaagattgaaaagttggccagagacatcctgatcgaccctattc

SEQ ID NO: 475187 - DNA, 49 bp, Homo sapiens
ggtgacccatgcattggttaatatcagcaaatgcagccctgaggatttg

SEQ ID NO: 475188 - DNA, 76 bp, Homo sapiens
gatgagagcgctccgaagactggtggatccataaagaacccagccaacccgcagagggaggggaggggctgagctg

SEQ ID NO: 475189 - DNA, 98 bp, Homo sapiens
cacagagtggcccttgcagaagcctgtagaaaacaggaagaatttgatgttgccaacaacggctcttctcaagtatgcctggactgttgcccagtgta

SEQ ID NO: 475190 - DNA, 80 bp, Homo sapiens
cttgaagtatttggctgaggagttttcaatcccagctaatggtcgatttgaagtgggcaagaaaatctgtttgagcatct

SEQ ID NO: 475191 - DNA, 75 bp, Homo sapiens
ccagccggggggcactgcccgcccgggctctggtgctacagaatattttagaaacagaaaatgaatattctaaag

SEQ ID NO: 475192 - DNA, 75 bp, Homo sapiens
gctgaaattatgcttcactacattgaaagaggaagaaaaatatgcttttgttaactggataaacaaagctttgga

SEQ ID NO: 475193 - DNA, 100 bp, Homo sapiens
gccagcaggttgggagatggcaaagacatcttctggtcagagatacttcttaaactgtatgcaggagctattcttgaagtttgtggatgaaaattgggaa

SEQ ID NO: 475194 - DNA, 49 bp, Homo sapiens
ctcatccttttccaccagctaaaggtgaccctggcagcaaccccaacaa

SEQ ID NO: 475195 - DNA, 74 bp, Homo sapiens
gaagctgaactccaaaaaatgaaggcaattcagagagagaaggagaccaagacacattccaccccagtgggggg

SEQ ID NO: 475196 - DNA, 88 bp, Homo sapiens
cccagcgtgaccagtggccacctctgcagtgtcttccacaacctggatgtgtcgtggaggccgaatgtttgcaccaaccaaaacctgg

SEQ ID NO: 475197 - DNA, 100 bp, Homo sapiens
gggagatcaaggacttcaaggatttctacctttccatagcagctgctcatgtttcccacctggagaatgtgtcagaggaagaaatgaacagactcctggg

SEQ ID NO: 475198 - DNA, 90 bp, Homo sapiens
ctggggagcgcctcgtcgacatgagtgatgtggaggaaaacaacttcgagggcagagtgcagagagagctagcagctgttattgctttga

SEQ ID NO: 475199 - DNA, 100 bp, Homo sapiens
ttttcaatgctgcgaaagctgccaaaagtgacatgcagacctcctgccccccgaggtctgcagtctcctgaacccagcagccatctacgccaacaacgag

SEQ ID NO: 475200 - DNA, 75 bp, Homo sapiens
gccatggcagcctcactgacatcagccagttttcggctttgtgagaaaccttaccatcaaacacgatggccagca

SEQ ID NO: 475201 - DNA, 100 bp, Homo sapiens
gaccagcgacccaagcgccgcggttaaccacgtctcgtccacgacctccctagctggagctctcaaacactgctgtcctgcaccagatgcggcgggacca

SEQ ID NO: 475202 - DNA, 100 bp, Homo sapiens
gaagaccattcagatgggatctttccggatcaatccagatggcagccagtcagtggtggaggaaaatgtttcaacgtgcgcaagagttgcggtggcgggc

SEQ ID NO: 475203 - DNA, 99 bp, Homo sapiens
atggtgctgggtgcagatgcagtgtggctctggatagcaccttatggacagatctttctcctggcctgccctccatgtcggggagctatcgtcgtcttc

SEQ ID NO: 475204 - DNA, 75 bp, Homo sapiens
caacggcagaagcttcaccacaaaagcgaaatgggcacaccacaggaaagtaatggaccagtgaaggtgtgggga

SEQ ID NO: 475205 - DNA, 97 bp, Homo sapiens
cagccttagactatttttcaaacaattgcattcatggcttctctggcaacccacttcagcaatcagaacagtgggattatcttcagcagtgttgaga

SEQ ID NO: 475206 - DNA, 100 bp, Homo sapiens
gcaagactgtcgacctaaagcctgactggggcaaggatcatgttctaattgagctcacccaggctggattgaaaggctccacagagggaagtgagagcta

SEQ ID NO: 475207 - DNA, 50 bp, Homo sapiens
ctcgggcgccgacgagatcggactgtgccctgtccacggtgcctcctgca

SEQ ID NO: 475208 - DNA, 106 bp, Homo sapiens
gctaaaaggctccttcagtgagcaaggcatcaacgagtttctcagttctgaagtttataggttaaacttagaacaaggacgatacctgaatcctctacaaactgat

SEQ ID NO: 475209 - DNA, 100 bp, Homo sapiens
ggagcctcaaggcggcccggcgggcgactggacggccggacagacatgtcatgctgcccaaggacatagccaagctggtccctaaaacccatctgatgtc

SEQ ID NO: 475210 - DNA, 100 bp, Homo sapiens
cgaggagcgagcgctgcgaggtggcggcctgagatatgtcttctccgactactatgaagaagcctgaaaagccattgttcagctctgcatctccacagga

SEQ ID NO: 475211 - DNA, 100 bp, Homo sapiens
tacggctgttgccatgaggcgaggctagggaggacctcacttccccggggtgtaataatgttaactgagcatgaacaggctgaacactttgccacgaggc

SEQ ID NO: 475212 - DNA, 96 bp, Homo sapiens
cagtggttcagaccgacatgctgtacagcttcaaaagcagtggactgtcttttggattcaaagtgggcaaaggccaagaaaggagaggaagcttta

SEQ ID NO: 475213 - DNA, 98 bp, Homo sapiens
cgcggccggagaccgtggggcccccggttgccgccccctcggccccttcgactccaccggggccctgaggcggctggggtggggctgtctgggcccca

SEQ ID NO: 475214 - DNA, 83 bp, Homo sapiens
gttcgactgctagagccgagcgaagcaggccacaagaggaagctgaatgaagaggacgccgccagcgagtccagcagggagtc

SEQ ID NO: 475215 - DNA, 75 bp, Homo sapiens
ggaaacgactcaacccatctgtgtggaagccttctctggtctgcggctcagaaaaagatgttgctggtccatttg

SEQ ID NO: 475216 - DNA, 106 bp, Homo sapiens
gctgaagacatcaagaagatcttcgagttcaaagagaccctcggaacacacgatgaggcgagtggtacgacagagcaagtttcggcatgtatttgggcaagcggtg

SEQ ID NO: 475217 - DNA, 100 bp, Homo sapiens
ttgtcctcccctttcatccctatgtggaaaacgatgtcggtgcagatctcttgtccatgtgccagcgaaacattgccctcaacagccacctggctgccac

SEQ ID NO: 475218 - DNA, 74 bp, Homo sapiens
cactgttcccgccatggctcagggcctaacatcatcctcacagattcatgttacatgtaaagctgtcctcattt

SEQ ID NO: 475219 - DNA, 96 bp, Homo sapiens
ccaccatgttcctgggcaccggggagccggccttggacacggggcgtggttgctctccagaccctacgaaaattagttgaacttactcagaagcca

SEQ ID NO: 475220 - DNA, 82 bp, Homo sapiens
ctgggacacagcggggcaggagcgcttccgcaccatcacctccaccgctgataaagcagtttgtgtccgacgtggcctgggg

SEQ ID NO: 475221 - DNA, 88 bp, Homo sapiens
gaatatctactgaagtggaaaggcttttctgaccgtttccctggggagatggtaaccatactctattccataaccctcatgtgaatcc

SEQ ID NO: 475222 - DNA, 100 bp, Homo sapiens
ttagaaaggagacccgactgcaactgctggattgctgcaaggctgagggacgagaacgagaactctcttgatagagcccaagcagccaagaataaaggca

SEQ ID NO: 475223 - DNA, 90 bp, Homo sapiens
tgccccgctacgagctggctttaatcctgaaagccatgcagcgggtcccttcaccgatgttgtcaccaccaacctaaagcttggcaaccc

SEQ ID NO: 475224 - DNA, 96 bp, Homo sapiens
ctgcaacctccccttcccaagttcaagcaattttcatgccgcagcctcctagctgggattacagtttttccagaaaggaggagtcaaggaagccct

SEQ ID NO: 475225 - DNA, 97 bp, Homo sapiens
cttggactgctctatcattataataaccaagatgctgctgcagttcaggtgtgggttgctgaccgaggaaataaaagaatccaagtatttgataaag

SEQ ID NO: 475226 - DNA, 105 bp, Homo sapiens
cccagtcctgcagcgccagcagctggactatggcatctatgttatcaaccagttaagtgggcagaccaacatccacctcagcaaaaacttcttcctgacgaatcg

SEQ ID NO: 475227 - DNA, 100 bp, Homo sapiens
tcctgctcgccctcctcctgcctcactgccagaagctctttgtgtatgaccttcacgcagtcaagaacgacttccagaaaagaggcacagttagatgaag

SEQ ID NO: 475228 - DNA, 100 bp, Homo sapiens
gcgcgagggaggaagagaactactcctttttacctttggttcacaacatcatcaaatgatcaccgccagatgcaaaaaaccaccgctaagcattttgtaa

SEQ ID NO: 475229 - DNA, 100 bp, Homo sapiens
ttcacttaccagaatactacgttcagctaaattaagggagaatgaagttgaagaggtaaaagaggagggtccaaaagagatgactttggatgagtggaag

SEQ ID NO: 475230 - DNA, 111 bp, Homo sapiens
gcgagccggcggggctgcggagggccagtggactcaggtactccaaagattcaggtttactcacgtcatccagcagagaatggaaagtcaaatttcctgaattgctatgtg

SEQ ID NO: 475231 - DNA, 100 bp, Homo sapiens
ctacttcacactgcagaactgggttctggactttgggcgtcccattgccatgatattcaagattaaagcagtgcaattggctgagaaactccttcctgcc

SEQ ID NO: 475232 - DNA, 87 bp, Homo sapiens
agaacccatcgggcagctacacatcttgaaagagaagctcttcctgtgagggatcgcccggagcccacacccgtcctccgctctgca

SEQ ID NO: 475233 - DNA, 58 bp, Homo sapiens
caggagtccaagaagttcaatattgtggagcctagatcctacagtaaggaattgtttg

SEQ ID NO: 475234 - DNA, 80 bp, Homo sapiens
caaggggcttacgcagaaggacctggccacgagcactacaaacaccactggtttcccgaaaagccgtccaagggctccgg

SEQ ID NO: 475235 - DNA, 98 bp, Homo sapiens
tggaaaaagcaagctgaagacatcaagaagatcttcgagttcaaagagaccctcggaacgtcgccactgggacactgtgaaccaggagtgagtcggag

SEQ ID NO: 475236 - DNA, 75 bp, Homo sapiens
caaagccagcgttacagtaatgttccagtcttatgatgtaatcagcgcgatttcacttcctgaatttcgatgaat

SEQ ID NO: 475237 - DNA, 100 bp, Homo sapiens
taccagcagggcgttggctatgtgcccatcacaggtacacggtcctcttctcgcacggcaatgccgtggacctgggccagatgagcagcttctacattgg

SEQ ID NO: 475238 - DNA, 98 bp, Homo sapiens
agcctcatctactgcacacttgagtccatgagattttagagtggaccctgatgctcccataagacagaaaatgccccttgatgatctggatagagaag

SEQ ID NO: 475239 - DNA, 100 bp, Homo sapiens
tttaacattccaacacataaaaattatttatccaacagctcctcccagctttttggagaccacggcatatttcttcatgaaaccaaaacttggagagaag

SEQ ID NO: 475240 - DNA, 80 bp, Homo sapiens
ctcgaagaacagctgtggaaagaagttgcaaaacactggcagcgtcaccctttacaccagaaagctggcgggcactatgg

SEQ ID NO: 475241 - DNA, 100 bp, Homo sapiens
ctctagctattgccttattttttctcatggatgttcttcttcgagtatttgtagaagggaaaaatgatgtgatgaacctccttgaaagcgctggtttttc

SEQ ID NO: 475242 - DNA, 90 bp, Homo sapiens
gaaaaagactttgtggataaagcagagaagagcctgaagcagactccccatagtgagaggctgacccgcggctgattgagtccctctccc

SEQ ID NO: 475243 - DNA, 101 bp, Homo sapiens
gcctttccccagatggctacctatataaatggcttgacaacattctggcttgtcaagatttacgagtgtgactgaagaaatatcaaatgtttcctagtaag

SEQ ID NO: 475244 - DNA, 82 bp, Homo sapiens
acttttgacacggctttggaaacgacgtcatgtgttagaaacctgctaatattttagttatgggtgaaggtcctgagcgagg

SEQ ID NO: 475245 - DNA, 101 bp, Homo sapiens
aaaatcatcctggccgtcatggataggcagaagaaagaagaggagaaggagcagtccgtgctcaaactacatgaggaaataattgacttttataacttcat

SEQ ID NO: 475246 - DNA, 100 bp, Homo sapiens
cgctgggagagaggtacctctccttttccctctccctttccctaaggattctcaaagttggattggtggaaacaatgaaccattgacaggctttacatgg

SEQ ID NO: 475247 - DNA, 88 bp, Homo sapiens
aaagctggcaaaggagaagtaacttttggtgctggagaatctggtaaaagcaccattgtgaagcagatgaggatcctgcatgttaatg

SEQ ID NO: 475248 - DNA, 100 bp, Homo sapiens
gggattgacccaactccggagcagtggaagcagattgcttctgtcatgaaggcttacctatttctactccatgtaccaccataaacaaagtttgtgcttc

SEQ ID NO: 475249 - DNA, 75 bp, Homo sapiens
cggaggagtcagctgtgtgtccagaacgtgccatggagacgcttaacgggaagatcagttttcctgccatccagg

SEQ ID NO: 475250 - DNA, 100 bp, Homo sapiens
gtttgatacagcatgtgttaccaagctgtttcctaccaggtcacacactgttgcagcgcagaactgctgcccattgcctgcccggatccaggagattgtg

SEQ ID NO: 475251 - DNA, 100 bp, Homo sapiens
cgaggaggaggccacccagatggaccagtttgggcaggcagcaggggtcctcattcacagaggtacagccccgtggtggaggccggctcggacatggtct

SEQ ID NO: 475252 - DNA, 100 bp, Homo sapiens
gggctgaagcgactgagtccgcgatggagctctggcaggctgccctgagcacgctcaaccccaaccccacggacagctgtcccctctacctgaactacgc

SEQ ID NO: 475253 - DNA, 90 bp, Homo sapiens
gctgagctctgtcggtatctttccaaggtcctagaactcaggaagagtgatgtggttttggataagggtaagcttgatgattaccaggaa

SEQ ID NO: 475254 - DNA, 109 bp, Homo sapiens
tagtggatccttgaatgttgaagatgtccttaccagctttgacaatacaggaaatgtttaatcttgcctcctggaatccttcaaatcctgaatgtctcttacttgtggt

SEQ ID NO: 475255 - DNA, 83 bp, Homo sapiens
gcagtgtgtgcaaaaaagcgccccccaggtatgttcaagatcagtaaatttagaaaaagcttcagagtctttgaaaggaaaca

SEQ ID NO: 475256 - DNA, 98 bp, Homo sapiens
gcttatgatcattgtttctggtctatggatgaatctgtcaaagaaaagtatgcagatttccaaaagaccttggctcaggtgtcacttttgcagaaaag

SEQ ID NO: 475257 - DNA, 96 bp, Homo sapiens
caccccgagaaccgtcagtttgagccagatgattgaagaaggtattgttgtaatggaagatgattctccagtggaggctgtgagcacacctaatac

SEQ ID NO: 475258 - DNA, 75 bp, Homo sapiens
gtggggcattcgtcttggtaaacttggtgatgcctttgtggaactgtacggccccagcatgcggcctctgtttga

SEQ ID NO: 475259 - DNA, 100 bp, Homo sapiens
attggtggatctgaagtacaaaatattttccagttaatatgatcctctgttgaagcaagaagacaaactgtatggtggagaaagaagtgggaaggatctg

SEQ ID NO: 475260 - DNA, 80 bp, Homo sapiens
tggattcagacgccgattcgcccagttggcaaacatgaattgactgggcataaagtagctgtgaagatactcaatcgaca

SEQ ID NO: 475261 - DNA, 100 bp, Homo sapiens
gttcttcaggcacttgcatccacagtaaacaggataattcgtgtccagtccccggatggagtgaagcggatcacagcaacaaagagagaaacagcagcaa

SEQ ID NO: 475262 - DNA, 75 bp, Homo sapiens
tacagtacgatgatgaaaaaattatcagtggcctacgagataattctattaagcatttatgacattaacagagaa

SEQ ID NO: 475263 - DNA, 98 bp, Homo sapiens
cagtttctagctactgcacgtacttcataaagcaggactctaaaagctttggagatcgagatggtgatcatggagcgtagcaagctctcagagctggc

SEQ ID NO: 475264 - DNA, 100 bp, Homo sapiens
aaacatgtgaacactcaagtgaagcaaaagccttccatgattacgaatgaagcaaagtcaggtggacgaagtgatttgataccaactatcaaatttcgac

SEQ ID NO: 475265 - DNA, 99 bp, Homo sapiens
tctggatgttggttctctttgtcattttcaacagtctgcaggttccttgcattgactccatggagagtatatcacctgatttccgtcatgatacttggg

SEQ ID NO: 475266 - DNA, 100 bp, Homo sapiens
gaaagcagaggaactgctgttgttacctgggaaccctggaggggccttcctcatccgggagagccagaccaggagagaacatccagtcatggataaaaat

SEQ ID NO: 475267 - DNA, 102 bp, Homo sapiens
gtttgctgcagaagagacaggggaggcactgtctgaggagactacagcagctctttgtgctatggaagtgcttcctcttgcactaccttctccacctcgtca

SEQ ID NO: 475268 - DNA, 100 bp, Homo sapiens
tgtcctcctggcctcagcaacctgacaattctgtcgtgtcccgggcagatgattctggaccagatgaagcctgaggagccttccagctctaagatagcag

SEQ ID NO: 475269 - DNA, 75 bp, Homo sapiens
acacctccttggagactagacgccagttagccttgaagttaagtgggcagaccaacatccacctcagcaaaaact

SEQ ID NO: 475270 - DNA, 111 bp, Homo sapiens
cccggctgtaccggcagatcctcaggggcaagtacagttactctggggaggaggtgttccggcagcaccgggggccacagctcctggccctggtggaagaggtgctgcccc

SEQ ID NO: 475271 - DNA, 83 bp, Homo sapiens
gctgacgctgctgctgtgtgcggtgctgctgagcttggcctcggcgtcctcggaaatgcttcggttacccacagtctttcgcc

SEQ ID NO: 475272 - DNA, 76 bp, Homo sapiens
ttcaggaaaacagagaaagaagtgataggagggctctgtaggtcagccatgtcatctgagcctcccccaccaccac

SEQ ID NO: 475273 - DNA, 75 bp, Homo sapiens
ctcggagacgagtggtgggagaaccagccgactggagcaggcagcagcccagggttttgacccaccacatcagag

SEQ ID NO: 475274 - DNA, 100 bp, Homo sapiens
ttagcgcaaaagttctgaatggcatccgtcctaccggaaacctaggaaaaggaccctaatcgactgcattatgaccctgctgaactcaagctcttcgaaa

SEQ ID NO: 475275 - DNA, 100 bp, Homo sapiens
aaaaatgtactctgacctgaatcctgaattttccttgatggtcaaaagattaagaaataggaaggttgttgattactcacagtttcaggaatctgatgat

SEQ ID NO: 475276 - DNA, 82 bp, Homo sapiens
aggtcaagagttggagcagacggtcagttctgactacagtggtagtggaggccgaagcggcgggaacagctacggctcaggc

SEQ ID NO: 475277 - DNA, 101 bp, Homo sapiens
tcctttaccaaccagactggcggttcatggagagcaaggagaaggatcgccaggtgctggaggacttcccaacggtccttaaaattctagtcagggcagtg

SEQ ID NO: 475278 - DNA, 78 bp, Homo sapiens
tcagactgatggactcaactgtcccagatgaaatccaagaggtgtggatgaggtcaccattgtcaacattttgaccaa

SEQ ID NO: 475279 - DNA, 88 bp, Homo sapiens
gccctacgccgtggacttccagcgcagccatgaaccagagaatcagtcagagtgctccagtgaaacagccaccacccctggctcccca

SEQ ID NO: 475280 - DNA, 98 bp, Homo sapiens
cacgtgatcaagtaccttgagacactcctttactcacagcagcagttactccacaggatccgctgaacataggatgttgccacaaaatctacctcgtg

SEQ ID NO: 475281 - DNA, 100 bp, Homo sapiens
cccagacccaaagtttgcaacaatcagtcaggactcaggtacttctgccctccctttggtctccctgttcttctatgtggtgacagatggcaaggaagtc

SEQ ID NO: 475282 - DNA, 95 bp, Homo sapiens
ttcatcatcagggttttgtagatgctattacagaactccttaaagtaaggactgatgcagaaaaactgaagggggcagacactaccgaagatggg

SEQ ID NO: 475283 - DNA, 100 bp, Homo sapiens
agcccctcctcagatgcccctgccggagatccctcagccctggctggtggtggtctgtcacgtggtgggccaggctattcagttcttggtcagcgagacg

SEQ ID NO: 475284 - DNA, 75 bp, Homo sapiens
aagatggaacaatagttttaatgggaacatacgatgatggagcaaccaagtttcctgaaatgcagtttttccagc

SEQ ID NO: 475285 - DNA, 80 bp, Homo sapiens
cctgaagagggaagacacgcggaaacagattgatctggatactattgatgtaagcaacctcaacagacagtttttgtttc

SEQ ID NO: 475286 - DNA, 75 bp, Homo sapiens
tgtgctgacgacctgctacaacagaataccttctccaggcaaattccgttcccctgcagcaccatctcctttggc

SEQ ID NO: 475287 - DNA, 75 bp, Homo sapiens
tgtccttacgtcctgctaacccgcttggcattgagattgaaaagtagttatgcttgtcctagcttggaaattgga

SEQ ID NO: 475288 - DNA, 83 bp, Homo sapiens
ctgaagttccctgatgatcagactcagaaaattttggaaagagaagatgctcggctgatgaaaacctcggatcaattctcagc

SEQ ID NO: 475289 - DNA, 100 bp, Homo sapiens
aataagctggcacagatggaagaggctccacttttcccaggagaatcaattaaagccattggttctgcggggagtgtctccagccctgcctgcaggtgcc

SEQ ID NO: 475290 - DNA, 99 bp, Homo sapiens
aaatatgtaggagctgtccagatgctgaaaagagaaggtcaaacagctgaagtttgcttcagtgtccccaacagttcctgaattcttgaaaactcctcc

SEQ ID NO: 475291 - DNA, 85 bp, Homo sapiens
gactgggagcagaggaagccttgaggacctactcacagataggaattgaaggtctggaggcggctggtggaaatccaattccccg

SEQ ID NO: 475292 - DNA, 100 bp, Homo sapiens
ctcgaacccgtgccagaacgacgccacctgcctggaccagattggggagttccagtgcatctgcatgcccgctcaaagtgtggatctatcccgagggtac

SEQ ID NO: 475293 - DNA, 75 bp, Homo sapiens
caccaccgtccacgacagcctggccatcttcgggcccgtgctggacaaagatgccacttcaaatgaacaacaaga

SEQ ID NO: 475294 - DNA, 48 bp, Homo sapiens
gcaggacatcactttagatgatgtggagaacatgcagctgaccctgaa

SEQ ID NO: 475295 - DNA, 75 bp, Homo sapiens
ggagcagccgcgggcgcccgaggggccgagcgaggtaagaatgattgatgttggctgatattggagtgctcattc

SEQ ID NO: 475296 - DNA, 51 bp, Homo sapiens
gaccaggtttccagtgaaataagcagtttgaagagaacacatgaagaagag

SEQ ID NO: 475297 - DNA, 76 bp, Homo sapiens
tggagctgggccaggcgctggaggtctcacactctgaggatgactgtctagctttcaaagttcaccaatactttaa

SEQ ID NO: 475298 - DNA, 90 bp, Homo sapiens
cagctgcggagcagtgcgtcagagtttcagatcctgcagctcctgaaaggcaagctggtggtgggtcatgacctgaagcacgacttccag

SEQ ID NO: 475299 - DNA, 98 bp, Homo sapiens
cccgcactctctcgatgagtcggagaagtcccagtcactgctagttggattgaagcacacctgccagatgattctaaagacacatggaagaagagggg

SEQ ID NO: 475300 - DNA, 73 bp, Homo sapiens
cgcactgtgactccagccagagcccccccacggtgaataagtctgatgacacagcagaacatcttctggagtt

SEQ ID NO: 475301 - DNA, 83 bp, Homo sapiens
gttgtgtcttgttgcgggcaccgcagtcgccgtgaagatggcgtctaccagccggaatgtttacccttgcggaagttgcatca

SEQ ID NO: 475302 - DNA, 82 bp, Homo sapiens
caggaactacgtcccggggaaggtactgctataaccagaatttggtagaaaaaggatttacttgttggggccctcttgataa

SEQ ID NO: 475303 - DNA, 90 bp, Homo sapiens
tgctccggccgcggccagcggagccctgggctggggcaggagccggatgtccagcaaagaatcctgtgggaaaaaagagacatctcagag

SEQ ID NO: 475304 - DNA, 90 bp, Homo sapiens
ctacgcgacctccgtgggccacctcatagggaaatgtttcaacgtgcgcaagcgttgcggcggcgggcagaggactactacagatgcaaa

SEQ ID NO: 475305 - DNA, 82 bp, Homo sapiens
aggacatcctgcgcaaggccgtgcagaagcagtcctgcgttaactgcggccgggaggctatgagcgagtgcaccggctgcca

SEQ ID NO: 475306 - DNA, 94 bp, Homo sapiens
ggccggcccgcctccctggccggggcgcagttcggaggttcaggcaaaatacatatctcagtgcattgatgagatcaagcaggagctgaagcag

SEQ ID NO: 475307 - DNA, 75 bp, Homo sapiens
gtgcctcctggtgaagacaaggggggatatgtgatcaaagcatcagaaggttaatcactgttctgaagatggtgt

SEQ ID NO: 475308 - DNA, 80 bp, Homo sapiens
ctgcttgaatgtgctgatgacagggctgacattattatcggacacttatgtatcagacatgaaatgactccagtaaaccc

SEQ ID NO: 475309 - DNA, 100 bp, Homo sapiens
ttgaaaaccagctgcttcaaattggacttaagtctgaatttcggcagaatttaggctcttgtcaggatggtgaagctgttcatcggaaacctgccccggg

SEQ ID NO: 475310 - DNA, 88 bp, Homo sapiens
tcccagacgaagacagtccctggatcaccgacagcacagacagaatccctgctaccattaacccagtatccactccagttgcacttcc

SEQ ID NO: 475311 - DNA, 98 bp, Homo sapiens
gctgcggcacagctggtttgagcaactgaactggaaacaagatgcaggagaaatccagcggtcgcaccgcccattacaagttgacctccacggtgatg

SEQ ID NO: 475312 - DNA, 98 bp, Homo sapiens
gaaaacatgtactacagccagtcttctatgtttccacatcggtcagaaaaagatcctgtgcccctgtaggatgcagtgaagaccttggaagagacagc

SEQ ID NO: 475313 - DNA, 96 bp, Homo sapiens
tcagcggccggaggacatgcgggagagagaatgagccagagggacacgctggtgcatctgtttgccggagggagacaaggacggcagcaaggtgac

SEQ ID NO: 475314 - DNA, 100 bp, Homo sapiens
atttattctaaaacctggacaaagcaacctgatttgaccatggtcagaaaggcagataaaacgtcactgtgcagagccttttacagaatattggacttgc

SEQ ID NO: 475315 - DNA, 90 bp, Homo sapiens
gccgggctgagaggagcgtggctgtctcctctctccgccatgtgaaagatgtcatgtatatctgcccatttatgggagcagtgagtggaa

SEQ ID NO: 475316 - DNA, 100 bp, Homo sapiens
cacaaatgcaaatacttgtgcactgggagagtgagctaattgccatccaagattcccactctttgggttcttcaaaatctgccttgagagaagatgagac

SEQ ID NO: 475317 - DNA, 82 bp, Homo sapiens
gctcactccgcccggccccagccctagcgctggccgcgaccccggcgaccatggtgaatccgggcagcagctcgcagccgcc

SEQ ID NO: 475318 - DNA, 75 bp, Homo sapiens
aagaaaatgtggctgcagatatcccaatcacagctgtttgtgatatagggtctgcctcctttaaatatgatatgc

SEQ ID NO: 475319 - DNA, 100 bp, Homo sapiens
ttgggctcctgtctgcaggatttacgcgcacgttggaaccgaagagagctctgttgttgcaaaggtgacctgctgagaaaagtggtacaaatactgggaa

SEQ ID NO: 475320 - DNA, 87 bp, Homo sapiens
tggtcggcttggtgtggtgtgcggaggagctccaggcccgtcggcgcggagaaggaatttccacttcatccctagaagttgtgccag

SEQ ID NO: 475321 - DNA, 97 bp, Homo sapiens
cacatcattgactcctgggcccaactgtgaccgatttaaactgcacataccatatgctggagagacattaaagtagccccagtttgagggacagcgg

SEQ ID NO: 475322 - DNA, 100 bp, Homo sapiens
cgtgtttcctctttcggccgcgctggtgaacagagtttattaaccacttaacctctcagaactgaacaaagacaacattgttcctggaacgccctctttt

SEQ ID NO: 475323 - DNA, 97 bp, Homo sapiens
ccgacacaccagcagcaggaccagccccctgacctcacccaccaactgttcccatgggggtctgtctccaagtttgcagtgttgatgtgggtattta

SEQ ID NO: 475324 - DNA, 74 bp, Homo sapiens
gccggccagccgaagatggtggcggctactcctcctgattttgcaagaacgaggctcaaggatgtgagggacac

SEQ ID NO: 475325 - DNA, 100 bp, Homo sapiens
cctccgctcaaatcctaaagccccctgatgaaagatttggctctgatttgctgccaacttattgaattcaattcgtcataatctgtccctacacagcaag

SEQ ID NO: 475326 - DNA, 87 bp, Homo sapiens
ctttttctaactatttcaagatgatatttattcaccaaacaagatggcagaaacggtggacacaagcgaaatggtcaacggcgctac

SEQ ID NO: 475327 - DNA, 101 bp, Homo sapiens
gtgttccagtccccactgaccagtaggagcagcagggcgtcggcttgtgaggataatggggacgtttgccaggactgcattcagatggtgactgacatcca

SEQ ID NO: 475328 - DNA, 100 bp, Homo sapiens
tttgctgagcacatcagtgatgaatgcaagaggcgtttctataagaattggatctctgctgtctcttggatcccatctgcctagatggaagaggatccta

SEQ ID NO: 475329 - DNA, 90 bp, Homo sapiens
gaaagaattcaaggccaaggaagctgcggtcagtgctgacagttgcttgtgaacaaactgaagttctgctttttgaccctatatcttcaa

SEQ ID NO: 475330 - DNA, 100 bp, Homo sapiens
cctcgcccaggtccccttggacaaatgggtaaatttggaaggcaaagccagccctctgtcacttctacaaatggcctccccaagtggcctgtgtgtcttg

SEQ ID NO: 475331 - DNA, 75 bp, Homo sapiens
cggacagagacgtgaagcactgaatcaaagtgtgggatgctgtctcaggagatgaattgatgaccctggctcata

SEQ ID NO: 475332 - DNA, 82 bp, Homo sapiens
cagtgcgtgaggttggcgcggcgcagtcttcctgctttggcgttgtctctcagacaatgcagatcttcgtgaagactctgac

SEQ ID NO: 475333 - DNA, 75 bp, Homo sapiens
tccagcccgtggtccttctccatattcgagtctcagaccagtatccttcaggggttctcttactctgatttgcgg

SEQ ID NO: 475334 - DNA, 90 bp, Homo sapiens
tgtgatttcagtggaataaatggcgtccaaagtcacagatgctatagtctggtatcaaaagaagagatgaggactcagtgtgtcgtcgtg

SEQ ID NO: 475335 - DNA, 83 bp, Homo sapiens
ggaagtgcagctgcctcagttcttagcgcagagaaagcttcttgctatctacctccaccatgatgaaagtgtgttaaccaacg

SEQ ID NO: 475336 - DNA, 100 bp, Homo sapiens
gcaagtcctaagcgtgggcaaaagagggaagaaggatggaaagaagttgtaagaaggttttgcacactagggaccaagaagccctcggggacactgctga

SEQ ID NO: 475337 - DNA, 50 bp, Homo sapiens
cggagaggccgcaggagtcatttcgagcatactcatagctatgtgaaaat

SEQ ID NO: 475338 - DNA, 100 bp, Homo sapiens
tttgtcttgatgggctacagttagagtctgaagttgttaccaatggtgaaactacatgttcagaaaccagaataaaagctacttggccgtaaggctaaaa

SEQ ID NO: 475339 - DNA, 90 bp, Homo sapiens
gatggatgaagacggcggcggcgagggtggtggcgagctgtaggtaaaacttgcctactgatcagttacacaaccaatgcatttcctgga

SEQ ID NO: 475340 - DNA, 100 bp, Homo sapiens
gaatcaaagtttaaggaaacaggtgtaattaccccagaagagcttcctgcctgacacagctcacttcaagaagtgcacaatgtcagaacgtggaattaag

SEQ ID NO: 475341 - DNA, 75 bp, Homo sapiens
cactgtctgttccggagcatcccccagccagatggagaagtctatccagaagttaaaggagagattgctcgtaaa

SEQ ID NO: 475342 - DNA, 90 bp, Homo sapiens
gctcttcgacgtgcgctctcgcgaggaggcggcagctgggaccatcccaggggcgctcaacatcccgggcatcctgacatcgaggcccag

SEQ ID NO: 475343 - DNA, 83 bp, Homo sapiens
agctcaaatggcaagacgaactcaaccagcacaacagacctcctgccccccgaggtctgcagtctcctgaacccagcagccat

SEQ ID NO: 475344 - DNA, 100 bp, Homo sapiens
cgctgatggagctcaagaccagggccctgcagctggaagaggagctgttccaggcatggatgagttgatggaggtgtctttctcgcccctggcggccaca

SEQ ID NO: 475345 - DNA, 75 bp, Homo sapiens
cgccggcgagatgcctttgttcaccgccaaccccttcgagcaagacgtggcttaaagaaagtggttattgtacag

SEQ ID NO: 475346 - DNA, 90 bp, Homo sapiens
tatttacacctggccagagaagacacgaataatctgttcagcgttctcccggggaagtacttggaagagatcgccacacagatgcgcacg

SEQ ID NO: 475347 - DNA, 82 bp, Homo sapiens
agcggccgagcgggcggcttcctggcctgggcgctccggtggcggcggagcctcggagaagtcaatgtgcccatcgctggac

SEQ ID NO: 475348 - DNA, 99 bp, Homo sapiens
tgccttatcaccttcttgcttgcagtgattcgcctttgccagtctcatctcgtgtctgctttgttaagttccatgatccagactcagcagttgtggcac

SEQ ID NO: 475349 - DNA, 100 bp, Homo sapiens
ctctgttggaaccggcggcgttgcgtctaaaaaggcgaaagccttgaggttgaaggtgggacgagcctaatgaagtggaaaacaatgaagagtcgttata

SEQ ID NO: 475350 - DNA, 100 bp, Homo sapiens
aaatccgagctgcggatgctcctcagcgtgatggaaggggagctggaggccagagaccttgtcatcgaggccctgcgggactcagaattcatgattgaag

SEQ ID NO: 475351 - DNA, 90 bp, Homo sapiens
tgaagtggcaggaggaggaggaggggctccggctggtctgtggtgaggcaattgctggctactttgatatatattttgagaagaattgcc

SEQ ID NO: 475352 - DNA, 100 bp, Homo sapiens
tggtatatttgcagccagtactctatatgaacaatccgtctggatcacggatgtaggaagtggccttgtgaaaaagggtaaagaacaaaacacacagcga

SEQ ID NO: 475353 - DNA, 75 bp, Homo sapiens
ccctggagcctcagttggaagcagccgatccagcctgcggagcctgtggggcagtggacagaggactgcagaaaa

SEQ ID NO: 475354 - DNA, 75 bp, Homo sapiens
ctggattgctgacggcagccctctcagactattgggaagaagttacctgcaactacagcaactccagactcatca

SEQ ID NO: 475355 - DNA, 100 bp, Homo sapiens
ggcagagaattctggctccctgtaaggctggcttagcaggagctccagcccgtgctgtatcagctgtaaagaatatgaatcttcctgagatcccaagaaa

SEQ ID NO: 475356 - DNA, 51 bp, Homo sapiens
aaaaatgccatacctcaaacgggaaaggaaagtgatgaccccatggcttat

SEQ ID NO: 475357 - DNA, 98 bp, Homo sapiens
aaatacccctttgaattaattatggctgtatggtttaggaatgatttattacaagcaagaaaaattcagccttgcagaaatgcatttccaaaaagcgc

SEQ ID NO: 475358 - DNA, 51 bp, Homo sapiens
tgaaaacatggggattggaattcggagcccagtttcctccaattgcagcac

SEQ ID NO: 475359 - DNA, 105 bp, Homo sapiens
cgccgaggcgcttctgcatctgtgggccgagggttccccactgaaggacttggtccagctgtctggcagggaggagagacagaagctctggcccgcctggataag

SEQ ID NO: 475360 - DNA, 113 bp, Homo sapiens
aaaaagatctaaagtcacccggcggccaaaggccagtgactaccaacgtttggaccagaaggtagcaaattatggagttggaggacagtatgaaccccattttgactttgcac

SEQ ID NO: 475361 - DNA, 100 bp, Homo sapiens
gcgcgcagcgcggggagctgccagaatagactgccatcggataaagagtggtccctagcttctatttttccaagtaaataagtagaacatgttcttggga

SEQ ID NO: 475362 - DNA, 87 bp, Homo sapiens
gcaattgttgccattgaaaaccctgctgatgtcagtgttatatcctccaggaatactggccagggtttttaatgaccacaacaagca

SEQ ID NO: 475363 - DNA, 100 bp, Homo sapiens
cacacctggagcaacaacctggcggtgctcgagtgcctgcaggatgtgagggagctatatgttctcctttcagccaagacctttcaccagtgcaggggat

SEQ ID NO: 475364 - DNA, 74 bp, Homo sapiens
gggtgatgactggagggtcagcctggaagaccacagcagccaaggttggatggcaagcatgtggtgtttggcaa

SEQ ID NO: 475365 - DNA, 100 bp, Homo sapiens
tttaaacatcctgatgaatggagagcatttttgtttggctatgccaccacagtcatccccagggtctatacatactatgtttcaactgtattatttgcca

SEQ ID NO: 475366 - DNA, 75 bp, Homo sapiens
tcgtgctgaataagaagaacaaactgacgcagagtaagggcccccctggtccccctggccctcctggacctccag

SEQ ID NO: 475367 - DNA, 100 bp, Homo sapiens
aagccttaagacacccgtggcttcagttgaagattcctgtctctggatccaaatcagagggccttctctacgtccactcatccagaggtggcccctttca

SEQ ID NO: 475368 - DNA, 71 bp, Homo sapiens
ctcttggagccagaagctacatgacccctaaacgcctggagacgatgccaaagctgcagggcttcgagttc

SEQ ID NO: 475369 - DNA, 99 bp, Homo sapiens
gcgtggggcctcgctaaggaattcccggcccctcagggccacggctttagcggtgtcttttgcggcaagaaaattggatgtatattttgaatatgaaga

SEQ ID NO: 475370 - DNA, 82 bp, Homo sapiens
ggaggagaagtttgaggacaggtccccagccttatcatcctcatcgccctcaacgtcctgctcttctaccgcctctggtccc

SEQ ID NO: 475371 - DNA, 90 bp, Homo sapiens
ttgtttgaagtgccctcgctcaaactccttgcggcccactgcattgtgggacaccaacagcaagctataccagagaatcagatagcaagc

SEQ ID NO: 475372 - DNA, 120 bp, Homo sapiens
tatcgggatgacacaggaagagctggtgtccaacctggggacgattgccagatcggggtcaaaggacaataacgtcatgtttaatacagagcctccagctggggcccgggcagtccctgg

SEQ ID NO: 475373 - DNA, 80 bp, Homo sapiens
gacccggcctcaccatgttggtgctgtttgaaacgtctgtgggttacgccatctttaagactgctgcagtaagaatgtct

SEQ ID NO: 475374 - DNA, 90 bp, Homo sapiens
agaaaagagccctacaatgtgaagatacataagatcgtagccagacccccagtattgactcggagacaaaaagaggccaagaccaagagt

SEQ ID NO: 475375 - DNA, 75 bp, Homo sapiens
ccaactagtattatgagaggagtcaatcagaggtgtcccgacccaggctaagcttgagcatggctgagcaggagc

SEQ ID NO: 475376 - DNA, 80 bp, Homo sapiens
atgcttaaaaatcaccagttactttaatgagttccatctgtcttgcttgctccaagtcatctaatggctcttctgacgct

SEQ ID NO: 475377 - DNA, 82 bp, Homo sapiens
ctcaagaccagggccctgcagctggaagaggagctgttccagacctcacgtggtgggcagtggcggcaacgacaaagaaaag

SEQ ID NO: 475378 - DNA, 140 bp, Homo sapiens
ccgagatgtctcgctccgtggccttagctgtgctcgcgctactctctctttctggcctggaggctatccagcataacgaaggaggcccaacttcattcaataaggagcctgacggatttatcccagacggtagaacaaaa

SEQ ID NO: 475379 - DNA, 100 bp, Homo sapiens
atgatctctaccgatgggaagtccttattattggccctccagatacactttagggcagatttattgaaattaactagagatgatgtgatccaaatctgtg

SEQ ID NO: 475380 - DNA, 98 bp, Homo sapiens
tttggatgtagcaaggaagaaattgttcagttcttctcaggtctcctcctacctggatctcattacttgggccgttttcaggatcgtttaatgtggat

SEQ ID NO: 475381 - DNA, 100 bp, Homo sapiens
caagttcagctcttccttggaacatcacagtacattttaagcacaaacacagagcagtctaaagcaaccgagcactgagaaaaatgaactctgcccaaag

SEQ ID NO: 475382 - DNA, 128 bp, Homo sapiens
cattcccccaggagatggcatgccagtaggtcctgtaccaccagggttctttcagggaacgggtatggcaatccccgaaactcaccaggtctgctggtctcacctggtaacttgaacaagaatatgca

SEQ ID NO: 475383 - DNA, 109 bp, Homo sapiens
aaacaaagggtccctcaaggccccctttggacgcaaagatctttcgaggccaggttggatggcaagcatgtggtgtttggcaaagtgaaagaaggcatgaatattgtgg

SEQ ID NO: 475384 - DNA, 100 bp, Homo sapiens
tcctcgatcgaggacgacttcaactatggcagcagcgtggcctccgccaccgtgcacatccgaatggacgttgagaaagaagggccttaatggctgtgac

SEQ ID NO: 475385 - DNA, 89 bp, Homo sapiens
ggagagaaccagcacttctgggacgcacagagaccgtgaagattccaagttcaggagaactcgaccgactggatacacgtctgtttaac

SEQ ID NO: 475386 - DNA, 75 bp, Homo sapiens
ccggggacccttccgtatctgcctaggcattttgctgtctcctcctaatacggaccctaaagtaaattggttgaa

SEQ ID NO: 475387 - DNA, 98 bp, Homo sapiens
cgatatcacagaacacaagattaatcaatgtcaactgacaggtgctggagaatctggtaaaagcaccattgtgaagcagatgaggatcctgcatgtta

SEQ ID NO: 475388 - DNA, 98 bp, Homo sapiens
tacacactgctgaaccaggccccagacatgctgcatagcgatcattcttcggaacatagctccgcacactgtggtggattccatcatgacagcactgt

SEQ ID NO: 475389 - DNA, 50 bp, Homo sapiens
aactctttccagcttgtgtctgtggaataccagcaatggtggattttgct

SEQ ID NO: 475390 - DNA, 99 bp, Homo sapiens
ggatctgtggtcgcggctggggacgtgcgcccgcgccaccatcttcggctgaaggtcaaaatgcagatcttcgtgaaaacccttaccggcaagaccatc

SEQ ID NO: 475391 - DNA, 100 bp, Homo sapiens
caggacgactcggtggaaacagtcacgtccatagaacagaacgtaggcgttcccggtccacatcccgggagagagaacgcaggcgccgagaaaggtccag

SEQ ID NO: 475392 - DNA, 100 bp, Homo sapiens
ttttacttcatcctccaaggagttcaatcacttggcgtgacttcactacttttaagcaaaagaggatcatagacggtatttctatgtaaacgaacagtcg

SEQ ID NO: 475393 - DNA, 100 bp, Homo sapiens
cccgtgcctgtcttcagatcttcacagcacagttcctgggaaggtggagccaccagcctctccctggttagagccacagctgaaacaactacaaacaaaa

SEQ ID NO: 475394 - DNA, 83 bp, Homo sapiens
caaaaacacagactttttcattggcaagccaactctgagagaggtgaagagatggcgtttgtgaagagtggctggttgctgcg

SEQ ID NO: 475395 - DNA, 90 bp, Homo sapiens
cggaggcaagtttggtgtccagatggacagagttgatcagcttcggggagttttgcctggctcacctgttactgaagaggaaccctgtca

SEQ ID NO: 475396 - DNA, 113 bp, Homo sapiens
tccttgtggagccggagctgggcgcggattcgccgaggcaccgaggcactcagaggagaaaccaaggtgtatgttggtaacctgggaactggcgctggcaaaggagagttaga

SEQ ID NO: 475397 - DNA, 98 bp, Homo sapiens
tgtgtgtccagaacgtgccatggagacgcttaacggccgccagatcccacccttggacccccatgaaaatggaaacaatggaacaatcaaagttgaga

SEQ ID NO: 475398 - DNA, 101 bp, Homo sapiens
tggaagcaggggatgtggtccaaggaagaaattgatattttgatgaacaatattgaacgctatcttaagagaatggatcttggagaatgtctgaaagtcca

SEQ ID NO: 475399 - DNA, 100 bp, Homo sapiens
cttcgcttcacggcgccgagccgcggtccgagcatagaatgtcaagctaaccaggcgtccgctacttcagaagagtgtactgtcgcatggggagtctgta

SEQ ID NO: 475400 - DNA, 99 bp, Homo sapiens
tggaagcattgcattgattgtcttatatttcaagttaaggtccaaaaaaactccagctgtgaaagcaacataaatgaggtcctcaaagagggcagcggg

SEQ ID NO: 475401 - DNA, 100 bp, Homo sapiens
gcctagaatgcatcagtgcccttgtggcgaatggggctcacgtcgagtgacttaagagattaaaattaatttggttgctgttggttctgaacaaataatg

SEQ ID NO: 475402 - DNA, 148 bp, Homo sapiens
cggcagccgtgcgacaggatttggcccagctcatgaattcgagcggctctcataaagatctggctggcaagctagtgtgagaaacaccaacagcaggcccatctcagatcttcactatggcaacttatgcaagaaactgttgaattag

SEQ ID NO: 475403 - DNA, 74 bp, Homo sapiens
cctcgtcccaagagaatcatttgtcctcgggagcacactttcatattccccatcacattggctgaagtcgtcct

SEQ ID NO: 475404 - DNA, 49 bp, Homo sapiens
gtggttgctgaccagttgaaagacagaatgttgctgcgggatgtaaaag

SEQ ID NO: 475405 - DNA, 82 bp, Homo sapiens
ccttctggattacaggccaaattagcaagactggtaatgaggaacaaacacggattaatctgaattgtactcagaaggcttt

SEQ ID NO: 475406 - DNA, 50 bp, Homo sapiens
ctcctgcctcctaatagctttgaggaaatgattctggggaccattctgac

SEQ ID NO: 475407 - DNA, 102 bp, Homo sapiens
agaattggtatttcaaatgaccaccatgttgcaaaaggattcgataccagcatcttgccaatttgcaaggactcacttggctggatgtttaacagacttgat

SEQ ID NO: 475408 - DNA, 96 bp, Homo sapiens
atgtcggatagtgggaaacttatctctccccctgtccctccaagacccacacagactgagacgagttgtactgctgtcacaggaaatggacgctgg

SEQ ID NO: 475409 - DNA, 78 bp, Homo sapiens
tgacgatcctgtgtacccggagctatccgcacctccggagagcaatcaaagccttagatgggagatctcaagtttcaa

SEQ ID NO: 475410 - DNA, 82 bp, Homo sapiens
tgcacgtctcgcggatcatgctgtaatctgtaagtcagatgctccaacaggggatgttcttcttgatgaagctctgaagcat

SEQ ID NO: 475411 - DNA, 82 bp, Homo sapiens
aggactgcgccgcgtcttcctcaaggtgtggatgtggaagcagccaagcgggcagaagaggaattgctccttcatgacacga

SEQ ID NO: 475412 - DNA, 76 bp, Homo sapiens
gcaattgatcccaagttgtcgacgaccgacagggtggtgaaagggtttggattcaggatttgttcctagtgtccaa

SEQ ID NO: 475413 - DNA, 98 bp, Homo sapiens
agcccggcgctttccccgcaagatggacggtttcgccggcagtctcggtttttcgttggaatatacgttgcacatttatggcgattctgagtgtgagg

SEQ ID NO: 475414 - DNA, 75 bp, Homo sapiens
taaggagcgattaggcatgtcagctgatccagataatgaggatgcaacagggaaaagttaaccattggatgccgc

SEQ ID NO: 475415 - DNA, 100 bp, Homo sapiens
tagactttttacttctgtgatggcagtacacaggaagaagaagaattttcagttcttgccagctgcctgggacttctgccaacgttttaccaaacagaac

SEQ ID NO: 475416 - DNA, 50 bp, Homo sapiens
ggtatctacggcctggacttctatgtggagcaaccagggttttatgcaca

SEQ ID NO: 475417 - DNA, 83 bp, Homo sapiens
gcacctagtcttccttggcacatcgtgagtgctcggaattttctacttctggtcatgcttacactgatacagggaaagcatca

SEQ ID NO: 475418 - DNA, 98 bp, Homo sapiens
gaggaagcaggcggagaagagacaagggagttctgggaaatcgttcattcatttacagatgaacagaaaagactcttcttgcagtttacaacgggcac

SEQ ID NO: 475419 - DNA, 71 bp, Homo sapiens
tggcctcagctgggaggaatattgctgcccggctgcttcttggacacttaatgattgttggcaagaaatgt

SEQ ID NO: 475420 - DNA, 100 bp, Homo sapiens
cagaacagttaatcctcaatttaagcctgatctaacccctagaaacaggactcgctgattcttgagaagagtcaaaactggagctctcaaaaaatggacc

SEQ ID NO: 475421 - DNA, 87 bp, Homo sapiens
gtggtctctgcacctcctttctccttcgttcagaaaaacctggtctatggcacaactaaaaaggtttgccgcagacccaaatacgtg

SEQ ID NO: 475422 - DNA, 78 bp, Homo sapiens
atcagatcaaccaccaaagtgggaaacattgaaatcaaggtgagtacccagaacatgaagatgggtgggctgccgcgt

SEQ ID NO: 475423 - DNA, 83 bp, Homo sapiens
attccaggaggaagtactggcgaagtgctccatgccatcactggtgcaagctatatttaacggagatcctgatgaagttcgag

SEQ ID NO: 475424 - DNA, 90 bp, Homo sapiens
tcggacagccagacggggttagcggagcaatgcgcaggaataaggaagcgacctgcaaccgacggctgtgagctctccggccacacccgc

SEQ ID NO: 475425 - DNA, 100 bp, Homo sapiens
ccatgatcgtggaggagatgaaggcagtggacacacagcatggagaaatccttcgcaatgtcaccatcctacgaggtgttggtaaatcatgcttattgct

SEQ ID NO: 475426 - DNA, 98 bp, Homo sapiens
gggagcgcgatgtggagcgcttctttaagggctacgggaagatcctggaggtggatctgaagaacgggtcatcatcagatttgaaatatttaaagtgg

SEQ ID NO: 475427 - DNA, 83 bp, Homo sapiens
gtgtttgaccgagacataaactgcagaagagcagcctctggtggcccagttgaaatccttcccttcctctaccttggaagtgc

SEQ ID NO: 475428 - DNA, 100 bp, Homo sapiens
gtgcaggggttggagtaaagagtgagccacagccaataataatcgcatgctacaagtgaaaactgatgagaaactgaatgtgtctgatgagaatacagca

SEQ ID NO: 475429 - DNA, 83 bp, Homo sapiens
cgaccacagccagagcctcagcaggagcctgttctcatcaccatggcaacaggaccctttgtggaggagttgtttgaagtgac

SEQ ID NO: 475430 - DNA, 96 bp, Homo sapiens
aaggcggtgccacagagcttggagctggccaaggcctaatgagtcagattctgatgatctggatgatgaagactttgaatgtttagatagtgatga

SEQ ID NO: 475431 - DNA, 98 bp, Homo sapiens
gaagcaacccgatcccggaggcggcggcggcggggggagccggagccgcctgggatgttcatctgcgggccaggcatcgacatccgcaacgactatca

SEQ ID NO: 475432 - DNA, 75 bp, Homo sapiens
atctacaaccttcgatctcctgacgagttgacgagattagagagatggttgacaatgatttaggttttcaacagg

SEQ ID NO: 475433 - DNA, 48 bp, Homo sapiens
ggagcccagagccacgtcaaagctaaagacctaatagtcacaccagct

SEQ ID NO: 475434 - DNA, 100 bp, Homo sapiens
aactgagtggaatggcctctcaatattgcctggacgattgcttagaggagtatttcctgaactgtgtgggtagattgcttccaagtatgatcatcaggca

SEQ ID NO: 475435 - DNA, 97 bp, Homo sapiens
gcgagctgagtggttgtgtggtcgcgtctcggaaaccggtagcgcttgcagcatggaacaagatcactcaaggtgaaggataatctactaataccag

SEQ ID NO: 475436 - DNA, 98 bp, Homo sapiens
ggtaaaaggagtctgctttaaagcgcataagaatgtcctggcagcattcagccagtattttaggacacattggcgtgagacctgggagtacgttgtgc

SEQ ID NO: 475437 - DNA, 75 bp, Homo sapiens
gggaccttctctcccaatgggaccctggaggaatgtcagcaccagaccaagctcaggccacagggtcaccacata

SEQ ID NO: 475438 - DNA, 83 bp, Homo sapiens
gagaagtgaggagcctctccgcccggcagccaccccatctgggaagtttactaactgtggaatctccagaattacaagtccca

SEQ ID NO: 475439 - DNA, 90 bp, Homo sapiens
tgctaggggctgaattctgactcagccatttactaactgtgtgaccttaggatacaatgtctctttgctatatgaccttgaaaatcttcc

SEQ ID NO: 475440 - DNA, 97 bp, Homo sapiens
gcacagctaagatgcccggacatcctggaagctgggaaatggctgaactccagtgcacccagttagacttggagcggaaactcaagttgaatgaaaa

SEQ ID NO: 475441 - DNA, 108 bp, Homo sapiens
aacgaagtcgtggaggtggcgaaacgaggaggagataacgcggccttgggctctgctttgcagttctcctggagttcgctgaggagcagctgcgagccgaccatgtct

SEQ ID NO: 475442 - DNA, 82 bp, Homo sapiens
aggcgtgggcgacccggtgtgtggcgcgcccagagccccgcgtttcagccctagggaaggttgtggcagcactgcctgaagg

SEQ ID NO: 475443 - DNA, 100 bp, Homo sapiens
gggtgatacggcgtcttgccaccgggcctgtcagttgacctaccccttgcacacctaccctaaggttggctttgatatgagtaaagaagctgcaagaaaa

SEQ ID NO: 475444 - DNA, 73 bp, Homo sapiens
tggctccacgcatttcccttcgtggtgagggtcccgatgtcctggtgtacagcttggactttggtgggcatct

SEQ ID NO: 475445 - DNA, 141 bp, Homo sapiens
aaacttgaattgcactccagtgaggaagctgacaaaaaccaaactcttggagaagctgttaaggattcctacaggaagcaagtagtaattgatggagaaacctgtctcttggatattctcgacacagcaggtcaagaggag

SEQ ID NO: 475446 - DNA, 114 bp, Homo sapiens
cagtctgttcggcctgccatgtggaaaatgatgcttaatatcgatgttgttgacctcctgtactggagagacattaagaagactggagtggtgtttggtgccagcctattcctg

SEQ ID NO: 475447 - DNA, 83 bp, Homo sapiens
caaagatttactttcccatccgtgactcctggaatgcaggaattcctcctgatcagcagagactgatctttgctggcaagcag

SEQ ID NO: 475448 - DNA, 78 bp, Homo sapiens
gcggacctccagtggccggctccggaggcttggtgactccagtggcccagtttctccttggaccaagatgactgatgg

SEQ ID NO: 475449 - DNA, 74 bp, Homo sapiens
aagagacccacagatttggatgtagatacgttagccagtttacttaaatgtgacagtgatgataacatgggtgc

SEQ ID NO: 475450 - DNA, 100 bp, Homo sapiens
ggaactcgaccggatccaacccagttagttacttcctgtctagagttgtagcttccacctgatgaggtggaggaccatcctgctacagtattgctttctc

SEQ ID NO: 475451 - DNA, 100 bp, Homo sapiens
caccacaacctccacctcccgggttcaagtgattctcctgcctcagcctccccagtagctgggattacaggtttgatgacaaatacaccttgaagctgac

SEQ ID NO: 475452 - DNA, 90 bp, Homo sapiens
cagctactaacagcctgggtgagatcaacactagtgccaagctctcagtgctcgaagatcgtctggtagaatcaacttccttgagaaaag

SEQ ID NO: 475453 - DNA, 130 bp, Homo sapiens
gtctgtcgcccgaggcggccgccgctgcaccttcaccgcgtacccgggacccgcccgcccgcgggagcaaatccagtttgctgatgacatgcaggagttcaccaaattccccaccaaaactggccgaaga

SEQ ID NO: 475454 - DNA, 138 bp, Homo sapiens
ctggggcaacctggacgagctggggcaacctgatctcggctgtcggagtgggtgtcctcaagaaagacaccatcatccgagcagtattgatttttgcagaaggaatttttacaggtgaaagccacgtggtacatccca

SEQ ID NO: 475455 - DNA, 78 bp, Homo sapiens
tgatactcacccttctccatcacattcctccacagtaaaggtggcggcgactttgaataaccttgcagtcctttatgg

SEQ ID NO: 475456 - DNA, 82 bp, Homo sapiens
ctcagggaagctggggctggtgcaactttcagaagtggtcccaggttctgcggggagtgtctccagccctgcctgcaggtgc

SEQ ID NO: 475457 - DNA, 101 bp, Homo sapiens
ctttatccctcttggtctgtggaggtagttgctgagtggcactgggtaaaagccccttcacagatgtagtcactacaaatcttaaattgcgaaatccatcg

SEQ ID NO: 475458 - DNA, 80 bp, Homo sapiens
atggaagtgaatccccctaaacaggagcacctgctggcgctaaaagcaattcccttgactgaagacgttctcataacatt

SEQ ID NO: 475459 - DNA, 90 bp, Homo sapiens
ggcgccgcggggcagccgccgctcctccggggccgagacgcatccagagctttcgtgaccggggactgttctgaagcaggcctcgtggat

SEQ ID NO: 475460 - DNA, 90 bp, Homo sapiens
cggcggagcgcgagagcttcgagcggactcaggtttgatttcctctgcatgcctgtcttccatccgcgtttcaagagggagttcattcag

SEQ ID NO: 475461 - DNA, 100 bp, Homo sapiens
tggcggctgctggtagttccatgctgtctgttcagacttcagcttggttacaacaaacacctcttcgtgcacattgggcatgccaaccattcttacagtg

SEQ ID NO: 475462 - DNA, 95 bp, Homo sapiens
cggcgagccaaagaggagccggccgcgcgggccgggaggggacggccgccggagccgcgaggccaaatcagcggtttgagtgctacgtttgcaga

SEQ ID NO: 475463 - DNA, 100 bp, Homo sapiens
ctccgggcccaacagcaacaggtctcaattatggataatgtgcttatggtgtaaccaggtttgagggaggcatatctcatgtgactgggagaagccaatc

SEQ ID NO: 475464 - DNA, 100 bp, Homo sapiens
tgagaagcaagaaggccctggacacagcaatatctctgggctttcacagcacgacttcagcctggagaggacggcactcttctgggtggaggccgccggc

SEQ ID NO: 475465 - DNA, 100 bp, Homo sapiens
aagagggatccttcacccgtgtctggggacaccgtggtgtttaaggatggccagtactggatccgaggccggacctcagtggacatcatcaagactggag

SEQ ID NO: 475466 - DNA, 101 bp, Homo sapiens
cgtcgaactgtgaattctacccgggaaactcctcccaaaagcaagcttgctgaaggggaggaagaaaagccagctatttcccaatgaagaccaaggcacgg

SEQ ID NO: 475467 - DNA, 90 bp, Homo sapiens
tccgaagcccgaggcagaggaaccggctcccagaccaagatcactccatggatgaaatgacagctgtggtgaaaattgaaaaaggagttg

SEQ ID NO: 475468 - DNA, 74 bp, Homo sapiens
acgtgggaatcccctgagctgcgccatggccagagccaagactaaggggctgcagagcggggtggacattggcg

SEQ ID NO: 475469 - DNA, 101 bp, Homo sapiens
gataactgggcccctgcgctcaggaggccttcaccctctgctctgggatggccaggccatgttatgggatctcaacgaaggcaaacacctttacacgctag

SEQ ID NO: 475470 - DNA, 83 bp, Homo sapiens
agaaggctgctattgaaagagagtatgcacaggttcgagaacttgtcttggacaattgcaaatcaaatgatggaaaaattgag

SEQ ID NO: 475471 - DNA, 129 bp, Homo sapiens
gccgagatgtctcgctccgtggccttagctgtgctcgcgctactctctctttctggcctggaggctatccagcgttgaaatcacaaagattagacacctttttagataggtgttcttcagcaccactga

SEQ ID NO: 475472 - DNA, 96 bp, Homo sapiens
ctgaaccacatgggctggccagagcacacaccaggcactggttattctggagcaaacccagacatatttgttatttattgatctccacctcatccc

SEQ ID NO: 475473 - DNA, 75 bp, Homo sapiens
ccttctggatagagttcaagagaccattgaccaggttggaatgggactgctgagatgtcctctattcttgaagag

SEQ ID NO: 475474 - DNA, 100 bp, Homo sapiens
ggtaaaatctttaagccttggaaatggaggaaaaagaagaccagcgacaaatttagagaaacctcggcaggcctttgtggaggcccagaataagattact

SEQ ID NO: 475475 - DNA, 100 bp, Homo sapiens
gttcaccaccgtggtggccgacacgggcgacttccacgggggcagtacccaaaggaaacgctacgaaagaatacatggagagcttgcagctgaagcccgg

SEQ ID NO: 475476 - DNA, 98 bp, Homo sapiens
gcagagtggaccaccccatgaacctcgaataatgcatatactgccatgtcagattcctacttacccagttactacagtccctccattggcttctccta

SEQ ID NO: 475477 - DNA, 75 bp, Homo sapiens
catccaggcccacatcgacagggacgtcctcattgtcctcggtactccaaagattcaggtttactcacgtcatcc

SEQ ID NO: 475478 - DNA, 98 bp, Homo sapiens
ctgagtttgagccctatgagcagtggaacctaggattcatgcccaagcacaaaacaacccatttaaagaagatgctcggccttaaaggaaatggcggt

SEQ ID NO: 475479 - DNA, 100 bp, Homo sapiens
aaacctttgaccatgaagagaaatgagatgatagccaaaccctcagtaacaaatgtggcaattattttggatctatcacctgtcatcataactggcttct

SEQ ID NO: 475480 - DNA, 75 bp, Homo sapiens
gctcttcggcctgcacgggaccatcacgcagatccgcatcctcggaaagaccacagcaagattctttcattcgtc

SEQ ID NO: 475481 - DNA, 100 bp, Homo sapiens
cggaccggcgtccccggcgcgaagaggctggactcggattcgttgcctgagccgccaccggcacggccaggccagcatggtggaccacttacttccagtg

SEQ ID NO: 475482 - DNA, 100 bp, Homo sapiens
caatgcctgaggctgacttcagctcctggacacccttagaattcctagttgagccagcattgaaacaggggaccgtgtctggaggatgcctctcttcgaa

SEQ ID NO: 475483 - DNA, 101 bp, Homo sapiens
acgtgtgtaccccaagtgcacatggctgaccacccctaaaagcacctggccccgctacagcaaaccaggccccccggacagaccacccagccctgtacagg

SEQ ID NO: 475484 - DNA, 100 bp, Homo sapiens
cggagatcatcacgtttgccgagtcaggtctctaattaacagaagatggcaaagcccagccacagcagctatgtccttcagcagctaaacaaccaaagag

SEQ ID NO: 475485 - DNA, 75 bp, Homo sapiens
agaaacactctccttctgccacatttgttttgagctaaatattgagggccaaacttccagatctgcaaccatttc

SEQ ID NO: 475486 - DNA, 74 bp, Homo sapiens
agcaaccaattatcagtttacaacctgcacccactaaaggctgatctactggctgacctttgccgtgggccgct

SEQ ID NO: 475487 - DNA, 96 bp, Homo sapiens
tgttccttcagccaaagaaacaagccgtggaataggtgtatcaagtaatggtgcaaagcctgaagtttttagaacttcagccataaaaatgggcag

SEQ ID NO: 475488 - DNA, 109 bp, Homo sapiens
gcgcggaggccgcgacggacgcaagatggcgacggcgaccatagctctcatgagcgggatcgtgtgcagaagaaaaccttcaccaagtgggtcaacaagcacctcatca

SEQ ID NO: 475489 - DNA, 75 bp, Homo sapiens
ggacctaccacttgaaaccattagtgagctgtctattatcctcccagtccacaacgctgaaccgtggctggacga

SEQ ID NO: 475490 - DNA, 76 bp, Homo sapiens
ctggattgctgcaaggctgagggacgagaacgaggatagtggccaaagcctccaagaacctcatgtccacgcaaag

SEQ ID NO: 475491 - DNA, 82 bp, Homo sapiens
tcacgccatccagccaggacatctgcagctctgaaatcacatgaagctgtggatggagagtcacctgatagtcccagaaacc

SEQ ID NO: 475492 - DNA, 98 bp, Homo sapiens
ttgagaacctagaaatcatacgcggcaggaccaagcaacagtgccacatctgccccattcctcatcttcatcttccctgccatcttctacttccgaat

SEQ ID NO: 475493 - DNA, 75 bp, Homo sapiens
ttcatcggggtcctggacatctatgggttccagcaacagatagaaatgctttaagttcactctggggaaagctgg

SEQ ID NO: 475494 - DNA, 100 bp, Homo sapiens
tctcggggaccctggccctggccgagacctgggcgggagacaagatccctggctctgccgtgctaatcttcaacgtccatgtcattgacttccacaaccc

SEQ ID NO: 475495 - DNA, 75 bp, Homo sapiens
caaatttctcagaggagtagaaaaggtgcggtggctactaaagttcgaaggcacgatatgcgtgtccatccttac

SEQ ID NO: 475496 - DNA, 96 bp, Homo sapiens
tttgtgtcctgagatcaaatggcacttcattggccacctacagaaacaaaatgtcaacaaattgatgggacttcctaaagccagtccaggagcaca

SEQ ID NO: 475497 - DNA, 74 bp, Homo sapiens
tgaggattacagtgaaactgaccattcagaacagacaggcccagatcaatacagcaaagcggctcctggagaag

SEQ ID NO: 475498 - DNA, 82 bp, Homo sapiens
gtaggcaggcacatctttgccaaggtccttatgtcgtcagaagatcgagaagctcaggaggatgaattgctggccctggcaa

SEQ ID NO: 475499 - DNA, 75 bp, Homo sapiens
tgtactcgctgagtgtggaccctaacacctggcagactctgctccatgagagctttgtgtccctggtgatgttgg

SEQ ID NO: 475500 - DNA, 100 bp, Homo sapiens
tccctttgatttgaatcataatcttggagctggattatcaaggaaaagtacctaaaacagatccaggacctgcccccaactggcctccctgagatgaacc

SEQ ID NO: 475501 - DNA, 90 bp, Homo sapiens
gtacttgaagattaaaggccttactgaggccaccaccacctatcatgacagatggtgaagatgcggattacactcattttacaaaccagc

SEQ ID NO: 475502 - DNA, 90 bp, Homo sapiens
tacaatttctcttttgactactatgcattcctgattctaataatgatctcctacattccaaatattttccagcagatgccaccgctgaga

SEQ ID NO: 475503 - DNA, 71 bp, Homo sapiens
gctctccatcctgctcttcttccacaggtttggctccagcagctgctgttgccaccaccactagttcaagc

SEQ ID NO: 475504 - DNA, 51 bp, Homo sapiens
gagtggtgactggagcttttgggtatattgaagcaagtcaaagattacatt

SEQ ID NO: 475505 - DNA, 112 bp, Homo sapiens
cacgcacatggtggcaggcgccgtggcagggatcctggagcactgcgtgatgtaccccatcgactgcgtcaaggagctagaagcatctgaagaactagatacaatttgtccc

SEQ ID NO: 475506 - DNA, 75 bp, Homo sapiens
tgggccaaatgctcctttaatttttgaacgagaatccgtctcttgctcaagtgaaaattgaagaagcaaagcgag

SEQ ID NO: 475507 - DNA, 100 bp, Homo sapiens
ccaagctggagtttacacaggcaaactgtcagaaaagagtagcctgggctgtctggaaatctgagttgctgattgttggaggttcttttggtcttcgtga

SEQ ID NO: 475508 - DNA, 51 bp, Homo sapiens
atggaatcatggatgctgccaattttgaccgtgtttcttcgcctcgcctcc

SEQ ID NO: 475509 - DNA, 100 bp, Homo sapiens
caggaggggcgagagggagccgcagctgatgtcagactatgtcttcagcagtggtgcagttatatgcagcagatcggaactgtatgtggtcaaagaagtg

SEQ ID NO: 475510 - DNA, 96 bp, Homo sapiens
gagccatcacgcccagctagccatcttctaattttcattccttcaaagaattcactcgtgaagtaacagacacacagatgccacttgttgctcctg

SEQ ID NO: 475511 - DNA, 97 bp, Homo sapiens
cggacctttcccgctggcgcgcagcctcagctagatgacatttgatccagaaatcttcttcaatgttttactgccaccaattatatttcatgcagga

SEQ ID NO: 475512 - DNA, 92 bp, Homo sapiens
gctacagatagatgttaaggacatctgcaaatctttcaccaatggtgagaggatcacactgctccggcaggtagatgagaactggtacgaag

SEQ ID NO: 475513 - DNA, 83 bp, Homo sapiens
ggaccacggtcaccgtctcctcaggtttatgaaaaccccagatgaaatcatgagtggccgaacagaccgtctggagcacctag

SEQ ID NO: 475514 - DNA, 90 bp, Homo sapiens
ggtcctcagaccgaccagcccaagaaacatctcaccaatttcaaatctggtgctcttacagcctgttccaagtgtggcttaatccgtctc

SEQ ID NO: 475515 - DNA, 75 bp, Homo sapiens
ccatgcccatcgcagccgccccgaaggagccagtctattgcgtctgcagacatggatttcaaccagctggaggca

SEQ ID NO: 475516 - DNA, 80 bp, Homo sapiens
gcacaaagagcttgctccctacgatgagaactggttctacacgcgagctgcccaagaagatgaaaggattgttcttgttg

SEQ ID NO: 475517 - DNA, 83 bp, Homo sapiens
gagtccgccccgtgaggagaatgcggccctccaggcactgaagcgtaagaagaggtatgagaagcagctggcgcagatcgacg

SEQ ID NO: 475518 - DNA, 75 bp, Homo sapiens
tccaggtctatctgcctggccaaggggaggtgtgcggcgtgggacaggggtgcttgtggagttcagtgagctggc

SEQ ID NO: 475519 - DNA, 74 bp, Homo sapiens
ttggatggatgtcgaccatgtgactgtgaccttgggggagccttaaacaacagtgtttatgaacctcagttgca

SEQ ID NO: 475520 - DNA, 100 bp, Homo sapiens
caatatttgcaggacaaaatgatcccttgaaagacagttacgccacaggtggaattaagaaatctggcaaaaagtaagctgttccttgtgcctgaggaga

SEQ ID NO: 475521 - DNA, 80 bp, Homo sapiens
attgaattctccaacaatggaggccagtggctggtctcagggtcggaatctggcagatcttcgccgtagccagtcccgag

SEQ ID NO: 475522 - DNA, 100 bp, Homo sapiens
ccaggcagacggatgaggagcggctggagctgaggcaacagattggcaccaagctcaccagttttaattgataaagaccagagtccaaaatggaaaccag

SEQ ID NO: 475523 - DNA, 82 bp, Homo sapiens
atgctcataaggattgtcctctttctacaaaagattgatgtacagctatatattttgtcctttctttcacctcatgatctgt

SEQ ID NO: 475524 - DNA, 100 bp, Homo sapiens
cgtcctccttttgatgttgtcattgatggtctcaatgttgccaaaatgtttcctaaagttcgtgaatctcaacttgtaaatcttacaaaccattgtggtt

SEQ ID NO: 475525 - DNA, 122 bp, Homo sapiens
caggtgacgaggacctagactgtgacaacgaccacgtctccaaaatgagtcgcatcttcaacccccatctgatgctcgtcagaagttccgctctgttctggttgaagcaacggtgaaactgg

SEQ ID NO: 475526 - DNA, 83 bp, Homo sapiens
gcggccgggtccgggacttcgtcgccaagctggccaacaacacgcaccagatcctgggcatcaccagccctgcagggaagaag

SEQ ID NO: 475527 - DNA, 50 bp, Homo sapiens
tcacgggaactgaatttcaattggaagagactaagaaaaatggctttgtc

SEQ ID NO: 475528 - DNA, 100 bp, Homo sapiens
ctgaccacccaatgcagtgcatattaacaagggtagattttggaaattggatacactcacatgaaaatagcggaaggagtgaactctcttttgcagatgg

SEQ ID NO: 475529 - DNA, 75 bp, Homo sapiens
ccggcccctcctgcccatggcggtggccgagctgtacacgcagggggatatgagactttctactcggaatatcct

SEQ ID NO: 475530 - DNA, 82 bp, Homo sapiens
taatgaactcagacctattgcaaggaaaggacactcccctaacatatttgtgagatggaagattttcgaggtatagcagaag

SEQ ID NO: 475531 - DNA, 51 bp, Homo sapiens
actcgccaggacaactccatccttaaggcagcccctggaagagatcatcac

SEQ ID NO: 475532 - DNA, 100 bp, Homo sapiens
acgcccctgctaacgggaatgctacacaatctgggagcaatatggaggatggactggaatgggagccatgaagactggttttaggataactggttaagaa

SEQ ID NO: 475533 - DNA, 74 bp, Homo sapiens
taggacatgcgtttgagatctactgtgaagttgctggagaatgtaaccctaatccataaaccagtgtcgttgca

SEQ ID NO: 475534 - DNA, 73 bp, Homo sapiens
taaatgccgtccatggagccatgcgtgtgctgacagggataaacacacttgttacctatgatatggttccaga

SEQ ID NO: 475535 - DNA, 75 bp, Homo sapiens
tgatgcagatgcccctcctccaccagaggactgggaggagcatgtcaacaggtacagagccagatggactccttc

SEQ ID NO: 475536 - DNA, 89 bp, Homo sapiens
ccaagggcctccgtctggatttccaaggaagaatttcctctgaagcaccgacctcctgccccccgaggtctgcagtctcctgaacccag

SEQ ID NO: 475537 - DNA, 75 bp, Homo sapiens
aaaagatctctctacttctcctaagatatcaaagctcagctctttgaaacatccagcaagacaggccagagtgtg

SEQ ID NO: 475538 - DNA, 100 bp, Homo sapiens
gaactgtatgccagcagcttgttgtacacaaacatgtctgacaaagagctaaagaagctacgtaataaacaaagaagagctcaaaagaaagcccagatag

SEQ ID NO: 475539 - DNA, 77 bp, Homo sapiens
ggagcaatgatgtagccacctcctaaccttcccttcttgaacccccaggttggccttggggaggcactattagaggc

SEQ ID NO: 475540 - DNA, 118 bp, Homo sapiens
agagcgtgaccgagagcgcgaatatcgtcatcgttagaaggctccttcctcagagaagcttcctgttatgtaccttatggattctattgtgaaaaacgttggaagagagtatctcact

SEQ ID NO: 475541 - DNA, 50 bp, Homo sapiens
gaaggcccgcggcgccccgtgctgcagttatagctgaggtggtaccagtt

SEQ ID NO: 475542 - DNA, 96 bp, Homo sapiens
aagcagttttggaagaggagcgctaagctgccggggaggtgaacatgattaaagatgatgggacagttattcatttcaacaatcccaaagtccaag

SEQ ID NO: 475543 - DNA, 76 bp, Homo sapiens
gactcttagcactttgaaagaaaaaggctacaaagctgctttcattggaatagagtggccaaatcaatgaaggtcc

SEQ ID NO: 475544 - DNA, 98 bp, Homo sapiens
ggcgcttggcagccaggagctctgcattgaaggcactgggtcccatgaagctgaggtcttgaagcagctggctgagaaacgagagcacgagaaagaag

SEQ ID NO: 475545 - DNA, 100 bp, Homo sapiens
taaatatacgacacatccaggagtttattggagcgcagactgatggcgcaaagggctgaagccgacgtagcttctctgaacagacgcatccagctggttg

SEQ ID NO: 475546 - DNA, 90 bp, Homo sapiens
gaggacctgtgcaacaacctcttgaggatcgaatcttcactcccgctgtctcagcagtctacagcacgtggtagacggaggagaagtcca

SEQ ID NO: 475547 - DNA, 90 bp, Homo sapiens
ggactggagtggtttgtctgtgatggctggaagttcctctgtaccagggctgttgataatcaggtgtatgtggccacagcctctcctgcc

SEQ ID NO: 475548 - DNA, 75 bp, Homo sapiens
gagggtgcatgtttgcgaggaagccgccgggcgccgcgcctttgggaagtgctctctggcgtggtggtcatatcg

SEQ ID NO: 475549 - DNA, 75 bp, Homo sapiens
ggacgaggagagacagaagaagctggaggccggcaaagccaagttgctgtctctgctggccttcatctgtgaaga

SEQ ID NO: 475550 - DNA, 142 bp, Homo sapiens
ttgtccgtgaccctttctgaccaaaacaatcaacgtgtccctcaataccgtgcaattctttggagaaaaacattccaacaggatggattcctggtgctggaaggattcttgtctgcggaagagtgtgtggccatgcaacaaa

SEQ ID NO: 475551 - DNA, 100 bp, Homo sapiens
ctctgtctgctagagcttggccggattgcagccagaaaacctttccaacctatgagagaaagagatgtgaagaaagaagacgggtcatagagatgctaca

SEQ ID NO: 475552 - DNA, 75 bp, Homo sapiens
ccctacgccgtggacttccagcgcagggctacaggggaagaattgaaagtgaaggcatacctaccaacaggcaaa

SEQ ID NO: 475553 - DNA, 100 bp, Homo sapiens
cgaggaacgaagaaacagacattcaacatgattgcatttgaagatgatcaggatggtagtcaaggtctgggcaagagaaaaagggtaaaactaagcagtg

SEQ ID NO: 475554 - DNA, 75 bp, Homo sapiens
gttttttctaatggctattcaaggaattgaggaagctcagataggaaaacgaggatacttaacacccaccagtgc

SEQ ID NO: 475555 - DNA, 75 bp, Homo sapiens
acgtcttccacctggagggcatgactacatctgtcatggtgaccccagggtttgaagaaaaggagggggagctgc

SEQ ID NO: 475556 - DNA, 101 bp, Homo sapiens
cccgcccgcccaaggtctctcgcgggcgggagaacggaaaactcccaacttcctggtgaatggaggcattgagaacacattagagaaggaggtgatgcagt

SEQ ID NO: 475557 - DNA, 90 bp, Homo sapiens
agaggagcagctagagaagaaagctgtccagggtgctgagctgtcagaagcaggcaatctgaagctgagggtcagaatgatacaattgag

SEQ ID NO: 475558 - DNA, 75 bp, Homo sapiens
gtggtgagcgcacctacacccagctggtgcggctcatcattctgcctagtgtgttaattgtaacctacaaggagc

SEQ ID NO: 475559 - DNA, 83 bp, Homo sapiens
atctgggtgcccgtggaccacaggccctcgttgcccagatgattatatctgtccaagatgcgagtctggttttatcgaggagc

SEQ ID NO: 475560 - DNA, 82 bp, Homo sapiens
catccagagctgcatcattccttggggcaaaatgtggacaaggagatgtggtactggatcttcctctgggctctcttctctt

SEQ ID NO: 475561 - DNA, 88 bp, Homo sapiens
gaatacggaggagagagctggaggtggaggaactaaggaccttctttgccaggtggggacttaaagacggagttttgctcttgttgcc

SEQ ID NO: 475562 - DNA, 100 bp, Homo sapiens
ggaggcaagaatattaaggctctccgtacagacgtgctgggtaggccaggtttcagcatcgcagacaagaagcgcaggacaggctgcattggggccaaac

SEQ ID NO: 475563 - DNA, 100 bp, Homo sapiens
cagaatcagttgttggagaaaattaaaggtatggatcctggcgggagccagtcaacccctattatgtcaatgccggctatgccctggccccagccaccag

SEQ ID NO: 475564 - DNA, 95 bp, Homo sapiens
ggcttccagtggaggcattttggggcagaatacagagatatggaatcagtgggtgggcctgatagtcctgattcagtggatcccgttgaaccaat

SEQ ID NO: 475565 - DNA, 100 bp, Homo sapiens
aaaatgaagaagccattgctcttagcaggaaggacaaaactattcaacatgtggaagtattttgttatgccaggtgatgccacactcaatcagaaactat

SEQ ID NO: 475566 - DNA, 73 bp, Homo sapiens
ccttcctggcactgagcccagcctcccggatggagagaagtttgctgaggaatgccttcaagcacaaagtgat

SEQ ID NO: 475567 - DNA, 101 bp, Homo sapiens
ttttcctgagttaagcaataaaagctctcagcatggcggctcctctacgtcacttgcgtccaccaaagtctgcagctcgatggatgagaacgatggccctg

SEQ ID NO: 475568 - DNA, 100 bp, Homo sapiens
tctggaaccgcactgcagagaaagtagtaaacctattgatggcaattttgctgactgtggaagtgactcatccaaactccatgccagctgtcaacattca

SEQ ID NO: 475569 - DNA, 82 bp, Homo sapiens
agagcccgtgttagtcatggatgatccattcagcccctgcaggtcagcccaaggccaaccccactgtcactctgttcccgcc

SEQ ID NO: 475570 - DNA, 75 bp, Homo sapiens
caagcatgcagcttactgcttgaaaggcttcccagctggcgtgtatgttgtaaagagagttcttcagcttcagcg

SEQ ID NO: 475571 - DNA, 98 bp, Homo sapiens
aatgaaaatgaacttcagtttcagattaaggaatgtcatttaaatgctggtcacaacgccgacgacatggcggagaccgtgctcatgaacttcctacg

SEQ ID NO: 475572 - DNA, 75 bp, Homo sapiens
cttatatcagtattctacgcgacttgaaacagctgcctaaaacgttgaaggagaatcaattcttcaactcaagat

SEQ ID NO: 475573 - DNA, 82 bp, Homo sapiens
gagagcttcatcaaaaatagtgatagctttgataaaatatcgataacttgatgaccccagaaggagttggccttaccactgc

SEQ ID NO: 475574 - DNA, 85 bp, Homo sapiens
ccttctctgcagtggctgttctcctcaggagtgaccaggagccgctgtacccaggtaggtggagagttttcaaacactgttatcg

SEQ ID NO: 475575 - DNA, 100 bp, Homo sapiens
tggaggtctgcgttgctcttgcttttcctcgctggggtgtacgggaagcagtttaagtgcacggtgtgtgactacacagcggcccagaagccacagctgc

SEQ ID NO: 475576 - DNA, 98 bp, Homo sapiens
tggagtctgcgaaggccgggacccggttccccggcccacagtgggggtgtgcaaacccgagagaactggctggtgtcgaggacaagagaaccacaagc

SEQ ID NO: 475577 - DNA, 96 bp, Homo sapiens
cgcccacagctgccggatagtgctgaagaggagggggcgttccccagaccatggcatctacggaaggatactgtggcctcatgaataggaatgtct

SEQ ID NO: 475578 - DNA, 90 bp, Homo sapiens
accaagaaggggagtgcccgcggcaggaggtggaatcaaattctcctgcagcactggcaggtcttagaccacacagtgattatataattg

SEQ ID NO: 475579 - DNA, 100 bp, Homo sapiens
cttatgatgtttcagcaagttcatcggaagcccatggcatcttttgttaccactcctgttccaccagactttaccaggctggagtgcggtggcgtgatct

SEQ ID NO: 475580 - DNA, 75 bp, Homo sapiens
ccgagtacgaagcgggcgtttgcgaaggaggcaggtggaagtcatcataaagtttctgtttcacccgtcgtccat

SEQ ID NO: 475581 - DNA, 83 bp, Homo sapiens
aacgaccgtctggggaagaaggtccgcgttaaatttatcaggaactgttgccgttattacatcagatgggagaatgattgtgg

SEQ ID NO: 475582 - DNA, 80 bp, Homo sapiens
gccggcaagaccaccaccctgtcctctccacccggatcctggccatgaaggcctcgctctgcaagctgtcgccctgcacg

SEQ ID NO: 475583 - DNA, 71 bp, Homo sapiens
ggagccaatcagcgcgggcagcgaaccgggggagcgaggcacgtgcacgatctgattttctggagagatgt

SEQ ID NO: 475584 - DNA, 100 bp, Homo sapiens
caggaatctgtctggaaaaaggcagttctcactgaggaggtttgaggcgcgcgctctgggcagggtgatctgtgaaaatggttcgctattcacttgaccc

SEQ ID NO: 475585 - DNA, 98 bp, Homo sapiens
gacgacgctgctgggtccgctgagcggggcgacccgagcctccttttagaggactcagaagaagaagaaggtgacttatgtagaatttgtcaaatggc

SEQ ID NO: 475586 - DNA, 100 bp, Homo sapiens
tagggaggcattgcaaaagctcattgacgatcaagatatcaaatgtaattgaccggaaaccataccctgatgatgaaaatttagtggaagtgaagtttgc

SEQ ID NO: 475587 - DNA, 74 bp, Homo sapiens
ggggtgtgcaaacccgagagaactggtttgcctatctggggcgcctggctcacgaggttggctggaagtaccag

SEQ ID NO: 475588 - DNA, 100 bp, Homo sapiens
attcctcctgagataataatgaagatccctaaagaagtggctgacatctttaacgcccccagtgatgatgaagagtttgttggcttccgagatgatgttc

SEQ ID NO: 475589 - DNA, 121 bp, Homo sapiens
gcatactgtctcaatgatggcgagtgctttgtgatcgaaaccctgaccggatcccataaacactgtcgtacctggagtagaacagaaaaattattatgtctgtgttcccttgggactcatt

SEQ ID NO: 475590 - DNA, 96 bp, Homo sapiens
gccaacaatgacttcttcctccttgctgagctcctgagtgactacattcgcctcctggccatagtccgcgacttgaaagaggagattgatattcga

SEQ ID NO: 475591 - DNA, 75 bp, Homo sapiens
gccggaggagtctcagagctgtcagaaagaagcgcatactgtgctgcctccgtagcctcgctgaccaacatcatc

SEQ ID NO: 475592 - DNA, 100 bp, Homo sapiens
gcctctgcaggtcggggagcgctcggactacgcgggatttcgcgcgtgtgtgtgtcaggaccctatctgcagatgttctgaatacctctgagaatagaga

SEQ ID NO: 475593 - DNA, 75 bp, Homo sapiens
aggcagaaggcctctctcctgatacagcaggcgctcaccatgttccctggagaacttacgctggaaaaactccaa

SEQ ID NO: 475594 - DNA, 101 bp, Homo sapiens
accgacctcgacgtcttgcctgtgtcccacttgttcgcggcctataggccagaagcggactcctagaagaggggagcagcaaggatggaatgacagccgtg

SEQ ID NO: 475595 - DNA, 51 bp, Homo sapiens
ctcccatcattgatgtggtgcgatcggaggaagacagcgaacccctcccac

SEQ ID NO: 475596 - DNA, 78 bp, Homo sapiens
agagccagaagggagtgcagggaatcatcgtcgtgaacacagaaggttgtttacattcagagctctatcaataagagg

SEQ ID NO: 475597 - DNA, 100 bp, Homo sapiens
cgcgaagatggcagctgctgaggaggagccgaagcccaaaaagctgaaggtggaggcgccgcaagcgctgaggtgaaagaactcttttcttctttgggag

SEQ ID NO: 475598 - DNA, 75 bp, Homo sapiens
cggggacacagggcagcccgcagaggacagcgaccacggccacggcatatgcctccaaggacggggtcctcactg

SEQ ID NO: 475599 - DNA, 109 bp, Homo sapiens
ctatgtgacgctgctggaggaaacacctcaggacacggcctacaacaccaagagaggctgtggccaggccagctgggctcggggagcgccagcctgagaggagcgcgtg

SEQ ID NO: 475600 - DNA, 100 bp, Homo sapiens
ctcggcccgcgggggagccccgggagccgcacggcctacaggatgatgaggatctacaggcgctgctgaagggcagccagctcctgaaggtgaagtccag

SEQ ID NO: 475601 - DNA, 98 bp, Homo sapiens
ggcgacgaaccttggagagaggagaacgaacatcttctggacctttgtccaggtgttggagcgggccggagagaagtagagtgggctgcgaggagaag

SEQ ID NO: 475602 - DNA, 78 bp, Homo sapiens
aataccctgacctcgccccagttccagcaggtcgtgtacaacgtgggactctgcatttgtctgtttgatatcaccaaa

SEQ ID NO: 475603 - DNA, 104 bp, Homo sapiens
gtggaaatagatgacatcaataccagtgataaggccaaatttgagtttcatcatggtgactatgaaaaacagtttctgcatgtactgagccgcaaggacaagac

SEQ ID NO: 475604 - DNA, 100 bp, Homo sapiens
aaagagtattcaccaagggcacgaattcgttcctggatgggcatgtcctggaattggaagccaaaatggaccagctgcgaacaatggtggaagctgctga

SEQ ID NO: 475605 - DNA, 106 bp, Homo sapiens
gataaacatcacgatgctgctcatgaaatcatcgagaccatccgggtgagaactctgtctcagtcgacgggaagtgcagtgactccacgctactgagcaacttgtt

SEQ ID NO: 475606 - DNA, 90 bp, Homo sapiens
ggagactgcaaatgctattgtcagtcagcaaactccacaaagagttgaagtattgataacaccaaggaactctatcacaatttgaaaaga

SEQ ID NO: 475607 - DNA, 75 bp, Homo sapiens
ggccgtctgggcggccgccgcgcttctgctctcagtgtcccggacttcagttgcagagtgggcaggatcttaaga

SEQ ID NO: 475608 - DNA, 75 bp, Homo sapiens
tggagacagtagctggaaccctgaccccaggtgctcctggagagaccccaggtgctcatggaaacaacctcattg

SEQ ID NO: 475609 - DNA, 82 bp, Homo sapiens
ctcttcagggatgagtcatgtggtggtgaaaaatgaccctgaactggaccagcagtagtttatgccaacgtgacttcattca

SEQ ID NO: 475610 - DNA, 98 bp, Homo sapiens
ccagaaggaagatggcggatctggaggagcagttgtctgatgaagagaagctatatgttctcctttcagccaagacctttcaccagtgcaggggatag

SEQ ID NO: 475611 - DNA, 100 bp, Homo sapiens
tgggattttgtcaaagagaactggaataagcttgtacagaagtgctggtaaacaatgccaaaactcatggagatacaagagcattggaactgaatcagag

SEQ ID NO: 475612 - DNA, 100 bp, Homo sapiens
aacgaagtaggccgtctcgctctgggtctccaggcccgcgaccgtccgccagtcgtcccgaggttccccctaaaggactcaaaacgtctaatccaatggt

SEQ ID NO: 475613 - DNA, 98 bp, Homo sapiens
agcccgccggtgaggccgggccacgctcagacacttcgatcgtcgagtctgtcactggtggatccataaagaacccagccaacccgcagagggagggg

SEQ ID NO: 475614 - DNA, 75 bp, Homo sapiens
gaggtgaactggaccgagcagcagcagatggatgggcaacactccagattcagcctcagacaacctcggtttccg

SEQ ID NO: 475615 - DNA, 80 bp, Homo sapiens
cttactaaccacgaccatcaaatccgtgtcggagtccttacaggcacttctggatccagctgtgtgatagccgcactagg

SEQ ID NO: 475616 - DNA, 50 bp, Homo sapiens
accaacccggccttcaccaaactccctctttctaaaaccaatttttccaa

SEQ ID NO: 475617 - DNA, 100 bp, Homo sapiens
aaaaggaacaatgacagaaatatacaacgatctttctaaaaacactactggaagcacaatagctgaggaatcagagatcattgatttcttcctgggggcc

SEQ ID NO: 475618 - DNA, 103 bp, Homo sapiens
agcagcccccggagacagcggcacagaggtgcttctgccagatcaatgagctcagccaggtgcctcccccggtgatgctgctgccagatgactttaaggccag

SEQ ID NO: 475619 - DNA, 97 bp, Homo sapiens
tggccaagaagggccttactccttcacagatcggagtaaaatttcaagagactgaaaccagatctgagtttcgctgttccagtctggacctctttgg

SEQ ID NO: 475620 - DNA, 90 bp, Homo sapiens
attatgcccagacaagtccccagggaatgccacagcatcctccagcacctcaggtattccaaagttgattacgtctgatatggttaaaga

SEQ ID NO: 475621 - DNA, 100 bp, Homo sapiens
tggttcactgtgcatcgcccactccagaagtagcatggaaatggagggcatcttcaaccacaaaggacctgaaggagaagaaggagaaggtggaggagaa

SEQ ID NO: 475622 - DNA, 80 bp, Homo sapiens
tcaaagagaaaaggcaacatcctgtcacaggccatgctctggcaaaaaccttcgagagctgtgcccaggagtgaacaacc

SEQ ID NO: 475623 - DNA, 123 bp, Homo sapiens
acgcccagaataaagccaagctcatctctgagacccggaggaggttcgaagctgagtatgtgacaggtcttgatgactgtttgcagcagtatattaagaactttgagagggagaagatcagtg

SEQ ID NO: 475624 - DNA, 87 bp, Homo sapiens
accacatcagtaattattcttgaaatgacatcagatgtaccatcactgggtccagccattgcctctggaaactctggacctggaatt

SEQ ID NO: 475625 - DNA, 82 bp, Homo sapiens
gctcggagcagcagcctctgagggctctggaacttcatccattctctatgaaacctcttctgaggcgggcgatggcctatga

SEQ ID NO: 475626 - DNA, 75 bp, Homo sapiens
gtttgggcagcgttggacagctctatgagggaaactcccatcaagactgaagcagacgttttggcagaaaaccag

SEQ ID NO: 475627 - DNA, 49 bp, Homo sapiens
agagacaacaccgagtatgagaagtacatgtcccagagcaagcacacgg

SEQ ID NO: 475628 - DNA, 75 bp, Homo sapiens
agatggatttttgcatgagacgcttctggacaggaatcagtgtctgtccctgaagggtcattaaatcagctatgt

SEQ ID NO: 475629 - DNA, 49 bp, Homo sapiens
tacgcctcctacgtttacctgtccatgcgtgctgcaggccgacccctcc

SEQ ID NO: 475630 - DNA, 90 bp, Homo sapiens
cacaaagtgaccaagaacgtgagcaagcccaggcacagccgacgccgcggggatcaggcaaaaatgatcatgccgaaaaagtggcggaaa

SEQ ID NO: 475631 - DNA, 75 bp, Homo sapiens
ctgagggtggaagcggcccccgcagacgctcggcagcaaccatgtccaagggacctgcagttggtattgatcttg

SEQ ID NO: 475632 - DNA, 90 bp, Homo sapiens
atttaagtacaatggtgggcttaattttagcgtgctcaggcagttcttcaagctgtgacagctgtccagacagcaaatactcctcttagt

SEQ ID NO: 475633 - DNA, 88 bp, Homo sapiens
cggcgggagatcgcgggcgagcggagcgcaacactcgcttggttggggagatcggcgcttggccggctatggtgaactaaacggtaat

SEQ ID NO: 475634 - DNA, 101 bp, Homo sapiens
aactgaagcttctgtcagaatgccaatacaagcagttggagattcaataagtgtaattggcagaaacaacagcaacaactttgacctgaaccgaaatttcc

SEQ ID NO: 475635 - DNA, 100 bp, Homo sapiens
acgtgcctgcagccggcgggtacctgcggccaattcggtggaacgaggacgcggactgcgaaggcagattaaaaggagcccaagccccatctcatcctag

SEQ ID NO: 475636 - DNA, 75 bp, Homo sapiens
taggcgaagatccggactctgggtgttttgctaccgtgaccgtttaggtgtttgagaagctgcagctgctcaacc

SEQ ID NO: 475637 - DNA, 100 bp, Homo sapiens
atgaccctcgagggagacatcaggctggtggttgggcttgacattcaggatgagatgggcaggcacgaagtgggccacatcgacaactccatgaagatcc

SEQ ID NO: 475638 - DNA, 100 bp, Homo sapiens
tctgggctccaattatgaaatggttgcgacaaccaccagttaagcgtttgagacttcgtggtgattggtcagatactggacccagagcaaggccggagag

SEQ ID NO: 475639 - DNA, 126 bp, Homo sapiens
gtccctttgcctcatcccaggttgccttggaaaatgccaacgccgtgtctgaaggcgaatttccttttgcaaaatgttttgtttgtggagaaatggggcacctgtctagatcttgtcctgataatc

SEQ ID NO: 475640 - DNA, 75 bp, Homo sapiens
caggaacttggtagtagtcaatcagcaggccaaaatgaagtttaatccctttgtgacttccgaccgaagcaagaa

SEQ ID NO: 475641 - DNA, 100 bp, Homo sapiens
ctcaagagaagctgcaagagcaacatctttcctcaccccaagtgaagaaaaaatgactgctgcccgcattagaaaatgccacaagtgtgggactggcctc

SEQ ID NO: 475642 - DNA, 100 bp, Homo sapiens
tgcaggaggctatacttcaaatcctacttataaagaagtctgctcaggtggagccgccaccaaaatgcagattttcgtgaaaacccttacggggaagacc

SEQ ID NO: 475643 - DNA, 100 bp, Homo sapiens
ctgctcttcgtctgcttcttcctcttcagtcaagatgctgcagttggagaagaaacttgaacgtgaacttgaggatgatgcacgagttattgcttgccgg

SEQ ID NO: 475644 - DNA, 99 bp, Homo sapiens
tattcttgatattttgagcaaactcttcttctctgatcagtgcccagaacaaggaaacaggtgaccaagaatatggcccaggtgaccaaagccctggac

SEQ ID NO: 475645 - DNA, 100 bp, Homo sapiens
tgcttctggcgagggcctcagggagcttctactcgtgcaggaaggtgaagtgggagcagatatgtcacacgtaacagatcaactcctagcaatcatgatc

SEQ ID NO: 475646 - DNA, 83 bp, Homo sapiens
agatccgtagcaaccgggtcatcgaggttggtggttctgtcagatgaaagcaaagcgaggctggatcccagcgtccttcctcg

SEQ ID NO: 475647 - DNA, 91 bp, Homo sapiens
tactggatctgctgacagaactataaaggctggagacgtttaaaagaccgtttcaaaagagatttacttttttaaaggactttatctgaac

SEQ ID NO: 475648 - DNA, 82 bp, Homo sapiens
cctcttcctgttgcaccaggttcttcgaaaactgaagcagatgttgaacaacaaggtgctttggaaataccagccagctcat

SEQ ID NO: 475649 - DNA, 100 bp, Homo sapiens
ggagaagaccaccaccacctacctggacaacggcacccacccagcccaagcgtgctgcaggccgacccctccaggattccggcgcccaggcacgtctggt

SEQ ID NO: 475650 - DNA, 50 bp, Homo sapiens
ttgccgcagccccaggctgagacaggaaatccccgccagccctttcagag

SEQ ID NO: 475651 - DNA, 100 bp, Homo sapiens
ccagctactgagtactcgcacagaagcattagaagccttacagagtgaaaaatcacgttgtggaagatatcaataagcgcagagagccgctccccagcct

SEQ ID NO: 475652 - DNA, 98 bp, Homo sapiens
ctgaatattcaatctacatcgcttgcgagccttccccttcagcgaacaatgaaatacatgtggccattctcctacctcccggcagcctctccaggccc

SEQ ID NO: 475653 - DNA, 74 bp, Homo sapiens
ttggacttgatgaagaagatgaagatgaggatgaggatgaagccatttccccaaaggaatgtcttgcatattac

SEQ ID NO: 475654 - DNA, 50 bp, Homo sapiens
agtgcttggagtgcagaactgaaagaggagccctctggcacaaatggaag

SEQ ID NO: 475655 - DNA, 82 bp, Homo sapiens
gtggctcgacggagaccagctaggagacaagaggagcagcagcggcaccgcccctcaccctggagggtcctgtacaatctca

SEQ ID NO: 475656 - DNA, 98 bp, Homo sapiens
agatcaccagcaagattgcgagggtcccacgactcccgcctggggttcaactagatatagcttcacaatctctggatcaagaaattttattaaaagtt

SEQ ID NO: 475657 - DNA, 101 bp, Homo sapiens
ccagcttattgttgcaaggagaataagcaagtgcaatgagggtgaaaatcctatttataagagtgccgtaacaactgtggtcaatccgaagtatgagggaa

SEQ ID NO: 475658 - DNA, 82 bp, Homo sapiens
tgcgtcctttttcgtttttcggatgatgccttcaatactacctttatttccaccataggttgtatggttcctggagctggtg

SEQ ID NO: 475659 - DNA, 100 bp, Homo sapiens
cctggcacccccactgctgcggtgggcacccccactcctcacagtgctgcatagcgacctcttccaggccttgctgggagttccccttggccattctcag

SEQ ID NO: 475660 - DNA, 75 bp, Homo sapiens
cgaagtgaagggtggcccaggtggggccaggctgactgaagtatcgaaggatgatcgcagtgatgtggagagcag

SEQ ID NO: 475661 - DNA, 75 bp, Homo sapiens
tggggttccctcctccgtttctgtatccccacgagtggtgtttccccaggatctgctggagaaaggcctcgaagc

SEQ ID NO: 475662 - DNA, 90 bp, Homo sapiens
ccacacctttactcgactcactaacttgactcagctccagattgccacggcagtgaagtttctacagaattcccgggtccgccagagccc

SEQ ID NO: 475663 - DNA, 75 bp, Homo sapiens
tggacaaacctgaagagtttatatctgaaatggacgctgaagccgacgtagcttctctgaacagacgcatccagc

SEQ ID NO: 475664 - DNA, 82 bp, Homo sapiens
tgccactaagctgctacttcaagctttggccatcaatagctctgaggacaaggagcatccaagatacctgatcccagaactt

SEQ ID NO: 475665 - DNA, 82 bp, Homo sapiens
gtttctctgctgcaccgacctcgacgtcttgcctgtgtcccacttgttcgcggcctatagggtccctcaggctccctatcag

SEQ ID NO: 475666 - DNA, 100 bp, Homo sapiens
ctaaaatgaaagccatcattcatcttactcttcttgctctcctttctgtaaacacagttgaatccttggcctgaatatatttacacacgtcttgagatgt

SEQ ID NO: 475667 - DNA, 90 bp, Homo sapiens
gaatgtgtctcttgccaaagcgaaggtgctggagaatctggtaaaagcaccattgtgaagcagatgaggatcctgcatgttaatgggttt

SEQ ID NO: 475668 - DNA, 100 bp, Homo sapiens
ggatatcggcccttgggtcactcttcccagaggacagcctgaggtgttggagtggggcctcccaaaggatcaggttgtaggtagtatggatgcacaccca

SEQ ID NO: 475669 - DNA, 145 bp, Homo sapiens
tctagtagccacggtgtggcagctgctctgaaccaggacctggacccggacccaaagtgccatgtctttaatgacattgccgagaatggctgcgcccccaccccagaagagcagctgccaaagactgcaccgtccccactggtgg

SEQ ID NO: 475670 - DNA, 82 bp, Homo sapiens
taccgcatgactcagagaggccgttgtgagggacctcggacagtgatccaccctaaagcaagaattattgcggaagccgggc

SEQ ID NO: 475671 - DNA, 74 bp, Homo sapiens
tgacaacgtggatcgttgttttgaaaccaattaccagctctggctgggtcgccacaacttgtttgacgacgaaa

SEQ ID NO: 475672 - DNA, 101 bp, Homo sapiens
acaaaagcagatgctgctgaattctggagaaagttttttggagacaagtcatcatcagatttgaaatatttaaagtggatacaaaactatttcagcaatgc

SEQ ID NO: 475673 - DNA, 98 bp, Homo sapiens
aatgttcagcctggactcattcagaaaaggtacaagaatattccacagatgtcctttgatgatacagaaagggagccagatcagacctttagtctgaa

SEQ ID NO: 475674 - DNA, 80 bp, Homo sapiens
ggaactcaatcaaaccagtattcttttcacacaggttcgagaacttgtcttggacaattgcaaatcaaatgatggaaaaa

SEQ ID NO: 475675 - DNA, 100 bp, Homo sapiens
gtggtgaaagaggttctggcgggagacagcgtccacagcctgctcagcatcctggacatcatcaccataaaagcttcgatgatgaagaatcagtggatgg

SEQ ID NO: 475676 - DNA, 97 bp, Homo sapiens
gaagagatggatattgaaatggacagtggagatgaagcctaagaatatgatcaggtactggaaacagttgactctgctccatttcgtttataatgga

SEQ ID NO: 475677 - DNA, 98 bp, Homo sapiens
gggacctgttccagtttaacaagacgccaaggagcaagtcctcgccaacctcgccaacttcgcttatgaccccagcaactacgagtatctgcggcagc

SEQ ID NO: 475678 - DNA, 74 bp, Homo sapiens
cagtcttcagctgcaacacctgtttatgatcctggcctcaccaaggtatgtggtgtgcaagggcctgaaggtgg

SEQ ID NO: 475679 - DNA, 100 bp, Homo sapiens
gaccgattgactttggagaaggagcggacatgtgcagaacagattgttgccaaaattgaagaagtattggtgtccgcaatgttgccagtgtctgtctgca

SEQ ID NO: 475680 - DNA, 72 bp, Homo sapiens
agaatctgatgagccttttaggcctgttcaggagctgtggagtccaagtgtgactgccaagaggaatccagc

SEQ ID NO: 475681 - DNA, 48 bp, Homo sapiens
ctggacaccctcctggactcgctgataaggtgtacctcggccccccac

SEQ ID NO: 475682 - DNA, 75 bp, Homo sapiens
gagtcgccccctacccgcttctcgtagtcctgggagcacagcagaagtgtgagagcacagtaaggactattgcta

SEQ ID NO: 475683 - DNA, 78 bp, Homo sapiens
cagtacctgcagaaggtctctggagacatcttcagcagagagcatcagtgatgtcacgtttggagcaggggtcagtta

SEQ ID NO: 475684 - DNA, 50 bp, Homo sapiens
ggaggttacgcagcaaaccatccagaagttgcccagaagattgttgccac

SEQ ID NO: 475685 - DNA, 82 bp, Homo sapiens
tgcgacgaggacgatgactgcttagaccacagcgacgaggacgactgccaaacgcttcgttaagggactcaggcagtacggg

SEQ ID NO: 475686 - DNA, 76 bp, Homo sapiens
cgaggggggagcctcagcaggattgctgtgtgaaaaccgagctgctgggagaagcttcgagagctgtgcccaggag

SEQ ID NO: 475687 - DNA, 100 bp, Homo sapiens
gtcggaggagaagctgcaggagaaagggcctcggcttcacaggatggggctgccagtgtcctgggcccctcctgccctctgggttctagggtgctgcgcc

SEQ ID NO: 475688 - DNA, 82 bp, Homo sapiens
aatgggacaagatcccgtccatgaatcaggctactgcagcactggggtgtcagttgttggtccgacccagaacgcttcagtt

SEQ ID NO: 475689 - DNA, 85 bp, Homo sapiens
tgatggggctggacctgctggtgttcgcccacgaccatggcatttatgtttgaatcatctttaagtctggcggtcacaaagtggg

SEQ ID NO: 475690 - DNA, 75 bp, Homo sapiens
tttgtgctgccagcaagaaatgatcagtagcaccagtgtttatgacaacccatttgttgagattaaaacaccaaa

SEQ ID NO: 475691 - DNA, 100 bp, Homo sapiens
ctgtggagtggctggaggaggatgaacactatgattaccaccaggagattgcaagggagaagtcagagagacggtgcctgaacccctcggccccgccgct

SEQ ID NO: 475692 - DNA, 75 bp, Homo sapiens
ggacgcggcacctacggtcacgtctacaaggcgaggcggaaagatgggcataatcaccagcaacacccgggacaa

SEQ ID NO: 475693 - DNA, 83 bp, Homo sapiens
ttccaagaaaccaacattcccaacagccaccaccaccaccagatgatgatatcatcaagttgaatcgaaaggaagggaagaag

SEQ ID NO: 475694 - DNA, 80 bp, Homo sapiens
cagcagaggaggcccaggcagtgccaggagtcaaggtgtctgcctgtatcccagtgttcaggctggctagacggcggaag

SEQ ID NO: 475695 - DNA, 101 bp, Homo sapiens
tgcaagccggtgcagcagccttcagcttttggcagcatgaaagttagcagtgccttagctggaccaattattgtggagccacatgtcacagcagtatgggg

SEQ ID NO: 475696 - DNA, 80 bp, Homo sapiens
ctgttcctggaggaatccgagaagagcagagcggagggagccccagacacggtgggacagtcacttcctcctccctcccc

SEQ ID NO: 475697 - DNA, 88 bp, Homo sapiens
ctccaggagttcgtctcttacgtctgcggaagtgcagctgcctcagttcttagcgcaggctcgtggtcccaagaagcatctgaagcgg

SEQ ID NO: 475698 - DNA, 90 bp, Homo sapiens
ttctgaagttgttcattaagacttcccagcattcctacagatataaatagcaggaacgaatgcaggaatttgggaactgagctgtgcaag

SEQ ID NO: 475699 - DNA, 100 bp, Homo sapiens
gcgcgcagcacgccggggcccgcgagctggctgcgctctactcgccaggtttgtccgatatgtgcctcgatgccctggggagaccccaactaccgcagcg

SEQ ID NO: 475700 - DNA, 74 bp, Homo sapiens
tctccaggggcctgactgtgggcggcagccactcctgagtgagcaaaggtgtagaaccttacatacatcagaaa

SEQ ID NO: 475701 - DNA, 82 bp, Homo sapiens
gcaggatggctgcgttgacacgtcttatttaatccacatcataggttacaataagctcttgtgacctcctggttgtaagtgt

SEQ ID NO: 475702 - DNA, 75 bp, Homo sapiens
cgcaacatcgaccagaccatgctctccatcctgctcttcttccacaggtatagctgtggaccaactgtatatgat

SEQ ID NO: 475703 - DNA, 100 bp, Homo sapiens
tagctgaatgtgttactccattgctgaggagtgggccatcactgtgcatgtccccatgccctcagcaggagtcgtggacatccccattgtggagaaggag

SEQ ID NO: 475704 - DNA, 108 bp, Homo sapiens
attcagaaggaacttgcagaaatcacattggaccctcctcccaactgtagttgttgacctcctgtactggagagacattaagaagactggagtggtgtttggtgccag

SEQ ID NO: 475705 - DNA, 51 bp, Homo sapiens
aaggaaatacatttgtacacgatcccaaggcaaagatgccttttgatgcca

SEQ ID NO: 475706 - DNA, 100 bp, Homo sapiens
tctgccaggacaaatcatcagggtaccactatggggtcagcgcctgtgagggatgtaagactctttttgatcagaacaatgctgcaaaaaaagaagagtc

SEQ ID NO: 475707 - DNA, 88 bp, Homo sapiens
ctaggtaatgtgtagttctcaatgcatcatgtcaggcagcttatgatgccaatttgtcccatgttgaagagatgaaggcgcagaggca

SEQ ID NO: 475708 - DNA, 50 bp, Homo sapiens
agtaaccctcactggagaatccagaggttagggaaagtttctcctgaaga

SEQ ID NO: 475709 - DNA, 83 bp, Homo sapiens
ggcaaaagtatacactgcttatcaggcacatgaaggagatcccacaaatggaagtggagaacaaagtaaaacttcaaataatg

SEQ ID NO: 475710 - DNA, 88 bp, Homo sapiens
tcggacctctatgccatgaacttcaatcccatcatttccagaaaggacatcacaggggcaccaccacgaggcgatttgtgggccatac

SEQ ID NO: 475711 - DNA, 101 bp, Homo sapiens
tcagtgatcttacatcgaggactgtgcatctttatgataattggatcaaagatgctggtcggcttcttcaagcggaaccggccacccctggaagaagatga

SEQ ID NO: 475712 - DNA, 100 bp, Homo sapiens
cctctcccaaagcacctgcgcaggtaaaacttccttttcctgtagatcaaatcacagatcttccaaggaacgatttccagatgatgattaaaatgcacaa

SEQ ID NO: 475713 - DNA, 74 bp, Homo sapiens
ctgtctccgtcggaagggagcccaagctttgcagaggcccactgctcagtggagcgtggaggacgaggaggagg

SEQ ID NO: 475714 - DNA, 100 bp, Homo sapiens
tacgccgccgccatgtcggcgcaggcccagatgcgcgcgatgctggaccagttgatgggcacctcccgggacggaatcccagtcagaagttccagcctgc

SEQ ID NO: 475715 - DNA, 100 bp, Homo sapiens
agatagctgtggatcgagtgaacgctgctgatgggagataccatgtcctgtttctcggaacagggattaatgaaaatcaagttccatcctcagacaagag

SEQ ID NO: 475716 - DNA, 100 bp, Homo sapiens
ggaatttgtggaggattttattcaggttcctaggaatctcgttgattcgggcaagtccaccactactggccatctgatctataaatgcggtggcatcgac

SEQ ID NO: 475717 - DNA, 86 bp, Homo sapiens
gaccgggacctgctcctggacccggcctgggagaagcagcagagaaagatgtgccggtgacttcagcgccagtcaccgcgttctac

SEQ ID NO: 475718 - DNA, 100 bp, Homo sapiens
caacctcaccgtgcaccttcgcaagaagcaccagttcaagtggccctcagggcatccccgttttcgttaagtgggcagaccaacatccacctcagcaaaa

SEQ ID NO: 475719 - DNA, 88 bp, Homo sapiens
caggacgtgaaggggaagaggcccaccctggagtaaccctcactggagaatccagagaccaagatcactccatggatgaaatgacagc

SEQ ID NO: 475720 - DNA, 75 bp, Homo sapiens
tcaccggcccgtggccatcggcagctgcggccacacccaacacaagccatcagccccatgctcagctcccagcag

SEQ ID NO: 475721 - DNA, 96 bp, Homo sapiens
tcataaagaaatccaacttaccttgtcaatgtcaccgggtgcgcatcaatgtacctccacacagagggcttctctgggccctctccaggtgacggg

SEQ ID NO: 475722 - DNA, 99 bp, Homo sapiens
agagaaaaggaattagcagaagacattatgtcaggtcaaaatgcagatcttcgtgaaaacccttaccggcaagaccatcacccttgaggtggagcccag

SEQ ID NO: 475723 - DNA, 75 bp, Homo sapiens
ctcaagatggatatgtcacacagacaggtggacataaagcagcccctgtcaaagggaacaggaagcagtccacgg

SEQ ID NO: 475724 - DNA, 87 bp, Homo sapiens
ccgctggctcagccgcaagtacccgtccatcatagtcaactgcgtggaagagaagaaacagaagcctatcagttgctgaagaaggcc

SEQ ID NO: 475725 - DNA, 100 bp, Homo sapiens
ctggtcttctcgtcggattgcccatgcacttgttgcagaaacagccaaggcacatctaacatgtcatttgaggagctgttggaattgcagagccaagtgg

SEQ ID NO: 475726 - DNA, 90 bp, Homo sapiens
ctttgtgtcctgagatcaaatggcacttcattggccacctacagaaacaaaatgtcaacaaattgatggatggagtctcgctttgtcgcc

SEQ ID NO: 475727 - DNA, 80 bp, Homo sapiens
cgcctgcgcatgctccatcgcctgggagtccaaaactacttacctggaagaccttccaccaccccctgagtatgaattgg

SEQ ID NO: 475728 - DNA, 98 bp, Homo sapiens
gagcaagggccacggaagggccgtggactggtgggccctcggcatcctgatattcgagatgctttcgggtggggaccacaagcagaagttttactggg

SEQ ID NO: 475729 - DNA, 75 bp, Homo sapiens
atagcagagtacgatactcaggtcaaagactctttttgatcagaacaatgctgcaaaaaaagaagagtcagaaac

SEQ ID NO: 475730 - DNA, 50 bp, Homo sapiens
gccatcgttgctgccttcttcgtcaagtgcatttgcccagtataacatgg

SEQ ID NO: 475731 - DNA, 100 bp, Homo sapiens
acctactgatggtgctgtaaccacctcacagattccagcttcggaacaagagaccctggtgtggtttcagaaccgaagagccaagttccgcaggaatgag

SEQ ID NO: 475732 - DNA, 75 bp, Homo sapiens
gaaagacccaggagaagccgcccaaagaactgagtgtgaacatggctacgcctcttcattcccgtccatgccgag

SEQ ID NO: 475733 - DNA, 74 bp, Homo sapiens
ataccaagcccgagaagacggaggaggactcagaggaggtctgaaggggcgtctcgattacctgagctctctga

SEQ ID NO: 475734 - DNA, 101 bp, Homo sapiens
gacggacagtgcagggaagcaactgcagagagatgacctgatcagagccatcaagaaactaaaggcacttggcactggcttcggcatcatccctgtgggcg

SEQ ID NO: 475735 - DNA, 75 bp, Homo sapiens
ctgcaacccgtgcttatgcagatagttactattatgaagatggagtttccaggaatatggatctactggaacagc

SEQ ID NO: 475736 - DNA, 100 bp, Homo sapiens
gaaagcaagtgaatacgagtcagaaggaagggatgagaccatgcagcctgcgaaaccatcctttcttgaatattttgaacaaaaagaaaaggaaaaccag

SEQ ID NO: 475737 - DNA, 96 bp, Homo sapiens
ccggagcggtccgcgagccaccgaggcccaggcaggtgacagcagggacatgtctcgggagatgcaggatgtagacctcgctgaggtgaagccttt

SEQ ID NO: 475738 - DNA, 75 bp, Homo sapiens
gttttccagagctttgccaagttcagcaaatttggagatgctcttatctcaggtggacatggactgcagggtcca

SEQ ID NO: 475739 - DNA, 82 bp, Homo sapiens
gcctctctcatcttgggaatctgcgtcagaagtcactcgcagtcccgtcagcccaggtggaggctacggagccacaggacgt

SEQ ID NO: 475740 - DNA, 100 bp, Homo sapiens
ctcgtctcggtcggaaccatgccttatggactggagaaaagttccctcaaacagcactgaaactgtaatagaatctggattttgcagaaaagaagtccac

SEQ ID NO: 475741 - DNA, 74 bp, Homo sapiens
ctccatcaggtacaacctcgaggagctctaccagggcagcaggatgggtgtggaagcagtgatggcacttttgg

SEQ ID NO: 475742 - DNA, 100 bp, Homo sapiens
gagatgtctcgctccgtggccttagctgtgctcgcgctactctctctttctggcctggaggctatccagcagcctggagacacaggccccatccttccca

SEQ ID NO: 475743 - DNA, 109 bp, Homo sapiens
tactactacatggacgtctggggcaaagggaccacggtcaccgtctcctcaggttatgaagacagtatggagtttccagaccatagtagacatttgctacagtgtctga

SEQ ID NO: 475744 - DNA, 74 bp, Homo sapiens
gggaaatccttcggatggtgaactcattagaagtcctaaaaacatcctgagtttctttggcctgccagaaagtc

SEQ ID NO: 475745 - DNA, 100 bp, Homo sapiens
cttccaaaagcgcagaccacagttacatgtatggagaatggctggtctcctactcccagatgcatccgtgtcactgaaaatgtgtgtctgacatgcaagc

SEQ ID NO: 475746 - DNA, 100 bp, Homo sapiens
ccggaatcgcccgaccgcacacgttgccaccctgagattttgcaggactgtccagaagagcctgaagctattaatgatgaggagcaatttgatgaaattg

SEQ ID NO: 475747 - DNA, 100 bp, Homo sapiens
ccttcatcatgatccccgacctgacgagcccctacctccccaacggatcgctctcgcccaccgcccgaaccccagcagccagcttcgggtgtagcctatt

SEQ ID NO: 475748 - DNA, 83 bp, Homo sapiens
gcgtgctcaggtcggcggaggagaagtttaattagacacttcagaattttgatcacctaatgttgatttcagatgtaaaagtc

SEQ ID NO: 475749 - DNA, 100 bp, Homo sapiens
gcgcgggatcccagcctcaggcgtgcgcggacggtgtgcggtgtctttggtgcaacactaacaaggcttgtctggactacccagttacaagcgtcttgcc

SEQ ID NO: 475750 - DNA, 50 bp, Homo sapiens
gaactgcgactcagcatgcagaaggaagccagcagacctgcagaacttgg

SEQ ID NO: 475751 - DNA, 100 bp, Homo sapiens
attgcatcttcctctggctctacagcgaaaatttttactactggagatgtcaacaaagatgggaagctggattttgaagaatttatgaagtaccttaaag

SEQ ID NO: 475752 - DNA, 100 bp, Homo sapiens
tttacccgcccgcctgctcggcgaccagtgtcaacagcatctccaccctggagcctgtgagccggtgccagcgcctgagtgagctgtacctgcggaggaa

SEQ ID NO: 475753 - DNA, 117 bp, Homo sapiens
gttcgtcgtggcaacgttgctggtgacagcaaaaatgacccaccaatggaagcagctggcttcactgctcaggtggagccgccaccaaaatgcagattttcgtgaaaacccttacgg

SEQ ID NO: 475754 - DNA, 83 bp, Homo sapiens
gcggtcgtccggccggggacccggcccgggaccggcggcgcgcggcggccgaggccagtcaccttcaggccattcagaggagg

SEQ ID NO: 475755 - DNA, 98 bp, Homo sapiens
atgctcttcacatcctttcaagaaccaacatggatagacctggaggctattttttctgcgtgaaatgacccagaaacagaaagtaaaaaactgcatgt

SEQ ID NO: 475756 - DNA, 100 bp, Homo sapiens
gctcgctgggtaacatacttcaacaagccagatatagatgcctgggaattgcgtaaagagagcacgttttcaatatcataggagcatttgatattccacg

SEQ ID NO: 475757 - DNA, 75 bp, Homo sapiens
tgaagatcctggtgtcgccatgggccgccgccccgcccgttggttctaatcaaggtccatgcatgtggtgtcaac

SEQ ID NO: 475758 - DNA, 100 bp, Homo sapiens
aagaaaccatgtgctgaaatgtttgacgacactgatggtttgaggcatcccaacacgctgtcttttcgctgctcgctggcggacttccagatcgaaaaga

SEQ ID NO: 475759 - DNA, 82 bp, Homo sapiens
ctggctccgggctgagcttcctggagaagaggaaggtttggtgcacctcgatttggaggaagtagggcagggcccttatctg

SEQ ID NO: 475760 - DNA, 98 bp, Homo sapiens
catgattcacctgctagcccatgatccagattttacaagatcacaagatgttgatcagcttcgtgatatcaaagacaagtttatttctgatcgtgaaa

SEQ ID NO: 475761 - DNA, 100 bp, Homo sapiens
ttttgtttatttgaaagtggcaaaacccacaagtatgtatatgaatgatggctatgcaccacctgatatcaccaactgtcaaagttaatcgaagtgagtg

SEQ ID NO: 475762 - DNA, 96 bp, Homo sapiens
ttttgggccagtggctgtcattacatatgagatgagtctcttgaagactacagatggttagaagtttcatgcattcaaataatggcaccatttctg

SEQ ID NO: 475763 - DNA, 83 bp, Homo sapiens
ggctgaacatgaatccacagatcagtgaactttgaggcgctgatcatcaccatgtcggtagtcgggggaaccctcctcctggg

SEQ ID NO: 475764 - DNA, 80 bp, Homo sapiens
cacctccggccactgggacggcggcgcggagaaggcaggactatggcagccagggacgccacttcaggcagcctgtcaga

SEQ ID NO: 475765 - DNA, 75 bp, Homo sapiens
tggaaggggccagtctggagacagtcaaggcgcagcccagcctcgaaatgcagaacgacgccggcgagttcgtgg

SEQ ID NO: 475766 - DNA, 100 bp, Homo sapiens
cgaacgggggtcttcctcctccgccgttgacagatcgtcagtatttaaacagatcacatcatgcgtgagtacaagctagtggtccttggttcaggaggcg

SEQ ID NO: 475767 - DNA, 98 bp, Homo sapiens
aaactgcagccagttactatggcagttgcaaaatattcaggagaccgtcgttgccttgtatttccagagaacaggagtttgttcatctggcaaagaga

SEQ ID NO: 475768 - DNA, 100 bp, Homo sapiens
ggagagcttggtgaaacagagattctggagtcctccctctgaagatttgagtaggataagttctgaacgtcgaaaagaaaagtctcgagatgcagccaga

SEQ ID NO: 475769 - DNA, 100 bp, Homo sapiens
caaccacctggatgtgggagtgggccggggtaatgtcacccagcacgtgcaaggacacaggaacctctccacgggagagcacatctgcctgatccgcaag

SEQ ID NO: 475770 - DNA, 100 bp, Homo sapiens
gtatcctccgaagctatggcctgaagacgggattctttagcttcttggacacttaatgattgttggcaagaaatgtgctgctgatctgggcctgaataag

SEQ ID NO: 475771 - DNA, 82 bp, Homo sapiens
ctctgccctcctggcgggcccggcggctctcactatccaggtgacttaagagattaaaattaatttggttgctgttggttct

SEQ ID NO: 475772 - DNA, 107 bp, Homo sapiens
gatgaagaagaggaggaatggcatttgaaaaatgctattagagtagatggaaaggttccaggaagaaggtgcattttggcagcatacatgatgcagtacgagctgga

SEQ ID NO: 475773 - DNA, 101 bp, Homo sapiens
gccaatggtggagaagaaaacttcgggttgcagccccacccacgtcacggtgtacagcgagtatggcgtggacgtctttgatgtgcgcaccatggagtggg

SEQ ID NO: 475774 - DNA, 74 bp, Homo sapiens
aggtgctgggacagccatggtttcagacggagcagttgcagaagctcgaggttgaactgagagaagtcactaag

SEQ ID NO: 475775 - DNA, 90 bp, Homo sapiens
atgtatagactccaacaattgaggaccgtataatagacgctggccccaaaggaaactactctcgatttatgaatcacagctgccagccca

SEQ ID NO: 475776 - DNA, 98 bp, Homo sapiens
aaggaattgtggccatttgatataattctggatggaagacctcttatttgtattacattgaattagagattcgacggaggcgccttgcacgacttgct

SEQ ID NO: 475777 - DNA, 75 bp, Homo sapiens
ggaggggggttttcatcaccaacgagaccggccagccgctgattgggaagaaccagaaggaccctggtgtccttg

SEQ ID NO: 475778 - DNA, 124 bp, Homo sapiens
ctgtagaaaccaaagatgaacgatttgaacaaagcgctagcaacttctaccaacaacaggtactaggttttgacaagcttgcatcatgcgtgagtataagctagtcgttcttggctcaggaggc

SEQ ID NO: 475779 - DNA, 82 bp, Homo sapiens
tcctggcccgaaaggagagcctgtgaatgaaaactttgccattgatttgatagcagagcagcccgtgagcgaggtggagact

SEQ ID NO: 475780 - DNA, 74 bp, Homo sapiens
caaaaatagtgatagctttgataaagcaaacatgaacgttggagttgcccacagtgaagtgaatccaaataccc

SEQ ID NO: 475781 - DNA, 98 bp, Homo sapiens
tctgatgtggcatctagactttggtttacatacaggaaaaactttccagccattggttatgccaaggacgccctgaatctggcacagatgcaggagca

SEQ ID NO: 475782 - DNA, 89 bp, Homo sapiens
cagcgatccgcgggctggcgacgtagaggaggacgcctcacagctcatctttcctaaagtgccaaacccaagtctgaaatccacgtgtc

SEQ ID NO: 475783 - DNA, 100 bp, Homo sapiens
tgcctggcctcacgggaacaagcaaggagtcatatatccttcatatgatccatcttagtgaagaattaggatacagctttggacatcagacagtgcagga

SEQ ID NO: 475784 - DNA, 78 bp, Homo sapiens
cacatggcacgggaattatgaatacaactgatctgacggcattagccaaagaactaagagaactccggattgaagaaa

SEQ ID NO: 475785 - DNA, 100 bp, Homo sapiens
caaaattaaaagaggagcagcatggcatttcagtcactggtttgcagagtccagtgtgaccgcaacaagggaaaacatggcttatactgtggaatgcctg

SEQ ID NO: 475786 - DNA, 100 bp, Homo sapiens
cccctccagccctcgccgccctcgccaccgctcccggccgccgcgctccggtacacacagatgggcgcagttcttcatccacccactaatgatcagagat

SEQ ID NO: 475787 - DNA, 83 bp, Homo sapiens
ctctgccaccttctccagcattgtgaaagagtttattaaccacttaacctctcagaactgaacaaagacaacattgttcctgg

SEQ ID NO: 475788 - DNA, 101 bp, Homo sapiens
cgccaccgccacgctacacacagaagtctggcaagttgatgagcagatagatcactacaaggaaagccaagacaaacttccttggcaagctgcattcatag

SEQ ID NO: 475789 - DNA, 76 bp, Homo sapiens
tccagtggcaaacagctgtataaactcttgtaaacagtacacggagtatgggaggaatggtcaccatggagtttat

SEQ ID NO: 475790 - DNA, 100 bp, Homo sapiens
gctgtggaacatccagcactgatgttcacctccatttctcaatgtgaaagctttacatcattaagatgagttgaatatagatttcaattaatgttcttcc

SEQ ID NO: 475791 - DNA, 75 bp, Homo sapiens
gtttgctcgaaagcccttctgtgttatagaatgtgacagtgatgataacatgggtgccaaaaatacttcaatagg

SEQ ID NO: 475792 - DNA, 75 bp, Homo sapiens
tcatcatcttcatccccgagtaaggactcctcaagaggagagggtcatgtaggtacaacagcaaccaagaagatc

SEQ ID NO: 475793 - DNA, 97 bp, Homo sapiens
ggaagccgactgctgcctggtctgcaaagaagtcctttcaagtctctaggactggactcttcctaagcaagtccgagctaaagttgcagacaagatc

SEQ ID NO: 475794 - DNA, 75 bp, Homo sapiens
gagaagcggccgcggccagggaacggggcatcgcggttccaacgatcatggaagggaagtggttgctgtgtatgt

SEQ ID NO: 475795 - DNA, 75 bp, Homo sapiens
gacatcctggaagctgggaaatgagctgccaaacggaggcccgaagaaaaagaacctgaaaaagtaaatccacag

SEQ ID NO: 475796 - DNA, 100 bp, Homo sapiens
aattcagaaggagctagctgaaataacccttgatcctcctcctaattgcaggtgtcatggagaaactccagctgggcccagagattctgcagcgggaaaa

SEQ ID NO: 475797 - DNA, 50 bp, Homo sapiens
caaagatctcgtacaagatccttcttttgtaaacaggaacatcgataagt

SEQ ID NO: 475798 - DNA, 91 bp, Homo sapiens
ccggactccatcgactcccccggctcttagactagtcagcccaaggccaaccccactgtcactctgttcccgccctcctctgaggagctcc

SEQ ID NO: 475799 - DNA, 90 bp, Homo sapiens
gctctgtgcaatcctcacattcaagctgataggctgcgctaccggaatgtcatccagcgagtgattaggctggacaccaaccagttccag

SEQ ID NO: 475800 - DNA, 100 bp, Homo sapiens
gtcaggtacctcaaagcgtaagtgttgtggaatacttaagcaatggaggagtagctgacaaccataaagacttcaaggaactaaggtacaatgagtgtct

SEQ ID NO: 475801 - DNA, 98 bp, Homo sapiens
ggcccccgatcaccatgtcggctttcgacaccaaccccttcgcggacccagtggatgtaaaccccttccagcattttctgcattagcaaatatcgacc

SEQ ID NO: 475802 - DNA, 100 bp, Homo sapiens
ctgttccagccttccttcctgggtgttcgtactggcgttcaccttcctcatcctcttcctcggcaacttcctgaccacgctcaaagtcgtgcatgccaag

SEQ ID NO: 475803 - DNA, 101 bp, Homo sapiens
ggcaagagggagttaaggacattccaggcagaggcaagaccctgcagatggagaaggcccagagacattaagctcagcactctctaaaggagcaacagttt

SEQ ID NO: 475804 - DNA, 46 bp, Homo sapiens
gacatctgaaagccaggaaatgtcgagtaatcctgcctgtgtctgt

SEQ ID NO: 475805 - DNA, 51 bp, Homo sapiens
ccctttccttctctacagaaatgccagatagactaaggtgtcagtatgttc

SEQ ID NO: 475806 - DNA, 100 bp, Homo sapiens
tcagattttgaagctaaagttaagcagcctaaacagcgaacatccattgtgtcttctctggattttcaccgaatgaatcacaaccaagaatattttgaaa

SEQ ID NO: 475807 - DNA, 83 bp, Homo sapiens
cggaacctttttagtgccggactccgggccgcaggcagtcccgcggcagcaggatcacagacaatgcagatcttcgtgaagac

SEQ ID NO: 475808 - DNA, 80 bp, Homo sapiens
cgtttttcggatgatgccttcaatactacctttatttccaccatagttccaggaatggatggaggtgctttaactgatac

SEQ ID NO: 475809 - DNA, 75 bp, Homo sapiens
ctgctcctggtgcagtggaagcagaggcacccacgctcctacaatgaggctgaaccgtctgagcccagaagtgct

SEQ ID NO: 475810 - DNA, 82 bp, Homo sapiens
ctggacctgcggccgcccgtgtgtgacgtcaggagggaaaacccctgatcctaaaatgaatgctaggacttacatggatgta

SEQ ID NO: 475811 - DNA, 49 bp, Homo sapiens
ctggagtttgtgacgctgtgatgcttggattagaagaacaagaaagact

SEQ ID NO: 475812 - DNA, 71 bp, Homo sapiens
tggggcgacgaggcgattgcgggggcctgggctaggtgacagagttagtccttgataattgcctgtgtgtc

SEQ ID NO: 475813 - DNA, 100 bp, Homo sapiens
ggaaatccccagctcccctctggactgccttccgggaaaatctggatgcttgccgtttaaaagccaatgaagcccctccacgtccttggagccccgcaac

SEQ ID NO: 475814 - DNA, 100 bp, Homo sapiens
gacaggagcattaccacctcagccaccctgaccactatcatcaccatggaaaaagtgacttgagcagatgtttctttctcagcaaaatagaggagaagct

SEQ ID NO: 475815 - DNA, 100 bp, Homo sapiens
ctatttactgaggacccactggatgtcaagcattgtgcatagttttcttcgattgttgcaacatcccttgcgaggtatttacatgaggaatttccagagt

SEQ ID NO: 475816 - DNA, 82 bp, Homo sapiens
tggatcccaatgattcagatgtggaggagaatatatcctctaaatctgatatattgtactccaagatacttggattacgaag

SEQ ID NO: 475817 - DNA, 100 bp, Homo sapiens
ggcaggggctgcaggagcaagtgaccaggagcaggactggggacaggagcctcctcaacaagcccaagagtgagatgaccccagaggagctgcagaagcg

SEQ ID NO: 475818 - DNA, 82 bp, Homo sapiens
tgggcaaactaagccgattttccggaaaaagcacacaggtgaactccagaaagaagaagctatggccgcagtgattctggag

SEQ ID NO: 475819 - DNA, 75 bp, Homo sapiens
ctgcgaggaaaatggcggcgggagggcccactgatgatggtgaagaagagatggaagaagacacagtcacaaacg

SEQ ID NO: 475820 - DNA, 83 bp, Homo sapiens
gataaatcagtgctgctttctttaggacgaaaggccagggctcgacccacagagcaccctcagccatcgcgagtttccgggcg

SEQ ID NO: 475821 - DNA, 100 bp, Homo sapiens
gccgagcagattctacaacacatggtggaatgtatccgggaggtcaacgaggtcatccagtctacgcctgcaagctctcagaccgggaacatccactcta

SEQ ID NO: 475822 - DNA, 74 bp, Homo sapiens
tgtgcttctgactatcttctcttcaccagctcttcagatcaatatggtatcacgctcattgctgtggatgaggc

SEQ ID NO: 475823 - DNA, 100 bp, Homo sapiens
tctggagcttgttgacaactggctgcccacagagcatgcccaggccaagccaaggccacctttgatgccatttctaagacctacagctacctgacccccg

SEQ ID NO: 475824 - DNA, 100 bp, Homo sapiens
tccagccccgagcgggacagcgcggcggggagcgacgataaggtacctgccgtgggcagatctgagctttcttcttggacaccccatacccacagtcctc

SEQ ID NO: 475825 - DNA, 90 bp, Homo sapiens
gcgcggatgggatccagctgttagtcgggtaggcataggactctgcccttgtccacaaggagagcacacaggagagaatggctgctgtgt

SEQ ID NO: 475826 - DNA, 98 bp, Homo sapiens
tgtcccgggggcccgaggaggtgaaccggctcacggagagcacctaccgggtggtttcctagaaacatgattgtttattggcattgatctcacagtct

SEQ ID NO: 475827 - DNA, 98 bp, Homo sapiens
ccgagctgaatacttgaaggagcaggtcaagatctgttcagcctgtgtgcgctgtaagagctgtggggcaactccaggcaagaactgggacgtcgagt

SEQ ID NO: 475828 - DNA, 73 bp, Homo sapiens
actcctgctcagtgtagcattaaggcaattcgaagttttcaagtagcccttcacatctatccaatgaaccctg

SEQ ID NO: 475829 - DNA, 82 bp, Homo sapiens
caagcccgccacgccgcccagcccggccccgcccgcgccggaagagccacgccgggtgctttcttctgcgacctggtactca

SEQ ID NO: 475830 - DNA, 97 bp, Homo sapiens
tgtagaggcgcaccagcgggtgaagtacaccaaggaccatactgtgcgctctactgataccctgaccataaatgatgaccagtgtttactcctctct

SEQ ID NO: 475831 - DNA, 100 bp, Homo sapiens
cctggctttgatggagtagtcaaggacaactacacctttgcccaacctgggattcaaatgaaagtgaaaatgttagaagaactcgtgagccggattgatg

SEQ ID NO: 475832 - DNA, 97 bp, Homo sapiens
tgaaataacccttgatcctcctcctaattgcagcctctgaagagccaatccattcaggatgggaaaccacgcaggcaaacgagaattaaatgccgag

SEQ ID NO: 475833 - DNA, 83 bp, Homo sapiens
gagacactgccaagcagccttagccctagtgtagagcgctgcaaactcctgcccctccagcccccggggagcggggtcttcag

SEQ ID NO: 475834 - DNA, 100 bp, Homo sapiens
attcctacttcatggatgtgaaatgcccagtttcattgtactgacaacctcagctggcatcatggaccatgaagaagcaagacgaaaacacacaggaggg

SEQ ID NO: 475835 - DNA, 100 bp, Homo sapiens
ggagcatacattaaaccaaaatggctacacactggttatcactgggaagaaggtgtgtcaaggatgccacaatgccatcgacccagaagtgcagcgggtg

SEQ ID NO: 475836 - DNA, 97 bp, Homo sapiens
aggctcagtctgcggccaagactccgtcctgcaagggtgtggtctgcaccctgcatgaaggagatgacttcggcaagttagcactagtgaatgatgc

SEQ ID NO: 475837 - DNA, 80 bp, Homo sapiens
ccgccacagaacttacctgcctcttcatgcagttctccatcgtgccaaacatccagtcatggataaaaatgagctggttc

SEQ ID NO: 475838 - DNA, 75 bp, Homo sapiens
gccagaggcagaaaacggacggaagaaaaggtctggccggaggaattttgttgtcagagaataaaaggaggttgt

SEQ ID NO: 475839 - DNA, 88 bp, Homo sapiens
cacatcccaccccctcagctctcccctgcccttcactcatggaagtcttcaggtgcccctgagccagcctccagaggatgagctggat

SEQ ID NO: 475840 - DNA, 90 bp, Homo sapiens
tagatactacactgaatttcctacagttcttgatattacaggtgaaattgatcttcaaattctctccaaagttcaggctcaatacccagg

SEQ ID NO: 475841 - DNA, 83 bp, Homo sapiens
ttctctcagtcgtgagggaggcgtcgacggcgtgcggtcaaaatgcagatcttcgtgaaaacccttaccggcaagaccatcac

SEQ ID NO: 475842 - DNA, 90 bp, Homo sapiens
cttactcgggagctggctgaagatggctactctggagttgagatgagacaaaaggacccagtgaaaggaatgacagcagatgactaaagc

SEQ ID NO: 475843 - DNA, 82 bp, Homo sapiens
gccattaccatcttacttatttaaggaccgggactttgtagccaagcagaaggaggacctggagctggccatgaagaggctc

SEQ ID NO: 475844 - DNA, 51 bp, Homo sapiens
tgcgccatcatcctcatcatcatcataggagcacggtctgaatctgcacag

SEQ ID NO: 475845 - DNA, 98 bp, Homo sapiens
cctggcagttgtcatatgtactgtgtcagccatcatgtgtgtcagcatgagagtagagaaatggtcagaaggaacgacaccacagaagaaattagaat

SEQ ID NO: 475846 - DNA, 88 bp, Homo sapiens
gagcacgggcaaggcggagagtgacggagtcggcgagcccccgcggcgacagatctgagtgggacatacttttgaaggatgtgcaatg

SEQ ID NO: 475847 - DNA, 75 bp, Homo sapiens
ctgggatcccggccaccagcaattgtccgggccagatattcgaagcttacaacatggcagctttgtggaaattac

SEQ ID NO: 475848 - DNA, 100 bp, Homo sapiens
aaatcattcagtgaatcccaactgttatgccaaaggttatgatgtgattgctcaagcccaatctgggactgggaaaacggccacatttgccatatcgatt

SEQ ID NO: 475849 - DNA, 74 bp, Homo sapiens
ttgggttaggtcgtcaggcgttttggaggtgtaccccgtccaggaagccctggccgtgctggagccctatgcgc

SEQ ID NO: 475850 - DNA, 74 bp, Homo sapiens
ttagatgaattgtcagacccagaatcttcaatggaacagattaaaagggccaataaactgtttaccaatgattg

SEQ ID NO: 475851 - DNA, 74 bp, Homo sapiens
cgttgaacagtcctgtatcaaaactgaagatggtttgaaacagcttcacaaggaacaagatcactcaaggtgaa

SEQ ID NO: 475852 - DNA, 83 bp, Homo sapiens
agcaccggcaagaccaccttcatcagctgctgtaagtaaagatgattccattatttcaagtcttgatgtcactgatattgcac

SEQ ID NO: 475853 - DNA, 50 bp, Homo sapiens
aaaattatcgccaagattcagcaatgttcaaagcttctttcagacaccag

SEQ ID NO: 475854 - DNA, 50 bp, Homo sapiens
ggaggtacagcaagttctttgacctgcagacccaacatgagtgaagtttc

SEQ ID NO: 475855 - DNA, 97 bp, Homo sapiens
gcgcgggacccggaggacggtatcccgagcccaccgtgctacgcagcatgtcagtgaaaaaaccagtgaatcgccttccaaaccaggagaaaagaaa

SEQ ID NO: 475856 - DNA, 100 bp, Homo sapiens
ccacctcctgacacaacaccactcatttccacagtgcctacacaacctgataatccattttctcaccctgacaaactcaaaaggatgagcaagtctgttc

SEQ ID NO: 475857 - DNA, 50 bp, Homo sapiens
aaaaaagaacaggagaagtctgaacacgagatgcatcgaaggtttgagaa

SEQ ID NO: 475858 - DNA, 87 bp, Homo sapiens
ggatttgccagggcatgtagctctccaggcttgcaagcgattaccagctcagagtcaagatctccactgaagttggcatcacaaatg

SEQ ID NO: 475859 - DNA, 100 bp, Homo sapiens
ctcggagcttatactcctcccagtgacgggtctggagtgcgtgggggaccggctgttggcggaattttgatttggctgctgggctgctaccttgaaatcc

SEQ ID NO: 475860 - DNA, 78 bp, Homo sapiens
acaagcccgggagacacagtgtcagaattacaaggtctcagcggcggtggcagccgaggtgcaggatgcaagaaggcg

SEQ ID NO: 475861 - DNA, 100 bp, Homo sapiens
cctgaagcccccggcgggcgcgcgctgcgggacgcgagcctctgcattgagaacagctgcatcgcggcccacgacaagagggggaggtacgggaccctgt

SEQ ID NO: 475862 - DNA, 100 bp, Homo sapiens
gcgcctcttctaccggggcaagcaggctcccgtcttcgtcaggaagattttccacctcgcattgttgaacacccttcagacctgattgtctcaaaaggag

SEQ ID NO: 475863 - DNA, 100 bp, Homo sapiens
tgagaggtggtgactgagactagatgcgggtgcagtaattgtgtaagtgactgcattggaactggatgtccagtgtgttacaccccggcctggatacaag

SEQ ID NO: 475864 - DNA, 100 bp, Homo sapiens
gcggcagcgaggggctcggagaggtgctcggattctcgtagctgtgccgggtgcttttgaagatgatgatatcacgcacgttgaaggaagtgtagatcct

SEQ ID NO: 475865 - DNA, 96 bp, Homo sapiens
cattgacatttaattttagggtcctttatatagaagggagagtaggaaacccctcctggagtttccccaaagccatggacagccctagtcttcgtg

SEQ ID NO: 475866 - DNA, 50 bp, Homo sapiens
ttcagggcggaaggcgcgctaagagcaggcagcagcagcggaaccgctta

SEQ ID NO: 475867 - DNA, 75 bp, Homo sapiens
aattaagcagatgctccagtttgagaaacctggatctgcgatctgtttgtgacggtatccaactgttgaaaaacg

SEQ ID NO: 475868 - DNA, 106 bp, Homo sapiens
ggaacactggcatcatctgtaccattggaatgggaaaaggacagcacaggatgccctccaaggatgagctggtccagagatacaacaggatgaataccatccccca

SEQ ID NO: 475869 - DNA, 100 bp, Homo sapiens
cgccggatgagttgcttttaggcttgctggcccgcggggctgtccaggcacgcgaggcccctcagatacagatccacgggttttagaaaaacaagaatta

SEQ ID NO: 475870 - DNA, 82 bp, Homo sapiens
cgccgccaccatgcccaagagaaaggaccatgaatggcacctacaacacctgtggctccagcgacctcacctggcccccagc

SEQ ID NO: 475871 - DNA, 82 bp, Homo sapiens
ggctgccgccccgaaacaacgcccacgcccgggagaagggcaggctggcgtccagtaaaatgtttattggaggcttgagctg

SEQ ID NO: 475872 - DNA, 74 bp, Homo sapiens
atgttccaggcttgtacattgctgtgcaggtgcagacctgaaggagcgggaacagatgagtgaagcagaggtgg

SEQ ID NO: 475873 - DNA, 100 bp, Homo sapiens
gccaggcccgggctgcagccgcgtctgatcgccgagcgcgccgcgtagacctccgctcccccaggaactgttgacattcagggatgtgaccatagaattc

SEQ ID NO: 475874 - DNA, 100 bp, Homo sapiens
tcatcacagacgccgtgctcagccttgacgaggacacggtgctttcaacaacagagtccaatatcagatggaaatgatgcggagccttcgccatgtaaac

SEQ ID NO: 475875 - DNA, 83 bp, Homo sapiens
gtgaccgagaccgcggccgggaccgagggagctggccctcagcgcactcctgaagttcgtgcagctggaaggagcgcaccccc

SEQ ID NO: 475876 - DNA, 76 bp, Homo sapiens
agaaaggacggtagacctgcccaagtctcccaagctacttgaaggaaattttgccaaagaagtgagccatgaaatg

SEQ ID NO: 475877 - DNA, 73 bp, Homo sapiens
gacaagatcatgggcaaaggacagatccaggacctcacagggggcgcctttgaggacaacctgaggtcactgc

SEQ ID NO: 475878 - DNA, 82 bp, Homo sapiens
ctacaccaccaacgcctttcccggagagtacatccccaccgtgacaactacacctttgcccaacctgggattcaaatgaaag

SEQ ID NO: 475879 - DNA, 82 bp, Homo sapiens
gaagatccttcacgcaggctttaagatgatgagcaaaattctgaaagtcaagaagacatcatccggaatattgccaggcacc

SEQ ID NO: 475880 - DNA, 128 bp, Homo sapiens
cagtcagagaagtttggcatataatcgaatagttgatgccctaaatgaattcaggctgaccggttccctgatgtgttacctgcttctgctactgatccaaactgcagaacttctcattcatccccaag

SEQ ID NO: 475881 - DNA, 75 bp, Homo sapiens
agtgacggggagatcagcatttgcatggaacacatggtgaacttcacggtagaccagatccgcgccatcatggac

SEQ ID NO: 475882 - DNA, 74 bp, Homo sapiens
agccatggatggtggagggagcgaatccacacgagagctctccagcggatctgtactcagccgagcctggggag

SEQ ID NO: 475883 - DNA, 97 bp, Homo sapiens
tctggttgacttgacagcagtggacgtcccaactcggcaaaaccgttttgaggtttctaccatgaatgaaatgaagagttattctcaagctgtcaca

SEQ ID NO: 475884 - DNA, 99 bp, Homo sapiens
gacggcccgcgggcgtaagcggactgcagccgcgagctcctggaggcggcgggatggaggcggcggccgattatccctggcgctggagccgggccgtcc

SEQ ID NO: 475885 - DNA, 96 bp, Homo sapiens
agcgctcctggcgctgctggctgcgctctgcccggcgagtcgggctctggaggaaaagaaaggaaactactttgcttcgcactttttcatgggagg

SEQ ID NO: 475886 - DNA, 75 bp, Homo sapiens
ctaaacctgtgaccacccctgaagaaattgcacaggtggagaccattggcgatgcctattgtgtagctgggggat

SEQ ID NO: 475887 - DNA, 100 bp, Homo sapiens
atactgggggcagcacgggcttgcccaggcggaaggaggtgacggaggaggaggctgagagaaaaatggctacaaacttcctagcacatgagaagatctg

SEQ ID NO: 475888 - DNA, 75 bp, Homo sapiens
gttcgcggctctaacggggctttctacaagcctcagaatattctgttgacaagtgaatctccattgggtgacatt

SEQ ID NO: 475889 - DNA, 107 bp, Homo sapiens
gggagctgcctaggccgggccctgccagggagcaagtctgcatcgcagaggccaggtaagactttgaccccgacgcaggcttcagtgattgccgcggatcagaagcc

SEQ ID NO: 475890 - DNA, 80 bp, Homo sapiens
ccatatcataagtggaattttggagatattcaaagctttgtgtccctggtgatgttggaacattaatgatggaacatggc

SEQ ID NO: 475891 - DNA, 101 bp, Homo sapiens
agagaagacgatctgcacttcgcattttggcattgacatttaattttagggtcctttatatagaagggagagtagggaccatatgatgtggtggttctacc

SEQ ID NO: 475892 - DNA, 75 bp, Homo sapiens
tggaacaggagttccgatcgacccggtaccaagaaggggagtgcccgcggcagattcagctgctgggctcctgat

SEQ ID NO: 475893 - DNA, 49 bp, Homo sapiens
aggcgccgcgccaggccgggcgggcgacttgtccttgtgtggacgggag

SEQ ID NO: 475894 - DNA, 98 bp, Homo sapiens
acggcggagacccccgccctcaactgagttacgccccatggtgtccatcctgccagcagactgattcagaatgggaggcttttgcaaagaatggtgaa

SEQ ID NO: 475895 - DNA, 50 bp, Homo sapiens
ttctggagactccacagccccacccagggcggctaccacctggagtcact

SEQ ID NO: 475896 - DNA, 100 bp, Homo sapiens
tcttcccccatcgcggctgcgaagggtaaaataccatgaagattttgaaaaaacaaaggggagaggctttactcccgtcgtggacgatcctgtgacagag

SEQ ID NO: 475897 - DNA, 97 bp, Homo sapiens
ttggaagtggggcccacagactgacgctgctctgcttcctggattcagccctcttcctaaggtttcaagtgtcgtcagatgtatcacgcacccacag

SEQ ID NO: 475898 - DNA, 50 bp, Homo sapiens
tttgagtccccttgcccgctccttcaggggcccggacaccctaggcgatg

SEQ ID NO: 475899 - DNA, 90 bp, Homo sapiens
tcgtctcttacgtctgcggaagtgcagctgcctcagttcttagcgcaggctcctggagtccatgatccctatcaagatggtcaacttccc

SEQ ID NO: 475900 - DNA, 113 bp, Homo sapiens
cccaacggcaccagccctttgcacctcgcagctaaaaacggccacatcgacatcatcaggagaagtacagcatcggggagcccacagtgccatccaccctggcagaggagttt

SEQ ID NO: 475901 - DNA, 98 bp, Homo sapiens
agcaacatttcccacaggacacgaagtttgtcggcccttgccttggcagagctgagtgtttgaaagatgtatggtgatcttgaaacctccagacacaa

SEQ ID NO: 475902 - DNA, 75 bp, Homo sapiens
cacaagtggtcagtttggttgtggaaagataacgaaggaggcccaacttcattcaataaggagcctgacggattt

SEQ ID NO: 475903 - DNA, 98 bp, Homo sapiens
cacacctgtagacgttcgccaggtaaaggtgagcgtcctgaccaccctggagcgtaggttcaacctgcagagcgctgacgtgggtgtgatcgctagca

SEQ ID NO: 475904 - DNA, 86 bp, Homo sapiens
ttacagagggccgagaaggacaggatcaggccggacatggtggctcacacctggaatcccagaacttcaggaggctgaggtgggag

SEQ ID NO: 475905 - DNA, 50 bp, Homo sapiens
cgaaaggattggattggcatctttagagcctgatcaaccccgtataacca

SEQ ID NO: 475906 - DNA, 51 bp, Homo sapiens
attgccttgttgaaaacttatgtctattctggataagcaggttttgtgaag

SEQ ID NO: 475907 - DNA, 100 bp, Homo sapiens
agattcgcagtggtcgcttcttctccttgctcctgagactggacagactgcaggacaattccagacacggacagcagagggtgtgggtgtctggccacag

SEQ ID NO: 475908 - DNA, 100 bp, Homo sapiens
aaaagaagaaacgggcaactaaaactccaatggctctttggtgtaacgggaaactgcgctgcctgtagtaagctcatccctgcctttgagatggtgatgc

SEQ ID NO: 475909 - DNA, 97 bp, Homo sapiens
ttctgtcctgcgcgcgcagattctcgcaaatctggaagcggatcgcgtggagtgacggtcacaccgcggcggtggggagaagaattttcattgtcca

SEQ ID NO: 475910 - DNA, 82 bp, Homo sapiens
gtctggtcaggcgtcaggctagtccgacgaagagtggacaatgcagatcttcgtgaagactctgactggtaagaccatcacc

SEQ ID NO: 475911 - DNA, 87 bp, Homo sapiens
tgtacgaatgagagaactactgtggagaaaggaagattgccagaggttttaccgagagcatgaagcaatggctgccatccggaagaa

SEQ ID NO: 475912 - DNA, 74 bp, Homo sapiens
gagagatggagagagacctagttaggagaaaatatggagaagtcttgtgcaagcaaggaagaagtcaaagaagt

SEQ ID NO: 475913 - DNA, 83 bp, Homo sapiens
gaggctacggggctcggtttggctgactggggagtcggcaggcggcagaggagcccaaggtgggcatcaagaccatcaaggtg

SEQ ID NO: 475914 - DNA, 76 bp, Homo sapiens
cgttttggcaaaatgatgataatggggtgtattttctaaatgtcaaaactggaccaatggggccaggctgaagtat

SEQ ID NO: 475915 - DNA, 101 bp, Homo sapiens
gagctgagtggttgtgtggtcgcgtctcggaaaccggtagcgcttgcagcatgattttgggaaccagtaggacattgacatacatccgagaacattctgtg

SEQ ID NO: 475916 - DNA, 80 bp, Homo sapiens
aaacccggggcaggcgggcagctgtgcccgggcggcacggccaggaagctcttcgtgggcggtcttgactggagcacgac

SEQ ID NO: 475917 - DNA, 75 bp, Homo sapiens
caggccccagacatgctgcatagcatgattatgatatgagggtggatgatttccttcgtcgcacacaagctgttg

SEQ ID NO: 475918 - DNA, 50 bp, Homo sapiens
gaagtgtgctgatgaagtcctctataaggcagcagaacttgctgaattca

SEQ ID NO: 475919 - DNA, 101 bp, Homo sapiens
gtccaattctgctcaactgcttgttgaggctcgagttcagcctaatccatcaaaacattgaacagcagagaatttcaaaggaccttgctaatatctgtaag

SEQ ID NO: 475920 - DNA, 76 bp, Homo sapiens
tcgctttccaaggacaatgtcttcgagaataaccgtttgtgacgcagccgccaaccatcaccaagcagtcagcgaa

SEQ ID NO: 475921 - DNA, 74 bp, Homo sapiens
gcgggacggctgccggcctgtgtggtggactgtggcacgggttttcggctttgtgagaaaccttaccatcaaac

SEQ ID NO: 475922 - DNA, 50 bp, Homo sapiens
cggacgtgtccgcgaagatggcgggccggcacgttcacgtccatgttctt

SEQ ID NO: 475923 - DNA, 98 bp, Homo sapiens
tggcatggaaaccagagtctccactctgggaaaaaattagagacaatgaaaacagagttcctacatgtgaagaggtcgtcatacctcagaagaaaggc

SEQ ID NO: 475924 - DNA, 82 bp, Homo sapiens
agacaatgtcatgtgattcagcctaatatctcagtagacatagctgacattgagaatgaagagaaccgctactgtctattca

SEQ ID NO: 475925 - DNA, 75 bp, Homo sapiens
tcaaagcatggggctaactccagaatcccccattgggagttctgtccaacatctcttccatcaccgatctcggcg

SEQ ID NO: 475926 - DNA, 83 bp, Homo sapiens
ggattcactaacttcagcgaaggaatataaatagtttctggaaaggacactgacaacttcaaagcaaaatgaagttctttctg

SEQ ID NO: 475927 - DNA, 75 bp, Homo sapiens
gcctttagcctcaatgacgcctcagctttctttagcttgcccatggtgatgtgaagatgagaagaaatagcaagg

SEQ ID NO: 475928 - DNA, 90 bp, Homo sapiens
ctcgtcgacatgagtgatgtggaggaaaacaacttcgagggcagacgtggtaccatgcgacgacgctatgaagatgatggcatttcagat

SEQ ID NO: 475929 - DNA, 101 bp, Homo sapiens
tgcgatccatgcccatccgaaaggatgatgaagttcaggttgtactggtcagtggacatctggacagctgggatgttgggcagggtgccatggatgatggc

SEQ ID NO: 475930 - DNA, 100 bp, Homo sapiens
ctggggaagacaggtggcaggaaaaggtgttttcattcacggattatttctggatggagcttcctggaatagaaagatcaagaaacttgcagaatcgcat

SEQ ID NO: 475931 - DNA, 100 bp, Homo sapiens
caatctgggcggcgtgcccagcaagagattaaagatgcagtacgccacggggccgctgctcaagttccagatttgatataattggtgattacaactttcc

SEQ ID NO: 475932 - DNA, 83 bp, Homo sapiens
gcaagaacaaggtgacacatattctgtctgtccacgatagtgccaggcctatgttggagctggtaggtgagtgctgtcctcgg

SEQ ID NO: 475933 - DNA, 75 bp, Homo sapiens
ctgacactatggacttcagacatgcagggtgacgattttgtgaacaatttggcatgaggagagaaaggaacctga

SEQ ID NO: 475934 - DNA, 76 bp, Homo sapiens
ggtggatcctctggtaccgctgcgaagcttgatgaggaacttgaggcaagtcaccagcccctgatcatttcgccta

SEQ ID NO: 475935 - DNA, 100 bp, Homo sapiens
tctagatcaacaatcaaagacaatatcaatgacaaactgacggaaaaggagagagagacagtggcagctacaaacatgaatgaaacaagtagccgttccc

SEQ ID NO: 475936 - DNA, 88 bp, Homo sapiens
gggtttgtgagcctggactcgccctcctatgtcctgtacagacctggaatggccaaatatcaaggtgaagttcaaagtttgaaactgg

SEQ ID NO: 475937 - DNA, 98 bp, Homo sapiens
cagaactactgctaggagaggaacgttacacaccagccatagatgtttggagctgtgggaccgtagcatcctgagacattttgaattgacacttctca

SEQ ID NO: 475938 - DNA, 75 bp, Homo sapiens
gacgctgagggcagccccgtccagggtaccttgaggttatgcggaaactccagaaaacatacaggatggagccag

SEQ ID NO: 475939 - DNA, 149 bp, Homo sapiens
ccagattcccatggaagcgccgcgatgttcgccccccggctgctggatttccagaagacgaaatacgcgagcgcccgggggctggagaaggccaggcagcagctgcaggaggagctccggcaggtcagcggccagctgttggaggagag

SEQ ID NO: 475940 - DNA, 85 bp, Homo sapiens
tccgaactctaatatgagcagcatggtagttacagattgtgattgctagcattatgtgcagttacaataaaaatgactggacgga

SEQ ID NO: 475941 - DNA, 99 bp, Homo sapiens
gcagggaggatgtcgggacaccccggaagctgggaaatgcccccaaatacatcaagatgtttgtactggatgaagctgacgaaatgttaagccgtggat

SEQ ID NO: 475942 - DNA, 82 bp, Homo sapiens
caacattttttgaaatttttaagacacgctgcaacaaagcaggtacgacaccgagcttctggtcaggtgatggctcttaaga

SEQ ID NO: 475943 - DNA, 80 bp, Homo sapiens
aaactggcactgattcaaattcaacagaatcctctgaaacttccacaggtaagaatgattgatgttggctgatattggag

SEQ ID NO: 475944 - DNA, 101 bp, Homo sapiens
cacctccagcccctgcgcctcggcctccccatggccacccatggaccagtcggcattcacttcctcccttctgcggcccataaaagccctgggttcaggca

SEQ ID NO: 475945 - DNA, 82 bp, Homo sapiens
cagatctgaggatcaaggagaagctctttctggaagctttcaaagctttggggggaaaagggggcctggtgaccaggaccgt

SEQ ID NO: 475946 - DNA, 73 bp, Homo sapiens
cgttctgtgtcctggtcgcagttcaacaaggctgctgacagtgatgatgaagatttggatgacttatttgtgg

SEQ ID NO: 475947 - DNA, 90 bp, Homo sapiens
aaagaggagccagttaccatgactcatccaggtgctggagaatctggtaaaagcaccattgtgaagcagatgaggatcctgcatgttaat

SEQ ID NO: 475948 - DNA, 99 bp, Homo sapiens
ccagttgtttgacaagagtggaaatggagaggtgacatttggtgctggagaatctggtaaaagcaccattgtgaagcagatgaggatcctgcatgttaa

SEQ ID NO: 475949 - DNA, 90 bp, Homo sapiens
gaggccgacttcttgtatgcatactccacagcacctggctgcagacctgcagctggaaatgacacagaagcctcataagaagcctggccc

SEQ ID NO: 475950 - DNA, 73 bp, Homo sapiens
gtcaggtcacttcccgtcgcccatccggctggagtttgagaaggtctcttcagagctgctgtgcccagtggtg

SEQ ID NO: 475951 - DNA, 101 bp, Homo sapiens
ttggcgcctgaggttctcccattagcttagcagtgtctgcaaaaacgaatcttttcctacaacctgttaactgactggactgttggtaacaaagtaattgt

SEQ ID NO: 475952 - DNA, 100 bp, Homo sapiens
gtgtctacattgatctgggctgctcctcgactccagtcagaagtggctgagttgaaaatagttcaaaccttgtactactcagctgatcacaagctgcttg

SEQ ID NO: 475953 - DNA, 99 bp, Homo sapiens
catggcgacgcggggccatgtgcaggaccctaacgacaggcgcctccggcccatttacggtgtgcctacaggggttgtggaaggagacgctgcccccgg

SEQ ID NO: 475954 - DNA, 90 bp, Homo sapiens
gcgggagaaggaggaggaggagccggaggaagagtcttactactttgaccgcgatgatgtggctttgaagaactttgccaaatactttct

SEQ ID NO: 475955 - DNA, 97 bp, Homo sapiens
ctgcctccagctgccaggggggacagccagccagcagcaggaggtgctgggcctaaaggagataacatttatgaatggagatcaactatacttggtc

SEQ ID NO: 475956 - DNA, 74 bp, Homo sapiens
gcgaccacccggagtgattgcccggcagagcgcgagtgctgcagcagctcccagtccagtgctaggaaacattc

SEQ ID NO: 475957 - DNA, 100 bp, Homo sapiens
cctttctgctgacatcgccatggccacccgtgcagatgaggacggagacacaaggaaagccacgcaagttggggagaaaacccccaaggatgaatctgcc

SEQ ID NO: 475958 - DNA, 100 bp, Homo sapiens
tggaaataagaccgcatcctccgtgatagaattgacctgtacaaagacggtgggcagacctgcattcaagagatcgtctggggaatatttttcatcttag

SEQ ID NO: 475959 - DNA, 80 bp, Homo sapiens
cctcaccctcatctatatcctttggcagctcacagataatggattcatacccgattcacttctggaagatgtgatgaaag

SEQ ID NO: 475960 - DNA, 82 bp, Homo sapiens
gttcattgaactcatccggcagaataagagactggacgctgtgagacaatgcagatcttcgtgaagactctgactggtaaga

SEQ ID NO: 475961 - DNA, 100 bp, Homo sapiens
acgccagcggcgtcgagaggaccatcctgggtgctggccctgtgctggaggacactcatgaggaccatgatacttccactgagaatacagacgagtccaa

SEQ ID NO: 475962 - DNA, 101 bp, Homo sapiens
gtcgaagcagcagctctcgctccagaagcttcactttggaagatgaagtcctcagtacattctgaagaagatgattttgttccagagctacatagaaatgt

SEQ ID NO: 475963 - DNA, 75 bp, Homo sapiens
ccctgggctgggcgtcagccgccaccggcagcagcagcaccaccggacggttttctgtctcaactggtctctgac

SEQ ID NO: 475964 - DNA, 75 bp, Homo sapiens
aaaacttgaagcaacccttaatgtgcatgatggttgtctgctggaggaggtgaagtggcatcgatgtcatctttg

SEQ ID NO: 475965 - DNA, 100 bp, Homo sapiens
gcagctcatcacccagtacgagcgggagaaggcgctgcgcaagcacgctgaggagatataacacgtgggaaccggaggagaacatcctggaccccaggct

SEQ ID NO: 475966 - DNA, 82 bp, Homo sapiens
aggacaaggggaaatggaaggggcctccagggtctgcagacaaggcaggagcagcccgacggccatggaggctgaagagacg

SEQ ID NO: 475967 - DNA, 100 bp, Homo sapiens
tggatccagagacacaggcacgactagaagcattgctagaagcagcagttactgtaaaatggggaaaggagaaatttgaaggtgtagaattgaatacaga

SEQ ID NO: 475968 - DNA, 96 bp, Homo sapiens
ccaggattcaagatctggacataatgagacatatctgaagagatggattaagaatgctttggattaaggattgtggagcacatttcaatcatttta

SEQ ID NO: 475969 - DNA, 101 bp, Homo sapiens
agccagccgctgttttgccggaggagcccctcaggccatttcagccttccaagttctgatgtaacaaacaacttaaaacccagtcttcatccacagatgaa

SEQ ID NO: 475970 - DNA, 80 bp, Homo sapiens
attcgcccctgaagcccctcagcgactcagaccctgacagtgacaaagtccagagaaaatgttgcaaaaagagttacaga

SEQ ID NO: 475971 - DNA, 110 bp, Homo sapiens
ggcggcggctgctgctgctgctgcccgcgtccgaggctcgcgggcggcgggcccggtgttatagttttgccgctggactcttccctcccttcccccaccccatcaggatg

SEQ ID NO: 475972 - DNA, 82 bp, Homo sapiens
gcaggatggcgcggccgagtccccgtacggccacccggcggatccggaagaccacggccagccaggtgtacgagacattgct

SEQ ID NO: 475973 - DNA, 50 bp, Homo sapiens
ggaaaacttcccttccctttcggcttatgtacagaagtacgtcgtgaaga

SEQ ID NO: 475974 - DNA, 88 bp, Homo sapiens
ctttgacaatttaaaaaagaacaatataaaggaagcctctgaacttttgaagaatatggataactgggatgacgatgatgatgaaaaa

SEQ ID NO: 475975 - DNA, 75 bp, Homo sapiens
gcagcttattccaagctttgctagtttcagaagaggagccccgccgaggcatgagggccgtgctccccccagagg

SEQ ID NO: 475976 - DNA, 76 bp, Homo sapiens
actgcctcaccagcctgacccaggaccggggcgggcacggcgccacagtgcggcaccttcccgtctgatgctggcg

SEQ ID NO: 475977 - DNA, 89 bp, Homo sapiens
agccccagacggaaagagctacttgctgagactgaagatggaggaggaaggcacagaagataatggcctggaagacgattccagagacg

SEQ ID NO: 475978 - DNA, 82 bp, Homo sapiens
ggacttctctgcacagcatccctgtgacaggtgtctgacttccagcaactgctggcctgtgccagggtgcaagctgagcact

SEQ ID NO: 475979 - DNA, 89 bp, Homo sapiens
tgccgttttttgggcaaggaatgaatgcggaaagaccggcagagaccaatgccaatgtggacaactcggcgtccccctcggtggcccag

SEQ ID NO: 475980 - DNA, 75 bp, Homo sapiens
gaggacgcgcccggcgcccctgagccggccgagcggcgacggaccgcgaggagaagatggtataaactggtccat

SEQ ID NO: 475981 - DNA, 51 bp, Homo sapiens
tggagaactacaggaacctggagtctgtggagatgcggtcttgctgtgttg

SEQ ID NO: 475982 - DNA, 100 bp, Homo sapiens
ttgggcttcagaggcccaaattgaggcgcaatgatgagaggatgtggtggtctactctgatgtcaatcttgagggctagatgatccctctgataagccac

SEQ ID NO: 475983 - DNA, 96 bp, Homo sapiens
tgttccagtggcaaacagctgtataaactcttgtaaacagaacttggagcgtgatgcccagaagtgtgtgaactggtctgtgaccacaaagatgag

SEQ ID NO: 475984 - DNA, 83 bp, Homo sapiens
caaaatgcaaaaaaggaggccaaagactttggtgtcgtagtcattcttcagcacaattcttaattggagaccaagaaccctgg

SEQ ID NO: 475985 - DNA, 50 bp, Homo sapiens
atgctcacactgttggtgtaaggatgagttttgatcatcctgagaaaaat

SEQ ID NO: 475986 - DNA, 82 bp, Homo sapiens
tgaccacaggtgaagctgagacccgcgtccccactatgagacaatgcagatcttcgtgaagactctgactggtaagaccatc

SEQ ID NO: 475987 - DNA, 101 bp, Homo sapiens
cggcccgcttcctggaatggcaagcgcagcaacaacagagagcacgtgcaaattgtggctactaatttgccccctgaagatcaagatggctctggggatga

SEQ ID NO: 475988 - DNA, 100 bp, Homo sapiens
ctttccgtgatgtcattttgaaagaggacagacaatagctgtggggaaagattcctgaatttgacaacttgtacctggatatgaatggaattatacatca

SEQ ID NO: 475989 - DNA, 75 bp, Homo sapiens
actttgcacattatgaaaagcgtcaagaagaggaggaagccatgcgtagggggtattccctcagcggatactaca

SEQ ID NO: 475990 - DNA, 116 bp, Homo sapiens
ggttggtgaaggaagcattcagtcctctcgatataagaaggaatcaaagtcaggccttgtgaaaccagccctggtacctgacagtgtaaagaaggagctcctacaaagaataagaa

SEQ ID NO: 475991 - DNA, 90 bp, Homo sapiens
gggaccatctcatcactaagcgggatcttgccctcagtgaaggagatattcacactttggtaatagcctgcagctggtgttttgagaagc

SEQ ID NO: 475992 - DNA, 100 bp, Homo sapiens
agtccttgggctcagtgccaggaggatgggccaactcaaaatctgaagcctgatttgctctttacccaggactctgaagatggagtctcgctctgtcgcc

SEQ ID NO: 475993 - DNA, 51 bp, Homo sapiens
tagtaaatttttatgctgactgggaggatgtatggcgctgatgacttcttg

SEQ ID NO: 475994 - DNA, 100 bp, Homo sapiens
atgtttcgaagacctgtattacaggctggctggagggcgtgaggctctcagacggggagcgaggctggtttcctgtgcagcaggtggagttcatttccaa

SEQ ID NO: 475995 - DNA, 100 bp, Homo sapiens
aggaaacaccctgatatcagtggattatgaaatttttgggaaggtgcaaggggtgtttttccgtaagcatactcagacaggacagctggagcccctgctg

SEQ ID NO: 475996 - DNA, 100 bp, Homo sapiens
agcggattgcagcggaaaagcaaaggtgtgatgaatgcagactctgctaccattttggctgtttggatcctcctttgaaaaagtctcctaaacagacagg

SEQ ID NO: 475997 - DNA, 82 bp, Homo sapiens
ggagcaccaggatctcgggctcggaacgagactgcacggtgacaaccaaagccaagcaactgaaggattcagtgacctgctc

SEQ ID NO: 475998 - DNA, 84 bp, Homo sapiens
gctagccatcttctaattttcattccttcaaaggaacagtggaggccatgtgtcttttggcagtcagtccagatgggaattggc

SEQ ID NO: 475999 - DNA, 100 bp, Homo sapiens
cttgccggcagaacttacgctgcgggaccccgggcactgttgctgctgcgggagtttctcccgtacatcccagtccagccccagcctctggagttatctt

SEQ ID NO: 476000 - DNA, 98 bp, Homo sapiens
ccaagaacagcgtgggctctgggcgcatcagcgagatcatcgaggccaagacccacgggcgggtctcgcccaagaacttcaaggtgaaaatgatcatg

SEQ ID NO: 476001 - DNA, 51 bp, Homo sapiens
gtatctgaggatggagaactcagcaggctgtcttcatcggtggaatacaac

SEQ ID NO: 476002 - DNA, 82 bp, Homo sapiens
cccaggtgtaagcgcagaaagcaggcgaacccgcggcgcaataacggagggtgtgaagacagagaatgaccacatcaacctg

SEQ ID NO: 476003 - DNA, 51 bp, Homo sapiens
ggagatatggcgcaactgcggcgccggaaggagagttttacatggaagtgg

SEQ ID NO: 476004 - DNA, 100 bp, Homo sapiens
ggaccttaacagggagccatggatgctcgtcagaagttccgctctgttctggttgaagcaacggtgaaactggatgaactggtgaagaaaattggcaaag

SEQ ID NO: 476005 - DNA, 98 bp, Homo sapiens
ggcaaatcaagcctagtgcttcgttttgtgaaaggccaatttcatgaatttcaagagagtaccattggggctcttgcaagcttaggatatgaaaagag

SEQ ID NO: 476006 - DNA, 98 bp, Homo sapiens
aagattaacctggagttaaggaacagatccccggaggaggtccatggctaatgaaacacagaaggttggtgccatccattttccttttcccttcacac

SEQ ID NO: 476007 - DNA, 109 bp, Homo sapiens
cattttcaaaaccttgttctataatactttgtgctgggcaagagggatctaaggtgtggatgtggaagcagccaagcgggcagaagaggaattgctccttcatgacacg

SEQ ID NO: 476008 - DNA, 50 bp, Homo sapiens
aagcttgaatatgaaaagtcagaccaagatcactccatggatgaaatgac

SEQ ID NO: 476009 - DNA, 100 bp, Homo sapiens
gagactgttaggcccagaagaacaattagggtgacgtgtgcattgagtaaacgtatctgcccaaactggaacttatgctgtagacatttctttgtggttt

SEQ ID NO: 476010 - DNA, 75 bp, Homo sapiens
cgtggctcaagcaggacaatcgcactttataccacctgcgattactatgccagcctgttattgcgctccaggcca

SEQ ID NO: 476011 - DNA, 75 bp, Homo sapiens
cctggatcttcgaacttttgacacggctttggaaacgacgtcatgtgttagattcttcgctgctgctgccttacc

SEQ ID NO: 476012 - DNA, 75 bp, Homo sapiens
gtcctgccgggtccacggcggcagatacaaactggactctcaggacaaaacgacaccagccaaaccagcagcccc

SEQ ID NO: 476013 - DNA, 98 bp, Homo sapiens
cggacgggaaggcgggagacgagaagcctgaaaagtcgcagcgagctggagccgccggaggttctcctgaaaagaaagctgaacattcatctataaat

SEQ ID NO: 476014 - DNA, 74 bp, Homo sapiens
aaggaaacctttccaacacagatgtccaagctgccaagctgttttggagtcagcggaagatcaccaaggccagg

SEQ ID NO: 476015 - DNA, 98 bp, Homo sapiens
gtgaacgttcccttccatttagcactgagccagccatacgtcgtgtgccggcagtgtcctgagtacagaaggcaggcggcgcagcctccccactgccc

SEQ ID NO: 476016 - DNA, 74 bp, Homo sapiens
tcagtatctcagtcctccagtgtttggatattcagtgtgctggaattgatgttcgtctgtgtgatgttggtgag

SEQ ID NO: 476017 - DNA, 83 bp, Homo sapiens
cgagaccgtcctggcgcgatgcgtcaagtacactgaaattcatcctgagatgagggtgtcttttatgaataatcaaaagcagc

SEQ ID NO: 476018 - DNA, 74 bp, Homo sapiens
cgcggagcccggctcccgcaccatggaggaggacgacagctacgaaacacatttactccccaataattgtacgg

SEQ ID NO: 476019 - DNA, 100 bp, Homo sapiens
gcgccgcgaacttggtggccagcgccgcgcccggggccgtgcgctctcgggccactcggccgcaggtaggtgagctcgtgaaacaatatgaagaggagaa

SEQ ID NO: 476020 - DNA, 82 bp, Homo sapiens
cttgaatctctcaaagtcatccatgagggttggaaccaacatcttccaaactcctgacagagtttcactcctgttacccagg

SEQ ID NO: 476021 - DNA, 100 bp, Homo sapiens
accctccttgcagcctcccccagaaagcaatgataattcccaggacagtcagtctggtactaacaatgcaggtcttgggctggcacgaagagctgcccgg

SEQ ID NO: 476022 - DNA, 99 bp, Homo sapiens
agcacgcgcgagagcggttgcaggacgactcggtggaaacagtcacgtccatagaacagatgtgaatttcttcggagtaagaaatcctcagaggaaatt

SEQ ID NO: 476023 - DNA, 101 bp, Homo sapiens
tggctgtctctaggctaagcagagtggtcaaggtggtgggcagcaacatctcccacaagctgcgcctgtcccgggtgaagcccacggacgaaggcacctac

SEQ ID NO: 476024 - DNA, 75 bp, Homo sapiens
tcgccgccgccaccatgcccaagagaaagaccatggtgaatccgggcagcagctcgcagccgcccccggtgacgg

SEQ ID NO: 476025 - DNA, 100 bp, Homo sapiens
acgttagagagactgaaaagacatctaatttcattgctcggcaggaaatgcttccagactgcacacttttacttagaggacagtacatcccctagagtta

SEQ ID NO: 476026 - DNA, 74 bp, Homo sapiens
cgtgatccgctgggccgggagcgacttccaggatatagccctggaggtggagcccccgaggaggggtcccgcgg

SEQ ID NO: 476027 - DNA, 75 bp, Homo sapiens
accagagacagaagcagatggattcgtccttttaggtagctacagcaagctgggtagcaggcagatccaaaggat

SEQ ID NO: 476028 - DNA, 100 bp, Homo sapiens
ggcgtgcgaggtcgccgcggggctggccgccatgcacaagctgcacttcctgcacagccctttctaaggcacaaaatgatgtgatggaaatgaagatgca

SEQ ID NO: 476029 - DNA, 74 bp, Homo sapiens
gcaaatgcagcgttagcagctagtgcagtaacacaagtagccaagctttttgactccacaactcttgaacatca

SEQ ID NO: 476030 - DNA, 51 bp, Homo sapiens
gaggaatctggagctgtcattttagaagataagaccatcatcatgtggaaa

SEQ ID NO: 476031 - DNA, 50 bp, Homo sapiens
ctttgaccagtatcgagacctgtctccaattgagaaacatggcactgttt

SEQ ID NO: 476032 - DNA, 105 bp, Homo sapiens
ctcgggcaccatgagcgacgtggctattgtgaaggagggttggctgcacaaacgaggtgagaagccctaccactgcaactgggacggctgcggctggaagtttgc

SEQ ID NO: 476033 - DNA, 82 bp, Homo sapiens
gccttagctgtgctcgcgctactctctctttctggcctggaggctatccagcgtctggcggcttctctgttgacaactcagc

SEQ ID NO: 476034 - DNA, 100 bp, Homo sapiens
tgtccgagggccaccaggccgccgggggcctgctgcgcccgggcagctgacacacaagagttcaggaccaaactgcacaaagtatttcgtgagatcaccc

SEQ ID NO: 476035 - DNA, 83 bp, Homo sapiens
gattaggccacaatcttcaatgagtaaacatattcctatcttgtagaaaatttcagctgtagcccttggactagaagctgaaa

SEQ ID NO: 476036 - DNA, 100 bp, Homo sapiens
agaggatggagatgaagatgaggaagctgagtcagctacgggcaagcgggcagctgaagatgatgaggtggatgggaagagagtcccaagggatgcaggg

SEQ ID NO: 476037 - DNA, 100 bp, Homo sapiens
gcggctgaaagtgtaggcatcaaacccagcctggcatgatgggcccacctcctggtatgagacctcctatgggtcccccaatggggatcccccctggaag

SEQ ID NO: 476038 - DNA, 100 bp, Homo sapiens
gaatgcttttttatctcatattagtgcctgtgatggcatctttcatctaacacagataatcattcaggtcttcgtgagctaaggccaaacaaacaaaaaa

SEQ ID NO: 476039 - DNA, 75 bp, Homo sapiens
ggaactgatagcttatggttctccattgtgatgaaagcacatggtacagattggtgaaagacaacaagtgttagt

SEQ ID NO: 476040 - DNA, 50 bp, Homo sapiens
tttgactccttgctgaatctgagcaagcccataggcagcatgtcatccat

SEQ ID NO: 476041 - DNA, 100 bp, Homo sapiens
cttcagtggggtggactccgtgcaggagctggccccgccgcccgccctaccccccaagcagcggcagctgggcaagtgtccagagaatggctgggatgaa

SEQ ID NO: 476042 - DNA, 100 bp, Homo sapiens
cttggctggacggcgcggccacggagaagggcgcggtcatggcaaaaccccaaaagatgccgcgtcagttcgagccacgcatccaataccagcagcctgt

SEQ ID NO: 476043 - DNA, 96 bp, Homo sapiens
aagatagacctgaaaaccaagtcttgtagtggagtgacttatcagatgtagacttcctagatgattcttcaacggagagtttgcttctgagtgggg

SEQ ID NO: 476044 - DNA, 101 bp, Homo sapiens
ctcatctcgctcggctgcgggaaatcgggctgaagcgactgagtccgcgatggaggaaggagccatggctctggacgggataaggatgccagatggctgct

SEQ ID NO: 476045 - DNA, 100 bp, Homo sapiens
agaagttctcgaatcattctttgtacagaaattgaaaggcttcaaagctagcagatatgtgttgagacggattctccgccgagctgtccgatacgcccat

SEQ ID NO: 476046 - DNA, 100 bp, Homo sapiens
ctggttggcccagctccttggggtttccggctgcagggcggtaaggatttcaacatgcctctgacaatctctagttgtgcagacctgggttcttcaaagc

SEQ ID NO: 476047 - DNA, 75 bp, Homo sapiens
ttcggtttcctaggcaagatcgacgaactgcgcctcttcccgccggagtggttgatttgctgagatatttttcct

SEQ ID NO: 476048 - DNA, 100 bp, Homo sapiens
gagaatctgaacctcgtctgtattcccacttccttccagggccacaacacacagtgatcttgttctaagagcaacaaagctgggaattccttatagagtt

SEQ ID NO: 476049 - DNA, 75 bp, Homo sapiens
agaagggctactgtgcctatggaactcggtgcagatgggatgtaatgaccgaatttccccaagaaagaagctcca

SEQ ID NO: 476050 - DNA, 75 bp, Homo sapiens
ccactgacaaagccccccgaaaagggcaaagcctggagatttgaaaaagagaattgaatctctgatagacagaga

SEQ ID NO: 476051 - DNA, 100 bp, Homo sapiens
cctcccgtttctggctccgggctgagcttcctggagaagaggaagcatgtgtgcctggatgattgatagcttcggaaatgaggaacagaggcacaaattt

SEQ ID NO: 476052 - DNA, 73 bp, Homo sapiens
gaacatctgggatgacatcatcacaaatcgacagaaagaatttactttcaggttttcttacctaaagggagca

SEQ ID NO: 476053 - DNA, 73 bp, Homo sapiens
ggtctgatgatgagaacacagccacgcttacgattgtcctgggtcacataatgccagctgagcgtaaaaagcc

SEQ ID NO: 476054 - DNA, 75 bp, Homo sapiens
ctgggcccaggtgtggcgtctctgtccccatctggttttagcatcttcctcacggcaattctgggcctgcccgaa

SEQ ID NO: 476055 - DNA, 100 bp, Homo sapiens
gacttcacttttgagtgcaactgccttccaggaatcacatgcagcccaactacagattcttatggaattcctcaaggttgcaagaagaaataagagagag

SEQ ID NO: 476056 - DNA, 100 bp, Homo sapiens
attgcagatctgtgccatactttcatcaaagatggagcgccttcaaaacctcttacattccagtagaaaactctctctgcaagtccttaactttgttcac

SEQ ID NO: 476057 - DNA, 100 bp, Homo sapiens
tgaagacctacaagtcagtgcttcccgggagcaagctggtggactggctgctggctcaggtggacccccaaaagtacaagggcatatttaacggattctc

SEQ ID NO: 476058 - DNA, 90 bp, Homo sapiens
ccgtttataattttgaaaaacctgttgtcatgaaggaagatgagaagtttttgtctgaagtttttgcacaattaacagatgaggctacag

SEQ ID NO: 476059 - DNA, 82 bp, Homo sapiens
ctccaggtccgacccgcgaacccctctgggatccccgccgctctgtctacaacccgaggtgctacctttttacccacactta

SEQ ID NO: 476060 - DNA, 75 bp, Homo sapiens
gccgacgcgcagatagcagagccatccttgggtgagatggaagattttcgaggtatagcagaagaatcatttcca

SEQ ID NO: 476061 - DNA, 75 bp, Homo sapiens
cctcccctctccagcacgcgagtgtcgcagaaaggacccaggagcgataacagtaaatcaaataagatatttgtc

SEQ ID NO: 476062 - DNA, 74 bp, Homo sapiens
gaaaagtgtgctggggcggaatttcaagatggatcggcaactccgaagtcaagcccgcactctgattacctttg

SEQ ID NO: 476063 - DNA, 88 bp, Homo sapiens
gttcgcgtctctctgctgcggcgcggggaccgctgtgctctcgcaattctgtggtgttcttggtcacacatttatggagtttctgaag

SEQ ID NO: 476064 - DNA, 82 bp, Homo sapiens
aggatccctcagatctgtggagcagatccgatggagaggctgagctgctccaggacttgggcaactggatgatgctcgcaac

SEQ ID NO: 476065 - DNA, 100 bp, Homo sapiens
ggggtcagctagtgtccgctctgctcggccgcgggctcccggaggactgcaggtctcctctgagcctccggcctccataagacccaaaacagatgacacc

SEQ ID NO: 476066 - DNA, 100 bp, Homo sapiens
ccacctgctggtgccctggaggctctgagccccggcggcgcccgggcccacgcggaacgacggggcgagatcatggaagggaagtggttgctgtgtatgt

SEQ ID NO: 476067 - DNA, 50 bp, Homo sapiens
acagtatatcatttcagaggaggattaagcatgaaaatattgttgccctg

SEQ ID NO: 476068 - DNA, 100 bp, Homo sapiens
ataagctgaacattatggcagccaaaagacaacaggcgggcacctgtgtcctggagtacgccacccccttgcagactttgtttgccatgtcacaatacag

SEQ ID NO: 476069 - DNA, 100 bp, Homo sapiens
gaaaaacctggaaggctggtggaagatcagtgacctgaccaacggtgcagatgggatgctggccacaagctccaatgggtctcagtacagcggctccagg

SEQ ID NO: 476070 - DNA, 85 bp, Homo sapiens
aaacttttgattttgatgctgagtacattgatagtgtggcaaaggagcagagaactttgacaagttcttcacacgaggacagccc

SEQ ID NO: 476071 - DNA, 50 bp, Homo sapiens
taagtccatggaccaggacttcggggcagcgggtggcatgagacgtggga

SEQ ID NO: 476072 - DNA, 51 bp, Homo sapiens
ctggctaggcaaataagctttaaggaatctgatgcttccaccagatgtctg

SEQ ID NO: 476073 - DNA, 100 bp, Homo sapiens
gaagattaaatctcattctcagtgtgtttttatttctcgaaattttcatactgggagattccaattacagtgtcttctgggactctcctactcattgctt

SEQ ID NO: 476074 - DNA, 83 bp, Homo sapiens
ggctccgctagcccggggggccctccccgcggggcagatgtgttctggacttggtgcctctttctgttatatgctttcctatt

SEQ ID NO: 476075 - DNA, 75 bp, Homo sapiens
tccccgttcctggagattctgattgagtactttttggggatcctgaaagccaaggggaccctgcgaccacctgag

SEQ ID NO: 476076 - DNA, 76 bp, Homo sapiens
tgatatttgtttgtgcaactacaggccaaggagacccccctgacaacatgaaggaaaatcctgccttgcttcgttg

SEQ ID NO: 476077 - DNA, 83 bp, Homo sapiens
acaggtgtgcaggtttcggcacatggagattgatgcagcctggcatcctcgctacaacctcattgttgtgggccgatacccag

SEQ ID NO: 476078 - DNA, 75 bp, Homo sapiens
agtggggctgaccctgtgaccagtgtggggaaaagctcattgctatggacagtgctatcaccctgtggcagttcc

SEQ ID NO: 476079 - DNA, 75 bp, Homo sapiens
cgggagatggaaccaaggagaaaccatttaaaacaggtctaaagccatcagtggcctatgtacataccacgccgg

SEQ ID NO: 476080 - DNA, 98 bp, Homo sapiens
atactacctttatttccaccatagattctacaagggggttgctcctctctggatgagacagataccatacaccatgatgaagttcgcctgctttgaac

SEQ ID NO: 476081 - DNA, 90 bp, Homo sapiens
atcatcacaaaggagtttattttaatgggcggaaccgtggacacgttgagtcgtggggacagcttgaaggagccaacctcaattgcagag

SEQ ID NO: 476082 - DNA, 100 bp, Homo sapiens
tccgggaccggagtcagaaccctccgcagagtaaagatcgtcagtatttaaacagatcacatcatgcgtgagtacaagctagtggtccttggttcaggag

SEQ ID NO: 476083 - DNA, 90 bp, Homo sapiens
agatcatggtgggacctcagttccaagctgacctcagcaacctgcacttgaaccggcactgtgagaagaccggcacagtcttcactaccg

SEQ ID NO: 476084 - DNA, 82 bp, Homo sapiens
acagtgacggggagatcagcatttgcatggaacacatggcctccggtgtggctgtctctgatggtgtcatcaaggtgttcaa

SEQ ID NO: 476085 - DNA, 88 bp, Homo sapiens
cttgcaggccgggcagtgcggcaaccaaatcggcgccaagccttcatcacggcggcttggattgtcctgtgccaactgtcacaccaca

SEQ ID NO: 476086 - DNA, 96 bp, Homo sapiens
cagggtatggaaccggccttctttcagccaacagacattcactcatggagaattcaagactccttcaagagcgtggcgtggcttatattaatgctg

SEQ ID NO: 476087 - DNA, 100 bp, Homo sapiens
cacatgtctgggaggataattgggatgatgacaatgtagaggatgacttctctaatcagttacgcatacggcggcatcaagaaaggagagcaattttgac

SEQ ID NO: 476088 - DNA, 90 bp, Homo sapiens
agctctcttgatttcacacattgtgcaatgtcgagtctatgctgtcttgtcaaagagagaaggtcgggtacttcaagaagaaatgaaaga

SEQ ID NO: 476089 - DNA, 98 bp, Homo sapiens
tcgggccaaggttccgcgccgggcgtggacggtgtggggcggtcccggccccgcagttacagaatgtctgaaggggacagtgtgggagaatccgtcca

SEQ ID NO: 476090 - DNA, 80 bp, Homo sapiens
aaggcggcaaaatggcggaccgcttctcccgcttcaacgaagaccgagactttcaggtcaaaatgcagatcttcgtgaaa

SEQ ID NO: 476091 - DNA, 100 bp, Homo sapiens
cttgtggataagcacaaagtcaagagacagcgattggacagaatttgtgaaggtttctgctgatgtactccacggttctgtgcagctattacaattcagc

SEQ ID NO: 476092 - DNA, 75 bp, Homo sapiens
ccgagcagcgtcatgtacccctacagcccacctgaggatattgaccataaggactcatatctcattacaagaagc

SEQ ID NO: 476093 - DNA, 101 bp, Homo sapiens
gcggctgcgctgttcgtgctgctgggattcgcgctgctgggcacccacggagcctccggggctggacatgtcatccagtgacagtgactcggactgggatg

SEQ ID NO: 476094 - DNA, 75 bp, Homo sapiens
cgagtcgcgcggaggcggaggcttgggatacgtaggtaacctttccagagatgtgacagaagtccttatacttca

SEQ ID NO: 476095 - DNA, 75 bp, Homo sapiens
aacagattgttcctaaaccagaagaggaggttgcccagaagaaaaaggccataggaaaaggatacagagtagagt

SEQ ID NO: 476096 - DNA, 73 bp, Homo sapiens
tggaattacaagagatttcgactgtggaagaaactggcgatggaatatgagaggagccctctggaaagaaaag

SEQ ID NO: 476097 - DNA, 100 bp, Homo sapiens
ggcaagaaccccatgaaagctgtgggactggcctggtgacaagggtccccaaaggctaagcgggtccagctatggttccatctccagcccgaccagcccg

SEQ ID NO: 476098 - DNA, 75 bp, Homo sapiens
gaatacattgctgattatctcatgcaggttggaatgttgcatcagcaggtagaagaacatgaaaaaatcaagcaa

SEQ ID NO: 476099 - DNA, 100 bp, Homo sapiens
cataccaatattgttgcacagactagctttcaacagacctcacatctttcttcttatgaaattataactccttggagattaactagagaaagaagagaag

SEQ ID NO: 476100 - DNA, 104 bp, Homo sapiens
gtcggtgagcgcgtttcccgcctgagcgcaactagcggcgggtcgtgggcacctccagacaatgcagatcttcgtgaagactctgactggtaagaccatcaccc

SEQ ID NO: 476101 - DNA, 51 bp, Homo sapiens
ggcaacctcactgagttagaatcagaggttatcaatactctggctgaccat

SEQ ID NO: 476102 - DNA, 75 bp, Homo sapiens
ggagaccagtgtggagagcgccgtggacacgtggaggccatagtggagtttgactaccaggcccagcacgatgat

SEQ ID NO: 476103 - DNA, 75 bp, Homo sapiens
cctccagcgagaagttgagggagaaaggcgggcccgggaacaggatgtgggctctcttgatgagaagatgaagag

SEQ ID NO: 476104 - DNA, 90 bp, Homo sapiens
cccagatcgctactaccccgcagttcccggacatgatcctctccgcctctcgagggcgtctctggccgagcctctttttgtggaaaacga

SEQ ID NO: 476105 - DNA, 82 bp, Homo sapiens
gtatttgatgctttctgaatgtgatttcaaagccatgctgtgacctacaagcaaactaaatagccaacatttctgaacccct

SEQ ID NO: 476106 - DNA, 73 bp, Homo sapiens
gaagaggaagaaggtggggaggaagaggaggaggaagaagaaggtgatgagctagagccggtgcaggccacgc

SEQ ID NO: 476107 - DNA, 74 bp, Homo sapiens
cagcctgaaggaagccatcattggtcgtggccgcccacctacagagccgctgcccgacgggtggatcatgacat

SEQ ID NO: 476108 - DNA, 87 bp, Homo sapiens
aaattacatttatgaagatgcttatgacaaactttctccagaaaatggctaaagaacgtgccaatggaatggagcttgatgggcgta

SEQ ID NO: 476109 - DNA, 100 bp, Homo sapiens
aaacaaaattcgatttgcaaatcattcagtgaatcccaactgttatgccaaagcggatgtgatgctggtacaacccagagtagaatttattctgtctttc

SEQ ID NO: 476110 - DNA, 100 bp, Homo sapiens
tacagattttggaagaaacgaattgtgggtcctacgtgtatgaactcagcgcagtcctcatacacagaggagtgagtgcttattctggccactacatcgc

SEQ ID NO: 476111 - DNA, 50 bp, Homo sapiens
tcgggaaggtcactgaacctgactcatctgatgatgtgagaagagttcag

SEQ ID NO: 476112 - DNA, 49 bp, Homo sapiens
cacactgggtacgctgtgccaagatttttcaagccacattcaattgata

SEQ ID NO: 476113 - DNA, 100 bp, Homo sapiens
agcggagcacagtccgccgagcacaagctccagcatcccgtcaggggttgcaggtgtgtgggagatccctgcatgtcactgagtccaccatgctttacag

SEQ ID NO: 476114 - DNA, 100 bp, Homo sapiens
gtaattcgtggcctgggagttcagcttttagagcaggtgtatgatcttttggaggaggaggatgaatttgatagagagaacaccaatcagggtcttcagg

SEQ ID NO: 476115 - DNA, 100 bp, Homo sapiens
attatgaagaaaatggaacagatttatccggggctggtgatccgttactgtgcagtatatgcaggatcgaggtgctgtgcttcccatcagagtccacaca

SEQ ID NO: 476116 - DNA, 75 bp, Homo sapiens
agggctatgaacgattaaaagaagaactcgcaaaagctcagagggaaacccagcgtttgctggcagaaccagttc

SEQ ID NO: 476117 - DNA, 78 bp, Homo sapiens
gtcatcacaaaagagttgattgaaattatctctggtgctgcagctctccaacagctcatcaaggaagtggatgccaaa

SEQ ID NO: 476118 - DNA, 100 bp, Homo sapiens
gaagaagaagacgactatgaagctgcttctgatttttataggaagggagttgatttactcctagaaggtgttcaaggttgccgaggagcccaagtagaag

SEQ ID NO: 476119 - DNA, 98 bp, Homo sapiens
aatacatttgacctggtggttagcagtttaagtgtcttcattggctgctctggcatggagctgatatcacacacgtaacaacgagaggttggacagca

SEQ ID NO: 476120 - DNA, 100 bp, Homo sapiens
aaatattggggccatttagtaacttctttgcaaggtagctacagcaagctgggtagcaggcagatccaaaggatatcatgaagtttccagggcctttgga

SEQ ID NO: 476121 - DNA, 100 bp, Homo sapiens
gaactacttcacattttccccaatatatgtgttccttgcctgtatctccccttggttcaatagctaccagatttttggaagaggaggaactgaggtctca

SEQ ID NO: 476122 - DNA, 82 bp, Homo sapiens
catctctttgggcccaaccagcgcccagccccctgctatgacccttgcgaatacagccttttcctccctctccatgaactct

SEQ ID NO: 476123 - DNA, 90 bp, Homo sapiens
acctttagactaatgactgtccgaaacatcgcctccatctgtaatatgaccccaaatcagatcaagtcgggaactccataccgaactccg

SEQ ID NO: 476124 - DNA, 73 bp, Homo sapiens
ggtggccggttcttggtgggatctgagcaggtacatctccgttcatggatgcattaacagccaatgggacaac

SEQ ID NO: 476125 - DNA, 104 bp, Homo sapiens
gggcaacttacccgagaacgtgcgggaagagaagatcatcgagcatttcaaacgcaaacggggattcagcgtccgatcctttggaacagggactcacgtgaagc

SEQ ID NO: 476126 - DNA, 85 bp, Homo sapiens
ggatggctttttcgggaagataaaacaggttttgaatatagccgttctggaaatcccactaggaattgccttgaaaaagcagtgg

SEQ ID NO: 476127 - DNA, 95 bp, Homo sapiens
ggttaacttgggagaaagtttcatctgtggatggagtattgggtgccttcaccagggatggaagaggcaggctgcagcagagagatgcagagttc

SEQ ID NO: 476128 - DNA, 80 bp, Homo sapiens
tcctctgcctccttcggacacaatctactcctacgtcaggccagagaggtgaaaggtgtagcagtcactcggcctacacc

SEQ ID NO: 476129 - DNA, 100 bp, Homo sapiens
tcccccgggagcacattattgacacgtttgtagtggaggtgtacacttaaagcgttctgggaatatgaatcccttctgcaccctggaatcaccagtccag

SEQ ID NO: 476130 - DNA, 48 bp, Homo sapiens
tccacatcggtcagaaaaagatatatgagatcctgactccaaactcca

SEQ ID NO: 476131 - DNA, 123 bp, Homo sapiens
gcagacggacagtacctcttctgcaggtactggaaacccacaggcacacccaagtgacagagctgaatgaacctctctccaatgaagatcgaaatctcctctctgtggcctacaagaatgtgg

SEQ ID NO: 476132 - DNA, 46 bp, Homo sapiens
aggctcttacccactttctgaagccttgatccagagcagaaggaaa

SEQ ID NO: 476133 - DNA, 98 bp, Homo sapiens
cacagtcaccttcactgggatgatgcgctgcagccagctggcccccagggccctgcaggcggggagtccattccgagagcccctgatcaagttcctga

SEQ ID NO: 476134 - DNA, 82 bp, Homo sapiens
gcccgctcacctgcgctgtgatgcctgcagagctgtggcttaccaggtcacagctctcatcaagctgaaggagtgtgaggat

SEQ ID NO: 476135 - DNA, 113 bp, Homo sapiens
catgtactgggggattcgcagggaggatgtcgggacaccccggaagctgggaaatggtcaaaatgcagatcttcgtgaaaacccttaccggcaagaccatcacccttgaggtg

SEQ ID NO: 476136 - DNA, 51 bp, Homo sapiens
tatgagaacctcatttctcttccaagaaaacccgcctagtgccaagcaacc

SEQ ID NO: 476137 - DNA, 82 bp, Homo sapiens
gggcgcagcgagaggatggtcatccgcgtgttcatcgcctcttcctcgggcttcgtggcgatgcttgtgaccacaccagaaa

SEQ ID NO: 476138 - DNA, 75 bp, Homo sapiens
aggcatgtcagctgcaattttggaggtaagaatgattgatgttggctgatattggagtgctcattcacatgaagt

SEQ ID NO: 476139 - DNA, 82 bp, Homo sapiens
gtggactccttcggcagtccacccaccgccgccgcctcccagtgatcccggccgctgatctgtcgcagcagatctccactgc

SEQ ID NO: 476140 - DNA, 51 bp, Homo sapiens
gttcgagaacgaccccgagacggctcagctgtcgcaggccctggaggagct

SEQ ID NO: 476141 - DNA, 74 bp, Homo sapiens
gttcagtatcgctacttcaaagggtactttttagaaccaaagtgccggtggtggtgtgcacattgagccccggt

SEQ ID NO: 476142 - DNA, 80 bp, Homo sapiens
cttccttccaaggaccagcggtagctcccgggtaaaggcatgacttcctggcaccacagggaaaatcgggtgcaagccca

SEQ ID NO: 476143 - DNA, 75 bp, Homo sapiens
gaagaaacaattcttcgacatactctccagcttcaagttatttcaaagttaaagacagaactctcaagcatcatt

SEQ ID NO: 476144 - DNA, 76 bp, Homo sapiens
ggcaagccccgctccggccaacaagtaccgctagagcgacatgatggtggaatctgcctcggagacaatcaggtcg

SEQ ID NO: 476145 - DNA, 75 bp, Homo sapiens
cgctctataacccctaccgccacgtggaagtagtggaggaagtggaagtcgagaaaacagtggtagcagtagtat

SEQ ID NO: 476146 - DNA, 96 bp, Homo sapiens
attcaccaaataagctatatactttggttacctatgtacctgttaccactttcaaaatttcgagaggcccgtgccatgagaccgcctggggtgagc

SEQ ID NO: 476147 - DNA, 98 bp, Homo sapiens
ggactgcctcactgagcaaccaagaatctacgcagaccccaccaagaggctggagctgtacttccggcccaaggacccatactgccacccagtgtgcg

SEQ ID NO: 476148 - DNA, 90 bp, Homo sapiens
ctcagagaagcctgtataaagatgtcatgatggagaattatggaaacctggtctcactgggtttttctatatgagtggagaagacagctg

SEQ ID NO: 476149 - DNA, 75 bp, Homo sapiens
tcaacgactccattgccgaggagctgaacaagaagttggccaacaaggcccaacagcgccctggaatcctgctcc

SEQ ID NO: 476150 - DNA, 83 bp, Homo sapiens
aggcagtacattttgggttaccgaatggccaacagaaagggagaaggtgaagaaagctgcagatcactgtcgtcagatcttaa

SEQ ID NO: 476151 - DNA, 100 bp, Homo sapiens
ctgcccaggttgacctttctgcgggagaatgttgtaccatctttgggtaggcagacttccctgacgacatcagtgatacccaaagctgagcagagcgtgg

SEQ ID NO: 476152 - DNA, 75 bp, Homo sapiens
caagacttggttaaagtcattgaggactttccagcaaagtgctcatctctcagagatctagaacttgcctaccaa

SEQ ID NO: 476153 - DNA, 100 bp, Homo sapiens
acctcatggtatatttgcagccagtactctatatgaacaatccgtctggatcacggatgtaggaagtggaggttgacaaacagccttttcgggaatggga

SEQ ID NO: 476154 - DNA, 75 bp, Homo sapiens
gatccagaagtccagagctgaggactgcctgtttgcagccaagttctatagaaattttagagtattcatcagata

SEQ ID NO: 476155 - DNA, 100 bp, Homo sapiens
gtggactcctcttctacatcaacttggctgaccattggaaagattggccagtgttcagtgacctcgataacatggcatccagagaccatgatcatctaga

SEQ ID NO: 476156 - DNA, 87 bp, Homo sapiens
gctccccgtcgtcctggtgctgcagcggaaaatcatcagcgtgttagcattttctttgactatgcaagatgtagcaagaacactgcg

SEQ ID NO: 476157 - DNA, 100 bp, Homo sapiens
gcaagtcaggagctgccggcggctctgccaagtccagcagcaatgggcctgtggccagtgcacagggctgacaggacaactggatcagtttcattaaaaa

SEQ ID NO: 476158 - DNA, 74 bp, Homo sapiens
attgacaatgatggctttgaagggaaacaaaggacccatcgcaaatgttttccatgctgatctccaaagtggtg

SEQ ID NO: 476159 - DNA, 98 bp, Homo sapiens
ttcaatgtgacacaaggaaagtattctacagcggtcttgcgagtggctggttccctgcagaagagcacagaagtgatgaaggccatgcaaagtcttgt

SEQ ID NO: 476160 - DNA, 98 bp, Homo sapiens
cgccgccgcgcacaaccgcacgtgcaggtgaatcaggtctaggaaaatcgactctcataaacagcctattcctaactgatctgtacccagaaagagtc

SEQ ID NO: 476161 - DNA, 75 bp, Homo sapiens
agaagatgaagaaacccagcttgatatgttgggggagctgatcaccttctattactattggaagaagacccccga

SEQ ID NO: 476162 - DNA, 100 bp, Homo sapiens
ctctgctccaatccaaacacaggagagaattatatccagatcgagagacagaagattctgaaagggttcaatgaaatgagagtcatcttggacaatgagg

SEQ ID NO: 476163 - DNA, 75 bp, Homo sapiens
gcagccaagaaaaaaagacgaaagaagaagaagagcaaagggccttctgcagaatttcttgaggttggcaaaaag

SEQ ID NO: 476164 - DNA, 82 bp, Homo sapiens
gattcagacgccgattcgcccagatcgccaaactgaggcagcaactacaacgcagtaaacagagtagtcgtcacagtaagga

SEQ ID NO: 476165 - DNA, 75 bp, Homo sapiens
ctactactgctcctcctggcatccgcagtggctgcgatggaagtcgggaagacgtctctgattacgaggttcatg

SEQ ID NO: 476166 - DNA, 80 bp, Homo sapiens
gctcgcgctactctctctttctggcctggaggctatccagcgcctgggttctgaggaaaacgcaatggtggccatggact

SEQ ID NO: 476167 - DNA, 50 bp, Homo sapiens
ccgggggctcggcttcggaggaagcttcctgcctgacacagctcacttca

SEQ ID NO: 476168 - DNA, 75 bp, Homo sapiens
ttcgaaataatgaatccaaaatccttcatttacagcctgaactctttgcttccggaatccgggattgttgctgac

SEQ ID NO: 476169 - DNA, 75 bp, Homo sapiens
agtgttcagcaggtcctgttggagatgatagttgttgatcattatgaaaatcctagaaacgtggggtcccttgac

SEQ ID NO: 476170 - DNA, 75 bp, Homo sapiens
tccacagctaagacgctaggaccccctggaagcctagaaacggttattcagcttctcaaggctggaaaagcgaag

SEQ ID NO: 476171 - DNA, 101 bp, Homo sapiens
ggtgccaacattatgcgaagaactttacgtggacatcccatttaattctcagaagccgatcacaagtgttcagctccaaaaatatggagaacccctaatgg

SEQ ID NO: 476172 - DNA, 97 bp, Homo sapiens
gccgctatggatgatcgagaggatctggtgtaccaggcgaagctggccgagcaggctgagcgatacgacgatcctgtattaaaagtaactctagcag

SEQ ID NO: 476173 - DNA, 98 bp, Homo sapiens
gactcaatcatcactgttttaacagcgtaagagacccatacagaaagtagaaatgggtacatcaagtcagaatgatgttgacatgagttggattcctc

SEQ ID NO: 476174 - DNA, 89 bp, Homo sapiens
ccggcttgttgtcttcaattaaaaaatttattaaaggaagcacacctaagagagtgattgactgcctggaggatgagaaggcaaccctc

SEQ ID NO: 476175 - DNA, 82 bp, Homo sapiens
acgcctatctcttcaagtacatcataatcggcgacacaggattttttatcaagcagaaatgcatcgaacaacgagaatcaag

SEQ ID NO: 476176 - DNA, 50 bp, Homo sapiens
gacagaattctctttgaaattacagcagagagtgataatgaactctcaag

SEQ ID NO: 476177 - DNA, 101 bp, Homo sapiens
tgcctcaacaaccatttctaagtgaaaatatttacaccagcagctccagttcataccaataaagaagatcctgctacccaaactaatttgggatttatcca

SEQ ID NO: 476178 - DNA, 90 bp, Homo sapiens
gcggaagatggcggccggcgaaaggagctggtgcctgtgcaagttgttgagttttaatccaggtgctggtttgccaactgacaaaaagaa

SEQ ID NO: 476179 - DNA, 89 bp, Homo sapiens
gaagaactcgtcatgctctttgtagcgtggtgcttctgttgctcacagacggtctggaaaatcccgaagcagaagcccgtattcatcta

SEQ ID NO: 476180 - DNA, 90 bp, Homo sapiens
gctgtatggccgccgtcgcaagaagttatcaatactctggctgaccatcatcatcgtgggactgactttggtggaagtccttggttacat

SEQ ID NO: 476181 - DNA, 83 bp, Homo sapiens
gagaaagtccacagtcttttccggcgacagttggcgatcccactctatgatgccccttggtgtggccactgcaaggctctggc

SEQ ID NO: 476182 - DNA, 98 bp, Homo sapiens
gcagaaccaggcgtccaggacgccgctgaccaccctcaacacggatatcagcatcctgtccttgcagtaacagggggtatcacagaagagcagtttca

SEQ ID NO: 476183 - DNA, 82 bp, Homo sapiens
ggggccaggaagtcggagtttgagccccggaggcagagcggctgccatggatgagatggccttctgctacacccaggctccc

SEQ ID NO: 476184 - DNA, 89 bp, Homo sapiens
cgaacttttgacacggctttggaaacgacgtcatgtgttagaatcatgtcaaccctgccatggacttcacgcagactccacctgggatg

SEQ ID NO: 476185 - DNA, 74 bp, Homo sapiens
agctcgggggccaactctgaggagtccactgcagcagtcaatgatacacttgatgacatctttgacggttctga

SEQ ID NO: 476186 - DNA, 76 bp, Homo sapiens
agatactctgactccacctttacttttacctacgttggcggccccagaagaatcagacacaagtttggcagaagga

SEQ ID NO: 476187 - DNA, 75 bp, Homo sapiens
gtggtggagaatgtagtgaagctcaagtacagtttgtgtccgagccctgcagcctctccataaacggagtgatct

SEQ ID NO: 476188 - DNA, 82 bp, Homo sapiens
tgcgggccctgctggaccagctcatgggcacggctcgggacggtgcccgtggttgacacgagctgtgtccccagctgttccc

SEQ ID NO: 476189 - DNA, 82 bp, Homo sapiens
caggctctgcgggaggtggagcacctgaagagatgccagcagggtggtgaaggaggagatctttgatgacaatgccaagctt

SEQ ID NO: 476190 - DNA, 95 bp, Homo sapiens
gaagaaaacaagtcatttagcgctatggaagatgaccagaggactagacctgaagtttcaaaggtttatggctacaaatgatttgatgacggaac

SEQ ID NO: 476191 - DNA, 75 bp, Homo sapiens
ctgggggagtacaagaggatgccctgatggcagttagcacactggtggaagacatagggcctgattacattccaa

SEQ ID NO: 476192 - DNA, 75 bp, Homo sapiens
aaacctcaaagcatggctaagagtgttcagtagaaatgggtttttgtcatccattggagggacactgtatgaggt

SEQ ID NO: 476193 - DNA, 101 bp, Homo sapiens
agaggaggccgtccagcagatggcggatgccctgcagtacctgcagaaggtctctggagacatcttcagcaggttttcaaatggaacattttgatgcatca

SEQ ID NO: 476194 - DNA, 90 bp, Homo sapiens
ggaactcagcacatgtttgaggatgaccccaggtgaggacaccagtgatgaattctgaagcaaaagttctggtgcctgggattcctggtc

SEQ ID NO: 476195 - DNA, 83 bp, Homo sapiens
cttccatcggggcagcgacaagatggaccgtataatagacgctggccccaaaggaaactactctcgatttatgaatcacagct

SEQ ID NO: 476196 - DNA, 74 bp, Homo sapiens
atggaagatgaggaggtcgctgagagctgggaagaggcggcagacagcggggaatactcccccagttgcaagag

SEQ ID NO: 476197 - DNA, 75 bp, Homo sapiens
aacatggaactcaggcagaaattcgagtatgagcccagaggacctggtcggcccttgtaccaaagaagaatctca

SEQ ID NO: 476198 - DNA, 75 bp, Homo sapiens
ggggaaagcctggagtcctggctcaccaggtgctgcccacctacgacagcctggatgagccgtcagtgaaaacca

SEQ ID NO: 476199 - DNA, 51 bp, Homo sapiens
cctggcgatctacttcctctggcagggcacttttgtgattcccctgcttgt

SEQ ID NO: 476200 - DNA, 90 bp, Homo sapiens
gtggagatgctttccttgacctgaagaagcctcctgcctccaaatgcccccatcgctatacaaaagtcctccacagcctgtgaatccccc

SEQ ID NO: 476201 - DNA, 71 bp, Homo sapiens
gggacctgcggggagggcccgcgagagatctaaatgagtgtggcctgaagccccggccctgtaagcacagg

SEQ ID NO: 476202 - DNA, 100 bp, Homo sapiens
tagaacactggatcgatcgggggatctaggcgacatggagccattgaagggaacaacacccttgatgcgggaaagagacatgcgaatgggtggcggagga

SEQ ID NO: 476203 - DNA, 98 bp, Homo sapiens
ctgtgtgtgtcattgacatgtcctctttcacaaagtttgagataacaggggcaatggcggcttcctgtgttctactgcacactgggcagaagatgcct

SEQ ID NO: 476204 - DNA, 90 bp, Homo sapiens
tttgatcttgcccaggaggaggagaatgtcttggatgcagaattcttaaaggttttggggccttgtcacagatgccagatgatttgcatc

SEQ ID NO: 476205 - DNA, 100 bp, Homo sapiens
cggggcgctgcccttgggcgcgcagatacccgcggtgcaccgcctgctgggagcgccgctcaagggagaagcagaatttgcccgcatcatgagcattgtg

SEQ ID NO: 476206 - DNA, 75 bp, Homo sapiens
ccacatcgacagggacgtcctcattgtcctcgtggacagaggactgcagaaaatcaacctatcctccttcaggac

SEQ ID NO: 476207 - DNA, 98 bp, Homo sapiens
aagactgtttgtgttgcgggggccggacttcaaggtgccctcaccaccaatggcatcaaccctgacaccagtactgagatcggacgtgctaagaactg

SEQ ID NO: 476208 - DNA, 75 bp, Homo sapiens
gcgcggccttgcaggttccctgctacgtttgcctatctggggcgcctggctcacgaggttggctggaagtaccag

SEQ ID NO: 476209 - DNA, 100 bp, Homo sapiens
gcgactcgcggaccggcgtccccggcgcgaagaggctggactcggattcgttgcctgagccctggcaggtgcccggcccgccccccaccctccggctccc

SEQ ID NO: 476210 - DNA, 75 bp, Homo sapiens
agcatccaggcctcattggacagcattcgaggtagacgttacatccaagaggaaataatccaggcaaggaagcac

SEQ ID NO: 476211 - DNA, 100 bp, Homo sapiens
gccgcctccagcgccgcgggatgtagcgcgggggaccgcggcccccagcagagcccgcctgcccggctcccctggcgaagcggtgctgcctccagcccag

SEQ ID NO: 476212 - DNA, 75 bp, Homo sapiens
ttcttttctcgcaagtgttctggtcctggtcgccacacctttttcgagctgaagatccctgaaaacgccaacgtc

SEQ ID NO: 476213 - DNA, 75 bp, Homo sapiens
catttggctttgcctttctggacacagaagtatttgtgacagggccgttgctccagggagaactgcaaatatctt

SEQ ID NO: 476214 - DNA, 100 bp, Homo sapiens
gagagatggaacccgaagaagaaaggattcgttacagccagagattgcttctaaccgaaaatcttcagttggcgtaaaaaagaatagcaagagcagaacg

SEQ ID NO: 476215 - DNA, 74 bp, Homo sapiens
ggcggccgctgcagacgaaaggcaggaaagggcaggccggaatgaacggagaccagaattcagatgtttatgcc

SEQ ID NO: 476216 - DNA, 76 bp, Homo sapiens
aatcatatgaagtttctgtcttaactgcagtaaatccacaagagaaataccagcgaaggcggaagtacagcctgtc

SEQ ID NO: 476217 - DNA, 100 bp, Homo sapiens
aaggaaccgtcaagggcagtcatcagatccaccatctgcttcaacgctggattgtagtcacatattccacttacagtgctgtcggcgagtattagaaaat

SEQ ID NO: 476218 - DNA, 75 bp, Homo sapiens
ttttgacacggctttggaaacgacgtcatgtgttagataaatttgcgcctcattttggtaagcggaaaaacaaaa

SEQ ID NO: 476219 - DNA, 129 bp, Homo sapiens
tgttaatgtcacaagagagaggaaaaggatgaaggccttgatgacaatgatgggtcttcgggattcagcgttctgtataacactgcctttaaattcagatgtccccaaggtatttgcagcgttgcctga

SEQ ID NO: 476220 - DNA, 75 bp, Homo sapiens
ccattgtgaaagaaggttgggttcagaagaggggtgacttcatggtcatgacgattttcttcaatgtgagcaggc

SEQ ID NO: 476221 - DNA, 89 bp, Homo sapiens
gtactttccgccgccgccacagcgggtctctaattaacagaagatggcaaagcccagccacagcagctatgtccttcagcagctaaaca

SEQ ID NO: 476222 - DNA, 99 bp, Homo sapiens
cagtcctaccatgtcagccttcccagtagctgggaccacagccccaagcccccagcaccggatcctgctggacttccttttcctggacacagagtgcac

SEQ ID NO: 476223 - DNA, 98 bp, Homo sapiens
tcttgtgcaggacctgaaagtgttaaacccatccagagtaatggctgcggccttacccaggaccctgggggagttgcagctgtatagaatattacaaa

SEQ ID NO: 476224 - DNA, 100 bp, Homo sapiens
gcctagggggtggtaagcccaaggctctggcagcagcggaccggctccagaaaatattccccggtgtggtttaaatgtgatactggtgtagatctccttg

SEQ ID NO: 476225 - DNA, 75 bp, Homo sapiens
ggagaagatcacccggaccaaggaggaggccctggagctgatcaacggccctgggaggagcggggacactgagga

SEQ ID NO: 476226 - DNA, 90 bp, Homo sapiens
acggcccaggtccccgcccgcaggtcccgggcagggtcaacatatttcactggcacctattcacaagcttgaagaagctctgtatgaata

SEQ ID NO: 476227 - DNA, 82 bp, Homo sapiens
atttccaaaaggaccacaggatattggtcccattctattcagcgggagatacagatgacccaccaagaattactcagaaccc

SEQ ID NO: 476228 - DNA, 100 bp, Homo sapiens
cgcaaagcaacgtctaggagaccacagtggatgccacagcgggcccgaagcggatcagccttgtggggtctcctctgagcctccggcctccataagaccc

SEQ ID NO: 476229 - DNA, 100 bp, Homo sapiens
tctactcggccactccggtcccgacacctagcctgccatcagaggctccttgaaatgctagatacagagaaggaactgttaaaagaaaaaataaaggaag

SEQ ID NO: 476230 - DNA, 96 bp, Homo sapiens
caagtgtctgtgcacaggagtcagagagggggaaccgccgtcccaacatcacaaaaagtttcagctcctggcatcagctctattcaaatctggttc

SEQ ID NO: 476231 - DNA, 75 bp, Homo sapiens
gccaagttgcgttacatgagccgagatgacttcagggtcttgaccgcggtgtcagcttcctctggtgcaaccagc

SEQ ID NO: 476232 - DNA, 75 bp, Homo sapiens
ctggtgcagccaccctcgctccctctgctcttcctcccttcgctcgcaccatgcacatgattaagtaccggtaca

SEQ ID NO: 476233 - DNA, 76 bp, Homo sapiens
tgacaccaacatcgtctacctctgtggcaaggcaagaaatgggaaattgccaagcccctgaaacacaagcaagtag

SEQ ID NO: 476234 - DNA, 100 bp, Homo sapiens
ggccgctgctgctgctgctgctcctggaaaccgggacagaagatgagcctgtcggtcctggagggtatggggttccgtgtgggccaggctctaggcgaga

SEQ ID NO: 476235 - DNA, 75 bp, Homo sapiens
gcaatatctctgggctttcacagcattaggtggtctcttcagtcagcctacacaagctcctacccagtccaacca

SEQ ID NO: 476236 - DNA, 100 bp, Homo sapiens
agtgattgctgtggagacacggactgtggaggtggcagtccctgcagaccctgccaacctggattctgaggccaaggccagaagccttttaaaaggtccc

SEQ ID NO: 476237 - DNA, 98 bp, Homo sapiens
agttcttcaagtgggccaacaccaccctcgtgagtaacctgtatggtcaccccccagacagtacctgtaatgagaaacagtaaagaaaacagactaag

SEQ ID NO: 476238 - DNA, 89 bp, Homo sapiens
tggcctcaatatgtgccgccagtgtttccgtcagtacgcgaaggatatcggtttcattaagctcttgaatgtcgtctctcaactagcca

SEQ ID NO: 476239 - DNA, 100 bp, Homo sapiens
gcagccgccgagccggacgtgtccgcgaagatggcgggccgggaatccagacgctctgcagtgtcccatcgtcttatgcggatggcggggaaaggcctcc

SEQ ID NO: 476240 - DNA, 100 bp, Homo sapiens
cttctccaacctgcagattcgagagttgtggaaagtaaaaatgtagccctaccaaaaggaactattgtactggcttctccaggctggacaacgcactcca

SEQ ID NO: 476241 - DNA, 54 bp, Homo sapiens
ctggtcgacgacttcagtgatcgagatggatacacaactgatgacattgagttt

SEQ ID NO: 476242 - DNA, 83 bp, Homo sapiens
gccgctctgggatcccggccaccagcaattgtccgatccgatcacataggacagtatgcaccttaagatcctgaagaaacggc

SEQ ID NO: 476243 - DNA, 75 bp, Homo sapiens
ggaaaaagctccaggattctgacagggatgttgcgaagtacctggagtagaacagaaaaattattatgtctgtgt

SEQ ID NO: 476244 - DNA, 75 bp, Homo sapiens
tcgacccccgccggactgcagtgacaacgcccaagggggaggcaatggcagcagataaaagtgacgagtggtttg

SEQ ID NO: 476245 - DNA, 82 bp, Homo sapiens
gacagcacctcatcccctggatgggggaccacaagatcctcatcgacaggagctctttgttcaatgcctagccacctattcc

SEQ ID NO: 476246 - DNA, 150 bp, Homo sapiens
tggataatgtccaccccgagccgattcaagaaggacaaagagatcatagccgagtatgaaagtcaagtcaaaggtgacccgacaatcaacccctgaaaaaggcggtcataaaacccccaggagacgaagatgatggcacgtcgtgacccc

SEQ ID NO: 476247 - DNA, 50 bp, Homo sapiens
tgcctcctctgcaccagcacctgggcagtggagacggggtttcactgtgt

SEQ ID NO: 476248 - DNA, 75 bp, Homo sapiens
gctgtgggcgctgctggcgctctggctgtgctgcgcggcccccgcgcatgttgagacatttgggaaatgatgaag

SEQ ID NO: 476249 - DNA, 100 bp, Homo sapiens
gcagcgccgccttttgtgctgcggccgcggagcccccgagccactgaggcggctcccagctgcgttggcgacatggccgacacccccagagatgccgggc

SEQ ID NO: 476250 - DNA, 98 bp, Homo sapiens
gggtctgtcatcatgtcgcgttacgggcggtacggaggagaggcggatgccccaaaccttccgtgacccagcaactgctcccctgagaaaactttctg

SEQ ID NO: 476251 - DNA, 100 bp, Homo sapiens
aagaacaccaaccaaattgtcgccattaagaaagtcaccattgaaccttctgaagagcctttatttcctgctgatgaattgtatggaatagttggtgcta

SEQ ID NO: 476252 - DNA, 89 bp, Homo sapiens
ttagctgtgctcgcgctactctctctttctggcctggaggctatccagcgaccaggaatcaccttcaagcctatgtcgtgaggctttgg

SEQ ID NO: 476253 - DNA, 75 bp, Homo sapiens
ggagagggagtgatgtcttccagactcggtgctgtacccgccggagatgcgctggaacaagggcaccatcctgaa

SEQ ID NO: 476254 - DNA, 75 bp, Homo sapiens
gaagcttaagtagctacaggggaaaatattctgaggtctgaatgctggtgctttttatgccttgtccactcttct

SEQ ID NO: 476255 - DNA, 90 bp, Homo sapiens
cttcggggcttgccgttcgttcgtttccagcctcaggaatttatggtcgcctttttgaatgaggttactcaaatgagtcgtccagacttg

SEQ ID NO: 476256 - DNA, 100 bp, Homo sapiens
gaacagctgaccctacatgatgagaggtttgagaagaccacagatgacatccttgtggcctcagcagagtgtcccagcgatgatgaggacattgacccct

SEQ ID NO: 476257 - DNA, 100 bp, Homo sapiens
ctggatccaggataacggaggctggtgacttttttgaacgaaccattctgtgcaacagccttgtgtggagttgtgctgtgacgggtagacctggactgac

SEQ ID NO: 476258 - DNA, 75 bp, Homo sapiens
ctggtctcctactcccagatgcatccgtgtcacttcctacatgccaggcatgccaggtggaatctctccataccc

SEQ ID NO: 476259 - DNA, 101 bp, Homo sapiens
ctgggccctgtatataggagatggctacgtgatccatctggctcctccaagtccctttctagagataggagaagagagagatcgctgtctcgggagagaaa

SEQ ID NO: 476260 - DNA, 75 bp, Homo sapiens
ggtcctttatatagaagggagagttatcaatactctggctgaccatcatcatcgtgggactgactttggtggaag

SEQ ID NO: 476261 - DNA, 50 bp, Homo sapiens
gacaaatcaaattagtggttttggatctcatagatcagaacatactggag

SEQ ID NO: 476262 - DNA, 100 bp, Homo sapiens
aaggctcaggccatttttctgggtaacaaacttcttaaaagcaaccggcttaaacatctggaagctcaaggtactagtggttacagcctgtgacatggcg

SEQ ID NO: 476263 - DNA, 100 bp, Homo sapiens
tgaagattcagagcctttccgtcagccggtagatctccttgaatatccatctccagagaatacagagggcaaagatggatccaaagtaactaaacaggag

SEQ ID NO: 476264 - DNA, 75 bp, Homo sapiens
ttgagaaacctggatctgcgatctgtttgtgcaaatgatgtgcttgcttttggaacattggtcagtacttccaat

SEQ ID NO: 476265 - DNA, 83 bp, Homo sapiens
gcctcccgagtggctgggattacagaaccagtggctctgaatatcagcgtcggaaccaacgggaccaccatgtattggccagc

SEQ ID NO: 476266 - DNA, 96 bp, Homo sapiens
gaggcaaggagctaaagcagcgtgcgttcagccctgggaatgcctaccgcaggaatgggatggcttttctagcctgctgatgtgacaactgtgatg

SEQ ID NO: 476267 - DNA, 74 bp, Homo sapiens
ctgtgtactgccgttgttggaggtccaaaaagtttgctgtagggtaccagcgattgaaaggaaaatgttgtctg

SEQ ID NO: 476268 - DNA, 82 bp, Homo sapiens
aagagcctctggtgtccggggtgctttcggagcccgaagttttgctcccggaatactcccccagttgcaagaggcgcaggac

SEQ ID NO: 476269 - DNA, 75 bp, Homo sapiens
agcggatcgggtggagtgaaggtcacgtcgccatgacccaacatgagtgaagtttcctgcaagaaacgggacgac

SEQ ID NO: 476270 - DNA, 82 bp, Homo sapiens
cacggccgaggacttcgccgaccagaataccgtagcagtaggcaggacagttccaattcaacaaaaacctctttaccctggc

SEQ ID NO: 476271 - DNA, 60 bp, Homo sapiens
cctgatgggtcgaggcggacgcgcggctgcgtcagcaataccaagtttccaggcccgaag

SEQ ID NO: 476272 - DNA, 100 bp, Homo sapiens
ggctggaccagccccaaaagaggaggtcctgatccggttccccatgcagaggaacttggtggtgatccccaagtctgtgacaccagaacgcattgctgag

SEQ ID NO: 476273 - DNA, 100 bp, Homo sapiens
tcaaatacaacaaagatggcagtgttgccattgccagtaagccaagagaggcatatgttgaaacaattagactaaaagatgatgaaatactcaaggtaca

SEQ ID NO: 476274 - DNA, 75 bp, Homo sapiens
gcgcaggagctggggtccgcggtctggggccgctcaccatggatgatgatatcgccgcgctcgtcgtcgacaacg

SEQ ID NO: 476275 - DNA, 112 bp, Homo sapiens
ttcagagttggataagcacttggaatcacgggttgaagcaggtgcagttaataaccaaagcaggccacaaagccacagcagtggagaatttagcctgcttcatgaccatgag

SEQ ID NO: 476276 - DNA, 83 bp, Homo sapiens
ttccactggagttgcttcacttagctctacaatcaacccatgtgagaaactccagaaaatcttgccaaacttctgaccaggat

SEQ ID NO: 476277 - DNA, 50 bp, Homo sapiens
ctcacagactgaactgctcccgagagactttgagaatcactacaagaaaa

SEQ ID NO: 476278 - DNA, 100 bp, Homo sapiens
agaagatgtgccgccgctgccaacgtcgagcggcgacggctgctcaaagcattcagcaaaccagggttccaaggtgaatgtatagattttacagaagaaa

SEQ ID NO: 476279 - DNA, 95 bp, Homo sapiens
ggacttgggcccagtttatggcttccagtggaggcattttggggcagaatacagagatatggaatcagccttgtagcagtacctgggaacctgca

SEQ ID NO: 476280 - DNA, 90 bp, Homo sapiens
tgtcagctcagtgctgtgcgggccaggtcagtactcctgcatttgtaccaacgaaaactcacgtgctgcttcatcgaatgagtggaaaag

SEQ ID NO: 476281 - DNA, 83 bp, Homo sapiens
atttgacactgatcactaagcagcaccagatgcttcgggacctcataaaggaaaggtttggtgcacctcgatttggaggaagt

SEQ ID NO: 476282 - DNA, 100 bp, Homo sapiens
ggaggatggcggagtcggggctcctgacgaattctgcttggtcagaatcgtgatggcattgtgttcagcactgatgactattttcaccatcaagatgggt

SEQ ID NO: 476283 - DNA, 82 bp, Homo sapiens
cgtggagcccggcaatgccgccatccgggagaagctggcctgggccaagatgtgaagttcatttccaatccgccctccatgg

SEQ ID NO: 476284 - DNA, 59 bp, Homo sapiens
atgtttgccagtggtttattttacagtttgtacctgttcaagctaggcctggcccctca

SEQ ID NO: 476285 - DNA, 100 bp, Homo sapiens
gcagggaggatgtcgggacaccccggaagctgggaaatggttatgaaaaccaggctggctgtaggcaaaactgggcagtactctggaatatatgattgtg

SEQ ID NO: 476286 - DNA, 75 bp, Homo sapiens
cagaggatggaacacttcagtgcattcaaggtgctgcactatctggcaatccagaaacctgcagaccttgctcgg

SEQ ID NO: 476287 - DNA, 108 bp, Homo sapiens
ctaactcttatttctccgttggcccaaccagtcccagcgctgtcgtgctcctctactcgagccttagatcgtctgtcagtgaaggaattcgggcagttgatgaacgaa

SEQ ID NO: 476288 - DNA, 92 bp, Homo sapiens
tccgattagccttttctctgccttgcttgcttgagcttcagcggaattcgaaatggtactccaaagattcaggtttactcacgtcatccagc

SEQ ID NO: 476289 - DNA, 87 bp, Homo sapiens
agcggcgccgagaggccgtgcgggacgcgggcgccaggaccggccgaacgcagagatgagcagcagctgctcagggctgagcagggt

SEQ ID NO: 476290 - DNA, 82 bp, Homo sapiens
gaagcagcgtgagctggtgaagctgcagcgccgccgggactccgactacgagttccagggagctctgtcctggtgaccgtgc

SEQ ID NO: 476291 - DNA, 78 bp, Homo sapiens
tcaattctgatcaccgcactcgggccatgcaagattcaagtaagcaatccagatgtcagtgatcagaagcctgaaaca

SEQ ID NO: 476292 - DNA, 100 bp, Homo sapiens
tgtctgtgacagtaacagtacttgggatcccccagttccaaagtgtcttaaaggtgcgacgagattggtatgtgtatgcatttctgtcatctttgccctg

SEQ ID NO: 476293 - DNA, 100 bp, Homo sapiens
caacatattgctgcaatcaggaccattgcaataaaatagaacttccaactactgattcttctgcacagtcagtatcctcgggagttcgtgcaccatctcc

SEQ ID NO: 476294 - DNA, 99 bp, Homo sapiens
agctggatgaagtcctatccatttgtactttcagcaaacctgcatggagcatcaacttcaatcaggatgcgtccctcatctgcgtatccagcgaccacg

SEQ ID NO: 476295 - DNA, 100 bp, Homo sapiens
agttgcttttggaatgaatttggaatcttcccttgaagagctctggttgaagaagtgtattttgcgcagaaggaacgtgatgaagctgttatgtctagac

SEQ ID NO: 476296 - DNA, 85 bp, Homo sapiens
gacagtcctagctaaacttcgccaactccgctgcctttgccgccaccatgcccaaaacgggaaacagaagtacctgtgcgccagc

SEQ ID NO: 476297 - DNA, 75 bp, Homo sapiens
caagagtgttctggctttcagaggaatccctgtaactgcgtcattgattggctggtatccaaccagtctgttagg

SEQ ID NO: 476298 - DNA, 100 bp, Homo sapiens
gaagaagaaaggattcgttacagccagagattggtgtggatccggagttgtatgagttaacaacttctaagctggaaatctccacctcaagcctcaaagt

SEQ ID NO: 476299 - DNA, 75 bp, Homo sapiens
cacctactttgacatctatacggcaggaaagtggagaatgaggacatgaataaagaccagatcttgctggaaaaa

SEQ ID NO: 476300 - DNA, 100 bp, Homo sapiens
ggtgacagcaaaaatgacccaccaatggaagcagctggcttcactgctcagagagaagaagaaggaggttcctgctgtgccagaaacccttaagaaaaag

SEQ ID NO: 476301 - DNA, 100 bp, Homo sapiens
tggttccatgccgcagtaggacagcaggcccaagtctgcacatcccaggtgtacaaagataatcaatgctgattcggaggacccaaaatacattatcaac

SEQ ID NO: 476302 - DNA, 51 bp, Homo sapiens
attaaaaccagggctccacagttaggaggcctgtagtggtggagacacgcc

SEQ ID NO: 476303 - DNA, 100 bp, Homo sapiens
ctgcgagaagcaagcggaacttcctgagggctatgagggcctcgtggagggaggtgagaacatcaagcaggccaactggctgagcgtctccaacatcatc

SEQ ID NO: 476304 - DNA, 90 bp, Homo sapiens
caccatcgtctccgccttccagttcggagaggtacatgatgttgattgatggcacaaatgaagtttttatgattgatagagacaattcag

SEQ ID NO: 476305 - DNA, 75 bp, Homo sapiens
gccgattcctcctccttggtcgccgcgtccttggctggcgtatggcggctcagcggcagcgggcgctggccatca

SEQ ID NO: 476306 - DNA, 97 bp, Homo sapiens
gggagcagaagggaggctccaagacctcatcaacaattaagtttcggagcaacatcccctgtcacctggttgatatctcttgcggattaccctgcag

SEQ ID NO: 476307 - DNA, 75 bp, Homo sapiens
tctgccccagaaccggtcgaaaaccgtgtatgagggattcatctcggctcagcaaatgcagccctgaggatttgg

SEQ ID NO: 476308 - DNA, 100 bp, Homo sapiens
caggagaagctcagggagcaggtggtgaagcgtgaggagctcttcatcgtcagcaaggtttttgccaatccagaagactgtgtagcatttggcaaaggag

SEQ ID NO: 476309 - DNA, 88 bp, Homo sapiens
tgagctaccccctcaggtgcacaagggccactgtttgtggaagatataatgacaatggtgctgtgtaaacccaaacttttacccttaa

SEQ ID NO: 476310 - DNA, 100 bp, Homo sapiens
ttccttacctgtttttccagctcacccactgccagcagaggtgttaagtgtgatgcttccataatacatttggatgctgtcagctaagttcacttctgaa

SEQ ID NO: 476311 - DNA, 74 bp, Homo sapiens
ctcctgccaggcagtgcccttcccggagcgtgccctcgccgctggtggcccatcccctgcacccctgcacccca

SEQ ID NO: 476312 - DNA, 82 bp, Homo sapiens
gtgatcagcaccgcgaaagccccaggggccattggaccctacagcctactcaatttgaagacattgaggatgaagaccttta

SEQ ID NO: 476313 - DNA, 98 bp, Homo sapiens
acaaatgaattccccacttgaactctgccgaattcctgtgccacctcctcctttagaaaactgatcttaatacagaatgccagaggattcaacatgag

SEQ ID NO: 476314 - DNA, 88 bp, Homo sapiens
gcagaaaccccgttgacaaggcactgctttttcatgacgaatacagattctgttcatcttgctctgaaattaaataattctgaactca

SEQ ID NO: 476315 - DNA, 100 bp, Homo sapiens
tcttctccaaaaggacctgccagagactgggagtgttgactgctgcaaggaccaagggcagctgcaatgactctccgcacggtattattgtcattgcaag

SEQ ID NO: 476316 - DNA, 74 bp, Homo sapiens
gaccactcctgtgatcgttgcggctggggctggaggggaggaaggccatttcataattctgaatcatgtctgat

SEQ ID NO: 476317 - DNA, 101 bp, Homo sapiens
caaagaagatgcctcgaactaaacaaattcatcccagaaatctaagagactgcttttcaggaagccttggacgctgcaggtgataaacttgtagtagttga

SEQ ID NO: 476318 - DNA, 50 bp, Homo sapiens
actgataaaacccaccagtctagatctcgaatacctgatgcatgcaaaac

SEQ ID NO: 476319 - DNA, 95 bp, Homo sapiens
ggcaagggggcaacgaggaagctcttaagagcgcggccggaaagcaggaagaagtaagtctaacttgggctggacacctctacatctggcatgct

SEQ ID NO: 476320 - DNA, 73 bp, Homo sapiens
gctttatatcaagtagatttgctagtgaagatctcttctgaaaagcaagaagccaccgcagagcaagagaaca

SEQ ID NO: 476321 - DNA, 96 bp, Homo sapiens
cgcggccgtcggagacatgggagacccggggtcggaggtgcactgtgaagagttcatccccgagtttgagaagcaatacccagaatttccctggac

SEQ ID NO: 476322 - DNA, 90 bp, Homo sapiens
atcctgaagaagtgtgttggcctgctgagatctgtatctgtggacctgaatgttgatccctcgcttcagattgacatacctgatgcgctc

SEQ ID NO: 476323 - DNA, 75 bp, Homo sapiens
catcgtccaaaccagggcctggaaatgctgcaagggctgggcattgggatgctgtaattctgagaagatccgcaa

SEQ ID NO: 476324 - DNA, 99 bp, Homo sapiens
aagactgcaggcgatcataaagaaaatcgacttggactcagatggctttctcactgaaagatccaccttgatgttcagtgaagagtaccagaaaagtct

SEQ ID NO: 476325 - DNA, 82 bp, Homo sapiens
cccatcctgccgtccttctccactttcgccagcccgtgccgcgagcgcggcctgcaggaggaaaactttattctcaagagat

SEQ ID NO: 476326 - DNA, 113 bp, Homo sapiens
ctgctggaacctgctgtatctactcaagagtggaagttttcacagattcagaatggacagtttagaagaacctcagaaaaaagtctttaaggctcgaaaaacgatgagagtga

SEQ ID NO: 476327 - DNA, 90 bp, Homo sapiens
tgctgcattccgtcaaggtcacaacagtgtctttctgatcaagaacaccttccaccatgaccacctcagcaagttcccacttaaataaag

SEQ ID NO: 476328 - DNA, 50 bp, Homo sapiens
gctcccctaaactggggcctggaaaaggcaggaacgaatgcaggaatttg

SEQ ID NO: 476329 - DNA, 50 bp, Homo sapiens
cgaggcggaacctccacgccgagcgaggaagctcttcgtgggcggtcttg

SEQ ID NO: 476330 - DNA, 74 bp, Homo sapiens
ctgaggagacaatagcacagacggaggctaaagaacgtgccaatggaatggagcttgatgggcgtaggatcaga

SEQ ID NO: 476331 - DNA, 73 bp, Homo sapiens
ctgcctcaggtttatttgtacaaatagcacaggaggacccttcagaagacatatttacagttttgacagctga

SEQ ID NO: 476332 - DNA, 100 bp, Homo sapiens
tgaactggattccatgtagagacccctggaggctgccaggatatcgcagatgaattcagagcacaggagattgatggacaggcccttctcttgctgaaag

SEQ ID NO: 476333 - DNA, 48 bp, Homo sapiens
ttggttgcagttgtgtagtagttaaggatggagattcttcaacaatga

SEQ ID NO: 476334 - DNA, 75 bp, Homo sapiens
caagattcgtatcattatggcagagcccctgaacatggttggagagtgggccttaccagaagaaatggttgacaa

SEQ ID NO: 476335 - DNA, 97 bp, Homo sapiens
tccagaaggtgcctgaccagaaaggaactcccaagcgactgcaggcagaagctgagacggctaaggaagctgccacttttgctagagagcaaggctt

SEQ ID NO: 476336 - DNA, 75 bp, Homo sapiens
ctgcaagccggtgcagcagccttcagcttttggcagcatgaaagttagcaaaacctctgcgccatgagagccaag

SEQ ID NO: 476337 - DNA, 82 bp, Homo sapiens
atgccgacatcgacgccgcctggcaggccctgcgcaccaggagcaggccgggctctcgccatgggtcactgtcgcctctgcc

SEQ ID NO: 476338 - DNA, 100 bp, Homo sapiens
cacttgaaccttgggaatattgagacgtccacacggaagctgtccaggcggctctggccaaacacaaagagcggaagatggcagtgcctatgccttccaa

SEQ ID NO: 476339 - DNA, 100 bp, Homo sapiens
tctgggcctgggatattgtggttgataactgtgccatctgcaggaaccacattatggatcttttttctcttcagcaacgggtagcagaattggaaaaaat

SEQ ID NO: 476340 - DNA, 100 bp, Homo sapiens
ccaagcttcatgagacaactggaagagtatcaggggatcttgctggcaaggctctacagagtgaaggtttaaatccaaggtcatggcaaaacatctgaag

SEQ ID NO: 476341 - DNA, 100 bp, Homo sapiens
aaagatggcggcggcgtctgtctctgcggcttctggttctcacttgtcgaaaaagcttgtggtgaaggggggcaaaaaaaagaagcaagttctgaagttc

SEQ ID NO: 476342 - DNA, 100 bp, Homo sapiens
aaccctagaatgcaggggcccatccagcaaccttccatctctcatcagacaaggagccccaaactgtctcacagtcctcaaccacccagtctgggtgacc

SEQ ID NO: 476343 - DNA, 100 bp, Homo sapiens
actgtgaaaaggctggtgaaagttaaggttctagagccttctttccgccaggcctttcccaataccaaccgctggttcctcacctgcattaaccagcccc

SEQ ID NO: 476344 - DNA, 100 bp, Homo sapiens
ggctggccggccggccatggaggctgatggggccggcgagcagatgagaccgctactcacccgggtaacgagcaggaacggtgtgctgctgaggactgtc

SEQ ID NO: 476345 - DNA, 80 bp, Homo sapiens
tagcctattggaggaaaacacaccaaggaactgtggctgcaccatctgtcttcatcttcccgccatctgatgagcagttg

SEQ ID NO: 476346 - DNA, 74 bp, Homo sapiens
atccgtttgttcaggaaccaccagtgacagaggtgtggatgaatggaacatagctcgcctcaatacagtcttgg

SEQ ID NO: 476347 - DNA, 100 bp, Homo sapiens
aagcttaggaccacccaccatgcctatccagcctcgccgctcctgctatttgccaaccgccgggacgtacggctggtggacgccggcggagtcaagctgg

SEQ ID NO: 476348 - DNA, 96 bp, Homo sapiens
gcggctttgcatcggaaatcagctctacagttcaggttcgtcaaaaaatgttgtatgcagcaacaagagcaactctgaagaaggaatttggaggtg

SEQ ID NO: 476349 - DNA, 83 bp, Homo sapiens
cagccccctgctccggaggctggtgcagaggctgggaggcggcagaatgcagccagaggagggcacaggctggctgctggagc

SEQ ID NO: 476350 - DNA, 75 bp, Homo sapiens
caagattccagatgttcctgtggaccccagtccagatggagcaaagacagtgactgtgctgagaacatgtatatt

SEQ ID NO: 476351 - DNA, 96 bp, Homo sapiens
agctgttcctattcggccatctttgctcctccctgcaactaactccattcttaattggtgtcatggagaaactccagctgggcccagagattctgc

SEQ ID NO: 476352 - DNA, 100 bp, Homo sapiens
tcctggaggtggatctgaagaacggggaactgtccaggtttattgctgccgggagactacactgcaaaatagataaagtgaatgaaatagtagaaaccaa

SEQ ID NO: 476353 - DNA, 100 bp, Homo sapiens
tcaaggtgcacaaatggataataaatctgaagttcagttgtggctgttaaagagaattcaggtacccattgaaggctgatcacttgattgaaaaactaag

SEQ ID NO: 476354 - DNA, 143 bp, Homo sapiens
gcagcccgagctgaccctaggcctccaccctggcaggaatcccaatttgcctccacttagtgagcggaagaatggtggatacattgcaaatagcctagcaatcatgacagatgcacttcatatgttaactgacctaagcgcca

SEQ ID NO: 476355 - DNA, 75 bp, Homo sapiens
ccccatgttctgcagcgtggcttcctttggtgccagctctttgtctaggttgtaaagctctctgaaatagtgacc

SEQ ID NO: 476356 - DNA, 74 bp, Homo sapiens
taagtgggaaagagtttggcgttgaaagaagtgatctcacttccctgctaaccggtgggcggcccgccggggtg

SEQ ID NO: 476357 - DNA, 100 bp, Homo sapiens
attaattgttctagtctccaggcccagtacatggatgcttgttggatgaattaatgaaccttgacccacaccaagtgtggcaaaggagcagagaactttg

SEQ ID NO: 476358 - DNA, 74 bp, Homo sapiens
ggggcggccggccaggaaccacccgttaaggattatcgagattgcagcctgtcactccacacacacgtctgcgg

SEQ ID NO: 476359 - DNA, 100 bp, Homo sapiens
tcattactctggagaagagaggctatgtgaaggctgggctctggactccagaggcagtgatagaacacccagacgcagattgtagaaggcatgaaacaaa

SEQ ID NO: 476360 - DNA, 74 bp, Homo sapiens
gaaactggtggtggttttcggaggcacaggggtactttcattgaattccgaaatgggatgttaaacgtgtcccc

SEQ ID NO: 476361 - DNA, 92 bp, Homo sapiens
ctttcaacccccaatcagaccactgcattcagtggtattggaggactttcatcacagcttccaggtgagcgtgtaggagccttcactatggt

SEQ ID NO: 476362 - DNA, 104 bp, Homo sapiens
tgaaggagcagatttacaaactggccaagaagggccttactccttcacagatcgcctgctcaacctgctgatgaacctgcagaaaaggctgatgaaccaatgga

SEQ ID NO: 476363 - DNA, 101 bp, Homo sapiens
gctgtgcagccgcgaggaggcgcgggaggtgttcgagaacgaccccgagacggctccccacaggtgcaggaagccgccgcccagccatggacggggaggag

SEQ ID NO: 476364 - DNA, 99 bp, Homo sapiens
gcccgagccgccccccgagcccgccttctccgaggcgcagaagtggattgaggtaaaaatgcatttgcaaagggagaaaatgaaggccaaacagaagca

SEQ ID NO: 476365 - DNA, 75 bp, Homo sapiens
ggaaagaagttgcaaaacactgggggccttcaagctctacgacttggacaatgatggctacatcaccaggaatga

SEQ ID NO: 476366 - DNA, 75 bp, Homo sapiens
gtttgaaactattccaatgttcagtggcggaacttgcagaacaagagtttgttcagaaacaacagcaagaattag

SEQ ID NO: 476367 - DNA, 75 bp, Homo sapiens
catcttttgacaagatgtcacctgaaagtggtcacagccgcatctttgaaggagacgaaaccagacagagggtca

SEQ ID NO: 476368 - DNA, 75 bp, Homo sapiens
ctctgttctgcccgaaagcagagtaaggctgttactaaaatgtttactggtctctaattaacagaagatggcaaa

SEQ ID NO: 476369 - DNA, 90 bp, Homo sapiens
gtaaggctaggccgcgagcttagtcctgggagccgcctccgtcgccgccgtcagagccgccctatcagatcctgggaagactctgcctga

SEQ ID NO: 476370 - DNA, 101 bp, Homo sapiens
gcagtcccccaggatacagggtcaaaggagagcacaaccatcgcagttggaagcccatggggcagggcttcgtgctgtgtcactccatcgctgggggtacg

SEQ ID NO: 476371 - DNA, 100 bp, Homo sapiens
ctggcgtctcacgggctatgaagacggaatgcctcttaatgccggaattccaagacggaatgcctcttaatgccgaacctagaagtcggaatccggaaga

SEQ ID NO: 476372 - DNA, 100 bp, Homo sapiens
actgattggaaataattcctcaaacaccaccaagtcaaggatacagagatgatttacacaatgaagaaagtacatgcactttgggcttctgtatgcctgc

SEQ ID NO: 476373 - DNA, 83 bp, Homo sapiens
agtgaatgtggaaaggagattgacagtcacaattttgtaataagtccccagggaaaagcctttcgctctaaagtggagttgat

SEQ ID NO: 476374 - DNA, 100 bp, Homo sapiens
aggaaaacaacttcgagggcagaatatttctccctcgagtggctgggaaacttggcaagagaccagaggacccaaatgcagacccttcaagtgaggccaa

SEQ ID NO: 476375 - DNA, 100 bp, Homo sapiens
gagagcaaccgccaagcttggtgggagtcaaggcagcctggcatcctcgctacaacctcattgttgtgggccgatacccagatcctaatttcaaaagttg

SEQ ID NO: 476376 - DNA, 75 bp, Homo sapiens
atctttggagaattgtcttgaacagcagtcaaaatggagctgatgaccaaagggaaggtattcatgtaaatcaag

SEQ ID NO: 476377 - DNA, 100 bp, Homo sapiens
ggaccgggacctgctgctggacccggcctgggagaagcagcagcgcaaggagcttactccacgggaacagcctctagataatctgagttgttgaaaatac

SEQ ID NO: 476378 - DNA, 83 bp, Homo sapiens
cacacgtgttcaatacacctcccacctgtcctcaggcatatcaaaggtgctttgtaacagagccagactggtttcctatctcc

SEQ ID NO: 476379 - DNA, 97 bp, Homo sapiens
ctggaccctgcccaaaggacactgtacagggatgtgatgctggagaactgcaggaacctggcctcactagggatctcagtgtggatgctggcttgag

SEQ ID NO: 476380 - DNA, 98 bp, Homo sapiens
gcggcggcgaacatgcgcttttgacacattggagatcaaatgatgccgtttggaaaaatttcccagcagttgtgtggcgtaaagaaactcccatggtc

SEQ ID NO: 476381 - DNA, 90 bp, Homo sapiens
gcgccatgtccgcgcacaatcggggcaccgagctcgtgtggaaaagccactggcagtgattcaagtggtgtcattgatctcacaatggat

SEQ ID NO: 476382 - DNA, 74 bp, Homo sapiens
gctgatcttgctcaggttgaaagcttccaggaactggccgtcgctttcgggttctctcatcgcttcgtcgttcg

SEQ ID NO: 476383 - DNA, 75 bp, Homo sapiens
gtgcggcatgatctccatcaccgaatggcagatatggcatgcagctgtaccagaattatatgcatccatatcaag

SEQ ID NO: 476384 - DNA, 105 bp, Homo sapiens
gaagaaagtaaagttggaagttaagggagacaaagttgaaaacaaagtgctggtgctactcgtgagcagtagtcgccatccagacagatggattgtccctggagg

SEQ ID NO: 476385 - DNA, 83 bp, Homo sapiens
cagctggctctgggccttgaacattccgaaactgtcaagattggcaagagagagcaggagattcggatgggtcagatggctat

SEQ ID NO: 476386 - DNA, 101 bp, Homo sapiens
cagattcgcagtggtcgcttcttctccttggctgagtatgcccatcgtggtttctccgaggtgaaaactcccacactgttttctacgaagctctgggaaca

SEQ ID NO: 476387 - DNA, 100 bp, Homo sapiens
gaacactattcaaaggaccatgatgtgaaaatggagttggttcgactatgcaatgagggcgcccggaagatggaaaggactgagatgatgtacacaatta

SEQ ID NO: 476388 - DNA, 100 bp, Homo sapiens
attttcaaattggagcaagaagaagaaccatgggtgatggaggaagaagtattaaggagacactggcaaggtcttgggcgtctttggtactggctttttt

SEQ ID NO: 476389 - DNA, 83 bp, Homo sapiens
ccaacactacttagctttccaaggaaacagagcaaatgcagcgttacaatcaaagacttattgaggaattgaaaaacagacag

SEQ ID NO: 476390 - DNA, 76 bp, Homo sapiens
gcccaaggtctctcgcgggcgggagaacggaaaactcccaacttcctggtggatggaagtttgcttagttgaagaa

SEQ ID NO: 476391 - DNA, 103 bp, Homo sapiens
cccgagggccagaccatcaaagggcgtgtgggcaccgtgggttacatgggtgatggaggacgaggagaaggcagtggagatcttgggcaacacggaagctgct

SEQ ID NO: 476392 - DNA, 75 bp, Homo sapiens
gtcttcggtggactccttcggcagtccacccaccgccgccgcctcccagccctttcccagtctgcctggagaacc

SEQ ID NO: 476393 - DNA, 100 bp, Homo sapiens
ctcatgatggctggtatcgatgactgctacacctcagcccggggctgcactgccaccctgggcaacttcggcttcagcgctgtggtgctcctgaagggca

SEQ ID NO: 476394 - DNA, 90 bp, Homo sapiens
ccagatcactccaagaagaacatcggcaatgggattatttcctccccactgactggaaaggaggccatgctctaccacaaccagaccgcc

SEQ ID NO: 476395 - DNA, 88 bp, Homo sapiens
aagcaatggtcattggaaatacaaattatgattggaaggaactggaaaagactcagattgatggacaacttttcttaattaagcacct

SEQ ID NO: 476396 - DNA, 82 bp, Homo sapiens
ggcacccacggagcctccggggctgagacaagaggagcagcagcggcaccgcccctcaccctggagggtcctgtacaatctc

SEQ ID NO: 476397 - DNA, 100 bp, Homo sapiens
cgggattggactgatccaggctggacccacgtctgtctggtgataccaggggcagagggaccactctgacaggaacgccgcgatggctgcgcagggagag

SEQ ID NO: 476398 - DNA, 51 bp, Homo sapiens
ccacagctgtggccccggctcagcccatgcagaatgccaccaagtatggca

SEQ ID NO: 476399 - DNA, 132 bp, Homo sapiens
tggaggcagaagttcggcaccttatttctctgctgagtgtccagatcctccaaagacagatctgagccaagaaaatgatgagctaagagatgcccatgaaaaacgcaaggaacggctacagatgttacagac

SEQ ID NO: 476400 - DNA, 100 bp, Homo sapiens
tgtgcttcaacaaaggacactacatcaaggactgcccccaggtctcctttacagaaaggggcttggataaggaggaaagaccatcagaagaaaagataag

SEQ ID NO: 476401 - DNA, 74 bp, Homo sapiens
tcaaggccatagtcctgttcacctcagatgcagagcaaagcggcagtccccggacagggatgggctctgaccag

SEQ ID NO: 476402 - DNA, 100 bp, Homo sapiens
tgaaaaccctgctgatgtcagtgttatatcctccaggaatactggccaggtttttgccaatccagaagactgtgtagcatttggcaaaggagaaaatgcc

SEQ ID NO: 476403 - DNA, 98 bp, Homo sapiens
aagcatgcagcttactgcttgaaaggccaaacgtaccaagaaagtcgggatcgtcggtaaatacgggacccgctatggggcctccctccggaaaatgg

SEQ ID NO: 476404 - DNA, 82 bp, Homo sapiens
gccgccccctccggcgtgttcatgcccccgggttgattatggaagattcccacaagagtaccacgtcagagacagcacctca

SEQ ID NO: 476405 - DNA, 90 bp, Homo sapiens
caaagcctgcgcgagaggagccgggacacgcctagcgcgggctccaggctgtgggtgagcgtggaggatgctcagatgcacaccgtcacc

SEQ ID NO: 476406 - DNA, 90 bp, Homo sapiens
tccgcttcctgcacagccagggacttgtccatcgtgatatcaaactgaaaaatgtgctggaagctgatggaactttggattgtatcagca

SEQ ID NO: 476407 - DNA, 50 bp, Homo sapiens
cagggcggtgctggaggcgctcaggatgtctcgggctgttcgtcttccag

SEQ ID NO: 476408 - DNA, 100 bp, Homo sapiens
tacggcaagtcgctgtaccacgacatctcggagttgaactgaatgaccgactcttgggcagccaacttttggcctgtaccctctcccataacactctttt

SEQ ID NO: 476409 - DNA, 100 bp, Homo sapiens
cttggatatgacccatatgccaacccacctaactacggaaaacctgatcccaaaattattgaaaacactcgaaggatgggtgagtcaagtgaagacatag

SEQ ID NO: 476410 - DNA, 95 bp, Homo sapiens
ttcgcgcgcttcatcaaccacagctgcaacgatcaggcaaaaatgatcatgccgaaaaagtggcggaaaagctagaagctctctcggtgaaggag

SEQ ID NO: 476411 - DNA, 98 bp, Homo sapiens
tgacatcttcatgaacaatgtcatcgtccgcctctcccagatcagtgaggatgtcatcagactcttcaaaaaggcagtgtgtgaagaaaccctgaagg

SEQ ID NO: 476412 - DNA, 83 bp, Homo sapiens
cagggctgctgccagcacctgccactcagagcgcctctgtcgctgggacccttcaggtggaataacactcccatggatgaagc

SEQ ID NO: 476413 - DNA, 80 bp, Homo sapiens
ttaccaagaggggattgatctgctcctgcaggttctgaaagattgcaaaattacgccagcagttgcagagaagtaaacac

SEQ ID NO: 476414 - DNA, 100 bp, Homo sapiens
ccattccagaaccatggcccaatttgtccgtaaccttgtggagaagaccccggcgctggtgaacgaacagctttgctgagccatcaaggtctaatggaag

SEQ ID NO: 476415 - DNA, 50 bp, Homo sapiens
cgctgggcaggggtaccttcgggaatcttctcacaccattttgctggtac

SEQ ID NO: 476416 - DNA, 74 bp, Homo sapiens
tgagatggaaggatgactatgagtatgagctattatagaaaccatggttattcagcaaagaaatgaagaatgtg

SEQ ID NO: 476417 - DNA, 100 bp, Homo sapiens
cctccaggcacctacattgcccacctcaatggcctaagcaagtgtctgcagtgccaaatgtgtgacccagccggtgagggtttggaaaccaggattgggg

SEQ ID NO: 476418 - DNA, 71 bp, Homo sapiens
ccagagcattgaagatcagtacaaaaattcttcaagaaatctaagccatgtgaagatgtgcttgcttcccc

SEQ ID NO: 476419 - DNA, 75 bp, Homo sapiens
tgcaccacgcccggggggacgctcttctccaccacaccgggaggtatccgcccccagatcatgaacggccccctg

SEQ ID NO: 476420 - DNA, 97 bp, Homo sapiens
aaaaaggtgatgtacaagcacagataagaaggctgactgcacaatcacaatggctgactcagacttcctggctttaatgactggtaaaatgaatcct

SEQ ID NO: 476421 - DNA, 101 bp, Homo sapiens
tcagatggcagacatacatcatttaaaggtgacaccacagccaaagccctatgggaagctttactgaacactaagcacaaagaggcagtgatggaagttcg

SEQ ID NO: 476422 - DNA, 96 bp, Homo sapiens
gcgtggaacggctgcttttggaagattttaggtgatgggcaagtcagaaagtcagatggatataactgatatcaacactccaaagccaaagaagaa

SEQ ID NO: 476423 - DNA, 101 bp, Homo sapiens
tgaagatataacaagatcagcaaatctaactgaccagatgatgctgtgtatctggacaatgagaaagaaagagaagagtatgtcctgaatgacatcggggt

SEQ ID NO: 476424 - DNA, 83 bp, Homo sapiens
gacacagccggtcaggaacggtttcggacgatcacaacggcctactacaggggtgcaatgacatgcaagaaagcacttcagcc

SEQ ID NO: 476425 - DNA, 75 bp, Homo sapiens
atttttctccaagagccattgaatatgttaagattatgagcctcaaacaatttgtgagcatctccagtacttgtt

SEQ ID NO: 476426 - DNA, 75 bp, Homo sapiens
gcaaccacagccccagccaccacccgtaacacagctgaggagaagaaagtggaagcaaagaaagaagaatccgag

SEQ ID NO: 476427 - DNA, 100 bp, Homo sapiens
gttggctgaaccttgtgtcaaccatccattccaggagccagctatctgaggctccctgactggcagtcctcacctttccgagctgtctgtgaactcgcag

SEQ ID NO: 476428 - DNA, 98 bp, Homo sapiens
agcaaacagaaatttgtgctcaaaacccccaaggaggtctgcaagatgctcatacacatgcgtcacccggaggtgtaccaccacctgggcgtcgtgcc

SEQ ID NO: 476429 - DNA, 100 bp, Homo sapiens
agaaacctgaagttagaaaggctcaacgagaacaagctatcagtgacagtgatgaaaagcctctcaaaggaagccttcggtcccttaatagggatatgca

SEQ ID NO: 476430 - DNA, 97 bp, Homo sapiens
aaaagaaagctgcgttaatgtttgcaaatgcagaggaagaatttttctatgagctttatcttcaagccaggatgaagggagactgggcaagactctt

SEQ ID NO: 476431 - DNA, 90 bp, Homo sapiens
ccgggaaggggctgacggccgtgcccgaggggctcagcgccttcacccaagcgctgtggattcaccaatgaacttgaagcatcctcatga

SEQ ID NO: 476432 - DNA, 82 bp, Homo sapiens
ggatcatgaactagtgacctggaaaggaaggcccgaacaagacaggaacgtcctgtgccctggactgtggagctggcattgg

SEQ ID NO: 476433 - DNA, 100 bp, Homo sapiens
tggactcagatgatctccccttgaatgtttcccgcgagactcttcagcaacataaactgcttaagccgattccacgactcttctttgcgggagaacatac

SEQ ID NO: 476434 - DNA, 82 bp, Homo sapiens
agcaccacggaaacgcatccttctgtggccactgttagtgagatggaagattttcgaggtatagcagaagaatcatttccaa

SEQ ID NO: 476435 - DNA, 85 bp, Homo sapiens
aggcctctgaggaagtggagcttgatggattaccgggccttggtgcatgagcgagatgaggcagcctatggggagctcagggcca

SEQ ID NO: 476436 - DNA, 96 bp, Homo sapiens
caggattgcgtggaggctgctgtctgccacgtcaaggacctcgagaatggccagagcttcatgaacaactgggaggtgtacaagcttctagctcat

SEQ ID NO: 476437 - DNA, 75 bp, Homo sapiens
caatcaggtgcagcattcagagaccgtcgaaagcggattccaaggaatccagcgatggcaagccggcaggtggat

SEQ ID NO: 476438 - DNA, 83 bp, Homo sapiens
ccggacgccggaatggagtttgaggaagagacaatgcagatcttcgtgaagactctgactggtaagaccatcaccctcgaggt

SEQ ID NO: 476439 - DNA, 73 bp, Homo sapiens
cacaggcagcctcctgccagaactacttcctcatgattgtttcaggggagacaatccagggtctgagggcgaa

SEQ ID NO: 476440 - DNA, 101 bp, Homo sapiens
ctataacaccacctggagtgagtggagccccagcaccaagtggcacaactggatccgcaaccaggccgacaactgccctagggtacccaactcagaccaga

SEQ ID NO: 476441 - DNA, 100 bp, Homo sapiens
cgactgctaatcagtcacgaggctcccttgacaggcggctttgcatcggaaatcagctctacagttcagtctccagagaatacagagggcaaagatggat

SEQ ID NO: 476442 - DNA, 100 bp, Homo sapiens
tagaagtggtgatgcaagaagtttctaggaaaggccggacaccagggaactctaatgatccaggacaaagaagttaccctggagtatgtatcaagcctgg

SEQ ID NO: 476443 - DNA, 100 bp, Homo sapiens
tccctctgtgctccaggactccctcaataatgagacacagcaggtccccacagaggaagtgtccttggaagtgctgctcagcaacgggcagaaagttctg

SEQ ID NO: 476444 - DNA, 75 bp, Homo sapiens
tgagtggtcgcggacctgggctctgtgcgttgggaaagggaagtggagataagctgtcattggaaggaatagtgg

SEQ ID NO: 476445 - DNA, 83 bp, Homo sapiens
ctagccagcgacagtggggtgtttgaacctctaaccaaaaggcacaggtaacagcatcatggtcatgaaaatgaatggatccc

SEQ ID NO: 476446 - DNA, 50 bp, Homo sapiens
ccctgctggaggagcgcttccggattaagcctgatcaagatgacaacctc

SEQ ID NO: 476447 - DNA, 82 bp, Homo sapiens
cagaccctggagcctcagttggaagcagccgatccagcctgcggagcctgtggggcaggatgctttggagtctgcaatgaag

SEQ ID NO: 476448 - DNA, 90 bp, Homo sapiens
gtttatagagcagcctgtctcttggatggagtaccagtagctttaaaaaaagtgcagatggagttttaacattgaatgcggagaacacta

SEQ ID NO: 476449 - DNA, 100 bp, Homo sapiens
atccagcagccctgatctcctgcagcctaccaccagtatgttggatttttccaatccttcagagcaaggcttagatcacatagcagaaaacattctttcg

SEQ ID NO: 476450 - DNA, 96 bp, Homo sapiens
gcgcgtttcccgcctgagcgcaactagcggcgggtcgtgggcacctccagatgtgactggagtgatttgcacccggatgcctagactcgccatctg

SEQ ID NO: 476451 - DNA, 100 bp, Homo sapiens
aagcaggactgcgccgcgtcttcctcaagcccgtggaccgggagcccgtggaccgggagccggtggtgtgccaccccgacctggaggagcggctgcaggc

SEQ ID NO: 476452 - DNA, 100 bp, Homo sapiens
gcgagctgaggtggaggcaggctgcggcagacggcgacagtggcggcggcgccatggcagggcttgcagctgggagtgtccactcgccttccaccagcat

SEQ ID NO: 476453 - DNA, 96 bp, Homo sapiens
gctgacgctgctgctgtgtgcggtgctgctgagcttggcctcggcgtcctcgggtgtgccttgcacatacaaaaaagaacctgttcgtatatctaa

SEQ ID NO: 476454 - DNA, 82 bp, Homo sapiens
cacttacaaggacgaccaggccaagcttaagaaggtgaaaggtgtagcagtcactcggcctacacccacagcatcgaccttg

SEQ ID NO: 476455 - DNA, 74 bp, Homo sapiens
aagctgtggtgttaatcccttttattgatgagctggagaatgctggaggagaccttaaggatggccaccaccac

SEQ ID NO: 476456 - DNA, 74 bp, Homo sapiens
ctccctctattatccacaacaagccatcgtgtttgcccaggtcacgcatgaagggagcaccgtggagaagacag

SEQ ID NO: 476457 - DNA, 98 bp, Homo sapiens
aagaggaagtacaggccatgcagagctttaattctacccagcaaaatgaaactgagcctaatcagcacactgacaggttgctctcagaccctgaactg

SEQ ID NO: 476458 - DNA, 100 bp, Homo sapiens
tttagaaaatggacctgctgacagagcagatggcctggagattcatgacaaaatcatggaggatgaatctggttatagatggacaagagacgatcattct

SEQ ID NO: 476459 - DNA, 82 bp, Homo sapiens
cggacctgtctgggtctcagccgccaaagaccccgtccggtaggtactccaaagattcaggtttactcacgtcatccagcag

SEQ ID NO: 476460 - DNA, 131 bp, Homo sapiens
gcgggagacgccgccgccgccgcctccagggtgggcgcctttcgccgtggacgccgaccgtccgggacgagatgctcagagtgtgtgcacaaggctggcacgcccagggtcttcctcatggcactaacagt

SEQ ID NO: 476461 - DNA, 100 bp, Homo sapiens
agtcacggggcctcctccaccgaggaggtgaatacacctctgattttaatcagttctgcgtttgaaaggaaacccgagcgatgaagtaacttgatttgaa

SEQ ID NO: 476462 - DNA, 100 bp, Homo sapiens
tcggagttcccgtcttatgagtcatcagagaactcacacagagtgaagttcccagaccctacgccccgctgtcaggcagcccgccgatcagatggaggag

SEQ ID NO: 476463 - DNA, 75 bp, Homo sapiens
tgtgaatactgtgacagcgggtaccgcatgactcagagaggccgttgtgaggtggccataaaatgcagtaaaaac

SEQ ID NO: 476464 - DNA, 100 bp, Homo sapiens
cgccgtcctagccgctgctgtcttcgtgggaggcgccgtgagttcgccgctggtggctccgggaaaatgtttataggaggccttagctgggacactacaa

SEQ ID NO: 476465 - DNA, 54 bp, Homo sapiens
ctggaaggaggcaacaccaccatccaggagcaaattcaggacctgacacataag

SEQ ID NO: 476466 - DNA, 75 bp, Homo sapiens
gggggccacaccatttgccgtggccaggctagagttgatattcactgatggactccaaagaatcattaactcctg

SEQ ID NO: 476467 - DNA, 48 bp, Homo sapiens
cacacacaccatcatggtcctgagaagagaaggtgttcttagatcaga

SEQ ID NO: 476468 - DNA, 123 bp, Homo sapiens
gactccgttatctgcaggtattgggagatgcacagctaagatgccaggaccacctggaagcctagaaatggtgtgggccatgtttgaggattgccccagcattcagttctatgagtaataaat

SEQ ID NO: 476469 - DNA, 96 bp, Homo sapiens
cccaaatccccagagcctcagctcaggccctctgacccagaaacagaatggccttcagaccacagagaaacgcttcgttaagggactcaggcagta

SEQ ID NO: 476470 - DNA, 89 bp, Homo sapiens
gtggactccttcggcagtccacccaccgccgccgcctcccagtaatttctatgcagcccccgacccagagccgagctccacttctgctc

SEQ ID NO: 476471 - DNA, 75 bp, Homo sapiens
ccgaccttgtcctgctggacaacttcaagccagaggccttcaatgtgatcaacgggggctcccatgctggaaaca

SEQ ID NO: 476472 - DNA, 90 bp, Homo sapiens
tcgagtaccaatttctttcaaggtgctcccaggtgaccatgagtatcccaaatgtagacccaagcctggtggaatgaaggcaggaacatt

SEQ ID NO: 476473 - DNA, 80 bp, Homo sapiens
ggcagctgcggtggcagctgctgagttctcggtgaagaacctgtggcatattccttggagtatctccaggttgagaattc

SEQ ID NO: 476474 - DNA, 82 bp, Homo sapiens
aggcaacgacgttccatctgtggaaggacctaccaaccagcaatggctgccatccggaagaaactggtgattgttggtgatg

SEQ ID NO: 476475 - DNA, 98 bp, Homo sapiens
ctcaccgttctgcccccagaactagggagaaagagagagcgcgaaagagagaggatgtctctctcagactggcacctggcggtgaagctggctgacca

SEQ ID NO: 476476 - DNA, 74 bp, Homo sapiens
tagtatcggacatgatcctcatcttttatacactcttagtgctgtccaggttgaatttagtattagtgacaaac

SEQ ID NO: 476477 - DNA, 75 bp, Homo sapiens
tcatcttaggctgtgctgtgaactgtgaacagaagcaagacagcccacctgaggatattgaccataaggactcat

SEQ ID NO: 476478 - DNA, 100 bp, Homo sapiens
aaggggcaggaacgacaaactcaaagtccagcgtactgtgaaccgagaggagctgctgaaacaggcggagtctgtgatgcaggacctcggcagctcacgg

SEQ ID NO: 476479 - DNA, 100 bp, Homo sapiens
gcctcccggcgctcttcctcccggagtatgctccagaagcagctgtctgagctggacgaggacgacctgtgctatgagttccggcgagagcgcttcactg

SEQ ID NO: 476480 - DNA, 101 bp, Homo sapiens
ttttacgtctagatttccatgcccatggaagtgttctagaacagatcagacattttgtaatgatgcctgaaataaacactaaccacctcgacaagcaacag

SEQ ID NO: 476481 - DNA, 50 bp, Homo sapiens
aagctcaatgcctcagaaattcattggccactatctaccactggcaccag

SEQ ID NO: 476482 - DNA, 101 bp, Homo sapiens
gctgctgctgctgcccgcgtccgaggctcgcgggcggcgggcccgggtgaatctggattgggaaagtcgacattaatcaactcattattcctcacagattt

SEQ ID NO: 476483 - DNA, 100 bp, Homo sapiens
acaagggcgactccaaggaaacgcggctgaccctgatggaggaagtgctcctgctgggcctcaaggaccgcgaggactgactgcattgcacagatgatgg

SEQ ID NO: 476484 - DNA, 99 bp, Homo sapiens
gaaattgtctgctgcccttttccaatccagtgaatttagatgcccctgaagacaaggacagccctttcgtcttgccacttgcctagtgaggcttttccg

SEQ ID NO: 476485 - DNA, 82 bp, Homo sapiens
aatgacttccacaagtgcatctataaggtacgaggaacagcaaattcaggaaaaagtggcgacctttcgactcatgttgctg

SEQ ID NO: 476486 - DNA, 74 bp, Homo sapiens
ccagcgtgatcgacgcagaagacaggtgatttctgcatttccgactgaggaatggaagttggatacactttgtg

SEQ ID NO: 476487 - DNA, 75 bp, Homo sapiens
tggaggacgagatgcccaagactctagtccctgtgaagcaggaagagtgagggcaggttcactgcagctcagcag

SEQ ID NO: 476488 - DNA, 83 bp, Homo sapiens
ccagttttgaaatcgacacacaaagaatagagttgagcctgtgggacacttcgggctgaccccgcactacatctacccaccag

SEQ ID NO: 476489 - DNA, 75 bp, Homo sapiens
tgacgagcggccgaagcagctttgcggctactgcagcactggggtgtcagttgttggtccgacccagaacgcttc

SEQ ID NO: 476490 - DNA, 121 bp, Homo sapiens
ccgtgccctcggaggcggcgtgggcggcagagagcggggcggcggcaggatgagttccacccgttcatcgaggccctgctgcctcacgtccgcgccttcgcctacacctggttcaacctgc

SEQ ID NO: 476491 - DNA, 100 bp, Homo sapiens
tggagaagctgcggcgagtcctgagcggccaggacgacgaggagcagggcctgactgcgcagatggaggagatgtataagaaagctcatgctgctatacg

SEQ ID NO: 476492 - DNA, 80 bp, Homo sapiens
aggatccccaacggggaggccaacgtgaagaagtccgcgggagagctgtggggcttggtgagtgtttcgtggcctctcgg

SEQ ID NO: 476493 - DNA, 50 bp, Homo sapiens
gaaagaccccagttatggatgggagcaatttttccagctagtcaaattac

SEQ ID NO: 476494 - DNA, 129 bp, Homo sapiens
agcaagctgggatctatgagtggaaaggtgaccaagcccaaagaggagaaagatgcttctaagggtccctccagctacaaggtgggcaccatggcggagaagtttgactgccactactgcagggatccc

SEQ ID NO: 476495 - DNA, 75 bp, Homo sapiens
cacagacagaatccctgctaccattccagctattcttcagatgctctggattttgagacggagcacaaattggac

SEQ ID NO: 476496 - DNA, 50 bp, Homo sapiens
gttcagcaggtcctgttggagatgataggaatctagagcaacagcaaagc

SEQ ID NO: 476497 - DNA, 100 bp, Homo sapiens
cagacatccggagaaacatattctgcacaataatgacaagtgaagattttttggatgcttttgaaaagcttctgaagctaatctggtggctgcttttgag

SEQ ID NO: 476498 - DNA, 80 bp, Homo sapiens
agtcatgaccgcccagaaatacctgcagactcgggccgtggccgcctacagaccatggtgaatccgggcagcagctcgca

SEQ ID NO: 476499 - DNA, 83 bp, Homo sapiens
gatccaggataacggaggctgggtttgctggttggctcccgagcagacagcaggaaagaagaagcccttcgtgtacacccagg

SEQ ID NO: 476500 - DNA, 90 bp, Homo sapiens
cacagaaccattggctctcactgaaacagatcgtactgagaagcactccacaatgccagactcacctgtggatgtgaagacgcaatctag

SEQ ID NO: 476501 - DNA, 115 bp, Homo sapiens
ggtggaggcaggctgcggcagacggcgacagtggcggcggcgccatggcagggcttgcagacaatgcagatcttcgtgaagactctgactggtaagaccatcaccctcgaggttg

SEQ ID NO: 476502 - DNA, 100 bp, Homo sapiens
acacagaagcaaaagccttgatagcatggatttctgtgagctcactaaagatttgatcaccaggagatttttcgggacattaccaaaccactcattttag

SEQ ID NO: 476503 - DNA, 100 bp, Homo sapiens
cgactggctcctggaccatattctgtgggtgaaagtctgcaaccccgagaaggatgcgttcatccacacgctggagagccagcgcaccttttcagctcgg

SEQ ID NO: 476504 - DNA, 74 bp, Homo sapiens
cctgaagtatgccattagttcccaggctgttttggagtcagcggaagatcaccaaggccagggagtggttccac

SEQ ID NO: 476505 - DNA, 100 bp, Homo sapiens
tgacctttttgaagcctttgcaaaagctatgtggttgatgttgcagaatgatgagccggaggacttcgttatagctactggggaggtccatagtgtccgg

SEQ ID NO: 476506 - DNA, 100 bp, Homo sapiens
caggcatacatttggcagaataaatgaaccaggtgtccctggccagtgtccttccacctgtccacaagcatggggaacatcttcgccaacctcttcaagg

SEQ ID NO: 476507 - DNA, 75 bp, Homo sapiens
cttgaatgacatcgtacagtatctccgacgcacagtagtaacactctggtacagatctccagaagtattgctggg

SEQ ID NO: 476508 - DNA, 89 bp, Homo sapiens
ccgcgggagagtgtgcagccgagtcactactgcctgcctgcctgcctgctacgactatgaaagtgatgacgactcttatgaagtgttgg

SEQ ID NO: 476509 - DNA, 50 bp, Homo sapiens
cgccccggcccggccccgcgagcttcggaaccaaaaagaagcttcccaga

SEQ ID NO: 476510 - DNA, 96 bp, Homo sapiens
acggtcccgccgccgctgctgctgctgctgtgctcaggcctggccggacagatgtccgttgtggtatttaaaattactggtgttaatggggaaatt

SEQ ID NO: 476511 - DNA, 100 bp, Homo sapiens
attaagacttcccagcattcctacagatataaataggatgtcacatgtacttcagtttgaggataaaagcagaaaagtgaaagatgcaagcatgcaagac

SEQ ID NO: 476512 - DNA, 90 bp, Homo sapiens
tgttgattgaaggggatgatgatgaaaacccgtatgttgctaaattgcttgagttgttcgaagatggtacaggtttgcagattccgccag

SEQ ID NO: 476513 - DNA, 74 bp, Homo sapiens
cgaggaggaggcgctgcgtcagtaccagcaggttgactatagtcaatggggccaatggagccaagtgtatggaa

SEQ ID NO: 476514 - DNA, 96 bp, Homo sapiens
gaaaatggagagttctacctacgagaaactgacccagactttgatcattgtgcagtctgcatagagagctataagcagaatgatgtcgtccgaatt

SEQ ID NO: 476515 - DNA, 82 bp, Homo sapiens
tgggatctgagctagccccaccagacccctgctacacgtgccagtgccagacatctgaatgggactccgagtgccttacatc

SEQ ID NO: 476516 - DNA, 83 bp, Homo sapiens
agctgacgcacccggggaaggcgatcctggcaggtgacttaagagattaaaattaatttggttgctgttggttctgaacaaat

SEQ ID NO: 476517 - DNA, 74 bp, Homo sapiens
aggcatttccagcccgcccacccaggttctgcggggagtgtctccagccctgcctgcaggtgccatccccgctg

SEQ ID NO: 476518 - DNA, 82 bp, Homo sapiens
taaaactggaagagaccagagaggtacagaacttgaggaagaggcccaacggggtgaggttcctgcgccacgtgcctgtcgt

SEQ ID NO: 476519 - DNA, 128 bp, Homo sapiens
tgctgggtgcagtcaaaatatgccaatggagaaaccagcaagggtgatgagctgcgctttggcccgacttttgctcaaaggtgaagaacaccatctactgcaacgtggagccatcggaatcaaatatg

SEQ ID NO: 476520 - DNA, 82 bp, Homo sapiens
gccggggccgcgctgagggcgcccagctgattgagaggatccagaatccagatctctggaatagctaccaggcaaagaaaaa

SEQ ID NO: 476521 - DNA, 100 bp, Homo sapiens
gccaagaggaggccagagcccattatccctgtcactcagccccgaattttcctgcatggagtgctacatcctcttgttccagtctcagctggctgctccg

SEQ ID NO: 476522 - DNA, 101 bp, Homo sapiens
aggattccaagtaactcttatttggtctccgtgaggccgggtgacgctccagaatgggagacaagccaatttgggagcagattggatccagcttcattcaa

SEQ ID NO: 476523 - DNA, 90 bp, Homo sapiens
atcctgcacttccgagccgcccggccacccttcgtcatctgcgtgaagctgaacgagcctctgactccaggttatcatggattcccagcg

SEQ ID NO: 476524 - DNA, 51 bp, Homo sapiens
ccaatgcctttgatggaccaattaccataaccctcaagggaacaaagccga

SEQ ID NO: 476525 - DNA, 75 bp, Homo sapiens
gcgggcgcagccctttgcgcagccgccgggaccctggcccctgtcgaggtgagaagccctaccactgcaactggg

SEQ ID NO: 476526 - DNA, 75 bp, Homo sapiens
caagctgaccaagaagccaaagaactggctaggcaaataagctttaagtggatgaggatcgcagtacggaacctg

SEQ ID NO: 476527 - DNA, 100 bp, Homo sapiens
agggagcagggagcattgcagcagccactggctttgtcaaaaaggaccagttgggcaaggaagtcaacttcaagcagattgacttgaaacgggatctcat

SEQ ID NO: 476528 - DNA, 97 bp, Homo sapiens
tcaggatctacaagtccgtcatccaagctgtacagaagtcagaagaaggccatccattcaatgcagtcattggagaaatcgatgaagaaacagattc

SEQ ID NO: 476529 - DNA, 100 bp, Homo sapiens
gactacaagcatcactggcaaggccatgcccggaggtgctggcttcgagcccttcagacaagtaaggtcagctctgccccctcctgcttcacttgccctg

SEQ ID NO: 476530 - DNA, 90 bp, Homo sapiens
attggtcaccaaaaccgatcctgagaagggtgaaatagaagattatcgtttgctgacagatattttggtgttcattttggaagagttgct

SEQ ID NO: 476531 - DNA, 82 bp, Homo sapiens
aaatatcggaacccctccttgaagctgatggtgaatgtgtgcggacacactctagacccatctattttggatagtttagatt

SEQ ID NO: 476532 - DNA, 75 bp, Homo sapiens
agcggcgcagccggagtggggccgtgaggcctccggtgtggctgtctctgatggtgtcatcaaggtgttcaacga

SEQ ID NO: 476533 - DNA, 75 bp, Homo sapiens
acacagctgcttccattggccagtatgaagtggtgaaggagtgtgtgcagcggtgtctgatgatttgtgagcctc

SEQ ID NO: 476534 - DNA, 99 bp, Homo sapiens
ttgttcttcaaggaattgggagtgatgagaggttccgtcagtgtctgatgtcagatttatctcatgctgtgcagttggtgttggtattaggagatctgc

SEQ ID NO: 476535 - DNA, 82 bp, Homo sapiens
gttctctcggtttgggcggatcatcaactcgcgggtcctcgtggatcagactacaggtttggtgcacctcgatttggaggaa

SEQ ID NO: 476536 - DNA, 74 bp, Homo sapiens
agtgcttctgtctcgactgcactttgagaaggatccagccgcagaagccaggatgaaggtagcctgcatcacag

SEQ ID NO: 476537 - DNA, 82 bp, Homo sapiens
cggagagcggcctgcgggcgatcgggccgaggggtcgctgtgatgaaattcaagaaccccccagtgaacagcctgagcctgg

SEQ ID NO: 476538 - DNA, 83 bp, Homo sapiens
caacgggcattgtcgtgtcagcttttggactccctattgtatttgccagagcacatctgacggtcctaaaatctctacacttg

SEQ ID NO: 476539 - DNA, 78 bp, Homo sapiens
gcagtggtcgcttcttctccttgcttaattggcttagtgtcgacttcaataattggaaagactgggaagatgattcag

SEQ ID NO: 476540 - DNA, 74 bp, Homo sapiens
ttacattggctgttttcctcacattcctcaagcagatgttttcatcttctgcccctgtggatcaggagattaaa

SEQ ID NO: 476541 - DNA, 100 bp, Homo sapiens
gaagatgacaaagccttcgtatggcggctcagcgatggggagctgctctttgagtgtgcagcaagccacccgaggggactgcctggccttccagatgcga

SEQ ID NO: 476542 - DNA, 83 bp, Homo sapiens
aacagactgagcgcgtccaggcctgacagctctgcggctcgggccctgaggtgaaagaaaatggcccgaaccaagcagactgc

SEQ ID NO: 476543 - DNA, 50 bp, Homo sapiens
caagttccaaggttacgtttcaatttcttcggtgcagaaaaaaaatgaag

SEQ ID NO: 476544 - DNA, 83 bp, Homo sapiens
ctccccagtgtgtgccggagaacacgggctacacgtatgcgctcaggggatttgggagcagcttgtcttacacaaggacgaag

SEQ ID NO: 476545 - DNA, 97 bp, Homo sapiens
cctgagcaggcagagagcagaagatattcacagacatgcggaatttgaggtctgtttctgtcgactgtggaccacttatgtgcgatccgtggaccac

SEQ ID NO: 476546 - DNA, 98 bp, Homo sapiens
ttccgcaacctcttccaccggcagggcttctcctatgactacgtctttgactggaacatgctgaaattctgcggcaccttcccgtctgatgctggcgt

SEQ ID NO: 476547 - DNA, 74 bp, Homo sapiens
tacctccatcatcacatgaccaaagcattcctcttctatggatgtggagagcatcttgtgcgcaccatactggc

SEQ ID NO: 476548 - DNA, 74 bp, Homo sapiens
ccccactggaatttccaggaagagacgctgaaggccaagtcttgtcatctgtaatgaagatcattgtgaaacag

SEQ ID NO: 476549 - DNA, 75 bp, Homo sapiens
gaaaagaaggagagcaaggagctgctggatgagagccactcagagtgggtgtcttgtgtccgcttctcgcccaac

SEQ ID NO: 476550 - DNA, 85 bp, Homo sapiens
ccccgggacaccctggaagccaggaaatggggcaagattcttgccaagagaattaatgtgcgtattgagcacattaagcactcta

SEQ ID NO: 476551 - DNA, 100 bp, Homo sapiens
gcttccgacggggcggccgggggctcagagatccaagtgcgcgccctggcgggtccggaccaaggaacttctagcaatagtaaaacaaaagactactgag

SEQ ID NO: 476552 - DNA, 137 bp, Homo sapiens
ctgtggagggtgccgcggccctgcgcagctgccccatgtgccagaaggagttcgcccccagttgcacactgacaagaaacagatcagtgttgggttcattggctatccaaatgttggcaagagctctgtgataaata

SEQ ID NO: 476553 - DNA, 100 bp, Homo sapiens
ccctcgctgcaagtcagaggggaccctgattgacctgagcgaagggttttcagagacgagctttaatgacatcaaagggttcccttctggagaagagtca

SEQ ID NO: 476554 - DNA, 75 bp, Homo sapiens
atctcattaatgacaatcagccatcctggattggacagctttccttaaagtttcccatgtctcaatggactcctg

SEQ ID NO: 476555 - DNA, 75 bp, Homo sapiens
cctggccttctgtatcttcatggtgcggctcatcttcgagagacagttgatattcataaagagaaagttgcaaga

SEQ ID NO: 476556 - DNA, 78 bp, Homo sapiens
tgcagagcccatagccaccttctatgggttaaggcaacaggtctgagaaagaaccccagtttaagtttatctacttca

SEQ ID NO: 476557 - DNA, 101 bp, Homo sapiens
tccctcccagcagagctacctatctatggagaaaatcattcaagtggccaagacctctgctgcacagaggtccagttccggccgtaccgcacagacgactt

SEQ ID NO: 476558 - DNA, 82 bp, Homo sapiens
ctctccttttccctctccctttccctaaggaggtatttaactgaaaggaatatctgcttcactgttgcaaccaaaccagatg

SEQ ID NO: 476559 - DNA, 50 bp, Homo sapiens
acaacattgaagatcggacacggcttctaaccgaaaatcttcagttggcg

SEQ ID NO: 476560 - DNA, 82 bp, Homo sapiens
ctttatctgggtcctgcgggagtacaatgaagtggagcccatcatcctctccgacccagacagtcatccacacagtgcagag

SEQ ID NO: 476561 - DNA, 76 bp, Homo sapiens
gcatctggacaccacacacatcatcagtctggtactttattaccaaggttgccatcggaaccaggaatgacattac

SEQ ID NO: 476562 - DNA, 75 bp, Homo sapiens
aacgaaagagaaaggaggcttatgagagagaaaaaaaagtgtgggaagagcatgatttgtacacacagatatgac

SEQ ID NO: 476563 - DNA, 100 bp, Homo sapiens
atggaagtaaaagacaatgctggcaactgggctctaatctcctaaagatagacagctcaaatgaattgagcaggcagatggcttgtgcagaagattggag

SEQ ID NO: 476564 - DNA, 75 bp, Homo sapiens
agcatcccactcgtcgaaaactcgttcactaggggttggccggagacctacgacatgaatacctcggagcccaag

SEQ ID NO: 476565 - DNA, 83 bp, Homo sapiens
ctatggccgtgccctggggctgagccctcagttccaaagaactactggttcagattttagctcttcccaagttgtgaaaatag

SEQ ID NO: 476566 - DNA, 101 bp, Homo sapiens
cctctgctgcaccacttcatgggaaaggagacctgcagccccagctggacagtgccctgcaggacgtcaacgacatgtacctgctgctggaggagacggag

SEQ ID NO: 476567 - DNA, 87 bp, Homo sapiens
gtcgtgcagcggcggcgagcgctcgcgagcggctgcgggacgcgaggtttccggctgcttccagctgccatggtgatgccaccccag

SEQ ID NO: 476568 - DNA, 100 bp, Homo sapiens
ggacaacgtggatgcagccttggccctccctgcccatagctacagtggccgggagcgggtctacttcttcaaggggaagcatgctagagtgaaagaaaga

SEQ ID NO: 476569 - DNA, 83 bp, Homo sapiens
cggctctctgctcattggggcgttgaggaatcttcagtttagatcttggaggcatatcaactgtggttctaaatggctatgat

SEQ ID NO: 476570 - DNA, 97 bp, Homo sapiens
ctgggatccggagcaagcgggcgagggcagcgccctaagcaggtgaggagcaaaagaagggatccacctattcagttccaaaatctaaggagaagtt

SEQ ID NO: 476571 - DNA, 98 bp, Homo sapiens
cgacgctggctgcagggacccggtgacagcgtgagagcgtcagcctcgagtttgaccagcagcaggggtcggtgtgtccctctgaatctgagatctat

SEQ ID NO: 476572 - DNA, 90 bp, Homo sapiens
ggctcggggacttgtgggattatcaccagcaccgatacctgcaagatgttcctcctgctgatcaagagaagctttttatccagaagttac

SEQ ID NO: 476573 - DNA, 50 bp, Homo sapiens
gggatgtgaatgccaaagctagtcaggtggccctgagaaggcagcaggcc

SEQ ID NO: 476574 - DNA, 101 bp, Homo sapiens
cagaagagtgagagatggaacccgaagaagaaaggattcgttacagccagagattggctattcagcttgaccctgaagaaactcgtcatgctaaaagaaat

SEQ ID NO: 476575 - DNA, 98 bp, Homo sapiens
agcgctgtcccggccaggaaccaggggtgaatctctacattaagaacttggatgacactattgatgatgagaaattaaggaaagaattttctcctttt

SEQ ID NO: 476576 - DNA, 130 bp, Homo sapiens
gactcgctacgcgggtcttgcgagatatctggccgcctctgccgcagctggaggtagtggtagcagagaattttgatgaaatagtgaataatgaaaataaagatgtgctgattgaattttatgccccttg

SEQ ID NO: 476577 - DNA, 101 bp, Homo sapiens
gcaccttccagaggctttgtggtgcgggacgcaccctggaccgccagcagcagtgagaagtttcccaggcggcaagtgcgacccggctgaccaagatgtgg

SEQ ID NO: 476578 - DNA, 51 bp, Homo sapiens
ctctaaattgactcagctccagatgtgcctgcttccccttcaacttccacc

SEQ ID NO: 476579 - DNA, 100 bp, Homo sapiens
gaccccaagttcctgaggaacatgcgctttgccaagaagcacaacaaaaagggcctaaagaagatgcaggccaacaatggcatctgttttctgcgttttg

SEQ ID NO: 476580 - DNA, 74 bp, Homo sapiens
tgtcatatctatgagtaccgcgagagcaacaagtcccttcaataatcaggagatggcagaatggtttcaggcgg

SEQ ID NO: 476581 - DNA, 75 bp, Homo sapiens
gtgaaagtggcggtgcggatacgacccatgaaccggcgaggtttcaagtgccccatttgctccaagtctgtggct

SEQ ID NO: 476582 - DNA, 97 bp, Homo sapiens
ggaacctgaaaaattcaagaagttgaaaaacgcttttcacgtcacctggagagatgcacagcataagctgtggccatgactactgaagtaggctctg

SEQ ID NO: 476583 - DNA, 83 bp, Homo sapiens
ccttcgtgcgcttcgaggacccccgcatgatgccttcttctgtagagtgggcgctttgcagaatacgtgttgaatgaaatcac

SEQ ID NO: 476584 - DNA, 82 bp, Homo sapiens
tatctgtcttcggtggactccttcggcagtccacccaccgccgccgcctcccagcaactgaagcagcagcgggacaagctga

SEQ ID NO: 476585 - DNA, 83 bp, Homo sapiens
ctcaagcctggagactcgcaacaagatcccctatgagagtcccatcttcagcagaggttttaaaatcaaagatgggaaaatcg

SEQ ID NO: 476586 - DNA, 100 bp, Homo sapiens
acaaggcgttcaagcgaaaacatgaccgctgagcccatgaggcagaagctcctcctggggtagagacagatcttattgatgttggattcacagatgatgt

SEQ ID NO: 476587 - DNA, 98 bp, Homo sapiens
cccacaccaacggaccaatcaatccagggcccagctaatttgacaggacatgctgagaaggtgggaatagaaaattttgagctcctgaaggtcctagg

SEQ ID NO: 476588 - DNA, 87 bp, Homo sapiens
aatgtgcatactcacagagttagagagagggatggtgtggatgattcaacagccacacaaagcagcaacattttttggatgcattgg

SEQ ID NO: 476589 - DNA, 100 bp, Homo sapiens
aggattcatgacagcgcatggacagccagaccagcctcgatctgcgcgctacatcctgaaggactatgtcagtgtatttatgagcctccatttcttatac

SEQ ID NO: 476590 - DNA, 111 bp, Homo sapiens
acaagacccggcaggaccaggactccccgcacagtctgaccgacttgcgaatcaccaggggaggactcggtgctgctgctgaacccagctctgggggaccggctggtggcg

SEQ ID NO: 476591 - DNA, 104 bp, Homo sapiens
tctcactctgttaaagctggtctgttctaactgagatttgacaagatcaaagctgcaggaaaatggacagtgaggttcagagagatggaaggatcttggatttg

SEQ ID NO: 476592 - DNA, 74 bp, Homo sapiens
tgctgactggcaagctgacaccggaaggaaaatcacctcggcagtgtttgaaggaaggatactgcaactctttg

SEQ ID NO: 476593 - DNA, 116 bp, Homo sapiens
cgggcggcagcgatgttcggccaggtggctccaaggagaggaagcagtgatgcattgagaaacgtatgtcaaacgaggatacagtgtctggaactattggttctaagatataagtg

SEQ ID NO: 476594 - DNA, 101 bp, Homo sapiens
aggaatcaaacagttttatattaatgttgagagagaggtatacatccccagatttcctctatattcgttcttggctcccttgtatatttttctcaggaggc

SEQ ID NO: 476595 - DNA, 85 bp, Homo sapiens
acatttctgggtgacactcaacaggattcccggaatctagaaaactgtatctgaagttgttcctacctgaagccgttgcattgag

SEQ ID NO: 476596 - DNA, 75 bp, Homo sapiens
tgctgccatcttctccgcgctatggctgcgttcggccgtcaggtcatgtccaaagtaatggagatgttccagcct

SEQ ID NO: 476597 - DNA, 85 bp, Homo sapiens
ctaaaaggcttaacccaggcatttggagggtttctcatttggcctggatttcctgtggatccacgaaaggtgctaatagtagctg

SEQ ID NO: 476598 - DNA, 101 bp, Homo sapiens
aagttctccgccatgaacctgaggggcctcttccaggacttcaacccgaggtgaaaggtgtagcagtcactcggcctacacccacagcatcgaccttgtga

SEQ ID NO: 476599 - DNA, 114 bp, Homo sapiens
tttgaacaactgttaatttagaaaaagtgctgtcgttgtaataacaacttctaggagaccggcagcccttttcagcccgatacttggtgcttgaaaaactgaagaaggaagacg

SEQ ID NO: 476600 - DNA, 75 bp, Homo sapiens
cagtttttctcatgatcgaagaagtggtccacctcacagaggattggtgtggttggtacgggaactggtgaagag

SEQ ID NO: 476601 - DNA, 50 bp, Homo sapiens
cgtttcacggtggcacatacatgaaaggaggcattcacggaagcccgggg

SEQ ID NO: 476602 - DNA, 98 bp, Homo sapiens
cttcgacacctaccgctgcgaccgcaacctggccatgggcgtgaacctcaccagaccaactgaagaagaagctgagcaattactgcagttgatgacga

SEQ ID NO: 476603 - DNA, 98 bp, Homo sapiens
aatgaatgaaccttgccctggggttaacactccagtgggatgaacagacaaaccccacaagcactgcatacggagtattttatacagaaatcttgtga

SEQ ID NO: 476604 - DNA, 83 bp, Homo sapiens
ctctagcggccgggactctgaactatggcggtgttggagagcacaatggctgaacaagtccttcctcaggctttgtatttgag

SEQ ID NO: 476605 - DNA, 75 bp, Homo sapiens
aaagccgggagatcgactgtttgagcccggaagcgcagaagctggggcatggtctagtggcccagtcaggacgcg

SEQ ID NO: 476606 - DNA, 51 bp, Homo sapiens
gactctttcttaatgcagcctgagatgctcctgccagcatttgtcttcatt

SEQ ID NO: 476607 - DNA, 75 bp, Homo sapiens
gggtactgcattcctaccggtgtgacagggctccacgtgttccccacgtttgtggcgtacgagctcacggtgctg

SEQ ID NO: 476608 - DNA, 50 bp, Homo sapiens
caccgtgaacggacagtcccccccagtaatctatgccagcaattatgaca

SEQ ID NO: 476609 - DNA, 75 bp, Homo sapiens
ggacacgcaggaacggctccagcatcaagatccgtctgacagaccctatcagatttggatatgtccttcatattt

SEQ ID NO: 476610 - DNA, 75 bp, Homo sapiens
tcaataggaagtacgagtgtgaatggatttgcagccgctgcaagtgtgtggaagggccgtgttcgtgttggcaaa

SEQ ID NO: 476611 - DNA, 75 bp, Homo sapiens
cagaactcattctcaccaataatagtctcgtggaactggctcatggatttgagatcttatgctccaaatgtagcc

SEQ ID NO: 476612 - DNA, 74 bp, Homo sapiens
cgtgtaactgtgaatctttcaaagctatatgttctcctttcagccaagacctttcaccagtgcaggggatagaa

SEQ ID NO: 476613 - DNA, 83 bp, Homo sapiens
taaacatcaagcaagaatttatgttcaagtcactcaagactgcttgcaactgattgcagacagtgaaacaccaactatacaaa

SEQ ID NO: 476614 - DNA, 58 bp, Homo sapiens
gtcactttgggagcggttctgtgccaacatcataaagatagcaaaattactcagtggg

SEQ ID NO: 476615 - DNA, 51 bp, Homo sapiens
agacctcaagctttttgcaagaccgcagctgaatgcacagctagaaggttg

SEQ ID NO: 476616 - DNA, 100 bp, Homo sapiens
cgaggatctcaagttctgtgaaagtaacattgaaagtttgaatatggaactccagcaactaagaggattactacagcatcccatttcccacacccactac

SEQ ID NO: 476617 - DNA, 82 bp, Homo sapiens
atcgagaggatctggtgtaccaggcgaagctggccgagcaggctgagcgatacgacgagctagagccggtgcaggccacgca

SEQ ID NO: 476618 - DNA, 90 bp, Homo sapiens
ccggcaaatccgcgaggaggtggcgagtgcagtgagcagctcctacagcggcgtcttcgacatcttcggaacattgctgcccggaacatt

SEQ ID NO: 476619 - DNA, 74 bp, Homo sapiens
agaaaaactgcttccagtggttccaaggcaaagggaatgtactcaagactgatcttctaagttcactggaaatg

SEQ ID NO: 476620 - DNA, 90 bp, Homo sapiens
cctccgaaccccttcatgcccaaatcccggaaactccagcgtgtctccagccgtgggacctcaggatggaaaccagcagcctgcaccgcc

SEQ ID NO: 476621 - DNA, 80 bp, Homo sapiens
tcgggatccttctgtcatagaaactcacatgagacaaatgcgctcagcttcaattgtgtcactactccatccagaaggga

SEQ ID NO: 476622 - DNA, 87 bp, Homo sapiens
aagctcaggtgggagtgcagctgctgtatcggcgttcacatgctacgcggtgatcagcccatgacctaaacctccagacaaaataaa

SEQ ID NO: 476623 - DNA, 111 bp, Homo sapiens
atatttggagttcttacaacatggcagacattgacaacctatttgatggctttgcagatggactaggagttgctgaagctatttcatatgtggatcctcagttccttacct

SEQ ID NO: 476624 - DNA, 100 bp, Homo sapiens
aactgaagcaaaagatcagcgaggagcagcagcagctccagcaggcgctggctcctgctcagaacaaatcacctgctgcagtaacagaaccagagacaaa

SEQ ID NO: 476625 - DNA, 83 bp, Homo sapiens
aaggggaaggcgcctgaagaggacgaagctgcttttctaacccaaactgtatgtcttgatgacactacagtaaagtttgaaat

SEQ ID NO: 476626 - DNA, 88 bp, Homo sapiens
ggagggagatggtgcgctggctggtcagctgtgccacagagattgaacctagaagtcggaatccggaagaagatcgaacatgacgtgg

SEQ ID NO: 476627 - DNA, 83 bp, Homo sapiens
ttcgcctcccgaagggaaactagagactaaagctggacacccgcccgccggtttccatgctgagctcctgcccatcttcagtc

SEQ ID NO: 476628 - DNA, 80 bp, Homo sapiens
gccaccactgccaccacggtcgcctgccacagtctggcttcagccttgtcatgaaccacccagcctgtgtcaatgagatt

SEQ ID NO: 476629 - DNA, 100 bp, Homo sapiens
gcaacaaaaacataaagctctcagaaagagtactgattcctgtcaagcagtatccaaaggtgactctgacatcattagaagcatgccagaacagactggt

SEQ ID NO: 476630 - DNA, 98 bp, Homo sapiens
gcccttgctccaagtcccagtaactcggaatgcggagccgctcgtctcccgtcttttttaaggtggaaccgtcccaaaatgtcccttgctcagaagaa

SEQ ID NO: 476631 - DNA, 90 bp, Homo sapiens
cccactttgagtacgtcaagaatgaggacctggagaagatcggcatgggtcggcctggctacgggcgcacctacttgagctgcacgtctg

SEQ ID NO: 476632 - DNA, 100 bp, Homo sapiens
caagaaaaagcaacaggaattgtgtgctgatctgaaagccaagtgaaacaaagagtcctcttcgtggaaaagaaaaaaatacgctccctttaaacggtgg

SEQ ID NO: 476633 - DNA, 100 bp, Homo sapiens
gcaagatcaagcactggaaccgcttccgagacgcctccggtgtggctgtctctgatggtgtcatcaaggtgttcaacgacatgaaggtgcgtaagtcttc

SEQ ID NO: 476634 - DNA, 75 bp, Homo sapiens
ctgaagttggctaacaaattgaaagatatcatcaaacgacatcagggtgtgggccgaagatatgctcatgtggtg

SEQ ID NO: 476635 - DNA, 96 bp, Homo sapiens
cgtcccctgcatctccctcgcccatcacagccggctccttccggtcccacgcagcctccaccacctgcccggaggctggagtgcaatggcgtgatc

SEQ ID NO: 476636 - DNA, 100 bp, Homo sapiens
ttccctgcatcctaagactcgaaggcagcacaggacctggaaaaattacatcctctaaagagagcaatcactacacttatggctgggattttgcgcttag

SEQ ID NO: 476637 - DNA, 83 bp, Homo sapiens
cagacgctggcgggcgcagtttctcacgacgggccgagcctgccactgtcgcaatggaagaagagatcgccgcgctggtcatt

SEQ ID NO: 476638 - DNA, 90 bp, Homo sapiens
tgctgctgatgaagatgatgacgatgatgatgaagaggatgatgatgaagagaagaaatgcagagtaacgtggaagtggtccacacctac

SEQ ID NO: 476639 - DNA, 75 bp, Homo sapiens
gatggaagtggtggtgatcacccacaaagggggccagaggagcgacggaaacagttggtggttccaggattttac

SEQ ID NO: 476640 - DNA, 101 bp, Homo sapiens
tgagcctcctcctctccttctacctgctggggttgcttgtcagtagcgggcaagatgacaagagcacctcaaaggcagcagcctcaaggagcagccatggc

SEQ ID NO: 476641 - DNA, 99 bp, Homo sapiens
gcgcacctgtcggagacccgccagtccgccggccgcggtctctctgaagaggctatcatggagctgaacctgccgactggtattcccattgtctatgaa

SEQ ID NO: 476642 - DNA, 100 bp, Homo sapiens
gttctgcaaagtcgacaagaatctcaataacagtatgcctcaagtactacagccttccagcagccttcccagacccacagatcacacccagggaaaacta

SEQ ID NO: 476643 - DNA, 100 bp, Homo sapiens
ggggactctgtgtgagggaaagaaaacaatttctcctgctctgcagcttctgttcagtttcagactctctggctcaatctgtagttcagcatctaagatg

SEQ ID NO: 476644 - DNA, 51 bp, Homo sapiens
ttttgtctgatgactactcaaagacgccacaggtcatcatctggatcatcc

SEQ ID NO: 476645 - DNA, 100 bp, Homo sapiens
ggacctccctcacctggtcaatgcagacggacagtacctcttctgcaggtactggaaacccacaggcacacccaagaattctgatgtgaaactaacagtc

SEQ ID NO: 476646 - DNA, 75 bp, Homo sapiens
ggggaggtgccagcccgcgaatccggccggagcacaaggccaatcagcccccccacggtgtcccccaactctctc

SEQ ID NO: 476647 - DNA, 100 bp, Homo sapiens
cggcgacggaggagagcagctcctcactgtcaagcacgagctgcggactgatgtcgacgtacaagcgggccacgctggacgaggaggacctggtggactc

SEQ ID NO: 476648 - DNA, 75 bp, Homo sapiens
gcaccaggtcttgtagcagcgcctcctcgtgtgtgttttaatagaaaagttgtcactttccaaaatgccctttag

SEQ ID NO: 476649 - DNA, 100 bp, Homo sapiens
gccttctgcagtttccccagagctcctcaagaataacggaagggaggtgagccagccatgagagggtatcttgtggccatattcctgagtgctgtcttcc

SEQ ID NO: 476650 - DNA, 100 bp, Homo sapiens
ccagctctttcggaacccgcaccaagctctgctccacactgccaaccggccagaggacgagtgtgaaccaacctatgaccctgtgagcgaggaccaagac

SEQ ID NO: 476651 - DNA, 100 bp, Homo sapiens
ctaacatgtatgaaggtgtaggaagaatggagtgcatccgccccaacccttttccccctcgtctcctgtgagaattccccgtcggatacgagcagcgtgg

SEQ ID NO: 476652 - DNA, 50 bp, Homo sapiens
ctttttggcctggcttgtttgcaaaggttggttttgaccctcaccccccg

SEQ ID NO: 476653 - DNA, 100 bp, Homo sapiens
caagcagttccccggaaccctggctggagacggtgcctctagtcacacctgaagagccacccgctggtgcccagtcaaggagaagctgcgccttgatcct

SEQ ID NO: 476654 - DNA, 100 bp, Homo sapiens
tgggcttggccaagtccatccaccacgctcgcgtgctgatccgccagcgccatatcagaatgccagcagttactctgcagagatgacggagcccaagtcg

SEQ ID NO: 476655 - DNA, 111 bp, Homo sapiens
cgtggatgggaaagagagttgtgagtctctttcctgtttacctccagtgtcccttcttccacatgaaaaggataagacagttgaatttctgaatgaaaagctggaaaaaag

SEQ ID NO: 476656 - DNA, 100 bp, Homo sapiens
acgcacaatatcgggcagaaagataatcacgagttcaccgaacagcagaaagaatttcaagctactgctcgtaaatttgccagagaggaaatcatcccag

SEQ ID NO: 476657 - DNA, 100 bp, Homo sapiens
ctgagttgtcctatgcccctatgactccagaccacttcccaagcctcttttgcaaggcctctactacgtggacagtgaagggaaccggatttcaggggcc

SEQ ID NO: 476658 - DNA, 107 bp, Homo sapiens
acatgtggtttgctggtggcttcccactggcgaagagaagctacaaaatatgctcgatggatagcattcactggaagaaaataagcattgggtgttttgcaatggct

SEQ ID NO: 476659 - DNA, 75 bp, Homo sapiens
gcgacctggggccctgggtgaagtgctccgccgcccttgcctccagtgacatattcgatgccatgttccctgtca

SEQ ID NO: 476660 - DNA, 98 bp, Homo sapiens
ggcagccaaaagattgaaggaaggtgatacaatgatggggcagcaagtggccaaaaaatgtggacacagacttgccaggcagcctggggcagagtgaa

SEQ ID NO: 476661 - DNA, 100 bp, Homo sapiens
tgggaggccggccggtgccagcacctttcggcttctgagacggcggcagcagcggcattcagtttaaggaagaaatctctaaacgttttaaatcacatac

SEQ ID NO: 476662 - DNA, 75 bp, Homo sapiens
tttgccgtggtttttatcaccacacgactgggtatatttcctctctgccgttcttggaacacctcacagcttgcc

SEQ ID NO: 476663 - DNA, 50 bp, Homo sapiens
ccggggtttcctacttggttcggggtttgaacatcctcatccctgtgtta

SEQ ID NO: 476664 - DNA, 100 bp, Homo sapiens
gcattttggcattgacatttaattttagggtcctttatatagaagggagagtaggttgcccccaagtttcctggcagtgtgtgatactgaggaggtgagc

SEQ ID NO: 476665 - DNA, 100 bp, Homo sapiens
attcaagcggcaggacgcacttgtcttagcagttctcgctgaccgcgctagctgcctgcagcgtgctctacttgacctcagtggagacagagtcactgac

SEQ ID NO: 476666 - DNA, 100 bp, Homo sapiens
ccgcggcaacgaccgcaaccgcatcgtgctgcctttcagtttcgcctggccggcgaagctggtccgttacatttgtaagcagaggcagtgcaagctgagc

SEQ ID NO: 476667 - DNA, 98 bp, Homo sapiens
cttggccatgcgacggcggctgcctgtggaagaaatcatgagtggaggatctcaagtccacattttttggggtgctccaattgctccactgaaaatca

SEQ ID NO: 476668 - DNA, 75 bp, Homo sapiens
ctgaggacggcgtacggagtgtgggctatattcccaaagcttggattagcactgctatgaaccttcacatagatg

SEQ ID NO: 476669 - DNA, 75 bp, Homo sapiens
caactgtgtatctttgtgaaaagggatttggacatttggtgccatcttcagaagatccaggagtcctgggaatcg

SEQ ID NO: 476670 - DNA, 83 bp, Homo sapiens
tctgggggatcgaccgggacagctaccggcgcatccttatggtgtcccgacccaggctaagcttgagcatggctgagcaggag

SEQ ID NO: 476671 - DNA, 75 bp, Homo sapiens
attgccggtctgggagttgggggcaaggagaagatcctggaatctttgtctgaagtggaagaaaaatacaagaaa

SEQ ID NO: 476672 - DNA, 99 bp, Homo sapiens
cagagactgctgagcccgtccgtccgccgccaccacccactccggacacaggtcaaaatgcagatcttcgtgaaaacccttaccggcaagaccatcacc

SEQ ID NO: 476673 - DNA, 90 bp, Homo sapiens
tgccccctcagccctgtggctgggggcagagctcaggatgtcacatgtacttcagtttgaggataaaagcagaaaagtgaaagatgcaag

SEQ ID NO: 476674 - DNA, 98 bp, Homo sapiens
gagaagggtcactggactgcacggggtggctcttccgcatggtcttgtactatactggcaattgctggagaagattttgcaattgttgcttctgatac

SEQ ID NO: 476675 - DNA, 101 bp, Homo sapiens
tggtacccctgaaggagaccatcaaaggattccagcagattttggcaggtgtgaagcagcaactggggacggtgcggcccggcttaggcatgacctctgtt

SEQ ID NO: 476676 - DNA, 90 bp, Homo sapiens
tggtaacccaactccattaataaaccccttggctggaagagctccttatggcctctcttctgtggaaactctgaagccgaccagttgggc

SEQ ID NO: 476677 - DNA, 100 bp, Homo sapiens
gagccgagcacgcgggtctgtcatcatgtcgcgttacgggcggtacggaggagggagctgagcacataacgacttacacgttcaatactcacaaagccca

SEQ ID NO: 476678 - DNA, 100 bp, Homo sapiens
tgcgtgtgcctgtgaatgacagcttttgtgagaaaattttgccgtggttggacaaatcagtagatttcattgataaacaacttgatgcagatgtttcccc

SEQ ID NO: 476679 - DNA, 100 bp, Homo sapiens
taaagaggcaccattcgtacccgttgttttttgtagcatcagatccaacagttaaaacagatcgactgtggcacgacaagtatactttgaggaaatcgat

SEQ ID NO: 476680 - DNA, 101 bp, Homo sapiens
agcaatgcttgaggctccttacaagaagattgtcactgctgttccaagggcacacgcagagggatttggaattcctggagagttgcctttgtgagaagctg

SEQ ID NO: 476681 - DNA, 100 bp, Homo sapiens
gcaggctgaccccgcagcggccgggctgtcgcggcccccacctcaggagcagttgcagaagctcgaggttgaactgagagaagtcactaagaacaaggag

SEQ ID NO: 476682 - DNA, 74 bp, Homo sapiens
gtggctgctctgggggattctctgaccgtgtgttaccgagtggaatgggccaaattccaggaacgtgagaggaa

SEQ ID NO: 476683 - DNA, 100 bp, Homo sapiens
gacgcaaagcgaggaggaggaaaagtctggcctcggcgccaagatcccagtcacaattatcaccgggtatttagtgacattgcaggaatgctgctgaaat

SEQ ID NO: 476684 - DNA, 100 bp, Homo sapiens
cccgcggccagtgcgggtggctggctttgccattagcgggggcctttcctgaggacggcgtacggagtgtggtgctcggccttgttctccccatgtgggc

SEQ ID NO: 476685 - DNA, 100 bp, Homo sapiens
gctgcctctgtcactcctggtgaccagcattcaaggtagtcagatgcctccgcagccacccgggagccagtcagaatccagttcccatcccgccttgagc

SEQ ID NO: 476686 - DNA, 100 bp, Homo sapiens
tgcagttttattctctccagagtgataaacagttatacaatgtgatttgaagatattaaagctagaaattggaactagaaaatcaaaagaattcaaggca

SEQ ID NO: 476687 - DNA, 100 bp, Homo sapiens
tagttgttgagcagagggaaagggataggagaaggatgtggactgcagtgctgcagtgccagcttccgacttcgactccttaccttaaaagatgctggag

SEQ ID NO: 476688 - DNA, 91 bp, Homo sapiens
aagagttctaagtcttcaacttccttggcttttgagtcccgactcagcaggtggccataaaatgcagtaaaaacaaatccagttcccaaga

SEQ ID NO: 476689 - DNA, 100 bp, Homo sapiens
cttgttcccccaaatgtctgactctgactctcggactgagaaacgcaaggacatggatttgattgacatactttggaggcaagatatagatcttggagta

SEQ ID NO: 476690 - DNA, 96 bp, Homo sapiens
agacccaggaccctgtgcaggagcagctccgggtgacacgaggggactgaagatactcccacaggggctcagcagttctggaggctggaagtccaa

SEQ ID NO: 476691 - DNA, 89 bp, Homo sapiens
aaattctggaacacctatatgtacctggagtagaacagaaaaattattatgtctgtgttcccttgggactcattggaaattgtacagtg

SEQ ID NO: 476692 - DNA, 99 bp, Homo sapiens
cggcaactactttggattcacccacagcggggcggcggcggcggcggctgcggcccaatatagtcgctccccaagtagggagaagaagagagctcgttg

SEQ ID NO: 476693 - DNA, 82 bp, Homo sapiens
aaggcttccaagtgccctatgtcacctacgatgcgacaagactctgggacgatgaagaagccgcacaccactgaagagattg

SEQ ID NO: 476694 - DNA, 92 bp, Homo sapiens
gcggcggcgcccgcgggtggtataaaatggcggatttcgaagagttgaggggactgctgagatgtcctctattcttgaagagcgtattcttg

SEQ ID NO: 476695 - DNA, 129 bp, Homo sapiens
tccgggcgcggggaagtcatgctcgcttcacggaggcaatagctagccggtttggaattcacccagttgcaggccgaatgcctggtcagcttaatgtgctgctggctgaggctggtgtgccatatgaca

SEQ ID NO: 476696 - DNA, 102 bp, Homo sapiens
tgaagagcgacaagccgctggcagccgcggatctcaccgccgctcaggggcgaccattgacgaggtggagacggacgtggtggagattgaggccaaactgga

SEQ ID NO: 476697 - DNA, 100 bp, Homo sapiens
gcattttggcattgacatttaattttagggtcctttatatagaagggagagtaggaactaagcgtcttgtagaaggaactattaatccaggagaaacctg

SEQ ID NO: 476698 - DNA, 104 bp, Homo sapiens
cgccccctgggatccgcaggttccctacacggtctcctgggtcaagcactgctgatggttcttcagaactcaggaatcgtgttgcatgcattgtttctacccac

SEQ ID NO: 476699 - DNA, 83 bp, Homo sapiens
aaatgtcatccgatggcacaatcagattttcagctgaactctcatctctcaacactggcaaatattcataagatctaccacac

SEQ ID NO: 476700 - DNA, 82 bp, Homo sapiens
cctccagctgccccctgtgtggcaaacctttcttgagctcagacaatgcagatcttcgtgaagactctgactggtaagacca

SEQ ID NO: 476701 - DNA, 75 bp, Homo sapiens
aaaaatttcaggattggtactacaagaagtccccacgagaagaagaagaagaggcggtcccggtcgcggaccaag

SEQ ID NO: 476702 - DNA, 74 bp, Homo sapiens
acagaacgttgcaaactctggaaaaaaacttggatgcttgggatttgctttacattctaagtggatttggagaa

SEQ ID NO: 476703 - DNA, 122 bp, Homo sapiens
ggaagtcaacattttgatgttcctcccaggagacagctatatttgcccatgttattcaagattgttgatccatttcagatacttgtggcagcaaacaaagcagttcacctctacaaactggg

SEQ ID NO: 476704 - DNA, 75 bp, Homo sapiens
atccaagtggcaagaagaaactcaagatcttccagcctgcttgggtggcaaattttgaaagacctcgaatgaatg

SEQ ID NO: 476705 - DNA, 145 bp, Homo sapiens
tccctctctggccactatggaattctaatttgaaccatgtttggattgaagccgcctctgtattacttaccagataacgaaggaggcccaacttcattcaataaggagcctgacggatttatcccagacggtagaacaaaaggaa

SEQ ID NO: 476706 - DNA, 98 bp, Homo sapiens
taccacctacagccaagtggcagatttgttattggtgggcctcaggttcaaaccttgtactactcagctgatcacaagctgcttgatgggaacctact

SEQ ID NO: 476707 - DNA, 75 bp, Homo sapiens
tcttcactttttaacggaccagttcagtataccaacagatgttttaaagattgtgtattctgtgggtgctcagac

SEQ ID NO: 476708 - DNA, 100 bp, Homo sapiens
tggaggcatgtgaccccagcccagatagactgctttggggagtatgtggaaccgcaggactgcagggtctctccagccagtgccaatatctgcaatgtgg

SEQ ID NO: 476709 - DNA, 51 bp, Homo sapiens
ggtgctttcccgaatctcagaatgccttctccaaggagaggcacatcatgg

SEQ ID NO: 476710 - DNA, 100 bp, Homo sapiens
tgcaaagaggaggaaggagggacttcttggcttctcccagcatagccccaggtatctctcctaaatgtgtgatcaaggaattaccaccaacagagaacag

SEQ ID NO: 476711 - DNA, 111 bp, Homo sapiens
aagagaggcccaagatggagacggcggcggctgtagcggcgtgacagtgggctcgggatgagtttgaaggcctcttcaagcagccagcagaaaatgtcaaccagtacctca

SEQ ID NO: 476712 - DNA, 75 bp, Homo sapiens
cgccggccatggaagagcctgggcccccaggtgggctcagccaagaccaaggccctcgggaccaaggatcacgtc

SEQ ID NO: 476713 - DNA, 50 bp, Homo sapiens
cccagacaagatggacaccgcggaggaagatgctgcagttggagaagaaa

SEQ ID NO: 476714 - DNA, 100 bp, Homo sapiens
aaggctaaagagggctggagtcaggggacttctcttccaccagatatcagttttagagaatgtggcgtggagaaattctcaaggaaagagtaaaatgctg

SEQ ID NO: 476715 - DNA, 83 bp, Homo sapiens
tgaagctcactcagattccctcattgatacctttcctgagtgtagtacggaaggaaagaaggattgtccaaatgtggaagatg

SEQ ID NO: 476716 - DNA, 99 bp, Homo sapiens
agctttagagcctggctactcacagttgaagcctgattgcagcctccacaaatgggaagtgttcctgtaatgacgcaaccaaccttaatatacagccag

SEQ ID NO: 476717 - DNA, 75 bp, Homo sapiens
cttgcacatgaagctacaaaactggtaaaagctgctgaaacatgtcaagagccgaaggaattcagattgccgaaa

SEQ ID NO: 476718 - DNA, 100 bp, Homo sapiens
cagcagcaagtcccatcggaggacctccctgccctgtataccgagggaacaggcaagaaaattggatgtatattttgaatatgaagaaaaaataatgagc

SEQ ID NO: 476719 - DNA, 75 bp, Homo sapiens
atgattgatgttggctgatattggagtgctcattcacatgaaagttaaacatgaagtttctggagagacagtggt

SEQ ID NO: 476720 - DNA, 82 bp, Homo sapiens
agagcatgatcggcatgtccaccaaggcagtgttctaagaacggaagcatctgggctggatggaatttagcatcaagcagag

SEQ ID NO: 476721 - DNA, 100 bp, Homo sapiens
ggcagcatgcggaaggcattgctgggagcctgaaaactgtgaatgttacatgggaattggtctttctgctcaaggtgtgaacatgaatagactaccaggt

SEQ ID NO: 476722 - DNA, 101 bp, Homo sapiens
agctcagaacagttggatcttgctcagtctctgtcagaggaagatcccttgccggagcggttgcagggcacacattactcggtgcagtcggacatctggag

SEQ ID NO: 476723 - DNA, 82 bp, Homo sapiens
actcttggggctctacctctttttcaaagagagcgacttgcagttgtggaggtacagtgtgaacggctgaggatgctctacc

SEQ ID NO: 476724 - DNA, 100 bp, Homo sapiens
gccccgctgaccgccatgctgaccttcttcctcgtgtcggggggctccctctggctattcgtagtacctggagtagaacagaaaaattattatgtctgtg

SEQ ID NO: 476725 - DNA, 97 bp, Homo sapiens
gaggacagagaagccttttccgttgccggtgccggcctagcgtcctggaattacttcaatcaagttttgggcggaaagacgtagttgaatatttgct

SEQ ID NO: 476726 - DNA, 80 bp, Homo sapiens
cttggaatgaatccttctagagacgtccacgactagacgcttgaagcaaagctgccatcccagaagacgacatgctctca

SEQ ID NO: 476727 - DNA, 50 bp, Homo sapiens
gcggattctacattgcctccggagggagaagaaatgggtgaccgttggtg

SEQ ID NO: 476728 - DNA, 83 bp, Homo sapiens
ctcgtattctcctgcccttccccaggtttactcctggcttgggggcattaggaagcactggaggctcttcgggaactaatgga

SEQ ID NO: 476729 - DNA, 100 bp, Homo sapiens
gggaccatcgtcgtgaggatcgtgtgcattacaggagtcctccacttgccactggatggccgccctgctcccccaatgaaaggccagcttcgaagaaaag

SEQ ID NO: 476730 - DNA, 100 bp, Homo sapiens
catctttcccaatgccgaactgggaggcccctttgaccagatgaacggagtggccggaggaagctcttcgtgggcggtcttgactggagcacgacccaag

SEQ ID NO: 476731 - DNA, 87 bp, Homo sapiens
cccttccccacgcaaccccagatccatttacactttacatcaggatggctaaaggtgaccccaagaaaccaaagggcaagatgtccg

SEQ ID NO: 476732 - DNA, 90 bp, Homo sapiens
gtgcagctgcctcagttcttagcgcaggtattctttaggtgatgctagaaggcctcttcatgaaacagcagttttggtagaagatgtggt

SEQ ID NO: 476733 - DNA, 100 bp, Homo sapiens
cagagtacgatactcaggtcaaagatgcctgaaatgtgcagatgccccgtgtcagaagagctgtccaactaatcttgatattaaatcattcatcacaagt

SEQ ID NO: 476734 - DNA, 100 bp, Homo sapiens
caagaccaccacctgggagcggccccttcctccagggagtttgacttacaaggaatctggagtagatatcgcagctggaaatatgctggtcaagaaaatt

SEQ ID NO: 476735 - DNA, 87 bp, Homo sapiens
gcgcgaaggagcggaagaatggcagtgctcaaactcaccgaccagcggagcgggcactggacacaatgaactttgagatgctcaaag

SEQ ID NO: 476736 - DNA, 75 bp, Homo sapiens
aaaccctgtttttttaatagctactacataggcaagtcaccaaaggttggaaagaaccatgactgtattcaggaa

SEQ ID NO: 476737 - DNA, 100 bp, Homo sapiens
gtctcaccttcagtgtcgtgaccgtcttctcaagtcttaggattgcagcaacacgctcggctgcccaaacccaaggcgaagaccttgccagagttcatca

SEQ ID NO: 476738 - DNA, 78 bp, Homo sapiens
gatttatgtcttgaagacaaaagacgcattgcaaacttaattaaagaactggccagccagtgatgatcagccagagaa

SEQ ID NO: 476739 - DNA, 100 bp, Homo sapiens
caggaaaataaaactcttttgaaagttgtgggtcagctgaccagcctaaacagcgaacatccattgtgtcttctctggattttcaccgaatgaatcacaa

SEQ ID NO: 476740 - DNA, 152 bp, Homo sapiens
atgtagaggaagaaaacattcctgctctgaaagctcttcttgaaaaatgcaaagatgtagatgagagaaatgagattgtcactgctgttccaagggcacacgcagagggatttggaattcctggagagttgcctttgtgagaagctggaaat

SEQ ID NO: 476741 - DNA, 95 bp, Homo sapiens
ccagtatgaatgtgatgaaatcaggttgccgatcttcacaccgtcccagagggttctagtaaataccgcttgctgtgttttgatgttggtggcta

SEQ ID NO: 476742 - DNA, 100 bp, Homo sapiens
tggcacaccactagggaaaagaagaaggggcgaactgcttgtcttgaggaggtcgttcagattctaggagataagtttccatgcactttggtggcacaga

SEQ ID NO: 476743 - DNA, 90 bp, Homo sapiens
gaagaagaccagccttccagactcgcttggtgccctgacagatttgttcccgacaaggagttttctggttcagaccgtagacagagaggc

SEQ ID NO: 476744 - DNA, 101 bp, Homo sapiens
cggggaccgcgctcaagaggctgatggccgagtacaaacggcaggatggcagcagatgaaagctcacagaacactttgcggctccagttcaaggcaatgca

SEQ ID NO: 476745 - DNA, 83 bp, Homo sapiens
ctgggatttcaacctgaaagtggaggctgcgaaaatagggaatgacagaggaagaggaagacaaacttctggcactgaaagac

SEQ ID NO: 476746 - DNA, 101 bp, Homo sapiens
aaggattccaagtaactcttatttggccctccctatcctgaagacattagctgagagtctggcaccttttaaaggtctgatcatcaattgtctctctgggc

SEQ ID NO: 476747 - DNA, 83 bp, Homo sapiens
cacttggaatagtagcaggcggcggcggcggaacgccaggcaggcgtgccgccgccagacggattactggcagttcgtgaaag

SEQ ID NO: 476748 - DNA, 100 bp, Homo sapiens
gccgccgccagggtctgcagggcctgggccgccgctgctacctgcagcgccgtgtggcacgacacaaaaatcagtgtgattcttggagcaaatacccggc

SEQ ID NO: 476749 - DNA, 100 bp, Homo sapiens
gtaaaaagaaccagctgcctccaggcagccagccctcaagcatcacttacaggaccagagaatttggtgttcacttggcagaactgactgtagatcccca

SEQ ID NO: 476750 - DNA, 75 bp, Homo sapiens
cgtgtaactactacctgcagccagaggaagacgtgaccattggagtctggtacaaacccgtagtgctgatgaacc

SEQ ID NO: 476751 - DNA, 75 bp, Homo sapiens
cgactgtaagcaatctacgaagaccgaggaaaagctgcggtttgaacgccatgaccctgtggatgggagaattac

SEQ ID NO: 476752 - DNA, 75 bp, Homo sapiens
gttgaaacgctgcctggaaaggaagtaccaggacttgcacagacgctgaccggaaaggagattgagattgacatt

SEQ ID NO: 476753 - DNA, 100 bp, Homo sapiens
tgctgcttcaggaggagcagcctatacaaagagcaattctggggtcagaagccatggagtcagcattatcaccaaggatattattgaatacccaaataaa

SEQ ID NO: 476754 - DNA, 50 bp, Homo sapiens
cacctccgaagggcctacatgagtactgctggagttaataccaccgacaa

SEQ ID NO: 476755 - DNA, 82 bp, Homo sapiens
gaaacaagtatatatcccaacctattaggcgattagagaaaaatgttaaagaggtattggaagattttgctgaagatggtga

SEQ ID NO: 476756 - DNA, 100 bp, Homo sapiens
gcacttgacaaccagcatgccgagatggtaccaaccaagaagctgaagaaatatgagaaagaatatcagacaatgcgagagagtcagctgcaacaggaag

SEQ ID NO: 476757 - DNA, 87 bp, Homo sapiens
cggcggggctgaggcggccgcggggcccgagcgcaggtgctggagaatctggtaaaagcaccattgtgaagcagatgaggatcctgc

SEQ ID NO: 476758 - DNA, 99 bp, Homo sapiens
gattggctgtctcaacccccagccagggtcaccatcaaaatggaatgtaaccctagccaggtgaatggctcaagaatcatggtgtcatggaaagggatt

SEQ ID NO: 476759 - DNA, 82 bp, Homo sapiens
cggcccggaggaggctcatgcgggatttcaagcggtgattggagttgtgcttcaaaaatttcagaaattcagcagtatttta

SEQ ID NO: 476760 - DNA, 100 bp, Homo sapiens
gcggccccggctggtgtgacctgtgcggacgagaggtgctgcggcaggcgctgcgctgcactactgtacccaagaattaaaccaagacaaaggagcttgg

SEQ ID NO: 476761 - DNA, 74 bp, Homo sapiens
ccacactttccagaatgagtgtttcttttgtgttgaacagagttctggtgttgtttgggaggtgaaaccaaagc

SEQ ID NO: 476762 - DNA, 81 bp, Homo sapiens
ctggccaagctcgaggccaaaaccggcgtgaacaggagcttcatcgctcttggtctcctctgagcctccggcctccataag

SEQ ID NO: 476763 - DNA, 98 bp, Homo sapiens
gattggcatagtttgtggtgttttctatcccagttctttggcttttactaaaaatggacgcctggcaaccaagtatcaatcagctctgttaccacaca

SEQ ID NO: 476764 - DNA, 50 bp, Homo sapiens
accttttggaaataatgaaaagatcgagacatgtaagcagcatcatggag

SEQ ID NO: 476765 - DNA, 73 bp, Homo sapiens
gcccaagaaatcaaaataaaggaaacacatttcatatactgcaggattcaagttcgaaatatggcaactttga

SEQ ID NO: 476766 - DNA, 96 bp, Homo sapiens
ctcacctctgcgccaggctgcggatgaggatgacaaggggatgagattactccaaaggtttcggcggcaaatacggtatcgacaaggacaaagtgg

SEQ ID NO: 476767 - DNA, 73 bp, Homo sapiens
taattttagggtcctttatatagaagggagagtaggttcattttaatcgtgatggatccttgatagtttcaag

SEQ ID NO: 476768 - DNA, 49 bp, Homo sapiens
gttgtggagggaccctgtggaaggcaatgccaccgtagataagttggag

SEQ ID NO: 476769 - DNA, 90 bp, Homo sapiens
gcagctgtggcgcaggagccccctcccctggcagctctgacgtctccaccgcagtgagtgagatcattggccgagacctgagtggcttcc

SEQ ID NO: 476770 - DNA, 75 bp, Homo sapiens
gttgtggagatggggagcgtcctggggctgtgctccatggcgagctggtctatccagaagttaaaggagagattg

SEQ ID NO: 476771 - DNA, 90 bp, Homo sapiens
aggccccgggcacctagagacggatggtcgcacgcatgattgtcggcatctcacagggacccagacatggagctgcgggaagaagcctgg

SEQ ID NO: 476772 - DNA, 100 bp, Homo sapiens
actgggctcctgagcttcatggtggagaagggccccaccctgggcagtatagagacgtcggacttcacgcgggctgacgcacgaggcacacaggaaggag

SEQ ID NO: 476773 - DNA, 100 bp, Homo sapiens
tggctaggagaggaaggaccaagggacggggcgttcccaggtgggagcctggagggcaaagcgtggtgcgagcagagaagcagggccctgagcggaagag

SEQ ID NO: 476774 - DNA, 90 bp, Homo sapiens
caagacctgtcaaggcggcgcagctgggaaaggtcgcggagctgctcagagagctggcggagcaactagaagccatttgtgtcaaggtaa

SEQ ID NO: 476775 - DNA, 100 bp, Homo sapiens
atggattcatcttagtgtgcagatgcctgtgaggagccaccaacatttgaagctatggagctcattggtaaaccaaaaccctactatgagattggtgaac

SEQ ID NO: 476776 - DNA, 96 bp, Homo sapiens
ctcgcgctactctctctttctggcctggaggctatccagcaaggacagaataacgggctcccagattcacaagccccaccaagaggatcaccccag

SEQ ID NO: 476777 - DNA, 98 bp, Homo sapiens
gcaacctagccaatgctctcaaagagaagggcagtaaaaatcctgggtagaagctggatcagcaagaatgtcactccttatattggtgtccattttct

SEQ ID NO: 476778 - DNA, 138 bp, Homo sapiens
attaccgtatgcagtcccccaggatacagggtcaaaggagagcacaaccatcgcagttggaagcccatggggcagatcaatgagctgagcaatgttcctgttcctgtcatgctaatgccagatgacttcaaagcctac

SEQ ID NO: 476779 - DNA, 75 bp, Homo sapiens
gaatcatctagaaggacaaatgaacttcaatgcagattctagccaacataaagtatctggagtccatctttcacc

SEQ ID NO: 476780 - DNA, 74 bp, Homo sapiens
caggatccacccgatgaatgtgggaagactgagctgccactgcagagccccgccatggaagacacgccgttggt

SEQ ID NO: 476781 - DNA, 82 bp, Homo sapiens
tgacagattctcaacactcacaggatgggtttgtggagttcttccatgtagaggacctagaaggtggcatcaggaatgtgct

SEQ ID NO: 476782 - DNA, 90 bp, Homo sapiens
tgagctcccacctaaccttctgatgaaggctgacagcatcagccactatgtgattgtcatgtccatgaccatctttttggtgttcctcaa

SEQ ID NO: 476783 - DNA, 73 bp, Homo sapiens
ctcaacaacattggcgatgcctcctcgctcatccgagccaccattggactcggtggcttttgaggatgtagat

SEQ ID NO: 476784 - DNA, 83 bp, Homo sapiens
cagaaacctcacagaacacagcaaagttaacccagtatccactccagttgcacttcccacaccagctctttctccaagtttga

SEQ ID NO: 476785 - DNA, 75 bp, Homo sapiens
gtttgcatgcgtgacattgaaaaatgaggtctacatctcagtgagaaacttcctgaagtactaaatatggaatcc

SEQ ID NO: 476786 - DNA, 98 bp, Homo sapiens
ccgagtggtctaaggcgccagactcaagagctagagccggtgcaggccacgcagaacaagacagggaagtatgtgccgccgagcctgcgcgacggggc

SEQ ID NO: 476787 - DNA, 100 bp, Homo sapiens
attgtaaatgcaccaatcagcatgctgtgtctagctcaagggaactgctcgcagaaagaagaaggtggttcatagaacagccacagcagatgacaaaaaa

SEQ ID NO: 476788 - DNA, 76 bp, Homo sapiens
gcggagctgacggtggaggttcgcggctctaacggggctttctacaagggtggccattcagggcaactggggcctt

SEQ ID NO: 476789 - DNA, 83 bp, Homo sapiens
gaaacgggaggggaaaaacagatggcaagtgctgctcacggccgtgaactgctacagcgtgaaggccgccacccgggtccagg

SEQ ID NO: 476790 - DNA, 100 bp, Homo sapiens
ggaaagtcttgccttcttcttaggtttgcagaaaggaaacagattcattgtctgtctgaggatgagttaagttcttctacaagttcaactgataagtcag

SEQ ID NO: 476791 - DNA, 89 bp, Homo sapiens
cactgaagttcttcagcttctcagccccccagctgatgactatcagccagttcgtctgctcagtaaacctggggaactgagaagagaat

SEQ ID NO: 476792 - DNA, 98 bp, Homo sapiens
atgatgggcagaaatggactgtgtacagagagcctggtgtggagcaagataagtctggttgcaatcccagtgtatgtcaaacataacatcagtttccg

SEQ ID NO: 476793 - DNA, 100 bp, Homo sapiens
ccagagctgctggttcggaaggtgtctgcattgcaggtggtcctgggcggtggtcaggaagccatggatgtaaccacaacctccaccaggattggcaagt

SEQ ID NO: 476794 - DNA, 98 bp, Homo sapiens
actgcagaggtgctggagctggcaggcagttgtgaaaaacttcaggacaaaaatgtttcatttaaggacttgtgctgctaagttgaggccattgacgg

SEQ ID NO: 476795 - DNA, 50 bp, Homo sapiens
tggattggacaagcaggcaaagctgaggggctgcgtattgtcagtttatg

SEQ ID NO: 476796 - DNA, 97 bp, Homo sapiens
gtcagtgttatatcctccaggaatactggccagacagtggaaatatgatggtgagatgctgaacaggtaccgacaggccctagagacagctgtgaac

SEQ ID NO: 476797 - DNA, 90 bp, Homo sapiens
ttataaaagaaacacctgatacactcagtgacccgcaatgaatacctgacaaagcagtggaagtatccaattgagcttcatgggattggt

SEQ ID NO: 476798 - DNA, 90 bp, Homo sapiens
cataaaaattatttatccaacagctcctcccagagactctacaggggcaggtaattcactggtccacaagcggtctcctttacgtcgaaa

SEQ ID NO: 476799 - DNA, 82 bp, Homo sapiens
gatccaccagcggttccatcctacacttggcaaaaaatcccagaagtgggatgaaatgaacatcttggcgacgtatcatcca

SEQ ID NO: 476800 - DNA, 75 bp, Homo sapiens
atgggaccttgtttgcctggggcaatggagaaaagttggtgaccgttgttatgatgaaaaaatgtatgatgctgc

SEQ ID NO: 476801 - DNA, 100 bp, Homo sapiens
tgtcgtcgggcgctcatttcgagtgaccattccaacagatttgattgcctccagtggagatatcatcaagattgagaggatccagaatccagatctctgg

SEQ ID NO: 476802 - DNA, 114 bp, Homo sapiens
cgcccgccggtgccaccgtcgcccgcccagcctccgcccggtgctggagaatctggtaaaagcaccattgtgaagcagatgaggatcctgcatgttaatgggtttaatggagag

SEQ ID NO: 476803 - DNA, 82 bp, Homo sapiens
ttatgctgtgggtggccaggatggtgtgtcttgcctcaacattgttgagagattcctggtgcccctgatgatgaagcagtac

SEQ ID NO: 476804 - DNA, 100 bp, Homo sapiens
agttgatagaagcattgcaaaatgttgagggcctttttatcattgatgataagggtattcttcggcagatcactgtaaatgacctccctgttggccgctc

SEQ ID NO: 476805 - DNA, 100 bp, Homo sapiens
gtgacagtctgcatgtgcagttttcaggttgattcacaaaaggctgcaacaaagcaagtcaacaaggcacacaataggttaatcgaaaaaaaagtccaca

SEQ ID NO: 476806 - DNA, 76 bp, Homo sapiens
ccggtcagggtcaagtcgtgttctgatcactactgacttgttgtctcacaccattttgctggtacagcctaccaag

SEQ ID NO: 476807 - DNA, 100 bp, Homo sapiens
ctggaggtttgtgcaatttgagaccggtcggcactgtgcagagatcagagtactaagagacaggcctttccacgaagagtcctcagccttctccctccag

SEQ ID NO: 476808 - DNA, 100 bp, Homo sapiens
agggaccgggccaccatccggcgcctgaatatgtataggcaaaaggagcgcagaacaccttccaccatgaccacctcagcaagttcccacttaaataaag

SEQ ID NO: 476809 - DNA, 80 bp, Homo sapiens
ctcactccgcttctctcccactggcaactttgtccctaacaaaatgtggaagggattagtcaagaggaatgcatctgtgg

SEQ ID NO: 476810 - DNA, 82 bp, Homo sapiens
ccgggctggctgcggccgccctgggccgggccccaccggacggaggactggaatgaaattgaccccattaaaaagaaagacc

SEQ ID NO: 476811 - DNA, 119 bp, Homo sapiens
ctcagtgaagagtctggagtttatctggagtgaggtggccggttcttggtgggatctgagcaggtcagcccaaggccaaccccactgtcactctgttcccgccctcctctgaggagctc

SEQ ID NO: 476812 - DNA, 75 bp, Homo sapiens
cagaactccaccccggcgcccgcgccatgcggcgggagagaaagatcaactgaaatcggcaaacttctgagttcc

SEQ ID NO: 476813 - DNA, 82 bp, Homo sapiens
gtaaagcttcttaagatatcaggaattattcttaaaacgggagagagtcagaatcaactagatcatgatgctgcgattaata

SEQ ID NO: 476814 - DNA, 100 bp, Homo sapiens
attccaagtaactcttatttggaagatgaagtcctcagtacattctgaagaagatgattttgttccagagctacatagaaatgtacaccctcgagagcgg

SEQ ID NO: 476815 - DNA, 100 bp, Homo sapiens
aggcgcttggtcaagacacactgacggccctttgtcagcccaaaatttcagagttacacatgttaccataacagaagtatttttacactgggatcctcca

SEQ ID NO: 476816 - DNA, 50 bp, Homo sapiens
ccggcgtgttcatgcccccgggttacagaatgtctgaaggggacagtgtg

SEQ ID NO: 476817 - DNA, 50 bp, Homo sapiens
gaatactttgagaggttggagaaggttaatgttgaagaaggaaaatgcgg

SEQ ID NO: 476818 - DNA, 102 bp, Homo sapiens
tcatagggacagccgcccctggtgcacacaccctcgtattctcctgcccttccccaggtcaaaatgcagatcttcgtgaaaacccttaccggcaagaccatc

SEQ ID NO: 476819 - DNA, 128 bp, Homo sapiens
ggagaagagccaagagccgatccttagaaagaaaacgacgagaaccagagaggagacgactttcttctccaaggtgcttgaggaatccaaagccctcgtgcgctgcaacatgaagatggagctggagc

SEQ ID NO: 476820 - DNA, 100 bp, Homo sapiens
gaccagaattttaacccattaccaaattctgcttggtcagaatcgtgatggcattgtgttcagcactgatgactattttcaccatcaagatgggtacagg

SEQ ID NO: 476821 - DNA, 98 bp, Homo sapiens
caacaacaaatcttgaccgagaaaacattgaatctcttgcacatgctctggttgacactcctggaagcctgcactttccgtagaccttaaaatctcag

SEQ ID NO: 476822 - DNA, 100 bp, Homo sapiens
cagcccgagctgaccctaggcctccaccctggcaggaatcccaatttgcctccacttagtgagcggaagaatgatttggagcaagaggtggtggtggcct

SEQ ID NO: 476823 - DNA, 90 bp, Homo sapiens
cccgggatttcgatctggacctggcctggcgggagaccaggcgacagaagaagaggaaggtggttattcctgtggtactgcagaatcaca

SEQ ID NO: 476824 - DNA, 100 bp, Homo sapiens
tgaacatgagcctcctcctctccttctacctgctggggttgcttgtcagtagcgggcaagaacgccagccaggcccctctgtggccaattccaatgccct

SEQ ID NO: 476825 - DNA, 51 bp, Homo sapiens
gtgctgcgttcacaggtgtttctgcggcagaaaaatggctactggacagga

SEQ ID NO: 476826 - DNA, 90 bp, Homo sapiens
actttggaaacttatgaattctgggcgagccctgctgagacttactgacaaaaagctcgagcgaatggggattgcccaggagaacctccg

SEQ ID NO: 476827 - DNA, 75 bp, Homo sapiens
tttccaggaggctttggagcggctaaaaacctggtgagctccacaagtactgcactgcttgggatgaagctgacg

SEQ ID NO: 476828 - DNA, 82 bp, Homo sapiens
ttctgatgttccactgaaatcacaatggaaagtcttgacttgactgcaaaagctgatgaagcattgaaagccaaagaaagaa

SEQ ID NO: 476829 - DNA, 90 bp, Homo sapiens
tgcagagcacaaggcagaaaatttactggttaaggaggtgacaatcttcagactgcaataacagtggccagaaaatctggaatggtttct

SEQ ID NO: 476830 - DNA, 97 bp, Homo sapiens
agcctcgggtgcaatcctggagccccccagtgaggttatttgaaattacagtgcctctctctcaaggccccaaaccagtaacaatcagttttgccaa

SEQ ID NO: 476831 - DNA, 80 bp, Homo sapiens
gaggggcccaaggaatttccccaggagaagatgtgtctgcggctcttcaggcctggtccagatccctgtgagcatgtacc

SEQ ID NO: 476832 - DNA, 101 bp, Homo sapiens
gaaaagctgagaaagtttcgttttcgcaaagaaacgaacaacgctgctattataatgcaaccagagacccctctacctctgtcccagcctccggggcccac

SEQ ID NO: 476833 - DNA, 50 bp, Homo sapiens
ttccagaggggtgacagcaaaacgagatggggtctcaccctgtcacccag

SEQ ID NO: 476834 - DNA, 74 bp, Homo sapiens
gacaaggcgttcaagcgaaaacatgaccgctgagcccatgagagctaaagttgcagacaagatccagctcatca

SEQ ID NO: 476835 - DNA, 100 bp, Homo sapiens
catgtgtgttgagagcttctcagactatccacctttggtatttgattttcatcaagcagctgatggtatccaggaacaacagagacaagaacaagcagga

SEQ ID NO: 476836 - DNA, 101 bp, Homo sapiens
cgactttccaaagcgctggaattatgggcgtgagccactgtgcccaggtgtctgacttccagcaactgctggcctgtgccagggtgcaagctgagcactgg

SEQ ID NO: 476837 - DNA, 100 bp, Homo sapiens
gagagtcctcaggcacgagcacttgcatctcagctccaagactccttaaagacggtatccaactgttgaaaaacgagccagagtcttcaatggagcaagt

SEQ ID NO: 476838 - DNA, 75 bp, Homo sapiens
tttcaatgctgttgagtatatcaataccctgttcccaaccgagcaattgaatggatcgcagcagttaccattgct

SEQ ID NO: 476839 - DNA, 80 bp, Homo sapiens
gatggcggcgcgatggagcagcgaaaacgtggttgtagagttccgtgactcccagcaaacggggattcagcgtccgatcc

SEQ ID NO: 476840 - DNA, 74 bp, Homo sapiens
ggggctctggccgcgcctggcctggccgggaccatgggggatatgagactttctactcggaatatcctgagtgt

SEQ ID NO: 476841 - DNA, 117 bp, Homo sapiens
gagttcgtctcttacgtctgcggaagtgcagctgcctcagttcttagcgcaggtcatcatcagatttgaaatatttaaagtggatacaaaactatttcagcaatgcagacaattaag

SEQ ID NO: 476842 - DNA, 83 bp, Homo sapiens
ccggcgccgaggcggccacccgagacgcggcgcgcacgctccggcctgcggaggatacgaagcgttttcggcttcctgcccgg

SEQ ID NO: 476843 - DNA, 82 bp, Homo sapiens
attggagccaggcctacaccccagattcttcgctgctgctgccttaccgccgagaaccaccacccgccaggcgtcttgcggc

SEQ ID NO: 476844 - DNA, 98 bp, Homo sapiens
atcccgctggatgcacactgctgcgtggagatgaacactgggcagcgtagggatggacctcttgtacttataggcagtgggctgtcttcagaacaaca

SEQ ID NO: 476845 - DNA, 50 bp, Homo sapiens
gccaaggaggtggacccccagggttaaaggactggatgcatttgttctga

SEQ ID NO: 476846 - DNA, 87 bp, Homo sapiens
tgcggaagtgcagctgcctcagttcttagcgcagtttcaccagtgatcattaaagaatgggcagcttacaaaggaaagtctcctcaa

SEQ ID NO: 476847 - DNA, 100 bp, Homo sapiens
tagcgccatcccagcaaacatccatatctatgacacaaaaatggctacaaacttcctagcacatgagaagatctggttcgacaagttcaaatatgacgac

SEQ ID NO: 476848 - DNA, 75 bp, Homo sapiens
gggcaccagctcactgccaccaaggtagagttggctttgtgggacacagctgggcaggaagattatgatcgcctg

SEQ ID NO: 476849 - DNA, 100 bp, Homo sapiens
ttccaggagctacaacttgtccacgacaccggctacttctcagctttaccatccctggaggagacctggcagcagggattaaagcctgtggtttccacag

SEQ ID NO: 476850 - DNA, 75 bp, Homo sapiens
gatccgtgctttgcccaaggagatggtctcattaagggaggtgttgtagcaggaaatgtggctcatattctggac

SEQ ID NO: 476851 - DNA, 75 bp, Homo sapiens
ggagccaggggggagcagggctcactccagggtggctacggaccacaacatggataacacgtcaactgtgctgcg

SEQ ID NO: 476852 - DNA, 98 bp, Homo sapiens
agattctagacttgtgtgcagcacctggagggaaaacaacacacattgcagcactaatgcatgatcagggagagtcccgtattctcagagtaaaagtt

SEQ ID NO: 476853 - DNA, 98 bp, Homo sapiens
gtccgtgacgctgagcgaggcggagaaggtgtacatcgtgcatggcgtccagggaacatttacggatgagaagtcaaaagcttcccaccacatttacc

SEQ ID NO: 476854 - DNA, 83 bp, Homo sapiens
cagcgcctcggggctgcacttcatgccctgcagggaaatcctcattgacgattcaatttgttgaaggccaatttgtggactcc

SEQ ID NO: 476855 - DNA, 83 bp, Homo sapiens
ggactttgtttttcctgggaactgcaggttcgagaacttgtcttggacaattgcaaatcaaatgatggaaaaattgagggctt

SEQ ID NO: 476856 - DNA, 90 bp, Homo sapiens
tcagagtgtgaccaactggaaccctcaagaggaccgaggaggatttgacagctaaggatattgaagaaattattgatgagctcaaggctg

SEQ ID NO: 476857 - DNA, 100 bp, Homo sapiens
ggttgccggggcaggggcggaggcggaggcagaggtggaggcgctttgaaaggacatggatttgattgacatactttggaggcaagatatagatcttgga

SEQ ID NO: 476858 - DNA, 100 bp, Homo sapiens
agaagtccagaaaaaagtggatcatgaattggatgacgtgtttggcagaaaccactaatactagcctcttgcaggtgcaactggaatgcagtttacataa

SEQ ID NO: 476859 - DNA, 82 bp, Homo sapiens
gatttttggatccaacaaaaacagaccagaagattaccaagatttatactatggtggggaagctttctctgtagagcagcca

SEQ ID NO: 476860 - DNA, 75 bp, Homo sapiens
tatgtatttgaaaggcttccccaaaatgggcaacttcagcttaagggttatgtggtccgaatcagtggtgggaac

SEQ ID NO: 476861 - DNA, 86 bp, Homo sapiens
caccggcagaacacagcagggcggaggaaagtgcagggggatatgagactttctactcggaatatcctgagtgttgcgtggatgta

SEQ ID NO: 476862 - DNA, 90 bp, Homo sapiens
actgacagaagcagtggtcgaatccagtagaaaactggtcaaggaagctgacgtagacaagtttggcaacgagatcacccagctggcccg

SEQ ID NO: 476863 - DNA, 100 bp, Homo sapiens
cgaccgcatgttcgacaagaatctgcaggacttggtccgcggcatccgtaaccacaaggaggacgaggctgttttggagtcagcggaagatcaccaaggc

SEQ ID NO: 476864 - DNA, 118 bp, Homo sapiens
acatcatccataccaaggagacgctgacacttgtgtttgaatatgtggactttatctcctgccaagtctccttcttcatcaactgggtctattgcctccagcagaaaatacccttacc

SEQ ID NO: 476865 - DNA, 98 bp, Homo sapiens
acacctaccaggtggacggcacggacgacagaagcgactttggtgagactctggttgagaacttgttgcttagtaaccaagggaccattaagctgtgt

SEQ ID NO: 476866 - DNA, 100 bp, Homo sapiens
ggcgcgcgcccgcactgccaaggaccccaacacctataaagtactctcgctggttgagccagtgatacagagaggccatgagagtctggtgcaccacatc

SEQ ID NO: 476867 - DNA, 100 bp, Homo sapiens
ctccctctcctgttggctctcctgtaggaagcaaccagtctcgatctggcccaatctctcctgcaagtatcccaggttgaaggtcgaggagctggaaggc

SEQ ID NO: 476868 - DNA, 103 bp, Homo sapiens
cacaaagtgaccaagaacgtgagcaagcccaggcacagccgacgccgcgggaaccagctcatgtttggaaaaggaatcttccactgaaacatttggatacccg

SEQ ID NO: 476869 - DNA, 75 bp, Homo sapiens
cggggcgatgtgtagtgccttccatagggctgagtctgggaccgagctgagatctgtatctgtggacctgaatgt

SEQ ID NO: 476870 - DNA, 83 bp, Homo sapiens
gaaaaggagaacatcgtatgagtcgggaacatgccctgtgtgccgccgtcatttcccacctgcggttattgaagcatctgcag

SEQ ID NO: 476871 - DNA, 90 bp, Homo sapiens
cctcaggggaacagcgagcagatcaaagtctgggttctgcccgcacacattcctcgccaccttcttggtgtctgagaacctccagcttca

SEQ ID NO: 476872 - DNA, 98 bp, Homo sapiens
tacctacagtgaaatagcatggatttcatccattatgctggctgttatgtacgcaggaggttacactcctggcacaccttacaaagtgtcctgttccc

SEQ ID NO: 476873 - DNA, 86 bp, Homo sapiens
agaaatacatgcaacatggtgactgcaatggctgccatccggaagaaactggtgattgttggtgatggagcctgtggaaagacatg

SEQ ID NO: 476874 - DNA, 76 bp, Homo sapiens
caagggcatgatgcctccactaatggaacttgctaaggaagaaaagtgtgaatttctgccattcctgtccccacgg

SEQ ID NO: 476875 - DNA, 100 bp, Homo sapiens
gaaattacctccgagggaaacaagaaaacatcaaagaggtctagcaaagtgtcaagctgagctcccagactctgatacaggctggggatgatgagaagaa

SEQ ID NO: 476876 - DNA, 75 bp, Homo sapiens
ctagactttttggacgatgtgcggcggatgaacaagcggcaggactcaagagtagccttcctcgaggacctgcct

SEQ ID NO: 476877 - DNA, 50 bp, Homo sapiens
ggacttctcagcctccagaactgctttgtggatttgaccctccatgatca

SEQ ID NO: 476878 - DNA, 82 bp, Homo sapiens
ctacaacacgcgagagaagaactgcctgggcatgaaactggaagctgcagtaaaggaagatgaagaagaagtttcagataag

SEQ ID NO: 476879 - DNA, 100 bp, Homo sapiens
ccaacttcggcaagatccagatcgggatttacgtggagatcaagcgcagcgatgggagcttctgataattggaggtgttgcagcccgggatcagctctct

SEQ ID NO: 476880 - DNA, 80 bp, Homo sapiens
gtggcgatggtcttcctgctggggctcatgtttgagaaagtgaagtcactgcttttgctgtcttggatcaagaccagaaa

SEQ ID NO: 476881 - DNA, 134 bp, Homo sapiens
caaaaatgcaaaagactgctaaagtgagagtgaccaggcttgttctggatccctatttattaaagcaaattcaacacccaacagcttccttaatagcaaaggtagcaacagcccaggatgatataactggtgat

SEQ ID NO: 476882 - DNA, 98 bp, Homo sapiens
ccaccgtggagacctcatcacggagccctttctgccaaaatcattaaagacttttaccttctgggacgtggagaactgtttcaggccttcattgacac

SEQ ID NO: 476883 - DNA, 75 bp, Homo sapiens
catcttttaccaagtacagaggcttcatcttatgaaatggacaagaggggttatgtaccgaaggactctaccgtg

SEQ ID NO: 476884 - DNA, 98 bp, Homo sapiens
gcagctggacaaagcgtccatcatccgcctcaccacgagctacctgaagatgcgcgccgtcttccccgaaggggaacgcccttttgcttgtgactggc

SEQ ID NO: 476885 - DNA, 75 bp, Homo sapiens
caaatacatttataataggagtccagctattgctgctgttggctgcccggcagctctgacagactcagaggacga

SEQ ID NO: 476886 - DNA, 100 bp, Homo sapiens
gaaggaaaaagcggaagaaaacatgaagatggcggtggagataagagcggctatgagaggttttcctccgagtacccagaattctgttctaaaaccaagg

SEQ ID NO: 476887 - DNA, 90 bp, Homo sapiens
gaaggaagaaaacacaggagccggagcagaagcaaagaggaaactgtgtttgcaatgctggtagagatcacagagcgagccatggcacat

SEQ ID NO: 476888 - DNA, 50 bp, Homo sapiens
ccaccgtgaacggacagtcccccccagggattaatgaaaatcaagttcca

SEQ ID NO: 476889 - DNA, 75 bp, Homo sapiens
aaaaggccagagtggctgtcttaatatctggaacagggaggagatatcaccaaacatgatggaacaggcggacag

SEQ ID NO: 476890 - DNA, 75 bp, Homo sapiens
aaatggacagtggagatgaagcctaagaatatgatcagatcatgattgagttctgtccagggggagccgtggacg

SEQ ID NO: 476891 - DNA, 100 bp, Homo sapiens
caaggcgccaggcaggacgacagcagcagcagcgcgtctccttcagacagtgacaataccctcccctcccttgggctggacccctctctacagctaggag

SEQ ID NO: 476892 - DNA, 88 bp, Homo sapiens
tctttgctctcagcatcggtgcacttgtaatatacttcatagattcatcaaaggcaaacttgaagataaatcttttgactccagctct

SEQ ID NO: 476893 - DNA, 50 bp, Homo sapiens
cttccacgtgtgagtgagaacatcacagatgtcatccatactgtagggcc

SEQ ID NO: 476894 - DNA, 82 bp, Homo sapiens
caaaagcctttcatgattatgcaggccagaaagcagacccagggaggatagcacatgtcttcggctacactggtgaaggcat

SEQ ID NO: 476895 - DNA, 98 bp, Homo sapiens
ccatgactggacgctgtgttcccccacgaacttctgctggggttggtgccatctacatccgtcgccggccccgtgtgcgtgtggaggccctgcagagt

SEQ ID NO: 476896 - DNA, 98 bp, Homo sapiens
gatgaagaagatccttcaaaattaaaagaggagcagcatggcatttcagtcactggtttgcagagtccaggcttcagggatgacttcttagggggcag

SEQ ID NO: 476897 - DNA, 100 bp, Homo sapiens
tcccccagccctaaccagagttaccagggcagcagcggctacaacttccggcccacagatgcccgctgcctgcccagtgggaatttcagattggaccttg

SEQ ID NO: 476898 - DNA, 131 bp, Homo sapiens
gaccactggatctccaaacagggccagaagctggagatgatgctggagcagaagttagcgcttctctctcgagctctggagctcagcagtggcaaagatgagatctccttgttggtggaacaggagttcct

SEQ ID NO: 476899 - DNA, 96 bp, Homo sapiens
gtcgatttacctggagaaaggagtgcctggctgttatggaaaggttaagcaaccttttccacgggatggataagaatactcctgtaagatacacag

SEQ ID NO: 476900 - DNA, 100 bp, Homo sapiens
gtggcactgaggctctggaacttctgcccagctctccttgaactcaagctcctgctccagcttccaggaccagaagatcgccagcatgttcgatctgact

SEQ ID NO: 476901 - DNA, 96 bp, Homo sapiens
ggaaaataaaccttcaaggcaaactgtgttcattgagaccctgattgaagagagagggaatttgaagtactgccttgtaattcttaatcagccttt

SEQ ID NO: 476902 - DNA, 100 bp, Homo sapiens
gctaagatgccaggaccacctggaagcctagaaatggaaatgcttccagactgcacacttttacttagaggacagtacatcccctagagttatatccaca

SEQ ID NO: 476903 - DNA, 75 bp, Homo sapiens
ctggatctgcgatctgtttgtgtgggcatccccaccatcagatggtgcggggcagagggggactacaacgtcatg

SEQ ID NO: 476904 - DNA, 100 bp, Homo sapiens
ctccaagccaaaatcacagctttgagtgagaaacagggaactctaatgatccaggacaaagaagttaccctggagtatgtatcaagcctggatttttggt

SEQ ID NO: 476905 - DNA, 75 bp, Homo sapiens
gaattggtggaacttgttggaaatggaacatacgggcaagtttataagacctgaagattatcggctataagagaa

SEQ ID NO: 476906 - DNA, 75 bp, Homo sapiens
cccagctctccctgcagatcggcgatgtggtgcgaatacaggagacgtgtggagtttcagtctgatggaagcaaa

SEQ ID NO: 476907 - DNA, 74 bp, Homo sapiens
tttacctgcttcccaatcccactgatgaggatcagcccatgggctgaactgtatcgggcctcagggaagtttga

SEQ ID NO: 476908 - DNA, 128 bp, Homo sapiens
agggatctttgaattggtggaacttgttggaaatggaacatacgggcaagtttataagagagacaagagagacacctccaacttcgacaaagagttcaccagacagcctgtggaactgacccccactg

SEQ ID NO: 476909 - DNA, 75 bp, Homo sapiens
gggacccacttcactccagtgcctccgacgcctcctgatggtgaaaggtgtagcagtcactcggcctacacccac

SEQ ID NO: 476910 - DNA, 100 bp, Homo sapiens
ctgcctcctgcagcccccatagcagaatggagatctcctctcatcagtctcacctcctgcagcaactgaacgagcagcgcaggcaagatgtattttgtga

SEQ ID NO: 476911 - DNA, 96 bp, Homo sapiens
agcccctcgggcagtgacaccacctacttctccgtcaatgtttcaggtgcagtgcgagctgaagcgaaaatggcgaagccggtgcccgaccccgtc

SEQ ID NO: 476912 - DNA, 100 bp, Homo sapiens
ccctgtgggtcctcttccacttcttgactgtgcaggcagctcggcaaaatgtagaccactcacaggaagcagatggactagaggcttttaccagatttct

SEQ ID NO: 476913 - DNA, 75 bp, Homo sapiens
agatcagagtcacgcccttggggtgaggacgcttgagcggaagttagaagcaaaaatgatcaaggaggaaagcga

SEQ ID NO: 476914 - DNA, 76 bp, Homo sapiens
cgctgctgtacttcgtctatgtggcgcccggcataggccagaacacaaagcgtgaatccggaagaaaagttcaatc

SEQ ID NO: 476915 - DNA, 100 bp, Homo sapiens
atgagtccactctggccttccagcaggatggaactccaacctcgaaaacatttgaacacgtgaccagtgaaattggagcagaggaagctgaggaagttgg

SEQ ID NO: 476916 - DNA, 75 bp, Homo sapiens
cccggctttcgcatttgggaccctgcagggtgcagaccatgaattacgtggggcagttagccggccaggtgtttg

SEQ ID NO: 476917 - DNA, 83 bp, Homo sapiens
agaaattcagaacctcaagcttttcaggcatcctcatataattaaactgtatgtcttactgaaagaaagaaacatgcttctaa

SEQ ID NO: 476918 - DNA, 90 bp, Homo sapiens
gcagagccgtgcatggggctgctccccaggacctgagcaggaacctggagttttcaggaaaacacagatcctggtgccgaacatgaggac

SEQ ID NO: 476919 - DNA, 98 bp, Homo sapiens
caggaagtggctttttatcagttgcaacaggactgtgacctgagctgtcagatcaccattcccaaagttttcatatgagtccaacaagcaatgaagac

SEQ ID NO: 476920 - DNA, 75 bp, Homo sapiens
tattcccacggatcccaattcaggtttcagaaaagggatccctaacatcagaagagtttgctaagcttgtgggaa

SEQ ID NO: 476921 - DNA, 101 bp, Homo sapiens
ttactgatttcatcaagttcgacactggacctgtgaaaagagcaagagaagaaacagacaaagaagaacctgcatccaaacaacagaaaacagaaaatggt

SEQ ID NO: 476922 - DNA, 50 bp, Homo sapiens
cggcaaatattacacttctctccttgtgttacagttcgagtgcctcaaac

SEQ ID NO: 476923 - DNA, 80 bp, Homo sapiens
aggagagaagatgaaagtcctggaggaactttgagaatcactacaagaaaaactccttgtggtgaaggttctaagacgtg

SEQ ID NO: 476924 - DNA, 50 bp, Homo sapiens
gtttccgttaagctggacaacagggttttggccaaattgggcgagggcac

SEQ ID NO: 476925 - DNA, 82 bp, Homo sapiens
gatgcaatgctgatgtttgataaaactaccaacaggcacagaggagtcagtggatcggtggggaaaatgctgcttaccctgg

SEQ ID NO: 476926 - DNA, 100 bp, Homo sapiens
ggaaattgcaaggatttttgaagatctatgccaggaaagatacattatggtgccgagtggtaacatgggagtgtttgatccaacagaaatacacaatcga

SEQ ID NO: 476927 - DNA, 100 bp, Homo sapiens
tgtcattggcggccgctcaggaactgtgggagctggctgagcagaaaggcaccatgactcctgtgaggatgcagcactccctggcaggtcagacctatgc

SEQ ID NO: 476928 - DNA, 100 bp, Homo sapiens
ttgctgcagaagcgtagtcggccagagctgcatcttcctcccgtgaggctggccgagctccacgctgatctgaagatacaggagagggacgaactcgcct

SEQ ID NO: 476929 - DNA, 87 bp, Homo sapiens
cagcagccttggtgctcaggtgccagatgcaaaggttagagcagccagcgggtacagaatggattttggaagagggagtcaccactg

SEQ ID NO: 476930 - DNA, 101 bp, Homo sapiens
agaaccagcaggctccttttggaacgggcgaaagagctaaatatcgatgttgttggtgtcaggcattatattgtacttctagcaagtgcaccaacagaaaa

SEQ ID NO: 476931 - DNA, 50 bp, Homo sapiens
tgtgcagtactcggcaggaaattgattatgagcctcaaacaatttgtgag

SEQ ID NO: 476932 - DNA, 100 bp, Homo sapiens
ttggctcccttgtatatttttctcaggaggcgtcacggtggggaacataggacgacagttagctatggaaggtgtcttgctgcaggtaactaatgaagaa

SEQ ID NO: 476933 - DNA, 102 bp, Homo sapiens
caagcatgcagcttactgcttgaaaggtggcagatatctacctagcatctcagtacacatcctatgccataagtggtcccacagtacaaggtggcctccctg

SEQ ID NO: 476934 - DNA, 82 bp, Homo sapiens
agaagaccttgaaatgcatccgctggtcgctgccggaaatggccagcctggtccgacccccagtggcactaacgtgggatcc

SEQ ID NO: 476935 - DNA, 74 bp, Homo sapiens
agagagacagttactggaacatagagattttatagggttcgttccaccagtcataaaccagatgaaatctatgg

SEQ ID NO: 476936 - DNA, 98 bp, Homo sapiens
gaaaattcttgttaaaagttgatagcaagttcacagccatgaatgaaccacagtgcttctacaacgagtccattgccttcttttataaccgaagtgga

SEQ ID NO: 476937 - DNA, 98 bp, Homo sapiens
ctgctggagcagagaaactgaaactgaccagatgagtgagaaaccccaggacaaatctgctggcagaggatataagtttcaacgaaccaaacttttaa

SEQ ID NO: 476938 - DNA, 83 bp, Homo sapiens
cagcagctccagcaggcgctggctcctgctcagaaactgaggcttcttgaagagcttgaagacacttggctcccttatctgac

SEQ ID NO: 476939 - DNA, 95 bp, Homo sapiens
ccagctcgatctgctcttcgtctgcttcttcctcttcagtcaaggtttttcgttggaatatacgttgcacatttatggcgattctgagtgtgagg

SEQ ID NO: 476940 - DNA, 74 bp, Homo sapiens
ggagctgggccgcgaacacctcactattgatggtgtagcgctttaggggaagtgattcgcctttgccagtctca

SEQ ID NO: 476941 - DNA, 100 bp, Homo sapiens
cggccccgctgaggggccgcaaggacgaggacgcctttctgggagaccccgacaccgggtaccgtgagggttttctctggaagcgtggccgggacaacgg

SEQ ID NO: 476942 - DNA, 75 bp, Homo sapiens
ctgctgggattcgcgctgctgggcacccacggagcctccggggctggttgtggcagcactgcctgaaggtatgag

SEQ ID NO: 476943 - DNA, 75 bp, Homo sapiens
ccggtagctgcagctggagcagtggcgtttggaggagactcggaagtgggagtgatgctgcctctcttctgacct

SEQ ID NO: 476944 - DNA, 88 bp, Homo sapiens
taaggattccaagtaactcttatttggcattggaggtgatccttttaatggaacagattttattgactgcctcgaaatctttttgaac

SEQ ID NO: 476945 - DNA, 82 bp, Homo sapiens
tggggttgtcctctttaagaaggtgcatctgcagacgcagcaggaggtgaagctgcgcatgacgggcatggcgctgcgggtg

SEQ ID NO: 476946 - DNA, 82 bp, Homo sapiens
cccggggccgacccggcccgtagtgtggaagcagcttcaggtgaaccacctgcgctgcctccacgagttcgtcaagtctcag

SEQ ID NO: 476947 - DNA, 80 bp, Homo sapiens
cctctgtttttggcagggtgatgcagatagacctgcctagagctggaacgttacctccagagcgagccctgctatgtttc

SEQ ID NO: 476948 - DNA, 96 bp, Homo sapiens
tgggtgtgggtcaagcaaccaggtccccatggagtacaatcacctgcaggagatccccatcattgcgctgaggaaccgtctgctgctgctgcacca

SEQ ID NO: 476949 - DNA, 90 bp, Homo sapiens
cagccgacacttagggaaaatagaacctacgctgaaattttgggggcaggttctcttgctagctatggcattgctggttctaccaacgtg

SEQ ID NO: 476950 - DNA, 74 bp, Homo sapiens
gacagatgaagagtgacttgtttctggatgattctaagaggcccaccgtttccatggtcgaaggtcagggcgag

SEQ ID NO: 476951 - DNA, 100 bp, Homo sapiens
cgaaaatctctgcccctggaggagaaatagaaggatctcatagatcagaacatactggagcctgtaacccgtgcacagagggtgtggattacaccaacgc

SEQ ID NO: 476952 - DNA, 77 bp, Homo sapiens
gcagcagcccagacgcggcacagagagggcctgggagcttgctgcagcttcagagctccacgcaggagatcggtgag

SEQ ID NO: 476953 - DNA, 75 bp, Homo sapiens
atcgacgaccacgtgcggaggaaggactcctcgctctatataggctccctgactggcagtcctcacctttccgag

SEQ ID NO: 476954 - DNA, 82 bp, Homo sapiens
gtctttccgtcctctgaggcgacggccgcggctgcacagtactatactggcaattgctggagaagattttgcaattgttgct

SEQ ID NO: 476955 - DNA, 75 bp, Homo sapiens
cggatgtagccaagacattgctatttaaatggttctcaccagaaaatacagagcttcttacaactttaggattac

SEQ ID NO: 476956 - DNA, 90 bp, Homo sapiens
cggtgctgattgggggctgcgggcgggttggctacctgaagaaggccttcaacctctacaaccagggaaagtttaaaggaagaggaaatg

SEQ ID NO: 476957 - DNA, 100 bp, Homo sapiens
ctggtggagatggtacaggcgctttacgagatggggacattggttttggacctttacaacagaggatgtctgaagaagtttctttccagtctgagattaa

SEQ ID NO: 476958 - DNA, 78 bp, Homo sapiens
cgcctccattgtttgaccacaacaagggccggattctcacccagacaatgcagatcttcgtgaagactctgactggta

SEQ ID NO: 476959 - DNA, 98 bp, Homo sapiens
ctggtgaaggaatgggacaagacccatctttatgcaaagccagcgttacagtaatgttccaggtagctacagcaagctgggtagcaggcagatccaaa

SEQ ID NO: 476960 - DNA, 100 bp, Homo sapiens
gcgatcaagcaggcagcgggctttgccagcaaaaccgaaacagctcccggagccctgcctgttccctgtccatccaggccagcagctgaaggagcctcac

SEQ ID NO: 476961 - DNA, 101 bp, Homo sapiens
cttcagtactcgggcaagaccaccttcgtcaacgtgatcgcggtgacagagttagtccttgataattgcctgtgtgtcaatggggaaattgaaggcctgaa

SEQ ID NO: 476962 - DNA, 97 bp, Homo sapiens
atgtggccagttatttgcctcagtaaaagagaacttacaatgtctcagaaaaatggtgggaatgttcttcagatgatgtatgagaaacctgaacgat

SEQ ID NO: 476963 - DNA, 100 bp, Homo sapiens
ttattttggatcctaatcaggaaaatgttttggagattcaagtccagcatccagcggccaagtccatgatcgaaattagccggacccaggatgaagaggt

SEQ ID NO: 476964 - DNA, 50 bp, Homo sapiens
agccaatgcccaagacattataaacgatttcaaatatgcgtgcattagag

SEQ ID NO: 476965 - DNA, 87 bp, Homo sapiens
cagccttcatttctctgaacatactgccttatgggacagatcaagaagtgcacggctgtctataacgtgctgccgggtctcaggatg

SEQ ID NO: 476966 - DNA, 74 bp, Homo sapiens
cggcctgcgggcgatcgggccgagatgacgacaacccccccgtgtcttttgtgaagttctccccgaacggcaaa

SEQ ID NO: 476967 - DNA, 100 bp, Homo sapiens
caagagacagcaacagagattgcacaaatgaactgtctaattcttgcaaggtggcgacatgtctaagaatgtgagccagtcacagatggcaaaattgaac

SEQ ID NO: 476968 - DNA, 90 bp, Homo sapiens
caaagcatggagaccctccctccagtgaagctgtggtctaccaatctagacaactcagtggcaagcattgaggcaaaggctaatgtgtgc

SEQ ID NO: 476969 - DNA, 99 bp, Homo sapiens
actgcgcttgttttcctgggattgaatgctggtgggaagggaaatcctcattgacgattcaatttgttgaaggccaatttgtggactcctacgatccaa

SEQ ID NO: 476970 - DNA, 74 bp, Homo sapiens
aaattcttaaggatgctttcaaatcaaatgactcacagcagttaatgaaggagttcccccttctgagtatgttc

SEQ ID NO: 476971 - DNA, 75 bp, Homo sapiens
gctgaagttgcgtgtggtgatgatcgaaaacgtgctggagaatctggtaaaagcaccattgtgaagcagatgagg

SEQ ID NO: 476972 - DNA, 83 bp, Homo sapiens
cggaagaagctaatcttgtacttcaagaggaggaatcacgctcggaaacaatggaacccttaggagaaatcttgagagtggac

SEQ ID NO: 476973 - DNA, 50 bp, Homo sapiens
ctgcaagcaggcaacctgaatacaggccctcgtgaccttctggacttccc

SEQ ID NO: 476974 - DNA, 90 bp, Homo sapiens
cgtggagacgtcagcgaagacccgggccaacgtggacaagctgaattcttgccgccaggatggggaaacagaacagcaagctgcgcccgg

SEQ ID NO: 476975 - DNA, 82 bp, Homo sapiens
ggaatccaccctgtctgtgcagagaggctgacccgcggctgattgagtccctctcccagatgctgtccatgggcttctctga

SEQ ID NO: 476976 - DNA, 80 bp, Homo sapiens
cggcgggctggagacatggaccgcggcgagcaagggtttcccaaactctcgattgcctcttgcaagcagatgacctggga

SEQ ID NO: 476977 - DNA, 76 bp, Homo sapiens
cagaagaggaggatctcccacctttccaagcaaggccaggagtgcatcccctcggcaattgtgagcttcaccgtct

SEQ ID NO: 476978 - DNA, 82 bp, Homo sapiens
gcgcctgcgccgccggggccgctgcaaggggaggagagaggccgcctcaggagcatcagatccatgctgctgctgactcgga

SEQ ID NO: 476979 - DNA, 99 bp, Homo sapiens
gagtattacaccatcgccgaattccagacaaccatcccagacggcatcagcttccaggcaggcctgaaggtcgagcttccaccaacactttcttccaaa

SEQ ID NO: 476980 - DNA, 83 bp, Homo sapiens
agttccgcgacaccatcttcgacaacatcctcaagtgatcaggaacctccctattcaatgataacattacacgaaatggcaga

SEQ ID NO: 476981 - DNA, 80 bp, Homo sapiens
cccgtgcgtccgtctgcgacccgaggcctccgctgcgcgatcaggatcctcatgaccagccaaagagaagaagaattagg

SEQ ID NO: 476982 - DNA, 90 bp, Homo sapiens
ctgacaaacactgtattcgttgacagagctttgatagtcgtaccatatgcagaagctctttcgacgtgtagcagcagctttgccgggaat

SEQ ID NO: 476983 - DNA, 96 bp, Homo sapiens
cccgccaccctgcgctgccgccgctctgaggagttaaagtgaaactggaacgccaagctgaagaagaacgaatacggaagcacaaagcagctgctg

SEQ ID NO: 476984 - DNA, 80 bp, Homo sapiens
ggagaagcgggcgcccgccgccgagccgtctcctgcagcggcccccgccgggagcatcagatccatgctgctgctgactc

SEQ ID NO: 476985 - DNA, 88 bp, Homo sapiens
agaaacccaggaaatcgagactcatgactcccagagaggatggcatctagaagaatcgcctaccatttggtgcaagcaaaaagcaatc

SEQ ID NO: 476986 - DNA, 100 bp, Homo sapiens
gtggccacgctgcagagcctcggtgaagattgtccccagtggatggtccctatcacaatctctactagtgaagaccccaaccaggccaaactaaaaattc

SEQ ID NO: 476987 - DNA, 75 bp, Homo sapiens
gggtgaggctgcaacacgaggctgccgttcagcacccgtcgagcaaactggcgatggaatatgagaggagccctc

SEQ ID NO: 476988 - DNA, 82 bp, Homo sapiens
tgtacttccagggagacaccgattataagaagagaaactcagcgctggggaagaaggtagttagaaacaaacctgtggcaag

SEQ ID NO: 476989 - DNA, 100 bp, Homo sapiens
tgatgcctgaagctcaagggactgtgtccaccctcaggccgccatggcatcagatgaaggcaaactttttgttggagggctgagttttgacaccaatgag

SEQ ID NO: 476990 - DNA, 83 bp, Homo sapiens
cgagaacgtgcgggaagagaagatcatcgagcatttcaaacggaagccagcagacctgcagaacttggctcccgggacccacc

SEQ ID NO: 476991 - DNA, 50 bp, Homo sapiens
agtcagggatggctcttcctcagatatccctcctaaatgtacaatcaagg

SEQ ID NO: 476992 - DNA, 100 bp, Homo sapiens
tcactgtggtgaacaatgacctgggagaggcgcaggcacctattcagtgggaggagcggaacgtcactgccattcaaggacctggaggaaagtggatgat

SEQ ID NO: 476993 - DNA, 131 bp, Homo sapiens
taagaagctaaccaaagcccatgtgttcgagtgtaatttagagagcagcgtggagagtatcatctcaccaaagtttgtcccatgaggagcacccccatagccatcctctctatggacatggtgtatgcaag

SEQ ID NO: 476994 - DNA, 78 bp, Homo sapiens
aagctgccaagttgaaaatggacgagtaatcgcctgctttgattcattgaaagctaggcagctggaagagaaagaccg

SEQ ID NO: 476995 - DNA, 82 bp, Homo sapiens
ggggttcagattttaatgaagattgaatatatgcagcaaaatttagtaagggcacaggagctgcaagttttgacgaatttgg

SEQ ID NO: 476996 - DNA, 90 bp, Homo sapiens
tttttggctgtttgccagcagtgcctgtctaatgttaatactccagtgaaagaacagtgtcgagttatagcagtgctggattgggagctg

SEQ ID NO: 476997 - DNA, 73 bp, Homo sapiens
gccaaggcggcgcgcgagctggagcactcgcatgacgagttccagttattacagagaaatttcatggacaagt

SEQ ID NO: 476998 - DNA, 75 bp, Homo sapiens
agatatatctggcctaccatccttctgctgctgaaccaatgccaacaggctccagggagttccacgctgtccagt

SEQ ID NO: 476999 - DNA, 51 bp, Homo sapiens
aagtaaaccacgatcgttatgctgaatgtggcctcatggatgagctggtac

SEQ ID NO: 477000 - DNA, 76 bp, Homo sapiens
ccgcacccgggcccgcaggccaggatttaagtgccctgtatgctcaaaatttgtatcctcagatgaaatggatttg

SEQ ID NO: 477001 - DNA, 100 bp, Homo sapiens
gaatggagcctagaagtggaacgtgtactaccgcaactgaaagtcacgattaggactgacaataaggggtcaggcccagccccaggcccagtggtattac

SEQ ID NO: 477002 - DNA, 82 bp, Homo sapiens
gcttggcccgcctaaggcactgggtgtacctgctttgcttctctgcaggagcgagctggacgccactgtggggctctgagag

SEQ ID NO: 477003 - DNA, 97 bp, Homo sapiens
agcccgacgcaaaccaaggatctggggatcttcgcactatcccaagccctgaccctctattctgcaccctgtgagccaccgagactgaaccaaaccc

SEQ ID NO: 477004 - DNA, 100 bp, Homo sapiens
tctgctgagagagtgcaagccgtggggtgagaagcgccactgctttgatgtcaactataattcaagttacatgtatgagaaagagagtgagctcatacag

SEQ ID NO: 477005 - DNA, 75 bp, Homo sapiens
gcaagatggctgaactcaatactcatgtgaatgtcaaggaaaagggtgacgcagacttacgatgcaggtgcttgt

SEQ ID NO: 477006 - DNA, 108 bp, Homo sapiens
tcggctgtgtcaatgccattgaattctccaacaatggaggccagtggctggtctcaggatcagtacgacttcgtggcggcaaaaatgagtttgaaggcacagtggaag

SEQ ID NO: 477007 - DNA, 100 bp, Homo sapiens
ccgcctcgcctactcactctggagccgtgcgttcttcacaaaggtggtggatgtgggtgccacctctctgaagcttgagatctgggacacagctggccag

SEQ ID NO: 477008 - DNA, 75 bp, Homo sapiens
gctggaattgctaaagcttgtggaaaagctggatgtgctctccttggtgttggggatgtcctttgcactgaccct

SEQ ID NO: 477009 - DNA, 76 bp, Homo sapiens
caggctgctaccgcccctccgcttccagacattctcagctgtcagatgtggcaccatttattgagtttctgaaggc

SEQ ID NO: 477010 - DNA, 97 bp, Homo sapiens
cgccacattgtggatgaggtcaatggattaataaggctcatccattctttagacacattaactgggaagaacttctggctcgaaaggtggagccccc

SEQ ID NO: 477011 - DNA, 89 bp, Homo sapiens
taaaagtgaagcaaaggataatttcttcgaagtgtttaccccagtgtttgaaaggaattccagactctgaagaagaagctatggagact

SEQ ID NO: 477012 - DNA, 88 bp, Homo sapiens
gagtgctcctgcggctcccagactgcaaccaggtctcctcatttaccacatcccccaggttgaaccacgggaccttgacttcagtacc

SEQ ID NO: 477013 - DNA, 100 bp, Homo sapiens
gcgggatcccagcctcaggcgtgcgcggacggtgtgcggtgccgcgtatgatgctgtccttgacagaaatgtggccattaagaagctcagcagacccttt

SEQ ID NO: 477014 - DNA, 99 bp, Homo sapiens
gaggggcggggccacgctgcgggcccgggccatggccgccgccgatgccgagatgccttcaattaagttgcagagttctgatggagagatatttgaagt

SEQ ID NO: 477015 - DNA, 50 bp, Homo sapiens
tctacatctgcagataaagtggagagacattccactgcccttctcccaaa

SEQ ID NO: 477016 - DNA, 83 bp, Homo sapiens
ggccaagcgacccgggcgcggcgcggggaggctgaagggacgctcgggtaggcaaggccgccatggcatcagatgaaggcaaa

SEQ ID NO: 477017 - DNA, 75 bp, Homo sapiens
gtgcagacatctacaaccttcgatctcctgacgagatcgaggccatcaagctacagatggtcttacaaatggaac

SEQ ID NO: 477018 - DNA, 96 bp, Homo sapiens
atcacagaactcacacgggagagagaccctatggctgtgatgagtttgttttgacagggcaatggaagaatggagacagttccattgtgaccttaa

SEQ ID NO: 477019 - DNA, 90 bp, Homo sapiens
ctccccatcctcagcaatcccatcaggtgttttgggaaatggacaggctactagcatggtccaactgcagggtgggagattcctgatggg

SEQ ID NO: 477020 - DNA, 100 bp, Homo sapiens
gagtgagcgagcggacccgcgatggagttacactgttagaccttatgatagccaagataacgagtgatgagccactcaccaaggatgacatccctgtgtt

SEQ ID NO: 477021 - DNA, 82 bp, Homo sapiens
cctcgcctcgggacccgcggtccccgctcttgctggctgaccccgcactacatctacccaccagccatcgtgcagcccagcg

SEQ ID NO: 477022 - DNA, 96 bp, Homo sapiens
ctcgagctgcggtagcagcgactcatgagagcgcggccggaggacagagatgtggtatggtgtattcctgtgggcactggtgtcttctctcttctt

SEQ ID NO: 477023 - DNA, 82 bp, Homo sapiens
ttcagaattccctcaaagagctctggtccttgctgcactttattatgccggagaacaaacggggattcagcgtccgatcctt

SEQ ID NO: 477024 - DNA, 96 bp, Homo sapiens
aaaccttcaggcggcccatgggcaaagggtggaggttatgaaagtgaagatgcctatcaaaatgctgaactagttttcctggatatccacaatatt

SEQ ID NO: 477025 - DNA, 90 bp, Homo sapiens
cttcagtcaaaagcctgaatttcaggatctttcaggtctaagcccagacagtgggtgctcccacagcacttggttcatctctccactgtg

SEQ ID NO: 477026 - DNA, 83 bp, Homo sapiens
caatttccctgagaaccgtttacttccagaagattggtggagcttgatctgaaggagccttcacgtaaatgggtccagtcatg

SEQ ID NO: 477027 - DNA, 100 bp, Homo sapiens
ccggggtcctgtcaccgccaccgccaaaaaagtcaccgccgctagggtcgccgttgcatcggtgcagggcaagaaaaatggctacaaacttcctagcaca

SEQ ID NO: 477028 - DNA, 82 bp, Homo sapiens
ttgcgatggcgcagaaaccccgttgacaaggcactgctttttcatgacgcacatggattaattgatgtatgttgagtttatg

SEQ ID NO: 477029 - DNA, 100 bp, Homo sapiens
ggatcgcactgctcatcttggccatcactatacacaacgttccagcggaatggccaaagactatgacgggtcttcctagcacatcagggacaactgccag

SEQ ID NO: 477030 - DNA, 110 bp, Homo sapiens
tttcggcaagaactggattcgtggcgccacaagctcattcactgtgtaggtcactcctggaagcaaggcggctctagctaatttatgtattggagatgtaatcacagcca

SEQ ID NO: 477031 - DNA, 130 bp, Homo sapiens
tgcaaagataccagtctcctgtccgagtctacaagtacccgtttgagctggtcatggcgctgatgcttttttcaaagccgctataagccttgttccggaagttccaaagatgattaatattgatgggaag

SEQ ID NO: 477032 - DNA, 97 bp, Homo sapiens
tcgtcacttgcctcccgggagtcgctgtggcaaaagaacagctttgctgagccatcaaggtctaatggaagcatggttcggcattcttcatctccat

SEQ ID NO: 477033 - DNA, 80 bp, Homo sapiens
acaagaacttcgagatggattccaacatcctgctagacttgttaaggaatcatgggtaaagaaggaagacaggctgcaag

SEQ ID NO: 477034 - DNA, 50 bp, Homo sapiens
tgtgtgcaccgcgcgctgcccgaggcgctgtgaccgcaacaagggaaaac

SEQ ID NO: 477035 - DNA, 75 bp, Homo sapiens
cgtcgcccaggagtcatcggacgccagaatctgagtccactgccagctggttcgactctttgcacgaggaattga

SEQ ID NO: 477036 - DNA, 75 bp, Homo sapiens
tcagtgagctgtccctgctggaggagcgctttcgggactatggccccaaagtcaactttcggaaacagaagctaa

SEQ ID NO: 477037 - DNA, 100 bp, Homo sapiens
ggaactagagacagcttgctttctgtcgtggcaatgttttgaaactggcaaaatcagggaggagctgtgcagtgagaagcaaagcaggaaacaagcctat

SEQ ID NO: 477038 - DNA, 82 bp, Homo sapiens
caagaaactcctttccttaaagacactcgcctatggggacatgaaccacgagtggatcggcaacgagtggctccccagcctg

SEQ ID NO: 477039 - DNA, 89 bp, Homo sapiens
ggccgccgcgatgtcagctcagtgctgtgcgggccaggagacagggtctggctatgttgcccaggttggagtgcagtgatgcagttata

SEQ ID NO: 477040 - DNA, 100 bp, Homo sapiens
acgagaagcgcagcaacgtgcggtgggaccacgagagcgtactaggttttgacaagcttgcatcatgcgtgagtataagctagtcgttcttggctcagga

SEQ ID NO: 477041 - DNA, 82 bp, Homo sapiens
gaaaacattcaacaaagatacagtgattatagtacctcaaaggaagaccttctgcaggctgattttgaaggtgctttaaagt

SEQ ID NO: 477042 - DNA, 60 bp, Homo sapiens
tagcagcagctccactgaacagataagggttgccaacttggcctgttccatctcaaataa

SEQ ID NO: 477043 - DNA, 101 bp, Homo sapiens
aagttgaaaatggacgagtaatcgcctgctttgattcattgaaaaaaacctcggatcaattctcagctggtggcacaacaagtggcacaacagtatgccac

SEQ ID NO: 477044 - DNA, 100 bp, Homo sapiens
ccgagccagcgactaagaggaccgagaggtggcgtggacaggaagagaggatggtgatgcaccggttacaaaagatgagaccacctgcatttcacaagac

SEQ ID NO: 477045 - DNA, 97 bp, Homo sapiens
tgtttgacccagttcctgtcaagcaagaggccatggaccctgtctcagtggagattacctggggcaattgatgttatcggtcagactataactatca

SEQ ID NO: 477046 - DNA, 100 bp, Homo sapiens
aggttctggaatgggaggctacggaagagatggaatggttcggaggaaatcatgtcttgtgaaggaagtggaaaaaatgaagaacaagcgagaagagaag

SEQ ID NO: 477047 - DNA, 90 bp, Homo sapiens
gtgaagcaaaagccttccatgattacgaagatgttaccgagtacttcagtgaattccttagtgcaggggaacggagtcttgaattccagg

SEQ ID NO: 477048 - DNA, 100 bp, Homo sapiens
gactacagtaaggctgaaatcattgaagtgcttggagtgcagaactgaaagaggaccgccgggagagcctgcccacctccccaccctggacgccgggcgc

SEQ ID NO: 477049 - DNA, 96 bp, Homo sapiens
cgagccccgtcctccttcgccgccgcgcacaaccgcacgtgcagcgaatgacaacagagctgctcaaggcgggaactctgagctaagcagtggagg

SEQ ID NO: 477050 - DNA, 87 bp, Homo sapiens
accatcctgctctcaactacaacatcgtttcagggttcaaaccttgtactactcagctgatcacaagctgcttgatgggaacctact

SEQ ID NO: 477051 - DNA, 100 bp, Homo sapiens
gggctgtgctgaagtgggcagatggcaaaatgatcaagaatgaagtggacatgcagaagatgggtgtgaacctgacacgcagcaacaaggagacggtgaa

SEQ ID NO: 477052 - DNA, 50 bp, Homo sapiens
caggactgcgccgcgtcttcctcaaggttcataggcggaagggacttgac

SEQ ID NO: 477053 - DNA, 83 bp, Homo sapiens
ttgattcatcagattttgcattggatattcgcatgcctggggttacacctaaacaggagtctccaagagcttttagattaccc

SEQ ID NO: 477054 - DNA, 75 bp, Homo sapiens
gaggtgatgatagctttggagacagtgttggggatgtcctttgcactgaccctgaactgccagattgacaaaacc

SEQ ID NO: 477055 - DNA, 87 bp, Homo sapiens
aaaagaatatgatccagatgatcatctgatagaagagttggtccagcatttgccacatctttatatgtgccttcaataccccagtac

SEQ ID NO: 477056 - DNA, 75 bp, Homo sapiens
ccgattcctcctccttggtcgccgcgtccttggctggcgtgaaccccatgggccgcacaggactgcgtgggcgcg

SEQ ID NO: 477057 - DNA, 89 bp, Homo sapiens
ggaacagaaaaccaaacaccacatgttgtctcttagaagtgggagctgaacgggttcacagagagtttcggagctgccaacatctccca

SEQ ID NO: 477058 - DNA, 100 bp, Homo sapiens
gaagcaggactgcgccgcgtcttcctcaagggcaaggcaatacagaagcgttccacacagggacattgcaaagacaagcaagtcatcacattggagattt

SEQ ID NO: 477059 - DNA, 82 bp, Homo sapiens
tacaccaggcagcccccaaatcccggcccaggtgacttaagagattaaaattaatttggttgctgttggttctgaacaaata

SEQ ID NO: 477060 - DNA, 98 bp, Homo sapiens
ccagggccgagtcctcgccatgccggcccggcggctgctgctgctgctgacgctgctgctgcccggcctcggggtttgtggatttccatgcagctgcc

SEQ ID NO: 477061 - DNA, 100 bp, Homo sapiens
aaacccaccaagatccagattgaagctattcctttggccttacaagaagaaattgcttcagagaattcagattgcatctttccttcagctcctgatgtta

SEQ ID NO: 477062 - DNA, 96 bp, Homo sapiens
aaatatggaaatgtcgggggcctcatcagaaatgttacacacggagtatcaaactctgctgccaaggccaccccagcagacatgtttgccaaggcc

SEQ ID NO: 477063 - DNA, 74 bp, Homo sapiens
atagaatggccgggcgcctaccccaaactcatggaaattgatcagaacacacatgcaggacttgaaagatgtta

SEQ ID NO: 477064 - DNA, 133 bp, Homo sapiens
ggaagagagcaacgccagagcccaggtgcccagaggactttcttccagcttctgctgtccttctttgtggagagcaagacttcccaagtaagaagcggaagaggagccgctggaaccaagacacaatggaaca

SEQ ID NO: 477065 - DNA, 100 bp, Homo sapiens
aactacccacggcagtttttgaaggtccttcatttggttacacagaacagtcagccagatcctgtttctcccaacaggttcctaaaagtaaagctttaga

SEQ ID NO: 477066 - DNA, 76 bp, Homo sapiens
ctcccgagcagctgggattacagttactaaaagatgtaactgaactgcagatccttggtgaaatatctttcaacaa

SEQ ID NO: 477067 - DNA, 101 bp, Homo sapiens
cctgatacgatttccatcgcctcacggacgtctcagaacacgctggacagcgataagacatatgtagagtgtgtcggtcagaaggaacacctgagaaaccg

SEQ ID NO: 477068 - DNA, 98 bp, Homo sapiens
cgccggactcgcggaaaaggccgctggaagccccccctgaagccggcagcaccaagaggaccaatacgggcggccctcgggaccaaggatcacgtcat

SEQ ID NO: 477069 - DNA, 143 bp, Homo sapiens
ggaagtacatgtgtcgtatcatagttcattttatgtgggaggatgttcagcagcgcggcagagtcatggggctggccaaatttcgcagtctcctgtgcacagcggagggtgaagcagcagcttttctggtgagcaatcaccgc

SEQ ID NO: 477070 - DNA, 111 bp, Homo sapiens
cccgttcttgcctcaggccagtcgcctccaggccaagagggatccttcacccgtgtctggtcaaaatgcagatcttcgtgaaaacccttaccggcaagaccatcacccttg

SEQ ID NO: 477071 - DNA, 74 bp, Homo sapiens
cgatgagctcaatcggcactggggaagcggctcagccccagggcagcacatcagagacaccatggaacacagcc

SEQ ID NO: 477072 - DNA, 75 bp, Homo sapiens
gtccgccgctcaccccgcggccgcaccttcccgccttctcagaatgttgtaccatctttgggtaggcagacttcc

SEQ ID NO: 477073 - DNA, 75 bp, Homo sapiens
ctctgcagcccctgctgctggttctgcccctgctgcagggactttgaacatgtcggggatcgccctcagcagact

SEQ ID NO: 477074 - DNA, 75 bp, Homo sapiens
cagagatattctactccatctcattcattgtacaggattaaccacaatgaacggttggaattcctgggtgatgct

SEQ ID NO: 477075 - DNA, 90 bp, Homo sapiens
agcagatggaaacacatgaaagacttcctcaaggactacagtatgcacttaatgtccctaggcgacaggaagaagggtattacagccgcc

SEQ ID NO: 477076 - DNA, 98 bp, Homo sapiens
aagcaaacagatgagtgtattcgagggaactctaatgatccaggacaaagaagttaccctggagtatgtatcaagcctggatttttggtactgcaaac

SEQ ID NO: 477077 - DNA, 83 bp, Homo sapiens
ccgccgctgagccgtcgcggagccgcgcagccctcggagcacggaaaaccaattctgtgtcctcggaggaccacagcccagtt

SEQ ID NO: 477078 - DNA, 76 bp, Homo sapiens
atgtagatggcctccttgttcagttgcctcttccagggtgaagtaccatgcaagcatttcttaaaggtacatccat

SEQ ID NO: 477079 - DNA, 83 bp, Homo sapiens
ctcttcccactcaaaatccgttgccgggctgacctggtcagattgcccctcaggatgcccaccttgggacaccttgactccaa

SEQ ID NO: 477080 - DNA, 98 bp, Homo sapiens
ttgcaacgcagttcggagttattatgagacaacagcagttctgtagagagtttaaatatgaaggaatggcaggacgggctaagggcacttctacccaa

SEQ ID NO: 477081 - DNA, 100 bp, Homo sapiens
tgagtgatgtggaggaaaacaacttcgagggcagagtatttataacagcaatgatgtagcagtatcgtttccaaatgtagtatctggctcgggatctagt

SEQ ID NO: 477082 - DNA, 82 bp, Homo sapiens
gagctttctggaagaaaggaaatgttaggatcactttattctgaacaagttgaaatcatcgcagaaggataaagttcgtcag

SEQ ID NO: 477083 - DNA, 51 bp, Homo sapiens
aatctctccccaggcttcaacttcaggagcatcaactccaggagaacaggg

SEQ ID NO: 477084 - DNA, 100 bp, Homo sapiens
cagtacatggattcttcacttgttaaggggaagggtgccaacagcagcagagggacaagagtgacatccaaggaaacccagcgtgaggcccagatccact

SEQ ID NO: 477085 - DNA, 74 bp, Homo sapiens
gcaagtcgaacaaagtcagctttctccaatctttctacatcccagagcgatatgagtctcatccagtctgtgct

SEQ ID NO: 477086 - DNA, 145 bp, Homo sapiens
ctcagcccttcgcgaagcgccgggcagctcgggaacatggccctggagcggctctgctcggtcctcaaagctgatgaacttattagtcctaaagacattgatcctgtccagcgctatgtcccactaaaggatcaacgtaacgtga

SEQ ID NO: 477087 - DNA, 50 bp, Homo sapiens
cgagggtctcggcctcgcggtgcagatgttctcagtgcagctgagtcttg

SEQ ID NO: 477088 - DNA, 80 bp, Homo sapiens
aaccagcatggctacttcatattttggaaagcagtttttaagacaagtggaccaaagaccggcgtgcgatgagagtgatg

SEQ ID NO: 477089 - DNA, 50 bp, Homo sapiens
gataacactaagtttagatctcatgagacgcccactattgcttggttcta

SEQ ID NO: 477090 - DNA, 50 bp, Homo sapiens
ggactcttatgtgagctctaccactgggcttacaaagaggttacaaggac

SEQ ID NO: 477091 - DNA, 75 bp, Homo sapiens
gccgatccagcctgcggagcctgtggggcagtcattgaaagaaaatcttgcaaggtgttggacacttactgaagc

SEQ ID NO: 477092 - DNA, 75 bp, Homo sapiens
cttcagcaccactgacaacacggttctgacagtatttcatgacaccctgtatgatgagattcgtcagtttcgcaa

SEQ ID NO: 477093 - DNA, 82 bp, Homo sapiens
accgccgccactggggcagccagcacaatcgggcggaggtggcgctgccccttcaggtgagcgagtgctgtgctttcatggg

SEQ ID NO: 477094 - DNA, 100 bp, Homo sapiens
gtgacctttgtcctgcacaccattgttcgaggtttcttccactcagcctgtgggagtctctatgctgcagtgctactgcagcactggggtgtcagttgtt

SEQ ID NO: 477095 - DNA, 85 bp, Homo sapiens
tggttcctcttcagaaagaaaaaagaagaagtccccgagttcaccaaaattcagacattgcttcctggactgggtccccaagaag

SEQ ID NO: 477096 - DNA, 88 bp, Homo sapiens
cattgggaagtgcccatacagccaggaagccatgcagagagcactgattggaaggtatcagtgctgcagaatcagggcagagagatga

SEQ ID NO: 477097 - DNA, 75 bp, Homo sapiens
tgccggagctgtcgacccggcctggcgccggactagatgccttattggaggaactggaacgctccacccttcagg

SEQ ID NO: 477098 - DNA, 98 bp, Homo sapiens
tgcggcgggagctggacgcgggaggaggcggcggcggcggaagtgggaaaactcttgcctttgccatcccaatgattcatgcggtgttgcagtggcag

SEQ ID NO: 477099 - DNA, 75 bp, Homo sapiens
acgccctggaagcgtatcagaaaacaggccaggtgcacaggatctaccgaggggctggcggaagcttccagaagg

SEQ ID NO: 477100 - DNA, 100 bp, Homo sapiens
gggcttttcctcgcacgtggtggagggccacccgttcatcgtgcagttcaatgatggaaatgccgccgtggtgtccatgtgggtgtgccgggcgctggag

SEQ ID NO: 477101 - DNA, 74 bp, Homo sapiens
cagagatgtgatgttggagaactatagcaatctggttttcttgggcatgatgggcccacctcctggtatgagac

SEQ ID NO: 477102 - DNA, 75 bp, Homo sapiens
gatgcagctgcccttcctggacaggatcccgttgaagataccacattacacttaggctcctgttggccatgacag

SEQ ID NO: 477103 - DNA, 95 bp, Homo sapiens
tgctaacatggataagcatgccctgaaaaagtatcgtcgagaagcctatcatcgggctgaggacgaggaggagaccacgttcagaatggagtcca

SEQ ID NO: 477104 - DNA, 100 bp, Homo sapiens
gtcatgaatcaaacatgttgtcctcagtacacaataagcttagaccatgctcagcctccaagcagccttgtcatcgacaaagaatctgaagtttacaaga

SEQ ID NO: 477105 - DNA, 75 bp, Homo sapiens
cgccaccgtcacccggctggaggacctgctgcaggatgcccagggtcatcgagcagctcggtgggaagcagctgg

SEQ ID NO: 477106 - DNA, 82 bp, Homo sapiens
cttggactgagtcctgcaggacacaggtgattggagttgtgcttcaaaaatttcagaaattcagcagtattttatctgccaa

SEQ ID NO: 477107 - DNA, 97 bp, Homo sapiens
gccgcggcccggaatcggggcgcttcgccccgggccccccagcatgaagaccccggcggacacaggctgctctttggcgtaaattgcaatcgattag

SEQ ID NO: 477108 - DNA, 75 bp, Homo sapiens
atctggaggagcagttgtctgatgaagagaagacctggagtggaagatcatttatgttggctcggctgagagtga

SEQ ID NO: 477109 - DNA, 83 bp, Homo sapiens
gccagttttgaaatcgacacacaaagaatagagttgagcctgtgggacacttcgggttgagaacttgttgcttagtaaccaag

SEQ ID NO: 477110 - DNA, 75 bp, Homo sapiens
gagcccggagcccgggcaagagctggggcactgtttgaagaagcaaacatggtagcatcaagcattccttgaaat

SEQ ID NO: 477111 - DNA, 96 bp, Homo sapiens
ggcgccgctcaccctctctgagctggtggacatcataggtgacagaccatgccaccactgccctgctccactatcagctgccccagatgccggatg

SEQ ID NO: 477112 - DNA, 75 bp, Homo sapiens
ggcagctcacaagtgatgggcagctcagatggtttaattggttggggtcagataagaagaggagtgacaatcaag

SEQ ID NO: 477113 - DNA, 100 bp, Homo sapiens
gtgctatggaaaatcaagacattgctgccaactatagagatgaaaattcacagctgcgatcattcttcggaacatagctccgcacactgtggtggattcc

SEQ ID NO: 477114 - DNA, 90 bp, Homo sapiens
cgtccatccatttcgtggttcacccgctgccgggcaccgaggaccagctcaatgacaggttcttgggtgtctctggggagtccctgggcc

SEQ ID NO: 477115 - DNA, 111 bp, Homo sapiens
cgcccacgtagccccgcagctgcagccgcctgaccacggcgactggacttacgaggagcagtttaagcagcttcggaaccaaaaagaagcttcccagagccggggccagga

SEQ ID NO: 477116 - DNA, 76 bp, Homo sapiens
gcgcgggcagagcgcggcggcgcggaattcagaaggagctggcggacatcactttagaccctccacctaattgcag

SEQ ID NO: 477117 - DNA, 75 bp, Homo sapiens
ggcggctggccgggcccaggtcccttcctccacaaatttacatgtattggagaccagaccagaagcccttctgaa

SEQ ID NO: 477118 - DNA, 100 bp, Homo sapiens
taatgaacacacacattccagagaactgtgctgctgtgacttactcgaagcctcgattggccacattttggtactacgccaaggttgagctggttcctcc

SEQ ID NO: 477119 - DNA, 100 bp, Homo sapiens
gctggttggccctgtgatccctcaagactggtccacggagtgtatgaccacaaacagccatcaaggttctggcctataggaacaagacattttcagtaat

SEQ ID NO: 477120 - DNA, 88 bp, Homo sapiens
aaattttacataagaagttacctttttcaggctcaactcagtttccttataaccctctgactatgcggatgctcagcagtactccacc

SEQ ID NO: 477121 - DNA, 100 bp, Homo sapiens
ctgcgctgcttcctacacagcctcctgtcgtgaagcatcaagtgtacctgatttgtgaacctatcttgcttcagttggtttcctcctaaatattaggcag

SEQ ID NO: 477122 - DNA, 99 bp, Homo sapiens
gatgatgaggactggaagatgtggctggggggacttatgaatgatgatgtggggaatgaagatgtgtcaccggtggtggccggcctcatcggggcctct

SEQ ID NO: 477123 - DNA, 50 bp, Homo sapiens
gcggctgagacaaaggcgacgatggactcaccctgtcacccaggttggac

SEQ ID NO: 477124 - DNA, 83 bp, Homo sapiens
tatgcaagttttcacttatctcgaaagcctatcagcatagttaagacaatgcagatcttcgtgaagactctgactggtaagac

SEQ ID NO: 477125 - DNA, 107 bp, Homo sapiens
gtgtgacagtaactgaacattggtctaaagtctttccaaaaggtcaaggttcacaagtccaagtggtaagaagttcagaagcaagcctcagttggcaaggtacctgg

SEQ ID NO: 477126 - DNA, 50 bp, Homo sapiens
aatgaatttgcaaaacttactgtagctgataccccaatgtccttctttga

SEQ ID NO: 477127 - DNA, 97 bp, Homo sapiens
gccgccgccgccaagcgcccgtcggacggggaggaggagcaggagctggaggaggagccgccgccgccagtactatactggcaattgctggagaaga

SEQ ID NO: 477128 - DNA, 100 bp, Homo sapiens
gcctgtagaaatgagaatgacagctgtgataaaaaaaaaattcatctgggcggtatctggaacttgtgcacttggaggctcctcagctcttcatatccca

SEQ ID NO: 477129 - DNA, 75 bp, Homo sapiens
gagacatttgctacagcatcccacattaagtcaacgaaagcgtggatacccatcaacgaagttttgatattggaa

SEQ ID NO: 477130 - DNA, 100 bp, Homo sapiens
ctcttacagtgcgtggaccacagcacccatcctgactgtgccttaaagtcggttttgactctgggaggagggctgccttatttggagcaccttaatctct

SEQ ID NO: 477131 - DNA, 100 bp, Homo sapiens
ctttgagcatacaccgagagagtgaggagccagacgacaagcacacactatggcgctgaaacggattaataagacgcccttgcacttggcagtgatcact

SEQ ID NO: 477132 - DNA, 90 bp, Homo sapiens
gttcatttagaccttaaaggagctccaccaaaggtctcgtacctctcagagatttcaggtatgctgctgaaagtgggaatcctctacatt

SEQ ID NO: 477133 - DNA, 101 bp, Homo sapiens
cctggctcccagaggtgcaccaaactatccatatattcctgcacatattacaaagcctaaggaacataagaagttgtttctggttcagcttcaagaaaaag

SEQ ID NO: 477134 - DNA, 100 bp, Homo sapiens
ctgtagtgaatccagtactcattttgctacacttacagcaaggatgttaatagccttggataagccactcttcacctccaccatgagcctggacatccag

SEQ ID NO: 477135 - DNA, 98 bp, Homo sapiens
ctcgaattagtctggctgagatgcttgaagaccttcatatttcccaagatgccactggtgaagaagaggacaagaattttgggcagatttgaatgcca

SEQ ID NO: 477136 - DNA, 90 bp, Homo sapiens
cggcgagaggactggaggggtgcctctgatcaaagcccccaagagagctgtgagtaccagagtgcccactggttccaacagttcttctca

SEQ ID NO: 477137 - DNA, 119 bp, Homo sapiens
ctcggcaaggagcgatttgctggtgtagacatccgtgtccgtgtaaagggtggtggtcacgtggcccagatttatgctaaaaagtttgcagagacccaacctaaaaaggacacaccacg

SEQ ID NO: 477138 - DNA, 101 bp, Homo sapiens
gacggcccggacttcctctcagaagaggaccgcggaggaggaagaaagggaagattttgatactagcattgagagcaaagacacagagcaaaaggaattag

SEQ ID NO: 477139 - DNA, 59 bp, Homo sapiens
acttcatcagagctattgcaagtttattaaccttgcaagaactcttcaggcacatatgg

SEQ ID NO: 477140 - DNA, 83 bp, Homo sapiens
gtttgagagtgggaacatgacgcaggtgcaggtgtctcttctcgccctggcggggaagattgacgagatgcctgaggctgccg

SEQ ID NO: 477141 - DNA, 98 bp, Homo sapiens
cgacatcttgacgaggctgcggtgtctgctgctattctccgagcttcgcaatgtgtctcgactgcattgtgagagtgaatctttcaagatggatctaa

SEQ ID NO: 477142 - DNA, 100 bp, Homo sapiens
cttcatccacgcctttcagccaaatgccagactgattgtcatgctcagggaccctgtggagaggtggagcagctcctgtacgaaagccctgagcggtact

SEQ ID NO: 477143 - DNA, 90 bp, Homo sapiens
gctgaccttcacctgtcactgtgcccaggtgtagccataggcgctgactgaggtcctgggaacaagtctccagagggcagtggcactcaa

SEQ ID NO: 477144 - DNA, 98 bp, Homo sapiens
gggaggagccttaacaagcgcacggagccctcaagaagattctagtgttccagaaactccagataatgaaagaaaagcaagtatatcatatttcaaaa

SEQ ID NO: 477145 - DNA, 75 bp, Homo sapiens
gtaagcgcagaaagcaggcgaacccgcggcgcaataacgtactgtaagattgatgttaaaggcatggtgttcacc

SEQ ID NO: 477146 - DNA, 90 bp, Homo sapiens
catctcagtgaatttgcaagtggtgcaaaaacttcaagctattctaaagccaatgatgttgagacgtctcaaagaggatgtagaaaagaa

SEQ ID NO: 477147 - DNA, 83 bp, Homo sapiens
gcctctgatctgcaaagaaggagaaagcgtgcagcaaactgtcatcaggagcttaaataggacagattttcacggcagtggat

SEQ ID NO: 477148 - DNA, 75 bp, Homo sapiens
tctaaactacgaaatacaccttatcaggtttctgcatttaatgccagttactcagattctggactctttgggatt

SEQ ID NO: 477149 - DNA, 82 bp, Homo sapiens
gagcagcgccagcggccgagcgggcggcttcctggcctgggcgctccggtggcggcggaggcccccgaggtcatcatgtccc

SEQ ID NO: 477150 - DNA, 98 bp, Homo sapiens
gatgatggagtttgtgagggaaacctgctcccaggagttgaaatgaacagtgctttgagacaaatgtcatatggtggaaaatttggttcttcacctct

SEQ ID NO: 477151 - DNA, 74 bp, Homo sapiens
tgccatgcaggcaggccctgagcacgctgctgtgtgagcagcagttttctggatatgccgcagaaggatccgtg

SEQ ID NO: 477152 - DNA, 88 bp, Homo sapiens
cgctgaatattaaccagcaaagttttatggctacctgtcccagcagcagaacatgatgcaggactacgtgcggacaggcacctaccag

SEQ ID NO: 477153 - DNA, 100 bp, Homo sapiens
cagaccgtggaagatttaacgaatggggttgtgatggcccaggttcttcaaaagatctctcgtggcattatccttcagtggggctattggactgactttt

SEQ ID NO: 477154 - DNA, 75 bp, Homo sapiens
tgccagacaatagagcatatggccccccaggttcgcctaatagtcttggctacttccctacagctgctaatctta

SEQ ID NO: 477155 - DNA, 75 bp, Homo sapiens
cttccccacgcaaccccagatccatttacactttacaggcatggtggctttgccaatggtccttgttttgctgct

SEQ ID NO: 477156 - DNA, 50 bp, Homo sapiens
cttggtgacaagctggtctgagcagttaccggtattgtaagaacaagccg

SEQ ID NO: 477157 - DNA, 82 bp, Homo sapiens
gacagccacactggtgatggcaccacctctagaggaaggcttgggtggagcaatggaagtggaactgtcaccgctgttccca

SEQ ID NO: 477158 - DNA, 75 bp, Homo sapiens
tcagccacgaagtacagccggaggtgctgtaaaatacctggagtgctcggcgctcacacagcgaggcctcaagac

SEQ ID NO: 477159 - DNA, 98 bp, Homo sapiens
catgaagttgtcccacaccaaggtcagcgactggcaggttctctacaagtacaacgccctgctaagcaacatgagcaggatctactccaccgccaagg

SEQ ID NO: 477160 - DNA, 74 bp, Homo sapiens
cccatcctcttaccccaagagccagaaagaggctggagcttggcatggtattcatgggtagtttgaaatatcca

SEQ ID NO: 477161 - DNA, 99 bp, Homo sapiens
acaacaaggaagggactttaatcactgaccatcccaatatacaggatatgcctttcacctgtgaaggtatcacccctgatatcatcatcaatccccatg

SEQ ID NO: 477162 - DNA, 83 bp, Homo sapiens
tttgcctactgaagagcttatcagagctctacttgggaaagtagctacagcaagctgggtagcaggcagatccaaaggatatc

SEQ ID NO: 477163 - DNA, 90 bp, Homo sapiens
ggacatcctggaagctgggaaatgtttccatagggctgcctgttgtctgcatccgacgctggagcctactgtccacaggaggtttgggag

SEQ ID NO: 477164 - DNA, 83 bp, Homo sapiens
gctcgcgctactctctctttctggcctggaggctatccagcgcaccggcttttccgtgaacattgtgtttgtgtacaaggaaa

SEQ ID NO: 477165 - DNA, 98 bp, Homo sapiens
aaaaccattctgatatctgctcatggaaatagcagtagggcactcctaaaacacctggaagatatgtcttctccgactactatgaagaagcctgaaaa

SEQ ID NO: 477166 - DNA, 90 bp, Homo sapiens
ttcaagaggactttagactaattgcagataattaagactttgggattccagaagacagaggtttgagtgtaaaacacaaaataacaaaac

SEQ ID NO: 477167 - DNA, 100 bp, Homo sapiens
aacaggccatggagggacaggatccggaggcgccagctcaacctgaacagagtatctgccaagcccgggcttccgtgatggtctacgatgacaccagtaa

SEQ ID NO: 477168 - DNA, 75 bp, Homo sapiens
caggacccatttgtgtccattgatctcttggagcagctggggatcatggacactgcccatctctaagataagaac

SEQ ID NO: 477169 - DNA, 98 bp, Homo sapiens
taacacacaaggattagatgatgacactccactccatgattctgctagtagtgggcacagagatgcccctagcagtcttcttgatgctttggaacaac

SEQ ID NO: 477170 - DNA, 75 bp, Homo sapiens
gccaagtcgacagcttgccccaaacaaacctaggaggactgacaaatggtagtggtcgatatatctctgcagcac

SEQ ID NO: 477171 - DNA, 98 bp, Homo sapiens
gaagaatgtccaataagcaagaaaagagcaacatgggagactattcttgatgggaaggtcgagctgtgtttagagtgcatcgaatgggccaagtcaga

SEQ ID NO: 477172 - DNA, 100 bp, Homo sapiens
ctgggggaggctcgggccacagtagggaagaggctggactatatcacagctgaaatgctccctggggaagggaatgcagggttgctggggctgggcccag

SEQ ID NO: 477173 - DNA, 76 bp, Homo sapiens
gccctgagaacgggaggtcaagagttggagcagacggtcagttctgagagacaagagagacacctccaacttcgac

SEQ ID NO: 477174 - DNA, 100 bp, Homo sapiens
atatcttcccgtcctccatcagtgccatggaggccaccatcaccgaacggggcatcaccagccgacacctgctgaatgctgggctcttgcactgtttggt

SEQ ID NO: 477175 - DNA, 75 bp, Homo sapiens
cttggagggtacggaccccacatgaggggtgaagttgaacaaattgctatgatgaaaccaaaaggccagactgaa

SEQ ID NO: 477176 - DNA, 100 bp, Homo sapiens
cttcaccaacctcaagtactgtaatcacccaggcaccatcctctaacaggccaattgtgactactgttcgaagatttttggaagaatactgagaacggca

SEQ ID NO: 477177 - DNA, 74 bp, Homo sapiens
aacagagactctttggtcaaaagatatggcgccatatcagggccctcgggaccaaggatcacgtcatgactccg

SEQ ID NO: 477178 - DNA, 96 bp, Homo sapiens
ctgacattgatctccaagaccgttcagaccctcggcagcctgtccaagtccaaatctgacgggctctacgagtgcattctctgtgcctgctgtagc

SEQ ID NO: 477179 - DNA, 75 bp, Homo sapiens
aaagattatgacaaatcacaacttgtagaggtattgggagagttgctgctacatctttaggaaatttgactaacc

SEQ ID NO: 477180 - DNA, 100 bp, Homo sapiens
tgtgtcagctgcttaacaacctgctaccccatgccatcaacctgcgtgaggtcaacctgcgcccccagatgtcccagcaaagccttctagacaagctcag

SEQ ID NO: 477181 - DNA, 75 bp, Homo sapiens
cagagcatggactgttaaatcttgcacttcttctgagtgagttgcaggagaaataacaaggcattgaagaatggc

SEQ ID NO: 477182 - DNA, 100 bp, Homo sapiens
acagatgagccagtatggaccacaaggaacggcgtaagaaacagcagtgggaaataatgcacaagcacaacgagacatcacaaaaaatcgccgcccgagc

SEQ ID NO: 477183 - DNA, 95 bp, Homo sapiens
tcatgagaatggagaagaaggatctttgagtctagcaagtgttattatttctgccctttgtacccttacaagagatggacagagacgtatgtgcg

SEQ ID NO: 477184 - DNA, 100 bp, Homo sapiens
cgccgaagaagcatcgttaaagtctctcttcaccctgccgtcatgtctaagtcagagatgcgctgcctgaccacgcctatgctgctgcgggccctggccc

SEQ ID NO: 477185 - DNA, 100 bp, Homo sapiens
ctcaccacaagtggctgggtgtgacttgacacggtgtgaaagtggaggggcgcgagcactcaggcaaatactgtggtctggggttgcaaatgaaccattc

SEQ ID NO: 477186 - DNA, 75 bp, Homo sapiens
cgaggagacgctcgcgctcaagttcgagaacgcggccgccggatctttctcctggcctgccctccatgtcgggga

SEQ ID NO: 477187 - DNA, 51 bp, Homo sapiens
accaagtggcgaaggagccggctccaagagagaactcgatgccaccgcaac

SEQ ID NO: 477188 - DNA, 90 bp, Homo sapiens
gcctggcctggcgacccggtggactcggcccgcggcggcgcgctcacccgccccgttcagcttcttctgcacggtacctgagatcctggt

SEQ ID NO: 477189 - DNA, 83 bp, Homo sapiens
ggataatttacctgagcatatgagaaattctttcattctccagcattttgaaagcgaagcagaagccgtagaatcagcggcga

SEQ ID NO: 477190 - DNA, 82 bp, Homo sapiens
cccggtgtgcctcggcagccttgcgctgctctaatggtccggacttccgtgtgccctgtttgtgctcttcgtcctggcctac

SEQ ID NO: 477191 - DNA, 90 bp, Homo sapiens
agagaaaggagacctcattccaagttccaggattaattctgagatggatttataaaagctattggtcctgctgatgttattcaaagacag

SEQ ID NO: 477192 - DNA, 94 bp, Homo sapiens
tggcggccatcgtcatcctgctgctgaagatctggaagacgcgctcctgcgccggttttttattggcacctcagtctcaacattttcttttcgg

SEQ ID NO: 477193 - DNA, 51 bp, Homo sapiens
gaccggttctcagggacagtgcacgcagaggtccagcaccccatcctcgcc

SEQ ID NO: 477194 - DNA, 96 bp, Homo sapiens
gcatggcaacaccggattcagtgtttcaggcagacactggaagaactttgccctggtcccccttttaagagaggcaagtgctcgagataggcagtc

SEQ ID NO: 477195 - DNA, 74 bp, Homo sapiens
ctaaaccagagcttccaggaaaactatgcagggatctttcacttccagggtgtccgcaatgttgccagtgtctg

SEQ ID NO: 477196 - DNA, 100 bp, Homo sapiens
agaacctgcagcagctagcccaagatgcggacctggccttgctgcagatgctgagatgaatcgtcacctgtgtgtttggctttttagacatccatctctt

SEQ ID NO: 477197 - DNA, 75 bp, Homo sapiens
gctgctggcgctctggctgtgctgcgcggcccccgcgcatgtgggtaattccagaattgattggccataccattg

SEQ ID NO: 477198 - DNA, 100 bp, Homo sapiens
gtaagcaatctacgaagaccgaggaaaagctgcggatggcagatgatcagggctgtattgaagagcagggggttgaggattcagcaaatgaagattcagt

SEQ ID NO: 477199 - DNA, 50 bp, Homo sapiens
atggggagcagaaggactcggacacaggacgtgaccacgcagtctgtgat

SEQ ID NO: 477200 - DNA, 50 bp, Homo sapiens
ccagcgtttcacctaccttcccgccaacgtgtcttgggacaaggtgcgca

SEQ ID NO: 477201 - DNA, 100 bp, Homo sapiens
atctaaagacagttggcacgggcctccagaggaagaagtccaagttccgcttgtccaagatctggtcaccaaaaagcaaaagcagcccctcccagtagta

SEQ ID NO: 477202 - DNA, 80 bp, Homo sapiens
cgtcactcggagcggcgggtcccgtctcgacagtgttagacaccatcatggccacaaaactcgacttcaataaaatgcca

SEQ ID NO: 477203 - DNA, 100 bp, Homo sapiens
ttggatgaaagataaagcccttaaggacaagacccagtttgtgttctgccactatgtggtgtcccgggaccccactgccttctctgagcctgaaagcttc

SEQ ID NO: 477204 - DNA, 90 bp, Homo sapiens
caaacgcagaaggactgcctcactgagcaaccaagagccaaagaagcccaggatgacctggtgaagaccaaggaggagctgcacctggtg

SEQ ID NO: 477205 - DNA, 100 bp, Homo sapiens
cggcggcgctggaggagcgaggcagctgtactaggactgggaacgggtatcctggtcagatataggaggactggaaagtatcaaactgaagttggaacag

SEQ ID NO: 477206 - DNA, 100 bp, Homo sapiens
cagtttcagttcgccgatgggaaacccggagaccaaatccttggagcagtgaggagaatgaataccttccaagaccagagtggcagctccagtaatagag

SEQ ID NO: 477207 - DNA, 100 bp, Homo sapiens
gctgcttgaatgtctgccgaaatgttcaagtttaccaaaagagaggcaccgctggaacactaatgagacttcagctacgggacggacgagtacgacggag

SEQ ID NO: 477208 - DNA, 75 bp, Homo sapiens
tggttttaaaaaatacatatctggttttgtgattctaccagaaaggaatgaagaacagaaccttcaggaattgag

SEQ ID NO: 477209 - DNA, 100 bp, Homo sapiens
ccctggctggagtgccctgcctggagggagccctcctggctgggggcaaggtcccgttgagcagacagtccaagcaagcagatacaatggttgcacctcg

SEQ ID NO: 477210 - DNA, 83 bp, Homo sapiens
cacagcctcccgcgcctcgctcagctccaacatgggggatatgagactttctactcggaatatcctgagtgttgcgtggatgt

SEQ ID NO: 477211 - DNA, 89 bp, Homo sapiens
caaaagcaagatatactactaactttgaaatggaataagtgtttctgaaagatctatccagcactccgatggccagcaacaacaccgcc

SEQ ID NO: 477212 - DNA, 82 bp, Homo sapiens
gtattgaaaggaaactggaagaaaaaagaaaagaaactgacaaaaacatttctgagattgtctccagctttaagaccacgac

SEQ ID NO: 477213 - DNA, 75 bp, Homo sapiens
ttactcgatgatggaactctggtggtttcaggaagattttaccaaatgttgcaagaactctggagttcttatggt

SEQ ID NO: 477214 - DNA, 100 bp, Homo sapiens
gctggatttgccccagccattggatttcctcaagctacagaggccagtaatagtagccatgagtctcgtattggtctagctgaggggttggaatccgaga

SEQ ID NO: 477215 - DNA, 83 bp, Homo sapiens
aggagcgggaagagttgctgggttcattccttggaagaagctgtaccatcgatacctgatgaatgaagagcaagctgtcagca

SEQ ID NO: 477216 - DNA, 74 bp, Homo sapiens
cccaagtgcatggtgcattccgctggggtttggaattacaagcttcggcgctgtcttttcacattgcttgggca

SEQ ID NO: 477217 - DNA, 74 bp, Homo sapiens
gctgggacgtacggagcccgcaagtcccggcccgaggcgtttaaatgcagaattgcaggcaaaaacagctgacg

SEQ ID NO: 477218 - DNA, 82 bp, Homo sapiens
atacgccgctctgaatcttgccgccctgcactgccgcttcggtcactagccatttgtgtaggaccagaaaacatgcagataa

SEQ ID NO: 477219 - DNA, 80 bp, Homo sapiens
gcagcaaggtgggcccggacggcacaccctacgttaccgtgctcaagcaaccatgtccaagggacctgcagttggtattg

SEQ ID NO: 477220 - DNA, 80 bp, Homo sapiens
ctctacttcaacccgcaccttgtgttccggaagttccaggtatcatgatattagctggtttgacatcaagtcatttgtga

SEQ ID NO: 477221 - DNA, 87 bp, Homo sapiens
tccccctgggtggagtccgaatacctggattacctttttgaaggcctgatgcctttaacctacttcaggaaaatctctaaggatgaa

SEQ ID NO: 477222 - DNA, 105 bp, Homo sapiens
ctcaatatctgtcttcggtggactccttcggcagtccacccaccgccgccgcctcccagccgagagggtgacctctctgggcaaggactggcatcggccctgcct

SEQ ID NO: 477223 - DNA, 100 bp, Homo sapiens
agagatctggacagaatcgccggacaggcaaaccacagggaagctggaaaagaagcggccctggcagaagtggctgacgagaagatgcttagcgggctca

SEQ ID NO: 477224 - DNA, 75 bp, Homo sapiens
tacaatcactacggacacaggattcatgcgcctggtccgacccccagtggcactaacgtgggatcctcagggcgc

SEQ ID NO: 477225 - DNA, 100 bp, Homo sapiens
cgagtccggaccggagactttggggcctaactagttacagaatgtctgaaggggacagtgtgggagaatccgtccatgggaaaccttcggtggtgtacag

SEQ ID NO: 477226 - DNA, 71 bp, Homo sapiens
ggaggtggcagccatctccttctcgcagagtggcaagacttcctcgattctttgcagaagaggaagatgga

SEQ ID NO: 477227 - DNA, 75 bp, Homo sapiens
ggagaagcccccagaaccaggcccccaactcagccatctgcggaggtcaagattacttctctaacaggatcacca

SEQ ID NO: 477228 - DNA, 75 bp, Homo sapiens
cgagcacggccgcccggccacggtggtgtttactagtgatcctcataaaagttacctccctgtgcaattccagtc

SEQ ID NO: 477229 - DNA, 83 bp, Homo sapiens
atgaaatcctggatgcactctcacattgccatcataaactggttgatgataattagaagcatgctttccactgaacttcccga

SEQ ID NO: 477230 - DNA, 83 bp, Homo sapiens
ggagattgacagtcacaattttgtaataagggatcatagacggtatttctatgtaaacgaacagtcgggcgagtctcagtggg

SEQ ID NO: 477231 - DNA, 100 bp, Homo sapiens
ttgatgctgtggtattcgatgttcttaaggttacaccagaagaatatgcggatgtgggctctcttgatgagaagatgaagagcttggatgtgaatcagga

SEQ ID NO: 477232 - DNA, 82 bp, Homo sapiens
agctgccgaacgacgtggtcctacagccacccaggtcgatccgtgcaacctccaggagctgttccaggagatgtcggccaac

SEQ ID NO: 477233 - DNA, 75 bp, Homo sapiens
tcaattatcatgttgaccacagaccttcacagtccacaggtgcaagaaagcctttgaggtgaaggtgtatgaaag

SEQ ID NO: 477234 - DNA, 100 bp, Homo sapiens
cttactggagtccaagatgctaatggctgttaccttctcctctcaaggatgcagtggaagtctcaacctggagaagatgctatacaatgcaagaggtgaa

SEQ ID NO: 477235 - DNA, 101 bp, Homo sapiens
cttttttcatttccatttctaccttgtatgcctcaatttgctggatttaagcactgctgcactttatgagtggaatgcagtagccctctgggcctgggata

SEQ ID NO: 477236 - DNA, 75 bp, Homo sapiens
tcaagccccgcgagtcgcatctgctcaacgacgaggacctgacgcaggagagcttgtttcatatccatatcccac

SEQ ID NO: 477237 - DNA, 88 bp, Homo sapiens
aagaccacatagataagaagtattttcccttgacagcttctgagcagaaaaatatggctcaggagactaaccagaccccggggcccat

SEQ ID NO: 477238 - DNA, 98 bp, Homo sapiens
ttggaagagggagtcaccactggacctccaaggaagccacgtgcagacatctacaaccttcgatctcctgacgatctgcgggccaggcatcgacatcc

SEQ ID NO: 477239 - DNA, 82 bp, Homo sapiens
gaacttgccctgtctcctcgcagatgagggtaaatgggaagttggtagctctgaaggtgatcaggctgcaggaagaagaagg

SEQ ID NO: 477240 - DNA, 74 bp, Homo sapiens
gtcaaaggaattctgtcttcacaagcagaagggttggctagtggatcttctcaacaaatttggcactttaaatg

SEQ ID NO: 477241 - DNA, 100 bp, Homo sapiens
agcaccagctgcagccccggccgcccactcgcctcacttgagcctgtgcctccccatggccacccatggaccagtcggcattcacttcctcccttctgcg

SEQ ID NO: 477242 - DNA, 74 bp, Homo sapiens
aagacaatcgtcacttatacagggttgacaattttggtttggggcttttgcttcggtccaagcagataaaacgc

SEQ ID NO: 477243 - DNA, 90 bp, Homo sapiens
cgaggaccgtatccttgtgctaggacaggggaaagtatcttgtcgctgctgagggatccctccaaaaggaaggttccaccccagcccctt

SEQ ID NO: 477244 - DNA, 99 bp, Homo sapiens
ctacaacaacaaaatgccactttcaacacatagaggctgatccgatagagtaatacctaattatatcaccatgagatggcaaaacggaatgtcagatct

SEQ ID NO: 477245 - DNA, 95 bp, Homo sapiens
catttgtctacaccatcaaggaggaaggcctggttcttcaagttctctcctgcgctatggtggaaacctgtccctccaaagtgccatgagtgtac

SEQ ID NO: 477246 - DNA, 127 bp, Homo sapiens
cagagttcgaggtggtgggactcaccgctctggccagggtgcttttggaaactcatagcaaccaagagtcaagagagtgattaccagccaattaagaaaaatgtgaccaagcagattgcagagtaca

SEQ ID NO: 477247 - DNA, 100 bp, Homo sapiens
gccttccgcctgctcaacaaataccgtaacaagtactgcatgttcaatgatgacatccaagttgacctggataggctcaatgatgatgccaagcgttaca

SEQ ID NO: 477248 - DNA, 73 bp, Homo sapiens
ccaacctcagctcccaggccagttctctgaatgtcgagtctcttgcatggcaccaagaatgttaccaattcaa

SEQ ID NO: 477249 - DNA, 83 bp, Homo sapiens
gttgtgattcagcacctgctgtctgagattgtcactgctgttccaagggcacacgcagagggatttggaattcctggagagtt

SEQ ID NO: 477250 - DNA, 82 bp, Homo sapiens
tgtttgtggatcgctgtgatcgtcacttggtcgcgtggggcaggcagtggcgctgcgggccaaggccttcggcttcaacgtg

SEQ ID NO: 477251 - DNA, 101 bp, Homo sapiens
atgggctgctggggacagctgctggtgtggttcggagccgcggacaatgcagatcttcgtgaagactctgactggtaagaccatcaccctcgaggttgagc

SEQ ID NO: 477252 - DNA, 90 bp, Homo sapiens
atggcagacctgcaccgcatgatgatgtgtcgaggagggccccaaccgcagcacagtcagccgcccccgcagccaccggctgtgaccccg

SEQ ID NO: 477253 - DNA, 90 bp, Homo sapiens
catatttcatcacaagttgctgaacttaagagccaggccgaggcccactacaaaggaagtaaacatgccaagaaggtcaaagcactagac

SEQ ID NO: 477254 - DNA, 100 bp, Homo sapiens
cgagttcttcaacggcaagaacaagtccaagactccagagatgaatgtgccataccgaatccgtgtgcggctgtccagaaaacgtaatgaggatgaagat

SEQ ID NO: 477255 - DNA, 100 bp, Homo sapiens
gagttcccaattaacaatgaagcagatcctagtccactgcctggaacatggaagatgctccataattgtttgctgaaggaacgagtgataaccagagaag

SEQ ID NO: 477256 - DNA, 101 bp, Homo sapiens
tacagttcatgacaatgactttgagccctaccttactggacagtcaaatcagggaactctaatgatccaggacaaagaagttaccctggagtatgtatcaa

SEQ ID NO: 477257 - DNA, 50 bp, Homo sapiens
aggaattctgtcttcacaagcagaaggacttgcaccttcgagatcccctg

SEQ ID NO: 477258 - DNA, 74 bp, Homo sapiens
ccaagccgaaccgagccggggcgccgggagctattgggacctgcgggtttgatctgtggatgaaatgaatcatg

SEQ ID NO: 477259 - DNA, 100 bp, Homo sapiens
aggagtaaagccgaagagtggggcgtgcagtacgtggagacgtcagcgaagacccgggccaacgtggacaagtaaaatgtttattggaggcttgagctgg

SEQ ID NO: 477260 - DNA, 101 bp, Homo sapiens
gcgaagctggccaaagcctgcccagacggctcacctgtgcgggatggaacaaaagctcggattctgaaggtaattttgagactcctgaagctgaaaccccg

SEQ ID NO: 477261 - DNA, 75 bp, Homo sapiens
gcttgcggagcactttgggtttcatttgtaaaggagccggagccccagttcctgctcattttccacaaggccgcg

SEQ ID NO: 477262 - DNA, 74 bp, Homo sapiens
agaggttgattacagcggcctcagggttcaggcaatgcaaataagactcctgggagagttggctctcaaggttc

SEQ ID NO: 477263 - DNA, 100 bp, Homo sapiens
gctgtgggaattaattaaagaaaagcattatcatttgaggaaccttcggcagctcaggtcctggtgcttgatggtcgaggccatctcctgggccgcctgg

SEQ ID NO: 477264 - DNA, 75 bp, Homo sapiens
taacagttaggagttgatggcagtttcaataacaggtcattgccgagaaaagtttgctaatccagactttacaca

SEQ ID NO: 477265 - DNA, 83 bp, Homo sapiens
tcctaccggatccacgtgcttcatcatgtgattgcatactcggaacatcgttaccgtatctttggggaaaccatcgatattgc

SEQ ID NO: 477266 - DNA, 75 bp, Homo sapiens
ctgccggaaggggtcccgaagccccctgcaggaactctacaacccaatccagacaggtgatttggcttctgcaca

SEQ ID NO: 477267 - DNA, 90 bp, Homo sapiens
cgtggacagcctcatcacccggctgctggaggagccccccaagatgaacccagtggtggagccactgtcctggatgctgggcacctggct

SEQ ID NO: 477268 - DNA, 50 bp, Homo sapiens
gtttctaggaaaggccggacaccagcaatcccacagagtattgatgagga

SEQ ID NO: 477269 - DNA, 90 bp, Homo sapiens
cccaagtgcacatggctgaccacccctaaaagcacctggccccgctacagcaaaccaggtccaatgagctttctgaacagctggtgtagc

SEQ ID NO: 477270 - DNA, 83 bp, Homo sapiens
cgcagtatctgccgtcccagtcccagcagaggtaccagccgcagcagatcaatgtccgagttaccaccatggatgcagagctg

SEQ ID NO: 477271 - DNA, 71 bp, Homo sapiens
acggcctggctttctgcgccatcctgcaccgccaccggcccgacctcatggacgtccagatcggtgacatc

SEQ ID NO: 477272 - DNA, 82 bp, Homo sapiens
cgacggctgaacgcagcccgccctccccaagtcgacgccgcaacccggggaaagcaggagggctccccgaggactttctgaa

SEQ ID NO: 477273 - DNA, 50 bp, Homo sapiens
gccgtaaccccgaaggaaataattcgacaccaaattttggaacttaaaaa

SEQ ID NO: 477274 - DNA, 152 bp, Homo sapiens
tcaaggtggcgaagcccgtggtggagatggatggtgatgagatgacccgtattatctggcagttcatcaaggagaagagctccttaataagcatttatagtcagtttttggcagcaatagaatcactaaaggcattctgggatgttatggat

SEQ ID NO: 477275 - DNA, 100 bp, Homo sapiens
aaaatggaccaacttctttggcaagtggacattttactggctcaatgcacgatctgattttctggagagatgtgaagaagactgggtttgtctttggcac

SEQ ID NO: 477276 - DNA, 100 bp, Homo sapiens
actgacagcgggaggcagagggaggaacctggacgccggaagccgggaaatggtcaaaatgcagatcttcgtgaaaacccttaccggcaagaccatcacc

SEQ ID NO: 477277 - DNA, 75 bp, Homo sapiens
cgaggaagccgccgggcgccgcgcctttggcccgacttaaatctctgcaatggctaacgaagcttatccttgtcc

SEQ ID NO: 477278 - DNA, 75 bp, Homo sapiens
agacgatattgatattgaagcaatgcttgaggctccttacaagaaggagtctcgctctcagtcaaaatctccaac

SEQ ID NO: 477279 - DNA, 98 bp, Homo sapiens
gcacgagctcgcttctatgctgcagaaatcatttcggctctcatgttcctccatgataaaggaatcatctatagatacctctactaagaagacagaag

SEQ ID NO: 477280 - DNA, 100 bp, Homo sapiens
catgatgcctacatgttctgcatcattgacaagtcattggctgtccagtgaatacagagccatctggcccaacctgtgagaagaaaacatactctgtgcc

SEQ ID NO: 477281 - DNA, 82 bp, Homo sapiens
gcagagcagctttgccaccggcttatggagcatggcatcatccagcatggcatagaatgtcaagctaaccaggcgtccgcta

SEQ ID NO: 477282 - DNA, 82 bp, Homo sapiens
ggaagacgaggagcgcgtcgtgcgcctgggggtgcgcgcctgcgacctgcccgcctggcatctactgccgaggatgttccaa

SEQ ID NO: 477283 - DNA, 100 bp, Homo sapiens
atgaaaagattgctgtccactgcacagttcgaggggccaaggcagaagaaatcttggagaagggtctaaaggtgcgcgtggaattcatggacgacacgag

SEQ ID NO: 477284 - DNA, 122 bp, Homo sapiens
aaacctgacaaatgtgcaatcttaaaagaaactgtgaagcaaattcgtcagatcaaagaacaagaaaatggtgtgaatggaacattaacttcaaatgtagcagactctccccggaataaaaa

SEQ ID NO: 477285 - DNA, 75 bp, Homo sapiens
aggtctctggagacatcttcagcagtctctcaagtttccaagaacttggaaagccaccacggtgaccagatggcg

SEQ ID NO: 477286 - DNA, 98 bp, Homo sapiens
tgacttttcctatgggatgcacagggtggaaacaagctgctctcagaaagcagaagccactggagaaaaacggccaagaggcagacctaggaaatggg

SEQ ID NO: 477287 - DNA, 82 bp, Homo sapiens
attggatgaagtggctccggagatgggagctctttgctcaggccccggtggatcagtttcctggcacagctgtggagagtgt

SEQ ID NO: 477288 - DNA, 100 bp, Homo sapiens
gatggcctggcgacccattcaggcacttatggccatttcagccaattcttctaacagagaaaatgccattgaggatgaagaggaggaggaggaggaagat

SEQ ID NO: 477289 - DNA, 73 bp, Homo sapiens
gaggatattacctccaaaaaagacaggggagtattaaaggtgctactcgtgagcagtagtcgccatccagaca

SEQ ID NO: 477290 - DNA, 96 bp, Homo sapiens
gacccgccgccggctccggccgcgtttcccgggtaaagggggttttggccaaattgggcgagggcacaaaataaccacttaccccttctcaccgag

SEQ ID NO: 477291 - DNA, 83 bp, Homo sapiens
gccggagccggtgccgcagctgcgatggccgtggccgtggggagaccgtcttatgccaccacgggctgttccctgaccctgca

SEQ ID NO: 477292 - DNA, 100 bp, Homo sapiens
ggaagactgtgaagctacagatttgggacacggctggccaggagcggtttcgataatgatctacgtactacttcgacactgtctttgagtgcagaggatt

SEQ ID NO: 477293 - DNA, 98 bp, Homo sapiens
cggtgccggcctagcgtcctggaattacttcaatcaaatcacaaacaacatcgacccagtgggaagaatccaaatgcgcacgaggaggacactgcggg

SEQ ID NO: 477294 - DNA, 50 bp, Homo sapiens
ctttgacatgtgtgaaaacatgaaatgggagtggacatccgccataacaa

SEQ ID NO: 477295 - DNA, 101 bp, Homo sapiens
tggacgaggactctcctgtgctcacccaagaccgagactgggaggcgtattggcggctactctttaaaaaggatgagaacaagttgagcagtgccaacggc

SEQ ID NO: 477296 - DNA, 90 bp, Homo sapiens
tccaccattcactgtcttctcaggctgcccagaatttcagaggcaggaaagtgtccggtcccagcataaaggtatccagttatatgacac

SEQ ID NO: 477297 - DNA, 100 bp, Homo sapiens
cttctgccaacctttacaacatggcctctggtgctcgagaaactggtagggggagcagaggcttcgtgacggagttatcagagacattgagaggcaaatt

SEQ ID NO: 477298 - DNA, 75 bp, Homo sapiens
tgcggcgcggggaccgctgtgctctcggttgactatagtcaatggggccaatggagccaagtgtatggaaaccca

SEQ ID NO: 477299 - DNA, 100 bp, Homo sapiens
ggcaaagtcttttgtgctcccctcccccatcaaaggaaaggggaaaatgtctcagtcgaaagggatcgcttacacctgagacgaactacagaacagcacg

SEQ ID NO: 477300 - DNA, 100 bp, Homo sapiens
tcagcagccacttttcatggcgatggtgggacccctgaaaggagagcccttctgggttttttattggcacctcagtctcaacattttcttttcggattca

SEQ ID NO: 477301 - DNA, 100 bp, Homo sapiens
ctttaggtgcttttatattcatctcaaaaacaaaattctgaactcaggacttggcaaatgtaaacaggttacccagctgggagagaggacatctgctggc

SEQ ID NO: 477302 - DNA, 100 bp, Homo sapiens
tgaagaccacaataaaagagacctctacttagctcagcaattcttaccttaaatctccgagaagcaagggataatgctgtggctgaaaaggaacgagcag

SEQ ID NO: 477303 - DNA, 82 bp, Homo sapiens
cgggggccgctctgggatcccggccaccagcaattgtccgctcttggtgctggacaggcatctttgtttgggaacaaccaac

SEQ ID NO: 477304 - DNA, 100 bp, Homo sapiens
ccagcaagatcggcaggcgagattgcctgacccaggcctgctcggccctcacaggacatgtcatgctgcccaaggacatagccaagctggtccctaaaac

SEQ ID NO: 477305 - DNA, 87 bp, Homo sapiens
tgcttcccagcttcaagtgattctcctgcctcagcctcccgagtagctagtattacagattagtgggatggtttggccatgaactca

SEQ ID NO: 477306 - DNA, 90 bp, Homo sapiens
gctgagcctttctggacagaccaacctgtcagtgctgcaagtatgatctcgtgaaaccttgagagaaactgaatgacgaatgaaactatt

SEQ ID NO: 477307 - DNA, 100 bp, Homo sapiens
cgcaagtacccgtccatcatagtcaactgcgtggaagagaaggttattctcgttcaagttaatccaggtgagactttcacaataagagcagaggatggaa

SEQ ID NO: 477308 - DNA, 75 bp, Homo sapiens
gcccctggtgagcttgggatctgcgacaaaagggaccgaggcgtcgagggcgaggcccccagcagtgagactggc

SEQ ID NO: 477309 - DNA, 100 bp, Homo sapiens
ggtagtgacctctgcaattctaaaccgtccactttgggcaaaattcatcaagctatggatatgaaaaaaggcccccaagacggagtttcgctcttgttac

SEQ ID NO: 477310 - DNA, 100 bp, Homo sapiens
cagagacagaagagcggggtcggggccggctgaccaggaacctgggcgagcagcggcgggggcccgagggaagttgattcaagtcagttgagacgccagt

SEQ ID NO: 477311 - DNA, 98 bp, Homo sapiens
ctgcatgtctaccaggagaggagggaactgcggagcgggtctaccccgagccccggagcgagagcgagtgcctgagcaacatccgcgagttcctgcgc

SEQ ID NO: 477312 - DNA, 75 bp, Homo sapiens
agagtctgactacttgacacactggctcgcttggcagcagcatgatgtacaagaactatgcagagtcatgtttga

SEQ ID NO: 477313 - DNA, 118 bp, Homo sapiens
cgtccgccgattcctcctccttggtcgccgcgtccttggctggcgtgtggctattatcatggaaaactaatttttcccagagaatttcctttcaaacctcccagtatctatatgatca

SEQ ID NO: 477314 - DNA, 75 bp, Homo sapiens
aaaacgatacattgatcagaaattcgtacaacaggtatactgtgatgtcaggaacacctgaaaaaattttagagc

SEQ ID NO: 477315 - DNA, 80 bp, Homo sapiens
gtttccttaggcgttctaagggctttactcaggtcaaaatgcagatcttcgtgaaaacccttaccggcaagaccatcacc

SEQ ID NO: 477316 - DNA, 120 bp, Homo sapiens
gacaattgttcagttgcaaaaagaaactggagccaccatcaagctgtctaagtccaaagatttttacccaggaggagatgaccgccgggttctgctatggcacatggaacaagccatcca

SEQ ID NO: 477317 - DNA, 96 bp, Homo sapiens
aagacttcttgctcatttctgagtattgtctttatatcctgacactatgaatgctacttggatgcctcttaaggtgctggagaatctggtaaaagc

SEQ ID NO: 477318 - DNA, 75 bp, Homo sapiens
ccagtgctgaagtcccaaggagccgccctgcagggtgaggtggctttgaccccgggttgcccggccagcacgacc

SEQ ID NO: 477319 - DNA, 83 bp, Homo sapiens
ccggctcgcggggcccggcgaagggcaggggtgagcccctccagactccgaataggagatcaagagtttgattcattgcctgc

SEQ ID NO: 477320 - DNA, 75 bp, Homo sapiens
ttccacaagaaggactgcggggacctggtggccatcgtcctcctccgcctcctcctctctgcatgcgcgtcagag

SEQ ID NO: 477321 - DNA, 75 bp, Homo sapiens
gatggaggagctggtggtggaagtgcggggctccaatggcgctttctacaagagcctggagaaagttcttgtgga

SEQ ID NO: 477322 - DNA, 83 bp, Homo sapiens
agctagccatcttctaattttcattccttcaaaggagaataaaggcagccccgttgatgactgaaaatgacaaagcatccacc

SEQ ID NO: 477323 - DNA, 51 bp, Homo sapiens
gctggccgggcccaggtcccttcctccctatgtgttctcatttcacccaag

SEQ ID NO: 477324 - DNA, 99 bp, Homo sapiens
cagagttgctccaacagcaaatattttttcccagagttaatagagtggatacaaccttgctgaagatgaagaatatacaatattgaggatatttttttc

SEQ ID NO: 477325 - DNA, 100 bp, Homo sapiens
ggcttttgcaaagaatggtgaaatacttcagatcagtgtggggaaggtagatgtcattcaagaaccaggtattggatcaggagtcaattttcagttgaac

SEQ ID NO: 477326 - DNA, 82 bp, Homo sapiens
aactagaggcagggtcatccttgcccttgtcctcccctttcatccctatgtggaaaacgatgatctcaatgccacccaccaa

SEQ ID NO: 477327 - DNA, 82 bp, Homo sapiens
ccgggaggaaggaacgaggcaaggagctaaagcagcgtgcgttcagccctgggatatgtgtcacaaagatgtctacacggaa

SEQ ID NO: 477328 - DNA, 100 bp, Homo sapiens
cccttgtttaggctctcggaaaccagaccaaccctatgaatggctttcatataaacagaagcgtaaaagatgtgttgttttcaatcaaggtgaattggat

SEQ ID NO: 477329 - DNA, 98 bp, Homo sapiens
ccaggagcaggtggcagatctcaacaaacaggccacgacttatggcatggccgacggtgacttcgtcaggtcagaatggcggcagtggagcatcgtca

SEQ ID NO: 477330 - DNA, 82 bp, Homo sapiens
agccgacaacgccttcatgctgctcacgcaggcatgttatttgaaagcaattgagacgcaaccgaactttgcagtagcttgg

SEQ ID NO: 477331 - DNA, 110 bp, Homo sapiens
ccgacatgttcacgcacgggatccagagcgccgcgcacttcgtcatgttcttcgcgccctgaggctgggaggcggcagaatgcagccagaggagggcacaggctggctgc

SEQ ID NO: 477332 - DNA, 74 bp, Homo sapiens
ggagattctacacgccaggtggtggtgcgctcaggacatcaaaggccagttctggaatgatgacgactcggagg

SEQ ID NO: 477333 - DNA, 80 bp, Homo sapiens
agagggatccttcacccgtgtctggtgaccattgtgaggtagatattttgttctaattttccagatgaggaagctgagac

SEQ ID NO: 477334 - DNA, 100 bp, Homo sapiens
ggcgggggacaagtcggcgccccagagcggacgagatttgagttctgtgaacctgcatttgttgttggtaattgcctccagatagcttctgacagtcatc

SEQ ID NO: 477335 - DNA, 98 bp, Homo sapiens
cccaaaggcgactcgacaccgtcccagctgaagagagtcacccacaaaagctgtatataatgccagacattggaatcatccagattcagaagaactgc

SEQ ID NO: 477336 - DNA, 83 bp, Homo sapiens
tgccacttgtacccgcagacattatgaaaggcccaggctgcaagcacaaaggaagtttgctcagtctcagccgaatagtccca

SEQ ID NO: 477337 - DNA, 83 bp, Homo sapiens
ggacaaaggtggcccagaattttccagtgccctgaaaaataaagtgagcttgtagtggacaaaacaaagaggaaaaaaagaag

SEQ ID NO: 477338 - DNA, 100 bp, Homo sapiens
ccactaggcatcattgtgaaagaattgactggtgacatgcagttgtccaaaagtgaaattttacgaactcaggaatattgtaatacagtccagctagatt

SEQ ID NO: 477339 - DNA, 100 bp, Homo sapiens
cggctggcggcgctcgccgccttgggcaggacccacctcgccttcctcccggcgtggcagatgctccaggtttggacatatttgactcttttccccccag

SEQ ID NO: 477340 - DNA, 101 bp, Homo sapiens
gcaggaaagccccagccacccatcaaatcagagagaaggaatccaccttcttacgctatggcagcttccaaacagtttcataatgaggtcctgaaggccca

SEQ ID NO: 477341 - DNA, 100 bp, Homo sapiens
cgcgtttccacttcagagatctgagttttgccgaattgacaagcccctgtgtcacagtgaggatgagaaactcagcttcgaggcagtccgtaacatccac

SEQ ID NO: 477342 - DNA, 83 bp, Homo sapiens
gccgagttcaacatcctcctggccaccgactcctacaagggcgaccattgacgaggtggagacggacgtggtggagattgagg

SEQ ID NO: 477343 - DNA, 83 bp, Homo sapiens
ttcaggccattaactcagcagcgcccactggaggtgggagctgtactggaacccaaggagatgttcacaaggaagatggaaag

SEQ ID NO: 477344 - DNA, 50 bp, Homo sapiens
ggaacatctcaccaatttcaaatcggctaatcacatatggctctgataga

SEQ ID NO: 477345 - DNA, 83 bp, Homo sapiens
ggagccgcaggcgcagacccacccgccatgaagccccccgcagctccacggagaagaactgctgcgtgcggcagctgtacatt

SEQ ID NO: 477346 - DNA, 100 bp, Homo sapiens
ggaagaaataggaggcggtcagacagccttaaagagcccagcagtgagaaactttcacaatctgtaatagatggtgtgactgttctaggaggtcaattcc

SEQ ID NO: 477347 - DNA, 75 bp, Homo sapiens
cttaaggagcgattaggcatgtcagctgatccagataatgaggatgcaacagaattcaattcgtcataatctgtc

SEQ ID NO: 477348 - DNA, 87 bp, Homo sapiens
cggcggcggtaggaagccggagacagcagggtgacagcttggtgctaacagtggtttgcacatcatcatctttgatgaaattgatgc

SEQ ID NO: 477349 - DNA, 75 bp, Homo sapiens
agaactctcggatgagatccaagtccaggcgttcctcttgatccaaagtgagaagatgaaaaatgattacattta

SEQ ID NO: 477350 - DNA, 110 bp, Homo sapiens
agagcaacgccagagcccaggtgcccagaggactttcttccagcttctgctgtccttctttgtggagagcaagttataaaccggtggaccataagcttatttggctaccc

SEQ ID NO: 477351 - DNA, 90 bp, Homo sapiens
ccggggagacggacgcgtttggcaacagcgagggcaaagagctggtggcctcaggtgaaaattacatggacacagaacagtatgaagaag

SEQ ID NO: 477352 - DNA, 100 bp, Homo sapiens
cggattcagctctttttggccaggcttttccctctgtctgagaaatcagcacaagtggaagtgctgtccgctgcactacgtgcttccagcctggatgcac

SEQ ID NO: 477353 - DNA, 75 bp, Homo sapiens
gccggggccggccagaagcgggcggcgcgggggagatgctcatatgttagatttgatatcattcgaaggatccta

SEQ ID NO: 477354 - DNA, 108 bp, Homo sapiens
caggaggaggtgccgctgccgtggccgcccggctgccgggagccgacagcttcgcgccggaatgtgaaagatgttgcagaagtgttccagaagtggctgaagatagaa

SEQ ID NO: 477355 - DNA, 98 bp, Homo sapiens
ctgactgctgccatggggctcaagacccggtgtggaggcaagctgggcttcctggcctgtctttggtgcaacactaacaaggcttgtctggactaccc

SEQ ID NO: 477356 - DNA, 98 bp, Homo sapiens
gctgccccagcagcctgtgttcgtagtgcaagagtgtctttggtgcaacactaacaaggcttgtctggactacccagttacaagcgtcttgccaccgg

SEQ ID NO: 477357 - DNA, 75 bp, Homo sapiens
gagtggagaactgccttctgaaaggtggaatcctactcagaatgtgaggaggagatgttaaagtaacccatcttg

SEQ ID NO: 477358 - DNA, 75 bp, Homo sapiens
gagttcaacatcctcctggccaccgactcctacaaggactggctgactcgctatggttacctgccgccaccccac

SEQ ID NO: 477359 - DNA, 90 bp, Homo sapiens
gccagtgaacaacgcggacttcatcatccctgtggagattgatggggtggtccaccaggtgtatgtgctcaagaggccttatgtggatga

SEQ ID NO: 477360 - DNA, 75 bp, Homo sapiens
cagccctcccaggtggagtacacggcagactgtggctttttctcaagtatattttccagtctgtttggaactcgg

SEQ ID NO: 477361 - DNA, 82 bp, Homo sapiens
aatcatttcccgggaatgctgtgcaggcaaaaggaaaacaaaggcattcaggagccacagctgaccccgcactacatctacc

SEQ ID NO: 477362 - DNA, 83 bp, Homo sapiens
cgctgctcctcgccctcaagttcacctgcaggtcaaaatgcagatcttcgtgaaaacccttaccggcaagaccatcacccttg

SEQ ID NO: 477363 - DNA, 90 bp, Homo sapiens
aacaatatcaatttattttataccactgaaccgtgcacttcaaaatggttaagatggcggtggatgaattttattccaagatagaaggcc

SEQ ID NO: 477364 - DNA, 83 bp, Homo sapiens
tcgcgccggctatggccgtgccctggggctgagccctcagacctcgaagtagggggaaaactgcagtggaagatgaggacagc

SEQ ID NO: 477365 - DNA, 100 bp, Homo sapiens
ataaaccaagcactctagatgccctcaactatgctctccgctgtgtccacagcgttcaagaagtggtccaaaggcaaagttcgggacaagctcaataact

SEQ ID NO: 477366 - DNA, 103 bp, Homo sapiens
ttcagtggtgtgcagacagaaatttcaccaagccgcaggtggtgttcccactgatgaagagcaggcgactgggttggagagggagatcatgctggctgcaaag

SEQ ID NO: 477367 - DNA, 74 bp, Homo sapiens
gtgagttcttcggccacaatgcggtaatgagagatccaaacaccaagcgctccaggggctttgggtttgtcaca

SEQ ID NO: 477368 - DNA, 50 bp, Homo sapiens
ccaatcgtgaaaactatattcacaggatctcaaagatttcatgagacaag

SEQ ID NO: 477369 - DNA, 49 bp, Homo sapiens
atcaggtagatacagcaccaacggtatgagaaagtgccagtcatcttgg

SEQ ID NO: 477370 - DNA, 75 bp, Homo sapiens
tccgaactcttaacatcaatgggcaaatccccacaggagaaggacactggagaggggtctcctgaaaaccctgca

SEQ ID NO: 477371 - DNA, 97 bp, Homo sapiens
aaaaaccatctggtgctgtggattgcaaccttgaatcctatatatgcaaacagatttgcagtaccaacctatgcagccaagcaacctcagcagttcc

SEQ ID NO: 477372 - DNA, 78 bp, Homo sapiens
ctccctcccgcgcgtgctgcgggtctgctcgggggtctacttcgaggaaactgattattgatgagaagaagtattact

SEQ ID NO: 477373 - DNA, 100 bp, Homo sapiens
gaggatgcagcagatgtcagagcaggttctgatggtcctttggctaccagcaaaccagtccctgcagaaaagtcaggtcttccagtgggtcctgagaacg

SEQ ID NO: 477374 - DNA, 138 bp, Homo sapiens
ccaagattaatgccatgctcatggcaaaagggaagctgaaaccaactcagaatgcttctgagaaggtatggctaccatattactaaagcttcctattttatctgccatgatcaagaaaccattaagaaattatttgaa

SEQ ID NO: 477375 - DNA, 75 bp, Homo sapiens
ggctgcagacttggccaaatggacgggactattaagatgtccagctcgccgctgtccaagaaacgtcgcgtgtcc

SEQ ID NO: 477376 - DNA, 50 bp, Homo sapiens
cttcacaggaattgccatttgggagaacattaatatctgctggagtcctg

SEQ ID NO: 477377 - DNA, 97 bp, Homo sapiens
gaaaattaaccacagcttcctgcgggaccacagctatgtgactgaagagcaacctgcaagcaatcaaggccagtctaccctgcagcccttgccgcct

SEQ ID NO: 477378 - DNA, 100 bp, Homo sapiens
cggatgccctgcagtacctgcagaaggtctctggagacatcttcagcagggtggcccagttgaaatccttcccttcctctaccttggaagtgcctaccat

SEQ ID NO: 477379 - DNA, 100 bp, Homo sapiens
ctgaggacatggggaccacagtcaatggagatgtgtttcagagaggccaatgagacttgaaccctgagcctaagttgtcaccagcaggactgatgtgcac

SEQ ID NO: 477380 - DNA, 100 bp, Homo sapiens
ttacagtttcatcagaaagggagaagtatgaattccactggatctgggaaaagtagtgggacagtttcaagaaactcatcactgctatatatgcagatta

SEQ ID NO: 477381 - DNA, 100 bp, Homo sapiens
cttgcatatatttgactgcaagtccgggcccaccagctggtcttgccaccttgcgacgtagtgatcaaagccgttgctgactatgtacgcaacattcagg

SEQ ID NO: 477382 - DNA, 96 bp, Homo sapiens
ttcctcgtcgagcgcaacccaagttcacacaaaagatgttggacaatttctacaattttgcttcatcatttgctgtctctcaggcccagatgacac

SEQ ID NO: 477383 - DNA, 75 bp, Homo sapiens
ctggcatcagctctattcaaatctggttcagattttacagctctggttgctgggggactatgacaaggtcaaggc

SEQ ID NO: 477384 - DNA, 82 bp, Homo sapiens
tctgagctcagacctgccaatttaccagagataattgataacaccctgtaacagctgattgctgatgtatattcaagatgag

SEQ ID NO: 477385 - DNA, 100 bp, Homo sapiens
ctgagtggtttttcggatcatgtctggtggctccgcggattataacaggcagaagctcctcctggggtagagacagatcttattgatgttggattcacag

SEQ ID NO: 477386 - DNA, 51 bp, Homo sapiens
aatcgcctgctttgattcattgaaagttttgggtcctgctcctcggtggtg

SEQ ID NO: 477387 - DNA, 75 bp, Homo sapiens
cttccttaggcgtggtgaggctgccgggtctcctgttccaactccacctagatggagtctcactctgttgcccag

SEQ ID NO: 477388 - DNA, 80 bp, Homo sapiens
gcacctgcacacctggatccaggataacggaggctggggtcatctttctgaaggattggttactaaatggtacagatctc

SEQ ID NO: 477389 - DNA, 58 bp, Homo sapiens
gaacctctggaggaacggctctacctccagatcactcctctgccaaagatcccaacaa

SEQ ID NO: 477390 - DNA, 98 bp, Homo sapiens
tggcactttccaaagtggatgcctccggggaggccgccatggcatcagatgaaggcaaactttttgttggagggctgagttttgacaccaatgagcag

SEQ ID NO: 477391 - DNA, 74 bp, Homo sapiens
agattctcttgaccatgtgacatctgatgctgtggaacttgcaaatcgaaggaaagctggcagttaaggaaagg

SEQ ID NO: 477392 - DNA, 96 bp, Homo sapiens
cctggacttctacgacttcgagccgctgcccaccctccccgaggacgaggacaaggactgccatccaccatggtgaagctgggctgcagcttctct

SEQ ID NO: 477393 - DNA, 82 bp, Homo sapiens
cttgttcccccaaatgtctgactctgactctcggactgagaaacgcaaggtgaaaggaaagcaagccaggatggatatttac

SEQ ID NO: 477394 - DNA, 100 bp, Homo sapiens
ctgagctagcagtgagcaccttttggcccaatgaatatcagggagcgcttgtgagtgccttggctgatgacaccttacacttatggaatttacgtcagaa

SEQ ID NO: 477395 - DNA, 83 bp, Homo sapiens
cggaaaacctaaccatgaagacttgaacttaatacagcaagaaagaccatcaagtttaccaatgaacagactagccactttgc

SEQ ID NO: 477396 - DNA, 83 bp, Homo sapiens
agagcggcagtttcgtgagcgacctcagcagcctcctgacaaggtgatccgggcgggccccgcaggaattttatcccctcacc

SEQ ID NO: 477397 - DNA, 75 bp, Homo sapiens
ggcaggctctggactcctaaagctctggagcgatgtttctttctcagcaaaatagaggagaagcttacccctctt

SEQ ID NO: 477398 - DNA, 87 bp, Homo sapiens
gctcgatcttgggacccaccgctgccctcagctccgagtccagggcgagttacagaatgtctgaaggggacagtgtgggagaatccg

SEQ ID NO: 477399 - DNA, 82 bp, Homo sapiens
gcagcgcctgttcccggggcagatccaggttcaggatattagaaatggctactccccagtcaattttcatctttgcaatctg

SEQ ID NO: 477400 - DNA, 99 bp, Homo sapiens
accaggaaggtgagatcttcgacacagaaaaagaggatgccccagtgaagttgtgtgactttggatttgccaagattgaccaaggtgacttgatgacac

SEQ ID NO: 477401 - DNA, 75 bp, Homo sapiens
ggaacaacgtcggcgagcgggattgatccaaatcctgatcagtcagcagatgatagaccatcctgcccctctcgt

SEQ ID NO: 477402 - DNA, 75 bp, Homo sapiens
gcgcggcagtatccttggggcactgtgcagggaaacctggacaagcatgaagaactagaggagcttgtagcaagg

SEQ ID NO: 477403 - DNA, 75 bp, Homo sapiens
gagcgaacccgagagcgtggagcgggctgggccaggctgggtccgatacgccgagcgggtgctgggtcgccccat

SEQ ID NO: 477404 - DNA, 50 bp, Homo sapiens
gcggagagcaacagcgcgccggtcactcctggaagcaaggcggctctagc

SEQ ID NO: 477405 - DNA, 100 bp, Homo sapiens
taccggctgacctcgctgtacgccgagcacccaggcgactgcctcatcttcaagttgatattcactgatggactccaaagaatcattaactcctggtaga

SEQ ID NO: 477406 - DNA, 50 bp, Homo sapiens
attgaggactgccagctggcgctgcagatgcgtctgttactagagtggag

SEQ ID NO: 477407 - DNA, 75 bp, Homo sapiens
ttttaatcctgggaatcccgatgcatttcatgagaaacatgttccaaatcaagtatagatattgagaatgggttt

SEQ ID NO: 477408 - DNA, 75 bp, Homo sapiens
gagatccaagagattcagtatcactcgctcccttgatgatcttgagcattcctctgaatattgatttgctgaata

SEQ ID NO: 477409 - DNA, 83 bp, Homo sapiens
ggcggtgtgaactgtgaggagttcgccgagttccaggtctccggataactgtgctcctgacatccttccttatggttttggga

SEQ ID NO: 477410 - DNA, 80 bp, Homo sapiens
aacccaacctagtgggtgtaatacatcatgaactgcaggacactttttcaaaaatggcaatggtatcagaattcctcaag

SEQ ID NO: 477411 - DNA, 83 bp, Homo sapiens
aattatgccctgttggttccaatgctgggattggctgcttttcgagagcatatagattattgtggatattctgttcttcctat

SEQ ID NO: 477412 - DNA, 100 bp, Homo sapiens
aagggcaaagaaaaggagccagggacggctcttcctcagctgaccacagtggccgagaagtcgcgcgtgctgcagctggaggaggagctcaccctgcgcc

SEQ ID NO: 477413 - DNA, 74 bp, Homo sapiens
cctagaagaaatttggagtgtgcgtgcgcgccgagcgcggagctggagtttgttcagatcatcatcatcgtggt

SEQ ID NO: 477414 - DNA, 50 bp, Homo sapiens
caaggtgggaaatagccgcttcagcttcctgcctgacacagctcacttca

SEQ ID NO: 477415 - DNA, 124 bp, Homo sapiens
cgtgtcttggtctctaagagagtgggcactgcggctgtctccttgaaggttctccctgttggttctgattagttcaaggagcagggacaagttacaggaatgttctccaagcagcaatccaaaa

SEQ ID NO: 477416 - DNA, 83 bp, Homo sapiens
agaagcactatagatttagctaaacatccatgtaatgcctcaatgccctgccaaggtaaccctgctggggtcagttatcttca

SEQ ID NO: 477417 - DNA, 82 bp, Homo sapiens
ggaaaaacgaagaggaaacagaaattatgagtaagcagcggaagttgtttttcagaagaagtgaagtcaagatgaagaacca

SEQ ID NO: 477418 - DNA, 75 bp, Homo sapiens
agcgaagccttgaaaaagctgccctgagacggtgtcccgccgaaaggcaaatctaagtaggtctttgagagacac

SEQ ID NO: 477419 - DNA, 114 bp, Homo sapiens
ctagaagacttattataaatgaagatctggacagtggcacacagataccgtttattaaaagagctgtggctgctgtgattctaggattgaaaaagaggaaatgattccaaagca

SEQ ID NO: 477420 - DNA, 100 bp, Homo sapiens
ggtaccgtgtgctacagatcgtcaccaaccgtgatgacgtccagggctatgccgccaagaccgtctttgaggctcccagccccattgccaataccttcct

SEQ ID NO: 477421 - DNA, 83 bp, Homo sapiens
ggccgagctgctgcgcagctcctgcccgcaattctgtggtgttcttggtcacacatttatggagtttctgaagggcagtggag

SEQ ID NO: 477422 - DNA, 83 bp, Homo sapiens
ctgggaaggattctgagcaagagaatgggctgggcagcctgagtcccagtgatgtcaaaatgcagatcttcgtgaaaaccctt

SEQ ID NO: 477423 - DNA, 100 bp, Homo sapiens
ggcttgggagcccggaccccgccccctgcggcccagcgcccccagtttgtggggacattcatggacaattctttgatttgatgaagctctttgaagtcgg

SEQ ID NO: 477424 - DNA, 100 bp, Homo sapiens
gcaggagatcgagagcaccgacaccgcctgtgtggggcccaccctccggaagatgagaatgtgcctactgctcctgatcctccaagtcaacatttacgtg

SEQ ID NO: 477425 - DNA, 101 bp, Homo sapiens
cagggattccttcaaggtttactgcaacttcacagccggggggtcgacatgcgtcttccctgacaagaagtccgaagggatcttccctggcaactgggaca

SEQ ID NO: 477426 - DNA, 100 bp, Homo sapiens
cagtgagatgctgcttcattacagccaggaggactcttcggacggggacagagagctgatgaagggcagccaggccagccaagatgaaattacagcatca

SEQ ID NO: 477427 - DNA, 100 bp, Homo sapiens
ggccaacatggcggaacgcaggagacacaagaagcggatccagcacgttcacgtccatgttcttcccaggaaggctggagactttcacaggaatgacagc

SEQ ID NO: 477428 - DNA, 76 bp, Homo sapiens
gtcagagtgccggaccccagcacacagaagccgagacggtgggtttggaggatttgggacaacatctacaactgca

SEQ ID NO: 477429 - DNA, 87 bp, Homo sapiens
tccctgtgtctgctggaactgttggagccgcagtgcagcctaattttgacttcaggtgaagacattcagtgaagcttgcctgatggt

SEQ ID NO: 477430 - DNA, 100 bp, Homo sapiens
ataagcatgctattaaaaaacggcaggagtctcagtggctggcacatgtgtatcaatcccaaggaatgatgagagctgcagagatgtgttacagaaagag

SEQ ID NO: 477431 - DNA, 100 bp, Homo sapiens
cctctctggagctggagacacctcaatctctgaccgtaaatccaaggtcccatgcagccctcgggagagacccagccaccatccaactcccaagttaaag

SEQ ID NO: 477432 - DNA, 82 bp, Homo sapiens
tgaagagcgacaagccgctggcagccgcggatctcaccgccgctcaggagagcagactagccagcagtggtgctctgagagt

SEQ ID NO: 477433 - DNA, 74 bp, Homo sapiens
aacaagggatccattgtctggcaggaggtttttgatgataaagcaaagctacaagtggaccttctagtgcagtt

SEQ ID NO: 477434 - DNA, 75 bp, Homo sapiens
ccccagcatgaagaccccggcggacacagactccccagacaggccctggaacccccccaccttctccccagccct

SEQ ID NO: 477435 - DNA, 97 bp, Homo sapiens
ccagccatggcagattcctccgggcagcagggtgtcatggagaaactccagctgggcccagagattctgcagcgggaaaatccaaggcttatttatg

SEQ ID NO: 477436 - DNA, 101 bp, Homo sapiens
gcgaagcgggcgagcggtggtttggacgccggcggagacgcgggcgaggtgtccctggccagtgtccttccacctgtccacaagcatggggaacatcttcg

SEQ ID NO: 477437 - DNA, 100 bp, Homo sapiens
ctcctcctcggccagcaacagcgaggaatagccaggccagaagaaggaaggcctgtggtgagtgggacaggaaatgacatcaccaccccaccgaacaagg

SEQ ID NO: 477438 - DNA, 100 bp, Homo sapiens
gccagatcaacctggagctctacgcctcctacgtttacctgtccatgctgcatttagttcactggaattctgtgaaataccaaaattacaaggaagctgt

SEQ ID NO: 477439 - DNA, 83 bp, Homo sapiens
tggctggtctctgccgcacactgctacatcgatgacagaggattcagggggagtcggtgaagtacttcctggacaacttggac

SEQ ID NO: 477440 - DNA, 83 bp, Homo sapiens
tctggtctctttttggagctacagtggacaggcatttgtgacaggaaccctaaggactctgcaatatgaataattccctagag

SEQ ID NO: 477441 - DNA, 83 bp, Homo sapiens
aagctcatggcctgccactgcgtgcacttcccagactcccggccagccatcgaggacctcaagtactgcctggagaggacgga

SEQ ID NO: 477442 - DNA, 100 bp, Homo sapiens
tgctcccgtggcctgggattcacaccaggaaagaacgccacgaagaaggaatggttgaaatcacaaagattagacacctttttagataggtgttcttcag

SEQ ID NO: 477443 - DNA, 96 bp, Homo sapiens
tctgacttcctccagtctgaatgacatttctgataaaccggagaaggaccaggaaaccacccctactcctaatcccccgactacagaagaggagaa

SEQ ID NO: 477444 - DNA, 100 bp, Homo sapiens
ccgagccgagggccaccccctggtcctctgccctcgcgccccgctagggccaggttgcagaagttttacaagtacctccaatgagagtatatgaagtagc

SEQ ID NO: 477445 - DNA, 76 bp, Homo sapiens
aagctggtgggcactcagcaccctctgcttaccacagccagtttgcagttaacatgtttcgaacattaccaccttc

SEQ ID NO: 477446 - DNA, 76 bp, Homo sapiens
cggaagtgcagctgcctcagttcttagcgcagcaaagttaaacctcctccacaaatttcacccagcaaatcgatgg

SEQ ID NO: 477447 - DNA, 75 bp, Homo sapiens
tccagctcatcgctcgcatcgctgccgccaacgggatcgccaaactgaggcagcaactacaacgcagtaaacaga

SEQ ID NO: 477448 - DNA, 100 bp, Homo sapiens
gtggaagctatcaggaccaattacaatgacagatacgatgagtgtggggtgatcagccccagatttgacgtgcaactcaaagacctggaaaaatggcaga

SEQ ID NO: 477449 - DNA, 90 bp, Homo sapiens
gcagcatttgccaaggagacatccctcttaggcactcaaggagttgcccctggtcctgtaattggacttcaggcaccatctactggtctt

SEQ ID NO: 477450 - DNA, 75 bp, Homo sapiens
gtgagaacaccctgcagttctacaatgagagggacgtccagatcggtgacatcgtcacagtgggcgagtgccggc

SEQ ID NO: 477451 - DNA, 100 bp, Homo sapiens
agcaggtcacagtggacgaggtgttggcggaagaaaatcctgagcgagcagctctgtactttgtttctggcgtgtgcatcgggctggtgctgaccctggc

SEQ ID NO: 477452 - DNA, 75 bp, Homo sapiens
cggagccctcggggcggcggactggctcgcggtgcagatgagattgtggggaacctgggtgaaggcacctttggc

SEQ ID NO: 477453 - DNA, 101 bp, Homo sapiens
gcctctgtccctttcccggatggaggctcctcctgtgcagcgcagctactgatggcagcctggctttctgggatctcaccaccatgctagaccatgactcc

SEQ ID NO: 477454 - DNA, 111 bp, Homo sapiens
caaattaagaatgggtctgtgatgtcacatctaggagcatctacccatggacagacatgtcttcccatggaggcacttggaggtgtcccaggaagtcagccattactcccc

SEQ ID NO: 477455 - DNA, 98 bp, Homo sapiens
tgtgctggccttagtgccccaggatcagggaggactggagccaccatgttggtgataccccccggactgagcgaggaagaggaggctctgcagaagaa

SEQ ID NO: 477456 - DNA, 83 bp, Homo sapiens
ctctgcagtgccaaccaaatcctaatatcaatccacaggatataaaggtgtgtgtggtttcagcgcagcatggctgtggtcat

SEQ ID NO: 477457 - DNA, 138 bp, Homo sapiens
tgtgctacaacgtcggtcagaaaatgaagagtttgttgaagtgggaagattggggccttctgattattttggaatcatattgacaggtcatgaaaatgagaccaaaagatctctggaagcgattaatgataaaatttc

SEQ ID NO: 477458 - DNA, 90 bp, Homo sapiens
gtgatcgtggaacagcctaagcagtcaatcaccttctgctgcttggatgggtggatttggtgctcagcctccccaaggacaagctcctcc

SEQ ID NO: 477459 - DNA, 78 bp, Homo sapiens
ctgtctgtagtgtgcctcctccaggcagcagaagaagcctttgtaaatgacattgacgagtcgtccccaggcactgag

SEQ ID NO: 477460 - DNA, 90 bp, Homo sapiens
atgtttcccttggtcaaaagcgcactaaatcgtctccaagcttgatggaccagacaaataggatgatggctgcccccacacaataaatgg

SEQ ID NO: 477461 - DNA, 82 bp, Homo sapiens
caccgtctggcacagctgagccctatgatggcaccaagattaaaaggagcccaagccccatctcatcctagcacaccctcct

SEQ ID NO: 477462 - DNA, 114 bp, Homo sapiens
ggggtttccggctgcagggcggtaaggatttcaacatgcctctgacaatctctagtaaaactgtcgctgaaaagcaggagaagagaaatcaggatcgcttgaggaggagagagg

SEQ ID NO: 477463 - DNA, 100 bp, Homo sapiens
gccagtcagagaagtttggcatataatcgaatagttgatgccctaaatgaattcagtgaaattggagcgatttgaaattccaatcaaggttcgattaagc

SEQ ID NO: 477464 - DNA, 82 bp, Homo sapiens
cggaggaacaaaggcgacccaagacacccagagagggacagcaccctcatcacatgtgtggattctgggattctcagagtct

SEQ ID NO: 477465 - DNA, 100 bp, Homo sapiens
agccgccgccagagaggcccgcccaccagttcgcccgtccccctgccccgttcacaatgtggctccgctgccggatgggagtgccccagtgtgctggatg

SEQ ID NO: 477466 - DNA, 83 bp, Homo sapiens
ggattctcgacctgctaacagaactggaccttttcgcaaaatgatgcttcaacacccaggccaggtctctgcctcggaagtga

SEQ ID NO: 477467 - DNA, 90 bp, Homo sapiens
gtctggattttcctgtagaactgagggcagaatgctgagatgtataaactgtcttcagagcaattccatgaggcagcctcaaagatggag

SEQ ID NO: 477468 - DNA, 90 bp, Homo sapiens
gctgtacaccctcaacaaacaccagcgctttggttggcgtgcacagtgtcatgaagcacgatgccatcatggatggagccagcccagatt

SEQ ID NO: 477469 - DNA, 51 bp, Homo sapiens
agagtgagcgagcggacccgcgatggagttgcatgctgagaatttgaaaaa

SEQ ID NO: 477470 - DNA, 75 bp, Homo sapiens
ggatttgccaggaatgaccaaggttatgagtccagggacaatatggagctcatagtgaagcagatttctgatgac

SEQ ID NO: 477471 - DNA, 74 bp, Homo sapiens
acaagtattgctgaaaatgagtgctgtagatgacatgatagcagctattgacctgaaaagtggttctggaaaag

SEQ ID NO: 477472 - DNA, 100 bp, Homo sapiens
ccagcagatgaagagggaggcctgagaggctgctgttctaactcgctcccaggtagctttggatatgttaaatcctcatgttactttgcctgttttttac

SEQ ID NO: 477473 - DNA, 89 bp, Homo sapiens
ggtcggccggaaggaggagaggtgctgtgctgtgtatgaagaggcagtgaagactctgccaacagaggagaaggcagagcccccccagg

SEQ ID NO: 477474 - DNA, 86 bp, Homo sapiens
gaaagtttcgttttcgcaaagaaacgaacaacgctgctattataatggtattattcagcacgacttgattttctcccttcaacaaa

SEQ ID NO: 477475 - DNA, 102 bp, Homo sapiens
gcaaagccgagaaggagaacaccccgagcgaggccaaccttcaggaggaggagtccacaagaatcggaatgtcagttaatgctattcgcaagcagagtacag

SEQ ID NO: 477476 - DNA, 98 bp, Homo sapiens
cctaggcattttgctgtctcctcctaatacgtggttttatgaagaaacagaaagcagtgatgatgttgaagtgctgactctcaagaaattcaaaggag

SEQ ID NO: 477477 - DNA, 100 bp, Homo sapiens
cagcacatggtcttactggagcagccgccggcacaagcacccctcgtcacagattactctcgtggctttggtggccggtacggggtggagaaggataaat

SEQ ID NO: 477478 - DNA, 80 bp, Homo sapiens
tgtctgtctgtgcaggtggtcaactgcagccgtgtattcagccttagaacccagtgacttgattgtaaaaatttacagag

SEQ ID NO: 477479 - DNA, 82 bp, Homo sapiens
caggcagaaggcctctctcctgatacagcaggcgctcaccatgttccctggaggttttaaaatcaaagatgggaaaatcgga

SEQ ID NO: 477480 - DNA, 100 bp, Homo sapiens
aatcacagtgctgagtcagtgtgacagtccatatgtaaccaaatattatggatcctatctgaagatgtccggtctgtgctacgacagcaaaatgttccag

SEQ ID NO: 477481 - DNA, 88 bp, Homo sapiens
attgggacaacattcagacccatttccagtcatgactgctgcagaagaatattttgcctgctggaacctgctgtatctactcaagagt

SEQ ID NO: 477482 - DNA, 50 bp, Homo sapiens
ccgggagaacctgcggcggccggagcgttcagagaagccgaactgggatt

SEQ ID NO: 477483 - DNA, 75 bp, Homo sapiens
ttgaccccttgtccagttactctaacaagtctggagtgtttcctgaggttataggcgggtgtttgaggagtacat

SEQ ID NO: 477484 - DNA, 82 bp, Homo sapiens
tggacttgaaagaagctgcagcggaggaaggcgagaatgctatagttatccatgaagtctatgaagaaggggcagcagccag

SEQ ID NO: 477485 - DNA, 90 bp, Homo sapiens
tcctgcagaagaaaatggatttcgttatatcccctttagaatatatcaggttattggagtgatgagtaaagaatacataccaaagggcac

SEQ ID NO: 477486 - DNA, 101 bp, Homo sapiens
agtgaccgtggtggcttcaataaatttggtggtgctggagaatctggtaaaagcaccattgtgaagcagatgaggatcctgcatgttaatgggtttaatgg

SEQ ID NO: 477487 - DNA, 75 bp, Homo sapiens
tttgttaaggattccaagtaactcttatttggcttgttagcagtggcacaagatcttacagaggatgaagaaaca

SEQ ID NO: 477488 - DNA, 100 bp, Homo sapiens
gggaagccctgagaggactgagaggatgggaaattctctgctgagagaaaacaggccctctttggattccagtacgatgcatcagaccataccatggcgt

SEQ ID NO: 477489 - DNA, 100 bp, Homo sapiens
cgggtggcggctcgggacggaggacgcgctagtgtgtcatggagaaactccagctgggcccagagattctgcagcgggaaaatccaaggcttatttatgc

SEQ ID NO: 477490 - DNA, 74 bp, Homo sapiens
aggaggagctggcctacctgaggaagaaccacgaggagggtaaaaaacttgttgctgcaagtcaagctgcctta

SEQ ID NO: 477491 - DNA, 75 bp, Homo sapiens
gtttcatctgtggatggagtattggaaaatcaggaaaatgtttccaacctggtgattgaggacacagagctgaaa

SEQ ID NO: 477492 - DNA, 100 bp, Homo sapiens
cctccaccctggcaggaatcccaatttgcctccacttagtgagcggaagaatgagttgcatgctgagaatttgaaaaatgaagatgatgtagacactgga

SEQ ID NO: 477493 - DNA, 75 bp, Homo sapiens
aatggaacatacgggcaagtttataaggctatgtggttgatgttgcagaatgatgagccggaggacttcgttata

SEQ ID NO: 477494 - DNA, 100 bp, Homo sapiens
aattcagatgtggaagtcatgcctgcacagtcacctcgagaagatgaagaaagcagcattcaggcccacccttcctccattctgagcacataaaaacccc

SEQ ID NO: 477495 - DNA, 75 bp, Homo sapiens
gacccggcccgtagtgtggaagcagcttcagatcaaatgatgccgtttggaaaaatttcccagcagttgtgtggc

SEQ ID NO: 477496 - DNA, 100 bp, Homo sapiens
aaagaggctggcccaccccttctccttggccgtctttgaggtggtcgttctcgttaccggaccacttcttcagccaacaatcccaatctgatgtatcagg

SEQ ID NO: 477497 - DNA, 100 bp, Homo sapiens
gggctgttttcccatccattgtgggacgtcccagacatcaggtacaagtaagttagtggataacagaccacctgccctagcaaaattcctcccgaatagt

SEQ ID NO: 477498 - DNA, 100 bp, Homo sapiens
gggatggctgctcagctgctgactgatgaggcactgatccccatattaaggtttctggaaagaaagaagatgttaaagaagccaaggaaatgatcatgtc

SEQ ID NO: 477499 - DNA, 101 bp, Homo sapiens
taagcttgacattacagccaagatggtgctgtcccagagacaacgagatgaacttggaatgcagtagccctctgggcctgggatattgtggttgataactg

SEQ ID NO: 477500 - DNA, 122 bp, Homo sapiens
atactggaagaacctcacctttgtctccccgatctacggggctgacatcagcggctctttgtatgatgacctggtcagtgagaaggtcggaggggccgaggggaccaagctggatgatgact

SEQ ID NO: 477501 - DNA, 82 bp, Homo sapiens
caaagcattaggcgtgaagcccccccagaatctctgggaatataagctgggatagatgggcagcagaagatcatgtgcttcg

SEQ ID NO: 477502 - DNA, 100 bp, Homo sapiens
ttgttcccctcctgcctcaccactgggtgcccgctggctacgctatgtatgtccctgggaagctgcatgatgtggaacacgtgctcatcgatgtgggaac

SEQ ID NO: 477503 - DNA, 100 bp, Homo sapiens
gttggcctaggcgaagatccggactctgggtgttttgctaccgtgaccgtttaggcaccgaccgtcacgagctaacttcctggaagagctttccgtctat

SEQ ID NO: 477504 - DNA, 83 bp, Homo sapiens
ctggaagctgagggcacgtgtttgcggttcagccctttgatgaccgcagcagatgaactgcctctcctcctccctgcctgggg

SEQ ID NO: 477505 - DNA, 100 bp, Homo sapiens
gttctctctctttcttgttggctctggaggctttggtggaaaacggacatcagacaaagtcaaggcacagctacaaggaacacccttcattggtctctgg

SEQ ID NO: 477506 - DNA, 98 bp, Homo sapiens
cagcgcgcagaggcgggcgcggaggcggctagaaggtgaccgcggatcccagcttcctgcagccagaagatgcagatgcctccagctattacgagtcc

SEQ ID NO: 477507 - DNA, 82 bp, Homo sapiens
agatattgaaacaaccaccatttcaaattttcacactcagaatgaagcccaaactgccaaggagtttattaaaatcatagag

SEQ ID NO: 477508 - DNA, 88 bp, Homo sapiens
ccacttctctacatcccatctcaatcagaattactagattttctctcaaactacgagcgtggaggtcctgaataaccatggtggctgc

SEQ ID NO: 477509 - DNA, 95 bp, Homo sapiens
agcagaaagcagctccataggggaggagagccacgcaggatctcacagctgcagtctaatagtaacacagagactccccatccccaggatgtcaa

SEQ ID NO: 477510 - DNA, 100 bp, Homo sapiens
cgggtccccgcgttcacagccccagcgcagacatgtcatgctgcccaaggacatagccaagctggtccctaaaacccatctgatgtctgaatctgaatgg

SEQ ID NO: 477511 - DNA, 83 bp, Homo sapiens
agactctggaagcccacaaagactcccataaggagggcctgctttcttccccgggcgatgtgcagagatctttgccaggggtc

SEQ ID NO: 477512 - DNA, 100 bp, Homo sapiens
caacagcttcccaaaagatagggattacagaagagaggtgatgcaagcaacagccactagtgggtttgccagtggaacttcctgcctgacacagctcact

SEQ ID NO: 477513 - DNA, 74 bp, Homo sapiens
cgggactacgaccacctcttcaagctgctcatcatcggcgacagcggtgaaatgacaatggatgctctgttggc

SEQ ID NO: 477514 - DNA, 122 bp, Homo sapiens
gcggccgaggcggcggtgtgggcgcgtcaggccgcgacgagggcgctgaggtggctattatcatggaaaactaatttttcccagagaatttcctttcaaacctcccagtatctatatgatca

SEQ ID NO: 477515 - DNA, 100 bp, Homo sapiens
aaacggtgcacgtactacgagacgtgtgctacatacgggctgaatgtggagagggtcttccaggacgatgccttcaattaagttgcagagttctgatgga

SEQ ID NO: 477516 - DNA, 78 bp, Homo sapiens
gagcctctgtgggagccggggccgcggcggcgcgggtgctccgggccgaggccgcgggagtgcatccgccccaaccct

SEQ ID NO: 477517 - DNA, 75 bp, Homo sapiens
aatgaccttggcaacagaccccacagatggaagcattttggacatcacacccctgcaggtggttctgcccaacac

SEQ ID NO: 477518 - DNA, 51 bp, Homo sapiens
gtggagtgtaggtcatatcgccgcgagttgaagtattgataacaccaagga

SEQ ID NO: 477519 - DNA, 133 bp, Homo sapiens
gggtgacaggccgtcgcatcggcaacaacttcatggacggcctcaaagatggcatcattctttgcgagatatggctgtgctggggtttcgtctgtggcctatgggctcctggcccgagagctggagcgggtgg

SEQ ID NO: 477520 - DNA, 82 bp, Homo sapiens
aaatcccacagaggcatctgaggagtttgacttacaaggaatctggagtagatatcgcagctggaaatatgctggtcaagaa

SEQ ID NO: 477521 - DNA, 90 bp, Homo sapiens
gctaaaaacaagactggggctgctcccatcattgatgtggtgcgatcgggttggtacattgtgacctatgccttggggatctaccatcta

SEQ ID NO: 477522 - DNA, 75 bp, Homo sapiens
aacagtttggcgtgcaacatggggcttgagaaagggcatcataggcgagtattagtggaatggctaagagatcca

SEQ ID NO: 477523 - DNA, 82 bp, Homo sapiens
ctgctccatcgaggcagccatggtgaagagccagaggccaagaagagtaagacggccgcaaagaaaaatgacaaagaggcag

SEQ ID NO: 477524 - DNA, 100 bp, Homo sapiens
tacatgctctgatgacggcactgttagaatctgggactttcttcgttgccatgaggaaagaattctccgaggtgaatctggattgggaaagtcgacatta

SEQ ID NO: 477525 - DNA, 74 bp, Homo sapiens
ctggagcgggtgctgcaggcgccgccgccggacgtcggcaacggagaagcactattcctgatcagagaactcca

SEQ ID NO: 477526 - DNA, 90 bp, Homo sapiens
ttcaaagcgggaggctccttgtgccacattcttgcagctgcctacaaattcaagagtgaccagggatgaacctgcacttgttgccaagtc

SEQ ID NO: 477527 - DNA, 83 bp, Homo sapiens
aaaaacactccaacgattgagatcatttaaagatgtacagtgaaggtgaaattcgatttaatttaatggccattgtgtctgac

SEQ ID NO: 477528 - DNA, 83 bp, Homo sapiens
ggaagcgcggggcggcggcgaaaggacggtttttagaacttcagccataaaaatgggcagaattttccttgatcatatcggtg

SEQ ID NO: 477529 - DNA, 100 bp, Homo sapiens
gccgactgtcaatggagctggaaaacatcgtggccaacacggtcttgctgaaagccagggaaggcaggagtagggctgattggagccattgtacagtgtc

SEQ ID NO: 477530 - DNA, 97 bp, Homo sapiens
aggacaagcaggaaaacggcgagaggactggaggggtgcctctgatcaaagcccccaagagaggctaaggcagctggataagcacagccaggccaca

SEQ ID NO: 477531 - DNA, 75 bp, Homo sapiens
caagtgcagggagttcccgttacaatcactagtgttgcagcgtggggtagagcagcggctgccatgctcttctgt

SEQ ID NO: 477532 - DNA, 100 bp, Homo sapiens
gacacttcactttgctgcctgtgcactgaggcctcagaatctgctctacccgacttaacaggatgagggagtggtgggtccaggtggggctgctggccgt

SEQ ID NO: 477533 - DNA, 88 bp, Homo sapiens
gcggtgacagagtggagccatggctagagtatacctgaggtgcaccggaggtgaagtcggtgccacttctgccctggcccccaagatc

SEQ ID NO: 477534 - DNA, 82 bp, Homo sapiens
caaccattgacgccatgtcgggttattcgagtgaccgagaccgcggccgggaccgaggattcctccttatggacaacaaggc

SEQ ID NO: 477535 - DNA, 82 bp, Homo sapiens
cagataccaccttatggctatgcagaattttcaggacatggatttgattgacatactttggaggcaagatatagatcttgga

SEQ ID NO: 477536 - DNA, 90 bp, Homo sapiens
gcgggagaagagcggagcagtggtcggagatgtggcgaccgggagctcgaggagcagcacggcatccactgcaacatgacgttactcttc

SEQ ID NO: 477537 - DNA, 75 bp, Homo sapiens
gaggagggtggaaagcatttcggctcagctggaggaggccagctctacaggcgtttgggcgcaccgaagtcatcg

SEQ ID NO: 477538 - DNA, 100 bp, Homo sapiens
tgatgattccgttggagtagaagtgtccagcgacagcttctgggaggagaatttgcagccttcaagtagccaccatcatggcagcatctgctcttatttc

SEQ ID NO: 477539 - DNA, 100 bp, Homo sapiens
ccctctgctcttcctcccttcgctcgcaccatgcattgtaggtttaacactcaatgtacaagaccggactgcacattctaccatcccaccattaatgtcc

SEQ ID NO: 477540 - DNA, 89 bp, Homo sapiens
aaggagctgcacaacaccccgtacggtacggccagcgagcccagcgagaaggccaagggcgagctgaggatcagtgtcctgcctgccta

SEQ ID NO: 477541 - DNA, 85 bp, Homo sapiens
gagatgtgatgttggagaactacagaaacctggtctccctagatccatcacaaagcgaagtcatgggagagccacacttgatggt

SEQ ID NO: 477542 - DNA, 51 bp, Homo sapiens
ataaacatgcaatgaacccaaaagggtctttcaggactgattttggtggaa

SEQ ID NO: 477543 - DNA, 98 bp, Homo sapiens
aaacaagccaatcccaggaggaaaaacgatacgtttgaaatggtttctgaagatgaagatgggaaattgggatttaaagtaaattaccactacatgtc

SEQ ID NO: 477544 - DNA, 82 bp, Homo sapiens
tgctgtcaggctacatcagcaaaggggtttgatctgtggatgaaatgaatcatgattttcaagctcttgcattagaatctcg

SEQ ID NO: 477545 - DNA, 78 bp, Homo sapiens
gctctctgctcgtgcctcaaacgcttggattctacagcaacatattgaattctgcttggtcagaatcgtgatggcatt

SEQ ID NO: 477546 - DNA, 50 bp, Homo sapiens
ggggatgaagcagcaaattctgccctgcctgaaaatgaaatttcttcaga

SEQ ID NO: 477547 - DNA, 75 bp, Homo sapiens
ctagaccggtttttagtccattgactatgcagcctaatgggaccagttactctccacaagaaaattcacacaacc

SEQ ID NO: 477548 - DNA, 100 bp, Homo sapiens
cctggtcatacaccagtactaccaaggacagcttttttcctgcaagatacgtgcttttcaacatgccttcagcactaatgactgctccaggaatgtctac

SEQ ID NO: 477549 - DNA, 100 bp, Homo sapiens
tttgccaatgttggagccgtctgcaaagtgtccccggcaagaagtctggctcttgctgattgaattcctttggtgcagtttagcatgttcctctgtgttc

SEQ ID NO: 477550 - DNA, 75 bp, Homo sapiens
aaggagctaaagcagcgtgcgttcagccctggggcactatgtcgtccgaggcccagagatgaccccttatgaagg

SEQ ID NO: 477551 - DNA, 97 bp, Homo sapiens
tgctccggggaggtcacctgacgaggagctgaagaaatcaggggagaaacccctgcttggtggaagcctgatggaatatgcaatcttgtctgccatt

SEQ ID NO: 477552 - DNA, 100 bp, Homo sapiens
tggaacagactccacccaaacatctggttggcaatatgatactcagtgttcactggcaggagattactgacagccctgtcctaggagcacaacgtccgag

SEQ ID NO: 477553 - DNA, 100 bp, Homo sapiens
cctccacactcctggaactgtacacctattggaacccttaaggtttggtgcacctcgatttggaggaagtagggcagggcccttatctggaaagaagttt

SEQ ID NO: 477554 - DNA, 100 bp, Homo sapiens
cggttccccggcccacagtgggggtgtgcaaacccgagagaactggcgtgagtgcatctccatccacgttggccaggctggtgtccagattggcaatgcc

SEQ ID NO: 477555 - DNA, 83 bp, Homo sapiens
ctattcgcggctcttcccgcccgccttccgccgtctcttcgagttcttcgtgctgctcaagccggagtcagagtggtggctac

SEQ ID NO: 477556 - DNA, 80 bp, Homo sapiens
tgacgcgcgctgccggggcgagatgtgtcttgctgaatcagggctctcttatccctgccatcgacttacagtgggaagaa

SEQ ID NO: 477557 - DNA, 98 bp, Homo sapiens
cccgtacagcaagaccctggtcctccaaacgtctgaggagacagggcagggcattgttcatgcactgaccgacctcagcagccccggcatgacctcag

SEQ ID NO: 477558 - DNA, 84 bp, Homo sapiens
ggaaatcatgtcaagcgaagccttgaaaaagctgccctgagacggtgtcccgccgaaagctcctctggtgcaagtgtggtagct

SEQ ID NO: 477559 - DNA, 50 bp, Homo sapiens
gtggagagagtggtgctggaaagggatttgtggaactgactatatttccc

SEQ ID NO: 477560 - DNA, 90 bp, Homo sapiens
acccggtgacagcgtgagaggttcgcagagatcaagtcttccataccagggaccaggccaaaaccagactgccactgcccctacttgggc

SEQ ID NO: 477561 - DNA, 85 bp, Homo sapiens
actaagtaacgatctggatgcccagataccccatcagcctgagtctcttaaaggcctttatacacatatgtctacacatagggat

SEQ ID NO: 477562 - DNA, 100 bp, Homo sapiens
gccgagataaagccaccacgtctgggtgttgaaagcagcaggggcctagaagacattaaaccgataccacagaaatacaaaggatcattagagactatta

SEQ ID NO: 477563 - DNA, 88 bp, Homo sapiens
tgggcgttcatctaccacgctttcgtgtttatggttggctgtgggagatgtgatgactggtttcatggtgattgtgttgggttaagtc

SEQ ID NO: 477564 - DNA, 100 bp, Homo sapiens
tggagactgttcaatcaccagggctgggatatgaagaacaacagcctgaggttccaattctttatcatgatgtaacatcccttttgctcatccagatctt

SEQ ID NO: 477565 - DNA, 51 bp, Homo sapiens
ccgaatcttccttcaggatatcaagggacatctctacaccgttcccatccg

SEQ ID NO: 477566 - DNA, 90 bp, Homo sapiens
acttctttacttggtgcaggaaggcagtctttgctacgtacagcaaaagggactaggccctggccaggcccccgaggtggcccccacgcg

SEQ ID NO: 477567 - DNA, 100 bp, Homo sapiens
agtcagctactcattttaaaaaggtagcctttccagtaaatatatgactcagggaaaagcctcagcgaagaggacccagcaggaatcatgagggaaggaa

SEQ ID NO: 477568 - DNA, 50 bp, Homo sapiens
cttcgacttggagtctttgtccaggacggcttctcacggcattcagcagc

SEQ ID NO: 477569 - DNA, 100 bp, Homo sapiens
tgatgtctgataagaagtgttctgtcgaaaagaaatcagaaatggaaagtgttttggcccagatgtccttcggccttctccgtgtgttctccattgtgat

SEQ ID NO: 477570 - DNA, 50 bp, Homo sapiens
tctggatgtccctggattgaagaagaagaactttggcatcagctacctgg

SEQ ID NO: 477571 - DNA, 99 bp, Homo sapiens
tggaaaaccagttattgaatatcaagaggaggagttgttggaagagtctaacctgtctctgcaagctcttgagtcccgccaagatgatattttaaaacg

SEQ ID NO: 477572 - DNA, 71 bp, Homo sapiens
cctgggccgcgtccatcacctggcactcaagattgctgctaaaattgattcaattcctcacttgaataatt

SEQ ID NO: 477573 - DNA, 82 bp, Homo sapiens
tatttaagaaagaagatgttaactttcagccaaaatgaagtttaatccctttgtgacttccgaccgaagcaagaatcgcaaa

SEQ ID NO: 477574 - DNA, 73 bp, Homo sapiens
ccaaagcctgaacaggcagggccagacccagattatgatgacatttccaatcagatagacttcatcatctgcc

SEQ ID NO: 477575 - DNA, 103 bp, Homo sapiens
gccgccagtggagcccccgcgcgcccggccggcccggagcaccgagctcgcggcacggtaggaggctgaccccgcactacatctacccaccagccatcgtgca

SEQ ID NO: 477576 - DNA, 98 bp, Homo sapiens
tctactccagagctccgacttatttctgtgggcagacattaacattcaggtcatggaatatcagcctggaggggacttgctgtcacttttgaatagat

SEQ ID NO: 477577 - DNA, 100 bp, Homo sapiens
gctatggcattgttcaagtacccactggaccgtggttttgcaggaaatgtgaatctcaggagagagcagccagagtgggaacagagttcagaggcagcag

SEQ ID NO: 477578 - DNA, 75 bp, Homo sapiens
ttcgttactatgtggatgttccacaggaagaagtgccattcaggatttttagactctgaggagcagttggagcta

SEQ ID NO: 477579 - DNA, 100 bp, Homo sapiens
gctctgtctggccggccccttggcactcgcctcggatttgggggcttcctcactcgtggctttccgaaggctgctgttctggaaagctggcttgatttca

SEQ ID NO: 477580 - DNA, 75 bp, Homo sapiens
gaaatgtacaccctcgagagcggcctgattgggaagaaactcttagcgcaatggacatagctcgccttttgcaag

SEQ ID NO: 477581 - DNA, 74 bp, Homo sapiens
acagacttgaaaaagccagttctaatcaggtagttaaaccagagagcaatgacaaagaaacagaagctgcgtat

SEQ ID NO: 477582 - DNA, 75 bp, Homo sapiens
gtggagcgggacacgaacgtggggcattgacgttgtgaggaataaaattaaaatgtttgctcaacaaaaagtcac

SEQ ID NO: 477583 - DNA, 98 bp, Homo sapiens
agccttcccgtccgcctcgccacgcgcccggacggcctggggttgctgcccgtcagtctcgaaaggcattgaagttgatatcgatgtggagcacggag

SEQ ID NO: 477584 - DNA, 100 bp, Homo sapiens
ggacaccgggacctggagcagtttgagagggtgcatcgctacatcagtgaccagctcttcacaaactttggagaagatgtcaaccggacactagaaggtg

SEQ ID NO: 477585 - DNA, 90 bp, Homo sapiens
gtgaaaggcaaagaacaagagaagacctcagatgtgaagtccattaaaggaagagagaagggcacagttacctaagtatcaacgtaatct

SEQ ID NO: 477586 - DNA, 83 bp, Homo sapiens
aaggacaaaggtggcccagaattttccagtgccctgaaaaatatttggtgccctggttgtcagatgttggaaagcagtaggac

SEQ ID NO: 477587 - DNA, 75 bp, Homo sapiens
tctgacaatgcagcttctcttgcagtgcagagctggagtggaccagagaaattgcttgctttagatgaactcatt

SEQ ID NO: 477588 - DNA, 100 bp, Homo sapiens
ttgggtcttccggtaggagctgtaatcaattgtgctgacaacacagtcctgtcagccctcctgttgtggatctcagaactatcatggaaatagaagaaag

SEQ ID NO: 477589 - DNA, 95 bp, Homo sapiens
tgtttgagaggctggctgaggaggagaacaagaatggtcagtctgtagacgttgaagagacattgccatctgaaccagaaaatggagctcttttg

SEQ ID NO: 477590 - DNA, 120 bp, Homo sapiens
cagtgaagtacttgcggcctgtacccagaatcacctgggatccaccatcaactggggtggaacagaaaagcctttaccggtcgacatggttctcatctccctttgctttggactcagcat

SEQ ID NO: 477591 - DNA, 100 bp, Homo sapiens
gcacttcaacgctggacgaagaactgtggctgcaccatctgtcttcatcttcccgccatctgatgagcagttgaaatctggaactgcctctgttgtgtgc

SEQ ID NO: 477592 - DNA, 75 bp, Homo sapiens
cccaccatcgagtccctgatagctggactgggcagcctttggggtcatgacccttccctccatcggcatccccct

SEQ ID NO: 477593 - DNA, 96 bp, Homo sapiens
agaggatctatgatggccagtacctccaggccctgaacgcggactggcacgcagactgcttcaggtcctcttcctgatggatgggaacaagccatg

SEQ ID NO: 477594 - DNA, 82 bp, Homo sapiens
gtgtgagcagggctgagatgggcaccgcggatctggggccgtcctcaggtgtggacactgccagcggctgcagccgacttgg

SEQ ID NO: 477595 - DNA, 100 bp, Homo sapiens
ctggaacttgccctgtctcctcgcagatgagtgatatgcgctggaacaaaggaaccattctaaaagcatcagtggagtacatcaagtggctacaaaaaga

SEQ ID NO: 477596 - DNA, 100 bp, Homo sapiens
gcgggaacgattgggctgagcagaggacgacatgttgcttttcgtggagatcttacagactctttcagcacctacgaaaaatttagaacagcaggtgaat

SEQ ID NO: 477597 - DNA, 82 bp, Homo sapiens
atgaaaagatccagaaaagaggcaaagcaagcgagaagtcgcgggcccagcccacagcaggaacactatggctatgcatcct

SEQ ID NO: 477598 - DNA, 51 bp, Homo sapiens
gcaaaggcaggggaggaagccacctcgagataccagatgacaattttagca

SEQ ID NO: 477599 - DNA, 51 bp, Homo sapiens
atcaacttcctcaggaccctcaatgagacgaacctcagaggatccagaacg

SEQ ID NO: 477600 - DNA, 75 bp, Homo sapiens
ggcgtccctggatcgggtgaaggtactggtgttgggagactcaggcattttggagatcaaagatgggtagaaaag

SEQ ID NO: 477601 - DNA, 96 bp, Homo sapiens
gctacagcttcagaagaccgaagcgttcgtatctggaagtggaggacgtgagatatgcgtccgtggccagaatctggacgtggtacagacgccaag

SEQ ID NO: 477602 - DNA, 88 bp, Homo sapiens
gtggaacatcttttgaagagctcagaccctggacccctgatcttaatgagctttgcagccttcaccacaggtggaattaagaaatctg

SEQ ID NO: 477603 - DNA, 75 bp, Homo sapiens
gttttgccagtcacctctcaactgtgtgccaaagatggagtttcactcttgtctcccaggctggagtacaatggc

SEQ ID NO: 477604 - DNA, 82 bp, Homo sapiens
gagatttggagacagggacagtactttttgagattgccaaaccttgcgtttcaggtgaagaagatgggcgggcttgggcttc

SEQ ID NO: 477605 - DNA, 73 bp, Homo sapiens
ggaggacctacgccggcctgggtgtgacgtatgcagccaaaggctactttgacgccctggtgaagatggggga

SEQ ID NO: 477606 - DNA, 75 bp, Homo sapiens
caattgatgaactagtagatagagccaaacaatcttttcaaggttcttcacacacccccattcggcgtagtaccc

SEQ ID NO: 477607 - DNA, 100 bp, Homo sapiens
gcagcatggagaggggccgtggcccctgcagcggaaccggacccagtccctgagccgcccctacacccacagggcgtccccctggataccagtaaactgt

SEQ ID NO: 477608 - DNA, 100 bp, Homo sapiens
ctggcgtaccctgtgcgttagtcaccagctgctcctccgtcttctcaggagaccagctggtccaacgtgtcatggagaaactccagctgggcccagagat

SEQ ID NO: 477609 - DNA, 82 bp, Homo sapiens
cgtgatccagaagtccagagctgaggactgcctgtttgcagatgccgctcctacgaggactgctgtggctccaggtgctgtg

SEQ ID NO: 477610 - DNA, 100 bp, Homo sapiens
ggctggttggggtggtgaggcccgaggcagcttggtaaaatgcggctgacaattccgtgtcgggcccttacatgttctcatctacaatgttttgacgcaa

SEQ ID NO: 477611 - DNA, 100 bp, Homo sapiens
atgaaaatgtgaatccagagtatcacagagggcaagtgtccagagaatggctgggatgaaagtacacttgaactctttttacatgaacttgcaatcatgg

SEQ ID NO: 477612 - DNA, 74 bp, Homo sapiens
cataagtggaattttggagatattcaaaggtggcagtagagaagagcatcacagaagttgctcaggagctgaca

SEQ ID NO: 477613 - DNA, 100 bp, Homo sapiens
gttgattggagatatgcccttagttggagctttgtctatcttcttccttaggaaaccaaaatattctacatcattggagctgtggtatttgtggtcatca

SEQ ID NO: 477614 - DNA, 51 bp, Homo sapiens
agtagttttgtaacatctactgtcaaggttaacgtccctaaaacccgccgg

SEQ ID NO: 477615 - DNA, 100 bp, Homo sapiens
cccgcctcgttcctctgggcagcctgggtgttttcacttgttcttggactgggccaaggtgtaccagagatgtctccaagagcaccagcaaccccagcta

SEQ ID NO: 477616 - DNA, 74 bp, Homo sapiens
actggttctacacgcgagctgctgtgtcagcgtgttatgatgccgtcccgtaccaacctggctactggaatccc

SEQ ID NO: 477617 - DNA, 75 bp, Homo sapiens
gggaccggctgctgcaggccatcgacccccagagcaacgactgagcagggggaggaacatttaagctgatggaag

SEQ ID NO: 477618 - DNA, 100 bp, Homo sapiens
gagcaaaaccactttccctgaaatccgacactactgattctagtcaagctgacatagcccagagatacaggataagcaaatacccaaccctcaaattgtt

SEQ ID NO: 477619 - DNA, 75 bp, Homo sapiens
tatgttcgtgagaactgcaaaccgctgcgggacttcgagtaagaaggtgatttacagccagcctagtgcccgaag

SEQ ID NO: 477620 - DNA, 90 bp, Homo sapiens
ggagattgcccggcagatgaaggctggtacagaaggcagagctggtacgactgtcccagacactgagcctggtgccccggctgcattggc

SEQ ID NO: 477621 - DNA, 100 bp, Homo sapiens
cacagaggaggcacccctgaagctctccaaggcatttgttgctatcggggactacaatggccacgtcggtctgggtgttaagtgctccaaggaggtggcc

SEQ ID NO: 477622 - DNA, 75 bp, Homo sapiens
ccattatgtctgggtcaaaggccaaggtccggaaagcggacagtcattttgtttactcattcagccctgttgcag

SEQ ID NO: 477623 - DNA, 50 bp, Homo sapiens
ataagcaagtcgaatttttgtcttacggtgctggagaatctggtaaaagc

SEQ ID NO: 477624 - DNA, 75 bp, Homo sapiens
ctcccctgtccagaaaagctgccttatatgctttctgtagaaaatgtttcctgactgcaatgagggaaagcggag

SEQ ID NO: 477625 - DNA, 98 bp, Homo sapiens
gaaatgtggaaaatttcctagaagcttgcagaaaaattggtgtacctcagaacaagttgaaatcatcgcagaaggataaagttcgtcagtttatgatc

SEQ ID NO: 477626 - DNA, 74 bp, Homo sapiens
cggcgccctggggccccggagaggtgattaaaccccctctgatttttgtcgaccctaatcgtagtccagctggc

SEQ ID NO: 477627 - DNA, 100 bp, Homo sapiens
cggagacgccgagctggggccgggtacgacagtgccagcccacagggccatcctggtggcccgttgtgaagtgatggcagccatgtttaatggtaattac

SEQ ID NO: 477628 - DNA, 75 bp, Homo sapiens
cacagtttgacactgctctcgatgaggcctgcctgtgttaatacacctagtgaggagtggagctgaatttgaatg

SEQ ID NO: 477629 - DNA, 117 bp, Homo sapiens
tgctctttgtcactccccggcggcagcacgaaagtaccatgctgttttggagtcagcggaagatcaccaaggccagggagtggttccaccgcactgtgaagattgactcggacctgg

SEQ ID NO: 477630 - DNA, 106 bp, Homo sapiens
gtttggcgatggggcagcgcgagatgtggaggctcatgtcgaggttaaacccatccagagtaatggctgcggccttacccaggaccctgggggagttgcagctgta

SEQ ID NO: 477631 - DNA, 118 bp, Homo sapiens
tttgaccttttcaacttggttctctcctacaagaggctggagatctacctggaacccttgaaggatgcaggttctcaagaagatttcccgctacatccaggagcagaatgagaagatc

SEQ ID NO: 477632 - DNA, 100 bp, Homo sapiens
cctctgggaggcttaccgagagtttgaaagtgcgattgtggaagctgctcgggtgggaatggaagtggccccacatctcaaagaaaccctaaataagaac

SEQ ID NO: 477633 - DNA, 75 bp, Homo sapiens
atggctgccgcgccgccgctacgggaccgcctgagctttctacaccgggaagaaacacctcttacagtcatctgc

SEQ ID NO: 477634 - DNA, 83 bp, Homo sapiens
attcacttctagacgacaaaatgcaaaaaaggaggccaaagactttacggaagtgaaaatgtgacaggattggacctttcaga

SEQ ID NO: 477635 - DNA, 100 bp, Homo sapiens
ccagaagaggccgcacacgccctggagctccgcaagggggagctgcgctcggcggacctgcccgcgatcgtgaccattgtgaggtagatattttgttcta

SEQ ID NO: 477636 - DNA, 83 bp, Homo sapiens
acggtggcgccgcccggggcgaggcagggccagcagcaggcgggaggaaagtgaaaaggtttctgaatatccagcagtgattg

SEQ ID NO: 477637 - DNA, 75 bp, Homo sapiens
catgatgcatgtgatctgggccgcactggcatttgcagctattcaggtactccaaagattcaggtttactcacgt

SEQ ID NO: 477638 - DNA, 100 bp, Homo sapiens
gaagtggaagaagtagttataaaagcaaacacaggattcaccacagtacttcacatcgtcgttcacatggggtagttttggatgttgggtgtggaactgg

SEQ ID NO: 477639 - DNA, 82 bp, Homo sapiens
ccagttggaattgaagaatattcccaagtccttcacccgggtctggtccgagagcaggaggctgggctgctgcagttcctcc

SEQ ID NO: 477640 - DNA, 100 bp, Homo sapiens
cgatgttcagcatggtgtactcatccataaagtcatcctgggctcccctgcacaccggttgaaggggcccggccaggactcggggaagggtggcctgaga

SEQ ID NO: 477641 - DNA, 100 bp, Homo sapiens
tccgttccgggctcggtgcgactgcgcagctcctcggcgcttcctcggtggcttccccgggtcgagcaaacaggcttttaaggataccggaaaaacaccc

SEQ ID NO: 477642 - DNA, 51 bp, Homo sapiens
aataattaagaagaccaagtagcatccaagacggtctggaaaatcccgaag

SEQ ID NO: 477643 - DNA, 100 bp, Homo sapiens
gaggaatctgtgctttctgtcccagaactccagattataagcgccatggctatggctagtgttaaattgcttgccggtgttttaagaaagccagatgcct

SEQ ID NO: 477644 - DNA, 75 bp, Homo sapiens
ggccaattccccccgcaccaaattgcatcgtttcccaggttgggtttatcagcctcgtccagggaagcgaaaacg

SEQ ID NO: 477645 - DNA, 97 bp, Homo sapiens
ggaaaggctctcagtgaaaaagtatatttgccttccctccatgatctccaacactatccgataaagtagaagcaactgaggtaccgtgaaagagaaa

SEQ ID NO: 477646 - DNA, 50 bp, Homo sapiens
ccaaaaaggacatctttggagccaggtgatttgatgaaggctgctgcagg

SEQ ID NO: 477647 - DNA, 73 bp, Homo sapiens
cctgcaggacggcgcggcagagtccccgtacgcctacagtaacggtgtctcccagtctgctaaagccctaagg

SEQ ID NO: 477648 - DNA, 75 bp, Homo sapiens
cagatcttcacagcacagttcctgggaaggtggagccaccagcctctccctgattgtagaaggcatgaaacaaaa

SEQ ID NO: 477649 - DNA, 83 bp, Homo sapiens
ggaacgtgtgcccacacagagagaaatacgatgaatggattaaagcagataaaatagtaagacctgctgataaaaatgtgcca

SEQ ID NO: 477650 - DNA, 100 bp, Homo sapiens
atttgcacatccttcgaaaagctgccaagttgaaaatggacgagtaatcgcctgctttgattcattgaaagaactttatattgctgttggaatatctgga

SEQ ID NO: 477651 - DNA, 74 bp, Homo sapiens
acgagctctagctggatgggcgcagagctgtgcagagagattgcagtcagaggagcaggtgtccaagaacctct

SEQ ID NO: 477652 - DNA, 100 bp, Homo sapiens
ggggtcgtcgtggtccagacagtttagcagaacagcctccgcggctccggggagaagttgtaaagaataccgaaatgccttagaggaattgtctaaagcg

SEQ ID NO: 477653 - DNA, 51 bp, Homo sapiens
atgaagacaccgtgagcaggctagaggagccaaggcaaagagggaccactg

SEQ ID NO: 477654 - DNA, 59 bp, Homo sapiens
atttttgcatgagacgcttctggacaggttcctgattgtcctggggtgcttgattctgg

SEQ ID NO: 477655 - DNA, 101 bp, Homo sapiens
gaagaccccagttttgctgaccttattcaccatgacttatcagatttcatgcagaaagagctattggtatcattacccacatcctacctgaagatcatctt

SEQ ID NO: 477656 - DNA, 75 bp, Homo sapiens
tccagctccaagaaagtcacctttgggctgaacagaaacatgactgccgcttactgcagagtgggtctgggcatc

SEQ ID NO: 477657 - DNA, 74 bp, Homo sapiens
ctctctcccagatatccggcacccaaaaccattcctcaagaattttgtatccaaggcccaaaagtttgttaccc

SEQ ID NO: 477658 - DNA, 90 bp, Homo sapiens
gactggcccagtatccaggtcgaggttctgcagaaggttgtgactttagtatacaagtggaacagatgtgcattcagattaaagaagttg

SEQ ID NO: 477659 - DNA, 100 bp, Homo sapiens
tcagcatgcagaaccgtgggtggtttctggaattagaagtgcgtctcaccaaccagccaagatgaacatggtgaagaggatcatggggcggccgaggcag

SEQ ID NO: 477660 - DNA, 100 bp, Homo sapiens
ccaggaaatcgagactcatgactcccagagaggatggcatctagaaggtgatctgtgaaaatggttcgctattcacttgacccggagaaccccacgaaat

SEQ ID NO: 477661 - DNA, 90 bp, Homo sapiens
gcggcggtagcggcagtggcggcgcgtaggaggcggtcgcctgcgaggccgctggccaggcctgagcctctgccaccatggccattgtgc

SEQ ID NO: 477662 - DNA, 100 bp, Homo sapiens
ctggatggttgtgagggaagagacaggaagatggtgcccagagcttacgatgtgaagaacttcatcttcatgcagaaaatctgtctaggcgggtctggga

SEQ ID NO: 477663 - DNA, 98 bp, Homo sapiens
tctacctgtttcacggagtcttgggacccagcatcagcccctcccacagccagaaagaaatgaccgcccggatgtgccactgagagccccgcgggtct

SEQ ID NO: 477664 - DNA, 100 bp, Homo sapiens
ccgattgccagggtgctgaccgtgggagccgaccgaggtctagatgttgatggaatatatcgagttagtggcaatctggcaacaatacagaagttaagat

SEQ ID NO: 477665 - DNA, 88 bp, Homo sapiens
gaagatggccaccaaatcatgccccgagtgcgaccaacagattagaagcccaggacccaggaaggagacacaggaaatttattcaaag

SEQ ID NO: 477666 - DNA, 98 bp, Homo sapiens
cgtccccgaccttgcctgaacaaggaatggtcctcgtccgaagtgagaatgggcagttgttaatgattcctcagcaggccttggcccagatgcaggcg

SEQ ID NO: 477667 - DNA, 90 bp, Homo sapiens
taaagattactgctctacctttgtactttgaaggttttttattaatcaagcggtcaggataccggagtacccaaaggcaagtggaacagc

SEQ ID NO: 477668 - DNA, 75 bp, Homo sapiens
cccaagacccttgtgctcgttgtcgccgcggtcctgctgttggaaatcatcgagttccccatcctaaagctaaat

SEQ ID NO: 477669 - DNA, 88 bp, Homo sapiens
catgatgtttaagaacatgacgccgtcacccttcctgcgattctacttagcatcaattcctgaagattgccaagcccctctccagcct

SEQ ID NO: 477670 - DNA, 83 bp, Homo sapiens
cgagctggagagcgtggacaagagcgcggggcaagtggctcggaacacagacaatgcagatcttcgtgaagactctgactggt

SEQ ID NO: 477671 - DNA, 100 bp, Homo sapiens
ggaatattattacaccaaggaggagcagtattccgggaccccaaatcccagcggacgcaccaggctcaggtggcgttccaggtgtgtgtgcgccctggct

SEQ ID NO: 477672 - DNA, 75 bp, Homo sapiens
gctcttgtgccctagcaccccgagaaccgtcagtttgagccagatgggacttcatctgcagcatcctcaccatta

SEQ ID NO: 477673 - DNA, 83 bp, Homo sapiens
tggagcttggtttcgggatctcggtgctgcagacggcgagacctcctgcacagcatgttggcagataaattgaacatgactcc

SEQ ID NO: 477674 - DNA, 80 bp, Homo sapiens
gaacctggctcctcgcgcctcggcagccctgacgccacgaggaagggggatatgagactttctactcggaatatcctgag

SEQ ID NO: 477675 - DNA, 83 bp, Homo sapiens
gccgccgccagagaggcccgcccaccagttcgcccgtccccctgccccgttcacaatgtgtctgtgacctttgaggatgtggc

SEQ ID NO: 477676 - DNA, 97 bp, Homo sapiens
agttggacctgtgttggctaccttgggacatcatcagactcctacaccaaatagtacagaccctggtgggcagcagtgggaccattctgaccacaat

SEQ ID NO: 477677 - DNA, 100 bp, Homo sapiens
tggaaacagcagatgtaccctcagtacgccacctactattacccccagtatctgcaagccaagacaatctgtggctccaactatccactgagcattgcct

SEQ ID NO: 477678 - DNA, 100 bp, Homo sapiens
ggaaaattataacatagcattaaggtggacagccaaacagaagctttattcgagaacagagccatgcacattatcttttactgaaatggaaaagaataat

SEQ ID NO: 477679 - DNA, 74 bp, Homo sapiens
agtctggaagacttgcttcgagaaaggaaacctgtgaggaaaatgtttataggaggccttagctgggacactac

SEQ ID NO: 477680 - DNA, 74 bp, Homo sapiens
aaaccaacgcctggctcggagcagcagcctctgaggtgcatggctgcctcctaatcccatagtccagaggaggc

SEQ ID NO: 477681 - DNA, 75 bp, Homo sapiens
gcaacttctggatgtgcagcaatcagatttatcattcggatggcgtttaatgattgcttcagtttgaactaccct

SEQ ID NO: 477682 - DNA, 82 bp, Homo sapiens
ggagctaaagcagcgtgcgttcagccctggggaacggagctttgactgtaagatctgtgggaagagcttcaagaggtcatcc

SEQ ID NO: 477683 - DNA, 100 bp, Homo sapiens
gaaaagtttaaacaaccctgccatgttgcaagttcttctacagccccagttatgtggacgagctgttaaaccagtgagggagataaatctgcaggacatc

SEQ ID NO: 477684 - DNA, 74 bp, Homo sapiens
gcaccaccctccatgcctttgcagctgactggaaataccggcatgcaggattgatggccttatctgccattggt

SEQ ID NO: 477685 - DNA, 75 bp, Homo sapiens
agagccaaggaataaacatgcaatgaacccaaaagggtatgttcaagatcagtaaatttagaaaaagcttcagag

SEQ ID NO: 477686 - DNA, 83 bp, Homo sapiens
gaggagcgccgctgcctcgcctcggctcacagaacatttcctgcctgttgctcacactctgttgtccacagcatacccgcacc

SEQ ID NO: 477687 - DNA, 108 bp, Homo sapiens
ggcggcgctgcggatccagggggtcggctgccaggtacaggatatacgtggcatttcaagtgatcagttgcatagagtactaaaaagtgtggaatcagaaagacataa

SEQ ID NO: 477688 - DNA, 75 bp, Homo sapiens
ctttgctgcccttgccatgctcctgtccatggccaacacaggctcagtctgctggagcgggtcagtgccgaggct

SEQ ID NO: 477689 - DNA, 83 bp, Homo sapiens
ccggcgtctgcgcttccccatggggctggcctgcggcgcctgggcgctctgaggtctcggcgcggaagatggccggcggcgtg

SEQ ID NO: 477690 - DNA, 82 bp, Homo sapiens
tcctggagatctgtgctgagcagcgaaacctgagcgagcagacctagaggatcaagacataatgggagcatttttagacaag

SEQ ID NO: 477691 - DNA, 51 bp, Homo sapiens
gaagcactcagctacctcaagcccaggtattccaataactgtaccacctcc

SEQ ID NO: 477692 - DNA, 90 bp, Homo sapiens
ggaagatggcgaaggtctcagagctttacgatgtcacttgggaaggtgtgaacttcaacccggagcactgcagccccaatggcaccgacc

SEQ ID NO: 477693 - DNA, 82 bp, Homo sapiens
agagcagtttactgttgcgttttgcagacaacactttctcagttgagccccatatgggggttggcaggcagcagagaggccc

SEQ ID NO: 477694 - DNA, 75 bp, Homo sapiens
caaatggagctcagaaagctgtatggacctctgtgtgggtgtggaatatcaaacaaatgattaagttgacacagg

SEQ ID NO: 477695 - DNA, 82 bp, Homo sapiens
ttcttcttatggccagagccagaacaatcccaccaaatattttggttgtgagctgggagcacagacccagtttgatgttaag

SEQ ID NO: 477696 - DNA, 100 bp, Homo sapiens
ccccaaggggattgcctggcaggacgtgaaggggaagaggcccaccctggagtaaccctcactggagaatccagaggtgccagcttaggaataaccagcg

SEQ ID NO: 477697 - DNA, 100 bp, Homo sapiens
gagcccaggtgcccagaggactttcttccagcttctgctgtccttctttgtggagagcaagtctgaagttgcagccggagtgaagaagagcggaccgctg

SEQ ID NO: 477698 - DNA, 82 bp, Homo sapiens
gcagcggctccgagggcgcggcggacgcaggtaactaggatttctacctcaaccgcgagacctatgcaaggacggtgtggac

SEQ ID NO: 477699 - DNA, 98 bp, Homo sapiens
gcggcgggacagagcgcctgcgaccccagtcggtgctccggggaggtcacctgacgaggaggtggatgaagactacatccaggacaaatttaatctta

SEQ ID NO: 477700 - DNA, 73 bp, Homo sapiens
tctggggttttcatacactgaaccggtgaagcatccggttactgggcaatttctatatcaggacagcaactgg

SEQ ID NO: 477701 - DNA, 83 bp, Homo sapiens
catttcctcagtcacgggcctagaactccaaggagaaaggcggcggttgtgaccgagattcccgacgagagagactgagggga

SEQ ID NO: 477702 - DNA, 80 bp, Homo sapiens
atcgacggcaggaacgtgaccgtcactgacgtggacatcgtcttcagcaagatcaagttggatttggtctagggagtccc

SEQ ID NO: 477703 - DNA, 76 bp, Homo sapiens
tcacctatgtttacagcgacagattcatgttacatgtaaagctgtcctcatttgtgactatggacctatggagttg

SEQ ID NO: 477704 - DNA, 80 bp, Homo sapiens
acaaaacataccaattcttgaatgacatccgagcgaaagagaaagagggtgtgggccgaagatatgctcatgtggtgttg

SEQ ID NO: 477705 - DNA, 100 bp, Homo sapiens
aaggagctcttacagatggacctgtacgcgctgctaggcattgaggagaaggcagcggacaaagagagatatgaatcaggttcttgatgcctatgaaaat

SEQ ID NO: 477706 - DNA, 100 bp, Homo sapiens
aggtgtttttcctgtcgtacgtgggacaggccacgctgtccgtccgcagtaccgacgcctgcaggaagctcttcgtgggcggtcttgactggagcacgac

SEQ ID NO: 477707 - DNA, 90 bp, Homo sapiens
cgcgccgcggccgggcagggaggagaccggcacccagacaggtggcgacggcagaggaggcggcgactggcggcgcgatggacctgaccg

SEQ ID NO: 477708 - DNA, 100 bp, Homo sapiens
accaaggccgggcagccgggagcacccaaggcaggaaaatgaggtgggaactttgaggctcagagacagagcagaagacagaacctggtcttctgattcc

SEQ ID NO: 477709 - DNA, 96 bp, Homo sapiens
ggttttattgggaggtaaaggtcaatgcgtaggggtagagtaagactgcagaatccgcaacggtgagaatggaatacattttctcctaaacagaga

SEQ ID NO: 477710 - DNA, 90 bp, Homo sapiens
gtccgtggccttcgcgtctgcccggccaagaggcaaaggggaggttacgcagcaaaccatccagaagggcagctggtggaatttttgaag

SEQ ID NO: 477711 - DNA, 83 bp, Homo sapiens
cgcgcggccaagccatgctcggccccaggaccaagaatcgccttcagccctgtctggtgcatccttggcagaaagtgaggagg

SEQ ID NO: 477712 - DNA, 100 bp, Homo sapiens
gttgagcacaaaaaaccacctctacatttctcttaaagcatggccgaaacagaagccctgtcgaagcttcgggaagacttcaggatgcagaataaatccg

SEQ ID NO: 477713 - DNA, 127 bp, Homo sapiens
agccctttgaggagcactggaggaagcacaccctgtcctatgtggacgttggcactgggaagcaagagtgagccatggagctacgtgtggggaacaagtaccgcctgggacggaagatcgggagcgg

SEQ ID NO: 477714 - DNA, 119 bp, Homo sapiens
cctccttgcccgtgaccgtcgctagaactcagttgtgcgttgcggccagtcgccactgctctgataggaagatgtcttcaggaaatgctaaaattgggcaccctgcccccaacttcaaa

SEQ ID NO: 477715 - DNA, 98 bp, Homo sapiens
gaggttccgtcagtgtctgatgtcagatttatctcatgctgtgcagatctttgtagaatttgatggctgtaactggaagcaacactcctgggtaaaag

SEQ ID NO: 477716 - DNA, 90 bp, Homo sapiens
gtgaggagctaatccctgaatatctgaattcgagatatgttcacccaacttgatatggaccagcttttgggacctgagtgggacctttac

SEQ ID NO: 477717 - DNA, 98 bp, Homo sapiens
cctctgagaaagtgagccagaaacatgctgagcctttgacagctctaagcgaaagacatgaggcctcagcctgaaatgaggttgttttgaggtcatct

SEQ ID NO: 477718 - DNA, 80 bp, Homo sapiens
agcggaagccttctgtcgagaagcagctacccaagctccaggagcttccggatttctctgcctcttccaaacttttcctc

SEQ ID NO: 477719 - DNA, 51 bp, Homo sapiens
gggtggagctcagaccggtgggctaggtgctggagaatctggtaaaagcac

SEQ ID NO: 477720 - DNA, 100 bp, Homo sapiens
ggcaacgttgctggtgacagcaaaaatgacccaccaatggaagcagctggcttcactgctcaggcatcgttggcttcacagtatgactgatgatcctcca

SEQ ID NO: 477721 - DNA, 88 bp, Homo sapiens
tatgcacaaagatggttcggtcccacttgcagcagaaattcttgctggaggctgcatgacctgtgtagaaaaagcaggaacagatgag

SEQ ID NO: 477722 - DNA, 75 bp, Homo sapiens
tccatttgcaacttatccccaacagcttggtcgggaggaacctgccatgtccatggatgccaatggaaagataat

SEQ ID NO: 477723 - DNA, 75 bp, Homo sapiens
tgactgtcctgtccctgctgggccgtgtttggactcctgcctcgccaaaacagagtggagtacgagaaaagggtc

SEQ ID NO: 477724 - DNA, 98 bp, Homo sapiens
ggcatcgcgcgccgagaaggccgggcgtccccacactgaaggtccccggcaacttccacgtgtccacacacagtgccacagcccagccacagaaccca

SEQ ID NO: 477725 - DNA, 90 bp, Homo sapiens
cagaggacacgatctttctcagagagtaccagacccggtcccttctcataccgtcgtggcccgaagtatgggcggcaaggaggacttgat

SEQ ID NO: 477726 - DNA, 97 bp, Homo sapiens
cgacggctaccgggcctacctgccgtccaggctgtgtatcaaaagggctgaagaagatgcagagcagcctgaagctggtggactgtatcatcgaggt

SEQ ID NO: 477727 - DNA, 100 bp, Homo sapiens
gaatgaccctagccagactcagggatcaaagagcaaacagattcagtggcctgcattgccactacttccttcattggactgcaaggtatttctgtttgga

SEQ ID NO: 477728 - DNA, 80 bp, Homo sapiens
aggcgtgtgtgcggcaacacctccccgacctctacgctgctgccgggatatgaagagaaggctactaaagacttggaacg

SEQ ID NO: 477729 - DNA, 83 bp, Homo sapiens
gacgggctttctgctgccgcccgcaagcagaggttcatcatgcctagtggcgtataagaagaccccgccaccggtccctccac

SEQ ID NO: 477730 - DNA, 73 bp, Homo sapiens
tcattatggagggaggtttggcagatggagaacctgatcgaacttcggtgctggctgccagctgctgcgcccc

SEQ ID NO: 477731 - DNA, 135 bp, Homo sapiens
gtggcgccgcgctgctcctgctgctcatcccggtggccgccgcgcaggagcctcccggagctggtactccaaagattcaggtttactcacgtcatccagcagagaatggaaagtcaaatttcctgaattgctatg

SEQ ID NO: 477732 - DNA, 106 bp, Homo sapiens
cagaattcggccatgagccgctacatactcatcatggggctcctgtacaaggtttggtgcacctcgatttggaggaagtagggcagggcccttatctggaaagaag

SEQ ID NO: 477733 - DNA, 75 bp, Homo sapiens
cgatccgttggtgcatgaaagtcttctaaccattccaaaatctctttcagggaacttaggctgcggaactatgtc

SEQ ID NO: 477734 - DNA, 101 bp, Homo sapiens
tatatgctagagcctcactcctgtcaatatattcttgggcctaaacccaccaagggacgaatgcgcatccactgcttagagaatgtggacaaggcccttca

SEQ ID NO: 477735 - DNA, 100 bp, Homo sapiens
aagacaaacagcggaaaatctactgcgtggcttgtcaggaactcgactcagacgtggataaagataatcccgagtcaagaacagagccaggtggttcttc

SEQ ID NO: 477736 - DNA, 51 bp, Homo sapiens
agaggaggttgcccagaagaaaaagggaaatgatcttcattggttagcatg

SEQ ID NO: 477737 - DNA, 75 bp, Homo sapiens
atttgacaaaagaaggcctatccaactgcaatacaggtttctggtcctcataccgtgtggttgagtgaaatcaaa

SEQ ID NO: 477738 - DNA, 100 bp, Homo sapiens
ttggagaactacagaaacctcgtctccctgggccctgccctgggagaagccctgccacacgtcgtgcccacgctgagggcctgtctgcagccctcccaag

SEQ ID NO: 477739 - DNA, 110 bp, Homo sapiens
agcgttccgctaatcagatgggagtatctgccaaacgtagaccaaaggctcagcccacaactcttgtcctaccacctcagtgtcagttgtacccgaggcgttctcagcag

SEQ ID NO: 477740 - DNA, 76 bp, Homo sapiens
aggacggacaagcacagtcttcggaagtggtagagctttgtgttcagtatggacagaatgaggagggaatggtagg

SEQ ID NO: 477741 - DNA, 100 bp, Homo sapiens
aaaagtggatggatcgttacgaaattgactccttgataggcaaaggttcctttggacaggtgagagttacgtgtgtgcatccaatgaaccatttcgtaaa

SEQ ID NO: 477742 - DNA, 82 bp, Homo sapiens
ctgagcccgtccgtccgccgccaccacccactccggacacagcgcccgggggctggagaaggccaggcagcagctgcaggag

SEQ ID NO: 477743 - DNA, 75 bp, Homo sapiens
ccagcagcccccgaaggccctatcaggacatggagtatgaaagacgaactgtctagtccgacgggaagatcgagg

SEQ ID NO: 477744 - DNA, 50 bp, Homo sapiens
ctccctgctgcataagaccttgtcagagctgctggaagtgaacaagcagt

SEQ ID NO: 477745 - DNA, 99 bp, Homo sapiens
ttgtgcaggacaccgacatggaacagggactcactgggggcttcgggagcaggaaagaaaagaagcagaagaagctagtcaaaaggaaatagaagaatg

SEQ ID NO: 477746 - DNA, 95 bp, Homo sapiens
ttaccagccagccccaccaagtgctggccagtgagcccatcccgttctctgatttgcagcaggcagtggttgcaggaatccagcaggctcacgcg

SEQ ID NO: 477747 - DNA, 75 bp, Homo sapiens
gccttgatggatttgactgcagcttcaaacactttcttgggcaaacgaaggtccggcaggttcggctattccagg

SEQ ID NO: 477748 - DNA, 100 bp, Homo sapiens
ttcacgagggcatatatgaagaaggcatttctattttagaaagcagttcgtgcccgtccgtgatgatgggaacatgcccgacgtgcccagccacccccag

SEQ ID NO: 477749 - DNA, 98 bp, Homo sapiens
aacaaattcatcaaagacgtaatcaaagacggcaacgcgcttatcagcgctatgagaaacattggcgaggaggctgggagatctgccggcgtccagca

SEQ ID NO: 477750 - DNA, 100 bp, Homo sapiens
gttcgacgactccattttcctcggtgggggcttagcgcactggaggagcggcgggcttcagacaggcgcatattaaatttcctattgactacccctattc

SEQ ID NO: 477751 - DNA, 74 bp, Homo sapiens
gttgcaacggagataaattcccggaaccgcgattcggcgtgtcagggaactctcagactttgataaagatggtg

SEQ ID NO: 477752 - DNA, 75 bp, Homo sapiens
aacaggcacgacaagtttctggacactctccgagaggtgaaggtttcctgggagaaggtggcttaaggctgagac

SEQ ID NO: 477753 - DNA, 90 bp, Homo sapiens
ccactatccacttcatgccagatgccccagaccacgagagcctcaagcttctccagagagctccaacagacagaagcagagctcaggaag

SEQ ID NO: 477754 - DNA, 141 bp, Homo sapiens
gtggctaccatgttctctcgcgcgggtgtcgctgggctgtcggcctggaccttgcagccgcaatggaaacttggatttaactggccagaagcaggtattcaaagcagagaacaatccctgggtgacccccattgcagacca

SEQ ID NO: 477755 - DNA, 83 bp, Homo sapiens
cttctgctcaggtgagcagacttctaactggaacgcctggctcttggacaagtgctgtccccggcataggtccatctctgcag

SEQ ID NO: 477756 - DNA, 100 bp, Homo sapiens
tccgccagcccccaggagcaagaccaagaccgcaggaaggactggggccacgtggagctgctggaggggagtggttttcagagacatttcagaaagtgaa

SEQ ID NO: 477757 - DNA, 75 bp, Homo sapiens
cgccgattcctcctccttggtcgccgcgtccttggctggcgtcccgagggcaacatccttcgagaccggttcaag

SEQ ID NO: 477758 - DNA, 90 bp, Homo sapiens
gtccttattattggccctccagatacactttatttctccttggaccaagatgactgatggaaaactctccacctctacaaatggcgtagc

SEQ ID NO: 477759 - DNA, 95 bp, Homo sapiens
aggacgcgccgcggccaggcagggaggagaccggcacccagacaggtggcgaaggcagaggagaatcccagtcagaagttccagcctgccactgt

SEQ ID NO: 477760 - DNA, 97 bp, Homo sapiens
ctgcacttcttttttgagaaaggaaggaatatatcctgactgattatgcaccagcaaggaatactgaagaccgatgatctcataacaaggttctttc

SEQ ID NO: 477761 - DNA, 97 bp, Homo sapiens
attgacagacacaagtaactcctcttcatccactggggaggaagatgctgagggttggaaaagcaaaagcagatgtgtggcccaaaactgctccaaa

SEQ ID NO: 477762 - DNA, 83 bp, Homo sapiens
ggagcgcagaaccggccgcgcccgaatagcctaacatggcagaccagagacagcgctcactgtctacctctggggagtcattg

SEQ ID NO: 477763 - DNA, 100 bp, Homo sapiens
ctgggaacagttccatcagcctcggaatctcctcctggccttggttggggaagtgggggagctggcagaactcttgcttgaccactatgctatcatcaag

SEQ ID NO: 477764 - DNA, 117 bp, Homo sapiens
gtcgccagaaggaagatggcggatctggaggagcagttgtctgatgaagagaagaccaagatcactccatggatgaaatgacagctgtggtgaaaattgaaaaaggagttggtggca

SEQ ID NO: 477765 - DNA, 102 bp, Homo sapiens
agtgttcaagaaggccagtccaaatggaaagcatcctaatgtcctatgatcacgtggaactcacattcaatgacatgaagaacgtgccagaagccttcaaag

SEQ ID NO: 477766 - DNA, 50 bp, Homo sapiens
ttatcttcggcgctttaattttcaaatagcaggctcatatgaatcaacca

SEQ ID NO: 477767 - DNA, 50 bp, Homo sapiens
ctctggatcatcgaactgaatcaaaccagtccagctacgggggcccagcc

SEQ ID NO: 477768 - DNA, 100 bp, Homo sapiens
aaggccgggacccggttccccggcccacagtgggggtgtgcaaacccgagagaactgggtgctgacagctgcagaagaaattgtacatggtgctgtacag

SEQ ID NO: 477769 - DNA, 112 bp, Homo sapiens
cagcagcccccgaaggccctatcaggacatggagtatgaaagacggagaataaaggcagccccgttgatgactgaaaatgacaaagcatccacctaacagacgaggaatcag

SEQ ID NO: 477770 - DNA, 99 bp, Homo sapiens
cccactcgggctctccgctgactcagcaccgcccctgcgccaagccagccggccagggtaaatggatccttctatgagatcttgcaagtggactttgga

SEQ ID NO: 477771 - DNA, 75 bp, Homo sapiens
cagattcagaaggagcaggattaccaaagggttgcctgcaggagggaaggcggtgaacacagcccccgtgccagg

SEQ ID NO: 477772 - DNA, 100 bp, Homo sapiens
agtgtgggatagtataatccagcaggcaaccaaaattacaggctgtgccagccctggaaaaacagttacaattgttgttcgtggttctaacaaactggtg

SEQ ID NO: 477773 - DNA, 100 bp, Homo sapiens
aagcccacaaccgccctcctggacaaggtggccgacaacctggccatccagcttgctatgaagatgtgtgtgtctttaagtgctcagtgtcccgagagac

SEQ ID NO: 477774 - DNA, 98 bp, Homo sapiens
attcgcagtggtcgcttcttctccttggcttgtctggagcgggaaagactactgtgagcatggccttggaggagtacctggtttgtcatggtattcca

SEQ ID NO: 477775 - DNA, 75 bp, Homo sapiens
ttaaattcaagaaggagccctgtcccagcactattcctgatcagagaactccagttgcttcaacacacagtatca

SEQ ID NO: 477776 - DNA, 83 bp, Homo sapiens
cccggagcgcttgaaggagctgcggcagatataatttctacagtagaatttaatcattctggagaattactagcaacaggaga

SEQ ID NO: 477777 - DNA, 75 bp, Homo sapiens
gttctcaaggagaaggcagacctggcatcatggcagaacaggatgtggaaaacgatcttttggattacgatgaag

SEQ ID NO: 477778 - DNA, 100 bp, Homo sapiens
ttccttcagccaaagaaacaagccgtggaataggtgtatcaagtaatggtgcaaagcctgaatgaaggagaacgacctgctcagaatgagaagaggaagg

SEQ ID NO: 477779 - DNA, 80 bp, Homo sapiens
ggacagtgggcagtgctcccggaacacaagctgtgaaacactagactccatcaagaatgctggaggaagggtgtttgtcc

SEQ ID NO: 477780 - DNA, 100 bp, Homo sapiens
agcagctcatccctgtgcatggtgatcaccatctattatgactgtgtacagtgccctgggcctgagggatgcctgccgctccctgccgcagtccatccag

SEQ ID NO: 477781 - DNA, 82 bp, Homo sapiens
gaccgagaccgcggccgggaccgagggctccccacaggtgcaggaagccgccgcccagccatggacggggaggagcagcagc

SEQ ID NO: 477782 - DNA, 75 bp, Homo sapiens
tgagaccgggggaggcgacgctaagttgctgatcgtggcgaagtccattggaatattaagcccaggagttgcttt

SEQ ID NO: 477783 - DNA, 82 bp, Homo sapiens
agctggctaagctcatcattgttactggttgatgccggcccaggatggatcagacctgtgaactacccagaagaaattgtct

SEQ ID NO: 477784 - DNA, 101 bp, Homo sapiens
cagaaaccagcacaatccagcattcagatggatgataaaatcctcaagacaaccacacgggatttatgtgatcagtttggctgaaccccgtctgcccctgc

SEQ ID NO: 477785 - DNA, 107 bp, Homo sapiens
tccagtgctaggaaacattcccccaggagatggcatgccagtaggtcctgtaccaccagggttctttcaggtgaagctcgtgtgtggagtgccacggtacaatcaga

SEQ ID NO: 477786 - DNA, 83 bp, Homo sapiens
gcctatggtcggcctccgacagcgctccggagggaccgggggagctcccaggcgcccggaagctgcacacatacatgtaagag

SEQ ID NO: 477787 - DNA, 90 bp, Homo sapiens
gtggggttggccaagctctcggaggagatctcggctccagtttcggagcggatggtttttcgttggaatatacgttgcacatttatggcg

SEQ ID NO: 477788 - DNA, 74 bp, Homo sapiens
agaaagatggatttttgcatgagacgcttctggacaggtgtgatgaatgcagactctgctaccattttggctgt

SEQ ID NO: 477789 - DNA, 75 bp, Homo sapiens
gccgtcctgaacctgttatcacctggagacaccttacaccaactggtgccgtgagcgatgtggagatgcaggaac

SEQ ID NO: 477790 - DNA, 126 bp, Homo sapiens
aggcgcgccactcctcccggaggcgacatggggcacccggtgtaccgcggcgagaagccccagctgcactacgcggtactccaaagattcaggtttactcacgtcatccagcagagaatggaaagt

SEQ ID NO: 477791 - DNA, 100 bp, Homo sapiens
cagactcaggtaactgttcagaaaattggaaaggaaattgaagaaaaactaagactcacatctacaagcaatgaactgagtaaacatcagtctccaaaga

SEQ ID NO: 477792 - DNA, 100 bp, Homo sapiens
tttcgtcctcttccgttcttcacccctacaccttggataacggcacagccaacaagatgaacggagctttggatcactcagaccaaccagacccagatgc

SEQ ID NO: 477793 - DNA, 100 bp, Homo sapiens
gcgggctctgccaggagagaagactgatgggaaactcttgtctagtgatgtgactcattacgtgatcccagactggaaagttgttcaagattatcttgag

SEQ ID NO: 477794 - DNA, 83 bp, Homo sapiens
caccaagaggaaggagaattcaaccttttttgataagaaaaacatgattcccgtgacagaattccggcagttctctgagcagc

SEQ ID NO: 477795 - DNA, 101 bp, Homo sapiens
gcaggatctgcagaagacgcagggctcaaggaagtgctggactccctggtcagcaatgtcaacattgagctgctcaatgccctccgctaccatatggtggg

SEQ ID NO: 477796 - DNA, 116 bp, Homo sapiens
ctttaattacgatcatttggcttccacctgcctgaacccgataccttacacgggaacctgtatgataagtgcctagctgccactccatttatatgaggcaagaaggcttcctggct

SEQ ID NO: 477797 - DNA, 51 bp, Homo sapiens
ggaatttgtggctggctggatctctgtgctacaaggtgagctgcctggaaa

SEQ ID NO: 477798 - DNA, 80 bp, Homo sapiens
aggagttcaaggcctgcctcatcagcctgggctacgacgtggagaacgaccggcagggcatggcctatctgcacgcgcag

SEQ ID NO: 477799 - DNA, 74 bp, Homo sapiens
gcggatttggctggcgtcccgcggagatacttcaggggattaccggaagattctgctgaagatctgtggtggca

SEQ ID NO: 477800 - DNA, 98 bp, Homo sapiens
ctgagcaaagtgatcattgttgacaattcccctgcctcatacatcttccatcctgagaatgcagctcctcctgctggaccctccagccccgggcctca

SEQ ID NO: 477801 - DNA, 100 bp, Homo sapiens
gaggaggctcatgcgggatttcaagcggttattcagcttctcaaggctggaaaagcgaaggaagtttcctacaatgcactagcctcacacataatctcag

SEQ ID NO: 477802 - DNA, 100 bp, Homo sapiens
gctttcttccccggcagagtttttcgagctcatgaagctctgcagccagatggaacagctggagcaagagaaccagcaactgaaggagggggctgcagga

SEQ ID NO: 477803 - DNA, 100 bp, Homo sapiens
attttgaccaatttaaagaagcattaatactcatcttgtccagaactctgtcaaatgaagaacactttcaagaaccagaccacagatgacatccttgtgg

SEQ ID NO: 477804 - DNA, 82 bp, Homo sapiens
ccaggatctcgggctcggaacgagactgcacgacacttcgtgtatgatcatgtgttcgctgagaagatcacttccttgcaag

SEQ ID NO: 477805 - DNA, 99 bp, Homo sapiens
gatgtggggggattctcgacctgctaacagaactggaccttttcgggaccactgacaattagggatgtgactgtagaattctctctggaggagtggcat

SEQ ID NO: 477806 - DNA, 90 bp, Homo sapiens
aactgattggaaactctttgggaaagccactcgaaaaggttagtcatattgatgtgatcacagcagagatggccaaagactttgtagaag

SEQ ID NO: 477807 - DNA, 100 bp, Homo sapiens
gtatggactactatgactctgaacatgaggagctggtttcacctgaggacctgctggagtggctgcggcctttctgtgctgatgacgcctggccggtgcg

SEQ ID NO: 477808 - DNA, 83 bp, Homo sapiens
gataaatacatcagacattatattggttggtctacgggactatcagtttgtgaatagcacaatggaagaagctggactttgtg

SEQ ID NO: 477809 - DNA, 100 bp, Homo sapiens
cgtgaagattccaagttcaggagaactcgaccgctgttttcactcattagctcctgaggtaaacaaattgaaaaaatgagcgaactggaacagttgaggc

SEQ ID NO: 477810 - DNA, 100 bp, Homo sapiens
gagctcatggttgagtgtacgaagaaatggatatgaacgagactgccaaacaagaagatattttggaatccacaacagatgctgcagaatggagcctaga

SEQ ID NO: 477811 - DNA, 50 bp, Homo sapiens
cagcctcctgagcagctgggactacagcattttgaaagcgaagcagaagc

SEQ ID NO: 477812 - DNA, 100 bp, Homo sapiens
ggcgccatccttcagaatgcagggaaagaatatggcaaagctgatgcaagatgggtttattttgatccaaccattgtgtctgtggaaattctgaccgtcg

SEQ ID NO: 477813 - DNA, 90 bp, Homo sapiens
ttgcaccaaacacacctcagctggctgacattgttgcaacagggcctgtttccttggctttgaagttgccatgaagttccttaattgggc

SEQ ID NO: 477814 - DNA, 90 bp, Homo sapiens
tcaaaagagattaaaacaactcagcaatgggacgctgaaaaatgacaatgttacgagaactggtcagcatgtgcatctgccctgaccccc

SEQ ID NO: 477815 - DNA, 82 bp, Homo sapiens
tcgcctttgccgatccgccgcccgtccacacccgccgccagctgtgttgggagtggaagaggaggaggcccccgacatcggc

SEQ ID NO: 477816 - DNA, 75 bp, Homo sapiens
cctccaggaaggactgggaaccgctgtcagcatcaggcccagactggtcttgtcaacggaaaggggtccctatcc

SEQ ID NO: 477817 - DNA, 75 bp, Homo sapiens
tgtttgtggatcgctgtgatcgtcacttgtttgattcatccagattcctcaaatactcctctttcaacaagactt

SEQ ID NO: 477818 - DNA, 90 bp, Homo sapiens
ggaaaaagaaactggaatctcccaacagagaaattattattttacacaatccaaagatcctgtctacctttcatgaccaactacagtttt

SEQ ID NO: 477819 - DNA, 96 bp, Homo sapiens
gagccccgtggatccgctggagcggagccggccgtacgcggtgctgcgagggcagaacctggatccgctttatcctcatccagaaccgggcaggca

SEQ ID NO: 477820 - DNA, 100 bp, Homo sapiens
ctccgaccagtctgggggcgctggcggcctgcgcagccacctcaagggatgatcatggtgattttactgctgcttgtggctatcgtggttgttgcagtct

SEQ ID NO: 477821 - DNA, 100 bp, Homo sapiens
ttgagaacctagaaatcatacgcggcaggaccaagcaacagattatacttactcagctgttaagagtaggcaatttcttcagttcttccacaagaaatca

SEQ ID NO: 477822 - DNA, 98 bp, Homo sapiens
ctgcccccttttcctggtgcatgtgaagttatcaaaaacagatgcctggaatgatgtcgtcagtaatgcctggaatgatgatgtctcatatgtctcag

SEQ ID NO: 477823 - DNA, 98 bp, Homo sapiens
ccgtatcttccagcccacaccacctggggcacgaaagtggaatgcagtagccctctgggcctgggatattgtggttgataactgtgccatctgcagga

SEQ ID NO: 477824 - DNA, 75 bp, Homo sapiens
cccacatcaatgcactgccaatggtgacttaagagattaaaattaatttggttgctgttggttctgaacaaataa

SEQ ID NO: 477825 - DNA, 123 bp, Homo sapiens
acgggtgtccagcaacggcatctttgatcttcagaaaacttcccttggaggggatgcaccagaagagccagagaaaagaatttctgcttggacactgcatagctgctgggaaaatgaacatca

SEQ ID NO: 477826 - DNA, 97 bp, Homo sapiens
tgcagtacctgcagaaggtctctggagacatcttcagcagggtcttactacatattgcaacagaagataatattggaggtgaagagggtaacatgaa

SEQ ID NO: 477827 - DNA, 75 bp, Homo sapiens
aagaaatagaagctgaatatgctgcattagacaaacgagaggcacatgaggatttcatgtatgacatcatacgag

SEQ ID NO: 477828 - DNA, 106 bp, Homo sapiens
aagagccaccagtttttccagtccacatgggacactgttgccttcattgttttcctcaccttcatggggaacaggcacggtctcctggtacccaacaataccaccg

SEQ ID NO: 477829 - DNA, 100 bp, Homo sapiens
atcgtatgtccgctatccagaacctccactctttcggagttggaacaaaaattgaccccactttgtgccgggctgacagaatggtggggcaagtacttgg

SEQ ID NO: 477830 - DNA, 82 bp, Homo sapiens
tgaagagcgacaagccgctggcagccgcggatctcaccgccgctcaggaaagagctcttggaggaagttggccagaatggca

SEQ ID NO: 477831 - DNA, 96 bp, Homo sapiens
gtggccttacggggtgctgtcacgctgcctttggcagcctaccagcactacatcctggccaaggaaggtgtcttgctgcaggtaactaatgaagaa

SEQ ID NO: 477832 - DNA, 50 bp, Homo sapiens
tgctgcagaagcgtagtcggccagagctgatgtagaaggccaatccttaa

SEQ ID NO: 477833 - DNA, 100 bp, Homo sapiens
tgaagagctgccagatcccacaggactccagaagacctttccagattcgtggttgagctgcagcagagggagcttgccttgaaggacaagaacagcgccg

SEQ ID NO: 477834 - DNA, 75 bp, Homo sapiens
cctgcctcagcctccaaagtagctgagactacagaaggaagaatcctgctcaaaaatgaggtgaattaatacttg

SEQ ID NO: 477835 - DNA, 76 bp, Homo sapiens
catctcagccacgaagtacagccggagggacgtccagatcggtgacatcgtcacagtgggcgagtgccggcctctg

SEQ ID NO: 477836 - DNA, 97 bp, Homo sapiens
agcattttgcaacgcagttcggagttattatgaggttaatttggagtggcccctggagtcagtttcctacaccatccgaggccccacccagcacgag

SEQ ID NO: 477837 - DNA, 100 bp, Homo sapiens
agagcgctcccaggagaaacaagagccaaaaacctgtatatcatctccgtgaaggggatcaagggacggctgaacagacttcccgctgctggtgtgggtg

SEQ ID NO: 477838 - DNA, 98 bp, Homo sapiens
cctggatcaccgacagcacagacagaatccctgctaccacactgaacctaccagatgtatttgggttggtcgtcctcccattggaactgaaactacgg

SEQ ID NO: 477839 - DNA, 80 bp, Homo sapiens
ccccgcctccctcccgcgcgtgctgcgggtctgctcgggggtctacttcgaggaccatggtgaatccgggcagcagctcg

SEQ ID NO: 477840 - DNA, 100 bp, Homo sapiens
caaggtttactgcaacttcacagccggggggtcgacatgcgtcttccctgacaagaagtccgaagggatgaagatctccttcaacgacaaaagcctgcag

SEQ ID NO: 477841 - DNA, 114 bp, Homo sapiens
aaggagctgtcagatggagaaataaaagtggccattagtactgtgagcatgaaccttgagtttaaggaagaaatctctaaacgttttaaatcacatactgaccaacttgtgttg

SEQ ID NO: 477842 - DNA, 55 bp, Homo sapiens
cagcctcagcggcagtgttctgtgtgcagattggccatctgcaagcttcccttct

SEQ ID NO: 477843 - DNA, 98 bp, Homo sapiens
tggagacatgagcaagaaaagcctctgggagcagaagggaggctccaagacctcatcaacaattaaggtttcagcacagccagtcccacaggagccca

SEQ ID NO: 477844 - DNA, 128 bp, Homo sapiens
gactgggctgtagtgaggaaggacctgctgatgaatattacatcatataccgaaatgtttttgataaggttccctctggggtcctataccatacaaaatattgttgctggatcaacttacctgttttc

SEQ ID NO: 477845 - DNA, 100 bp, Homo sapiens
agcctccgtgcagccgtggcgtgcaggactcgggtggctctgaggtcgcctggggaccccagaagaatgctgaccccctgaaggtgtacccgccactgaa

SEQ ID NO: 477846 - DNA, 75 bp, Homo sapiens
cggaagcccaagtggcacaaatgcagaaactccctctggtgatgatttcaggctgcaataggatctgtggctttg

SEQ ID NO: 477847 - DNA, 100 bp, Homo sapiens
ggaagaactgttcttgactttcagtttttcgagcgggtttcaaggtcactcctggaagcaaggcggctctagctaatttatgtattggagatgtaatcac

SEQ ID NO: 477848 - DNA, 100 bp, Homo sapiens
tttcggacccgcaggtccacacggtgctggtggagcgctccacgctcaaagatgcgtttagcccagcccctgctggtaaccaaggtcctcctccaatgat

SEQ ID NO: 477849 - DNA, 51 bp, Homo sapiens
agcggaaaatgatccagtcacagaacaagcgagtgagcatcaataaagatg

SEQ ID NO: 477850 - DNA, 80 bp, Homo sapiens
gaaaatggttcccactgccgggcgagatcaagtctcgggttctcatgactcccttagccctctcacctccgcggagtacc

SEQ ID NO: 477851 - DNA, 100 bp, Homo sapiens
ctgtgtaagagctgcagaaaatgatcagcttccaggaccttgaagaacagctggaggaggaggaagctgccaggcagaagctgcaacttgagaaggtcac

SEQ ID NO: 477852 - DNA, 75 bp, Homo sapiens
aggaagttggccaaagtatcccacatgacgagtgtttcagggagaccttgcatcaccatggggagtgtgatacca

SEQ ID NO: 477853 - DNA, 75 bp, Homo sapiens
ggatgtgccaccagaacccaagaagattccgataagaaacacggttttgcacactagggaccaagaagccctcgg

SEQ ID NO: 477854 - DNA, 75 bp, Homo sapiens
gcgggctggagcctgacgagctggcgggaagctgaatatggtgggcatgatcagatagatttgtatgacgatgtc

SEQ ID NO: 477855 - DNA, 83 bp, Homo sapiens
agtgcatcctctcacaccccagctgtgcatggtgcaagcaactggacgccaggaaagcatgtgcagatgcaactctctctcag

SEQ ID NO: 477856 - DNA, 115 bp, Homo sapiens
agctgagtggttgtgtggtcgcgtctcggaaaccggtagcgcttgcagcatgtcaggatggctaaaggtgaccccaagaaaccaaagggcaagatgtccgcttatgccttctttg

SEQ ID NO: 477857 - DNA, 89 bp, Homo sapiens
gtcccggagcctggccagctgcacttcaaccaggcagaggttgaaaagataattgcagttgcctgggacatttttcagccccttctttt

SEQ ID NO: 477858 - DNA, 50 bp, Homo sapiens
gcggttcagccctttgatgaccgcagcagacctggaatggccaaatatca

SEQ ID NO: 477859 - DNA, 90 bp, Homo sapiens
ccttctgggagcctgtacccatggaggtactgggcctaatcgctacgtgcctctttggctatgatgcctatgtcaccttccccgttcggc

SEQ ID NO: 477860 - DNA, 82 bp, Homo sapiens
tatagcacaccatccccagccataagactttgaccccgacgcaggcttcagtgattgccgcggatcagaagcctgagcactt

SEQ ID NO: 477861 - DNA, 100 bp, Homo sapiens
ctgtgtttgaccgtgacaacaacagggccaagactaaggggctgcagagcggggtggacattggcgtcaagtactcggagaagcaggagcggaatttcga

SEQ ID NO: 477862 - DNA, 96 bp, Homo sapiens
tgggggaaatgacagcttggaccatgggcgcccgcggtctggacaagcgaggaagtttctttaagctctttcgacgtgtagcagcagctttgccgg

SEQ ID NO: 477863 - DNA, 75 bp, Homo sapiens
cagctctttcctttccgtctggcggcagccatcaggtatggacctgtctgccaatcaggacgaggagaccgacca

SEQ ID NO: 477864 - DNA, 82 bp, Homo sapiens
agaggccgtgcgggacgcgggcgccaggaccggccgaacgcagagggactggtgattgcagctggaagtgcccatgaccgag

SEQ ID NO: 477865 - DNA, 73 bp, Homo sapiens
gctgcccctgggaaaccagagagtcggagggagtccatctggagcggccaaatcggacagctggcttttaaag

SEQ ID NO: 477866 - DNA, 75 bp, Homo sapiens
aggcagagtgctgatgtgaaaaataccacgacaaaaccaccctagaaagaatacccacctcatgtccaaaaagtt

SEQ ID NO: 477867 - DNA, 99 bp, Homo sapiens
agcatgaaaagtgcctctaagacatccacaggtgtgcagtgttaaagcaggtgcttaatttacccatttctgatgcgaggaggaaagcctatgccactg

SEQ ID NO: 477868 - DNA, 98 bp, Homo sapiens
gtcccaatcccccactctttccgccctaatggaggtctccagtttcggtttttctatatgagtggagaagacagctgttaccagggaggtcatacaac

SEQ ID NO: 477869 - DNA, 95 bp, Homo sapiens
ggccaaatggacgggactattaagtcatccgtccttggctcaggatttggagagcttgcaccaccaaaaatggcaaacatcaccagctcccagat

SEQ ID NO: 477870 - DNA, 75 bp, Homo sapiens
ccgagtgcggcccggaggcggcggagggcaccccgggcgggcggcggctgctgaaggtgctcgggtcttcggggc

SEQ ID NO: 477871 - DNA, 100 bp, Homo sapiens
aaacaacagaagaactgagctatttttgaaagaacatgaccaccttcgaaacactgctcagcacgcaggcatgtgaggaagctgggcttaaaggagactc

SEQ ID NO: 477872 - DNA, 82 bp, Homo sapiens
cacttcctgcagtgggcattagccacgtccaggtgaatcaaaaactctggttttaagcaacctctcctacagtgcaacagaa

SEQ ID NO: 477873 - DNA, 75 bp, Homo sapiens
cgaacagagccgggagttcaagaagaacactccagaggtgattgatatgcccgagcacaaccctggcaatttggg

SEQ ID NO: 477874 - DNA, 90 bp, Homo sapiens
gtgggacctagattagaccatgaacgagccaagattgacatggtacatcgtaacaagtccgaaggattcttccttgatgcatctcgacac

SEQ ID NO: 477875 - DNA, 83 bp, Homo sapiens
ctctggccgcgcctggcctggccgggaccatgaccacgtggccgtgaccatccagctcctccttagacgaggcaacatcttcc

SEQ ID NO: 477876 - DNA, 78 bp, Homo sapiens
ggctttcctgctgagtgcatttcagtgctgacttgctcatcagttttgcacagtggcaattttgggactgatttagaa

SEQ ID NO: 477877 - DNA, 75 bp, Homo sapiens
gaaccaggccgtgtgccatgactacgacatccacttctaccccaccttccgggaggagatgttaaagtaacccat

SEQ ID NO: 477878 - DNA, 76 bp, Homo sapiens
gcaagacaaagggaagaaataaaattttcccatactgaattcatgatgttgctatcaaaagttgagaaattgtcag

SEQ ID NO: 477879 - DNA, 75 bp, Homo sapiens
aaaatcatctgcccggcctgtgggatgcaagtgggaggttgagttgttacaacaaaagttgagagaaaagttgga

SEQ ID NO: 477880 - DNA, 110 bp, Homo sapiens
cagcacctacgtcccgctgccgtcgccgccgccaccatgcccaagagaaaggcttgggcactgtttaaaggaaagttccgagaaggcatcgacaagccggaccctcccac

SEQ ID NO: 477881 - DNA, 95 bp, Homo sapiens
agcaatttgggcaactttaattatggtttttcgttggaatatacgttgcacatttatggcgattctgagtgtgagggcagacttctgccaggctc

SEQ ID NO: 477882 - DNA, 100 bp, Homo sapiens
gattcggaaacttcagatacgaaatatcccgcctcatttacagtgggaggataggaaaaacttgttggagacccgattgcacatcactggcagagaactg

SEQ ID NO: 477883 - DNA, 100 bp, Homo sapiens
ctgggagagcggtcggcggggtttcttcgttgcattgcctgagaggagcggagtctgccaggtggtgtccatcatggagtggttaatgtgttgctaacaa

SEQ ID NO: 477884 - DNA, 75 bp, Homo sapiens
ggactgtctatgatgtcatgtttgtcagcacaggtgtggacactgccagcggctgcagccgacttggaatgacct

SEQ ID NO: 477885 - DNA, 90 bp, Homo sapiens
gtgagcttggggacgcacggagaggtgcagctggagctattctcaagctggaataactgagactgaatggacaagtggatcttcaaaagg

SEQ ID NO: 477886 - DNA, 97 bp, Homo sapiens
cccctcatcgagctcttcgtcaaggtggtggacataatgcgagttaacgtggacaaggttctggaaagagaccagaagctctctgagttagacgacc

SEQ ID NO: 477887 - DNA, 83 bp, Homo sapiens
aaagcgtctctacaaagtgatccggaagctatgcccactggaagggccaagtgctgaattcagatgagctccaggagttgtac

SEQ ID NO: 477888 - DNA, 82 bp, Homo sapiens
cctgcagcgggagctggacggcgagcgcgagcggcgcgagaaattcaaggagcagggacaagttacaggaatgttctccaag

SEQ ID NO: 477889 - DNA, 75 bp, Homo sapiens
agctgtatagcatcttcactgtaaaggaggatcaacactctgtggtaggccagaacacaggccccagtccaagtc

SEQ ID NO: 477890 - DNA, 76 bp, Homo sapiens
gggagtaaaaacaggctggtgcagacagcagagctcacaaaggcctagttccccgagagcgttcagacagtggggg

SEQ ID NO: 477891 - DNA, 100 bp, Homo sapiens
gtctctgctgggcctgtgtgcctggaaaggaattgttttggcctaggatcatccaggtggtcctggctctgccatatgacacccccgtgcccggctacat

SEQ ID NO: 477892 - DNA, 75 bp, Homo sapiens
gatcttctcatattcgggaaggagctaaggtacttgaagctggtgtgtgtttcctttcagcgtcaagggttccac

SEQ ID NO: 477893 - DNA, 98 bp, Homo sapiens
tctgttacgttaatgatattgtgcttgccatccttgaattactaaagttgggtcttgaggcaaaaaaagaagaaaatcttgctgattggtattctcag

SEQ ID NO: 477894 - DNA, 95 bp, Homo sapiens
cggaacccgtggtcctccgcttcatgatccacctctgatgttcagtgaagactaccagaaaagtctgctagagcagtaccatctgggtctggatc

SEQ ID NO: 477895 - DNA, 90 bp, Homo sapiens
gagggaggaacactctctgaggaagcccaactcctatgagctcctctctggcaggatgtgtttcacatggtagttgaagtaccacgctgg

SEQ ID NO: 477896 - DNA, 90 bp, Homo sapiens
taattttttcccaggagagagatgtcttatcaggggaagaaaaatattccacgcatcacgggcatccgcttcgatcctgaaattccgcaa

SEQ ID NO: 477897 - DNA, 100 bp, Homo sapiens
agcagacttacgcactgtggatccagagacacaggcacgactagaagcattgctagaagcagcagtgcaccaattccagctggacatcactgtgaaaatg

SEQ ID NO: 477898 - DNA, 83 bp, Homo sapiens
ggctacctggtactgagtgaaggtgcagtgctggcgggcagcggtcttaattctttttatgatcaacgagaatacatagggag

SEQ ID NO: 477899 - DNA, 71 bp, Homo sapiens
gaacttcaatcccatcatttccagaaaggacatcacagcaggtgccgaacccacggccaggcttccgtggc

SEQ ID NO: 477900 - DNA, 74 bp, Homo sapiens
ctggtgtaccaggcgaagctggccgagcaggctgagcgatacgacggtcaaaaggctgagtttcaaattctgga

SEQ ID NO: 477901 - DNA, 100 bp, Homo sapiens
tcaacctggagctctacgcctcctacgtttacctgtccatggtgcagcggaactgctgcctgacgctctgcaacttcagcatccccgaggagctggaatt

SEQ ID NO: 477902 - DNA, 98 bp, Homo sapiens
aaaacaattgaagatagaaatataaagaataaaaagtcaacaaataatagagcatccagtgcatctgccagaaccttgatgctctgcacgaccacctt

SEQ ID NO: 477903 - DNA, 98 bp, Homo sapiens
cttgcctggctcctgtggtggcaggctgggcacgaggaccatgctgggccggagcctccgagaaataagaaggctgactgcacaatcacaatggctga

SEQ ID NO: 477904 - DNA, 98 bp, Homo sapiens
tcaagctgggcatccagggctcgtacttctgctcgcaggttttgcgtgtgaagctgtgtggaaatgtgaaatactaccagtcacaccattatagtacc

SEQ ID NO: 477905 - DNA, 121 bp, Homo sapiens
gcgcgggcgtggtgcgggagctgtgcgcgcagccgggccaggtggtcgccccaggcatcaagatggtgctcatgtggaccagtggtgacgccttcaagacggcctacttcctgctgaaggg

SEQ ID NO: 477906 - DNA, 100 bp, Homo sapiens
aacatcatggactggctgggacggagcctgacctcttacttcctgtgggtgggaacatccagttgcaggaaaacaagcttaacacgcccactgattctac

SEQ ID NO: 477907 - DNA, 78 bp, Homo sapiens
gaactaaacaaattcatcccagaaatctaagaggcgcctgtgtctggcagagctggtgtgagacgagacaatcctgcc

SEQ ID NO: 477908 - DNA, 100 bp, Homo sapiens
gttggaggcttcgcccggctttgcagcggggacttcggcggcggcgcctcaggcacctcggcccggggagttcaggcacaaaagcaacatcaccttcaac

SEQ ID NO: 477909 - DNA, 100 bp, Homo sapiens
acgatcggagctgcacggaggagacccatggcttcatctgccagaagggcacggctcctgggcaacgtgctggtctgtgtgctggcccatcactttggca

SEQ ID NO: 477910 - DNA, 83 bp, Homo sapiens
tcacttccagccagctgtgaagaagacaatgcagatcttcgtgaagactctgactggtaagaccatcaccctcgaggttgagc

SEQ ID NO: 477911 - DNA, 83 bp, Homo sapiens
ccaaccagagattcatctttcatgcagtgacatgttgataaaaaatgatgattattttcgaaataccagtatttcgactccag

SEQ ID NO: 477912 - DNA, 82 bp, Homo sapiens
attaatgaaccttgacccacaccaaggtagttgatgtcacttggcgatattcctgcaaacatgaagaggtgattgccagaag

SEQ ID NO: 477913 - DNA, 75 bp, Homo sapiens
tggaccttccggagcttctcagaagacagagggttttcttttgagacttgggtcctggcctctgatttctccaac

SEQ ID NO: 477914 - DNA, 111 bp, Homo sapiens
ctgggagcctagaatgcatcagtgcccttgtggcgaatggggctcacgtcgaatctattgcagattggctccgagcccctgacaccatgtatttgttggactttgtgaagc

SEQ ID NO: 477915 - DNA, 51 bp, Homo sapiens
ctggatgcagctgcccttcctggacaggacttgattattcttagaaatgca

SEQ ID NO: 477916 - DNA, 100 bp, Homo sapiens
ccttgatgacttccttgctactgcagaacttgcaggaacagagtttgtagctgagctaaaaaagtccctgtacgccatcttctcccagtttggccagatc

SEQ ID NO: 477917 - DNA, 75 bp, Homo sapiens
tgctccgacctaagcggagcagcctcaagagccgagccgaggatggtgattgctcacaccaaagccttggacccc

SEQ ID NO: 477918 - DNA, 50 bp, Homo sapiens
agctctctgtaagaaatatgctgatcttatgcctgtcttagatgtcaagc

SEQ ID NO: 477919 - DNA, 100 bp, Homo sapiens
gactggtgacatgcagttgtccaaaagtgaaattttacgaactcagtggggttgcccagactctcaagaaaggagaagtttttttgtatgaaattggagg

SEQ ID NO: 477920 - DNA, 129 bp, Homo sapiens
tgaacagcattctatcatggaaggaggagatgaagggcaagggccaaaatgatggtcttaaagaaagtgcagaagagatggtcaaaaacaaattggaaggaaaggataaactgaccccttgggaacaat

SEQ ID NO: 477921 - DNA, 100 bp, Homo sapiens
gtgagtgccgatcaccgaatgggccgagagaaaaggtatgtcttactgaaagaaagaaacatgcttctaaccctagagcaggaggccaagcggcagagat

SEQ ID NO: 477922 - DNA, 100 bp, Homo sapiens
ctttgcccaggagtacgcacctgctggggacctgtttgacatcatccctccccaggaacccaagacagaccaggatgaggagcattgccggaaagtcaac

SEQ ID NO: 477923 - DNA, 82 bp, Homo sapiens
gataagaacccagaaacccgacccagtgccgcgcagctgctggagggcgtctctggccgagcctctttttgtggaaaacgac

SEQ ID NO: 477924 - DNA, 100 bp, Homo sapiens
cttggtccagtctggctgcagcaaaaagcagatgcagttcttaatgaagctgctcaaattctgcgattgctgcacatagaggagctcagagagctacaga

SEQ ID NO: 477925 - DNA, 75 bp, Homo sapiens
cctggacttaaatttaaggactgggtatcaagtaaacgaagattactgatctctcattacccaactatctgatgg

SEQ ID NO: 477926 - DNA, 100 bp, Homo sapiens
tgcattgagcttgggtcaggacaattccatttggggaccagagatggacggtcactcagcctatggaggtgacgcagctggaccagaggctggcactcat

SEQ ID NO: 477927 - DNA, 75 bp, Homo sapiens
cggcgccctggggccccggagaggccagaagcctgtcttagatgttcatgcagaactagacagaattacacgaaa

SEQ ID NO: 477928 - DNA, 82 bp, Homo sapiens
gaagagcgacaagccgctggcagccgcggatctcaccgccgctcagggatcctggtgcacctgagccgtggaggggctgaag

SEQ ID NO: 477929 - DNA, 90 bp, Homo sapiens
tgaaaatgggagaggtagatggcaaaaagattggctgcacagttagccttctgattgagaggatccagaatccagatctctggaatagct

SEQ ID NO: 477930 - DNA, 101 bp, Homo sapiens
cggagcgagcggggccggcggcgggcgccgagggacgccgaggcctcgggcgggggctggcccggggttccaggtggcagtagagaagagcatcacagaag

SEQ ID NO: 477931 - DNA, 100 bp, Homo sapiens
tttcccagaagttgttctaacgctgcctttgctttaaaacagtattacttgcgatatgaagagcattttaagaggtgcagcctctggaagtggatcaaac

SEQ ID NO: 477932 - DNA, 75 bp, Homo sapiens
cagtcacgagacctcactttgatcacagaagaactgcagcttcctggggagcagtttcacctccacaggcatcgc

SEQ ID NO: 477933 - DNA, 100 bp, Homo sapiens
gtcagctcggctgagaaagctggaggtggaagccaacaatgcctttgaccagtatcgagacctgtaagaatgattgatgttggctgatattggagtgctc

SEQ ID NO: 477934 - DNA, 75 bp, Homo sapiens
cagcctcaaacaggagctggagcagctcaaagagattctctcgggcctagccgtccttggaacccgatattcggg

SEQ ID NO: 477935 - DNA, 90 bp, Homo sapiens
aaggataaatctcatttcacagacaaagaggtggagccgccaccaaaatgcagattttcgtgaaaacccttacggggaagaccatcaccc

SEQ ID NO: 477936 - DNA, 100 bp, Homo sapiens
cccgacgctccctgtctgggaccttctccctgcctggacccctactattgcaacaaggtacctagtcgatagtcgctggttcaaacagtggaaaaaatat

SEQ ID NO: 477937 - DNA, 89 bp, Homo sapiens
gcggaggagtctccaggagacccggggacagcatcgcccaggcccctgatcagtgtgcgtgtgaccaccatggatgcagagctggagtt

SEQ ID NO: 477938 - DNA, 100 bp, Homo sapiens
ttcgggagcgggctcggaagctgtcacagggcatcctcatcatccggtcgtccatccgcaacgcgcacagcatccaccagcggtcgcggaagcgcctcag

SEQ ID NO: 477939 - DNA, 75 bp, Homo sapiens
cactgaaaacaattcatctcaaacggaaaactggtgatttatttgctatcaaagtatttaataacataagcttcc

SEQ ID NO: 477940 - DNA, 100 bp, Homo sapiens
cgggcctcaggggctgctctgaggaccgatgactcggaaagcgctcagaagaacgcttcgcccgttggtgctatagtattgttacaatcacatttgacgt

SEQ ID NO: 477941 - DNA, 75 bp, Homo sapiens
gatccagagcgccgcgcacttcgtcatgttcttcgcgccctgatatggatcagaaactttcgaagttggtagaag

SEQ ID NO: 477942 - DNA, 80 bp, Homo sapiens
caagcacagagtatgaccaccactattaagacttcctcgttctgcccatcttcctaacaaggctatggctgataacagca

SEQ ID NO: 477943 - DNA, 75 bp, Homo sapiens
gggctagaggcagcagagggaacagcaaagaagagccggtggcttgctttggtgaaggtattcatacagccttcc

SEQ ID NO: 477944 - DNA, 75 bp, Homo sapiens
gaaggaccagcgggacgcctgcatcaaggaggccattctcttgccgtggtccttcagcatatctctgtgctgcag

SEQ ID NO: 477945 - DNA, 50 bp, Homo sapiens
tttctgggagccgttatgccaaggcttggagcgctatagttatgtctgcc

SEQ ID NO: 477946 - DNA, 100 bp, Homo sapiens
ttttcaggacatctttaaataccctcaagaggagcaacctcgtcagcagcgaggaaggaaacagcggcagagtggcatgattccgactggatactctcag

SEQ ID NO: 477947 - DNA, 101 bp, Homo sapiens
ctcccgcctcatattccctgaccctgccctccctgcgagaactccagtccgggctccacaaagggcgcggtactccaaagattcaggtttactcacgtcat

SEQ ID NO: 477948 - DNA, 100 bp, Homo sapiens
tgagctgtatcctctcttccacaatctataggaaaaaagtaatcctcttggaaagctggaaacatagtccggatgaaatactggagctgttgtagaagaa

SEQ ID NO: 477949 - DNA, 100 bp, Homo sapiens
ccttccgccacggccgtctctggagagcagcaggtatgtgaggagcagcgctgtgaggaggaagtcttccccctggccatgaactacctggatcgctacc

SEQ ID NO: 477950 - DNA, 83 bp, Homo sapiens
gaagaaaccagccgaacttcagggtttccaccgttcgttcaaggccactcttcacctccaccatgagcctggacatccagagc

SEQ ID NO: 477951 - DNA, 59 bp, Homo sapiens
ttcaagatgacggaagcagatttaaggagctgcaggccgtggcacagcaattctccctg

SEQ ID NO: 477952 - DNA, 97 bp, Homo sapiens
gcagaaaatcagtgatgtcattgaggactctgtagttgaagattataattcagtggataaaactaccacagggccatcccagtaacctgcatcacat

SEQ ID NO: 477953 - DNA, 76 bp, Homo sapiens
ggaaccctgaccccaggtgctcctggagagaccccagaatttaagcagaacggtgggaagccctatttgtctgtga

SEQ ID NO: 477954 - DNA, 80 bp, Homo sapiens
ctggggaacctgctcaaagccctgggtcgcttggaagaagccaagacttacagccagctggcccaccccatccagcaggc

SEQ ID NO: 477955 - DNA, 132 bp, Homo sapiens
gacttgtctcttatttagttctggggagcgcctcgtcgacatgagtgatgtggaggaaaacaacttcgagggcagagtgctggagaatctggtaaaagcaccattgtgaagcagatgaggatcctgcatgtt

SEQ ID NO: 477956 - DNA, 100 bp, Homo sapiens
tgtggtgtccaacgctggctgctgggagaaagatttggccctcatgcagagagaatggcttactacacctccaggatgcagttccccatggagatggcgg

SEQ ID NO: 477957 - DNA, 75 bp, Homo sapiens
gccgcggcattcggggaatctgcagggcaggattcttacagaagcagagattgatgctcaccttgttgctctagc

SEQ ID NO: 477958 - DNA, 100 bp, Homo sapiens
ggttcgtcgcctccttgcccgtgaccgtcgctagaactcagttgtgcgttgcggccagtcgccactgctgtggccctggtacagtggacggaaagtgtgg

SEQ ID NO: 477959 - DNA, 88 bp, Homo sapiens
aagcccagaagcaacaagccctggggaccagctgctgagtgcccgagtgttcttcgagaacttcaagtacgaggacgcactacgcctg

SEQ ID NO: 477960 - DNA, 75 bp, Homo sapiens
ggcgaagcgctgcgctcgcgcccggatccctcaggctgaccccgcactacatctacccaccagccatcgtgcagc

SEQ ID NO: 477961 - DNA, 50 bp, Homo sapiens
gatggcagccagtcagtggtggagctcaccaagatggaggaacagagccc

SEQ ID NO: 477962 - DNA, 82 bp, Homo sapiens
cccacctggacgggtacctggaccttctcagggagaaccagctcctcccagtctctgctttctatccgtcaagatgataaag

SEQ ID NO: 477963 - DNA, 97 bp, Homo sapiens
agactttgtagccatcaacccgagtgcagtttcgatggaaaatgaagcactggaagaagtacgacatctatgagaagcaaaccaaggaggaaaccga

SEQ ID NO: 477964 - DNA, 100 bp, Homo sapiens
ctcaaggacatcgagacggcctgcaagctgctcaacatcaccgcagactggacccttgtcgaaactcctcctggggaggaacaagccaagcagaatgcca

SEQ ID NO: 477965 - DNA, 98 bp, Homo sapiens
gccaggggcccgagggcggggaccggcggcgctggaggagcgaggcagctgtactaggactgggaacggagatccgtgctcagctcacagagcagatg

SEQ ID NO: 477966 - DNA, 100 bp, Homo sapiens
caaaatctcagcttcacaaagtcattgaaagggcattttgtcagtgatgctgatctttgccttcttccaggaacttgtaatagctggcatcgttgagaat

SEQ ID NO: 477967 - DNA, 100 bp, Homo sapiens
tggaggaggagtccccaggaaagcgcctggacgcaggtgcctgtgaagcatgtgtaccgtgtgctgcagtgccaggaggaggagctcacgcagatggtgt

SEQ ID NO: 477968 - DNA, 88 bp, Homo sapiens
gccccacctccggccactgggacggcggcgcggagaaggcagattgccttctctcagcacagcaattttatggacctggtacagttct

SEQ ID NO: 477969 - DNA, 100 bp, Homo sapiens
atccaacccagtgctttctgctttttgccaaccaggggggcatgtgctctgtgtacctgaaggacagtgagaaggttgtcagcatttccagtgagcacct

SEQ ID NO: 477970 - DNA, 100 bp, Homo sapiens
tccaagtctattacctggggaatgtacctgttgctaaacctgttgatctctccagcgaacactgaatgagttaaaagagtatcaaaagcagcatgaccac

SEQ ID NO: 477971 - DNA, 74 bp, Homo sapiens
cggcagcctacccggctcactcaggatggatcctgagcttgaaaaaaaactgaaagagaataaaatatctttag

SEQ ID NO: 477972 - DNA, 75 bp, Homo sapiens
gcggggcgctgtgtccccaagctccccgtcctcggtggattctgctgcgaaccggagaccatggccaaaccagca

SEQ ID NO: 477973 - DNA, 104 bp, Homo sapiens
ctggagcctcagttggaagcagccgatccagcctgcggagcctgtggggcagaggagaggagacgccgtgagcgggacgaccagatgtaccgagagcggctgcg

SEQ ID NO: 477974 - DNA, 83 bp, Homo sapiens
ggcgtgtctccctgcgggtgctgagtgagcgcctcctacacaagagcatccagaccatggtgaatccgggcagcagctcgcag

SEQ ID NO: 477975 - DNA, 121 bp, Homo sapiens
cgcgagcaaggagcgcggaatcggggagcgtccggagctagctggatcctctaggcaggaccaagaatcgccttcagccctgtctggtgcatccttggcagaaagtgaggaggaaaacacc

SEQ ID NO: 477976 - DNA, 97 bp, Homo sapiens
agagaagagcacagaatgtaccagagagacggaatcagtccccaatgcctggaaattcctcattggattactgtgttttaaacagaatttcgtgaac

SEQ ID NO: 477977 - DNA, 74 bp, Homo sapiens
tgagagtcaccatgctcaaagtgaatatattaaggaaactgggaatctcataggaagagccaggacatgaagaa

SEQ ID NO: 477978 - DNA, 75 bp, Homo sapiens
gtaggtgcgggtgaagatggcggcagccgaggccgcgaactgcatcatggaggccagcgatctgtacatgagacc

SEQ ID NO: 477979 - DNA, 97 bp, Homo sapiens
tggtcggcgggggcggcgtgggcaagtcggcgctcaccatccagttcatccagagcacctggtgaatggccggatggactttgccttcccgggcagc

SEQ ID NO: 477980 - DNA, 50 bp, Homo sapiens
agagaagtgcccgaggagagttaacaggaagaattttaaatcgtttctcc

SEQ ID NO: 477981 - DNA, 98 bp, Homo sapiens
accgagagcgcgaatatcgtcatcgttagaagaatgtttcatccatttgtggaccaaaagatggagttggtttttatttttaaaaagataatgttaat

SEQ ID NO: 477982 - DNA, 75 bp, Homo sapiens
aaaactggagaatggttctatgaggaacgagccaagaaatttccaactggagacggagtctcactccaggcttga

SEQ ID NO: 477983 - DNA, 75 bp, Homo sapiens
ggcgcggggaccgctgtgctctcgatgaggtttatataactttccaagacaaggaagttgtgcaaagcctcacag

SEQ ID NO: 477984 - DNA, 87 bp, Homo sapiens
cgaagtgacatgtacattctcaatgagagcctcacagacccagccatcgttaaggcctcccgaggagcccagacagctgcagccaca

SEQ ID NO: 477985 - DNA, 74 bp, Homo sapiens
gttattggctgccgttaaggaccgttacgtttcccggattacctctctagtgacccttcagctgttaaccctgg

SEQ ID NO: 477986 - DNA, 90 bp, Homo sapiens
gtacaactgtcctcaccagccctcgcctcccgagtcactgcagccaacccttcagcaaggtgctggagaatctggtaaaagcaccattgt

SEQ ID NO: 477987 - DNA, 83 bp, Homo sapiens
cgcagttggaagcccatggggcaggccacggcagagacaacgtgtgtaccccaagtgcacatggctgaccacccctaaaagca

SEQ ID NO: 477988 - DNA, 88 bp, Homo sapiens
gactctgcaatagatacatggagcccatcagaatggcagatggcttatgaaccacaggtggtcagaatggcttcaacattcctcaagt

SEQ ID NO: 477989 - DNA, 76 bp, Homo sapiens
tgggaagtccttattattggccctccagatacactttagatttctctctgatcaaacggacagttcaggactcaga

SEQ ID NO: 477990 - DNA, 75 bp, Homo sapiens
tcccagtttgacaccacaggctgagctccctgaaccagttggatcgatcaacccgggaggtggagctgggcttgg

SEQ ID NO: 477991 - DNA, 90 bp, Homo sapiens
atttgactacctgaaggaggagagctggcctccaccctgctggacgccatcaccgataaggaccccctggtgcaggagcaggtctgcagt

SEQ ID NO: 477992 - DNA, 75 bp, Homo sapiens
gctcgcgctactctctctttctggcctggaggctatccagcggcattttccctgaaacatatatccatttgaaag

SEQ ID NO: 477993 - DNA, 98 bp, Homo sapiens
gaccatcgaaaggagcaagagcaagatcaccgtgacatccgaggtgcctttctccaaaaggtgcggccgggtgtgtggcaacattacttcatgatgca

SEQ ID NO: 477994 - DNA, 101 bp, Homo sapiens
acgtcggctcccacgcttagccagctcccggctgaagtttctctttggctcatcagccacccaggccttggacctagttgatcgacagtccatcaccttaa

SEQ ID NO: 477995 - DNA, 96 bp, Homo sapiens
aaatgtgataaaaacaaggtggaagattcttccaaggaaccagtgcgaagcagatataatttctacagtagaatttaatcattctggagaattact

SEQ ID NO: 477996 - DNA, 82 bp, Homo sapiens
caagttccgatcagaggtgaaaccaacagccagtgatatgctatacatgctatatgttctcctttcagccaagacctttcac

SEQ ID NO: 477997 - DNA, 49 bp, Homo sapiens
caggggcctcaattaatgtatctgcagatccagagccagagctctacct

SEQ ID NO: 477998 - DNA, 100 bp, Homo sapiens
acagaggcgcaatctcagctcactgcaacttccacctccctggctcaagtgatctcccaccttagcctcccaaatcattgagactgaaaatatgatggac

SEQ ID NO: 477999 - DNA, 75 bp, Homo sapiens
gaacctccgagttgcaatagtcagcatgaagctaagtgttaggcggaaaaatactaaagagatgtttggtggctt

SEQ ID NO: 478000 - DNA, 100 bp, Homo sapiens
catgcagcaaccactattttcttcctgcccctcgttgatgagagcattcgaagtgacctcagcagggcatccaggttgcccccaagtttcctggcagtgt

SEQ ID NO: 478001 - DNA, 100 bp, Homo sapiens
atgtgtgaaggttgacctgtctgagaaatataaaaaactggttctgaggttcaaatctgaacatcaatgatgtactagggaactactcattgactcttgt

SEQ ID NO: 478002 - DNA, 98 bp, Homo sapiens
ggcggcggagcggccggtccacggaggagctctgcttatgataatgtcaacaaagttcgagtagctatcaagaaaatcagcccctttgagcaccagac

SEQ ID NO: 478003 - DNA, 92 bp, Homo sapiens
ctctaccatagccatgtggtgcaatgcaaactgctgtaattcaagagagctcggttaatgaaaaaatggacacagaaagtaataggagagca

SEQ ID NO: 478004 - DNA, 100 bp, Homo sapiens
agaagtcttaccctcaggtcaaagaggagacagttatgaagctcaaaggtatagatgcaaatgaaccaacagaaggaagtattcttttgaaaagcagtga

SEQ ID NO: 478005 - DNA, 90 bp, Homo sapiens
ggaagcagcacgggatcccagcctcaggcctgcacggacggtgttggttggggtggtccagctgctcacctgtgacctgctactgtcgct

SEQ ID NO: 478006 - DNA, 80 bp, Homo sapiens
gcacggaccgcacgcctcttctaccgggcgccccacgggccgaagccgccccatggctgggggttatggagtgatgggtg

SEQ ID NO: 478007 - DNA, 99 bp, Homo sapiens
gacgacaagctgaagccctggctgatcgaggtcgggaactacaagcggactgtgaagcggatcgacgatggccaccgcctgtgcagcgacctcatgaac

SEQ ID NO: 478008 - DNA, 90 bp, Homo sapiens
gagggagagcaagaccatcatgctgcgcggccttcccatcaccatcacagagagcgatggaactcaaaactgtatgatctaccagatgag

SEQ ID NO: 478009 - DNA, 94 bp, Homo sapiens
acaaccttggaacagaacaagaggacaggaggtgtcgttccagggggatatgagactttctactcggaatatcctgagtgttgcgtggatgtaa

SEQ ID NO: 478010 - DNA, 51 bp, Homo sapiens
gtggtgctcaacgtgtacgacatggctaaggcagctggataagcacagcca

SEQ ID NO: 478011 - DNA, 82 bp, Homo sapiens
caagtacatcgccaagtttcagggagaagacacggtcgtgatcgcgggtgtccggtggagagctgtttgaccggatagtgga

SEQ ID NO: 478012 - DNA, 87 bp, Homo sapiens
cgggacaggcctgcgtctggtccaggatgtccagggtgccgacactttcactatcacagggcgccgagggtcccagcagcgtgcggt

SEQ ID NO: 478013 - DNA, 100 bp, Homo sapiens
cggagcgggtggcgctcaagaaggagatcgggctgctgagcgcctgcaccatcatcatcgcctgttcgacatgggcggtgagtattactgcttcgcttcc

SEQ ID NO: 478014 - DNA, 90 bp, Homo sapiens
tattacatgaagtatcatgtttctcttggttctacagccattgggatccagacatcagagggtgtgtgcctagctgtggagaagagaatt

SEQ ID NO: 478015 - DNA, 50 bp, Homo sapiens
gccatggggatgaacatgatttcaaaggatactggagatctaaaagatag

SEQ ID NO: 478016 - DNA, 101 bp, Homo sapiens
caagatagttgacagtgggcctgcagccaaggaaggaggcctgcaaattcatgacaggattattgaggtatccaattggtttggcaacaaacgaatcaggt

SEQ ID NO: 478017 - DNA, 74 bp, Homo sapiens
acaacagtgatgaggaaagctgtgaaagttctcaaggcgatcagtgggtgaccgcggctgcgagggactttgtc

SEQ ID NO: 478018 - DNA, 96 bp, Homo sapiens
gaacatggactcatcttcatggaaacgtctgctaagactgcttccaatgtagaagagaaatctccaaattggacatccagagcagcattcttgttc

SEQ ID NO: 478019 - DNA, 123 bp, Homo sapiens
aaaagaactcaatgccttggaaacttcgtcatctgccatggacatgcaaatcagccaaattaagatattaaacaccgtcgaattccaatcttattctttgcaaataaaatggatcttagagat

SEQ ID NO: 478020 - DNA, 101 bp, Homo sapiens
gctccaagatcaaggtcaacaatcaccttttccacagctgagcagcgccagttggcactagctgagaagttcaaggagctgaaacgcagcaagaaattgga

SEQ ID NO: 478021 - DNA, 101 bp, Homo sapiens
tgttggggagaagaggattggaggtgtcagtgttaaaggaacctctacaacgaaggtgaagccacggaagataaggctcttactctctgtcagtccgcctc

SEQ ID NO: 478022 - DNA, 100 bp, Homo sapiens
tggcttggcacctggcagcaatgggcaagacaaagcattagtgccagcagtagttcccaagggctgtctcagccatccacccagacgactcagtatctga

SEQ ID NO: 478023 - DNA, 90 bp, Homo sapiens
tccagtattctccagaaggtgctaaaattgaaagtggactatttaatagctagctcttggataagcacaagaatacagagagcatggtgg

SEQ ID NO: 478024 - DNA, 89 bp, Homo sapiens
ggcgaaggtctcagagctttacgatgtcacttgggaagacttaattcagtgcacaaatgagatgaatgtgaacatcccacagttggcag

SEQ ID NO: 478025 - DNA, 126 bp, Homo sapiens
gccgcgcggcgctggactggagcagaaccccaggactgcgcccccgggagcgggcgcccagagcggggatctgatgagcttctttcttctggcatcattaacggaccttttaccatgaatagttct

SEQ ID NO: 478026 - DNA, 82 bp, Homo sapiens
ttctttatccttcgaaggaagcctgtggagcttcagataaaccagtcgatcattttctgtaactcctctcagcgagttgaat

SEQ ID NO: 478027 - DNA, 105 bp, Homo sapiens
aaaagctgtggcaaccgaaatgagactccctcagatccagtgataattgacaggtgctgatgggaagggtgcctgacaggggaggccggccgaatgaaattgaac

SEQ ID NO: 478028 - DNA, 75 bp, Homo sapiens
ccctcgcattgtccggagatacctactcaggcggcagctcgggcagggggaggcgggcaaggatgactatgtgaa

SEQ ID NO: 478029 - DNA, 96 bp, Homo sapiens
cgagccaggagccccacaggccctgggggatgcaccctccacgtccgtcagcctgacgacaggtggaggacttgaagtctcagctggtggcccagg

SEQ ID NO: 478030 - DNA, 82 bp, Homo sapiens
cctcggacactgcccccgccgccgccggagctctgcagcacggattttttatcaagcagaaatgcatcgaacaacgagaatc

SEQ ID NO: 478031 - DNA, 82 bp, Homo sapiens
tgccatgagcgagcgcctccgtcccaggagattagcagaggcatttcatatcagtgaggattctgatcctttcaatatacgt

SEQ ID NO: 478032 - DNA, 100 bp, Homo sapiens
aggttctccagcaagtagataacaagtttattgcctgtttgatgagcactaagactgaagagaatggcgaggcaggtacttgatgaagaagcagaagttt

SEQ ID NO: 478033 - DNA, 100 bp, Homo sapiens
caaaggttctacaggaatggaaattctgctgtcaacattagagacgttggaacttgccaggaatccagcaatgatgcaggagatgatgaggaaccaggac

SEQ ID NO: 478034 - DNA, 76 bp, Homo sapiens
aggccgtgaagaccttcaatagcgaggaaagaatacccacctcatgtccaaaaagttgaaattaatcctgtaaggt

SEQ ID NO: 478035 - DNA, 82 bp, Homo sapiens
cgcggctgggcgttcatctaccacgctttcgtttggaactgataatgggagagaagcaattgaaagtggggctgcatttctc

SEQ ID NO: 478036 - DNA, 75 bp, Homo sapiens
tctcgctgtgacagagacaacaccgagtatgagaaataaactcaagccatggagggattactgcattacatcaac

SEQ ID NO: 478037 - DNA, 100 bp, Homo sapiens
gtcctaagacgccaggaggagtttgagcataaggaggaaatagccctgtccaggagttcactgtgcctgggagcaagtctacagctaccatcagcggcct

SEQ ID NO: 478038 - DNA, 83 bp, Homo sapiens
gtgcaggaattgcttgagtccttaccaggtgatgctactaggaggtggagcctttgggaggtgattagttcatgaaagtggag

SEQ ID NO: 478039 - DNA, 71 bp, Homo sapiens
cagctctcacagatgtgaatacacattctgcctgatcaatgcaggagtcctgtacctctacttcagcaatt

SEQ ID NO: 478040 - DNA, 82 bp, Homo sapiens
gcagaggggacagaggcaccaaggacctccaagacaggccaagaataaggagacgggtgctttggctgcggccaaagtcatt

SEQ ID NO: 478041 - DNA, 75 bp, Homo sapiens
agatagagacagataaaaatggatttttgcagtacgatgcaccagtatgcatgagcgggtgaaccgaacagaaag

SEQ ID NO: 478042 - DNA, 75 bp, Homo sapiens
cagctctgcggctcgggccctgaggattggttgccgtggtctttactgcttttctccctgatgtgtgaaacaagc

SEQ ID NO: 478043 - DNA, 75 bp, Homo sapiens
ggccgcggccggggcaggagcgcaggactttctgtctcttctgaaggcccttctcaaagacttggaacacctaag

SEQ ID NO: 478044 - DNA, 96 bp, Homo sapiens
ctcatttaaaagctcacctgaggactcacactgttttctgagtttaaccagtaatgccattcagttgccaatctcaagcaaagcaaacataagcca

SEQ ID NO: 478045 - DNA, 100 bp, Homo sapiens
atgccgaagtaatagtggactggagaccattggatgatgcattagattcctctagtattctctatgctagaaagattccttggtgttactcagttttcgc

SEQ ID NO: 478046 - DNA, 90 bp, Homo sapiens
ctatggatcagtgtcgccataccttggaacagcataactggaacatagagatttaaattccaggttgtcatcaatggccgagagtttccc

SEQ ID NO: 478047 - DNA, 75 bp, Homo sapiens
tgaagcgattcctgcaggcgttggttcccctctttgacctggggatcatggaagctgataaagatgacacacaac

SEQ ID NO: 478048 - DNA, 100 bp, Homo sapiens
ggactccattccaaaaaaataagaaaaacagaaaaataataattacatctgcaaagaccttatttccaggggtttgttgcatcggaccagtgtccctaag

SEQ ID NO: 478049 - DNA, 101 bp, Homo sapiens
aagcagcctattatgcccagacaagtccccagggaatgccacagcatcctccagcacctcagatattgagctcctggcagcttgcagagaagaatttcata

SEQ ID NO: 478050 - DNA, 48 bp, Homo sapiens
tctagactttgtgttccaagatcagagttgaagggatctgaactggaa

SEQ ID NO: 478051 - DNA, 85 bp, Homo sapiens
ttcatgaagattcaataacagttgcatttgaaaacaaggaactcaaagttggcattcccgtcacggatgagaatgggaaccgctt

SEQ ID NO: 478052 - DNA, 98 bp, Homo sapiens
ggagaaaaagttcagtgggaagcatgtcgtctttatcgctcaggtggagcagctcctgtacgaaagccctgagcggtactcccgctcagtgcttctca

SEQ ID NO: 478053 - DNA, 83 bp, Homo sapiens
gcaagacttaccctaagcgaatagcacaaacacagccagctggatgaggatgaagaagtatacaagagagatttcagcgctcc

SEQ ID NO: 478054 - DNA, 89 bp, Homo sapiens
agaacctgaggagagaatggcatgccaggtcaggaaaagcccaccgaagggccaagaaacacctgcctggggagcaacaacatgtacga

SEQ ID NO: 478055 - DNA, 83 bp, Homo sapiens
gcacacgcataccccagcgcccggcagttatgtattctccgctctgtctcacccagttcaaatctgaacatcaatgatgtact

SEQ ID NO: 478056 - DNA, 74 bp, Homo sapiens
ctcactgattcttaaggctctgttccttagagatccaaagatgattcagtccctcaaggcgttgattgaaaatg

SEQ ID NO: 478057 - DNA, 100 bp, Homo sapiens
gacccgtgaaggcaatgatttataccatgaaatgattgaatctggtgttatcaacttaaaagatgccacctctaaggaacaggggagctctacacctggg

SEQ ID NO: 478058 - DNA, 51 bp, Homo sapiens
agcctaactcaagccattggcacacagatccaaatcagaagatagtgctga

SEQ ID NO: 478059 - DNA, 73 bp, Homo sapiens
catctggtgcttttcccatggagaacacacaaccagttacttttcacatagaaccatatagcaatcgagatga

SEQ ID NO: 478060 - DNA, 88 bp, Homo sapiens
gtcagtgttgtgtggaagccagaacatcgttctcaatggcaagatgcatcaaattgcaatttggaggagaggcagcacaagcagaagc

SEQ ID NO: 478061 - DNA, 100 bp, Homo sapiens
cttcgacattgccgtcgacggcgagcccttgggccgcgtctcctttgaggcctatgagagctacaagaagaaggactacacccaggtggactacttaatc

SEQ ID NO: 478062 - DNA, 50 bp, Homo sapiens
tgtcagtgtgatgaagattggcacccagtattaaaggtggaagaaggtcc

SEQ ID NO: 478063 - DNA, 95 bp, Homo sapiens
gtgatgtgacctgttcacgcaggggaaacttgaacattcgcaggtattctgagagaagcctcacaaagtgtattggaattactattgaaaccaga

SEQ ID NO: 478064 - DNA, 120 bp, Homo sapiens
ggacaacagtagtagcagcagctgccttcttggacgcctttcagaaagtggctgacatggccaccaacacacgtggtgctggagaatctggtaaaagcaccattgtgaagcagatgagga

SEQ ID NO: 478065 - DNA, 50 bp, Homo sapiens
atggctttaaagaatacacttcaagaacgaatgcaggaatttgggaactg

SEQ ID NO: 478066 - DNA, 100 bp, Homo sapiens
gcgcgaacgagcgacggcggaacccgtgggcctgtggactgcagcctcggcggtcagcagctggctggaggcgtgatcctgggtgtggccctgtggctcc

SEQ ID NO: 478067 - DNA, 100 bp, Homo sapiens
cactggagtaccctgttcctggcagcctcccgaggagcccagacagctgcagccacagctccccgtatcaagaaatttgccatctatcgatgggacccag

SEQ ID NO: 478068 - DNA, 100 bp, Homo sapiens
ggacagtgaaccggacagtcatcaccatgggccgggatcacattctgatttctccagagaatacagagggcaaagatggatccaaagtaactaaacagga

SEQ ID NO: 478069 - DNA, 90 bp, Homo sapiens
ggacccccaggaggtgaccctgcaggaatcaaacattttaagtccagtgcaggatggaacaaagaaacctcagattgacagcaacaagag

SEQ ID NO: 478070 - DNA, 74 bp, Homo sapiens
ttggcattgtcatcctgatcttcactgggatcagagatcggaagaatcagccatcgctcccagccccaacagcc

SEQ ID NO: 478071 - DNA, 100 bp, Homo sapiens
cggggggcggctctgcgctggccgggggcgcgggcggcggcgccggcaggaaggactgtagctctccagagggtaatgggtccccagaacccaagagacc

SEQ ID NO: 478072 - DNA, 95 bp, Homo sapiens
agagtcactctttgttcgaatttggcttcctgaggctcaggtagtccaaagagccctgaattctgcggctaacaacgtgtatcagtatggacgag

SEQ ID NO: 478073 - DNA, 100 bp, Homo sapiens
cggcatcagggcagttgccatctgcctccatgcgattaaaattcctacggctgcatggcggcatggagcaggagatctacgcagaccccaccaagaggct

SEQ ID NO: 478074 - DNA, 75 bp, Homo sapiens
caaacttggtgtcttttctacaaactctgtgcctcaacaaccatttctaagtgagacatcatttcagctttccat

SEQ ID NO: 478075 - DNA, 82 bp, Homo sapiens
tgggagtctccgcgtcccgctcgctgggagagaggcagttgtgaaaaacttcaggacaaaaatgtttcatttaaggacttgt

SEQ ID NO: 478076 - DNA, 100 bp, Homo sapiens
ccccggcaccgcgcctgctgccgggttgcgctccgtgcacctcttgcggattgacctgcgttacgaagctcagaatctagaacacttccaggtcaacttc

SEQ ID NO: 478077 - DNA, 83 bp, Homo sapiens
gaaggaacgaggcaaggagctaaagcagcgtgcgttcagccctgggctgtccgtacctggcggtgaaaatcacccctgccatc

SEQ ID NO: 478078 - DNA, 100 bp, Homo sapiens
caggctgagctccctgaaccaggaacaggagtcgctactgagtcgttaccaacgtggggacaaacaagggttgcttttgttgcacaacaaaaccccgtcg

SEQ ID NO: 478079 - DNA, 105 bp, Homo sapiens
ccagtgtgcagcaggctacgagcaaagtgaacacaacgtgtgccaagttgttgacctcctgtactggagagacattaagaagactggagtggtgtttggtgccag

SEQ ID NO: 478080 - DNA, 119 bp, Homo sapiens
ccgcaaccattgacgccatgtcgggttattcgagtgaccgagaccgcggccgggaccgaggatagcctgggctggaagctcttctacgtcacaggctgcctgtttgtggctgtgcagaa

SEQ ID NO: 478081 - DNA, 101 bp, Homo sapiens
gggtaactacatcaatagcaatagctttatagcagctccggttacctgttttaaacatgtaagtcagtaatgttgtatgcagcagaaatgatacctaaact

SEQ ID NO: 478082 - DNA, 98 bp, Homo sapiens
caacgtcatccgctacatcgtgtgcagcctcttcggtgatctttggtctgaagggctatgtggctgagcggaagggtgagagggaggagatgcaggat

SEQ ID NO: 478083 - DNA, 74 bp, Homo sapiens
atctacaacccgcgcttctggccgcgggaaggagagcttctgcagaaagccgtcattacacctgattttgaaaa

SEQ ID NO: 478084 - DNA, 75 bp, Homo sapiens
ccgtccccgaccttgcctgaacaagaacatacggtccctaatgagcacagagaagaccaagggcttctgccagct

SEQ ID NO: 478085 - DNA, 108 bp, Homo sapiens
ccggctccgtcgtggaagcaggactgcgccgcgtcttcctcaagacctgcctagagctggaacgttacctccagagcgagccctgctatgtttcagcctcagaaatca

SEQ ID NO: 478086 - DNA, 82 bp, Homo sapiens
cacccaccgccgccgcctcccaggtggtctttgggaagaagcttcctgcctttgccaccatccccatccaccagctgcagca

SEQ ID NO: 478087 - DNA, 100 bp, Homo sapiens
gaccgaattcagaaggatatcgacgtcgtgatccagaagtccagagctgaggactgcctgtttgcaggctacatccacgtgacgcagaccttcagcatta

SEQ ID NO: 478088 - DNA, 75 bp, Homo sapiens
aagacttggttaaagtcattgaggactttccagcaaaggaacactgacaggccggatgcctctgctgtttacctg

SEQ ID NO: 478089 - DNA, 100 bp, Homo sapiens
tggaggccggggccgcgctgagggcgcccagctgagtatcctgagctccagctggaccctaaattggatcctcttcctgctgagagtcccctaatgaaca

SEQ ID NO: 478090 - DNA, 90 bp, Homo sapiens
ttgagctatcccagaaaactatgatgatcgacaatttgaaagtggattatcttacaaagaggatgtccggcttccagatcaacctcaacc

SEQ ID NO: 478091 - DNA, 73 bp, Homo sapiens
aagctgccggcagccctgcggctacggagacaggcagttgcagtggtgcagaatggctgacctcagtcttgca

SEQ ID NO: 478092 - DNA, 86 bp, Homo sapiens
gaggcgcaaggtggactggctgactgagaagatgcatgccagagacttcacagtttctgctctgacttcacagagaatgcagttgt

SEQ ID NO: 478093 - DNA, 128 bp, Homo sapiens
agcagaatgagaaagaaaaaccacaggctaatgttccttcagctctgccatcactccctgccgggtcaggccaggtgactttatacacactttgggagatgcacatatttacctgaatcacatcgagc

SEQ ID NO: 478094 - DNA, 98 bp, Homo sapiens
taaaacccagtgcgtacgcattgctacaaaagattccagttcttcagacaaacaatggtccaagtctaacaggattgactactatagcagctcatcta

SEQ ID NO: 478095 - DNA, 90 bp, Homo sapiens
cttctaccgctgcggctactgcaagaacgagtcgggcagccgctccaatggttgactatagtcaatggggccaatggagccaagtgtatg

SEQ ID NO: 478096 - DNA, 100 bp, Homo sapiens
cctggttccagctgcagcacgtggacgctgactcggaagtgcagggagaagaaatgggtgaccgttggtgacacatccctacgaatctacaaatgggtcc

SEQ ID NO: 478097 - DNA, 98 bp, Homo sapiens
gacatcctggaagctgggaaatggtctgaatttcctgctgctgttcacaaagatgctttttatctttaactttttgttttccccacttccgaccccgg

SEQ ID NO: 478098 - DNA, 73 bp, Homo sapiens
ggggctctccgggcctcccgccgcttagcctgatgctggaaggacgaaggtggcaagaagaagccactgaaac

SEQ ID NO: 478099 - DNA, 100 bp, Homo sapiens
cagatgtgttccaccttttcgagaaattgcatttttagaacctagagaaatcacactgcctgaggccaaagataaggaattgaatgatctggcacgggac

SEQ ID NO: 478100 - DNA, 73 bp, Homo sapiens
ctgaggtgggccggacctgggagtggcagcctgcagcacaaaactgtgatcttcatgtttgcccaggagccag

SEQ ID NO: 478101 - DNA, 118 bp, Homo sapiens
aatgattcagaactcacgtccgtcgctgctgcaaccccaagatgtcggagacacggtggaaacgcttatgacaatgcagatcttcgtgaagactctgactggtaagaccatcaccctc

SEQ ID NO: 478102 - DNA, 83 bp, Homo sapiens
gctactggaggcggcccgcttcctggaatggcaagcgcagcaacaacagagagcacgtggttgtgaccgagattcccgacgag

SEQ ID NO: 478103 - DNA, 100 bp, Homo sapiens
gcgctggaggcagcggtgcacgtgcagaatcagctgcctcaagtcttttcccgactctttcctttcaagaggggcctctgtcatgcatattgggctccaa

SEQ ID NO: 478104 - DNA, 96 bp, Homo sapiens
ggttcaggatcttcctctccctcgggacccaaggccacaaaggagagctccgtggagagaagtatccggagtgtgatgcagaagtaccttgcagag

SEQ ID NO: 478105 - DNA, 89 bp, Homo sapiens
tggaaatgtcagtccaatacagacctcagcttccccattatttcgaggaaggaacctgactggctcatggagaaagcctacctaagaat

SEQ ID NO: 478106 - DNA, 80 bp, Homo sapiens
ctcacaccagacctacggagggagctggaaattcctgacgttcattgatctggtttctgcggcactgaaacaaggccaaa

SEQ ID NO: 478107 - DNA, 83 bp, Homo sapiens
gtgtcctacaccaggcagcccccaaatcccggcccagggactttgaacatgtcggggatcgccctcagcagactcgcccagga

SEQ ID NO: 478108 - DNA, 100 bp, Homo sapiens
ccttctagcaagtgaggattctctgagagcaagagtggatgaggccatggaactcattattgcacatggacgagagttcctgtgagaacaagcgggcaga

SEQ ID NO: 478109 - DNA, 98 bp, Homo sapiens
caagctcaccgaaatggccgcgtccagtcaagaaatgaaagctcattagcatctacactgaagacgctcctgttcttcacagctttaatgatcactgt

SEQ ID NO: 478110 - DNA, 75 bp, Homo sapiens
gccgggtgggtctctccccagcgacgatttgggtggccgttaattaaggaaaagttgagccagggcgtgaccctc

SEQ ID NO: 478111 - DNA, 100 bp, Homo sapiens
gtcagagagagagcttggttaacttgggagaaagtttcatctgtggatggagtattggactttctgaagaccttttcccccgatgtcttccggttcttct

SEQ ID NO: 478112 - DNA, 90 bp, Homo sapiens
gggatcgctacggaccttaaaatacccgcaacagccccttcgtcccaaaagtgtcggaggaaggcttccagattccagctacaataacag

SEQ ID NO: 478113 - DNA, 90 bp, Homo sapiens
gctgctgctatgaatatgggtcgaccattccaaaaaaatcgtcattgaaattatgagactatcattcaaatggaagcattatagttcttc

SEQ ID NO: 478114 - DNA, 75 bp, Homo sapiens
attaaaaagcagtttccacttattatttcttctgtaagtaaagaccatgtctggacagaagtctattctccttct

SEQ ID NO: 478115 - DNA, 78 bp, Homo sapiens
cagtccatttggggaaatccttcggatggtgaactcattagaagacccagatgatgtggtaccagttggccaaagaag

SEQ ID NO: 478116 - DNA, 90 bp, Homo sapiens
cgcgggcccagcgcctacacgtcctggcccggatggcccgtggccctgacacggagaacatgctagttcttctggagctcaacttcttgc

SEQ ID NO: 478117 - DNA, 99 bp, Homo sapiens
gggagccggagagatcgcgcgcctgccgccgccggagcctgcgagccgagaccgcagaatccagagaccacatttgaagtatatgttgaagtggcctat

SEQ ID NO: 478118 - DNA, 50 bp, Homo sapiens
gcagattcagcggtactggtgtataatagcacaagtgcatacaccttgat

SEQ ID NO: 478119 - DNA, 79 bp, Homo sapiens
gtggacggtgtggggcggtcccggccccgcagatttctccacccaggtgaactcctccctcacctccccgacggggcga

SEQ ID NO: 478120 - DNA, 99 bp, Homo sapiens
caagcacattgcggaagaggctgaccgcaaatacgaggaggctagaaggtccagcttaaaaaatgtgtccgacctttttgtgatgggaggagctcttgt

SEQ ID NO: 478121 - DNA, 100 bp, Homo sapiens
gccgggggcgtctttcagagcattacggtagttacttttggtgacgctgtccagttcccacaatgtatcattccttatctgaaactagacatcctctgca

SEQ ID NO: 478122 - DNA, 91 bp, Homo sapiens
aacaaattcatcccagaaatctaagagagatgtggtactggatcttcctctgggctctcttctcttctctgtttgtccatggtgctgcagg

SEQ ID NO: 478123 - DNA, 97 bp, Homo sapiens
ggaggctccgtgtctgcagctagtgtgtcaactcagcgtttctcctctcgtccctggcagaagtcaattcatctggaaagactatctctgagtcaga

SEQ ID NO: 478124 - DNA, 100 bp, Homo sapiens
cctcgccttcgcctccgcctccgagataattgacgaccttgccaacctagtggagaacacagatgaaaaacttcgcaatgaaaccaggcgggtaaacatg

SEQ ID NO: 478125 - DNA, 90 bp, Homo sapiens
agccagaagaggaaagcccccgacaaaagaacccattagccagccccatctgctttgatatgattgaagaagcatacatgacaaaatgtg

SEQ ID NO: 478126 - DNA, 100 bp, Homo sapiens
ctcttgaccatgtgacatctgatgctgtggaacttgcaaatcgaagggcaactacactttccaatgcagtgtcttccctggcaagcactggtctatctct

SEQ ID NO: 478127 - DNA, 89 bp, Homo sapiens
gatgagaaggttcagttggcaaaccagatatatgacttggaactgcaagcacatgttgaccagataactgaaatggcagcagtaatgag

SEQ ID NO: 478128 - DNA, 85 bp, Homo sapiens
gatatgaaactggaagacatcctgaaagttcgtcgctgcttcctgtgctccaggagaggacatctcctgtattcctgtccagccc

SEQ ID NO: 478129 - DNA, 101 bp, Homo sapiens
accgcgggccgcggagctcgggcggccggcgcggagtaagagatgctaaaaaccttgtacctatggaccccaatggcctgtcagatccctacgtaaaactg

SEQ ID NO: 478130 - DNA, 90 bp, Homo sapiens
atcgcatcctgctggctgcgtcctgcgattacttcaggagcttgaagaaatccgcaaatgtgggatgaaaaacttccgtaacatccaggt

SEQ ID NO: 478131 - DNA, 123 bp, Homo sapiens
ttcgagagccctgtcatcttctaaacagagcagcagcagcagagatgataacatgtttcaggtgagacatggaatccattaaaattgcattatcagttaagaaatgtacgggaacgattagct

SEQ ID NO: 478132 - DNA, 100 bp, Homo sapiens
cgcgctgcggcctggcggcttccaggcgcactaccgcggccaccagcttgggctccccacggagggcagcaagtgggacttggggaacccggctgtcaac

SEQ ID NO: 478133 - DNA, 119 bp, Homo sapiens
gcggcggcggcggcggatcccggagagccccggagtgagcggagtagcgagtcggcaacccggaggacccagatgatgtggtaccagttggccaaagaagagcctggtgttggtgcatg

SEQ ID NO: 478134 - DNA, 90 bp, Homo sapiens
acgcgctcaccggctgggtgggttcgagcaactaccggtgttctccgtggcccgatgcccccacagcctatgtgaataacagcccttccc

SEQ ID NO: 478135 - DNA, 100 bp, Homo sapiens
atgttgctaaatgtagacaatggttagagaagaattttccaaatgaatttgcaaaacttactgtagctcaccagaacaagctagaagaaatgatcaatga

SEQ ID NO: 478136 - DNA, 100 bp, Homo sapiens
ctacaaagagagactttttgtacttacaaagtccatgctaacctactatgagggtcgagcagaggaagagaagttaaacttctagagaaacctaacagac

SEQ ID NO: 478137 - DNA, 50 bp, Homo sapiens
ccggggtgcgagcagcgcacttccggcccgatgagagaaagggaaagtta

SEQ ID NO: 478138 - DNA, 90 bp, Homo sapiens
cggagagcgagagaggggagcagtgcttagatgagtacgaagatgatgaagcagggcagaaagagcggaaacgagaagatgcaattacac

SEQ ID NO: 478139 - DNA, 80 bp, Homo sapiens
gccgcccggggcgaggcagggccagcagcaggcgggagtgcagagcagagcgggcggaggaccccgggcgcgggcgcgga

SEQ ID NO: 478140 - DNA, 90 bp, Homo sapiens
ttttgcaacaaattcgagctgtccgactctgagaatgcatgtgagtcaggatctggaagcctcgtcatgttcttcaacacaaggaaaatt

SEQ ID NO: 478141 - DNA, 98 bp, Homo sapiens
gctgggaattgctgaattagaactgcagaggttcctctacagcaaggtggctgaatccacagaggagcctgctggttctaatcggggacagtatcctg

SEQ ID NO: 478142 - DNA, 83 bp, Homo sapiens
atctacgctttttagaattgcacttggaggacaaggccttggaaaaccattgcagagtgaatggaggctattcaggcctaagg

SEQ ID NO: 478143 - DNA, 76 bp, Homo sapiens
gcacaatgttctagtagcggaggaatcccttggcaccatgtcctgtgtgcattataaattttcctctaaactcaac

SEQ ID NO: 478144 - DNA, 83 bp, Homo sapiens
caaagcgaggctgaagaaggccaaggctgcagaagccaaagccacgtaatctcaggggcgatataatcaatgaggtggtccta

SEQ ID NO: 478145 - DNA, 82 bp, Homo sapiens
agcagattgaacagaaatccattcgggattgcactgggggccacagtgctgatctcagcagctccattttttgtcctcttcc

SEQ ID NO: 478146 - DNA, 73 bp, Homo sapiens
caaatactgcatatcagaaacaacaggggttccaatttcatctgctgttgcaggcgtagcaataggattggtc

SEQ ID NO: 478147 - DNA, 82 bp, Homo sapiens
agaggattggaaccagttccgatacagcacaatggaggaatcggagaagcagctctgtctgattgaggcgcagaccatggag

SEQ ID NO: 478148 - DNA, 100 bp, Homo sapiens
tccacagagcagttacgtactatcatcagatatttactggacactttgctcagcctgcttcatgcttctaatgcaagtctggaaaagtttgaaattccag

SEQ ID NO: 478149 - DNA, 88 bp, Homo sapiens
ctaccatccttctgctgctgaaccaatgccaacagtgtttgggaaatgggaagtaatgacagctggcacctgaactaagtacttttat

SEQ ID NO: 478150 - DNA, 132 bp, Homo sapiens
aaggcggctttagtggcagcatgaagcgcaccccgactgccgaggaacgagagcgcgaagctaaggtgttaagtgtgatgcttccataatacatttggatgctgtcagctaagttcacttctgaactaaggg

SEQ ID NO: 478151 - DNA, 100 bp, Homo sapiens
ttttggacattttaaagaacatcttcgaaaacatacagaacattctagtatgccagtagaaaaaaatatcactttagaaaggccttctaatgtaaatctc

SEQ ID NO: 478152 - DNA, 100 bp, Homo sapiens
gagccttctcgtggcggcggggaccgtccagcccagcgattctcagtcaggtggtgatgatgtccagcaactctgtgaagcaggagaagaggagtttttg

SEQ ID NO: 478153 - DNA, 100 bp, Homo sapiens
ctccgaagtatgaagtctgcaaaagagccttgaaggaagttagcaagagagctgtagtacacatggatgaacgacgagaagaacaaattgtacagttact

SEQ ID NO: 478154 - DNA, 49 bp, Homo sapiens
tccctagtagctgggattacagttcttcaccaaaggacatggatgaaaa

SEQ ID NO: 478155 - DNA, 90 bp, Homo sapiens
ctgatattgaagaggaagaactgaccagagctgatcccgagcagcgtcatgtaccccttgattcgcctttgccagtctcatctcgtgtct

SEQ ID NO: 478156 - DNA, 75 bp, Homo sapiens
ggaaacttgtcaaatttcatcagtgaaaatgcctcgtgtaaaagcagctcaagctggaagacagagctctgcaaa

SEQ ID NO: 478157 - DNA, 100 bp, Homo sapiens
cggcagctggagatgtccgagcccaaggcaattgatcccaagttgtcgacgaccgacagggtggtgaaaggtggaaaacgaagctcattcccaacgtgca

SEQ ID NO: 478158 - DNA, 90 bp, Homo sapiens
tgtaagatctgcagtgagcaaagagagtggacagcggactgcagcgaaccgctggacagcagctgttccttctcccgagggcgagccccc

SEQ ID NO: 478159 - DNA, 74 bp, Homo sapiens
aggattccaagtaactcttatttgcatcatggcagaacaggatgtggaaaacgatcttttggattacgatgaag

SEQ ID NO: 478160 - DNA, 50 bp, Homo sapiens
ggatgaatgatgacccaagtatggaaggcttttttccagacttcaagctc

SEQ ID NO: 478161 - DNA, 75 bp, Homo sapiens
acctcaatattcttccttgccaggtgcctgtctggaaggccagatacacaatggtggatgcttccaaaagcatcg

SEQ ID NO: 478162 - DNA, 83 bp, Homo sapiens
ctttgccgatccgccgcccgtccacacccgccgccagtgaataaccctataccttccaatttgaaatcagaagcaaaaaaggc

SEQ ID NO: 478163 - DNA, 100 bp, Homo sapiens
gaaactcctggtgaatataagagaaagagaagacaacgtgtaggagatgctggctatgagtttgacatctgcttcacctcagtgcagaagagagcgatcc

SEQ ID NO: 478164 - DNA, 85 bp, Homo sapiens
tgtggagagcgacccgtggccttgtgtttcaggtgggcaccatgtccttgaagcttcaggcaagcaatgtaaccaacaagaatga

SEQ ID NO: 478165 - DNA, 75 bp, Homo sapiens
gttgtgcaagaggtactgtccatcaaacatcttccaccacagcttagagaggagaaggcagagcccccccaggct

SEQ ID NO: 478166 - DNA, 100 bp, Homo sapiens
cccgctggaggagctccccagctggtggctggagcgaccccttgttctttggtggcgctgggttcaagggcgaaaaggaccactggcggagccgacgcac

SEQ ID NO: 478167 - DNA, 83 bp, Homo sapiens
ctcggcagcgcccgcggagacgtgaagagggactttgaacatgtcggggatcgccctcagcagactcgcccaggagaggaaag

SEQ ID NO: 478168 - DNA, 99 bp, Homo sapiens
tggaattctgcccactctgcggagttagcagtcacgacctccagcacaggtgaccaagaatatggcccaggtgaccaaagccctggacaaggccctgag

SEQ ID NO: 478169 - DNA, 133 bp, Homo sapiens
gggaccaccatgttcacgtgacatcaagaggaagcggaaaccagtggccacagcatctttgtctagccccagtgcaggtctgagagtcactggagctaccagaagcatcatggggccctggggagagccagag

SEQ ID NO: 478170 - DNA, 83 bp, Homo sapiens
gcaatggtctcaatctctggaaaaacttcttgccaaccaaacgctggccgcgcgccgaacccgagtccggcggcaccgacgac

SEQ ID NO: 478171 - DNA, 50 bp, Homo sapiens
agctgtgttgaagaaataatccggggtcgacatgttaaaacgggtcagtt

SEQ ID NO: 478172 - DNA, 83 bp, Homo sapiens
cgcagccatgaccgtggagttcgaggagtgcgtcaaggactccccgcgcttcaggtgaaatgacaatggatgctctgttggct

SEQ ID NO: 478173 - DNA, 83 bp, Homo sapiens
cttagactaccccaggaacccgcgccgcgagggctccttccctcagttgatattcactgatggactccaaagaatcattaact

SEQ ID NO: 478174 - DNA, 78 bp, Homo sapiens
cagaaacccaggaaatcgagactcatgactcccagagaggatggcatctagaaggcctagttccccgagagcgttcag

SEQ ID NO: 478175 - DNA, 100 bp, Homo sapiens
ccctctccactcccatcttcagggctgacactgggcaagcccctgggagaaggttgctttgggcaagtggtcatggcggaagcagtgggaattgacaaag

SEQ ID NO: 478176 - DNA, 75 bp, Homo sapiens
tcttgcacttgcactagcagcgaacgattcgaaagcagcatttttgaagctttacgactgtcctcatattcaacc

SEQ ID NO: 478177 - DNA, 100 bp, Homo sapiens
gggacttgggcgcttacctgcgacagcgggtagcacaggcctttcgggagggagagaatacccagggtggttctcttcccaaagtggaagccaaattcat

SEQ ID NO: 478178 - DNA, 100 bp, Homo sapiens
gccgccgtgcaggcggccgtcagcaacctcgtccggtggcctattctgggccagcttttcttttcctctaagtttcagaagttggaaacatttaaacccc

SEQ ID NO: 478179 - DNA, 51 bp, Homo sapiens
gacggtcactcagcctatggaggtgccgacgccaccgccgagcccatgatc

SEQ ID NO: 478180 - DNA, 101 bp, Homo sapiens
aacatccagaagatcacacagtgttgaggctctgtcggtggtgagcgacgaccagtccctctttgactcagcgtacggagcggcagcccatctccccaagg

SEQ ID NO: 478181 - DNA, 101 bp, Homo sapiens
gtcagccccactctacaccaacctgacaattgatgaaaacaccagcgatcttcagcctgacctagccttcctctgccaggacaagtttgtcgtctgctctg

SEQ ID NO: 478182 - DNA, 98 bp, Homo sapiens
tggaggcaccggctgcattgttttcgggatcgaggggtgagggcgctatggcacccggctgcaaaaattaaccagaagggctcggagaagccacttga

SEQ ID NO: 478183 - DNA, 100 bp, Homo sapiens
aatacataaagatcccgaacaacttatgaacaccctaaggaaattgagacgtcagatggacatcattgtgtctgaagaattgaatgatctggcacgggac

SEQ ID NO: 478184 - DNA, 51 bp, Homo sapiens
gctattcatctacttcaagaatcagaaaggacactctggacttcagccaac

SEQ ID NO: 478185 - DNA, 100 bp, Homo sapiens
aacgcgaagacggtaacccgtgtgactttgactggcaagtctggaaaagtttgaaattccagtaaaaattcgtttgagtcctgaaccgtggacccctgaa

SEQ ID NO: 478186 - DNA, 75 bp, Homo sapiens
ccgaccccaagctctgccacgaaggtgccaccgaatcagcatgattcttcagaggctcttcaggttctcctctgt

SEQ ID NO: 478187 - DNA, 82 bp, Homo sapiens
ctgctccctcgcccctgcagccagcccttcggcccaaccccaccgccatcctggatgagctggaagccgacactgagtattt

SEQ ID NO: 478188 - DNA, 75 bp, Homo sapiens
ctcgcgggtgaccgaaaggatcatgaactagtgacctggaaaggatgcgaagtacaaaactgcttcggctcattg

SEQ ID NO: 478189 - DNA, 105 bp, Homo sapiens
tgcagcttcaagcttaggaccacccaccatgcctatccaggtgtggatgaggtcaccattgtcaacattttgaccaaccgcagcaatgcacagagacaggatatt

SEQ ID NO: 478190 - DNA, 101 bp, Homo sapiens
gttatgatacaatcttgcgtgtcctgggctctaatgtcagagaatttctacaggtgaatcagtggctaacctggttagaaactgctgaagaagaagaatca

SEQ ID NO: 478191 - DNA, 101 bp, Homo sapiens
cctcgaccccccactgatcgcgctggataaagatgcgcctctgcgatttgcagcccatctcagcactagcacagtgcatggtgcaacagagcaggcagtca

SEQ ID NO: 478192 - DNA, 80 bp, Homo sapiens
gtagctgcacagacataccatggctgctgctcttcatcctcttctgcattgggatgaaatgcatcttctgcagacaccgg

SEQ ID NO: 478193 - DNA, 90 bp, Homo sapiens
atcacattctcgatccagaggaaggcgatactctcgctcacgcagcaggagcaggggacgaaggctaatcaagacaagccctgaactggc

SEQ ID NO: 478194 - DNA, 115 bp, Homo sapiens
atgtgaagagagcatttgcaaaatggaggtctccaccagctcctggccgggttcgaggacaagtcagcctatgcgctctgcacgtttgcactcagcaccggggacccaagccagc

SEQ ID NO: 478195 - DNA, 75 bp, Homo sapiens
gggatttcgatctggacctggcctggcgggcaattattacagtttacgttctcagcatgagaaagcagccttata

SEQ ID NO: 478196 - DNA, 82 bp, Homo sapiens
cctgtctgggtctcagccgccaaagaccccgtccggtagttctgggaagtcatcagtgatgagcatggcatcgaccccagcg

SEQ ID NO: 478197 - DNA, 90 bp, Homo sapiens
tggaggcgggaggcgcggagcaggagcccggccaggcgctggggaaagaggcctcacgacaggactagtgccttggtaagaagaggaaaa

SEQ ID NO: 478198 - DNA, 100 bp, Homo sapiens
acccctctgcagaagagcatggacctcttaggaaaacaactttccttttactcctttggtataatagcttcaaaagcagtggactgtcttttggattcaa

SEQ ID NO: 478199 - DNA, 100 bp, Homo sapiens
cggagaagcaggagccctactcggcagatgaggacggggacttggttgccttttccagtgacgaggaattgacaatggccatgtcctacgtgaaggatga

SEQ ID NO: 478200 - DNA, 78 bp, Homo sapiens
ccacagtgggcttcaacatgaggaaggtaactaaaggcctcatggcggtccgagcttcgttcgagaacaactgtgaga

SEQ ID NO: 478201 - DNA, 73 bp, Homo sapiens
ctccaccaggactgaccgctgccgcccagcacgtccaggtgctggagaatctggtaaaagcaccattgtgaag

SEQ ID NO: 478202 - DNA, 100 bp, Homo sapiens
tctaaggacacatccaatttccattcgcatccaaaatggaatccgagacagaaagaggaccttagatgcctgaggaaacccagacccaagaccaaccgat

SEQ ID NO: 478203 - DNA, 90 bp, Homo sapiens
caaataagctatatactttggttacctatgtacctgttaccactttcaaaattgttgacctcctgtactggagagacattaagaagactg

SEQ ID NO: 478204 - DNA, 75 bp, Homo sapiens
cgcacctgcagctctgctgagagagtgcaagccgtgggcgatgaagaacgatacagatacagggaatatgcagaa

SEQ ID NO: 478205 - DNA, 100 bp, Homo sapiens
tttgattcagcgacttatgtctgttgcttatacgtatgataatctggctcctaggttacaaggagctattttcgtatcctaagcatatcacaagcaatac

SEQ ID NO: 478206 - DNA, 98 bp, Homo sapiens
ctgatgggaacttgtgtgttaaagtaacagatgatttagttgtcaaaatgcagatcttcgtgaaaacccttaccggcaagaccatcacccttgaggtg

SEQ ID NO: 478207 - DNA, 100 bp, Homo sapiens
tggaacgtgccagttgattctgaccatttctcatgaacagaaacacctaggaagggagaactggtttacccaaggtccagcctagcccctaggcaccatg

SEQ ID NO: 478208 - DNA, 83 bp, Homo sapiens
gtacagtattttgcagagcatcccccaaagacagattgaagaaatgcagagacagttcacacaaaagatgttggacaatttct

SEQ ID NO: 478209 - DNA, 114 bp, Homo sapiens
cggaactgcggagttgctgggtccaccgacccttaccctcagcgagagaagtaaccgtatggaaaagttgaggccactcgcatattgttagagaaaggaaagtgcaatccaaac

SEQ ID NO: 478210 - DNA, 100 bp, Homo sapiens
gtggcgcctaaagtctgagagagggaagtcgcctctgtgctcgtgagtgcatggggtataaggcctgcctcggtctcgcagtcagacgtgcctgccagag

SEQ ID NO: 478211 - DNA, 75 bp, Homo sapiens
aaagaccacattgtcctcacagtactgccggatcaagatcaatctatcctgtttgaccaaactcagagatcaatt

SEQ ID NO: 478212 - DNA, 74 bp, Homo sapiens
cccataattacaccagcaggagaagtggtggcttccaggctaaacttcaaagaagcaagatttccagatgtagc

SEQ ID NO: 478213 - DNA, 100 bp, Homo sapiens
agctgccacttcccctagtacaaatggtgcttctccagtgatggataaaccaccagtgtgattcttggagcaaatacccggccagacttggatctccgag

SEQ ID NO: 478214 - DNA, 75 bp, Homo sapiens
catccacgcacctgcagctctgctgagagagtgcaagccgtgggccagtaatgttaaagtagagactcagagtga

SEQ ID NO: 478215 - DNA, 75 bp, Homo sapiens
cgaggtcctgcaggtggagctccggcagccgccctgggagcatgacttcggcaacttcacctatcattctgaaat

SEQ ID NO: 478216 - DNA, 74 bp, Homo sapiens
gatcaccaagcagaatgtccagcgggtcctggaggctgctaacctcttccaggctgaccggttccctgatgtgt

SEQ ID NO: 478217 - DNA, 100 bp, Homo sapiens
gagaccgttctgcaagcctacatcagcaatgacctcttggactgttatagccacaaccagctgtgaattcctttggacaattgatgatatttatcattgt

SEQ ID NO: 478218 - DNA, 75 bp, Homo sapiens
tgtcatgtcttacctctttgctcagcagcttcatggagtttggccacaagatgttgttgacggaacgtgtgtagc

SEQ ID NO: 478219 - DNA, 95 bp, Homo sapiens
cggctctgcgcgtccgttactacagtgacaccagacaggcttttactctgtcacccatgctggagtgcagtggtgcaatcttggctcactgaaac

SEQ ID NO: 478220 - DNA, 83 bp, Homo sapiens
cgggagtgttcgttgtgccagcgactaaaaagagagtccctgtgaagcaggaagagtgagggcaggttcactgcagctcagca

SEQ ID NO: 478221 - DNA, 102 bp, Homo sapiens
agcgccaccctgtggacatcagcgccatccccgagcagcggtggaagctgctggtcagtgagaaggtcggaggggccgaggggaccaagctggatgatgact

SEQ ID NO: 478222 - DNA, 102 bp, Homo sapiens
ggaggacgccagatacctcaaaaggaactgtggaaggtgcatcagtgaagaaatggaccaatgtgtataatcatggaatctccttgctaaccatcaccacca

SEQ ID NO: 478223 - DNA, 99 bp, Homo sapiens
atggaaactggtaattctgctgccactcataaactcttctgcaggaatcattgacatagagtaactccacagcatgtgtcttcaagagcttccctaaaa

SEQ ID NO: 478224 - DNA, 75 bp, Homo sapiens
agaagggccttactccttcacagatcgatgttgaaagtgtgatgaacagtgtggtatccctactcttgatcctgg

SEQ ID NO: 478225 - DNA, 90 bp, Homo sapiens
gtatttagtgtgacgactgttgacctgaaaagctggttttcccatgggctatgcagcagcagctcctgcctattctcctaacatgtatcc

SEQ ID NO: 478226 - DNA, 75 bp, Homo sapiens
ctgggctcgcggcgtctccggggaaagccgtggccccgagggcggatccgagtgtgctggaattgatgttcgtct

SEQ ID NO: 478227 - DNA, 100 bp, Homo sapiens
tgtagtggccacaatgaagctgttagtcattacaagttgctgcttcagcaaaacaagaaatttcaaaacttgatcaagctgagatctgtatctgtggacc

SEQ ID NO: 478228 - DNA, 75 bp, Homo sapiens
tttttagatacttttaaacacccgagcgctgagcctttccgctgtgcccattgccattactcctgcaacatatct

SEQ ID NO: 478229 - DNA, 90 bp, Homo sapiens
taccctgaaggatgggactgaagggggatcatctagaagggtgggctttgacagcgagaatcccggggacgacgggcagatgcacaaggg

SEQ ID NO: 478230 - DNA, 73 bp, Homo sapiens
gccgccgctgcagctgccgcgcgtggtgtacaactatgagcctttgacacagctcaagaatgtcagagcaaat

SEQ ID NO: 478231 - DNA, 96 bp, Homo sapiens
gatttcctgaagatgtttacagtgcagtcttatcgaaggatgtgcatgaaggacagcctcttctcaatgattgatgatggtctccagctgtcaaag

SEQ ID NO: 478232 - DNA, 75 bp, Homo sapiens
ctattctccgagcttcgcaatggacatggtctgctatacagctcagactctcgtccgaatcctctcacatggtgg

SEQ ID NO: 478233 - DNA, 97 bp, Homo sapiens
ggggccgtggctgacatggagcaggtgatcatggagctcagcttggtctccatggggctggtggtgatggaatacatgatgacacagcaggtggaga

SEQ ID NO: 478234 - DNA, 49 bp, Homo sapiens
gatggtggccgcaaagaagacggaggaggaagccaagaatctggtgagc

SEQ ID NO: 478235 - DNA, 98 bp, Homo sapiens
ttgaggatgggggagtagctacaggaagcgaccccgcgatggcaaggaaagtctctgtacgtgaagaggttgcacgacaaaatgaagatgcagttaaa

SEQ ID NO: 478236 - DNA, 82 bp, Homo sapiens
tgctgcagacggcgagacctcctgcacagggcagtcagggcgacagcaagaatgccaagaagaagaacaacaagaaaaccaa

SEQ ID NO: 478237 - DNA, 99 bp, Homo sapiens
ctgaggtagatcatgaaagagatcctggacctatgaatatccagtttgagccatcggatctaagatccaaaaggctttcgccaaggtcttcaacacaac

SEQ ID NO: 478238 - DNA, 80 bp, Homo sapiens
gctgagcgttctaaaggaaggcgtccgttggccttcgtacccgtcttgattgaggtgtcccgacccaggctaagcttgag

SEQ ID NO: 478239 - DNA, 138 bp, Homo sapiens
ccagggtctgcagggcctgggccgccgctgctacctgcagcgccgtgtggcacgacacaaaaatcagctgtcttgtcgacggtctcactgatgcctcttctgcattcaaagttcctcgacccgggccagatacactcc

SEQ ID NO: 478240 - DNA, 100 bp, Homo sapiens
taagcagagaatggagaagaaggttgattccagatggactagaggcttttaccagatttcttaaaactgaattcagtgaagaaaatattgaattttggat

SEQ ID NO: 478241 - DNA, 90 bp, Homo sapiens
tcattttctctctcgaatacgtgagaaagagcgggacgaccctgggacagtctccactggggcagatccagctgaccatccggcacagct

SEQ ID NO: 478242 - DNA, 75 bp, Homo sapiens
gatatatatgctgacgaggagttcaaccagggaactgctcgcagaaagaagaaggtggttcatagaacagccaca

SEQ ID NO: 478243 - DNA, 90 bp, Homo sapiens
ccgagagcgcgaatatcgtcatcgttagaaggaaaattgggccgatttccacctatgatgcatcatcaccaggcaccctcagatggccag

SEQ ID NO: 478244 - DNA, 82 bp, Homo sapiens
cgcccctcctggaagaaggaagagaacgctgtaaatgtaagcctattagagctacacagaagacctatttccggaacaatta

SEQ ID NO: 478245 - DNA, 82 bp, Homo sapiens
tgcaggtggtcagacatgtcatcaactcagctggtccctgtgcgttttattgcgacctgccggtgggaactttgtctccgag

SEQ ID NO: 478246 - DNA, 75 bp, Homo sapiens
ccctacaatgtgaagatacataagatcgtagccagacccccagtaatccagtccctcatagcactggtgaatgac

SEQ ID NO: 478247 - DNA, 100 bp, Homo sapiens
ttggttcgaataaatgaaataaagagtgaagaagttccagcttttggggcacgtgtggttctcaaatataggcattctgatgggaacttgtgtgttaaag

SEQ ID NO: 478248 - DNA, 100 bp, Homo sapiens
gcaaagtggaagagcagcacctgcggactcgtgacatcatcaatgtgtccaacagatgtgtctgggaagctgaggatctgggataccacgcagaaggagc

SEQ ID NO: 478249 - DNA, 97 bp, Homo sapiens
accctgcccaacagaatttatatagagatgtgatgttggagaactacagaaacctcgtctccctggattctgaaggaagatttccattaggtaattt

SEQ ID NO: 478250 - DNA, 75 bp, Homo sapiens
ctgtccgagtcccaggtcaagagcctctgcgagaagatttccgttaatgctgaacaagtccgaatagaactggag

SEQ ID NO: 478251 - DNA, 83 bp, Homo sapiens
ggcgacgaggcgattgcgggggcctgggctagctgaggagtacctgtcatttgcctttgagcattgtcaccgttctagtcaga

SEQ ID NO: 478252 - DNA, 82 bp, Homo sapiens
cttagctgtgctcgcgctactctctctttctggcctggaggctatccagcactgcaaaattcaaaatggggctcaaggtatt

SEQ ID NO: 478253 - DNA, 83 bp, Homo sapiens
tgcccccaagaaggaagtcatcatgggccggcctggaacagctctccttcctccactaagagcggaaaatgaacaaatcccag

SEQ ID NO: 478254 - DNA, 87 bp, Homo sapiens
caggagagcgccaccttccttgaaggtaccattgttggatactggtgacatcatcattgacggaggaaattctgaatatagggacac

SEQ ID NO: 478255 - DNA, 75 bp, Homo sapiens
gacgttttgaaaaaccaggacgaaaagatgtaggggccctggtgaaaacagatgaacaagaagtaatcaactttt

SEQ ID NO: 478256 - DNA, 90 bp, Homo sapiens
gtcttcctgcccaacaaacagaggacagtgggacactccggacgcaggcccggccaggagagttcgtctgcatcgagtgcggaaagagct

SEQ ID NO: 478257 - DNA, 49 bp, Homo sapiens
cggccagctgggctccacagcccaggatgggcttaggtcacgagcaagg

SEQ ID NO: 478258 - DNA, 75 bp, Homo sapiens
ctcggacccagggcagccgtgcccatttccccagggcatggaggctgaaaactgttctggccaagcgaactgggc

SEQ ID NO: 478259 - DNA, 82 bp, Homo sapiens
cccgccctccccaagtcgacgccgcaacccggggaaagcagacaatgcagatcttcgtgaagactctgactggtaagaccat

SEQ ID NO: 478260 - DNA, 83 bp, Homo sapiens
tgtttcaactctccgccgagggcgagcaggagcgagagtgtgtcgaggtgaggtggctttgaccccgggttgcccggccagca

SEQ ID NO: 478261 - DNA, 89 bp, Homo sapiens
cggcgaaggggtcgagcagggagcagcgcagcgcgcgcagagcgtcgtccaggtgtgaccatgaagctcatggatgaggtcgccgggat

SEQ ID NO: 478262 - DNA, 100 bp, Homo sapiens
gttgaagacggcgccgtgggtgcgggtgctgaggatgctccagaccttgtatgattacttctggtgggaacgtctgtggctgcctgtgaacttgacctgg

SEQ ID NO: 478263 - DNA, 101 bp, Homo sapiens
taggaccagcgtgtcccccacatcctcccctgagtccggagctaccaaaaccatcctcctggttctagcatgtattaacaccgtgtgtctaaagtcatccc

SEQ ID NO: 478264 - DNA, 123 bp, Homo sapiens
acgttcttggagttgctggtgttctatactggaagaggcatgccagaggtagagcaggtttttcgttggaatatacgttgcacatttatggcgattctgagtgtgagggcagacttctgccag

SEQ ID NO: 478265 - DNA, 76 bp, Homo sapiens
tctttcaaactggagccttattggagagtgatggtgatgattttaattacatcattgcatttttccttggaacagc

SEQ ID NO: 478266 - DNA, 50 bp, Homo sapiens
tctacaggatgatcaaacttggtctggagacctacagagttgaaacagtg

SEQ ID NO: 478267 - DNA, 90 bp, Homo sapiens
gaaaattgaggaaatcaaggacttcctgctcacagcccgacgaaaggatgccaaatgccgctttgtagttcagaatgtttctgcacagaa

SEQ ID NO: 478268 - DNA, 51 bp, Homo sapiens
gccacgtgtctgagctggagccagataagtatgctgtgcgcttcatccctc

SEQ ID NO: 478269 - DNA, 90 bp, Homo sapiens
cctcagccaccgctccctcttcccacgacaactgggcggagttaatggaagtcaaccatgatgacaaagtggtcaccaccgaacgcttcg

SEQ ID NO: 478270 - DNA, 100 bp, Homo sapiens
acatccgatgcaccctttttgtcagattatcaggatgaggatggaatcgccacttatatatgtttcagttttgcttttgaacatatttgaattttcatca

SEQ ID NO: 478271 - DNA, 100 bp, Homo sapiens
ctggaggctccgggcgcggggaagtcatgctcgcttcacggaggcaatagctagccgagaaagatgctggtttcgagttttggagatccttgttttttat

SEQ ID NO: 478272 - DNA, 74 bp, Homo sapiens
cggctatcaaggcaatgcaccaagcacagaccatggagatcacttcagcatcggtgaggttggtctctcaagaa

SEQ ID NO: 478273 - DNA, 90 bp, Homo sapiens
agacggaaatgtccgaaggccgcagtacttgaccctgtattttgggagtcgaacggagtggttatcactaggctaaaactggacaaagac

SEQ ID NO: 478274 - DNA, 75 bp, Homo sapiens
gtattgggagatgcacagctaagatgccaggaccacctggaagcctagaaatgtttgctgacctctctgaggctg

SEQ ID NO: 478275 - DNA, 74 bp, Homo sapiens
aatccagagaccccctgaagattcggtcaatgagtggtcattgaagataagaaaggaaatgagagttgttgaca

SEQ ID NO: 478276 - DNA, 100 bp, Homo sapiens
ccagcaccccagatgggtgagagatgtgatcactggtttcgtggcctgaccaaggacctccaagggtccagattttggctatgtaactcgagggccccaa

SEQ ID NO: 478277 - DNA, 82 bp, Homo sapiens
cccaataaccaggtgcttggcaaaatcgagcgggccattgatgtgaagttcatttccaatccgccctccatggtggcagcgg

SEQ ID NO: 478278 - DNA, 74 bp, Homo sapiens
agactcggtgctgtacccgccggtatgttagagcccaccaaggaaccactgaaaccactttctgctgcagaaaa

SEQ ID NO: 478279 - DNA, 75 bp, Homo sapiens
gtggaagcagatggggtaaattggactcatctgatgatgtgagaagagttcagaggagggagaaaaatcgtattg

SEQ ID NO: 478280 - DNA, 97 bp, Homo sapiens
ctaaaccatctgaattggctcaatgatgagcatatgtaagtggaactcagaaggcaacattccctgaacatactcttccaccagaatctcctctaca

SEQ ID NO: 478281 - DNA, 100 bp, Homo sapiens
aaggatatcgacgtcgtgatccagaagtccagagctgaggactgcctgtttgcaggatctcgctctgtaacccaggctctggaatgcagtggcacaacca

SEQ ID NO: 478282 - DNA, 82 bp, Homo sapiens
acagtttcatcaccatcaaagtcaaagaagttagagtgcccttctcctgcggaacaagttcggctttccagtttggcagcag

SEQ ID NO: 478283 - DNA, 90 bp, Homo sapiens
tggaaaaaccaagctaatattgtctccatatggtaagtaaggaggtctctgtaccatggctcgtacaaagcagactgcccgcaaatcgac

SEQ ID NO: 478284 - DNA, 75 bp, Homo sapiens
ctctcaccatcatcaagacggaaaaagtcgatctggagcttttcccctccccggacccttcttatgactcagtca

SEQ ID NO: 478285 - DNA, 99 bp, Homo sapiens
cagagcttgctggagcagctctgttgaccgctgacccttggcctgctaactgaaacaaggatcgttctgcagcctgtttcgtggtctacagactctagc

SEQ ID NO: 478286 - DNA, 75 bp, Homo sapiens
cccggcgctcttcctcccggagtatgtgggaagaagtcagtggctacgatgaaaacctgaacaccatccgcacct

SEQ ID NO: 478287 - DNA, 96 bp, Homo sapiens
tcagaatcgaatctcttctccctccccttcttggtggtgaaaacaggaatgagaacgaggagtcaacctcaaaggctgaaacctcggaagattcag

SEQ ID NO: 478288 - DNA, 101 bp, Homo sapiens
catttgttttacaacagtacaaagagttgcttcagaggcacagaaagttacagaggatggagatgaagatgaggaagctgagtcagctacgggcaagcggg

SEQ ID NO: 478289 - DNA, 50 bp, Homo sapiens
gagaaactcagcgctggggaagaaggtgaaaaaccatttcgctgtgatga

SEQ ID NO: 478290 - DNA, 51 bp, Homo sapiens
taggtttagttgagcaccggaaagaacgtcttaaagaaagtgcagaagaga

SEQ ID NO: 478291 - DNA, 90 bp, Homo sapiens
atcacagtggatgggccccgagaacctcgaaaggaatggcttcttgtgggaaccaaacaaggacatcttcttctctataggattcggaag

SEQ ID NO: 478292 - DNA, 75 bp, Homo sapiens
cgggacttggccgagcggatcctaataaggggaaaatggagttgtaagacgttcatcgccgtgttatccttgagt

SEQ ID NO: 478293 - DNA, 100 bp, Homo sapiens
gagagcctgttggaacatgctttcttcaagatggaacaaagactgttgagtatgctccatgtagatcaccttcttctcagcctgttgataaccatgttag

SEQ ID NO: 478294 - DNA, 100 bp, Homo sapiens
gctgcaactatttagctttagttggtggtggaaaaaagccgaaataccctcccaacaaaggctgtcattatttgtatcaaaaacaaagaatttgaaaagg

SEQ ID NO: 478295 - DNA, 100 bp, Homo sapiens
aagatgaattaatccttgaaggaaatgacattgagcttgtttcaaattcagtttgtcgctgatggcatcttcaaagctgaactgaatgagtttcttactc

SEQ ID NO: 478296 - DNA, 100 bp, Homo sapiens
ctctaccttgcgagccgtcttccccaggcctgcgtccgagtctccgccgctgcgggcccgctccgacgcggaagaggcttcgtgacggagttatcagaga

SEQ ID NO: 478297 - DNA, 75 bp, Homo sapiens
aaatcctaagactcagcactgttgcgggatggagggagcgaggaaccaccggatcgaagacagtcaagtgtagac

SEQ ID NO: 478298 - DNA, 82 bp, Homo sapiens
tcaccacgcaccgactatgtcgcctgccaccgagccgggcccacctccccaccaaggaagaggagcaggagcggcttcgctt

SEQ ID NO: 478299 - DNA, 100 bp, Homo sapiens
taacaaaaactatgtaccagccacattcacacaacagattcaattagcagagcctcacagacaatggccaaatgtgtcaaagctgtcacagagggtgccc

SEQ ID NO: 478300 - DNA, 75 bp, Homo sapiens
cactcaaccagaaggaggctgtggcctatgcagtcaactcctggaccactagtacaaaaaacttggactttcgcc

SEQ ID NO: 478301 - DNA, 75 bp, Homo sapiens
ggcggctcgggacggaggacgcgctagtggagagctggtgacggcctccaaggccatcattgaaaaggagtacca

SEQ ID NO: 478302 - DNA, 82 bp, Homo sapiens
gattgtgggagtctccgcgtcccgctcgctgggagagaggttttaaaatcaaagatgggaaaatcggagaaaattgcccttc

SEQ ID NO: 478303 - DNA, 100 bp, Homo sapiens
tccattggatttaaaagacagtcctcgtcagcactgactttcagctatggaatcgatgaagtgcgcacaggaacctataggcagctcttccacccagagc

SEQ ID NO: 478304 - DNA, 100 bp, Homo sapiens
accaaattttgcagtggtcacgcccctcactttcccatgaagaaagttctcttgctgctctggaagacagtattggttgctcaggcctccctcaaactag

SEQ ID NO: 478305 - DNA, 111 bp, Homo sapiens
cgcaaccattgacgccatgtcgggttattcgagtgaccgagaccgcggccgggaccgaggattcccctcttcccgcggcctcgccatggcgacccacggacagacttgcgc

SEQ ID NO: 478306 - DNA, 100 bp, Homo sapiens
gcactggtgtctatcaaagccatcggatggatgagcagtcacacagactttgctgcagaaccttggcctgaaaatgctacattatatcagcaattgaaag

SEQ ID NO: 478307 - DNA, 100 bp, Homo sapiens
gctaccttgatcaattcaggcaactcatcagccagattggttctgtccacggtgtgtccaggaaaagaggaagaagaagtaggaggagctgtgtgcccgg

SEQ ID NO: 478308 - DNA, 100 bp, Homo sapiens
gccacctatgcagtattacaatagccaaggggatgccacacataaaggcctgtaccctgataccatggcctgggagaccatcctgatggatacactggag

SEQ ID NO: 478309 - DNA, 100 bp, Homo sapiens
aattaccgtatgcagtcccccaggatacagggtcaaaggagagcacaaccatcgcagttggaagcccatggggcaggaattacatgaacgacagccttcg

SEQ ID NO: 478310 - DNA, 83 bp, Homo sapiens
gcgacaagccgctggcagccgcggatctcaccgccgctcagggcgtctgcgtcctgcacaactgtatctatgctgctgggggc

SEQ ID NO: 478311 - DNA, 74 bp, Homo sapiens
ggctcacctgtgcgggatggaacaaaaggagcatgtgcccacctggcttcagaacactcatgtctacagctggc

SEQ ID NO: 478312 - DNA, 89 bp, Homo sapiens
caggaaattcagcctcaaaaccgtcctgctgcttgctgaccaaatgatgtgcactcccagcaacacccctgccacgccgcccaacttcc

SEQ ID NO: 478313 - DNA, 88 bp, Homo sapiens
tcgaaatgaagcggaaagcagatatgcgcgtcagcatactttggcgggcaatggacctcatcatgaccgttgctgtacttacaatgaa

SEQ ID NO: 478314 - DNA, 75 bp, Homo sapiens
tgatcccttgctcccatccctgcagcatgaacaaggagttggtccaggtagcaatgatgagacccttttatctgc

SEQ ID NO: 478315 - DNA, 93 bp, Homo sapiens
ctgccatgcaggcaggccctgagcacgctgctgtgtgagcagcaggtgagaagccctaccactgcaactgggacggctgcggctggaagtttg

SEQ ID NO: 478316 - DNA, 50 bp, Homo sapiens
caagtacgaagatatctatgaggagcaccatactggaccaacacagaaaa

SEQ ID NO: 478317 - DNA, 100 bp, Homo sapiens
tatgctgaggggcctctcgccccgcgagtcctcgctggcactcaactacgctgcgggtccccgagacagaacaatggcagcccgagtacttataattggc

SEQ ID NO: 478318 - DNA, 83 bp, Homo sapiens
cctcatgccctgatgatcttcagagttcctgagttggaggtagaagaagaaacccaagttcaagagatgactttagatgagtg

SEQ ID NO: 478319 - DNA, 75 bp, Homo sapiens
gtgcctggataccttcgaataggggcagctgcaatgactctccgcacggtattattgtcattgcaagcactattg

SEQ ID NO: 478320 - DNA, 97 bp, Homo sapiens
atgagatatgttcttcattgccaaggcacagaaggtatcaaacagctactgaaacaagggtcagtgcagaaggtatacaatggactgcaaggatatt

SEQ ID NO: 478321 - DNA, 98 bp, Homo sapiens
gagatgaagcctaagaatatgatcagcattttgaaagcgaagcagaagccgtagaatcagcggcgagcctgttgaaagaacccacaggtgcatttcac

SEQ ID NO: 478322 - DNA, 100 bp, Homo sapiens
gtgagcaggtgtggcatgtgctggtgctacgcatgatggtcggagtaaatatctcagatgagcagctgggcagcatcgcagacaggaccattcaggaggc

SEQ ID NO: 478323 - DNA, 99 bp, Homo sapiens
atggaaggtgtggaacttaaagaagaatggcaagatgaagattttccgataccaaaatccacacccttatcacagcccagtgccaatggagtccagacg

SEQ ID NO: 478324 - DNA, 100 bp, Homo sapiens
ccaagatggactaccccaagcagactcaggtctcggtccagctcgacttccagctcaggctccagcaccagcactggctcaagcagtggctccagctctt

SEQ ID NO: 478325 - DNA, 100 bp, Homo sapiens
cagtggggcacctgtcagatgccagccagagctctcctgtatcaggtgtctgtcggtccaagctagaaggtctgctgagaacagacccagtccctgagga

SEQ ID NO: 478326 - DNA, 74 bp, Homo sapiens
aagagaaagtaacaagaatcattcttgcagcatttcgtgtactccaaagattcaggtttactcacgtcatccag

SEQ ID NO: 478327 - DNA, 75 bp, Homo sapiens
tcggcaccgtcctttcctttctccctcgcgttaggtccaggtgcaggtacagcagtctccgcaacaggtctcggc

SEQ ID NO: 478328 - DNA, 74 bp, Homo sapiens
agcaaaggagatttccaaaatccaggggatcaagagaaagtagcacgtctggaaattgagaacaaagtccttca

SEQ ID NO: 478329 - DNA, 100 bp, Homo sapiens
gtaatgctccttcaacaaggtcttaatgacagatcaggtcagaaatgtgaattccaggatgcctatgttctgttgagtgaaaagaaaatttctagtatcc

SEQ ID NO: 478330 - DNA, 98 bp, Homo sapiens
cccactctgccgcatctgcttccaggggccagaacagagacttatttttgagctcgctgtaagactgagaaatcacgtagtccttcctgaaaccacta

SEQ ID NO: 478331 - DNA, 100 bp, Homo sapiens
actacagtaaggctgaaatcattgaagtgcttggagtgcagaactgaaagaggaggagatgttaaagtaacccatcttgcaggacgacattgaagattgg

SEQ ID NO: 478332 - DNA, 98 bp, Homo sapiens
attaacagactttgtggggaaaaaaaggagcttgccttctgagctttgtaccaaagacctgggaaaaatcaagatattttggaaactatattgataga

SEQ ID NO: 478333 - DNA, 75 bp, Homo sapiens
gaaggtttggggagcagctgatacagcaaggagggctcttgcaaggattcaagggtggcatgatcgctctgctgc

SEQ ID NO: 478334 - DNA, 83 bp, Homo sapiens
gcagaacgtgagggtgtaacttacaaaaagaccatggtgaatccgggcagcagctcgcagccgcccccggtgacggccggctc

SEQ ID NO: 478335 - DNA, 82 bp, Homo sapiens
caaccccaagatgtcggagacacggtggaaacgcttatgggtttccaggcctgaggtgcccgccctggccccaggagaatga

SEQ ID NO: 478336 - DNA, 100 bp, Homo sapiens
caagaaggagggtatctgcttcacggagggcaagagccggagggtctcagaggacagacagtgccagctttggaatcgtcctctgggaaatcgccactgg

SEQ ID NO: 478337 - DNA, 75 bp, Homo sapiens
ccaacagcagcaaccctatcatcgtctcctgtggctgggacaagctggtcaagggtggaattgcgtttgttgcca

SEQ ID NO: 478338 - DNA, 101 bp, Homo sapiens
aacatgctggatgtcaacggcctctgttttgacaagcttgcatcatgcgtgagtataagctagtcgttcttggctcaggaggcgttggaaagtctgctttg

SEQ ID NO: 478339 - DNA, 100 bp, Homo sapiens
tgtgaagatgagcacttacttggttgctttcattgtgggagagatgaagaacctgagtcaggacgtaaatggaaccctgtgctgcttaagtagagccgag

SEQ ID NO: 478340 - DNA, 100 bp, Homo sapiens
atgtactatatatgaaatacgtgactgtttataatcttatcaaaaaaagacctgatttcaagcaacagcagccaaagcctgctggagtactaggtgcagt

SEQ ID NO: 478341 - DNA, 82 bp, Homo sapiens
gtagcaagtggtgataacacactcagcatcactaaagccgttgatccagaaattatagctcgaggtactgttggcttttccg

SEQ ID NO: 478342 - DNA, 100 bp, Homo sapiens
tctagatgtaaatgtcagtggaaaggagagctaccatcactaagctgtgctccattgaagtgacttgtgaatcagccagtgtgatggctgcgacactggc

SEQ ID NO: 478343 - DNA, 50 bp, Homo sapiens
gagatcttccgccactacgacccgcggcgccatggctcacgtcggctccc

SEQ ID NO: 478344 - DNA, 100 bp, Homo sapiens
gacagattcgcagtggtcgcttcttctccttggctgaagccgacgtagcttctctgaacagacgcatccagctggttgaggaagagttggatcgtgccca

SEQ ID NO: 478345 - DNA, 96 bp, Homo sapiens
atgtaccgactgcttttggaataaaaagattcccaggatgtgagcaacacgggaccgcgcaaatctgtccaaggctgcctggggagcattggagaa

SEQ ID NO: 478346 - DNA, 98 bp, Homo sapiens
ccgctgccgccctgagtcactgcctgcgcagctccggccgcctggctccccatactagtcgccgagctcttcagaaaccaggctgctttcaggaacat

SEQ ID NO: 478347 - DNA, 74 bp, Homo sapiens
gaggagtcagaaactcagccactggttgccttggtaggcaataaaaggcggcgactggcggcgcgatggacctg

SEQ ID NO: 478348 - DNA, 100 bp, Homo sapiens
ggtgaagcggcccaggtgaggctcaaactttggaacaaataccgaatttccaacattccatcactaatattcctcgacgccaccactgggaaggttgtgt

SEQ ID NO: 478349 - DNA, 100 bp, Homo sapiens
acaatatattgactactgccacaattccggtacttaaagctttcaccaaaacacccagaatcaaatactgctggaatggacatctttgccaaattctctg

SEQ ID NO: 478350 - DNA, 82 bp, Homo sapiens
cattattgcgcgtggaacggctgcttttggaaggaatcccttggcaccatgtcctgtgtgcattataaattttcctctaaac

SEQ ID NO: 478351 - DNA, 100 bp, Homo sapiens
ctagaatacctgtgtggtgctgtccttcctcaagactacctcattctcactggctcggagactcctgcctgctgaggtttgcaacacaactacagacagg

SEQ ID NO: 478352 - DNA, 75 bp, Homo sapiens
ctccgaacgaaggcggctccgtgcgggccatcccctatctccccgggcggtttgtgaatagcacaatggaagaag

SEQ ID NO: 478353 - DNA, 83 bp, Homo sapiens
acgatgatgacagtgacaaggaaaaggatgaagaggacgaggtcattgacgaggtgattgtagagaaggctccaaaagccagg

SEQ ID NO: 478354 - DNA, 74 bp, Homo sapiens
tcagcaccaccctgcctgtggacagcaggatgattgaggccaggcacctcattgagaagtcagtgcgtaagatc

SEQ ID NO: 478355 - DNA, 98 bp, Homo sapiens
aactgtagaggggcaagcagtgttgcccagaagattgttgccacaaggaagaagcagcagctgtccataggaccctgcaagtcgctacctaattctcc

SEQ ID NO: 478356 - DNA, 154 bp, Homo sapiens
ccctggagtcctcgactctgatggagaagtacaacaccaggatcagctttgagaaccgggaggaggatatgatcggtagagggtgagaaacagcaggagcacgaggtgcagtggctgcgggagcacctggccatgctactgagctcggtgctgg

SEQ ID NO: 478357 - DNA, 83 bp, Homo sapiens
cggaggctcgcgagatccgcatgaaggagctggagcggcagcagaaggaggaactgtggctgcaccatctgtcttcatcttcc

SEQ ID NO: 478358 - DNA, 100 bp, Homo sapiens
ttggagatcatgaccaaatatgctgtgggagaagagtgtgacttcgaggaatgtttggatgaagcaaatgctgcattggattcagcatcaagacttacag

SEQ ID NO: 478359 - DNA, 100 bp, Homo sapiens
ccatgcagcggaggtgggtcttcgtgctgctcgacgtgctgtgcttactggtcgagacgtctcccacaacctgctccgggcgctggacgttgggctcctg

SEQ ID NO: 478360 - DNA, 100 bp, Homo sapiens
cagaaagcggcttatcgaacagagccgggagttcaagaagaacactccagagggtaagcttgatgattaccaggaacgaatgaacaaaggggaaaggctt

SEQ ID NO: 478361 - DNA, 98 bp, Homo sapiens
ccaagccaaggctgataaaattaagctggcgctggaaaaactgaaggaggccaaggttaagaagggcaattgaaggaacagactaaaaatcgtgtcct

SEQ ID NO: 478362 - DNA, 75 bp, Homo sapiens
caatgtctggtagccaccggcactcacggttggatggcaagcatgtggtgtttggcaaagtgaaagaaggcatga

SEQ ID NO: 478363 - DNA, 75 bp, Homo sapiens
atctggtgtaccaggcgaagctggccgagcaggctgagcgatacgacggtaagaatgattgatgttggctgatat

SEQ ID NO: 478364 - DNA, 100 bp, Homo sapiens
tgctgagctggttggccctgtgatccctcaagactggtccacggagtgtatgaccacaaacagccatcaaggggatcatcgtcttgctcttcttttatct

SEQ ID NO: 478365 - DNA, 100 bp, Homo sapiens
agtacttggacaagatgaacaacaatatcggcattctgtgctacgaagaaatgttgctgaagtgctgctgaaagggccagagatgcaaggatttgggata

SEQ ID NO: 478366 - DNA, 100 bp, Homo sapiens
tgtgaggtaaacagctgagggggaggagacggtggacatatgtagagtgtgtcggtcagaaggaacacctgagaaaccgctttatcatccttgtgtatgt

SEQ ID NO: 478367 - DNA, 50 bp, Homo sapiens
aaaaggaggccaaagactttgcagcctgcttctgcaaagtggtacgatcg

SEQ ID NO: 478368 - DNA, 82 bp, Homo sapiens
ccgaccctggccgccccgagcggagcctggaggagcggtggtgccccccccgggcacggggccatgtacaacgggatcgggc

SEQ ID NO: 478369 - DNA, 75 bp, Homo sapiens
ccaaggattatgaagagcatgacaagggcaccccggctctgccccagactggcataccaacagaggctttggtga

SEQ ID NO: 478370 - DNA, 95 bp, Homo sapiens
caacgccgagctggtgctgctcaccttgggccaggcctggcagggctatggcccactgcgtgaccttggttcagctgtccatttcctgtgaccat

SEQ ID NO: 478371 - DNA, 100 bp, Homo sapiens
tgaaacacagtcgaaaagaatactgtgaattatgcaagcacagatttgcttttacaccaacccaaagtggtcacagatacagatgagactgaacttgcga

SEQ ID NO: 478372 - DNA, 100 bp, Homo sapiens
cggttcccagcatggccccttcacaggactggccaaccaagcgcaccaggtgacacttcagtgaatggccctgtatgacgggtgacgtctgctgctgctg

SEQ ID NO: 478373 - DNA, 99 bp, Homo sapiens
gatggccaacaccccagatgcaagcgtggattggggtgaatatgaccatctcccagaacaggccttctatatggtgggacccattgaagaagctgtggc

SEQ ID NO: 478374 - DNA, 90 bp, Homo sapiens
cccgcatgaagaggaaagtgggtgcagagaatgtggccattgttgagcccagtgagatgaagactggcccatttgcagagcactccaacc

SEQ ID NO: 478375 - DNA, 75 bp, Homo sapiens
ggattccaagtaactcttatttgatgatggaccatttggattgtgcaacaaatgaagaaaaccctgtgatatctg

SEQ ID NO: 478376 - DNA, 98 bp, Homo sapiens
aagagaccgtttttgaaaacattgccaaaccagttgctgggagatcactggggtgatcctgctggctgttggagtctggggcaaacttactctgggca

SEQ ID NO: 478377 - DNA, 101 bp, Homo sapiens
gccgttagcccagccaagcccagccaagcccagccaagccccgccgatcgcgggcaccggagccagccccgcagcggagttgcatgctgagaatttgaaaa

SEQ ID NO: 478378 - DNA, 50 bp, Homo sapiens
actttctcaaaccaaggctgctgcaggcagaagtcctgaaggctgacatg

SEQ ID NO: 478379 - DNA, 74 bp, Homo sapiens
agccaaaggatggtgagattgttggcctttcaggaagagtgcttaagggcaaacttgaagataaatcttttgac

SEQ ID NO: 478380 - DNA, 88 bp, Homo sapiens
tccaccatttacttaacagattacaggtctatgttaacaatgaatgggcaaccagtgttggggaaggagggagctttggagaacttgc

SEQ ID NO: 478381 - DNA, 75 bp, Homo sapiens
caaagtttgatgagcagagaactgctactgtcttggctgttcaaccgtactttctccagaaggatcagctcaatt

SEQ ID NO: 478382 - DNA, 100 bp, Homo sapiens
tccgccgagcccaccgccttcgacatccaggatctcagccatgtgaccctgcccttctaccccaagagcccacatactatactggcaattgctggagaag

SEQ ID NO: 478383 - DNA, 101 bp, Homo sapiens
ccgacccagccggcagtatgccacgcttgacgtctacaacccttttgagacccgggagatgatgaggagtctgatgaggaagctgtgaagaaaaccaacaa

SEQ ID NO: 478384 - DNA, 90 bp, Homo sapiens
attgaagccattcatgcaatcttgagatcagaggttctctacttttagagtcgaaaataaatcctaacactgcataccagaaacaacagg

SEQ ID NO: 478385 - DNA, 75 bp, Homo sapiens
cactatcctgaagaacatgactgaagcagagaagcggcttactgaactaaagcgccagtgtgtagagaaagagga

SEQ ID NO: 478386 - DNA, 75 bp, Homo sapiens
agaggctggataaaatactgcattgtgagacatggaatccattaaaattgcattatcagttaagaaatgtacggg

SEQ ID NO: 478387 - DNA, 49 bp, Homo sapiens
cttggagataaagttgctttttactgaattttgatttggctgctgggct

SEQ ID NO: 478388 - DNA, 100 bp, Homo sapiens
cactttgttattggagaaacatgcagattatatcgcatcctatggctcaaagaaagatgattatgccagacgggtgcagggaacaactgggcgaaagggc

SEQ ID NO: 478389 - DNA, 98 bp, Homo sapiens
cggtgcaagaaaatccatgctggcgatgaagtgattcaagttaatcatcagactgtggtgaccaagaatatggcccaggtgaccaaagccctggacaa

SEQ ID NO: 478390 - DNA, 50 bp, Homo sapiens
gtggggttggcatcccccacatacgagaaatgttctttactaccatggaa

SEQ ID NO: 478391 - DNA, 74 bp, Homo sapiens
atcagatcaaccaccaaagtgggaaacattgaaatcaaggaaaatttctaccttgaaccgtatctgaaagaggt

SEQ ID NO: 478392 - DNA, 83 bp, Homo sapiens
gtggacccgtaaaataaaatggcaactggatgatgctcgcaacaaagctgacaatcaagaaaaggcaatacttaatattcaag

SEQ ID NO: 478393 - DNA, 75 bp, Homo sapiens
agttagcttcagagttctttgtggatggacttgattctgatgagagttcctgatgaatatctgttatcgtaagta

SEQ ID NO: 478394 - DNA, 74 bp, Homo sapiens
tggaaaacggggatttccaccatctgtcccagatggccggttcctgccttaactgatgacattccaccacaaaa

SEQ ID NO: 478395 - DNA, 100 bp, Homo sapiens
tggatatgacccatatgccaacccacctaactacggaaaacctgatcccaaaattattgaaaacactcgaaggtgtgacagtgacagtgaccaggaagag

SEQ ID NO: 478396 - DNA, 98 bp, Homo sapiens
ggggaccggcctctgcaggtcggggagcgctcggactacgcgggatttcgcgcgtgtgtgtgtcaggatgacgtcatgatgccccagcgggtgaggct

SEQ ID NO: 478397 - DNA, 100 bp, Homo sapiens
agacgggtgaggtacaggctcagtctgcggccaagactccgtcctgcaaggctggaagtgatggagagagtattggaaactgtcccttttgccaacgcct

SEQ ID NO: 478398 - DNA, 88 bp, Homo sapiens
ctgcggagccaggaggggaagcgatggctgggcccgcgtggatctctaaggacttgattattcttagaaatgcacttgacctgctttt

SEQ ID NO: 478399 - DNA, 75 bp, Homo sapiens
taaatttcggtagccatggcacaagaatataggtactatttttctgcctggaaataaagtttctgagcatccctg

SEQ ID NO: 478400 - DNA, 82 bp, Homo sapiens
cgcccagcagcagtatggcttccagtacccccttgccatggcagcaaatcaccttcaggccattcagaggaggaaagagagg

SEQ ID NO: 478401 - DNA, 83 bp, Homo sapiens
cgagctcctccctctgctccagcagtgccaagtggtcagacaatgcagatcttcgtgaagactctgactggtaagaccatcac

SEQ ID NO: 478402 - DNA, 83 bp, Homo sapiens
ctttgacttggtgttgaaagtgaaatgtcatgcctctgaaaatgaaggtcatcatcagatttgaaatatttaaagtggataca

SEQ ID NO: 478403 - DNA, 102 bp, Homo sapiens
ttcatgcaaagacatcagctacttaagcgccacgagaagcatctgtgttttgtgtgagcctggaccccaagaccaataccttggcagtgaccgggggtgaag

SEQ ID NO: 478404 - DNA, 100 bp, Homo sapiens
cggcgccatgaccccatcgaggcttccctggttgcttagctgggtctcggccacggcgtggagagcggcaaattgactatccaccatttgaaaaaaactt

SEQ ID NO: 478405 - DNA, 98 bp, Homo sapiens
gcggatcgccgcgctcagcgacaaacaagtcgcaatggaagaagagatcgccgcgctggtcattgacaatggctccggcatgtgcaaagctggttttg

SEQ ID NO: 478406 - DNA, 83 bp, Homo sapiens
atcatgtctgcgagccaggattcccgtacctggagtagaacagaaaaattattatgtctgtgttcccttgggactcattggaa

SEQ ID NO: 478407 - DNA, 82 bp, Homo sapiens
cggcttctgctgttgctcttctccgccgcggcactgatccccacagacaatgcagatcttcgtgaagactctgactggtaag

SEQ ID NO: 478408 - DNA, 83 bp, Homo sapiens
tattgtctttgctgacaatgtgtttgccctaaaggaatatgccattcgactgaacaactctggtttgtcaggctggcactact

SEQ ID NO: 478409 - DNA, 98 bp, Homo sapiens
ccagtgatgatgaaattgactttaaagaaacgggtttctcacaggattcttctttgcagcaagtccccgcggaagccgcggtgtcggcgccatggcgg

SEQ ID NO: 478410 - DNA, 75 bp, Homo sapiens
tagtactgtgagcatgaaccttgaggatagtaatgatgacactgaagatgtttcactgtttgatgcggaagagga

SEQ ID NO: 478411 - DNA, 75 bp, Homo sapiens
tggtccagctctcaggacaagaacaaagtgtgctggaacttgtaatagctggcatcgttgagaatgaatggaaaa

SEQ ID NO: 478412 - DNA, 75 bp, Homo sapiens
gctggagcagactatccgttgcctgctggatgagtgccacaaagaggttggaagtgtatcctcccttcttatttt

SEQ ID NO: 478413 - DNA, 75 bp, Homo sapiens
caatgcctccatgaacaatctcacccaattactctgctcagcattgtaggtttaacactcaatgtacaagaccgg

SEQ ID NO: 478414 - DNA, 51 bp, Homo sapiens
ggcagatctggaccttttgagagggtctgggggtggtggcatctcccctaa

SEQ ID NO: 478415 - DNA, 90 bp, Homo sapiens
tctccaagaccagaagcatcaaaatcctgttgctaaaaccaggcatggaccaacatggtgctaacagttctcaatcagattcagattctc

SEQ ID NO: 478416 - DNA, 90 bp, Homo sapiens
gctgaacttcaccttttggctttcttggcctgatgctgaactctcgagggttttgacacaagggcgcatatcttcaaagcacctagtacc

SEQ ID NO: 478417 - DNA, 52 bp, Homo sapiens
agaggagtggcgggggagaatctcttgttgcaggaagaggcagaggaagagg

SEQ ID NO: 478418 - DNA, 83 bp, Homo sapiens
aggatatcgacgtcgtgatccagaagtccagagctgaggactgcctgtttgcagggtcaacatatttcactggcacctattca

SEQ ID NO: 478419 - DNA, 75 bp, Homo sapiens
gaccactggaaggaccggtacctgccggacacgcttctcttggagaaactgttcaggttccattatcaaaacgag

SEQ ID NO: 478420 - DNA, 90 bp, Homo sapiens
cggagccacttcttcagagcaacttgcccgcactggtgtcacagatcagaggcatcctttgggaaaagcgatcaccttctccagatccgc

SEQ ID NO: 478421 - DNA, 75 bp, Homo sapiens
gctcacctgcgctgtgatgcctgcagagctgtggcttaccaggtgttggggatgtcctttgcactgaccctgaac

SEQ ID NO: 478422 - DNA, 98 bp, Homo sapiens
aagaaattgaccacctggactatggaactacaaggcgcctctgtcgaagagccttctgctggtccccagtgccctctccctcctgctcgccctcctcc

SEQ ID NO: 478423 - DNA, 82 bp, Homo sapiens
agagcggggagctgccctcagagaggtggaaccccacgcagaacgtcagagtcatcttagtgggatttggggaagcaacagg

SEQ ID NO: 478424 - DNA, 148 bp, Homo sapiens
ggcatttctccgccacaagatgaccctgatttccccgttaatgctgaagaaatatggaattccctttgacaagggtggaattgcgtttgttgccataaaaggagcatttaaagtttacttcaaacagcagcaatatttacgacaggca

SEQ ID NO: 478425 - DNA, 100 bp, Homo sapiens
aaggagctgcggagccggacctttcccagctgactcaggtgttgacaccttggcagtgtttatggccagcagcggaactacagacgtcacaaatcggaac

SEQ ID NO: 478426 - DNA, 75 bp, Homo sapiens
agacacggccagatctgccctccaggtattcccagcctgtgagagaacatattgccgatttcaacacacagcaga

SEQ ID NO: 478427 - DNA, 90 bp, Homo sapiens
atttggacggtttctcattgatttcatctcggcgtgcagaaacattggtctgttgctgttttgatttgctgaagaaattgagggcaaagc

SEQ ID NO: 478428 - DNA, 49 bp, Homo sapiens
gtcagagcctcatggagtacggttttaaaatcaaagatgggaaaatcgg

SEQ ID NO: 478429 - DNA, 75 bp, Homo sapiens
aatgcccgcctcatgagtgccctgacccagctgaaagagaggaaaggccgagggggacggcaagatgcacatcac

SEQ ID NO: 478430 - DNA, 100 bp, Homo sapiens
aagcgcccttcctagttggcattgaaggttcactcaaaggcagtggacatttgggagcaataaaaataagaagaaaggaaaagccagaaaaatagagaag

SEQ ID NO: 478431 - DNA, 100 bp, Homo sapiens
acaagatgagccatgatgcatttactgtcatcaagaactgtaatacttctggaatccagacagaatggatggaagagtgtagaaagtgtcccaaagttgg

SEQ ID NO: 478432 - DNA, 75 bp, Homo sapiens
ccgaggtgcctttctccaaaaggaatgaattcagatatttccagagaatgaccacaacctcttcagtagaaggta

SEQ ID NO: 478433 - DNA, 89 bp, Homo sapiens
gcctcttccagtaacattgaggattactgtgttttgtgagagctcgctaggcgccctaagcaacagagacatatctgaagagatggatt

SEQ ID NO: 478434 - DNA, 100 bp, Homo sapiens
ctgatgcccagtggggcattcgtcttggtaaacttggtttttaaccatgctgaccaacgaaactggctttgaaatcagttcttctgatgctacagtgaag

SEQ ID NO: 478435 - DNA, 100 bp, Homo sapiens
gacagtgcaggacatcgtgtaccgcaccatggagatcttccagctcctgaggaacatgcaggaaatggctagtgatgagctgaaagagatgcggaaaaac

SEQ ID NO: 478436 - DNA, 75 bp, Homo sapiens
ctccaagagaaagaaacagaagctaaaattgctgaaaagacagcagatcagtcgcatcgaatacattcattcaaa

SEQ ID NO: 478437 - DNA, 98 bp, Homo sapiens
aaatttcaacttctatttaaatttagtagtcgatatccttttgactctcctcaggagaagatgtatggtcttatgcaaagggacttcctcacatgttt

SEQ ID NO: 478438 - DNA, 83 bp, Homo sapiens
gtttgtatgcacgacttgaagacacgcacttatcattcagtggtaaataacagatgcgggtgaaagatccaactaaagcttta

SEQ ID NO: 478439 - DNA, 75 bp, Homo sapiens
taaaaccacatgtgcatctaaagacagttggcacggcaaaagatacagatattgtggatgaagccatctattact

SEQ ID NO: 478440 - DNA, 100 bp, Homo sapiens
cgcccggttcctctccacttcgtttagttgcgctccatggacagatcaacgaacctggacattgaggagctcaagcgctgtgcttcgccgtgagccgctc

SEQ ID NO: 478441 - DNA, 74 bp, Homo sapiens
gaagcacctggatgagacatttgctacagcatcccacattaagtcaacgattacatgaagcagatgacatttga

SEQ ID NO: 478442 - DNA, 90 bp, Homo sapiens
cccaccccggagacccccgcttccagtgcagataactgcgacctccacttcaaggtggcccgagatcggagtagtggctatccgctcaca

SEQ ID NO: 478443 - DNA, 75 bp, Homo sapiens
tgagatcaaaggtcacctggaaattgccttattggaaaaacatttcttacgtgtcgtgcgccaggtgcggcccat

SEQ ID NO: 478444 - DNA, 50 bp, Homo sapiens
gatgtgatttacattcttagcaagggtagtggtggtgcacgaagatccgc

SEQ ID NO: 478445 - DNA, 101 bp, Homo sapiens
tctgggagcggatctgcaggggagaagcacgcgagcctaacgtgagcgtcccgcctgtcgcgtgtcctgccttggccccttcacagatgtagtcactacaa

SEQ ID NO: 478446 - DNA, 75 bp, Homo sapiens
tagaagcagatttcttttggatagtgatgggaaaagattgatgtacagctatatattttgtcctttctttcacct

SEQ ID NO: 478447 - DNA, 75 bp, Homo sapiens
aaagaaggttaagctggctgtcctgaaatattataaggagacacacggacatcgggaacggacggaggaaggatg

SEQ ID NO: 478448 - DNA, 74 bp, Homo sapiens
gcagctccagcaggcgctggctcctgctcagggtgggctttgacagcgagaatcccggggacgacgggcagatg

SEQ ID NO: 478449 - DNA, 100 bp, Homo sapiens
aggacccgcttctctgaaaggctctccttgcagctgcttagacgctggatttttttcgggtagtggaaaaccagggagtgcatccgccccaacccttttc

SEQ ID NO: 478450 - DNA, 75 bp, Homo sapiens
tgagggcaacttctgaagacttcaacaagaaatattctagaagtggttctgacatttgttcactcccggttttgg

SEQ ID NO: 478451 - DNA, 82 bp, Homo sapiens
accctggtcaccgtctcctcagaacacgatgatgaacgcgttaatttccctcaaagaaagaagaaaggccggggtcccttcc

SEQ ID NO: 478452 - DNA, 105 bp, Homo sapiens
tgggaaggcgtgggcgacccggtgtgtggcgcgcccagagccccgcgtttcagccctagggaagggaaaaccagaaataccgggtatatgtcgtgataccacttc

SEQ ID NO: 478453 - DNA, 96 bp, Homo sapiens
agcgcccgagcactgtgagttagtggtggacctgtttgtgcgcacagtgctggtctgcctgacatattacgatgaggacctggtgcaggaagcttc

SEQ ID NO: 478454 - DNA, 90 bp, Homo sapiens
gatgatggaactctggtggtttcaggaagggccctccagaatttccacagcatacacctggacctgttcccaacagtttcagccagcccc

SEQ ID NO: 478455 - DNA, 99 bp, Homo sapiens
ttgttcttccctggaagttgaggcagccatatcaagaaaaactccagcccagcctcagaggctctgtggatagcaactggatcgtgggtgccacgctgg

SEQ ID NO: 478456 - DNA, 96 bp, Homo sapiens
gaggagccgccttctgcctcagaacggcgtgactcggaggatttactaaccagacataaagtgttggtagcagacttcttagaacaaaattacgac

SEQ ID NO: 478457 - DNA, 96 bp, Homo sapiens
ccacagtccacatgtcccggagatgccaggccaaggtggagcaagcggtggagacagagccggagcccgagctgcgccagcagaccgagtggcaga

SEQ ID NO: 478458 - DNA, 82 bp, Homo sapiens
acggcgtgggccgctaccaggaggtcaaccccggcctgacctctcgggacacacccagccctgtggacccagacaccgtgga

SEQ ID NO: 478459 - DNA, 107 bp, Homo sapiens
ccccgtcctccgttagctaattaaaacatttttcagggacgtagccatccagaggtagctacagcaagctgggtagcaggcagatccaaaggatatcatgaagtttc

SEQ ID NO: 478460 - DNA, 100 bp, Homo sapiens
ttagttcggcatctgcacagcactgaagaacctgggaatcagaccctgagaccctgagcaagaccctgaggctcagaggggcagcttcaggggaggacac

SEQ ID NO: 478461 - DNA, 96 bp, Homo sapiens
gcggcgcccctcggcctcggagcaacgagcgcagcgccgggctctctactggcttctggccgcgctccgcgccgcgcctcctctggattgccccga

SEQ ID NO: 478462 - DNA, 100 bp, Homo sapiens
ccaggtcatcaccattggcaatgagcggttccggtgtccggaggcgctgttccagccttccttcctggttcagtgcattcagaacaagcccctgtatttt

SEQ ID NO: 478463 - DNA, 82 bp, Homo sapiens
tggaagtatggaaaacacagtgtacctcaggggcttcataaaagtcagagttcatgtttgtcaggacctaatgaagaacaac

SEQ ID NO: 478464 - DNA, 83 bp, Homo sapiens
cgaaatccttcctgtaccgcttatgccaggccgatcccgacctggactcagacaaggtgctggagaatctggtaaaagcacca

SEQ ID NO: 478465 - DNA, 75 bp, Homo sapiens
cgacgcccctgacagggccacgcacctgatcgccgcgcgagctgggatttgtcttggctgttactatgacacggg

SEQ ID NO: 478466 - DNA, 74 bp, Homo sapiens
acgatgaggatgaagaagaggaagaggaggaagagattgaaggatgactcactggttgtgtggaaggaagtcga

SEQ ID NO: 478467 - DNA, 144 bp, Homo sapiens
caggcgatccgcccgcctcagcttcccaaagtgttgggattataggcgtgagccactgcacctggcacaggttttgttccaactctgggtggcacagagttcagagttcttcagacggttagccctattactttctacagccaa

SEQ ID NO: 478468 - DNA, 100 bp, Homo sapiens
atacctctacagatttattcagcaccaaccaaggtacctggccctggtgagtgccttggcctgcggtgcggactgggtgttccttccagaatctccacca

SEQ ID NO: 478469 - DNA, 98 bp, Homo sapiens
caccagcaccgcagatgttgtcaaggtggcctaccaggaggccaggggtgtcgccatggaatttactttgcaaaagatgccatctattcccacaaaaa

SEQ ID NO: 478470 - DNA, 50 bp, Homo sapiens
gctttatacaagaagattatggtgatactatcaaccaaagcaccctgccc

SEQ ID NO: 478471 - DNA, 100 bp, Homo sapiens
gttctgcaccatgaggaagaagcagctgaagacggaggcagctccacactgtgaactaatccaatatcagatggaaatgatgcggagccttcgccatgta

SEQ ID NO: 478472 - DNA, 96 bp, Homo sapiens
cagatatgcctgctaacatggataagcatgccctgaaaaagtatcgtcgagaagcctatcatcgtccctaaaagataagttagtacaagagaaaaa

SEQ ID NO: 478473 - DNA, 100 bp, Homo sapiens
cagaggagcgagctgagcgcctccagcgagaagttgagggagaaaggcgggcccgggaacaggagatggacgaacacatgcggagcatgttgcatcacag

SEQ ID NO: 478474 - DNA, 52 bp, Homo sapiens
cagtctgttccacatgatcattgtaataagcctcctgacaaggtgatccggg

SEQ ID NO: 478475 - DNA, 98 bp, Homo sapiens
cgcggcggccgggccctcgagacggggacgcacatggattaattgatgtatgttgagtttatggagctgccttttggtggcttgctttatctgcagtt

SEQ ID NO: 478476 - DNA, 90 bp, Homo sapiens
aggcgccgcacggagttgcgtcccggggacttggggccgcagggaggacggggaggtttactgcatcgacgcgcggttctacgggaacgt

SEQ ID NO: 478477 - DNA, 73 bp, Homo sapiens
aagagggatccttcacccgtgtctgaggcggccttagcaacatgctgttccagtgctccctacctgacaccac

SEQ ID NO: 478478 - DNA, 99 bp, Homo sapiens
attttgttcaaatgttcagactttgttgtggtacagtttaaagatatggactccagttatgcaaaaagagttgatcataccagggttgtcctacacgat

SEQ ID NO: 478479 - DNA, 51 bp, Homo sapiens
agcgtcaacagcagcaccatggacgaagggaacgtcatcgtttggaaagcg

SEQ ID NO: 478480 - DNA, 90 bp, Homo sapiens
tcctgagtacctgggactacaggaactgcctcttttctaaagaggactccaaaggaaggactggtcatctctttcatatctcaaaaccat

SEQ ID NO: 478481 - DNA, 88 bp, Homo sapiens
gcagtatgccggaagctggttttcaggccacaaatgctttcacaggtggatggaagtttgcttagttgaagaattgccaccaaccact

SEQ ID NO: 478482 - DNA, 75 bp, Homo sapiens
gcagcatcttctttatgtctaccttgactgttacaagcgggatcgctttgttggtcaaagtgaggggaaaaaagc

SEQ ID NO: 478483 - DNA, 75 bp, Homo sapiens
gcatggcccgcgcggcgccgggcgctgactgagattgacgagatgcctgaggctgccgtgaaatcaacagccaac

SEQ ID NO: 478484 - DNA, 82 bp, Homo sapiens
tgacatttaattttagggtcctttatatagaagggagagtaggggatccagttcttggtggagaatgaactgctgcagaaca

SEQ ID NO: 478485 - DNA, 90 bp, Homo sapiens
aagcatctgaagaccatggatcacaaccggaaccgcaggtgggctcgggatgagtttgaaggcctcttcaagcagccagcagaaaatgtc

SEQ ID NO: 478486 - DNA, 100 bp, Homo sapiens
atggatccatttctcctattgaggagtcaacgtaaagtaccttttattcatgtgggaaatcaagtagtatcagaacttggtccaatagtccaatttgtta

SEQ ID NO: 478487 - DNA, 100 bp, Homo sapiens
aacaactcctgagtatgttcacgatcggggtcaggcaatctgaaagcaaatcctgtttagatgcaggcgaaggttcctggtgacccaggctctcacctta

SEQ ID NO: 478488 - DNA, 90 bp, Homo sapiens
acaggctggattgtgtccacatgttgctgcaaatgggtgctaatcacaccagccaggcctgggccgaggccactggtgcatatgttcccg

SEQ ID NO: 478489 - DNA, 75 bp, Homo sapiens
ctgcgacctggggccctgggtgaagtgctccgccgcccttgcctccagagctattaagaatggcaaaggattgca

SEQ ID NO: 478490 - DNA, 83 bp, Homo sapiens
acaggagttccgatcgacccggtaccaagaaggggagtgcccgcggcagttggactaaatgctcttccttcagaggattatcc

SEQ ID NO: 478491 - DNA, 101 bp, Homo sapiens
ggatagtcattgacagcggagatggagtcacccatgttatcccagtgactgcgattcctactgcaaggcctccaaggggaagctgaagattaacatgaaaa

SEQ ID NO: 478492 - DNA, 75 bp, Homo sapiens
tgttcacccacaattccagcttcaaatacagggtcatcaatgctggcaagagtcggcacaatgaggaccaggctt

SEQ ID NO: 478493 - DNA, 101 bp, Homo sapiens
gagcgctccccatggaccacacggagggctcgcccgcggaggagccgcctgcgcatgctccatcgcctgggtccttctcatgaggaggaagacaccttttc

SEQ ID NO: 478494 - DNA, 95 bp, Homo sapiens
gccagcaacatggcactgggcaagttccgggccgcgctgcgagactacgagacgtacaagttgtgcaaagtgaggaagattactgtgggagtgaa

SEQ ID NO: 478495 - DNA, 75 bp, Homo sapiens
gaaactcctgggccgcgtgaaggccttcgatagcaaattatgcgcacagccatgaagtataacctgggattggac

SEQ ID NO: 478496 - DNA, 101 bp, Homo sapiens
ttgctgtaaaagtgccttctgtttttaagcttctaattaaagaggatcttcacactatatagcaaatcactaccacttgatctggcctgtcgagtctggga

SEQ ID NO: 478497 - DNA, 101 bp, Homo sapiens
ttgagtttgacttctatctgtgcagccacgcaggcatccagagatgcccgagtggtaaaagacatggcaacaggaaagtctaagggatatggctttgtctc

SEQ ID NO: 478498 - DNA, 100 bp, Homo sapiens
aaacatcgtggccctgtacgacttccagccggcacagtcttcactaccgtagaagaccttggctccaagatactcctcacctgctccttgaatgacagcg

SEQ ID NO: 478499 - DNA, 48 bp, Homo sapiens
ttaaaaccactaagtggaggtaaagacattcacggcatggtgtaactc

SEQ ID NO: 478500 - DNA, 132 bp, Homo sapiens
gagagactatgtggctcccacagctaatttggaccaaaaggacaagcagtttgttgccaagataacgaaggaggcccaacttcattcaataaggagcctgacggatttatcccagacggtagaacaaaagga

SEQ ID NO: 478501 - DNA, 90 bp, Homo sapiens
gggagcagggaaagaagagtgagcctgcatgccaattctaagctcttcaggatcaaagaatgcttccggatcccaagaacactcacatcg

SEQ ID NO: 478502 - DNA, 75 bp, Homo sapiens
ttgcagctactgctgctgttactgcagcagtaaagggcttcctactatgagatttcagttgatgatggtccatgg

SEQ ID NO: 478503 - DNA, 49 bp, Homo sapiens
aattgtggaaaagtcactctggaagcgagtcacgtcccagcgctgctcc

SEQ ID NO: 478504 - DNA, 75 bp, Homo sapiens
gtgtgaactgtgaggagttcgccgagttccaggcagttatacttaagcatgaacattgacgacaaactggaagga

SEQ ID NO: 478505 - DNA, 75 bp, Homo sapiens
cgacaagtggaggcgccgctctagcggccgggactctgaactatggcgctttcagtgaaaggttacaatgacaag

SEQ ID NO: 478506 - DNA, 50 bp, Homo sapiens
ggcctggagccagtgcccaagtcttggtgaagagtaacaacctgacggac

SEQ ID NO: 478507 - DNA, 90 bp, Homo sapiens
gcctcgcctgggttctggaggctgcggggccatcgctccaggagtggaaacaaaatgtcagtcagtgtgcatgagaaccgcaagtccagg

SEQ ID NO: 478508 - DNA, 100 bp, Homo sapiens
cccattctcgtcctcatggtggacaagaaactggtggtggttttcggaggcacagttgatgggtgacacatgtacaagaggttgcagattttgttctgtt

SEQ ID NO: 478509 - DNA, 75 bp, Homo sapiens
tgaacttaaaaagcagtctaaacctgtgaccacccctgaagaaattgcacagaaatatccagagaagttgtattt

SEQ ID NO: 478510 - DNA, 100 bp, Homo sapiens
acagcctcctcaacgaatacggcgacgacatgtatgggccagaaaaggtgtttcagggtaactctaactttcgggacccagtgcaaaacaatttcatccc

SEQ ID NO: 478511 - DNA, 95 bp, Homo sapiens
ccttgggcacagctccacccatcaccccagaacaccccgcagaaagtgcctgtgcatcagaacctaaaggcagacccagaagagctttttacaaa

SEQ ID NO: 478512 - DNA, 82 bp, Homo sapiens
taccagggccggaggattaccatcaccggaaatgtctttggtggacttgggaaagaggttgctagaagcagcaagaaaaggc

SEQ ID NO: 478513 - DNA, 75 bp, Homo sapiens
cgtgatccagaagtccagagctgaggactgcctgtttgcagccctgggcgctgcctatggcacagccaagagcgg

SEQ ID NO: 478514 - DNA, 75 bp, Homo sapiens
ggaccactcgttgctgacagtcagaaagaaattcgaaatgagtcccatgactatcctcatagagtggccaagttt

SEQ ID NO: 478515 - DNA, 73 bp, Homo sapiens
ccccagcggccagatcggcttcatgctgtgcagcaagaacccggattctcatcgctttggaaggcacctgaaa

SEQ ID NO: 478516 - DNA, 83 bp, Homo sapiens
ctcaacgccagccggagcctagaagtcagctgtgactttgacactgaggctggagctgtgtcctcctcagagcccactgtggc

SEQ ID NO: 478517 - DNA, 100 bp, Homo sapiens
cggggctgcccgccgggaaaccgtgcaggattggtggtgattttcatagccaagaatgtatcctgtcaggtataatgtcagtgaatggcaagaaagttct

SEQ ID NO: 478518 - DNA, 100 bp, Homo sapiens
gaaggaccgaaaatggcagatattcaaaacgtcagcaaccaaaggcaccggccttgatgaggcaatggaatggcaccatactggacataccttttatgtg

SEQ ID NO: 478519 - DNA, 98 bp, Homo sapiens
cggttcagccctttgatgaccgcagcagctgcacaacgtcaccctggcgctggagctgctgaaggacgagggcctgctcagctgccctgtcagccctg

SEQ ID NO: 478520 - DNA, 109 bp, Homo sapiens
gaaaaacagacacctgaaagtcttcctcaaaataacaatccaggtgtcatggagaaactccagctgggcccagagattctgcagcgggaaaatccaaggcttatttatg

SEQ ID NO: 478521 - DNA, 50 bp, Homo sapiens
caagaagcgtgcggggaccgatgggaaatttggtgagcggcctccaccta

SEQ ID NO: 478522 - DNA, 75 bp, Homo sapiens
agcatctgaagaactagatacaatttgtcccaaagctcccaaattagaggaaagaaggcaattctcaagttcaac

SEQ ID NO: 478523 - DNA, 100 bp, Homo sapiens
gactccagtcagtggtcctggtcccactgtcccagtgtagtagccggatcgagctgggagatgtgacaccacacaatattaaacagttgaaaagattgaa

SEQ ID NO: 478524 - DNA, 104 bp, Homo sapiens
cagagcctcgcctttgccgatccgccgcccgtccacacccgccgccaggggccaaaccagtgctcctgccacctctctggctgccccctagagcctgcccatcc

SEQ ID NO: 478525 - DNA, 82 bp, Homo sapiens
ctgcccgggcgcgccatgttcgcgcgtgggtcccggaggcgccgctccgggcgtgcgctatgaggtgtcaggtcgcattgag

SEQ ID NO: 478526 - DNA, 75 bp, Homo sapiens
ccaacccagatgaaatcggcaactttataattgagggtgtgggccgaagatatgctcatgtggtgttgaggaaag

SEQ ID NO: 478527 - DNA, 98 bp, Homo sapiens
aaggtccggggcttgccctggtcttgctcggccgatgaagtgcagaggtttttttctggacctgatcccaaccttgaagaaagtcctaaaagaaaaaa

SEQ ID NO: 478528 - DNA, 75 bp, Homo sapiens
tgtatctctaattggaagcaatattgatatgctggaggaatttgcctacttgagaactcaggaaggtgggaaaat

SEQ ID NO: 478529 - DNA, 96 bp, Homo sapiens
cctgcacgtgcaactgcaaacgctctttgttccagagcatggagatcaagttgcatgctgagaatttgaaaaatgaagatgatgtagacactggac

SEQ ID NO: 478530 - DNA, 50 bp, Homo sapiens
ccgggccacgcaccgcctgctgctgctggtcaccttcaggccattcagag

SEQ ID NO: 478531 - DNA, 100 bp, Homo sapiens
caactcaaatgcaagtccaagaggaggaggaggcggaggtccaagcggaaagattgtctccagctttaagaccacgacatcgagagctgcctgccagctc

SEQ ID NO: 478532 - DNA, 97 bp, Homo sapiens
ggaaaatgatgcttaatatcgatggtcagggccctttgaagtacgagcagaccttgaggagtccatggaatttgtggatcccggagttgctggagaa

SEQ ID NO: 478533 - DNA, 95 bp, Homo sapiens
gccgtgacgtggactacagtgacgccctcacggagaagcagtggctaaggccaacaaatggaattttcttgagcatgtttctaatcgttttgcca

SEQ ID NO: 478534 - DNA, 101 bp, Homo sapiens
agacaacaccgggagcctcatctctctcctcaccctgctgtgactccaccacagggccaagaccagcttcaagtctccatggtaccagaaaacaacaacct

SEQ ID NO: 478535 - DNA, 100 bp, Homo sapiens
cagacggggatgtctttggcccagagctggacaccctcctggactcgctgtctgcagatctccaggggagcccaccagcctagtcaacatggcctcggaa

SEQ ID NO: 478536 - DNA, 83 bp, Homo sapiens
gcaagaactgaggagcaccaggagacgcaactcatcggggacaaaagtggctctcaatccagcacatgcacattgaagcaagt

SEQ ID NO: 478537 - DNA, 98 bp, Homo sapiens
acgggaagcctcctgccgagataaagccaccacgtctgccgccgccatgtctgcgcatctgcaatggatggtcgtgcggaactgctccagtttcctga

SEQ ID NO: 478538 - DNA, 83 bp, Homo sapiens
gttgcacttaattcaaatgaagaatataacctggaccaagaggtggatcagtacaagggaaagcgggatttggagtcactgag

SEQ ID NO: 478539 - DNA, 75 bp, Homo sapiens
gtaccggatctgcatgccgctcaccgtagacgagaacacgatgatgaacgcgttaatttccctcaaagaaagaag

SEQ ID NO: 478540 - DNA, 82 bp, Homo sapiens
aactcccgcaggatctcagggcctgccgccccattatgatgatgtcgaggtacaggtgaacaaaggcagagtaaactgtcac

SEQ ID NO: 478541 - DNA, 75 bp, Homo sapiens
ccacctcacagcacttcattatgcagctaaggaattctatgagcatgccaaggctctgtgggaggatgaaggagt

SEQ ID NO: 478542 - DNA, 50 bp, Homo sapiens
ccagacctctctggagacgagaatctgaaccttagccggccgatcgagga

SEQ ID NO: 478543 - DNA, 100 bp, Homo sapiens
tgtatctaccgtcatcgtaaagattatgacaaatcacaacttgtagaggtccgggctctgtttccctgtgagaagccgcctcggcccaccgagatgtccc

SEQ ID NO: 478544 - DNA, 83 bp, Homo sapiens
ctcagcccacatgcccgctcacctgcgctgtgatgcctgcagagctgtggcttaccagctgtcccctaccaccaccggtcaca

SEQ ID NO: 478545 - DNA, 89 bp, Homo sapiens
ccatccaatggatgcaggaaaactgtattaaaggtggaagaaggtccatatctttttctgtgggtgcttcaagtgttgttggaagtgga

SEQ ID NO: 478546 - DNA, 82 bp, Homo sapiens
ttagctgtgctcgcgctactctctctttctggcctggaggctatccagctttcactgttacatgccttgaagtgatgaggag

SEQ ID NO: 478547 - DNA, 50 bp, Homo sapiens
tcggctttcctggtcagcagcgacttggagcagctgagaccctcagccca

SEQ ID NO: 478548 - DNA, 83 bp, Homo sapiens
aggggtatgagccacacatccccgaccacttgcggcctgagtatggaggagctcaagcacttcgaagccaaaatcgagaagca

SEQ ID NO: 478549 - DNA, 100 bp, Homo sapiens
gtggatccaagatggcgacggcgatgccaaaagaatgcaatggtgtaaagattccagttgatgccagtaaacctaatccaaatgatgtggagtttgataa

SEQ ID NO: 478550 - DNA, 75 bp, Homo sapiens
cagcaccagtccagaagcctccatccagtcttcttggacacttaatgattgttggcaagaaatgtgctgctgatc

SEQ ID NO: 478551 - DNA, 98 bp, Homo sapiens
cggccctgcagagagaaacagaagacgagttgtactgctgtcacaggaaatggacgctggattacaagcatggcagctcaggcagcagaagttgcagg

SEQ ID NO: 478552 - DNA, 82 bp, Homo sapiens
gtgtggcagctgcccttagccctctggatgatcaagttccagatgatcctcagtgagggataccatcctttcaatattcaag

SEQ ID NO: 478553 - DNA, 100 bp, Homo sapiens
tgccagcccgggccttggtggaagaggcccttgcccagcgattccaggttgtgcacagggacctgaagcccagcaacatcctgtatgtggacgagtccgg

SEQ ID NO: 478554 - DNA, 98 bp, Homo sapiens
ttgaagttggagaagtatccaatagggatattgtagaaactgtctttaacctgtggaagcatcagttcacagcagtaatgcacactgtacagataaga

SEQ ID NO: 478555 - DNA, 87 bp, Homo sapiens
agaaataaggacaaaagccaagaggaggacagttcgctacacagcaatgcatcgaggtgttggagcgggccggagagaagtagagtg

SEQ ID NO: 478556 - DNA, 74 bp, Homo sapiens
tgaagatgagccactgtggaagaagtatatttctcagatgtgttcagagcaacattgttttgttgacacaagca

SEQ ID NO: 478557 - DNA, 82 bp, Homo sapiens
gcggcggcggcggactggcgggccaatagcttcaccgtctcctctgtcgccgccccttcctggcttcaccgtttcatcattg

SEQ ID NO: 478558 - DNA, 75 bp, Homo sapiens
ctccttttccctctccctttccctaaggtttatcttgcagattatggactttcctacagatattgtcccaatggg

SEQ ID NO: 478559 - DNA, 90 bp, Homo sapiens
ggatgacaatattcgaactgttgtaagaggtcagacgaacgtggggcaggatggacggcaagccatcatgcagaagggggatacaaacat

SEQ ID NO: 478560 - DNA, 74 bp, Homo sapiens
gaaactagagcaaataaccgttttgaaattgtgttggagagcacaatggctgaacaagtccttcctcaggcttt

SEQ ID NO: 478561 - DNA, 75 bp, Homo sapiens
tgagccccaggaaatcccgagtggcggctcaaaactcagcttgtagattttcagtggaaactgggtatggctgtg

SEQ ID NO: 478562 - DNA, 75 bp, Homo sapiens
gaggaatctgattccaagcaaaaaccagatgatggaccatttggattgtgcaacaaatgaagaaaaccctgtgat

SEQ ID NO: 478563 - DNA, 75 bp, Homo sapiens
acgactctgcgccgccgctgcctccatcctgggcaaacctgcggacaaggagctggcaaacagccctgactgtcc

SEQ ID NO: 478564 - DNA, 83 bp, Homo sapiens
gctctatcaaggaaaacaagtgtctgcttatgtcgattggccatttcttaggttgttccagagtggtgggaatttgtggaaca

SEQ ID NO: 478565 - DNA, 101 bp, Homo sapiens
gttcagtcaggtggggccggtgaagcagtgcttcgtggtgactgaaaaagagttgtaaagatgtggcacctgtggagaagactattaagttgcttcccagt

SEQ ID NO: 478566 - DNA, 75 bp, Homo sapiens
ggattccatgtagagacccctggaggtcagcttttgccaactgttttcaaatcacatgcatgggggatcttacac

SEQ ID NO: 478567 - DNA, 100 bp, Homo sapiens
gtaagaagtgccttttgcctcccaccgtgattctgaggcctccccaaccatgtgcaattatcaggatcctcatgaccagccaaagagaagaagaattagg

SEQ ID NO: 478568 - DNA, 74 bp, Homo sapiens
cgcaccgccagggactggggtgagcggcccaggagttggcatcctttggaagagttcgtgaaagctttctgccc

SEQ ID NO: 478569 - DNA, 99 bp, Homo sapiens
ctaatctgtagtaatgccttagaatacaatccagatagagatcctggagctttccgcttggccctcatccagcttcagatttcttccatcaaatcagat

SEQ ID NO: 478570 - DNA, 100 bp, Homo sapiens
ggattccaagtaactcttatttgtgaaaatgcctcgtgtaaaagcagctcaagctggaagacagagctctgcaaagagacatcttgcagaacaatttgca

SEQ ID NO: 478571 - DNA, 80 bp, Homo sapiens
aagcaaaggagtcagggatggctcttcctcaggtgccacacctccctggatgatccaagatgaagaatacattgctggga

SEQ ID NO: 478572 - DNA, 82 bp, Homo sapiens
cggcaagatggacgcgggatttttccgcgtttggtgcacctcgatttggaggaagtagggcagggcccttatctggaaagaa

SEQ ID NO: 478573 - DNA, 83 bp, Homo sapiens
ctccgcgttcccagcccgggtccccgcgttcacagccccagcgcagcgggctgacgcacgaggcacacaggaaggaggtggag

SEQ ID NO: 478574 - DNA, 50 bp, Homo sapiens
tgataacaccctgtaacagctgagttgcagtgtaggattttggaagtcct

SEQ ID NO: 478575 - DNA, 100 bp, Homo sapiens
tgacacgggagggtcctcagctaaagccaaaagcagatcaaagtggtgggactcgcgtcgcggccgcggagacgtgaagttatcttcaggcagagtgaga

SEQ ID NO: 478576 - DNA, 100 bp, Homo sapiens
caactgccaaggactgcagctatggggctgttactagtccaacctctacccttgaaagcagagatagtggcatcattgaatttctctgcaaagaatgtcc

SEQ ID NO: 478577 - DNA, 75 bp, Homo sapiens
ttgcaactgcatccgagaaaaaattccaacagaatgggtttcctgaaacggatttgcaggaattcctgaaggaat

SEQ ID NO: 478578 - DNA, 50 bp, Homo sapiens
gaagctctgagagaatggctgtggaaggtggatttcgccttcacagtgtg

SEQ ID NO: 478579 - DNA, 97 bp, Homo sapiens
cagaatttgtatagagatgtgatgttggagaactacagaaacctggtctccctagaattacctctggactacaaatttacaagattctcttcaagca

SEQ ID NO: 478580 - DNA, 75 bp, Homo sapiens
ctaattacaactttcggggcatgtacaatcagagctctaagcgaaagacatgaggcctcagcctgaaatgaggtt

SEQ ID NO: 478581 - DNA, 100 bp, Homo sapiens
ccgcctccggccaggacgctgggagctgcctgcgggaaggtgcggggagcggagccatggcctccggtcagcccaaggccaaccccactgtcactctgtt

SEQ ID NO: 478582 - DNA, 76 bp, Homo sapiens
ccccagagcacgagtagtagtcttaagagtggttggaggcaaagtaaagaagcccggtaaacgtggtcggaagcca

SEQ ID NO: 478583 - DNA, 96 bp, Homo sapiens
agatgtgatgctggagaacttcaggaacctgctgtcagtgggccaacagatgttctccagacagtcaagttattagatctttcctctaatcaatta

SEQ ID NO: 478584 - DNA, 127 bp, Homo sapiens
cactgagcgagtgtggagagaggtacagccctcggcctacaagctctttaggttaacacagaaatctgcctcctgggccatgccgcttctaaggcctgtttcttctcatgagccccagcacaagaca

SEQ ID NO: 478585 - DNA, 82 bp, Homo sapiens
tggattggacaagcaggcaaagctgaggatcaccccttctgtgtcattctctgaggaaaacaagttcttctcaaggaggaaa

SEQ ID NO: 478586 - DNA, 101 bp, Homo sapiens
acctcacctcaagcacacccaatggacagcatgcctcaccaagtcacatgacaagcagaacctagaaagattgtacaatgaatggtgattctcgtgctgcg

SEQ ID NO: 478587 - DNA, 100 bp, Homo sapiens
ggtcccgggaggaagatggcgctgcgaattcgcttactgaaacaaatgcaggtatcaagtgcttggactccatgtgctgtttcccggaaggagaagcagc

SEQ ID NO: 478588 - DNA, 143 bp, Homo sapiens
ctcgcacatttgacttggaagcaatgtttgaacaaactcgaagaacagctgtggaaagaagttgcaaaacactggaaacggtgggagcccagagtatatgagatgtcttcagaggctcatctaactctgtccttacatactca

SEQ ID NO: 478589 - DNA, 82 bp, Homo sapiens
gacagagaacatccaaggttccattaaatacatcatgcttaaccctagttcacgaatcaagattcccagttctcaatcttcc

SEQ ID NO: 478590 - DNA, 117 bp, Homo sapiens
taatcagtgactcaaagctgtgatcaccctgatgtcaccgaatggccacagcttgtaaaagctgaactttgacctggaccggggcgtgtttccagtagtcatccaggctgtggtgga

SEQ ID NO: 478591 - DNA, 97 bp, Homo sapiens
agatttgaaaattcacccttgtagagtcattcctgcctttgagcggactcccttttaaggctgaactccagtgcacccagttagacttggagcggaa

SEQ ID NO: 478592 - DNA, 100 bp, Homo sapiens
ccttgggcacagctccacccatcaccccagaacaccccgcagaaagtgcctgtgcatcagggaggacatgtatgcccaggactctatagagctactaaca

SEQ ID NO: 478593 - DNA, 90 bp, Homo sapiens
gataaacaacaagtgcttcaggaggcatatcgggtgctgaagcgctagtcctgctgatgggcaaagaaggtgtccacggtggtttgatca

SEQ ID NO: 478594 - DNA, 82 bp, Homo sapiens
cccgcccggaagtgcccgaggggccgcgatggagctgggggagccgggcggtccctgtgcgttttattgcgacctgccggtg

SEQ ID NO: 478595 - DNA, 90 bp, Homo sapiens
ccggggggagcgcggggcgacgctggctgcagggacccggtgacagcgtgagaggggccacctacagatgctcctgcagtggacacagca

SEQ ID NO: 478596 - DNA, 82 bp, Homo sapiens
cgccgagtcgcgcggaggcggaggcttgggggccatcgatgcacccctcggagctaatagcggagatgagaaacagtgggtt

SEQ ID NO: 478597 - DNA, 100 bp, Homo sapiens
ggagatctttggcagcgccattggcctctttggggtcatcgtcgcaattcttcaggaatttgcagcaccatcaacagatgcccctgataaaggatacgtt

SEQ ID NO: 478598 - DNA, 100 bp, Homo sapiens
tccattttcgatcggaagtaaatcttgcccaaagaaatgtagccttggaccgagacatgatgaagaaagggataaggacggagcaggatttctacgtgcg

SEQ ID NO: 478599 - DNA, 75 bp, Homo sapiens
gaaggatgcttagactacttaacatacaaactttgagtcgtggggacagcttgaaggagccaacctcaattgcag

SEQ ID NO: 478600 - DNA, 100 bp, Homo sapiens
cagaggatgaagcgggactggatgcacacaggccggcgcccctcgggcctctgcggagcagccagggtgtcggcgccgagctgatggggctgcaggtgga

SEQ ID NO: 478601 - DNA, 100 bp, Homo sapiens
gagactcagtgcagacctgcacaaacccactggacaccttcgtcccctttgatccctgtgtgctgaagaggtctctaattaacagaagatggcaaagccc

SEQ ID NO: 478602 - DNA, 71 bp, Homo sapiens
cgccgtcaacgccttcaaccaggaggctgcaaactacttagacatcaaaggtttgcttgatgttacatgca

SEQ ID NO: 478603 - DNA, 75 bp, Homo sapiens
aggataactgacttaaaatctggctatgtgatgatgatgccatttaaacgacaggctctagtggaatttgaaaac

SEQ ID NO: 478604 - DNA, 90 bp, Homo sapiens
gccggaccctttgccttcgccactgctcagcgtctgcacatccctacaatggctaaaacagcaatggctccaaaaggaattcttcatttg

SEQ ID NO: 478605 - DNA, 97 bp, Homo sapiens
cggcataactgcagcagcgaacattaagaattacggcagtcggccaaacgcaccctacagcagccgctcttctaaaacattcaaaccaaagaagaat

SEQ ID NO: 478606 - DNA, 100 bp, Homo sapiens
cataattctccctctgtgtctcttgaagaacttagatttccacatggaagaggcactggattggcctggagtatacttgttaccaggccaggtttctggg

SEQ ID NO: 478607 - DNA, 80 bp, Homo sapiens
gcatttcacagcactctgggcgaaaattggatgtgaaaatgaagccagaccgaggaatcttctgcggcttgtccatagtg

SEQ ID NO: 478608 - DNA, 100 bp, Homo sapiens
cacagcatcatcctaaggacgcagctgtctgtgagggtccatgcctgcatcgatggtgagaacaagaccaagattggaaagccagcttcagaggagggaa

SEQ ID NO: 478609 - DNA, 97 bp, Homo sapiens
ctggtacgtgcttttcctcctgcagcccaccgtctacttgaaactgaggcttcttgaagagcttgaagacacttggctcccttatctgacccccaaa

SEQ ID NO: 478610 - DNA, 98 bp, Homo sapiens
agcgagccccagattattgcccagagacaatggtcacagagatgcggcggaccctgacgcctgccagctccccagtgtcctcgcccagcaagcacgga

SEQ ID NO: 478611 - DNA, 100 bp, Homo sapiens
ttatgaagctaatcctggcgttccaccagcaaccatgagtggttccatgatgggaagtgacatggacactttcttcatgagcaacaaaccccaaagatac

SEQ ID NO: 478612 - DNA, 101 bp, Homo sapiens
tgcggaataggagcttcagcctaaagaatgtgaagcactttgtgctggacgagtgtgacaagatgctggagcagctgggccctgggaggagcggggacact

SEQ ID NO: 478613 - DNA, 83 bp, Homo sapiens
aatctcaagatattaaagttactgctgttaaaaaggtgggtggagccgctgactgccgagggcagagcctcgcttcggtgccc

SEQ ID NO: 478614 - DNA, 95 bp, Homo sapiens
gacgactgcatgttttcccacgaccctctgaccgaagagacgagggagctcttggataaggtaactccagaagatcccggagctcagttcttgat

SEQ ID NO: 478615 - DNA, 74 bp, Homo sapiens
aagtccttggctgctgagtggtgacagtagcccagcccgccggccaggctttatgaaggcaaagaacagatgga

SEQ ID NO: 478616 - DNA, 50 bp, Homo sapiens
gcgtcttcaaaggagccccacatgaggtgccagatcggctagggatactc

SEQ ID NO: 478617 - DNA, 120 bp, Homo sapiens
gggagccctgggtcactttcagtgagtcatcgctgacagctgaggaagtctgcatccacattgcacataaagttggcctgtagtggtggagacacgcccagtggatgatcctactgctcc

SEQ ID NO: 478618 - DNA, 50 bp, Homo sapiens
ggccaagttactggagccgatctatgctaagaaggaatctgatcttaatg

SEQ ID NO: 478619 - DNA, 100 bp, Homo sapiens
gctaaaaggcttaacccaggcatttggagggtttctcatttggcctgcttcagaaatggagcagttaaggatcagcccagctacgatgcttgaagatgag

SEQ ID NO: 478620 - DNA, 100 bp, Homo sapiens
taagacggagttcctagtgcaaatgcaaggttgtgggactggaaaatatcttaaagtgaacagccaggtacataccgtgggctgtgactactgtgggcca

SEQ ID NO: 478621 - DNA, 73 bp, Homo sapiens
gccaacaagcctgataagctgcagcaggccaaggacgagatcctcgagtctattatcctcccagtccacaacg

SEQ ID NO: 478622 - DNA, 88 bp, Homo sapiens
gaacagagccgggagttcaagaagaacactccagagaagttgggatatctaaagcagaagccttagaaactctgcaaattatcagaag

SEQ ID NO: 478623 - DNA, 51 bp, Homo sapiens
gtgttatatcctccaggaatactggccagtgtatagagcatgaaatcaaga

SEQ ID NO: 478624 - DNA, 100 bp, Homo sapiens
ctgcgcgagaggagccgggacacgcctagcgcgggctccagtttttggctttcacccccaaccagtgaccaaagacttgaccactcaaagtccagctccc

SEQ ID NO: 478625 - DNA, 100 bp, Homo sapiens
gcatacaccgagagagtgaggagccagacgacaagcacacactatggcgctgaaacggattaataaggacatgaaagatcagatgtcaacttcatctgtg

SEQ ID NO: 478626 - DNA, 90 bp, Homo sapiens
tttaacaaagatgatgagcagcatctcctggaaagatgtaaatctcccaagtccaaagggctgttcacggaagaccaggatgtagatgag

SEQ ID NO: 478627 - DNA, 75 bp, Homo sapiens
tagtctggtggccatcagcaagcccaggtctatggaagaggcagaaatccaggcagaacttgaacgtttggaaag

SEQ ID NO: 478628 - DNA, 80 bp, Homo sapiens
gctgacggagatggtgcagaagatggaggagacccaacatgagtgaagtttcctgcaagaaacgggacgactatttggaa

SEQ ID NO: 478629 - DNA, 100 bp, Homo sapiens
cttgccgttcgttcgtttccagcctcaggaatttatggtcgcctttttgaatgagagtcctgtgtatggaaactcacatgagtcagctcagtctagaagg

SEQ ID NO: 478630 - DNA, 87 bp, Homo sapiens
gggagcgaggctgaagggaacatatcagttttagagaatgtggcgtggagaaattctcaaggaaagagtaaaatgctggtgatgtgc

SEQ ID NO: 478631 - DNA, 96 bp, Homo sapiens
cgtcgcctcccactgcaaaaaggcctggggggccggcgtgatgtccgtgtacctgttcaccaagcgctacgcggaggaggagatgtaccgtccaca

SEQ ID NO: 478632 - DNA, 95 bp, Homo sapiens
ctgcggcctagaggtccgggcttggagttcgcctcagacgcggtggagccgccggagtctgagaaggtacatggaaaacttggggatttcacaat

SEQ ID NO: 478633 - DNA, 50 bp, Homo sapiens
ccgccatccgggaggcccagggaaggtaaacactacacgtgaagagtggt

SEQ ID NO: 478634 - DNA, 50 bp, Homo sapiens
agctgcagttttgatgcacagagcgttgggccggagcactagcctcacgg

SEQ ID NO: 478635 - DNA, 100 bp, Homo sapiens
cggcagcaaatatggaatatatgggaaaggtggcccagacagcgtgtatgtcagcttgcaagcatttagccacatccttgatgcaacttttgttggaagc

SEQ ID NO: 478636 - DNA, 76 bp, Homo sapiens
ctcggagcctacggggctggcctcggactggatgggggggctttgaccacgacctttgaagagcttcattttgaga

SEQ ID NO: 478637 - DNA, 82 bp, Homo sapiens
ggtggactccttcggcagtccacccaccgccgccgcctcccaggactttctgcagggcgactgcaccaaagcgaaacagaag

SEQ ID NO: 478638 - DNA, 119 bp, Homo sapiens
gcgctcactgcactccatactgaggaggaaaattataatgtggttgcaccaggctgtctttcacaatccaggtacagcagggaagaactggaaactcagagaaagaaactgcccttcca

SEQ ID NO: 478639 - DNA, 97 bp, Homo sapiens
cggaggctccagaaacgggtcctgctgctcaccaagggcgagcgtttgggggtcctcagagccctcttctttaaggtcatcaaggattacccttcca

SEQ ID NO: 478640 - DNA, 100 bp, Homo sapiens
gcctctttaaacaagtgctcctttcttcacccagaacctgttgtggggagtaaggatcttctcttagaaatctacagaagtataggggagccagatagtt

SEQ ID NO: 478641 - DNA, 75 bp, Homo sapiens
ccaagtgcgacaagaccgtgtacttcgggagtaccctgacttctaccggaagctctacggcctcttggacccctc

SEQ ID NO: 478642 - DNA, 100 bp, Homo sapiens
gatgctggaaatcgacttcggtttcagttggagttggaatttgtgcaatgtttagccaacccaaattaccttaattatgcggaaaacgccatgcggtaca

SEQ ID NO: 478643 - DNA, 86 bp, Homo sapiens
ttttatctctccatgtggggcctgcaggcaagtcatgagagagaaaatccaagagaggtcccaagcaactagcccctcaccccaac

SEQ ID NO: 478644 - DNA, 90 bp, Homo sapiens
ctgcagaaagctcatttcactacagacgaaatccactagaattctggggagacattgccaaggaattttactggaagactccatgccctg

SEQ ID NO: 478645 - DNA, 101 bp, Homo sapiens
ctccaaactgcccagcagcaccaagtcgggctggccccgacagaacgaaaagaagccctccgaggtctcctctgagcctccggcctccataagacccaaaa

SEQ ID NO: 478646 - DNA, 75 bp, Homo sapiens
ccgagagcgtggagcgggctgggccagcctccagctgtggggtgcccagcttcccgcccaacctatccgcccgag

SEQ ID NO: 478647 - DNA, 98 bp, Homo sapiens
cgaagacagtccctggatcaccgacagcacagacagaatccctgctaccaatgttcctcctgctgatcaagagaagctttttatccagaagttacgtc

SEQ ID NO: 478648 - DNA, 50 bp, Homo sapiens
gatcttgaaagtgggcgagttgcccagtaatgttaaagtagagactcaga

SEQ ID NO: 478649 - DNA, 75 bp, Homo sapiens
gtttctccccaaaataaccattctccagatccaggctatattcccaaagcttggattagcactgctatgaacctt

SEQ ID NO: 478650 - DNA, 100 bp, Homo sapiens
gaaccggaggagaacatcctggaccccaggctgctgatcgccttccagaacaggcctctactgcagcggctgggtgaagagaggacctacaggtgtcata

SEQ ID NO: 478651 - DNA, 100 bp, Homo sapiens
atccttcctgtaccgcttatgccaggccgatcccgacctggactcagacaaggtattgttgcagcatctggcagtgagactgaggatgaggacagcatgg

SEQ ID NO: 478652 - DNA, 87 bp, Homo sapiens
cccgagaacgtgcgggaagagaagatcatcgagcatttcaaacggttctgcgttagacctgcatcttagcaatgtgaatattgcatc

SEQ ID NO: 478653 - DNA, 98 bp, Homo sapiens
tggatctcagccttgtcaaagatgccagatgtgggagacacgccaaagctcccaaggacaatattcctagtattactgttttctcaatacgccagaaa

SEQ ID NO: 478654 - DNA, 98 bp, Homo sapiens
ctaatggacagttagtcacccacctacatgttgagggtttttggagtctctggatgatttttacattcttagcagtggattgatattgctgcagacca

SEQ ID NO: 478655 - DNA, 100 bp, Homo sapiens
ctgatcgggtcttccttcatatggccctctacctgacccaagtatgatccgtggcagtgtgccaaaccagatgatgcctcgaataactccacaatctggt

SEQ ID NO: 478656 - DNA, 100 bp, Homo sapiens
tgcctttttaattaccaaactactctcagttttcaatgaatcagttcaaagaaagaatgcagtctttctatacctgtcggatatgttgcggtcactatct

SEQ ID NO: 478657 - DNA, 83 bp, Homo sapiens
cggctgccccgtggccacggccccaatcctggccaggcggagattctgcggacattcagcccattccagatgatgggatttat

SEQ ID NO: 478658 - DNA, 74 bp, Homo sapiens
tcctgaagacccagttcgtgctgcacctgctggtcggctttgtcttcgtggtcaaaatgcagatcttcgtgaaa

SEQ ID NO: 478659 - DNA, 100 bp, Homo sapiens
cagtagtattcgatgtatgagaagagctgtcctgagtgaaacttttaggttcttctcaccactaaatccaatacgagttcatattgatattggagctgat

SEQ ID NO: 478660 - DNA, 74 bp, Homo sapiens
agcctcccaagtagttggaattacagatcttaaaccttactcaggcattgagagacgggaagagtcctttccag

SEQ ID NO: 478661 - DNA, 90 bp, Homo sapiens
cgatgagtcggagaagtcccggagttctgggaaatcgttcattcatttacagatgaacagaaaagactcttcttgcagtttacaacgggc

SEQ ID NO: 478662 - DNA, 107 bp, Homo sapiens
gacaaagcaatggcaccacagcagggactactagacaaaataaaagatgaacctgacaatgctcaagtcctaaacctagtgcagtcctatgtgacccttcgagtccc

SEQ ID NO: 478663 - DNA, 75 bp, Homo sapiens
atagccctggtcctttctccagtctcctcaggaagatgaaccctcccttgcagaagcgggagctgccccagagag

SEQ ID NO: 478664 - DNA, 102 bp, Homo sapiens
gtagccatcaacccgagtgcagtttcgatggaaaatgaaggtttctgacgtagaagagcttacccctccagagcatctttctgatcttccaccattttcaag

SEQ ID NO: 478665 - DNA, 82 bp, Homo sapiens
ctcggcgcttggcgctggcgctggccaaggcgatgatatcatcaagttgaatcgaaaggaagggaagaagcagaattttcca

SEQ ID NO: 478666 - DNA, 98 bp, Homo sapiens
agccaacatggcagcggggttcgggcgatgctgcaggggaaatctaagttaatttcaaggcattcgaaatggggaaagactattattgcattttggga

SEQ ID NO: 478667 - DNA, 97 bp, Homo sapiens
cgctgggcactcccgcgcgtactcggccgcctgagcgcatttgacattgtgcagcaaagaaatggttatggagaagcccagtccgctgcttgtaggg

SEQ ID NO: 478668 - DNA, 75 bp, Homo sapiens
gaggtcagccgggtgctgtgcaagcggtgcggagttttttgagaaccctgcttttcgtcccgatgggctgaaact

SEQ ID NO: 478669 - DNA, 83 bp, Homo sapiens
acaatcttttagaaccaacaagggtctcaatgcccacagaaaatattgcactgctcagcacgcaggcatgtgaggaagctggg

SEQ ID NO: 478670 - DNA, 75 bp, Homo sapiens
cccggccaaagtcactgctgttaacaaggatggatttgcgcaagcaggtagcgccgctgctgaagagtttccaag

SEQ ID NO: 478671 - DNA, 75 bp, Homo sapiens
agagtgtatgcactttactacaaagatggacttctctgtacaggtgctgggtcttcagctctaaagaggccattt

SEQ ID NO: 478672 - DNA, 100 bp, Homo sapiens
tctctcgggagccgcaaggcgagagctgcaaaggaaaattgcctaagaattatgacccaaaagttaccccagatccagaaagatggctgccaatgcgaga

SEQ ID NO: 478673 - DNA, 98 bp, Homo sapiens
actccacagttgtatgtggcctgtggtaggggaccccgatcatctctgagagtcctaagacatggacttgagtttaaacccattttcctgaacacaat

SEQ ID NO: 478674 - DNA, 75 bp, Homo sapiens
agaaaatacaaaacaattcaaagctcttaaggcaagaaacctattggaattcgagacttaattaatgaagctttg

SEQ ID NO: 478675 - DNA, 50 bp, Homo sapiens
ggagtgcctccaaaggttgctgaggcaaatggcatcttggacaccacggc

SEQ ID NO: 478676 - DNA, 75 bp, Homo sapiens
cgcagggaaggagggcgtccgagtcaacaaccgcttcgagctggtgtttgagaagtcccccctgcgggtgaagaa

SEQ ID NO: 478677 - DNA, 82 bp, Homo sapiens
agaaacattaagacctactaccaggtgatgtgtccaatctagatcccaacttctcatttgaaggcaccaaactggatgtggg

SEQ ID NO: 478678 - DNA, 119 bp, Homo sapiens
agcacagatgaagacgaagttgatggcctggagaagaaagatgttttgcctactgttgatccggatctcctgtatcgaaggtctaggtcactagtggattatgaaaatgctaataaagc

SEQ ID NO: 478679 - DNA, 83 bp, Homo sapiens
ggtgctgtctgggcttcatagcattcgcctactccgtgaaggatctggtgaagaatcatctgatgtatgctgtgagagaggag

SEQ ID NO: 478680 - DNA, 75 bp, Homo sapiens
ggtcattgttcaggctgagaagccaaacttctttaatgataagcggagagatgcagaggatgctatttatggaag

SEQ ID NO: 478681 - DNA, 75 bp, Homo sapiens
taagaacctggttcctaagcctgtaccacctccttccaaggttgatgctatgaaactgggagtaaaggaaatgaa

SEQ ID NO: 478682 - DNA, 100 bp, Homo sapiens
ccggatcagttcgagtgcctctacccataccctgttcatcacccatgtgacagacagagccagggagaaaaaagggcatcatccccattccgaagggtca

SEQ ID NO: 478683 - DNA, 96 bp, Homo sapiens
gactgggcacagcatgagatccaaaggcagggcaaggaaactggccacaattttctttttaaaagcggaaggagagttttacatggaagtggctta

SEQ ID NO: 478684 - DNA, 75 bp, Homo sapiens
tgaagttattgttctggaaattgctttttcaaatggaagacttacatatcagtctgcagatgcctccaaggagtc

SEQ ID NO: 478685 - DNA, 100 bp, Homo sapiens
actcattgagcgccgattttatgccaggcaccgtgctgggtttttcgttggaatatacgttgcacatttatggcgattctgagtgtgagggcagacttct

SEQ ID NO: 478686 - DNA, 74 bp, Homo sapiens
acatgtccttcgataactccctgtttaccgtctccgcgtggatcaatcttcctgtcctacaactgacaaaggat

SEQ ID NO: 478687 - DNA, 90 bp, Homo sapiens
gggcgtccgagtcaacaaccgcttcgagctggcaaaaaaggatccacctgcagactctgagggcactgtcagaagtacagaaaatgacgc

SEQ ID NO: 478688 - DNA, 83 bp, Homo sapiens
ttgtgctccaggctgccccataataagcaccatgactcctgtgaggatgcagcactccctggcaggtcagacctatgccgtgc

SEQ ID NO: 478689 - DNA, 75 bp, Homo sapiens
cttgggatcctttatcctggtcatcttctatttccaaagatttttcaagccacattcaattgataggatgaaaaa

SEQ ID NO: 478690 - DNA, 75 bp, Homo sapiens
ccgcaataaaagaagcaaaagcaatgaaggagcagatgacctgcctagagctggaacgttacctccagagcgagc

SEQ ID NO: 478691 - DNA, 90 bp, Homo sapiens
gtggcacaaatgcagaaactccctctggtgatgatttcaggcagttcaattaacctccagaagatggctgaacctgcaggaataccagag

SEQ ID NO: 478692 - DNA, 83 bp, Homo sapiens
agcttggcctcggcgtcctcggtctaacaggcaaccagccaagttgaaccttctcacctgccaagtaaaacctaatgccgaag

SEQ ID NO: 478693 - DNA, 82 bp, Homo sapiens
cgaggtggacatgagtgaccggggcatctccaacatgctggatgtcaacggcctctataaagtggagaattttcatgaagaa

SEQ ID NO: 478694 - DNA, 75 bp, Homo sapiens
caggaaggacaaaactattcaacatgtggaagtattttgttatgccaggtttaaaagcaagttcatgaattcgcg

SEQ ID NO: 478695 - DNA, 83 bp, Homo sapiens
ccaaaggacgcgaccataactctaaaaggcgaggctgtgagtgtggtgggctttggcgtctttggccagtcttgcgggccctc

SEQ ID NO: 478696 - DNA, 90 bp, Homo sapiens
tctcgattggagaaggtgtatctgaagaacagtgtcatggagctgattgcaaatgtgttcacggccctggcactggtgcgaatgctcatt

SEQ ID NO: 478697 - DNA, 100 bp, Homo sapiens
gtattctcgtactcttaataaacacttcgagagttcttccaaagtcgcccaggcaccttctccatgcattgcaagctttactaatatgctgaagaacaaa

SEQ ID NO: 478698 - DNA, 50 bp, Homo sapiens
tggcttcatcagcactttggggaaactcttatcactactattgattctag

SEQ ID NO: 478699 - DNA, 75 bp, Homo sapiens
cctgctcctgggtgccgtggcatgtcgatttgtccttcactacagcctgtgcctactacactggcacaagtggat

SEQ ID NO: 478700 - DNA, 98 bp, Homo sapiens
cggagagaatactcgaagggctctcctgatactaacagttttacgatttaaaacttcgccagaatttgttttggcttgtggttaacgggcatgttgat

SEQ ID NO: 478701 - DNA, 98 bp, Homo sapiens
cgaagctctggtcagtgccatgatccggcaggagcgctccacatcctaccaggagccccaaggaggcccgcctgacgactgaccagttgccatggcat

SEQ ID NO: 478702 - DNA, 75 bp, Homo sapiens
ggcacttggcgtaaagccgcttccctcaagagtaactacaagccttcccttcttcttggtggtgttcttgagtaa

SEQ ID NO: 478703 - DNA, 100 bp, Homo sapiens
tgaccgagagcgtgaccgagagcgcgaatatcgtcatcgttagaagcatatcctgctcctctaacaagcatcagaggccgaaaacctctttttggagaaa

SEQ ID NO: 478704 - DNA, 51 bp, Homo sapiens
gagcattgcttctcatacagtaaggaggaacagcacagcatgctgggctct

SEQ ID NO: 478705 - DNA, 75 bp, Homo sapiens
gagaagagtttttgggaggaggcggagctgccggcggagctgttttctgtctcaactggtctctgacaagcctct

SEQ ID NO: 478706 - DNA, 75 bp, Homo sapiens
cgcggcctcctcctcagtcgggatcaaccgatggaggtcagcccaaggccaaccccactgtcactctgttcccgc

SEQ ID NO: 478707 - DNA, 50 bp, Homo sapiens
acctcagaggacaacgaagtgttcggacagtcattttgtttactcattca

SEQ ID NO: 478708 - DNA, 100 bp, Homo sapiens
agggaaaccactgtagtctgggacaagataactggagagcctctctacaatgctgtggaatagcattgaagaacttgatggtgtccttacatccatattc

SEQ ID NO: 478709 - DNA, 100 bp, Homo sapiens
ttcacctttgatcccctgacctgcattaccttggcctcttctgaagagctgaaagctgcctaccggaggctctgtatgctctaccatccagacaagcaca

SEQ ID NO: 478710 - DNA, 99 bp, Homo sapiens
ctgcagggtctgtgcgaagcgagtgagcacgcaggaagatgaggagcaggagaacagaagcaggtaaaataccatgaagattttgaaaaaacaaagggg

SEQ ID NO: 478711 - DNA, 75 bp, Homo sapiens
cgtctagagatgtgggcatggcagacaaatctgtagttcccggactggggcgttctctaggatttctgcccaaaa

SEQ ID NO: 478712 - DNA, 90 bp, Homo sapiens
caagcagttcagaagagccaaggaataaacatgcaatgaacccaaaaggctttactaatatgctgaagaacaaacagccgacgccagtga

SEQ ID NO: 478713 - DNA, 100 bp, Homo sapiens
ctctggatggcttcgacgtgtggaaaaccatcaggagtgctaacaggaatgaatgaaacttctgctgtaatcattgctgcaccacagaatttcactccct

SEQ ID NO: 478714 - DNA, 82 bp, Homo sapiens
cgatgcagtcttacagatgcagtactgccaaatctgtcgaaagggagataatgaagaactgcttcttctttgtgatggctgt

SEQ ID NO: 478715 - DNA, 75 bp, Homo sapiens
gctcgcggcctggcccttggcctcctcctgctgctactgtgtccagcgcagccaacatcccatgcaccatcgtgg

SEQ ID NO: 478716 - DNA, 105 bp, Homo sapiens
gtgccacagcagagacgcgaaggagaggccctagaaccgtacaccagaggatcgcttcctggcagaatttgggagctgtttattgcagcactgttgtgccctctg

SEQ ID NO: 478717 - DNA, 100 bp, Homo sapiens
tctccgcagcgcgcccaactgcatcctcctggccatgttcctcgtccactacgggcatcgagagtgattgactgcctggaggatgagaaggcaaccctca

SEQ ID NO: 478718 - DNA, 75 bp, Homo sapiens
tacttttgtttctcaacgtggaaaggtttactcgacaaaggcagaataagaaagccttgagttttgtgaaaaacc

SEQ ID NO: 478719 - DNA, 75 bp, Homo sapiens
cctccagccagcgtggtaccctgcagagggcactccggtggcccgacgttggggcattcagaaaaacaggccagc

SEQ ID NO: 478720 - DNA, 50 bp, Homo sapiens
attaccttgcaccttatgccaaggtggcttcccacacttctgactcggac

SEQ ID NO: 478721 - DNA, 83 bp, Homo sapiens
gtcatattgcccagtggtcacctcacactcctccaaggattacctaggaacagtacgatttggggttatcacaaataaacatc

SEQ ID NO: 478722 - DNA, 100 bp, Homo sapiens
cagaaagagtcaacagcagtggcaacaggcatgcatgtagggaataccggattcataaagagctggatcatcccagaatagttaagctgtatgattactt

SEQ ID NO: 478723 - DNA, 96 bp, Homo sapiens
tgtaaaccttgcggtcaatgaccagccacctgtcggtgcgcaggttatgcttctgaatctcctcccagctgaagcatcttggactcaagtgattct

SEQ ID NO: 478724 - DNA, 80 bp, Homo sapiens
gtctcgggggccgctctgggatcccggccaccagcaattgtccgatctcttacctcagctagaagctccgagttctctta

SEQ ID NO: 478725 - DNA, 100 bp, Homo sapiens
aggttcaggctacggtgagccgaaggaagaggagatcccagaactggagattgacgtggatgagctcctggacatggagagtgacgatgcccgggctgcc

SEQ ID NO: 478726 - DNA, 100 bp, Homo sapiens
cggccaccatggccacgcctgggctccagcagcatcagaacaagttgaaatcatcgcagaaggataaagttcgtcagtttatgatcttcacacaatctag

SEQ ID NO: 478727 - DNA, 100 bp, Homo sapiens
gaaggacaccaagatgcggatccgggcctttccgtgtaaacaggaacatcgataagtagtgtaaaaacttgcacaatgaaatccgaagccaaggatggag

SEQ ID NO: 478728 - DNA, 74 bp, Homo sapiens
cctgtctgggtctcagccgccaaagaccccgtccggtagtcgttgcagttcgataaggagcagatggtcgcggt

SEQ ID NO: 478729 - DNA, 88 bp, Homo sapiens
ggaagaatcactgtgggaaccattcaaagaacccagcggtcctcgatgggcttcctggaatattggtgtgtttatttgcatcagatgt

SEQ ID NO: 478730 - DNA, 100 bp, Homo sapiens
attctgatgaagaagttattcaagatggacggacacattgcccttcatctggctgtaagacggtgtcagatggaggtaatcaagactctcctcagccaag

SEQ ID NO: 478731 - DNA, 90 bp, Homo sapiens
ccgggactgaggccgccctgcaccttcagcggatttggggattaggctcttttaggggaacgcccttttgcttgtgactggcagggctgc

SEQ ID NO: 478732 - DNA, 90 bp, Homo sapiens
gaaagaagaagaagatatttatgaagtcttgccaggtttaagaaaatctacgaagaaacgcagtgagtctccacctgctgagctccccag

SEQ ID NO: 478733 - DNA, 74 bp, Homo sapiens
cggggtgcgtgggtgcctggagatgaagctggaaaggtgaccaagaatatggcccaggtgaccaaagccctgga

SEQ ID NO: 478734 - DNA, 75 bp, Homo sapiens
caagatccggagccccaacatccgcgtcaaagcaggtcaaaccaaacaactcactcattcttccccaagattttt

SEQ ID NO: 478735 - DNA, 82 bp, Homo sapiens
cagcacagttcctgggaaggtggagccaccagcctctccttggagtgtacctcacagccttctaggatctccagagtggaca

SEQ ID NO: 478736 - DNA, 82 bp, Homo sapiens
gacgcgccacccgccgacgcctcagccgcttggggcccgcacggaccctctacttcagtcatcatcagatttgaaatattta

SEQ ID NO: 478737 - DNA, 83 bp, Homo sapiens
gccgccgccgggagagcccggggcagagcagaggtgctcatcagcactgtaggcccggaagtgcccaaggttgaagcaatgaa

SEQ ID NO: 478738 - DNA, 75 bp, Homo sapiens
gataccacattagagccagaaggtgctggagaatctggtaaaagcaccattgtgaagcagatgaggatcctgcat

SEQ ID NO: 478739 - DNA, 48 bp, Homo sapiens
gatcatgtatgagatgctcatcggggtggaagttgggaaggatcagga

SEQ ID NO: 478740 - DNA, 75 bp, Homo sapiens
ggacaaacctatcacatttactcaggacagtcattttgtttactcattcagccctgttgcaggtcccaataaact

SEQ ID NO: 478741 - DNA, 111 bp, Homo sapiens
cgtcaagctggccaagcacaaagagcttgctccctacgatgagaactggttctacacgcgagctgccaaggccacctttgatgccatttctaagacctacagctacctgac

SEQ ID NO: 478742 - DNA, 98 bp, Homo sapiens
aaaatatttacttatatcaattcctggacacagagatttaccggaacattccaggatttttacgtacacttatggatgccctgagaaaagacaaaata

SEQ ID NO: 478743 - DNA, 100 bp, Homo sapiens
gcaggagcagatgtgaataaaactgaccatagccagagaacagccctccatcttgcagcccagaagggatatcccagagaaggaaggaaataccctttgc

SEQ ID NO: 478744 - DNA, 100 bp, Homo sapiens
ccacttcaagtatcatttgccgttctcagttctcctaataaatcatcaatctctgagaccctttcagcagatgcgtagcatttgctgcatgggttaattg

SEQ ID NO: 478745 - DNA, 90 bp, Homo sapiens
gctagcagtgagcaccttttggcccaatgaatatcaggagggtgcatctgcccggaagactcagactcctgcagcccagccagtaccaag

SEQ ID NO: 478746 - DNA, 88 bp, Homo sapiens
cagccactcggagctaatccacaatctccgcatgtctttggtgcaacactaacaaggcttgtctggactacccagttacaagcgtctt

SEQ ID NO: 478747 - DNA, 75 bp, Homo sapiens
cgaccctggccgccccgagcggagcctggagagagcgcctgctcgctgtgcccccgggttatgacgacccccaat

SEQ ID NO: 478748 - DNA, 90 bp, Homo sapiens
ccaaccggctccagggcactggtaatttggctagaggaccgcgcggaggcagcgggaattcagaaggaacttgcagaaatcacattggac

SEQ ID NO: 478749 - DNA, 73 bp, Homo sapiens
aaactctggaatctccatgtcatgaagcatgggctgtaggttccatgaggacaggccttgagtctgtcctggt

SEQ ID NO: 478750 - DNA, 56 bp, Homo sapiens
aaaaacctcagcgacctgatcgacctgggagctaaaaaagttcatttgggtgaaga

SEQ ID NO: 478751 - DNA, 74 bp, Homo sapiens
ctggacccgaaaacctccttgttgaaccgtggacaagggatgattccaaaagatgagcatattcttcggttcct

SEQ ID NO: 478752 - DNA, 95 bp, Homo sapiens
aaggaacactcttctggtggcactaacttagacagggaggagatatcaccaaacatgatggaacaggcggacagtccatttatggagacaaattt

SEQ ID NO: 478753 - DNA, 100 bp, Homo sapiens
ccccgggcggacgccgcagagcgccgaggaggctttcctgctggtggcaaccgcctacgagacactcaaggtgagcaagacgtggaaggtgattgcagag

SEQ ID NO: 478754 - DNA, 96 bp, Homo sapiens
ggcgtggggaagtatgagttcaccgacccggggcaccccagaggagcttgtcggttgggtcaagaatgaacctacgcatgacggcgtgctgatcct

SEQ ID NO: 478755 - DNA, 100 bp, Homo sapiens
cacgtcctgctccgtggtgctctatgaccccctggatttgggggttctttcatggcgccttccccatctccagtgactccagctcagaataacctgctac

SEQ ID NO: 478756 - DNA, 82 bp, Homo sapiens
tgacaacttcggtcgtggaggaaacttcagtggtcgtggagtttgacccagggcaggacacctaccagcacccacccaagga

SEQ ID NO: 478757 - DNA, 73 bp, Homo sapiens
tcagcaaaatcgagaatcatgagggggttcggaggtttgacatctacaggaaggtgcccaaggaccttacgca

SEQ ID NO: 478758 - DNA, 100 bp, Homo sapiens
cctcgaccttcacaggactcttcattgctggttggcaatgatgtatcgcgtggggtagagcagcggctgccatgctcttctgtggcttcatcatcctggt

SEQ ID NO: 478759 - DNA, 100 bp, Homo sapiens
caagacgctgcggccaagcagaaagttgaacagaacgcggctcccagccacaccaagttcagcacaggagaaaacgacgctccacacctttaacttcttc

SEQ ID NO: 478760 - DNA, 86 bp, Homo sapiens
ccgcgcagcccccggccgcagcgcaggcagcccagcaggatgatcggctgaatgtaacagaggaactaacgtccaacgacaagacg

SEQ ID NO: 478761 - DNA, 100 bp, Homo sapiens
gggaccgggtgctggaggagctgcacaaggcggaggacagcctcctggccgccgaagaggccgccgccaaggtgccagctgacgaggtatgcgggtgccc

SEQ ID NO: 478762 - DNA, 75 bp, Homo sapiens
ttgacatttaattttagggtcctttatatagaagggagagtaggtgtgtttccattgtagaaaacctggtcatgg

SEQ ID NO: 478763 - DNA, 95 bp, Homo sapiens
gtttcttgggactgcgaagctatacaggctggaagctatgcgaaattatttaaaagagcgaggggatcaaacagtacttattcttcatgcaaaag

SEQ ID NO: 478764 - DNA, 90 bp, Homo sapiens
cccatggcttacgctgcacttccatcccacggtcagatcccgatggaggagaaaaggggctggtatttcaccatggcaacactctacatc

SEQ ID NO: 478765 - DNA, 75 bp, Homo sapiens
aaaggtgctaatccagtggaaatcaggagagccatcatctgccctccaccatccatacctacgtttgcaacactt

SEQ ID NO: 478766 - DNA, 74 bp, Homo sapiens
aaaagacagatgggttcaggcgatgcctatccacatcaggcttctccagggaaagtgaccgaggcagtgaaaga

SEQ ID NO: 478767 - DNA, 51 bp, Homo sapiens
cattcagagtgtaaaaggaaagatatggagtctggagaacggttaccatcc

SEQ ID NO: 478768 - DNA, 90 bp, Homo sapiens
ccatcatggacaccagccgtgtgcagcctatcaagctggccagggactatcggacaaaacctttctgctgcagcgcttgtccattttcct

SEQ ID NO: 478769 - DNA, 96 bp, Homo sapiens
tgctgccctggctgccttgagaggtcacttctgcctttccagtgacaaaatggtgtggactcagaattcatgattgaagaaatgcaggttagttta

SEQ ID NO: 478770 - DNA, 95 bp, Homo sapiens
gtgcagaagtcattttaaactatggacgactccgaggaacattgagaacgctgtctctggcttccaaagcctgctgcattccttggcccatggcc

SEQ ID NO: 478771 - DNA, 85 bp, Homo sapiens
tctactgatttcttctctggaggctgttggctagagatttactacatccgtccttggaagaggaaaagaaaaaacataaaaagaa

SEQ ID NO: 478772 - DNA, 100 bp, Homo sapiens
aggtcatccgagccaacatcggggacgcccaggctatggggcagcagccaatcaccttcctccggcaggtatttcagagagatgggaatgatttgcacat

SEQ ID NO: 478773 - DNA, 73 bp, Homo sapiens
ctcccagatgcaagagctgcacaagtctctccggctgctggagccagttctgcttctcggcaaggagcgattt

SEQ ID NO: 478774 - DNA, 98 bp, Homo sapiens
cctctgctgctggaagtgggggtagaggagaagttcatgaccatggtgctggtgtggcaaaggagcagagaactttgacaagttcttcacacgaggac

SEQ ID NO: 478775 - DNA, 100 bp, Homo sapiens
ttaagaagcagccaagccacatggaggccgctcattttggtgacctggctttagcgtcacctccctcactgggcagcatgggggagaagtcagagaactg

SEQ ID NO: 478776 - DNA, 100 bp, Homo sapiens
ccggcctccaggtgctcaacgattacctggcggacaagagctacatcgagggtcactccagattgctgccttccttttcacggtctgccatgtggtgatt

SEQ ID NO: 478777 - DNA, 89 bp, Homo sapiens
tctctgtctcgctcagaggagatgcaccggctcacggaaaatgtctataaggacctgaaggagaagaaggagaaggtggaggagaaggc

SEQ ID NO: 478778 - DNA, 100 bp, Homo sapiens
ctgggcgtgggcggggctgctgtgctgggcattgccaccctggccgtgaagcgggttcgaacctctgacatgggtggctatgctacttgccatgacttca

SEQ ID NO: 478779 - DNA, 75 bp, Homo sapiens
tgcagaaaaagaggctcttcctcctcctcccgcgacgatacccagaaagcggtactctagaaatgaatgtcaagg

SEQ ID NO: 478780 - DNA, 88 bp, Homo sapiens
acatatttattagcagaaaacttttaaatgcaaaacactcagagaaatcaccaccttctacagaactgccattggatgtccagaatcc

SEQ ID NO: 478781 - DNA, 100 bp, Homo sapiens
gaggaaggacctgctgatgaatattacatcatataccgaaatgtttttgataaggcacagatagatcattatctaggacttgcaaataagaatgttaaag

SEQ ID NO: 478782 - DNA, 100 bp, Homo sapiens
gtggctgcctcctatggccagggcggttacctttacagcaagagtgagccatggagctacgtgtggggaacaagtaccgcctgggacggaagatcgggag

SEQ ID NO: 478783 - DNA, 82 bp, Homo sapiens
cttcctcggtggctgcgccggaggcctgactctgggagcacgcagtcttgagtcaccacgtccgaatataattcttgggtta

SEQ ID NO: 478784 - DNA, 100 bp, Homo sapiens
attcaaacatcgacgccatcgacaagcggactgcaatgtgccgatcttagctgctgcctgagaggatgtctggggtgtccgagcccctgagtcgagtaaa

SEQ ID NO: 478785 - DNA, 140 bp, Homo sapiens
gaagtggtccccgaaggctatttcgccgctggcgtcaggactattttcacgttttaatgccgagaggacgctgccaaggtctgcagagaattcaccgagcgtgagcaaggagaagtccgcttctctgccgtggctctctg

SEQ ID NO: 478786 - DNA, 82 bp, Homo sapiens
gattactgcacggggtcgcgccgtggcggagcaggttaaataggattgcgaatcaggtggccattcagcggaagaagcagtt

SEQ ID NO: 478787 - DNA, 100 bp, Homo sapiens
gctcttagaaatgtcctttaactgcctggaggatgtggagagcaccattccagtcagccctttgcacttagctgttggcaaggccacaggcttcctcaag

SEQ ID NO: 478788 - DNA, 90 bp, Homo sapiens
ccatcaatttcaaccctgaggacgatgagtgtgaagattgcagccttcttcgctgagtctctgcccagtgtgggagggcagatcattccc

SEQ ID NO: 478789 - DNA, 101 bp, Homo sapiens
tcttcaagctcactgccgacttcagggaggatccggacccccgcaaggtcaacctgggagtgggagtcatggctccgatcttcatcttgaagaagagtgac

SEQ ID NO: 478790 - DNA, 83 bp, Homo sapiens
cagagcctcgcctttgccgatccgccgcccgtccacacccgccgccagacctcctgccccccgaggtctgcagtctcctgaac

SEQ ID NO: 478791 - DNA, 101 bp, Homo sapiens
taggagaagcattttgaatcagaaggcttaagaagaattctgcttttctctttcattcattggctcccatgtactatcgaggctcagctgcagctgttatc

SEQ ID NO: 478792 - DNA, 83 bp, Homo sapiens
ctgggagcagaagggaggctccaagacctcatcaacaattaagctgagatctgtatctgtggacctgaatgttgatccctcgc

SEQ ID NO: 478793 - DNA, 100 bp, Homo sapiens
agcagcagctccactgaacagataaggtgcacttacatttcaatcgaccaagttccaaggacctatgccataatgataagcagacccgcctggctctggg

SEQ ID NO: 478794 - DNA, 100 bp, Homo sapiens
tgatctccatgtcctgttgtggggcttttacagcctttgggtactttggaagttcgtcttatgggctgccaagatatcctagagaatgtccctggacggt

SEQ ID NO: 478795 - DNA, 100 bp, Homo sapiens
gtcggggacggctgcgcgggacggctctgtaggaaggaacttggttccccctccctcagcttccgccccaaaaggctggtgagattggagagatgaagga

SEQ ID NO: 478796 - DNA, 98 bp, Homo sapiens
cgtgctgggggtcatcgacagctgcaaggaggccgtcaccttcaaggccgtcagacaagagttgctggagaatgtaaccctaatccataaaccagtgt

SEQ ID NO: 478797 - DNA, 82 bp, Homo sapiens
tggctgctgttgcttctgggccagaggaagagaatgaggaaaattgcctaagaattatgacccaaaagttaccccagatcca

SEQ ID NO: 478798 - DNA, 100 bp, Homo sapiens
cgcgtccgccccgcgagcacagagcctcgcctttgccgatccgccgcccgtccacacccgccgccagacttaattcagtgcacaaatgagatgaatgtga

SEQ ID NO: 478799 - DNA, 100 bp, Homo sapiens
aaaacaatcggcaaggggaattttgcaaaagtaaaattggcaagacatatccttacaggcagagagcatttggccatccagtgtcattggtctcagaggc

SEQ ID NO: 478800 - DNA, 100 bp, Homo sapiens
cttcctaacatccaggccgtgcttctgcctaagaagaccgagagtcaccacaaggccaagggcaagtgatttgacaggttatgaagacagtatggagttt

SEQ ID NO: 478801 - DNA, 100 bp, Homo sapiens
acagatgagaaacccggcaatgaaaatggatgatgctgaccctgaggaaagaaactatgacaacatgctgaaaatgctgtcagatctgaataaggacttg

SEQ ID NO: 478802 - DNA, 82 bp, Homo sapiens
tctgctcctctagaagatttcacagcaatgctggactgcagtgactatgttctagttaactgaactaaaggcagactttcag

SEQ ID NO: 478803 - DNA, 80 bp, Homo sapiens
gcctccaggccaagagggatccttcacccgtgtctgctggagcagatccgcagggacatccgagacttccggtctagcgc

SEQ ID NO: 478804 - DNA, 74 bp, Homo sapiens
aggacgacgacgacgaggaagaggaggtttctgagctggtgggcacggaggatgctcttctgcagcagctggcg

SEQ ID NO: 478805 - DNA, 50 bp, Homo sapiens
gaggccgaggcgggcagatcacgagctacttgaaggaaattttgccaaag

SEQ ID NO: 478806 - DNA, 98 bp, Homo sapiens
cacaactttggtggaccacccgataattttgcagtggggccagtgaaccagtttgactatcagtttctccacagacactacccaaagcagtccttcac

SEQ ID NO: 478807 - DNA, 100 bp, Homo sapiens
gctgcggtctctggccagcacgctggactgcgagacggcccggctgcagcgagcgctggacggagaggaaagcggatggatgcaaccttgaaagaactga

SEQ ID NO: 478808 - DNA, 100 bp, Homo sapiens
tcgaactgaaaaggaaagaaaatctgtttcagctgagatcaactatggaataaggtttactcagagtaaatattatcagtgtcactaacaagggactact

SEQ ID NO: 478809 - DNA, 139 bp, Homo sapiens
cacgttgacaatccccacggcgatgggcgctgcatcacctgtatctattacctgaatcagaactgggacgttaaggcatgctctttgccaatggaaaccgctggaaggtgcttcggcgattctctgtgaccaccatgag

SEQ ID NO: 478810 - DNA, 100 bp, Homo sapiens
cgcgggttgattcgtccttcctcagccgcgggtgatcgtagctcggaaatggcggggttcatagtggcgtcatgcacgcagactcctgcaagttccccta

SEQ ID NO: 478811 - DNA, 82 bp, Homo sapiens
aaacacaggaggaggaggatgagattcttccaaggaaagactatgagccatgacagtgcagatcctgctgaagctggaccgc

SEQ ID NO: 478812 - DNA, 82 bp, Homo sapiens
atgatgagcaccgtgacggaagttcgagccctcaggtgcagcggaactgctgcctgacgctctgcaacttcagcatccccga

SEQ ID NO: 478813 - DNA, 97 bp, Homo sapiens
gtcgctggaccgcggggcgctaaccctggagagcccaggagcgggcgggacatggatggtggatgtggggggccagcggtcggagcggaggaagtgg

SEQ ID NO: 478814 - DNA, 122 bp, Homo sapiens
ctttggtgtggacatctgctgccggaaggggtcccgaagccccctgcaggaactctacaacccaatccagggcggcgactggcggcgcgatggacctgaccgggctcctgctggacgaagaa

SEQ ID NO: 478815 - DNA, 75 bp, Homo sapiens
ccacaatgaagcagtcggacgcgtctccccaagaaagttgacttgctggtgaaggtgggggaggttgtggacaag

SEQ ID NO: 478816 - DNA, 98 bp, Homo sapiens
cgccggatgcggagcgcggtgctgccggtggagcttcagcctgagaaaaatgacagtgagccaggcagccagaggataaaacctgttttcattgaaga

SEQ ID NO: 478817 - DNA, 75 bp, Homo sapiens
aattggccttctctagaagactcttcttgaatgcaccaaggaaaggccatttgtggggacatagcaagaaggcag

SEQ ID NO: 478818 - DNA, 76 bp, Homo sapiens
ctgggaatcggtcgcctggaggaccagtatttcccatggagggtggagaaaatccgttactgcatcaccaaacttg

SEQ ID NO: 478819 - DNA, 89 bp, Homo sapiens
gccggggcccccgccgccgccggagcggaaaatcctgccttgcttcgttgggcctatgcaagaacaataaatgtctatcctaatttcag

SEQ ID NO: 478820 - DNA, 78 bp, Homo sapiens
gcacctcttcctttacctcaagaaagtgatccagactactcagcacagagaatgaagacctttcgaatccgtcaaaac

SEQ ID NO: 478821 - DNA, 100 bp, Homo sapiens
tccagaacaactcttcttcatagttacgttatactgcccctgcattgttggtattgaaatcctgaatggcatggaatgctctactcccaagctgacagca

SEQ ID NO: 478822 - DNA, 98 bp, Homo sapiens
atgaggaagtactgagcctgttggaggaactggcccggaaacaggaggacgcatgcggatcctggtcactctgctgctggatacgctgcccatgctcg

SEQ ID NO: 478823 - DNA, 100 bp, Homo sapiens
atgaagatgaggagggagctacagcgttgaacaaccacagctctattcccatggacccagctgctggttgcgcagccacctcgggatactgcacacggag

SEQ ID NO: 478824 - DNA, 119 bp, Homo sapiens
tgtgttttcaatgcacaaggggaaatttggcttgcaattcatcactttgaaaagctttggaaacatgatgagcaaggagaagcgagaggctgtcagtaaagaggacctggccagagcga

SEQ ID NO: 478825 - DNA, 100 bp, Homo sapiens
catagcagaaagctggtgttacacacagcactgttgcaagaattcaattccgtcttcctgatggttcttcctttacaaatcagttcccttctgatgctcc

SEQ ID NO: 478826 - DNA, 75 bp, Homo sapiens
agtaaccagcatgtcaataaggggtcataggtggaaaagacatgtgccgcagaatggaattcggcattgttccta

SEQ ID NO: 478827 - DNA, 101 bp, Homo sapiens
cgcaccaagaaccaaccctgccagcacctggaccttggacattcagacttcagaatgcacagccatgacagtgcagatcctgctgaagctggaccgcctgg

SEQ ID NO: 478828 - DNA, 88 bp, Homo sapiens
aacatcttcgagatttcggcgaggagcatcccttctatgacagcaaaagatacagatattgtggatgaagccatctattacttcaagg

SEQ ID NO: 478829 - DNA, 51 bp, Homo sapiens
gtgatggatgtggaacgttatgtagcattcctctgaatattgatttgctga

SEQ ID NO: 478830 - DNA, 83 bp, Homo sapiens
caccgagcgtgctgagcaaccgcagcctccgcggccgagagtgcagcgatggtgctcatcggggactcaggcgtgggcaagag

SEQ ID NO: 478831 - DNA, 75 bp, Homo sapiens
agcatcgagtctctgcgaacattccttttaacctatgtcttacaaaggcccaaagacgagttgtactgctgtcac

SEQ ID NO: 478832 - DNA, 82 bp, Homo sapiens
tagatggaacacatgctctgatgcggccctccaggcactgaagcgtaagaagaggtatgagaagcagctggcgcagatcgac

SEQ ID NO: 478833 - DNA, 74 bp, Homo sapiens
tgcgccgggtggagattctcagtgaaggaaatgaagtccgacatgaaagatcagatgtcaacttcatctgtgca

SEQ ID NO: 478834 - DNA, 101 bp, Homo sapiens
gtctgcggtcgttccctcggctgtggaccgggcggcacgcacgcggtgcagggtaacatggcggatgcggaaggcaatgatagtaagaaatgctaaagata

SEQ ID NO: 478835 - DNA, 51 bp, Homo sapiens
atctgcttccatcccgccagtttgggtacaccaggggttggaaaaaccaca

SEQ ID NO: 478836 - DNA, 100 bp, Homo sapiens
gcttgcctgctgctcctcggctgcggatacctcgcccatgttctggccgaggaaggaagcagccaccctcgccatggcctccccgcccgcctgcccctcg

SEQ ID NO: 478837 - DNA, 96 bp, Homo sapiens
ctctcaccgcgcatgtttggagtgtgaaagaaaatgtctttatttaaagcccgtgattggtggtctactattctgggagataaagaagaatttgat

SEQ ID NO: 478838 - DNA, 147 bp, Homo sapiens
caaggatgcttgaggactcagatgagcaactggattatactgtactgcccatgaaaaaggatgttgaccggacagagcagtcaagagaccagcccctgcaaaaagcagtgatcattctgaggaggacagtgacctagaggaaagcga

SEQ ID NO: 478839 - DNA, 75 bp, Homo sapiens
accctgagactctgctgggggagatggaggcgaagacaagagagctcattgataatgtgcaaaatggctcccatg

SEQ ID NO: 478840 - DNA, 100 bp, Homo sapiens
cttcacaagcaccaagaggcaccaaattacttcacagagaatgcagttgtcttgacttcaggtctgtctgttctgttggcaagtaaatgcagtactgttc

SEQ ID NO: 478841 - DNA, 100 bp, Homo sapiens
ggtgttccagtggcaaacagctgtataaactcttgtaaacagaacatggtccaagacaattcctgggaaagttcagttcttctcaagtgagggttctgac

SEQ ID NO: 478842 - DNA, 75 bp, Homo sapiens
attactgtcccgtttgattttggagaaaagcaaaaaaatgctcttggcacgagaagccctgccaacgtgggataa

SEQ ID NO: 478843 - DNA, 83 bp, Homo sapiens
ctggaagctactactacgtggtgcttggaaaggtttgctgggatgggaaacctgctcaaagtccttaccagggaaattgaaaa

SEQ ID NO: 478844 - DNA, 101 bp, Homo sapiens
agacagctcaacacggcacttccacagggtcaatgcaaccaacttcatggaggcaggagccccagttatgtggaatgggcacagagcaaggctgctggatt

SEQ ID NO: 478845 - DNA, 75 bp, Homo sapiens
ggaaaatagtggccgagtatgagaagaccatcgctcagatgatagtgtggtttattgacaatcatttacaatgcc

SEQ ID NO: 478846 - DNA, 100 bp, Homo sapiens
cttcttagtcagtgtatctaccgtcatcgtaaagattatgacaaatcacaacttgtagagcaatgccaagtgagtacacctatgtgaaactgagaagtga

SEQ ID NO: 478847 - DNA, 100 bp, Homo sapiens
ttccggacaccccctaccggctgtggcttcctgctcgcagccacctgcctccgcggactcaagtcggttcagcaaagttctgatggtcctttggctacca

SEQ ID NO: 478848 - DNA, 83 bp, Homo sapiens
gagagactcgccggccgagggtggccctaggggcagcgagcaagacagcaagcaggatgggagtcccagcttctggagacggg

SEQ ID NO: 478849 - DNA, 51 bp, Homo sapiens
ctggacggaggacatggaaggaggatgagacctgcacgcagtggctcacag

SEQ ID NO: 478850 - DNA, 89 bp, Homo sapiens
gacatttcttcggcattctgcaacaggtttacaggtacatacattacacccctatttctacaaagcttggctattagagcattatgaac

SEQ ID NO: 478851 - DNA, 83 bp, Homo sapiens
cgcggcttaaatgatgtattttgtgatcgcagcgatgaaaggactcctcctattttgaggacttctccaacatctccatcttc

SEQ ID NO: 478852 - DNA, 100 bp, Homo sapiens
cttcttctttcagctgttcgttcaaggctatgccctgcaactgcaccagttacagtgtgtaatgctgtgtcatggagctaaaatcggatttttccaagga

SEQ ID NO: 478853 - DNA, 82 bp, Homo sapiens
ctcgcgccggctatggccgtgccctggggctgagccctcaggtcccctgacaagcccaccaggccccctgctgagatggctg

SEQ ID NO: 478854 - DNA, 83 bp, Homo sapiens
catttcaagaagaacaacctaactccagatatctacctaattgattggtcgtgatgtctcgggagtcggatgttgaggctcag

SEQ ID NO: 478855 - DNA, 90 bp, Homo sapiens
ggagatgttgctgaagcatctgcagaggatggtcagtgtgccccaggtgaaggccagtgctctcaagacagggtctcgctttgccacaca

SEQ ID NO: 478856 - DNA, 82 bp, Homo sapiens
gaccgtgaacccaagaaagaggcgcttccccctataaccgctgcaagggtagtatatacctggtgttcgacttctgcgagca

SEQ ID NO: 478857 - DNA, 97 bp, Homo sapiens
cgagcacctgccgcgtggcggggctgtggagcggccgctgaccccggttttcggctttgtgagaaaccttaccatcaaacacgatggccagcaacgt

SEQ ID NO: 478858 - DNA, 75 bp, Homo sapiens
ctccctgtgccttgcttggagctgacgccgacgggttgaaatcacaaagattagacacctttttagataggtgtt

SEQ ID NO: 478859 - DNA, 50 bp, Homo sapiens
ggctgctgcaggagccattttagaaatgggatcttggttcctggccagca

SEQ ID NO: 478860 - DNA, 82 bp, Homo sapiens
cacaaccataatagaatgtctacattcctgatcaccccttctgtgtcattctctgaggaaaacaagttcttctcaaggagga

SEQ ID NO: 478861 - DNA, 100 bp, Homo sapiens
ggactgctgtatgctataggggggcacgatgctcccgcatccaacttgacttccagactctcagactgtgtggaaaggcagaagcaacaaattacccacc

SEQ ID NO: 478862 - DNA, 74 bp, Homo sapiens
ataatgggtatggaggaggacctggaggtgtttgacaacgacatctcctacattgagggtggaacagccagtgg

SEQ ID NO: 478863 - DNA, 82 bp, Homo sapiens
tgcgagatcaacttggacaggaattggaagaactcacagctagtctatttgagttctctcagctactggaagagaaaaacac

SEQ ID NO: 478864 - DNA, 98 bp, Homo sapiens
taaaaaagaagctgcttatccaaattcttccctctttatgtttttcaagggacggatacaacgactagagccaccattggttcaggcaatcttcagcg

SEQ ID NO: 478865 - DNA, 100 bp, Homo sapiens
gcgctctggctgtgctgcgcgacccccgcgcatggtgatgatgaacagtctacacagatggctgcaagttgggaagatgataaagttacagaagcatctt

SEQ ID NO: 478866 - DNA, 73 bp, Homo sapiens
ttgcttgggttatatttgatgaaattcattatatgagagattcagagctaaaaaagtccctgtacgccatctt

SEQ ID NO: 478867 - DNA, 124 bp, Homo sapiens
ggagacgtcagaacgtggcttatgagtacctttgtcatttggaagaagcgaagagataaccttaagtaattcctggattgctttttgccagaaaaatctttctgaatactctgagagtaataaa

SEQ ID NO: 478868 - DNA, 75 bp, Homo sapiens
tgtccgaagcaaggatttccgggactacctcatgaggtaagaatgattgatgttggctgatattggagtgctcat

SEQ ID NO: 478869 - DNA, 99 bp, Homo sapiens
ggctgctgactgcgcacttggaatagtagcaggcggcggcggcggaacgccaggcagggttacattccgaaaagcaaatgggagatggacacatctgag

SEQ ID NO: 478870 - DNA, 87 bp, Homo sapiens
ggcggcggatcccggagagccccggagtgagcggagtagcgagtcggcaacccggagggggcagctggcattttatgctatgtggga

SEQ ID NO: 478871 - DNA, 51 bp, Homo sapiens
ccactgatgaggatcagcccatggtgcagcttcaagcttaggaccacccac

SEQ ID NO: 478872 - DNA, 83 bp, Homo sapiens
cttgaacttctccggacagaggaacatctgtaccctctcaacatgtggacgagtgctcactagcagaaaaaacctgtgtgagg

SEQ ID NO: 478873 - DNA, 100 bp, Homo sapiens
tggatattttatccaacaatgttccttctgatgatgtggatgctgaaaacgccattcaacagatgggtggccagtggcttggtggaagacaaatcagaac

SEQ ID NO: 478874 - DNA, 98 bp, Homo sapiens
cacggagtgtctccaagccagccagtgcactttgcttatcccggagagatgtgttttacgagaaaccaacatggcttcccgctatgaaaaagaattct

SEQ ID NO: 478875 - DNA, 83 bp, Homo sapiens
tggacagccagatccggagtaagcaaaactggagtcttctgcctgcgcaggtagcaatgtacagataaagagtactttaacgc

SEQ ID NO: 478876 - DNA, 90 bp, Homo sapiens
tcacccactctggtctgtggcgggtgtgctgcatcgaagtatgcagaccctgtggctgacctcctagaccgctggggtgtgttccgggcc

SEQ ID NO: 478877 - DNA, 98 bp, Homo sapiens
tgtcgagatcacaagttgcatgttgactttaggcttcccaagctcttccttcagtcccacgactacagtctgtattccttggatgtggaattcatcaa

SEQ ID NO: 478878 - DNA, 96 bp, Homo sapiens
gtagggtgaacaacccgttcttgcctcaggccagtcgcctccaggccaagagggatccttcacccgtgtctgaggatggcattccctgtggatatg

SEQ ID NO: 478879 - DNA, 100 bp, Homo sapiens
gtgtctcttctaagctgaataaagctgttttggaactgtcaggtacctcaaagcgccagagaaggccggaccaccattgtgatagcacaccgactgtcta

SEQ ID NO: 478880 - DNA, 80 bp, Homo sapiens
tacttgattgtcagtgacaaggcccgagatgcagctgctgtccttgtgtccaggaattcatgatttgttcctgtagctga

SEQ ID NO: 478881 - DNA, 75 bp, Homo sapiens
tcttctgggtcagcaagtgggtggactattcggacaagtacggccttgtgcaggtcagctctgcggacgctcggc

SEQ ID NO: 478882 - DNA, 100 bp, Homo sapiens
gcagagctcaaggactacctgcggttcgccccgggcggcgtcggcgactcgggccccggagaggaggatgaaggagaagatgactaaatagaacactgat

SEQ ID NO: 478883 - DNA, 90 bp, Homo sapiens
ataagaacccagaaacccgacccagtgccgcgcagctgctggagcgcccccctcgcgggcccagctgcaactgcacttgcccgccaaccg

SEQ ID NO: 478884 - DNA, 100 bp, Homo sapiens
tgccgagtacaaggtcattggctcctggactgaccacctgcaccttagatttgacaagtatgcgcccaagctggacagcccctacttccgacattccagc

SEQ ID NO: 478885 - DNA, 100 bp, Homo sapiens
ggacgaaagtttcaaggagtttgggaaaaaccgcgaagtcatggggctctgtcgggaaggtcatctcttggaccagcgggcatcacattctccagcagcc

SEQ ID NO: 478886 - DNA, 50 bp, Homo sapiens
caacccctatcgctccagcgcagatgttttcacctcctgtgagcagtggg

SEQ ID NO: 478887 - DNA, 75 bp, Homo sapiens
tttgaaatcgacacacaaagaatagagttgagcctgtgggacacttcggtacctggagtagaacagaaaaattat

SEQ ID NO: 478888 - DNA, 75 bp, Homo sapiens
gggtgtggcggagcgcgcggtgcatgatccagagacaatggccccgatgggatggagcccgaaggcgtcatcgag

SEQ ID NO: 478889 - DNA, 75 bp, Homo sapiens
ttcctgtacagcctgcagaactgctctgtgtgctccgggatggagcaggtgtgcagagggtgagaacccagctct

SEQ ID NO: 478890 - DNA, 99 bp, Homo sapiens
gaggaagtgggaaatctgtggctggagctcagcaggcgtccgacctccgatcatgaacgggcccctgcacccgcggcccctggtggcattgctggatgg

SEQ ID NO: 478891 - DNA, 97 bp, Homo sapiens
ggcggcggcggcggcggagtgtaggaagaggcactgctgagggggcgcgaggggaacggaggccagagctgcgatggcctgatatgaaggagtcacg

SEQ ID NO: 478892 - DNA, 101 bp, Homo sapiens
gtggagaggagcagcggttgctgttggaggagaccagatgatgtgcttctgcatcgcactcatgatgagattgtcctcctgcattgcttcctctggcccct

SEQ ID NO: 478893 - DNA, 99 bp, Homo sapiens
gacagactggctcagggaagacatttactatgatggggaaaacaaagtgcatgatgaagtcttcagactgtgtcataaagcatgctggtgtatacagta

SEQ ID NO: 478894 - DNA, 82 bp, Homo sapiens
gagaccgtcctggcgcgatgcgtcaagtacactgaaattcatcctgagatgaggtgtctcaatgcttgtacctactgcaaaa

SEQ ID NO: 478895 - DNA, 75 bp, Homo sapiens
gtgcgaggagtgcctcaaagtctacctgagcgcccagaaataagcgggttttgaaaacaaaaaaaagaaggagtg

SEQ ID NO: 478896 - DNA, 100 bp, Homo sapiens
gcaccccggagcgtctggtggcgttgttggggtttttctatatgagtggagaagacagctgttaccagggaggtcatacaacatttttttaggatgtctg

SEQ ID NO: 478897 - DNA, 100 bp, Homo sapiens
tcgaaaagcagttcaacgagaatgaagccatccaatggatgcaggaaaactgtttgcctgagaatacagatcaacccacagaacaaagcggatttccaag

SEQ ID NO: 478898 - DNA, 80 bp, Homo sapiens
ctgggggttcgcgcccgccgacccgcgccctgctccctctcagcacctgggcggacgaattcggttccctcaaaattata

SEQ ID NO: 478899 - DNA, 100 bp, Homo sapiens
ccgagtggaagtggttcatcgagcagaggctgctcatgttctccttcgtcaacgaccgacttcacagagaatgcagttgtcttgacttcaggtctgtctg

SEQ ID NO: 478900 - DNA, 80 bp, Homo sapiens
ggagagaagcagcggatcagcagagcgaatgaatttccctgtttgccaaagcaagtggcttggattctggccacaagcaa

SEQ ID NO: 478901 - DNA, 100 bp, Homo sapiens
ttgttctcagctacttgggactcctctctcaagagaagctgcaagagcaacatctttcctcaccccaaggatatgtgatggcgtccagtttggagctggg

SEQ ID NO: 478902 - DNA, 75 bp, Homo sapiens
cagattctaactccaatggcccaaaaattcgtattttacatggagaagtgaacaaagtgaaactggatcagaaaa

SEQ ID NO: 478903 - DNA, 103 bp, Homo sapiens
aacgaaggtgaagccacggaagataagcgagttctatgagcctgaggctttaatgatggaggaagaagggatggtgattgttggtctgctggtgggactcaat

SEQ ID NO: 478904 - DNA, 98 bp, Homo sapiens
gggatgaagtagttttaattgactcgagttgtcttttagaaacactagaaacatatctgcgaaaacacaggtggtttcctagaaacatgattgtttat

SEQ ID NO: 478905 - DNA, 100 bp, Homo sapiens
ctcgctcggctgcgggaaatcgggctgaagcgactgagtccgcgatggaggccggctgttcggacggaagcatcaggctgcaccagctgagctccgcgtt

SEQ ID NO: 478906 - DNA, 100 bp, Homo sapiens
ctcagcaccttggcgaagccttgggtttctttcttaaaggactgatttttagaactccacatttgagacctcctgacagtgagtgagactgccaatgagc

SEQ ID NO: 478907 - DNA, 100 bp, Homo sapiens
cctgaggaggcgagctagccgggagttacaccgccaccgccagctcaacatcctggtggatacaggcagcagtaactttgcagtgggtgctgccccccac

SEQ ID NO: 478908 - DNA, 73 bp, Homo sapiens
agcaggcagctggtcaccgggtgtgctgacggccagagctccttaataagcatttatagtcagtttttggcag

SEQ ID NO: 478909 - DNA, 83 bp, Homo sapiens
ggtgaaggttctggatgaagcaacattaaaggaccaacttggaggccttgcagaagaagctggaggagctagagcttgatgag

SEQ ID NO: 478910 - DNA, 100 bp, Homo sapiens
ccagctgggcctgacagagaaggctcactcaaggatcagttggctttagcaattggttaaatgggccagggaaaactatcaccataacattggctcacca

SEQ ID NO: 478911 - DNA, 100 bp, Homo sapiens
agcaagcatgcagcttactgcttgaaaggcgaccgtggcaaaattggggcctctccctcgtgttcttgctgatattaccaagtcattgactaatcctacg

SEQ ID NO: 478912 - DNA, 51 bp, Homo sapiens
ggtttaaaacggtcactgaaggaggaatttgtaagtgtctgggttcgagat

SEQ ID NO: 478913 - DNA, 75 bp, Homo sapiens
cgactccgcacggcactgccgacctccgggagcagcgcaggttctgcggggagtgtctccagccctgcctgcagg

SEQ ID NO: 478914 - DNA, 75 bp, Homo sapiens
agggcacattccttttcacctcagagtcggtcggggaaggccacccagatcatgtttgagaccttcaacacccca

SEQ ID NO: 478915 - DNA, 80 bp, Homo sapiens
gatttggccaccaaactcctggacagttggaaagacctaaaggctgccagagctgctgagggggagagcagacagaagtt

SEQ ID NO: 478916 - DNA, 75 bp, Homo sapiens
ttttgcctttgttgattaactggacaaattcagttatagctgaggtggtaccagtttaagaagtgagaacttctt

SEQ ID NO: 478917 - DNA, 74 bp, Homo sapiens
agtgatggggagctgggatccagatactcctccgggtattcatctgcagaggctggaggcaaagctggaaagga

SEQ ID NO: 478918 - DNA, 50 bp, Homo sapiens
gtgatgcttaagctggtggagaaactcggaatcattaaccaatggcaaca

SEQ ID NO: 478919 - DNA, 74 bp, Homo sapiens
gcttggagcacttcctattccactggattgggaaagaccatggcaggtatccgctgatcattgacccctctgga

SEQ ID NO: 478920 - DNA, 75 bp, Homo sapiens
atggcgggtgaaattacagagaccggggaactctactcttcctacgtctccattttgtcagcaatggagctcatc

SEQ ID NO: 478921 - DNA, 75 bp, Homo sapiens
cgtgaatcattcctgcagatgaaaaagtgtgacttggcagctggttagaaatctgtgctacatggtgacaaggcg

SEQ ID NO: 478922 - DNA, 100 bp, Homo sapiens
agcgagttccaacttggtctgattttccaagctggcttctcggacaaactatttagtggaaaaggcttacattttcagccatcagttttagattttggaa

SEQ ID NO: 478923 - DNA, 126 bp, Homo sapiens
ccgatagctatgttctgctggagcattctgtgaagaaggcagtacattttgggttaccggatatgctgcaggctgctagtcattatcgccaaaatagaaactctttgtatagaagagaagaatcac

SEQ ID NO: 478924 - DNA, 100 bp, Homo sapiens
gctccgtccccaggatcttcccggttcagggacctggcgatttctgagtgttccgggctgggtataagtaagcaagaagagggcctgggagaagagtctg

SEQ ID NO: 478925 - DNA, 98 bp, Homo sapiens
cggaaagaagaaatccgaggaccggcgacgcctagaacaggcaaccactgagaaaacggaaccgaatagtcaagaggacaagaatgatggtggaaaat

SEQ ID NO: 478926 - DNA, 74 bp, Homo sapiens
agacagaacagttaatcctcaatttaagcctgatctaacccctagaaacagatcggacagctggcttttaaagg

SEQ ID NO: 478927 - DNA, 99 bp, Homo sapiens
cgaagccccctgcaggaactctacaacccaatccagcatttaaatcaaacggtattgagatggattgggttatgaaacataatggtccaaatgacgcta

SEQ ID NO: 478928 - DNA, 98 bp, Homo sapiens
atcagagacctcattggctgtctccagaagctgctgtttggaaaggtggcaaaggatagcagcagccatggccctacgctaccctatggccgtgggcc

SEQ ID NO: 478929 - DNA, 96 bp, Homo sapiens
gtttacttctcctccttctttgttcaagactgggcttccaccgagcagattggctcaagctacccaggaaagaacggatctttatgcaaagcaggg

SEQ ID NO: 478930 - DNA, 60 bp, Homo sapiens
ttacaagccagcctctgggaccgagttccaaagaactactggttcagattttagctcttc

SEQ ID NO: 478931 - DNA, 97 bp, Homo sapiens
ctaaggccgcgttggggtgagaccctcacttcatccggaaacttccattttagaagaatacagtatcaattggactcagaagctgggagctggaatt

SEQ ID NO: 478932 - DNA, 101 bp, Homo sapiens
gccggagatggaaacaggaaagcctgttgttttgtcgtcccaggtgaacttctagatccatgtggttatatcagtcctgaatctccagttgtacaacttca

SEQ ID NO: 478933 - DNA, 100 bp, Homo sapiens
tgtccctgctggaggagcgcttccggctacgactaatagactggggtttggctgagttttatcatcctggccaagaatataatgtccgagttgcttcccg

SEQ ID NO: 478934 - DNA, 98 bp, Homo sapiens
aaaattcggccagggttctcgctcttggctattgagggcacctacattgacaagaaatgccccttcactggtaatgtgtccattcgagggcggatcct

SEQ ID NO: 478935 - DNA, 75 bp, Homo sapiens
tagcacttgccttccccatattattcaggttgtagatatttccggtatattttaaagcaagatcaccaaatctta

SEQ ID NO: 478936 - DNA, 100 bp, Homo sapiens
gcgcatcaaccggatcatgggctttcacaggcccgggagcggcgcgggtctggagcccccaactcccttgacagtgtacgctggagcaggttccagggtg

SEQ ID NO: 478937 - DNA, 75 bp, Homo sapiens
cgcagtaccaccttccagagattttgcagatggcgtgtacctggttctgctcatgggccttctggaagactactt

SEQ ID NO: 478938 - DNA, 100 bp, Homo sapiens
ccaggttgcatttcctgaaggggaagagcaagatgcagtcagtggagggtcaacatatttcactggcacctattcacaagcttgaagaagctctgtatga

SEQ ID NO: 478939 - DNA, 97 bp, Homo sapiens
tacagccagtcttctatgtttccacatcggtcagaaaaagatgcactggagatattattgctgtcatgataacagaattgaggggtaaggatatttt

SEQ ID NO: 478940 - DNA, 83 bp, Homo sapiens
cagtgcgcaggaagtggggcagctgcgggcgctgcgtgccgtgttccggagccagcagcagcaactgaccaaccacatccggg

SEQ ID NO: 478941 - DNA, 75 bp, Homo sapiens
ctgagcctgacgcgggccgcgcggcgtttgctgccaattgatggggcaaatgatctcttttttcagccacctcca

SEQ ID NO: 478942 - DNA, 99 bp, Homo sapiens
cctactggctgggaagaagcatatacttttgaaggtgcaagatactatataaagtttaaggagttcatgagtaaacatgttcacttaatgtgttaccgg

SEQ ID NO: 478943 - DNA, 100 bp, Homo sapiens
ccgagacctgccgtgggaccccagagattcccagatgaaacaggcgcctatttaatcgacagagaccccacctactttgggcctgtgctgaactacctga

SEQ ID NO: 478944 - DNA, 100 bp, Homo sapiens
agatcaccgtgacatccgaggtgcctttctccaaaagacaacacaggcagttctacataccggccaccccctcggacccgggaggtgctgatcaacgggc

SEQ ID NO: 478945 - DNA, 100 bp, Homo sapiens
cacggacgagatgatcaaacgcctgaagatcttggcatatacagaagggctgcatggaaaatggctgttcacagagatacgatcaatcttttctcgtcgt

SEQ ID NO: 478946 - DNA, 90 bp, Homo sapiens
aaccagggtgggggctacggaggtggttatgacaactatggaggaggctattgagggcacctacattgacaagaaatgccccttcactgg

SEQ ID NO: 478947 - DNA, 50 bp, Homo sapiens
ttccagagcgtgaagatcaagatcgggcgtgatggtgggcatgggtcaga

SEQ ID NO: 478948 - DNA, 98 bp, Homo sapiens
ttgcctccgctgtcgcccccgcagcaccgctactcggagggcgagcggacctccctggagaagaacaccttccaccatgaccacctcagcaagttccc

SEQ ID NO: 478949 - DNA, 101 bp, Homo sapiens
gaaattcgactatggcaacaagtacaagcggcgggtgccccggaaaaagcttgtggtgaaggggggcaaaaaaaagaagcaagttctgaagttcactcttg

SEQ ID NO: 478950 - DNA, 100 bp, Homo sapiens
attactatgctagagtggaaggccgagagatcatttctaatttggcaaaggctgctggtggtctacccttggacccagaggttctttgagtcctttgggg

SEQ ID NO: 478951 - DNA, 88 bp, Homo sapiens
cgccggcgacggaccagcgacccaagcgccgcggttaaccacgtctcgtccacgacctccctagggagtgaggattctttggacacca

SEQ ID NO: 478952 - DNA, 75 bp, Homo sapiens
cgctgctgctcgttcgagtcgcaggattttttatcaagcagaaatgcatcgaacaacgagaatcaagatcactga

SEQ ID NO: 478953 - DNA, 75 bp, Homo sapiens
gttttgcctatccaatgcctttctggttcctgacggagacttcgcccttcatgtggtccaacctgggcattggcc

SEQ ID NO: 478954 - DNA, 100 bp, Homo sapiens
cgtgaccgagagcgtgaccgagagcgcgaatatcgtcatcgttagaaggatggaggatgaagctgtcctggacagaggggcttccttcctcaagcatgtg

SEQ ID NO: 478955 - DNA, 100 bp, Homo sapiens
gttcttcacccctacaccttggaggctatatccgacagtgccgcaagcacacaggaatgttcaccgttgcgcagctagccactatttttggaaacattga

SEQ ID NO: 478956 - DNA, 74 bp, Homo sapiens
ctccagcccatgtttctgaagggttaccgctgacaaggagtataatgtctcaggaaggcgattatgggaggtgg

SEQ ID NO: 478957 - DNA, 48 bp, Homo sapiens
gactgtgttgatatggcagaagattctggcaattaaccgtggagaaaa

SEQ ID NO: 478958 - DNA, 90 bp, Homo sapiens
ggtcctttatatagaagggagagtagttggattggatgctgctggcaagacaaccattctgtataaactgaagttaggggagatagtcac

SEQ ID NO: 478959 - DNA, 97 bp, Homo sapiens
catctcagatctggagcatcggctgcaggggtcagtgatggagctgcttcaggtttaccaaagatgcaggtcattaggaactattctggaacaccac

SEQ ID NO: 478960 - DNA, 102 bp, Homo sapiens
accctggagcctcagttggaagcagccgatccagcctgcggagcctgtggggcagaacatggtttcattggatattcacccgaactgctacagaacaacacg

SEQ ID NO: 478961 - DNA, 100 bp, Homo sapiens
ctctgtgactgaggattacccgctccatccatccaagatagaaactcagctcgtggtgggggcttgctggcaaggtgagacgtggtcttgtaacacagtg

SEQ ID NO: 478962 - DNA, 108 bp, Homo sapiens
gctggaaccctggggactacgacgtccctcaaaccttgcttctaggagataaaaaggttgtgaccgagattcccgacgagagagactgaggggaagagaggaaggagg

SEQ ID NO: 478963 - DNA, 78 bp, Homo sapiens
aggcgaggtggctcctgacgctaagaggtatctcaggagattacatttcagcttgaaaaagggtcggtggaatttaaa

SEQ ID NO: 478964 - DNA, 90 bp, Homo sapiens
gcatcccaggacctaccagaatctgttttctggatatgccgcagaaggatccgtgccagaagcaagcctgtgagatacagaaatgtttac

SEQ ID NO: 478965 - DNA, 100 bp, Homo sapiens
cctccttcttcctcaactatctcgctgacacgcaggggcataaggaaatggtggcaggcacttcctcctaacaagaaggaagtagttaaagaaaatataa

SEQ ID NO: 478966 - DNA, 97 bp, Homo sapiens
acattctcaggtggagacctgccatccggctgtccttagagcaagccctgcctcctgagccaaaggaagaaaatgctgagcctgtgagcaaactgcg

SEQ ID NO: 478967 - DNA, 50 bp, Homo sapiens
cttttggagaaaggattaagaaatttctatattcagatgaagttcaaatt

SEQ ID NO: 478968 - DNA, 100 bp, Homo sapiens
ggcgggtctacccgcgcggccgcggcggcggagaagcagctcgccagccagcagcccgccagccgccgggaggactcacaccacccggcaagaactgctc

SEQ ID NO: 478969 - DNA, 100 bp, Homo sapiens
gatgcaccttgtcttacaaaacatttacaaggcaccatcatgggagcagcattgctggaggactggtgaagggggctttgtctgttgctgcctctgcata

SEQ ID NO: 478970 - DNA, 101 bp, Homo sapiens
cagctcatcatgatggacttggagctgccgccgccgggactcccgtcccagcagctgctcagatggaagataaaaagccctttatcctgtcttccatgagg

SEQ ID NO: 478971 - DNA, 99 bp, Homo sapiens
gggagaggccagagagagaagcggctttcgggaaggaaagtgtgatctagactcgctgattcttgagaagagtcaaaactggagctctcaaaaaatgga

SEQ ID NO: 478972 - DNA, 80 bp, Homo sapiens
cctgtgctctccattactggaacagattcctctgtggaagccagggagaagaggaggattctcaaagttggattggtgga

SEQ ID NO: 478973 - DNA, 82 bp, Homo sapiens
agacagaggtgtgctgacgacctgctacaacagaaggggatatgagactttctactcggaatatcctgagtgttgcgtggat

SEQ ID NO: 478974 - DNA, 100 bp, Homo sapiens
tggctacacaggaaccctggattgcttgttacagtaacaaatgtggcaattattttggatctatcacctgtcatcataactggcttctgcttgtcatcca

SEQ ID NO: 478975 - DNA, 152 bp, Homo sapiens
tcggcctcccaaagttctgggattacaagtgtgagccactgccactggctgaaaaagtcttattgtggcataattgccattggaaaagaagtttgttcgagtttcaggagaagcaactattggacatgtagaaaaattcctcagaagaaaaa

SEQ ID NO: 478976 - DNA, 74 bp, Homo sapiens
cgagtcggaggaggacgaggacttggaagtgccggtggtggtgtgcacattgagccccggtatagacagttccc

SEQ ID NO: 478977 - DNA, 100 bp, Homo sapiens
tagagggtttgagtccgcatcgccacagctgaaggctgcgagggactaagagcagagctctttggtgtaacgggaaactgcgctgcctgtagtaagctca

SEQ ID NO: 478978 - DNA, 75 bp, Homo sapiens
acacagaccttactccccttagaacagctcaccccagaggaagaggagaagcgaagggtgcgccgggaacgaaat

SEQ ID NO: 478979 - DNA, 100 bp, Homo sapiens
gcgggacagcctcagccaggttctccagagatgctttgaagacaagattcccaaaaggagattctctgagatgcaaaatgaaagacgagaacaggcacag

SEQ ID NO: 478980 - DNA, 82 bp, Homo sapiens
tgcaacacgagcagtgtcaagtgccagccctcccgcgtccaccaccgcagcgtcaagcctgacatttaccccggtaactgct

SEQ ID NO: 478981 - DNA, 100 bp, Homo sapiens
aaactcatcgaacagctggagcaaggcgacgaaccttggagagaggagaacgaacatcttctggacctttgtccaggtgctgcttacgctcatgcagaag

SEQ ID NO: 478982 - DNA, 75 bp, Homo sapiens
ctcttttccagtataagtatttggctcttaatatgcattatgtagattggtggaacgagaatgcctacacgcagc

SEQ ID NO: 478983 - DNA, 111 bp, Homo sapiens
gcccagttggcccagaggatctcttctaacatccagaagatcacacagtgttgatcagttcgacagcttagacaagcatacacaatggggaattgacttcttggaaagata

SEQ ID NO: 478984 - DNA, 100 bp, Homo sapiens
cattaactggaaatgcagccactgaagaaggccaaatcctacatccagtccctgccacagacccccaggaaggatttcactcagctgttcccacgggcca

SEQ ID NO: 478985 - DNA, 90 bp, Homo sapiens
cgaggttcgagtgttgcagagcctgcggggcaagatctggttggatgactgcctgcaacaatatgtccacaagtttgaacgagagaagat

SEQ ID NO: 478986 - DNA, 83 bp, Homo sapiens
ggggactacgacgtccctcaaaccttgcttctaggagataaaaagaaagaagcttccggttctgaggtcctggaggtgccatt

SEQ ID NO: 478987 - DNA, 96 bp, Homo sapiens
gtgcggtaacaccgttcacagagctagccggacgtcctccgactcaaggttgaaatcacaaagattagacacctttttagataggtgttcttcagc

SEQ ID NO: 478988 - DNA, 95 bp, Homo sapiens
gaaggttaagctggctgtcctgaaatattataaggtggatactttaatactgataagccacaccccaggggtgaaattcttattgggggccaaag

SEQ ID NO: 478989 - DNA, 100 bp, Homo sapiens
ggacgccgtgccgtgggcctggggtcgggggagcagcagaccgggaagcaccggccaattcctgtccccccagcagcatggcatcgtgtgctgaaccctc

SEQ ID NO: 478990 - DNA, 74 bp, Homo sapiens
cagaagccgagttcaacatcctcctggccaccgactcctacaagctgcagacattcaatactgcctcaccttgt

SEQ ID NO: 478991 - DNA, 100 bp, Homo sapiens
aacaaaaagaaagctgcgttaatgtttgcaaatgcagaggaagaatttttctatgagataatgatctacgtactacttcgacactgtctttgagtgcaga

SEQ ID NO: 478992 - DNA, 98 bp, Homo sapiens
aaacatggcggcggcgggtgttgtgagcgggaagatgaccgcacctcgagcaggagtggggatgccacgtctgcccccagcgcccggccctctgtcca

SEQ ID NO: 478993 - DNA, 75 bp, Homo sapiens
tcccgaagctctgtttttgcactgagggcctttaatgtggaactggctcagttggagctcagctgcatggaaggc

SEQ ID NO: 478994 - DNA, 98 bp, Homo sapiens
tccagaggctcacccccagctacaacgccgacatccttctctcacatctccactacctcagagagaatgtggaagatgtcaagtttgtgatcaactat

SEQ ID NO: 478995 - DNA, 51 bp, Homo sapiens
tggtcttgaaacacaaatggtttttgaaccttcaacaactagtactgcttc

SEQ ID NO: 478996 - DNA, 76 bp, Homo sapiens
tagtttctgcatttagtgagataagtattatcagaaaatccacccagcttcaccattactgtgacgtctgaggctg

SEQ ID NO: 478997 - DNA, 75 bp, Homo sapiens
gataaccaacaagatggggaagaaaaggattgagaactttaagagtggtgtgcttgaaattttgacaaacttggc

SEQ ID NO: 478998 - DNA, 74 bp, Homo sapiens
gtgacctgactgatgccttcgtggagtatcaccttttgccatgatagcatttctttcattggacagttccttac

SEQ ID NO: 478999 - DNA, 74 bp, Homo sapiens
gccgattcctcctccttggtcgccgcgtccttggctggcgtgctgaagaactgaaactggccacccagctgacc

SEQ ID NO: 479000 - DNA, 75 bp, Homo sapiens
tcttgaaaatgaagaacatagtcaaataattatccattgtacaccttcaacagagggcccaggtcagcggtcaag

SEQ ID NO: 479001 - DNA, 100 bp, Homo sapiens
cgcccagctagccatcttctaattttcattccttcaaaggaaaatatatgcagatgatgaacattcttaagccaattgcctttgatgttattcatttcat

SEQ ID NO: 479002 - DNA, 90 bp, Homo sapiens
gagttcctcctggggaacccgttcagcacaccagtggggcagtgcctcgaaggccaatgatgaggccaatcagagtgatacaagtgtctc

SEQ ID NO: 479003 - DNA, 125 bp, Homo sapiens
gccgagcacctctccgcgcacatcactcccgagtggaggaagcaatacatccagtatgaggcccaagtctgttttggtggtctgagaggaaaaaagatgagcttctaaagttttgggaaaattat

SEQ ID NO: 479004 - DNA, 100 bp, Homo sapiens
aggcgcggcgccgctgcacacacgcacacgctctagccggcccggtccttggactgaaagaatgcaccaggggctcggcagtgtggtgccagaatgtgaa

SEQ ID NO: 479005 - DNA, 97 bp, Homo sapiens
attttggaaaatgtgataaaaacaaggtggaagattcttccaaggaaccagtgcgaagcatgttcaaaagaaagctgcagaatggaaaatcaagata

SEQ ID NO: 479006 - DNA, 87 bp, Homo sapiens
tgttggataaatatatctatggagcacaggggccacctacagatgctcctgcagtggacacagcagaacaagtctatatctcttccc

SEQ ID NO: 479007 - DNA, 100 bp, Homo sapiens
cagatggtgcaatgttcaaagtactcaagatgaatttgagtgacagccccaatgctgttcatgaggtggagaagtggctgccccggctgcatgctcttgt

SEQ ID NO: 479008 - DNA, 51 bp, Homo sapiens
cctccaacaacatccgcgagatcgagagtcccaagagtggcccaaaagaga

SEQ ID NO: 479009 - DNA, 120 bp, Homo sapiens
cctgaatccatcattgcagctgcatgttcaagaagtggccggagagttctgcatgttgattcgtacaggacacaatatccaatcctaggcctcctatatgatgactacgaatatatacca

SEQ ID NO: 479010 - DNA, 89 bp, Homo sapiens
gtactaatttgtctctgattcagtgtccaagagttcagtttcaggtggtaagttttcttcatacagttcttttgtgtgacaaactggat

SEQ ID NO: 479011 - DNA, 50 bp, Homo sapiens
gcgtgggactccatccagtcatttgcaccacctgccctggtcagctccag

SEQ ID NO: 479012 - DNA, 85 bp, Homo sapiens
aagtggaattttggagatattcaaagacttaattcagtgcacaaatgagatgaatgtgaacatcccacagttggcagacagttta

SEQ ID NO: 479013 - DNA, 82 bp, Homo sapiens
gccggttgctaagacttggcgaagcgctgcgctcgcgcccggatccctcagggtatctcccagagccccagctggtgtggcc

SEQ ID NO: 479014 - DNA, 100 bp, Homo sapiens
aaggacgtgtttgcttccccttccaccatgattacactgaccactactttctgcgctatgctgtgctgccgcgggaggtggtctgcaccgaaaacctcac

SEQ ID NO: 479015 - DNA, 90 bp, Homo sapiens
cagttttttaagaagggacaaaagtctggccttaccaaggcagtgaaggagagtacaattacattgcagcaggcagagtatgaatttctg

SEQ ID NO: 479016 - DNA, 75 bp, Homo sapiens
aatttgatgttgccaacaacggctcttctcaacttcgagcaaatgctctcatcaaaagaggcagcatgtacatgc

SEQ ID NO: 479017 - DNA, 90 bp, Homo sapiens
cggcggcggatcccggagagccccggagtgagcggagtagcgagtcggcaacccggagatgccttcaattaagttgcagagttctgatgg

SEQ ID NO: 479018 - DNA, 98 bp, Homo sapiens
agagatcgctcccactcaggtcacaggaatagccaggtctggctgggtcggcacaacctgtttgagcctgaagacacaggccagagggtccctgtcag

SEQ ID NO: 479019 - DNA, 75 bp, Homo sapiens
atggcccatcaccaattgcaactgcttcaggacaaaggtttactcctggcttgggggcattaggaagcactggag

SEQ ID NO: 479020 - DNA, 131 bp, Homo sapiens
cttagccatgtcgtccttgatcagaagggtgatcagcaccgcgaaagccccaggggccattggaccctacagaccactctgcttcatttttgggagaaaacttctcacactatggcagccatccatgagag

SEQ ID NO: 479021 - DNA, 75 bp, Homo sapiens
aggccgagggcttcgtggatgccctgcaccgggtccggcagctctacgtctcctccgagagccgcttcaacaccc

SEQ ID NO: 479022 - DNA, 90 bp, Homo sapiens
ttgctcggccgatgaagtgcagaggtttttttctgggtaagatgatcatgcaggataaactggagaaggagcggaatgatgctaagaacg

SEQ ID NO: 479023 - DNA, 82 bp, Homo sapiens
ttttccgcccgcttcgatcgcctcgcgccggctgctctttccgggccatgacgctgatggagtacctcatcaagaccggctc

SEQ ID NO: 479024 - DNA, 100 bp, Homo sapiens
ggatttatgctcactgcacaaaccaccacaacatttgcaggaccagggatgctgtgctgctctcccatgagccagtcaccgagtcggtctgctgcagccc

SEQ ID NO: 479025 - DNA, 74 bp, Homo sapiens
ctcccgagtggctgggattacagatgtccggtctgtgctacgacagcaaaatgttccaggtgcatcaggtgctc

SEQ ID NO: 479026 - DNA, 100 bp, Homo sapiens
gggtggaggtggtgcctctggcagtgacgaggacgaagtgtccgaggaagatgagaatgtgcctactgctcctgatcctccaagtcaacatttacgtggg

SEQ ID NO: 479027 - DNA, 50 bp, Homo sapiens
ctccagagtagctggtattacaggcctgttaggcctgttacattaaatat

SEQ ID NO: 479028 - DNA, 100 bp, Homo sapiens
aaatgatggcctttttggaaaagagtcaggaacaagaaaatcatgctacattagacgaagttatacggaagcgtctcctcattgatggagatggtgctgg

SEQ ID NO: 479029 - DNA, 101 bp, Homo sapiens
ggctcgctccctccctccctccctccgacgctggatcgcttacacctgagacgaactacagaacagcacgtaccagaggtggaagtccaagtcaaacgcag

SEQ ID NO: 479030 - DNA, 100 bp, Homo sapiens
caagaactgcagcattgcagccgccaagacgagcctttgcactggcgatgccatctgctgcctggatgtcttcctgctggctggtcccgttgcatggtag

SEQ ID NO: 479031 - DNA, 82 bp, Homo sapiens
aggacggggcgccggcgccgccgcccccgggctcgcggcctgcaggatcaagtcttccataccagggaccaggccaaaacca

SEQ ID NO: 479032 - DNA, 90 bp, Homo sapiens
tgctgaccgctcaagagattctacatcagtttggtttcactcagaccgtctccagagaatacagagggcaaagatggatccaaagtaact

SEQ ID NO: 479033 - DNA, 87 bp, Homo sapiens
gagcgtcagttcaggtgctgaacaagcggcagcgcacggctgtagactgtgctgaacagactctgtttgctggctacacggacaacc

SEQ ID NO: 479034 - DNA, 83 bp, Homo sapiens
gtgccgaggagcgggaagagttgctgggtcctattttgtaacggattatgatccaaccattgaagattcttacacaaagcagt

SEQ ID NO: 479035 - DNA, 90 bp, Homo sapiens
gctgctccttgcagccctggctgtggctacagggccagtaaagatgacggcgccttgaggtaagctacaggcaacaccacttccgcgttt

SEQ ID NO: 479036 - DNA, 58 bp, Homo sapiens
cttggggatcctctgtacgcccgttcactggcactcaggggcccagtgcattacctgt

SEQ ID NO: 479037 - DNA, 75 bp, Homo sapiens
tggtgaataaatcttctcagttcctggctcccaaggacccttcctggaaggacacagttctgggatttcggaagc

SEQ ID NO: 479038 - DNA, 98 bp, Homo sapiens
cagacacgaaaatttggaatgggatggttggagaacttgtatatgggaatgtgacagtgatgataacatgggtgccaaaaatacttcaataggagaag

SEQ ID NO: 479039 - DNA, 75 bp, Homo sapiens
cccgcctccctggccggggcgcagttcggaggttcaggtccgcgggagagctgtggggcttggtgagtgtttcgt

SEQ ID NO: 479040 - DNA, 82 bp, Homo sapiens
cccgtacctgctggggccggacaagaacctgaccgagagggagacaatgcagatcttcgtgaagactctgactggtaagacc

SEQ ID NO: 479041 - DNA, 82 bp, Homo sapiens
gaggatgctggaggcacagctggagcggcgagctctgcaggtgtccctggccagtgtccttccacctgtccacaagcatggg

SEQ ID NO: 479042 - DNA, 90 bp, Homo sapiens
gaaatcctcttgaactcttacaccacaccttcaaagctctttcgacgtgtagcagcagctttgccgggaatggaaagcacacaggacaga

SEQ ID NO: 479043 - DNA, 97 bp, Homo sapiens
agaagctggtgcccttggtgcggaccgtgtgcgtccgaagcccgaggcagaggaaccggctcccaggtgactctgacatcattagaagcatgccaga

SEQ ID NO: 479044 - DNA, 110 bp, Homo sapiens
attaacaatggcgaaatgcaggcgaaatgtggaaaatttcctagaagcttgcagaaaaattggtgtacctcaggttatcaatactctggctgaccatcatcatcgtggga

SEQ ID NO: 479045 - DNA, 100 bp, Homo sapiens
attcgttttcaggagcatctccagatacactgcctctaggactgggacagatagccactgagtacctgcttcaaatcaccctgcacgttttctctttgga

SEQ ID NO: 479046 - DNA, 76 bp, Homo sapiens
tggcaatatcctattccccagaccgaggcaaggattactgcaaagtaatatttccatatgaggcacagaatgatga

SEQ ID NO: 479047 - DNA, 100 bp, Homo sapiens
aaagattgcaaggtgaataaagaagtggagcgtgtcctgaaggagttccaccaggccgggaagcccatcggagacacctatggctgccgatgaaggctca

SEQ ID NO: 479048 - DNA, 46 bp, Homo sapiens
catcgtcgcggttctgctgccggtgtgggcagaagaaaaagctagt

SEQ ID NO: 479049 - DNA, 109 bp, Homo sapiens
gatcaagaagcacgtgcctgaagacttctggccgccgcagcccaagctgtacaagggtgaatcctggttctttcgttggctacctggaaagaaaaagacagaagcttat

SEQ ID NO: 479050 - DNA, 87 bp, Homo sapiens
ggatcaatccagatggcagccagtcagtggtggagctattgcagtacaaggcagacatcaatgcagtgaatgaacacgggaatgtgc

SEQ ID NO: 479051 - DNA, 77 bp, Homo sapiens
gagccctggcccagtggaagctcgtgcctgaggaacatggaggccacgctaatgtagagatggggtttcgccgtgtt

SEQ ID NO: 479052 - DNA, 92 bp, Homo sapiens
gggcagaggaaaatgcaagaagactgatggagcaggcttgcaatattaaatttggtgccctggttgtcagatgttggaaagcagtaggacgg

SEQ ID NO: 479053 - DNA, 97 bp, Homo sapiens
ctatgatttatgaaggacaggcacagctgtggaccgatttgcagtacagggagaaagaggtgaatgaaaactttgccattgatttgatagcagagca

SEQ ID NO: 479054 - DNA, 100 bp, Homo sapiens
gaaggaacgaggcaaggagctaaagcagcgtgcgttcagccctggggtataatttggcttcctgagattctgccttagcaagaaaggagtgggaaatacc

SEQ ID NO: 479055 - DNA, 82 bp, Homo sapiens
cgagcggaggaggaggaggaggcgaggaggagagactgctgaggccaccatggagcagtgtgcgtgcgtggagagagagctg

SEQ ID NO: 479056 - DNA, 100 bp, Homo sapiens
ttggacaaaattgagaagaactcataaacttggcttcctcgcttctgctcctcagtggcagctagactgtcttgcttgcttgctgaagttaatatgccag

SEQ ID NO: 479057 - DNA, 100 bp, Homo sapiens
agccctggactgtgaagagtgaggagaccatagctgcacagccagagtactgggatttaatgaatttgtctgaaaaacatgataagataccagaaatctg

SEQ ID NO: 479058 - DNA, 50 bp, Homo sapiens
gcggacatgtgcaggatgtccttcaaggggtgagcccctccagactccga

SEQ ID NO: 479059 - DNA, 90 bp, Homo sapiens
ctgttgtgaacttgtaccaagaggtgatgaagcacgcaggttgttcccacagcctggaagtctcttccctgacttgttccacgatcaacc

SEQ ID NO: 479060 - DNA, 98 bp, Homo sapiens
tctggtgagacatttttcttccttctgtcacatcacacccaatggtacccttgggcgagactgtacagtacttcccaaaccactgtcgacagcggtga

SEQ ID NO: 479061 - DNA, 96 bp, Homo sapiens
tcacctggagaagggatggaaatacttcaacaaggaccgagtctcctgccattccgagcaggcctggtatgggtaatggtgtgaaggaaggcccgg

SEQ ID NO: 479062 - DNA, 90 bp, Homo sapiens
ggcggccttgggccggtggacgtacccagcgctcggtgcaggaactgcagggccagcggcaggaggaggccatgaaggccgagaaatggc

SEQ ID NO: 479063 - DNA, 75 bp, Homo sapiens
gttactcgcacaaccccagttaagctgcgctccgggagatcaccacgcttattaatcataaagataataccaaaa

SEQ ID NO: 479064 - DNA, 75 bp, Homo sapiens
ctcggaatattacagcggcgaccagtcaggagaatgacatcttcctgggctgggaaaaaggagcttataagaaat

SEQ ID NO: 479065 - DNA, 90 bp, Homo sapiens
ataatgtgaggcgacaagcaacaacaatcatagctggaaatgcctacagtgtctgtattagaatatgctttgcctcagaggcccccccag

SEQ ID NO: 479066 - DNA, 51 bp, Homo sapiens
caccgctctgaaggggatctgcagaggtactccaaagattcaggtttactc

SEQ ID NO: 479067 - DNA, 75 bp, Homo sapiens
gaccccgtacctgctggggccggacaagaacctgaccgagagggagatttgcttgtaaatgcatcacgaagaggc

SEQ ID NO: 479068 - DNA, 100 bp, Homo sapiens
cttggttaaaacctgacacttttaacaggcaagtatatcgcgtcaacacagcgacctgacgggacctggcgcaagcagcggagggtgaaagaaggatatg

SEQ ID NO: 479069 - DNA, 74 bp, Homo sapiens
gaatttcctgtgttccctttgccgctcctggagttcactggcctcccccagggaagaacttcactatgcctcgg

SEQ ID NO: 479070 - DNA, 74 bp, Homo sapiens
atattactggcacagatatattggatatgaaactggaagacatcctgctttcaccaacaatcaccagtggttta

SEQ ID NO: 479071 - DNA, 90 bp, Homo sapiens
gcacttggaatagtagcaggcggcggcggcggaacgccaggcagagtgtgaacatggctacgcctcttcattcccgtccatgccgagccc

SEQ ID NO: 479072 - DNA, 100 bp, Homo sapiens
cttttcctccacctaccttcccgacttaacaaacaacagttgcagttactgaaagaacggttccaggccttcctcaatggggaaacccaaattgtagctg

SEQ ID NO: 479073 - DNA, 97 bp, Homo sapiens
aagaattcgctaaatttgaggaagaacgcgccagagcaaaatgggacacattgaaatctggtgaaacagctgccaacattgctagagagctggctga

SEQ ID NO: 479074 - DNA, 88 bp, Homo sapiens
ctgacatggcagtcccgaacacaggatgaacatccgaagacaatgttctccaaagataaggaaacttacatgcttgctgtaactttgg

SEQ ID NO: 479075 - DNA, 82 bp, Homo sapiens
accacaaatacctggctatattgtcgatgattcagtcagagggttttggccaaattgggcgagggcacaaaataaccactta

SEQ ID NO: 479076 - DNA, 100 bp, Homo sapiens
acgtgataaggcactagcagatgtggttggaatccttgctgtgctgaatcctggctgtgtgaccccaagtgtcatggagaaactccagctgggcccagag

SEQ ID NO: 479077 - DNA, 76 bp, Homo sapiens
gacaagctgagcttgccgcacaaaaagctagagagggcattttccctgaaacatatatccatttgaaagaggcaac

SEQ ID NO: 479078 - DNA, 83 bp, Homo sapiens
gtggtcgtggcgaacctggcagctgcgtttgaaatgcttactggtacactccctttccaaggaaaagatcgaaaagaaacaat

SEQ ID NO: 479079 - DNA, 50 bp, Homo sapiens
tatctccgtttcctggatgtgaacgtctcggcgcggaagatggccggcgg

SEQ ID NO: 479080 - DNA, 83 bp, Homo sapiens
tcatctcgctcggctgcgggaaatcgggctgaagcgactgagtccgcgatggagggtaacaagatgctcaactatagtgctcc

SEQ ID NO: 479081 - DNA, 51 bp, Homo sapiens
ggcgttgctggtgcgagtccttctcagagtcaagatctccactgaagttgg

SEQ ID NO: 479082 - DNA, 100 bp, Homo sapiens
atttcagcgtaaactgcagcatgatgttctgaagcttgagcctctaaagagagcaatcactacacttatggctgggattttgcgcttagtagttcaatgg

SEQ ID NO: 479083 - DNA, 87 bp, Homo sapiens
aaatcctcactctgagtacggtctcacagacaacgttgagggtgtccgcaatgttgccagtgtctgtctgcagattggctacccaac

SEQ ID NO: 479084 - DNA, 75 bp, Homo sapiens
caccaagaaggatatcgactcttttgtgcctagtaaagttgctcctggcaagtgtccagagaatggctgggatga

SEQ ID NO: 479085 - DNA, 51 bp, Homo sapiens
gggcagttcgggccggctgtcctggcgcggattggttacaagatagaccat

SEQ ID NO: 479086 - DNA, 98 bp, Homo sapiens
tgcaggctacctcaggggccgtccccaggacactgtccggatcttccctccctgtgtctaaaaagcacggcaagctcattacgttcttacgaacattc

SEQ ID NO: 479087 - DNA, 97 bp, Homo sapiens
cgcgagcacagagcctcgcctttgccgatccgccgcccgtccacacccgccgccagccctccagaatacccatcatatagcccctgaggtggcatgg

SEQ ID NO: 479088 - DNA, 100 bp, Homo sapiens
cgcggacccgcgagtatttctactacgtggaccaccagggccagatgaagactggcccatttgcagagcactccaaccagctgtggaacatcagcgccgt

SEQ ID NO: 479089 - DNA, 98 bp, Homo sapiens
aagcgagggatcctaactctcaaataccccattgaacacggcatcatcaccaactgggatgacatggagaagatctggcaccactctttctacaatga

SEQ ID NO: 479090 - DNA, 83 bp, Homo sapiens
ctgtcttcggtggactccttcggcagtccacccaccgccgccgcctcccagctccaattaaggaacagctatatcctgcttcc

SEQ ID NO: 479091 - DNA, 100 bp, Homo sapiens
tggaaacattgaagagattgcatataatgctgtttcctttacctgggacgtgaatgaagaggcgaaggttccagcaacagatagaaatgctttaagttca

SEQ ID NO: 479092 - DNA, 80 bp, Homo sapiens
agccatgatttaaatatcggcgttaagtgggagattttgataagatctggcgagaacactgtgaggatgaagaaactctt

SEQ ID NO: 479093 - DNA, 100 bp, Homo sapiens
gccaaaagatgaagacattctccaagtgtacaagccagctgccatgttgtgagcacataccacatagctccatggagatgcccatgtgactgtgatgaag

SEQ ID NO: 479094 - DNA, 100 bp, Homo sapiens
gaagctgcagaacatcatttgcgggacaaggtactccaaagattcaggtttactcacgtcatccagcagagaatggaaagtcaaatttcctgaattgcta

SEQ ID NO: 479095 - DNA, 83 bp, Homo sapiens
cacctctacctcctgcgaggcctcccgggctccgggaaaactacactggccaggcaagtgaaccggagcaaacgacttccgat

SEQ ID NO: 479096 - DNA, 100 bp, Homo sapiens
gcatcacctccagccccatttttatcaccttctacatcctggtcttcgccttgatcgtgttctcctgcatctatggtgagggctacagcaatgcccacga

SEQ ID NO: 479097 - DNA, 90 bp, Homo sapiens
cgagtagccagtgaagataatgaatgtcgaatgtgactgactagcagcttcattttgaagcattgagtattctgaaacatttgaagtcat

SEQ ID NO: 479098 - DNA, 98 bp, Homo sapiens
acttcatgcttagatacatgtataacaaggacatggatttgattgacatactttggaggcaagatatagatcttggagtaagtcgagaagtatttgac

SEQ ID NO: 479099 - DNA, 100 bp, Homo sapiens
ttggagaagaatccaatgagtttactaatgactgggaggatctctgggaaagtttagaaaatgctagtggtaaacctatagcagctgtgatgaatacctg

SEQ ID NO: 479100 - DNA, 100 bp, Homo sapiens
acgttaactctaacgtgaacgcggaccaggagatacaaactggactctcaggacaaaacgacaccagccaaaccagcagcccctcagcatccagcaacat

SEQ ID NO: 479101 - DNA, 123 bp, Homo sapiens
gtttggcactgctcctgctggccgcctggacggctcgggcgctggagttcatggtggattttcccagtggtctgcatggagagcctgcagtgtcacctgtggaaaaggcatccaaaagaggag

SEQ ID NO: 479102 - DNA, 101 bp, Homo sapiens
ataacagtgaaatatcagattcagaggatgacagttgcaaatatgaaaaacagtagctccgtatcgaatacattgacaaatggatgtgtcatcaatggaca

SEQ ID NO: 479103 - DNA, 100 bp, Homo sapiens
aggctgaaaagcatgacgtaccaaacaggcacgagataaggttgttcttgcagaacatgccagcagaagcattcaccaactgacatgtgccctgaaagaa

SEQ ID NO: 479104 - DNA, 80 bp, Homo sapiens
gctgctgctgacgctgctgctgcccggcctcggggatgccttcgtgaagatcgtgaggcacgagggcaccaggaccctct

SEQ ID NO: 479105 - DNA, 100 bp, Homo sapiens
tctgactccacctttacttttacctacgttggcggccccagaagaaaggagaagatgagtatgccaacgttgatgccattgttgtatcagtgggtgttga

SEQ ID NO: 479106 - DNA, 100 bp, Homo sapiens
tttaaggtgcccgagtccacgctgatggactgccgtagacgatctagtttgaagcactaagaagaataagacatcagtttgaaaagaggctctatcagaa

SEQ ID NO: 479107 - DNA, 80 bp, Homo sapiens
aagaacatttccaagatgatgtctttaatgaaaagggatggaactacattcttgaggatctgtgccagttcagaagcagg

SEQ ID NO: 479108 - DNA, 75 bp, Homo sapiens
tggccagtttaaaacttatgctatctgcggggccattcgtaggatgggatacccacccaccatcccagggtctac

SEQ ID NO: 479109 - DNA, 50 bp, Homo sapiens
gtcagtgagatggcttctaacaagaattcctagaggacctgtgcaacaac

SEQ ID NO: 479110 - DNA, 75 bp, Homo sapiens
ctcattgctccaaactgtgttgtttcagctgtattaggggtgtccgcaatgttgccagtgtctgtctgcagattg

SEQ ID NO: 479111 - DNA, 99 bp, Homo sapiens
catgaagccggggaccctgtacgtgtacatcatttacggcatgtacttctgcatgaacatctccagccaggaaaacctttccaacctatgagagaaaga

SEQ ID NO: 479112 - DNA, 75 bp, Homo sapiens
tttaaatgcagcatctgcgatgtgaggaaaggcacctccaccagaattggggcttgttgatggacaagaactggc

SEQ ID NO: 479113 - DNA, 82 bp, Homo sapiens
ggaccgcgcctcaggctcccccagagaggtggagaagagcgagtacttgagaaagaagaggaagaagatgatgatgaagatg

SEQ ID NO: 479114 - DNA, 89 bp, Homo sapiens
cacctgcaggatattaaagtgaaattttctgaccctggacagcctatggcctccgaccagggagaccttccatcctcctccacctgttc

SEQ ID NO: 479115 - DNA, 71 bp, Homo sapiens
gtactgtccatggacctctgagctgccctttccacatcgctgccgacatcggcctggctgcctggggacgc

SEQ ID NO: 479116 - DNA, 96 bp, Homo sapiens
taggaggaatcctaaccaaaccagccagcccactaccagaaggaatgcagagagcaaccaatgtcacctaccaagcccatcatgtcagcaggaaca

SEQ ID NO: 479117 - DNA, 98 bp, Homo sapiens
gtcacagtaaggccaaaaatgtgcatactcacagagttagagagagggatggtgggaacctcaggacctgacccaaccactgtctacgtggacatgag

SEQ ID NO: 479118 - DNA, 116 bp, Homo sapiens
gaggaggccgtccagcagatggcggatgccctgcagtacctgcagaaggtctctggagacatcttcagcagatgatgattattccccaccttctaagagacaaagaccaacgagcc

SEQ ID NO: 479119 - DNA, 75 bp, Homo sapiens
tcctggcatcagctctattcaaatctggttcagattttacagctctggaccgatttgggatgttgcccctggatg

SEQ ID NO: 479120 - DNA, 102 bp, Homo sapiens
cccgggagaacctgcggcggccggagcgatgtgttcagagcaacattgttttgttgacacaagcatttagaagaaagtttgtgattcctgactttatgtctt

SEQ ID NO: 479121 - DNA, 83 bp, Homo sapiens
gtggagtttgcagacataggctgtggctatggtggcctgttaggtcccgttcaagaagttcttccagttcgcagtcaagatct

SEQ ID NO: 479122 - DNA, 74 bp, Homo sapiens
gcagagcaccaggcccaccgtgaaagacacacatcatgagcctgaattccaatgaaaagtcattaaaattatca

SEQ ID NO: 479123 - DNA, 122 bp, Homo sapiens
ctcttttgaaagcctgagttacgatgtattgagcgcgtcgtatgcggccagcactaagatccgagagcagaatttacaggacattaagacggctggccctcagtcccaggttttgtgtggtg

SEQ ID NO: 479124 - DNA, 139 bp, Homo sapiens
gagctgacgctcgtggggctgcagtactcgggcaagaccaccttcgtcaatgtcatcgcgctgtttgatgaagacaatccagtacacaagtctggaaccagatacatgttcacaacagagggacacattgtatctgtgg

SEQ ID NO: 479125 - DNA, 101 bp, Homo sapiens
cagcgaggagaagcgcagcgacggcgtcgggagagcgcgcctagccggctcgcgagtagtggaggacatgctagaggacgaggaagaagaagatgacaaag

SEQ ID NO: 479126 - DNA, 83 bp, Homo sapiens
gagccacatcgctcagacaccatggggaaggtgaaggtcggagtcaacggtttgaaggatgacctctaggaagaaagtgttgc

SEQ ID NO: 479127 - DNA, 50 bp, Homo sapiens
ccgctctgagggcgcctgctcaggagctccagggtcagaggtcggatgtc

SEQ ID NO: 479128 - DNA, 52 bp, Homo sapiens
ccgggaccgtttaaaaaactggagctggagtcagatggcagcactatggagg

SEQ ID NO: 479129 - DNA, 75 bp, Homo sapiens
ggacaagaccctggtgaaggaggtcgtacagatgccatggacaatattaccaggcagaaccaattctacgatacc

SEQ ID NO: 479130 - DNA, 100 bp, Homo sapiens
ggaggagagcagctcctcactgtcaagcacgagctgcggactgattgctcgctgtaagcagctcatctgtgaccccagctacgtaaaagatcgggtagaa

SEQ ID NO: 479131 - DNA, 88 bp, Homo sapiens
tgaaggtgtggctcattgaggtcaacggtgcccctgcatgtgctcaagctggggtttcaccatgttggccagactggactcgagttcc

SEQ ID NO: 479132 - DNA, 75 bp, Homo sapiens
ggccagggaaccctggtcaccgtctcctcaggcattgaatgccccagaggagcccgaaacctcccaggcttggtg

SEQ ID NO: 479133 - DNA, 80 bp, Homo sapiens
cacgccaatgactgagaatggatatgatttggctatcaaagaccttaaagaagccttgattcagcttcgagggaaccagc

SEQ ID NO: 479134 - DNA, 74 bp, Homo sapiens
agtcttcaggggagattgtctactgtgggcagagtggaatgttggctgtccgtgaaaaccgctacattgtcctg

SEQ ID NO: 479135 - DNA, 54 bp, Homo sapiens
aattttacataagaagttacctttttcagggactggtaacgttcaaggatgtgg

SEQ ID NO: 479136 - DNA, 90 bp, Homo sapiens
aaaactttaggaaaagttctccccagttagaacatacaggagtttttttgacaaatatggtctctttagaaggccttaccaaagtagttg

SEQ ID NO: 479137 - DNA, 100 bp, Homo sapiens
atcccctggatgggggaccacaagatcctcatcgacaggggcataaggaaatggtggcaggcacttcctcctaacaagaaggaagtagttaaagaaaata

SEQ ID NO: 479138 - DNA, 113 bp, Homo sapiens
tgctgggctccggggacactttgcgttcgggctgggagcgtgctttccacgacggtgacacgcttccctggattgggtgacttcagcctgtcaggccttgcctcccgtggagt

SEQ ID NO: 479139 - DNA, 90 bp, Homo sapiens
ggtgcactgttcaacacagcaatgaccaaagcaacccctgctgtacggacagcatataaatttcataagcttaaatcgtctcagaaggac

SEQ ID NO: 479140 - DNA, 57 bp, Homo sapiens
cttcttcaggttcccgcgggaccctgccagagtgttcaagaaggccagtccaaatgg

SEQ ID NO: 479141 - DNA, 100 bp, Homo sapiens
aattatttatccaacagctcctcccagggagactgcattgcttattgatccaaaaaattcctgttcttcatcccgccagtgggttgctctggttgtggga

SEQ ID NO: 479142 - DNA, 116 bp, Homo sapiens
ggagggcagggccagtccggccccgggcagcggacaccctgaaggtcccggtgctcacttggacatgattggatttgtcctgtatccccccagtggaggtcctgcatgggatctga

SEQ ID NO: 479143 - DNA, 101 bp, Homo sapiens
ggaaaaccagatccagaaactggaggagtcccgctcgaagctagaccttcaatattgatgtacggcagttacattgggcagaatatatagagaactactgc

SEQ ID NO: 479144 - DNA, 76 bp, Homo sapiens
aaagaactagcagattttgtaagggaacggtctcctaaaaacccagaacagaagatcattaagagagtgattgctc

SEQ ID NO: 479145 - DNA, 83 bp, Homo sapiens
tgggtcacgggctggggacacacccagtatggaggcaagtgaaccggagcaaacgacttccgatccagtctgcgctgttgcgg

SEQ ID NO: 479146 - DNA, 119 bp, Homo sapiens
atcattctccttacctgtctgatgagagctgatcttcatgccactgtgtacactgcacagttggggatcttcaaaccaagatagatggcttggaaaagactaactcaaagcttcaagaa

SEQ ID NO: 479147 - DNA, 50 bp, Homo sapiens
tgtgacatatcgttggacccagaattgagccttccttgaatccagaagct

SEQ ID NO: 479148 - DNA, 90 bp, Homo sapiens
aacagatggaggaggagcagaaagcaatgaggttcaagttctttcttcaaagagtcatcagaataacatggattgaagagacttccgaac

SEQ ID NO: 479149 - DNA, 75 bp, Homo sapiens
gggacctgtgacagggctggtagcagcgcagaggaaaggcggcttttagccagatgagacgtgcaggtaccatca

SEQ ID NO: 479150 - DNA, 75 bp, Homo sapiens
ttttttcagagaccttggcgataaaggccgaagaacagttgagaattgttgaagaacaaagaaagattcatgagg

SEQ ID NO: 479151 - DNA, 100 bp, Homo sapiens
gctccgctcttgccagagggacaggagccatggctcagaaaatggactgtggtgcgggcctcctcggcttccaggttttactgcaatcacagcaaccaac

SEQ ID NO: 479152 - DNA, 100 bp, Homo sapiens
accatgtatttgtggcttaaactcttggcatttggctttgcctttctggacacagaagtatttgtgacaggtactttattaccaaggttgccatcggaac

SEQ ID NO: 479153 - DNA, 50 bp, Homo sapiens
tagctgcttatggctataaaattacaggatctgcatttactgctcaacca

SEQ ID NO: 479154 - DNA, 100 bp, Homo sapiens
gacaagatgtcacctgaaagtggtcacagccgcatctttgaaggtggttgtgagacaacttcaacaagaagtggctgattcccttaaaaaattaactatg

SEQ ID NO: 479155 - DNA, 50 bp, Homo sapiens
gcgaccatggctgtagtaaaaggaactctccggagtcctttctgtattgt

SEQ ID NO: 479156 - DNA, 115 bp, Homo sapiens
ctgccatattgtgtcttccccggccggtccctcgcctcccggccgagctgacgacaatgcagatcttcgtgaagactctgactggtaagaccatcaccctcgaggttgagcccag

SEQ ID NO: 479157 - DNA, 100 bp, Homo sapiens
aagaaattgggaacattatcacaaagctatcatcctgccaaactccaggctcagatgtcacaggagaagatggtataaactggtccatcagtgacaaaga

SEQ ID NO: 479158 - DNA, 82 bp, Homo sapiens
tcgactttttcagagactgggacttggagcagcagtgtgtggacgaatgtggaacctcgctctgtggctgtgttcccttggc

SEQ ID NO: 479159 - DNA, 58 bp, Homo sapiens
gagaaaatgaaaccagcagacagaatttgtcaggttatgaagacagtatggagtttcc

SEQ ID NO: 479160 - DNA, 99 bp, Homo sapiens
ctgagctgttgagttagagccaacatgagtgagccagagactgctgctactttgaaacgtacgatagaggccctgatggacagaggagcaatagtgagg

SEQ ID NO: 479161 - DNA, 96 bp, Homo sapiens
ggcgaaggagtctgtttttcaacccaggaagggtactagatggaaacttgagaaaggactgcttattgataacagctaaggtattcctggaagcag

SEQ ID NO: 479162 - DNA, 113 bp, Homo sapiens
agaacttcctgatctctctcgctgtgagacatgtctgagactcctgctcagtgtagcattaaggtgattgtagagaaggctccaaaagccagggtgcctgatctggacaagag

SEQ ID NO: 479163 - DNA, 98 bp, Homo sapiens
ggccgcctggctccccatactagtcgccgccaagggaagagatggtgttgagtggaaaatacaaatctggggaacaaattcttcgtttggccaatgag

SEQ ID NO: 479164 - DNA, 101 bp, Homo sapiens
atgcgggtgctctgcgagcagcgctactgcgccgtgtgccgcgaggagctgcgccaggctaggcagctggaagagaaagaccgagtgctaaagaagcagga

SEQ ID NO: 479165 - DNA, 100 bp, Homo sapiens
gctggatatcaaaggaaatcatgtggctctgtttctcagtactttgaagttataactaatctgcctgaagacttctcatgatggaaaatcagccaaggac

SEQ ID NO: 479166 - DNA, 98 bp, Homo sapiens
tggcgggtgtggacgccactacagttcatcaacatcaactacgtccctctgaagggagatgcatttcctgagctgaagaaggacccagacatggtgaa

SEQ ID NO: 479167 - DNA, 100 bp, Homo sapiens
gaaaacaaagaaaaacatactccagaattcctaatagaacattcaaatctgaacatcaatgatgtactagggaactactcattgactcttgttgatgcat

SEQ ID NO: 479168 - DNA, 100 bp, Homo sapiens
ggctcacactcttctgaaacgactcgggtagaggctgaggaaggccgtgttgtttgtctacctgggactagaatggaagttggatacactttgtgacttg

SEQ ID NO: 479169 - DNA, 98 bp, Homo sapiens
ttcgcttttttacctgccaatcaaactgctacaagacaacaccctgatctggcatggacatcttgctgatgaccgtatggcactggtgtcaggcatca

SEQ ID NO: 479170 - DNA, 90 bp, Homo sapiens
ggccgcagtacttgaccctgtattttgggagtcgaacggatttgtcagaggaatggctgtgaatggatgcctggaaggaccatcctctaa

SEQ ID NO: 479171 - DNA, 80 bp, Homo sapiens
ccgtaatgagagcccggaaccactctttgtgccgcagcttcgcaggaggctgctggaatcttccctcatttcattatccc

SEQ ID NO: 479172 - DNA, 74 bp, Homo sapiens
aacaagcaagcatgcagcttactgcttgaaagatgcatggtcatggaggctatgattctgattttagtgatgat

SEQ ID NO: 479173 - DNA, 117 bp, Homo sapiens
ccgcgcgcagggcctgcagcgggagctggacggcgagcgcgagcggcgcgagaaagtaaggctggcctctctgcagtcagaggtctgagctctgccatggggataggggtgtcttta

SEQ ID NO: 479174 - DNA, 51 bp, Homo sapiens
gcttttcagaatcttatcaacatcagcgagagctttctaactgtcaaaggt

SEQ ID NO: 479175 - DNA, 50 bp, Homo sapiens
ctggcctggaggctatccagcgcatcagtgtttttctgaccgaagttctc

SEQ ID NO: 479176 - DNA, 101 bp, Homo sapiens
gcggctctgggaagtgcgcagtccgcctttctgagaaaagtctacagcattctttctctgcaggttctcttaactacagtgacttcaacagtttttttata

SEQ ID NO: 479177 - DNA, 75 bp, Homo sapiens
ggcgctgctgctcgggctgctcttggagattgttgtgtccactgtatcctggcttgcttgttctgcgaattcctg

SEQ ID NO: 479178 - DNA, 95 bp, Homo sapiens
ttccaacagtgacgtgttctccaaataccagctcgacaaagatggggttgtcctctttaagaagaggctgaggggatctggcggtggagcgctag

SEQ ID NO: 479179 - DNA, 100 bp, Homo sapiens
ctcagacaagttctggaggagatgaaagctttgtatgaacaaaaccagtctgatgtctcctctggtgcaagtgtggtagctattgacaacaaaatcgagc

SEQ ID NO: 479180 - DNA, 50 bp, Homo sapiens
tactatcttcaaaataacctggatgcttggtccatcctactagatcgctc

SEQ ID NO: 479181 - DNA, 75 bp, Homo sapiens
agcgcaaggtcgccctcaaggccatgatcaaaacggaaggtgctgagctactggtgcttcagtcccggccacagc

SEQ ID NO: 479182 - DNA, 50 bp, Homo sapiens
cgccgcgggacctctccgggccatggggtaacaagatgctcaactatagt

SEQ ID NO: 479183 - DNA, 98 bp, Homo sapiens
agcctgtcagcagagggaaggacagaactaccagcagaactgtatcaaggaagtggagcagttcacccaggtggccgacatgaaaaagaagatggagg

SEQ ID NO: 479184 - DNA, 100 bp, Homo sapiens
ttcacttttgagtgcaactgccttccagctcggagcccaagatcctcttctcctacaaatgccaagtggacgagacagaggagccagatgtacacctacc

SEQ ID NO: 479185 - DNA, 83 bp, Homo sapiens
cagctccttgcagggagagacattgaaggtacagacaatgcagatcttcgtgaagactctgactggtaagaccatcaccctcg

SEQ ID NO: 479186 - DNA, 50 bp, Homo sapiens
tgatggagtacctgttgcagggtacaagaatattccacagatgtcctttg

SEQ ID NO: 479187 - DNA, 51 bp, Homo sapiens
atcgtcttcctcttcagccatccagggttggaaatcgtgccaaatgggata

SEQ ID NO: 479188 - DNA, 82 bp, Homo sapiens
aaccattgacgccatgtcgggttattcgagtgaccgagaccgcggccgggaccgaggaactcccccactggaaaggattctg

SEQ ID NO: 479189 - DNA, 90 bp, Homo sapiens
gcccctggtcctgctgctcggggtccgcgcggcctccgcggagccagagtgtgaacatggctacgcctcttcattcccgtccatgccgag

SEQ ID NO: 479190 - DNA, 96 bp, Homo sapiens
gatgccagaatggttatctacacacccttctcatggcaatcgagttgagtacttggatagacttatacctcagacctttgtagtattaaacagagg

SEQ ID NO: 479191 - DNA, 100 bp, Homo sapiens
aaagagaggatttgcttttgtaacttttgatgatcatgatacagttgataaaattgttggacacagcattgttggttttgccatgtactattttacctat

SEQ ID NO: 479192 - DNA, 101 bp, Homo sapiens
aaagccaaagagctgaatgttatgtttattgaaactagtgcaaaagctggatacaatgtaaagcaggtattgatgaagatgaccctactgctgatgatacc

SEQ ID NO: 479193 - DNA, 100 bp, Homo sapiens
catcatgctgcgcggccttcccatcaccatcacagagagcgatgtgttaacagaactgaaatccgacaaccagaggctgaaagatgaaaatggtgccctc

SEQ ID NO: 479194 - DNA, 99 bp, Homo sapiens
gtgaagatgaagatgaggagggagctacagcgttgaacaaccacagctctattcccatggacccagcctgaaccccctgcacgcccagccgcagccgca

SEQ ID NO: 479195 - DNA, 83 bp, Homo sapiens
gctgccagtcccctgccccgggcaaagcccatctggtccgccgagcaggtgtggacactgccagcggctgcagccgacttgga

SEQ ID NO: 479196 - DNA, 100 bp, Homo sapiens
tgttcatggtgatataaaagcagcaaatctacttttgggttacaaaaatccagaccaggccctgggaggagcggggacactgaggacctctctccaaatt

SEQ ID NO: 479197 - DNA, 96 bp, Homo sapiens
gacggcaacctctacaaggccaagttcatctcctccgtcaccagccacatctaccagaataccctctaccatctgctttggtcagggtgccgctcg

SEQ ID NO: 479198 - DNA, 74 bp, Homo sapiens
gaacctccgggtgtcatccgcggggaaaggcctgcactgcccaaagtcttggaaacttgctggatatgatgtac

SEQ ID NO: 479199 - DNA, 74 bp, Homo sapiens
gtgctcactgtcaccgagccgctgcggccagattttgagaagagggggaaaaaggaagtttgtcctgtcctgga

SEQ ID NO: 479200 - DNA, 96 bp, Homo sapiens
ttctacgagaccctccctgctgagatgcgcaaattcactccccagtacaaagaggccattaactgtttgatgcgagcaatcgagatctacacagac

SEQ ID NO: 479201 - DNA, 90 bp, Homo sapiens
ggagagccagcccctgattggaacccagtccacagctcatcctgccccacgtggacatccagctaaagtattttgacctcgggctcccaa

SEQ ID NO: 479202 - DNA, 96 bp, Homo sapiens
gagggagagtgacagcagcgctcgaacccttaggagaaatcttgagagtggacagcaattgtgaagatcgccagagagttctgtgtttcatcaccg

SEQ ID NO: 479203 - DNA, 100 bp, Homo sapiens
atcaaagagctgctttgaatcagcagatcctgaaagccgtgcggatgaggaccggagcggaaaaccttctgaaaccctcgttttggctggggaatgaaac

SEQ ID NO: 479204 - DNA, 82 bp, Homo sapiens
caacccaatctcccataggcactcagtcaagtaaaatgtttattggaggcttgagctgggatacaagcaaaaaagatctgac

SEQ ID NO: 479205 - DNA, 75 bp, Homo sapiens
caaagatactacttcagcagttttgattcagcagactccagaggtgatcaagtgctgaagctgctgaaagatggc

SEQ ID NO: 479206 - DNA, 96 bp, Homo sapiens
ctaccagtgattatgtcagccaaagctactcctactcatctattttgaataaatcagaaactgatatttggagtctgggagtgatccttttcatgt

SEQ ID NO: 479207 - DNA, 98 bp, Homo sapiens
gctgctgctctggctgccgcccctggccacactgcccgtgcgcggggaggcggcggcggcagcgttatcaggtagcacaggcggagtgcagcggaggc

SEQ ID NO: 479208 - DNA, 100 bp, Homo sapiens
ggaatccctccagaacaatccttggaaactgctaaggcagtaaagaggggtctggttgctgcttacagtggtgacagtgacaatgaggaggagctggtgg

SEQ ID NO: 479209 - DNA, 78 bp, Homo sapiens
gcaaactgggagacagctgccatccactgactcgtaaagttcccgtgtcagtggctatgatgacacctcaagttatca

SEQ ID NO: 479210 - DNA, 82 bp, Homo sapiens
ccggagccgtgtggaccaggaggagcgctgtcaaaatgcagatcttcgtgaaaacccttaccggcaagaccatcacccttga

SEQ ID NO: 479211 - DNA, 75 bp, Homo sapiens
gagagatgagcagcttctgagtgtgaagatatgtgacgtgtataacgctgtcatggacgtggttaaaaagcagaa

SEQ ID NO: 479212 - DNA, 83 bp, Homo sapiens
accagtaccggctgacctcgctgtacgccgagcacccaggcgactgcctcatcttcaagataagaccatcatcatgtggaaac

SEQ ID NO: 479213 - DNA, 80 bp, Homo sapiens
gaggctggtgcactcagctgtggacgttcccaccattcaagagattgtttgttgacacaagtgtttactaacactggacc

SEQ ID NO: 479214 - DNA, 73 bp, Homo sapiens
acgaatctgcccacccctcctgtaacccagcctgtttcacttcttgcacttttccagccattaactccaggct

SEQ ID NO: 479215 - DNA, 82 bp, Homo sapiens
actgttacaatcaaggtctatgaagagttcaagctgaagaagatgtggaaaagtcccaatggaactatccggaacatcctgg

SEQ ID NO: 479216 - DNA, 75 bp, Homo sapiens
atcaatggtgttacagatggctacttaaataggtgtcattccacacatccacaaatctctgattgggaagaaagg

SEQ ID NO: 479217 - DNA, 82 bp, Homo sapiens
caggcgccgcgggctccgcgcccggccggacccgggcccgagttcaaaaggtgatgacctatcaacagccattctcaaacag

SEQ ID NO: 479218 - DNA, 98 bp, Homo sapiens
ccacctcgagctgcggtagcagcgactcatgagagcgcggccggaggacagcaggaacgaatttcatatacacctccagagagcccagtgccgagtta

SEQ ID NO: 479219 - DNA, 96 bp, Homo sapiens
taatgaagcgagtacgagaagctcagtcatttatctcagcagctattgaaccagagatgctaagatttctcgcctgctgctggatgcccagtaccc

SEQ ID NO: 479220 - DNA, 51 bp, Homo sapiens
atggagccttatgtggaacataaaggtctctctgaagaggctatcatggag

SEQ ID NO: 479221 - DNA, 76 bp, Homo sapiens
atggaggtggacctgagtgaacatggtcctagaacaattggagattcatacgcacacaaagaacctcaacccttac

SEQ ID NO: 479222 - DNA, 89 bp, Homo sapiens
aaactaggtcgatggtcggcggcgcccggatgggcagctgagtgtgccatgcggagctgaatgccatcatgaacaaaaattcgaccgat

SEQ ID NO: 479223 - DNA, 100 bp, Homo sapiens
gttggcttatgagtggaacatggctagcaggaatgcttactgttgcgtggttcgttattaacagggtttgggatgctctgacagacaattacatcccttc

SEQ ID NO: 479224 - DNA, 75 bp, Homo sapiens
gtggtccagggcagggccactccagcggaccatgtgtcaacttatgccgcgtttgtacagacgcatagaccaaca

SEQ ID NO: 479225 - DNA, 93 bp, Homo sapiens
ttgccctggtcttgctcggccgatgaagtgcagaggtttttttctggagccagatgaccaagatgctccagatgaacatgagtcgcctccacc

SEQ ID NO: 479226 - DNA, 51 bp, Homo sapiens
accaagggaagtgtcttcacaaagatgagatctattccagaggggagcttc

SEQ ID NO: 479227 - DNA, 75 bp, Homo sapiens
cgataccgaagcgggctgtgtgccccttctccacccagaggtatctgagagcaagcagcaatagaaatttcctgc

SEQ ID NO: 479228 - DNA, 100 bp, Homo sapiens
ctcaaatgttggcaagtggagcagagtcccagaacagaagctccaccatgaggcgaggtggatggaggaagcgagctgaaaatgatggctgggaaacatg

SEQ ID NO: 479229 - DNA, 83 bp, Homo sapiens
cagacaggtgctgtctctagcatcacctctcagcacgattttcccgagagttcacaggattttttatcaagcagaaatgcatc

SEQ ID NO: 479230 - DNA, 100 bp, Homo sapiens
caatattcagtttgaaagagattcagttgcaaaaggacccgggttttcgaaattcttcttatccagagacagtggaaagaggcaaaacctgatgaattaa

SEQ ID NO: 479231 - DNA, 90 bp, Homo sapiens
atgcagtcccccaggatacagggtcaaaggagagcacaaccatcgcagttggaagcccatggggcaggttcggagatgatcgagacgcag

SEQ ID NO: 479232 - DNA, 101 bp, Homo sapiens
ggctccggaagatgtgtctgaggtcatctttggacatgtcttggcagcaggcatgcccaagagaatcgtaaatgcaaaaattgcttgccttgacttcagcc

SEQ ID NO: 479233 - DNA, 96 bp, Homo sapiens
gtgcacacgccctgcatcgagcagctggagaagggaggtggggaagacagggctccagctaccacaggacgggctctgggtatagccgttccagtc

SEQ ID NO: 479234 - DNA, 82 bp, Homo sapiens
tggcacgggctgtctgattctccttcgctgtggcgggaagatggccggatttgaagccctgaaggatggctgccatattggg

SEQ ID NO: 479235 - DNA, 51 bp, Homo sapiens
ggatggaacacttcagtgcattcaagtttgaaggatgacctctaggaagaa

SEQ ID NO: 479236 - DNA, 80 bp, Homo sapiens
ggggccggctgaccaggaacctgggcgagcagcggcgggggcccgaggggtttacccaaggtccagcctagcccctaggc

SEQ ID NO: 479237 - DNA, 96 bp, Homo sapiens
gcctgggttcagcttttaccattgcacatgagattggtcacaacttggtgtttcacttagcagtttgggagctataccagcagcagcactagaccc

SEQ ID NO: 479238 - DNA, 101 bp, Homo sapiens
gaggaccgcgcgggagagcacggatgggcaccctgggctcgatgtgctggagaatctggtaaaagcaccattgtgaagcagatgaggatcctgcatgttaa

SEQ ID NO: 479239 - DNA, 124 bp, Homo sapiens
ctgaagaagaacttaagaaacacaacaaaaaagatgattgttggatatgcataagagagacaaagcatggaggacacaagaatgggaggaaaggcggactctcaggaacttcattcttcacgtg

SEQ ID NO: 479240 - DNA, 90 bp, Homo sapiens
caagactttactcccaagcttctgttagtcagaaagcggttacttggtttggaacctgaaggccctatttgttggaattggaagcggaac

SEQ ID NO: 479241 - DNA, 97 bp, Homo sapiens
caaagatgtagatgagagaaatgaggctgaccggttccctgatgtgttacctgcttctgctactgatccaaactgcagaacttctcattcatcccca

SEQ ID NO: 479242 - DNA, 83 bp, Homo sapiens
ctgagggaaaagcgaggcaaggcaggcggcctcctgacaaggtgatccgggcgggccccgcaggaattttatcccctcaccgg

SEQ ID NO: 479243 - DNA, 75 bp, Homo sapiens
gacttcgttcaagtcatgagacatagatgaggtttatataactttccaagacaaggaagttgtgcaaagcctcac

SEQ ID NO: 479244 - DNA, 75 bp, Homo sapiens
aggacgaagaaaagcagagcaagggaacccagtgagagccacgagccaaggtgggcacttgatgtcggatctctt

SEQ ID NO: 479245 - DNA, 100 bp, Homo sapiens
gtaaagggaagtcatttctactggacttcatgcttagatacatgtataacaagaacatgaacttcatgaattgggtttgctcaaggatcactctttggag

SEQ ID NO: 479246 - DNA, 100 bp, Homo sapiens
gttactttgccacttcttcacggaccagtttcagttcgccgatgggaaacccggagaccaaatccttggttagcactctacgtatatgaatatctgctcc

SEQ ID NO: 479247 - DNA, 100 bp, Homo sapiens
ggatcctggagcactcggtcatgtacccggtggactcggtgaagataacgaaggaggcccaacttcattcaataaggagcctgacggatttatcccagac

SEQ ID NO: 479248 - DNA, 100 bp, Homo sapiens
atttaacctgtcatcaagacctgggattttggtggttccttcaatggtgccttagctgctgttcctgtccaggacctgggctccactgtcatcaaagaag

SEQ ID NO: 479249 - DNA, 75 bp, Homo sapiens
tcatcattgtccaggcctgcagaggtggatgcccaccccctcctcctgtcctggatggtgaggacgtgcttcctg

SEQ ID NO: 479250 - DNA, 130 bp, Homo sapiens
cggactctccattccagaaccatggcccaatttgtccgtaaccttgtggagaagaccccggcgctggtgaacgccacaggaggaaattgctactaagaaactccgactaacaaaaccaagtaaatctgca

SEQ ID NO: 479251 - DNA, 98 bp, Homo sapiens
ctgaatcagggttccttgaaaagggaggaacggcgacatcctgacctagagcccatcctaagcatgggctactgcatcctttttgtgcatggactgag

SEQ ID NO: 479252 - DNA, 90 bp, Homo sapiens
ggcctccagcttcaccacccgcacggcgcagtgccggaacactgtggcggccatcgaggagatgagaccccgctttctacaccaaccgca

SEQ ID NO: 479253 - DNA, 80 bp, Homo sapiens
cttggctccctgcagtttggctacaacactggagtcatcaatgccccccagaagtcagagcaccataacatggtgtggga

SEQ ID NO: 479254 - DNA, 101 bp, Homo sapiens
ctgggaggccggccggtgccagcacctttcggcttctgagacggcggcagcagcggcattcagtgtcgcgctcgagtcccgacgggccgctccaagcctcg

SEQ ID NO: 479255 - DNA, 98 bp, Homo sapiens
ctttgggcgtcccattgccatgataatcgcttatcagccgtatggaaaatctgtggactggtgggcctatggcgtcctgttgtatgaaatgcttgccg

SEQ ID NO: 479256 - DNA, 75 bp, Homo sapiens
attgagagcaaaatctacaagatgatgcagggaggaggactgcctgtgcagaggtctcccgggcctgtgacttcc

SEQ ID NO: 479257 - DNA, 75 bp, Homo sapiens
ctcaattcagagaagaaatcagaaggtggtggaggaagcaccaagaaccagctcctggccgaccatggacataat

SEQ ID NO: 479258 - DNA, 116 bp, Homo sapiens
gcgagcacagagcctcgcctttgccgatccgccgcccgtccacacccgccgccagatatggctcgtggacagcagaaaattcagtctcagcagaaaaatgccaaaaagcaagctgg

SEQ ID NO: 479259 - DNA, 75 bp, Homo sapiens
cactctggaggatggggtggatgggaggtttaactatagatcaacacatcatcttgcatctcatgggttctatga

SEQ ID NO: 479260 - DNA, 50 bp, Homo sapiens
gcggactggcacgcagactgcttcagggggtcctgatgacaacttaattg

SEQ ID NO: 479261 - DNA, 100 bp, Homo sapiens
ccggctgccctgcagtcgcctccaacacccgctgctgcccgcccgctgcctgcctgcctggcatctctctctcccgcattcttgttatttaacacgggaa

SEQ ID NO: 479262 - DNA, 98 bp, Homo sapiens
agaaaagtccatgtgctggcagcacttccctgagccactctccaggctgctccagtactcaagggaacggatgaatttaaaggccactcgttgctgca

SEQ ID NO: 479263 - DNA, 83 bp, Homo sapiens
ctctggtcttccctgaccccgcggccggacgacccaagcccgctgagcaggatgagggttacttcctcagaatgttggcctcc

SEQ ID NO: 479264 - DNA, 74 bp, Homo sapiens
tcagggctacggtgccccgccacagttcattggcgacaaacagcccacaattctcaaatggcggatcctatcgg

SEQ ID NO: 479265 - DNA, 75 bp, Homo sapiens
ccgtcggcagcaagaacagagagagaggtggacagatctgagagatactgagctttctgaaaaggatatgagcat

SEQ ID NO: 479266 - DNA, 83 bp, Homo sapiens
gcgatccgggcgctcgagacttaccagagccacaagggctgcccctgatggggcctggcaatgactgagcaggcccagcccca

SEQ ID NO: 479267 - DNA, 100 bp, Homo sapiens
cagcgggccctggccgctcacccgtggaaagtacaggtcctgacagctggttatcaatactctggctgaccatcatcatcgtgggactgactttggtgga

SEQ ID NO: 479268 - DNA, 125 bp, Homo sapiens
gaaatggaaggcaccaagccacaccagcagctgaaggaagtttccgtggaagaaaggccggagcctcaacagaaagctcctttagttcctcctcctccaccgccaccaccaccaccaccgccacc

SEQ ID NO: 479269 - DNA, 98 bp, Homo sapiens
ttgtcccagcgcctcaaagtgcccaaggagcgcctggctcttctccacaaagacacaatagcctaacatggcagaccagagacagcgctcactgtcta

SEQ ID NO: 479270 - DNA, 75 bp, Homo sapiens
gcagatcctgagacccggacagtggcagtgaaacaggagcgagagagggtttgggacacgtacagtggcctggag

SEQ ID NO: 479271 - DNA, 128 bp, Homo sapiens
ttatggttatagtccatgagcgagtgcctgacatgcagacctatccaccactcccagatatattcttagacagattcccctcttcccgcggcctcgccatggcgacccacggacagacttgcgcgcgt

SEQ ID NO: 479272 - DNA, 121 bp, Homo sapiens
aagcacgtcaacaatgatgtgaaccttcgcattcagaatttgaccatcttggtgagaaacattaagacctactaccaggcatttgttgctatcggggactacaatggccacgtcggtctgg

SEQ ID NO: 479273 - DNA, 82 bp, Homo sapiens
cgccgcagttgccggtacatcggggatttctggctctttcctcttcgccttaaattcgggagtgcatccgccccaacccttt

SEQ ID NO: 479274 - DNA, 98 bp, Homo sapiens
ctgcctgttggtggcatcaaggagaagaccattgcggatacagacgtccctcaccagtgccagcttggggtctgcagatgagaactccgtggcccagg

SEQ ID NO: 479275 - DNA, 100 bp, Homo sapiens
gtgtctactatattgatacccttggaagaattatgaatttaacagtaatgctgagagaaaaggaacagttccgtaagctctttattggtggcttaagctt

SEQ ID NO: 479276 - DNA, 125 bp, Homo sapiens
caacaagtgtctttggttataaattatgatctacctaccaatcgtgaaaactatattcacagcactcctgtaggaggcctgctgatggcatttcagaagtactctggtgagactgttcaggaaag

SEQ ID NO: 479277 - DNA, 75 bp, Homo sapiens
agagttcaaggaggccttccagctgtttgaccgaacaggtaaattcgaaccaccattatttcacccgaatgtgta

SEQ ID NO: 479278 - DNA, 100 bp, Homo sapiens
cccttccacctcgacctctggttctacttcacactgcagaactgggttctggactttgggcgtcccattgccatggtgaccaagaatatggcccaggtga

SEQ ID NO: 479279 - DNA, 90 bp, Homo sapiens
tgcctgcgcgcctaccaggctcgaccccaggtggtcctgccatcatggctgtcctctgcaaaggtctcctcgctcattgagagaatctct

SEQ ID NO: 479280 - DNA, 100 bp, Homo sapiens
cgcgaggtcaagctgctgctgctcggtgtcatggagaaactccagctgggcccagagattctgcagcgggaaaatccaaggcttatttatgccaggctga

SEQ ID NO: 479281 - DNA, 100 bp, Homo sapiens
ctgtaaactgcaaaccataatcctgtcttaatactgcaaacaaatcatagtggaactaaggggaacttaatttactggaaacctgtaggaagtgtcaggg

SEQ ID NO: 479282 - DNA, 96 bp, Homo sapiens
gtgcccaagctcatcgagaagtgctggaccgaggacgaagtgatgagctcacagtgcctgcactttaccccagtagccctgaagtgtgggccccgt

SEQ ID NO: 479283 - DNA, 100 bp, Homo sapiens
ttccagtccgttgctttactttttgcttcaccgacatagtcattatgccgaagagaaagaaggaagaggcccagcagaagggactcgctgagccaccccc

SEQ ID NO: 479284 - DNA, 100 bp, Homo sapiens
aaaggtggctgctacggaggccattaccatgtatatattaaagatgttgatcatttgggaaactggcagtttcaagaagctgagctgaacacattacgat

SEQ ID NO: 479285 - DNA, 96 bp, Homo sapiens
cggaagccggtgcagaaaactgtatgcagagaatatttccaaaatggtgggaagagaaaagcacttgagaaagatgaaaaaagagctgtacttgcc

SEQ ID NO: 479286 - DNA, 114 bp, Homo sapiens
cacagtccaccagaaggaccagagctcagatgctacccctggagtggcaggtgaggacgagctacaggtgattcagcctgaaaagtccgtatcagttgcagctggagagtcggc

SEQ ID NO: 479287 - DNA, 98 bp, Homo sapiens
aacaactctgattcttggaattgtaatggcaagggcaatttcactgggtccacacatgcagtacatgccacactactacccttcctgctcttgtgcgc

SEQ ID NO: 479288 - DNA, 51 bp, Homo sapiens
atcttattgatcctccagtcgagcttttcatgcaacacccaacacttataa

SEQ ID NO: 479289 - DNA, 83 bp, Homo sapiens
cgccgggcactgctgatgctgctttcgctgggggtcaaaatgcagatcttcgtgaaaacccttaccggcaagaccatcaccct

SEQ ID NO: 479290 - DNA, 82 bp, Homo sapiens
ctttgttcaccgccaaccccttcgagcaagacgtgggtactccaaagattcaggtttactcacgtcatccagcagagaatgg

SEQ ID NO: 479291 - DNA, 101 bp, Homo sapiens
acagataaagtcaaacaaggcttttgggaagaatttgagaaggccaatgatgaggccaatcagagtgatacaagtgtctccttgtcagaacccaagagcaa

SEQ ID NO: 479292 - DNA, 117 bp, Homo sapiens
tgacagtcgtagatacaaatttttggatgatgatggatccatttctcctattgaggagtcaacattgagaggatccagaatccagatctctggaatagctaccaggcaaagaaaaaa

SEQ ID NO: 479293 - DNA, 71 bp, Homo sapiens
cctcttcaagaagaaaaccgtggatgaccattcctcaagaattttgtatccaaggcccaaaagtttgttac

SEQ ID NO: 479294 - DNA, 96 bp, Homo sapiens
aaaaatcgaatgattcgactgcatcctgatggaacagttctctatggactccggaacaagctgaaagctggatacctaatgtcagtggagtcttct

SEQ ID NO: 479295 - DNA, 75 bp, Homo sapiens
tgacgtttacaaaactacagaacacgttggtcgtcattgcctccgagcccactttagccctcagctctgtatcag

SEQ ID NO: 479296 - DNA, 98 bp, Homo sapiens
ttccgtatctgcctaggcattttgctgtctcctcctaatacgggagatgcacttatttacatggaaccagagaaacaagtgatgtccaggtcgtcaga

SEQ ID NO: 479297 - DNA, 98 bp, Homo sapiens
ccaggagacccagacctagaactacccagagcaagaccacagctggtgaacagtccaggtccaggagagcctcagattattttttgtagaagtgaagc

SEQ ID NO: 479298 - DNA, 98 bp, Homo sapiens
agaaattctcatgatagcttccaagggacaaggtgtcaacaatgtgccgaaaatggtgtgaatggaacattaacttcaaatgtagcagactctccccg

SEQ ID NO: 479299 - DNA, 100 bp, Homo sapiens
tgtcacttgacgagcaacagggctgagtcatcactagagagtgggaagggcagcagcagcagagaatccaaaccctaaagctgatatcacaaagtaccat

SEQ ID NO: 479300 - DNA, 90 bp, Homo sapiens
caacagacagctttttctcaacagcccaatgtatgaggttgatgagctacgccgaaagaaggagattacagtgagggggggagatgtttg

SEQ ID NO: 479301 - DNA, 50 bp, Homo sapiens
ggaggacctacgccggcctgggacagtcattttgtttactcattcagccc

SEQ ID NO: 479302 - DNA, 75 bp, Homo sapiens
agagaaggtgaaacgatcatcgagctaaaatatcgtgttggtattggctgggatccaccaaaacttcaatcaatt

SEQ ID NO: 479303 - DNA, 51 bp, Homo sapiens
ccgcagtggcgtcctggagccctcctcagccaccagtggtaaaaacagaga

SEQ ID NO: 479304 - DNA, 100 bp, Homo sapiens
aaaggtctcgcactcagtcagagagccctgcactggaacatgatgctggaaaatgaccgtagcatggcttctttgggctgtgtttgatgtggacaagaag

SEQ ID NO: 479305 - DNA, 82 bp, Homo sapiens
aaaaagccgaaataccctcccaacaaaggtctatcagccacagtctctgcaagtttccaagagcagcagaaaatgaacacat

SEQ ID NO: 479306 - DNA, 88 bp, Homo sapiens
gagcttccctcgtggccgacggaacaatgaaggttctgccattactgcaatagccacatctgtgtgtcacggcccaccctgtcgccag

SEQ ID NO: 479307 - DNA, 74 bp, Homo sapiens
tgccagggatggaaggcaaagaggagtatccaatgtactcacgggattatgtttatgttcggcggtatagtgtg

SEQ ID NO: 479308 - DNA, 90 bp, Homo sapiens
ccaggatacagggtcaaaggagagcacaaccatcgcagttggaagcccatggggcagcttggaggtattatagcagaagtgaatttggcc

SEQ ID NO: 479309 - DNA, 75 bp, Homo sapiens
gtgggcaagtcggcgctcaccatccagttcatccagtttcgaaatcagtatgacaatgatgtcactgtttggagc

SEQ ID NO: 479310 - DNA, 50 bp, Homo sapiens
ctcctgagcagctgggactacaggaaatgaaggaccatatggtcagccca

SEQ ID NO: 479311 - DNA, 98 bp, Homo sapiens
acagaaggcgtctcatggcgttggaataccggctctcagcggctgacgagattgaggagctgcgggccgagatgctggagatgcgggacgtctatatg

SEQ ID NO: 479312 - DNA, 100 bp, Homo sapiens
acgagtgcgccttctccttcgacacgccgatatctcttccaaatgcatgatgaaggagttctcgtcaacagcacaaggcaatagagaagtgttccatgca

SEQ ID NO: 479313 - DNA, 74 bp, Homo sapiens
tgaatatgaccctatggaagcagaagaagctgaggatgaagaagatgggaaccctgagcagaacacatgcacaa

SEQ ID NO: 479314 - DNA, 100 bp, Homo sapiens
ggggcaggatctgtgtcaaaagagcttctctccagagtagaaaggtgttcaagcagccctggccagggatcatgcgcacagtctatgggaaccacgaacg

SEQ ID NO: 479315 - DNA, 90 bp, Homo sapiens
caagaattacatcagcgcctgggagctccagcggaagacctgacccgcatgatccacatcctggacacggagcacccctgggacctgcac

SEQ ID NO: 479316 - DNA, 87 bp, Homo sapiens
tgaattcacgcttatggtagtgggtcgagatttaatttgcatccagtctatggatgggatgctgatggtatttgagcaggagagcta

SEQ ID NO: 479317 - DNA, 97 bp, Homo sapiens
ccggctgctcgtggagagcgtgcggaaagagaaggtggacctgtccaaccagctggaggaggagaggagggtgtacaactatgagcctttgacacag

SEQ ID NO: 479318 - DNA, 98 bp, Homo sapiens
ggaggctgtgcgggccccgctccgcttcgaatggatactattcgttacttgtccttgcatgacaacaaatacatcagatactttcctggacatagcaa

SEQ ID NO: 479319 - DNA, 101 bp, Homo sapiens
cggatctggacacccagcggtctgacatcgcgacgctgctcaaaacctcgctccggaaaggggacacctgctggatgaaaaagaaagtcggcgtctgttcc

SEQ ID NO: 479320 - DNA, 90 bp, Homo sapiens
tttggagatctccaggtagacttcagagagatgccaaagtgtggaggcctgatcacttgaacggacatatcaagcaggtgcacacttctg

SEQ ID NO: 479321 - DNA, 132 bp, Homo sapiens
caaggaattaccttggagaggctgtgagccacaatgcatcgctggaagtagccaaccaagatcactccatggatgaaatgacagctgtggtgaaaattgaaaaaggagttggtggcaataatgggggcaatg

SEQ ID NO: 479322 - DNA, 50 bp, Homo sapiens
catcagccgcttggccaactttgggggcggctgtgcgtggcgagcagtgg

SEQ ID NO: 479323 - DNA, 75 bp, Homo sapiens
cggcgcagaaaggtggaggccgggaggacgaagcaaaagctggcaggctgacagaggcggcctcaggacggacct

SEQ ID NO: 479324 - DNA, 122 bp, Homo sapiens
ttaatcgtgcacctgaggagtctgaaccatgaagcatcagagctagcaaactacttccagagcagaaaatgatccacagtctatttctcataaactgttccggtgacatatttctagagaag

SEQ ID NO: 479325 - DNA, 100 bp, Homo sapiens
gccccggacgtggggcccaagcccccgtgaagatggtgtcctggatgatctccagagccgtggttctgtgaatttctggtacgtgctggtgatgaatgat

SEQ ID NO: 479326 - DNA, 75 bp, Homo sapiens
ccggccaccagcaattgtccggtacatcaggaacgtctctatcaagaatacaatttcagcaaggctgagggccat

SEQ ID NO: 479327 - DNA, 75 bp, Homo sapiens
cagaaagccaccgaccttattccggtgttcagtgtgaggtggagctgatagagtccatagaggacctgagacaac

SEQ ID NO: 479328 - DNA, 98 bp, Homo sapiens
tatcgtgcacagcactgacaagggccccaacagtgcattagtgcagcagcttatcaaagcctccgatggaaccccacagggggagaaggaaaaggaag

SEQ ID NO: 479329 - DNA, 87 bp, Homo sapiens
gcgggcggcgcggcccagctcgttccaggtctgcggtgccgctcagactccgaggatgagtgcagcacgcaggaggccgacggccag

SEQ ID NO: 479330 - DNA, 100 bp, Homo sapiens
gtttatgacgaagatagcctgggacctgcccaaattctacccacccgtggagcccccggctgcagcttggggggaggagtttgggctttgcaaaactgag

SEQ ID NO: 479331 - DNA, 50 bp, Homo sapiens
gagcctcacagctgtattcatgtgggagattttccttcgggagttgatct

SEQ ID NO: 479332 - DNA, 100 bp, Homo sapiens
cggggaccaacacgcagcagccgctgccgccgccgcgggagccgctgcccgaactcccggcccgaactccaggtgaacttcacggtagaccagatccgcg

SEQ ID NO: 479333 - DNA, 101 bp, Homo sapiens
gcgttatggatacataacctgaggagccgggggaagctggccttgggcaaaaattggatgcagagtttcagaaaagactggaaaagaataaaattgctgca

SEQ ID NO: 479334 - DNA, 82 bp, Homo sapiens
cggacgaggaggacgcgcccgccaccgacatctactttgcaagccgattttttcagttgatattcaccctgacgggaccaag

SEQ ID NO: 479335 - DNA, 74 bp, Homo sapiens
cactgctgttcatgatagctttgttgcagttggaaaagatgcccccgcaaatgtcatggatgttattgcaagac

SEQ ID NO: 479336 - DNA, 75 bp, Homo sapiens
tttccttattcttctgatgtggatccagaacactcgtgaaactgctcaggccatcaagggtatgcatatacgaaa

SEQ ID NO: 479337 - DNA, 75 bp, Homo sapiens
gtgcagagccccaattcctacttcatggatgtgaaatgcccaggtgctggagaatctggtaaaagcaccattgtg

SEQ ID NO: 479338 - DNA, 100 bp, Homo sapiens
gctttgtacggcttagaggacttccctttggatgtagcaaggaagaaattgttcagttcttctcaggtttctaagcatgaattgaggaacagaagaagca

SEQ ID NO: 479339 - DNA, 74 bp, Homo sapiens
cgcaggacgtgctgttttccagccctccccaaatgcattcttcagcatataggttgctgtagatgaatgttctt

SEQ ID NO: 479340 - DNA, 110 bp, Homo sapiens
gatgctgagctccctactggctgagggcagagactctcccgcacgtttcctgtggcagcctaagagggagtgtcatttcttcaatgggacggagcgggtgcggttcctgg

SEQ ID NO: 479341 - DNA, 79 bp, Homo sapiens
gcctagggaggcgaggttcccgcaccggatagggggcaatggcggcttcctgtgttctactgcacactgggcagaagat

SEQ ID NO: 479342 - DNA, 50 bp, Homo sapiens
gccgccatgacagcgagcgaggcggagctgaaaatgtgtgtctgacatgc

SEQ ID NO: 479343 - DNA, 74 bp, Homo sapiens
agaatgtgatttgcttgaagatatgagggagagcgcgcggcggacgcgcccgggacgcgcggcggcaccgggag

SEQ ID NO: 479344 - DNA, 100 bp, Homo sapiens
ggcaaactgtggtaggaaaaacgtatggcctttggaaatgtgtgcttcctgactgcagatagtggtgaaggtgactttctagctgaaggaggaggcgtgc

SEQ ID NO: 479345 - DNA, 51 bp, Homo sapiens
ccctcactcttcatggtcactgatgacttgtggggggaccacagtctggag

SEQ ID NO: 479346 - DNA, 80 bp, Homo sapiens
gaactgcgcagcctcttcgagcgccgcggacgcgtcatcgagtgtgacgtggtgaaagccctgggcgctgcctatggcac

SEQ ID NO: 479347 - DNA, 90 bp, Homo sapiens
attaaaataaaatacctggatgaggaagatgaagagagctgtaggtaaaacttgcctactgatcagttacacaaccaatgcatttcctgg

SEQ ID NO: 479348 - DNA, 100 bp, Homo sapiens
attgttgattttggcctttcaagaatattgaagaacagtgaagagctccgagaaattatgggtacccctgaatatgtggcattccggtgtctttccatcc

SEQ ID NO: 479349 - DNA, 107 bp, Homo sapiens
ggaagatgacgattcagagactgaaaaacctgaggctgatgacccaaagccaccattggttcaggcaatcttcagcggtgatccagaggagatccggatgctcatcc

SEQ ID NO: 479350 - DNA, 82 bp, Homo sapiens
cttccggaaggactttggcgagggtagttgatgtcacttggcgatattcctgcaaacatgaagaggtgattgccagaagaac

SEQ ID NO: 479351 - DNA, 100 bp, Homo sapiens
gatctcatgggacatagagacacctggtttggcgataccccttcaccaaggagactgctatttcatgcttggctggtacacacccccaaaagaagacggc

SEQ ID NO: 479352 - DNA, 74 bp, Homo sapiens
aaaacgaacgcccttcggccggatcgaagttctctgtggacattgactcggagctggtggaggagctgccggcc

SEQ ID NO: 479353 - DNA, 50 bp, Homo sapiens
gctctacccactgccctcggcccgcggtcatgctttcagaacgaaaaggc

SEQ ID NO: 479354 - DNA, 97 bp, Homo sapiens
aagcactctcttcagttcctttaaatgagccgaggtcatggtggttcggagggaacaacagccgcttgcaggccgagctctgccagaagcattggca

SEQ ID NO: 479355 - DNA, 50 bp, Homo sapiens
ccactattattttggcacaacaggaaggagtgcccgtgcgcagcggagat

SEQ ID NO: 479356 - DNA, 82 bp, Homo sapiens
cgatggtcttcctgctggggctcatgtttgagagacgaggtcttgctacattgtccaggatggagaagtaggaattcttaag

SEQ ID NO: 479357 - DNA, 75 bp, Homo sapiens
gtcgacatgagtgatgtggaggaaaacaacttcgagggcagagcaaaatgtttagaaagtgagaaggatggagtg

SEQ ID NO: 479358 - DNA, 75 bp, Homo sapiens
tggatctcatcaaaaaggacaccagcaagctgttcaatgaggaggtatgaagaggagatcaacaaacgcacagca

SEQ ID NO: 479359 - DNA, 73 bp, Homo sapiens
aagaatcctgcaaaaatgtctctctatccatctctcgaagacttgaaggtggtgttatcaaggagaagaaatt

SEQ ID NO: 479360 - DNA, 100 bp, Homo sapiens
aagtagaaattgatcagcaacaactaactcagcagcaacttaatggaaactagttctgtgcattccttggctcctggctggtcccctttgcctacctcac

SEQ ID NO: 479361 - DNA, 75 bp, Homo sapiens
aagtttggcatataatcgaatagttgatgccctaaatgaattcagatttggagcaagaggtggtggtggccttcc

SEQ ID NO: 479362 - DNA, 100 bp, Homo sapiens
cggggggactggccacatccctctgaaggagatgccggccgtgcagctggacacgcagcacatgggggatgtggagacgctggtagcggggccaggaagg

SEQ ID NO: 479363 - DNA, 83 bp, Homo sapiens
ctaacagacttcctggactgtgtgatcattagtgagacggtttaagcggaagcatcttactgccattgactgccagcatttgg

SEQ ID NO: 479364 - DNA, 98 bp, Homo sapiens
taccatggtctacaagactctcttcgctctttgcatcttaactgcagcactttcagaccatgctgaagtctaaattgaatgtcttaacactgaaaaag

SEQ ID NO: 479365 - DNA, 100 bp, Homo sapiens
ccgagaccgtgaccgagagcgtgaccgagagcgcgaatatcgtcatcgttagaaggaacatgtcaaaatggtgaggagtgggggtattccagtgcaccta

SEQ ID NO: 479366 - DNA, 74 bp, Homo sapiens
ggcggatttagataaactcaacatcgacagcattatccaacggctgctggaagatggagtctcactctgttgcc

SEQ ID NO: 479367 - DNA, 82 bp, Homo sapiens
ggacaccgggagtgggagagattggactgggagactcagcaggttttggagccctctcttaagtcagaactctgtcccaaaa

SEQ ID NO: 479368 - DNA, 99 bp, Homo sapiens
gtgacatccgaggtgcctttctccaaaagccctagagaatgaagtgtactgcaatccaaagcagtctgtgatcgatcgttctgtcaatggattaataaa

SEQ ID NO: 479369 - DNA, 73 bp, Homo sapiens
tgaacaccaagatgaaagcagcagttttcatcatctaagtgaaaggtgatcaactgggagaacacgctccaca

SEQ ID NO: 479370 - DNA, 89 bp, Homo sapiens
ctttcctaccatctaaaatacgaaggtttctggctgggattgtcagcacccaactcccgccctccctcaccgccaaggtcctgcttcac

SEQ ID NO: 479371 - DNA, 101 bp, Homo sapiens
aatccaccaaagaaagtgacctctgagaaagtgagccagaaacatgctgagcctttgacagatccagacatttaatgtggatgcaccatgccagaccgtgg

SEQ ID NO: 479372 - DNA, 101 bp, Homo sapiens
gtttcttcgttgcattgcctgagaggagcggagtctgccaggtggtgatctttgtgaagtctgtgcagcggtgcattgccttggcccagctactagtggag

SEQ ID NO: 479373 - DNA, 110 bp, Homo sapiens
ggagcgtcaacagcagcaccatggatattgcaggagaagaggctgggtccgatccacactcattatgtctgttccacaaacaagtacttcaaaagggaaagtcatgctta

SEQ ID NO: 479374 - DNA, 90 bp, Homo sapiens
gggctatgtgcacccagatgagttcttccagtcccctgaggtgatggcagtagccacgatggaggtgatgaacctgatggagcagcctat

SEQ ID NO: 479375 - DNA, 51 bp, Homo sapiens
ggacggacaagcacagtcttcggaagatgtcagtgaagagcttccagccag

SEQ ID NO: 479376 - DNA, 82 bp, Homo sapiens
gcaagatctcatgtccatcatggaaatgcaggttacttttcacatagaaccatatagcaatcgagatgatcaaaacatgtac

SEQ ID NO: 479377 - DNA, 76 bp, Homo sapiens
cccgcaaagcagattctatttttactgaagaaggagaggcagtgacatcagtgtctggcccaggtgagcacctccg

SEQ ID NO: 479378 - DNA, 100 bp, Homo sapiens
tgctgcaaaacgtgactccccacaataaccctgggcgctgcctatggcacagccaagagcggtaccggcattgcggccatgtctgtcatgcggccggagc

SEQ ID NO: 479379 - DNA, 75 bp, Homo sapiens
agcctatgggtgaaatttggctttcattcatgaatgagagctccctctttgcccactagcagggcattagctggt

SEQ ID NO: 479380 - DNA, 46 bp, Homo sapiens
gtgggtgtgtggtgagtgtgggccaaagaactgccaactctgaaag

SEQ ID NO: 479381 - DNA, 100 bp, Homo sapiens
gtggaaagcaatttcttgaaaagagattacaggatgccacagctgagcctgtcctcgctgggcctttggccaatggcagcatccccgtggctgctcctgc

SEQ ID NO: 479382 - DNA, 100 bp, Homo sapiens
gggaggctccgttgcctgctcccggagggagacgcgctgccgaggagaacccagcgggttgaatataagctgggattccaagtggacaatgttttggcaa

SEQ ID NO: 479383 - DNA, 98 bp, Homo sapiens
tgggacttcccgtccgcggcgtggagggaatagccaggccagaagaaggaaggcctgtggtgagtgggacaggaaatgacatcaccaccccaccgaac

SEQ ID NO: 479384 - DNA, 75 bp, Homo sapiens
gttgcactgtaaaaaacccagctgaagaccactttagaaactcaattaaatagaaaactacctgctacgaaatca

SEQ ID NO: 479385 - DNA, 75 bp, Homo sapiens
cctgcagagagccacatctaccgcgagggctgtgctgaagtttgctgctgccactggagccactccaattgctgg

SEQ ID NO: 479386 - DNA, 101 bp, Homo sapiens
ggcggacaaaacgccaggcggatctcagaaggccagttcaaaggctgaatattctgaactggtcgaaacattactatcaagtcagcaagacccagttattt

SEQ ID NO: 479387 - DNA, 74 bp, Homo sapiens
ggaagatatctgaggaatctagagtccctggtgatttgggtaaccaactggaagccaagctggacaagccgaca

SEQ ID NO: 479388 - DNA, 100 bp, Homo sapiens
gtcaacgtcttccacaaaacctcagtcatcgtcacgagtcctgagtcggttaagttctgggaggtgatcagtgatgaacatggcatcgaccccaccggca

SEQ ID NO: 479389 - DNA, 90 bp, Homo sapiens
tctttaccaaacttattaataggaataccactattccaaccaagaagagccagcttcgaagttccttcaacaaagcgttcagtataaaaa

SEQ ID NO: 479390 - DNA, 82 bp, Homo sapiens
caaagtcttggaacagcgacgacaaggcttggaaacatacttacagaaaaggcgacggcggattgacagaagtatgattgga

SEQ ID NO: 479391 - DNA, 100 bp, Homo sapiens
tgaatttggaatcttcccttgaagagattgactggggcgactttggggtagaggcagtgtctgaggggactgactctggcatctctgccgaggctgctgg

SEQ ID NO: 479392 - DNA, 74 bp, Homo sapiens
gtcctgggccccgggcggcggtcgccaggtctcagggccgggggtacccgagacatccacgacagcgatggcag

SEQ ID NO: 479393 - DNA, 76 bp, Homo sapiens
taatgtcaactttactgagaattttccacctcctgacacaacaccactcagtcctgtggcggtacactggaacccg

SEQ ID NO: 479394 - DNA, 75 bp, Homo sapiens
agacttctttcccagatgtttataatgagggcacacaggaaatgatttgcagctgagtgaatcaggaagtgacag

SEQ ID NO: 479395 - DNA, 95 bp, Homo sapiens
agttggtaccttcttttcagaagtaaagcctgcaggctgtcctgaagcgtggcctgaagccgagctgcaccatcatccccctgatgaagaaggat

SEQ ID NO: 479396 - DNA, 100 bp, Homo sapiens
tattaataaggatatcctccggagagtgctagttcttatggcctcgaagcatgctttcttggcattatgaagtcaaagtgaattgggcaacaacccctag

SEQ ID NO: 479397 - DNA, 90 bp, Homo sapiens
gccatgagggccctgtgggtgctgggcctctgctgcgtcctgctgaccttcggtgccagaaccctgtggagcatcatgaactgggaagag

SEQ ID NO: 479398 - DNA, 98 bp, Homo sapiens
cataactgatggggcggtggacacctatgatacaatctttgcaaaatacaattggccagatcgaaagattgtttgggatgaaaagaaaaaccagtggg

SEQ ID NO: 479399 - DNA, 89 bp, Homo sapiens
cggtgacgtcggccaccatcgtctaccacctggcccggcaaggcaacgggacataagcagctctatgaccaatagcacagctgccagta

SEQ ID NO: 479400 - DNA, 82 bp, Homo sapiens
gggacctgccggcacgcgactccccccgggcccaaagtgcgcgcggagccatggttatcatgtcggagttcagcgcggaccc

SEQ ID NO: 479401 - DNA, 100 bp, Homo sapiens
cccgcgtccggcttggatatcttcggggacctgaagaagatgaacaagcgccaggaaatccccttacccaggatatattgaacctttatcaggaaccaga

SEQ ID NO: 479402 - DNA, 49 bp, Homo sapiens
accctggaccagcagaaacctagagtgctctcccacccgtagacggtgg

SEQ ID NO: 479403 - DNA, 75 bp, Homo sapiens
atgctcgcagataagcatgctaagtttgccttctgccaggtggatgcctccatcgctctggccctggccctggcc

SEQ ID NO: 479404 - DNA, 75 bp, Homo sapiens
gtttcggaatgggcattgtcgccaattttcaggtagttatatagcatcaatattaagcctcctttaaactaagac

SEQ ID NO: 479405 - DNA, 51 bp, Homo sapiens
gcctgatgctgaactctcgaggtaatctatgccagcaattatgacaatgtt

SEQ ID NO: 479406 - DNA, 100 bp, Homo sapiens
acaagatggacaccgcggaggaagatccagacatttaatgtggatgcaccatgccagaccgtggaagatttaacgaatggggttgtgatggcccaggttc

SEQ ID NO: 479407 - DNA, 50 bp, Homo sapiens
gaagtcaacagtggagtgggccagaaaaggagaacaacttcccgccactg

SEQ ID NO: 479408 - DNA, 100 bp, Homo sapiens
gcaaggtggtcacgaagaagttcagcaaccaggagaccagcccccgtcctgcggccccgaggacgacgcccagctccagctggcccttagtttgagccga

SEQ ID NO: 479409 - DNA, 100 bp, Homo sapiens
accacgtggagcagaacgacttcccagccaggccccagacaatctacaacactgtgaaagctcttttgaaacagatggtcaccatgtttagatattagca

SEQ ID NO: 479410 - DNA, 100 bp, Homo sapiens
gggggaccccaggcacgcggggaccaagaggagaccctgcacatgaatgggtggatgagggctttgctcggctggcaggagctgggccgggtcgggaggc

SEQ ID NO: 479411 - DNA, 75 bp, Homo sapiens
ctgaagcatctcatctattatcgtttcaacacgttgtggacatcggatacccaaggagacgaagctgaagcagga

SEQ ID NO: 479412 - DNA, 100 bp, Homo sapiens
ccatctggactaccaaggagaagctatagactacttctactccaccaggaaggtgtctgatgatttgtgagcctcaagtgactactctgtggaatcatct

SEQ ID NO: 479413 - DNA, 83 bp, Homo sapiens
gtttgtaatgtgactagacggccagccagtcatcaaaccttcttggacacttaatgattgttggcaagaaatgtgctgctgat

SEQ ID NO: 479414 - DNA, 75 bp, Homo sapiens
gtgggatgttacgtggccggaatcattcccttggctgttaatttctcagagagcaaagactcaggtggactgaag

SEQ ID NO: 479415 - DNA, 139 bp, Homo sapiens
tcgaggctatgtggcttcactgcttacctatatcccaaacagtgctgtctggtggcccttctatcacttctatgcagtcccttttctagctcctccggtcatgatacatccacactccagactctgtgtctggccctgc

SEQ ID NO: 479416 - DNA, 73 bp, Homo sapiens
gcacttggaatacaagatggttgccgggtcatgttaattgggaaaaagggtctgctcttgataaaataacagc

SEQ ID NO: 479417 - DNA, 95 bp, Homo sapiens
ctgaagtttccttggggaaattcaccttcgatgttgagaaatcggagattcagactttccacctgcaggattacggggcgctgaaagacatcgtg

SEQ ID NO: 479418 - DNA, 95 bp, Homo sapiens
aagagatttatggcagcctcactcccagtagtttctgcatttagtgagataaggaagtgtttggattgtgagctatttcagaactgttctcagga

SEQ ID NO: 479419 - DNA, 51 bp, Homo sapiens
tatgagatgggggaggagctgggcagaatggcttcagttctgtgcaggcca

SEQ ID NO: 479420 - DNA, 99 bp, Homo sapiens
tacgtctggcaaatggatactgggaatgaaggatggcagcatgccgtgcattaaaagctgttttggtagatctcagtggcacacttcacattgaagatg

SEQ ID NO: 479421 - DNA, 100 bp, Homo sapiens
gaagagaataattgacgacagtgaaattaccaaagaggatgatgcattgtggcctcctcctgaccgagtgggccggcagcttatgtccctgatgccaaaa

SEQ ID NO: 479422 - DNA, 100 bp, Homo sapiens
cgccctcccgccgccgccctaagacgcaggaggagggagacgcactgatgacatcgggccgctcctgcagctcgggcgcctcgcagtctccaggtgcaag

SEQ ID NO: 479423 - DNA, 100 bp, Homo sapiens
gcgttcgggctgggagcgtgctttccacgacggtgacacgcttccctggattgggcgattgtggaaaaatgtgacagactcgctgagagaatctgaaatt

SEQ ID NO: 479424 - DNA, 100 bp, Homo sapiens
gctcctccctgcaactaactccattcttaattgattcttgaagacctggatgaacaaatttatatcattaccttagaggaagaagcactccagagacgac

SEQ ID NO: 479425 - DNA, 80 bp, Homo sapiens
ctttggaccgatccgacttggcgctcagaatactcccccagttgcaagaggcgcaggaccgtggaagacttcaacaaatt

SEQ ID NO: 479426 - DNA, 137 bp, Homo sapiens
gtagaccagctcaaggcctttggctatgtcgagatcccctgtgtggccaagaagctggtgtgcggagatgaaggtcccctctgagccctctcaccttgtcctgtggaagaagcacaggctcctgtcctcagatcccg

SEQ ID NO: 479427 - DNA, 95 bp, Homo sapiens
tccgtgttcggtgaccgcagcactggggaaacgatccgctcccaaaacggtgtattttgattacatgagaagctggatccaaatgctacagcaat

SEQ ID NO: 479428 - DNA, 98 bp, Homo sapiens
tgatgcagcgtgacatagcagccggcgacttcatcgagcatgccgagttctcggggaacctgtatggcacgagatgcagattttcttttacaatccag

SEQ ID NO: 479429 - DNA, 100 bp, Homo sapiens
ccctggcgtccggggaaggatgggacaggctgctgagcctcccaaagtgaaatgcctgaccaagatctggcaccccaacatcacagagacaggggaaata

SEQ ID NO: 479430 - DNA, 100 bp, Homo sapiens
gcggtgattttcgacatgggcggagttctcattccttctccagggagagtcgctgcagtttccacgggctcccttgctcagcagtatgcgcaccctaacg

SEQ ID NO: 479431 - DNA, 97 bp, Homo sapiens
gtggaggtgagcatcaccacctccaagatcatcagcgaagatgagaagaaggatgaggagatgagatttctcaggctattcaagatctctggcagtg

SEQ ID NO: 479432 - DNA, 100 bp, Homo sapiens
aaccccctctcccatcctctgtggattttactcagagccagggaagttctgggtttctttggttgagcaatgtttaaagcgtttgaaaaacatgaatttg

SEQ ID NO: 479433 - DNA, 80 bp, Homo sapiens
caaaaatgtgcatactcacagagttagagagagggatggtgctagttgctacattgcctgatgatgttcagcctgggcct

SEQ ID NO: 479434 - DNA, 89 bp, Homo sapiens
tttgaagagggaatttgatgaagtttttacaaagaaaatgattgagtctatatgcacccactgggcctatgtaataacaatgacgaaga

SEQ ID NO: 479435 - DNA, 74 bp, Homo sapiens
gcaagatcaccgtgacatccgaggtgcctttctccaaaagctatatgttctcctttcagccaagacctttcacc

SEQ ID NO: 479436 - DNA, 100 bp, Homo sapiens
gcgcgggcgaaaatggcgtacatccagattcagctgtgtcccctccagtccgggatgttggtatgaattccccagctctggtcttccccagctctgcttc

SEQ ID NO: 479437 - DNA, 74 bp, Homo sapiens
acccttcatgcatgaaagacaaagctactcagcacttgctctgaaatttggggactgagtacaccaaatacgat

SEQ ID NO: 479438 - DNA, 50 bp, Homo sapiens
gggacctgcccgcctgcggctgctccgggctgaccggttccctgatgtgt

SEQ ID NO: 479439 - DNA, 96 bp, Homo sapiens
ctctctggcgttcctcacactccccctgaagttcatctaagatcttcattcttcaaaggttttgacacaagggcgcatatcttcaaagcacctagt

SEQ ID NO: 479440 - DNA, 73 bp, Homo sapiens
gtcaccatgctattatgcatagaaagggtttagatgtagattctctggtcattgagcatatccaagtgaacaa

SEQ ID NO: 479441 - DNA, 83 bp, Homo sapiens
catgatttaaacaagagatttccacagaaggtgagtataggtgcttggagaggataaggaaatcaccctgatccaatagctgg

SEQ ID NO: 479442 - DNA, 50 bp, Homo sapiens
aggtgagaggcggatctacagacatagtaatctcaggggcgatataatca

SEQ ID NO: 479443 - DNA, 75 bp, Homo sapiens
tgcctacctgaagctgcggaactggcagtggtggcggctcttcaccaaggccagtgaagaagcaaaggaagacat

SEQ ID NO: 479444 - DNA, 141 bp, Homo sapiens
gaaaaggtgctcaaaggatatttgtttaatgaatgtggtatgctgacatttaaacaggacaaaacttgcatcgagagtaaacatgaggttacgatcctgggaggacttaatgaatttgtagtgaagttttatggaccacaa

SEQ ID NO: 479445 - DNA, 85 bp, Homo sapiens
cccgctcgctgggagagaggtacctctccttttccctctccctttccctaagaaatgagccgtcagactgctacagcattaccta

SEQ ID NO: 479446 - DNA, 50 bp, Homo sapiens
ggccgagctttgcgggaaagcagcggttaatgttgaagaaggaaaatgcg

SEQ ID NO: 479447 - DNA, 100 bp, Homo sapiens
tccctcgggaggcgcctggccagagcctggtcgagccggaggaagccaccaggtacgaaaccagcactggagcctcattatggaaagtgtggtcccatct

SEQ ID NO: 479448 - DNA, 97 bp, Homo sapiens
tgtgatatgtcacttgtgaattttgaaccagcagcaagaagagcatccaatatctggttcgagatgtgaggatgatttctgacagaaattcaagacg

SEQ ID NO: 479449 - DNA, 50 bp, Homo sapiens
cagtgacggcgaggaggccgagtggagagagtggagctgggaagacagtg

SEQ ID NO: 479450 - DNA, 98 bp, Homo sapiens
atggcggagccaggaagccgggagtccgagacccgggaggcatgtgagcgcagcctggcagagatggagtcctcgcaccagcaggtgatggaggagct

SEQ ID NO: 479451 - DNA, 100 bp, Homo sapiens
gatccggacagcggcacagaggagggagaacatccagtcatggataaaaatgagctggttcagaaggccaaactggccgagcaggctgagcgatatgatg

SEQ ID NO: 479452 - DNA, 116 bp, Homo sapiens
cctcaaacttcgatgagtttccagaatctgatattcttaagccaacagatcataatctactttctcagcccaaggagcatagcattgttcagaagcatcaccaggaggaaataatt

SEQ ID NO: 479453 - DNA, 75 bp, Homo sapiens
aagcggagggggccggagaagagagctctggggtcgacacgtgtaaggcaaacattggtgggcaccgatcttcct

SEQ ID NO: 479454 - DNA, 90 bp, Homo sapiens
tcgccttcagccctgtctggtgcatccttggcagaaagtgaggaggaaaacacccccattgattcactccttctccagttgcacagccac

SEQ ID NO: 479455 - DNA, 100 bp, Homo sapiens
ccttgtcttctccactgttcctggaggaatccgagaagagcagagcggagggagccccagacacgggcatctggcggatccccgtggacgagattgaccg

SEQ ID NO: 479456 - DNA, 85 bp, Homo sapiens
agattcgcagtggtcgcttcttctccttgggaagtgttcgccagttactacatgaaaagataagagatgcttatactcacccaca

SEQ ID NO: 479457 - DNA, 51 bp, Homo sapiens
atgaaaaacatcagcaatcaccttcttcttaatgaagaggataactcagaa

SEQ ID NO: 479458 - DNA, 75 bp, Homo sapiens
gtgaggcgcagtcgttcgcccaggctttggcccggcttccggagccctccttacagcctagaaaaaatgacagat

SEQ ID NO: 479459 - DNA, 100 bp, Homo sapiens
cgaaggctctccatcgaaggcaacattgagttttgaaaagaaacttgctccagaagaatgcttttcccctttggatctttttaacaaaatccgagaacaa

SEQ ID NO: 479460 - DNA, 101 bp, Homo sapiens
aaggaagcaagcagttcagaagagccaaggaataaacatgcaatgaacccaaaagggttcctctcctggctgaaatttatggtatagaaggaaacattttc

SEQ ID NO: 479461 - DNA, 100 bp, Homo sapiens
agctgggattatgaaggggtggcctgcccctccacatctgtgggatatctcatcagccacctccatgtgtacggcagaacagttccgctgtcactcaggc

SEQ ID NO: 479462 - DNA, 74 bp, Homo sapiens
tgagaaatgctacgaccaacttttcgttcagtgggacttgcttcacgctctcgtgctcattcccccatgatcgc

SEQ ID NO: 479463 - DNA, 82 bp, Homo sapiens
ggctattgatggcagtgctcttggcagcccaatggatccaatggtgatgaagagacctcagttgtatggcatgggcagtaac

SEQ ID NO: 479464 - DNA, 75 bp, Homo sapiens
tctgcccctattgtaagtgcagatggaacacaacagctgaagaaaaggtgactggtctcatgagccctgaagaat

SEQ ID NO: 479465 - DNA, 100 bp, Homo sapiens
ctgaagacggggtagccacgagattcatccttaccaattacaacaagttgtccatccagagttggtttagtttgcgccgagtcgagatcatttccaacaa

SEQ ID NO: 479466 - DNA, 90 bp, Homo sapiens
caagatccagatcgggatttacgtggagatcaagcgcagcgatgctcctgcccctcctaaagctgaagccaaagcgaaggctttaaaggc

SEQ ID NO: 479467 - DNA, 101 bp, Homo sapiens
cagccagtagcttggatccttgtgggcatgatccataatcggtttcaagagctgtaccgtggtgcgatgactagtagcatggagcgagattttggacgtgg

SEQ ID NO: 479468 - DNA, 100 bp, Homo sapiens
atcacgttgacgtccatttaccagtcttccctggcaagattcttctgaattgtgctgccttggccaaaagaggcatggattccgtgaaggaacaacacct

SEQ ID NO: 479469 - DNA, 100 bp, Homo sapiens
atatcttaccttaatttgacaagtacgcaagaaataatgcaagactcgtttatgttcaggttcgaagtcaacaataccattcttcacccagagatcgttg

SEQ ID NO: 479470 - DNA, 75 bp, Homo sapiens
ctcccaaagtgctgggattccagcttatgtgtgagttggggaatgatgttataaatcgagtttatgaagctaatg

SEQ ID NO: 479471 - DNA, 82 bp, Homo sapiens
ccactttgcattgactggaaacaatggcatttacagaaagagtcaacagcagtggcaacagaatgcttccaggaccactcat

SEQ ID NO: 479472 - DNA, 50 bp, Homo sapiens
ggcgtttcttacgaagagtttcaagtggacagagcagaatgggctgatat

SEQ ID NO: 479473 - DNA, 123 bp, Homo sapiens
tctggcaacggcgaccgcctctgcttcaatgtgggccgggagctgtacttctatatctacaagggggtccgcaagatgcctgaggaaacccagacccaagaccaaccgatggaggaggaggag

SEQ ID NO: 479474 - DNA, 100 bp, Homo sapiens
gccaaggacgtcgatgagtacaaactgaaagaccactatctggagtttgagatgaacaagtgcttcctcacaacttgaagcttctagcagaagaacttaa

SEQ ID NO: 479475 - DNA, 75 bp, Homo sapiens
agtccttatcttaatggaatattgtcgagcagataatctcagtgataccttgaagaagctgaagataacagctgt

SEQ ID NO: 479476 - DNA, 90 bp, Homo sapiens
ctttaataagttgattgtaaatggccgcagactgaatgtgaaatggggaagtagcatctttccctggcccattgaaagaagagaatctgt

SEQ ID NO: 479477 - DNA, 90 bp, Homo sapiens
ctccgccgccgccgccttgctgctgctcaaagctgctgccgccccttgggctaaaaggctcttcgtcagattgggcagaggacgataagc

SEQ ID NO: 479478 - DNA, 82 bp, Homo sapiens
gatgaaggtggggtggcgtggcaagccggactaaggaccggggacttcttgattgagccttatgccagcctggaccatcttg

SEQ ID NO: 479479 - DNA, 83 bp, Homo sapiens
ctgctgctgtgtgcggtgctgctgagcttggcctcggcgtcctcggaaatcttcccaaggctgcagacaccgacggatttgct

SEQ ID NO: 479480 - DNA, 100 bp, Homo sapiens
ctggagcagagccgctgggcgccggagccgaggcgagcgccgcgcgcaccactggtacatgtcccagagcaagcacacggaggcccgggagctcatgtac

SEQ ID NO: 479481 - DNA, 75 bp, Homo sapiens
cactttcctcggcaagaaatgtgtggtaaaagagaacctgctttcatgcaagatgctgctgcactgcaaacggga

SEQ ID NO: 479482 - DNA, 74 bp, Homo sapiens
ggacggctcaggagcatgacaagcgagaccctgtggtggcttattactgacatccaggcagaaattgatgccca

SEQ ID NO: 479483 - DNA, 83 bp, Homo sapiens
ctgggaccgcggcgaggcctgccctgcctgccagatagccacccgcaaggcctacgggcaggcactggccaagctgggccatg

SEQ ID NO: 479484 - DNA, 78 bp, Homo sapiens
acctgcagcgccgtgtggcacgacacaaaaatcagatttcaggtatgctgctgaaagtgggaatcctctacattggtg

SEQ ID NO: 479485 - DNA, 88 bp, Homo sapiens
gtcctcaactttctgggcgttcatgatcctggccagcctgctcatcgcctactgcagtactccaaagattcaggtttactcacgtcat

SEQ ID NO: 479486 - DNA, 100 bp, Homo sapiens
ccgacagccgacgcgcagatagcagagccatccttggggataaagtggccagtgtgtacgaagccccgggctttttcctggacctggagcccatcccggg

SEQ ID NO: 479487 - DNA, 100 bp, Homo sapiens
ggcaagactgtttgtgttgcgggggccggacttcaaggtacctttaaaacagggcagaagccttatggattggattcgactgaccaaaagtggaaaggat

SEQ ID NO: 479488 - DNA, 100 bp, Homo sapiens
gagacccctctgctgcaccacttcatgagaccccaagtttgtggagcgaacactgcggctggcaggcactcagcccttggaggtgctggaggctgtgcag

SEQ ID NO: 479489 - DNA, 82 bp, Homo sapiens
gtcttcttcacgtcggacaacggcgctgccctcatttccgcccccgaacaaggccgacggtcgcaaggtcctacggtcaagc

SEQ ID NO: 479490 - DNA, 74 bp, Homo sapiens
tccttagccagagaactctctgacaacaagctgaaggagcttccagacaccgtgggggagcttcgaagcctgcg

SEQ ID NO: 479491 - DNA, 93 bp, Homo sapiens
cagctgacggagatggtgcagaagatggaggagagtggagactgctgcacggactctggaaccatgaacatatttgatcgaaagatcaacttt

SEQ ID NO: 479492 - DNA, 83 bp, Homo sapiens
ccgcccccaacgtccatgcctgaggaaccctactctggaaactgtcagtcccagggcactggggagggctgaggccgaccatg

SEQ ID NO: 479493 - DNA, 75 bp, Homo sapiens
cgcttggggtgatcatgtatgagatgctcatcgtgacaaccatgagtggaaaaaactaattatggttcagcactg

SEQ ID NO: 479494 - DNA, 83 bp, Homo sapiens
aagtggaaagagagcaaggggaaggatcgggagtacacagacatcatccgtgtcattggcacccccttctatgtgatggagta

SEQ ID NO: 479495 - DNA, 100 bp, Homo sapiens
cggcgtactctcaacaaggcccgggcctcccgctcctccgtacagaaatgggacgtcggtcatcagatactgaagaagaaagcagaagcaagagaaaaaa

SEQ ID NO: 479496 - DNA, 100 bp, Homo sapiens
ctccacttgtgatgtaaaggtgaaaaatggtaccacttatgagggtatcttcaagacgctaagctcaaagaagccagctgaagatgagtggggtaaaacc

SEQ ID NO: 479497 - DNA, 101 bp, Homo sapiens
cgacaagaaaaacaatcgcttcaatgatgggaaggtggatcccgccgggaggtactttgctgatgttccatttaagcagacctcttccatagctgtagctg

SEQ ID NO: 479498 - DNA, 90 bp, Homo sapiens
ctcatcgccctggccgacaagcacgcaaatcaacaggcggtccttcgggtcggagtggacatcggatggtggcctggaagagacaattga

SEQ ID NO: 479499 - DNA, 100 bp, Homo sapiens
ggacacacagcccaaggacggggtggagatggatgctcgggctgctgcatctgaagccccccaggatgtgacctacgcccagctgcacagcttgaccctc

SEQ ID NO: 479500 - DNA, 74 bp, Homo sapiens
gcccaggaggagcaagtccgatggagaggctaagctcaagcccgaccctccagaaggcgtgcgcctaagccccc

SEQ ID NO: 479501 - DNA, 151 bp, Homo sapiens
ttgcaccgctacaacgcctacccctcagagcaggagaagctgagcctttctggacagaccaacctgtcagtgctgcaaaaggtggtcttctgccctgttaaagaagccctggaggtggactggagcagtgagaaagcaaaggctgctctga

SEQ ID NO: 479502 - DNA, 100 bp, Homo sapiens
gagacttatatgatgcaagatgtggcagaagaacaagaagttgagaccgagaatgtggaaacagcacgctccctgaaatttggcaggcagactggaggtg

SEQ ID NO: 479503 - DNA, 75 bp, Homo sapiens
tggcattggaacttcctgttctgatagcgtggaaggactatggcaaggagtctcaggccaaggatgtcattgaag

SEQ ID NO: 479504 - DNA, 82 bp, Homo sapiens
gttgatgaacagtaccaggaagaggcagaagaggagatcttatgccttcattcatccggcatggtccaacaattccaagacg

SEQ ID NO: 479505 - DNA, 75 bp, Homo sapiens
actggattgaattacttagtggactcagcccaaaaccatgtttgcccaagttgaatctgatgatgaggaagcaaa

SEQ ID NO: 479506 - DNA, 50 bp, Homo sapiens
gtcagacatgtcatcaactcagctgttaccggtattgtaagaacaagccg

SEQ ID NO: 479507 - DNA, 75 bp, Homo sapiens
caaacagaattgaaagaatgcatggtggtatttgtaggcaaaataccaagggatttatatgaggatgagttggtg

SEQ ID NO: 479508 - DNA, 96 bp, Homo sapiens
ctgctttccactcggctcctgtcgtccgttctctcaggctcccgttcaggcttgggcactgtttaaaggaaagttccgagaaggcatcgacaagcc

SEQ ID NO: 479509 - DNA, 100 bp, Homo sapiens
ctgcccaaggagtatgtgaagcagaagggagagcgtaagatcttccaggcaggagaccgggtgatggtgttgaaccggtcagggatgtggcaggaagagg

SEQ ID NO: 479510 - DNA, 82 bp, Homo sapiens
ctccccgatctacggggctgacatcagcggctctttgtatgatgacacaatgcagatcttcgtgaagactctgactggtaag

SEQ ID NO: 479511 - DNA, 100 bp, Homo sapiens
ccaacatcctgctcctgctcatggacgacgtcaatgagctgaaggagaaaggcaacaaggccctgagcgtgggtaacatcgatgatgccttacagtgcta

SEQ ID NO: 479512 - DNA, 96 bp, Homo sapiens
tcctccgggagcacttcgagaagctggagaaggcacaggagacgatggactcactggccatggtggagggtgtcagcagctgccaggacctctacc

SEQ ID NO: 479513 - DNA, 100 bp, Homo sapiens
agcaattgcacgagccaagcatatggaaatgtctctaaaagtcactattcctgatcagagaactccagttgcttcaacacacagtatcagtagtgcagcc

SEQ ID NO: 479514 - DNA, 83 bp, Homo sapiens
cccacttgttcgcggcctatagggcttcctcagccgccgcctcaagggctccatcaagcgcaccaagagccagcccaagctgg

SEQ ID NO: 479515 - DNA, 80 bp, Homo sapiens
gacagcttgttggccttttaagcccaatggtctatcaggaagtagaagagcagaaagaaggtcttcttacatgggcagat

SEQ ID NO: 479516 - DNA, 100 bp, Homo sapiens
tacatgaaaatccagcagtatgacaaggcactggatgatgcaatcaaagctcgacttctcaatcccaagtggccaaagggtgtgaaagctgttttggccg

SEQ ID NO: 479517 - DNA, 75 bp, Homo sapiens
aaatttcaggagaaagattacacaggagctgcagtgctgtactctaagaaatcaagatgactaccagctggttcg

SEQ ID NO: 479518 - DNA, 82 bp, Homo sapiens
agagaataccagcatccaggggcgtgaactgtcagatgaagaagtggtgttgacttcaaaatcaaaactgtagagctaagag

SEQ ID NO: 479519 - DNA, 78 bp, Homo sapiens
aaatgaaatattcatggcaatagctagtgagacctgcaacgacttccacccgatgttcttcacccacgacagatcctt

SEQ ID NO: 479520 - DNA, 90 bp, Homo sapiens
gacaagttgcatgaagagcatatcaatgcaggacgtacagttcagggtcttgctctatcgcccaagctggagagcagaggcatgatcaca

SEQ ID NO: 479521 - DNA, 82 bp, Homo sapiens
ggaattatttcgtgatatccaagaacaagcactgcaggagaagacagactgctgctttggacctgttggtaatgatggcctg

SEQ ID NO: 479522 - DNA, 101 bp, Homo sapiens
agtgctatgtgatccctctgaacacttccattgttatgccacccagaaacctactggagttacttattaacatcaaggacagtcattttgtttactcattc

SEQ ID NO: 479523 - DNA, 100 bp, Homo sapiens
ggacagtgaagggagagaagtggatttgggagacatttaggaggtttgggatgggaattgaattccgtgaaggctccctagtaatcaatagcaaaaatca

SEQ ID NO: 479524 - DNA, 83 bp, Homo sapiens
cgagcgggagttcgaagagttggatactcagcgtcgctggcagccgctgtacttgggtttggaaatcccttgtctccaggttg

SEQ ID NO: 479525 - DNA, 83 bp, Homo sapiens
aagaagatacacgtatgcagcaggcagatagagactccatcactggtgcaagctatatttaacggagatcctgatgaagttcg

SEQ ID NO: 479526 - DNA, 100 bp, Homo sapiens
agccgcaccactacgtggaacgacccgcgcgtgccctctgagggccccaagtctgtgtggtgtcagtttggtttctagatccagccaagagcccacataa

SEQ ID NO: 479527 - DNA, 82 bp, Homo sapiens
ggggcgagcctggaggattgtcactccaacctcttttcgctgctacgagttccagggagctctgtcctggtgaccgtgcccg

SEQ ID NO: 479528 - DNA, 87 bp, Homo sapiens
gctggccaaagcctgcccagacggctcacctgtgcgggatggaacaaaaggcctcaccgccgatgcaaggatagtcatcaacagggc

SEQ ID NO: 479529 - DNA, 100 bp, Homo sapiens
tgggccgtgactacaggacctgtctgacgatagtccaaaaactgaagaagatggtggataagcccacccaggcgttcaatgtcatcaatggcggttctca

SEQ ID NO: 479530 - DNA, 98 bp, Homo sapiens
ttccattgggaggtgatgatgaagttatgagctctacattgcaacagttttcaaaagttatagatgagcatttcccccgtttcccgaggggcatccag

SEQ ID NO: 479531 - DNA, 90 bp, Homo sapiens
ctgcgatgtctgtggactgtcttgggcagcatgcagtgctttctgggtctccatcatcaccagttccagtagtgaaaaacagaacccaac

SEQ ID NO: 479532 - DNA, 95 bp, Homo sapiens
gggatctttccggatcaatccagatggcagccagtcagtggtggagggttattggggctgtgccatcggcaaagccaggcaagctgcaaagacgg

SEQ ID NO: 479533 - DNA, 80 bp, Homo sapiens
ctgtaaccacctcacagattccagcttcggaacaagagaccctggtcagggaagtcaaagatgcatccctgagttcttcc

SEQ ID NO: 479534 - DNA, 74 bp, Homo sapiens
ggaagaagcacctcagcggggagttcgggaaaccgtattttatcaaggtacagagtgagatcccaggctcgccc

SEQ ID NO: 479535 - DNA, 76 bp, Homo sapiens
atccaggcctcattggacagcattcgaggcctccggtgtggctgtctctgatggtgtcatcaaggtgttcaacgac

SEQ ID NO: 479536 - DNA, 73 bp, Homo sapiens
gagatcttcatctgtcacgccaacgtcatccgctacatcgtgtgcaggttctgcggggagtgtctccagccct

SEQ ID NO: 479537 - DNA, 101 bp, Homo sapiens
cggagccgggggcctgggacccgtcgcgtcagagccaggttctgtttggattctgcaaagcagactcgtcagaaagttgctgtgaactggaccaacttcag

SEQ ID NO: 479538 - DNA, 100 bp, Homo sapiens
agaaagccttgcgagttttaaagcaaaagaggatgagattagcagaggcatttcatatcagtgaggattctgatcctttcaatatacgttcttcagggtc

SEQ ID NO: 479539 - DNA, 102 bp, Homo sapiens
gcctcccaaagtgctggaattacaggatcagctcagctactatttaataaaacaaaatctgtagaattcacgttttgtaatgacactgtcgtcattccatgc

SEQ ID NO: 479540 - DNA, 75 bp, Homo sapiens
gcgattggcatcgatctctccatcccttccgaggcccgacttcgccctggactttgtctcacaagatgaaatgtt

SEQ ID NO: 479541 - DNA, 74 bp, Homo sapiens
ttgctctgagcatcagtcacgggccgtggatccaggacatcgagggagccagcgccaaggacctttgcagcgcg

SEQ ID NO: 479542 - DNA, 90 bp, Homo sapiens
ggcggggatacagcctggaaggtgcgtgtggggctgggtctcggagtgggagacgtggagtgcagtatgagcccagaggacctggtcggc

SEQ ID NO: 479543 - DNA, 83 bp, Homo sapiens
atcaaaaatagtgatagctttgataagtaggcgaaaaccaagagtacatcggcctcgttctcctatattggaagaaaaagaca

SEQ ID NO: 479544 - DNA, 98 bp, Homo sapiens
cacctcattttagagtatcaagcaggggagtcctcagcactgcctcttctatttccctgtggaaacctcaaaagagaaatcctgccaaaagcgctcaa

SEQ ID NO: 479545 - DNA, 75 bp, Homo sapiens
ggggacagccgagcccggagcccggagcccgggcaagagctgggaagctcttactcctcagaaatgtattcctca

SEQ ID NO: 479546 - DNA, 50 bp, Homo sapiens
ccccgaggaggggaccatgacacagccaatggtggcagagtctacataga

SEQ ID NO: 479547 - DNA, 90 bp, Homo sapiens
caaccacaacttttctgactgggattattcaggcctgtcccctcagttcccaggtgccatgaggaagcctcgtcggaagtcccggcagaa

SEQ ID NO: 479548 - DNA, 74 bp, Homo sapiens
gccccagcagcccccgaaggccctatcaggacatggagtatgaaagacgaacccttaggagaaatcttgagagt

SEQ ID NO: 479549 - DNA, 82 bp, Homo sapiens
gccagtcaataggaagtacgagtgtgagtggaggcaatgcccagagctgtggcagccaccttgcagccgtgaagcaccagtg

SEQ ID NO: 479550 - DNA, 100 bp, Homo sapiens
cgaccgggctagctttggcgaggggacggagccggatcaggagccgccgccgccatatcaggctggcagtgatggtgaaagcataggaaactgccccttt

SEQ ID NO: 479551 - DNA, 100 bp, Homo sapiens
ccgggacgagctgttccgccggagcccccggcccaagggcgacttctccagccgggcccgcgaagtggcattgatgacggggagccttcctggctttgtc

SEQ ID NO: 479552 - DNA, 100 bp, Homo sapiens
agaaaatcgtcttatagttgagaatttatcctcaagagtcagctggcagatgtcaccaatcctttgcagataatgtatagtgtgtcacaaggacatcgac

SEQ ID NO: 479553 - DNA, 80 bp, Homo sapiens
acatcgtctcctgtgtggcgatggtcttcctgctggggctcatgtttgagatgggacctgcaaaggataaactggtcatt

SEQ ID NO: 479554 - DNA, 100 bp, Homo sapiens
tgactgcaaaacagccgtcaattgttcatctgattttgatgcgtgtctcattaccaaagctgctggaccgtgaggccaacctcaccagcagcgtgacgat

SEQ ID NO: 479555 - DNA, 97 bp, Homo sapiens
cttctgatggagggatcaggaaaggtgaccaagaatatggcccaggtgaccaaagccctggacaaggccctgagcaccatggacctgcagaaggtct

SEQ ID NO: 479556 - DNA, 100 bp, Homo sapiens
ccctgaagatttgcctgccctcagtggttaacttttttgctgcaatcacaaaacctggaatcatttttctgataatgaggcagagcgggttaaaatgatg

SEQ ID NO: 479557 - DNA, 73 bp, Homo sapiens
cactcgctcccttgatgatcttgagaaaaagcttgtggtgaaggggggcaaaaaaaagaagcaagttctgaag

SEQ ID NO: 479558 - DNA, 75 bp, Homo sapiens
gaccatatatgtcattgggcagggatcaggcttgcgaggatccctggaacgcctccagctgggatacgtggacat

SEQ ID NO: 479559 - DNA, 96 bp, Homo sapiens
ggtaggcgtccctggagcggccgccttccagcgtgacagtggatagtggaaacaggagatcgtggatcctccttcaaaaatggaggatggaaagcc

SEQ ID NO: 479560 - DNA, 75 bp, Homo sapiens
cggatggtctgggtggacctggagccggactactttagttctgtggccacagtggtgtatcttcgcaaagagaac

SEQ ID NO: 479561 - DNA, 100 bp, Homo sapiens
gtctgggagctactgatgcttcttcctacatgtcctaatatgttgatggcattccagaatatctcagatgagcagtttcagctcaggctccaaactctgc

SEQ ID NO: 479562 - DNA, 80 bp, Homo sapiens
cggcatcacaggggtaaccaaggtttcctccagcctggtggtgccctgtccttgcaaaagcagatggaacatgctaacca

SEQ ID NO: 479563 - DNA, 100 bp, Homo sapiens
cagattcgcagtggtcgcttcttctccttggagtcgccgttaaaacacctactgaaaaagttgaaaagatgtttccacatcgcaaaaatgtgaacaaacc

SEQ ID NO: 479564 - DNA, 100 bp, Homo sapiens
caactattcgcggagctggaatgactggcaacccagatagcaaagccattgtggatgggaacctgaagctcatcttgggtctggtgtggacgctgatcct

SEQ ID NO: 479565 - DNA, 108 bp, Homo sapiens
tcgctgctcctctctggggtcctggcggccgaccgagaacgcagcatccacggtgctggagaatctggtaaaagcaccattgtgaagcagatgaggatcctgcatgtt

SEQ ID NO: 479566 - DNA, 75 bp, Homo sapiens
cagggatgttcaggagctgaaagacggaaagaccacagcaagattctttcattcgtctcctcctagcctggggga

SEQ ID NO: 479567 - DNA, 75 bp, Homo sapiens
ttggccgccgcgatgtcagctcagtgctgtgcgggccaggaggacaaccacagctattatgtgtcccgtctctat

SEQ ID NO: 479568 - DNA, 102 bp, Homo sapiens
gcagttccaattccagagaaaatgagtgaatgggcacctcgacctcccccagaatttgtccgagatgtcatgggtttttcgttggaatatacgttgcacatt

SEQ ID NO: 479569 - DNA, 100 bp, Homo sapiens
actcatggaggctgagcatttattcaggatgtacagttacccagcacgtgtacctcctcctcctcctattgctcgggctgtagtgccctcgaaacgtcag

SEQ ID NO: 479570 - DNA, 100 bp, Homo sapiens
agacgttagcgtgagtgatcactctcaatcccgggtggcttcgtcctgttcatcgccaactaggggaagcgaatgaggagtttgcactccgtgtacaaca

SEQ ID NO: 479571 - DNA, 100 bp, Homo sapiens
cgtagggaccacatcaaagacagctttcacagtttgcgggactcagtcccatcactccaaggagagaaggagtctagtaaaagccctaaaacgatgaaga

SEQ ID NO: 479572 - DNA, 100 bp, Homo sapiens
ggaacctggcttcgcccttattgtctgtcagcgttgatggcactcagaggactgtccaggaattggcagcaatgaaacagattctcgttaagatgcatag

SEQ ID NO: 479573 - DNA, 75 bp, Homo sapiens
ggatcgcggcagcaacacgatcggcgcccgcctgaaccgagtagaagacaagctggtaggtgagtgctgtcctcg

SEQ ID NO: 479574 - DNA, 100 bp, Homo sapiens
ctcaaatcagaatgggacaggtggagaaagtatttatggtgaaaaatttgaagatgaaaatttccattacaagtacgctggggaggaggaggaggaaggg

SEQ ID NO: 479575 - DNA, 100 bp, Homo sapiens
ccgctcgcggagggagaggctgcagagcgagggcaggaggacagtactgcttttaaagagacagtgttagggatcttggaagcacagccaacatgtgtga

SEQ ID NO: 479576 - DNA, 77 bp, Homo sapiens
aacttggaatactctactggacaaacatttcctccaagtcaggtcaattcagtgaagatatgatacccacagtgggc

SEQ ID NO: 479577 - DNA, 82 bp, Homo sapiens
aaaacagtccagatccccgtgtatgactttgtctcccattcccgtggatgaggatcgcagtacggaacctgaccgattgcag

SEQ ID NO: 479578 - DNA, 51 bp, Homo sapiens
cctcctgagtggctgggactacaggggatgatggaactaacaaagaagcca

SEQ ID NO: 479579 - DNA, 75 bp, Homo sapiens
tatttttggataacaacttacagagatgcagagaggtgttcataaagagcaatatcagatggcaccccaaaaaag

SEQ ID NO: 479580 - DNA, 75 bp, Homo sapiens
agattcgcagtggtcgcttcttctccttggtgtgggcagaagaaaaagctagtgatcaacagtggcaatggagct

SEQ ID NO: 479581 - DNA, 75 bp, Homo sapiens
ctgccggcacgcgactccccccgggcccaaaatgatgataattccgaagaaggcttccacactattcattcagga

SEQ ID NO: 479582 - DNA, 100 bp, Homo sapiens
agaagattattgaagaagcacctgctactattgctactccagcagtatttgaacacatggaacaggatgagtctgaatgtacttcagatgaggaaatctt

SEQ ID NO: 479583 - DNA, 90 bp, Homo sapiens
ccatcaccttcaatccgctctactggaatgtggagtcagcagaagttgaagaaatagtgttcccaagacaattcagtaagcacagtggcc

SEQ ID NO: 479584 - DNA, 102 bp, Homo sapiens
ttacagaatgcagcagatatgcctgctaacatggataagcatgccctgaaaaagtatcgtcgagaagcctatcatcgacttaaaccattggatattgagttt

SEQ ID NO: 479585 - DNA, 90 bp, Homo sapiens
ggccgccgtcctggaatacctgacagcagtccctggaggaggattgtgtgtccattttacagctggagaagccgagatccagaaaggacc

SEQ ID NO: 479586 - DNA, 74 bp, Homo sapiens
tggcatgccaagcccctcacgctcagggaggtcgagattcaattagcagagcctcacagacaatggccaaatgt

SEQ ID NO: 479587 - DNA, 75 bp, Homo sapiens
aagccaagaggaggacagttcgctacacagcaatgcatcgaggaagtgggaaaactcttgcctttgccatcccaa

SEQ ID NO: 479588 - DNA, 100 bp, Homo sapiens
cgccgctccgaggcctcgcgaccgccgagcctgcagcctgccccgcggccaacatgagcttcttgttaaaagaggcacagttagatgaagaaggacagtt

SEQ ID NO: 479589 - DNA, 82 bp, Homo sapiens
cgccctggccgacaagcacgcaaaatgtggaggctgtggacccacgaggtcgaacattattgcatcttgctgtttccttggg

SEQ ID NO: 479590 - DNA, 75 bp, Homo sapiens
agcggagggggccggagaagagagctctggggtcgacacgtgtctttggtgcaacactaacaaggcttgtctgga

SEQ ID NO: 479591 - DNA, 98 bp, Homo sapiens
gatccggaggcgccagctcaaccctgtgaaagttgtgtagatttactgtttgtgagaggagctggaaactgccctgagtgtggtactccactcagaaa

SEQ ID NO: 479592 - DNA, 100 bp, Homo sapiens
cagacgccggtgggcacgcccaaaggaagctgtgctgaatggtttggtggccactgaggtgttgatgtggttttatgtcggagagattataggcaagcgg

SEQ ID NO: 479593 - DNA, 83 bp, Homo sapiens
ggaggcagtcgaagactctccctccctggattgttgtcacaaggggtttcctggaagcaccttcatgtcatcctatcaaaacc

SEQ ID NO: 479594 - DNA, 51 bp, Homo sapiens
agagaatgcagttgtcttgacttcaggacgccaggaaagcatgtgcagatg

SEQ ID NO: 479595 - DNA, 75 bp, Homo sapiens
ccactggggatggcaaagacgacatccggtgcgccgaggctgctcacaaaagcgccatgtcagaaccggctgggg

SEQ ID NO: 479596 - DNA, 75 bp, Homo sapiens
gtggaacttctacccgacacttacatgccatggccttctacgttgtgaaaatgataacatgcctggacatttcca

SEQ ID NO: 479597 - DNA, 51 bp, Homo sapiens
ccctggagaagcagatggaaaagtactgttgcccagaaatggttgaatacc

SEQ ID NO: 479598 - DNA, 100 bp, Homo sapiens
gtgataccaggggcagagggaccactctgacaggtaccccctgtaccggctgggtggcccacaacttcgggtgttccgaaccaacttcttcattcagctg

SEQ ID NO: 479599 - DNA, 80 bp, Homo sapiens
ggtggcgggcccgggctgcggcgtgtgcgcgcccgccagctgctccggagatacggacttgggaccctggaggactgacg

SEQ ID NO: 479600 - DNA, 89 bp, Homo sapiens
ccctccctgccagccattcacaaggtgtgatccctcacatccacaaatctctgattggaaagaagggacagcagaaaactgcttagagg

SEQ ID NO: 479601 - DNA, 75 bp, Homo sapiens
gagaaaacgaatgaagagttgcaaggttctggagatatatcttcagattctattgaccacagcccagccaaaaag

SEQ ID NO: 479602 - DNA, 87 bp, Homo sapiens
ctaaagcagcgtgcgttcagccctgggtgccatcagacaagatcagttgatcagaacagaaagctagctcggaaaatcctacaagag

SEQ ID NO: 479603 - DNA, 74 bp, Homo sapiens
ctgacagctctgcggctcgggccctgagttgaagattcctgtctctggatccaaatcagagggccttctctacg

SEQ ID NO: 479604 - DNA, 82 bp, Homo sapiens
cggaactacgagtacctgatccgcctcttccaggagtgggagcccccaaatacatcaagatgtttgtactggatgaagctga

SEQ ID NO: 479605 - DNA, 90 bp, Homo sapiens
gcagggacggcttcagccgcatccacgagatccagaggcgacaggaagaagggtattacagccgcctggaagccgagaggcgcagacagc

SEQ ID NO: 479606 - DNA, 107 bp, Homo sapiens
ggatttgttaaggattccaagtaactcttatttgaaccagacgtcctgggtcctctccagcatggcagccctctactggagggtgaaaggccaaggaaagaaggcaa

SEQ ID NO: 479607 - DNA, 90 bp, Homo sapiens
ggctctgctacgacgcgctggtgcacttcgcgctggtggatctccttacgtagcagccaaaataaatgaagcaaaagacttgctagaaac

SEQ ID NO: 479608 - DNA, 76 bp, Homo sapiens
gaaccagtccgggatgtgggaagcttcagctttagctgcagctgcctctgttcagccacttgcaacacaatgtttc

SEQ ID NO: 479609 - DNA, 75 bp, Homo sapiens
attgatcccaagttgtcgacgaccgacagggtggtgaaagatgccatggacaatattaccaggcagaaccaattc

SEQ ID NO: 479610 - DNA, 90 bp, Homo sapiens
ggcggaaagcgagtacacgttcgaaagtgcgcgtcccgggacgactggcgctgtgcgcgctccatgcacgagttttccgccaaggacatc

SEQ ID NO: 479611 - DNA, 51 bp, Homo sapiens
ctgaggatgagctggaggaggggctatcagaggactcctgaaacctggaga

SEQ ID NO: 479612 - DNA, 50 bp, Homo sapiens
atcttggaggagattgacacactggcgggagacactatattcaatcgtgc

SEQ ID NO: 479613 - DNA, 74 bp, Homo sapiens
tttagcgcatcatgtgatccggcggagctccctgggtcctcagcagtgaggctggcctccctgcgtgacctgcc

SEQ ID NO: 479614 - DNA, 50 bp, Homo sapiens
atgacccagaggatgccaaggcaaaggcagactgccagattcacttacag

SEQ ID NO: 479615 - DNA, 75 bp, Homo sapiens
ccggggcctgatgaatgacatcgggtggcctgggatctctgttctatcttacactggatgtgctagagactgact

SEQ ID NO: 479616 - DNA, 100 bp, Homo sapiens
gaggtgcctggggcaacctccaccttgacggttccaggcaaaatcctcaatgatgatactgctctcaaagaatataaaattgatgagaaaaactttgtgg

SEQ ID NO: 479617 - DNA, 90 bp, Homo sapiens
gagctgaaaccagtgggtagatgtcgttctgaaacgcagctaaagcttgctttcactctggaccacgagaccggattgcctcaaggatgt

SEQ ID NO: 479618 - DNA, 100 bp, Homo sapiens
gtgagcgtgaggtgtgggtgttcgtttctcaggcttttggttactccccttcccaccccatcccttaattttattcttttgaagagtgcatttcaagctg

SEQ ID NO: 479619 - DNA, 82 bp, Homo sapiens
gtatcacctgccccatcatcgtgcccttcggcgagcccatccggcccattgaccctgcggcctgggtctcccacactgcagc

SEQ ID NO: 479620 - DNA, 74 bp, Homo sapiens
caggcgcaggcgcagtgggggtgagggcgcgtgggggcgcacagctggttgtcttcttgcctgccctgtgtcgt

SEQ ID NO: 479621 - DNA, 98 bp, Homo sapiens
gaccatcgctccaaccaaaaccgtgaatggtgtctggaggagtgagagccggcagatgatcacggaagccttggcccaaggtgggatgcacataagag

SEQ ID NO: 479622 - DNA, 88 bp, Homo sapiens
agggctttatacagggccgtgatgttggagaactacaggaacctggagtctgtggaatgtccctcttccagtggaaagcccaaccatg

SEQ ID NO: 479623 - DNA, 50 bp, Homo sapiens
tttggatatcctgaaagatcaatgcagaattacctgattctaggacaaag

SEQ ID NO: 479624 - DNA, 85 bp, Homo sapiens
ctgctgtagtcctgttcttctggctctaagatctgaatgttgtgaccactaatttgggtggacccgaactccccggtgctcttgg

SEQ ID NO: 479625 - DNA, 100 bp, Homo sapiens
gtggtgctggctcagtacatattcaccttgaagaggaagacggggcggaagaccaagatcatcgagatggacaaggtggagcagacacctcgcagtcaac

SEQ ID NO: 479626 - DNA, 108 bp, Homo sapiens
aagccgaggaaaagtagaaattgatcagcaacaactaactcagcagcaacttaatggaaactagagactaaggtgtcagtatgttcttcaagctgctctgctcctggg

SEQ ID NO: 479627 - DNA, 83 bp, Homo sapiens
catcagcttgtaggagacagaggacagtcattttgtttactcattcagccctgttgcaggtcccaataaactcttcataaggt

SEQ ID NO: 479628 - DNA, 100 bp, Homo sapiens
cctcgtgaagaacctgaaggacacactagaaaacctcggatcaattctcagctggtggcacaacaagtggcacaacagtatgccaccccaccacccccta

SEQ ID NO: 479629 - DNA, 90 bp, Homo sapiens
atcagtgctgctttctttaggacgaaagagcatcgaactggctccacacaaagtcctcggacacaacctcgagatgaagactacgaaggg

SEQ ID NO: 479630 - DNA, 73 bp, Homo sapiens
ttcattagaaggatcccaagtatatcttggattggcctaatgaagaagttcaacctggagagatggaaaatca

SEQ ID NO: 479631 - DNA, 75 bp, Homo sapiens
aagtcatgggagcagagctcagacatgttctcaccacccttgggagaccagtgtaaatttgatcatgatgcagag

SEQ ID NO: 479632 - DNA, 90 bp, Homo sapiens
ctcgcacacagcaggatttaagagtaggtgatttcaaatcggagaagtccaacggggagctaagtgaatctcctggagctggaaaaggag

SEQ ID NO: 479633 - DNA, 98 bp, Homo sapiens
tcccggccccggggccacctcacgttctgcttccgtctgacccctccgacttccgggggggccctcagcctcttggccttgaacgggctgttcatctt

SEQ ID NO: 479634 - DNA, 75 bp, Homo sapiens
aaaaggtcgcctctttgctgcaccaggtgtcctggagacaggatgccggctccaggagcagcagtggaggtcggg

SEQ ID NO: 479635 - DNA, 82 bp, Homo sapiens
caactgttaagatggaatgctttgcacttggcaagatggcactggatctttaaaacgcagtggttcctttagcaaactccgg

SEQ ID NO: 479636 - DNA, 75 bp, Homo sapiens
gaatggagaaggaagaggagtcgggccaggaaggaatactgggagaatcttcggatagcctcaggccggccatac

SEQ ID NO: 479637 - DNA, 90 bp, Homo sapiens
tgtccgcccccttggccactgatcccccgaagagcttctgtcgccgctctaggggaaaacttgttattggacacaatatgctcttggacg

SEQ ID NO: 479638 - DNA, 98 bp, Homo sapiens
ctggatttcctgaagagcgatgaaggtggcaaagtgctgcttccaaagctcattgacttttctgctcaggacccagatgatgtggtaccagttggcca

SEQ ID NO: 479639 - DNA, 82 bp, Homo sapiens
ggccaagggaccaaggtggaaatcaaacccggctcagttcggggaagctgcaggagttcggcgtgggtgatggcagcaagct

SEQ ID NO: 479640 - DNA, 76 bp, Homo sapiens
cgacaggaaaaaaatttgctggatattgatgcgccagtcactggaatactttcaagtcatcccaaatatggttcca

SEQ ID NO: 479641 - DNA, 51 bp, Homo sapiens
ctataacaatgcagtgtataaagacctccacaatctaaattgcttcgtgaa

SEQ ID NO: 479642 - DNA, 51 bp, Homo sapiens
cccactgcgcccaaaccgaagtcatgtatgctccagaatcactgacagaga

SEQ ID NO: 479643 - DNA, 100 bp, Homo sapiens
ctggatcccagctttgtggctgccgtcatcaccatcaccttcaatccgctctactggaatgtggtactccaaagattcaggtttactcacgtcatccagc

SEQ ID NO: 479644 - DNA, 100 bp, Homo sapiens
cgggacctgctcctggacccggcctgggagaagcagcagagaaaggtctgccatcatggatgttctcgcagaagcaaatggcacctttgccttaaacctt

SEQ ID NO: 479645 - DNA, 82 bp, Homo sapiens
aaagatccccgttcctggagattctgattgagttccagggtctccctccactgctgtagtaacccgggtccggggcctcggt

SEQ ID NO: 479646 - DNA, 100 bp, Homo sapiens
tgctgaaggctttgccgacttcagccagatgtccaagtgctgagcttgcaagacctctgctgccgggcggtcgtgtcctgcacgccggtgcacctggtgg

SEQ ID NO: 479647 - DNA, 89 bp, Homo sapiens
gggccgcgtccatcacctggcactcaagcaatgcaggcggggaccttataactaagacggctcttgacttttggcgggccggaagaaag

SEQ ID NO: 479648 - DNA, 100 bp, Homo sapiens
cgcggccaggccccccaacatggactgtctctgtatagtgacaaccaaggacctgctgaagctcacacccgtggaccacccagactgcctgccgctacag

SEQ ID NO: 479649 - DNA, 100 bp, Homo sapiens
ggggacgcgggtcggacgcgtccggctgtggaagagagcggcggccgctcacaacatgcacagcctggcgacggctgcgagtctgagaagccaactgggg

SEQ ID NO: 479650 - DNA, 111 bp, Homo sapiens
ccaaagactcattcgcttctccctggacaacaggagaggcttctacagccaggacctgcccccaggagcctctcaggggttggtacaggtcttgggcctacactggagttt

SEQ ID NO: 479651 - DNA, 90 bp, Homo sapiens
taaaggactgatttttagaactccacatttgagattgcaaaggtcgactgcaaggaagtactagacatcatttgtaatctggaatctgag

SEQ ID NO: 479652 - DNA, 82 bp, Homo sapiens
ctggatgcgtccggactcctgcaggttttaaaatcaaagatgggaaaatcggagaaaattgcccttccccatggccagcttg

SEQ ID NO: 479653 - DNA, 82 bp, Homo sapiens
agacagtgacgacaaaacaccagatgatgaccctgagcaaggaaaatctgagggagggaaaacccctgatcctaaaatgaat

SEQ ID NO: 479654 - DNA, 80 bp, Homo sapiens
cgtgggtgaagataggatcaagatggccatgtggcagggtgtggatgaggtcaccattgtcaacattttgaccaaccgca

SEQ ID NO: 479655 - DNA, 109 bp, Homo sapiens
gttttttcatattacatctacaagaggggacaagtacctttatgaaccagtgtatcccaaattttccagcaaataacattgtgaagttcctggtaggctttaccaacaa

SEQ ID NO: 479656 - DNA, 87 bp, Homo sapiens
gttggagaactacagaaacctcgtctccctggtattgactcggagacaaaaagaggccaagaccaagagtgacagtgggacagctgc

SEQ ID NO: 479657 - DNA, 96 bp, Homo sapiens
acatgccttggagttcttgagaaaggattgcgccaacgtcaatggcttgttagcagtggcacaagatcttacagaggatgaagaaacagtagaaga

SEQ ID NO: 479658 - DNA, 90 bp, Homo sapiens
ccgggttcggggaggcggcggccgcggcggtcgctgggggccacggagcctgagaaagggctattgcaagacacgaagtccgagaaattg

SEQ ID NO: 479659 - DNA, 75 bp, Homo sapiens
ctcaatctctactcgaagaagaaagagaagaaacgttttctcaggaaatgtggctttagataatctacagataaa

SEQ ID NO: 479660 - DNA, 100 bp, Homo sapiens
gacaagttcctgggccgcgccgaggtggacctgcgggatctgcaccgcgaccagggccgcaggaagacgcagttaatgttcgtgaagaaattgaagagtt

SEQ ID NO: 479661 - DNA, 100 bp, Homo sapiens
cattgtcaaccgattctattcagtaccaccttcagatggaggataagaatggacgagcctgcaactggtgaaagaaaaaatggatctactgctgttgctg

SEQ ID NO: 479662 - DNA, 98 bp, Homo sapiens
agctcactgcaactgctgcctcccgggttcaagcaattcttttacctcagcccccccagtagctgggatcacagatgttcccacaagcctgcatttcc

SEQ ID NO: 479663 - DNA, 75 bp, Homo sapiens
gtggcagtggaaaatgcgctcgggctggaccagcaggaccatggccaacctggagcgcaccttcatcgccatcaa

SEQ ID NO: 479664 - DNA, 75 bp, Homo sapiens
ggcgaaggtctcagagctttacgatgtcacttgggaaggtatacccgaaatcttgtggatcaaggaaatggaaaa

SEQ ID NO: 479665 - DNA, 87 bp, Homo sapiens
ccaaccttccttctgacaagtcccagaccctgtattcagtggatcagctggcaccacccaaatagataaattggcccatctggtctt

SEQ ID NO: 479666 - DNA, 98 bp, Homo sapiens
gcctaccacctagaactggattgtgcggttctccccatgacaccacctgaacgtctcttcctcccaagggtgtgtggcaccaccctacacctcctcct

SEQ ID NO: 479667 - DNA, 100 bp, Homo sapiens
cgccggccctgccgcgccccatccgcaacctggaggtcaagttcaccaagctgggagtgtccactcgccttccaccagcatggcaacgtcttcacagtac

SEQ ID NO: 479668 - DNA, 100 bp, Homo sapiens
gcgggtgaccgagtggggcagcctgtctcgcccaagaacttcaaggtgaaaatgatcatgaagacatcagttctgctcagctgggagttccctgacaact

SEQ ID NO: 479669 - DNA, 90 bp, Homo sapiens
ggggcctgctcccggagagatacggctatgtcgatcgaaatcgaatcttcggaatttcattcatacctgtgaaaagctctgccatgaagg

SEQ ID NO: 479670 - DNA, 100 bp, Homo sapiens
ggggcagccgctgagacggtttttcacaagcaagctgtgtaatgttcttgatcgactaaatgtgattgcagaaagtgtggtgaagaaaacaggtttcttt

SEQ ID NO: 479671 - DNA, 82 bp, Homo sapiens
ggagcagcgcgtcgtggggcgagcggcagccacacccactcgcccgggtctatggccacggtcggagagtggtcctgtgtgc

SEQ ID NO: 479672 - DNA, 100 bp, Homo sapiens
acggttataagaccatttatttctttggagacaaaactatgccagaccgtgtgtgaatgcctgctctgtgagccctcagaatctactggctgaatgagtg

SEQ ID NO: 479673 - DNA, 75 bp, Homo sapiens
caaaggcaagtacatctgtattcaactgggtaaagtctgttgtccaggctggagtgcagttgcgtgatcccggct

SEQ ID NO: 479674 - DNA, 101 bp, Homo sapiens
gcaagtaatgctgtatgtgctccactgacctgggttccagttgatggagtttgcactgtagcaaattgcgttggaaaagaactagctccacatgtcaagaa

SEQ ID NO: 479675 - DNA, 80 bp, Homo sapiens
agacactgaacgaggagccagtgcggcagtccctgccccggtgggccgagtgcaggctgctacagaaggaggcctcgctc

SEQ ID NO: 479676 - DNA, 98 bp, Homo sapiens
gcagctggaccatgttcctcattaacatctgtctgtccgcttagtcatcacatcatttcactgtgaaatgcactcggtgatggaaagagagccactat

SEQ ID NO: 479677 - DNA, 50 bp, Homo sapiens
ggcgctgaaacggattaataagatccaagtattttagaacatgctcaaga

SEQ ID NO: 479678 - DNA, 90 bp, Homo sapiens
ccatcggcaagggcaacttcgcggtggtcaagcgggccacgcacctcgtcaccaaggccaaggtgaacctgagcaaggtgggcgagtatt

SEQ ID NO: 479679 - DNA, 88 bp, Homo sapiens
gctacgcgcggggcgggtgctgcttgctgcaggctctggggagtcgccatggtgaatgaaaactttgccattgatttgatagcagagc

SEQ ID NO: 479680 - DNA, 75 bp, Homo sapiens
cctatgggaagccaacgatcggaacgaaacttggctgtgcttcaccgtggaagccaaaatgaagtttaatccctt

SEQ ID NO: 479681 - DNA, 156 bp, Homo sapiens
gaattcctctgagctttctggacttccagctgggcctgacagagaaggctcactcaaggatcagttggctttagcaattgctgcgttcctttgcctgcaacaggggtcaagatgagttttgcctgacttctttgatgtcctgaactttccgtagtc

SEQ ID NO: 479682 - DNA, 100 bp, Homo sapiens
gcagtggtggccctggagcagtatgccagcaagagctcgtccgcatggtgctgaatggctgaggaccttcccagtctccccagagtccgtgcctttccct

SEQ ID NO: 479683 - DNA, 75 bp, Homo sapiens
ctgatccagctggtggtcctggtctacgtcatcggaagcgaatgtctgtgacggagggtggcatcaaatacccag

SEQ ID NO: 479684 - DNA, 76 bp, Homo sapiens
cagaaaaagtgctcctgggactccaggataccaggtttgatgaacttgtgaaaaaattcaaagtcgaatatcatgc

SEQ ID NO: 479685 - DNA, 100 bp, Homo sapiens
cccctcccaacttgtgtggcacctcccacgccattgtgggactcatggccaatgaaaccgaccagagggcaaagtgttggagacagttggtgtgtttgag

SEQ ID NO: 479686 - DNA, 100 bp, Homo sapiens
tgggggagccctgccctcctggttcggcctccccgcgcactagaacggtcaaacttgtcagtgtcctaatcccagagaaagagcagaagcctaaaggcaa

SEQ ID NO: 479687 - DNA, 82 bp, Homo sapiens
ggcccttgttcccccaaatgtctgactctgactctcggactgagaaacgcaagctggcccgagataacttcttccgctgtgg

SEQ ID NO: 479688 - DNA, 74 bp, Homo sapiens
gccaagctcctgaaggagcaccagggcatcttcaccttcctctgcgagtctcttcaagaaaatgaggaggagga

SEQ ID NO: 479689 - DNA, 97 bp, Homo sapiens
ggatggaattctcctgcctgcgggtctttaaagactgaggccatggtaggggaggagtgtgtaggtgccatcgtttgcaagttggatatgcacaaaa

SEQ ID NO: 479690 - DNA, 82 bp, Homo sapiens
aaacgggactggctagttaaacaaagaggctggggctgggttacgacccctacaaccctgagctgcccaagccccccgcgca

SEQ ID NO: 479691 - DNA, 74 bp, Homo sapiens
ccgattcctcctccttggtcgccgcgtccttggctggcgtaagtcaatgaaaggattctattttgcaaagctgt

SEQ ID NO: 479692 - DNA, 82 bp, Homo sapiens
catgaaccgggtcctcagcttccacagcgtgtctgaacgtcctgactgccatcctgctgctgctgcgggagctggatgcaga

SEQ ID NO: 479693 - DNA, 50 bp, Homo sapiens
atcatcctgctgctccccggaagcgtgtctaggaagccctccctcctgac

SEQ ID NO: 479694 - DNA, 51 bp, Homo sapiens
acatctggaggctgggaaatggagccggtgaaacctgaagaaggcagagat

SEQ ID NO: 479695 - DNA, 100 bp, Homo sapiens
ccgccctcagccccggcgcagacatggacccctcgcgagccatccagaacgagatcagctccctcaaaggcctgaccgccgctgcctacagagtcacact

SEQ ID NO: 479696 - DNA, 98 bp, Homo sapiens
ctcctccaagaaccaacccccaaattggctgggacaggttatcactgtgaatataagatgcggacaggaaggaaacctgatggctgtgctatttgctt

SEQ ID NO: 479697 - DNA, 74 bp, Homo sapiens
tgaatgatgcctataagaccctcctggcccccctgagcagaggactgtaccttaaccaaaaacttttgctagaa

SEQ ID NO: 479698 - DNA, 100 bp, Homo sapiens
gcagcttcagcacaatgacattgacaaacgggtgaagtggatcctaaagagaggatagcacgccaacgaaaattattacagaagaaacttggccttaata

SEQ ID NO: 479699 - DNA, 98 bp, Homo sapiens
agcagcaatttcacaactcaggcacgcactcctggctttaaagtttatacttgcatttgccatacctgataagccacggcatatccagatgaaactag

SEQ ID NO: 479700 - DNA, 106 bp, Homo sapiens
gtcttcccgcgtccgccgattcctcctccttggtcgccgcgtccttggctggcgtgtgtcatggagaaactccagctgggcccagagattctgcagcgggaaaatc

SEQ ID NO: 479701 - DNA, 83 bp, Homo sapiens
agaagacaagagtcatggaaaaaaccaagtggctggatatcaaaggaaatcatggagcatctttccttgaagaagtacattat

SEQ ID NO: 479702 - DNA, 75 bp, Homo sapiens
caaaaacagacgcccagaaaaactccgagactcgctcaaagagttggaggtgctcctcgcctgcttgcagatatc

SEQ ID NO: 479703 - DNA, 100 bp, Homo sapiens
gctgagaaaagtaaacagctgaaggatgaaggagccagtttggctgaaaataaaagtgagatggaagattttcgaggtatagcagaagaatcatttccaa

SEQ ID NO: 479704 - DNA, 75 bp, Homo sapiens
ttgcgctgcccagggaccgatgttgcgcgaggaaaatgcgggacgcccagaaaggacctaagtgtgaaatacccc

SEQ ID NO: 479705 - DNA, 90 bp, Homo sapiens
gccatttcacctctaaaaaatgggatgggccaggacgactggaatgggaccaggccgtcgctgaaggcccctcctgctaggccagtgaag

SEQ ID NO: 479706 - DNA, 99 bp, Homo sapiens
ctcagggatatgcactctgcacttccattcctgcagtgaaattaactcgagcttggcagagcgaaaagctgttgctatatgatacagtccagagtgaac

SEQ ID NO: 479707 - DNA, 88 bp, Homo sapiens
ggtgctggcatccgaacaccgggtggctggtgcagccgaggtcttcgggaattccagcgaggctagagatgatcgctatggaaaatcc

SEQ ID NO: 479708 - DNA, 75 bp, Homo sapiens
ctgcaccgccccctgggatccgcaggttccctacacggtctcctgggtcaagctggtggatagcgaggtggtcat

SEQ ID NO: 479709 - DNA, 82 bp, Homo sapiens
cctgagcaagcggaggacctacgccggcctgggttgagaacttgttgcttagtaaccaagggaccattaagctgtgtgactt

SEQ ID NO: 479710 - DNA, 100 bp, Homo sapiens
cacaaatgtttttctgttttgcctgaatacatgatttaaacaagagatttccacagaaggtgctgaagacgcggttgaccttgcgtcggacgggccagta

SEQ ID NO: 479711 - DNA, 97 bp, Homo sapiens
ccgaggaattcatgatcatttgccagtgctcctgatatggaagatatattgactgaatcagaaattaaattggatggtgtcagacaaaagatattcc

SEQ ID NO: 479712 - DNA, 101 bp, Homo sapiens
cttatggtgttgacggacctgcagagacatttgtttgggtgaacaatgcatctgcacattcccagagtgttgccaaggccaaatatgaatttttatttggc

SEQ ID NO: 479713 - DNA, 74 bp, Homo sapiens
aaccttcccgccagactacggcttccccgaacgcaaggagcgcgggctcactcgctttgacctgctgggtgact

SEQ ID NO: 479714 - DNA, 100 bp, Homo sapiens
aatagcgtcattgatatctgcttctaagatgaccagagaggagaacttaatcccgtattctccagatgtacagatacacgcagagcgattcatcaactat

SEQ ID NO: 479715 - DNA, 73 bp, Homo sapiens
caggaaaggaaaaacccacaaacatgttcacaacgggcatgttgttgacctcctgtactggagagacattaag

SEQ ID NO: 479716 - DNA, 100 bp, Homo sapiens
gttcctgctccttctacatctgcagataaagtggagaggatgaagccccacccgcccttcaggatgccagccttggcaacatcgtgagaccctgtttcta

SEQ ID NO: 479717 - DNA, 118 bp, Homo sapiens
catattcaccttgaagaggaagacggggcggaagaccaagatcatcgagatgttttcggctttgtgagaaaccttaccatcaaacacgatggccagcaacgttaccaacaagacagat

SEQ ID NO: 479718 - DNA, 100 bp, Homo sapiens
aagaggaggaggaggaggggcggagggagacgcccgaggacagggaggtgcgtctgcagctggcgcggaagagctctgcttatgataatgtcaacaaagt

SEQ ID NO: 479719 - DNA, 99 bp, Homo sapiens
aaagggggagcggctgccccagccccccatctgcaccattgatgtctacatgatcatggtcaaatctgacacttcctccatggcccatctatcgccggc

SEQ ID NO: 479720 - DNA, 100 bp, Homo sapiens
agagcattttactactgagctgcaaagctaagggagaacattgagcaattcttcaccaaatttgtagatgaggggaaagccactgttcggttaaaggagc

SEQ ID NO: 479721 - DNA, 100 bp, Homo sapiens
tgggccttttgggcagcttttccggcctgacaacttcatctttgttcccagtgacctgacagcagaggagcgtcaagaactggagaacatccgacggaga

SEQ ID NO: 479722 - DNA, 100 bp, Homo sapiens
aaaaagccctcagtaccagagacagaagcagatggattcgtccttttagacttacagattccagtctgctgttagatgattattcatccaagttgagccc

SEQ ID NO: 479723 - DNA, 82 bp, Homo sapiens
ctgagcttggcctcggcgtcctcggatattgatgatgttaagaagttcaaaccgggttacctggaagctactcttaattggt

SEQ ID NO: 479724 - DNA, 82 bp, Homo sapiens
gcagcaatgaaaacctcgacaaaatagatatgtctttgggttttaaaatcaaagatgggaaaatcggagaaaattgcccttc

SEQ ID NO: 479725 - DNA, 83 bp, Homo sapiens
gaaatgggctcgaccccccatttccatgaactttgagcaaaatgatgcttcaacacccaggccaggtctctgcctcggaagtg

SEQ ID NO: 479726 - DNA, 82 bp, Homo sapiens
caagttcttcaggaatggagacacggcttcccccaaggaatatacaggggttgtgtccactgtggtccccgactctgcccac

SEQ ID NO: 479727 - DNA, 100 bp, Homo sapiens
tcctataacaatgcagtgtataaagattacctctctagtgacccttcagctgttaaccctggttggccatgacgatcagcttgatggaccaaaatacaaa

SEQ ID NO: 479728 - DNA, 74 bp, Homo sapiens
gtgaaaagactgaaaccggaccctgagccagatgacaagaatcaaggagagccatcaggacttccggagcatca

SEQ ID NO: 479729 - DNA, 80 bp, Homo sapiens
aggacgtcttcttcgacatggaggcctacctgcccaagaagaacgggacagtcattttgtttactcattcagccctgttg

SEQ ID NO: 479730 - DNA, 74 bp, Homo sapiens
gaagatggtggcggctactcctcctggtattgttgcagcatctggcagtgagactgaggatgaggacagcatgg

SEQ ID NO: 479731 - DNA, 100 bp, Homo sapiens
tttcccccgagggtcaacgagaaagagatcgattctgtttctggcgtctgcatacgcaagtccccaactcgctgaggagagctgttcagctatggctgct

SEQ ID NO: 479732 - DNA, 100 bp, Homo sapiens
tagatattaatgaactaactcagcacctggctgcagtggaagaaagaaagatcaagtccctggtagctctcttggttgagacacaaatgaagaaactaga

SEQ ID NO: 479733 - DNA, 98 bp, Homo sapiens
gtaagcgcacgtttaaacatctcaagttaaaggcattaggatttcctgaaggacttgtgatacaagcgtattttgcttgtgagaagaatgagaatttg

SEQ ID NO: 479734 - DNA, 96 bp, Homo sapiens
tcctagtccgaggtgccaccgtggaaggacagaatgggaaatgtttcaacgtgcgcaagcgttgcggcggcgggcagaggactactacagatgcaa

SEQ ID NO: 479735 - DNA, 82 bp, Homo sapiens
ctggtcttgctcggccgatgaagtgcagaggtttttttctgatgagagtccggagtgttgtcatgtgaagcctgccatccag

SEQ ID NO: 479736 - DNA, 108 bp, Homo sapiens
gcttttgccactgactcggccgtgtcctgacacctccaggttgtccatctgggactttcaaggccaaccaaggggatgaggcctgtacccactgtcccatcaacagcc

SEQ ID NO: 479737 - DNA, 75 bp, Homo sapiens
agcaggggcagatggcaagtggagacagcaatctcaacttcagtcgagcaaaagatgtgataataccagcaaagc

SEQ ID NO: 479738 - DNA, 83 bp, Homo sapiens
ggagaggccgtgtagcgtcgccgttactccgaggagataccagtcggtagagggtctgctgagaacagacccagtccctgagg

SEQ ID NO: 479739 - DNA, 100 bp, Homo sapiens
atggatccatttctcctattgaggagtcaactgttctggacttggtgcctctttctgttatatgctttcctatttagttgggagaccagttgtatacaaa

SEQ ID NO: 479740 - DNA, 98 bp, Homo sapiens
tcaaactgaatcctctaaaggccccatacaatgaagtagacattggtggaaacatttagaagtgtttggattgtgagctatttcagaactgttctcag

SEQ ID NO: 479741 - DNA, 106 bp, Homo sapiens
agactcgcaacaagatcccctatgagagtcccatcttcagcagagggggatatgagactttctactcggaatatcctgagtgttgcgtggatgtaaaacccatttc

SEQ ID NO: 479742 - DNA, 87 bp, Homo sapiens
aaaatggaccaacttctttggcaagtggacattttactggctcaacaacatggccaatctttcctaagctgctcagcttacaagaaa

SEQ ID NO: 479743 - DNA, 75 bp, Homo sapiens
attagaaccatggttttcccagtgatgtacctcaatgagatgtggcaaaatctggcaaaggcagagaccaaactt

SEQ ID NO: 479744 - DNA, 51 bp, Homo sapiens
ggaaagacatggagattctcttaaaaagtcttgctggtggatgccctcctt

SEQ ID NO: 479745 - DNA, 101 bp, Homo sapiens
gatctggacttcaaaaacatcatggactttgttcagaaaaaggagctgtatgcggccggggagaaccgcctgggaacagacgagtccaagttcaatgcggt

SEQ ID NO: 479746 - DNA, 90 bp, Homo sapiens
atggtggccaacctcttgtatgagaaacgggcccaggacctcccagtgggtttccgtcccagcagcccgggcgccacagcagtctgacag

SEQ ID NO: 479747 - DNA, 96 bp, Homo sapiens
gttaagaaaggaaatcaaaccgaaaatgtgtatataggttgatgccggcccaggatggatcagacctgtgaactacccagaagaaattgtctgctg

SEQ ID NO: 479748 - DNA, 75 bp, Homo sapiens
atgtggtggtgaaaaatgaccctgaactggaccagcagagatgttcgacaagcagcaggcgaacaccatcttctg

SEQ ID NO: 479749 - DNA, 96 bp, Homo sapiens
aaatacagatgaatgaagaccccattcggaaagacacctggccagcggtccagagctgatgcaggagccacacaggacagttgacccaacacttct

SEQ ID NO: 479750 - DNA, 98 bp, Homo sapiens
cacattctcaccagccactattgaaaacgaacttataaagttctgccgggaagcaagaggcaaagagaatcggttggggccagtgtcattcaaggacg

SEQ ID NO: 479751 - DNA, 97 bp, Homo sapiens
ggactccggagccgcacaaaccagggctcgccatgaagccagtttgaatataatgtagaaggagtgacttccaaggaaatggctacccaacttgcct

SEQ ID NO: 479752 - DNA, 75 bp, Homo sapiens
acagagagccatccgagttaaaagagtggtggataagaaaagattgtagagtacagagagatggatgaaagcttg

SEQ ID NO: 479753 - DNA, 75 bp, Homo sapiens
atctgagcctcagcaagagaaattaaccctatacctctgacccaggtcttgggcgtctttggtactggctttttt

SEQ ID NO: 479754 - DNA, 50 bp, Homo sapiens
cctgaagcaacatctggttctacaggtatttacatgaggaatttccagag

SEQ ID NO: 479755 - DNA, 74 bp, Homo sapiens
ttacaacattaatcagatactgcatttaaggagccaaaaacctgtatatcatctccgtgaaggggatcaaggga

SEQ ID NO: 479756 - DNA, 83 bp, Homo sapiens
aggccaaccgcgagaagatgacccaggacggaagctcctgttttcttgtcagccgccagctgagggccattcgcagcttctcc

SEQ ID NO: 479757 - DNA, 76 bp, Homo sapiens
ccagggaatatcagctcaatgattctgcttcatacaaaccacagtgctaagcagtgccggacaccatgtgccttga

SEQ ID NO: 479758 - DNA, 75 bp, Homo sapiens
atgatttactgaaatttgatgacctagatggaacacatgctctgatgctgctacaggagctgagagaccctaccc

SEQ ID NO: 479759 - DNA, 80 bp, Homo sapiens
cttactgaaggccgtcttaaagttacgttgttagaatgtagcaggaattgagtgatctacagcgcgatccacctgctcac

SEQ ID NO: 479760 - DNA, 82 bp, Homo sapiens
tgggccacccctcctttcaggtcaagagtgaccgccttctgatcagaggtgggaggatcgtgaatgacgaccagtcctttta

SEQ ID NO: 479761 - DNA, 90 bp, Homo sapiens
gaaacctgttttttttctggagctgatcttagaaacctctgcacagaaagcttcttcgagacaccttcacttccctgggctatgaagtcc

SEQ ID NO: 479762 - DNA, 101 bp, Homo sapiens
gaataactgtcaagacaacagtgatgaggaaagctgtgaaagttctcaagaaccagcttcttgcaaaaggactgttctttgtggaggagaagatcaagctg

SEQ ID NO: 479763 - DNA, 90 bp, Homo sapiens
tctatgggcggggacccaggcgcaggcatctctgacacgctgtgggccatcgagatgtgggaccctgcggcccaggcgttccggctgaac

SEQ ID NO: 479764 - DNA, 97 bp, Homo sapiens
caaagacgcggctgattataatttatgggggcataaggaaatggtggcaggcacttcctcctaacaagaaggaagtagttaaagaaaatataaggaa

SEQ ID NO: 479765 - DNA, 74 bp, Homo sapiens
cgtcggtggtgttggcgctgaggacccggacagccggccctggccaacgtcaacattgggagcctcatctgcaa

SEQ ID NO: 479766 - DNA, 74 bp, Homo sapiens
ctcagaacttggtgctgctagaatgcaggaacagcaggtccttatgtcgtcagaagatcgagaagctcaggagg

SEQ ID NO: 479767 - DNA, 82 bp, Homo sapiens
tcgccagcccgtgccgcgagcgcggcctgcaggagggcgcggatggcgtcggggcgccccgaggagctgtgggaggccgtgg

SEQ ID NO: 479768 - DNA, 90 bp, Homo sapiens
gtacagtgacatcttctgggatttagtctggtgtcagcttcctctggtgcaaccagcaagtcttccagtatgaatcccacagaaaccaag

SEQ ID NO: 479769 - DNA, 140 bp, Homo sapiens
gaagagcacgcagagccgcaagctggtggaagcgctgtgcgccgcgggccaccgcgccgaactgctccggttcccggattggaggtggacacaaaggaagaggcagccagacagctacttcagcgtcctcaacgcattca

SEQ ID NO: 479770 - DNA, 87 bp, Homo sapiens
cggggacattattgcgcgtggaacggctgcttttggaaggagcgggacggtatgcgggccatcctggggtcctacgacagcgagctg

SEQ ID NO: 479771 - DNA, 51 bp, Homo sapiens
tctcgggctcggaacgagactgcacgtggtagtcgctcttctaaaactttt

SEQ ID NO: 479772 - DNA, 73 bp, Homo sapiens
aacgctctctcagcagcttccaagagaaccaatggaatggagaaggattggcctaatgaagaagttcaacctg

SEQ ID NO: 479773 - DNA, 82 bp, Homo sapiens
tttaattttagggtcctttatatagaagggagagtaggctgaagtttctctttggctcatcagccacccaggccttggacct

SEQ ID NO: 479774 - DNA, 101 bp, Homo sapiens
gttttattgggaggtaaaggtcaatgcgtaggggtagagtaagaacaatccatttcacagatgaagaaacagactcagtgagcacgtgatcacttctcaca

SEQ ID NO: 479775 - DNA, 80 bp, Homo sapiens
ctagcacccagaagatgagaccgcaattcgagaatcaaagggccgggagcgatggtgtctgtgacctttgatgatgtggc

SEQ ID NO: 479776 - DNA, 75 bp, Homo sapiens
accaaaggcctgtgtgctgcagaacccccagaccatcattttggaaattttagcattcaggtgccaggaatgcag

SEQ ID NO: 479777 - DNA, 80 bp, Homo sapiens
atttgcctttagtgcactcttctccttcacagtaaagtggctggggacggcaaaacagaacagaaaggcggagataaaaa

SEQ ID NO: 479778 - DNA, 74 bp, Homo sapiens
cttcatcgaccgagatggcacacactttggtcgtgatgagaggagatggattgaaaagcagaacagagcaacaa

SEQ ID NO: 479779 - DNA, 80 bp, Homo sapiens
gtatgctggacaagaaccccgagtcgaggatcgtggtgccggaaatcaagccattgagacccagagcagcagttctgaag

SEQ ID NO: 479780 - DNA, 100 bp, Homo sapiens
gcccagcgccgcctcctcctcggccagcaacagcgagattgccctgacattctcaatcgtctttggggtgatagtgtatcgaataacaactgcagccgct

SEQ ID NO: 479781 - DNA, 75 bp, Homo sapiens
actcgaagaacagctgtggaaagaagttgcaaaacactgggacttggaccctctgtggaacacccgagtacctag

SEQ ID NO: 479782 - DNA, 100 bp, Homo sapiens
gagcgagctgagtggttgtgtggtcgcgtctcggaaaccggtagcgcttgcagcatggtcctgcagacattcgctttgtctgggagaagaatgggcgagc

SEQ ID NO: 479783 - DNA, 74 bp, Homo sapiens
gggagggggcgttagccccgcgcagccgccggcgtcgccgccatggacctagcctcaaaataaattcgctgctc

SEQ ID NO: 479784 - DNA, 82 bp, Homo sapiens
cgaggagcgcgtcgtgcgcctgggggtgcgcgcctgcgacctgcccgcctgggaaagctccaaccatggccatggggctctt

SEQ ID NO: 479785 - DNA, 100 bp, Homo sapiens
cttgggtcctccgagagcagcagcgtgaagcctggtgttcggtacagagaattgggaaacattatccagaagcatgcccaagcaaatgggttttcagttg

SEQ ID NO: 479786 - DNA, 110 bp, Homo sapiens
aaacccatactaatgttcatatgcagaccatcgaaagactggttaagctgagtcatcactagagagtgggaagggcagcagcagcagagaatccaaaccctaaagctgat

SEQ ID NO: 479787 - DNA, 97 bp, Homo sapiens
cgctcgatccagcaccatggggaagcgggacaatcgggtggcataatcaccagcaacacccgggacaataatacgggggccacctacccccacctga

SEQ ID NO: 479788 - DNA, 87 bp, Homo sapiens
aattctggcgtcagtccctcctggttagcatcttgcaaggaggtagtaacatatccagtcgtgaaactgggaaagaccagagctctt

SEQ ID NO: 479789 - DNA, 90 bp, Homo sapiens
ggacgcggccaggcgattcggtgaagcgattcctgcaggcgttggttcccctctttgacctgctcggcttattccaggggtgtgtttcgt

SEQ ID NO: 479790 - DNA, 75 bp, Homo sapiens
gatgataatgaagatcggggggatgaccagggtgcttcaaggatgaccgcatcgtcttctggacttggatgttct

SEQ ID NO: 479791 - DNA, 100 bp, Homo sapiens
ccttgctcgggatggtgccacaggaggctgtgcgggccccgctccgcttcgaatggtcattcccaacatagcaccgcaactcgtcagccttcaatgactc

SEQ ID NO: 479792 - DNA, 125 bp, Homo sapiens
gagctccgatccctgcgcgggctcgagagctcgccccgaacgggggtcttcctcctccgccgttgacagttctacttgtccaattctgaaaaggaacgttatgaaaaagaattcagccaagaaag

SEQ ID NO: 479793 - DNA, 75 bp, Homo sapiens
agtaccagaggtggggactgttgttggaggaacactttccagaagccaagtacaagaagctggagaagcgatgag

SEQ ID NO: 479794 - DNA, 83 bp, Homo sapiens
cgaaccgcagtatcatgctggccaagaagatcatcattaaggacggaggcacgtttttggctttcacccccaaccagtgacca

SEQ ID NO: 479795 - DNA, 50 bp, Homo sapiens
ggggcggagcacgcgagctatgatgagcagcaccagcagtaagagggctc

SEQ ID NO: 479796 - DNA, 100 bp, Homo sapiens
ctccgctccccacttcagacgagctcttcctgcctggaatctggcaggatggggaagcagaatagcaaactggcccctgaagtgatggaggacctggtga

SEQ ID NO: 479797 - DNA, 50 bp, Homo sapiens
gggggacgagctcggagcagcagccagacttaattcagtgcacaaatgag

SEQ ID NO: 479798 - DNA, 50 bp, Homo sapiens
ggaggggctccggctggtctgtggtgagaaggaggaacggaccatgctgg

SEQ ID NO: 479799 - DNA, 82 bp, Homo sapiens
cactagacaatcgaaaacagagttcagaaggggccaagtcctgtatctgccatgtctgtggcgtccacctcaacaggctgca

SEQ ID NO: 479800 - DNA, 86 bp, Homo sapiens
cagctatatttgcccatgttattcaagcagccgctcttctaaaacattcaaaccaaagaagaatatccctgaaggatctcatcagt

SEQ ID NO: 479801 - DNA, 100 bp, Homo sapiens
tgcagcgcatccggcacgagttccggttcaggagtttgaacatgttaatgggcgctggagcatgcctgaactggctgaggtggaggaaaacaagaagatg

SEQ ID NO: 479802 - DNA, 73 bp, Homo sapiens
gaggatccgcgggagctgcccggcagggcggagcctcccctcgcagatcagcttgaacgggtctttttacgac

SEQ ID NO: 479803 - DNA, 96 bp, Homo sapiens
cctcctgcccgcagcccgggccacctccaggagggaaggaaaagcttttgacatcacctatgtgcgtctcaagttccacaccagccgcccggagag

SEQ ID NO: 479804 - DNA, 101 bp, Homo sapiens
ggaactgagctgctcaaagacatccagctagtaaaaggcagagctgggactcatacccagagtgctgatggcagagattggtgaggatttggataaatctg

SEQ ID NO: 479805 - DNA, 100 bp, Homo sapiens
gctgtgtataatgaagatacatccatgatagaaaaacttctttcacatggtacaaatattgaagaatgcagcaaggtctctaattaacagaagatggcaa

SEQ ID NO: 479806 - DNA, 76 bp, Homo sapiens
gtgaaggaccggatcctggagaacatctcgctgtcggtgaagaaggatcttctgcaggacaactggtccttatcac

SEQ ID NO: 479807 - DNA, 50 bp, Homo sapiens
caagattgtccccattgccatccaggtctgagcagagggcggggtgcagg

SEQ ID NO: 479808 - DNA, 82 bp, Homo sapiens
gcaggactgcgccgcgtcttcctcaaggtatactgcaacatccagatggcacagttttgaaacagttacaaccacctccaag

SEQ ID NO: 479809 - DNA, 90 bp, Homo sapiens
gttgaccctgggtctgatctggaccattattttgcatttccagagtgctccaagctcccgaagccgaagtctcactttgctcccacatgg

SEQ ID NO: 479810 - DNA, 74 bp, Homo sapiens
gtcggcacctgaaggacatggagaaagggctattgcaagacacgaagtccgagaaattgagcagcgacatacaa

SEQ ID NO: 479811 - DNA, 100 bp, Homo sapiens
cgctgggagagaggtacctctccttttccctctccctttccctaaggcctatgaaaggaggttccctacatgtcctttgattccgatgttcgtgggcagt

SEQ ID NO: 479812 - DNA, 98 bp, Homo sapiens
tggtgcgggccctctggaccctggagtacaccccgcagcacagccgcgacttcaagagactaagaaagcactgtgcatcaccttgaccctggggacct

SEQ ID NO: 479813 - DNA, 96 bp, Homo sapiens
tactgctccgtggtctcagcccaggacctccaggggaacaatgaggcctacgcagagctcatcgtccttgattgctttattcaccaagtgaaaaac

SEQ ID NO: 479814 - DNA, 98 bp, Homo sapiens
gtttcgccacagttcctaccttatgagctcggttttcttatgcttataagagtggaacagccaatggagatcttcgtggatgatgagacgaagttgac

SEQ ID NO: 479815 - DNA, 100 bp, Homo sapiens
ggaattttgccgatttcatgactaaccagttatttaggtcagttaacgtccataccaggatacctgaatccctccagtaggactgaaatcctgcatttca

SEQ ID NO: 479816 - DNA, 83 bp, Homo sapiens
gtagctgtaatagaatgccagcaaccagaagcagacttatacaggccctgtctctgcccctggtggtcatcgtccatggcaac

SEQ ID NO: 479817 - DNA, 75 bp, Homo sapiens
agccggatcaggagccgccgccgccatatcaggaggagatgttaaagtaacccatcttgcaggacgacattgaag

SEQ ID NO: 479818 - DNA, 100 bp, Homo sapiens
caaagcgcaactccttgaaggaactgtggcttgtgatccatgggcgagtctacgatgtcacccgcttcctcaacgaggccctggccaacgtcaacattgg

SEQ ID NO: 479819 - DNA, 78 bp, Homo sapiens; identical to SEQ ID NO: 90008

SEQ ID NO: 479820 - DNA, 137 bp, Homo sapiens
tttgctgccggtgccatggtctacgtggtcatggacgacatcatccccgaagcccagatcagagcccatggaacagacttacggcgtatgacctcatcggagacttgtacatggggccaacccccattttcccacag

SEQ ID NO: 479821 - DNA, 75 bp, Homo sapiens
gaagtgcggggctccaatggcgctttctacaagtactgccaaatctgtcgaaagggagataatgaagaactgctt

SEQ ID NO: 479822 - DNA, 75 bp, Homo sapiens
gcgtgtcacaaagcagtggtgaatgagaaagtgctccagaatattattaaggtgttcttccagagagcaaagccc

SEQ ID NO: 479823 - DNA, 50 bp, Homo sapiens
caccgcacgccctgcaagggaggtgtgcaactgaggaacatggctcaaga

SEQ ID NO: 479824 - DNA, 98 bp, Homo sapiens
agattcaactgccataaacgttgtgcaccgaaagtaccaaacaactgccttggcgaagtgaccattaatggaggtccagatggctgtggaggccaagt

SEQ ID NO: 479825 - DNA, 51 bp, Homo sapiens
gtgctacttctactccaagttcggagcttctacctggccctctacaagcag

SEQ ID NO: 479826 - DNA, 98 bp, Homo sapiens
ttgtgtcctgagatcaaatggcacttcattggccacctacagaaacaaaatgtcaacaaattgatggggtctccctctgttgtccaaggctggagtgt

SEQ ID NO: 479827 - DNA, 82 bp, Homo sapiens
cgcgaatatcgtcatcgttagaagttcttccctgtggaacagtagagacctagtctgccttctttcacaagataatccttca

SEQ ID NO: 479828 - DNA, 90 bp, Homo sapiens
gttttgaagagttctgcgttttgccagtcacctctcaactgtgtgccaaaggatttattggatcattcgtgtacatcaggaagtggctct

SEQ ID NO: 479829 - DNA, 100 bp, Homo sapiens
aatttttctttgtatttttaggacattcagtcagaagaaggctgctattgaaagagagtatgcacagaatttctagaaggaggagttggccatgttgaaa

SEQ ID NO: 479830 - DNA, 100 bp, Homo sapiens
aagcattcggcagcgtcgtcgcttcactgtggctcatacatgagctggactggccattatggaggaggagctgcagcattcccattgtgtgaattgtgtc

SEQ ID NO: 479831 - DNA, 100 bp, Homo sapiens
caagtgttattatttctgccctttgtacccttacaagcgccagccagcctttgacacctttgatgggtccctgtttgctgtttttccttctctaaatgaa

SEQ ID NO: 479832 - DNA, 80 bp, Homo sapiens
tggaacaaaaaaaggagatgcctggcagccccgctctctgcatcctccttgttcttcacagcctcggggaacctaccatt

SEQ ID NO: 479833 - DNA, 74 bp, Homo sapiens
aaggggctggtgtactccagcaacttccagtgcctccggagccagcgtggtggccatagacaacaagatcgaac

SEQ ID NO: 479834 - DNA, 100 bp, Homo sapiens
ggcgggaggcagccagtccaggcgcccgctagcttcggcggcgacccagacggggaaagcggaaggaatgtcgcgtgcccagtctaggctggatgatgac

SEQ ID NO: 479835 - DNA, 90 bp, Homo sapiens
gttgtgccagcctacaggaggaaaggccagactcacagaagtatgctcaggcttcagaagaggctcgcctctagtgtcctccgctgtggc

SEQ ID NO: 479836 - DNA, 90 bp, Homo sapiens
ggaaacacaaagccggctacgcgctgcgagggccgttgctccagggagaactgcaaatatcttcatccacccccacatttaaaaacgcag

SEQ ID NO: 479837 - DNA, 100 bp, Homo sapiens
ctgctcctatgcggtacttgaaggatggcgaagaggtcgcgcagaggcgtggagctatttcctatgacagttctgatcagactgcattatacattcgtat

SEQ ID NO: 479838 - DNA, 83 bp, Homo sapiens
agaagcgtctatgattccttcagataccagggactgggtggttctcttcccaaagtggaagccaaattcatcaattatgtgaa

SEQ ID NO: 479839 - DNA, 75 bp, Homo sapiens
ggaccccggtacatctgaaagccgggaaatggaatagagctgtgcccccctggaaaacggttcatgattacgatg

SEQ ID NO: 479840 - DNA, 74 bp, Homo sapiens
ggggggctcggacccgcccccgactcgccgagccagctgccaccttcatggagcactggaagcggaaacagatg

SEQ ID NO: 479841 - DNA, 51 bp, Homo sapiens
acacaaaccccaatctcagtggacaagatattgtgaataacaagatggtgc

SEQ ID NO: 479842 - DNA, 90 bp, Homo sapiens
ctgggaatgtcctacgtgttaccggaaccacgtgaatgttgagggggcgacacacaagcaggtggtggacctgattcgagcaggcgagaa

SEQ ID NO: 479843 - DNA, 100 bp, Homo sapiens
gccctgcagtggaacatgatgccagaaaatcaccatagcatggcctccttggatgaggaaaatgaagctcgggctggttaactgacttgctcagcgtccc

SEQ ID NO: 479844 - DNA, 83 bp, Homo sapiens
tgggacaacattcagacccatttccagtcatgagttcgggatgagtatcggcaggactacgatgctgggagaggaggctatgg

SEQ ID NO: 479845 - DNA, 75 bp, Homo sapiens
atgaaatctcgaaggggacctcatgtccctgtgggacacaatgcccccaagttgattgatattacaggcaagaac

SEQ ID NO: 479846 - DNA, 75 bp, Homo sapiens
gggaggaaggaacgaggcaaggagctaaagcagcgtgcgttcagccctggggtttctacgataaagacagttcag

SEQ ID NO: 479847 - DNA, 50 bp, Homo sapiens
cttcgatgtgcgagactttggaaagtgatgttcctccatcttacgttcaa

SEQ ID NO: 479848 - DNA, 76 bp, Homo sapiens
ctcgtcagcactgactttcagctatggaatcgggattacatctactacaacgacgtgtatgcctttaatctggaca

SEQ ID NO: 479849 - DNA, 75 bp, Homo sapiens
gcacaaatacatttacaagagccctgagctgccacggatactgaggctgacaccccttcagactgagttatacaa

SEQ ID NO: 479850 - DNA, 82 bp, Homo sapiens
ctgcaaatggttctgctgaaacatctgccttggacacagggttctcgctcaagtcttgggcgtctttggtactggctttttt

SEQ ID NO: 479851 - DNA, 100 bp, Homo sapiens
acagaacctgtccaggagctggcatgacgtgcaggtctctagcgcatttgatggtagagtggtggcaaagcttccttttacccctctttcttacatccaa

SEQ ID NO: 479852 - DNA, 88 bp, Homo sapiens
cggaggaagatgaaccaacgttagaagcagcctggcctcatctacagaggctgaggggatctggcggtggagcgctaggatcagacgc

SEQ ID NO: 479853 - DNA, 82 bp, Homo sapiens
ctcccactccctgaaatctggagtgaagaacgccgccatccagccaccattccaagggcatcgagcgcctcaaacgaaagaa

SEQ ID NO: 479854 - DNA, 75 bp, Homo sapiens
agatgcagtacgccacggggccgctgctcaagttccagatttgttgccaaaacaaaggggatttggtgatggagg

SEQ ID NO: 479855 - DNA, 83 bp, Homo sapiens
caacgggctcatcaactcctacgaggacaaaagcaacgacttcgtatgttcaaaagaatgctgaaccgggagctgacacacct

SEQ ID NO: 479856 - DNA, 100 bp, Homo sapiens
ttgctttgattgggattcacccccaaggagtctcgctgcttttgtgtgcacttacatttcaatcgaccaagttccaaggacctatgccataatgataagc

SEQ ID NO: 479857 - DNA, 90 bp, Homo sapiens
cggacgcaccggcgagcgccgaggggacaggccgagcgcggggcgccggaggcagggagctgcagtccatggctgaccaggagcaggtgt

SEQ ID NO: 479858 - DNA, 82 bp, Homo sapiens
aggaactcgactcagacgtggataaagataatcccggtgagaagccctaccactgcaactgggacggctgcggctggaagtt

SEQ ID NO: 479859 - DNA, 100 bp, Homo sapiens
ttgttacaattttttttcaagaactgccgtcttctttgcctgcactaatgtctgatgccaatgcaagttacttaagagcagctcgagctggacaccttga

SEQ ID NO: 479860 - DNA, 50 bp, Homo sapiens
ccaccgccctggccatctaccatgtggctgatcagctgaccgaagaacag

SEQ ID NO: 479861 - DNA, 88 bp, Homo sapiens
cggaggcggaagcaggactcggggcacttggtgtgcagcaaacaacttcctccttgtaacctgagtaaagaggacctgttacagaacc

SEQ ID NO: 479862 - DNA, 75 bp, Homo sapiens
tggatcgctgtgatcgtcacttggcagcagtacctgtccaaagatcgctttagttccaccttgctccacaagcag

SEQ ID NO: 479863 - DNA, 97 bp, Homo sapiens
gggacagtttctggaagttataacgctacacgaagaactaagaatattattagcacaagagcaccatactttgaggacgtgaaacggagctatgcga

SEQ ID NO: 479864 - DNA, 75 bp, Homo sapiens
tggcctcgaggccgctgctgctggcgctcctgtcgttgggagtccaacctataccttctcagggaggcaaactag

SEQ ID NO: 479865 - DNA, 75 bp, Homo sapiens
ctaggaatgagagggacaggagtatctgaggatggagaactcagcattgtggaagaaggactctgggaaaatggc

SEQ ID NO: 479866 - DNA, 100 bp, Homo sapiens
tcggggcacaaagtttggcctcttcactccaggatccagaattgaaagtatcttgatgtctttacctctaactgcccgtatgcaggtgatagactagaga

SEQ ID NO: 479867 - DNA, 100 bp, Homo sapiens
tgcgaaggccgggacccggttccccggcccacagtgggggtgtgcaaacccgagagaactggacaaggtctttactaggtgtatttgaagaagatgccac

SEQ ID NO: 479868 - DNA, 99 bp, Homo sapiens
ctgaaatggaacttgctgctagagggcttaacagagcgttccaaaaagaggactctccagctactttttattgcatcagtatgcagtggtttagagaat

SEQ ID NO: 479869 - DNA, 90 bp, Homo sapiens
ctgtacgtccctctggaccaccactttccatcatgccccaattttctagaccttttgtccccgggcaagatgtatccagttaaagcaggc

SEQ ID NO: 479870 - DNA, 92 bp, Homo sapiens
gggcacctccgagcgcaaggacagcgcgaggtccgcgcagcccagcgcagccattgcccagcagaggagcacgcagctgaacaagaagagag

SEQ ID NO: 479871 - DNA, 88 bp, Homo sapiens
gttcagcaggtggccctaaggttggagaccagcatctcagacatgtcgaaaaagatgttttgatccctaaaataatgagagaaaaggc

SEQ ID NO: 479872 - DNA, 75 bp, Homo sapiens
tgcatactcacagagttagagagagggatggtgatttgaacatggaattcaatccttcagatcatcctcgggcca

SEQ ID NO: 479873 - DNA, 73 bp, Homo sapiens
ccagtacaagacgtgtcccttctgcagcaaggtcccagcatttgagggtgatgatggattctgtgtgtttgag

SEQ ID NO: 479874 - DNA, 76 bp, Homo sapiens
gtggttcgagttggtatcttcaccggtgcccgtgtcttctttgtccatgagtttaacttacatgtgtagagctgga

SEQ ID NO: 479875 - DNA, 82 bp, Homo sapiens
cttgtgccacccaatagtagaaagacctgcaaatccaagagacacatctttggaagataagagagcttcttcaagaccaaaa

SEQ ID NO: 479876 - DNA, 99 bp, Homo sapiens
tgaccttctggagttattggctagtaagaaagtatacactgcgctgtgacatgaagcggtctctgttggccaaggacttgacaaagacctgtgaattta

SEQ ID NO: 479877 - DNA, 80 bp, Homo sapiens
attccccggaatcgtgtgctgggctggtcccccttggctttatcctgtggataaacgcagagtgaacgagtttggggagt

SEQ ID NO: 479878 - DNA, 135 bp, Homo sapiens
ctgttagtcattacaagttgctgcttcagcaaaacaagaaatttcaaaacttgatcaagtgcacagccagagaacaacacatcacacacaggaaacagttgtgctcatgtgatgggggcctcagcactaggaagg

SEQ ID NO: 479879 - DNA, 100 bp, Homo sapiens
ggagagtctgtgccgacaagatggcggacggggagctgaacgtggacagcctcatcacccggctgctggaggggaatgacagaggaagaggaagacaaac

SEQ ID NO: 479880 - DNA, 83 bp, Homo sapiens
tgaaagtccaagcaaaatttttatgcatttcatttagatagaagaaattcaccaccaaatagtttgacaccgtgtctaaagat

SEQ ID NO: 479881 - DNA, 100 bp, Homo sapiens
cttcgatcccttctctgatttgctgtcagccatgaacggatggatgtgatgcctgctagccaaaaggcttcgatgtttttgaagcaggcatttgaaggag

SEQ ID NO: 479882 - DNA, 75 bp, Homo sapiens
tcatcccccccgacgccgtcgcggtggactgcaagcttggtgatccagctatttttcctgccgtaattgtggaac

SEQ ID NO: 479883 - DNA, 83 bp, Homo sapiens
aaagcatgaacaggcatctaatgttcttagtgacattagtgacaacctgccattttgttctgaagatttgaatagcaacacag

SEQ ID NO: 479884 - DNA, 88 bp, Homo sapiens
gctgatgataggggggttccatctcccaacttgtccatgaaaatgtttataggaggccttagctgggacactacaaagaaagatctga

SEQ ID NO: 479885 - DNA, 100 bp, Homo sapiens
ctgggccctcccgcgactacagccactactacacgaccatccaggacctgcgggacaaggttggatggcaagcatgtggtgtttggcaaagtgaaagaag

SEQ ID NO: 479886 - DNA, 100 bp, Homo sapiens
tcgggatgagctgaatgtcaaatctgaggagcaggagctcgaggccatgagcagatataccagcccagtgaacccagctgtcttcccccatctgaccgtg

SEQ ID NO: 479887 - DNA, 100 bp, Homo sapiens
ctgccttcaagctggatttcctcccggacatgatggtcgagggccgcctgctcgttcctgacagaatgtgctggagaatctggtaaaagcaccattgtga

SEQ ID NO: 479888 - DNA, 100 bp, Homo sapiens
tcaggaatgtgtttcactgtgaggcacacagaattctctacatttgtgaaagtcagtttctgaggaatttcatcagcaataagagctaactgccatcaag

SEQ ID NO: 479889 - DNA, 100 bp, Homo sapiens
cgcccgccgcgcggagcgccccttcgcgtcccctgcaccatgagctggggcaccgagctctgggattgcagtaacggatgctccgcagagtgtaccggag

SEQ ID NO: 479890 - DNA, 90 bp, Homo sapiens
ccagcctctgcctcccagaaactcagttctcctgtgcctcctgttggctctctttgcatctggcctcatccaccgagtctgtgtcaccac

SEQ ID NO: 479891 - DNA, 100 bp, Homo sapiens
ggtcaagtacacagagagacggcagccgctgtacagattcatcaccacgatgaggacggggacttggttgccttttccagtgacgaggaattgacaatgg

SEQ ID NO: 479892 - DNA, 51 bp, Homo sapiens
cctggcactgaagccgagctcaaaggttagaaaatggatttctgactggaa

SEQ ID NO: 479893 - DNA, 100 bp, Homo sapiens
cggaacttgcctgtgaatttcgaggcagtcttcccgtgtcccagtgagcctgctctcagcaaaaacgagctgatcctgaccacagagtccatcatgaaga

SEQ ID NO: 479894 - DNA, 98 bp, Homo sapiens
ttcttacaggaacaccagctttaggaaggcctgaagaggttatcaagttatacccaaccagcagcaaaactaccaaggaatagttggagttcagcaac

SEQ ID NO: 479895 - DNA, 100 bp, Homo sapiens
cttccacaaatcagacggcagcactgtctctgtgcccatgatggctcagaccaacaagttcaactatacttagcagtgtctgcaaaaacgaatcttttcc

SEQ ID NO: 479896 - DNA, 73 bp, Homo sapiens
gtacaaggaagtaatgttggagaactacatcaacctagtatcaatagatgtatcggcaagcagtgtaaacgga

SEQ ID NO: 479897 - DNA, 124 bp, Homo sapiens
cagacccgcacctacgacggcgacggctacaagaagcgggccgcatgcctgtgtttccgcagcgagagcgaggaggaggctgggctgggcgagtatctcttcgaaaggctcactctcaagcacg

SEQ ID NO: 479898 - DNA, 49 bp, Homo sapiens
cagaaacatgctgagcctttgacagaggccacaagaggaagctgaatga

SEQ ID NO: 479899 - DNA, 82 bp, Homo sapiens
agaggaagaactagtttcccaaacagatgttaagacattcttggaagccttaccggggatcatggaagctgataaagatgac

SEQ ID NO: 479900 - DNA, 100 bp, Homo sapiens
ccagcatcgcgtggtaccagtgccgctgggcacactggcttcacgccggctccgcctcaccagcaagcgcattcccagatccgctactggaaagctgggg

SEQ ID NO: 479901 - DNA, 82 bp, Homo sapiens
cgaaaaagctcaatgcctcagaaattcattgttgcagcatgagaaagccgaactagaacagcatcttgaacaagagcaggaa

SEQ ID NO: 479902 - DNA, 83 bp, Homo sapiens
tctcgcctcgggtctcgggggccgctctgggatcccggccaccagcaattgtccggtcttcatcctccaggtccacctttagc

SEQ ID NO: 479903 - DNA, 83 bp, Homo sapiens
ggaaaatgcaagaagactgatggagcaggcttgcaatattaaagagatcatgaatcagacagataaaaatcaacaagaaatcc

SEQ ID NO: 479904 - DNA, 90 bp, Homo sapiens
ctataacatgtacatcttccctgtacactggcagttcggccagctggaccagcaccccattgacgggtctcacctcccacccctcctgcc

SEQ ID NO: 479905 - DNA, 74 bp, Homo sapiens
ctagctttatatttgctccataatgacatcttcttggacacttaatgattgttggcaagaaatgtgctgctgat

SEQ ID NO: 479906 - DNA, 75 bp, Homo sapiens
accggatctgcatgccgctcaccgtagacgagaaagaacattggagctatcatgtctggaagtgtgtttgcaatc

SEQ ID NO: 479907 - DNA, 100 bp, Homo sapiens
atcttcttcactgcctctggcatggatgaggttctggggctgctggtatggacgcttattgctggaactgagtacttccgggtccccgcatttggctggg

SEQ ID NO: 479908 - DNA, 97 bp, Homo sapiens
caggccctcaagtccctgatggcctcagaggaggaggactctgctgggccgctcagccatgcctgagggagcccaaggactgagcctctccaaacct

SEQ ID NO: 479909 - DNA, 80 bp, Homo sapiens
agaacaggatatgactacagtagatgaaggacttccaatagtagtcagacattatcatcctgtcatactatggagccatg

SEQ ID NO: 479910 - DNA, 101 bp, Homo sapiens
gtcagcagccaaggtgtttccaggaagttcagagagaacaggcctccccatggccacccatggaccagtcggcattcacttcctcccttctgcggcccata

SEQ ID NO: 479911 - DNA, 90 bp, Homo sapiens
ctggcttacgcctgttacctggagaaaaggcccagaagttactgcagaaggacagagcgggatgccaccagcttgtccaaagggaagttc

SEQ ID NO: 479912 - DNA, 74 bp, Homo sapiens
tcaaaggacactatgcaatcacccgaaaggagaaggacatgtttttgtctggggctatggaattcttgggaaag

SEQ ID NO: 479913 - DNA, 50 bp, Homo sapiens
cgcctaccacacacgtgaagtccaggtgcctcaggaaccctgaagctggg

SEQ ID NO: 479914 - DNA, 82 bp, Homo sapiens
tgacgcagtagaaaaggtggcgtggctggcgattcgtgttcgtgagggccttttctggttcctggtagagttacacagttgt

SEQ ID NO: 479915 - DNA, 83 bp, Homo sapiens
tcatgctcctactatccatttcaactacagatactttgaagtagaagaagctgatgcaggagagcctgtcctgcctccagtcc

SEQ ID NO: 479916 - DNA, 82 bp, Homo sapiens
ggagaacctgcccttcgccaaggagatcgtctctctcatcgaggcccaaaccgccaagacatatctgaagagatggattaag

SEQ ID NO: 479917 - DNA, 121 bp, Homo sapiens
cttagctgtgctcgcgctactctctctttctggcctggaggctatccagctttcaccagtgatcattaaagaatgggcagcttacaaaggaaagtctcctcaaaccccggaactggttgaa

SEQ ID NO: 479918 - DNA, 75 bp, Homo sapiens
ccttactcagcgcctcgtcctgcagtggtgagtcaagggtccagagaaggaggagaagttgagacaggcggtcaa

SEQ ID NO: 479919 - DNA, 83 bp, Homo sapiens
gcgttgtgcgttcgacgacgcggcaccggcttcgacgccctctgcccgctccagaagcaggcctcctgatcacttgccacgtg

SEQ ID NO: 479920 - DNA, 89 bp, Homo sapiens
ggctttggaatccaccagctacatccagctccctgaggcagataacgaaggaggcccaacttcattcaataaggagcctgacggattta

SEQ ID NO: 479921 - DNA, 75 bp, Homo sapiens
gatcctgaaacacctgtcccgtgctgcttttgacacaaaaacggggttacgtgtggcagtgaagaagctctccag

SEQ ID NO: 479922 - DNA, 100 bp, Homo sapiens
agctgatcccatgttctcctgccctgaagcagagagtgataatgaactctcaagtggaacaggtgatgtgtctaaggattgtcctgagaagatcctgtat

SEQ ID NO: 479923 - DNA, 82 bp, Homo sapiens
tctccctctgcccccccttccccacgcaaccccagatccatttacactttacaactggtcaaacaaatggattttacagagg

SEQ ID NO: 479924 - DNA, 90 bp, Homo sapiens
atgaggcagagcctaagagaactatggcaacatcaggtgactgtcccagaagtgaatcgcagttaagtgggcagaccaacatccacctca

SEQ ID NO: 479925 - DNA, 75 bp, Homo sapiens
aaacagctggtggacaaaattttgtggcgctctgcgtcccctgaagggtgtctgatgccatcaagtgttgcagga

SEQ ID NO: 479926 - DNA, 90 bp, Homo sapiens
ctggcctttggcacgtcctgctccgtggtgctctatgaccccctgatgtcggtgcagatctcttgtccatgtgccagcgaaacattgccc

SEQ ID NO: 479927 - DNA, 142 bp, Homo sapiens
tgagaggaaggaggaagaggatgccatgcagaactgcacactcagtccctctgtgctccaggactccctcaataatatctgacaggatggcatctgatgactttgacatagtgattgaggccatgctggaagctccctataa

SEQ ID NO: 479928 - DNA, 82 bp, Homo sapiens
cttgggagaaagtttcatctgtggatggagtattggaaagtgatgaccccatggcttatattcactttactgctgaagggga

SEQ ID NO: 479929 - DNA, 95 bp, Homo sapiens
gtaaggggctagacaggattgaggagagactgcctattctgaatcagccatcaactcagaaagaatcttcaagagggagacatagggaaaaggaa

SEQ ID NO: 479930 - DNA, 90 bp, Homo sapiens
ttcatgaatttcaagagagtaccattggggaagcatcagatggtgaaggagaaggagacacagaagtgatgcagcaggagacagttccag

SEQ ID NO: 479931 - DNA, 90 bp, Homo sapiens
gcgtctgagcttcagcgtcagccgcgacggcgcctcgtctcgcggcgccagaattcctcagagagagaagactgtaataatggcgaaccc

SEQ ID NO: 479932 - DNA, 100 bp, Homo sapiens
aacaggaaaatcatattatagatggagtaaagagtggtgcacgtatcaacatctcagaagggaattgtcctgagagaattatcactttggctggacccac

SEQ ID NO: 479933 - DNA, 100 bp, Homo sapiens
ggcggccacggaggcaccatgaagaagtcttactcaggtgtcatggagaaactccagctgggcccagagattctgcagcgggaaaatccaaggcttattt

SEQ ID NO: 479934 - DNA, 83 bp, Homo sapiens
agctgtgctcgcgctactctctctttctggcctggaggctatccagccgaccgtggcagccatgtattacagctactacatgc

SEQ ID NO: 479935 - DNA, 50 bp, Homo sapiens
ggtgtaaacaacgattctttggaggacgactgggtttggattcagaagag

SEQ ID NO: 479936 - DNA, 75 bp, Homo sapiens
gcgcagcgacggcgtcgggagagcgcgcctagccggctcgcgatgatgtcttggcattgcccattttcaagcagg

SEQ ID NO: 479937 - DNA, 98 bp, Homo sapiens
acaatgggaataaaactccaagaagccaggtgttcaagtgggggcttatttggcctccccaggatggactggagcatcagtagtgcccgggtttatca

SEQ ID NO: 479938 - DNA, 96 bp, Homo sapiens
ctgccgctgctggcggccctgcttcagaacaactctgctcatggtgattacatgcaaaataacgagagcagcttaatagagcaagctccaatacct

SEQ ID NO: 479939 - DNA, 75 bp, Homo sapiens
ggtacttttctggtccaggaattaatcaagagcaagactcccaagcagcttgctacaaggtgagctgcctggaaa

SEQ ID NO: 479940 - DNA, 90 bp, Homo sapiens
atggataactgtgaggagctaatccctgaatatctgagacacatgacggaagtgtgtatttttgggccactccacggcaggtccctagcc

SEQ ID NO: 479941 - DNA, 97 bp, Homo sapiens
ctgaagcagctttcttgaatgtctacaaaagattgattgacgtcccagctcagaattctgcaaatgcagattttgcaaactttgatgcatttggaca

SEQ ID NO: 479942 - DNA, 128 bp, Homo sapiens
ggaggaggaagaggaggagggcgactgtatgatcgtggatgtcccggatgctgcgggtctccctgtcttcctgcctctgtgtcagccaggagctcatcttctgtggctgcacagatgggatagtccgc

SEQ ID NO: 479943 - DNA, 75 bp, Homo sapiens
ctccaggcagtgtaatctcattccatcttcattcatgactccagacagcttacgaggaaatatttcagtaaaagc

SEQ ID NO: 479944 - DNA, 100 bp, Homo sapiens
cggcattacctgtacccattcaccggcggctaccggcggcggcgcgcagcgtgtcaggcggagagacccgccgccaggccctggccaacgtcaacattgg

SEQ ID NO: 479945 - DNA, 90 bp, Homo sapiens
gaggatcgtgggagctaagaagtgactctgacatcattagaagcatgccagaacagactggtgaaaagtaaaccttttcacctacaaaat

SEQ ID NO: 479946 - DNA, 83 bp, Homo sapiens
tttattcgtaatgcgactcaaagctgcacggcagtctgtttatgagttggactaaatgctcttccttcagaggattatccggg

SEQ ID NO: 479947 - DNA, 100 bp, Homo sapiens
gaaacattagaggaggcttttcattatatttttaatgtgcaactagcctgtgagattcaggttgggataattcttcactattccacccttgccacagtac

SEQ ID NO: 479948 - DNA, 98 bp, Homo sapiens
gtccgcccaggcgcagatgcgggccctgctggaccagctcatgggcacggctcgggacgtaagactttgaccccgacgcaggcttcagtgattgccgc

SEQ ID NO: 479949 - DNA, 75 bp, Homo sapiens
gaaaattggcaaatctgttactgcagacagatgggaaaaatatttgatcaaggtcatgttggccccccttatttc

SEQ ID NO: 479950 - DNA, 76 bp, Homo sapiens
gccgaaccgtgaagggctggaggccccggcggctaggtgccgacgccaccgccgagcccatgatcctggaacagta

SEQ ID NO: 479951 - DNA, 75 bp, Homo sapiens
ctagtgatctctataatggttccagtatagtctctaggtgttaagtgtgatgcttccataatacatttggatgct

SEQ ID NO: 479952 - DNA, 100 bp, Homo sapiens
gaggcagaggtggaggcgctttgaaaggtctctaattaacagaagatggcaaagcccagccacagcagctatgtccttcagcagctaaacaaccaaagag

SEQ ID NO: 479953 - DNA, 74 bp, Homo sapiens
cttctgggccagaggaagagaatgaggagcgagcccagggcgtggtgctgaaagtgctcacaaacttcaagagc

SEQ ID NO: 479954 - DNA, 50 bp, Homo sapiens
gcaaggcccaatgacccaggcgggtttggagaacattgattaaggaagca

SEQ ID NO: 479955 - DNA, 75 bp, Homo sapiens
aagaagaccacacactgggaaacatcattaaatctgcctccagaaagagtcgagaagataatggatcagattgaa

SEQ ID NO: 479956 - DNA, 76 bp, Homo sapiens
aagaggttggagatgggaccacatcagtaattattcttgttgtggacatcggatacccaaggagacgaagctgaag

SEQ ID NO: 479957 - DNA, 85 bp, Homo sapiens
agtttagccacaccaggctggagaatatggtgcagaggccctccacgctctggccaagtattttatttcgtccctaaacattcta

SEQ ID NO: 479958 - DNA, 102 bp, Homo sapiens
ctaaccacactatttatatcaacaacctcaatgagaagatcaagaaggatggagtctactcttcatcttgtgttgagacttcgtggtggtgctaagaaaagg

SEQ ID NO: 479959 - DNA, 105 bp, Homo sapiens
tgcaaaaaaggcatcttgtccctacatcttctcttctgactttggctacatctcataatggctgcatatttcggattttctgtagctgccactgacattaatgga

SEQ ID NO: 479960 - DNA, 58 bp, Homo sapiens
atcaaaaagttcctcatccctgaccagagatcaagaagccccagaggatgtacaagtc

SEQ ID NO: 479961 - DNA, 82 bp, Homo sapiens
cccggcagcgggacccggcgaagacgcgaccgcggcgcgagtcaccatgggaacggcaggagcagctgatgggatatcggaa

SEQ ID NO: 479962 - DNA, 50 bp, Homo sapiens
gtcaacttcctcaagtcgcccaaaggtcgcaatggaagaagagatcgccg

SEQ ID NO: 479963 - DNA, 73 bp, Homo sapiens
acaaatatatctgttattttacctactgttcatgaggtggatattttcagtgatgtcttggcattgcccattt

SEQ ID NO: 479964 - DNA, 60 bp, Homo sapiens
ggagaaggtcaaggcagtggaaggtgatgaaggggataacttctatgtgattgatcaagg

SEQ ID NO: 479965 - DNA, 100 bp, Homo sapiens
tattttgacctccttccatgaatcacaaatgttcttaatggcatctagaatgcaagatggattctggatatactctgagtattgtaacaaccacctggat

SEQ ID NO: 479966 - DNA, 100 bp, Homo sapiens
gagaggcggcgccgctcccaagatgtcgcagacggccatgtccgaaacctacggtctgagcgggaaagttccgaagaataggagtggctgagttagctac

SEQ ID NO: 479967 - DNA, 87 bp, Homo sapiens
ctgaggcgacggccgcggctgcacagccactgaggcggctcccagctgcgttggcgacatggccgacacccccagagatgccgggct

SEQ ID NO: 479968 - DNA, 85 bp, Homo sapiens
agactcagcctcactctgtacaacacgctggcagcgaaggggaactctaccctccagaatctcagccaccagtttcaggctctgc

SEQ ID NO: 479969 - DNA, 73 bp, Homo sapiens
gcggaagcggcctggcaggggaaggatcgagagagaactcgatgccaccgcaacggtattggcgaaccggcag

SEQ ID NO: 479970 - DNA, 83 bp, Homo sapiens
ggaggacatcgacatccaggcgaactcggcctatcgctaccctccgaagtccgaactgatagtgcatcagctgacccaggtaa

SEQ ID NO: 479971 - DNA, 99 bp, Homo sapiens
tgaaggttctttccctttaagatatgtgcaggatcaagttgcggcaccttttcagcgtcctgggaactccaacaagggagcaaatcagagaaatgaacc

SEQ ID NO: 479972 - DNA, 50 bp, Homo sapiens
ctcaccagatgtcaaatttgtttgtcagattgattcatggtgcaaagatc

SEQ ID NO: 479973 - DNA, 95 bp, Homo sapiens
gagagcgtgaccgagagcgcgaatatcgtcatcgttagaagttgaacaagagatttttcaatcaagactttggaactacgaagatggaagagatt

SEQ ID NO: 479974 - DNA, 98 bp, Homo sapiens
tcttcgggatcttcgacgggcacgggggagaggtacggttcctggagcagcagaacaagatgctggagaccaagtggagcctcctgcagcagcagaag

SEQ ID NO: 479975 - DNA, 99 bp, Homo sapiens
gctgctgctgctgctgctggtcctcctgatcgccggcagtgctggggccgcgccacttccgcaaacaggtgcagcggttaagaagattgtctaccaaat

SEQ ID NO: 479976 - DNA, 75 bp, Homo sapiens
actgccctttttgcaccccagggagctgctgctggtcgctgaaaattttgttccccctctgttggatgcagttct

SEQ ID NO: 479977 - DNA, 100 bp, Homo sapiens
tgtcaagaaggtgccggtggtgcgagtcttcggagcgaccccggcaggaaaaccagtagattcccagacatcgcgaagtgaatctgaaattgtgccaaaa

SEQ ID NO: 479978 - DNA, 100 bp, Homo sapiens
tgtcctagaattgatactcagcagctggaccggcaaattaaagcaattatgaaagaagtcattccttttttgaagaaactgctctttgagcgcgggaagg

SEQ ID NO: 479979 - DNA, 75 bp, Homo sapiens
cttctgaacaaggccaacacctatgcaggcattgaagaaaaatttaggcctttttatttaagtcaattagaagaa

SEQ ID NO: 479980 - DNA, 97 bp, Homo sapiens
ccctgcagtacctgcagaaggtctctggagacatcttcagcagatgatgctggagggtcttgaaatctttacagtaaaacctgcaacttgaaaacta

SEQ ID NO: 479981 - DNA, 75 bp, Homo sapiens
agctgaagcagcagaaccccaggctggtgtacgggactcggagatcatgcagcagaagcagaaaaaggcaaacga

SEQ ID NO: 479982 - DNA, 100 bp, Homo sapiens
tctagctttgtaggagcatggcttggagcacttcctattccactggattgggaaagaccatggcagccgtgcagtcggaggtccttgtgcatgaagacag

SEQ ID NO: 479983 - DNA, 82 bp, Homo sapiens
gggctctggctgtttaaaagctggagaggaagtgaaagcgtcaagtacagaactgtggctgcaccatctgtcttcatcttcc

SEQ ID NO: 479984 - DNA, 95 bp, Homo sapiens
acagcttattgttcatggagacttcagccaagacagctatgaacgtgaatgatctcttcctggcaatagttttttgctccactcaagcctgttag

SEQ ID NO: 479985 - DNA, 75 bp, Homo sapiens
actcaaagaagaagttggtgcattggccaaagtattgcgcttatttgaggtgtttaaggataattgctgcaagag

SEQ ID NO: 479986 - DNA, 83 bp, Homo sapiens
accatcaaatccgtgtcggagtccttacaggtttttagaacttcagccataaaaatgggcagaattttccttgatcatatcgg

SEQ ID NO: 479987 - DNA, 98 bp, Homo sapiens
agaccaagtacctgcagatcctgacctctctgatgagatggatcgaacccttaggagaaatcttgagagtggacagcaattgtgaagatcgccagaga

SEQ ID NO: 479988 - DNA, 83 bp, Homo sapiens
caacccgataccatcggacaggatttctccgcctcagcccaacggggaggcctgagacctgggaggaagctggagaaaagatg

SEQ ID NO: 479989 - DNA, 97 bp, Homo sapiens
cgttaatcagacagccagaccgaagacaaaggtttgcaatgagaattccctcttcaaaagtctttctcgctacctggtacgtcgaaaggatccagaa

SEQ ID NO: 479990 - DNA, 75 bp, Homo sapiens
acccggcgccgggcactgagcaccgccaccatggggaaggggaaactggcgatggaatatgagaggagccctctg

SEQ ID NO: 479991 - DNA, 97 bp, Homo sapiens
ctagaggaatgggacgtgaagcgcttgcagacgcactgctacaaggtccatgaccactgcttctcggaggagtgccgctctgtgatccaggaacaag

SEQ ID NO: 479992 - DNA, 100 bp, Homo sapiens
cccagtggaggacaatgagaaggatgtaacccacattaagacgattcatcaggaggatgaattgattgagatccagtcggacacagggacctggtaccag

SEQ ID NO: 479993 - DNA, 100 bp, Homo sapiens
cattacaagccagcctctgggaccgagatcctacatggctttccaccaacctgggcatcctgacctgcatcgagtgttccggaatccaccgagagctggg

SEQ ID NO: 479994 - DNA, 51 bp, Homo sapiens
ggcgagtgtccgtgccatcaacgggacgtcattcctgcacaggacagtcca

SEQ ID NO: 479995 - DNA, 83 bp, Homo sapiens
agtgaggagaagctggcatctgtgtccaacctggtcactgtgtttgagaatagcaggttgaagatgacagcgatgcagagacc

SEQ ID NO: 479996 - DNA, 50 bp, Homo sapiens
caagtacctgccagagaacgacctgaaggaaagtatgtgatggtgatggg

SEQ ID NO: 479997 - DNA, 83 bp, Homo sapiens
ctggcggagcagaagagggccttgatgtacacacgtcggtactcaaggggacggaaaatatagtcgcggtgatgataagcaac

SEQ ID NO: 479998 - DNA, 75 bp, Homo sapiens
ggccaccgcctccagcttgccaccaaagacctgcgactttgctcagcgccgtgccgtccctgcagtgacaccgag

SEQ ID NO: 479999 - DNA, 112 bp, Homo sapiens
ttgacgccatgtcgggttattcgagtgaccgagaccgcggccgggaccgaggctgcatcttcctcccgtgaggctggccgagctccacgctgatctgaagatacaggagagg

SEQ ID NO: 480000 - DNA, 100 bp, Homo sapiens
cagagccctggaacaaactgggtcccaatgatcaatacaaggctggcaaagcacacaggctgagcgctgaggagagggaccagctgctgccaaacctgag

SEQ ID NO: 480001 - DNA, 90 bp, Homo sapiens
ttccaaagcaagtgcttctttaaatgggctgtctgtggaagcccgtaaagagatgactagaaaggctattaagacagtcaaacattttat

SEQ ID NO: 480002 - DNA, 90 bp, Homo sapiens
cttcttggaaaaccagatccagaaactggaggagtcccgctcgaagctagaaaatgtcactgaaattcacaaatgcaaaacggattgaag

SEQ ID NO: 480003 - DNA, 92 bp, Homo sapiens
ggcgggagacgagaagcctgaaaagtcgcagcgagctggagccgccggagcctgaacacttgcctttgcagactcagttcaaagaaagagaa

SEQ ID NO: 480004 - DNA, 74 bp, Homo sapiens
cagctgggccggagcagccgcgggcgcccgaggggccgagcgagattgttctctggggccggactgagaaatgc

SEQ ID NO: 480005 - DNA, 89 bp, Homo sapiens
cagtgctgctgtgagtttgacgaagtggacatcacctgcagtcagtccagagctgcccaggcgagcaccttgggagaggcacgagaaca

SEQ ID NO: 480006 - DNA, 100 bp, Homo sapiens
gagtcaacgtgtggccgggcggccaaagagtgaccgccttctgatcagaggtgggaggatcgtgaatgacgaccagtccttttacgctgatgtgcacgtg

SEQ ID NO: 480007 - DNA, 80 bp, Homo sapiens
cggcggggccccaggccgcggggcggcgcgggacggcgggcgccggcgccggtttttagaacttcagccataaaaatggg

SEQ ID NO: 480008 - DNA, 96 bp, Homo sapiens
gtgcggaatatgttctcattgtgcatggtaacaacattgactcaggaagtttctcagttgggtaaagacatgagaaatgtgatccagcttctggaa

SEQ ID NO: 480009 - DNA, 75 bp, Homo sapiens
cccacggctccccccaccaccagcccagctcctctcctccaaacaagctgtcagtagggacggggtttcaccgtg

SEQ ID NO: 480010 - DNA, 100 bp, Homo sapiens
tcaggatatgacaggggtaacacccttccagatgatttttgagattcgccatgaagtcagcgtaaataatgtaacacataaactgtgcagtaaccattgc

SEQ ID NO: 480011 - DNA, 50 bp, Homo sapiens
cgagagccccggctccagccccacgacttctgcgctgacccaggggctgg

SEQ ID NO: 480012 - DNA, 75 bp, Homo sapiens
cctcttccgcttctaccgcgtgctcacctgtatcagctggcccctgtcggtcattgctagaatcgtggatggaag

SEQ ID NO: 480013 - DNA, 50 bp, Homo sapiens
ccccaagctccccgtcctcgggaattgaatgatctggcacgggaccctcc

SEQ ID NO: 480014 - DNA, 90 bp, Homo sapiens
ctgcagctcaacgactcctacgacctggaggagcacctggatatcaaccagggccatggagttggggagagaatgtctaaatctctgggg

SEQ ID NO: 480015 - DNA, 100 bp, Homo sapiens
cctgaagatcatcaccagtgcagccgcaagacggcagcctgtgagtcctcctccaccaccacggccgatctcccctccacatacctatggctacatttca

SEQ ID NO: 480016 - DNA, 122 bp, Homo sapiens
ggcggctgaggaaagcaggaggaggtggcggcggcgggaagatgtactccaaagattcaggtttactcacgtcatccagcagagaatggaaagtcaaatttcctgaattgctatgtgtctgg

SEQ ID NO: 480017 - DNA, 73 bp, Homo sapiens
catggctgcggcggcccagctctctctgacacaggaaccttttgaggatggctttgcaaatggggaagaaagt

SEQ ID NO: 480018 - DNA, 80 bp, Homo sapiens
attgatccagagaacatgctggctacaactaatacatatctgaagagatggattaagaatgctttggattaaggattgtg

SEQ ID NO: 480019 - DNA, 100 bp, Homo sapiens
tgaccaagtgtttgaagccgtgggaactacagatgaattaagttcagctattggggtttgtggcatcatcatcccctggaactatcccctgatgatgctg

SEQ ID NO: 480020 - DNA, 50 bp, Homo sapiens
ggcatgataacccaacattcaagggtaaagcatcaagtcgaatatttggg

SEQ ID NO: 480021 - DNA, 83 bp, Homo sapiens
gggaatcgcaaggctcttccctgaccattttctactgtccctgcgcgaggggaagacaggaagacccccagcgaatcaaatag

SEQ ID NO: 480022 - DNA, 100 bp, Homo sapiens
accagcgttttgactttgctgttctctggcttgtggcatttaggattaacagcgacaaactacagcgtggaagatgaactggagatggccaccgtcaggc

SEQ ID NO: 480023 - DNA, 118 bp, Homo sapiens
agtgacgccgcagccatggagagcggcccgcgtgcggagctgggggcgggcgcacccccagacaatgcagatcttcgtgaagactctgactggtaagaccatcaccctcgaggttgag

SEQ ID NO: 480024 - DNA, 100 bp, Homo sapiens
ccaaggggattgcctggcaggacgtgaaggggaagaggcccaccctggagtaaccctcactggagaatccagagaaatggaatctatttggaatttgcag

SEQ ID NO: 480025 - DNA, 75 bp, Homo sapiens
atgaactttctttacagatcggagacactgtgcacatcttagaaacatatgaagatgcccagcctacagagtctg

SEQ ID NO: 480026 - DNA, 100 bp, Homo sapiens
cggacggccagtgctgcgcgctcctgcaagggaaatcctcattgacgattcaatttgttgaaggccaatttgtggactcctacgatccaaccatagaaaa

SEQ ID NO: 480027 - DNA, 103 bp, Homo sapiens
acctgtgccgcaacatggacgcgctcagcgagtgggactggatggagttcggtgctggagaatctggtaaaagcaccattgtgaagcagatgaggatcctgca

SEQ ID NO: 480028 - DNA, 100 bp, Homo sapiens
tgccttggcgctggccggctacatcgagatatggaatgtgcagatgtcccactattaactccaagcagcaaagaaatgatgtctcaagcattaaaagcta

SEQ ID NO: 480029 - DNA, 100 bp, Homo sapiens
ccctcggacttcatctcattgctcagcgcggacctagacctggaatcgcccaagtccctctactcgcgaggaagctcttcgtgggcggtcttgactggag

SEQ ID NO: 480030 - DNA, 100 bp, Homo sapiens
cggagccgcgccccaccccgccagctccagagccacaatccagcaactatcacaagaatactccttagccacttcaattgggataaagagaagctaatgg

SEQ ID NO: 480031 - DNA, 100 bp, Homo sapiens
ctgatgatgaacagtttgtcccagattttcagtctgataaccaattaaacaaccaccatgtcgagcaaaaaggcaaagaccaagaccaccaagaagcgcc

SEQ ID NO: 480032 - DNA, 100 bp, Homo sapiens
ctgcaccgacctcgacgtcttgcctgtgtcccacttgttcgcggcctataggagtgtggccatctggggccgtgtggtatttgccactcaggagacatgt

SEQ ID NO: 480033 - DNA, 83 bp, Homo sapiens
ctggatgggaagttaatgtttacggcgaagtctactcaacgtttccaagacaggtgatttggcttctgcacagttaggaggag

SEQ ID NO: 480034 - DNA, 98 bp, Homo sapiens
ggagactgactgcctatgaatttgctaaacttaaaagcaagctggttctctgggatataaataaggtctctggggaacaagactcatggaggaaagca

SEQ ID NO: 480035 - DNA, 83 bp, Homo sapiens
atcagtcctttgtactggttggtgagactgggtctggtaaaacaacacaggggtgagcccctccagactccgaataggagatc

SEQ ID NO: 480036 - DNA, 94 bp, Homo sapiens
tcgcgtccgtaatcagtgacgaggtccgctacgtaaatccctttgcggcgggatccaaactactggatacaggtgcatcgcttggaacatggag

SEQ ID NO: 480037 - DNA, 74 bp, Homo sapiens
aggattgttcctgagggagccaaaaaaggaatggaagttggatacactttgtgacttgtacgagacactgacca

SEQ ID NO: 480038 - DNA, 100 bp, Homo sapiens
ctctgctctccctgggcaggaagactgaggaggaagggatggctgtggatctgctgtctgctcagcaatcccacagagtattgatgaggaaactgaagtt

SEQ ID NO: 480039 - DNA, 83 bp, Homo sapiens
gttctgcgcttccaggtctccttccagcatccacacaaggcctccggtgtggctgtctctgatggtgtcatcaaggtgttcaa

SEQ ID NO: 480040 - DNA, 100 bp, Homo sapiens
aacatccacagccggaccgtcacccgctatcctgccaactctatcgtggtcgtaggaggctgtcctgtctgcagtcttattgttacaggtatcgctgtgc

SEQ ID NO: 480041 - DNA, 51 bp, Homo sapiens
actgagtgaaggtgcagtgctggcgctctgcgtacgtgtcctatgggggcc

SEQ ID NO: 480042 - DNA, 75 bp, Homo sapiens
cggctcgcccttcccaggcgccggctgcagcagagttccacagaaacagacacttccagttgctcccagaactcg

SEQ ID NO: 480043 - DNA, 50 bp, Homo sapiens
ccacaacaaaatttgtatcagaggtgaaagaagaacgtccagaaaaaata

SEQ ID NO: 480044 - DNA, 75 bp, Homo sapiens
tggggtgatcatgtatgagatgctcatcggtacgagcaggtgataataaatatatgcacttgaaagtattcaaaa

SEQ ID NO: 480045 - DNA, 100 bp, Homo sapiens
caatggaatctggtccaaacaatcatgggaatttccaaggggattcaaacttcaacagaatgtggcaaccagctttcaccaacaatcaccagtggtttac

SEQ ID NO: 480046 - DNA, 75 bp, Homo sapiens
tgttaccattgtgaaagaaggttgggttcagaagagggcctttctgagaaaagtctacagcattctttctctgca

SEQ ID NO: 480047 - DNA, 90 bp, Homo sapiens
aaggagctgtatgactttgctaaggaaaatataatggatgatgatgaggtatctcattcagttgctaaacttatattagttaatttccac

SEQ ID NO: 480048 - DNA, 90 bp, Homo sapiens
ggactgcatccttcttcaacgcaggtttaaaagcaagttcatgaattcgcgtgccgtgtgcacggagagaggccgtagttcctggggctg

SEQ ID NO: 480049 - DNA, 90 bp, Homo sapiens
tattgatgaaattttgaacaacattaacactattatttgtgatcttcagcctcaacagaattttaccttcaatgatgacttcagtcccag

SEQ ID NO: 480050 - DNA, 50 bp, Homo sapiens
tgctgcagcagagcgcggcgcagaagtctcaaaccatgaattatgtggga

SEQ ID NO: 480051 - DNA, 100 bp, Homo sapiens
ctgagcagttctttaagggatgagacttggccctcaagatctgggtttccattacccctgccatcgtcaggtcacaggcatggcccattgtgttgcaagg

SEQ ID NO: 480052 - DNA, 78 bp, Homo sapiens
aggcttatgaggatggctgcaagactgtcgacctaaagcctgactggggcaaggcatagcgcgctggctaggactcca

SEQ ID NO: 480053 - DNA, 75 bp, Homo sapiens
ctcaggatatgacaggggtaacacccttccagatgatttttgaggagatgttgcagtaaagatcctaaaggttgt

SEQ ID NO: 480054 - DNA, 82 bp, Homo sapiens
gtcttccagagcgtgaagatcaagatcgcgctgctgggacatcgccttgggtcccctcaaacagattcccatgaatctcttc

SEQ ID NO: 480055 - DNA, 100 bp, Homo sapiens
atggttaatacagtttcatttaaaaggaaaccacataccaatggagtttcagatcgtcgtggctcaggtaaaccccgaccaaagagtgaaggctttgagc

SEQ ID NO: 480056 - DNA, 100 bp, Homo sapiens
ccgatttcatcactcgtgacttcactcagccagtttcgctctgctgcccaggctggagtacagtgatgtgatctcctgacgtcaagtgatccattcgcct

SEQ ID NO: 480057 - DNA, 75 bp, Homo sapiens
agtacaagcacctcctgctccagtaattggtgccaagtcctgccctgccaacttcttggcagctgccgacgacaa

SEQ ID NO: 480058 - DNA, 100 bp, Homo sapiens
ggaactcctgggctcaaaccatcctcccacctcagccttggacatgagagatggctttagaagaaaaagtttctactcttcccattatgcgagagagcgg

SEQ ID NO: 480059 - DNA, 145 bp, Homo sapiens
agcacgtcaacaatgatgtgaaccttcgcattcagaatttgaccatcttggtgagaaacattaagacctactaccaggtttggtgcacctcgatttggaggaagtagggcagggcccttatctggaaagaagtttggaaaccctg

SEQ ID NO: 480060 - DNA, 87 bp, Homo sapiens
ccccggcccacagtgggggtgtgcaaacccgagagaactggtcagattctgaggaagatgaacccacaaagaagaaaactatccttc

SEQ ID NO: 480061 - DNA, 75 bp, Homo sapiens
ttggatatcttcggggacctgaagaagatgaacaagcgccagctggaatagtcaaatgatttcagttcgtgaagc

SEQ ID NO: 480062 - DNA, 90 bp, Homo sapiens
gtttgcatttgtgtatgaagctcaagatgtggggagtggcagagagtatgcattaaagacaatgcagatcttcgtgaagactctgactgg

SEQ ID NO: 480063 - DNA, 82 bp, Homo sapiens
cgttccctcagcctctgcccaaagaaagaaggagtcttctcacaagactttcaggattaagcgattcctggccaagaaacaa

SEQ ID NO: 480064 - DNA, 51 bp, Homo sapiens
gagaaacccggagggcgccgggacgcaaacatgcagatctttgtgaagacc

SEQ ID NO: 480065 - DNA, 74 bp, Homo sapiens
aagaccgtgctcatctcccgactcaagcagtcactggaggaggatccatggccaagggtgaattctaaggacca

SEQ ID NO: 480066 - DNA, 75 bp, Homo sapiens
atgaaaactgggatagattgcaccctggagagatgttttcatcttctgcccctgtggatcaggagattaaaagcc

SEQ ID NO: 480067 - DNA, 50 bp, Homo sapiens
agcattcgcctactccgtgaaggtcctgatccggttccccatgcagagga

SEQ ID NO: 480068 - DNA, 100 bp, Homo sapiens
atggagaggggccgtggcccctgcagcggaaccggacccagtccctgagccgcccctacacccacagaattcaaagaagctttttcactatttgacaaag

SEQ ID NO: 480069 - DNA, 101 bp, Homo sapiens
accgtgtgtcagaacaatcttgaatcatgaagctactaaccagagccggctctttctcgtgtgtaatgctgtgtcatggagctaaaatcggatttttccaa

SEQ ID NO: 480070 - DNA, 75 bp, Homo sapiens
gagctggccatggtgccccactatggtggcatcaaccgagttcgggccttcccttcttcttggtggtgttcttga

SEQ ID NO: 480071 - DNA, 101 bp, Homo sapiens
aagggtccccgggacccgcctgctgagtggacccgggtggtcaatgcaaccaacttcatggaggcaggagccccagttatgtggaatgggcacagagcaag

SEQ ID NO: 480072 - DNA, 75 bp, Homo sapiens
gatcatggctcaccgcagtctcgactttcctgggctcaggatatggctttagttgcccctgaagctccttcagaa

SEQ ID NO: 480073 - DNA, 73 bp, Homo sapiens
gatttcttaaaggatagccaattgcagtttgaggctggatggggaaagacaccatagtcataaaagaagaaag

SEQ ID NO: 480074 - DNA, 73 bp, Homo sapiens
ttcaatatgcgtggtggaaatttcagaggaggaggagcgagctggacgccactgtggggctctgagagtcctg

SEQ ID NO: 480075 - DNA, 89 bp, Homo sapiens
ggggtccccaggtccctcaagcccctacatcccttcaccagggaaatcctcattgacgattcaatttgttgaaggccaatttgtggact

SEQ ID NO: 480076 - DNA, 95 bp, Homo sapiens
ctgctgctgcccgcgtccgaggctcgcgggcggcgggcccgggtacatgtcccagagcaagcacacggaggcccgggagctcatgtactcgggag

SEQ ID NO: 480077 - DNA, 100 bp, Homo sapiens
cggagacccagtcgctacgggagcagccagagtggtgacagcaggagcaatcatccctttccccttggctccaggccagtcccttcctgattccctgatg

SEQ ID NO: 480078 - DNA, 101 bp, Homo sapiens
aaacgagggttcccgggattggaccgacgcagccatgttttcagcattgcaaataacaatctcagctactgggatgcccccctgggaagttcttatatgtg

SEQ ID NO: 480079 - DNA, 82 bp, Homo sapiens
gaatgtcaaaaagctgccagcacttttaaacattacagttgtataagatgttggagtccggggtgacctggtctcagtgaag

SEQ ID NO: 480080 - DNA, 100 bp, Homo sapiens
agaactagaacaggagcttatgctggtattccctctcgagtggtttccactcaacaagcccagtgttggggactacttccacatggcctacaacgtcatc

SEQ ID NO: 480081 - DNA, 75 bp, Homo sapiens
ggggagtcgcgggcgcctccgcctcaggatgtgaagagattgaattcagccaactcatcttcaaagaagacttcc

SEQ ID NO: 480082 - DNA, 101 bp, Homo sapiens
ccatgctgctattgtcatcttccttgaattctttgcgtggggccttttgacaactccaatgttgactttttcatggagtgataatgaaaggagcagcagcc

SEQ ID NO: 480083 - DNA, 50 bp, Homo sapiens
attaaagtctaactctccaaatctaaaaaaatagaggttcctgcacagct

SEQ ID NO: 480084 - DNA, 100 bp, Homo sapiens
gcgtgtcctcggagcgcggtccctgtattggtctcctgctcctagagatatcagttttagagaatgtggcgtggagaaattctcaaggaaagagtaaaat

SEQ ID NO: 480085 - DNA, 83 bp, Homo sapiens
ggcaaagggaagttcttcggaacctttcttcccctggatgggaaaacatctcaaggtcaaaatgcagatcttcgtgaaaaccc

SEQ ID NO: 480086 - DNA, 100 bp, Homo sapiens
tacttccagaaaaagtgctcctgggactccaggataccagctcaccaggactttggctacttttatggctcgagctatgtggcagcccctgacagcagcc

SEQ ID NO: 480087 - DNA, 89 bp, Homo sapiens
ctgttcctgatccgcactgccctttttgcaccccagggagctgctgctgggattttatattggaagacatggatcttgctgccaacgag

SEQ ID NO: 480088 - DNA, 80 bp, Homo sapiens
ctcatcgagatggggaacaggctccgtgcagagctgggccgacccgaaaggaaatcctcattgacgattcaatttgttga

SEQ ID NO: 480089 - DNA, 50 bp, Homo sapiens
aagtctttgaagaagaaatagtgtgttctggacttggtgcctctttctgt

SEQ ID NO: 480090 - DNA, 100 bp, Homo sapiens
gggagatccacagctaagactccaggaccctctggaagcctagaaatggtgtcatggagaaactccagctgggcccagagattctgcagcgggaaaatcc

SEQ ID NO: 480091 - DNA, 85 bp, Homo sapiens
agtgctgcaaggctgacgataaggagacctgctttgccgaggaggtcgatgagcagatgcttaacgtgcagaacaagaacagcag

SEQ ID NO: 480092 - DNA, 101 bp, Homo sapiens
agcctggctccttctgctgggccctgaaggcagacgggataatgtggttggccaaggcctgttggtccatccagagtgccccctacagaagctaagcagca

SEQ ID NO: 480093 - DNA, 75 bp, Homo sapiens
agaagtttctaggaaaggccggacaccaggtcatcatcagatttgaaatatttaaagtggatacaaaactatttc

SEQ ID NO: 480094 - DNA, 83 bp, Homo sapiens
gtccactatgtcctgctggatccttcctgcagtggctcgggctttatcctgtggataaacgcagagtgaacgagtttggggag

SEQ ID NO: 480095 - DNA, 100 bp, Homo sapiens
cttcattcagatgtggtggaatatgccaaggaaaaactggagagcttcatcaaaaatagtgatagctttgataatcggcgtggcacaagcctaatggaag

SEQ ID NO: 480096 - DNA, 83 bp, Homo sapiens
tcacggagcgcatgatggcctactgcgaccagatcttccaggacgagacgggcaagaaccgccagcggccccgcctccagcgc

SEQ ID NO: 480097 - DNA, 50 bp, Homo sapiens
accagcaataacttacagagttatcgagtaaaatcttctgtagacttgag

SEQ ID NO: 480098 - DNA, 77 bp, Homo sapiens
ggctcagatcagtggccgaggccccagagcaattaccagctctggctgggtcgccacaacttgtttgacgacgaaaa

SEQ ID NO: 480099 - DNA, 110 bp, Homo sapiens
aaaaatgattcttttcaaaatgtgcagccagatgagcccaaggttcttaatgaatgtctaagattggtggaacgagaatgcctacacgcagccacaggaatccagtttcc

SEQ ID NO: 480100 - DNA, 82 bp, Homo sapiens
ttccacgagatcttcaatctgacagaaaacgagcgtccgctggcggcaattctgtggtgttcttggtcacacatttatggag

SEQ ID NO: 480101 - DNA, 98 bp, Homo sapiens
tgggcgcagagggctcctccggcgccgccgagctgcgcccgctgccttcacaccccggacatccgcgccacacagagcgcatcctctctggaaagctg

SEQ ID NO: 480102 - DNA, 100 bp, Homo sapiens
ctgtaatgtcgcaaggtggccgttactgatcttacttcatccagtctaatagggttgacatgatgaacaatcggtttcggaaggatatgatgaaaaatgc

SEQ ID NO: 480103 - DNA, 83 bp, Homo sapiens
ggaccacaggccctcgttgcccagatgtgatgtgtccaatctagatcccaacttctcatttgaaggcaccaaactggatgtgg

SEQ ID NO: 480104 - DNA, 50 bp, Homo sapiens
gaaattgtcccgaatccctgcagtgtggacgaatgtggaacctcgctctg

SEQ ID NO: 480105 - DNA, 73 bp, Homo sapiens
ccccgagaagtacttaaaaaaacattggaattctgcttatctagatggctgcggctctgcattcaatccaagt

SEQ ID NO: 480106 - DNA, 83 bp, Homo sapiens
agtctgtatcctgtagcatcaccatctcttcagcaactggtagtagagagcagcccgacggccatggaggctgaagagacgat

SEQ ID NO: 480107 - DNA, 100 bp, Homo sapiens
ctctgggacatttagccaaaggagccagcctggacgatctcattgacagctgcattcaatcttttgaggtgatgtttcaccatgttgcccgtggctaatc

SEQ ID NO: 480108 - DNA, 100 bp, Homo sapiens
gccggaggtggcaattcaccgaattcgaatcaccctaacaagccgcaacgtaaaatccttggaaaaggaacaggaggtgaggttccgccctgcacactgg

SEQ ID NO: 480109 - DNA, 96 bp, Homo sapiens
gtcagtccaaaagtttccgtcgtcggcacaactcctaacacacatgcaggacttgaaagatgttactaataatgtccactatgagaactacagaag

SEQ ID NO: 480110 - DNA, 97 bp, Homo sapiens
ctcatggtgacacagatctgaaaaccagccccatggctgggggttatggagtgatgggtgacgatggttctattgattatactgttcacgaagcctg

SEQ ID NO: 480111 - DNA, 100 bp, Homo sapiens
cagtacacagacgagcatggggaagagtaatggtagtaacaggggtgaagatgccttttgtgatcctgaagatgaatgggaacccgacattacagatgca

SEQ ID NO: 480112 - DNA, 117 bp, Homo sapiens
gccgaagaagcatcgttaaagtctctcttcaccctgccgtcatgtctaagtcagaggaacacgatgaacctattctgaagcacttgaaagatattaaagtgaagttctcagatgctg

SEQ ID NO: 480113 - DNA, 82 bp, Homo sapiens
acctcctacctccgttgaaaggagagccagttactaacttctgaccatgccactgcctcggtacggctccgggcagcagcca

SEQ ID NO: 480114 - DNA, 97 bp, Homo sapiens
gaaggcgtggatagcctgaaggcagccattcagagtgtgaacatggctacgcctcttcattcccgtccatgccgagcccccgactgcagcattcaaa

SEQ ID NO: 480115 - DNA, 100 bp, Homo sapiens
cagcaaccactattttcttcctgcccctcgttgatgagagcattcgaagtgacctcagcagggcatccaggtgaaatgacaatggatgctctgttggctc

SEQ ID NO: 480116 - DNA, 90 bp, Homo sapiens
ctcaatgactgccctctaaaggaagaggccacggaaaggtatgatatatttgatccaagacagtccattccagtccgggaatctacagtg

SEQ ID NO: 480117 - DNA, 90 bp, Homo sapiens
cgccggggccggaggaaaaagctcgagagagtctacaaggagattgaacaggtggttggcccacatcgccctccagcgcttgatgaccga

SEQ ID NO: 480118 - DNA, 78 bp, Homo sapiens
gcacctacgtcccgctgccgtcgccgccgccaccatgcccaagagaaaggtacatgtcccagagcaagcacacggagg

SEQ ID NO: 480119 - DNA, 83 bp, Homo sapiens
cgggagtgttcgttgtgccagcgactaaaaagagaactcccccactggaaaggattctgaaagaaatgaagtcagccctcaga

SEQ ID NO: 480120 - DNA, 75 bp, Homo sapiens
ccgtggcagaggaacccgcgggcacgtatcgaaggatgatcgcagtgatgtggagagcagctcagaggaagaaga

SEQ ID NO: 480121 - DNA, 75 bp, Homo sapiens
ctgggatcaatactcagcatccagctgtcaaatcaacaccaagctgctcaagaagccagaaaaaggagatgaaaa

SEQ ID NO: 480122 - DNA, 100 bp, Homo sapiens
gcaattcctaagtgctgcctggaggcctctacagagacataatgttggagaacttctgccacatggcagtgctggatgagacaccaattattgcggtgat

SEQ ID NO: 480123 - DNA, 100 bp, Homo sapiens
ctgaaaacattggaccacacaaagtcttactggaacgagtggaatatctctttctcataatttttacggtggaagcgtttttaaaagtaatcgcctatgg

SEQ ID NO: 480124 - DNA, 100 bp, Homo sapiens
ggctcagccgcaagtacccgtccatcatagtcaactgcgtggaagagaaggttctgatctacaatggccaactggacatcatcgtggcagctgccctgac

SEQ ID NO: 480125 - DNA, 96 bp, Homo sapiens
gacacacgccttcaggtttgctcaggggctggactctgtgaagctgagcaggagcagatgcggaagatcctctaccagaaagagtctaattacaac

SEQ ID NO: 480126 - DNA, 75 bp, Homo sapiens
aggcgccggggcctagcgctatgcctgcggcggagactgcatcaggctctcggaaggagtcaagactgagaacaa

SEQ ID NO: 480127 - DNA, 97 bp, Homo sapiens
cgcttctgcatctgtgggccgagacagtcagtcggatgcggagactgcagccgccgcgggcgaagtgctagacctcacctcacgggacagagagcag

SEQ ID NO: 480128 - DNA, 101 bp, Homo sapiens
aaaaatgtgctggtggtagctgcagcagcccttggaattgcttttgtcgaggttgtactcgtaaaacaaggatcatcgatgttgtctacaatgcatctaat

SEQ ID NO: 480129 - DNA, 83 bp, Homo sapiens
gcccaccagctccccatcgcagaggccatgctgacctacaagcagaagaggtgccagaaccctgtggagcatcatgaactggg

SEQ ID NO: 480130 - DNA, 74 bp, Homo sapiens
aagaactaagaatattattagcacaagagcaccatactttgagggtggtgactatcctgttgagaagcaaaaga

SEQ ID NO: 480131 - DNA, 75 bp, Homo sapiens
cttggactgagtcctgcaggacacagaacgctgtaaatgtaagcctattagagctacacagaagacctatttccg

SEQ ID NO: 480132 - DNA, 90 bp, Homo sapiens
gagctctgtctggaccccaaggaaaactgggtgcagagggttgtggagaagtttttgaagaggctcctcacacatcctcaccccgacccg

SEQ ID NO: 480133 - DNA, 100 bp, Homo sapiens
agcttcgctcggaagggtctttgttccctgcagccctcccacgttttcggctttgtgagaaaccttaccatcaaacacgatggccagcaacgttaccaac

SEQ ID NO: 480134 - DNA, 100 bp, Homo sapiens
gtcataacatatcactgactgcactattcctgatcagagaactccagttgcttcaacacacagtatcagtagtgcagccaccccagatcgaatccgcttc

SEQ ID NO: 480135 - DNA, 100 bp, Homo sapiens
gctcctgggacgcctgtccgaccgcctcggcaggaaccgggaccgccagcgcaggagtgatcagggccaaagcggtcagtgagaaggaagtggactctgg

SEQ ID NO: 480136 - DNA, 100 bp, Homo sapiens
ccaccgactcgtgggccctggcggtggacgagcaggaagcggctgtcaagtcgggttattttagggacacagtgatgtactatggcttttacaccaattc

SEQ ID NO: 480137 - DNA, 99 bp, Homo sapiens
tgagctcacattccagcctacttacaagtatgatacgggctctgacgactgggataccagtgtgggccaaactgaaattgcagaaggcttcagaacgat

SEQ ID NO: 480138 - DNA, 100 bp, Homo sapiens
aggtggaccaaagtcatgggcacagctgaatggaaagccagtaggacacgaaggtggggcaagctctgtgtgattgattggaagacatcagagaaaccaa

SEQ ID NO: 480139 - DNA, 80 bp, Homo sapiens
cacaccaatactgttgcagattgatttggagcaagaggtggtggtggccttcccccgaagaaatttggtaatcctgggga

SEQ ID NO: 480140 - DNA, 106 bp, Homo sapiens
cccgtcggacggggaggaggagcaggagctggaggaggagccgccgccgccaggaacctcggagagctgatagatcggtttgtggctgatttcaaagcccaggggc

SEQ ID NO: 480141 - DNA, 75 bp, Homo sapiens
tagaatcttcccttttttactccattcaagagcagcattcataaatttccagagtcttgctgtgtcgcccaggct

SEQ ID NO: 480142 - DNA, 89 bp, Homo sapiens
ccgagaaccgtcagtttgagccagatggtcactctgtgagactgctgggtcagaaaaaggataatggaaggcggcttgggggagcacga

SEQ ID NO: 480143 - DNA, 74 bp, Homo sapiens
tgcggtggtgggggacctgccggcacgcgactccccccgggcccaaaatgactcctcctctgagagtggcagcg

SEQ ID NO: 480144 - DNA, 100 bp, Homo sapiens
gcagcctcccggagcccctcctttggtgacccacagctatcccctgaggcccgacccagagctgagaatgaagcggagagcatcagacagaggagctggg

SEQ ID NO: 480145 - DNA, 99 bp, Homo sapiens
gataattgataacaccctgtaacagctgaaactatctcagggaggttgtatgagctcatttcgatggaacagaggtggcgacttcaaaggacgaaagtg

SEQ ID NO: 480146 - DNA, 98 bp, Homo sapiens
ctgattttggacagtggagccactcataccactgcaattccagtccacgatggctatgtccttcaacaaggcatttgttgctatcggggactacaatg

SEQ ID NO: 480147 - DNA, 83 bp, Homo sapiens
ggaataatatggaagaagatggaaaaaacttgtttaatggcatcagaggctccttgaaatgctagatacagagaaggaactgt

SEQ ID NO: 480148 - DNA, 97 bp, Homo sapiens
aaactgggtccatgggagcaagattagtggctgctaaacttgaaccgaaaagctcttcaaaggaatctaaagacagcaagacatcatctaaagatga

SEQ ID NO: 480149 - DNA, 100 bp, Homo sapiens
gagccccttacccgccgccgcggccaggccccccaacatggactgtctctgtatagtgacaaccaagcctttatcctcctcttctacctcgttttttatg

SEQ ID NO: 480150 - DNA, 75 bp, Homo sapiens
cagattcgcagtggtcgcttcttctccttgttggaaatctacatttctgaaggaacccactcaacagaagaagac

SEQ ID NO: 480151 - DNA, 100 bp, Homo sapiens
ctggaagctgatgctgctggacgccactttccggggtgcacagcaagtgagctacaggcaaccagctgctttcatcgtcacacaataccctctgccaaac

SEQ ID NO: 480152 - DNA, 100 bp, Homo sapiens
ctctgctgccgctcggtcacgcttggaaggcaacagcccccaggggagcaaccagggagtcaaaatcacaccggaccagcagaagaggagcagctttttc

SEQ ID NO: 480153 - DNA, 100 bp, Homo sapiens
ggatcagtttctttgtcatgtagccaagactggagaaacaatacgaagttatacggaagcgtctcctcattgatggagatggtgctggagatgatcggag

SEQ ID NO: 480154 - DNA, 100 bp, Homo sapiens
aatttagagccaaactgtccaaggctttggcagcgaatctggctttgggggaagaggaagaaaagtcggattacaagatcaaccaccaccaacaacaata

SEQ ID NO: 480155 - DNA, 99 bp, Homo sapiens
gaaggaaaaagacttcggagggtagcttgcacctgtcccaactgtaaagaaggtggtggaagatcacaaaatttgtccaggatagacatagagctagaa

SEQ ID NO: 480156 - DNA, 80 bp, Homo sapiens
gtagagcttatcaacacaaagttggcaacattattgatacaatagcaacaagatatggatttggatatagaatttgatgt

SEQ ID NO: 480157 - DNA, 97 bp, Homo sapiens
tattttgtgatcgcagcgatgaaaggtggacagcagcaaggaatcagctgaagcagcttgtgatatactatcgcaacttgtgaattgctctttaaaa

SEQ ID NO: 480158 - DNA, 50 bp, Homo sapiens
atttgtactcaggtgaaaggaccaggttactttcaggagtgaaaaagctc

SEQ ID NO: 480159 - DNA, 83 bp, Homo sapiens
cattgacgccatgtcgggttattcgagtgaccgagaccgcggccgggaccgaggcccgtgccccgcatcatggtgcagtcagc

SEQ ID NO: 480160 - DNA, 75 bp, Homo sapiens
cctgcctgctgctgcgcgtcttcaggtctgagcgggaaagttccgaagaataggagtggctgagttagctacgga

SEQ ID NO: 480161 - DNA, 100 bp, Homo sapiens
gggggttcgcgcccgccgacccgcgccctgctccctctcagcacctgggcggacggtactccaaagattcaggtttactcacgtcatccagcagagaatg

SEQ ID NO: 480162 - DNA, 50 bp, Homo sapiens
ggccttggccgaccctgagaacaggatggatagaatgacagaagatgctc

SEQ ID NO: 480163 - DNA, 75 bp, Homo sapiens
tggccagagcctggtcgagccggaggaagccaccaggaatttaaactttgggataatgagctgcagtatgtggac

SEQ ID NO: 480164 - DNA, 98 bp, Homo sapiens
ttcagtgggaagcatgtcgtctttatcgctcagggaaatcctcattgacgattcaatttgttgaaggccaatttgtggactcctacgatccaaccata

SEQ ID NO: 480165 - DNA, 114 bp, Homo sapiens
ccagctcgaagaaggcgagcagggtgcgggagagccccttgcagaagacgccgtacgagccctaccacttatgtcttggatgaagatgaacctcgattccttgaagaagttgat

SEQ ID NO: 480166 - DNA, 88 bp, Homo sapiens
gcgagagtggcagaggagctggcggagagcggcctgcgggcgatcgggccgagtactatactggcaattgctggagaagattttgcaa

SEQ ID NO: 480167 - DNA, 98 bp, Homo sapiens
cggcagaacacagcagggcggaggaaagtgcaggactgatcctttgaaatactccagccatgactaaaagagaagcagaggagctgatagaaattgag

SEQ ID NO: 480168 - DNA, 96 bp, Homo sapiens
ccctcttccaggttacatacagcttacatcttgcatcctcaagcgccccagcatgagaccagatgtaagctctcctccatccagctcctcaacagc

SEQ ID NO: 480169 - DNA, 75 bp, Homo sapiens
gcttaaggaagtaaaatggcggacctggcgaacgaaggtgctggagatcagaatttatttacctctgtttatcca

SEQ ID NO: 480170 - DNA, 100 bp, Homo sapiens
gtgtacttgcaagaaacctcaggacttgagtaacagcaacatgaatctggccaacctatttgtggaaatggaatggtagaacaaggtgaagaatgtgatt

SEQ ID NO: 480171 - DNA, 154 bp, Homo sapiens
tttgttggggagaagaggattggaggtgtcagtgttaaaggaacctctacaacgaaggtgaagccacggaagataaggctgctgagaactagccctagacctctgcgtgagggttcttctgccgaagacatcaccagtgtgtggagcctgccac

SEQ ID NO: 480172 - DNA, 82 bp, Homo sapiens
aggcctcggactccgcggccggcccggcgcggcccagcgccctcaggtattagaaaactactcggatgctccaatgacacca

SEQ ID NO: 480173 - DNA, 101 bp, Homo sapiens
cacctggatgcctacgtgggaagggacctcgaatgtgggaccccagcccctctccagctcgaaatcggggggccctcagcctcttggccttgaacgggctg

SEQ ID NO: 480174 - DNA, 51 bp, Homo sapiens
ctgagacggtgtcccgccgaaagacaaggggagctgcttttttcattattg

SEQ ID NO: 480175 - DNA, 96 bp, Homo sapiens
gagactgcaatggggacacgccaaacctgagtttctacagaaatgagatccgcttcctgcccaacgatgtcaccgggtgcgcatcaatgtacctcc

SEQ ID NO: 480176 - DNA, 74 bp, Homo sapiens
tcaaggatggggattcaaggatggaatttttcataactccatatggcttggtggccagcatcgaaatgttcagc

SEQ ID NO: 480177 - DNA, 50 bp, Homo sapiens
atccctgacacccggcatgaccaagctaatgtcaaaccccgaaattccac

SEQ ID NO: 480178 - DNA, 75 bp, Homo sapiens
cacaagtggagctccttttcctccacctaccttcccgagtaacagtatgactaaatatactgagaagctcgaaga

SEQ ID NO: 480179 - DNA, 97 bp, Homo sapiens
tcgtggtgggaggacactccaacacatttctttacacagtctctagtgatccctgaaaagttccagcatattttgcgagtactcaacaccaacatcg

SEQ ID NO: 480180 - DNA, 90 bp, Homo sapiens
ctccagcagcgccggacccgggaagaactggtgagccaagggatcatgccgcgcatagaatgtcaagctaaccaggcgtccgctacttca

SEQ ID NO: 480181 - DNA, 97 bp, Homo sapiens
gcagatatgagagatagcacagatggaccaaaggttatgcacaggatgaagatttgataaagtggaaggcactgtttgaggaagtccctgagttact

SEQ ID NO: 480182 - DNA, 100 bp, Homo sapiens
cacactgcaagtcactgaggacaatgacagcaatcagtcgctacatggagctgaccatcgagcctgtgcagcagtgatattgtggtccagatagtagatg

SEQ ID NO: 480183 - DNA, 80 bp, Homo sapiens
tggcccacttgcctccctgcttcctgctgctggcactggtccttgtcccctcagcggccctgggagagcctcagctctgc

SEQ ID NO: 480184 - DNA, 75 bp, Homo sapiens
atcgcggagcttgacccgtccatcgctgtgctccctggaattcccatgccaccaccacctttgggactcccccct

SEQ ID NO: 480185 - DNA, 75 bp, Homo sapiens
tgctcgagagcctcacttcggcaaacgtggtccttgcaacaaacacaggtactccaaagattcaggtttactcac

SEQ ID NO: 480186 - DNA, 101 bp, Homo sapiens
agccctctgggcctgggatattgtggttgataactgtgccatctgcaggaaccacattatggatctttatctttaatctcatgaagtacgacagctacagc

SEQ ID NO: 480187 - DNA, 75 bp, Homo sapiens
atccatggcttttgtgctcattttggttctcagtttctacgagctggtgtcagcttcggtcttcgagaacctgga

SEQ ID NO: 480188 - DNA, 80 bp, Homo sapiens
atccagcctgcggagcctgtggggcaggttggacacgagttgccgctggttgtccaaatcaacaaccaggtcgtccagct

SEQ ID NO: 480189 - DNA, 95 bp, Homo sapiens
agtccaatgaaaacaaacaaccaagaccacaatgggaatatccctaaacccgcttccaaagactcatctttcaagaggactttagactaattgca

SEQ ID NO: 480190 - DNA, 100 bp, Homo sapiens
atacattaaatgcaatagcccttcagtactgttgtacgatttgttcccgacaaggagttttctggttcagaccgtagacagagaggccgagaaggaccag

SEQ ID NO: 480191 - DNA, 89 bp, Homo sapiens
caaaagaaccccagcaaggaagagagagaggccttagtggaggaatgcaacagggcgttatggttttctatggcccggactgaatgtcc

SEQ ID NO: 480192 - DNA, 82 bp, Homo sapiens
ctctagaggcgttttttggccaagggattattttcgaaataccagtatttcgactccagggggatgttcatttctatagtat

SEQ ID NO: 480193 - DNA, 80 bp, Homo sapiens
ggccagctgggctccacagcccaggttaatgaaggagttcccccttctgagtatgttcaatatccatgaaaaccttttag

SEQ ID NO: 480194 - DNA, 83 bp, Homo sapiens
gagagctgcaccgcgcgggacaagtcgccggcggcgcccgacggagcagaatttcacaaacttgtttggacagccactagtct

SEQ ID NO: 480195 - DNA, 99 bp, Homo sapiens
aagtaatccaattcgaagaccaatttcagcagacagcgccatcatgaatccagctagcaaagtaattgcactgaaagtgaattttgaagattgcaccgg

SEQ ID NO: 480196 - DNA, 96 bp, Homo sapiens
tcggagaccccgcgccggaccctgaggcagcgagagcctgattcgggaggatggggggccgggcactgagtgtcgccacctgcagcagctcctggt

SEQ ID NO: 480197 - DNA, 50 bp, Homo sapiens
gctttgagtaacattgccagagagtttggaaattttagcattcaggtgcc

SEQ ID NO: 480198 - DNA, 75 bp, Homo sapiens
atctggtgttatcaacttaaaagatgccacctctaaggagtgtttggctgccccacaactgtggccaacgtggag

SEQ ID NO: 480199 - DNA, 74 bp, Homo sapiens
agggaaccctggtcaccgtctcctcagtatctggagtccatctttcaccatcttctcctgagattgtactggac

SEQ ID NO: 480200 - DNA, 73 bp, Homo sapiens
ccgtggtgaggaaccctggactctcagggaggaaagatccctatccgttggacagcccctgaagccattgccc

SEQ ID NO: 480201 - DNA, 100 bp, Homo sapiens
ccctgtgccgggacccgaaatccttcctgtaccgcttatgccaggccgatcccgacctggactcagacaagtgtccacaggatgaaatgtccgagtcagg

SEQ ID NO: 480202 - DNA, 75 bp, Homo sapiens
gttccacgtggagccaggcctgcagaggctgttctacaggggcaaacaggtactccaaagattcaggtttactca

SEQ ID NO: 480203 - DNA, 117 bp, Homo sapiens
cgtaacctgcgggagaggtttggaattgatgatcaagatttccaggatgcatcatctgcagacatcagaaaagcatatcgtaagctttcactaactttacatccagacaagaataaa

SEQ ID NO: 480204 - DNA, 100 bp, Homo sapiens
tcttcctcaacaccagcaccgcagatgttgtcaaggtggcctaccaggaggccaggggtgtcgccatgtctctgctggatgaaccgaatcctaacagtcc

SEQ ID NO: 480205 - DNA, 87 bp, Homo sapiens
atacagatctgggaccgaaatttgactgaagacaactgttagttttgtggcttactgctgctccacccagtgtctgcagacttttga

SEQ ID NO: 480206 - DNA, 96 bp, Homo sapiens
gaggggagtggaaaggctctcagtgaaaaagattctacaagggggttgctcctctctggatgagacagataccatacaccatgatgaagttcgcct

SEQ ID NO: 480207 - DNA, 83 bp, Homo sapiens
ccccgaggccagacggccggctctgtgagcgccaagaccggctgaagcccacagaattcttccagtccctgggtggggacgga

SEQ ID NO: 480208 - DNA, 75 bp, Homo sapiens
ggagatcatagcagagtacgatactcaggtcaaagtatgaagtgtaacagaacagactttaccacctgaaactgc

SEQ ID NO: 480209 - DNA, 76 bp, Homo sapiens
cgcacttccaggtgcacagcgcgggagccgtcacggtgctcaagggccacccgttcatcgtgcagttcaatgatgg

SEQ ID NO: 480210 - DNA, 75 bp, Homo sapiens
agacaccagctccgaaatcaccaccaaggtctggcgtgctcctgatcagagttactctgatctgaagattttggc

SEQ ID NO: 480211 - DNA, 98 bp, Homo sapiens
cgcttcttgcatgaaactggaggagcaatggtgtatgattccttttgcaataaaaacaacaccaggtgcctctcaaattcttgccaaaacaattctac

SEQ ID NO: 480212 - DNA, 75 bp, Homo sapiens
gtttagcttaaaaacagctcattctcctaatgttttccttcagcaaggacaaagctcctcaagagttactgatct

SEQ ID NO: 480213 - DNA, 75 bp, Homo sapiens
gagctacccgagcggcggcggcggcagcagcggcagcggcaagcaccggaaagcaggcaggatgggagagtcgcc

SEQ ID NO: 480214 - DNA, 83 bp, Homo sapiens
gttgaggcttccaaacttcctgggaaggacgacctgcctagagctggaacgttacctccagagcgagccctgctatgtttcag

SEQ ID NO: 480215 - DNA, 75 bp, Homo sapiens
gaggaaaacaacttcgagggcagagttcgtgggagtaagggagaagttttgtacattttggatgctaccaaccca

SEQ ID NO: 480216 - DNA, 100 bp, Homo sapiens
atcctcgcgtgagacagatcaagatcaagaccggcgtggtgaagcgcctaaacccaccaagggacgaatgcgcatccactgcttagagaatgtggacaag

SEQ ID NO: 480217 - DNA, 104 bp, Homo sapiens
aacgctgccgtcggggaggattgatgtcccttcagcatcatgcagccgccgccgaggaagacaatgcagatcttcgtgaagactctgactggtaagaccatcac

SEQ ID NO: 480218 - DNA, 100 bp, Homo sapiens
ccttggtggatcatcctagtggctattctcgctgggatcttgatgcttgctttattagtgtttatactatggaaggtcctaggcctacttacaagcctcc

SEQ ID NO: 480219 - DNA, 101 bp, Homo sapiens
cgtggaagatttagaaagagagcctggaagacctagatcttcggatttttcgggattgtcaccctacgaaaggaagagactgaagaacatatcagaaaacg

SEQ ID NO: 480220 - DNA, 100 bp, Homo sapiens
tgacactggggtactggaacatccgcgggggtttgaagaagatctctgcctacatgaagtccagccaattcctccgaggtcttttgtttggaaagtcagc

SEQ ID NO: 480221 - DNA, 100 bp, Homo sapiens
tggtggtcaaagatggtgccacatataaagtggacgtggtgccaataaagaatcaggtttttctttggactcagggaaaggtattgtttctaaagatgag

SEQ ID NO: 480222 - DNA, 51 bp, Homo sapiens
ggagcgtcaacagcagcaccatggatacagatccacgggttttagaaaaac

SEQ ID NO: 480223 - DNA, 100 bp, Homo sapiens
acgtgagattgtaccccacgagctgccacacggcctgcactctgcgctttgagctactgggctgtgagctgaacgttcctgggcttcccgatggactcga

SEQ ID NO: 480224 - DNA, 74 bp, Homo sapiens
agaaattgtatacaggacctggcttagctattcattgcatgcaggaaattatggaagtggaaattacaatgatt

SEQ ID NO: 480225 - DNA, 100 bp, Homo sapiens
accgagtcagaacccgagtgctgcttggcggcgagagcctgttctgctgggacacagaatcacttgctccatctcatacattgatgatgattaatttgta

SEQ ID NO: 480226 - DNA, 75 bp, Homo sapiens
tgaaccccaaggccaacagagagaagatgactcagggtccctctctgtcctgctcgatgacctgcaggacctgag

SEQ ID NO: 480227 - DNA, 100 bp, Homo sapiens
cagcaagtctgttgtctgaattgtactgtcaagaggagctctctgctcgtgatggggatcctacctttcatacacatcagctgcacttagtagatttacg

SEQ ID NO: 480228 - DNA, 50 bp, Homo sapiens
cgccgcccgtccacacccgccgccagggacccccatcaaccgaatcccca

SEQ ID NO: 480229 - DNA, 75 bp, Homo sapiens
ctccatcccttccgaggcccgacttcgatagttcttcagacacttctggcctttgcagttacctgttacggtata

SEQ ID NO: 480230 - DNA, 83 bp, Homo sapiens
tgccatgagaccaagtttgccaagcattgcgtgaagtgcaacaaggccacactggtgtgtctcataagtgacttctacccggg

SEQ ID NO: 480231 - DNA, 76 bp, Homo sapiens
gttgaacaaattgctatgatgaaaccaaaaggccagactgaacacgatgaggcctcccgcgacgatgcccctcaac

SEQ ID NO: 480232 - DNA, 75 bp, Homo sapiens
cccggcgtgccgagcggcaacggggctccgggccctaaggggaaaaggggaagatagtgatgtactcagtataaa

SEQ ID NO: 480233 - DNA, 139 bp, Homo sapiens
gggggccataccggacccgcaagcatgcccaccactgccacaaacgccgcaccaggtcttgtagcagcgcctcctcggtcaaaatgcagatcttcgtgaaaacccttaccggcaagaccatcacccttgaggtggagcc

SEQ ID NO: 480234 - DNA, 100 bp, Homo sapiens
tggcggtgtctacagtgttctcgacttcgtcgctgcccaccttgggacaccttgactccaagcccagcagtaagtccaacatgattcggggccgcaactc

SEQ ID NO: 480235 - DNA, 105 bp, Homo sapiens
ccggtaacaaacgagggttcccgggattggaccgacgcagccatgacaatgcagatcttcgtgaagactctgactggtaagaccatcaccctcgaggttgagccc

SEQ ID NO: 480236 - DNA, 85 bp, Homo sapiens
agcctggttggaaaacccaagatatttatcattcaggggctatctgatgggttagagtgcctttgagaagaaatcagtggatact

SEQ ID NO: 480237 - DNA, 96 bp, Homo sapiens
cgatgtgtgagaagaccaccatcaacaatgagtacaactaccgctgctggaccacaaaccgctgccagaaaaatgttagtaggcaggaagaggcgg

SEQ ID NO: 480238 - DNA, 51 bp, Homo sapiens
aatgctgccaagctcttggccaagtgagagtctgagaaaactgtgcgtctt

SEQ ID NO: 480239 - DNA, 50 bp, Homo sapiens
gaagacttgtaacctggagaagaggtatggctgatggcaagcattgtact

SEQ ID NO: 480240 - DNA, 100 bp, Homo sapiens
ccaacttcttcgccaaattaaagttttacaagatttaacctgtcatcaagacctgggattttggtggtagaggaccgaaaacactttggagctgtagaag

SEQ ID NO: 480241 - DNA, 75 bp, Homo sapiens
tgcgtccttatcagccgagccggagagagagaggaggtcgccagcatttaacctccaaatcaccaccttccccga

SEQ ID NO: 480242 - DNA, 100 bp, Homo sapiens
tctgagcccagcgctactgtgaccattgaggagctcgacccacccccacagaggcctgaggagacctctgcccagggattccgccagctgctggagctga

SEQ ID NO: 480243 - DNA, 74 bp, Homo sapiens
atgacttatttgtctgcacctaatgcttctgttgattcactttaagagatttggaaactcttccctttggaatt

SEQ ID NO: 480244 - DNA, 141 bp, Homo sapiens
caacgacatgcagcagtcgggcagctgtccccgaggacccttctgcgcctttgcccacgtagaactctggagggcagtatgagctttttgctgtgattgcgcacgtgggaatggcagactccggtcattactgtgtctaca

SEQ ID NO: 480245 - DNA, 75 bp, Homo sapiens
gccgcagccccaggctgagacaggcccctcaccgttccccaaccaacaaactcctccctcaatgatgccaggggc

SEQ ID NO: 480246 - DNA, 74 bp, Homo sapiens
tttcattagccacgaggagaaaagaactcagattgatggacaacttttcttaattaagcaccttttgatacttc

SEQ ID NO: 480247 - DNA, 96 bp, Homo sapiens
aaaggagttgtcataagggtgttggccttgccagggccttcctgggtgaggcgaagaagggaaggcatcatgacggtgatgtcagctctgtcggtg

SEQ ID NO: 480248 - DNA, 100 bp, Homo sapiens
ggaagcccctatcgccgagctcgttggagcttgaacccattgtcacccctccgttgtgtgacttcattgagacacattacctgaatgagcaggtgaaagc

SEQ ID NO: 480249 - DNA, 100 bp, Homo sapiens
aaagcagcgtgcgttcagccctgggtttcagcaagttcgtgagcagatggaggcagagatagctcacttgaagcaggaaaatggtatactgagagatgca

SEQ ID NO: 480250 - DNA, 82 bp, Homo sapiens
tcttaaggtcactttctgaaggcggcctcatcacagtcggagggggatatgagactttctactcggaatatcctgagtgttg

SEQ ID NO: 480251 - DNA, 100 bp, Homo sapiens
ttaatctcagggaactggatgtcagcaagaatgcttgaccacatattatcccctccacccatgccgtttcggaaatgcagcaacccagatgtggcttctg

SEQ ID NO: 480252 - DNA, 82 bp, Homo sapiens
aaaacagacgagaaacacgggagactcccggtaacccccaacttgccgtccctcctcctatgtctccatcctccaaatctgt

SEQ ID NO: 480253 - DNA, 90 bp, Homo sapiens
ctgacagtgaggttgacaaaaagctggaagagcctgtattgtcctcacaatagtatagaagaattcaagagaggagagagagacagcacc

SEQ ID NO: 480254 - DNA, 50 bp, Homo sapiens
cgatctgctggcctcggcctctcaagagagctcagaaatatgctcagcaa

SEQ ID NO: 480255 - DNA, 82 bp, Homo sapiens
tcctgctgcttgctgaccaaatgcaactgaatgccatcattgcagcctcaatgtccatcaagtcctctgacaaactccgcca

SEQ ID NO: 480256 - DNA, 100 bp, Homo sapiens
tactcttgcttatttattggcttaaggattaaggatccccaaagtctcagacttcaaattcaaagaagctttttcactatttgacaaagatggtgatgga

SEQ ID NO: 480257 - DNA, 100 bp, Homo sapiens
ccaacatgaagcttcttcatgttttcctgttatttctgtgcttccacttaaggttttgcaagcttccaccaacactttcttccaaatatcctgaagatga

SEQ ID NO: 480258 - DNA, 49 bp, Homo sapiens
ctcaccggtttctcccacatcgacctgaaaagcagtcctgaagaacgag

SEQ ID NO: 480259 - DNA, 50 bp, Homo sapiens
tgctgctcgtcttctatgtcaagaagatgagatcgtggggctcaccagcg

SEQ ID NO: 480260 - DNA, 100 bp, Homo sapiens
cctcccaaagtgctggaattacaggtatctcttaaatattccaggaccaattgacattccatctcgtttatgtaaagggaattttgatgatgatatgttt

SEQ ID NO: 480261 - DNA, 100 bp, Homo sapiens
aaaagaaggacgatgaaacagttgatagcttagggtgtccgcaatgttgccagtgtctgtctgcagattggctacccaactgttgcatcagtaccccatt

SEQ ID NO: 480262 - DNA, 98 bp, Homo sapiens
tcaacttcacgctggcgcgagccccgtcctccttcgccgccgcgcacaaccgcacgtgcagggggggccctcagcctcttggccttgaacgggctgtt

SEQ ID NO: 480263 - DNA, 82 bp, Homo sapiens
gttagaactgaagcatgcaaaggtcctggacccaagccagaagcctctgcaaagcttccttccagacctgcagataactatg

SEQ ID NO: 480264 - DNA, 75 bp, Homo sapiens
cttgtccttgctggtgcatgcgtcgtcggcctctgggcagcagccagatgaaaactcgctggatttttcctcctg

SEQ ID NO: 480265 - DNA, 83 bp, Homo sapiens
cgcgaggtggcggtgctgaggcacctggagaccttcgagcaccccaacgtggtcaggcagaagctcctcctggggtagagaca

SEQ ID NO: 480266 - DNA, 82 bp, Homo sapiens
catggtgatccttcgggacaagattcgcttctatgagggtgatgtgtccaatctagatcccaacttctcatttgaaggcacc

SEQ ID NO: 480267 - DNA, 74 bp, Homo sapiens
aaaattcagaaaagagcaacttggagctgtaaagtcggcgtggcacaagcctaatggaagatgatgaagagcca

SEQ ID NO: 480268 - DNA, 138 bp, Homo sapiens
gctgcatttgttctgcctgacttggaccctggaaaacctggccctcttcaatttctgacaaaaggccccttcacagatgtagtcactacaaatcttaaattgcgaaatccatcggatagaaaagtgtgtttcaaagtg

SEQ ID NO: 480269 - DNA, 104 bp, Homo sapiens
cattcattcaccccatgatgttctggaagtaaaccttggttgtctttcgttggccagaggaattgtcttcaggcagtgacagtggtgggagcagcagcagcagc

SEQ ID NO: 480270 - DNA, 75 bp, Homo sapiens
tttgctacgacctcattttctgctggaactgcatttaaatcaaacggtattgagatggattgggttatgaaacat

SEQ ID NO: 480271 - DNA, 75 bp, Homo sapiens
aatatacgacacatccaggagtttattggagcgcagactgatggcgcaaagggttgattcttcaccacactgaaa

SEQ ID NO: 480272 - DNA, 100 bp, Homo sapiens
caaggaagctcgttcacaattgaccccgtcaggggagaagtcaaagtgaccaaacttctcgaccgagaaacgcttgcattcacaagagatgggctctgtg

SEQ ID NO: 480273 - DNA, 87 bp, Homo sapiens
gatcttcaaatgggcattcacaagccctaccacttatgtcttggatgaagatgaacctcgattccttgaagaagttgattacagtgc

SEQ ID NO: 480274 - DNA, 74 bp, Homo sapiens
tggaggctgagcatttattcagttggtgttggtattaggagatctgcacatcccacaccggtgcaacagtttgc

SEQ ID NO: 480275 - DNA, 83 bp, Homo sapiens
tcacgaccacatttgtcatgatgacagtgacaagacaatgcagatcttcgtgaagactctgactggtaagaccatcaccctcg

SEQ ID NO: 480276 - DNA, 132 bp, Homo sapiens
ttgcattgactggaaacaatggcatttacagaaagagtcaacagcagtggcaacagatatatttttgccatcatggatcagtttggagatatattagaaggtgaagtggaccattctttctttgacagtgac

SEQ ID NO: 480277 - DNA, 101 bp, Homo sapiens
ccatcagctgccacgcctggaacaaggaccgcacccccagatgacgtgtactactgtggaataaagtacatcaaagatgatgtcatcttaaatgagccctc

SEQ ID NO: 480278 - DNA, 90 bp, Homo sapiens
gcgcctgccccgccatgaatgaggagtacgacgtgatcgtgctgggcaccggcctgacgagatggggtttcaccatgttagccaggatgg

SEQ ID NO: 480279 - DNA, 98 bp, Homo sapiens
ccgtctgccccgcccacatctagaacgacggaatcagtccccaatgcctggaaattcctcattggattactgtgttttaaacagaatttcgtgaacag

SEQ ID NO: 480280 - DNA, 75 bp, Homo sapiens
aaggattccaagtaactcttatttggtttctagagaggaaggatctccccagctgtcttcagcaaggccgtctcc

SEQ ID NO: 480281 - DNA, 78 bp, Homo sapiens
tttagagctgcggaacaggacgccctctgatgcccctgtgtccgtctgggatgaggaggaggatggtgccgtgtttac

SEQ ID NO: 480282 - DNA, 75 bp, Homo sapiens
ttgacaccctgctccagaacctgcatgaggacctgaaggaaaaagaagtgtgactactggatcaggacttttgtt

SEQ ID NO: 480283 - DNA, 76 bp, Homo sapiens
gacacttacctccgagacgctcataggcagaaagacccagtgagctctctagaaaatttagaggaaaaaaagtttc

SEQ ID NO: 480284 - DNA, 75 bp, Homo sapiens
ctctctcagaactccttggcttcacaggaggaaggcctccttccctggacacatcccggactgtggaccccttca

SEQ ID NO: 480285 - DNA, 82 bp, Homo sapiens
gggaggagctattggtttcagagcatgctacaagtgaaaactgatgagaaactgaatgtgtctgatgagaatacagcaagtt

SEQ ID NO: 480286 - DNA, 100 bp, Homo sapiens
agtgggtcaacctttagcagtccagcctcaagggacagtaatgcgtgtgaaggcaaagaagaatgctgctccattcagaagtgaagtctgctttgggaaa

SEQ ID NO: 480287 - DNA, 103 bp, Homo sapiens
tgccttggcaagagcagtgcctagaaagatacttggatgatattgatgatgagatggacccagagatagaagaagcttatgaaaagttttgtttggaatcaga

SEQ ID NO: 480288 - DNA, 50 bp, Homo sapiens
acaaggtgttgatgccgccggacggtgacgccttctgggccccatctgtc

SEQ ID NO: 480289 - DNA, 75 bp, Homo sapiens
cggcgcagcggcggcagcggagagcgagagaggggagcagtatgaaaacaaagttgcagtacgtgacagagtggc

SEQ ID NO: 480290 - DNA, 100 bp, Homo sapiens
ccatatccgggtgcggctccaccccttccacgtcatccgcatcaacaagatgttgtcctgtgctggggctgacagtttctacagcagtataatcactaca

SEQ ID NO: 480291 - DNA, 83 bp, Homo sapiens
cctgacagcccccacctcgcaagagcagccgcggcgccactaataccctctaccatctgctttggtcagggtgccgctcgagg

SEQ ID NO: 480292 - DNA, 80 bp, Homo sapiens
ggcgacagtggcggcggcgccatggcagggcttgcaggagtgtggccatctggggccgtgtggtatttgccactcaggag

SEQ ID NO: 480293 - DNA, 74 bp, Homo sapiens
gaagcacttggaactcctttataagtgtcagctgtgagatacaaacagttccccttccagagcctctgtttgtg

SEQ ID NO: 480294 - DNA, 89 bp, Homo sapiens
gttttcttcagaagaaggacttcggaatgcactacaacaggaaaatcatattatagatggagtaaaggagcctgattccccacgtgtca

SEQ ID NO: 480295 - DNA, 100 bp, Homo sapiens
ggttagcccgtcagtccctgctctgtgcgcgcctccatctgggccatggatggggtttcatcaccttaaatggttttgaaccaatgaaggtgtattccct

SEQ ID NO: 480296 - DNA, 101 bp, Homo sapiens
gagctgcccggagttccgctcctgcgggcttagcaggaaagggtgcctaaggaacttagtgatttggcccgtgaccctccagcacaatgttctgcaggtcc

SEQ ID NO: 480297 - DNA, 74 bp, Homo sapiens
gagtggggcctcatgatcctggatgaagtgcacaccataccagattgatgccaagaaggaacagctagcagatg

SEQ ID NO: 480298 - DNA, 75 bp, Homo sapiens
tcctgtggttcgtgagcatggacctggtgcagaaactggcgatggaatatgagaggagccctctggaaagaaaag

SEQ ID NO: 480299 - DNA, 75 bp, Homo sapiens
gacttgactcttcaaacacaaaggtgctggagaatctggtaaaagcaccattgtgaagcagatgaggatcctgca

SEQ ID NO: 480300 - DNA, 110 bp, Homo sapiens
agagtcaggagaagccgcgggagatcatggacgcggcggaagaagcgttgttgacgaccatggacatcatccacgatggatttggattcatgctggcttttggagacttg

SEQ ID NO: 480301 - DNA, 50 bp, Homo sapiens
cccgcggcgaccacagccaaagcgggcccaacatcccatgcaccatcgtg

SEQ ID NO: 480302 - DNA, 100 bp, Homo sapiens
gattcttccaaggaaccagtgcgaaggacagtcattttgtttactcattcagccctgttgcaggtcccaataaactcttcataaggttgacagaagcacc

SEQ ID NO: 480303 - DNA, 90 bp, Homo sapiens
gacaagaccaaggtcaacaaggacaacaatgagatcgtggacaagatcatgggcaaaggacagatccagcagggagagcaacaagccccg

SEQ ID NO: 480304 - DNA, 50 bp, Homo sapiens
gagacttttttctaaagaatgcagcagaagaggatgaaacacaaaaccag

SEQ ID NO: 480305 - DNA, 101 bp, Homo sapiens
gaagaaggaaatgaaattaaagaaagcaatgctcggatagtcaagtggtcagatggaagagacctcttgatacaaacaatagaaaattgtggctttcagta

SEQ ID NO: 480306 - DNA, 83 bp, Homo sapiens
tgtggttgctgggatcttagtacaaaacgtgttaaagtagaaaatctggtgtattaactgtgaaaattttagagctgcatgag

SEQ ID NO: 480307 - DNA, 100 bp, Homo sapiens
aatacagatgacttcaccacagaaactttagaatggaggctcggttcttctgacattcttaattacaggaaagctttgaattttatgcacagcagctaag

SEQ ID NO: 480308 - DNA, 100 bp, Homo sapiens
aagaatgaagctgcggaccctcgcgtgttattattacaacagttctatacctctcagatgcacttcgtaagaacttcttaaatgaaaactttgattataa

SEQ ID NO: 480309 - DNA, 75 bp, Homo sapiens
gtaggctgaaattgcaggtggaaaggaatttggacaagtcagcacctcatctatgggcactttaccaaagcgggt

SEQ ID NO: 480310 - DNA, 98 bp, Homo sapiens
agaaagtgaaggatgtccagtgtctattaaaagaacacccaggttaatgcctgataaagaaagcatgtattacccacgggtacaacattaccgagagc

SEQ ID NO: 480311 - DNA, 75 bp, Homo sapiens
caacattctcacagacaagcatggagcctggggaaattctgcagtgaggaaaatgtttataggaggccttagctg

SEQ ID NO: 480312 - DNA, 100 bp, Homo sapiens
gtcctgcggaaaacagagaggttccagaaatggctgcaggccaagcgcctcacgccggacctggtgcagatccggggatttctttcacggtttgataatg

SEQ ID NO: 480313 - DNA, 88 bp, Homo sapiens
ttcatttggctgtgataggtgctttgctggctgtgggggctacaaaaggactgatctaagccaggatgaccctgttcaggatcatttg

SEQ ID NO: 480314 - DNA, 78 bp, Homo sapiens
cgcaccaggtcttgtagcagcgcctcctcggtgcaaaaggcagttgaagaagaaaattgctgctttgggactattgat

SEQ ID NO: 480315 - DNA, 97 bp, Homo sapiens
ttccagaagtgaagaagtcgaggagcagaccacggtggcttcgttaggagagcccgcggttcccttcaaaaagcggctgcaagatctggaggtgcgg

SEQ ID NO: 480316 - DNA, 83 bp, Homo sapiens
gtgctacggccctgtgggcctgggagctgcctctgaggaacacgccgcaggaggatacgaagcgttttcggcttcctgcccgg

SEQ ID NO: 480317 - DNA, 75 bp, Homo sapiens
agtcactgaacttaggagaaagtatacagaattacagctggaagatgtaatccctgttcattactacttaatacc

SEQ ID NO: 480318 - DNA, 100 bp, Homo sapiens
tatttaagtcaattagaagaaagtgtagaagaggacgtgaagagtttaaagcagggaaaaggggtcgaggccggtcctgacctgttacaatgaagactga

SEQ ID NO: 480319 - DNA, 100 bp, Homo sapiens
gaacgagaaccaagtgcggacgctgtgcgagaagcattatggatccaagcctgttgagagaaagggagctgttcaaaaaacgagctctttctactcctgt

SEQ ID NO: 480320 - DNA, 126 bp, Homo sapiens
ccagctcgccgacatgcttaagagctgcaacttcagtgggcatcactgctccgccagcaacttctctgtggcccagcccgagttcccggacgccgcgggactggagtgccagccggtgttggacgt

SEQ ID NO: 480321 - DNA, 75 bp, Homo sapiens
aaggatcttgagactcaaccccatatggtgatcgaggagttctacaaccagacatgggtccaccgctatggggag

SEQ ID NO: 480322 - DNA, 51 bp, Homo sapiens
aaccttgagaaggacaggaaaggcttaacagcattgcgcagtgatgaagtg

SEQ ID NO: 480323 - DNA, 101 bp, Homo sapiens
tgaccaacagttgaatcaaagtatggacacagtcccatgaagctgaggtcttgaagcagctggctgagaaacgagagcacgagaaagaagtgcttcagaag

SEQ ID NO: 480324 - DNA, 100 bp, Homo sapiens
acaaaacctgaatggaaaacttcgaagtgaaggacaaggaatatgggctttactaggcagaatcacagggcaggtgtgagttcttgatacgaatgaaagg

SEQ ID NO: 480325 - DNA, 75 bp, Homo sapiens
ctcagttggaagcagccgatccagcctgcggagcctgtggggcagagctccaaacgagaatggaagccgctggag

SEQ ID NO: 480326 - DNA, 97 bp, Homo sapiens
gagtggggaagctgctaacccgacccggattggcgctgaggtggcccgtggggcagatgactctggggacgacgacgaggctaccaccccagccgac

SEQ ID NO: 480327 - DNA, 100 bp, Homo sapiens
gatggagttttgcaagactgggtcattgacgattgcattggtaactggtggagaccaaattttgaacctcctcaggcttgccgagggaccgagcttgatg

SEQ ID NO: 480328 - DNA, 100 bp, Homo sapiens
gcaagcagggcaagccccgcctgaagccccccttccccgcagacgtggtttcctgaggttgttccccttaacatcggaggggctcacttcactacacgcc

SEQ ID NO: 480329 - DNA, 100 bp, Homo sapiens
aggatttcttaaaggatagccaattgcagtttgaggctgaagagagaagggcacagttacctaagtatcaacgtaatcttcctcggccaggacaggcccc

SEQ ID NO: 480330 - DNA, 51 bp, Homo sapiens
cgcaagactgtcccggcccggtttcactgttacatgccttgaagtgatgag

SEQ ID NO: 480331 - DNA, 50 bp, Homo sapiens
catctgcatggacggatactcagagcaaatccagtttgctgatgacatgc

SEQ ID NO: 480332 - DNA, 82 bp, Homo sapiens
caagtaaaatggctcagctcgcagctatttgtaaaatgcagttagaagagcaatcaagggaaaggcgtaggaggaggagcag

SEQ ID NO: 480333 - DNA, 75 bp, Homo sapiens
ttcagtacaaggataaagagactggagatatcaaggagtgtgtcatgaacaatgtcacctgtactcggatctatg

SEQ ID NO: 480334 - DNA, 100 bp, Homo sapiens
accacgctcgtgctcatctcctactgtcccacggccaccgaagagtcaatcctttcccatggtaccgtggcagactgtgctgttgttggcaaggaagatc

SEQ ID NO: 480335 - DNA, 82 bp, Homo sapiens
gtccaggagtacccgaccctcaaggattttttatcaagcagaaatgcatcgaacaacgagaatcaagatcactgagctaaat

SEQ ID NO: 480336 - DNA, 50 bp, Homo sapiens
tccaggtccagctccccctcctcatatgtgctgccttaacaatttcagga

SEQ ID NO: 480337 - DNA, 98 bp, Homo sapiens
gcagaatggcagccagctcttcatcaaggagctgcggagccggacctttcccagtaacagtgtatcatgtatgccactgattccaggggacactcccc

SEQ ID NO: 480338 - DNA, 76 bp, Homo sapiens
cccaatgataacatgcatgcatatggaacttgctgcatgccagcaccatctgctacaggagctgagagaccctacc

SEQ ID NO: 480339 - DNA, 50 bp, Homo sapiens
cggcgtaactatcgcctgacagggagtacgagagggcctccaaagtggac

SEQ ID NO: 480340 - DNA, 123 bp, Homo sapiens
atctaatcacagactcctatttgaagtatttgacgaaaatagactggtgtcatggagaaactccagctgggcccagagattctgcagcgggaaaatccaaggcttatttatgccaggctgagt

SEQ ID NO: 480341 - DNA, 51 bp, Homo sapiens
taaagagccaagcctcagagaggtgataaaagaaaatgtggctgaagttac

SEQ ID NO: 480342 - DNA, 80 bp, Homo sapiens
gaactttcacctgatccaggccaacaagatgtgaagttcatttccaatccgccctccatggtggcagcggggagcgtggt

SEQ ID NO: 480343 - DNA, 83 bp, Homo sapiens
gtggacttctacaaggcccgcatggagagctcaggccccggggcctccagcggcaccagcggagaccacggtgagctcgtcgt

SEQ ID NO: 480344 - DNA, 100 bp, Homo sapiens
tatttggggagaatgactgaggagccattgatgtgtcagaagatggctgtgccacccacgtatgccgatcttggcaaatctgccagggatgtcttcacca

SEQ ID NO: 480345 - DNA, 75 bp, Homo sapiens
aaagaatgtaaacattgtaacatcgttgcctactttgggagttatcttagaaatccatacttgttatcagaggag

SEQ ID NO: 480346 - DNA, 50 bp, Homo sapiens
ccgcatcccattttttatgtccacagccactgaggcggctcccagctgcg

SEQ ID NO: 480347 - DNA, 100 bp, Homo sapiens
cgatacaaaatggtggtgcaagtagtgattggagaacaaagaggtgaaggagtattaattcctagaggacctgtgcaacaacctcttgaggatcgaatct

SEQ ID NO: 480348 - DNA, 92 bp, Homo sapiens
ccccctgcctgcccgcgcctagaccccattcagattttttatcaagcagaaatgcatcgaacaacgagaatcaagatcactgagctaaatcc

SEQ ID NO: 480349 - DNA, 100 bp, Homo sapiens
cttctcctttctacaacccgttccagttcgagatcaccttcgagtgcatcgaggacctgtctgaaggacatggacatcttccagcaacagatctcgagaa

SEQ ID NO: 480350 - DNA, 100 bp, Homo sapiens
aagattcaccaaataagctatatactttggttacctatgtacctgttaccactttcaaaagacagatctattcagaaatgatccacaacttgcttcgacc

SEQ ID NO: 480351 - DNA, 100 bp, Homo sapiens
gaggcaccgggatcgtgaccgagaccgtgaccgagagcgtgaccgagagcgcgaatatcgtcatcgttagaagccatcactggtgcaagctatatttaac

SEQ ID NO: 480352 - DNA, 98 bp, Homo sapiens
ggcaaccgagggacccgcgtccaggcagaacgcagagctggccaagcttcggcaggagctcagcaaggtcagcaaagagctggtggagaagtcagagg

SEQ ID NO: 480353 - DNA, 74 bp, Homo sapiens
gggagatcgtgggcgagctgggcgacggcgccttcggcaaggtttacaagcaattaccagctctggctgggtcg

SEQ ID NO: 480354 - DNA, 100 bp, Homo sapiens
aatccttatgcatcatctaaagcagctgctgaatgttttgtacagtcttactgggaacaatataaggattccagtggaatgacactggtgatgcttgccg

SEQ ID NO: 480355 - DNA, 75 bp, Homo sapiens
tacatcaacattggatcctacataggttcagcaacactgcctgtcaccttccgctgtgctgaagaaaataaccag

SEQ ID NO: 480356 - DNA, 144 bp, Homo sapiens
ctccggccgccacttgcgcctctccagcctccgcaggcccaaccgccgccagcaccatggccagcaccatttccgatgtataatttcaccagtttcactgtgagcctcaacgagctggagacaggcatggagaagaccctgcca

SEQ ID NO: 480357 - DNA, 101 bp, Homo sapiens
ggccagctgtttttgaggatcctgctccacagagaatgctctgcacccgttgatagattattttgcagaggatgatggggagatggtacccagaacgagtc

SEQ ID NO: 480358 - DNA, 76 bp, Homo sapiens
ctggggatggcgcatcacacaccaaaggtgtggatgaggtcaccattgtcaacattttgaccaaccgcagcaatgc

SEQ ID NO: 480359 - DNA, 74 bp, Homo sapiens
agaatctgggactttcttcgttgccatgaggaaagaattctccgagtgaagttattgccagtggactgtgagag

SEQ ID NO: 480360 - DNA, 82 bp, Homo sapiens
tccttggctcactgaggaggtttgatcttcctcagaactgtgatcctaacattcccctagttgctcaggaattaatgaaaaa

SEQ ID NO: 480361 - DNA, 100 bp, Homo sapiens
ggagaactacagcaacttggtctcactggacctcgaagtagggggaaaactgcagtggaagatgaggacagcatggatgggctggagacaacagaaacag

SEQ ID NO: 480362 - DNA, 83 bp, Homo sapiens
tgctgctgagacagagatgacactggaaaaggtttggtgcacctcgatttggaggaagtagggcagggcccttatctggaaag

SEQ ID NO: 480363 - DNA, 74 bp, Homo sapiens
tgccttttgcctcccaccgtgattctgaggcctccccaaccatgtgcaattattcgggaacaaaatcgatatga

SEQ ID NO: 480364 - DNA, 50 bp, Homo sapiens
ccttgctgttacctacttctttcatcaggaattgaagccattttttatga

SEQ ID NO: 480365 - DNA, 90 bp, Homo sapiens
cttggttccccctccctcagcttccgccccaaaagtttctcttcagcaacgggtagcagaattggaaaaaattaatgcagaatttttacg

SEQ ID NO: 480366 - DNA, 97 bp, Homo sapiens
tttgaggacagcttcaatcgcggtgtgaagaagaaagcagcaaaacgaccactgaaaacaacgccggacttggatgttgtgggtgatggtatgcagt

SEQ ID NO: 480367 - DNA, 50 bp, Homo sapiens
tactttaccaacgagctgaagcaggttactcactataaacaatatccacc

SEQ ID NO: 480368 - DNA, 82 bp, Homo sapiens
tgggattacaggcacgcgccaccactcccaggacgagattgaggagctgcgggccgagatgctggagatgcgggacgtctat

SEQ ID NO: 480369 - DNA, 82 bp, Homo sapiens
ccaattccaacatggtcattatgcttattggaaataaaagaccactaaggcttttcttcctacgatgctggagattaatcat

SEQ ID NO: 480370 - DNA, 74 bp, Homo sapiens
ggaagaagaggacgacgacgacgaggaagaggaggtttctgaggttttgaacgaagaatgtgatcagaactggt

SEQ ID NO: 480371 - DNA, 101 bp, Homo sapiens
ctctgccagtataaatgcagtgacggatgtacagttacccagcacgtgtacctcctcctcctcctattgctcgggctgtagtgccctcgaaacgtcagcgt

SEQ ID NO: 480372 - DNA, 98 bp, Homo sapiens
cagctgccccatgtgccagaaggagttcgcccccaggcaagaggaggaacgacgtagaagagaggaagagatgatgattcgtcaacgtgagatggaag

SEQ ID NO: 480373 - DNA, 90 bp, Homo sapiens
tgattgagaaagaaatgtaaagaaggttctctttgtgtgagtaagcaagaacctggtagcctccacctcctggatgccctcccaatgctg

SEQ ID NO: 480374 - DNA, 101 bp, Homo sapiens
caacacataaaaattatttatccaacagctcctcccagaatttgaatacatctggcaagacaacttcaagtacagatggacccaaattccctggagataaa

SEQ ID NO: 480375 - DNA, 98 bp, Homo sapiens
gcggccatggtccaaccttgaagtcctacaagattatcaattttgcccccagtttacttcggattatagtctctgaccatgtggaattcccagtacga

SEQ ID NO: 480376 - DNA, 75 bp, Homo sapiens
tgacatttaattttagggtcctttatatagaagggagagtaggaaaaacaccaccaggccataccacagcctgcc

SEQ ID NO: 480377 - DNA, 101 bp, Homo sapiens
gatcgatctaagatggcgactgtcgaaccgatccagacatttaatgtggatgcaccatgccagaccgtggaagatttaacgaatggggttgtgatggccca

SEQ ID NO: 480378 - DNA, 100 bp, Homo sapiens
tactgtacggtctcgtgtggctgctgacagtcctcctggaggggatctctggccaaggagtgtacggagaagaatttggattggtttcctcggatgcgag

SEQ ID NO: 480379 - DNA, 80 bp, Homo sapiens
aacagcagcaggcagcgcagccagtgcggatgcggacgcgggtcctgtcactgcaggatgctccagaccttgtatgatta

SEQ ID NO: 480380 - DNA, 83 bp, Homo sapiens
cccgactgcagctccgtggatttcagtgtcttttctgcctgctcagttccagttgtcacaaatactacccgccggactttgac

SEQ ID NO: 480381 - DNA, 82 bp, Homo sapiens
tcaggggctaaagaggaggacgaagaaaagcagagcaagggaacccaggtgctgtccctggacaccaacatcacaaaccagg

SEQ ID NO: 480382 - DNA, 105 bp, Homo sapiens
cgtacatcaggggctgttcttttgctgcaaatgaagttgatggaattacactgtgatacgactgactttacagaatgtctgaaggggacagtgtgggagaatccg

SEQ ID NO: 480383 - DNA, 75 bp, Homo sapiens
atggagtggaaacgcttgtagggcttcaccagctgaagaaaaggtgactggtctcatgagccctgaagaatgaac

SEQ ID NO: 480384 - DNA, 100 bp, Homo sapiens
gccaacctctactcccttcacagctggctgggcatcaccactgtcttcctcttcgcctgccaggtcacgcatgaagggagcaccgtggagaagacagtgg

SEQ ID NO: 480385 - DNA, 100 bp, Homo sapiens
cccccaccaagccccagagctgggagtgggcaggacggggcagtgttctaagaacggaagcatctgggctggatggaatttagcatcaagcagagtcccc

SEQ ID NO: 480386 - DNA, 90 bp, Homo sapiens
gacgcagaggcgggccgaggacggagctgcagaggctggagacagagttgggccaacccgctgagcgctggaaggacacctgggaccggg

SEQ ID NO: 480387 - DNA, 75 bp, Homo sapiens
cggacgcacgccactttttctctgctgatccaggttccagtgtgtgttccaagtgctgccaaagtgcctcagccc

SEQ ID NO: 480388 - DNA, 98 bp, Homo sapiens
acaagatggtgcagaagaagaacgcggggacagatgatttctgctgaagattgtgagtttattcagaggtttgaaatgaaacgaagccctgaagagaa

SEQ ID NO: 480389 - DNA, 100 bp, Homo sapiens
agcctccggagtagctgggattacagctgtcacgaccaccacccagaggcccagcagcatgactaccacctggaggctcagtagcacaaccaccacaacc

SEQ ID NO: 480390 - DNA, 100 bp, Homo sapiens
gggacccaccgctgccctcagctccgagtccagggcgagggcgtgatggtgggcatgggtcagaaggattcctatgtgggcgacgaggcccagagcaaga

SEQ ID NO: 480391 - DNA, 82 bp, Homo sapiens
aaacagttccccctgcatgaaaagggcattgagcaagtgcagcaaagtagaggcctgcaagaaatagaagagtcactcagga

SEQ ID NO: 480392 - DNA, 74 bp, Homo sapiens
tgctttttcccatgatgggcagatgctagtctcagggaaatctactttcttcaatgtgttaaccaatagtcagg

SEQ ID NO: 480393 - DNA, 75 bp, Homo sapiens
gtcgaatgtgactgactagcagcttcattttgaaggtggatccatgctgtgctgacgcctgtggactgccttgcc

SEQ ID NO: 480394 - DNA, 100 bp, Homo sapiens
ctggctgtgaagttgatgaccttaagggaggtgtagctggtggtagtatcctaaaaggagtattaaaggttttgcacactagggaccaagaagccctcgg

SEQ ID NO: 480395 - DNA, 75 bp, Homo sapiens
atcgagatcgactgttacaacagcctggcagatctactggaagagacccaaagaaaagatgaagaaatgggatct

SEQ ID NO: 480396 - DNA, 82 bp, Homo sapiens
catgatggcgggagagaagaagcgcaggcacaggaagctggtgacggcgatgaacgatgtgacaagccgaggcggtgagccg

SEQ ID NO: 480397 - DNA, 98 bp, Homo sapiens
acgtgcctcgtggtctaaagcttcggcacaagggcccaactggaattccacttacggtgtgggccaaactgaaattgcagaaggcttcagaacgatgg

SEQ ID NO: 480398 - DNA, 50 bp, Homo sapiens
gaggaggtggggcctcgcgaagcagataaaggagaagtggctgaatgagg

SEQ ID NO: 480399 - DNA, 90 bp, Homo sapiens
tagagatgctggtggcagggcatgaggacagcaatggttgtatcaactatgaagagtgtaccttcattgtgctggatgccgagaagtggc

SEQ ID NO: 480400 - DNA, 100 bp, Homo sapiens
ggggaaatggctgcgagaccctagaggcctgcggtgcatggctgcctcctaatcccatagtccagaggaggcatccctaggactgcgggcaagggagccg

SEQ ID NO: 480401 - DNA, 100 bp, Homo sapiens
gcttcatatgcagcactaatttatttggtgacactgatcccaactcatgactcagaagtgatgagggaatggtaccaggagacccatgagaaacagcaag

SEQ ID NO: 480402 - DNA, 83 bp, Homo sapiens
catgactacgacatccacttctaccccaccttccggaattggcagagggggtcgatttgggaggaaaggtgtggctataaact

SEQ ID NO: 480403 - DNA, 75 bp, Homo sapiens
cagactcgagccttggtcaaccattccggcaaatgtgcaataccaacatgtctgtacctactgatggtgctgtaa

SEQ ID NO: 480404 - DNA, 75 bp, Homo sapiens
tcttcctctggctctacagcgatgggaaaactgacaaccatgcctgcaggtctgatatatgcatctgtaagtgta

SEQ ID NO: 480405 - DNA, 98 bp, Homo sapiens
gaaagacgaggaaagaggaggaaaacaaaagctgctacttatggaagatacaaaggggaccagttactctccacaagaaaattcacacaaccacagtg

SEQ ID NO: 480406 - DNA, 82 bp, Homo sapiens
ggggcctcaaacgtggagatcaactcctctctgttaatggagtgtgattcgcctttgccagtctcatctcgtgtctgctttg

SEQ ID NO: 480407 - DNA, 82 bp, Homo sapiens
ctgggtcagtccgccgctcaccccgcggccgcaccttcccgccttctcaggtgaaagaacttgtcctggacaacagtcggtc

SEQ ID NO: 480408 - DNA, 75 bp, Homo sapiens
ctggacagaccaacctgtcagtgctgcaaatggaggagatgtataagaaagctcatgctgctatacgagagaatc

SEQ ID NO: 480409 - DNA, 96 bp, Homo sapiens
tggaggtgggaaggtgtgtccggaggtttgcaggggtgcagtgtgtctggtcttatgaggtactccaaagattcaggtttactcacgtcatccagc

SEQ ID NO: 480410 - DNA, 80 bp, Homo sapiens
gtcttagtctcctaggaaattttgaggacatgtattcctctgagaaaccttggacagcagattttggtttaatatctgat

SEQ ID NO: 480411 - DNA, 100 bp, Homo sapiens
gtgggccgacgcggaggcggcagcggcgggcctgaggcgaaggagcggccgggagcccgccgcgctggtagcgggcttccttctgaactctccccagcta

SEQ ID NO: 480412 - DNA, 75 bp, Homo sapiens
catccagtttgctacggtctacggggcagagcagatccggaacatggtggcggtgctggaagtcatctccagcct

SEQ ID NO: 480413 - DNA, 83 bp, Homo sapiens
cagtagtggaagatgtaaagcaatatttcgagcagtttggcaaggtcagcccaaggccaaccccactgtcactctgttcccgc

SEQ ID NO: 480414 - DNA, 90 bp, Homo sapiens
ccttatcccctcaacaacttttcagtggcaagtggttgaccagattgacaccctgacctctgacctacagctggaggatgagatgactga

SEQ ID NO: 480415 - DNA, 85 bp, Homo sapiens
caccatggagagtaggtgctacggctgcgctgtcaagttcaccctcttcaagaaggagcgtgccaagttggaggccgccattgcc

SEQ ID NO: 480416 - DNA, 100 bp, Homo sapiens
caggactgcattttgctccggagcgtccagagtcctggccctgagcgggaatcgcagtggccgaggctgagcggcagtttattgagagaacattcaattg

SEQ ID NO: 480417 - DNA, 83 bp, Homo sapiens
atctaccttctggaagctactactacgtggtgcttggaaagactgaaagagcatattccttttgtggaactattgaatacatg

SEQ ID NO: 480418 - DNA, 75 bp, Homo sapiens
gggccagcgacccgctgctcagcgtcctcatgtggggggtaaaccactcggtgatctgcaactctttcaccatct

SEQ ID NO: 480419 - DNA, 80 bp, Homo sapiens
gcgagggcgcgcggctggtgtccgccccgcccgaaagcagctccacagctgggtcctgctcctcagacaagatggggcca

SEQ ID NO: 480420 - DNA, 75 bp, Homo sapiens
gaggcgcggggctacatcgtgacagacagagagcttattgtgtaacagaacctggagcaggctctgatgtagctg

SEQ ID NO: 480421 - DNA, 100 bp, Homo sapiens
ggccgccgctgctacctgcagcgccgtgtggcacgacacaaaaatcagctgccactgcagagccccgccatggaagacacgccgttggtgatatcgaagc

SEQ ID NO: 480422 - DNA, 100 bp, Homo sapiens
aaagcagtcgtaagaagaggtcccaatcccccactctttccgccctaatggaggtctccagtttcgggacccgagctgatccagaaagccaacggtctcc

SEQ ID NO: 480423 - DNA, 75 bp, Homo sapiens
tgagaggaaaaccgaggagtacgatactcagaacttggaccacgggaaggcctggggcatcctgaccttcaaagg

SEQ ID NO: 480424 - DNA, 98 bp, Homo sapiens
cctttctgaaaatctgttagtaactgttgaaaaagctgaggcagctttacaaagtcaaatgtatgcagagaatatttccaaaatggtgggaagagaaa

SEQ ID NO: 480425 - DNA, 60 bp, Homo sapiens
atttctccaaggatctgctgaaaacgaaatctcacaaaactgtcccttatcttcagtcac

SEQ ID NO: 480426 - DNA, 83 bp, Homo sapiens
atgcctgggaagaaggcgcgcaagaacgctcaaccgagccccgcgcgggctccagcagtcccaggggcagccactggcctccc

SEQ ID NO: 480427 - DNA, 74 bp, Homo sapiens
gcaaactcaacttgctgggccggtgcaactattcgcagtccgagcggctgccaaactttttgatgaagaaggaa

SEQ ID NO: 480428 - DNA, 100 bp, Homo sapiens
cggggccacagccgcgggggccaccacactggcccaaatatttcctgcagttttgcagagggcaagcaggtccacagagctcctcacgctgacatggcag

SEQ ID NO: 480429 - DNA, 83 bp, Homo sapiens
tgggattcaaatgaaagtgaaaatgttagaagaactcgtgagccggattgatggtcagcccaaggccaaccccactgtcactc

SEQ ID NO: 480430 - DNA, 74 bp, Homo sapiens
attcaaattgctcacagctgatcctaaggtagcctttccagtaaatatatgactcagggaaaagcctcagcgaa

SEQ ID NO: 480431 - DNA, 75 bp, Homo sapiens
ttgctctgctcttccaacaccagtggaagatgatcacatcccagcttcccatcgacggtcagtgcgcacgttgta

SEQ ID NO: 480432 - DNA, 75 bp, Homo sapiens
cctacaatgtgaagatacataagatcgtagccagacccccagatgctgttgcatgaaaaagcagaagccctgcaa

SEQ ID NO: 480433 - DNA, 98 bp, Homo sapiens
accgcccccaggccgcaggtgctcctgctgccgctcctgctggtgctcctggcggcggcgcccgcagccagcaaggctgaagccgacgtagcttctct

SEQ ID NO: 480434 - DNA, 100 bp, Homo sapiens
ggcgccatgtctgtgagcgagatcttcgtggagctgcagggctttttggctgccgagcaggacatccgagaggttccagatgtggaatctcgtgaagact

SEQ ID NO: 480435 - DNA, 82 bp, Homo sapiens
cccacaggaggtggctgatcgactgcttcggaccatggcttttcatgaacccagtgacttgattgtaaaaatttacagagcg

SEQ ID NO: 480436 - DNA, 75 bp, Homo sapiens
acacaaagaatagagttgagcctgtgggacacttcggaagaagaaaggagggcgcgggctaatgaccgagaatac

SEQ ID NO: 480437 - DNA, 98 bp, Homo sapiens
caaaccgtggctgctcgataaatcagacagaacagttaatcctcaatttaagcctgatctaacccctagaaacagtagacccaaatgatttgtacatt

SEQ ID NO: 480438 - DNA, 100 bp, Homo sapiens
aacaatgtcgattctggacatcattttttccaaaagtcttggaaatgacaggctcatcttcaggtggaactaatctggttaagattcctacagaaaaaag

SEQ ID NO: 480439 - DNA, 90 bp, Homo sapiens
cgagaatatcaattatctgactctaccaaatatgcatactccttccacgttactgcagacggtcagatgcagcctgtcccttttcccccc

SEQ ID NO: 480440 - DNA, 100 bp, Homo sapiens
gggtgttttgctaccgtgaccgtttaggtgagcgaggagccaaaggtgacccaggtgcacctggagttggcctccgaggcgagatgggaccccctggaat

SEQ ID NO: 480441 - DNA, 100 bp, Homo sapiens
gacaccacaggctgagctccctgaaccaggcccttccaccgcagccatccgcacgggaggcctcgcgattgctcggaaccatcccgcaggagttcagctg

SEQ ID NO: 480442 - DNA, 100 bp, Homo sapiens
ttccgagaaagcttcagacatgcttataagacaactcttagctaatgtgacagtgatgataacatgggtgccaaaaatacttcaataggagaagaattta

SEQ ID NO: 480443 - DNA, 74 bp, Homo sapiens
acaaatgaagttcaaggatttctctttgggaaactaaaatggagtgaaggtacctgagcgcaggaaccatggtc

SEQ ID NO: 480444 - DNA, 50 bp, Homo sapiens
ctagacgaagcctttgaagaattaagaatactgtggcctcatgaatagga

SEQ ID NO: 480445 - DNA, 75 bp, Homo sapiens
ttcactggaaggaaaatgggacattagttcaagtagcaactatatcaggcctgcttcggccttctgctcttctgt

SEQ ID NO: 480446 - DNA, 100 bp, Homo sapiens
cctcgtgctggggctctggctggcgttgctgcgctccgtggccggggagcaagcgccaggtacagcagggaagaactggaaactcagagaaagaaactgc

SEQ ID NO: 480447 - DNA, 101 bp, Homo sapiens
gaaagatgagcgaggagacggcgacttctgacaacgacactattcctgatcagagaactccagttgcttcaacacacagtatcagtagtgcagccacccca

SEQ ID NO: 480448 - DNA, 80 bp, Homo sapiens
aaattcactcactttgcaatggaagattcgagtggtgaatgcatttcgtagttctttatatgaagggttagaaaaaccgg

SEQ ID NO: 480449 - DNA, 75 bp, Homo sapiens
caaatggcacttcattggccacctacagaaacaaaatgtcaacaaattgatggatactgtggatggtagggaaga

SEQ ID NO: 480450 - DNA, 112 bp, Homo sapiens
caacggccaacttcggcaagatccagatcgggatttacgtggagatcaagcgcagcgatgcggtcttgcgagtggctggttccctgcagaagagcacagaagtgatgaaggc

SEQ ID NO: 480451 - DNA, 83 bp, Homo sapiens
cggagatggtgcagaagatggaggaggttgtatcagagtaagatggacggtagctttgattgtgattgtggtgagctggagcc

SEQ ID NO: 480452 - DNA, 100 bp, Homo sapiens
ggctaccaaggacagagtcagtgatttccataaattgaagcaaagagcaggggagagaagacagaagaggttggagaggtcagggaggtgccagatcatg

SEQ ID NO: 480453 - DNA, 100 bp, Homo sapiens
agaagactattcttctgcaggtggatcagaactgtgttcgcaattcttacgatgtcttctctttgctacgatgccttcaattaagttgcagagttctgat

SEQ ID NO: 480454 - DNA, 102 bp, Homo sapiens
gtaccattccgacgttacaatggtggagttggcaggtgtgcgcaggccactgagaatgcaaaggaggaagtgaggcgaattctggggctgctggatgcttac

SEQ ID NO: 480455 - DNA, 100 bp, Homo sapiens
ggctgctgtcgccgctgctgggagatgggcctactcgcccgccaccctgcgctgccgccgctctgaggagttaaagagataattgacgaccttgccaacc

SEQ ID NO: 480456 - DNA, 90 bp, Homo sapiens
ctgagaacagaagtgagacagctgaagcgtgttggggaaggagctgtaaagagagtttttcgttggaatatacgttgcacatttatggcg

SEQ ID NO: 480457 - DNA, 83 bp, Homo sapiens
tgcgcttggagccgaacctgcaagcccagacttcccaagtaagaagcggaagaggagccgctggaaccaagacacaatggaac

SEQ ID NO: 480458 - DNA, 100 bp, Homo sapiens
ggaacatggctagcaggaatgcttactgttgcgtggttcgttattaacagcttcctgcctgacacagctcacttcaagaagtgcacaatgtcagaacgtg

SEQ ID NO: 480459 - DNA, 100 bp, Homo sapiens
aattttagggtcctttatatagaagggagagtagggcaagctctgcatttcccctcctctcctttttctcatcgtggtttgtacttgcctctcagcaccc

SEQ ID NO: 480460 - DNA, 75 bp, Homo sapiens
caccaataccatacctcaggaggacaagatgaagcattgctccaaaatacaggcagcggaggaggagaaagagat

SEQ ID NO: 480461 - DNA, 100 bp, Homo sapiens
cgctcattctggagctggaggacgccgtgcgcgccctgcgggaccgcatcgaccgcctggagcactcggacatgccagaggagatgcgcgtggagaccat

SEQ ID NO: 480462 - DNA, 74 bp, Homo sapiens
ggttatcgcacttaagcctcggaacaactttaccagagacatctgaacagctgacccctgaggaagaggctgag

SEQ ID NO: 480463 - DNA, 97 bp, Homo sapiens
cccccgctgcccacacagcagtttggcgtcagtctgcaatagaggctgaaccgtctgagcccagaagtgctgaggtgacgaggaagcccaaggctgc

SEQ ID NO: 480464 - DNA, 50 bp, Homo sapiens
agaagtaaagattttgctgaaaagttgcttatcaagtgtcccacaaatga

SEQ ID NO: 480465 - DNA, 88 bp, Homo sapiens
aaaacggacgatgtattactaagctggaaaacatggggtttcgagtgggacaaggattgatagaaagtacgtagagaaatcgacactc

SEQ ID NO: 480466 - DNA, 50 bp, Homo sapiens
ccggacgtcggcaacggagaagacctgcctagagctggaacgttacctcc

SEQ ID NO: 480467 - DNA, 87 bp, Homo sapiens
tcacagccagagaaggggccagtcggaaagcttttgctcatgtatccaagttgctgtcacagtgtaaatttgatctgttggaagaac

SEQ ID NO: 480468 - DNA, 74 bp, Homo sapiens
cacagtttctagaacgttttccggagttggaagccgcattgacaaaggatccccaggattaccctgataaaaaa

SEQ ID NO: 480469 - DNA, 95 bp, Homo sapiens
tcagagatattacagtttacaggctgactactggaaggctcagtttatgaacctcttaaaagcattaatcttccaagacctgataatgaaactct

SEQ ID NO: 480470 - DNA, 100 bp, Homo sapiens
accagaccgtgcacctgcctggccagctgccccagcatgagtacctcaaggagatgcacttccaccccaaggccctaaaggacgtgaagggccagatcgg

SEQ ID NO: 480471 - DNA, 90 bp, Homo sapiens
ccccagttcagatgggacttccccgcgtgacagcacagagataacggccagccctgggcgaaggtgaagttttacaggcggtcaccgacc

SEQ ID NO: 480472 - DNA, 50 bp, Homo sapiens
agcgctgccggagccgcctgagactgattcttgctattccaaatcctctt

SEQ ID NO: 480473 - DNA, 86 bp, Homo sapiens
gccgtgccctggggctgagccctcagttacagaatgtctgaaggggacagtgtgggagaatccgtccatgggaaaccttcggtggt

SEQ ID NO: 480474 - DNA, 50 bp, Homo sapiens
gacgcccgggacccagattgcgggttcagatgcacaaagcagggtcatca

SEQ ID NO: 480475 - DNA, 75 bp, Homo sapiens
agcccggaaccactctttgtgccgcagcttcgcagatattgatgatgttaagaagttcaaaccgggttacctgga

SEQ ID NO: 480476 - DNA, 75 bp, Homo sapiens
gcgcatctgacggttgtctcggttactcatgctggtgtttggaatgctttatcctgcatattattcatacaaagc

SEQ ID NO: 480477 - DNA, 100 bp, Homo sapiens
cctcctgagtagctgcgattacagatcattaaaatccgtgcccagacggaaggaatcaacatcagtgaggaggcactgaaccacctgggggagattggca

SEQ ID NO: 480478 - DNA, 100 bp, Homo sapiens
gggtcatctttaactgcttggccgtgcttgccctgtcatcccacctgagaaccatgctcaccgaccctgaccctgatgctcccataagacagaaaatgcc

SEQ ID NO: 480479 - DNA, 80 bp, Homo sapiens
ggactggaaccatcaaacaaggctgcagagtgtttgccagctctgagcctgtgccaggattccagggggataccctgcag

SEQ ID NO: 480480 - DNA, 83 bp, Homo sapiens
ggcccaaggccagttctccgcaggtttggtgcacctcgatttggaggaagtagggcagggcccttatctggaaagaagtttgg

SEQ ID NO: 480481 - DNA, 73 bp, Homo sapiens
gagaagctgtcggagcttcccaagtccacaagaatcggaatgtcagttaatgctattcgcaagcagagtacag

SEQ ID NO: 480482 - DNA, 99 bp, Homo sapiens
gttttagatggcagtggccacatactttctcagaaaccttcacatcttggtcaagattcgttgggcttttgccagctctttttagattgtcctcttgag

SEQ ID NO: 480483 - DNA, 97 bp, Homo sapiens
tcaacaccttctcccagagcgtcagcagcctgttcggcgaggacaacgtgcgcgccgctcagaagccgctgtacaaccagccctccgacacccggca

SEQ ID NO: 480484 - DNA, 98 bp, Homo sapiens
aagccagatcttcatctcttccagtgtgatgaggttaaggtcaacgtattgaaacttactgttgaagacttggagaaagagagggatttctacttcgg

SEQ ID NO: 480485 - DNA, 75 bp, Homo sapiens
ccggtactgtgcactattctttcccaggaaccattggataaggataaaggtaaaagtgctgtttgtacgcaacct

SEQ ID NO: 480486 - DNA, 50 bp, Homo sapiens
cttgaaaggagtgcttatagaatggcagaaggagaagacagcctgaagaa

SEQ ID NO: 480487 - DNA, 90 bp, Homo sapiens
gcctgttccagagaaaagggtccatgacaatgagcatccagtggaaaacacgccagcttcaaagcaagaatagttctgtcccaagaagaa

SEQ ID NO: 480488 - DNA, 75 bp, Homo sapiens
ctccaggttgtagcagtgaagaagctgacgaggactcagtctattatcctcccagtccacaacgctgaaccgtgg

SEQ ID NO: 480489 - DNA, 97 bp, Homo sapiens
aatgattctacaaactttaaacttatttacagatatgcgtttgactttgcacggcaaagttccaatggtcctgtaaagaagtccatgcgtgagaagg

SEQ ID NO: 480490 - DNA, 83 bp, Homo sapiens
cagaagtcgcgtgtctaggtgagtcgcggtgggtcctcgcttgcagttcagcgaccacggtgagatcggactggaactgttcg

SEQ ID NO: 480491 - DNA, 75 bp, Homo sapiens
ccgaggccttcaagtgcatgatgtgcgatgtgcggaagggcacctccacccgattcagaatggacagtttagaag

SEQ ID NO: 480492 - DNA, 75 bp, Homo sapiens
gttgtggaaaaggaagattactcagagattatagggagcatgggtgacaaaatatctgaacagaagaggacttag

SEQ ID NO: 480493 - DNA, 135 bp, Homo sapiens
caagaaactgctgtgagggccagtatttccaaagcaccaaaaataattattttccacctaaaaagctgggaacttctccacttcatctagcagcacagtatggtcattattccaccacagaggtactgctgcgag

SEQ ID NO: 480494 - DNA, 75 bp, Homo sapiens
tgcagaaacgtaaagaaatgcaattgagactgaaactgttgaggagcccatggaggaagaagaagcagccaaaga

SEQ ID NO: 480495 - DNA, 80 bp, Homo sapiens
tttcatgcaagaagtaggctatggcttttgtgcaagatttgtccaatatgtgcagcgttacctggaggcgatcctaatca

SEQ ID NO: 480496 - DNA, 97 bp, Homo sapiens
cgtcttcagaatttggaaactagttactgcaagtggcaacgtggaagcaaaagtagtatgcttttatagacgacgtgatatttccaacacacttata

SEQ ID NO: 480497 - DNA, 50 bp, Homo sapiens
cgatcatcgagctaaaatatcgtgttggacagcatagatctttaggacca

SEQ ID NO: 480498 - DNA, 83 bp, Homo sapiens
cgccggccgagggtggccctaggggcagcgagcaagacagcaagcaggaaggtgctcgggtcttcggggcactgggtcccatc

SEQ ID NO: 480499 - DNA, 71 bp, Homo sapiens
gagctgcagtctttgtgggacaagccccaactggaccctaggcaaaagtgagtggcactcctctgccagga

SEQ ID NO: 480500 - DNA, 87 bp, Homo sapiens
tttgacatggaggatttgggagataaagctgtgtactgccgttgttggaggtccaaaaaggttgtgcaccatctccaggtgcttatg

SEQ ID NO: 480501 - DNA, 80 bp, Homo sapiens
ttctcaccaaacatcttagggcagataatgcctttatgttacttactcaggaggaggaggagaggaaggcccgcgaggag

SEQ ID NO: 480502 - DNA, 75 bp, Homo sapiens
cgttgccttgtatttccagagaacaggtcacccaattgacaggtttctcagatcctgtatatgcagaagcttacg

SEQ ID NO: 480503 - DNA, 83 bp, Homo sapiens
gccagctgcagccccggctgcccactcgcctcacctgagcctgggaaagcttagatatgccaacaacagcaattacaaaaatg

SEQ ID NO: 480504 - DNA, 75 bp, Homo sapiens
ctgctgtctcctgcaagaactggctcaagaaatttgcctcgaaaaccaaagcgtttcccaaagtgtattctgcgg

SEQ ID NO: 480505 - DNA, 50 bp, Homo sapiens
gctccagttcctgattaatgaggcgccaagcccatctttgtgtgcttgca

SEQ ID NO: 480506 - DNA, 90 bp, Homo sapiens
cgctgtggggagctggtgctgttctcaggatgaccgagtgggagacagcagcaccagcggtggcagagaccccagacatcaagctctttg

SEQ ID NO: 480507 - DNA, 98 bp, Homo sapiens
ttcaagactgtctttgctgagcacatcagtgatgaatgcaagaggcgtttctataagaattgcccttaggtacctgtgttttgtttgggaactcggag

SEQ ID NO: 480508 - DNA, 126 bp, Homo sapiens
aggcgctggagctgggtcagtccgccgctcaccccgcggccgcaccttcccgccttctcagattacctaaaacctcgggcagaagaggagaggaggatagcagcagaagagaagaagaagcaggat

SEQ ID NO: 480509 - DNA, 46 bp, Homo sapiens
accagctccgaaatcaccaccaaggctgaccaactgactgaagagc

SEQ ID NO: 480510 - DNA, 100 bp, Homo sapiens
ctttgaagtagaagaagctgatgaggcacagttgaatgctgttgatgctttgattgactccatgagcttggcaaagaaagatgagaagacagacaccctt

SEQ ID NO: 480511 - DNA, 75 bp, Homo sapiens
tcttcggaccccccaacaccctctacgaaggcggctacttcaagtggacagaggactgcagaaaatcaacctatc

SEQ ID NO: 480512 - DNA, 74 bp, Homo sapiens
caagttcctcatctgggacactgctggtcaggaacgggatgaaggtttaaggctcagaaaggtagcacattcgg

SEQ ID NO: 480513 - DNA, 75 bp, Homo sapiens
cgcagatgttgtcaaggtggcctaccaggaggccaggggtgtcgccatgtggacgtgatgctgaatccaggcagt

SEQ ID NO: 480514 - DNA, 100 bp, Homo sapiens
gcgtcccggccttcatcgacatcagtgaagaagatcaggttggcgtgcagtggtgtgatctcagctcattgcaacctctgcctcccggactcaagcaatc

SEQ ID NO: 480515 - DNA, 51 bp, Homo sapiens
gcggaagactgattgaaaagagggtcttactggacagagctcattcagact

SEQ ID NO: 480516 - DNA, 90 bp, Homo sapiens
gtcatctttaactgcttggccgtgcttgccctgtcatcccacctgagaaccatgctcaccgaccctatagaagcagatttgggatatcct

SEQ ID NO: 480517 - DNA, 100 bp, Homo sapiens
ctcggcgccttgggaaccgctcgagcctaccaggtgaggggaagtggcttcgaaacattgactattaccgtttagatggttccactactgcacagtcaag

SEQ ID NO: 480518 - DNA, 100 bp, Homo sapiens
catattccgctccagaaattctgcttggtgatgagtatgatgcacctgcagtagatatgtcttgtcgttcaagacttgcaacactaaacgagaaattgac

SEQ ID NO: 480519 - DNA, 75 bp, Homo sapiens
ccaattcagcagagaatattttcaaggggggagccttcacgtaaatgggtccagtcatgcctcccagtaagaagc

SEQ ID NO: 480520 - DNA, 100 bp, Homo sapiens
gatgcggaggctgcctcggcggagcagaggaaccacacgctgatcatggttttgggatttgagattgacgcggtgaactctgtccagttttcaaaccaca

SEQ ID NO: 480521 - DNA, 82 bp, Homo sapiens
ctcaccctcggggagcaacatggtaaaatgtttattggaggcttgagctgggatacaagcaaaaaagatctgacagagtact

SEQ ID NO: 480522 - DNA, 100 bp, Homo sapiens
cgaaccccctgaacaaggagctcgactgggccagcatcaacggcttctgcgagcagctcaacgaggactttgagggtagagacagggtttcgccgtgttg

SEQ ID NO: 480523 - DNA, 83 bp, Homo sapiens
cagaacgttgcaaactctggaaaaaaacttggctgtctcgaagcaggtacaaaggcattcccctggtgtgaggccaggcgtgg

SEQ ID NO: 480524 - DNA, 88 bp, Homo sapiens
gtgaacactcaagtgaagcaaaagccttccatgattacgagtggaaacaaaatgtcagtcagtgtgcatgagaaccgcaagtccaggg

SEQ ID NO: 480525 - DNA, 100 bp, Homo sapiens
ccaaaaccattcccgcggagaatcaactctgaacggaaagctggcagctgtcagcaagcttaagagttggacagtggaggaccttcagaagaggctcttg

SEQ ID NO: 480526 - DNA, 75 bp, Homo sapiens
ggtggaggagttaacgacgctttcaaagatgcactgcagagagcccggcagattgtgtcagcagctaaggtgtgt

SEQ ID NO: 480527 - DNA, 100 bp, Homo sapiens
tgaggatgatgttgacttggggatccaaaggcacagattttcagctgaactctcatctctcaacactggcaaatattcataagatctaccacacccttaa

SEQ ID NO: 480528 - DNA, 101 bp, Homo sapiens
accagactggcggttcatggagagcaaggagaaggatcgccaggtgctggaggacttcccaacggccaagtcctgtatctgccatgtctgtggcgtccacc

SEQ ID NO: 480529 - DNA, 75 bp, Homo sapiens
atatgtgttgctaatacccatctttactggcatcctaaagaatagcctaacatggcagaccagagacagcgctca

SEQ ID NO: 480530 - DNA, 87 bp, Homo sapiens
gtaacaagaatccaaagaaaacaaaatggtggtatcatgaactatttgtcaatgaagattgtaaagccaaatgtgtaacaaaggcaa

SEQ ID NO: 480531 - DNA, 75 bp, Homo sapiens
gatttgtttctcattctcatatttcaccaataaagattgagaggatccagaatccagatctctggaatagctacc

SEQ ID NO: 480532 - DNA, 80 bp, Homo sapiens
tatgtagctgatgtcactcaggagcacgagcgaagtacagcttatggatgggtccgggcccaccagctggtcttgccacc

SEQ ID NO: 480533 - DNA, 75 bp, Homo sapiens
agccttgatgacggccatcttcccccggtagccctaatggagaaccttgtggaaagacttgtttggaagagagag

SEQ ID NO: 480534 - DNA, 109 bp, Homo sapiens
caccaaataagctatatactttggttacctatgtacctgttaccactttcaaaactcctgatgataattcattattgctgctgcgggcggagttatatttgaccatgaa

SEQ ID NO: 480535 - DNA, 83 bp, Homo sapiens
cggctcctgtcgtccgttctctcaggctcccgttcaggtgtggaaacaggaagagaactagaactggaagtaaagcattgaag

SEQ ID NO: 480536 - DNA, 75 bp, Homo sapiens
gaggcggaggtcgataagctggaactgatgaacattaaccaggtggtatttgttggaaatttcttgagaattaat

SEQ ID NO: 480537 - DNA, 100 bp, Homo sapiens
ctgaaaacatccttcagctggtgaaagcggccagtgatatccaggaaggcgatcttattgaagtggtcttgtcaggatgaactggacctcacagacaaac

SEQ ID NO: 480538 - DNA, 74 bp, Homo sapiens
agatattaaaccagacaagtgtcctaggagagtgaacaggtaagaatgattgatgttggctgatattggagtgc

SEQ ID NO: 480539 - DNA, 100 bp, Homo sapiens
cgctggctctttggcggctcggaggagcggctgctgctgctgctgctgctgctggtggcccctttgcaggtctactttgaggatgaggacagggcagaac

SEQ ID NO: 480540 - DNA, 100 bp, Homo sapiens
ccagatcatccatgtgagtgaccatgcagcaaaagaaggagggtcctctcagtgattaaggaaattttgtctgtggctaaaaaaaataaaaaggagaatg

SEQ ID NO: 480541 - DNA, 75 bp, Homo sapiens
ctctataatgcagcaatgtgacagaatacagattctgttcatcttgctctgaaattaaataattctgaactcatg

SEQ ID NO: 480542 - DNA, 75 bp, Homo sapiens
aggaagtttctcaatggcttggaaccagaaaatatccacatgatgattggtgctaaaatgatgtattttctggac

SEQ ID NO: 480543 - DNA, 51 bp, Homo sapiens
agctgagcctgccacgccgaggacgtggggaaagcaggcaggatgggagag

SEQ ID NO: 480544 - DNA, 82 bp, Homo sapiens
cccaagccccagccccctgtggctgaggctacaccccggagccaggaggattgtcactgctgttccaagggcacacgcagag

SEQ ID NO: 480545 - DNA, 82 bp, Homo sapiens
atgaagagtttagatctgatttagtcatcaagttccaagactatcttctttctcactgtcaaaatgcagatcttcgtgaaaa

SEQ ID NO: 480546 - DNA, 75 bp, Homo sapiens
gcctattggaggaaaacacaccaagggtggatccatgctgtgctcacttctcaggactgtatggcttttgggggg

SEQ ID NO: 480547 - DNA, 75 bp, Homo sapiens
gcccagcctgccgcctcgctgtccctgcggcttctggggagtgggaaaccacccatcaatgatatgttcacagac

SEQ ID NO: 480548 - DNA, 80 bp, Homo sapiens
tatctatattttttgactgctctgctcctctatgctggacatcaaatttccaggacagttcgtgtttggttaaagagaga

SEQ ID NO: 480549 - DNA, 75 bp, Homo sapiens
ccggcgccgtcgcgccactcctccgatgctgattcctaaagaaaagcccccaatcacggttgtgggtgatgttgg

SEQ ID NO: 480550 - DNA, 100 bp, Homo sapiens
ttataggaacctggtctccctggaacatccagtcatggataaaaatgagctggttcagaaggccaaactggccgagcaggctgagcgatatgatgacatg

SEQ ID NO: 480551 - DNA, 83 bp, Homo sapiens
cctgcttcgcaccccaaaaacagtgtcgagaagaggtgctcaatgccttgctttccatgacatttcccctcaagcaccaacac

SEQ ID NO: 480552 - DNA, 100 bp, Homo sapiens
gtgttaagtgtaaggatcttcatgatgaaatttctgtaaatggacttgatagacgacctgaagtcagaactgagtggcaacttcgagcaggtgattgtgg

SEQ ID NO: 480553 - DNA, 82 bp, Homo sapiens
gctgacacccatcacccacatctcacaataacgaaggaggcccaacttcattcaataaggagcctgacggatttatcccaga

SEQ ID NO: 480554 - DNA, 75 bp, Homo sapiens
ctggcctgcggcgcctgggcgctctgaggtgtagacggggcactgccttcagagcaggtcctgccagcctcgctg

SEQ ID NO: 480555 - DNA, 75 bp, Homo sapiens
agctgtagagaggaccccggtacatctgaaagccgggaaatgtgcacttggaggctcctcagctcttcatatccc

SEQ ID NO: 480556 - DNA, 116 bp, Homo sapiens
aaagagaaaggaagcaggcccgttggaagtggttgtcttcctgcctgacacagctcacttcaagaagtgcacaatgtcagaacgtggaattaagtgggcttgtgaatattgtacgt

SEQ ID NO: 480557 - DNA, 83 bp, Homo sapiens
cagtaccggcgtgccaaggagggcagcagccgcggccgagttccagtgtctcgccccatcctcaccctcagggttcccagggc

SEQ ID NO: 480558 - DNA, 82 bp, Homo sapiens
attcgccgtgcccgagaatagctccgtccagcagggagtgagttttccgggagtccctacagccaccctcagtattcctcgt

SEQ ID NO: 480559 - DNA, 88 bp, Homo sapiens
acgcgggccagcctcagcaccgacagccgacgcgcagatagcagagccatccttgggtaatctatgccagcaattatgacaatgttag

SEQ ID NO: 480560 - DNA, 100 bp, Homo sapiens
aaatccaggtcgcgatcgaagagtccccccaagtctcctgaagaggaaggagcggtgtcctcttaagaaaatgaaactggcgatggaatatgagaggagc

SEQ ID NO: 480561 - DNA, 50 bp, Homo sapiens
gcatcatccgctatgcaattggggtgtctgactccgtgagtggacagacc

SEQ ID NO: 480562 - DNA, 90 bp, Homo sapiens
ttcctgcgctgttccacctcattcaacttcagataagccaatggacacgtcagtgttatctgaagaaggaggagagccttttcagaagaa

SEQ ID NO: 480563 - DNA, 101 bp, Homo sapiens
gggggagctagtggaagttactgccgcgccaccgagtccggaccggagactttggggcctaactagctgatgctggcacccccacgggaactcttcaaaaa

SEQ ID NO: 480564 - DNA, 75 bp, Homo sapiens
gaaattcccacctgtcaaagagatcgataaagaattggctagtggtgaatactttttgaaggcaaatcagaagaa

SEQ ID NO: 480565 - DNA, 90 bp, Homo sapiens
gggccatttagtaacttctttgcaagatcttggccctgattgcattcatctgcatagagaccatcatggcatgctccccgtgtgaaggcc

SEQ ID NO: 480566 - DNA, 75 bp, Homo sapiens
ccttggccttcctcacgctcctgcccacctccatcagccagttcttctccggtgcaacctgccccccatctcaga

SEQ ID NO: 480567 - DNA, 75 bp, Homo sapiens
gctcaaccccatccactgccgcggccgtgggcccgaccgcggggacccgtcaaaagcgtcaggcagagagataag

SEQ ID NO: 480568 - DNA, 75 bp, Homo sapiens
tgcaaggcatggtgacagaaacgacaatgaagtgggagaaagaatgtggaatacagaagcagatttacaaatgaa

SEQ ID NO: 480569 - DNA, 90 bp, Homo sapiens
cgcagggcgaggcggaggcgcccaccctctatctgtggaagactgctgctactgtttgaacggtcttggatgaacagatggaagtctgct

SEQ ID NO: 480570 - DNA, 98 bp, Homo sapiens
agagggagccgccgcagccgccggcgctgtggaggataaggaagcctgtgtgggtaccaacaatcaaagctacatctgtgacacaggacactgctgtg

SEQ ID NO: 480571 - DNA, 75 bp, Homo sapiens
gcgccgacctggtcatgagcttcgtcaacatgggtactccaaagattcaggtttactcacgtcatccagcagaga

SEQ ID NO: 480572 - DNA, 82 bp, Homo sapiens
ctgcagaggaccatccagtgtgcaaaaggtgatgtgtccaatctagatcccaacttctcatttgaaggcaccaaactggatg

SEQ ID NO: 480573 - DNA, 100 bp, Homo sapiens
gttatgttaatgctgggacgctgcctgccacacattgttcccaatgtgctattggcaaagagagagccacccacacagaatatgcctatgggtcctggag

SEQ ID NO: 480574 - DNA, 74 bp, Homo sapiens
tgatctcttggagcagctggggatcatgaaaattttcgtgctctgagcactggagagaaaggatttggttataa

SEQ ID NO: 480575 - DNA, 95 bp, Homo sapiens
agctgtgctcgcgctactctctctttctggcctggaggctatccagcgctgaaggtgatgtggccgccctcaaccgacgcatccagctcgttgag

SEQ ID NO: 480576 - DNA, 75 bp, Homo sapiens
gggctgtcagagcctcatggagtacggtacaggtttgcagattccgccagcagcacagcaagctctacagatgag

SEQ ID NO: 480577 - DNA, 101 bp, Homo sapiens
ctatgaggaggagtcaaggcatcaccacagcgaacgcatgcaacacgtggtccagcttccccctgagccggtgcagacctgtcatttactccatcctttat

SEQ ID NO: 480578 - DNA, 76 bp, Homo sapiens
gataaagaagaagaagagaagaaagatgaaacttcgagctcctctggtgcaagttcaacatggaggcaaatcactg

SEQ ID NO: 480579 - DNA, 101 bp, Homo sapiens
tagcaaaagtgggaagccaagcctttcctcccgctggttcccgagcctcatacagcagccagcatgggcacctgggcccagagttgcgggccctgcagtcc

SEQ ID NO: 480580 - DNA, 82 bp, Homo sapiens
agcccgggaccgccaggccaccaccggccgcctcagccatggacgcgtccctggagaaggaggaatcattatagattctaaa

SEQ ID NO: 480581 - DNA, 87 bp, Homo sapiens
tcctggtccacaacgtcaaggagctggaagtgctgctgatgtgcaacaatactatactggcaattgctggagaagattttgcaattg

SEQ ID NO: 480582 - DNA, 75 bp, Homo sapiens
gaaccaggaacagaggacagtgagtcgctctcgtccctccagacagaaagaatttactttcaggttttcttacct

SEQ ID NO: 480583 - DNA, 98 bp, Homo sapiens
gctctacagaggctcatcgtaggattctggactctacttataatatccctaactgctggattctcctgttgcagcttttcttggacagtgacttactt

SEQ ID NO: 480584 - DNA, 121 bp, Homo sapiens
cgctgccacaactatctccagaatgtcagcatggaggctgctgggcaggtcatgagtcaccatgacatgcacatgatggtgtccaagccagaacagtgggtaaagccaatggctgtagcag

SEQ ID NO: 480585 - DNA, 96 bp, Homo sapiens
cagccttcccagtagctgggaccacaggatttcaaatatgcgtgcattagagaatgattttttcaattctcccccaagaaaaactgttcggtttgg

SEQ ID NO: 480586 - DNA, 75 bp, Homo sapiens
gcttcctctggtgcaaccagcaagtcttccagtatgaatcccacagaaaccaagtttctcaagtcaaagaaggcc

SEQ ID NO: 480587 - DNA, 50 bp, Homo sapiens
actaccaacgtttggaccagaaggtgcactacatcctccaggaggtggtg

SEQ ID NO: 480588 - DNA, 100 bp, Homo sapiens
cggttgccgggcgcgggcgagaaaggttgaaggggaccagctgcctccaggacacacagtcagtcaatatgaaacctgtaagatcaggaccataaaagct

SEQ ID NO: 480589 - DNA, 50 bp, Homo sapiens
ccactttagaaactcaattaaggcagcccaatggatccaatggtgatgaa

SEQ ID NO: 480590 - DNA, 82 bp, Homo sapiens
agacaatgtcatgtgattcagcctaatatctcagtgaaaggaaagcaagccaggatggatatttacgacactcaaaccttgg

SEQ ID NO: 480591 - DNA, 75 bp, Homo sapiens
acttgagcgaagttttatgcaagttgtatcacggactgattcaccgagcccaaccgtactcaactcacatatttc

SEQ ID NO: 480592 - DNA, 90 bp, Homo sapiens
tctgccgaattcctgtgccacctcctcctttagaaaactgatcttaatacagaatgacagggagagagtttttctctcgtttcccagaac

SEQ ID NO: 480593 - DNA, 51 bp, Homo sapiens
tttactggagtaggtgttagtaaggcctttgctggacagatgaagagtgac

SEQ ID NO: 480594 - DNA, 100 bp, Homo sapiens
ccgccaccatgcccaagagaaagagacaagaggagcagcagcggcaccgcccctcaccctggagggtcctgtacaatctcatcatgggactcctgccctt

SEQ ID NO: 480595 - DNA, 83 bp, Homo sapiens
cgagaacgtccactgcgggccggcgaaagctggccaccagcccctcgggttccaagatgcagctactggagacagagttctca

SEQ ID NO: 480596 - DNA, 82 bp, Homo sapiens
gtcatgcaatcaaaatgaagttgaagcatcagcttaccctgaaagaagcagatcccagttcaaaagtagccataagaaggaa

SEQ ID NO: 480597 - DNA, 78 bp, Homo sapiens
tccgcgccatcgagaccctctcgggttaatgttgaagaaggaaaatgcggaagtcgtcatttgacaagttttataaat

SEQ ID NO: 480598 - DNA, 75 bp, Homo sapiens
gtggggagatgaacccaacctagtgggtgtaatacatcatgaactgcaggttcatagccctgatgaagcaagtta

SEQ ID NO: 480599 - DNA, 101 bp, Homo sapiens
tcagaactactatattcagtggctaaatggctccctgattcatggactcacaccacccggcaagaactgctcactacggctccctgccccagaagtcacac

SEQ ID NO: 480600 - DNA, 75 bp, Homo sapiens
aaatgattttggggtagcaatccaggactcgtgagctgaagtgcagatgaccacattcaagggggaaccttctgc

SEQ ID NO: 480601 - DNA, 100 bp, Homo sapiens
atgcatttaagaactttccttttctagaagagctgtcaaaatgcagatcttcgtgaaaacccttaccggcaagaccatcacccttgaggtggagcccagt

SEQ ID NO: 480602 - DNA, 101 bp, Homo sapiens
gctggaaatcgacttcggtttcagttggagttggaatttgtgcaatgtttagccaacccaaattaccttaattagagtcaattctactacagaagcaaata

SEQ ID NO: 480603 - DNA, 99 bp, Homo sapiens
ttatacatggagttgatattacaaccagtgacactgcagcacgaaagcaagagattatcaaagtcactgaacaactgatcgaagctatcaacaatgggg

SEQ ID NO: 480604 - DNA, 96 bp, Homo sapiens
tcacccaccaggcgttcagccacagcagccaccatatacaggagctcagactcaagcaggtcagattgaagaattaatgcaccatctggaaacctc

SEQ ID NO: 480605 - DNA, 100 bp, Homo sapiens
tgggttgaggctgagatgggatggcggtatcgtgctgtgtggccttagcttagaccatgctcagcctccaagcagccttgtcatcgacaaagaatctgaa

SEQ ID NO: 480606 - DNA, 75 bp, Homo sapiens
ttcgccacttactttaatgagaagatctccattcctgaggaggagcttcacgagaagtttgaccttctaaagcgg

SEQ ID NO: 480607 - DNA, 83 bp, Homo sapiens
aaaacttttattccacatttggagggatcatagacggtatttctatgtaaacgaacagtcgggcgagtctcagtgggagtttc

SEQ ID NO: 480608 - DNA, 100 bp, Homo sapiens
ccacggtcaaggaacacagttcaccttcgaccaggaccccagttacatggacacagaacagtatgaagaagcagtacgagactatgaaaaagtataccag

SEQ ID NO: 480609 - DNA, 100 bp, Homo sapiens
aaagagcagatcatcgagctggagctgaaggaggccttcatcagtggtgctggtgagtcagacatctatgtggtcatgtgccgaacaggaggaccaggcc

SEQ ID NO: 480610 - DNA, 100 bp, Homo sapiens
gaaagaagagaatggcaaagtatgagaaggctgaggagcaaagaatctgcagagtgttgtgcttagtaaaatgaattttgaatcttttgtaaaagatctt

SEQ ID NO: 480611 - DNA, 82 bp, Homo sapiens
gagcctcatttactgaacagtggacagatggttatgcttttcagaatcttatcaagtaatctgtaagtcagatgctccaaca

SEQ ID NO: 480612 - DNA, 75 bp, Homo sapiens
ccaagatgtgatgctggagaacttcaggaacctgctgtcagtgggtgagacgagagaagagcggacatttaggaa

SEQ ID NO: 480613 - DNA, 83 bp, Homo sapiens
ctcaaggacatggagcgcttgaaagaggtgagaagccctaccactgcaactgggacggctgcggctggaagtttgcgcgctca

SEQ ID NO: 480614 - DNA, 98 bp, Homo sapiens
aaactccaagaggaattagcctcaggaaaattagtggaacaggctgttctcttagaagcacaagatatggcagtgagagaccataacgtggaattcag

SEQ ID NO: 480615 - DNA, 83 bp, Homo sapiens
gaagagttggatactcagcgtcgctggcagccgctgtacttgacaaatttacatgtattggagaccagaccagaagcccttct

SEQ ID NO: 480616 - DNA, 100 bp, Homo sapiens
gatctccaaagactggatggtatgggctgtctggagtttgatgaggagcgagcccagaaatttctgaataaattggcagaagaacgcagacagaagaagg

SEQ ID NO: 480617 - DNA, 82 bp, Homo sapiens
cggcatcgtctttccgtcctctgaggcgacggccgcggctgcacagatattctcccaggagtacatcaacctcctgctgtcc

SEQ ID NO: 480618 - DNA, 82 bp, Homo sapiens
cctggaggagattctggggcagtatcaacggagtctccggggattttttatcaagcagaaatgcatcgaacaacgagaatca

SEQ ID NO: 480619 - DNA, 82 bp, Homo sapiens
cactgccgacctccgggagcagcgcagacaatgcagatcttcgtgaagactctgactggtaagaccatcaccctcgaggttg

SEQ ID NO: 480620 - DNA, 96 bp, Homo sapiens
cggaggtctccgccggctcccggatctcccttgagtttagaaatctggctgagaaataccaaacagtgattgccgacatttgccggagaatgggca

SEQ ID NO: 480621 - DNA, 75 bp, Homo sapiens
atattctccaggagcctgacgaaggcatggtggatgcttccaaaagcatcgaagctgtccatgaggacatccgcg

SEQ ID NO: 480622 - DNA, 100 bp, Homo sapiens
aagcatctgataaagccactatcatggcctttgatgccctggtgaccttctgtgaagaactgggtacggcaagaagaagctgaaatacctgccctacaat

SEQ ID NO: 480623 - DNA, 100 bp, Homo sapiens
cagttcactggtattaaaaaatatttcaactcttatactctcacagaacccattattaagccagtgaaaaccaagaaattcactctgatggagcagacat

SEQ ID NO: 480624 - DNA, 83 bp, Homo sapiens
ttccaaagcacaggaatctcactctgttaaagctggtctgttctaactgagtttgcagagcagtctctgatgaagaatgccat

SEQ ID NO: 480625 - DNA, 75 bp, Homo sapiens
ccttgaactctgcacagcaagcccaggctcattatcagggttcttgaagcttttgagattaacaatggcaggaaa

SEQ ID NO: 480626 - DNA, 139 bp, Homo sapiens
cggggccctggccggagccggagtcggagtcagagccggagccagagccaaaggccaggacagaaacgccgagagaggatggacacctccaccgagcagtgcggatcggagctcagctcagcgttcttgaagatctggc

SEQ ID NO: 480627 - DNA, 100 bp, Homo sapiens
gtgccgcttcgccagcgcccgaggtggtgcccaggcaacatgggtgactggagcgccttaggcaaactccttgacaaggttcaagcctactcaactgctg

SEQ ID NO: 480628 - DNA, 75 bp, Homo sapiens
aaaatcacatgatccgcacccccagcatgaggcaggaggagcgctacctggtcaagaacccagtatggaagggag

SEQ ID NO: 480629 - DNA, 74 bp, Homo sapiens
agacgctggccgcgggctccatcagcatggctgaggctttatcctgtggataaacgcagagtgaacgagtttgg

SEQ ID NO: 480630 - DNA, 90 bp, Homo sapiens
cttgcagaagacgccgtacgaggttaaggaattcaatttccgagccaaatgtatctatactgcagtgatggtgcgaagagttattctggc

SEQ ID NO: 480631 - DNA, 75 bp, Homo sapiens
gttgttttagcaactaagacacctgctgttgatgcgggctacattgagagacctcagctgattcgagcaaaagtg

SEQ ID NO: 480632 - DNA, 100 bp, Homo sapiens
agaataatggcccggttggcccgggacgagtggaatggtactccaaagattcaggtttactcacgtcatccagcagagaatggaaagtcaaatttcctga

SEQ ID NO: 480633 - DNA, 76 bp, Homo sapiens
gagaatgaggaggacaacagctacaaccggggtgtttcctgaggttataggcgggtgtttgaggagtacatgcggg

SEQ ID NO: 480634 - DNA, 89 bp, Homo sapiens
atgagttcatcgagaagagtgtctctgaggccctggcatcttttaatacttgcacacctacccctgtggagcgtgcaccctataaggga

SEQ ID NO: 480635 - DNA, 50 bp, Homo sapiens
gatgagcctcaagtgcttctgcattacaatctgaaatagctcaactcagt

SEQ ID NO: 480636 - DNA, 90 bp, Homo sapiens
gtggcgctgggagcaacgggagtgtcctggacccagctgagcgggcggtcattcgcatcgcaggcgcatattaaatttcctattgactac

SEQ ID NO: 480637 - DNA, 75 bp, Homo sapiens
cagaactttgacatcttgcaaagtgccatcagtaagcatttgaatcatttgctgtttcaaatagagaactgtgcg

SEQ ID NO: 480638 - DNA, 83 bp, Homo sapiens
cttcggtggactccttcggcagtccacccaccgccgccgcctcccaggtggaaatgagttctcaacagtttcctcggttagga

SEQ ID NO: 480639 - DNA, 83 bp, Homo sapiens
aaactttggggcccgcgccgcgcgccggcggcaccatgaagtcagcggaggaagagatcctgaaggagctagacgagtgctac

SEQ ID NO: 480640 - DNA, 100 bp, Homo sapiens
cttggaccgccatctcagaatccacacgggaccccagccaggccacggggacaacaggcagcagcgtcagctgcacagaggagaaaaagcaaagcaagtc

SEQ ID NO: 480641 - DNA, 96 bp, Homo sapiens
ttctgctttcatggagttcacagaagagtcgaggagtatgatccatttgctgagcacagacctccaaagattgcagaccgggaagatgaatacaaa

SEQ ID NO: 480642 - DNA, 100 bp, Homo sapiens
agaaccaccagcattgccaccaccaccaccaccaccacagagtctgtggaagaggtggttcgagagcatttttctcagcatttgagaagttggcagccat

SEQ ID NO: 480643 - DNA, 92 bp, Homo sapiens
ggcgcgggcggcggacagattgaccttcagagcgaggaatactcccccagttgcaagaggcgcaggaccgtggaagacttcaacaaattctg

SEQ ID NO: 480644 - DNA, 90 bp, Homo sapiens
tagccgagaatcctgggaagtggatgataacctgccaggtcagcgaccacctacaagcctttaaatctacaagacagcagccttcccgaa

SEQ ID NO: 480645 - DNA, 100 bp, Homo sapiens
aagcctggaacatcacatctgtacgttgcaatctgtggatcagctacgagattgtcaagacattgccaataagggagctaaacagagcgggctttacttt

SEQ ID NO: 480646 - DNA, 100 bp, Homo sapiens
tccttttcactgaggccacccggatcctcttcttcaacacacccaaaaagatgacagactacgccaagaagggcatcatggtgggaggcttgaagaggaa

SEQ ID NO: 480647 - DNA, 100 bp, Homo sapiens
ctgaacgatttcatcagtatggatcccaaggcactacctggcagcaccatctaaacctgtatcatctgctgtggtcccagttactcaggaggctgaggca

SEQ ID NO: 480648 - DNA, 100 bp, Homo sapiens
ttaaggagtattgccccatggtgttccgaaaccttcgggagaggtttggaattgatgatcaggattaccagttcgtgtctgggatgtccggccatttgcc

SEQ ID NO: 480649 - DNA, 95 bp, Homo sapiens
ctgctttcaagctggtcatcatgatgaaacttagacacaatgtcatctgggtgattctcagtgtggaggtgggtggacttttaggagtaacgcag

SEQ ID NO: 480650 - DNA, 98 bp, Homo sapiens
ccatgatgagccatctccacttaatgactgtctcacattggccggcaacttgttccaggacaggaaaggccatgtgaggacatagggagaaagcagcc

SEQ ID NO: 480651 - DNA, 82 bp, Homo sapiens
gccatgtcactgctctgcgtgcgcgaatccagcaactatcacaagaatactccttagccacttcaattgggataaagagaag

SEQ ID NO: 480652 - DNA, 51 bp, Homo sapiens
taatgatataccacagtcaacagaacagtggtggacttgctttgtgaagag

SEQ ID NO: 480653 - DNA, 83 bp, Homo sapiens
tagaaacagaaaagaaaaaaagtcttggttagggtatgctcaggaaaaaagcagcaagccttcaggtgttccagtgatgcctg

SEQ ID NO: 480654 - DNA, 95 bp, Homo sapiens
ggtgccgcgcagctttccccgaccatattttacatccttccacgcctttcaggccttattgaagatgaatggatcaccattgataaatttaccag

SEQ ID NO: 480655 - DNA, 50 bp, Homo sapiens
gagacatgagatgattgccaaacccccagagatggagtctcgcgctgtca

SEQ ID NO: 480656 - DNA, 94 bp, Homo sapiens
tccagcacagtcttgttacccagtaactaccaaacatgaatgtagtgacaagctggcccagaacagcacatcccattataatgctggaacttgg

SEQ ID NO: 480657 - DNA, 100 bp, Homo sapiens
gggagttcaagaagaacactccagagatcttaccaatatatttgagtccttcctgcctcagttattggcctatcctaaccccatagatcctctcaatggt

SEQ ID NO: 480658 - DNA, 110 bp, Homo sapiens
ccattccaatgcaaagaactcacatgctagaaagagtcaccttcttgatctacaaccttttcaagaaggctacttctacaagtccgaacagccagtccagcaaaatgaac

SEQ ID NO: 480659 - DNA, 82 bp, Homo sapiens
gcatggaagaacttcacaatcaagaaatgcagaaacgtaaagaaatgcaattgagatagaagagtgatggatgtcatttctc

SEQ ID NO: 480660 - DNA, 97 bp, Homo sapiens
acaaataaaactcgctgacttcggccttgcccgcatctatagtttccagatggctctaacctcagtgtcggcagaaccaattgaaagaccaacagca

SEQ ID NO: 480661 - DNA, 97 bp, Homo sapiens
gcctcccatgtagctgggactacagagaacagcccatcttcaccacccgagcgcatgtcttccagattgaccccaacaccaagaagaactggatgcc

SEQ ID NO: 480662 - DNA, 100 bp, Homo sapiens
ctattacccccagtatctgcaagccaaggtatggcccatctcctgtacgcttggagcgacctttggctacgtggctggccttgttatttcaccactctgg

SEQ ID NO: 480663 - DNA, 98 bp, Homo sapiens
ctggaggatgcctactggaaggacgacgacaaacacgtcatgaggaaggagcagcgcaaggtgactgaatgtctgaccaccgtgaagtcagtcaacaa

SEQ ID NO: 480664 - DNA, 80 bp, Homo sapiens
agttggaggggtactgcattcaactcaaggaccctcgagatgcccctcctccaactcgtgctgaaacccgagaggagcgc

SEQ ID NO: 480665 - DNA, 75 bp, Homo sapiens
cgagttactcatgagaccagtgcccatgaaggtcagactgagatctgaagaggaatgattatacgcctgataaaa

SEQ ID NO: 480666 - DNA, 83 bp, Homo sapiens
gccagcggcaggaccagcgggcgggggcccacgagtgtggatgtggaagcagccaagcgggcagaagaggaattgctccttca

SEQ ID NO: 480667 - DNA, 100 bp, Homo sapiens
caaagatgctctgcggtttttgggctgtgttgacatcaaggatctaccagaaaccagcctggacaccaagtctgtgtcagaaggccacctcaagaggaac

SEQ ID NO: 480668 - DNA, 100 bp, Homo sapiens
caaacagaaaatctttttaaccatctcctttggaggaatcaaaatctttgatgagaagacagggatacagatccacgggttttagaaaaacaagaattac

SEQ ID NO: 480669 - DNA, 51 bp, Homo sapiens
ccacgtggcatgttaccactgtgagaacatccagtcatggataaaaatgag

SEQ ID NO: 480670 - DNA, 74 bp, Homo sapiens
ctgtcctgagcttccatgtggatccctatgtttgcaacccctccccaggacagagcgggatgccaccagcttgt

SEQ ID NO: 480671 - DNA, 88 bp, Homo sapiens
tcctggtcatcgagctgtccgacaaccctggcgtccatgagcctggaaacttggatttaactggccagaagcaggtattcaaagcaga

SEQ ID NO: 480672 - DNA, 87 bp, Homo sapiens
cacctcctggggggagctgatgaagtccaagtactcagacatcaccatcatgtttgaggactcagaattcatgattgaagaaatgca

SEQ ID NO: 480673 - DNA, 100 bp, Homo sapiens
tggaggcgtcgggcgtgagcggaaatgaggaggagatggtggaggaggctgaaggttgaggcctctggtgtctacgcagccagcaaagaaggtggccacg

SEQ ID NO: 480674 - DNA, 74 bp, Homo sapiens
aagaaaccgtgctcagaaactagccagattgaagttgaaaacgaggcccactgcgactttgtgaagctgcggga

SEQ ID NO: 480675 - DNA, 82 bp, Homo sapiens
agcgccttcctcaacgacgcggacatggtcatgagctttgtgaacctgggattcaagatgaccaacgaagaacctcttccca

SEQ ID NO: 480676 - DNA, 83 bp, Homo sapiens
ccaagacctccggccagcccagtgatgcgggcagcaggcccctcctgcgcacagggggatatgagactttctactcggaatat

SEQ ID NO: 480677 - DNA, 76 bp, Homo sapiens
agaagatgcagcacttacttttccagtccttttccaagatgtcatttatcagcttcaagtctggatagtcagaagt

SEQ ID NO: 480678 - DNA, 98 bp, Homo sapiens
gtgagagcgttttcgcgaggtcgcaaattccgggccgaagaacagttgagaattgttgaagaacaaagaaagattcatgaggaaaggatgaaactaga

SEQ ID NO: 480679 - DNA, 126 bp, Homo sapiens
ccccttcgtctccccagcacccactctctgggggcaggtgggcccggtgacaggtctcggcgcggaagatggccggcggcgtggacggccccatcgggatcccgttccccgaccacagcagcgaca

SEQ ID NO: 480680 - DNA, 60 bp, Homo sapiens
gaaaatgtgcatatttcaggagtgtcaactggctacccacctttctgttctgagacccct

SEQ ID NO: 480681 - DNA, 100 bp, Homo sapiens
atgctgtgtatgataccttacttaatactgacatggatttgattgacatactttggaggcaagatatagatcttggagtaagtcgagaagtatttgactt

SEQ ID NO: 480682 - DNA, 95 bp, Homo sapiens
ctgaaagcattaccgggttcgctaggctcacaggtcattgctagaatcgtggatggaagcagattcactgagttcaaagccttttatggagacac

SEQ ID NO: 480683 - DNA, 98 bp, Homo sapiens
ccgccgcccggcgccgcgggactgggagaccggtgtcgtgtgggagccaatgggagatgggaagaaaatcatttccttggctgataaccatatcctgc

SEQ ID NO: 480684 - DNA, 82 bp, Homo sapiens
tctggtggggagatgaacccaacctagtgggtgtaatacatcatgaactgcaggatgaggctgtggacccaggctagacaga

SEQ ID NO: 480685 - DNA, 59 bp, Homo sapiens
tttatcctggtcatcttctatttccaaatgagcatttgtcctgtgctttcacattcttt

SEQ ID NO: 480686 - DNA, 84 bp, Homo sapiens
aggccagtggagcgagtggagccagcctgtgtgcttccaggctccccagagacaaggacccacccgaggacgggtcaccatggc

SEQ ID NO: 480687 - DNA, 82 bp, Homo sapiens
cactccgtcccccgcgggtctgctctgtgtgccatggacggaccatggtgaatccgggcagcagctcgcagccgcccccggt

SEQ ID NO: 480688 - DNA, 74 bp, Homo sapiens
gattcgcagtggtcgcttcttctccttgaattaatgagtttgaagaagctgtcaatttctttacttgggctctt

SEQ ID NO: 480689 - DNA, 149 bp, Homo sapiens
agactcattcgcttctccctggacaacaggagaggcttctacagccaggacctgcccccaggagcctctcagggggaactgggaacagccaggtgccccaaagcaaatacgcggagctgctggccatcattgaagagctggggaaggag

SEQ ID NO: 480690 - DNA, 100 bp, Homo sapiens
gagcagctggcgcacctggtgcgggccctctggaccctggagtacaccccgcagcacagccgcgacttcaaggctcatcagattcaagagatgtttcccc

SEQ ID NO: 480691 - DNA, 100 bp, Homo sapiens
gacgaagatggggagaaggaagcgagactcatacgcaacctcaatgatgatcaagcggtgctgattcacgagagtggaagcctccagagcttggggcttt

SEQ ID NO: 480692 - DNA, 75 bp, Homo sapiens
gggggatatgacaaggatggaagaggtcctatgacaggatcaagactgctttgccagcaacatgctcaattcccg

SEQ ID NO: 480693 - DNA, 73 bp, Homo sapiens
cttcttcatatgctcgagtctccagagtcactccgttctaaggttgatctgttccagctgcaggtgaacaccc

SEQ ID NO: 480694 - DNA, 74 bp, Homo sapiens
gagatgcttattatttgttgaaggattttgcactcaccattaaatctatcaggaaaatgtttataggaggcctt

SEQ ID NO: 480695 - DNA, 95 bp, Homo sapiens
ccagaccctacccctatccccagtggagccggagtgcgggcgcgccccaccaccgccctcaccatggaattgaatgatctggcacgggaccctcc

SEQ ID NO: 480696 - DNA, 75 bp, Homo sapiens
gtgtgtggggaggagaggacctctgccactctcaccgtgaagggcatgtcgggccccaggcctgtggtgctgagc

SEQ ID NO: 480697 - DNA, 98 bp, Homo sapiens
gcctgttttgtctctaacttggctactggccgcaataattccatagtcaagagcatcacagtctctggagtggaggcagcacagacagtgaggacgaa

SEQ ID NO: 480698 - DNA, 82 bp, Homo sapiens
cgcgggcgagcggggctttggacgccggtggagacgcaggcgagcccccaggtttccctagatgacaaataaacattccttt

SEQ ID NO: 480699 - DNA, 98 bp, Homo sapiens
gagaaggcctgtctcgccagcatgtccttactagaattggtgttatgtctttgattcgcaagaaggttggtgttcgaggaagagacattgttgttctt

SEQ ID NO: 480700 - DNA, 74 bp, Homo sapiens
atgacagtcaagtggaaacaactgtctgacatatctgaagagatggattaagaatgctttggattaaggattgt

SEQ ID NO: 480701 - DNA, 96 bp, Homo sapiens
gttggaccttccggagcttctcagaagacagagggttttcttttgaggaactgcaagcacatgttgaccagataactgaaatggcagcagtaatga

SEQ ID NO: 480702 - DNA, 75 bp, Homo sapiens
gtgtgtccatcttggttttgagctctgctctgcctgtgatgtcgagaacactggaagaagctcattcacacagaa

SEQ ID NO: 480703 - DNA, 75 bp, Homo sapiens
cagacctcgaaaaatctcctcccctacaggctccaaagccactgtgtcgaactcccagcaggcttaccaggaagc

SEQ ID NO: 480704 - DNA, 90 bp, Homo sapiens
aagacgttcatcgccgtgttatccttgagtaaagggccttcatcctagaataatcactgaaggatttgaagctgcaaaggaaaaggccct

SEQ ID NO: 480705 - DNA, 90 bp, Homo sapiens
agccatctccacttaatgactgtctcacattggccggcaacttgttccaggatcgaagagcagtcataaaaccacaaagtcaacgcaaac

SEQ ID NO: 480706 - DNA, 51 bp, Homo sapiens
tgaggcggtcctcctagcggcctgcttccaattgaagacttgtgcagttta

SEQ ID NO: 480707 - DNA, 115 bp, Homo sapiens
cagaagaatattttgcctgctggaacctgctgtatctactcaagagtggaagttttcacaggtctcctttacagaaaggggcttggataaggaggaaagaccatcagaagaaaag

SEQ ID NO: 480708 - DNA, 98 bp, Homo sapiens
aatcgcccaagtccctctactcgcgaggctgtcattatttgtatcaaaaacaaagaatttgaaaaggcttcaaaaattttgaaaaaacatatgtccaa

SEQ ID NO: 480709 - DNA, 74 bp, Homo sapiens
tcgtggctgcgtcaccgccgcccccccagacaagatggacaccgcggaggaagattcacaatgacatcctttca

SEQ ID NO: 480710 - DNA, 75 bp, Homo sapiens
gcggcggcggcggggggagccggagccgcctgggatgttcagcttaaatgataatcccagcccctggatctatcg

SEQ ID NO: 480711 - DNA, 98 bp, Homo sapiens
tcccatttccagaaatcacaaggatgttaggcaatgaatggagtaaactgcctcctgaggaaaaacagatgccagaattccagaaaagttcagttcga

SEQ ID NO: 480712 - DNA, 83 bp, Homo sapiens
cttcatctttacagaggaatagtctacaaaggaagacttgtaacctggagaagagctattttgaagatgaggaagaagattct

SEQ ID NO: 480713 - DNA, 74 bp, Homo sapiens
atatctcagtgttctccgctctcataggtcagtcccatatagaaatcatccgtggccatgcagccttcacgagt

SEQ ID NO: 480714 - DNA, 90 bp, Homo sapiens
aacccactttctcggcgccgcggctcttttctaaaagtggtactatttttctgcctggaaataaagtttctgagcatccctgcaatgaag

SEQ ID NO: 480715 - DNA, 100 bp, Homo sapiens
ctatggggcctttatcaaaatcccaggctgtcggaagcaaggctaatagctcgtcagcttgctaaaatccatgctattcatgcacacaatggctggatcc

SEQ ID NO: 480716 - DNA, 100 bp, Homo sapiens
gccggagggcccacaacccgcagagacttctactggctgcgctcctttctggccggagagcaattgtatgatggctatgatgaagagtatgactgtccca

SEQ ID NO: 480717 - DNA, 100 bp, Homo sapiens
ccgctgggcgccggagccgaggcgagcgccgcgcgcaccactggtgaccattgtgaggtagatattttgttctaattttccagatgaggaagctgagacc

SEQ ID NO: 480718 - DNA, 100 bp, Homo sapiens
gttaggaggcacagggcgtcggacctgcacgagctgtctggtatgggggcaccttccagaacgtgtctgtgcagctgcccatcactctcaacaaattctt

SEQ ID NO: 480719 - DNA, 115 bp, Homo sapiens
cacttcattggccacctacagaaacaaaatgtcaacaaattgatgggagccctctggcacaaatggaagaagaaagaagggagcaagtagctaaaattaagaagatggagatgga

SEQ ID NO: 480720 - DNA, 100 bp, Homo sapiens
ctcacttctcctcagaggtcaaaggtgttggagcgggccggagagaagtagagtgggctgcgaggagaaggaaacaggcctttcggaggctcctcatccc

SEQ ID NO: 480721 - DNA, 95 bp, Homo sapiens
agatgcaaatgatgtagttattactgtcccgtttgattttggagaaaagcaaaaaaatgctcttggggaccaacacttgtacagcagtgatccat

SEQ ID NO: 480722 - DNA, 83 bp, Homo sapiens
atatgggcagatatttaagcctggcttcattatttcaaaaatgttgtgctagtgggatccctacaggatcgctatgttcctta

SEQ ID NO: 480723 - DNA, 50 bp, Homo sapiens
gaagaacacagccagtgtgaatgcagggtgaggacgcttgagcggaagtt

SEQ ID NO: 480724 - DNA, 82 bp, Homo sapiens
tgagatttacctgtgagatgtttcatcccaacatgaaactgatgaaagttgtaagaagcaccttggaagagtgttatctatt

SEQ ID NO: 480725 - DNA, 100 bp, Homo sapiens
tcgtcagcaaacagacatttacaaacagatacgtgctaataagatctcaggaaacaggctcgacagctggaaaatgaacttgacctgaaactagtttcct

SEQ ID NO: 480726 - DNA, 90 bp, Homo sapiens
gacttctggctttggccactttacttcctgccagttgataagcaatacaaatcggtaacaaaaccaaagccactaagtcaagctgaaatg

SEQ ID NO: 480727 - DNA, 90 bp, Homo sapiens
aaaaattcatctgggcggtatctggaacttggtgcttgtgaatgacttcttcttggtggcttgtcttgaggatttcattgaaaatgcccg

SEQ ID NO: 480728 - DNA, 100 bp, Homo sapiens
gcgcaacacgtcaccagtcggaaactgggggtttgcttctgtgatttatttcattattgtgctggtaaaagctcagttcctacccccggttgcgagagga

SEQ ID NO: 480729 - DNA, 75 bp, Homo sapiens
actgagaaaatggcatctgaaaattcagaatggacagtttagaagaacctcagaaaaaagtctttaaggctcgaa

SEQ ID NO: 480730 - DNA, 100 bp, Homo sapiens
cctggctcggctccctgcctccgcgtcgcagcccccgccgtagccgcctccgagcccgccgccacatcctctgagggcattttggaagtgtcaaaggcca

SEQ ID NO: 480731 - DNA, 82 bp, Homo sapiens
tcgttctgcaccagcgccttgatcgagtacttgagggcagttgggtgagaagcagcttccatcttcaacctcggatgatcgg

SEQ ID NO: 480732 - DNA, 115 bp, Homo sapiens
cagaggcgcctgcggttactggccgggccgacgggtcctgagtctccagagctcggcatctcgtccccggtgaagaagacagagatggacaagtcaccattcaacagcccgtccc

SEQ ID NO: 480733 - DNA, 90 bp, Homo sapiens
ggaattgatggagaaagaaaccgcaaaaccaaaaccagatcctttcaaagattgatctggatactattgatgtaagcaacctcaacagac

SEQ ID NO: 480734 - DNA, 74 bp, Homo sapiens
cgcaccaacggcgaccggatccggttcattctggacgtgcttctgcccgaggaagctcttcgtgggcggtcttg

SEQ ID NO: 480735 - DNA, 100 bp, Homo sapiens
gcccccacactcccagctgctcttctacagatgccatcaacgagcaggactctgggtggctccactgtctaaggtgctggagaatctggtaaaagcacca

SEQ ID NO: 480736 - DNA, 73 bp, Homo sapiens
ctgcgcagccaagccctggagctcaacaagcggaagagtctcacattcccagtcaggaggtcccaggcaccca

SEQ ID NO: 480737 - DNA, 117 bp, Homo sapiens
tcgctgcatctgccatcctgactgctcagctggatgaggagctgggaggtacccctgtccagcacttttctgtagaaggtcagttggaattcagggcattgctatttattcctcgtc

SEQ ID NO: 480738 - DNA, 100 bp, Homo sapiens
gagagtgttaccattgaagcccaggaactgtctttatctgctgtcaaggatcttgtgtgctccatagtttatcaaaagtgtgacagctatgaaattcgcc

SEQ ID NO: 480739 - DNA, 73 bp, Homo sapiens
gagtgagagaaaggctggaagacgaggtttatggctacaaatgatttgatgacggaactgcagaaagattcca

SEQ ID NO: 480740 - DNA, 98 bp, Homo sapiens
gtccgttccgggctcggtgcgactgcgcagctcctcggcgcttcctcggtggcttccccgggtcgagcaaacaggcccccgacagctgctctcgggag

SEQ ID NO: 480741 - DNA, 83 bp, Homo sapiens
caggtaccggctgggccggaagatcggcagcggctccttcggagacatctatctcggtgtcgtgaaaactacccctaaaagcc

SEQ ID NO: 480742 - DNA, 82 bp, Homo sapiens
caggcccctcactgcgctgtctgtatgatcttccagacttatcatcagtttttgaatcagagccgacaggcacttgaattga

SEQ ID NO: 480743 - DNA, 76 bp, Homo sapiens
cagttcgtgattcacaggagcctctgtatcagcaccatgcagtttattcatggaggacacactgctaagatttcag

SEQ ID NO: 480744 - DNA, 103 bp, Homo sapiens
ggcacagagagggcctgggagcttgctgcagcttcaggtggccatggtgcccggccctgcctcatagcaggctgccatgtcgcgggaggcgggctcatgccgc

SEQ ID NO: 480745 - DNA, 74 bp, Homo sapiens
gcgcgagtgaggaaaggaggtactgtaggtggttttcccgctgtatccttcagagaacaatgactgatgttgca

SEQ ID NO: 480746 - DNA, 50 bp, Homo sapiens
ggttacagtggatagaaactgcctagaggaatcagttgattgggttggag

SEQ ID NO: 480747 - DNA, 97 bp, Homo sapiens
tcttcccgctgctgctcttctccaggctctgtggaggatgcagcattcaaggttctatcttggaagcagagactgtgccctcaccagatgctgaacc

SEQ ID NO: 480748 - DNA, 74 bp, Homo sapiens
ttaaaacctgacacttttaacagataactgttcccaggaaaaaaaggaggaaatcctggaaaatgaaaagccca

SEQ ID NO: 480749 - DNA, 96 bp, Homo sapiens
ctggtctggccagagacctgctggaagaatcaccacgacagcagcatgcatgatggacctcaggagataccccctggacgagcagaactgcactct

SEQ ID NO: 480750 - DNA, 100 bp, Homo sapiens
gcccggccggctgcggtccgtgcggaggctgagccggccgcgggcgcgaccggaggcaggaacctacaagcagcaattggcgcctattatgactttgaga

SEQ ID NO: 480751 - DNA, 90 bp, Homo sapiens
cgttggccaagacagtttcaaaatggaaacagaaactccagaaaatcttgccaaacttctgaccaggatgtatttaaaatcagaagtcat

SEQ ID NO: 480752 - DNA, 101 bp, Homo sapiens
ggagagcacaaccatcgcagttggaagcccatggggcagtgtgtactgtaagcacggtcacctgtgtcccatcgacaccggcctcatcgagaagaatatcg

SEQ ID NO: 480753 - DNA, 100 bp, Homo sapiens
ccgcaaagcggggacccagaccctggagcctcagttggaagcagccgatccagcctgcggagcctgtggggcaggttttcccatcatatgattcccggtc

SEQ ID NO: 480754 - DNA, 75 bp, Homo sapiens
aagacgttccttgaggaggtttgaaaaagatagcaaaacctgatctcataaaacctaggtcacaaaggacagccc

SEQ ID NO: 480755 - DNA, 83 bp, Homo sapiens
cagcgtgagtctctacctgagcgaggacgaggtgcgccggctgatcgacctgcctagagctggaacgttacctccagagcgag

SEQ ID NO: 480756 - DNA, 100 bp, Homo sapiens
cctgggcccaaagagcctgttttggtgggcccatctggggcagggaagagcacaattttgcgcctgctgtttcgcttctacgacatcagctctggctgca

SEQ ID NO: 480757 - DNA, 85 bp, Homo sapiens
tgttttggaactgtcaggtacctcaaagcgtaagaaaagaagatttttcagatcccctggatgcatgcggctagacatgggtggg

SEQ ID NO: 480758 - DNA, 100 bp, Homo sapiens
agcgccatggcggagcagacctactcgtggtatgtgaatggccatgcaaaaaaacattatgaagatgcacaagtacctttaaccaaccataagaaatcag

SEQ ID NO: 480759 - DNA, 83 bp, Homo sapiens
cgcggatgggatccagctgttagtcggagttgtctgctggttctcagcttgaagaagattctgcagtccttattgatcctttt

SEQ ID NO: 480760 - DNA, 100 bp, Homo sapiens
gcctgttgcgccagtgccccctgcttctgccccagaaccggtcgaaaaccgtgtatgagggattcatctcggctcagctgagatgagtgaactgagtgtg

SEQ ID NO: 480761 - DNA, 50 bp, Homo sapiens
cgcggccctcaggagcaaggcggtttggagatcgtttccctgccatgtct

SEQ ID NO: 480762 - DNA, 50 bp, Homo sapiens
cgggaatgtcgacgaggagctgaggtcctagcttactctgccaccactgc

SEQ ID NO: 480763 - DNA, 100 bp, Homo sapiens
aagattccatccctgaatgtagattgtgcagtgctcgactgtgaggatggagtggctgcaaacaaaaaggctcttaaaaacatgggtgaaattctgaaag

SEQ ID NO: 480764 - DNA, 100 bp, Homo sapiens
ggcaaggagatgcccgccaaaaagctctgaaggacttgctgaaatgggtcttagaggatgttgcttcagagtgtgaagtcaaatgcatgccaacattcca

SEQ ID NO: 480765 - DNA, 88 bp, Homo sapiens
cagggagaggagctgtggataacgggaggtgaatttccatgtcaacatagtcctgatcctacaagcaatggggaagtcctatcatcca

SEQ ID NO: 480766 - DNA, 117 bp, Homo sapiens
gaatctgagggtgccctcaatgagcacatgaccagcttagcttctgtcctaaagtgtttgaaagatgtatggtgatcttgaaacctccagacacaagaaaacttctagcaaattcag

SEQ ID NO: 480767 - DNA, 75 bp, Homo sapiens
tcggcagcgtcgtcgcttcactgtggctcatacatgttgtatatgaacacagatcaagattagagaaatccttgc

SEQ ID NO: 480768 - DNA, 83 bp, Homo sapiens
ctacgcgcgcttctcgccgtccccgctctccatgaagcagttcctggacttcgggagaaacaaaggcagcgctgccctcgggg

SEQ ID NO: 480769 - DNA, 100 bp, Homo sapiens
cttcttggaaaaccagatccagaaactggaggagtcccgctcgaagctagggttttttatcagcaattggacaccctttccccaaaatgatttttaatca

SEQ ID NO: 480770 - DNA, 82 bp, Homo sapiens
tgtttctctgctgcaccgacctcgacgtcttgcctgtgtcccacttgttcgcggcctatagatcaagaggctggagatggag

SEQ ID NO: 480771 - DNA, 101 bp, Homo sapiens
gtacctgttgttgcagagttattttctgagtcagtttcagattctgaagactactttgaggtcaacattccaacagacctacgagcaaaacattctgggga

SEQ ID NO: 480772 - DNA, 98 bp, Homo sapiens
acaagaataagctgcaagtccttccagaattgcttttccagagcacgccgaagctcaccagactgttaatgactccagagagtaagatcagattcgtc

SEQ ID NO: 480773 - DNA, 90 bp, Homo sapiens
gggcaagaccagcctgatggagcgcttcaccgacgacaccttctgcgaggcctgcaagtccaccgtgggagcggtggtgccccccccggg

SEQ ID NO: 480774 - DNA, 100 bp, Homo sapiens
tgattatcttttagctctcagcactgaagattctcagctggtagctggtgttgcattcaagaagactttctcttacgctgggtttgaaatgcaacccaaa

SEQ ID NO: 480775 - DNA, 76 bp, Homo sapiens
tcagttggcagccatcaaagttatggatgtcactgagagatagaatctcactatgttgaccaggctggtcttgaac

SEQ ID NO: 480776 - DNA, 73 bp, Homo sapiens
ctcaatataatcctgattagtcggaacgaggagaagttgcagggctagttgcacatagtgatttagatgaaag

SEQ ID NO: 480777 - DNA, 100 bp, Homo sapiens
cgggatcaaagtgtaccagtcggcagcatgggatacttttgtggaactctatgggaacaatgcagcagccgagagccgaaagggccaggaacgcttcaac

SEQ ID NO: 480778 - DNA, 99 bp, Homo sapiens
ccgcagccttgggcctcgcgccggctatggccgtgccctggggctgagccctcagatttctgcgccaggagatgaggggcggtagagccctggaatgga

SEQ ID NO: 480779 - DNA, 74 bp, Homo sapiens
aagaaagggaagctattgctgggattttgaggagttttaagacaattatctcctatattgatgagcaatttgag

SEQ ID NO: 480780 - DNA, 75 bp, Homo sapiens
gtcgtgcgtctgaagcctacaagaaagttttcataccgatctagagttcgtccttgcgtggtttatggtggtgcc

SEQ ID NO: 480781 - DNA, 48 bp, Homo sapiens
tggatttgatagcacacagtggtgaggactcagaagacaaagatgtga

SEQ ID NO: 480782 - DNA, 100 bp, Homo sapiens
tgcgcgaagctggccaaagcctgcccagacggctcacctgtgcgggatggaacaaaaggtggtgatgatgtccagcaactctgtgaagcaggagaagagg

SEQ ID NO: 480783 - DNA, 83 bp, Homo sapiens
gcggaagctgcattcatggaagaagagtgtgtggacactccaaagacagtgggagtagctcaccgttacccaagtatgcttca

SEQ ID NO: 480784 - DNA, 101 bp, Homo sapiens
tcaagatggcggcgcagccaccccgcgggatacgcctcagcgcggttcgtgctggccgtgggcagcgccgtctttgatgccatgttcaacgggggaatggc

SEQ ID NO: 480785 - DNA, 85 bp, Homo sapiens
ggagtgaaggcggcaaaatggcggaccgcttctcccgcttcaacgaagaccgagactttcagaattctcaatcgcaatcctctga

SEQ ID NO: 480786 - DNA, 75 bp, Homo sapiens
tccatcatcacccaggcgcggagggaagacgccctggtgctcaccaagcaagggtctcccttgatctgagaatgg

SEQ ID NO: 480787 - DNA, 100 bp, Homo sapiens
ggagatgaacctctaacacagtggaaaggaaccgttctggatcagttggtagctggcagtgttgtgatggcttttgaagaagtatgcccggacagaatag

SEQ ID NO: 480788 - DNA, 75 bp, Homo sapiens
ttttagggtcctttatatagaagggagagtagcttctagtggtacccgtgggctgaaggcgaaatttgagtccat

SEQ ID NO: 480789 - DNA, 50 bp, Homo sapiens
aggaaatgttaggatcactttattctgaagctatgtggaagcagtgacct

SEQ ID NO: 480790 - DNA, 83 bp, Homo sapiens
cttgcagctgctgtcagcatggcccaggctcctgctgacccgggcagagaaggtttgaaagagaagatagtgaggagctttga

SEQ ID NO: 480791 - DNA, 87 bp, Homo sapiens
tcactgctgttaacaaggatgatggcccactgcgtgaccttggttcagctgtccatttcctgtgaccatctcattgacaaggacatc

SEQ ID NO: 480792 - DNA, 82 bp, Homo sapiens
gtccgttctctcaggctcccgttcaggcctttgtgacactaaccacaaacgatgcctacgccaaaggtgccctggtcctggg

SEQ ID NO: 480793 - DNA, 83 bp, Homo sapiens
cgaaggcggtgctcgggccagcccttctctgccgtccctgggagagacgtctcccacaacctgctccgggcgctggacgttgg

SEQ ID NO: 480794 - DNA, 75 bp, Homo sapiens
agggggaaatgaaagagcttccggagcagcttcaggaacatgctgggatggagaagtttatgtttgggatgtgaa

SEQ ID NO: 480795 - DNA, 103 bp, Homo sapiens
gccggccgcccagacgctgcccgcgggcccggccacggcggagccaaggattatatctgtccaagatgcgagtctggttttatcgaggagcttccggaagaga

SEQ ID NO: 480796 - DNA, 97 bp, Homo sapiens
acagccaattcaaaggaaggagtgggactctgggacattcgaaaacctcagagatggatcctgagcttgaaaaaaaactgaaagagaataaaatatc

SEQ ID NO: 480797 - DNA, 102 bp, Homo sapiens
attccaaacagttcacctattaccctctggtggaaggtggcgacctgcacatgacccagtttttccgaggcaatctggctggcttaactctccgttccggga

SEQ ID NO: 480798 - DNA, 50 bp, Homo sapiens
gggtgccttgcagcagagatccagtatgccgagattttgctgtcctggag

SEQ ID NO: 480799 - DNA, 110 bp, Homo sapiens
ctgtgtgctgagcgttctaaaggaaggcgtccgttggccttcgtacccgtcttgattgagcggctggctgtcggcaattggattcttccagtacagcccgggcgctgccg

SEQ ID NO: 480800 - DNA, 100 bp, Homo sapiens
tccccagccccagacacggaccccgcagggccgggacctgggggctcctgccggatccatgggggcggccagctgcgaggatgaggagctggaatttaag

SEQ ID NO: 480801 - DNA, 80 bp, Homo sapiens
tgaccctgaaggtccaggagtacccgaccctcaagtaaaatgtttattggaggcttgagctgggatacaagcaaaaaaga

SEQ ID NO: 480802 - DNA, 76 bp, Homo sapiens
aaaacagcaagcgcagagccaaacagccaggcagattttgaagacattttggctacaatatattttttgatgcaca

SEQ ID NO: 480803 - DNA, 83 bp, Homo sapiens
gcaacttgaaagccttggaattttaccagatcgaatctgggccaaatagaaagcagaaaaatatggctcaggagactaaccag

SEQ ID NO: 480804 - DNA, 90 bp, Homo sapiens
gcttggcctggtgggcccagtcctcggtgcggcgcggccaggttttcaaaattcacttctacagatcgtaattccagagaaaatccaaac

SEQ ID NO: 480805 - DNA, 90 bp, Homo sapiens
gatgtaaatgtcagtggaaaggagagctaccatcactaagaaactggcgatggaatatgagaggagccctctggaaagaaaaggacagac

SEQ ID NO: 480806 - DNA, 82 bp, Homo sapiens
ggcaacaaatggctttacaagaacaaggaccacgtgcctccggagccagcgtggtggccatagacaacaagatcgaacaggc

SEQ ID NO: 480807 - DNA, 80 bp, Homo sapiens
atcacaagctcagcctggacagcaacagagttgcatgctgagaatttgaaaaatgaagatgatgtagacactggactatt

SEQ ID NO: 480808 - DNA, 75 bp, Homo sapiens
ggagactctgctgacacccatcacccacatctcacagttaatttggagtggcccctggagtcagtttcctacacc

SEQ ID NO: 480809 - DNA, 101 bp, Homo sapiens
gacaccaaagatgggggaggggaagtggtaagcatccgtggcattcaagacgaagatccccctgacgcccagctcctgaggctggataacatgctgctggc

SEQ ID NO: 480810 - DNA, 83 bp, Homo sapiens
cggagtttgacgaagaggtggtttttgagattgatgccaagaaggaacagctagcagatgcccggagagacctgaaaagtgct

SEQ ID NO: 480811 - DNA, 100 bp, Homo sapiens
cataaacaggagaagacagcacagatgaagccacctaagcctacaaaatcaggtgatcagcttgaaattcagctaaccgagcagctacggtccctcatcc

SEQ ID NO: 480812 - DNA, 100 bp, Homo sapiens
cttgtcagtggagaagaccagcaagcgtggcggcaagatcatcgtgggcgacgccacagagaaagcttgctcatcagtttggaaggaatttggctccgtg

SEQ ID NO: 480813 - DNA, 75 bp, Homo sapiens
cctacattgtgaagctcctgggagcctactatcacgacgggaagctgtgggtgcacttacagagtgctacgatga

SEQ ID NO: 480814 - DNA, 100 bp, Homo sapiens
agcatctgtgacaactgtgtgggcgtcagcttcagactcaagcaaaactggttttagaggaaaacaagttgttgctggagcagttggagattcagcaaag

SEQ ID NO: 480815 - DNA, 85 bp, Homo sapiens
cgcgagcaaggagcgcggaatcggggagcgtccggagctagctggatcctctaggcagtcaggatggctaaaggtgaccccaaga

SEQ ID NO: 480816 - DNA, 74 bp, Homo sapiens
atcagaacagtgctagtgaaagaatgttattctgtcttcacaaatcgaaggggcaagtgtccagagaatggctg

SEQ ID NO: 480817 - DNA, 95 bp, Homo sapiens
tagctgacatcatcctcccaatgttagccaaacagcaggctttctgtgaagaattggaatcaatgatacaggagcaatttaagaaggggaagaac

SEQ ID NO: 480818 - DNA, 101 bp, Homo sapiens
taagcaattctcacttggtgctgattgcacttttcaggattagaagaggctgtgtatagaaacatacaagcttgcaaggagcttgcccaaaccactcgtac

SEQ ID NO: 480819 - DNA, 88 bp, Homo sapiens
ctgagggagggtccgagccagccgctgttttgccggaggagcccctcaggccatgatgagagtaatgttgcagttaccagacccgatt

SEQ ID NO: 480820 - DNA, 51 bp, Homo sapiens
gtaaaggaaaaggggattttgctcgcaaggcattaagaagaaatgcactca

SEQ ID NO: 480821 - DNA, 50 bp, Homo sapiens
cttacttcaatttgaacccatttgagtctaagccagaaatccagtacgca

SEQ ID NO: 480822 - DNA, 88 bp, Homo sapiens
cgtgctggtctttctcaacctcatcttctgggagcatctttccttgaagaagtacattattgacattgtggttgaaagtacagctcca

SEQ ID NO: 480823 - DNA, 100 bp, Homo sapiens
cttcattcccatcggcattggcatttttgtcacctccaacaacatccgcgagatcgaggtggaatacatgttggtatcttttgatcatgaaaataaaaaa

SEQ ID NO: 480824 - DNA, 83 bp, Homo sapiens
ccgccccggccggacctcgaccctgagctctatctcagtgtacacggcgccatgtcagaaccggctggggatgtccgtcagaa

SEQ ID NO: 480825 - DNA, 75 bp, Homo sapiens
ccccagttgctgtgctccaaggacacacaggatcaattacatctttacaggtcagaagccaatgacctggccctg

SEQ ID NO: 480826 - DNA, 71 bp, Homo sapiens
cctattcgcgagcgccccgagttgccctcagtggtcttcttggcaagaaatcaatgtggactgaacataaa

SEQ ID NO: 480827 - DNA, 88 bp, Homo sapiens
cagattcgcagtggtcgcttcttctccttgggcctccagacggtcatccaaagggatttctttcctgatgtggagaagctccaggcac

SEQ ID NO: 480828 - DNA, 83 bp, Homo sapiens
cattgggaaatgatcttcatcaagaccatcagcctagaagaagattacgtaatagagcccagtcttacgatattcaagcatgg

SEQ ID NO: 480829 - DNA, 145 bp, Homo sapiens
tcctcaccctctgccgagtctcaatatctgtcttcggtggactccttcggcagtccacccaccgccgccgcctcccagaccatggtgaatccgggcagcagctcgcagccgcccccggtgacggccggctccctctcctggaagc

SEQ ID NO: 480830 - DNA, 101 bp, Homo sapiens
cagtactgtttaccagatctttgcagatgaggtgcttggttcaggccagtttggcatcgtttatggagcgcgtacttgctttgtaagtgatctgaagcgag

SEQ ID NO: 480831 - DNA, 98 bp, Homo sapiens
gcgagggcaccccgagctcccgcgggccgcgtcgggacccgcctaggcggccgccccggaacgattcatgctgatcctggccagctgccaccccgagc

SEQ ID NO: 480832 - DNA, 76 bp, Homo sapiens
catgaagatggcgccaggacgaaggccctactgggcaagaattataagagaccatggattaatcaaccttagaaag

SEQ ID NO: 480833 - DNA, 100 bp, Homo sapiens
ctatgacaagaccaaggtcaacaaggacaacaatgagatcgtggacaagatcatgggcaaaggacagatccaggcccatcttgacgattccaagaccacc

SEQ ID NO: 480834 - DNA, 99 bp, Homo sapiens
tcgcagcctcgggagctgcggccgccgcggcattcggggaatctgcagggcagagttcttcgtaagtacatcttaaagctgtcaagatggttctagcag

SEQ ID NO: 480835 - DNA, 75 bp, Homo sapiens
caagatcccgccgcggtggctgaactgtccccggcgcggccagccggtggcagcttacagttgaacatgagtctt

SEQ ID NO: 480836 - DNA, 75 bp, Homo sapiens
gtggagcggccgctgaccccgggtacaggtttgcagattccgccagcagcacagcaagctctacagatgagtggc

SEQ ID NO: 480837 - DNA, 101 bp, Homo sapiens
tacagaagagcttctcctcatcaactggggatgattacagttcttcctaaaaaaggtgctggagaatctggtaaaagcaccattgtgaagcagatgaggat

SEQ ID NO: 480838 - DNA, 74 bp, Homo sapiens
caatccagatggcagccagtcagtggtggagggggcagagtccccaaggccaagaagaaggcgccgctggccaa

SEQ ID NO: 480839 - DNA, 74 bp, Homo sapiens
ggccggaggagtctcagagctgtcagaaagatgatgatgtgcctgcagatatggttgcagaagaatcaggtcct

SEQ ID NO: 480840 - DNA, 75 bp, Homo sapiens
tgaagaacctgaaggacacactaggaacaagatcactcaaggtgaaggataatctactaataccagcactttgaa

SEQ ID NO: 480841 - DNA, 100 bp, Homo sapiens
cctgcatctgccaacaagactggaagcagggttcccagttttccagacctgaagtgttttccaatcaaagcgaagagacgatctgtggatgttgaatatg

SEQ ID NO: 480842 - DNA, 75 bp, Homo sapiens
gctccgggatgctgtactccttgtctttgcaaacaaacaggtcaaaatgcagatcttcgtgaaaacccttaccgg

SEQ ID NO: 480843 - DNA, 76 bp, Homo sapiens
tttgaaagtgtctaatattggctgatgtagagctatagacttggcagtgtcataacaaaacagccaatgattttgt

SEQ ID NO: 480844 - DNA, 99 bp, Homo sapiens
tagacctgaactcttcagataatcagagtggaggaagtacagccagcactccctgtgctgtcaggaatctacaggacttggctcgtatttacattcgac

SEQ ID NO: 480845 - DNA, 75 bp, Homo sapiens
ctggagcctcagttggaagcagccgatccagcctgcggagcctgtggggcagccaagaacctacacggaggagga

SEQ ID NO: 480846 - DNA, 87 bp, Homo sapiens
acgcgccgcggccgggcagggaggagaccggcacccagacaggtggcgacggcagaggacaacccagactactacggactcatctaa

SEQ ID NO: 480847 - DNA, 101 bp, Homo sapiens
tcagcatcaggggcaccccggcggctccctgggtgctggagaatctggtaaaagcaccattgtgaagcagatgaggatcctgcatgttaatgggtttaatg

SEQ ID NO: 480848 - DNA, 100 bp, Homo sapiens
gacggggccttccagagacgcggcgcgcccgccctgcagctgcccaagcagtatttctgggaaaagccagcttctgtttgcactggtcttcacaactcgt

SEQ ID NO: 480849 - DNA, 83 bp, Homo sapiens
aatagtctacaaaggaagacttgtaacctggagaagagctaaaagatggcggcaaggcagcccaggcaaatgtaagaataggc

SEQ ID NO: 480850 - DNA, 87 bp, Homo sapiens
actgcctttaaccctcagcctcagagtcagatgcagggaagggaaaaggccgaggcatcagcgtgtgaagaccgcaaagacgatccc

SEQ ID NO: 480851 - DNA, 83 bp, Homo sapiens
gaggctgcaccaagtggcgaaggagccggctccaagtttttcagaagaagtgaagtcaagatgaagaaccatttgcttttctg

SEQ ID NO: 480852 - DNA, 88 bp, Homo sapiens
gaccccgcgccggaccctgaggcagcgagttttgggctggaggatagttgcaagtattgtttggtcagtgctatttctacccatctgc

SEQ ID NO: 480853 - DNA, 50 bp, Homo sapiens
cctgctcacacttcagaatagagaagaattatatccagatcgagagacag

SEQ ID NO: 480854 - DNA, 100 bp, Homo sapiens
tcagcctgacactgtggccaacattcagcagcgtcagaaggtaaaagagaacctgctttcatgcaagatgctgctgcactgcaaacgggatgagcttcgg

SEQ ID NO: 480855 - DNA, 100 bp, Homo sapiens
agagtgttgtggaaaaaatgaaaaacatcagcaatcacctttctcacagaaagttctccgctcccagacatgggtccctcggcttcctgcctcggaagcg

SEQ ID NO: 480856 - DNA, 90 bp, Homo sapiens
ggaattgggaggtcggcggccccaaaaaccttcacggcatggtgcaactcccacctgcggaaggcaggcacacagatcgagaacattgat

SEQ ID NO: 480857 - DNA, 78 bp, Homo sapiens
gagcatcgcggagcttgacccgtccatcgctgtgcgggctgacgcacgaggcacacaggaaggaggtggagcaggtgt

SEQ ID NO: 480858 - DNA, 100 bp, Homo sapiens
cctcacagactataccaaccagctgctccaggcaatgcagcgcgtctatggagcccagcattaatcttatcactggtcatttagaggaaccaatgccaaa

SEQ ID NO: 480859 - DNA, 114 bp, Homo sapiens
gttggcccagcaaatgcaactagccaatgccatgatgcctggtgccccattacaacccgtgtatcccttttactattcagcgactatgtgaattgttaacagatccaaggagaa

SEQ ID NO: 480860 - DNA, 51 bp, Homo sapiens
cgacctcagatgctcccttctgctcctgattcagaatggacagtttagaag

SEQ ID NO: 480861 - DNA, 100 bp, Homo sapiens
gcgggagcggcggccgcgccatgtggctgctggggccgctgtgcctgctgctgagcagcgccgcgggctttcatgagaaggacaagaagccatattgccg

SEQ ID NO: 480862 - DNA, 100 bp, Homo sapiens
tgagccgggtgctgcggctctgcgcggtccccgccagcgccccatcctgagccgagttgctggagaatgtaaccctaatccataaaccagtgtcgttgca

SEQ ID NO: 480863 - DNA, 75 bp, Homo sapiens
caacaatcctcccatctcagcctctgaagtagctgggactacagtctcagcaggagaagattgacagcattgcag

SEQ ID NO: 480864 - DNA, 100 bp, Homo sapiens
ggaacacggctctgcacatctgcgccctctacaacaagatggcccactgcgtgaccttggttcagctgtccatttcctgtgaccatctcattgacaagga

SEQ ID NO: 480865 - DNA, 100 bp, Homo sapiens
tctgggggccacaaatgctccttctcctggagacgcaactcaagattcaggcttcttcaggagaaagcaagtacactggtaccttggactgtgcaaagaa

SEQ ID NO: 480866 - DNA, 74 bp, Homo sapiens
ccaaaataatggtagatggaaccaatttggaatctgatgttgaagaattggcagagggggtcgatttgggagga

SEQ ID NO: 480867 - DNA, 100 bp, Homo sapiens
gcgaggttcgggctggttgttccgttgcgagctgcagctgcgatctctgtggtaggcccagatgaatcatccagatcttctgataaaagtacttgggatt

SEQ ID NO: 480868 - DNA, 95 bp, Homo sapiens
aaagaatctgttcgtggccaagatattttcattatacagacaatacccagagttttgcggcctccaggtggtggatccaatttttcattaggttt

SEQ ID NO: 480869 - DNA, 100 bp, Homo sapiens
ggaagctgcgggccgtgggggccggaggagaagccggctccacgcgcagctgctagatcacccctgacctgctacctcggccgccccggttgcttctatt

SEQ ID NO: 480870 - DNA, 100 bp, Homo sapiens
cagagcgcggcggtcttcaagctctcagaggaggtatctgagagcagctcgagcgcagaccccctgcctaatagctacctccctgattcatcgtctgtgt

SEQ ID NO: 480871 - DNA, 75 bp, Homo sapiens
cgccagctgcacactcttggggctctacctctttttcaaagttttcctttggaatatggataaatacaccatgat

SEQ ID NO: 480872 - DNA, 100 bp, Homo sapiens
acgggtgaggtacaggctcagtctgcggccaagactccgtcctgcaagacttaattcagtgcacaaatgagatgaatgtgaacatcccacagttggcaga

SEQ ID NO: 480873 - DNA, 100 bp, Homo sapiens
cgaccccagagcggcgctggacaggtggctattatcatggaaaactaatttttcccagagaatttcctttcaaacctcccagtatctatatgatcactcc

SEQ ID NO: 480874 - DNA, 73 bp, Homo sapiens
cgagagcgcgaatatcgtcatcgttagaaggaatctgtcttggaggacatcagaaggtgaattttccaagttc

SEQ ID NO: 480875 - DNA, 74 bp, Homo sapiens
gaggctttcctgctggtggcaaccgcctacgagacactcaagcatccctggctggctcatggagaattccagta

SEQ ID NO: 480876 - DNA, 82 bp, Homo sapiens
agcacctacgtcccgctgccgtcgccgccgccaccatgcccaagagaaagatgctgtgggccctgagggaaaggatcacaga

SEQ ID NO: 480877 - DNA, 100 bp, Homo sapiens
ccagcgttcaagcctgcggcgtctcctctgacttctctcagacagtatcctcctcgaagcaggaaaacagctcaggcatgtttgctgcagaagagacagg

SEQ ID NO: 480878 - DNA, 74 bp, Homo sapiens
aggactttgacacgctggccaccgtggatctgactgcagccatgagcagcaatgagtgcttcaagtgtggacga

SEQ ID NO: 480879 - DNA, 83 bp, Homo sapiens
gcggaggctcaggcagcttgaggtgttgctctcttgccattcgtggatgagcgaaggctacgagctgccctagaagaggtata

SEQ ID NO: 480880 - DNA, 100 bp, Homo sapiens
agaagacaaaagcagctcttgccagttttgaataatttctgcatgaatagaccagtaagaggactctgaaaaggaatcttgcccaagcagtgatgaagtt

SEQ ID NO: 480881 - DNA, 109 bp, Homo sapiens
taattgaagaaaaggctaggatgatatatgaagattacatttctatactatcaccaaaagagggtcgtcatgtcaaaacgggccagcttgcagccatcaaggttatgga

SEQ ID NO: 480882 - DNA, 98 bp, Homo sapiens
gagaaagcgcagccaggcggctgctcggcgttctctcaggtgactgctcggagttctcccagtctgcggacggccagtcacccccattgcccagaatc

SEQ ID NO: 480883 - DNA, 75 bp, Homo sapiens
tcaatccagatggcagccagtcagtggtggaggttgtgatcaattattcaatcgtgaaagggctgaagtacaatc

SEQ ID NO: 480884 - DNA, 100 bp, Homo sapiens
atggcatgtgcttatgccccatcgggatgtgccattgcttgtggctttcaccaacaatcaccagtggtttacacaacattgcaaggagcattgaaactcg

SEQ ID NO: 480885 - DNA, 75 bp, Homo sapiens
ctgggaatgagcaagaatggaagatcaagctgcaagtgcttggctcagccgtgctgctcttcctggccatgccaa

SEQ ID NO: 480886 - DNA, 51 bp, Homo sapiens
gtccagaatccgcgcgcaccgcggtgtgagcgacgtctcctcaccacagtg

SEQ ID NO: 480887 - DNA, 75 bp, Homo sapiens
caaaactggcactgattcaaattcaacagaatcctctgaaacttccacaggtcactgggcaaaaatagcttctga

SEQ ID NO: 480888 - DNA, 83 bp, Homo sapiens
aggaggaggaagagggagaggacgaggaagagctgagtgggacaaaggcgacgttgtggacgtttaccagcgggagttcctgg

SEQ ID NO: 480889 - DNA, 88 bp, Homo sapiens
gcccgcccgaccccgtcccgaccctggccgccccgagcggagcctggaggaccaagaatcgccttcagccctgtctggtgcatccttg

SEQ ID NO: 480890 - DNA, 51 bp, Homo sapiens
gcaaaagccttccatgattacaggagttgaagccaaacagccaaattctgc

SEQ ID NO: 480891 - DNA, 75 bp, Homo sapiens
cgatggactattccctggctgcagccctcactcttcatggtcactgctctattatcaagtcctaaattttggaat

SEQ ID NO: 480892 - DNA, 97 bp, Homo sapiens
gctggaggagctgaaagctgagaatggtgtcatggagaaactccagctgggcccagagattctgcagcgggaaaatccaaggcttatttatgccagg

SEQ ID NO: 480893 - DNA, 75 bp, Homo sapiens
cctgtgaccacccctgaagaaattgcacagtataagccacccgcacttaaaaagtcaaattctcctggaactgca

SEQ ID NO: 480894 - DNA, 74 bp, Homo sapiens
ccgcacctcggggacattattgcgcgtggaacggctgcttttggaagatctcccttgagtttagaaatctggct

SEQ ID NO: 480895 - DNA, 75 bp, Homo sapiens
ccgggaggggggagcggcgttggaggccaccgtttccaggttgttgccatggagctgaggatgaggaggcacctt

SEQ ID NO: 480896 - DNA, 80 bp, Homo sapiens
gcaactctttgatgtactactataatgggaaagcgggaccatggctaaacctcctggatcattagccagaagcagcagcc

SEQ ID NO: 480897 - DNA, 100 bp, Homo sapiens
cagagctacagatcacaaatgtgatggaggcaaaccagcgggtatttggtgttggagttccaaatccatatcgattgaggccgttccttggggccagagt

SEQ ID NO: 480898 - DNA, 97 bp, Homo sapiens
cggctccggggccccgataacgggccgcccccacagcaccccgggctggcgtgaggttgaaacagttcctcaggctacagtgaagactggattacag

SEQ ID NO: 480899 - DNA, 78 bp, Homo sapiens
acccaggaagggagagtcttcttccaagtaattcgccaaaatgacgaacacaaagggaaagaggagaggcacccgata

SEQ ID NO: 480900 - DNA, 97 bp, Homo sapiens
catgaacttgaaaagatggacctggaagagtgtgttcaggtgccttatgcccgctcagaggcccacctcacagagctgctggaggagatatgtgacc

SEQ ID NO: 480901 - DNA, 101 bp, Homo sapiens
ggaaaccggtagcgcttgcagcatggaacatcgtgaagggcatgagagagctccgggaggtgctgcggactgtggagaccaaagcaactcagaacttcaaa

SEQ ID NO: 480902 - DNA, 80 bp, Homo sapiens
caggcggtgacagagtggagccatggctagaggccgactcgcgggccgctgcacccaccgccaaggacaaaaggagccca

SEQ ID NO: 480903 - DNA, 50 bp, Homo sapiens
cacccgagggtcggctctaccaagtagacggaatcagtccccaatgcctg

SEQ ID NO: 480904 - DNA, 98 bp, Homo sapiens
cggcaggaagcccatctctatatgcaagtgcaggacagcagcctgcctgtaggagtctttgtgtgggatgtggaaaatgaaggggacgaagctctaga

SEQ ID NO: 480905 - DNA, 100 bp, Homo sapiens
ttgttagaagtaataaggatggaactgattccccagctttccgttgcacaaacagtgaagtgacagtccagcccagcccctatttgagttaccggctacc

SEQ ID NO: 480906 - DNA, 100 bp, Homo sapiens
ccgccgccgccgccgccgcccctgttgcgatggcgcagaaaccccgttgacaaggcactgctttttcatgacgggcagcgggtggcatgagacgtgggaa

SEQ ID NO: 480907 - DNA, 95 bp, Homo sapiens
aacccaccaattctggacacattgggattaaagttttcggctttgtgagaaaccttaccatcaaacacgatggccagcaacgttaccaacaagac

SEQ ID NO: 480908 - DNA, 100 bp, Homo sapiens
attttggaagaggaaccacaagaaaatcaaaagaaacttttgcccttatcagtaacacctgaggtattatacctgaagaaccttagccctcgggtgactg

SEQ ID NO: 480909 - DNA, 75 bp, Homo sapiens
agcaagtggccatggggagcctcagcggtctgcgcctggcagcaggtacctagtagaactgggttgtatcaagcc

SEQ ID NO: 480910 - DNA, 83 bp, Homo sapiens
agcagcagattgaaaatcagcagcagatgttggttgccaagctgctggagccagttctgcttctcggcaaggagcgatttgct

SEQ ID NO: 480911 - DNA, 90 bp, Homo sapiens
gtgcagaagttgtctgagtgcgttggtcggcggcagtcgggccagacccaggactctgcgactttacacaaaaagtaaccttcctgaaga

SEQ ID NO: 480912 - DNA, 82 bp, Homo sapiens
gtatttcgaaggactctatccaacctattatatgcagttgtgaaaaacttcaggacaaaaatgtttcatttaaggacttgtg

SEQ ID NO: 480913 - DNA, 83 bp, Homo sapiens
ctacattggaacagggccgcctctcaaggcttgaagtagaaaatgccatgatgagaaaaactattaaaaaacaggatgaccaa

SEQ ID NO: 480914 - DNA, 90 bp, Homo sapiens
tctccctggaggaagtgttacggctcggaggcaccaagggattaaagcctgtggtttccacagaagcaccacctatcatatttgccacac

SEQ ID NO: 480915 - DNA, 126 bp, Homo sapiens
ccatgctgctgaaagagtaccggatctgcatgccgctcaccgtagacgaggcatcgtgcgagcctccagcgtcttccccatcctcagcaccatcctgctcctgctgggtggcctgtgcatcggtgc

SEQ ID NO: 480916 - DNA, 98 bp, Homo sapiens
tagccatggtcaaccccaccgtgttcttcgacattgccgtcgacggcgagcccttgggccgcgtctcctttgagtttcgccgtgaggaagatgcggaa

SEQ ID NO: 480917 - DNA, 100 bp, Homo sapiens
gagcacgcaggccacgtgcaggccacgtgcagcccacagctctggggcgaggcaggccctcaaccgaacacgtagttcggctttccagtttggcagcagc

SEQ ID NO: 480918 - DNA, 50 bp, Homo sapiens
caccgaggaagagcgggagaaaggcttttagaaattaactggacaggact

SEQ ID NO: 480919 - DNA, 97 bp, Homo sapiens
ctcagttggaagcagccgatccagcctgcggagcctgtggggcaggaagatgttaccgagtacttcagtgaattccttagtgcaggggaacggagtc

SEQ ID NO: 480920 - DNA, 100 bp, Homo sapiens
ccaaccgcaaccattgacgccatgtcgggttattcgagtgaccgagaccgcggccgggaccgaggggctggaccccaatggagaacaggtggtgtggcag

SEQ ID NO: 480921 - DNA, 100 bp, Homo sapiens
acctgacccaactgatacagccccaggagagggaagaactgcagattttcctccttcaaaattaaagtcaggttatggagaacatgtatgctatgttctt

SEQ ID NO: 480922 - DNA, 123 bp, Homo sapiens
tgctccgaagatgtggacttgccctgcaccgccccctgggatccgcaggttccctacacggtctcctgggtcaagttctggagaccagaaggccaaaatcaaaagtatgggcaggcttgattt

SEQ ID NO: 480923 - DNA, 100 bp, Homo sapiens
aaaaagcagaatgtgcagagtcttttctttgccaagcaaaacagtttccaccacagattgaggacgaggaggagaaggtctccaggtaccgagagctgct

SEQ ID NO: 480924 - DNA, 51 bp, Homo sapiens
aggtattctagaagaagaaattgaatcgacaaggagaacgttgaactctcc

SEQ ID NO: 480925 - DNA, 82 bp, Homo sapiens
ctgtaccgatttggtcacctgaagcctcttgtcccttcattgtcatctgcttttgagccaagctacatcagtgatgtgggac

SEQ ID NO: 480926 - DNA, 120 bp, Homo sapiens
gcggcggcggcggcggcggctgctgctgctgctgcccgcgtccgaggctcgcgggcggcgggcccgggaggagagacttcagcatgcaaaccttcatctgttcggcttgcaccgtcattt

SEQ ID NO: 480927 - DNA, 88 bp, Homo sapiens
ggagtacatctacatgcattttggggagtgttgaacttgaccctcatcgacctcccgggtatcaccaaggtgcctgtgggcgaccagc

SEQ ID NO: 480928 - DNA, 75 bp, Homo sapiens
ctggggccaagggacaatggtcaccgtctcttcagatgggggctccggaggtggcgcccaggctctgagctaccc

SEQ ID NO: 480929 - DNA, 75 bp, Homo sapiens
ccagaagcgggcggcgcgggggagatggttgtggcagcactgcctgaaggtatgagaccagattctaatctttat

SEQ ID NO: 480930 - DNA, 100 bp, Homo sapiens
tgggagatccatagggaggacggcggaacatctggaggctgggaaatgttacatgctatgggaaaacttcctggaaccagaatggcagcgttaaaagcca

SEQ ID NO: 480931 - DNA, 50 bp, Homo sapiens
taactgatcctgtgttgagagagatttctgctcatggcagatcttcttcc

SEQ ID NO: 480932 - DNA, 83 bp, Homo sapiens
caagaatctgcaggacttggtccgcggcatccgtaaccacaaggaggacgagaaaaatggctacaaacttcctagcacatgag

SEQ ID NO: 480933 - DNA, 82 bp, Homo sapiens
ctcgtggcctggtctccattatttgagatgagttacatcttggagtggttgcaaatgatggattttatgtaatactgaaagg

SEQ ID NO: 480934 - DNA, 100 bp, Homo sapiens
ttctaagcagagcccgtcaggagcccacgggacacattttggagttcctggccattttctatccaagatgtggtacaacctcttaccctgcaagttcaga

SEQ ID NO: 480935 - DNA, 74 bp, Homo sapiens
cacatctgatatggcagaggaaactgaggatgcctggccggcctatgagctgtccacgctgacagggacacagg

SEQ ID NO: 480936 - DNA, 99 bp, Homo sapiens
ctggaaggagaactaaatgggagaagaggaatgttccctgacaatttcgttaagatacttggcatatcgaaattttatgattgacacgtatcgtctaaa

SEQ ID NO: 480937 - DNA, 82 bp, Homo sapiens
cggcgttctggatctcaaagcggacactgcccatctctaagataagaacctggaaaggggactctgttggccattggaaatt

SEQ ID NO: 480938 - DNA, 90 bp, Homo sapiens
gagggcggcggcagcgggtcctacgaggagggctgtcagagcctcatggagtacgttgactatattgtggagtatgactatgatgctgta

SEQ ID NO: 480939 - DNA, 82 bp, Homo sapiens
ctgtgtcctgttccgcttctccgaggacgccttcaactccacttttatctccaccataggtcccgcaggctcccgatggcga

SEQ ID NO: 480940 - DNA, 97 bp, Homo sapiens
gacagctcgccctgttcgctctggatgttttactgtgcctggctaactatagtcgagggggtgatggtcctatgtgtcgcccagtaattctgttgcc

SEQ ID NO: 480941 - DNA, 98 bp, Homo sapiens
ttaccgactaatatccagaggagaataatttggaagactgttgtgggagatacaactcgtcaacgaatcaaattcagtgatgacagagtatgcaagag

SEQ ID NO: 480942 - DNA, 101 bp, Homo sapiens
ggaacacagcagagggtgtgtaataaaatacagatatccttggaacagaagatcttattgtggaagtgacttccaatgatgctgtgagattttatccctgg

SEQ ID NO: 480943 - DNA, 100 bp, Homo sapiens
attatgacaaaactaaatccttctttgataatatttcttgtgatgacaatagggcctctgaaaaatggaaccaaattctctgaggactaaagtcccagct

SEQ ID NO: 480944 - DNA, 51 bp, Homo sapiens
cttgggggttttgatcctgtcactgtggggatggagaagtttatgtttggg

SEQ ID NO: 480945 - DNA, 96 bp, Homo sapiens
cgatcccgccagccactcgcccctggcctcgcgggccgtgtctccggcatcatgtgtggtcctaggcctacttacaagcctccagtctcaaattat

SEQ ID NO: 480946 - DNA, 75 bp, Homo sapiens
aaggactctaattatccacagaccaggaatccagatcttacataagatggaagtctctcacactagatactgaac

SEQ ID NO: 480947 - DNA, 100 bp, Homo sapiens
acaagatcccgccgcggtggctgaactgtccccggcgcggccagccggtggcagtgttcaagaaggaagtgtatcttcatacatcaccacacctgaaagc

SEQ ID NO: 480948 - DNA, 100 bp, Homo sapiens
tatgatcaatgaagtggatgctgatgatgtggacgagtgctcactagcagaaaaaacctgtgtgaggaaaaacgaaaactgctacaatactccagggagc

SEQ ID NO: 480949 - DNA, 74 bp, Homo sapiens
aaattgagaaccaggtagatccccaccacctacagtaaaaaggccctcgggaccaaggatcacgtcatgactcc

SEQ ID NO: 480950 - DNA, 97 bp, Homo sapiens
acatatttttggacctgaaacagaaattctggaacacctatatggctgaagccgacgtagcttctctgaacagacgcatccagctggttgaggaaga

SEQ ID NO: 480951 - DNA, 100 bp, Homo sapiens
ggtgtgtccggaggtttgcaggggtgcagtgtgtctggtcttatgagggcaccatgccggtggaaaggatgcgcatgcgcccgtggctggaggagcagat

SEQ ID NO: 480952 - DNA, 100 bp, Homo sapiens
aggaagtccactagcagcttctaagggaccgtataatagacgctggccccaaaggaaactactctcgatttatgaatcacagctgccagcccaactgtga

SEQ ID NO: 480953 - DNA, 100 bp, Homo sapiens
cgggagcagagcgaaccgcaccggcccgagcggagcgccgcacgttcccaaccgcgaggccaggacgagcctgtggagtgggagacacctgacctttctc

SEQ ID NO: 480954 - DNA, 90 bp, Homo sapiens
gttaaacctactcaaactattgagggattgagctctctttgctctgatgagccatcttcagaaattatgacttcttcctttctttcatct

SEQ ID NO: 480955 - DNA, 98 bp, Homo sapiens
tcatggatactgattcagcacttagtgaagttcctcaattgaagcaagagatttctgaatggaatgattcagctctctcaaagaaacaccaaagaaag

SEQ ID NO: 480956 - DNA, 100 bp, Homo sapiens
tgaaaagaaaattgaagttgtaatggccgaacccttgtcccttcagtctgaatatgttcattactaaggccttgccactccagtgaaagctgttcttctc

SEQ ID NO: 480957 - DNA, 100 bp, Homo sapiens
gcggcggccagagagcagcagccgcctgtattctgacaagtccctgtacacccagctgtgcttttaccggtacatttttgatgcggagtgtgcactggag

SEQ ID NO: 480958 - DNA, 75 bp, Homo sapiens
gacgtgatgcggatgaactacgagctgttggcatccttgggtaacagctgtggactggcactttgaggaggctgt

SEQ ID NO: 480959 - DNA, 50 bp, Homo sapiens
cgggagtattatgaaaagatcggcattttgtcagtgatgctgatctttgc

SEQ ID NO: 480960 - DNA, 101 bp, Homo sapiens
cctcggtctctccctgaagcccaccggtccccaacgcatcatgccagggagccaagcgtcctgcccggcctggagtacgacaaggagttctcccctcgtca

SEQ ID NO: 480961 - DNA, 75 bp, Homo sapiens
gctgcaaacagtgctgcccagcaatatcagagaatgaggtgctggcggaggagtccatagtatgtctgcagaaag

SEQ ID NO: 480962 - DNA, 122 bp, Homo sapiens
aaaatttaaatgtgtctctaagtgatgagatgaatgaagacttcagatctggttgatgaccagtgtcccagtgaaggaacgagtgaaggtgtctcagaactggagactggggcgctgccgag

SEQ ID NO: 480963 - DNA, 100 bp, Homo sapiens
gggcatattgacgcaatcagaaaatcaagtaaaggaacccaacagagatctcttctgttctccactgctagcactggccccctcaccttttcctttccag

SEQ ID NO: 480964 - DNA, 100 bp, Homo sapiens
cctgggattttgttgaagccacacaaagaacaaattgcagttgtttgagaatctacctgttactcgtattttggacaatcttatggagatgaagtcaaac

SEQ ID NO: 480965 - DNA, 74 bp, Homo sapiens
ccccctcttgaaagaagcaaacttcttagcatttcatatgcagctcagcaaaacccagcagctcagattcctgc

SEQ ID NO: 480966 - DNA, 73 bp, Homo sapiens
gtggagtgacggtcacaccgcggcgattctggctgtgactcagtcactgacactgagcctgaggacgagaagg

SEQ ID NO: 480967 - DNA, 83 bp, Homo sapiens
tgccgttattacatcagatgggagaatgattgtggaaattgcaagacctaacatggctgaaagagaaacagaaacatcaaatt

SEQ ID NO: 480968 - DNA, 122 bp, Homo sapiens
cggacgccgctgaggagcgcgcgggcaccctgcagcgcgagctggaccacgagaggaagctgagggagaccgaataggaggccttcaagattttgtgctgaaatctgcaacactgtgtagcc

SEQ ID NO: 480969 - DNA, 75 bp, Homo sapiens
cagagacgtgtctgatctaaaggttgcaaaagcttctcatttcagagagatgccaggatcctaagtgcctgccaa

SEQ ID NO: 480970 - DNA, 78 bp, Homo sapiens
gaagatggacgaggtcctgtacagcatcgccgagaagggtaaaccagacttgaatacaacattgccaattagacaaac

SEQ ID NO: 480971 - DNA, 83 bp, Homo sapiens
ccgcgcagccccgcacggcccgggcccacgtctcctgaaggaaaaggagcgcaaggcggccctgcctgcagccacaacccctg

SEQ ID NO: 480972 - DNA, 75 bp, Homo sapiens
ggacaactattttcgtcatctttggaacaaaggtacattttatattggaggaaaaggttcactgaacagcccatc

SEQ ID NO: 480973 - DNA, 100 bp, Homo sapiens
ggacctcgggtgcgggtccccgccccaccggcccccggcgccgtccagcccggagggacctgacttaattcagtgcacaaatgagatgaatgtgaacatc

SEQ ID NO: 480974 - DNA, 100 bp, Homo sapiens
aacaaaaagatcctgtggtacagtcataccctaatgatcccagcaagataatgtcctgtcttctaagatgtgcatcaagcctggtacatactgaaaaccc

SEQ ID NO: 480975 - DNA, 82 bp, Homo sapiens
agcacgaggatcgtgggagctaagaactcatctctggtatcacgaattcttcaggaggcttggacagagggccggcggtttc

SEQ ID NO: 480976 - DNA, 90 bp, Homo sapiens
cccaccaacaacaccacaataatccacagccaagctggaaaggcagctcatcatgcagagtgaaatgagggaaagacaaatggccatgca

SEQ ID NO: 480977 - DNA, 97 bp, Homo sapiens
atccattaaaaggagagctgggaggagggccatgaagcccccaggaggagaatcgagcaatctttttggaagtccagaagaagctactccttccagc

SEQ ID NO: 480978 - DNA, 87 bp, Homo sapiens
cggctataataatagcaaacatcgatggcctactggggataacattcatgcagaacatcaggtatctcgggggagctttgtgccttg

SEQ ID NO: 480979 - DNA, 90 bp, Homo sapiens
cgcggtgcagcgaatcaagcgggagttcaaggaggtgctgaagagcgaggagtaaatctgatatgtctcgcttgcgattagctgctggta

SEQ ID NO: 480980 - DNA, 95 bp, Homo sapiens
gaggtcccaatcccccactctttccgccctaatggaggtctccagtttcggtcagcccaaggccaaccccactgtcactctgttcccgccctcct

SEQ ID NO: 480981 - DNA, 101 bp, Homo sapiens
ggctggagtaaaagggacattgggaagattagttggaatttttgagtgtgtaaatatgttgctgtggagctgaagtcagcctttgaggaaaccggcaagac

SEQ ID NO: 480982 - DNA, 75 bp, Homo sapiens
tcaaaaggtgatctggacaaaggaacaggtatctcagatttggaatggagagaaatggaaggagatgattgcgag

SEQ ID NO: 480983 - DNA, 83 bp, Homo sapiens
cggggacggcgaggccctcatgtaccacacggtcagcagcaaggacaagatggagtaaaagtccagcaagctactatagctcc

SEQ ID NO: 480984 - DNA, 98 bp, Homo sapiens
aactacagatactttgaagtagaagaagctgatggtaacctgtgtatggtgactggaggtgctaacctaggaagaattggtgtgatcaccaacagaga

SEQ ID NO: 480985 - DNA, 83 bp, Homo sapiens
cgctgcgccgcaacgccgagcgcaccgacatctgcctgctcaaagggaaatcgtggaacacatggtccagcactttaaaacac

SEQ ID NO: 480986 - DNA, 83 bp, Homo sapiens
aacggacacctgcaactcttcgggtgccatggatgtagctttgggatcaggtgccactggggtctttaccaattcatcctggc

SEQ ID NO: 480987 - DNA, 100 bp, Homo sapiens
caaggtcccccaggtggaataggaaaccctggtgcagtgggagagaaggtgctcacagttctgtgcaatgttgcagaaaagggtcctgcttactgccagc

SEQ ID NO: 480988 - DNA, 101 bp, Homo sapiens
tgctgtgggtgctgggacttcccgtccgcggcgtggaggcttttgcgagaattgaagcaccctaatgtgattgcattgcagaaggtgttcctttctcacag

SEQ ID NO: 480989 - DNA, 50 bp, Homo sapiens
aagtatgacagcgaccgcacagtttaccgacaagactgtgaaactttcgg

SEQ ID NO: 480990 - DNA, 97 bp, Homo sapiens
ttacagataagcggttccagcctgtccacgacctcacaatagcaccatcactcctgtagtgggtaagaagagaaaacgtaatacctcatctgataat

SEQ ID NO: 480991 - DNA, 98 bp, Homo sapiens
tttgaactactgccggagcttctgccaggaccgagtctcctgccattccgagcaggcctggtatgggtaatggtgtgaaggaaggcccggtgcgattg

SEQ ID NO: 480992 - DNA, 74 bp, Homo sapiens
gttcaaggaggccttccagctgtttgaccgaacaggtatggacctgtctgccaatcaggacgaggagaccgacc

SEQ ID NO: 480993 - DNA, 102 bp, Homo sapiens
cgccgcccgaggccgtcggccgccgtcagcgagggcgccgagcaacttcgaactgatcacctgtctggagcaaggaaaaaaacctctgaccgtgaagagaca

SEQ ID NO: 480994 - DNA, 100 bp, Homo sapiens
gttgacgtgtccttcgtgaaaggggacagtgtccgcgcttgtgcttccctggtggtgctcagcttccctgagctcgagagacgggctctcactatgttgc

SEQ ID NO: 480995 - DNA, 82 bp, Homo sapiens
gacaagaaactagagcaaataaccgttttgaaatttgagttggactatggatcaggtactgtgctcagcatcagaaaatggg

SEQ ID NO: 480996 - DNA, 100 bp, Homo sapiens
gcaatatcccacacccttccaactgcagtgccacattgagagtacacacactccccatgagttttctaggttatatcctgtgttgtgacctcatggttta

SEQ ID NO: 480997 - DNA, 95 bp, Homo sapiens
aaacttgctgctatggcatctataagacttcagggattacataaacctgtgtaccatgcactgaacagccccagtaagggccttggaccttgcgg

SEQ ID NO: 480998 - DNA, 49 bp, Homo sapiens
tcgccctctccagccaggtacctctcaacgggacccaggtggagtctgt

SEQ ID NO: 480999 - DNA, 90 bp, Homo sapiens
gggagatccacagctaagacaccgggacctcctggaagccaaaaatgatggagtctcattctgtcgctcaagctgaagggcagtgccgtg

SEQ ID NO: 481000 - DNA, 100 bp, Homo sapiens
tcaggcctgcctagacggtgctgggagcgcgtctccttgaacgttgtcccgcctgggattgcgagggaacacaacagatttgagaagcctcggattaagg

SEQ ID NO: 481001 - DNA, 76 bp, Homo sapiens
aacaaaattcgatttgcaaatcattcagtgaatcccaactgttatgccaaaggaataaaattgaagggtgtttttc

SEQ ID NO: 481002 - DNA, 74 bp, Homo sapiens
ctgactgagctgctggctaagatcaccaacacagacgtgcaattaccagctctggctgggtcgccacaacttgt

SEQ ID NO: 481003 - DNA, 100 bp, Homo sapiens
ggcgcggcccggggtgtcagtgtggaggagactgagcctcctgacaaggtgatccgggcgggccccgcaggaattttatcccctcaccggcctcacacta

SEQ ID NO: 481004 - DNA, 100 bp, Homo sapiens
gagacgataatcctgtctgtcgactgccagctgtccccaatctcttcatgctggaaacagtggattctgtgaagttggcagacaaagtgaacagttcctg

SEQ ID NO: 481005 - DNA, 100 bp, Homo sapiens
gcgtcggcggccacggcagcgcccacggccactcccgccgcgcaggagtcgggcaccatcccaaagaagcgatgccttcaattaagttgcagagttctga

SEQ ID NO: 481006 - DNA, 75 bp, Homo sapiens
ctcggcggagctggtgatcggctggtgcatattcggcctcttactactgaaaaatatgtcgtaactgcaagtgtg

SEQ ID NO: 481007 - DNA, 100 bp, Homo sapiens
tgccaaagctgctgccttgctagcaaaacaggcagaaatggaagtcaagagggaatcttatgcaagagaaagaaggtggacgagatcagcaacagaatga

SEQ ID NO: 481008 - DNA, 100 bp, Homo sapiens
ttgaatcttacaaaagaaagtctggctgatgatttgaaaattgaaactgccagaggcatgcagcattggtgatggaaagccctttgtcatgaatctgcag

SEQ ID NO: 481009 - DNA, 83 bp, Homo sapiens
tggccaagcacgccgtgtccgagggcaccaaggcggtcaccaagtacaccagctcgaatactgtaagattgatgttaaaggca

SEQ ID NO: 481010 - DNA, 100 bp, Homo sapiens
tctaactagaagggatacccttccatttcaaagaacagaatgctaaggaagctgtggcaagtgtcatggagaaactccagctgggcccagagattctgca

SEQ ID NO: 481011 - DNA, 82 bp, Homo sapiens
agcaaacaaaaagtatgatggattacagcaacagttgtcttcagtagaaaggagaggacatgtactcccaggattccataga

SEQ ID NO: 481012 - DNA, 97 bp, Homo sapiens
gcagttccgccagcgctcgcccctgggtggggatgtgctgcacgcccacctggacatctggaagtcaggcctccaagactgcagagaatgccaccag

SEQ ID NO: 481013 - DNA, 100 bp, Homo sapiens
ttcaactatggcagcagcgtggcctccgccaccgtgcacatccgaatgggttacttgaatttccactagaggagcagaaatgccaccaatgccaagtgcc

SEQ ID NO: 481014 - DNA, 100 bp, Homo sapiens
gcggacgaaagcaggtgactctctagtcaacttccgacttggactccgaagatcggaacaatggcgctgtcttcagtggcacagtggagcagctctgaag

SEQ ID NO: 481015 - DNA, 100 bp, Homo sapiens
tactacgcgtacgtggtggagctctgcgtgtgcaaacatgctgaagacatatttggtgagttgtttaatgaggctaacaacttctacatcagagcaaatt

SEQ ID NO: 481016 - DNA, 50 bp, Homo sapiens
gatgagccagtatggaccacaagatcagtgtactgttacccggacatacc

SEQ ID NO: 481017 - DNA, 90 bp, Homo sapiens
cgtctgctggacagcggctccgtggagaacgtgctgcaagtcggagagattaaacagattctagaaaatgaacttcagatacctgtgtcc

SEQ ID NO: 481018 - DNA, 100 bp, Homo sapiens
cacgcaccacgacggcgccatcaccgagcgcttgatgtgcgcggagagcaatcgccgggacagctgcaagcaaactcagtcgtggctttggagatcactt

SEQ ID NO: 481019 - DNA, 75 bp, Homo sapiens
aaaggacagaggctgttccctatggcagatctatccaataaaggagagaaaggaccgcatacgcctggttctcat

SEQ ID NO: 481020 - DNA, 83 bp, Homo sapiens
tggatattattgtaacagatttgccatttggaaaaagtgacaaagcataaatcatggacaccagagaataaggtggacctcag

SEQ ID NO: 481021 - DNA, 83 bp, Homo sapiens
tggaacttcgttgcttgcttgcctgtgcgcgcgtgcgcggacatggcctcaaacggactgggcacttggagtcctgcatgcca

SEQ ID NO: 481022 - DNA, 71 bp, Homo sapiens
caaaagtgtggcaagatggaattctgaagatcactcacttaggaaacaaactatcagttgagggatttgca

SEQ ID NO: 481023 - DNA, 100 bp, Homo sapiens
gcactggtggcatccagtggtggccagtagaggaggaggtgaacaaggaggaggtagatcatgccactaatcgtacccagtttggggagaaaattcacaa

SEQ ID NO: 481024 - DNA, 87 bp, Homo sapiens
gggactccctgtgccttgcttggagctgacgccgacgggtcagcttttgccaactgttttcaaatcacatgcatgggggatcttaca

SEQ ID NO: 481025 - DNA, 83 bp, Homo sapiens
aagtgcgtctcaccacagtcttaaacagtggcttccttgatgaggaggctgaagatgagaagtcagtcctgatggcagctgtg

SEQ ID NO: 481026 - DNA, 83 bp, Homo sapiens
tgcgcatgcgtggctctccggcaccggtccgtactccagcgaggcttgtccagccggaagccctgagggcagctgttcccact

SEQ ID NO: 481027 - DNA, 82 bp, Homo sapiens
agagagggaagagattcagccagcacactcctcgcgagcaaggagccttcacgtaaatgggtccagtcatgcctcccagtaa

SEQ ID NO: 481028 - DNA, 90 bp, Homo sapiens
aaggaactgggatttcaacctgaaagtggaggctgcgaaaataggtaccagcaactaaggtttcagagctgaaccctaatgcagaagtgt

SEQ ID NO: 481029 - DNA, 82 bp, Homo sapiens
gggttattcgagtgaccgagaccgcggccgggaccgaggggaagatcagttttcctgccatccaggctgctccctccttcag

SEQ ID NO: 481030 - DNA, 100 bp, Homo sapiens
gatatctcaaaaggtgatctggacaaaggaacaggtatctcagaaccaacgaaacgtatgctttccttccaagggttagctgagttggcacatcgagaat

SEQ ID NO: 481031 - DNA, 73 bp, Homo sapiens
atgacatatttttggacctgaaacagaaattctggaacacctatatgaaaacctatactctccaagatggccc

SEQ ID NO: 481032 - DNA, 83 bp, Homo sapiens
ccgccgcaggccgggacgcggtcgtcttcgtgtggcttctgcttagcacctggtgcacagcagcctcccgcgacgatgcccct

SEQ ID NO: 481033 - DNA, 75 bp, Homo sapiens
atcaagatggccatgtggcagggcccattgctagaagactgggacataatcagccccaaagatgtcattggctcc

SEQ ID NO: 481034 - DNA, 100 bp, Homo sapiens
gggcagaagaagagcagaaaatagcagccaggaaccaagaaaacttgttgtgattccaaagaatccctatcctgcctccgatgtgaatactgagaagccc

SEQ ID NO: 481035 - DNA, 98 bp, Homo sapiens
ttttcttaaatggcccacatcaggacagctgttccttggccatcccaaagctattctgggggcaacagagaaacattgctgaggctcttgtcagcaaa

SEQ ID NO: 481036 - DNA, 98 bp, Homo sapiens
ggactggatgcacacaggccggcgcccctcgggcctctgcggagcaggttgtgcagcctgactctgaagaagctggtggtcttcaaggagctggagaa

SEQ ID NO: 481037 - DNA, 75 bp, Homo sapiens
ggggctttggacgccggtggagacgcaggcgagggagatcttgtgcgaaaactcaaagaagataaagcaccccaa

SEQ ID NO: 481038 - DNA, 100 bp, Homo sapiens
acgaggtgtcggcgcgggagcagcacttccacagccaagtgcgggagtccacgacaagttggatggcttgaggactggtactaaaaggaaacgtgactgg

SEQ ID NO: 481039 - DNA, 100 bp, Homo sapiens
gcaagtgccatctcaaacaaagaggcaagcagtggctctggcgacactaacaggtgaagatctcgggagaccatgactaagaaaagaattgctgtgattg

SEQ ID NO: 481040 - DNA, 75 bp, Homo sapiens
accgggcgcgggcagagcgcggcggcgcgggagttcgcagcacttactaaagaactcaatgtatgcagggaacag

SEQ ID NO: 481041 - DNA, 75 bp, Homo sapiens
gcggtggtgcccgacttcgaccccgggctgtgtggtctttgaggatgtgtttgtatacttctctcgggaagaatg

SEQ ID NO: 481042 - DNA, 100 bp, Homo sapiens
cacccgtgcccaggagcttgacgccttagataacagccatcctattgaaatacagcatcatgcaggcctgctgggccttggagcccacccacagacccac

SEQ ID NO: 481043 - DNA, 80 bp, Homo sapiens
aagaggaaagaaaaggagtcaggaatgcctcttagcaaaagtactttgactcaggagactacaacatggccaaagccaag

SEQ ID NO: 481044 - DNA, 75 bp, Homo sapiens
cccggagcctttgactggtttctggagcaattctgtggtgttcttggtcacacatttatggagtttctgaagggc

SEQ ID NO: 481045 - DNA, 95 bp, Homo sapiens
aggcgttgctgcgggtggcctggcttcattccagcgctccaatagtcatgacaaagtaaggagaatagttgcagaggagggtcgtacagcaagaa

SEQ ID NO: 481046 - DNA, 75 bp, Homo sapiens
cgccaaccccttcgagcaagacgtggaccccctggttgtggaatacgaggcattgctggtacaactacccctatc

SEQ ID NO: 481047 - DNA, 50 bp, Homo sapiens
caaaattgataagtgtgcttaaggatttctctctgatcaaacggacagtt

SEQ ID NO: 481048 - DNA, 88 bp, Homo sapiens
gtgaatcttccattgtgattggcactattatcaaaagtcaaaatatgactcaagtgtgagtggtcaatcatcttttgtgacatcccca

SEQ ID NO: 481049 - DNA, 75 bp, Homo sapiens
gataagggcgacagcaacagctctgccggctggaaggcactgggaaatcatgaatttgataatggtgtggaagga

SEQ ID NO: 481050 - DNA, 100 bp, Homo sapiens
caaggcgtgaggcgccgcccgggtgtccccgcggcgcaggaggcggtggagcgcagagcgggcgagcgcgttaccttatcccatatcacacaactggtcc

SEQ ID NO: 481051 - DNA, 89 bp, Homo sapiens
ctaactagaagggatacccttccatttcaaagaacagaatgctaaggaagctgtggcaaggcaaacttgaagataaatcttttgactcc

SEQ ID NO: 481052 - DNA, 89 bp, Homo sapiens
cctgtgactggcagcggaaaaggcgaccaccgcttgtgtaacctgagccagcagaagagtacactgagcaaagtgaagttgaatcaaca

SEQ ID NO: 481053 - DNA, 75 bp, Homo sapiens
ctcatcttcatggaaacgtctgctaagactgcttccaatgtagaagagacaaaacttacctggggtccctactta

SEQ ID NO: 481054 - DNA, 74 bp, Homo sapiens
gatggatgtgatgcctgctagccaaaaggaatgaagactattctcagcaatcagactgtcgacattccagaaaa

SEQ ID NO: 481055 - DNA, 96 bp, Homo sapiens
gactacacatggcctacagacacttctggatgttggttctctttgtcattttcaacagtctgcagctagagaccgttggatggcagcttaaccttc

SEQ ID NO: 481056 - DNA, 89 bp, Homo sapiens
aagtgggagcccagttggaagcccgggaccgtttaaaaaactggaacctacaagcagcaattggcgcctattatgactttgagagccca

SEQ ID NO: 481057 - DNA, 82 bp, Homo sapiens
cccagaccctggagcctcagttggaagcagccgatccagcctgcggagcctgtggggcaggaacagactttgacccagaaca

SEQ ID NO: 481058 - DNA, 75 bp, Homo sapiens
cgaagtggagagtgacatgcagttggatggcggtgactgcgtggacagccagtagaggtgacttcatgttttctg

SEQ ID NO: 481059 - DNA, 100 bp, Homo sapiens
gttctcagctacttgggactcctctctcaagagaagctgcaagagcaacatctttcctcaccccaagtaatctatgccagcaattatgacaatgttagca

SEQ ID NO: 481060 - DNA, 74 bp, Homo sapiens
gggcttccccggaatggagggctccgggcccaagtttgaggagcaaagccttctagacaagctcagtggaatct

SEQ ID NO: 481061 - DNA, 75 bp, Homo sapiens
ttttcttcaatgggcagcatatgaaagtggattatggaagtaaaaatgatcctcctgatcatcccatcctttcgt

SEQ ID NO: 481062 - DNA, 100 bp, Homo sapiens
gaaagttttccttccatctctgctgctctctcatttgctggccatcggattgggacctacaacggccagagcgagaacaacgaagactatgagatccccc

SEQ ID NO: 481063 - DNA, 100 bp, Homo sapiens
ccagcaaatccacccgtcttaccagctcctcagaaggcggacaccgaccctgagaacttacctgagatttcgtcacaggcccgcgatgctcccagcccgg

SEQ ID NO: 481064 - DNA, 83 bp, Homo sapiens
cccacagaccctggaagaaagcccctctcacacagggtggttgagtttgcctcttatggtgacttaaagaatgctattgaaaa

SEQ ID NO: 481065 - DNA, 90 bp, Homo sapiens
gcatattttgctgaaaagctctataaatcgatgaagagacgagttgtactgctgtcacaggaaatggacgctggattacaagcatggcag

SEQ ID NO: 481066 - DNA, 90 bp, Homo sapiens
cgaaggagaggccctagaacctttctacagcagtataatcactacaaatccaatgtggagattttcaaattgcaaccaaataaacccagc

SEQ ID NO: 481067 - DNA, 100 bp, Homo sapiens
ccaagcatgtcctcactggctcagctgacaacagctgtcgtctctgggactgtgaaacaggcaagttaggaaatcaacattgaatcccaatgcaaaggag

SEQ ID NO: 481068 - DNA, 75 bp, Homo sapiens
actatgcaaaacaagtttatcagcaattccatcgcctccatcccagatgaagcatttaatggattaccaaatttg

SEQ ID NO: 481069 - DNA, 83 bp, Homo sapiens
agtagggaggagaaacagaagcttgggttcatcatgcctagtggcgtataagaagaccccgccaccggtccctccacgcacca

SEQ ID NO: 481070 - DNA, 100 bp, Homo sapiens
aaggagatcatagcagagtacgatactcaggtcaaagagagtgataatgaactctcaagtggaacaggtgatgtgtctaaggattgtcctgagaagatcc

SEQ ID NO: 481071 - DNA, 50 bp, Homo sapiens
atgtgcggcgtccgctgtataagcttgtagaccctggagttaaggcatgg

SEQ ID NO: 481072 - DNA, 100 bp, Homo sapiens
aaagaaggaggagtgggggaggcgaacagtctcgttgctgcctctgtgtacgctgaggggggaggcagaatccagagaccacatttgaagtatatgttga

SEQ ID NO: 481073 - DNA, 100 bp, Homo sapiens
atttgctacagcatcccacattaagtcaacgtgcatgcaagatatgggaaatactaaagcaagactactctatgaagccaatcttccagagaactttcga

SEQ ID NO: 481074 - DNA, 51 bp, Homo sapiens
gtcggacctgcacgagctgtctgtggacagaggactgcagaaaatcaacct

SEQ ID NO: 481075 - DNA, 96 bp, Homo sapiens
gtgacctacactagtcgcgggagccacgcagaggacgccggaacaccctggaagccgagaaatgagtcatgtgctgttcctggggcttggatgatg

SEQ ID NO: 481076 - DNA, 83 bp, Homo sapiens
tgcagttccagaaattcttatgccggtctagatccaagcaaccaggcaatgatgagcaagttatcctccatgatgttgaaagg

SEQ ID NO: 481077 - DNA, 83 bp, Homo sapiens
gaaaaagctgcagatgagagtgagaggactctccttcagcaactccagaagcttcagactttggtgatgggcaaggtttctcg

SEQ ID NO: 481078 - DNA, 82 bp, Homo sapiens
agggggccacacgccccccctccttcacgccacacacacaagtccattggaatattaagcccaggagttgctttggggatgg

SEQ ID NO: 481079 - DNA, 100 bp, Homo sapiens
ggagcagtccatcagcctcctccttaacttcctgcttgcagcgtttgatccgatgagtctgctccagctgacaaacagtgtaaaccagaggcgacccagg

SEQ ID NO: 481080 - DNA, 100 bp, Homo sapiens
atgggagcatgggttaccagcgacgcaccctggctaagacagtgcctgtccctgaaaagtggaccactcctcaagagataaaacaaaagatccaactcct

SEQ ID NO: 481081 - DNA, 82 bp, Homo sapiens
ctagtctttccgcttcttgaatttctctctgtaaaggaggatgcctaaatcaaaggaacttgtttcttcaagctcttctggc

SEQ ID NO: 481082 - DNA, 75 bp, Homo sapiens
ttagaaaaggacggctccttatttcactccacccatcagaagacctggtgccctatgacacggatctataccaac

SEQ ID NO: 481083 - DNA, 90 bp, Homo sapiens
cttttatcgggatggtgtttcagaggggcagtttaggcaggtatccatgtttctaaaggacaaagttcagaataataacggtcgctttgt

SEQ ID NO: 481084 - DNA, 109 bp, Homo sapiens
atctgcagaaggtggacggctgggagcaggacttgtcagtacccgagtttccggaagacctgcctagagctggaacgttacctccagagcgagccctgctatgtttcag

SEQ ID NO: 481085 - DNA, 100 bp, Homo sapiens
gagctggaggctcacagcacactcaggaggatggctgccttttaccagtgcatcaggcctgaccccagcatcaacaaagagagcattgtggatgtagaag

SEQ ID NO: 481086 - DNA, 100 bp, Homo sapiens
gttccatgagaagtgacatcctcctcgaatcaaaaggaaatgcttccagactgcacacttttacttagaggacagtacatcccctagagttatatccaca

SEQ ID NO: 481087 - DNA, 87 bp, Homo sapiens
caggtcaagagcctctgcgagaaggttatatgtcaccacacccatctccattaggagccccagagcacgtctccagccctatgtctg

SEQ ID NO: 481088 - DNA, 100 bp, Homo sapiens
ctacattgacaatgtgggcaacctgcacttcctgtattcagaactatttggactgagcaacaaatttgaatctgaattcccttcttcattaactggaaaa

SEQ ID NO: 481089 - DNA, 100 bp, Homo sapiens
tgctttgccctgggaaatagtaaccctgccaaatacatcagcttgtaggagacagaggatgccggaccagatctctgtctcggagttcatcgccgagacc

SEQ ID NO: 481090 - DNA, 100 bp, Homo sapiens
gcagtcttctgaagaattgtggctcagttttcttggaaactacttattctgctcagcaatcctcagatgtggtggttaaatgattccaatcctgaaaccg

SEQ ID NO: 481091 - DNA, 98 bp, Homo sapiens
tcatgtgccacctgttcaccggggagtccctcgccacctgcaagagcctgcagcagtcgcttctccgcagagtccgatgggtggtccttttattcctg

SEQ ID NO: 481092 - DNA, 97 bp, Homo sapiens
acaatcccctcgccggggcaccgtcatgtatgtagctcacctgttctccaggaccagccctgctggggcccaggcccaggctctgagaggccgtgtc

SEQ ID NO: 481093 - DNA, 96 bp, Homo sapiens
gcggctggccgggcccaggtcccttcctccgaaggtgctcgggtcttcggggcactgggtcccatcggtccctcctcacctgggctcaccctcggg

SEQ ID NO: 481094 - DNA, 75 bp, Homo sapiens
tggggaaaatctccccggtgactttcaggtgaccaagaatatggcccaggtgaccaaagccctggacaaggccct

SEQ ID NO: 481095 - DNA, 110 bp, Homo sapiens
ggcggatgccctgcagtacctgcagaaggtctctggagacatcttcagcagcagtcctgcgttaactgcggccgggaggctatgagcgagtgcaccggctgccacaaggt

SEQ ID NO: 481096 - DNA, 75 bp, Homo sapiens
atatcgtatcagatggcagacatacatcatttaaaggctcagcaaagacccaaatatcgtcatagccaagatgga

SEQ ID NO: 481097 - DNA, 75 bp, Homo sapiens
tacgcgcacgttggaaccgaagagagctctgttgttgcaggaaaagcttcactctgaccatcactgtcttcacaa

SEQ ID NO: 481098 - DNA, 75 bp, Homo sapiens
cggcgctggagagggggcgctgagctgttgggatcctgaggaggatgaaggggctggccctggaggccgagagtg

SEQ ID NO: 481099 - DNA, 83 bp, Homo sapiens
caacaccacaataatccacagccaaggagtcagaaataccatcagaggaggggtactgtgactttaatagtaggccaaatgag

SEQ ID NO: 481100 - DNA, 82 bp, Homo sapiens
tggatggcatggggcgctttggcaggtgtggacactgccagcggctgcagccgacttggaatgacctgggagacaaatacaa

SEQ ID NO: 481101 - DNA, 75 bp, Homo sapiens
gccagaagcgggcggcgcgggggagatggaatactcccccagttgcaagaggcgcaggaccgtggaagacttcaa

SEQ ID NO: 481102 - DNA, 75 bp, Homo sapiens
cgtgcccatggcaaaggagggaaatctagaacttttaaagggtgtccgcaatgttgccagtgtctgtctgcagat

SEQ ID NO: 481103 - DNA, 83 bp, Homo sapiens
caagagggtgttcgactgctagagccgagcgaagccttgccttgcgccatggactggcagccagacgagcagggcctgcagca

SEQ ID NO: 481104 - DNA, 49 bp, Homo sapiens
agtcactcataagcgcgctcaagagaagcaatgcctgtgtgcccaggcc

SEQ ID NO: 481105 - DNA, 48 bp, Homo sapiens
cctgcgatactattatgacaaggaagacaactgttagttttgtggctt

SEQ ID NO: 481106 - DNA, 100 bp, Homo sapiens
cttccacttcgtgttcttcctagcttccctgtatgtgatgatgaccgtcaccaactggttcaaatgtgccgtttgggggtgctaaagctggtgttaagat

SEQ ID NO: 481107 - DNA, 100 bp, Homo sapiens
tacaattctaaaaccatgacctgttgcaaagagccgtctcactcttctctctgaacgacccggccctgagcccggacatcccgcctgcacacagtcctgt

SEQ ID NO: 481108 - DNA, 90 bp, Homo sapiens
gggggcccagctcccgtagggagccgtgggcgctcggtgcccgggccgggcaggatcaagattataggaccggcccaagtgaggagaaac

SEQ ID NO: 481109 - DNA, 82 bp, Homo sapiens
cgaggagcggctacgccagtcccgcgtactgagccagaaggaaaatggctttgtaaagaagtttgaacctaaatctggctgg

SEQ ID NO: 481110 - DNA, 89 bp, Homo sapiens
ctataaatgcggtggcatcgacaaaagaaccattgaaaaatttgagaaggaggctgctgagatctgcaagattgtaagacagcctgtgc

SEQ ID NO: 481111 - DNA, 87 bp, Homo sapiens
aatggaaggggcctccagggtctgcagacaaggcagggaaagcgtctctagcagctgatatccccagacttggatatagttcctcat

SEQ ID NO: 481112 - DNA, 90 bp, Homo sapiens
gcttggttaacttgggagaaagtttcatctgtggatggagtattgtgtcagagatggctttggattccccgttctgtgtgctgctgtctg

SEQ ID NO: 481113 - DNA, 100 bp, Homo sapiens
attgagatggcttcaaaggataaatccagcaaaaagaatgtatttgagcaaggatggaacattactgtggacctggtcattggccctaaagggatccgcc

SEQ ID NO: 481114 - DNA, 98 bp, Homo sapiens
tcaggctcagatcagtggccgaggccccagagggagtgcctgcagggcaccatccgcaacagccaggaggcggaggtctcctgccccttcattgacaa

SEQ ID NO: 481115 - DNA, 75 bp, Homo sapiens
tggcggcgccgctcatccccctctcccagcagctcctggggagtttgcttcacctacggcacctggtttggcctg

SEQ ID NO: 481116 - DNA, 83 bp, Homo sapiens
gtcgcgtcgttgtcctccgcgagcgtccggattgcagtttgcctgagaatacagatcaacccacagaacaaagcggatttcca

SEQ ID NO: 481117 - DNA, 75 bp, Homo sapiens
gctggccttcatcctcttcgtctgctttgctggacagcttctggaaagtggacacttaagttatgcctgtccgaa

SEQ ID NO: 481118 - DNA, 82 bp, Homo sapiens
tagacattcccaagaatggcaagttaaacatacagtcgcctctgacaagccaggttattcagcttctcaaggctggaaaagc

SEQ ID NO: 481119 - DNA, 75 bp, Homo sapiens
ggggacagctgcagagcgcgcttctgatcctggggcactggctcaggcgatcagggaagccagagagcagcaccc

SEQ ID NO: 481120 - DNA, 107 bp, Homo sapiens
ggaggcagcgcgggatcccagcctcaggcgtgcgcggacggtgtgcggaaccccagctcaaagggattgtgacaaggttattcagccagcagggatacttcctgcag

SEQ ID NO: 481121 - DNA, 100 bp, Homo sapiens
gcctgcctcagcctccaaagtagctgagactacagagtgtgaacatggctacgcctcttcattcccgtccatgccgagcccccgactgcagcattcaaag

SEQ ID NO: 481122 - DNA, 82 bp, Homo sapiens
cgggccctcattcagcagatgtccccctctgcctttgggttctagtggcagcagtggcaggaacccccaagccagcctgttt

SEQ ID NO: 481123 - DNA, 98 bp, Homo sapiens
tggagcagtgagaaagcaaaggctgctctgaagcgcacgacctccgactactttctccttcaaggttgaaatcacaaagattagacacctttttagat

SEQ ID NO: 481124 - DNA, 83 bp, Homo sapiens
ctggatgaagccaccagcgctttggatgccgagagcgagtatctggccctgggaggagcggggacactgaggacctctctcca

SEQ ID NO: 481125 - DNA, 97 bp, Homo sapiens
gacaaaagaggctatgtcagaaatgctaagacatcctaggatatcgggaaagcctatattggtatggcccactgcgtgaccttggttcagctgtcca

SEQ ID NO: 481126 - DNA, 106 bp, Homo sapiens
aactgaagaagcttgggctcacttccacaaatgtgtgatgaatgcagactctgctaccattttggctgtttggatcctcctttgaaaaagtctcctaaacagacag

SEQ ID NO: 481127 - DNA, 100 bp, Homo sapiens
acgactttccaagtttgaagttggagatgctgaaaatgttgcttcatatgaccatctccagattcatttttaatccagacctcaggtccccatcagtcag

SEQ ID NO: 481128 - DNA, 85 bp, Homo sapiens
aaagggagccttgctccttagttctatagagctggaggagctgaaagctgagaatgaactgaaggcagaagctagtctaatggac

SEQ ID NO: 481129 - DNA, 92 bp, Homo sapiens
cctcctgagtggctgggactacagctcatcatccatggtagctttgccctgatccagctgccccgtttccacatcttcttcctggtcccagc

SEQ ID NO: 481130 - DNA, 101 bp, Homo sapiens
gtgcggccctggattcaggggccttccagagattcagaatggacagtttagaagaacctcagaaaaaagtctttaaggctcgaaaaacgatgagagtgagt

SEQ ID NO: 481131 - DNA, 100 bp, Homo sapiens
gaagcatcaaacctggttcgaatgagaaaccagtcccttggacagtctgcaccttctcttactgctggcctggaggcttttaggcgtttgggtaatgggg

SEQ ID NO: 481132 - DNA, 90 bp, Homo sapiens
gctgtttgtattttggctgctgcaggagccattttaggtatttcagtgtctgtagacaagatggaatcatctccatttaatagacggcaa

SEQ ID NO: 481133 - DNA, 98 bp, Homo sapiens
tggaggagtactactttgaacagcatagagccaatcacattttgcacaagggcagtcaccatgaaagttcatttgatgaatacagttcagaacttaaa

SEQ ID NO: 481134 - DNA, 83 bp, Homo sapiens
taggcttgctggcccgcggggctgtccaggcacgcgaggcccctcaggaagataaattcaccagactgggaattcaagtacag

SEQ ID NO: 481135 - DNA, 98 bp, Homo sapiens
gcctgtgtcctcattgctccaaactgtgttgtttcagctgtattaggcatatattttgtgaagagtgcatgaccttatggtttaacagagagaaaaca

SEQ ID NO: 481136 - DNA, 90 bp, Homo sapiens
gttgattaaccacgacgtggtggagcccctctacatcgagggtggcatcccgttcatcttgactggtgagttcttccagcaatctcagcg

SEQ ID NO: 481137 - DNA, 83 bp, Homo sapiens
gaccggagcagagagctggcgagcaaggatcagtttgacaacttagaaaaacacacacagtggggaattgatattcttgagaa

SEQ ID NO: 481138 - DNA, 100 bp, Homo sapiens
gagctaattacaactttcggggcatgtacaatcagagatctcttccctgaagaacaggctgaaaaaggtctccacaaccactggggatggtgtggccaga

SEQ ID NO: 481139 - DNA, 51 bp, Homo sapiens
tgcggctgtgaagccctagtcgtgtgaaatatgagttggcgaggaagatcg

SEQ ID NO: 481140 - DNA, 97 bp, Homo sapiens
gtcactatggagctctcacatgtggaagctgcaaggtcttcttcaaaagagccgctgaagcttcctggaaagaatcgacagcgtcagcttggttgac

SEQ ID NO: 481141 - DNA, 83 bp, Homo sapiens
gaatcaagcaccttcattctgctggaattattcatcggatctttgatgatgcgtacaaatcccagctcagttgtgtggttgtg

SEQ ID NO: 481142 - DNA, 88 bp, Homo sapiens
tattggtaaatattcagaatgtggtcgcagaatgtcaaaactggaccaatggggccaggctgaagtattgaactttctgctacgctac

SEQ ID NO: 481143 - DNA, 95 bp, Homo sapiens
ccggacgcccaaggctacgagaggacgattgcattgtcgacaacagtagcaactgggcagtgtgtgggaaaagctgcggtgtcatctccatgcca

SEQ ID NO: 481144 - DNA, 134 bp, Homo sapiens
gggataacctggaaaaggagacagagggcctgaggcaggagatgagcaaggatctggaggagggggaatcctagcaggacacagccttggatcaggacagagacttgggggccatcctgcccctccaacccgac

SEQ ID NO: 481145 - DNA, 50 bp, Homo sapiens
agcggaggagcccgaccgacccgatagcctgggctggaagctcttctacg

SEQ ID NO: 481146 - DNA, 75 bp, Homo sapiens
tgaatctctgcccgcaacacatatcagacggagtctcagtggcgtgatcctggttcactgcaacctctgggcccc

SEQ ID NO: 481147 - DNA, 50 bp, Homo sapiens
caggcaacgtcaaagagctagcatgctctctgtgtgggtatgtgtgtagc

SEQ ID NO: 481148 - DNA, 100 bp, Homo sapiens
ccttgtttgcacggagcagcaaacgcagagacaaaagaaacgggccccgactggatattttgctcgagtccatggtgtcagtcagcttataaaggcattt

SEQ ID NO: 481149 - DNA, 100 bp, Homo sapiens
ggagagctgcaagccggtgcagcagccttcagcttttggcagcatgaaagttagcagggccaccttatcttagttccagaatttagtcttcctttggaat

SEQ ID NO: 481150 - DNA, 100 bp, Homo sapiens
caaccgccagatcaacctggagctctacgcctcctacgtttacctgtccatgggtgttgaaagcagcaggggcctagaagacattaaaccgataccacag

SEQ ID NO: 481151 - DNA, 74 bp, Homo sapiens
cccagatggcaggaaccggcccagccatgtctggccaaatgaccctgtgactaacatctgtcaggcagctgaca

SEQ ID NO: 481152 - DNA, 83 bp, Homo sapiens
ctgcaacatccgggcacctccaaagcagatggtctgactgtgagagcctgatccgccgcatgctggtggtggaccccgccagg

SEQ ID NO: 481153 - DNA, 96 bp, Homo sapiens
aagaaggccatcagtagatgccagtccctcaaccttgaactttccagacgcagaactaagcagcaaacccctctgcatgtagctgctgatcgtgga

SEQ ID NO: 481154 - DNA, 90 bp, Homo sapiens
tggatttaccagttaccataccagaagtttcttcagtccctgatcagatcagaggaggtacaggtgaacaaaggcagagtaaactgtcac

SEQ ID NO: 481155 - DNA, 74 bp, Homo sapiens
aaggaagccacgtgcagacatctacaaccttcgatctcctgacgagcaaaagtcaacaactctagcttaattgg

SEQ ID NO: 481156 - DNA, 75 bp, Homo sapiens
gttctccaaataccagctcgacaaagatggggttgtcctctttaagaagtggtaagcatccgtggcattcaagac

SEQ ID NO: 481157 - DNA, 75 bp, Homo sapiens
ttgtctatcttcttccttaggaaaccagactttccgtgacatttctgaagatctgaaatcttcagtaggttgatg

SEQ ID NO: 481158 - DNA, 110 bp, Homo sapiens
ctacaatacctactaccatagccctcctcacctgccaccatattctgcttatgactttcagaaaaatagtagtctagtcattcaagtgaaaggtccaagaaaggaagaaa

SEQ ID NO: 481159 - DNA, 75 bp, Homo sapiens
tccaagtttgaagttggagatgctgaaaatgttgcttcatatgactcctacagaagaagggaaaaaagagctgct

SEQ ID NO: 481160 - DNA, 88 bp, Homo sapiens
gcagcaagaacagagagagaggtggacagatctgagagatactgaggaaatgaaacacgatttccaaaatgaacttaatctttcatga

SEQ ID NO: 481161 - DNA, 101 bp, Homo sapiens
tgtaattgctgaacttaaaaagcagtctaaacctgtgaccacccctgaagaaattgcacagattgcattcatggcttctctggcaacccacttcagcaatc

SEQ ID NO: 481162 - DNA, 90 bp, Homo sapiens
atctttcttgaagacttgaattagattacagcgatggggacacagaagaaaaagcttgtggtgaaggggggcaaaaaaaagaagcaagtt

SEQ ID NO: 481163 - DNA, 82 bp, Homo sapiens
gtcgagaggaaactgttgtgcctcttcatattggcgatcctgttgtattcacaatgacatcctttcaagaagtcccattgca

SEQ ID NO: 481164 - DNA, 100 bp, Homo sapiens
tgacattcaaccgtacccgccaagctgtcatcacaaaagagttgattgaaattatctctggtgctgcagctctgtatatgactgatgggatgttacttcg

SEQ ID NO: 481165 - DNA, 50 bp, Homo sapiens
cacaacctcaaacccgttctccgtttgaatacatggcccagcacctggtg

SEQ ID NO: 481166 - DNA, 101 bp, Homo sapiens
ggagtctctatactcactcgtatgaggtaccaggacacattcagctaacgtattttagcaggtggagtgaggttgaagattcctgtgacagcgatgccata

SEQ ID NO: 481167 - DNA, 100 bp, Homo sapiens
tgcagaccaggttctgaatcccatgctgggcagcagatggtgagctatatgtgtttggagaacctgagaatgggaagttaggtcttcccaatcagctcct

SEQ ID NO: 481168 - DNA, 100 bp, Homo sapiens
acgcaggacagaaatgaccaacagataactgaggacaatggacctgcctgggcatagacttccttaagaatgaagagcttcgaaacttgtctttgtctgg

SEQ ID NO: 481169 - DNA, 83 bp, Homo sapiens
ggccggcagctggcgctggggatccctgctcttcgctctcttcctggctgcgtccctagtaattatgccaccctcggccctgg

SEQ ID NO: 481170 - DNA, 83 bp, Homo sapiens
agcacacccccgacggcgtgaagtggctggacacacaggacactcatgaggaccatgatacttccactgagaatacagacgag

SEQ ID NO: 481171 - DNA, 98 bp, Homo sapiens
gatgttggaaaactattgccacctcatctctgtgggctgcccaggctttgctgaggttctgcagaccttcagcacctgcaaggggatgctgggtgaga

SEQ ID NO: 481172 - DNA, 95 bp, Homo sapiens
gatggggtgtaccccaacatgagtgagcctgtcaccccagccaacatcaacctctatgccgaggccctggccactgcagtcatcccccagtggca

SEQ ID NO: 481173 - DNA, 83 bp, Homo sapiens
tcagctcaggaccaggcaccttctgtggaaggtcagcccaaggccaaccccactgtcactctgttcccgccctcctctgagga

SEQ ID NO: 481174 - DNA, 100 bp, Homo sapiens
tggattactggtcaaaaggtcaactaaaagcattgtttctagaacatgaggttaatttggagtggcccctggagtcagtttcctacaccatccgaggccc

SEQ ID NO: 481175 - DNA, 100 bp, Homo sapiens
ccagggccctgtggcatgaggaagctgggggcatcttctccccaggtcttcaggcaccatggaggacaaacgcaacatccagatcatcgagtgggaacac

SEQ ID NO: 481176 - DNA, 100 bp, Homo sapiens
cacagggcaaggcggcggacggctgcgtcgcccgaggcgaggaggagcgctggcgcatctactgccgaggatgttccaagccgctgtgctgctcgtgcgc

SEQ ID NO: 481177 - DNA, 75 bp, Homo sapiens
cctgtgcctggcgttgggcggtttcccgaggagcttgggccgccgcaggacacaactcagatgggaagttcatcg

SEQ ID NO: 481178 - DNA, 74 bp, Homo sapiens
tctcatctctccatccttagctaagcctggattcaaggtgccagcttaggaataaccagcgatggattttttca

SEQ ID NO: 481179 - DNA, 100 bp, Homo sapiens
gaggagtgcggcgcggcggccccgggaccaaggagtcgtccctcatggaccttgctgacgtcttcacggccccagctcctgccccgaccacagacccctg

SEQ ID NO: 481180 - DNA, 100 bp, Homo sapiens
cgcagggtcgcgatgctgcccggtttggcactgctcctgctggccgcctggacggctcgggcgctggaggatctaacttggcaagatgagcactctgccc

SEQ ID NO: 481181 - DNA, 75 bp, Homo sapiens
acgctgcctttgctttaaaacagtattacttgcggagatcatgaatcagacagataaaaatcaacaagaaatccc

SEQ ID NO: 481182 - DNA, 101 bp, Homo sapiens
aagaaaggcagcgaggtggagagcgatgtatatgccatgaagccactgtcaccatcaacatgcagaacacttccatcgcccccaaaagattcctcaagttc

SEQ ID NO: 481183 - DNA, 75 bp, Homo sapiens
ctcagccctaacggtggtggagaacccaaagggccaagaccagcttcaagtctccatggtaccagaaaacaacaa

SEQ ID NO: 481184 - DNA, 101 bp, Homo sapiens
tccccagaaatgaacctgcccacggtgtccgcgctcagggccacatccacgtcctccgagcctacatcaagacccaagtgaacaaagagctggagcagctc

SEQ ID NO: 481185 - DNA, 100 bp, Homo sapiens
aatgccacagaagaaatgctgcagcaggtacgctacgggccatgacatcacagagcactctgtgctgatccacgagtactacagccgagaggcccccaac

SEQ ID NO: 481186 - DNA, 100 bp, Homo sapiens
ggctggccacgggaagcgatgataactgcgcggcattctttgagggacccccattcaagttcaagttcacaattggcaaataaggatctggcatgtcaac

SEQ ID NO: 481187 - DNA, 90 bp, Homo sapiens
catttgtgttgatgaagatgaaagagactgcagaattgcaaccttgccaatggacctgatcggttttggttatgcagccctcgtgacatt

SEQ ID NO: 481188 - DNA, 101 bp, Homo sapiens
aaagaatatgagaaatcggattttacgacatggttacgactcactgattaaaaagagggactttttcaaatactttgcacttttgattgtgtattatggat

SEQ ID NO: 481189 - DNA, 80 bp, Homo sapiens
tgcagtacctgcagaaggtctctggagacatcttcagcaggagggtgaggacaaaatcttcttaatcaacaagcttcact

SEQ ID NO: 481190 - DNA, 74 bp, Homo sapiens
agcggtttactcaacagccatgaagctgcagtaaaggaagatgaagaagaagtttcagataagggcagtgattc

SEQ ID NO: 481191 - DNA, 51 bp, Homo sapiens
tggactcatggaggctgagcatttattcagtatgacctgtcagcctctaca

SEQ ID NO: 481192 - DNA, 73 bp, Homo sapiens
gtggtttttatcaccacacgactgggtatatttcctctctgggagcttctgataattggaggtgttgcagccc

SEQ ID NO: 481193 - DNA, 100 bp, Homo sapiens
ctattttctccagtttaacaaggccctgaagcgccagagctcgttgggcctttccttctttaacagcatcttggcccatggggacctacgcaacaacaag

SEQ ID NO: 481194 - DNA, 100 bp, Homo sapiens
agcagaattatacctagaagtctactaatggacagttagtcacccacctacatgttgaggcttcagggatgacttcttagggggcaggggaggtagtcgc

SEQ ID NO: 481195 - DNA, 124 bp, Homo sapiens
cggggtccgggccggagtacgtcgttcccgctgcgctaggggaagcgggcagaacccttaggagaaatcttgagagtggacagcaattgtgaagatcgccagagagttctgtgtttcatcaccg

SEQ ID NO: 481196 - DNA, 75 bp, Homo sapiens
tttaccatctttgtggctgtgcttgccaggcctggctccagggcaagattcttgccaagagaattaatgtgcgta

SEQ ID NO: 481197 - DNA, 82 bp, Homo sapiens
tgtcgctcctggtcggcgcgtggctcaagctagccgcggcgagtcctttgcacatgttggcaacacacgcatccgcatcggc

SEQ ID NO: 481198 - DNA, 75 bp, Homo sapiens
gttgaagacctagtagaagaggtgtgggaagaggagaggaactttggtgcatcccttttgcttccaggcctaaaa

SEQ ID NO: 481199 - DNA, 100 bp, Homo sapiens
tgccgtgcacacctggccaaacacgatgagcttatttccaaggaacttcaaggagtgtccagcagtttctggctatgtgtgacaggggtgaaacttccca

SEQ ID NO: 481200 - DNA, 75 bp, Homo sapiens
tttaaccctcagcctcagagtcagatgcaggatttccgtgagggtggaagaaaatcataccatatcagatgcctc

SEQ ID NO: 481201 - DNA, 75 bp, Homo sapiens
tggcagccccccacctggggacccccgaatctttcagagacgagttgtactgctgtcacaggaaatggacgctgg

SEQ ID NO: 481202 - DNA, 75 bp, Homo sapiens
caactggacagcggagcacgatgattgataggagcttgaagaaatccgcaaatgtgggatgaaaaacttccgtaa

SEQ ID NO: 481203 - DNA, 51 bp, Homo sapiens
gaggaattcctcaagacaccattccagctgcatatctatgtgagactgaat

SEQ ID NO: 481204 - DNA, 104 bp, Homo sapiens
gcaagtgagagccggacgggcactgggcgactctgtgcctcgctgagggtgaaagaaaatggcccgaaccaagcagactgctcgtaagtccaccggtgggaaag

SEQ ID NO: 481205 - DNA, 100 bp, Homo sapiens
gtggcggagcccggggcccggagccggcgcccccggcgcggatatcaatgagtgtttgagtatcagtgccccgtgccctatcgggcatacatgcatcaac

SEQ ID NO: 481206 - DNA, 82 bp, Homo sapiens
tggagaggcagagcctgtcggaagaggtggaccggctgcggacccaggtgccaagtcctgccctgccaacttcttggcagct

SEQ ID NO: 481207 - DNA, 75 bp, Homo sapiens
ggaaagaggttcacaagcaggtggttgagaggtcgtcatacctcagaagaaaggcaagaaggctgctgcaacctc

SEQ ID NO: 481208 - DNA, 71 bp, Homo sapiens
gttgcttcctctgaacttacttcgtgttcccagtgaagcggcggaaccggcacagcctagtggggcctcag

SEQ ID NO: 481209 - DNA, 74 bp, Homo sapiens
ttaagaatgagggtgccgaaccagatctaatcagatttctccagaggacattgtgttcatgacaatctatcacc

SEQ ID NO: 481210 - DNA, 100 bp, Homo sapiens
ggaggccacccagatggaccagtttgggcaggcagcaggggtcctcattcacagctactccaaggactacgacccggaagactggctgcaagtggacgca

SEQ ID NO: 481211 - DNA, 100 bp, Homo sapiens
gcgcctgtaccatgatattgcccagcaaggttacgtcgctggatttgtagacttggaggtgagcaacagaccagacctctatgatgtgtttgtgaatctg

SEQ ID NO: 481212 - DNA, 88 bp, Homo sapiens
gagtccctccggaactcacactccagaacagcgatttcttgcgggagctcgtgatcaccatcgccagggagggccttgaggacaaata

SEQ ID NO: 481213 - DNA, 83 bp, Homo sapiens
cgatatacatcagtagtaaccttggtgaaacctcatttagtaaaggatttctataattggcctgatgaatcctttgatgaaat

SEQ ID NO: 481214 - DNA, 51 bp, Homo sapiens
ctgtctcagcttcagtgttcagaatttaaatgtgcctgattcatctctccc

SEQ ID NO: 481215 - DNA, 50 bp, Homo sapiens
tttcaaggcttaatcgaagagatggaagattttcagtcaatgacttatgg

SEQ ID NO: 481216 - DNA, 80 bp, Homo sapiens
actcaccatggagaggacagaaggatgataaggatgccttctatgtggcagacctgggagacattctaaagaaacatctg

SEQ ID NO: 481217 - DNA, 100 bp, Homo sapiens
ccttagtgctggataatggagcttacaacgccaaaatcggttacagccatgaaaatgtgtcattctatggaggtgaaacctatcatgaccagaaagttgc

SEQ ID NO: 481218 - DNA, 100 bp, Homo sapiens
atgaatgggaagttatcagaagagagaacagaagatacagactgcgatggttcacctttacctgagtattttactgagatttccaactgataccatacag

SEQ ID NO: 481219 - DNA, 96 bp, Homo sapiens
ctgactttcagctatggaatcgaccttcacggcatggtgcaactcccacctgcggaaggcaggcacacagatcgagaacattgatgaggacttccg

SEQ ID NO: 481220 - DNA, 100 bp, Homo sapiens
aaacagcttatagctgctacaatttctagtcagatttcaggttcagtgacatcagaaaatgtgtccagagattacaaggaaccaaatggcgagacaccat

SEQ ID NO: 481221 - DNA, 100 bp, Homo sapiens
gtttctccattctgttggttttatgcatctttatccaatcaagtgcccttggacaaagcctgaaaccaggctgaccaactgactgaagagcagattgcag

SEQ ID NO: 481222 - DNA, 82 bp, Homo sapiens
gacgagctgaccctgggagacatcgacgaatggagatgtatgcatttcgattcttcatccgcctgtagatgacccacagagt

SEQ ID NO: 481223 - DNA, 82 bp, Homo sapiens
tcccactgcaaaaaggcctggcctgggagcctcgatctgaaagccaagcatcacgcaaggaagagggcctgcctgaagagga

SEQ ID NO: 481224 - DNA, 90 bp, Homo sapiens
actgaattcaccattaaggaaatttccctggacctcaagaaaactagagaggggcacagccgaacccttcccgaggctccacaacttgta

SEQ ID NO: 481225 - DNA, 75 bp, Homo sapiens
tggagattttgatgtggatgatgccaaagttttattaggttgatgacaacaagaaactaggagaatgggtaggcc

SEQ ID NO: 481226 - DNA, 75 bp, Homo sapiens
acaagaccacggaaaatacccaggcacttatatcatctttgccagatgtttcctgaatctgcaagtgacgctatc

SEQ ID NO: 481227 - DNA, 100 bp, Homo sapiens
agttgagaatttatcctcaagagtcagctggcagctgagtccacctcaggacgaggccagtgcctgaaacgcatccgctaccatggcagaggtcgctttg

SEQ ID NO: 481228 - DNA, 75 bp, Homo sapiens
gggagtatttgtagacacctaccccaatgaggagaagcagcaagaggcaacatcagatgctgacctgaaagaaca

SEQ ID NO: 481229 - DNA, 75 bp, Homo sapiens
tctggggtacacgacgcacctccacccccctacaccagaattttgtagccaccttggctaatgggatgagcctcc

SEQ ID NO: 481230 - DNA, 75 bp, Homo sapiens
ccagttgcttgatcaggtggaacagattcagaaggagcaggattaccaaagggtgggcttggtgcttgcatttcc

SEQ ID NO: 481231 - DNA, 100 bp, Homo sapiens
agagtcatgtgacggaagaggaggaggaggaagaggaagaagaatcagattcctaaaggagggggaaagccaggctgaattaaacaaccaccatgtcgag

SEQ ID NO: 481232 - DNA, 100 bp, Homo sapiens
gcacggccagcttgggacccaggaccctaacggtactgacgttttggaataatgggactctacaaaggccttgaagccaaactgctgcagacagtcctca

SEQ ID NO: 481233 - DNA, 80 bp, Homo sapiens
ctccgttgggtccggccgctctgcgggactctgaggaaaagctcgcaccagaataccgtagcagtaggcaggacagttcc

SEQ ID NO: 481234 - DNA, 100 bp, Homo sapiens
ggcgtctccagcctcggtaccatggccgggatcatcaagaaacaaatcttgaagcacctctccagccaagggaagagatggtgttgagtggaaaatacaa

SEQ ID NO: 481235 - DNA, 75 bp, Homo sapiens
ccgcggccggagaagggctgcgggttagggggccggcgcccgcggttcagactctgttgacgttcagggatgtgg

SEQ ID NO: 481236 - DNA, 90 bp, Homo sapiens
ccaacacctatcactcagtcggtgctatgatataatacctgaaactttactggctgaactgtatcgggcctcagggaagtttgagctgct

SEQ ID NO: 481237 - DNA, 90 bp, Homo sapiens
cctccttcttcaggagagcgccccagggcaagccccgctccggccaacaagaagctcttcgtgggcggtcttgactggagcacgacccaa

SEQ ID NO: 481238 - DNA, 83 bp, Homo sapiens
gggggatcactgtcctctctcggcagcagggcggcgactggcggcgcgatggacctgaccgggctcctgctggacgaagaagg

SEQ ID NO: 481239 - DNA, 75 bp, Homo sapiens
agagtcaaagaagaaaccgtgctcagaaactagccagattgaagcagagcatcctggccagaacaagccaaggag

SEQ ID NO: 481240 - DNA, 82 bp, Homo sapiens
ggaagagccctgaggacctgccactgcgtctgaagacagacagtctagcagtgcttccttggagaccctgttagcacttctt

SEQ ID NO: 481241 - DNA, 83 bp, Homo sapiens
ggctagccggcgacttgagtgacgaatcaggatcctcatgaccagccaaagagaagaagaattaggaagcataaatcaaagaa

SEQ ID NO: 481242 - DNA, 100 bp, Homo sapiens
agaagacgaagatgacagcatcccatctgaagtcaccatagataacattaagcttcccaattctgaaggtggaaaaggtggctttttctcaagtatattt

SEQ ID NO: 481243 - DNA, 125 bp, Homo sapiens
cggaaaggaaacaaaattcgatttgcaaatcattcagtgaatcccaactgttatgccaaagcccaagaagatgaaaggattgttcttgttgacaacaaatgtaagtgtgcccggattacttccag

SEQ ID NO: 481244 - DNA, 83 bp, Homo sapiens
aacatccaggctgtactgctccccaagaagactgagagtcaccacaaggccaaggggggtgaatctctacattaagaacttgg

SEQ ID NO: 481245 - DNA, 75 bp, Homo sapiens
ggcggatcggctcacgcagcttcaggacgctgtgaattcggtgaaaattgagctaccaacacaactccatgagaa

SEQ ID NO: 481246 - DNA, 100 bp, Homo sapiens
gcatggtgtaccagctttggctagatgatgctcagacgtcgtgtcatgccagggcccacggtcacttgacggaacccttgtgatgctggccacaacctca

SEQ ID NO: 481247 - DNA, 100 bp, Homo sapiens
cgctactcaggaggaaattacagagacaattatgacaactgaaatgagacatgcacataatatagtcctcgcagtccgcctgagagagtagagaagaccc

SEQ ID NO: 481248 - DNA, 100 bp, Homo sapiens
cggcacccctgggggatcgggggcggcggtggcgccggcggcgggacagattgaaaaggaagatcaggccaaccccaaagaagaagtgaccaaggaggag

SEQ ID NO: 481249 - DNA, 80 bp, Homo sapiens
tccttctggtgggttcgtggtctcgctggctcaggagtgaagctgcagaccttcatgaaatctgataccagcatcagtga

SEQ ID NO: 481250 - DNA, 75 bp, Homo sapiens
atttcccatcttgcagatgtgtagattctttcttgtggagaagttattcatgtgaagatccttggaattttggct

SEQ ID NO: 481251 - DNA, 90 bp, Homo sapiens
cggccgtggaaggcgacccggcggctgtggaggccacgctcagctcgccaggcggcgcaggttagttgaatccatggacatgaaacccac

SEQ ID NO: 481252 - DNA, 83 bp, Homo sapiens
atggagtgccacttccgattccgccaccagatggcactagtttgacaagtatgcgcccaagctggacagcccctacttccgac

SEQ ID NO: 481253 - DNA, 49 bp, Homo sapiens
gtattgcagaacagcctcagcctattttggggtaagtgcgttcctagca

SEQ ID NO: 481254 - DNA, 97 bp, Homo sapiens
aagagccaaggaataaacatgcaatgaacccaaaagggttctcctgttcctagtggtagtccctatccaaatccatcctttttgggaacaccgtctc

SEQ ID NO: 481255 - DNA, 75 bp, Homo sapiens
agggcaaatcaatgttggagttccagagaggtgtgggaaatggaactggatagactcaagaatcaggatggcgaa

SEQ ID NO: 481256 - DNA, 88 bp, Homo sapiens
agatgatgcggtggtgggggacctgccggcacgcgactccccccgggcccaaatgttgctaacaaccacaagcagaatttgatgacgg

SEQ ID NO: 481257 - DNA, 100 bp, Homo sapiens
ggacgacaagcaggagaagccgccggacacgcccattgtggacgtatccatgtttctaaaggacaaagttcagaataataacggtcgctttgtgttgccg

SEQ ID NO: 481258 - DNA, 100 bp, Homo sapiens
taacaataacaagaaaaacagcctagactagacgcacatcaggaagacaggaaatgcaacctcaccacaagtacaaagaccatctttcatggactacttt

SEQ ID NO: 481259 - DNA, 113 bp, Homo sapiens
gacgtggcagcaagcgggagtcggggatagtgtcatcggttcggtaaagtttctgttctctggaactgcaagcacatgttgaccagataactgaaatggcagcagtaatgagg

SEQ ID NO: 481260 - DNA, 74 bp, Homo sapiens
cagacgcctcacttaggacaaggctgcccttgagatggagttgctgcctctttggctctgcctgggttttcact

SEQ ID NO: 481261 - DNA, 100 bp, Homo sapiens
gaaagtgtgtccaactgcatccagttgaaaacgtcagttattaagggcattaagagccaactggtagagcaatttccagtttggaaattttagcattcag

SEQ ID NO: 481262 - DNA, 100 bp, Homo sapiens
tgaagttgaacaaaatggtggtctctttataatggtccatctcccatttgcagtggttggcagcaccgaagaggtgaagattggcaacaagatggcaaag

SEQ ID NO: 481263 - DNA, 97 bp, Homo sapiens
gtcaagtccaagatcggctccactgagaacctgaagcaccagccgggaggcgggaagctgcagagcctggagcaggagaaggggcgctggcgggtgg

SEQ ID NO: 481264 - DNA, 100 bp, Homo sapiens
gcaaactccaatggcccaaaacccacagaagttgtattagatgatgacagagaagatctttttgcagaaaaggcgacggcggattgacagaagtatgatt

SEQ ID NO: 481265 - DNA, 100 bp, Homo sapiens
tgagagtccgtaaggagcagcttccaggatcctgagatccggagcagccggggtcggagcggatccctgcatgtcactgagtccaccatgctttacagaa

SEQ ID NO: 481266 - DNA, 82 bp, Homo sapiens
gagacatcggcctctgcaggcttgccgaagaagggagatcaggcctttgtgacactaaccacaaacgatgcctacgccaaag

SEQ ID NO: 481267 - DNA, 94 bp, Homo sapiens
ttaaaggaccatgggctgtttgaggggccaacatcattaactggataagtcaattgagcttcacttctctaattgaaatcaccgtgctgatgga

SEQ ID NO: 481268 - DNA, 100 bp, Homo sapiens
gggccccgtaaattggaaggatgcacaagttccaaggttacgtttcaataccccatgtttccccatcactcgaggagtctgggcagagactggactacac

SEQ ID NO: 481269 - DNA, 98 bp, Homo sapiens
aagttggttggagatgtggattttgaagaccattgaagagttggagaaggagatgctgaatgggcaaaagctccaaggaccgcagacttctgctgaag

SEQ ID NO: 481270 - DNA, 100 bp, Homo sapiens
aggacggggacagcgacgacgcggaggcagagaagggaacgcccggcccagcccccgacatctcgaatcagcgatgcacacttggcagacacaatgattg

SEQ ID NO: 481271 - DNA, 85 bp, Homo sapiens
ctgccgagggagactttaggacaagaggcgttgtttttgtacttggaaaaatggacaaggattgtgaaatgaaacgcaccacact

SEQ ID NO: 481272 - DNA, 90 bp, Homo sapiens
tgtacaccaaatgtgaaggtgatgaggttgaagatctctatgagcttttgaaacttgttaaggccgctacctgtctgaggaacccgagcc

SEQ ID NO: 481273 - DNA, 74 bp, Homo sapiens
ctggacaagcacgagggcgcgctcgagacgctcctgaggtctctgcttggggtggttatgtatttatcatcaat

SEQ ID NO: 481274 - DNA, 90 bp, Homo sapiens
cacagtctccgtgccggtggaggggcggccccacggcgagcatggtcggaacgagctgattgcccgctacatcaagctccggacagggaa

SEQ ID NO: 481275 - DNA, 82 bp, Homo sapiens
gccacagccacggacgccgaggccagagaagctgcttccccgggcgctgcctggacaggcctgcctgcgtgctgggacatgt

SEQ ID NO: 481276 - DNA, 83 bp, Homo sapiens
ggacattcagacttcagaatgccaaaccccctaaaggtctccacactgctgtttaacggcacacttgacaatggcttcagcag

SEQ ID NO: 481277 - DNA, 89 bp, Homo sapiens
aggtctgacattcaaggatatttatctaaaaattcttcttttgagtgccagtaaaggaagtgcacggctgtctataacgtgctgccggg

SEQ ID NO: 481278 - DNA, 90 bp, Homo sapiens
ggggagagtagggtgctgtggtctgagctagagggtgaagctggcggagcaggaggatgggcggtggcaatcactgggcagcttggtgtg

SEQ ID NO: 481279 - DNA, 100 bp, Homo sapiens
ccagcacactcctcgcgagcaaggtttggaaagcagagtggagaacaaagagttgattccaatgcaacaaattttagaagaagcggagccacaggggcaa

SEQ ID NO: 481280 - DNA, 100 bp, Homo sapiens
ccccgggccaagaaggcggaggacaaggccaagagggccaagggcaaaggccgaggcaagatgatgatgaatgaagtcctggcagcttcctgtgtcccag

SEQ ID NO: 481281 - DNA, 82 bp, Homo sapiens
caaacccggggcaggcgggcagctgtgcccgggcggcacggccaggtgtccctggccagtgtccttccacctgtccacaagc

SEQ ID NO: 481282 - DNA, 100 bp, Homo sapiens
gaggacttcttcttcaccgccaggacctccttcttcaggagagcgccccagggcaagccccgctccggccaacaagaagacataggccaaggagccagac

SEQ ID NO: 481283 - DNA, 75 bp, Homo sapiens
ccgctacatcgccagtctgaagcaggttcgttccaccagtcataaaccagatgaaatctatggcatgattgaaag

SEQ ID NO: 481284 - DNA, 75 bp, Homo sapiens
tccacaacgtcaaggagctggaagtgctgctgatgtgcaacaaagatccgcacgcagctggtggagcagttcaaa

SEQ ID NO: 481285 - DNA, 75 bp, Homo sapiens
gaaaaactcttcaacactgttattgtaaacaaagttcagagcagtgagaactacagaaggcgaggaggagacaga

SEQ ID NO: 481286 - DNA, 98 bp, Homo sapiens
agcagctgctgtcccgggcctaccccctggactccctggagaagcagatggaaaagaatgatctctgcctttcacaaagaccacctttgtgcatccat

SEQ ID NO: 481287 - DNA, 98 bp, Homo sapiens
ggagctgtggccctcagaatttaaacttaaggaaagagtgggaaagtgagggtgctgtcatctatatgatctcagtattttaaacatcagcttccagc

SEQ ID NO: 481288 - DNA, 100 bp, Homo sapiens
cccaggaatggcccttcacggactgctggttcctcttgagggagctgcttctgatttggactgttaaatagatagaaaatcctcgatacctgagacagaa

SEQ ID NO: 481289 - DNA, 74 bp, Homo sapiens
cgtggtactcagcaagctcgagttaaagttggatgtgctggaacagatctcccttgagtttagaaatctggctg

SEQ ID NO: 481290 - DNA, 75 bp, Homo sapiens
tgccgctcccgggcggccgcgggcgggtcaaaatgcagatcttcgtgaaaacccttaccggcaagaccatcaccc

SEQ ID NO: 481291 - DNA, 96 bp, Homo sapiens
gcaaatcatactctttccatcagtctcaacatagaaattcagagactgcatttgaaatcaaatcatcagtttccagcaggagcatttttaaagata

SEQ ID NO: 481292 - DNA, 99 bp, Homo sapiens
aatgcacgacattgtccgcagcttccggcagaccatggaccaatacagcacggagcccggcagatacagaacatcagcactggaatggccatagctgga

SEQ ID NO: 481293 - DNA, 50 bp, Homo sapiens
aagagctgaagagcaggccaggaagagaatgctgcggccctggaggagct

SEQ ID NO: 481294 - DNA, 88 bp, Homo sapiens
ggcggcggcggtaggaagccggagacagcagggtgacaggacagtatttatgatgaaatggaagagaagtggtcaaaacagaaggcga

SEQ ID NO: 481295 - DNA, 58 bp, Homo sapiens
cgggccggcccgaccccaccggccatacgtgggacttctcctcttgcatgcctgaatg

SEQ ID NO: 481296 - DNA, 98 bp, Homo sapiens
cgctggggagccacggcggagacccccgccctcaactgaggtccagagccaaacccgtcactgaccccccagcccaggcgcccagccactccccaccg

SEQ ID NO: 481297 - DNA, 75 bp, Homo sapiens
cccctgcgttgtaccatccgcctgtgggacacctaccaggccataggaaaaggatacagagtagagtttcatgaa

SEQ ID NO: 481298 - DNA, 100 bp, Homo sapiens
atccaaagcatgtctgcaacccagccattttcagctcttgaatgtcgtctctcaactagccaaacggaatctgcgactgctggtcctaggccggaagcac

SEQ ID NO: 481299 - DNA, 82 bp, Homo sapiens
cggatatacaagatcactgggagatttcctcgatcatttcaaagatgcctaaagcagatttctatgttctggaaaaaacagg

SEQ ID NO: 481300 - DNA, 74 bp, Homo sapiens
cagaattcacatatttgctcaacaaaatgatcagctcatgatggagcagtccaagaagtcctccctcatggtgg

SEQ ID NO: 481301 - DNA, 90 bp, Homo sapiens
agcaaacccgccgggatcaaagtgtaccagtcggcagcatgggagttctacggggaagatgctaagaaatcccgggactatggaagaatc

SEQ ID NO: 481302 - DNA, 74 bp, Homo sapiens
gcagtggtcgcttcttctccttggcaaaaggactcttgtggaagatggaactcattgtccattttccagaatgt

SEQ ID NO: 481303 - DNA, 102 bp, Homo sapiens
gacaaactggtaggagcaattgtctactatgacgattctctcgggcctagccgtccttggaacccgatattcgggctgggcggttccgcggcctgggcctag

SEQ ID NO: 481304 - DNA, 100 bp, Homo sapiens
cagccgaccatctttcaaaacaagaagagggtcctgctgggagaaactggcaaggagaagctcccgcggtacaaagtgagcacatcacccctcaccaagc

SEQ ID NO: 481305 - DNA, 90 bp, Homo sapiens
gaaaggaagaaaaagaagctgtgtcagccagaagggccctggagaatgaactggaggctgctcagtgaaaagctactgaagtatgaccac

SEQ ID NO: 481306 - DNA, 87 bp, Homo sapiens
gggacgtcctcattgtcctcggaatcccagtcagaagttccagcctgccactgttctctgatgccatgccagcaccaactcaactgt

SEQ ID NO: 481307 - DNA, 75 bp, Homo sapiens
gcgatttcttcgaggtggagtcggagctgggacggtgaatgaaaactttgccattgatttgatagcagagcagcc

SEQ ID NO: 481308 - DNA, 90 bp, Homo sapiens
tcctctgaggcgacggccgcggctgcacaggttgaaatcacaaagattagacacctttttagataggtgttcttcagcaccactgacaac

SEQ ID NO: 481309 - DNA, 75 bp, Homo sapiens
ctcctggccctgctactgctgctatgctggaagtactgtgcctgctgcaagttaagtgggcagaccaacatccac

SEQ ID NO: 481310 - DNA, 83 bp, Homo sapiens
cgcagtggtcgcttcttctccttgaaatctatgacaagttcaagcagagtacacacagcatatatatgttcttcaacacatca

SEQ ID NO: 481311 - DNA, 75 bp, Homo sapiens
ggcgacagcaggtcacagtggacgaggtgttggcggaagctcggtcaaggagtgtgatgactggcgagcagatgg

SEQ ID NO: 481312 - DNA, 75 bp, Homo sapiens
gtagatcaaggttatagcttcaaggcctccggtgtggctgtctctgatggtgtcatcaaggtgttcaacgacatg

SEQ ID NO: 481313 - DNA, 104 bp, Homo sapiens
cattatcctgaccatgatcttggaatcattttgctctcagtcatccttacccctaaagaaggagagtccagggatgtgcattgtcttcagtgttaagaaatgtg

SEQ ID NO: 481314 - DNA, 83 bp, Homo sapiens
gaggaagttttctactgtaaagtcaccaacgagatcttccgccactacgacaattctgtggtgttcttggtcacacatttatg

SEQ ID NO: 481315 - DNA, 100 bp, Homo sapiens
aaattaccaactgctttcctttccctcagcacacagaggatgatgctgactttgatgaagatgagattgtggggaacctgggtgaaggcacctttggcaa

SEQ ID NO: 481316 - DNA, 114 bp, Homo sapiens
aaacgactctgcgccgccgctgcctccatcctgggcaaacctgcggacatggctctgagagattcctctgcgaatctgtttttagctatcaagtggcatccacgcttaaacagg

SEQ ID NO: 481317 - DNA, 75 bp, Homo sapiens
atgctgatagtctccagcgggcctggactgtgggctggtgtgtggaactgggagatgaataagcgtctaacagag

SEQ ID NO: 481318 - DNA, 100 bp, Homo sapiens
attgggaccatctcgagttctgtgatggattcagaaaacttttagaccatttacaattggataaaggctccaacaaaagaatcctctgaagaggagtatg

SEQ ID NO: 481319 - DNA, 82 bp, Homo sapiens
ctcccgcctccagcaggacaatattcgcacccggctgaagatggactcaccctgtcacccaggttggactgcactggcctca

SEQ ID NO: 481320 - DNA, 75 bp, Homo sapiens
cgcggatgtcggcgaagagttcaaccaggtgacattccaagcctgcagtatatctgaggccagatacctttatga

SEQ ID NO: 481321 - DNA, 99 bp, Homo sapiens
cggtttggccaaagaagcccccatactcccggtgaaaaaggttttgattcccaccatggccatcacccagtttcggttatttaaattttgtacctgcct

SEQ ID NO: 481322 - DNA, 76 bp, Homo sapiens
ggaagacaaatatggaaacaaatactatgaagacaacaagcaattttttggagatcatgaatcagacagataaaaa

SEQ ID NO: 481323 - DNA, 100 bp, Homo sapiens
agtgaagagaggcctctcccaaagcacctgcgcaggtttctaagcatgaattgaggaacagaagaagcagagcagatgatcggagcagcatttgtttctc

SEQ ID NO: 481324 - DNA, 83 bp, Homo sapiens
ccaccaacttccctctgcggccgtttgtcattcccttcctgaaggtgacttaagagattaaaattaatttggttgctgttggt

SEQ ID NO: 481325 - DNA, 98 bp, Homo sapiens
taaggcagctgatgatcctgaaaatggagaaagagaatctcatacacctgtctctattcaggaagagatagtgaaaatgcctcgtgtaaaagcagctc

SEQ ID NO: 481326 - DNA, 98 bp, Homo sapiens
cgaaatccggcagcagcgctggtcctgggcaggggccctgcaccacagctctccaggacataagaccaggaaagcaggcaggatgggagagtcgccga

SEQ ID NO: 481327 - DNA, 100 bp, Homo sapiens
gaacttggccccgcgcagcgtctggtcactcgctctcctctggggactgcagagaagcaggacctcgggccatggactacagtggtagtggaggccgaag

SEQ ID NO: 481328 - DNA, 101 bp, Homo sapiens
gccttaacaagttggcgacgtccctgggcgcgtcagaacaggcgctgcggctgatcatctccatcttcctgggtatctccatacagccaagaataaagaaa

SEQ ID NO: 481329 - DNA, 50 bp, Homo sapiens
tgcagctgcgatctctgtggtaggcccagacacccatccaacctgatgct

SEQ ID NO: 481330 - DNA, 87 bp, Homo sapiens
gtggagggcctcgccatgtcctgctgcccgaggcagaggaggtggacacggtggacgtctccggcgtgcccgcagaggtgctgtgca

SEQ ID NO: 481331 - DNA, 75 bp, Homo sapiens
ctggccttgtgggattggctgtgtgcaatactcctcacgagctacaagacattcagtacctgacagagaacatct

SEQ ID NO: 481332 - DNA, 100 bp, Homo sapiens
aaccaacttcgggcgcgctgtacagcaagtcaatgccatgggtggttctcttcccaaagtggaagccaaattcatcaattatgtgaagaattgcttccgg

SEQ ID NO: 481333 - DNA, 100 bp, Homo sapiens
gtgtccccacgagctgtgtggtccatgatgagccatcctggggtctccagctagtggaattcaaaacacaattggttctgttggcacagggcaacagaat

SEQ ID NO: 481334 - DNA, 87 bp, Homo sapiens
gggatttgggtcgcagttcttgtttgtggatcgctgtgatcgtcacttgggcgcggatggcgtcggggcgccccgaggagctgtggg

SEQ ID NO: 481335 - DNA, 80 bp, Homo sapiens
caccgccatcactttcatcacatggatcctcatccagtttgcatttaggttcgatacaagaggctgttttcctagcgtgg

SEQ ID NO: 481336 - DNA, 100 bp, Homo sapiens
ccgcctcgatgcaggaggacgaacagatgtccagaaggcttcttgggggaatattgtcaacatcgagacccctgtgagaagaaccgctgccagaatggtg

SEQ ID NO: 481337 - DNA, 82 bp, Homo sapiens
aggagctgtgcagccgcgaggaggcgcgggaggtgttcgagaacgaccccgagacgttgatattcactgatggactccaaag

SEQ ID NO: 481338 - DNA, 100 bp, Homo sapiens
cgcgtggctggaagacatggccactccagtcggtgttgagcacggcgagcagtctcaggcctttagtgatgatgctgtccccgccctactccggaccgcc

SEQ ID NO: 481339 - DNA, 101 bp, Homo sapiens
caaggataagggcgacagcaacagctctgccggctggaagctgccgggccgcaagtacagccctgggtacaacaccgaggtgggagacaagtggatctggc

SEQ ID NO: 481340 - DNA, 49 bp, Homo sapiens
gaaactctagagcaccgtttattagaggctggcaggatcccaaacccac

SEQ ID NO: 481341 - DNA, 90 bp, Homo sapiens
cgagtaccttccctgtcccatcgcaaacccaaagatccccgttcctggagattctgattgagctgagatctgtatctgtggacctgaatg

SEQ ID NO: 481342 - DNA, 82 bp, Homo sapiens
cggccgcctccgcgagggcaccatggaggtgaatgcaggtcttaaccatgaacttctctggaggagggaggcaggaagcagc

SEQ ID NO: 481343 - DNA, 74 bp, Homo sapiens
ttccaaagtcttgattgataatattccagacagctcttccttaattgaagagatccctacaatgttatatcatg

SEQ ID NO: 481344 - DNA, 50 bp, Homo sapiens
atgtggatgatgccaaagttttattaggtggtcactaactgccaagagag

SEQ ID NO: 481345 - DNA, 100 bp, Homo sapiens
cctctgcagccagaagaacaagaagtaggcattgaccccttgtccagttactctaacaagtctggagatgcagacaatctctttgaacatgaattggggg

SEQ ID NO: 481346 - DNA, 90 bp, Homo sapiens
gtggtgatgcaagaagtttctaggaaaggccggacaccaggatttcttcaagaagttcttatatgagccattgccagtagaatctcacct

SEQ ID NO: 481347 - DNA, 100 bp, Homo sapiens
ctaaaacaggatcagtaaagaaggaaaaagcagtaaagccagaggaaggaacaggaaatatagtggtcattatgattagctatccaaaaggaagagaaat

SEQ ID NO: 481348 - DNA, 76 bp, Homo sapiens
gcctcccaaagtgctggggttacagttcctgttggctgagtgttggctctagggctggcaccaggcactggaatta

SEQ ID NO: 481349 - DNA, 90 bp, Homo sapiens
tgagactcccctaaaggccagaaaggaatgaagccaagagtgatgaaagaagctgtatctactccatcacgaatggcccacagggatcag

SEQ ID NO: 481350 - DNA, 50 bp, Homo sapiens
agatgatgcgcttctcagaaatgtccaggactttctgaagaccttttccc

SEQ ID NO: 481351 - DNA, 74 bp, Homo sapiens
ttcggtggactccttcggcagtccacccaccgccgccgcctcccaggtcaataagcatgcgttttctggaggga

SEQ ID NO: 481352 - DNA, 97 bp, Homo sapiens
gaatgtgttgctgactgagaatgcagaggtgaaacttgggcaaggggacgcgagataaggtcctgatcagaatcatggtctcccgcagtgaagtgga

SEQ ID NO: 481353 - DNA, 50 bp, Homo sapiens
cccggggctcggagaatgggcagccacccaggctactttgggaaagttgg

SEQ ID NO: 481354 - DNA, 83 bp, Homo sapiens
cgccgctctccagcccgcttgaacggctatgactttgcagccgtcctggagtggttcgcggagcgtgtggaccgcatcatcct

SEQ ID NO: 481355 - DNA, 130 bp, Homo sapiens
gaggggtcaagctacgcctgacagtggtagatacccctggctatggtgacgctatcaactgcagagattgccttatgtttgatcatcggccaaggtcctggcgagaactgcctctgcggctagctgattt

SEQ ID NO: 481356 - DNA, 100 bp, Homo sapiens
tggactgctatctccgtcgcctcaaacaggagctggcagaatccagagaccacatttgaagtatatgttgaagtggcctatcccaggacaggtggcactc

SEQ ID NO: 481357 - DNA, 51 bp, Homo sapiens
gaacaatggataacttcttcaccgaggtgtctgtgggaggttatgtttatt

SEQ ID NO: 481358 - DNA, 73 bp, Homo sapiens
agactttttcattggaggagaagaagggatggcagagaaggtgtctcaaaggctgttgagcacatcaataaaa

SEQ ID NO: 481359 - DNA, 98 bp, Homo sapiens
gaacttccgtgaggcgtataatctctttgcagtgaacggcattctcttcaatcatgagagtcccagaagaggagctgactaaggctttggaacagaaa

SEQ ID NO: 481360 - DNA, 75 bp, Homo sapiens
attttgactttgctggctcatttcaagcaacttgagttggtggaaccaagtggctggattcatgttcccttaact

SEQ ID NO: 481361 - DNA, 98 bp, Homo sapiens
cgtgtgtggggtcgagcttcctgataacgaggctgtggagcagcacagggccatttctgagcagtggaggtttcaagtaatccactaacaaccagttc

SEQ ID NO: 481362 - DNA, 97 bp, Homo sapiens
gataaatatatctatggagcacaggaaatgcacaattttgaggaagagttaacttgtcccatatgttatagtatttttgaagatcctcgtgtactgc

SEQ ID NO: 481363 - DNA, 98 bp, Homo sapiens
tcggctacgcgcccacttggcgggccctggctggggatgtgcgagaacggcccgggatgttggacttcacgggcaaggccaagtgggatgcctggaat

SEQ ID NO: 481364 - DNA, 100 bp, Homo sapiens
tctcgctgggacccgcactgacagcgggaggcagagggaggaacctggacgccggaagccgggaaatgatcctctgccttgtcaatgttagtcacaatgg

SEQ ID NO: 481365 - DNA, 116 bp, Homo sapiens
gcggcggcggggccggggtccgcaaggccggagaaggccgccgggcccgggcatggtggtctggggcaacgcggaaggtactccaaagattcaggtttactcacgtcatccagcag

SEQ ID NO: 481366 - DNA, 98 bp, Homo sapiens
attttactgggataattatccaaataaattgcaagcattctatccaaatgtttcctcgctgatctcttcatgccgtgtaatttcacatggactttcaa

SEQ ID NO: 481367 - DNA, 100 bp, Homo sapiens
gacagaagtacgaaatgctgtgccgtggggagggtatcaaaatgggccatgctatgatagtggaagcttatccaaaataatagatccagaagaagtgacc

SEQ ID NO: 481368 - DNA, 90 bp, Homo sapiens
ggctccaagacctcatcaacaattaaggctcagagactcaggtcccaggactggacatatctgcactcctgccctctgacttcagccgct

SEQ ID NO: 481369 - DNA, 75 bp, Homo sapiens
ggcttggagaagtccagggcgacaacaaggtcttggtatggtgactcctgtgaacgatcttagaggatctgattc

SEQ ID NO: 481370 - DNA, 96 bp, Homo sapiens
acaaactaaagaaagacttgtgttacaatgcctgttattaaaccagacatagccaactgggagctctcagtaaaattgcatgataaagttcatacc

SEQ ID NO: 481371 - DNA, 75 bp, Homo sapiens
caaagagcagatgccaaatctggagttaaagaggattgcactgcctccatggaaccttcagcaattgaactccca

SEQ ID NO: 481372 - DNA, 82 bp, Homo sapiens
tggtggccgacagccatcctgaaagcattttgaaagcgaagcagaagccgtagaatcagcggcgagcctgttgaaagaaccc

SEQ ID NO: 481373 - DNA, 90 bp, Homo sapiens
gtcatcctcggctccctgctgggcgggaccctggtctccgcgtacggaaatcaccaagccgccctcagacgacagcccggcccacagcag

SEQ ID NO: 481374 - DNA, 90 bp, Homo sapiens
aacgaattctcaacccctacaacttattcctgtccggagacagcctaagggcacttcagacaccacctccaacaacacagcaaccgtgat

SEQ ID NO: 481375 - DNA, 76 bp, Homo sapiens
caaaagaaatgatagtatatatgcaggggcaagccaatatgatggccgcccatgccccatcattctttgggatgca

SEQ ID NO: 481376 - DNA, 75 bp, Homo sapiens
aaaatgccaagcctttaagttttaaggtcggagtaggcaaagttatcagaggagctggagtacaatggtgcgatc

SEQ ID NO: 481377 - DNA, 100 bp, Homo sapiens
gcttacaggatattgacaagtgcagacagcagcttcatgatattactgtaccgttagaagtttttgagtgggccttcctggagctgggcacaagtggcca

SEQ ID NO: 481378 - DNA, 50 bp, Homo sapiens
ccacgatgcaatatatgcatgttgaaatcacaaagattagacaccttttt

SEQ ID NO: 481379 - DNA, 100 bp, Homo sapiens
gatggaaagatggagatgaacctctaacacagtggaaaggaaccgttctggatcaggtaatcctcccacttcttaaaagtgatctttatgaagtgattca

SEQ ID NO: 481380 - DNA, 100 bp, Homo sapiens
agtggcagaggcagaaggagccccagagctcaatgggggaccacagcatgcacttccttccagcagctacacaggcaatggatcacttggagtcctttat

SEQ ID NO: 481381 - DNA, 74 bp, Homo sapiens
aactggactcttttacactcaactaattggcatcatcacacctagtgtgttaattgtaacctacaaggagcctg

SEQ ID NO: 481382 - DNA, 99 bp, Homo sapiens
cttatgagcagtgagctggagaccaccagcttctttgactcagatgaggatgactccaccagcaggtattaacaagtaaaggtgacgcgtgggccaagt

SEQ ID NO: 481383 - DNA, 98 bp, Homo sapiens
tgcactcccatctgcagtcccaaagaaacgctgagcagaagcggatgcggggtccagggaaggaccccaccaggaagtgcccagatccaagatctgcc

SEQ ID NO: 481384 - DNA, 100 bp, Homo sapiens
cttcaaggtggggttggcatcccccacatacgataagtaatggaacatcatctgtgatcgtctccagaaagaggccatcagaaggaaactatcaaaaaga

SEQ ID NO: 481385 - DNA, 74 bp, Homo sapiens
agggtctgaggcggcgcggccatggctcacctccggggatttgccaaccaggacctgaaggagaagaaggagaa

SEQ ID NO: 481386 - DNA, 98 bp, Homo sapiens
agatgggaaactctacctgtgtgtgtcaagccccaccatcaaggacaagccaagtggtggacatgacaacagagtcaactgcatacagtggcatcaag

SEQ ID NO: 481387 - DNA, 148 bp, Homo sapiens
ccgctactgtgtccaacaatgtgccgggttccgatttcagcatcggggcagacaccgccctgaacactatcaccgacaaaccaactttgatccagcagaatgggggagtaaggtagaagaccgcttctataacaatcatgcattcgag

SEQ ID NO: 481388 - DNA, 83 bp, Homo sapiens
gacacggtggctactctgcctcggggacgaaagcaggttttcctttggaatatggataaatacaccatgatacggaaactaga

SEQ ID NO: 481389 - DNA, 75 bp, Homo sapiens
ccgcggactccggagccgcacaaaccagggctcgccatgaagccagggtgtacagcaagctgtgattcctgggaa

SEQ ID NO: 481390 - DNA, 132 bp, Homo sapiens
tccctcattaccgtcgccagcggagcgaacccgagagcgtggagcgggctgggccaggctcacagaacatttcctgcctgttgctcacactctgttgtccacagcatacccgcaccctagatggctgactct

SEQ ID NO: 481391 - DNA, 100 bp, Homo sapiens
agccgcccgcgggccagcgcaccggtcccccagcggcagccgagcccgcccgcgcgccggcatgtcgggccccaggcctgtggtgctgagcgggccttcg

SEQ ID NO: 481392 - DNA, 75 bp, Homo sapiens
aagttgggagccaagattatcaaagcagagatgatggggaatatggtggaccacacaggagaatatggaaatctg

SEQ ID NO: 481393 - DNA, 96 bp, Homo sapiens
tgaagtgcgggcgcagctggcggagctggagctggagctctcggagggagagaagatgactgaggaggaggtggagaccgttctggcaggacacga

SEQ ID NO: 481394 - DNA, 82 bp, Homo sapiens
tgctcttctccgccgcggcactgatccccacagcgcgagcccagcattgacctgctgcaggccttcgtggagcactggaagg

SEQ ID NO: 481395 - DNA, 100 bp, Homo sapiens
ctaaagcttgacggcttggacgaagatggggagaaggaagcgagactcatacgcaacctcaatgtggatatcaaagtattgcagagtgccttagcagcca

SEQ ID NO: 481396 - DNA, 74 bp, Homo sapiens
tcacctgtgaaaaaatagggtctggcttcttttctgaagtgttcaagtgccagggcaggggcccttggagtgac

SEQ ID NO: 481397 - DNA, 100 bp, Homo sapiens
gcgcgggtgctgaaggctgcagccgcgaatgccgtagatgtgttcagagcaacattgttttgttgacacaagcatttagaagaaagtttgtgattcctga

SEQ ID NO: 481398 - DNA, 100 bp, Homo sapiens
ccgccggcgaaggaggaggcgttgccggtgttctttcagaggaccaagacagttacctgtgtaatgtcaccttgtttaggaaggcagttgatgacttcag

SEQ ID NO: 481399 - DNA, 83 bp, Homo sapiens
acccagtgaacaaatccgggggcaaggccaaaaagaagatatcaacctatgaattgcctctaccaaaaagcctacaatattga

SEQ ID NO: 481400 - DNA, 88 bp, Homo sapiens
atgagtgaccggggcatctccaacatgctggatgtcaacggcctctacctgcgaccgcatcaagcagtccgccagcggaaccaagcgg

SEQ ID NO: 481401 - DNA, 100 bp, Homo sapiens
gcgaggtggccggagccgtgtggaccaggaggagcgctgaacttgcatcagcactgaagtcagccttatctggccacctggagacggtgattttgggcct

SEQ ID NO: 481402 - DNA, 75 bp, Homo sapiens
cggtcaccaggattctgacaaaagtactctccgaagaggaattgacatagattgcatcatcagagaaaatacacc

SEQ ID NO: 481403 - DNA, 80 bp, Homo sapiens
cccaaggtcagaaggaagcaccacacagagggagagcctggggatgtacaggagatgcctgctccagaatctcctcctgg

SEQ ID NO: 481404 - DNA, 122 bp, Homo sapiens
ccgcgcgctctacaacgtgctggccaaggtgaagcgcgagcgcgacgagtataagcggagacaatgcagatcttcgtgaagactctgactggtaagaccatcaccctcgaggttgagcccag

SEQ ID NO: 481405 - DNA, 88 bp, Homo sapiens
tgcgtgcacagcgccttgttccagcagggcctgatccaggaaaaggaccagcgcagcctagacataaacactgccaagtgcatgttgg

SEQ ID NO: 481406 - DNA, 100 bp, Homo sapiens
ccgccccggccggacctcgaccctgagctctatctcagtgtacacgctctttgacctcatctaccgcgaggagacgctgttcaacgtcatcaagagtgtg

SEQ ID NO: 481407 - DNA, 100 bp, Homo sapiens
tgttgtttcttccaactctggaaacaattccactagaaggctcaatagttcaggtttttcgttggaatatacgttgcacatttatggcgattctgagtgt

SEQ ID NO: 481408 - DNA, 100 bp, Homo sapiens
ggatgcttatggaatgtgcgagaacacgggaagaccctgttcccaatggcctccgggcactcccagtattctatgctgctaccatagcaatcaatgtctt

SEQ ID NO: 481409 - DNA, 90 bp, Homo sapiens
gctgaggttgctgatgaaaagctccatgtcacaggaaattcacagtatggccaacagcaagatgcataccagggaccacctccacaacag

SEQ ID NO: 481410 - DNA, 49 bp, Homo sapiens
tgaagaggcacgtccgcacacacacagggcaccagaactagcacctctg

SEQ ID NO: 481411 - DNA, 78 bp, Homo sapiens
tgccctgcaccgccccctgggatccgcaggttccctacacggtctcctgggtcaaggctaccggctctctgaccagtt

SEQ ID NO: 481412 - DNA, 75 bp, Homo sapiens
cttgcacctgtcccaactgtaaagaaggtggtggaaggtagtgggcagcagtcagtgacaggtgtaacctctgtg

SEQ ID NO: 481413 - DNA, 100 bp, Homo sapiens
gtgagagagaggctcccccacgcccatcctgggaaggggcccggagtgtgagagagaggccggaatgaaggtgtacatctattcctcagggagtgtggag

SEQ ID NO: 481414 - DNA, 88 bp, Homo sapiens
tgcttctgaaacgtcagctgcgctcccctaggagtgctgagcccgcggaaccgcagccatgggaagcgtgacagcaatgacagtgttt

SEQ ID NO: 481415 - DNA, 83 bp, Homo sapiens
ggctacagagagccctgctacgcgtcgggtccaggtggcagaacatcctagagtccctgtgaagcaggaagagtgagggcagg

SEQ ID NO: 481416 - DNA, 100 bp, Homo sapiens
ttggtggtggtcgtggaggtggtttcggtgggaatgacaacttcggtcgtggaggaaacttcagtggtcgtggtggcaggtgtcacagctttagcctgtg

SEQ ID NO: 481417 - DNA, 82 bp, Homo sapiens
gctgaggaaatttatttggtagattgaagaaaacagacgtgactatgctcttgtatatagcagacaatctagcctgttttcc

SEQ ID NO: 481418 - DNA, 106 bp, Homo sapiens
gtattcgtacgaagttgatgcttatgtccagaaatgaagaggccactaagcatttagaaccctactgccaataaagggaaaataagagatgctcatcgacgaatta

SEQ ID NO: 481419 - DNA, 96 bp, Homo sapiens
tccaacagggtctggagtatcagccaggagcccgatcctgtccagaggcttcaggttcgagaacttgtcttggacaattgcaaatcaaatgatgga

SEQ ID NO: 481420 - DNA, 75 bp, Homo sapiens
gctgtgctcgcgctactctctctttctggcctggaggctatccagcttcaaacgatatgtcaataaacttcgaag

SEQ ID NO: 481421 - DNA, 98 bp, Homo sapiens
agccgccgactcacacaaggcagttgtatcacggactgattcaccgagcccaaccgtactcaactcacatatttctaccccaaatgtgaatgctttaa

SEQ ID NO: 481422 - DNA, 98 bp, Homo sapiens
tggagaatgctgaaggaagaagacgcagaagcaggacgaccctgaaagattcagcctcttcatcctcaaacagttttcggctttgtgagaaaccttac

SEQ ID NO: 481423 - DNA, 100 bp, Homo sapiens
aagcagcagtgtggctgtcaacccaagctttgcgattacagtctcatgcagattcaaaaatgtgagttggtcttgatccacacctacccagttggtgaag

SEQ ID NO: 481424 - DNA, 75 bp, Homo sapiens
gcacaagccagaccctggcacgccccagcacacgaggatgagagggccttaccaaaaggagatttcttccctcct

SEQ ID NO: 481425 - DNA, 98 bp, Homo sapiens
ttctcgctgtcatccggtttttcagcttaaaaaacaggtctgtgcagacttttgcagacaaatcaaaacaagaagctctgaagaatgacctggtggag

SEQ ID NO: 481426 - DNA, 100 bp, Homo sapiens
tacacggtgtgcaaggggagtcgtggcgtcgtctgcgaccgctgccttctcgggttatttggaaatagcggtgcttgcagcgcttgcggacagtcgattc

SEQ ID NO: 481427 - DNA, 75 bp, Homo sapiens
tggggaaccgcgctgaggagctggaaactttcccggcaggacccaggaccacccccaccttctccattactaggt

SEQ ID NO: 481428 - DNA, 98 bp, Homo sapiens
gccgcctcccgggagtgccgtgcgccgcagcccgggcccaggccccggcagcgcctgggacaagatgtgtgcaacagcaccgatcttccggaagtcga

SEQ ID NO: 481429 - DNA, 100 bp, Homo sapiens
ggagaggggccgccccccccggacggacatgggctcctgaagttgcgccgctgccggtcgggggaagagacctgacagtttaatggatcgagaagtggcg

SEQ ID NO: 481430 - DNA, 100 bp, Homo sapiens
cccgggagtaggagactcagaatcgaatctcttctccctccccttcttggagatggacgaacacatgcggagcatgttgcatcacagggaacttgagaac

SEQ ID NO: 481431 - DNA, 123 bp, Homo sapiens
catcatcatgcaagatgagagcaaggagaaccgtatgagctgcactgtgaacgtgctggaaagaccacagcaagattctttcattcgtctcctcctagcctgggggaccaggctcgaactgac

SEQ ID NO: 481432 - DNA, 90 bp, Homo sapiens
ttcggtccttccgaggaagctaaggccgcgttggggtgagaccctcacttcatccggttggtcaaagaaaaagtgatgtatgaaaaagag

SEQ ID NO: 481433 - DNA, 98 bp, Homo sapiens
ttgtctctgatgagctgagaaacaaagccacccagccaatgaagatcacaaaatttgtccaggatagacatagagctagaagaaacagacttcgtaaa

SEQ ID NO: 481434 - DNA, 75 bp, Homo sapiens
aatttgcaaatgatatacaacttctaagccttcacttaacttaagggaccttggattatctgaactaaaaattgg

SEQ ID NO: 481435 - DNA, 75 bp, Homo sapiens
ctcagacgcagcgtctagtccctggccatagctccgccgctgcccgctcaaagattagaacgactccgaaaagag

SEQ ID NO: 481436 - DNA, 101 bp, Homo sapiens
ccggtttctcccacatcgacctgtatcccagtcgacatcagtgacagtgatatgatgctgaacatcatcaacagctctattactaccaaagccatcagtcg

SEQ ID NO: 481437 - DNA, 131 bp, Homo sapiens
acaagtggtgcaggctgtggaacgggccaagcaggtgaccatggcagaactgaacgccatcattgggtttaaggaagaaatctctaaacgttttaaatcacatactgaccaacttgtgttgatatttgctg

SEQ ID NO: 481438 - DNA, 82 bp, Homo sapiens
catgatgccccagcgggtgaggctgcaacacgaggctgccgttcagcacccgtcgagcaggagcaggagcggcttcgcttgg

SEQ ID NO: 481439 - DNA, 98 bp, Homo sapiens
cttatcaaagctgttaagtctgtagcagatctaggggtgtttattcctgctcctatggctcaagggatgagaagtgacttctttctggagggaccgtt

SEQ ID NO: 481440 - DNA, 90 bp, Homo sapiens
ctgcggactagcgaacccggagatggatccctgcagagacccctccagtccgggatccccactctcgtggtaggctccctcagacgcagc

SEQ ID NO: 481441 - DNA, 96 bp, Homo sapiens
ctgagtagccggtaacaaacgagggttcccgggattggaccgacgcagccatgaaatgaccgctccttcatctgtcctgcagaaggttgtgggaaa

SEQ ID NO: 481442 - DNA, 90 bp, Homo sapiens
tggcatcagggaggctttcagccggagaagcgagtttcagctgtgccggtggtggtgtgcacattgagccccggtatagacagttccccc

SEQ ID NO: 481443 - DNA, 51 bp, Homo sapiens
tgcagtctcatgggcagtggtttgagcacccatatatctcccatcagcatc

SEQ ID NO: 481444 - DNA, 83 bp, Homo sapiens
aacgtgcagggccggacgctctatgacgtcatcttgtacggaataccctctaccatctgctttggtcagggtgccgctcgagg

SEQ ID NO: 481445 - DNA, 51 bp, Homo sapiens
gccctggtgtcacctatcagtaaaaggtggtactttggaaaacttggccga

SEQ ID NO: 481446 - DNA, 75 bp, Homo sapiens
tggggcagcgccagcagtttccctatggagccagttacgaccgaaggttcatgtgtgcccagctgcccaaccccg

SEQ ID NO: 481447 - DNA, 100 bp, Homo sapiens
cggcgtttagttcagcgcagcgactcggggacctggagctgacgcctagtgcgttccatggatgaactgaatcatgattttcaagcacttgctctggagg

SEQ ID NO: 481448 - DNA, 74 bp, Homo sapiens
gatcctttcatctcagcctcctcagtagctgagactacagactttttcacagggtacctttagtggttgccaat

SEQ ID NO: 481449 - DNA, 75 bp, Homo sapiens
gcggcggaaaggataagcctcgacttagaagctaccgagttaccctaagaaaggcccaagtctgttttggtggtc

SEQ ID NO: 481450 - DNA, 101 bp, Homo sapiens
aaacaaactacccattttcttttttggaactcatgagacttgccttgttgaaggggatgctaaagaagaaatactgcagccaccggaacctcatccagtgc

SEQ ID NO: 481451 - DNA, 98 bp, Homo sapiens
caagcctggaagaactcgtcatgctctttgtagcgtggtgcttctgttgctcacagaaatgcactcggtgatggaaagagagccactattctgaagaa

SEQ ID NO: 481452 - DNA, 100 bp, Homo sapiens
aagaagaatgagaactataagagcctggtgagacggagctatcggcgccgcggcaagagccaggtgccctacgagacgctgaacaaacgctttcgcgccg

SEQ ID NO: 481453 - DNA, 134 bp, Homo sapiens
ctttcccacccaaggacgccgtcagtcctttcagcttcagcctgctcaagaactgcagcattgcagccgccaagacgatcccggagatcgcccgccatggctttacttactgcggccgcccggctcttgggaac

SEQ ID NO: 481454 - DNA, 102 bp, Homo sapiens
cttattcatctgtccagcatgactcatccccgggagtgttgaagggaaatgataaagattttaccttgaatgattttggcttcatgatctttcactcaccat

SEQ ID NO: 481455 - DNA, 82 bp, Homo sapiens
caggagcagtggtgctgtcagcgcggccgtcggagacatgggagacccggggtcggaatgtactaatggtcacttgatgtgc

SEQ ID NO: 481456 - DNA, 100 bp, Homo sapiens
tgaggactacgacagtcaccgcaggttcgaaggccgggtgctcgtccactgccgggaaggttatagccgctccccaacgctagttatcgcctacctcatg

SEQ ID NO: 481457 - DNA, 83 bp, Homo sapiens
ggagtcgccagggctgcgtaggcttgtggcgcgcccgcggagaggccgggacaatgcagatcttcgtgaagactctgactggt

SEQ ID NO: 481458 - DNA, 95 bp, Homo sapiens
ccgtggtcagccgcttcgacgagcagaggatctgaagaggcaaaatgcagtattacaagctgcacaagatgatttgggacaccttcgaacccagc

SEQ ID NO: 481459 - DNA, 75 bp, Homo sapiens
aacaaattcatcccagaaatctaagaggtaacccaggcctgcacagtcccatgttggatcttgataatgatacac

SEQ ID NO: 481460 - DNA, 80 bp, Homo sapiens
ccatcatcatgaaggacgtgcccgactggaaggcttttctggctttgcccgcccagctgctccatgccaggaggaggagg

SEQ ID NO: 481461 - DNA, 75 bp, Homo sapiens
tttgagcctcatgacaaaagagaaagttactgtggcccatgtcctaaaaactggatatgttacaaaaataactgc

SEQ ID NO: 481462 - DNA, 74 bp, Homo sapiens
gaaatcctaatgacagtctccaaattcgcctccatctgtaccatgaacctaaaggcagacccagaagagctttt

SEQ ID NO: 481463 - DNA, 100 bp, Homo sapiens
gaggagcccatgtcctatgactcagacctgggcacagcaaatgctgaggactcagaccagtctctgcaagacatggcttctcgctgtttctgggatgctg

SEQ ID NO: 481464 - DNA, 100 bp, Homo sapiens
gcaagaagaaggtctggttagaccccaatgagaccaatgaaatcgccaatgccaactcccttaattgtgtgaggaacacgccggcctttttagccgaaag

SEQ ID NO: 481465 - DNA, 74 bp, Homo sapiens
ggtaccagatgtacatagatgatttaccaatatgggaactttatgaaatcttcctctcaagagcaaaagaacgg

SEQ ID NO: 481466 - DNA, 96 bp, Homo sapiens
tcaaatagtgatgaagctgtaatcaataaaaaacttcccaaagaactcctgttacgtgaccaggctgaggcccgcaggtctaagaccaaggaagca

SEQ ID NO: 481467 - DNA, 148 bp, Homo sapiens
cgagccgcagccgagcggccgtgggcccgggcggcgggcggagacgtgggcgccctccccgccaaggcccgtgcgagaccaggtgataggtttgatcgagacagaccgttgagaggacgtggaggcccgagagggggtatgcgcggca

SEQ ID NO: 481468 - DNA, 97 bp, Homo sapiens
gtggcaatgacccagacccggacgacccccattgctgagccagcggagctgcttggctttcatgagaaggacaagaagccatattgccgaaaggatt

SEQ ID NO: 481469 - DNA, 83 bp, Homo sapiens
cgggagccacgcagaggacgccggaacaccctggaagccgagaaatgatgagatccgaaatggcccataccgacagctcttcc

SEQ ID NO: 481470 - DNA, 82 bp, Homo sapiens
gacgaacccaacctggtgcccggcccgcagcaacatgtcatggtttagtggcctcctggtccctaaagtggatgaacggaaa

SEQ ID NO: 481471 - DNA, 75 bp, Homo sapiens
ccaaggaataaacatgcaatgaacccaaaagggtcttgtgataatggtcactgtatgctgaatggaacacatggt

SEQ ID NO: 481472 - DNA, 55 bp, Homo sapiens
cgtcttcagcttgagccccatcactagtaaagatgacggcgccttgaggtaagct

SEQ ID NO: 481473 - DNA, 74 bp, Homo sapiens
aaaagagccaaactcagctcgcccggtttctcggcgaatgacagcacaggatttaagtgccctgtatgctcaaa

SEQ ID NO: 481474 - DNA, 75 bp, Homo sapiens
ggagatgcaccggctcacggaaaatgtctataaggttatgaagacagtatggagtttccagaccatagtagacat

SEQ ID NO: 481475 - DNA, 83 bp, Homo sapiens
tggaggatttaatacacagcagcagcagcaaactaatattgatgatgttaagaagttcaaaccgggttacctggaagctactc

SEQ ID NO: 481476 - DNA, 96 bp, Homo sapiens
gccagtctcaacaacattatcagatgttcttgacagagtgtcaggagttatggtacagcacctgtaaatcttaacatcaagacagggggaagagtt

SEQ ID NO: 481477 - DNA, 100 bp, Homo sapiens
cgcggacgccgctccgggcagccgagcctctgtgggagccggggccgcggcggcgcgggtgctccgggccgaggccgcgtatggtttgaagtggtgaaca

SEQ ID NO: 481478 - DNA, 100 bp, Homo sapiens
tgtatcaagtaatggtgcaaagcctgaaagttctctgtggcccatgaccttcggcctggcctgctgcgccgtggagatgatgcacatggcagcaccccgc

SEQ ID NO: 481479 - DNA, 100 bp, Homo sapiens
tgaacttcaatcccatcatttccagaaaggacatcacagcatgctgaatgactttgtaacaagaactcccaacctggaaaacaagaaggaccaaaaagac

SEQ ID NO: 481480 - DNA, 51 bp, Homo sapiens
caatcgcagtggaaaactgagtgagtcaactgagagttcaaatacaacaat

SEQ ID NO: 481481 - DNA, 100 bp, Homo sapiens
agataatgacaaagccagctgtgaggactacctaatgatttcgtgtgtcatcaatcttacagaagaagtgctgtgggtcaaagtgaatataaacatgaat

SEQ ID NO: 481482 - DNA, 82 bp, Homo sapiens
gcggcggctgcggaggcgcaggcagcaactgaggcagcggcaggctcaggtgcagccgctgtagggacggggtttcaccatg

SEQ ID NO: 481483 - DNA, 100 bp, Homo sapiens
gctgaggagaaagcggcgcgcggaggatttctctctgatcaaacggacagttcaggactcagaatctaaggatgaatgttcaccgtggcagtgacagtga

SEQ ID NO: 481484 - DNA, 100 bp, Homo sapiens
ctgaagataaaaagctttgaaaagtcgaattcatggtcgtggaagctgagcccatattaagagatgtcagaacccagcgggtgccgcttctccacccgag

SEQ ID NO: 481485 - DNA, 75 bp, Homo sapiens
taaagactggaattgagcaagggagtgatgccggttatctctgtgaatctcagacgccaaggacttattgttgtg

SEQ ID NO: 481486 - DNA, 75 bp, Homo sapiens
tggatttaagccagcctctcaacagatgtatcggcaagcagtgtaaacggaggacttggggaaaaaggaccacat

SEQ ID NO: 481487 - DNA, 50 bp, Homo sapiens
tcttcagtgaaacagcttttcataggatggtgattgctcacaccaaagcc

SEQ ID NO: 481488 - DNA, 75 bp, Homo sapiens
cgtgaagaacctgaaggacacactagtaccttctccaggcaaattccgttcccctgcagcaccatctcctttggc

SEQ ID NO: 481489 - DNA, 58 bp, Homo sapiens
gatggaatgtgctttagaagttaaaaaggtgcagttacctttagcagccaaggacgag

SEQ ID NO: 481490 - DNA, 50 bp, Homo sapiens
cagcaagaacgggaacaaaactctgaagcatcaagtgtacctgatttgtg

SEQ ID NO: 481491 - DNA, 89 bp, Homo sapiens
cgcccctcatgatggctgccaagacgggcaagattgggggcaattgaaggaacagactaaaaatcgtgtcctggaaggaaactacaggt

SEQ ID NO: 481492 - DNA, 95 bp, Homo sapiens
cctgcgcaggaagtcgcgctccaagagctccagcctgagccggctcgaggtccccaggtgcatccaatttttcaactttaccaaagatctctcct

SEQ ID NO: 481493 - DNA, 75 bp, Homo sapiens
ccgccattgagctagatgaagatactggaacattcagaatctacggagaggggtttcccattaatcaaaacacgt

SEQ ID NO: 481494 - DNA, 82 bp, Homo sapiens
ccctgaactacttcctcggtggctgcgccggaggcctgactctgggagcacgcaacaatgcagatcttcgtgaagactctga

SEQ ID NO: 481495 - DNA, 125 bp, Homo sapiens
cggaggacggggccgggcgacctgggcaccagcaggacccgaggccaggagccaggggcccagaagtgtactaatggtcacttgatgtgcgctggctgttttatccacctactagcagatgcccg

SEQ ID NO: 481496 - DNA, 75 bp, Homo sapiens
gagccgctgggcttcatcaaagttctccagtgggagctggagtggctgctggagattaaccggctcacgcatcgg

SEQ ID NO: 481497 - DNA, 100 bp, Homo sapiens
tgctggccagggaggccgagatgctgttcacaggaggctacgggctggagaaggacccgcagagatcaggagctatgaagacatgattggtgaggaggtg

SEQ ID NO: 481498 - DNA, 51 bp, Homo sapiens
caagtactaccggccaactgaagtggaatgttttaaaggaagttgggctac

SEQ ID NO: 481499 - DNA, 74 bp, Homo sapiens
caaggaagaccccaagttcaaggaactggtcaaggcctccggtgtggctgtctctgatggtgtcatcaaggtgt

SEQ ID NO: 481500 - DNA, 75 bp, Homo sapiens
gaggtgatgctggagacctgtgggcttctggtcgcactgggtgctggagaatctggtaaaagcaccattgtgaag

SEQ ID NO: 481501 - DNA, 94 bp, Homo sapiens
gggggcgcagagcgcgggaggcggcggcggcgcggagcccagggcgccctgcgtccggcagaggaggcgagcatcccgctcaggtgatgaggaa

SEQ ID NO: 481502 - DNA, 140 bp, Homo sapiens
atagaaaagtcactggaggagaaaacagaattcaaaggagaaattatgttctacaagaaaaacggttcgatacaagaggctgttttcctagcgtggcttgctgcctttggtaagaacatgtcgtccatcttgccattcac

SEQ ID NO: 481503 - DNA, 100 bp, Homo sapiens
aatgacttgagcaatcttcgtttttataagaataaaattccattcaagccagatgagtcatcctttttgaacttccatgactcagactgcgaacccaagg

SEQ ID NO: 481504 - DNA, 75 bp, Homo sapiens
ctgcctgcggagaatgtgacaatcactgctggtcagaggaagtgagctcacaatgactcaagctgccacatagtg

SEQ ID NO: 481505 - DNA, 87 bp, Homo sapiens
ggacgtctagagatgtgggcatggcagacaaatctgtaggatgaatctggttatagatggacaagagacgatcattctgcaagcagg

SEQ ID NO: 481506 - DNA, 122 bp, Homo sapiens
tccctggcaagattcttctgaattgtgctgccttggccaaaagaggtggtgtatgaggagagccgcatggtcagcctcacagccccctacgtgtcgggcttcctggccttccgagaggtgcc

SEQ ID NO: 481507 - DNA, 101 bp, Homo sapiens
gaaaaactggagagcttcatcaaaaatagtgatagctttgataaaaaagaggcacagttagatgaagaaggacagtttcttgtcagaataatatatgatga

SEQ ID NO: 481508 - DNA, 82 bp, Homo sapiens
gattccatttgttatcccacgacccatccttgaagaagctagagatgatcgctatggaaaatcctgcagacttgaagaagca

SEQ ID NO: 481509 - DNA, 103 bp, Homo sapiens
gaggccttcaagtgcatgatgtgcgatgtgcggaagggcacctccacccgacaatgcagatcttcgtgaagactctgactggtaagaccatcaccctcgaggt

SEQ ID NO: 481510 - DNA, 51 bp, Homo sapiens
aatgcgtgcactgcgtccctctagaggtgtggtggctcacgtctgtaatcc

SEQ ID NO: 481511 - DNA, 75 bp, Homo sapiens
ttctgctcacctggagaagggatggaaatacttcaacaagctatcatggtgaacttacttcagattgtgcgggac

SEQ ID NO: 481512 - DNA, 82 bp, Homo sapiens
acggtcaacgtggacggcttgacagccctgcaccaggtacccattcctggcccagtgggtaacaagagaatggttcattttt

SEQ ID NO: 481513 - DNA, 100 bp, Homo sapiens
tgtccggctgggacagagaaccatccaggttgagaattctcacttaattctaacaggagctggagccctcaacaaacgagtgatagacagccaagcagag

SEQ ID NO: 481514 - DNA, 82 bp, Homo sapiens
cgacctcgacgtcttgcctgtgtcccacttgttcgcggcctatagcctcgaggtgcataccggacccccattcgcatctaac

SEQ ID NO: 481515 - DNA, 51 bp, Homo sapiens
gccttccagctgtttgaccgaacagacctacaacaagaaaggggcctcccg

SEQ ID NO: 481516 - DNA, 88 bp, Homo sapiens
tctcattaaaagtaattcccaaccagcaaagccgtcttcctgcactacaggtgtaccaacagtaccgttattgccaccacaagtaaac

SEQ ID NO: 481517 - DNA, 60 bp, Homo sapiens
cccagattagaacacagttcctcagttcaagaagtgcctggtccctgtgaccatgaagac

SEQ ID NO: 481518 - DNA, 97 bp, Homo sapiens
tgatgcgtgtctcattaccaaagctgctctgtcttcccaggattctccccatttccaagagaagagcacagaagagggagaagtggctgctctgcgc

SEQ ID NO: 481519 - DNA, 80 bp, Homo sapiens
aacagcaaatatagacctgtatgcattcatcttgctggaacaggagatcatttggacaactagtggtttgaagagccagg

SEQ ID NO: 481520 - DNA, 118 bp, Homo sapiens
gaatattggggggctcggctgcagacttggccaaatggacgggactattaagatgaatttcctgaaataaaccgagcctcaattcgacaggatcacaaggggagattctatgaagact

SEQ ID NO: 481521 - DNA, 90 bp, Homo sapiens
gaaaacggcgagagtgggcgagaacgtccactgcgggccggcgaaagctgatatcccgttgttacagcaccgtttgtagaagagggtgtc

SEQ ID NO: 481522 - DNA, 75 bp, Homo sapiens
cgcagaaaccccgttgacaaggcactgctttttcatgacgaaaaatggctacaaacttcctagcacatgagaaga

SEQ ID NO: 481523 - DNA, 85 bp, Homo sapiens
cctggagaggatggaccgcatcgagaaggagcgcaagcaccagaaggccccagcacccgcagagcagacactgcgatgacaacgg

SEQ ID NO: 481524 - DNA, 60 bp, Homo sapiens
tgggtatggaggaggacctggagggcctgccttaagtgtgaaagtaatgactgatgaaag

SEQ ID NO: 481525 - DNA, 75 bp, Homo sapiens
ctccaatgatatctacagcacctatcacttgttccctccaagacaactgaatggctcttgcagccaatgccggaa

SEQ ID NO: 481526 - DNA, 100 bp, Homo sapiens
gagaagcaagaaggccctggacacagcaatatctctgggctttcacagtggaaggagcctgggagaggccaggcctccccggactgctagcctgcttttc

SEQ ID NO: 481527 - DNA, 90 bp, Homo sapiens
tgtcctgatgagctcattgagagaaccatgatggtcaattgccatgcacacttctgggtgcttctgtacacgtctctccctgacttctgc

SEQ ID NO: 481528 - DNA, 51 bp, Homo sapiens
acggagagaacacgagcccatcagatgggcagctctcaaaaaaggcacaaa

SEQ ID NO: 481529 - DNA, 74 bp, Homo sapiens
gggagagtagttgagccaaaacgtgctgtagcaagagaggattctgtaaagcctggtgcccatctaacagtgaa

SEQ ID NO: 481530 - DNA, 101 bp, Homo sapiens
cggcgctgctgaccgacatcgaagcaattctgtggtgttcttggtcacacatttatggagtttctgaagggcagtggagattactgccaggcacagcacga

SEQ ID NO: 481531 - DNA, 75 bp, Homo sapiens
gtgatccagaagtccagagctgaggactgcctgtttgcagattattttcgaaataccagtatttcgactccaggg

SEQ ID NO: 481532 - DNA, 100 bp, Homo sapiens
aaacccggagaccaaatccttgatactacgaggccaaagcgagactacgaggtggatggcagagactatcactttgtcatttccagagaacaaatggaga

SEQ ID NO: 481533 - DNA, 74 bp, Homo sapiens
gagagttccatggctgagagtaggctccgggccccggacctagagttgaaactgtgggacagccagacagaaga

SEQ ID NO: 481534 - DNA, 75 bp, Homo sapiens
gtcagctgtgtgtccagaacgtgccatggagacgcttaacggctcagggtttggagcggccaccaaggccatgtg

SEQ ID NO: 481535 - DNA, 75 bp, Homo sapiens
gtcagcccttccctgaactacactgtgctgccttaaaagtgtttacggtactactaaccaataacctgcttggct

SEQ ID NO: 481536 - DNA, 100 bp, Homo sapiens
accgggcctattcctggtaccagggtcgccccattatactgtgctccaaggacgatactgaaagttccaagtttgcgtataagacaattgagctgcccca

SEQ ID NO: 481537 - DNA, 100 bp, Homo sapiens
ggccaatgttggtgctggcaaaaaggttcaaaccttgtactactcagctgatcacaagctgcttgatgggaacctactagatggacaggctgaggtgttt

SEQ ID NO: 481538 - DNA, 88 bp, Homo sapiens
gccggccttggtgcggcgagccgagcgaggcagctctgagccgcgcgtctaacaaagtgccagtggtgcagcaccctcaccatgtcca

SEQ ID NO: 481539 - DNA, 109 bp, Homo sapiens
cccacatacaggagacaccaaagaagagaaagacaaggatgaccaggaatgggaaagccccagctgatcttgcatctttaatggataaaacatttgagagaaagttgcc

SEQ ID NO: 481540 - DNA, 100 bp, Homo sapiens
tgttgaagatcaaagctgtgagggctgctaagagttcccgattttgaaatgctgggctcactcagaagtggcagccccttgtgctttggagaatgaggat

SEQ ID NO: 481541 - DNA, 74 bp, Homo sapiens
gggttgcttcccccgctgcgagcatcctgaggttagcattacacttctcccagtggagcccatgacttctgatc

SEQ ID NO: 481542 - DNA, 82 bp, Homo sapiens
cgaaagctttcctaggccaaaaagagatcattcatttttctgaagccagaagatgagaactatcaaatgtgtgaaggaattg

SEQ ID NO: 481543 - DNA, 76 bp, Homo sapiens
gggtccctgaagagggaagacacgcggaaacaggagaatggtgttgaacgcgtgtgtcctgagagcctgctgcagt

SEQ ID NO: 481544 - DNA, 95 bp, Homo sapiens
ggcgaggagcgcctgcctgaggagagcagggaagatcagttttcctgccatccaggctgctccctccttcagcaactcattcccacagatcttcc

SEQ ID NO: 481545 - DNA, 50 bp, Homo sapiens
gtggaactaaagaatgacctgaggcctgtagtggtggagacacgcccagt

SEQ ID NO: 481546 - DNA, 98 bp, Homo sapiens
aaacctagattgaggttcaaggcttttagtggagaagggcaaaaacttggaagagttacactgttagaccttatgatagccaagataacgagtgatga

SEQ ID NO: 481547 - DNA, 82 bp, Homo sapiens
ccactttgcattgactggaaacaatggcatttacagaaagagtcaacagcagtggcaacagaatacagttatggccacccag

SEQ ID NO: 481548 - DNA, 100 bp, Homo sapiens
ctacacactgggagaaaggtgaaagatgggcaacttacggtcggactggttctgaaagaacagtaccttggctacaggaaaatgttcttgggagatgctg

SEQ ID NO: 481549 - DNA, 115 bp, Homo sapiens
acgaaatggattggagtgaaccggagaccccgaaaacggaagcgcagggagaaggaagaggtgtttgaaaaggtaagaatgattgatgttggctgatattggagtgctcattcac

SEQ ID NO: 481550 - DNA, 98 bp, Homo sapiens
cgggcggcgctcgtacttctggccactgggcgagcgtctggcagatttatcatagaatccccgactcagacccatcttctagcaaaacaaggcagatc

SEQ ID NO: 481551 - DNA, 75 bp, Homo sapiens
cccggacatgatcctctccgcctctcgaggtacggactaagagcctggcagagagcaggtgtgtgatacacgtcg

SEQ ID NO: 481552 - DNA, 82 bp, Homo sapiens
gagtgcgtgggggaccggctgttggcggactgcaaaattcaaaatggggctcaaggtattcgtttcatctacaccagagaag

SEQ ID NO: 481553 - DNA, 75 bp, Homo sapiens
agggtccctgaagagggaagacacgcggaaacagggatgctgagaacttgctggagtcacagccactgggatcct

SEQ ID NO: 481554 - DNA, 74 bp, Homo sapiens
agacagagacgcaagagaaaaatccactgccttccaaagaaattggacatgatataggtcgtggatgtatgggg

SEQ ID NO: 481555 - DNA, 74 bp, Homo sapiens
tacagcttacatcttgcatcctcaagcgatgagcaccatgccaggactgcccacccggccctgcttttatgaca

SEQ ID NO: 481556 - DNA, 101 bp, Homo sapiens
tgattgaggactgccagctggcgctgcaggaaacaattgaagatgttgaagaaatgctcaacaaccttcctggtgtgacatcggttcacagtcgtttctat

SEQ ID NO: 481557 - DNA, 97 bp, Homo sapiens
aaacatgtactacagccagtcttctatgtttccacatcggtcagaaaaagatcccaatagtattaagaatgatgaatgatcaactcatgtttctgga

SEQ ID NO: 481558 - DNA, 130 bp, Homo sapiens
ctctactaagtttggaagaatcttctgaacttcttcatttggttcctgtggaacgtgtgaagaatttagtattagacatcgagctgcttgtttgatccaagcacattatagaggatataaaggaaggcag

SEQ ID NO: 481559 - DNA, 82 bp, Homo sapiens
ggcctgcagcgggagctggacggcgagcgcgagcggcgcgagaaaccttaaattggaatgtgagaaactggcaagtgaaaag

SEQ ID NO: 481560 - DNA, 75 bp, Homo sapiens
gcttccgtttgttggtggaggaggtggcaggcctcggcggctttgaacccgaaacgtactgggatcgaatgcacc

SEQ ID NO: 481561 - DNA, 108 bp, Homo sapiens
gcggcgagtttccgatttaaagctgagctgcgaggaaaatggcggcgggagaacatccagtcatggataaaaatgagctggttcagaaggccaaactggccgagcagg

SEQ ID NO: 481562 - DNA, 82 bp, Homo sapiens
tcccaacctcatgaatctcatcgccaccatctttgtctttgcagtggtcatctatttccagttctcctgtgcctcctgttgg

SEQ ID NO: 481563 - DNA, 82 bp, Homo sapiens
ctgcggcggagggaaaaaggaagaggagaaggaaattgtcccgaatccctgcaggctcctcgtccatccaccggtccccaca

SEQ ID NO: 481564 - DNA, 100 bp, Homo sapiens
ccgaagatgactcggatacaaaaaggctttccaaagaggaaaagggtcgggtcggcagcggttctggtcggaacctgtgggtcagcgggctgtcctccac

SEQ ID NO: 481565 - DNA, 100 bp, Homo sapiens
agattgttcctaaaccagaagaggaggttgcccagaagaaaaaggcttgctatcagaggaagtggagaatgtgccttcctgaatgacaatggagtcaaca

SEQ ID NO: 481566 - DNA, 46 bp, Homo sapiens
ggggaaggagctgtaaagagagttcgatacaagaggctgttttcct

SEQ ID NO: 481567 - DNA, 90 bp, Homo sapiens
gtctctgtccgggggcctggctaaggaaaccctattacctccaggtacagcagttgcaaggagtttacagtttacaggaacagcacttct

SEQ ID NO: 481568 - DNA, 100 bp, Homo sapiens
ccccggtacatctgaaagccgggaaatgggatctgcaaagacttggagaacttcaatctgaattggcaggagtagctgatttctctgccacctatcttcg

SEQ ID NO: 481569 - DNA, 74 bp, Homo sapiens
cacagatgtccaagctgccaaaatgatgccaatgggtggaatgatgccacctggaccaggaataccacctctga

SEQ ID NO: 481570 - DNA, 90 bp, Homo sapiens
ataagactgcatctgttcatatgagactacagtggtagtggaggccgaagcggcgggaacagctacggctcaggcggggcatcctacaac

SEQ ID NO: 481571 - DNA, 75 bp, Homo sapiens
cagagagcgccctgagagaacagggtggccgcttggtccagataatgttaattcaagactctcgaagagaagctt

SEQ ID NO: 481572 - DNA, 98 bp, Homo sapiens
tgaaattaagattgggacctcatgtaagaatggagggtgttcaaagcttacaaaacactacacagcaaaataatgatctgctagactgctaacccgag

SEQ ID NO: 481573 - DNA, 90 bp, Homo sapiens
ttcctgatatagatgccagtcataatagatttcgagacaacagtggccttctgatgaatactttaatgggccgaattcattttgttttcc

SEQ ID NO: 481574 - DNA, 101 bp, Homo sapiens
ctctgatgacggcactgttagaatctgggactttcttcgttgccatgaggaaagaattctccgagctgtcccctttcctccaacccaacggcttactttca

SEQ ID NO: 481575 - DNA, 75 bp, Homo sapiens
tgaccagaagtcccgccgcttaaaggtgagaaagatcagtctaaagaaaaggagaagaaagtgaaaaaaacaatt

SEQ ID NO: 481576 - DNA, 83 bp, Homo sapiens
ccagtatctctgattatgcggtgaagatcgtcaaagccaacaagttagaccacggtccagaggtgtccttctaaagctggtag

SEQ ID NO: 481577 - DNA, 138 bp, Homo sapiens
agccgaggcaattacctggttgatgtggacggcaaccgaatgctggatctttattcccagatctcctctgtccccatagatgttcctcagccaagatcaaagctgtggtgtttgggctgctgcctgtgctctcctggc

SEQ ID NO: 481578 - DNA, 75 bp, Homo sapiens
cctggatccaggataacggaggctggggtcagtatagaccttctgatttgctgtgccctgagacatatgtttggg

SEQ ID NO: 481579 - DNA, 96 bp, Homo sapiens
ccgggcctgaggctgatccagcaggaggatataaaaaagaaggagccatattgtagggtgaccaagaatatggcccaggtgaccaaagccctggac

SEQ ID NO: 481580 - DNA, 98 bp, Homo sapiens
ggaatggtattggagacaaatatgaatgagattgttacacaaattgatgcacaaaataagctggaaaaatctgagataacacttgttatttgggccgt

SEQ ID NO: 481581 - DNA, 99 bp, Homo sapiens
ccttactccccaatatatacgtcttggatagactgttggtgcatgctacaaaaagagggtaccggtggcctctgccgagcaagctttgtgcagtctgga

SEQ ID NO: 481582 - DNA, 75 bp, Homo sapiens
caagctgataggctgcgctaccggaatgtcatccagcgagtgattaggagaaccaggtgcatcagcgcattgcgg

SEQ ID NO: 481583 - DNA, 82 bp, Homo sapiens
cccggaagcagattacgtggagtgacggtcatgctgcggcgtgagcatcagatccatgctgctgctgactcggagccccaca

SEQ ID NO: 481584 - DNA, 75 bp, Homo sapiens
ggcgcaggcccgcggggagcgcagcccggcggaggtttgtctacagattttgagcgttcgaagttgacccctgac

SEQ ID NO: 481585 - DNA, 99 bp, Homo sapiens
ctcccacctcagggcccccttcagccatgactcctccctacccgcagtttgagcctactttggggataaaggattatttggtcttctggatttggaggc

SEQ ID NO: 481586 - DNA, 100 bp, Homo sapiens
gcggagaggaaaggccgctcaggtgacctctgagaaggatgtgcaaacagctctggctctagcaaaaggaaagtttggccgtgtggatgtagctgtcaac

SEQ ID NO: 481587 - DNA, 134 bp, Homo sapiens
gccgtcgccggtggcatgttggatcggatccttctggagtccgtgtgccagcaacagagctgggtccgggtgtacgcaaatgcagccctgaggatttggctactgcatataacaacagggggcaaatcaagtac

SEQ ID NO: 481588 - DNA, 100 bp, Homo sapiens
atggacatgagccccctgaggccccagaactatcttttcgtaaaggcatgacttcctggcaccacagggaaaatcgggtgcaagcccagaaactatttcc

SEQ ID NO: 481589 - DNA, 100 bp, Homo sapiens
cttgtgttgagtttggaagatgacgaaagactcctgctgaaagaagacagcactctgaaagcagctggaatcgcagctcttcagtgggtcatctgtgtgt

SEQ ID NO: 481590 - DNA, 98 bp, Homo sapiens
agcaaagaccaggaagtgctgcttcaaacgggcagggctctaggaaacatatgttacgatagccgaagcaagatttccagatgtagcaaatgggttta

SEQ ID NO: 481591 - DNA, 90 bp, Homo sapiens
cgctccggagcgcggcgccgagcgcagggatacggcgcccagcggggagccaccttcctcgtcacgtttggaaactcagagaaacctgaa

SEQ ID NO: 481592 - DNA, 83 bp, Homo sapiens
ctggaagagctcgtggcgtgcgacaacgcggcgcagaattactaaaccaaggagatttaactgaaagacggacatgagcgtgg

SEQ ID NO: 481593 - DNA, 95 bp, Homo sapiens
cgagccagcgagccgccgacccgccgagcaaaatgaatgattacggacctgaagccaaagaacaagatgcgctagtggacagattgctgaccagg

SEQ ID NO: 481594 - DNA, 97 bp, Homo sapiens
ccggaaggcttcaaaggctgtcgcaaggaggaagggacttctggagccccgtcctggacaggagacagaggaagaaccctggagtcggaagccagaa

SEQ ID NO: 481595 - DNA, 75 bp, Homo sapiens
aacaagggcgccagggtagcggttaccaaggctaggtcccactcagctcaaaatcttcacttgtgaatactgcaa

SEQ ID NO: 481596 - DNA, 100 bp, Homo sapiens
attttacattcccactagcaggatttggattcaagatgtgaaataatcagcgatgggaaaatgcagctttataggaaacactcatgtgttactctccatc

SEQ ID NO: 481597 - DNA, 75 bp, Homo sapiens
gccggtgactttcacttccagccagctgtgaagaaggcgccatgtcagaaccggctggggatgtccgtcagaacc

SEQ ID NO: 481598 - DNA, 100 bp, Homo sapiens
gacttcaatgacatacggcaagattttacaacaaatgaagttgttttggctgtggagtttcacccaacagatgcaaataccataattacatgcggtaaat

SEQ ID NO: 481599 - DNA, 87 bp, Homo sapiens
acgttgaacagtcctgtatcaaaactgaagatggtttgaaacagcttcacaagaatatggttgagccccttatacccacgaattgct

SEQ ID NO: 481600 - DNA, 98 bp, Homo sapiens
gacggaaagcttgaattacctacatgatgcagtgagtgaggggggggccatggcggaggagcggcccccccggctggtggattacttcgtggtagctg

SEQ ID NO: 481601 - DNA, 133 bp, Homo sapiens
agatgaccctaattcagaaaagaagaagaagagggatactcccatgctgccaaagacccattttcaaagatactcaaggctctcttgatctggatgggagattttctcctctgtataaacaagacagtagcaa

SEQ ID NO: 481602 - DNA, 96 bp, Homo sapiens
cttactaatgaggaaagctttgtttgaccacctaactgctcgaggcattcaagttcaccctgaaaatgaagattggacctgttttgaacagtctgc

SEQ ID NO: 481603 - DNA, 91 bp, Homo sapiens
gagcggtggtttggacgccggcggagacgcgggcgagagagaactcgatgccaccgcaacggtattggcgaaccggcaggatgaaagtgag

SEQ ID NO: 481604 - DNA, 100 bp, Homo sapiens
cttgaggaaagccattgctgaaagcctgaatgttcagcttgttggtttagatgaggagagttcagagtttatttgcagaaacacctttgaccacccatac

SEQ ID NO: 481605 - DNA, 77 bp, Homo sapiens
caccatgtcagacgcagccgtagacaccagctccgaaatcaccaccaaggggaacgcccttttgcttgtgactggca

SEQ ID NO: 481606 - DNA, 120 bp, Homo sapiens
cgacaagatggcggacggggagctgaacgtggacagcctcatcacccggctgctggaggccttatgccagcctggaccatcttggaggcagtgtaggatcatggaagaactttgaattag

SEQ ID NO: 481607 - DNA, 96 bp, Homo sapiens
tgcaatcttaccagggaggccaagcgaccacccaaagaagatggccctgctgtggcaccagtgaccaacgggaacacaacggtgccacccctgaac

SEQ ID NO: 481608 - DNA, 75 bp, Homo sapiens
aaaatacaaatcacacgcataatggatgaaaggaaccgacagacctgtcatttactccatcctttatagtgatgc

SEQ ID NO: 481609 - DNA, 100 bp, Homo sapiens
gaaaaggtgtacttgcaagaaacctcaggacttgagtaacagcaacatggcggcacaggcaccaagatgtccaaccgagtggtctgccgagaagccagtc

SEQ ID NO: 481610 - DNA, 100 bp, Homo sapiens
gaaaaaactactaggatcacgcggcatgtattgagttacttcatgtgaaaacaaagatggttggaagagcatgcttgttcaaatcctgaatagtccacac

SEQ ID NO: 481611 - DNA, 50 bp, Homo sapiens
atcgcctgggatgtcatcaccctgcttgaagaagtcatggaaaaagaaac

SEQ ID NO: 481612 - DNA, 49 bp, Homo sapiens
gccgcgcccgcggaaccagaccaggcagaatccagagaccacatttgaa

SEQ ID NO: 481613 - DNA, 101 bp, Homo sapiens
aggttggagtaatagatttttccctctaccttaaggatgtgcaggatcttgatggtggcaaggacctagtgtaagcggaatggatccgcctttcggggatg

SEQ ID NO: 481614 - DNA, 89 bp, Homo sapiens
ctaaattaccagaatgcagggatgatgcctttatcaacccccacctggctaagatcttcgagcgggtgcggcagagcgcggacttcatg

SEQ ID NO: 481615 - DNA, 100 bp, Homo sapiens
ggcaaagagctggtggcctcaggtgaaaaagagccttgggattttaaaagactaccctcattcagcttttaccttagaaaagaaagtcatcaaaacagag

SEQ ID NO: 481616 - DNA, 97 bp, Homo sapiens
acaaatacaagtgaaaaaaatagactaatggattaacgtccctgtcgtgtgacattttctgcatgatgccttcttctgtagagtgggcgctttgcag

SEQ ID NO: 481617 - DNA, 74 bp, Homo sapiens
ctccatcaagtggaaagcatgcacggagcaggggctgaggggaacccatatggagaatgtgtatgacttctaca

SEQ ID NO: 481618 - DNA, 75 bp, Homo sapiens
tgacacgggctgggcgcccccagaagcccgggaacaaactgttctaagaacggaagcatctgggctggatggaat

SEQ ID NO: 481619 - DNA, 50 bp, Homo sapiens
gtgtgctgcttaaagaaatccagaagatgctgagggttggaaaagcaaaa

SEQ ID NO: 481620 - DNA, 88 bp, Homo sapiens
ccagccttcaaatcaccaactgtgggaaccaactgcctcttattgccttggccaaggagcgggagctggaactgaagaacacctggtc

SEQ ID NO: 481621 - DNA, 78 bp, Homo sapiens
gtgtttcaactgctgtattgcagaacagcctcagcctgggctaagccagctctaccataaccagagtcagggactctt

SEQ ID NO: 481622 - DNA, 91 bp, Homo sapiens
ccctggagcctcagttggaagcagccgatccagcctgcggagcctgtggggcaggaagttaaatgaagttcgaaagagattgaatgagcta

SEQ ID NO: 481623 - DNA, 88 bp, Homo sapiens
gcaaactgtggtaggaaaaacgtatggcctttggaaatgtgtgcttcctgaccttagctggatctccaaaatacaagtgaatcacccg

SEQ ID NO: 481624 - DNA, 50 bp, Homo sapiens
tcaaaagccaagtggcaaacgttggaggtaatgcttgaagataatgtttg

SEQ ID NO: 481625 - DNA, 100 bp, Homo sapiens
ctcccctctcggggcaacccagacgtgcaacaaagtgcgatgaaactcccacgttaacccacgaaaccttcaaagcactgaagccaggtctttctgccta

SEQ ID NO: 481626 - DNA, 101 bp, Homo sapiens
cctctgaaaagagcccaagagcaaagtccccggaagcggggtcggcccccaaaggatgagaagatcatgatcagaagcatcttcctgttcttggaccgcac

SEQ ID NO: 481627 - DNA, 98 bp, Homo sapiens
ggcagccttccccaggtgagcagcaacaagagatggcaagaaagaagctgaaaaaatttactactttggagattgtgctcagtgttcttctgcttgtg

SEQ ID NO: 481628 - DNA, 100 bp, Homo sapiens
gtcaccttgtcccgctgcagccgagatgccgggggagcggggccttccacaccccctccgtgggtgtgtgggcaaagtgcacctggagctgcggctgagc

SEQ ID NO: 481629 - DNA, 83 bp, Homo sapiens
ctttgatgctcgacaaaacagtgtcgctgataccaacaagctgggatagatgggcagcagaagatcatgtgcttcgtgatacc

SEQ ID NO: 481630 - DNA, 82 bp, Homo sapiens
cagctacagactttcctgagtcaggtcccttcaccgatgttgtcaccaccaacctaaagcttggcaacccgacagaccgaaa

SEQ ID NO: 481631 - DNA, 100 bp, Homo sapiens
gatgattttttggacgaattcatggaggcagtttcttccaagaaagaatacccacctcatgtccaaaaagttgaaattaatcctgtaaggttaagtcggc

SEQ ID NO: 481632 - DNA, 50 bp, Homo sapiens
ggctgtaaaacctggcactctgcttggtagagacggggtttcgccatgtt

SEQ ID NO: 481633 - DNA, 75 bp, Homo sapiens
tagattctcttgaccatgtgacatctgatgctgtggaacttgcaaatcgaaggatctgaacaatgttttgaacag

SEQ ID NO: 481634 - DNA, 99 bp, Homo sapiens
gttgcaacggagataaattcccggaaccgcgattcggcgtgtcagatgaaatcagacatcactgaaggagttgatattccaaagaaacctagattggag

SEQ ID NO: 481635 - DNA, 100 bp, Homo sapiens
gacataggagaagtgattcttgtgggtggcatgactaggatgcccaagggtgtccgcaatgttgccagtgtctgtctgcagattggctacccaactgttg

SEQ ID NO: 481636 - DNA, 100 bp, Homo sapiens
tggccatccaaggagtgaaggctagcctctatgtggccatgaatggtgaaggctatctctacagttcatgaggtctgccagtctttagtgaaacacagct

SEQ ID NO: 481637 - DNA, 90 bp, Homo sapiens
cgcctcggccgtcgtcctctacaatgaggagcgctacgggaacatcaccttgcccatgtctcacgcggaacgccaatctgaattgccaac

SEQ ID NO: 481638 - DNA, 76 bp, Homo sapiens
gcgccgaggcgcggcggcaggacgggaaccacgcgagctgcagccagtgatgatgatgatgattttgatgatgagg

SEQ ID NO: 481639 - DNA, 74 bp, Homo sapiens
ttcaaaataaagcagcatcacttattcagggatttatcaaagatgttcatgaagactcccttacagttgttttt

SEQ ID NO: 481640 - DNA, 83 bp, Homo sapiens
acctgcagaaggtctctggagacatcttcagcaggttacgggcaggacttgagtggcttcggacagggcttctcagaccccag

SEQ ID NO: 481641 - DNA, 114 bp, Homo sapiens
ttcctgcgtgctacggccctgtgggcctgggagctgcctctgaggaacacgccgcagacaatgcagatcttcgtgaagactctgactggtaagaccatcaccctcgaggttgag

SEQ ID NO: 481642 - DNA, 103 bp, Homo sapiens
ctggagcctcagttggaagcagccgatccagcctgcggagcctgtggggcagtaggtcccattagtccaccacagccaccttcagtcagtgcatggaataagc

SEQ ID NO: 481643 - DNA, 100 bp, Homo sapiens
cagaaaggctttctttctgagatttcacttccctgtcaactcttcagctcggcagatcgggagcggtgccgagaaaaatttccttactagatgacatttc

SEQ ID NO: 481644 - DNA, 100 bp, Homo sapiens
ggaggaggaggaggattcagggaataggagctggggagcccttctgcgccacagagataatcattcaggtcttcgtgagctaaggccaaacaaacaaaaa

SEQ ID NO: 481645 - DNA, 88 bp, Homo sapiens
aatcctcagaggaaattacccagtatattcaaagctacaagggatttgttgacataacggtgttgctgcgggcccgtgctatcgaaac

SEQ ID NO: 481646 - DNA, 100 bp, Homo sapiens
cttatacagagatgtgatgctggagaattatgagaacgtggccaaagtagcatcttggcgacagttgggacggagtttgacctacggacgctgagggcag

SEQ ID NO: 481647 - DNA, 101 bp, Homo sapiens
attttccccaagcactctcaggaacctggcaacagctccagaaacatgacaaggaggactttcctgcctcttggagatcagaggaggaaatggcagcagaa

SEQ ID NO: 481648 - DNA, 88 bp, Homo sapiens
cttcctgcagatcaccgggggcgccctggaggagtccctgaagatctatgctcctctgtacttgagtcaagggtccagagaaggagga

SEQ ID NO: 481649 - DNA, 98 bp, Homo sapiens
acgcatccatccagatgaacgtggccgagtaagactttgaccccgacgcaggcttcagtgattgccgcggatcagaagcctgagcactttggctcgag

SEQ ID NO: 481650 - DNA, 75 bp, Homo sapiens
gaacactaaagtgttacatgacagatgtatgagaataatcatgggccagactgggaagaaatctgagaagggacc

SEQ ID NO: 481651 - DNA, 83 bp, Homo sapiens
cggcgaacgcggagagcacgccatgaaggcctcgggcacggtactccaaagattcaggtttactcacgtcatccagcagagaa

SEQ ID NO: 481652 - DNA, 75 bp, Homo sapiens
cttggatgaagagctggtcattaagggatccatcctacagaagaagaatgttggtgaaaagcacagaaaccagtg

SEQ ID NO: 481653 - DNA, 75 bp, Homo sapiens
tgcccacggttatcatggacccatcaaagggtggttctcttcccaaagtggaagccaaattcatcaattatgtga

SEQ ID NO: 481654 - DNA, 75 bp, Homo sapiens
gtccactactccctcctgaaaggtttatttatgaaacagagcatcataatggcatagcagagttactggaaatat

SEQ ID NO: 481655 - DNA, 83 bp, Homo sapiens
ctggtggtgttgtcgtggccggagcggcccgcgcctgggctgccggcacttcgcggcagcaaaatgatgcttcaacacccagg

SEQ ID NO: 481656 - DNA, 89 bp, Homo sapiens
tttactccatgtgtgggacattcattgcggaataacatcggaggagaagaaacagcacttcttctcagtctcagacaagtactgcctcc

SEQ ID NO: 481657 - DNA, 97 bp, Homo sapiens
ttcaaaagcagtgcaactggctcagtattcacagggaaagctgtgagggcttctccagggaaagtgaccgaggcagtgaaagaggccattgacgcag

SEQ ID NO: 481658 - DNA, 97 bp, Homo sapiens
aagctgcttccctgttgctggagatcctgggcctcctgtgcaaaagcatgggtcaatacacctaagaaacaaggaggactgggacccatgaacattc

SEQ ID NO: 481659 - DNA, 100 bp, Homo sapiens
tgactgagatgctggtaaatgtcctcaacatctgctcagatgatgaactagggtcagaagaagatggatttgatggctggagtgcaatggcgcgatctcg

SEQ ID NO: 481660 - DNA, 123 bp, Homo sapiens
tccaggccgcccgggacttcctctttcctcacctgcgggaggagatcctcagcggcgccttgcggagggaccccactaaaccatttacttctaaagtgaaacaaatgcgattacatagagaag

SEQ ID NO: 481661 - DNA, 50 bp, Homo sapiens
gagggatataatgagtggaactgaggttccagaatctcagcttttacctg

SEQ ID NO: 481662 - DNA, 90 bp, Homo sapiens
gaggaggagctcccagatcataatgtggctgtggaacggtaacggcacagccaacaagatgaacggagctttggatcactcagaccaacc

SEQ ID NO: 481663 - DNA, 75 bp, Homo sapiens
gcggcttcctccagacctctcggcgcggtatctggcaccaattctgacccagtcatttgtgatccctggctcttg

SEQ ID NO: 481664 - DNA, 75 bp, Homo sapiens
tctgaatttgaaggtggaaaatcaacagtgaattgtaggcttgagaaggagaaagcagaaattgaacgcatgcga

SEQ ID NO: 481665 - DNA, 75 bp, Homo sapiens
tgagtcatgtggcagtggaaaatgcgctcgggctggaccagcaggagaatgcaagcctacagttcctgactacga

SEQ ID NO: 481666 - DNA, 100 bp, Homo sapiens
tcgttcggtggtttcttgtgaggacgcggcagcccgtggagtcggctgagggaaaagcgaggcaaggcaggcgggttaaaaagatcaagtggcatgagca

SEQ ID NO: 481667 - DNA, 75 bp, Homo sapiens
agggcctgcagcgggagctggacggcgagcgcgagcggcgcgagaaatcgagtaatcctgcctgtgtctgtagat

SEQ ID NO: 481668 - DNA, 90 bp, Homo sapiens
ggacatcatcatcaagagggagatggtgtcccaatacttgtacacctccaaggcttccgtccactctctcatcagtgactttaaggaccc

SEQ ID NO: 481669 - DNA, 100 bp, Homo sapiens
gacctcatgatccaccggcctcggcctcccaaagtgctgggattataggcgtgagccaccgtgcctggctgaaggccaactgcaagcaaatgcttattgt

SEQ ID NO: 481670 - DNA, 100 bp, Homo sapiens
ttttcggaacttcctttacctacgccttgatgtctcggaagggtgctgacctggaccgggagaagaaggctgccgagtgcaaggtggacagcatcgggag

SEQ ID NO: 481671 - DNA, 75 bp, Homo sapiens
gcggggtaatggggggtcagagtgccggaccccagcacacagaagccgagacggattggtccaaaggaagatttt

SEQ ID NO: 481672 - DNA, 88 bp, Homo sapiens
atcacgagtatatctttgaaggattttctatgtttgcacatgcccccctgaccaatataatttgcaagtaccttttgagtgaagaaga

SEQ ID NO: 481673 - DNA, 100 bp, Homo sapiens
gccggcaggtcgcaggagccctgggagccgccgccatggaagtgtatgctgacttgtaaagtgaagaagccagtggtgctgcgggtgttcttttggggta

SEQ ID NO: 481674 - DNA, 80 bp, Homo sapiens
cgccgcggcagaggctggacacgtggacatctgccacatgctggttcagcgtgaagcctctgcgggccttcttttcgtct

SEQ ID NO: 481675 - DNA, 75 bp, Homo sapiens
ggcagcatgtcggtggcggggctgaagaagcagttctacaaggcgagccagggtgatattcatgaggatttttgc

SEQ ID NO: 481676 - DNA, 82 bp, Homo sapiens
ttgaagccaacggagaactcaaggtcttcatagaccagaaccttagtcccgggaaagatctctgttgaggagctggcgcgga

SEQ ID NO: 481677 - DNA, 51 bp, Homo sapiens
ctgccgcactgaaaacatttctgtgagaggcctgtggaaatcgaatcaagg

SEQ ID NO: 481678 - DNA, 100 bp, Homo sapiens
tctgccagtattatgatgtgatttatttgagttggaatccaggtctttttaaagaatcaacatgtattcacagccaaacccatccaccagcatgaagacc

SEQ ID NO: 481679 - DNA, 103 bp, Homo sapiens
agaagatccttctcaacatcgagcatcgcatcatgttgcgggctgtgagaagacatttatcacagtgagtgccctgttttcccataaccgagcccacttcagg

SEQ ID NO: 481680 - DNA, 51 bp, Homo sapiens
cagacagaacctacaccatccgtgaggacacattcagctaacgtattttag

SEQ ID NO: 481681 - DNA, 75 bp, Homo sapiens
gttcctggagattctgattgagggacccagacatggagctgcgggaagaagcctggtctccggggccgctggatt

SEQ ID NO: 481682 - DNA, 100 bp, Homo sapiens
cgcgcggccgggctggcgatggaagatggaaggaaggagcgcagcgggaatgaaggatggcagcatgccgtgcattaaaagctgttttggtagatctcag

SEQ ID NO: 481683 - DNA, 100 bp, Homo sapiens
gaaggggaaaaatttcaacttctatttaaatttagtagtcgatatccttttgactctcctcagatgaatcagctttagataaaataatagaaaggtgcct

SEQ ID NO: 481684 - DNA, 50 bp, Homo sapiens
cttgccccttttggaacagaaacagtgatgcggacccaggggagcctgcg

SEQ ID NO: 481685 - DNA, 75 bp, Homo sapiens
gccgacctcttccactccgaggaaatcaagcaatgcaggcggggaccttataactaagacggctcttgacttttg

SEQ ID NO: 481686 - DNA, 74 bp, Homo sapiens
ctgctaaaaacaagactggggctgctcccatcattgatgtggtgcgatcgatgcctgaggaaacccagacccaa

SEQ ID NO: 481687 - DNA, 49 bp, Homo sapiens
ttaaggaccgttacgtttcccggtgattacagtggcgagatcttgaaca

SEQ ID NO: 481688 - DNA, 98 bp, Homo sapiens
ctcctctatgctggacatcaaatttccagctattattcatggactatccagtctaacagcttgccagttgagaacgatatacatatgtcagtttttga

SEQ ID NO: 481689 - DNA, 73 bp, Homo sapiens
ggctccccatactagtcgccggctgttaaaagacataatctgactaaaagatggcttatgaaaatcgtcgatg

SEQ ID NO: 481690 - DNA, 75 bp, Homo sapiens
gcccagggagaaccccttggatatcgccaggatggtgatagctgcaaacattgggtacgccactgtgaggccatg

SEQ ID NO: 481691 - DNA, 74 bp, Homo sapiens
cctgccccggtgcgcagacagagctattccagcaccagcagagcctcgccgctcctgctatttgccaaccgccg

SEQ ID NO: 481692 - DNA, 90 bp, Homo sapiens
cttctggatgtccttgagttcaaccagctatgctgggactcatgtatgtctactggactcagctcaacatgttccagaccttgaagtacc

SEQ ID NO: 481693 - DNA, 100 bp, Homo sapiens
tcaggtggggaaagatgctgttccaggcgcacactagtctacaaggccagagctttctggaagggggcaagttgcatgctgagaatttgaaaaatgaaga

SEQ ID NO: 481694 - DNA, 80 bp, Homo sapiens
ggaggccccgggcgcggcgcagggctgaacaagacatcctctttctcctgcgaagcccataacgccaagggggtcaccac

SEQ ID NO: 481695 - DNA, 100 bp, Homo sapiens
gtaggggccggtggacctgctccagcagctggtgctgcaccagcaggaggtcctgccccctccactgctgctgctccagcagcagcagcagcagcagcag

SEQ ID NO: 481696 - DNA, 51 bp, Homo sapiens
cgacggcgcagtgcgaagcgaaacaggccctgagacgggagttaaaggaga

SEQ ID NO: 481697 - DNA, 73 bp, Homo sapiens
atactaaaccacttagccaatcacaacgccaatctagaatactctgcggaccctgatgctcccataagacaga

SEQ ID NO: 481698 - DNA, 100 bp, Homo sapiens
atgcaggattcaaggaagaaattagaccagatgagaagtcaaaaacacagtgctctgtgcctatacagtgtacggataaaacagataaacaagaagcgct

SEQ ID NO: 481699 - DNA, 90 bp, Homo sapiens
ctcaagggttctcttgtttatcgagggttttgggctggtggtctcggcaggctctgaagagtgttgtactctatgttatcctggctcctt

SEQ ID NO: 481700 - DNA, 83 bp, Homo sapiens
ctaaaattgccaaggaactgggatttcaacctgaaagtggaggctgcgaaaataggttcaaaagatgtcgtgataaaggcaca

SEQ ID NO: 481701 - DNA, 74 bp, Homo sapiens
taaagtgattttttgcctttgttgattaactggacaaattcagtaacaaatgtggcaattattttggatctatc

SEQ ID NO: 481702 - DNA, 94 bp, Homo sapiens
gggcgctcacggccacggcgctggtcaccggggtctgcctgggttctgatggtcctttggctaccagcaaaccagtccctgcagaaaagtcagg

SEQ ID NO: 481703 - DNA, 100 bp, Homo sapiens
tcctgacagattcagcaacactaaacccagtacagcagtggaatatctagccgcccacctctccaaaatccatggcctggactggcacccagacagcgag

SEQ ID NO: 481704 - DNA, 75 bp, Homo sapiens
atctggtgtaccaggcgaagctggccgagcaggctgagcgatacgacggctgaaggggatgctaagggagataaa

SEQ ID NO: 481705 - DNA, 132 bp, Homo sapiens
gaagaggcggatgtggatatcgaaggggacgtggtagcggcggcgggggcacagccagggcactgctgggagacagtggcagccagaactggagcactggaacaacagataaatatgggcgtctggaccgag

SEQ ID NO: 481706 - DNA, 100 bp, Homo sapiens
cggcgcgtccagcgcagcccgacgttccgctgctggggtgacgcggcgcacggcgcggatggtggccgagtggcagtgtgtgggcttctgccacggcgtg

SEQ ID NO: 481707 - DNA, 96 bp, Homo sapiens
ttgctggacagatgaagagtgacttgtttctggatgattctaagaggaggccccgtgtgggccgcggcccggccctcaccatggagtccatgttcg

SEQ ID NO: 481708 - DNA, 83 bp, Homo sapiens
ttactgcagagaaacacggaaactaggaagaggaaattaactatctgtacttataaggtcaaggtcagcatctcctcgacgat

SEQ ID NO: 481709 - DNA, 82 bp, Homo sapiens
gaaaccgttcctagggatgcccgcgcccctcggctacgtgccggggctgggccggggcttcaagagatagaggaattcaaag

SEQ ID NO: 481710 - DNA, 75 bp, Homo sapiens
gaaactagagcaaataaccgttttgaaattgaccgcctgggtgcagaagatcaaggcggcgtctgagcagtacat

SEQ ID NO: 481711 - DNA, 89 bp, Homo sapiens
ccagtacagtggtgccttaaaaatggagtcagcctcactcctcccaaagaagtcctggagggtatttgggagccaaaaagaaaaagaag

SEQ ID NO: 481712 - DNA, 87 bp, Homo sapiens
acccggacacctggaagctgggaaatgtaataaaagactagtggccttagtgcccatgcccagtgaccctccattcaatacccgaag

SEQ ID NO: 481713 - DNA, 104 bp, Homo sapiens
cttcggtggactccttcggcagtccacccaccgccgccgcctcccaggaattctgtggccacactgcgaggagatcggttctgggtcggaggctacaggaagac

SEQ ID NO: 481714 - DNA, 75 bp, Homo sapiens
cgccgccgccgccgcccaggcgcaggagaactatgccatttttgggtcaggactggagatctcctggatggagtt

SEQ ID NO: 481715 - DNA, 50 bp, Homo sapiens
tgagactgctgatattctatgtccaagtgccgacgccaccgccgagccca

SEQ ID NO: 481716 - DNA, 75 bp, Homo sapiens
atttcctctggaagctaccacatgcaaacatacaagcagtctcacctcagctggaagatctggaagttactgtag

SEQ ID NO: 481717 - DNA, 90 bp, Homo sapiens
cctgcctcagcctcccgagtagctgagattacagatattaataaggcagcggaaagaagaaatatgaatacggctccatcaagacccagc

SEQ ID NO: 481718 - DNA, 75 bp, Homo sapiens
cctggtgagctgtcctcatccactgctcgctgcctctccaggatgtacagttacccagcacgtgtacctcctcct

SEQ ID NO: 481719 - DNA, 74 bp, Homo sapiens
ccgacatgtctctagtggcggaagccttcgtctcccagattgcaggtgacttctgggggaacagaaagcatact

SEQ ID NO: 481720 - DNA, 80 bp, Homo sapiens
tctctttctggcctggaggctatccagcacctgcgaccgcatcaagcagtccgccagcggaaccaagcggcgcgtgttca

SEQ ID NO: 481721 - DNA, 50 bp, Homo sapiens
aaaatgtcaacaaattgatggaccccatgccacagctggatgtgactgag

SEQ ID NO: 481722 - DNA, 83 bp, Homo sapiens
gattcgccgaggcaccgaggcactcagaggagggcgtctctggccgagcctctttttgtggaaaacgacagcagcagcagtgg

SEQ ID NO: 481723 - DNA, 125 bp, Homo sapiens
cggggcccgggcggcagcgctgcccgccaagcctcccaacctggacgccgctctggcgctgctccgcaaagagatgagtcatcctttttgaacttccatgactcagactgcgaacccaagggatc

SEQ ID NO: 481724 - DNA, 85 bp, Homo sapiens
tttcctcggcacactggataccattttcctcttctcctatgctgtgacttgcacacctacccctgtggagcgtgcaccctataag

SEQ ID NO: 481725 - DNA, 100 bp, Homo sapiens
ctgagtcaaagaagatgcctcgaactaaacaaattcatcccagaaatctaagagtgctgccaactgtccctattcagaaatcaatttgaataaagaccgt

SEQ ID NO: 481726 - DNA, 75 bp, Homo sapiens
atcagtttctggaagaagaagaagagcatgatcggcatgtccaccaagagcactgcagtttcctcctgaaggctg

SEQ ID NO: 481727 - DNA, 95 bp, Homo sapiens
actgaaagtttattgcattccaacagctcattttatgttgatacctcaagaagaacatgctgctaatggtccagaacttctgaggaaaaaacgta

SEQ ID NO: 481728 - DNA, 129 bp, Homo sapiens
ggttacaatatattatcagtgatctggcttctgcaagaattattgaacaagatgctgtagtaccttcagttgttgacctcctgtactggagagacattaagaagactggagtggtgtttggtgccagcc

SEQ ID NO: 481729 - DNA, 97 bp, Homo sapiens
cttcggtggactccttcggcagtccacccaccgccgccgcctcccagattgtcactgctgttccaagggcacacgcagagggatttggaattcctgg

SEQ ID NO: 481730 - DNA, 75 bp, Homo sapiens
attcgcgctgctgggcacccacggagcctccggggctggggttgtgtccactgtggtccccgactctgcccacaa

SEQ ID NO: 481731 - DNA, 75 bp, Homo sapiens
aatgtttagccaacccaaattaccttaattatgtgttcagagcaacattgttttgttgacacaagcatttagaag

SEQ ID NO: 481732 - DNA, 97 bp, Homo sapiens
cccggagcccggcgctttccccgcaagatggacggtttcgccggcagtctcggaaaatggcattcctatgaagaaagcacgaaatgatgaatatgag

SEQ ID NO: 481733 - DNA, 49 bp, Homo sapiens
tgaaaaaccaggacgaaaagatgtaggcaggtaacttgcagactcactt

SEQ ID NO: 481734 - DNA, 100 bp, Homo sapiens
ctgcgggccgctccgacggcggtccatcctgtgagttattctccccacctcagaagtaccagcttttggtgtatcatgcagattctctctttcatgataa

SEQ ID NO: 481735 - DNA, 152 bp, Homo sapiens
tggtcgagtatctcagaaaagaagacatggaatatgccctgcgtaaactggatgacaccaaattccgctctcatgaggtcaagagcaatctgaatccaaatgcaaaggagtttgttcctggggtgaagtacggaaatatttgagtagacggg

SEQ ID NO: 481736 - DNA, 83 bp, Homo sapiens
tgaacgtggacaaagctgttgtctcagggagcacagaagtttgcctgcaatgagatttcattctctacatttaaaggacatcc

SEQ ID NO: 481737 - DNA, 80 bp, Homo sapiens
aagaattgtgcaagtccttctgcagcaagccagaattcaaagaagctttttcactatttgacaaagatggtgatggaact

SEQ ID NO: 481738 - DNA, 96 bp, Homo sapiens
gttatgctcagtgctgtcgtcatgacctattggaccaactttgccaagactggttacatccttaatgttcagtcaagcagtgatgacaccagtggg

SEQ ID NO: 481739 - DNA, 75 bp, Homo sapiens
agcagagaatattttcaagggggaaagaagatgctgatatgctacaacacggatgaacctggaggacgtggtgca

SEQ ID NO: 481740 - DNA, 101 bp, Homo sapiens
caaagtaggagtgaagccatgctgcaggccacatgtgggactcctatctatatgggagaccaagacacattccaccccagtggggggtcccataccactca

SEQ ID NO: 481741 - DNA, 98 bp, Homo sapiens
gctctgaaaaactcttcaacactgttattgtaaacaaaggcttcccagctggcgtgtatgttgtaaagagagttcttcagcttcagcgtcatcatatt

SEQ ID NO: 481742 - DNA, 101 bp, Homo sapiens
aacgattacatgcagccagaagaggactgggaccgggacctgctcctggacccggcctgggagaagcagcagagaaaggtgctggagaatctggtaaaagc

SEQ ID NO: 481743 - DNA, 49 bp, Homo sapiens
cagatatccgtgaaggctctaggtgcttctcagcttcacgggaaagggc

SEQ ID NO: 481744 - DNA, 52 bp, Homo sapiens
atggatgtgaggcgctatggaaaggctggtccttactggaaggcagcatgtc

SEQ ID NO: 481745 - DNA, 75 bp, Homo sapiens
tcaatactacctttatttccaccatagtctcagagaaagatgtcacatctgctaaagcactgtatgaacatttga

SEQ ID NO: 481746 - DNA, 74 bp, Homo sapiens
ttataggtgatgaactagtccaggtgaccaagaatatggcccaggtgaccaaagccctggacaaggccctgagc

SEQ ID NO: 481747 - DNA, 90 bp, Homo sapiens
cttttccgttgccggtgccggcctagcgtcctggaattacttcaatcaagtagaagaagctctgatccagatccatgatccagaactcag

SEQ ID NO: 481748 - DNA, 100 bp, Homo sapiens
acggtcaacgagcggggcaaccactgcgagtactgcttcaccaggacacaactcagatgggaagttcatcgcccgggcacagcggatagagtacgactgt

SEQ ID NO: 481749 - DNA, 89 bp, Homo sapiens
catctttggtcattgtggtcagtgtgcagtggaagtatgcgagacttaagagctcaagtgactagtggtctcctgccatttccagaagt

SEQ ID NO: 481750 - DNA, 80 bp, Homo sapiens
ccgccgcagagtcccaccgccacagctggggccccccacattgcccacttcacggagccccttgtggaagccaccatcat

SEQ ID NO: 481751 - DNA, 50 bp, Homo sapiens
gctcttcctcccttcgctcgcaccatggagctgacacaatgagtgacacg

SEQ ID NO: 481752 - DNA, 99 bp, Homo sapiens
ttcaatccagttccaaggactccacgggatacactgcctctaggactgggacagatagccactgagtacctgcttcaaatcaccctgcacgttttctct

SEQ ID NO: 481753 - DNA, 96 bp, Homo sapiens
agaagagaagcccctaggccctattcaaaacaaatgttctcagtgcagctgagtcttggtgagcagacatgggaatccgaaggcagcagtataaag

SEQ ID NO: 481754 - DNA, 74 bp, Homo sapiens
ccatgagccacccctacaccatgacaacgccttacccttcgctcccagcccagagggagacgtggtgggcggtc

SEQ ID NO: 481755 - DNA, 101 bp, Homo sapiens
ctcacgtcagaggagtacacagatggtcttcgatgccaagaacatgatggctgcctgtgacccccgccacggccgatacctcaccgtggctgctgtcttcc

SEQ ID NO: 481756 - DNA, 76 bp, Homo sapiens
ctgtgaggtcatcggaatcccgacacctgtcctcatctggaacaagataggtgaaaatggtgatcccaaagccttc

SEQ ID NO: 481757 - DNA, 51 bp, Homo sapiens
caggaaccctattttggactgacgtggagaacgaccaggagcggttcctga

SEQ ID NO: 481758 - DNA, 75 bp, Homo sapiens
ccctcatggggaaaatctccccggtgactttcaggcggcttacagggagaacacagttggcctccaccgtttctg

SEQ ID NO: 481759 - DNA, 100 bp, Homo sapiens
ttcatcacccctctcttccaaatcctgtagccataaatgtctggctaatggcatttacaggagggccggtgcataaacttctcccgagttccatctcagt

SEQ ID NO: 481760 - DNA, 51 bp, Homo sapiens
ctcagatatcaatgctgtcagtggtacctttcaacagatgtggatttccaa

SEQ ID NO: 481761 - DNA, 90 bp, Homo sapiens
tgttcgacttcgatgatttactgaaatttgatgacctagatggaacacatgctctgatggtggggcaggagaccctgtaggaggaccccg

SEQ ID NO: 481762 - DNA, 90 bp, Homo sapiens
tgcccttgatgtcacaggatctcttgaaggtatctagaagagcagaagacagagaatggaaaagataaggaacagaaacaaacaaatacc

SEQ ID NO: 481763 - DNA, 100 bp, Homo sapiens
gaattccggagttgccatgaaatatggaaacgactcctcggccgagctgagtgagttcgtgccctcgtgaggctggcatgcaggatggcaggacagcccg

SEQ ID NO: 481764 - DNA, 50 bp, Homo sapiens
catttgcttgcagctgatgtgttattagatccaaaattaacgggacaggc

SEQ ID NO: 481765 - DNA, 101 bp, Homo sapiens
ttggattccagatttgtattcgatagaccactgcctgtgtctcgtcttgtatctctaattggaagcagatgtgggggctcaaggttctgctgctacctgtg

SEQ ID NO: 481766 - DNA, 76 bp, Homo sapiens
gaaagtcaagatctaggtcagcatccaggtgtcattccacacatccacaaatctctgattgggaagaaaggacaac

SEQ ID NO: 481767 - DNA, 100 bp, Homo sapiens
cgatgggaagtccttattattggccctccagatacactttagagcttgaagaaatccgcaaatgtgggatgaaaaacttccgtaacatccaggttgatga

SEQ ID NO: 481768 - DNA, 100 bp, Homo sapiens
agacgcttcgtcaagtggatgatcaagaacaaggtctaattggtagctgcaccaattcaagctatgaagatatggggcgctcagcagctgtggccaagca

SEQ ID NO: 481769 - DNA, 74 bp, Homo sapiens
cagaggaaactctgcattctcgcttcctggagcccaacgatgatcaaatatggcatcaacaatatccgggagct

SEQ ID NO: 481770 - DNA, 100 bp, Homo sapiens
ggctatggaaatctcagttctaggaaccgtgtcctttcgtcccggaggcagataagttgctgtcacaggattttgtgcagataatggaggatattattct

SEQ ID NO: 481771 - DNA, 90 bp, Homo sapiens
gctgggtccgctgagcggggcgacccgagttgctccgctctgctgctgattggtctgctggtataaagtaccatgaagagtccatccacg

SEQ ID NO: 481772 - DNA, 100 bp, Homo sapiens
tcttttggttggtgattttgatgatagccacaaagcaagcaggaggtcctgctgtactagccaccaaagcagctgctggtactaagaaatatgatcttag

SEQ ID NO: 481773 - DNA, 82 bp, Homo sapiens
tccgagaagagcagagcggagggagccccagacacgatcctccgagcggcggcgacggctgttgctaagggaggggacgcgc

SEQ ID NO: 481774 - DNA, 74 bp, Homo sapiens
atggatgcttgttggatgaattaatgaaccttgacccacaccaaggtctctaattaacagaagatggcaaagcc

SEQ ID NO: 481775 - DNA, 50 bp, Homo sapiens
gccgatgaagtgcagaggtttttttctgctctcagacaccttgagttcct

SEQ ID NO: 481776 - DNA, 51 bp, Homo sapiens
cctaccttcatatgactcaatgcttccaaacagtttcataatgaggtcctg

SEQ ID NO: 481777 - DNA, 90 bp, Homo sapiens
gctatcagcggccagcgcgggcgcggccggagaccgtggggcccccggttgccgccccctcgggtggacgccctgcttcatctggcccgc

SEQ ID NO: 481778 - DNA, 100 bp, Homo sapiens
ctggtgctgagctgctaggaagcccctatcgccgagctcgttggagcttgaacccattgtcacccctccgaatcacgtgcagaaaatttgatactgttca

SEQ ID NO: 481779 - DNA, 98 bp, Homo sapiens
atggcgcagaaaccccgttgacaaggcactgctttttcatgacgtaagactttgaccccgacgcaggcttcagtgattgccgcggatcagaagcctga

SEQ ID NO: 481780 - DNA, 90 bp, Homo sapiens
cttgtccggggagcagtatgccggaagctggttttcaggccacaaatgctttcacagactttgaagattatccaatgagaattttatatg

SEQ ID NO: 481781 - DNA, 75 bp, Homo sapiens
atgcatgcaccaaaacgaggacaggttgcagtgagagcagatgctggcaagaagcacttaccagacaagcaggat

SEQ ID NO: 481782 - DNA, 95 bp, Homo sapiens
attctgaactcaggacttggcaaaatcaaagaatcttcaggatggcagcaagtgtttacgagcccatatttggattggactatcgaacgagtagc

SEQ ID NO: 481783 - DNA, 100 bp, Homo sapiens
aactcgtgacgtatttggccagcgtgccaagaaaccaccatcatgggttcgggtcccatagaccccaaagaacttctcaagggcctggacagcttcctta

SEQ ID NO: 481784 - DNA, 100 bp, Homo sapiens
agcgtcaacagcagcaccatggactaagcctggagtaattcgcccagtacctgtaaaatccagaatattactgaaaaaagaggaggaagtctatgaaccc

SEQ ID NO: 481785 - DNA, 75 bp, Homo sapiens
aggcaagatgatccaccagcggttccatcctacacttgggtctaggcgttttacactgagattctccactgccac

SEQ ID NO: 481786 - DNA, 83 bp, Homo sapiens
cagacaagacggatgtgatgctgttgggatgaatgggttccggagagcagagtactcaaatacgtggacaccaatttgcagaa

SEQ ID NO: 481787 - DNA, 82 bp, Homo sapiens
attcagccagcacactcctcgcgagcaaggagtgtggccatctggggccgtgtggtatttgccactcaggagacatgtccct

SEQ ID NO: 481788 - DNA, 83 bp, Homo sapiens
ctgcgctgtgatgcctgcagagctgtggcttaccaggaaaccactgttgctgcgattgccccggatatgccagaggaacctga

SEQ ID NO: 481789 - DNA, 75 bp, Homo sapiens
aggatggtgatccgtgtatatattgcatcttcctctggctctacagcggtaaagctacttcttcttctaatccaa

SEQ ID NO: 481790 - DNA, 75 bp, Homo sapiens
cttgacttcaggggcatgttgaggaaactgttcagctcccacaggtttcaggtccctatcactgttcagtccatc

SEQ ID NO: 481791 - DNA, 105 bp, Homo sapiens
aagaacaggaccccgtacgtcactaccactgtctctgctcacagtgccaagctgataccccaatgtccttctttgactttgtggttgatcctcattctttccccc

SEQ ID NO: 481792 - DNA, 100 bp, Homo sapiens
aaaagtgggcggactctttccggacagacaggagagggatttgtcatcagcgtgtctcatggagaaccactctgcaatgtctcaggctgtgcagacaaac

SEQ ID NO: 481793 - DNA, 75 bp, Homo sapiens
tgatgctttaatacagaaccagcatggaccagttactctccacaagaaaattcacacaaccacagtgctcttcat

SEQ ID NO: 481794 - DNA, 90 bp, Homo sapiens
ttcactttcaaaccactttcagtaacaggtgacagagattggcaaagatgtgattggtttaaggatcagtcctctgcagtttcgctaagg

SEQ ID NO: 481795 - DNA, 78 bp, Homo sapiens
aggaaacagcaaacacgatacaacggaaacttgagcaacataagcatgcatatgcgctagaacttctatttgatcagt

SEQ ID NO: 481796 - DNA, 101 bp, Homo sapiens
tcttggcatttggctttgcctttctggacacagaagtatttgtgacagattctgaagactactttgaggtcaacattccaacagacctacgagcaaaacat

SEQ ID NO: 481797 - DNA, 125 bp, Homo sapiens
aacattgctacacatgctaaaagatgacagacttggacaacatgtcccaacattacatcccaggtggcttatctgcattcaaaaaatttcagtaaagcagatgttgcacagatggtcagaaaagc

SEQ ID NO: 481798 - DNA, 88 bp, Homo sapiens
acctgcaggtattgggagatccacagccaagagccaggaccccctagaagtctagaaatgaaatcgtggatgggaatgtgaagatgac

SEQ ID NO: 481799 - DNA, 80 bp, Homo sapiens
ctcccaaggtgctgggattacaggctggagcgcaatggcgtgatctcagctcactgcaacctccgcctcctgtgttcaag

SEQ ID NO: 481800 - DNA, 74 bp, Homo sapiens
tcccctgctagaagtgggggactcggcggggtttaagggaaaccacaggctccgagagtgatgggggtgactca

SEQ ID NO: 481801 - DNA, 75 bp, Homo sapiens
tccatctactgtctttttcttcaatgggcagcatatgaaagtggattatggtacaagccagctgccatgttgtga

SEQ ID NO: 481802 - DNA, 90 bp, Homo sapiens
cgggaagatggcggctgggttcaataacaaatgtggcaattattttggatctatcacctgtcatcataactggcttctgcttgtcatcca

SEQ ID NO: 481803 - DNA, 80 bp, Homo sapiens
gcagtatctgccgctcctggctcctagggcagcgcctagagcacaggtaggaggtgtgcaatctttggggggaacaggtg

SEQ ID NO: 481804 - DNA, 100 bp, Homo sapiens
aggaagttctccagcagctgattgtaatgaatttgcccaatgttttgatgattggcagagacccactgtctgatgccgacaaaaggatcaaggtggcgaa

SEQ ID NO: 481805 - DNA, 82 bp, Homo sapiens
gtggagaagcaggataatgaaacatttggatttgaaattcagattggccggtcgactgaaagccccattgattttgtagtaa

SEQ ID NO: 481806 - DNA, 100 bp, Homo sapiens
ctcagctcccaccctcagcccctgccactagtgagatgaccacgttcctgagactggcccagacgctgcggcactatggctacttgcgctttgatgcctg

SEQ ID NO: 481807 - DNA, 90 bp, Homo sapiens
ggcctgcgagcttcctcccagcggagccctgggcgagccgaggagggtgaggacaaaatcttcttaatcaacaagcttcactccatctac

SEQ ID NO: 481808 - DNA, 100 bp, Homo sapiens
gaagatgatgagcagtttgtttctctgtatggcacagaagaatatttggatttctctcaaaagtcccatctgccgtctattgtggtggaatccagtgagg

SEQ ID NO: 481809 - DNA, 75 bp, Homo sapiens
cccggctgtagccaagaactattcggttctctacttccaacagaagattgagaggatccagaatccagatctctg

SEQ ID NO: 481810 - DNA, 75 bp, Homo sapiens
cacaacttccccctcgggctccactgccagggtggagagattcaaccagttagcgtgaaagttggagataaagtt

SEQ ID NO: 481811 - DNA, 80 bp, Homo sapiens
cgcgccgccgctgccgccgccgcgcgcggaaatcatgagtggaggatctcaagtccacattttttggggtgctccaattg

SEQ ID NO: 481812 - DNA, 83 bp, Homo sapiens
ctcaagaaagaggtgggcaagatcctgtgcactgactgcgtgtcaagctgagctcccagactctgatacaggctggggatgat

SEQ ID NO: 481813 - DNA, 90 bp, Homo sapiens
cccacccagtgatgctcaaacagcatggagatatggaccaaaaggaacgagacgtgattatgagggagtttcgttctggctctagcagag

SEQ ID NO: 481814 - DNA, 88 bp, Homo sapiens
ggattccaagtaactcttatttgcacttttccagccattaactccaggctctcgagaatttgaagatgttgtaaatattctccattct

SEQ ID NO: 481815 - DNA, 100 bp, Homo sapiens
gatgaagttgttcattgtttgtcaccacaaaaaggacagctgccactgcagagccccgccatggaagacacgccgttggtgatatcgaagcagaagacgg

SEQ ID NO: 481816 - DNA, 90 bp, Homo sapiens
ctcagcgccggtgcatgtcgatgtggaagttgatgggtcgaaactaaatgtgaccagcacgtggaacctggcttcgcccttattgtctgt

SEQ ID NO: 481817 - DNA, 82 bp, Homo sapiens
ggaggacgtggaggaccattatgagatgggggaggagctgggcagggctgcgctggcaggactgtcactcagcctgatggaa

SEQ ID NO: 481818 - DNA, 75 bp, Homo sapiens
ttaagacggagttcctagtgcaaatgcaagtggtttatcagatactatcattttggatataatatcaaactatct

SEQ ID NO: 481819 - DNA, 75 bp, Homo sapiens
gaagaggaaagtcttgcctctccattttcttccgttcatgaggaaaatatatgcagatgatgaacattcttaagc

SEQ ID NO: 481820 - DNA, 83 bp, Homo sapiens
tggacctgaaacagaaattctggaacacctatatgactgctgtgccctaatccgccggtgcctggcccccaaaccttcttccc

SEQ ID NO: 481821 - DNA, 100 bp, Homo sapiens
gcgccacgctcagcagcatcagacacatgatccgcaagaacaagtaccgccccgacctgcgcatggtcttcgatgccaagaacatgatggctgcctgtga

SEQ ID NO: 481822 - DNA, 100 bp, Homo sapiens
cgaagatccggactctgggtgttttgctaccgtgaccgtttaggctatgaccagggccagagcactcagatctcagtcagaggagtctgcttctgccttt

SEQ ID NO: 481823 - DNA, 90 bp, Homo sapiens
ccagacccagcagctgctccacccggcacaggtccagaatctcgcccacccgccagaagtcgtgttgacagatttccagaccctggatgg

SEQ ID NO: 481824 - DNA, 75 bp, Homo sapiens
ctacagcctggtttgggtcatggcagcagtggtgctgtgcacagcacaagttgaaatggatgcagtcagaactga

SEQ ID NO: 481825 - DNA, 100 bp, Homo sapiens
tcaagatccaagaaaggtccgagtcaagtctctatttatgaggtggacaagcaagattgtcgcaaattttgcactactggcatcgatggagccatgacaa

SEQ ID NO: 481826 - DNA, 100 bp, Homo sapiens
ctctctatagtcaactccttcaagcatataagtggtcaaacaagctacaaggctttggccgaccaagtgtgtaccatgctgctattgtcatcttccttga

SEQ ID NO: 481827 - DNA, 75 bp, Homo sapiens
cactaaaatgtttttagcctatcaagttggtgtaatacggtgcccagtatgccgccaagaatgcagacagataga

SEQ ID NO: 481828 - DNA, 100 bp, Homo sapiens
ggaatatgccaaggaaaaactggagagcttcatcaaaaatagtgatagctttgataaaccattaaaaatctcaagtgacgactttgggaaactctggtta

SEQ ID NO: 481829 - DNA, 90 bp, Homo sapiens
ggagacgtgcagctacgaggaggccttcgaggctctggagtcctccacggctacggatgtgttcatgttcctgaccaaccggcacaccct

SEQ ID NO: 481830 - DNA, 98 bp, Homo sapiens
aagagctggctcggatgctgatggggctggacctgctggtgttcgcccacgaccatgttgatattcactgatggactccaaagaatcattaactcctg

SEQ ID NO: 481831 - DNA, 75 bp, Homo sapiens
cttcaaccactatctcagtgcaatgggatgagaacaagttgagcagtgccaacggccatgaagaacgtagcaaaa

SEQ ID NO: 481832 - DNA, 75 bp, Homo sapiens
tccgtgtgccctggttgtgagaagacgtctgtgtcgtgcggttgaatttttaggagaagaaggaactggcttggg

SEQ ID NO: 481833 - DNA, 75 bp, Homo sapiens
ctcatgaacagaaacacctaggaagggagaactgcatgcatatgcgctagaacttctatttgatcagttgcatga

SEQ ID NO: 481834 - DNA, 90 bp, Homo sapiens
ggtgggggttggcatgaccaagcctcccctggtgaagacacaaactgtcaccatctcagataatgccaatgctgtgaaaagtgaaatccc

SEQ ID NO: 481835 - DNA, 100 bp, Homo sapiens
cctggaatcgcccaagtccctctactcgcgagttttaccaacagactgcagtttcttcactaccaaaatgacatcattttccacctctgctcagtgttca

SEQ ID NO: 481836 - DNA, 50 bp, Homo sapiens
aagctattgctgggattttgaggagagatggcatagaatttgcttttaaa

SEQ ID NO: 481837 - DNA, 75 bp, Homo sapiens
gtctgaagttatatcgcaaaatgaaacgtgctctccaggtgccgtgagcgatgtggagatgcaggaacactatga

SEQ ID NO: 481838 - DNA, 100 bp, Homo sapiens
agttcttctgcagccgaaggcgatttgtgacaaagagtggcactactatgtcatcaatgtggagtttcctgtggtaaccttatacatggatggagcaaca

SEQ ID NO: 481839 - DNA, 95 bp, Homo sapiens
agtgtctgacatttcttttgtgcaagatgagcctcaagtgcttctgcattacatgtcagagatggctttggattccccgttctgtgtgctgctgt

SEQ ID NO: 481840 - DNA, 75 bp, Homo sapiens
acttcgagccatcccagaaccacagccaagtctggtaggacggcccttcagatcggggacagcctgaacaccgaa

SEQ ID NO: 481841 - DNA, 83 bp, Homo sapiens
gaccaaacctgtgataacctgtctcaaaaccctcctcatcatctactccttcgtcttctggattaactgctgaagtactgatc

SEQ ID NO: 481842 - DNA, 106 bp, Homo sapiens
aatatcttcgagctgaacctgaggaccattattttttaatggtactaggttttgacaagcttgcatcatgcgtgagtataagctagtcgttcttggctcaggaggc

SEQ ID NO: 481843 - DNA, 100 bp, Homo sapiens
tccttcgtcgctgttgctgccgccatacgcgctctccctgtttaggcatgagccatgagcccaagtccccttcgctagggatgctttccaccgcgaccag

SEQ ID NO: 481844 - DNA, 51 bp, Homo sapiens
tctgaaaggaaatccggaattatcacagaatggagtctcgcaccgtcgccc

SEQ ID NO: 481845 - DNA, 75 bp, Homo sapiens
cactgcagaggtgctggagctggcaggcaaagcggagcggagatcctcaaacggcctagtgcttcgcgcttccgg

SEQ ID NO: 481846 - DNA, 100 bp, Homo sapiens
cagatttctatgttcctgtctctgaaatgcctgaacacaagatccagtcatctgggggcccactgcagctttgggaactactttataaattgcagtttgt

SEQ ID NO: 481847 - DNA, 90 bp, Homo sapiens
tggtagagcagcttaagatggaagccaatatcgacaggataaaggatgagtagtatgtcagcactctttcagctatctatgtggatcagg

SEQ ID NO: 481848 - DNA, 87 bp, Homo sapiens
acctactgtggggccgcggccggaccgagcgcctcgacctcggtctgagacccaacatgagtgaagtttcctgcaagaaacgggacg

SEQ ID NO: 481849 - DNA, 75 bp, Homo sapiens
gcctttgcaggggagcctgagagccacaggttgtgcctctatgacatgattcagtccagagtaacactgatggct

SEQ ID NO: 481850 - DNA, 99 bp, Homo sapiens
gcgagagatggtcaggtctggagctcgaccgggccaggtgaatgaaaactttgccattgatttgatagcagagcagcccgtgagcgaggtggagactcg

SEQ ID NO: 481851 - DNA, 100 bp, Homo sapiens
cggcttcactgggcacccggcaagcagaacctgagctcgacctccgctcaattaaggaagtcgatgagaaaaaatgcctgtcttaaaggctgaagcgtca

SEQ ID NO: 481852 - DNA, 96 bp, Homo sapiens
cccacccatcaccccctcctcttcattccgcagcagcactccgacagttcgcctgatggcccccatctccctccaagttgtccacgtggagaccca

SEQ ID NO: 481853 - DNA, 125 bp, Homo sapiens
aacaaatagagctgccagaggttccctccgagccccttcctgagaagatcccaggaatccctttgcccacgtccagctgaagccgacagtgaccaacgacaggtctgcccccctcctcagctgat

SEQ ID NO: 481854 - DNA, 76 bp, Homo sapiens
ttcagcagagatgattgacttccaaaaaagccaagcttcttggacacttaatgattgttggcaagaaatgtgctgc

SEQ ID NO: 481855 - DNA, 83 bp, Homo sapiens
cgagaaagcttcagacatgcttataagacaactcttagctagtctcactgtcgcccaggctgcagtgcagtggtgccatcacg

SEQ ID NO: 481856 - DNA, 106 bp, Homo sapiens
atcaataccttctattccaacaaggagattttccttcgggagttgatctctaatgcttctgatatttcagatgcagaactccaggaagttgtaaaagtaggccaag

SEQ ID NO: 481857 - DNA, 87 bp, Homo sapiens
aacttgacactcaccctgaccggttttagctgaaaaggttcatatgagagctatgtccattgctcagagagtaatgctccttcaaca

SEQ ID NO: 481858 - DNA, 100 bp, Homo sapiens
tcctctggcccccggaaaacctaaccatgaagacttgaacttaatacagcaagaaagaccatcaagtttaccatcttcccaagggattgttgaagaaact

SEQ ID NO: 481859 - DNA, 80 bp, Homo sapiens
cgcccagcaccatgaagatcaagacaatgcagatcttcgtgaagactctgactggtaagaccatcaccctcgaggttgag

SEQ ID NO: 481860 - DNA, 90 bp, Homo sapiens
aaatttgttgagcttccaggtgcggagatgggaaaggttaccgtcagatttcctccagaggccagtgggagcatattaatgaaaagtgcc

SEQ ID NO: 481861 - DNA, 75 bp, Homo sapiens
acaaccctcgggatcacacttatgattggagattatttggtagcaattgaagagaaaaacaaagctacatttcta

SEQ ID NO: 481862 - DNA, 83 bp, Homo sapiens
gacgaagtggacaagttcaaggccaagttcctgacagcctggaacaacgtcaagtacgtgtgtcccggcatggatatccggaa

SEQ ID NO: 481863 - DNA, 100 bp, Homo sapiens
tgcaagggaaaaagtaaataaagctgctgtttttgaagagtttaaggaagaaatctctaaacgttttaaatcacatactgaccaacttgtgttgatattt

SEQ ID NO: 481864 - DNA, 76 bp, Homo sapiens
gcagaaggagatcaccgccctggcgcccagcaccatgaagatcaagatcattcctttctgacaaacgatgagctcg

SEQ ID NO: 481865 - DNA, 100 bp, Homo sapiens
ccggcccccgctggagcagcccggaggcagcgagcaaggagaaaggtctgccacctcttccttccatgcctccccgaaacttacctggcattgcacctct

SEQ ID NO: 481866 - DNA, 78 bp, Homo sapiens
gttaaggattccaagtaactcttatttgatgttctcaaatagtgatgaagctgtaatcaataaaaaacttcccaaaga

SEQ ID NO: 481867 - DNA, 87 bp, Homo sapiens
aaagaatgagaattctaaaagtttagaagaggaggaaaaatttgaccctgcctatatgaacccaatagcaatggcgagatcaagggg

SEQ ID NO: 481868 - DNA, 98 bp, Homo sapiens
gcccttagcgtggactgggctggccccggaagcccccacgggctctacctgaccctgcaggttggagcaaaacgtcccactcactggaggcacctgag

SEQ ID NO: 481869 - DNA, 98 bp, Homo sapiens
gaagcgatggcttcagacagcatatttgagtcatttccttcgtacccacagtgcttcatgagagggaagatcagttttcctgccatccaggctgctcc

SEQ ID NO: 481870 - DNA, 73 bp, Homo sapiens
cagcttccccacactcaagttctttcctgccagtgccgacaggacgaaagacctggtggaagaggaggctgag

SEQ ID NO: 481871 - DNA, 100 bp, Homo sapiens
aaataaacacagaaatagtccagaatgtcacaggtccagggcagaggaccaacatgggcattttgtttatgagcaagtggaggaagaagcgaatgcgcag

SEQ ID NO: 481872 - DNA, 100 bp, Homo sapiens
tgctgctgctgcgcctgggccagagcaaagactcaggtggactgaaggccgctatgatcgaattggtggaaaggttgaagttcaagagctcagaccctaa

SEQ ID NO: 481873 - DNA, 88 bp, Homo sapiens
ccggcggctaccggcggcggcgcgcagcgtgtcaggcggagagacccgccgccaggtcatcatcagatttgaaatatttaaagtggat

SEQ ID NO: 481874 - DNA, 75 bp, Homo sapiens
tcgagagctaccgcgccagacagacttttaatacaggcaggctatgatgttaatattaaagactatgatggctgg

SEQ ID NO: 481875 - DNA, 75 bp, Homo sapiens
tggtcacttgaaccttgggaatattgagtttttcagaagaagtgaagtcaagatgaagaaccatttgcttttctg

SEQ ID NO: 481876 - DNA, 100 bp, Homo sapiens
tcggagaggtgctcggattctcgtagctgtgccggcactgaacctaccagatgtatttgggttggtcgtcctcccattggaactgaaactacggatcttc

SEQ ID NO: 481877 - DNA, 50 bp, Homo sapiens
aagaaagacagctttgtggaagagggatccatctgtctctaagtctgtag

SEQ ID NO: 481878 - DNA, 82 bp, Homo sapiens
cggcacgccgcggcggggtgggtgcaagatgccgctgccggttcaggtgtttaacttgcagaagtcccgggcccagagcccg

SEQ ID NO: 481879 - DNA, 100 bp, Homo sapiens
tcaggtcatggcggtcgcggggcccgcgcccggagctggcgccagaactcccccactggaaaggattctgaaagaaatgaagtcagccctcagaaatgaa

SEQ ID NO: 481880 - DNA, 75 bp, Homo sapiens
cagacaagacacttttcagaaagacagattgatgtacagctatatattttgtcctttctttcacctcatgatctg

SEQ ID NO: 481881 - DNA, 90 bp, Homo sapiens
acccaaaccatgttccctgtgaaggtgaaagtggagaaatcagacttgccttcaaggtgtgcaagtaaggacttatctccagaaaagaac

SEQ ID NO: 481882 - DNA, 96 bp, Homo sapiens
atgaggtgacttggtgattttcctggaaaattatagatggtcatccagactcagagctctctctacagagaggaaattctccactgtgcacaccca

SEQ ID NO: 481883 - DNA, 89 bp, Homo sapiens
tgaccacaacactaaaaccaccacctgggcctccatgaagaagtggactattctgagaaactgaagttcagtgatgatgaagaggagga

SEQ ID NO: 481884 - DNA, 100 bp, Homo sapiens
aacagaggctggacccattggatcgaaggagacaaactccacctgacaacaagggaggtgtcacagttttccatttagatcaacaacttcaagttcttac

SEQ ID NO: 481885 - DNA, 75 bp, Homo sapiens
aactggtgagccaagggatcatgccgcgctttgggaacgatcactgcagtgcctgtcacgggtcctcaggtcagc

SEQ ID NO: 481886 - DNA, 90 bp, Homo sapiens
cgaatggcgagattgagcacgtgaccaagcgggccatcagcacccccgagagctcttgtcaggatggtgaagctgttcatcggaaacctg

SEQ ID NO: 481887 - DNA, 82 bp, Homo sapiens
gtcatccagccttagcaaaccagagacaggggcaagtgtccgagtggtgaatcagctacttacagagatggatggtctggaa

SEQ ID NO: 481888 - DNA, 80 bp, Homo sapiens
aaatgggaaggacaggcagagctaaacaaggtgtttcaagaggtattccagatcctctctgaatcggcagcaagatctat

SEQ ID NO: 481889 - DNA, 92 bp, Homo sapiens
ctcgcggcgagcggacggggtcgagtcagtgcgttcgcgcgagatccagagacaatggccccgatgggatggagcccgaaggcgtcatcgag

SEQ ID NO: 481890 - DNA, 82 bp, Homo sapiens
cgagcactaatatttaagaaagaagatgttaactttcaggggtttgtgaccatgactctggaaagcctagaggaaatacagg

SEQ ID NO: 481891 - DNA, 88 bp, Homo sapiens
agaatcgcatctcttgggtcggagaagccgtcaaggggcaaaaaggccccgagtcacttcaggtggtgtgtcagagtctcccagtgga

SEQ ID NO: 481892 - DNA, 74 bp, Homo sapiens
ggcagcggagccacagcacggagcgaggagctctcaacaggtgtcaggcagagaaggatctgaagagctgggtc

SEQ ID NO: 481893 - DNA, 100 bp, Homo sapiens
tcctccatgcgcagtcatgagtcgcttcaagtttatcggggcatggtctgcatgggataggagaaactgtccatgtcccatttccatttgatgaaacaga

SEQ ID NO: 481894 - DNA, 100 bp, Homo sapiens
ttagatgaggaatttcctcactatgattccctgtcctgcgcagatgcaattcaacaacctcttcaagaaaaattggtgtgatgaatgcagactctgctac

SEQ ID NO: 481895 - DNA, 95 bp, Homo sapiens
atcaaattgtatgtacgcagagttttcatcatggataactgtgaggagctaatccctgaatatctgagccttttcagatattaatggcaaagttc

SEQ ID NO: 481896 - DNA, 74 bp, Homo sapiens
gagcgaatcccagaccagctcggctacctggtactgagtgaaggttttcttagggaacatttggacaccttctt

SEQ ID NO: 481897 - DNA, 98 bp, Homo sapiens
agaaactggaggagtcccgctcgaagctagactaaatgtgttaaatgggcttgccaacaatatggatgatttgaagataaacaccgatattactggtg

SEQ ID NO: 481898 - DNA, 100 bp, Homo sapiens
ggaaggaacgaggcaaggagctaaagcagcgtgcgttcagccctgggactgattcttgctattccaaatcctcttccacgttgacagcccttcagatatt

SEQ ID NO: 481899 - DNA, 100 bp, Homo sapiens
gctggagcgaccccttgttctttggtggcgctgggtctgcggaagagggagctgctgaaggagctgctaccagtcatcgggcagaacctccgattccagc

SEQ ID NO: 481900 - DNA, 90 bp, Homo sapiens
cagcctggggctccttatggcaaccctaagaacatggcctacacggctctttcgacgtgtagcagcagctttgccgggaatggaaagcac

SEQ ID NO: 481901 - DNA, 98 bp, Homo sapiens
aagagtggaacaggtaatgagaatcttcgccttgcgtggtctcacgtgtgaaacatggctacagattggctgggaagtattgtgtccatcaattgtgg

SEQ ID NO: 481902 - DNA, 98 bp, Homo sapiens
aggcatggactcggagattggctgcctcatccgcttctatgcagctgtacacattgagaagataatgttgaaaggagtccagagaaaaagagctgaca

SEQ ID NO: 481903 - DNA, 100 bp, Homo sapiens
catccttgtaatgcgactagcaaccaaggaacaagagatgcaagagtgtacttggaagacttataaccctgccttctcccggttggaaatctggttccgg

SEQ ID NO: 481904 - DNA, 87 bp, Homo sapiens
gtggaagaaaatcataccatatcagatgcctcgcagagcaccaggcccaccgtgaaagcaaccatgtccaagggacctgcagttggt

SEQ ID NO: 481905 - DNA, 100 bp, Homo sapiens
tcgctagaactcagttgtgcgttgcggccagtcgccactgctaagatggctgtgccacccacgtatgccgatcttggcaaatctgccagggatgtcttca

SEQ ID NO: 481906 - DNA, 100 bp, Homo sapiens
accttatgccacagcatagcttgaccctgaagatcctggaagagaagctgggaggaaaagcatccgtacccttccgaagagcagaagaaacagttagcgc

SEQ ID NO: 481907 - DNA, 100 bp, Homo sapiens
atggtggcctggcgctcggcgttccttgtctgcctcgctttctccttggccaccctggtccagcgaggggtctaaattatggataataatggaatacctg

SEQ ID NO: 481908 - DNA, 83 bp, Homo sapiens
gccagtcctcatgaactcaaagctgcctcttgatgtcctgggcagggatcgacgagaacgtgctaggagcccagctggacgtt

SEQ ID NO: 481909 - DNA, 50 bp, Homo sapiens
ataagatcgtagccagacccccaggactttatggacagcagcctgctaac

SEQ ID NO: 481910 - DNA, 80 bp, Homo sapiens
atgtggtgtattttccacattggctttcttcatgtggatagatacttctcaagacatcacacagcgtgagtcaatcaagg

SEQ ID NO: 481911 - DNA, 75 bp, Homo sapiens
aactggccgggaggaccgcgcgggagagcacggatgggcaccctgggctcgatggcgaccattgacgaggtggag

SEQ ID NO: 481912 - DNA, 96 bp, Homo sapiens
tacaatagtcaaggtgttcatttctccacagacactacccaaagcagtccttcactacagtggcagacagacctgaaaattttcatctgaagcagc

SEQ ID NO: 481913 - DNA, 97 bp, Homo sapiens
gttgtgtttgtgaaacagagaaagataggcggccatggtccaaccttgaaggaagtgcacggctgtctataacgtgctgccgggtctcaggatggag

SEQ ID NO: 481914 - DNA, 100 bp, Homo sapiens
ccgtggcagcctgaacggagtgtgcgacggattgggagctgggagtgtccactcgccttccaccagcatggcaacgtcttcacagtaccgccagctgctc

SEQ ID NO: 481915 - DNA, 83 bp, Homo sapiens
cgaagaagctgcagccgcacctggccaaggatatcaacagtgatggtgtcctggatgagcaggagctggaggcactcttcacc

SEQ ID NO: 481916 - DNA, 100 bp, Homo sapiens
tggaggctggtgtcccggagcagtgcaaggaggagtttgtttacgaggacatggaggccctctgcagtgtcctgcgcactctggccactgacagtaacaa

SEQ ID NO: 481917 - DNA, 100 bp, Homo sapiens
cttggcgaggcctttcaccaagtccatgcattttgaaagcgaagcagaagccgtagaatcagcggcgagcctgttgaaagaacccacaggtgcatttcac

SEQ ID NO: 481918 - DNA, 96 bp, Homo sapiens
tgagcccagccgaggtaccgctgaagaggaatcaattttgcaccagccacaaaaacctacaaaagaagggaaattactgtctttaaatattaaaaa

SEQ ID NO: 481919 - DNA, 100 bp, Homo sapiens
ctggccagagcctggtcgagccggaggaagccaccagagacctccaggaaaccactgtgctgtccaacctcaagattagatttgaacggaacctcatcta

SEQ ID NO: 481920 - DNA, 110 bp, Homo sapiens
gcccgagctgaccctaggcctccaccctggcaggaatcccaatttgcctccacttagtgagcggaagaatggtgtgagatgcacaatgcgaaacctaggccccagctttt

SEQ ID NO: 481921 - DNA, 74 bp, Homo sapiens
ccggaaggatgctcctcttacacttttccgaagataatgagcccagccaaggccaaccgcgagaagatgaccca

SEQ ID NO: 481922 - DNA, 100 bp, Homo sapiens
attctgaaagctccggtattattctttgatagaaatccaataggtatgagaaagtgccagtcatcttggttgggaacaaagtggacctggaaagtgagag

SEQ ID NO: 481923 - DNA, 51 bp, Homo sapiens
ccttgcggcaggtcccaagaggagtgcatccgccccaacccttttccccct

SEQ ID NO: 481924 - DNA, 98 bp, Homo sapiens
agtgtcccacttgcatcaagctgggcatccagggctcgtacttctgctcgcaggaagatgatccctatgatcttgaagatgtttctgcacagaaatga

SEQ ID NO: 481925 - DNA, 83 bp, Homo sapiens
tctttgccaaggagagccagtgggaccccacgtggctgtacctgtgcaagagaggtttttagaacttcagccataaaaatggg

SEQ ID NO: 481926 - DNA, 73 bp, Homo sapiens
gcttttggggcgatggggcccaaatcacgctgcagatcccattataaccagcaacaaggcgtgcaggtatttt

SEQ ID NO: 481927 - DNA, 99 bp, Homo sapiens
ggctgaggtgctcatggtggaggtagagaacgttgtccacgaggacttccaggtcacggaggaggtgaaaaactatttgtcaatgaagattgtaaagcc

SEQ ID NO: 481928 - DNA, 112 bp, Homo sapiens
gttgctagaggcttcagaactccagcctaatggatcccaaactcgggagaatggactcacaccacccggcaagaactgctcactacggctccctgccccagaagtcacacgg

SEQ ID NO: 481929 - DNA, 100 bp, Homo sapiens
ttaagatcttcctgaggacaatggcgcaagatcgtcttcagctgttcatagcaaatgaaagctcattagcatctacactgaagacgctcctgttcttcac

SEQ ID NO: 481930 - DNA, 74 bp, Homo sapiens
cagctgcctacagaaccgtcccaaaatatggcaaagaaacctattctgagggcaccctcccccaggagacttca

SEQ ID NO: 481931 - DNA, 75 bp, Homo sapiens
ccccggaggcagagcggctgccatgaacacgatgatgaacgcgttaatttccctcaaagaaagaagaaaggccgg

SEQ ID NO: 481932 - DNA, 90 bp, Homo sapiens
agcacattgcaatgcattatagcaatcccagacctaagtttgaagattggctttgtaacaagatgcgtctgttactagagtggagagtct

SEQ ID NO: 481933 - DNA, 82 bp, Homo sapiens
ctcatggaggctgagcatttattcaggttgtggcagcactgcctgaaggtatgagaccagattctaatctttatggttttcc

SEQ ID NO: 481934 - DNA, 87 bp, Homo sapiens
tttctcctcctaatctgggcctcttgtcatgatccctgcatgtcactgagtccaccatgctttacagaagaagacagatttagtctg

SEQ ID NO: 481935 - DNA, 139 bp, Homo sapiens
gacctacccagatactgattccttcaacactgtagcagagatcactgggagcaaatatccagaacagccaaatgggcggactgttgaagtggctgagggtgaagctgttcgaacacctcaaagtgtaacagcaaagcag

SEQ ID NO: 481936 - DNA, 82 bp, Homo sapiens
tggaggatttgggggctgtagcccccccagtcagtggagacttaaccaaagagcccgcggcgccatggctcacgtcggctcc

SEQ ID NO: 481937 - DNA, 82 bp, Homo sapiens
tcgccgtggcgtcttggtgttctccacgctggttcgcagaacgccaatctgaattgccaacgcaaagcaaagcgagcttccc

SEQ ID NO: 481938 - DNA, 100 bp, Homo sapiens
acgcggcaaacgtaaatgcaaaggacatggccggccggaagtcttctcccctgcacttcgctgcaggagttgtgcagcatttgcagaacggtcagctgct

SEQ ID NO: 481939 - DNA, 75 bp, Homo sapiens
tcatcttcatggaaacgtctgctaagactgcttccaatgtagaagagggagaaaatccccttcaacattcctggg

SEQ ID NO: 481940 - DNA, 90 bp, Homo sapiens
ggacgggtccaggaaagaggaggaggaagacagcacattcaccaacatttctcttgcagatgacataggagttgatccctgaattttatt

SEQ ID NO: 481941 - DNA, 75 bp, Homo sapiens
ccctgctgatgtcagtgttatatcctccaggaatactggccagaagcgtaaaagatgtgttgttttcaatcaagg

SEQ ID NO: 481942 - DNA, 117 bp, Homo sapiens
ccgcgcgcagggcctgcagcgggagctggacggcgagcgcgagcggcgcgagaaagtaaaagtacacctgtaagccagcttggttccgcagactttcccgaggcccccgatccattc

SEQ ID NO: 481943 - DNA, 109 bp, Homo sapiens
tccttcccagccttcagaaattgccggtctgggagttgggggcaaggagaagatcctgtctgtgctgagacctataaccctgatgaggaagaggaagatacagatccaa

SEQ ID NO: 481944 - DNA, 100 bp, Homo sapiens
ctgttccacactttgactgttgaagcctcgacccacccagatgcactggttggcacagggaacttaggctgcggaactatgtcccggaggatgaggacct

SEQ ID NO: 481945 - DNA, 100 bp, Homo sapiens
gcctagggaggcgaggttcccgcaccggataggccaaagaggtgctgaaaaaatatttggagtccaaggaggatgtggctgatgcacttctacagactga

SEQ ID NO: 481946 - DNA, 103 bp, Homo sapiens
cgaattagttcaccaggattacaactatggactcattatgatgtagtgggcagcagtcagtgacaggtgtaacctctgtggatgacagcaacagttactggag

SEQ ID NO: 481947 - DNA, 100 bp, Homo sapiens
gaccggcgacagcagccaggagtcatgagcgacagcggcgagcagaactacggcgagcggggccctcatctttgtgtcccatggagccggagagcacagt

SEQ ID NO: 481948 - DNA, 50 bp, Homo sapiens
gcgattcttccagcagatatgaaggtggtataagttgaaatccaaaccag

SEQ ID NO: 481949 - DNA, 88 bp, Homo sapiens
cttatcgaaggatgtgcatgaaggacagcctcttctcaatgaaatgggcaagttcatgaaacctgggaaggtggtgcttgtcctggct

SEQ ID NO: 481950 - DNA, 80 bp, Homo sapiens
gccctcctcatttatgccatttcagctacagtgttcacaatgaggagactgtccttcctgtttcgcagatgaggaaactg

SEQ ID NO: 481951 - DNA, 74 bp, Homo sapiens
ccagaccttcctctgaaggcaaagtgacctgtgcttccccgggcgctgcctggacaggcctgcctgcgtgctgg

SEQ ID NO: 481952 - DNA, 100 bp, Homo sapiens
ccgcagtccaagtcccggaagatcgcgatcctgggctaccggtctgtgggtattagaaaactactcggatgctccaatgacaccaaaacagattctgcag

SEQ ID NO: 481953 - DNA, 122 bp, Homo sapiens
gagaaaataatgcagtgtatgccttcttaggcttgacagccccacctggttcaaagttttgtccatcaactaaaggcacaaacagatacctcacttctactggtgctgatggaacaatctgt

SEQ ID NO: 481954 - DNA, 83 bp, Homo sapiens
tgagcagcagattggaaaagtgaatggtgtgcatcacattaagctatcagttgagggatttgcagttgataaaatggctggag

SEQ ID NO: 481955 - DNA, 80 bp, Homo sapiens
gctcatggacggaagacccctggctctataagctgaattatggcagcccagtcaagaatgttgtaccatctttgggtagg

SEQ ID NO: 481956 - DNA, 50 bp, Homo sapiens
aatgccgagaaggccagtacggtactccaaagattcaggtttactcacgt

SEQ ID NO: 481957 - DNA, 83 bp, Homo sapiens
cctcgggtctcgggggccgctctgggatcccggccaccagcaattgtccgcactgagctagcctctccttgctagaagcttac

SEQ ID NO: 481958 - DNA, 100 bp, Homo sapiens
aaaagagatgtggggggattctcgacctgctaacagaactggaccttttcgggtggtggccttgtccatgtcacctgtggatgacactttcatttctggg

SEQ ID NO: 481959 - DNA, 75 bp, Homo sapiens
cgctcctaagcctgcacagccgcggcggcagcagcagtgagagggggcccaggcagtgccacttctgatctgggg

SEQ ID NO: 481960 - DNA, 100 bp, Homo sapiens
ccgccgggaggtactttgctggatcctgctggccactttcatcaagtatggtatgataaccctcagagtatttctttaaaggcaacatatatacaaaact

SEQ ID NO: 481961 - DNA, 100 bp, Homo sapiens
gatacagaggaaggaattgtcttagaaagtcctcattatgctgtgaaaatattagtatcaccttttgccatgatagcatttctttcattggacagttcct

SEQ ID NO: 481962 - DNA, 80 bp, Homo sapiens
aagacagacagtctccagggaggacggcatcggctatgatttccggcgcccactggcccagctgcgtgaggtccacctgc

SEQ ID NO: 481963 - DNA, 51 bp, Homo sapiens
agctccatgacttcatgcagagatcatccaatggcagaccagagaatggac

SEQ ID NO: 481964 - DNA, 100 bp, Homo sapiens
gcagaggatccagtgttcaccatcctggccccggaagcgctgtgcttcgccgtgagccgctcgctgctgctgacgtgcctggtgccggccgcgctgctgg

SEQ ID NO: 481965 - DNA, 100 bp, Homo sapiens
ggcagcggtggccaggagcgctatgatgcagagctgccccgttcagaccatggatcctgaggtgaccttgctgctgcagtgccctggcgggggcctgccc

SEQ ID NO: 481966 - DNA, 100 bp, Homo sapiens
actagcggactcttcttcgccttcgactgttcaacggttttgtgtatagcatttgaggttcttcagggcttgcagtatatgaacaaacatggtatagtac

SEQ ID NO: 481967 - DNA, 75 bp, Homo sapiens
gcgggacacacagcaggtgaccaccctccagctacccccgatttggaatctgagcatgatgagaggactcaagag

SEQ ID NO: 481968 - DNA, 74 bp, Homo sapiens
tggatggaacgctctacaagctgcacccgcggttcagataatgcacgtgtttcgaatcccactgtgatatgcca

SEQ ID NO: 481969 - DNA, 83 bp, Homo sapiens
ctttcatctaataccaaagctgctgatttgaagaacctctttggcaaatatggaaaggttcagcggcagtggatctgggacag

SEQ ID NO: 481970 - DNA, 75 bp, Homo sapiens
ggttaccaagaagccatacatgtggatccaaacttctacagcaaaaacttacttcttttaggaaagacatacttg

SEQ ID NO: 481971 - DNA, 82 bp, Homo sapiens
tgaagagtgtggctgtgaagctggggaagacgcagaaggtgaaggtgctcacgggcacggggttgttatgaggctcaaagga

SEQ ID NO: 481972 - DNA, 75 bp, Homo sapiens
gtgactgggcggtgccggcgccggagacgatgccgttgaggaggtgcgccagtctgtaactcctgccgagccagt

SEQ ID NO: 481973 - DNA, 98 bp, Homo sapiens
ttctccaagagaggcagcagggagggagaaatggcaaggaggttgctgccagcccatgtacaggcctggtctccaagtcctctcctaagaagcctcgt

SEQ ID NO: 481974 - DNA, 156 bp, Homo sapiens
tgagggattgctactgcacggtgaacctggaccaggaggaggttttcaggaccaaaattgtggaaaagtcactctggtactccaaagattcaggtttactcacgtcatccagcagagaatggaaagtcaaatttcctgaattgctatgtgtctggg

SEQ ID NO: 481975 - DNA, 101 bp, Homo sapiens
ctgcttatgctttctaagaggtgtcccttcaaagatgtgagagagaaaagtgagtttattctgaagagcatccaggtcgtagttcccccgctccctgggaa

SEQ ID NO: 481976 - DNA, 100 bp, Homo sapiens
gaaagaattaccactaccaagaagggatctatcacctctgtacaggctaaagtaaataatgccagcctgattggactgggttatactcagacccttcgac

SEQ ID NO: 481977 - DNA, 101 bp, Homo sapiens
ggaaactaggtcgatggtcggcggcgcccggatgggcagctgaggatagagggaggaatcagcagcttggaaattcaagcacgtgatctggcgggatgggc

SEQ ID NO: 481978 - DNA, 82 bp, Homo sapiens
gagtgaccgagaccgcggccgggaccgagggcggctatgagaggttttcctccgagtacccagaattctgttctaaaaccaa

SEQ ID NO: 481979 - DNA, 74 bp, Homo sapiens
agatggtttagtttatgaaccaaatctgaattatccagaacagaaagttgtgactgttggacagttcaaaattg

SEQ ID NO: 481980 - DNA, 80 bp, Homo sapiens
acgcaccccactcggcgtcgcgcggcgtgccctgcttgtcacagggacgagaaggtgcagagattgaaccttgggaagat

SEQ ID NO: 481981 - DNA, 99 bp, Homo sapiens
cgccgaagaagcatcgttaaagtctctcttcaccctgccgtcatgtctaagtcagagcattacccagaacgccatggaggaccagagcgccacggccgg

SEQ ID NO: 481982 - DNA, 98 bp, Homo sapiens
cgcggccccgctgaggggccgcaaggacgaggacgcctttctgggagaccccgacaccggtacgacctggcccagctgcccttcctgaccatgtgcgt

SEQ ID NO: 481983 - DNA, 95 bp, Homo sapiens
ccaccgtttcctccaggacagcacctagtcgtggccggaggagtctcagagctgtcagaaagacgttccatcctcagagcagcctgaactgttcc

SEQ ID NO: 481984 - DNA, 101 bp, Homo sapiens
gctggtgacgcctgagaaggtgaacagccgcgacacggcgggcaggaaatccaccccgctgcacttcgccgcagatgaggacggggacttggttgcctttt

SEQ ID NO: 481985 - DNA, 96 bp, Homo sapiens
gggggtcgtcgtggtccagacagtttagcagaacagcctccgcggctccggggagaagggcaaatcataccccttcagggggccattcccacctgt

SEQ ID NO: 481986 - DNA, 89 bp, Homo sapiens
ccatccccgctccccgaggccggccgcctggtcatggcgcagccgggcccggcttcccagcctgacggaactggagctctgctatcgaa

SEQ ID NO: 481987 - DNA, 95 bp, Homo sapiens
cttcgtgagtttcgctctaaactgcccttgaaatgaagctggacttggagggtatttgaagtataccatacaactgttttgaaaatccagcgtgg

SEQ ID NO: 481988 - DNA, 100 bp, Homo sapiens
gtggatcaagcaggttttaaatcaagatttaacattccaacacataaaaattatttatccaacagctcctcccagaggtgacattgtgattgcaaaaagc

SEQ ID NO: 481989 - DNA, 86 bp, Homo sapiens
ttggatatcctgaaagatcaatgtgagattacgtactataggtgaacttttagctcctgcagctccttttgacaagaaatgtggtc

SEQ ID NO: 481990 - DNA, 90 bp, Homo sapiens
tgagtgcactggcaacctcaccaatgcagagaaccgaaagtttcctacactactgaggtttaggggcactgtgaagcaaaagccacgcct

SEQ ID NO: 481991 - DNA, 75 bp, Homo sapiens
agaccagagcattgaagatcagtacaaaaattcttcaagaaatctaagatacaaactggactctcaggacaaaac

SEQ ID NO: 481992 - DNA, 51 bp, Homo sapiens
gccgatttcatgactaaccagtactgctgtggatgtttttcgaaggataat

SEQ ID NO: 481993 - DNA, 100 bp, Homo sapiens
tcggtgtcggtggccggcagtcatctcgcggccgttcaggtgagatgagtgagagccgagcaaagagagttagaataaaagaggtagatggctggaccct

SEQ ID NO: 481994 - DNA, 75 bp, Homo sapiens
tcagcctcttccagaaccagccagctaggcatccaaacagagcaacttgctgagcttcgtcaggaatttcttcga

SEQ ID NO: 481995 - DNA, 101 bp, Homo sapiens
gtgtcagtgttaaaggaacctctacaacgaaggtgaagccacggaagataaggaacttgctactaccagcaccatgccctaccaatatccagcactgaccc

SEQ ID NO: 481996 - DNA, 75 bp, Homo sapiens
ctataagcagcttcggaaaggagccaatgagggtcgctttgctgttcgtgatatgagacagacagttgcggtggg

SEQ ID NO: 481997 - DNA, 51 bp, Homo sapiens
gtggacttcaccaggatattgaagagaaatacagcccctcggaccctgcat

SEQ ID NO: 481998 - DNA, 87 bp, Homo sapiens
caacctctcccccggctccatcgacctcaaggacatcaacttccggccgcagatgtcccaggttattcagcttctcaaggctggaaa

SEQ ID NO: 481999 - DNA, 75 bp, Homo sapiens
ttctcaattttctttctcagaaagcagaggctcagagcttggagacagacgcgaagcagcagttttgggaatttc

SEQ ID NO: 482000 - DNA, 100 bp, Homo sapiens
agttttcagtcgcagacctctcggttcagatattcacggttccttcacttctccaacctgagcggcaagacccagatggacatgggcacctaggggcttt

SEQ ID NO: 482001 - DNA, 82 bp, Homo sapiens
cagccaagccatatctaacagaactatcttcaacttttcaggtactccaaagattcaggtttactcacgtcatccagcagag

SEQ ID NO: 482002 - DNA, 100 bp, Homo sapiens
gtggacaccgctctgcagaactttgcctctactttctgctcaggtgttgacttcaaaatcaaaactgtagagctaagaggaaagaaaattagattacaga

SEQ ID NO: 482003 - DNA, 51 bp, Homo sapiens
gacattgcatcttcaagactgtgtggttggttctagctattgccatggtac

SEQ ID NO: 482004 - DNA, 129 bp, Homo sapiens
ccaggatctgtctatgtgctgtattgtgtggccactgggactttgcagacatgatggtgataaggagcctgagagtgtgaacatggctacgcctcttcattcccgtccatgccgagcccccgactgcag

SEQ ID NO: 482005 - DNA, 100 bp, Homo sapiens
ctggctgtgggcatctttgggctgtgcacggcgctggtgcaggtatggaacctggctaactgcaagctgaagaccaaccacattggccacacaggctatc

SEQ ID NO: 482006 - DNA, 98 bp, Homo sapiens
gggagtggtgcctcatggaaagcgaccccggggtcttcaccgagctcattaaaggattcggttggactccatgaaagaattgcacaaaacaaatcgac

SEQ ID NO: 482007 - DNA, 101 bp, Homo sapiens
agctcaggacagggctgaggaaccatgtctccatccccgaccgccctcttctgtcttggacatgtcatccagtgacagtgactcggactgggatggaggca

SEQ ID NO: 482008 - DNA, 83 bp, Homo sapiens
gcctgacgcccaccctcaatggcggaatccacattcatctcaatggaaggatcctgccttaagtcaacttatttgtttttgcc

SEQ ID NO: 482009 - DNA, 75 bp, Homo sapiens
agtatcatgctggccaagaagatcatcattaaggacggaggcacggcctactttaaggctggccaattctgcaag

SEQ ID NO: 482010 - DNA, 50 bp, Homo sapiens
cacggggtgctgcagatcctgttccaggcactatgtcgtccgaggcccag

SEQ ID NO: 482011 - DNA, 75 bp, Homo sapiens
tggctacttcatattttggaaagcagtttttaagacaaccgatgcagcctcagtgttcctttgccttgggggttt

SEQ ID NO: 482012 - DNA, 82 bp, Homo sapiens
gcaggccctgagcacgctgctgtgtgagcagcaggggaacgcccttttgcttgtgactggcagggctgcgacaagaagttcg

SEQ ID NO: 482013 - DNA, 75 bp, Homo sapiens
aaaaaaggagcttgccttctgagctttgtaccaaagacctgggaaaagccatcgaagacggcaatttggaggaaa

SEQ ID NO: 482014 - DNA, 100 bp, Homo sapiens
ggtttgcctttcaattagtaaagctttttggatctccaggcgttccaatggggggctcgaatggttcgtgaactctttgaaatggccagaacaaaaaaag

SEQ ID NO: 482015 - DNA, 101 bp, Homo sapiens
ccggagctgggccgcgaacacctcactattgatggtgtagcgctttaggggaaggcgctgttcttgctggctggtgccccagggcctggagaggtctgaag

SEQ ID NO: 482016 - DNA, 75 bp, Homo sapiens
aaggagcttcaaacccaaagagccgaggcctgcctggagccccagatcaccccttcctactacaccacttctgac

SEQ ID NO: 482017 - DNA, 139 bp, Homo sapiens
acgctgggcaagggcaacttcgctgtggtgaagctggggcggcaccggatcaccaagacggagattgatatcagtaaatgccattatttagtggatttggacaccatgagagaaacaccccgggagccaaaatattcat

SEQ ID NO: 482018 - DNA, 83 bp, Homo sapiens
gagcgccgcgcacttcgtcatgttcttcgcgccctgaagccccatgtgccactcccctgatctgcagcttcggtaggccggtg

SEQ ID NO: 482019 - DNA, 100 bp, Homo sapiens
gaaatgttgtccaaagttcttccagtcctcctaggcatcttattgatcctccagtcgaggagcaggggagagaagacagaagaggttggagaggtcaggg

SEQ ID NO: 482020 - DNA, 80 bp, Homo sapiens
atcctgaggaggcagctgcggtggcagctgctgagttctcggtgaagatgcagagagaacttgtttatgcaagaggagat

SEQ ID NO: 482021 - DNA, 74 bp, Homo sapiens
tagaaaatgagcagatactgaatgtaaaccctgcaggttcagcgtcttccatttctttcaagctcaaatctttc

SEQ ID NO: 482022 - DNA, 100 bp, Homo sapiens
cctccccaaccccaccatcccaccaaagggggctgctgaccgagagagctcactcagccaggtgtgagcctcagcagcgatttcattgctggcttttgtg

SEQ ID NO: 482023 - DNA, 76 bp, Homo sapiens
gtggcatccacgcttaaacaggtgaaacatgcatcagaagagctaacaattgctggaatgacctttacaacttttg

SEQ ID NO: 482024 - DNA, 75 bp, Homo sapiens
cttggagccagaagctacatgacccctaaacgcaaccatgtccaagggacctgcagttggtattgatcttggcac

SEQ ID NO: 482025 - DNA, 97 bp, Homo sapiens
tgaactctatagattctgctggtatacagctacatccaggagagaatgctgacagtcctgcaggttttgctgttactgctcagtgtagtcacacctt

SEQ ID NO: 482026 - DNA, 88 bp, Homo sapiens
gggagatggtgtcccaatacttgtacacctccaaggctgttgatactgcctctccaagcccaatggaaacatctggatgtgcccctgc

SEQ ID NO: 482027 - DNA, 90 bp, Homo sapiens
ctagctttggcgaggggacggagccggatcaggagccgccgccgccatatcagaaagggctattgcaagacacgaagtccgagaaattga

SEQ ID NO: 482028 - DNA, 82 bp, Homo sapiens
cgatgttgtacctagaagactatctggaaaggaggttatattcaaaagaaaaaggaactgtggggaatctgtatctttattg

SEQ ID NO: 482029 - DNA, 59 bp, Homo sapiens
atcctcagcgccccagcgatccggtgcccattagaaaatgtggacacagacttgccagg

SEQ ID NO: 482030 - DNA, 75 bp, Homo sapiens
ggacatgtatgaatctgcaaacaatcgagttaaaattgcagagttttctcgtactccagaagactttctaaagaa

SEQ ID NO: 482031 - DNA, 100 bp, Homo sapiens
tgatgatcagaaacttatgatctgctgggcatgctgtgtgcttgcatcgtgttgtgcagaaggagtagagatcctgcttacgagctcctcatcactggcg

SEQ ID NO: 482032 - DNA, 85 bp, Homo sapiens
gcgctgaggagctggaaactttcccggcagggtagatatggattcccagtttctccagcggccagtgctccccctagtccacaca

SEQ ID NO: 482033 - DNA, 107 bp, Homo sapiens
gaaacccttcggagggtattcccgcaacgtcacccatctgtactcaaccatcttagggcatcagattggactttcaggtctataagggagaattccaactacctgac

SEQ ID NO: 482034 - DNA, 75 bp, Homo sapiens
gtttgtcctggcccacgcgcagcggccgcaagtcgtccctcatggaccttgctgacgtcttcacggccccagctc

SEQ ID NO: 482035 - DNA, 75 bp, Homo sapiens
caggagtcatttctgttccgcacaggcctgctgaactgggtgctttatataggttccttggacacagcatgaatt

SEQ ID NO: 482036 - DNA, 73 bp, Homo sapiens
ggaggcaacggtggacacgtcattctgagagtgcattcccttattcgtggaagcagccttagaaagactgaca

SEQ ID NO: 482037 - DNA, 100 bp, Homo sapiens
ccgcgcgctgcgcgccggacccgctgcccctgccggcccggccgggtcgggcggcccaggatcatgcggccagatgatgccaacgtggccggcaatgtcc

SEQ ID NO: 482038 - DNA, 82 bp, Homo sapiens
ggagttgtcggcgccgcggccgctgcggacggacgctcgcctgccggctgagaagatggctgtgccacccacgtatgccgat

SEQ ID NO: 482039 - DNA, 96 bp, Homo sapiens
atcttctactattctgtgttgttgttgaccctgtatacagtgctgggtttcagcaagcagatggtggaaattcttcacaaacataatattcagttt

SEQ ID NO: 482040 - DNA, 75 bp, Homo sapiens
aggttcacggacgagtatcagcttttcgaggagcttggaaaatatggaatgtgcagatgtcccactattaactcc

SEQ ID NO: 482041 - DNA, 100 bp, Homo sapiens
gtttgggcataccaaaaggagaggaaagaccacagcaagattctttcattcgtctcctcctagcctgggggaccaggctcgaactgaccctggacatcaa

SEQ ID NO: 482042 - DNA, 74 bp, Homo sapiens
tcagctgctgaaacgtctggccacgaccatgctcgacagctgaccaaggccatgatgcgaaaggccacggccag

SEQ ID NO: 482043 - DNA, 80 bp, Homo sapiens
cagtgggacgtctgagactttctccttcaagtacttggcagatcactctcttagcaggagctcttgtccctggcaaagcg

SEQ ID NO: 482044 - DNA, 100 bp, Homo sapiens
gcggcgagctgggtggtctggagaccatggagaccctcacggagctgggcgacgagctgaccctgggagacatcgacgctgaagccacacatcaatgggc

SEQ ID NO: 482045 - DNA, 100 bp, Homo sapiens
cttgaaagaagctgcagcggaggaaggcgaggctgcgctgaacatcttaaagttgctgtctgagttggaccaacaaagtacagagatgccaagaacagga

SEQ ID NO: 482046 - DNA, 82 bp, Homo sapiens
caagatggcggccagcaggaggctgatgaagacacgctttcaccagcttcgagcccctcctcggtgacttatcctgtggtcc

SEQ ID NO: 482047 - DNA, 98 bp, Homo sapiens
gtctcccactacatcatcaacagcagcggcccgcgcccgccggtgccaccgtcgcccgcccagcctccgcccggaattgaatgatctggcacgggacc

SEQ ID NO: 482048 - DNA, 76 bp, Homo sapiens
agctcgagagagcattacaagccagcctctgggaccgaggatcatggggttgacagcagcattttccagaatccta

SEQ ID NO: 482049 - DNA, 96 bp, Homo sapiens
gaagaactcataaacttggcttcctcgcttctgctcctcagaatcatggtgtcatggaaagggatttactttatactgactctgttttggggaagc

SEQ ID NO: 482050 - DNA, 76 bp, Homo sapiens
gggtacgggggctggtcccagaagatggcggaggcggggactttgtgtggacagtaatgacctcacgtttccgatt

SEQ ID NO: 482051 - DNA, 90 bp, Homo sapiens
ggatcatcctcctggtgaaggctgggcaagctgtggatgatttcatcgagaaattggatgaatttttagatgtgatctactggttccgac

SEQ ID NO: 482052 - DNA, 50 bp, Homo sapiens
gctagccaagctgtcctgcctgggtttggctggtttggattggatgcaga

SEQ ID NO: 482053 - DNA, 74 bp, Homo sapiens
cacttatagatcttctgcactgtttacaggcacagggaagcagtttaagtgcacggtgtgtgactacacagcgg

SEQ ID NO: 482054 - DNA, 92 bp, Homo sapiens
gcgggcactgctttccactcggctcctgtcgtccgttctctcaggctcccgttcagctcaccatggatgatgatatcgccgcgctcgtcgtc

SEQ ID NO: 482055 - DNA, 90 bp, Homo sapiens
ggccggtgagtgaggcttacagggccccgggaccaaggtaacttcaacatctccgctgatgagcctataactgtgacacctcctgactca

SEQ ID NO: 482056 - DNA, 80 bp, Homo sapiens
gagtccagcactctgcatgtgactccccgcagcctggacagagctcgtccgcatggtgctgaatggctgaggaccttccc

SEQ ID NO: 482057 - DNA, 100 bp, Homo sapiens
cgcagagaggggtgcggagcgggcggaagaggcgtctgtgtcgcagcttggtctcagaggagcatcgctgggcatttgacattgtgcagcaaagaaatgg

SEQ ID NO: 482058 - DNA, 100 bp, Homo sapiens
gaagatgaggaaatgtcagaagatgaagaagatgatagcagtggagaagaggagaatgaggaaaatggggagcaggaggctgacaatgaggtagacgaag

SEQ ID NO: 482059 - DNA, 100 bp, Homo sapiens
cgcagcctcaggaaagctttaccaattcaggcacccagtcagatacaaagccagcctgcgtatttaacaatgtggaatattatgatggagacatgtttcg

SEQ ID NO: 482060 - DNA, 75 bp, Homo sapiens
tcgcagactacggacctgtctgggtctcagccgccaaagaccccgtccggtagggttcgggggtgattaaagctg

SEQ ID NO: 482061 - DNA, 100 bp, Homo sapiens
tggtcagagaggacgcacaagaacttgagcgacatggagaacgaattctactatcgctacccaagatgtgggctctcttgatgagaagatgaagagcttg

SEQ ID NO: 482062 - DNA, 74 bp, Homo sapiens
ccacacactgagagcctagagttgcaggagagaagatgactgaggaggaggtggagaccgttctggcaggacac

SEQ ID NO: 482063 - DNA, 102 bp, Homo sapiens
ggccccgccatgggctgctgcagctccgcctcctccgccgcgcaggtactccaaagattcaggtttactcacgtcatccagcagagaatggaaagtcaaatt

SEQ ID NO: 482064 - DNA, 95 bp, Homo sapiens
ctcctctcccacttcttgccccagaaagccccagacggaaagagctacttgctgactgtcgacttgctggagaagatgcttgtattggactcaga

SEQ ID NO: 482065 - DNA, 82 bp, Homo sapiens
actgccatggcccctgtgctcagtaaggactcggcggacatcgaggtcagcccaaggccaaccccactgtcactctgttccc

SEQ ID NO: 482066 - DNA, 75 bp, Homo sapiens
cattcacacctagataccggaggaggatcttctgcggattgttggaatctaccacacgatgaggcgagtggtacg

SEQ ID NO: 482067 - DNA, 83 bp, Homo sapiens
cctcccggcttcccggcttcccgtctcgtcaccctctgctgcggttggatttctcacgatgtccagtgttatctccatgtctg

SEQ ID NO: 482068 - DNA, 100 bp, Homo sapiens
aggggcagagcgctcctgtggggatgaaggccgagggcttcgtggatgccctgcaccgggtccggcagaacgtgctggccaaagcgctctatgacaatgt

SEQ ID NO: 482069 - DNA, 100 bp, Homo sapiens
cagtgtggtcttccaggaggccgaggacacaccgctggatcagtgtaaggtatgtcgagagtaccaacgtggcaattgcaaccgaggagaaaatgattgt

SEQ ID NO: 482070 - DNA, 100 bp, Homo sapiens
ttttggggattccactctccagtgtaatgattattgacaacaggaatggaagttggatacactttgtgacttgtacgagacactgaccattacacaggct

SEQ ID NO: 482071 - DNA, 82 bp, Homo sapiens
tgccttctgccgccggccggcgcgtcgtccccacagctggaacgtggtgggcatccagggatccctgctcagcattttcgtg

SEQ ID NO: 482072 - DNA, 87 bp, Homo sapiens
cgttcaagcgaaaacatgaccgctgagcccatgagccactgaggcggctcccagctgcgttggcgacatggccgacacccccagaga

SEQ ID NO: 482073 - DNA, 90 bp, Homo sapiens
cggcgagccacgggggccgccgcagcaccatggcgaccaccgtcagcactcagcgcgggccgttggaatcgaagcctcttaaaatggcag

SEQ ID NO: 482074 - DNA, 76 bp, Homo sapiens
cgacgccgccgctcttcagtttgcccgaagcgcggacgcggtttacgggagaaggctgagcagaccatctggaacc

SEQ ID NO: 482075 - DNA, 83 bp, Homo sapiens
tgaattccatctaaccagacaagaaatagtatcattattcaacgcatttggaagtgattcgcctttgccagtctcatctcgtg

SEQ ID NO: 482076 - DNA, 100 bp, Homo sapiens
tgttcatccagggagacagcgtgagaaacaaatgacctgcacggacatcaacaccctgacaaggcagaaggaacttctcctgcagaagctgagcacattt

SEQ ID NO: 482077 - DNA, 83 bp, Homo sapiens
ctagagaccatacagacctaccggtctgtcagtgagatggcttctaacaaggaactgtggctgcaccatctgtcttcatcttc

SEQ ID NO: 482078 - DNA, 97 bp, Homo sapiens
ccgggagaccaaagcctgccagggcgccccatgcccaatgtacggccccctcccgcaaagctttgacaaagagtgggtggccaagcagaccaagagg

SEQ ID NO: 482079 - DNA, 101 bp, Homo sapiens
ctgcctactttttcatgggccggctcccattgctccggcgcgttctcaagggcttgcagctgagctcctgaaggaagcactaaacatggaaaggaacaacc

SEQ ID NO: 482080 - DNA, 100 bp, Homo sapiens
ggtggatgaggtcagagcgccccatggtgtggtgctgcctctttgtccgttcgcagaacatacatatgatagttgagaaagacacatattctgatcatga

SEQ ID NO: 482081 - DNA, 90 bp, Homo sapiens
tcggacccacggagccggcagcccagcactccggttgcttatggaaccacagagaacagtcccgtgacattcgcgcacttccctgaggac

SEQ ID NO: 482082 - DNA, 75 bp, Homo sapiens
cctgatgctgaactctcgaggttgtatcacggactgattcaccgagcccaaccgtactcaactcacatatttcta

SEQ ID NO: 482083 - DNA, 100 bp, Homo sapiens
caacacgagcagtgtcaagtgccagccctcccgcgtccaccaccgcagcgtcaagggcagcacgctgaggaaacgcaagatgtacgaggagttcctcagc

SEQ ID NO: 482084 - DNA, 75 bp, Homo sapiens
agattactacagatttctccatctagcggaacaacagtgacatctgtggatgtatcggcaagcagtgtaaacgga

SEQ ID NO: 482085 - DNA, 80 bp, Homo sapiens
ccggagccaggctggtttcggaaatgcccttacagcagcaggagtgcctgtgaagaaaacggggtattgccctgaggctt

SEQ ID NO: 482086 - DNA, 100 bp, Homo sapiens
gtcggtgttgagcacggcgagcagtctcaggcctttagtgatgatggactcgctgattcttgagaagagtcaaaactggagctctcaaaaaatggaccat

SEQ ID NO: 482087 - DNA, 50 bp, Homo sapiens
gagcaggctgagcgatacgacgtcatccgtccttggctcaggatttggag

SEQ ID NO: 482088 - DNA, 88 bp, Homo sapiens
cctcccaaagtgctgggattacaggcgtgagccaccacgccgggcccagatgaacaggtaatagcctgcagctggtgttttgagaagc

SEQ ID NO: 482089 - DNA, 100 bp, Homo sapiens
aatgtggacgccctgagctcccattaggagccgctggctgcggcagcaggggactagcgtgagagaaaagcacttggttctgcttcgagatggaaggaca

SEQ ID NO: 482090 - DNA, 100 bp, Homo sapiens
cccagacaagtccccagggaatgccacagcatcctccagcacctcaggtatcctccatgaaatgtgggatccttccaatttctcaagagtctcttcttct

SEQ ID NO: 482091 - DNA, 90 bp, Homo sapiens
acctctgagctgttcctcccagctacgagctgccccagagtcagatgtaatgggaagaggccatgcacgcctggtgcatgttgaagagcc

SEQ ID NO: 482092 - DNA, 75 bp, Homo sapiens
tgagttctagaatgaagctgcagaccctcgcagttacaagatgttcacctaagattgagacctagtgactacatt

SEQ ID NO: 482093 - DNA, 99 bp, Homo sapiens
ccacaggaagacctgcaccactgtcgccttcacacaggtgaactcatggtcagtaggacagaaggtaacattgatgactcgctcattggtggaaatgcc

SEQ ID NO: 482094 - DNA, 98 bp, Homo sapiens
gctagaaacacagcagcacatccatacgagtgtagaagagctgggctcaagtgtcaaggaggccaggttgtatgagctgtctgcccagttgttacaac

SEQ ID NO: 482095 - DNA, 99 bp, Homo sapiens
cgggagctcatgatccacgcgccaactgtcagtgggtggcggtcacctagtccccaacacccttcctgcttatttttccaatataatacacagctgggc

SEQ ID NO: 482096 - DNA, 83 bp, Homo sapiens
cgacgagctgaccctgggagacatcgacggtgcatctgcagacgcagcaggaggtgaagctgcgcatgacgggcatggcgctg

SEQ ID NO: 482097 - DNA, 100 bp, Homo sapiens
caaaacagtgtcgctgataccaacaagcaaaatgaagccaagttggatgagattttaaaagagatcaaatctataaaagacacaatctgcaatcaagatg

SEQ ID NO: 482098 - DNA, 75 bp, Homo sapiens
cgatattgaagtgtcaaaatccatagatggaaaagatggatgacagtgatgggattccgtggtcagaagaacggg

SEQ ID NO: 482099 - DNA, 82 bp, Homo sapiens
cagactttctgcctgatcatcccattgtactgcaaaaaccagatgacgtagctttgccaaagacttagaagctaagcagaaa

SEQ ID NO: 482100 - DNA, 83 bp, Homo sapiens
tggacacttgtcttcttccttactgtaatgggactatttctactccacataatctgaactgccattggatgtccagaatcccc

SEQ ID NO: 482101 - DNA, 75 bp, Homo sapiens
agacagaacagttaatcctcaatttaagcctgatctaacccctagaaacaggtgagagcacagtaaggactattg

SEQ ID NO: 482102 - DNA, 98 bp, Homo sapiens
agactctaggcaggctggcaggcaacaccttaggcctaagaaagctgtcaagataaaacctcacccacctgtagctcctcgaccttctagtggttcca

SEQ ID NO: 482103 - DNA, 50 bp, Homo sapiens
tcgcctccggaggcggcgaggagcggcggtggatgaggatcgcagtacgg

SEQ ID NO: 482104 - DNA, 100 bp, Homo sapiens
gcttcatcaaaaatagtgatagctttgataaaattcctggaaaactcaagcaattcgtatttgacttacattctggaaaactgcacagagaattccatca

SEQ ID NO: 482105 - DNA, 75 bp, Homo sapiens
ctcaggaagagtgatgtggttttggataaggtgaatcatccatgataatggaaatagaactccagagccaggtgc

SEQ ID NO: 482106 - DNA, 100 bp, Homo sapiens
cttgcggaaaggatgttggcggtccctgtgacctgtggagacacggccagatctgccctccagcaggtgacagcagggacatgtctcgggagatgcagga

SEQ ID NO: 482107 - DNA, 75 bp, Homo sapiens
cgaatctgcccacccctcctgtaacccagcctgtttcacttcttgctccccaggtgtgtcctggtagacaactgc

SEQ ID NO: 482108 - DNA, 50 bp, Homo sapiens
cgggcatcttggctcctccttgagttgggtgggactatatcagcatacaa

SEQ ID NO: 482109 - DNA, 90 bp, Homo sapiens
ctgtattagtgcggggtgccggccacatcactgtttccacttgtcctacacagacaaggagcgctatgaaaatgaagaaagacctgaggt

SEQ ID NO: 482110 - DNA, 82 bp, Homo sapiens
tgaaatcagaggagatgtaactatcgattgctgtcgtggctgtgatgtgcaaaccccacagatgtccacacatcagttttac

SEQ ID NO: 482111 - DNA, 82 bp, Homo sapiens
cagttggaagcagccgatccagcctgcggagcctgtggggcaggaatcttgtcgattggcctggctgctgcctactacagcg

SEQ ID NO: 482112 - DNA, 100 bp, Homo sapiens
ccgttatgtgggaagcgaatccagaagctaaagaaactatttcgaaagctgaaagatgagaccgaagctggagaaactgactctgcccattcgaaacatc

SEQ ID NO: 482113 - DNA, 100 bp, Homo sapiens
gtcagcatgtcagtcctggcatgctaggttctataaataggcagactgccagattcacttacagccccagctaattccaccaaacatggaggagtacatg

SEQ ID NO: 482114 - DNA, 88 bp, Homo sapiens
tgaatttaaaggagcagccctggtgtcacctatcagtaaaaggtaaaccccagtgataggtaccatcttatgcctataattacaccag

SEQ ID NO: 482115 - DNA, 100 bp, Homo sapiens
aaacagcagtgaccgagatcgtcaacaggaagctgagaccaagaccaaggacgagatggctgctgctgaagaaaaagtcggtaagaatgaacaaggggag

SEQ ID NO: 482116 - DNA, 50 bp, Homo sapiens
gtctcagccccccctccaacagaatcagacagaaccaagttgtattgtta

SEQ ID NO: 482117 - DNA, 98 bp, Homo sapiens
caatcctaccatgtcagccttcccagtagctggaactacaggattccatatggctctcatatcattccattccatctctgccaagatttggataccgc

SEQ ID NO: 482118 - DNA, 100 bp, Homo sapiens
agtactgaaagagcctttattcatcgactcagtcagtctcttggtttggtctctaaaagtaaagggtgttacagttcgagtgcctcaaacaaccacatat

SEQ ID NO: 482119 - DNA, 100 bp, Homo sapiens
gatggccccgaagccggacagactgtgaaggatctcaccctgttgcccaggctggagtgcagtggcatgatcagggctcactgcagccttgacttcctgg

SEQ ID NO: 482120 - DNA, 74 bp, Homo sapiens
gatgctggagaattataggaacctggtctccctggtctatccagaagttaaaggagagattgctcgtaaagatg

SEQ ID NO: 482121 - DNA, 98 bp, Homo sapiens
cggtcctgaccaccgtgaacggacagtcccccccagcggagctggagtttgttcagatcatcatcatcgtggtggtgatgatggtgatggtggtggtg

SEQ ID NO: 482122 - DNA, 100 bp, Homo sapiens
cgcgaacgagcgacggcggaacccgtgggcctgtggactgcagcctcggcggtcagcagatgcagaatcctgatacactatcagcaatgtcaaaccctag

SEQ ID NO: 482123 - DNA, 75 bp, Homo sapiens
tgtggtcgctgctgtgatgtggaggaagaagagctcagactgccggctgcacatctgcctgtactaccgggaaat

SEQ ID NO: 482124 - DNA, 50 bp, Homo sapiens
gaaaagttcatccatctctagtttcaagaaaaatgagcaggcggaattgt

SEQ ID NO: 482125 - DNA, 87 bp, Homo sapiens
actggcaggggccgcgctctgctgcttcctcgtcctagtgatccacgcgcagttcctcaaagaagaaatcttcccaaggctgcagac

SEQ ID NO: 482126 - DNA, 89 bp, Homo sapiens
ggcacagctcactccagcactacgtgaccagcacgttcctggagccgagagaatggtcaggctgctgccttggttcacatttatcttga

SEQ ID NO: 482127 - DNA, 75 bp, Homo sapiens
ctgcaatagatacatggagcccatcagaatggcagatggcttatgaaccacagtctctgctggatgaaccgaatc

SEQ ID NO: 482128 - DNA, 75 bp, Homo sapiens
catgagaagtatgacaacagcctcaagatcatcagcaatgctggagcagaaaggatcacagatgtggctttggat

SEQ ID NO: 482129 - DNA, 50 bp, Homo sapiens
attcgcctccatctgtaccatggattctataaacctggagagtaatccta

SEQ ID NO: 482130 - DNA, 100 bp, Homo sapiens
gacagaagagagaaagaagaaaattgctggaataatgaccttgaatagaggaaatgggatatcatctgggatacccacccaccatcccagggtctacaac

SEQ ID NO: 482131 - DNA, 75 bp, Homo sapiens
aaatgctgacaagagctagcatcactcctgtccttaatccgaaagtcatctgagttggctatctgcacgttctct

SEQ ID NO: 482132 - DNA, 100 bp, Homo sapiens
ttgttttcgggatcgaggggtgagggcgctatggcacccggctgcaaaagtcatcaaccccatgggatgggatgcttttggattgcctgctgaaaatgcc

SEQ ID NO: 482133 - DNA, 74 bp, Homo sapiens
ttgcagaaatcacattggaccctcctcccaactgtagccttgagaaggaaaattatgacgtttgggctaaagtg

SEQ ID NO: 482134 - DNA, 75 bp, Homo sapiens
actgtgcttggctggaaaaccccaaaagtgtacataaggtcctccaaaagctggggaaagctgatgagacaaaag

SEQ ID NO: 482135 - DNA, 80 bp, Homo sapiens
tggcttgtgaaatcatgcctctgcaaagagcatggatcattttgatgacattggtcccagtgttgtaatggcctccccag

SEQ ID NO: 482136 - DNA, 100 bp, Homo sapiens
gagatccttgttgccgtcccttcgcctccttcaccgccgcagaccccttcaagttctagtcatggtatcatctttatcagaaagtgaggagtcccaggac

SEQ ID NO: 482137 - DNA, 90 bp, Homo sapiens
cttcgtgaggctgctcttcgagcggcctggacgactccaccggggggacccccctcacacctgcggcccggatatcagccctcaacattg

SEQ ID NO: 482138 - DNA, 90 bp, Homo sapiens
gcactttatcattatgcttcctcaagatcgaggggcttcaggacagtgaacatgtgcagtagacattgttgcaatcatgatcggcaatct

SEQ ID NO: 482139 - DNA, 75 bp, Homo sapiens
ttattatcaggttcacgccaacagtacctcattgctctttggcgactcttattgagcccccctctgaggacctgg

SEQ ID NO: 482140 - DNA, 100 bp, Homo sapiens
aagtccacccagcgtttccgaggtgaaggcgccgcgccaggccggggggcggtgatgcaggttctgaatgctgatgccattgttgtgaagctgaactcag

SEQ ID NO: 482141 - DNA, 98 bp, Homo sapiens
tgagcgccaccctgtggacatcagcgccatccccgagcagcggtggaagctggattatatctgtccaagatgcgagtctggttttatcgaggagcttc

SEQ ID NO: 482142 - DNA, 50 bp, Homo sapiens
atcgacatcagtgaagaagatcagggcagatgattctggaccagatgaag

SEQ ID NO: 482143 - DNA, 75 bp, Homo sapiens
ctgccctgacccttacatccagcgttgtctgggttcatgtctaagcttgttccagctatccagaatgcccacaag

SEQ ID NO: 482144 - DNA, 100 bp, Homo sapiens
ctgagtgtgcctgggcctccagtcttgtccctggaggcctctgaggaagtggagcttggtactgtgctaaaccctggggagacggcgaagtggaaaacat

SEQ ID NO: 482145 - DNA, 100 bp, Homo sapiens
gacgcggatttttggcctcatactctgttatagataaacaaggtttcaaccgcagcggaggtggtggctatagccagaaccgctggggtaacaacaaccg

SEQ ID NO: 482146 - DNA, 101 bp, Homo sapiens
gtccgcgcccggcggcggcgggagcccaggagcctgccccgccctggggacgaagagctgcagctcctcctgtgcggaactgtcaagtaatccacctctgg

SEQ ID NO: 482147 - DNA, 99 bp, Homo sapiens
ccgccgacctcgcagcccccgcgggcgcagccctttgcgcagccgccgggaccctggcccctgtcgagactttgtccagccatcagccacggcctctcg

SEQ ID NO: 482148 - DNA, 90 bp, Homo sapiens
cagcataacataaggaaaagcaagcgtaatcttcagatgtgttcagagcaacattgttttgttgacacaagcatttagaagaaagtttgt

SEQ ID NO: 482149 - DNA, 97 bp, Homo sapiens
gaccctgagcaatttgaggtcatcaagcaacaaaaagaaatcattgaacacggcatcgagctgccattacagccatgggcttcaagcagcccacccc

SEQ ID NO: 482150 - DNA, 50 bp, Homo sapiens
gttcgctgcatcatccagaatgaaggttgggacagcgtcttcgctgctgc

SEQ ID NO: 482151 - DNA, 101 bp, Homo sapiens
ctcctttcacagctgtatcctgaagaatggcagtgagccggaagagccacaggattcggcaaagacggacacacaggtgaccattgtgaggtagatatttt

SEQ ID NO: 482152 - DNA, 100 bp, Homo sapiens
ctttacctgttcacttaagaggaaccctgagcagaacacatgcacaaactcatgccataccctaagggacaaggttccccacatctacttggaaatcttt

SEQ ID NO: 482153 - DNA, 100 bp, Homo sapiens
ggaatctggttttgttattacacttactgatggtcattcagcatggactgggacaggtgaccaagaatatggcccaggtgaccaaagccctggacaaggc

SEQ ID NO: 482154 - DNA, 50 bp, Homo sapiens
ctgccgaggatctggaaattgggctgcttgctctcggtgactacatgaat

SEQ ID NO: 482155 - DNA, 74 bp, Homo sapiens
gacgaacatttctgggtgacactcaacaggattcccggtttactcctggcttgggggcattaggaagcactgga

SEQ ID NO: 482156 - DNA, 74 bp, Homo sapiens
aggattggagcacagaggctcagaagcaagtccagactctaaaatagagctcaagcttgagaagagagaaccac

SEQ ID NO: 482157 - DNA, 82 bp, Homo sapiens
ctctacttccctctgctccttcccagacctgcctagagctggaacgttacctccagagcgagccctgctatgtttcagcctc

SEQ ID NO: 482158 - DNA, 75 bp, Homo sapiens
tcctcacggtcctcctggctgtgctcatatacacctggacgagcctgtggagtgggagacacctgacctttctca

SEQ ID NO: 482159 - DNA, 50 bp, Homo sapiens
gtgggacgtccaaggatgatgggcactggagagtcgcggttgctgatcgt

SEQ ID NO: 482160 - DNA, 90 bp, Homo sapiens
gaagagcagagcggagggagccccagacacgggcgtctctggccgagcctctttttgtggaaaacgacagcagcagcagtggcctggaag

SEQ ID NO: 482161 - DNA, 140 bp, Homo sapiens
gcagctgcgtgagtggagatgctttcagtggtggagaatggactggacccccaggctgccatcccggcactggtgaggtggattgatgatgaatcttctggcacacctggagcaactccagaacacagtcgtgaggataa

SEQ ID NO: 482162 - DNA, 98 bp, Homo sapiens
cgttcctgaagttctcagtgtttacaaaggagttgacagcacttttcaaaaacctgacctgtggatgaagagccagagtcctctgaggtcgatgctgc

SEQ ID NO: 482163 - DNA, 95 bp, Homo sapiens
aattgaccctgtcatgcagtcccttggatattgctgtggacgcaagatatacgagaacgccatgattgctgctggacttgttgacgaccctaggg

SEQ ID NO: 482164 - DNA, 80 bp, Homo sapiens
gagtcttctggcaaacagtgtttgcctctggttcagctcatacaacagcttcttaggctccttgccagaggcctccactc

SEQ ID NO: 482165 - DNA, 80 bp, Homo sapiens
agaatacaaacctgacaagggtaaaggatgtatatacaaagacgatatctttatggtcgtatatcaatagccagctagac

SEQ ID NO: 482166 - DNA, 75 bp, Homo sapiens
cccttagccagcccgagcaagtaaagattgcctgaaaactggttttttaaaatggaagccagattatgacagtgc

SEQ ID NO: 482167 - DNA, 96 bp, Homo sapiens
cgagccttcttcccggggcgccataaacgcccccaatttcccagctgctaaaggaagaggaagctatgtgatgatgatgccatttaaacgacaggc

SEQ ID NO: 482168 - DNA, 123 bp, Homo sapiens
gagagttttgctgaacaccgaagtgggctggttccgcaacaaatcaaagatgggaatttcttagccataggctcacatgacaactgcatctatatatatggcgttagtgacaacgggaggaag

SEQ ID NO: 482169 - DNA, 75 bp, Homo sapiens
cctgaatgcccggaaggagctacagtcagacttcctcaggttctgccgaaatgaatgttccattgaacagatgga

SEQ ID NO: 482170 - DNA, 82 bp, Homo sapiens
gataagaagctgaaatccattgcatttccatccatcggcagcggcagtttctccacagacactacccaaagcagtccttcac

SEQ ID NO: 482171 - DNA, 74 bp, Homo sapiens
acaagttagatgtcagggatacagcctatcctgaaaccaatactatgcaatttgaagatgatgatcatggccca

SEQ ID NO: 482172 - DNA, 98 bp, Homo sapiens
ttcgtggaaggctgtatgagcttctaactcattgtattcctcctgagataataatgaagacaattgcagcatgactttcccagggccctgattttcag

SEQ ID NO: 482173 - DNA, 82 bp, Homo sapiens
tgaaaattggtattgttggattgccaaatgttggcttcctgcctgacacagctcacttcaagaagtgcacaatgtcagaacg

SEQ ID NO: 482174 - DNA, 75 bp, Homo sapiens
ctcagggctccagtcaggccgatccgctccgctcacggagtttcaattactgaaaattacttggaaatagaagga

SEQ ID NO: 482175 - DNA, 100 bp, Homo sapiens
atccaggagaatgggtctcttgttgaaatccgaaatttcttgggtgaaaaatatatccgcagggttcggatgagaccagcaatgccctgccctaaggaag

SEQ ID NO: 482176 - DNA, 96 bp, Homo sapiens
aagacctccgctcaggcccctctttcgaatgctccacgccctcctgcgatctagaatggggcctttacaacaactaaacggacaggcattccagcc

SEQ ID NO: 482177 - DNA, 82 bp, Homo sapiens
gaggaacctctatgccgacatcgacgccgcctggcaggccctgcgcaccaggccagcatccttcagaaaaagcatccccgag

SEQ ID NO: 482178 - DNA, 98 bp, Homo sapiens
tctacccaaagtgaaaagactgctgtcagatagcacttgccttccccatattattcagttgcagctccatgaaagaggactgaaattacaccaaacaa

SEQ ID NO: 482179 - DNA, 98 bp, Homo sapiens
ccggagggagacgcgctgccgaggagaacccagcggcactcccaccaaaggcatagagaacaaagcttttgatcgcaatacagaatctctctttgaag

SEQ ID NO: 482180 - DNA, 50 bp, Homo sapiens
ccggccactgcggatccctgaaaccaattgacaacacttactacaaagag

SEQ ID NO: 482181 - DNA, 100 bp, Homo sapiens
ggctacagactgctggctgtgtgtgctgcaaaccgagacaagttcaccccgaagtctgccggtgacttctgggggaacagaaagcatactgatggcctgc

SEQ ID NO: 482182 - DNA, 100 bp, Homo sapiens
ctgttggaggaagccttgttctatggtactcggaccatggagccatacaggctgagtcatcactagagagtgggaagggcagcagcagcagagaatccaa

SEQ ID NO: 482183 - DNA, 100 bp, Homo sapiens
gacagctgtgtactttgccctcagcatctcccttcatgtctgggtcatgtctctgttggatgaacccaatcccaatagtccagcaaacagccaggctgct

SEQ ID NO: 482184 - DNA, 100 bp, Homo sapiens
tttgaagaaaaggatttccaaaaactacaatcataaagaaatccaacttaccttgtcattccagaaagctgagtctgatctggattacattcaatacagg

SEQ ID NO: 482185 - DNA, 50 bp, Homo sapiens
caagaccacagctggtgaacagtccagccctggcctcccacgactacatc

SEQ ID NO: 482186 - DNA, 100 bp, Homo sapiens
gtttaagcaggagcatcgcattggaggctacaagggtcagtatagaccttctgatttgctgtgccctgagacatatgtttgggtacccattgagcaatgc

SEQ ID NO: 482187 - DNA, 98 bp, Homo sapiens
tcagtgcaaaactcctattatccaccgggacctgaagggggcagtacccaaaggaaacgctacgaaagaatacatggagagcttgcagctgaagcccg

SEQ ID NO: 482188 - DNA, 75 bp, Homo sapiens
cacagagttagagagagggatggtgatttttggaagtaccagcacagtgacgcttcctgaaaccttgttgtttgt

SEQ ID NO: 482189 - DNA, 100 bp, Homo sapiens
tttccagaaaacagaaatcgaaacagatacagagatgtaagcccatatccccagagacgtgaagatgcatggaataacacgtgaagagaggaaacttcgg

SEQ ID NO: 482190 - DNA, 100 bp, Homo sapiens
caaaggaggacagtggcaacaaacccatgtcaaagaataacttagcttgcacatgaatgcagtcatgcaaaccgttaggaaaaccagagcctatatggag

SEQ ID NO: 482191 - DNA, 100 bp, Homo sapiens
agaggggacatggcttggggcctggaagcacaggatgatcccccagcagagaggaccaaaaacgtctgtaaagggaaatcctcattgacgattcaatttg

SEQ ID NO: 482192 - DNA, 87 bp, Homo sapiens
aagcgctacaacctgcaaatctatcgctggctacagcaaacatcattcaagatgtccagcaaagggagcagcacagatggcagaaca

SEQ ID NO: 482193 - DNA, 100 bp, Homo sapiens
ctaacccagaacactatattaaacatcccctacagaacagtgagaaagatcagtctaaagaaaaggagaagaaagtgaaaaaaacaattccttcctgggc

SEQ ID NO: 482194 - DNA, 82 bp, Homo sapiens
ggccccacctccggccactgggacggcggcgcggagaaggcagcatcttcatgatacagttaagaggaatcttgacagcgcc

SEQ ID NO: 482195 - DNA, 90 bp, Homo sapiens
ccaccccacgaaggatccctcacagcccagctcgggaagtggacagactgggcgtcatgacccttttaagtgggcagaccaacatccacc

SEQ ID NO: 482196 - DNA, 98 bp, Homo sapiens
caaatgctgtaaggaatgcaaattcaacgaaacggaatattccaatgctctttgtccggggagatggcgttgtcctggttgcccctccactgagagtt

SEQ ID NO: 482197 - DNA, 75 bp, Homo sapiens
gagtccaaagagattactccaggcccagcaacatatgagatgatccagatcctgatgatggatttaactataaac

SEQ ID NO: 482198 - DNA, 75 bp, Homo sapiens
ctgctgctgggcgacccgtccttccagaacgacgacaggaatctatcttctggatttaatctacattgattctgc

SEQ ID NO: 482199 - DNA, 101 bp, Homo sapiens
tggaggcagcccctaagggcccttcgcgggagagcgtcgtgcacgcgggccagaggcgggaactgggaacagccaggtgccccaaagcaaatacgcggagc

SEQ ID NO: 482200 - DNA, 100 bp, Homo sapiens
gggggattctcgacctgctaacagaactggaccttttcgaggcatttcatccttcatgaagccattcaggattttgaattgcatatgagtgcttggctct

SEQ ID NO: 482201 - DNA, 50 bp, Homo sapiens
tttttgactggagactatagtagtagccggatcgagctgggagatgtgac

SEQ ID NO: 482202 - DNA, 100 bp, Homo sapiens
cttgagttggtcgggggcagcggcaggtgaatcagctcccggccgactttaggattcttctggattttaaattttttctttttaaaaaaacttggacgga

SEQ ID NO: 482203 - DNA, 74 bp, Homo sapiens
ggccttcgtacccgtcttgattgagggaaagcaggcaggatgggagagtcgccgatagaaccacctcttccctg

SEQ ID NO: 482204 - DNA, 85 bp, Homo sapiens
ataagaagatggtcacaccatatgcaaatggtatatcccgtgccttacctgactgggggctctgagtccagttgtgttgtcttca

SEQ ID NO: 482205 - DNA, 108 bp, Homo sapiens
cgaggatccgggcgtggagccgagtgaggccgcagcccagcgggcctcgggcggtttggtgcacctcgatttggaggaagtagggcagggcccttatctggaaagaag

SEQ ID NO: 482206 - DNA, 101 bp, Homo sapiens
aagaatggggtggtgcaattccttgccagttttcagcattgcaaataacaatctcagctactgggatgcccccctgggaagttcttatatgtgcaacaaag

SEQ ID NO: 482207 - DNA, 90 bp, Homo sapiens
gtggagagagcgagctgagtggttgtgtggtcgcgtctcggaaaccggtagcgcttgcagcatgtttctcctggcggcgctggtcctgtc

SEQ ID NO: 482208 - DNA, 75 bp, Homo sapiens
tctgcccggaccctgctggctatcctgcgcctttccactgctctgagccaagattttcttcttcactcctcgctt

SEQ ID NO: 482209 - DNA, 82 bp, Homo sapiens
gaagatgactgtacaaaggataataaactagttgagaagcagaacccagctgaaggactgtgcacctggagcagagaggggc

SEQ ID NO: 482210 - DNA, 101 bp, Homo sapiens
tgccggaccccagcacacagaagccgagacggaaacttggatttaactggccagaagcaggtattcaaagcagagaacaatccctgggtgacccccattgc

SEQ ID NO: 482211 - DNA, 75 bp, Homo sapiens
tacaggaacaatattgatgatgtagtaagggttgtgtctgtaaagacaaaggccagtgcttctgtgacggggcca

SEQ ID NO: 482212 - DNA, 101 bp, Homo sapiens
agaagctgttctggccattgatgatgatatcattatgctgacctctgacgagctgcaatttggttatgagaaccgcatgcacgagtctctcatgctcttcg

SEQ ID NO: 482213 - DNA, 98 bp, Homo sapiens
tcccaacaccatgccgtccgccttctctgtcagctctttccccgtcagcatcccagccgtgctcacggaagctcttcgtgggcggtcttgactggagc

SEQ ID NO: 482214 - DNA, 96 bp, Homo sapiens
ctgaagacaaatttttttgccactagaaacatgtgcaacgagttactgccgataatgaaacctcatggtgtcatggagaaactccagctgggccca

SEQ ID NO: 482215 - DNA, 49 bp, Homo sapiens
ggattgtagccataagtggacttattttcctggaaacatgaactgccaa

SEQ ID NO: 482216 - DNA, 75 bp, Homo sapiens
tggaaatgtcatccgatggcacaatcaggccgtacacctggtccctggctccaagcggaagcagtcgggcagagc

SEQ ID NO: 482217 - DNA, 101 bp, Homo sapiens
caaggagagaaatgacagccaaaggttctacaggaatggaaattctgctgtcaacattagagaatgtgacagtgatgataacatgggtgccaaaaatactt

SEQ ID NO: 482218 - DNA, 82 bp, Homo sapiens
ccgggtgtgagctgcctgaaaatgcactcggatgccgccgctgtcactatgctaagaaggaatctgatcttaatggcgccca

SEQ ID NO: 482219 - DNA, 98 bp, Homo sapiens
ctgagtgctgcccgattctggatcccactctgcttagctcaggttaaacccatccagagtaatggctgcggccttacccaggaccctgggggagttgc

SEQ ID NO: 482220 - DNA, 75 bp, Homo sapiens
actgtgaacaccgtctcttagagctgcagtatttcatctcccgggattggaaaatagctgaaacctttggacttc

SEQ ID NO: 482221 - DNA, 100 bp, Homo sapiens
aatgttttgccacgtggatgtgaagatttcctctaaaagataacttctttgtggatgattatgctagatttactatcttggattcccaaggcaagactgc

SEQ ID NO: 482222 - DNA, 80 bp, Homo sapiens
cggaggctccagaaacgggtcctgctgctcaccaaggctgagcagtccaaagtcctgagcgccgtggaggaccgcatgga

SEQ ID NO: 482223 - DNA, 100 bp, Homo sapiens
cgagggcgccagagggggccatgtcgtaccagggcaagaagagcatcccgcacatcacgaaatgacctccaccttcaacccccgagaatgtaaactgtcc

SEQ ID NO: 482224 - DNA, 83 bp, Homo sapiens
aggcgacgctaagttgctgatcgtggcggttgacatcatggacatatgtgagtccatcctggagaggaagcggcatgacagcg

SEQ ID NO: 482225 - DNA, 75 bp, Homo sapiens
ggtctctggagacatcttcagcaggtattttgaaggtggcgtctcatctgtctacctctgggatctggatcatgg

SEQ ID NO: 482226 - DNA, 90 bp, Homo sapiens
agcagcatgctccaccgaaggccagggccttttaatcatatcaagtcaagcctcctgggatccacatcagattcaaacctcaacaaatac

SEQ ID NO: 482227 - DNA, 74 bp, Homo sapiens
ctggtgacgttgcctgtggccaccttggagaagacactggagatgttgaaacatttgtagcagatatactgaaa

SEQ ID NO: 482228 - DNA, 80 bp, Homo sapiens
taagcgatctggttcccacctcagcctcccgagtacctggtgacagagtaagactccatctcgaacaacaaaaaaaaaag

SEQ ID NO: 482229 - DNA, 75 bp, Homo sapiens
gaaaggatcatgaactagtgacctggaaaggctctgtgtgctccgggatggagcaggtgtgcagagggtgagaac

SEQ ID NO: 482230 - DNA, 75 bp, Homo sapiens
cttggaggtggagcaggccctgactccaggtactattttgaagcgctggaagaagaactggtttgatctgtggtc

SEQ ID NO: 482231 - DNA, 100 bp, Homo sapiens
ccgggagtcgctgtggcaaaagatttggatgatccagtagtaactgttcatcaaagtataggtgaagctaaagaacaattttactatgagagaacagtgt

SEQ ID NO: 482232 - DNA, 91 bp, Homo sapiens
tgcacagctgacaatggctttggtccccagcgcagtgaagtggtgagcctttttgtcactgtgagtgatagttgcttcaggaatcttgcag

SEQ ID NO: 482233 - DNA, 89 bp, Homo sapiens
ctggggaggtcctccatgcgcagtcatgagtcgcttcaagtttatcggaaacgggattatgaaggttatttatgctccctgctgctccc

SEQ ID NO: 482234 - DNA, 90 bp, Homo sapiens
agtatgtggagtgttctgcacttacacagcgatcaccagaatataccaattgtcggtatctatgcaaactttgcttaattcacattgaaa

SEQ ID NO: 482235 - DNA, 100 bp, Homo sapiens
ccgggaggccctggccgccgcctgcgaggcgctgcgagcagatcaggatcctcatgaccagccaaagagaagaagaattaggaagcataaatcaaagaaa

SEQ ID NO: 482236 - DNA, 83 bp, Homo sapiens
atttgaggtcatcaagcaacaaaaagaaatcattgaacacggcatcgagctggcactccacagaaggatgttattatcaagtc

SEQ ID NO: 482237 - DNA, 80 bp, Homo sapiens
cggcatctttttgaaccaaattatgctgcaaattgcctccggagccagcgtggtggccatagacaacaagatcgaacagg

SEQ ID NO: 482238 - DNA, 75 bp, Homo sapiens
tgggaaaacaattagtctttgtgcagaaagcacagatgattgcttggagagacaaaggcagcgctgccctcgggg

SEQ ID NO: 482239 - DNA, 88 bp, Homo sapiens
ctcgcagaggatgtgttagactcagagatcttcaagatgaagttcaaagggagaatactaatctgcaaaaactacaggcccagaaaca

SEQ ID NO: 482240 - DNA, 101 bp, Homo sapiens
gggagcttacccagcttaaagagctccacattcaggggaaccgcctcaccgttctgcccccagaactagatctttaatctcatgaagtacgacagctacag

SEQ ID NO: 482241 - DNA, 50 bp, Homo sapiens
ctgaaccgcgcggccgaaccctccggtcaaaatgcagatcttcgtgaaaa

SEQ ID NO: 482242 - DNA, 80 bp, Homo sapiens
agggagtttccccggggagcggccaaccacgacctgacggacaccacccgggcgggtagtccaggggatcctgctcatct

SEQ ID NO: 482243 - DNA, 99 bp, Homo sapiens
cgcgatgggggcgcaggaccggccgcagtgccacttcgacatcgagatcaaccgggagccggggaactctaatgatccaggacaaagaagttaccctgg

SEQ ID NO: 482244 - DNA, 75 bp, Homo sapiens
ctccacgaaaggcagccgcggatcgccgcgctcagcgacaaacaaagtatcctgagctccagctggaccctaaat

SEQ ID NO: 482245 - DNA, 75 bp, Homo sapiens
aggccccgggaggccgaggttcggccccactgtgttctccttgcctcaaaagaaaactcggcacctgttaaactt

SEQ ID NO: 482246 - DNA, 99 bp, Homo sapiens
cgcggtgttcatctccgacatccggaactgtcagtgactggtgggaggaatttgtgtacctgcgctcccgaaatccgctgatggtgaacagcaactatt

SEQ ID NO: 482247 - DNA, 95 bp, Homo sapiens
cgcaactggtcttggtagcggaggcacccgaatgctgcccgggtgaggtactaggttttgacaagcttgcatcatgcgtgagtataagctagtcg

SEQ ID NO: 482248 - DNA, 100 bp, Homo sapiens
ccagtatgaatctctgcccgcaacacatatcaggtctccaggaaacctagagaaaaaccgttatggggatgtaccctgcctggaccaaactagagtgaag

SEQ ID NO: 482249 - DNA, 98 bp, Homo sapiens
ccctgcctgcctcctgcgccgcgcagccctcgcgagcgccccggatggcgctttacccctaggaccggcaatgctggacgtggctgcaaaccagggct

SEQ ID NO: 482250 - DNA, 101 bp, Homo sapiens
attccaacacataaaaattatttatccaacagctcctcccagcacactgatttatgtcagtacatggacaagcaccctggggggctgcatccagataatgt

SEQ ID NO: 482251 - DNA, 90 bp, Homo sapiens
gtgccggccgggagggcggccgcagcaggtgtacagagccagtgggccggatggagccactggcagaggccagagaatccacctgcagtt

SEQ ID NO: 482252 - DNA, 98 bp, Homo sapiens
tataattgaaaaacagtaaagatggaaaaccagttattgaatatcaagaggaggagttgttggttcattttccagacactgaaagagcagaatggcta

SEQ ID NO: 482253 - DNA, 98 bp, Homo sapiens
acaaaactgtcccgggtgggaagaggaacagcctatgtgggcttccacggaggtggttgtgtcaaaccgattggtgacatctccatgctgtattgtca

SEQ ID NO: 482254 - DNA, 75 bp, Homo sapiens
aaacaagaaaacatcaaagaggtctagcaaagaaactggcgatggaatatgagaggagccctctggaaagaaaag

SEQ ID NO: 482255 - DNA, 127 bp, Homo sapiens
ccaggatgacctggagccaggggggccttcggaacagatgcacacccttcctgggtgatgaaaggagaagatgagtatgccaacgttgatgccattgttgtatcagtgggtgttgatgaagaaattg

SEQ ID NO: 482256 - DNA, 75 bp, Homo sapiens
ctcctcccccctcccctcagcggtggctcccaagaagtccgagacacgcggtcagggatgttggaagctggagta

SEQ ID NO: 482257 - DNA, 100 bp, Homo sapiens
ctacgaacaatggggaaagcttacagactgtgtgcacccagtcagcttgaagagtttcaaatggaccctaccactgagaaatcaagatggcagtctacta

SEQ ID NO: 482258 - DNA, 97 bp, Homo sapiens
ccgaaggactgccaccaatgggctggtcacactggacaataccaaccttcaaattcacagtgaacagcagagaatttcaaaggaccttgctaatatc

SEQ ID NO: 482259 - DNA, 76 bp, Homo sapiens
gttgtaaattacagagaacctaagtctgtttgcaaagcacctgaactggcactcctctttatgctgctcactttcg

SEQ ID NO: 482260 - DNA, 75 bp, Homo sapiens
ctatactccacgatcaaaccccggaggcttcgcagggtggcagcactggaagcatcaggaaccctggctgctctc

SEQ ID NO: 482261 - DNA, 98 bp, Homo sapiens
gagatttcatgcataaaaacacttcgactgacttccctcagatgcagctctctctcgccagcagccctgtggtggcgacgacgatggaccaggagcca

SEQ ID NO: 482262 - DNA, 100 bp, Homo sapiens
tatttctacaatcggtcttggcctggctgccaggaatgtccagcttgttaccggctggtaaaggataaggcaaccacacctccaaatcaaggaaggccag

SEQ ID NO: 482263 - DNA, 100 bp, Homo sapiens
ataaatcaaaaatttctgtgaaggtgtaaagaagacattccagtgtgagctttgcagttacacgtgtccacggcgttcaaatttggatcgtcacatgaaa

SEQ ID NO: 482264 - DNA, 100 bp, Homo sapiens
gaagcctttggaataacagtgttcctgtgtgtgaacaaatcacctgcccaccaccccctgttatctacaatggggcacacaccgggagttccttagaaga

SEQ ID NO: 482265 - DNA, 73 bp, Homo sapiens
agatggcgaaggtctcagagctttacgatgtcacttgggaagggtaagcaggaagagaacgacgtggtggaga

SEQ ID NO: 482266 - DNA, 75 bp, Homo sapiens
ctgcgctatgaagacacgcttcttctggaagaccagccaacagggtttggttttcagataggagttaggtatgag

SEQ ID NO: 482267 - DNA, 98 bp, Homo sapiens
catctacaatttttagtggagttgccatctatgttaatggatacacagaatgtgacagtgatgataacatgggtgccaaaaatacttcaataggagaa

SEQ ID NO: 482268 - DNA, 83 bp, Homo sapiens
ggcttcctggcctgggcgctccggtggcggcggagggcaccgcgtccgtgctgcagcgccggtcccccaatgaggagtacgtg

SEQ ID NO: 482269 - DNA, 82 bp, Homo sapiens
tttataatggaattggagtcagcagaactgaaataggaaataccacacacatttattacagtttgatggtgaaggaggttgg

SEQ ID NO: 482270 - DNA, 75 bp, Homo sapiens
gggaggaggatgggggctaaccagttagtggtgctcaacgtgtacgacatgtctgagggaaaaggccataccaat

SEQ ID NO: 482271 - DNA, 97 bp, Homo sapiens
aggtagttcatgaatataccaaagaagagctacaagttccaacagatgaaggattacggccaggagatacaaccagcactttctgtggtactcctaa

SEQ ID NO: 482272 - DNA, 75 bp, Homo sapiens
agagacagccaacaaaatattcatggttcttgaggtcacaagctacctaactaagaagtttgctgaactacgcag

SEQ ID NO: 482273 - DNA, 75 bp, Homo sapiens
caaatattacacttctctccttttctaatacccgatttacaattacattgaactacaaggatcccctcactggag

SEQ ID NO: 482274 - DNA, 79 bp, Homo sapiens
tcctgacagagttcatcaactacatcaagaggagaaaactgcagtccgggatggctcagtcggcccctccaaagtcgcg

SEQ ID NO: 482275 - DNA, 100 bp, Homo sapiens
tgctgggatcggttcctccaggagaagttagcttcagagttctttgtggatggacttgattctgatgagaggggccctcctcgccaaagacagcctagag

SEQ ID NO: 482276 - DNA, 75 bp, Homo sapiens
ctgggcctcccggtccgcaagcagatttagcatgtagactgctggggcaatcaatggatgaaagtggattaccac

SEQ ID NO: 482277 - DNA, 100 bp, Homo sapiens
ctgctctcagagtttggacagttcctgcccgaagccaagcggtctctgtcttactactttgaccgcgatgatgtggctttgaagaactttgccaaatact

SEQ ID NO: 482278 - DNA, 51 bp, Homo sapiens
gcgggaggagcctgttcccctgagtagccggatcgagctgggagatgtgac

SEQ ID NO: 482279 - DNA, 83 bp, Homo sapiens
ctttggagcctgagctcgaggcccggctggcgcacctgggcgtgcagggtcctgaggacaccgtgagccagccaggcctggcc

SEQ ID NO: 482280 - DNA, 90 bp, Homo sapiens
gtgatgccattccagcactggactcatggaggctgagcatttattcagtgggagctggtgaggtggccaacttcgctgcgtatgcgtttg

SEQ ID NO: 482281 - DNA, 80 bp, Homo sapiens
cgaccgcgtgctggagctcttcgacccacccaaggttttgggatttgagattgacgcggtgaactctgtccagttttcaa

SEQ ID NO: 482282 - DNA, 82 bp, Homo sapiens
ttattcgagtgaccgagaccgcggccgggaccgaggtctgcgctcctcagaccaccggcaggtgaacagcctgatgcagacc

SEQ ID NO: 482283 - DNA, 50 bp, Homo sapiens
tatgctgtctacactgtggttagcagaaacctgctcctccaaagccagag

SEQ ID NO: 482284 - DNA, 90 bp, Homo sapiens
ggaactacaagcatatgctgatgttcaggcagtcttagcaaagtatgatggaggagttggatttgtcttctagttctcagatgtctcccc

SEQ ID NO: 482285 - DNA, 88 bp, Homo sapiens
ggcacataaatcctgtgaagttattattgaatgtcaaaactggaccaatggggccaggctgaagtattgaactttctgctacgctacc

SEQ ID NO: 482286 - DNA, 80 bp, Homo sapiens
cagaggcgagccctggtggaggaagaggtggttgtgtcaaaccgattggtgacatctccatgctgtattgtcacaagcac

SEQ ID NO: 482287 - DNA, 100 bp, Homo sapiens
agctgtttgtattttggctgctgcaggagccattttaggatgacagtgatgggattccgtggtcagaagaacgggtggtacgtaaagtcctttatttgtc

SEQ ID NO: 482288 - DNA, 76 bp, Homo sapiens
agagatgtgatgttggagaactacagaaacctggtctccctagaacaccaatcagggtcttcaggcctggaagatt

SEQ ID NO: 482289 - DNA, 83 bp, Homo sapiens
ttcaacaagggcccctcgtacgggctgtcggccgaggtcaagaaccgggtgtcgtgaaaactacccctaaaagccaaaatggg

SEQ ID NO: 482290 - DNA, 83 bp, Homo sapiens
ctccagcgaccggtgcagctggaaggggaggtctcggcgcggaagatggccggcggcgtggacggccccatcgggatcccgtt

SEQ ID NO: 482291 - DNA, 50 bp, Homo sapiens
tcgctgtccctgcggcttctggggcagcagccgctcttctaaaacattca

SEQ ID NO: 482292 - DNA, 75 bp, Homo sapiens
cgtgtatggcgtgtgcgtgccaggcagaatatgaagttactccagatgaaaaactgggagagaaagggaaggaaa

SEQ ID NO: 482293 - DNA, 75 bp, Homo sapiens
gccaccacgcccggctaatttgcaatacggaaattttaataggaatggtggaaagcagcagacataattggagtg

SEQ ID NO: 482294 - DNA, 80 bp, Homo sapiens
cgacacatttgacattgatccgatggtggttactgcctttagaagaagccacactctctgaattaaaaactgtcctcaag

SEQ ID NO: 482295 - DNA, 90 bp, Homo sapiens
caaaatccgaaagattcgggccagagacgacaacccgggcctccgaggacttctccagacaggttatgttacctgcagaggctgccctga

SEQ ID NO: 482296 - DNA, 100 bp, Homo sapiens
tagctttgtaggagcatggcttggagcacttcctattccactggattgggaaagaccatggcagattactgacagccctgtcctaggagcacaacgtccg

SEQ ID NO: 482297 - DNA, 98 bp, Homo sapiens
aacgttgaggcccttcttgtgtatctggagaaaatagagaatagcctaacatggcagaccagagacagcgctcactgtctacctctggggagtcattg

SEQ ID NO: 482298 - DNA, 75 bp, Homo sapiens
gaaaccggtagcgcttgcagcatgccagagactgctgctactttgaaacgtacgatagaggccctgatggacaga

SEQ ID NO: 482299 - DNA, 83 bp, Homo sapiens
acagggaccggaagatgcccacggactacatcaggaacggggtgctctacgtcacggagaaagcaagtgcaccggcacctgga

SEQ ID NO: 482300 - DNA, 100 bp, Homo sapiens
taaagagccatctgtggtgccaattgaaggagcagagcccaggcagccaggcctcactggccacgatgccggaggcacctgatgtgctggaggagaccgt

SEQ ID NO: 482301 - DNA, 100 bp, Homo sapiens
gcggagccgctgctcgagctgctgctggattgaactcagagaagccgggggacttgccatgaggtgttgaagccttgtttcactgagttggagagactgg

SEQ ID NO: 482302 - DNA, 75 bp, Homo sapiens
gccaagttcagcaaatttggagatggaggccactgtctgcagctcccgtgaagatgtccactccagacccacccc

SEQ ID NO: 482303 - DNA, 83 bp, Homo sapiens
cttcctgcccctcgttgatgagagcattcgaagtgacctcagcagggcatccagggcaaatccagacagaacctttgacttgg

SEQ ID NO: 482304 - DNA, 100 bp, Homo sapiens
gagcagggccttggaccccgcggcgcccctcggcctcggagcaacgagcgcagcgccgaacactatggctatgcatcctccaacgtcagccccgccctgc

SEQ ID NO: 482305 - DNA, 87 bp, Homo sapiens
tctcgggaagagatagatcatgcagagtattacctttacaaggctgatcccttatccaacatggttctaaccttcagtactaaagaa

SEQ ID NO: 482306 - DNA, 90 bp, Homo sapiens
gccagccccagccatggtctacgattactatgaaaaaggtgaccaagaatatggcccaggtgaccaaagccctggacaaggccctgagca

SEQ ID NO: 482307 - DNA, 98 bp, Homo sapiens
ccaagccccctagccggcggccgaagctttacatcgtgaacctgcagccgcttacaaacacgcagatggcaagaagattgatggcaggagggtccttg

SEQ ID NO: 482308 - DNA, 74 bp, Homo sapiens
cgcaagtacccgtccatcatagtcaactgcgtggaagagaagaaaatttgaagccattacttccagctggtata

SEQ ID NO: 482309 - DNA, 87 bp, Homo sapiens
cagtactctatatgaacaatccgtctggatcacggatgtaggaagtgagaatgaagacctttcgaatccgtcaaaacctatacagaa

SEQ ID NO: 482310 - DNA, 101 bp, Homo sapiens
tcagcgtttctcactggttcgaggaaggcggcctcagaggagagggaaggcccaaggcattgctcatgagaacctcattcctctggaaaccctaggtaagt

SEQ ID NO: 482311 - DNA, 100 bp, Homo sapiens
cttagaggacagtgtggccaagaccttcgagaaatgcatcattgaagccgtgagctcagcctgccagcggaggcctcagcaacctgctcttccgctgctc

SEQ ID NO: 482312 - DNA, 83 bp, Homo sapiens
ttttagagttgacagaacagagtcaaaaattacagattcaatttcagcaaccaacaagtcccaaatttggaaaagctgactca

SEQ ID NO: 482313 - DNA, 74 bp, Homo sapiens
aggaccgcaagtcccgtcttatgggacttgaggccctcaagacacggcatcagcgaggagatacgcatcctcta

SEQ ID NO: 482314 - DNA, 83 bp, Homo sapiens
aacatctctttcaatgacaaaaagtttgtcattaaacccatcgacaagaaggcacctgtgatgatgaacagtctacacagatg

SEQ ID NO: 482315 - DNA, 60 bp, Homo sapiens
gagacatgagatggtaactgaacccccaggatggagctatgacattgaagagaggaaggt

SEQ ID NO: 482316 - DNA, 88 bp, Homo sapiens
ggaggcgagggtgcgatggcgcggagcccgggacgcgcgtacgccctgctgcttctcctgccatcagtggcctatgtacataccacgc

SEQ ID NO: 482317 - DNA, 75 bp, Homo sapiens
aagcccaggggtacaggaggcctctgggtgaaggcagaggctaacatggggtgtgtttccattgtagaaaacctg

SEQ ID NO: 482318 - DNA, 98 bp, Homo sapiens
attgaagtgcttggagtgcagaactgaaagaggtggtaatcactcaaggaaaaggaattatcagagtaacaatagttcctgttactgacttgatatgg

SEQ ID NO: 482319 - DNA, 96 bp, Homo sapiens
cttgtcacggcttcttacgataccaatgtgattatgtgggacccctacaccggcgaaaggctgaggtcactccaagcaagctggtgaagtacttca

SEQ ID NO: 482320 - DNA, 75 bp, Homo sapiens
tgagacagatcaagatcaagaccggcgtggtgaagcgatgagaccccgctttctacaccaaccgcaagagacagc

SEQ ID NO: 482321 - DNA, 148 bp, Homo sapiens
cccagccgcagacaaaagacctcggggccggcctcgcaaggcgcttcccctttccagagagccagaaagaagccatttcataattctgaatcatgtctgataacggagaactggaagataagcctccagcacctcctgtgcgaatgag

SEQ ID NO: 482322 - DNA, 100 bp, Homo sapiens
gcagaggacgacatgttgcttttcgtggagaccaagatcactccatggatgaaatgacagctgtggtgaaaattgaaaaaggagttggtggcaataatgg

SEQ ID NO: 482323 - DNA, 100 bp, Homo sapiens
tctccgcgtcccgctcgctgggagagaggtacctctccttttccctctccctttccctaagagtacccaaaggcaagtggaacagctctaatggggttga

SEQ ID NO: 482324 - DNA, 50 bp, Homo sapiens
tctccatattctcaggcacagagaaagaggttgacggatatattcagacg

SEQ ID NO: 482325 - DNA, 88 bp, Homo sapiens
ggaggccggccggtgccagcacctttcggcttctgagacggcggcagcagcggcattcaggtaacaaatatactctggagactagacc

SEQ ID NO: 482326 - DNA, 96 bp, Homo sapiens
gcttggtaacactgatcccctttcagggtgtgctggagtatctgtctgccttcgatgaagaaaccacggaagtttgttctctggacactccttcta

SEQ ID NO: 482327 - DNA, 131 bp, Homo sapiens
cggcttagaggacttccctttggatgtagcaaggaagaaattgttcagttcttctcaggtgaccaagaatatggcccaggtgaccaaagccctggacaaggccctgagcaccatggacctgcagaaggtct

SEQ ID NO: 482328 - DNA, 90 bp, Homo sapiens
agagactaccacgtggcatgttaccactgtgagattcctacgagaagcaacaggcacaaggctctggtcggaaaaaattactgtcttcta

SEQ ID NO: 482329 - DNA, 85 bp, Homo sapiens
tctcctcagagaagctgagcagctctgtcagcatgaacaccttctccgacagcagcacaccctggcaccggatgcccaccaccca

SEQ ID NO: 482330 - DNA, 75 bp, Homo sapiens
gacgatgcagctgcatcccgtggccgactcttctcctgcggggcgggcagggctgggcagcggcctgagtctcag

SEQ ID NO: 482331 - DNA, 100 bp, Homo sapiens
ggcggagcgcggcaggaagcggccgtgcggcccgggaagttcgccatccgacctgacaaaaagtccaaccctatcatcaggacagtgaagtctgtgggca

SEQ ID NO: 482332 - DNA, 98 bp, Homo sapiens
gagagcagtggatccgggccaagtacgagcgacaggagttcatctacccggagaagcaggagccctactcggcaggattttttatcaagcagaaatgc

SEQ ID NO: 482333 - DNA, 50 bp, Homo sapiens
cccaagatgccactggtgaagaagaagtcaatgaaaggattctattttgc

SEQ ID NO: 482334 - DNA, 100 bp, Homo sapiens
tggatcccgaccaagaggcagaagtacggggttgggatcagtgtcattcaaggatgtgactgtggacttcacccaggaggagtggcagcaactagaccct

SEQ ID NO: 482335 - DNA, 100 bp, Homo sapiens
tatgccctgcaactgcaccagttacagccggctgtgaccacaaggtgacatccaccagtggtaccatcaccagccccaactggcctgacaagtatcccag

SEQ ID NO: 482336 - DNA, 95 bp, Homo sapiens
ctgagcaggaacctggagttttcaggcgttggagaccagggccagccctggccacaccccaggctgtgtcaccttcgtcctgaatgaccacagca

SEQ ID NO: 482337 - DNA, 83 bp, Homo sapiens
aatcactaaattctgccgaaaggactgaggaacggtgcctggaaaaggtaaaaatctctacaccaatgaatatgtagcaatca

SEQ ID NO: 482338 - DNA, 75 bp, Homo sapiens
gtggaccgatttgcagtacagggagaaagaggacttggatgttgtgggtgatggtatgcagtgtcctccttcacc

SEQ ID NO: 482339 - DNA, 100 bp, Homo sapiens
agagaatgatcttctgcaaagccatgaactcatgcaggcaatttgaatcaacccatagaagtgacagcgctgtattcatttgaaggacagcagcctgggg

SEQ ID NO: 482340 - DNA, 88 bp, Homo sapiens
gagaggcgccagtcggagcctcatggccttttcggacctttgcaagaatgtggaactgctgagtgcaaagctaaggatgtatcaaatg

SEQ ID NO: 482341 - DNA, 100 bp, Homo sapiens
gccgctgccccggctgcctcctccctgaggtgaaaggtgtagcagtcactcggcctacacccacagcatcgaccttgtgaacccagcgacctgactgcct

SEQ ID NO: 482342 - DNA, 83 bp, Homo sapiens
tgctgtacaccctcaacaaacaccagcgctttggcgtttagtgggctacagatggcatggcatctaaaaccttacaatgcttg

SEQ ID NO: 482343 - DNA, 83 bp, Homo sapiens
aagacaggtgtgcgtcatgcacttgaagcacctgaggaccctgctgagccctcagatgtctttggtggacttgggaaagaggt

SEQ ID NO: 482344 - DNA, 75 bp, Homo sapiens
atccaagtcaccaagaaattactgtctcaagtgatacggcatgttatttgaaagcaattgagacgcaaccgaact

SEQ ID NO: 482345 - DNA, 74 bp, Homo sapiens
caagtcccgtcttatgggacttgaggccctcaaggcaatgaatcgctccctggctaatgtgattcttggaggct

SEQ ID NO: 482346 - DNA, 97 bp, Homo sapiens
gagattgacaatcaatgggccatcttggacgtacgtaggaagcctggacgtgccaaggcccaacagcagggtggagatcgtggctgccatgcgccgg

SEQ ID NO: 482347 - DNA, 75 bp, Homo sapiens
tgtgctatgcctgtaacaagagcatcacagccaaggaagccctcatctgcccaactgttctccatagtggtgttc

SEQ ID NO: 482348 - DNA, 90 bp, Homo sapiens
ggcggcttccaggcgcactaccgcggagctccttcccttaacagagctgagagaggcatctggagctgcagcatggaccagcgagagccc

SEQ ID NO: 482349 - DNA, 83 bp, Homo sapiens
cgcagctgcagccgcctgaccacggcgactggacttacgaggagcagtttaagcagtaatagctcttcaagtctgcaataaaa

SEQ ID NO: 482350 - DNA, 100 bp, Homo sapiens
ctggcgagcgccaccgcatggtgtctttggtgcaacactaacaaggcttgtctggactacccagttacaagcgtcttgccaccggcttccctttgtaaat

SEQ ID NO: 482351 - DNA, 122 bp, Homo sapiens
cgcgtccgtaatcagtgacgaggtccgctacgtaaatccctttgcggcggctggtagcagtgtttgatgagcaggatccacatcacggaggtgatggcaccagtgccagttccacgggtacc

SEQ ID NO: 482352 - DNA, 74 bp, Homo sapiens
tacaatgatggggcagcaagtggccaaagcccccctccatgcgcctgaaggcccgacccagcagccctggcttt

SEQ ID NO: 482353 - DNA, 100 bp, Homo sapiens
agtcatggatgggcacactgtgggggtgtcctggtgcacccccagtgggtgctcacagctgcccattgcctaaagaagatgtacagttacccagcacgtg

SEQ ID NO: 482354 - DNA, 75 bp, Homo sapiens
gtgctgggtgggggacgtgtaccctgtctaccagcctgtgattggtgctgaagacatggacggcttccaggcaga

SEQ ID NO: 482355 - DNA, 89 bp, Homo sapiens
gatctgccaaggctgcccacatagaaaaatggctacaaacttcctagcacatgagaagatctggttcgacaagttcaaatatgacgacg

SEQ ID NO: 482356 - DNA, 75 bp, Homo sapiens
tggatgcagcaccccgtcgccggcaagtgcccaagcaaggaaagaaataatgaagagacacatgtgttagctgca

SEQ ID NO: 482357 - DNA, 75 bp, Homo sapiens
gaacagttggaaggatctgagtatgatgccaagggatgtgtttggccaaatgggagagtggttacaacacacgag

SEQ ID NO: 482358 - DNA, 100 bp, Homo sapiens
gtcccggccatctcgctgcccgacgatgtccgcaggcggtccgcgggagagctgtggggcttggtgagtgtttcgtggcctctcgggttggtcagcaccc

SEQ ID NO: 482359 - DNA, 100 bp, Homo sapiens
cagaagcgggaggagctgtgccggcagatccaggaggaggaggacgagaagcagcggctgcagaatgaggcaacttcaaagtgggagttcacattgctga

SEQ ID NO: 482360 - DNA, 50 bp, Homo sapiens
caaccccagatccatttacactttacagttaatttggagtggcccctgga

SEQ ID NO: 482361 - DNA, 100 bp, Homo sapiens
gatatgaaaagaagaggtcaaagttaattggagcctaccttccgcagcctccgacgttacagtgtttctgccacctctgtacaaaagacaattttacttg

SEQ ID NO: 482362 - DNA, 100 bp, Homo sapiens
aggcagacggactcggtattggagctgaaggcggcggcagagaacttgccggtgccagctgaggttgaaaatctttctaaacgatacgaagaaatttatc

SEQ ID NO: 482363 - DNA, 96 bp, Homo sapiens
agttcttctcccagaatatggaggcaccaaagtagttctagatgacaagtttagcagatactttcagaaatggatacataagaaatggctggaaat

SEQ ID NO: 482364 - DNA, 100 bp, Homo sapiens
tcgcgcctccgagacccggacagaggcaagcaggggcgccgtgggtgccagagaggcggaagaggaggcctgatggggttctgtccacggtgtgtccagg

SEQ ID NO: 482365 - DNA, 98 bp, Homo sapiens
gacaggggacagcgtcatcagggaatgtcagtgacttggcgcagactgtcaaaacctttgataaccttaagaaaagtacgaagatctgagctcttctg

SEQ ID NO: 482366 - DNA, 89 bp, Homo sapiens
ctagaggataaaggaaatctttgggaaagtcagtattttatatagcaaaactggttagtactgcagaaaaaccacgacttaaagaaggc

SEQ ID NO: 482367 - DNA, 100 bp, Homo sapiens
aagttacacgaggttggtcatgaaagagattccttgcagagacagctcaacacggcacttccacaggtgaatgaaaactttgccattgatttgatagcag

SEQ ID NO: 482368 - DNA, 85 bp, Homo sapiens
ggcctggaacaacatgattatactcctcgacaatacaggaccagagtgtgtcaggcttcagcagcgcaggaggcagccaggggga

SEQ ID NO: 482369 - DNA, 98 bp, Homo sapiens
ttaaaattttacataagaagttacctttttcaggaaatgcttccagactgcacacttttacttagaggacagtacatcccctagagttatatccacac

SEQ ID NO: 482370 - DNA, 75 bp, Homo sapiens
aatgctgctcagaacaccatggagccacccctgaccccgcccagcccagcaggtccctacagttcagtccccccg

SEQ ID NO: 482371 - DNA, 75 bp, Homo sapiens
attgaatatcaagaggaggagttgttgatttttacataccgttgctcaaaagagggctgcaagaagaaagagatg

SEQ ID NO: 482372 - DNA, 100 bp, Homo sapiens
cgatgatttactgaaatttgatgacctagatggaacacatgctctgatggctggcaaaggaggaggtgagccggcaggagctgaggcagcgggtgcgcat

SEQ ID NO: 482373 - DNA, 76 bp, Homo sapiens
gcccactgaggagtccaacatcaccatgcaggatgacagtgatgggattccgtggtcagaagaacgggtggtacgt

SEQ ID NO: 482374 - DNA, 75 bp, Homo sapiens
cgagaagcctgaaaagtcgcagcgagctggagccgccggagagatcctacagtaaggaattgtttgaagaagtta

SEQ ID NO: 482375 - DNA, 100 bp, Homo sapiens
atctccaggtggagatgatcttaaacaaacctggcttgaagtataagcctgcagttaaccagatttagtacctcaagacaaactcttatgtggattccag

SEQ ID NO: 482376 - DNA, 100 bp, Homo sapiens
ccccaggcttctgcgcagaatgcttctcagcagcaacatccccaaacagcggcgtttcacggtggcacatacatggaaacctcgacctgtctcccagttg

SEQ ID NO: 482377 - DNA, 50 bp, Homo sapiens
cctccccagccatgtggaactaatctgtccctctgtacagctgccctcat

SEQ ID NO: 482378 - DNA, 100 bp, Homo sapiens
cagtacggaggcgcagtgggcaccgtgggccgactgaacatcacggtggtacaggtccccacgatggtccctgtggtccacatgggccccctgttcggtg

SEQ ID NO: 482379 - DNA, 98 bp, Homo sapiens
aatcacagcaacagactctcctgcagaccttcccaggaagccagagccacacacaccatcatggtcctgaaatctcctgcaaagaagctgagccatgc

SEQ ID NO: 482380 - DNA, 50 bp, Homo sapiens
ggtttcccatttcatggggtctctcaggcagctgacacacaagagttcag

SEQ ID NO: 482381 - DNA, 75 bp, Homo sapiens
ctacagggaagtgcatcacatgtcagtttttcagaagaagtgaagtcaagatgaagaaccatttgcttttctggg

SEQ ID NO: 482382 - DNA, 100 bp, Homo sapiens
tgccgaggtccgggagcagcctaggctatttcctccaagggtcacatggatgaagatgttcaggaggctctgctccagatcatacaaatgcggcaggggc

SEQ ID NO: 482383 - DNA, 75 bp, Homo sapiens
accaaatagaagaataagcagtgcctgtgtggagatatacgactaaggggtcagacgggggttcgtgctgaacgc

SEQ ID NO: 482384 - DNA, 75 bp, Homo sapiens
ctagcgtcctggaattacttcaatcaagttcctgggctatataagtccagttctgcagactctctttctacaacc

SEQ ID NO: 482385 - DNA, 99 bp, Homo sapiens
aggctggttctagtgggacgagctcagccgcctcctcagtgccaggagcctgctggaaaggtcccccccgcctccagccagcctgtgcagacttgctgc

SEQ ID NO: 482386 - DNA, 100 bp, Homo sapiens
acattttggaccagggagccctacagcgtctcttcaaaaagttaagtgggcagaccaacatccacctcagcaaaaacttcttcctgacgaatcgcgccag

SEQ ID NO: 482387 - DNA, 74 bp, Homo sapiens
gttggtccgaagtttgaaccggacagaagcgctggtcggcgtctggcggctgatttcatgctctggggacacag

SEQ ID NO: 482388 - DNA, 100 bp, Homo sapiens
ctttaaatccggagggggaaaaaatcccaaggtctgcaaagggatgtgtttggccaaatgggagagtggttacaacacacgagctacaaactacaatgct

SEQ ID NO: 482389 - DNA, 75 bp, Homo sapiens
ctgcagaacccccagaccatcatgcctgacctctcgggacacacccagccctgtggacccagacaccgtggaggt

SEQ ID NO: 482390 - DNA, 72 bp, Homo sapiens
ctgaaccatccacacatcataaagctttaccaggtatgcagaatctgtgggagcaaaacattatcatacttc

SEQ ID NO: 482391 - DNA, 74 bp, Homo sapiens
agctgtgggggaaagcagaaatgatcattgaacaggaatgacatctcggtctggtacagatgtcgatgcagcaa

SEQ ID NO: 482392 - DNA, 75 bp, Homo sapiens
gtcagcactgactttcagctatggaatcgatcgggcccgggacacccagacagatgagattgtcgcactgaagaa

SEQ ID NO: 482393 - DNA, 100 bp, Homo sapiens
cggcatttaacaaggcggtgtggtttactccatgcagttgtcaggaggtggcaatttgtaccatacggatgtctcactctttggagaacctaccgaattt

SEQ ID NO: 482394 - DNA, 98 bp, Homo sapiens
aacagcagagccgcggccctctttagggataaggtgaagtattacaacgccgagagttacgaagtggaacgctatcgagaggccatcatcaaatatca

SEQ ID NO: 482395 - DNA, 88 bp, Homo sapiens
ttaatcaggaatgtgaagaaattctacagcatcaaagctaagccagaagatttatcacattttcatcatcagctacaggattagaaag

SEQ ID NO: 482396 - DNA, 78 bp, Homo sapiens
ggagagtgagagaaaggctggaagacgaggccacaccatgaggccccagccccaccagaggccccgcgctgccctggc

SEQ ID NO: 482397 - DNA, 101 bp, Homo sapiens
acgtcgggatagtagtcaagatggataaaaagtcctttgaaatggtgctggatgaaattagaaagaaaatcagaaagtgcagttgacagaagggtcacgtt

SEQ ID NO: 482398 - DNA, 98 bp, Homo sapiens
cggcggcaccagcagtaacaacagcgaggaagaagaggacgacgacgacgaggaagaggaggtttctgagaatcgaagcaaacgcttggagaaggtcc

SEQ ID NO: 482399 - DNA, 83 bp, Homo sapiens
ttcgaccagaaggcgctgctggagttccgcgacaccatcttcgacaacatcctcaagagatctgtggtccaggccactccaca

SEQ ID NO: 482400 - DNA, 114 bp, Homo sapiens
gtaaccgggacccggtgtctgctcctgtcgccttcgcctcctaatccctagccactatgggggatatgagactttctactcggaatatcctgagtgttgcgtggatgtaaaacc

SEQ ID NO: 482401 - DNA, 98 bp, Homo sapiens
attcttctgcctcagcctcccaaatagaatttggagttgtgtacagttgtgtggaaggcaagatgtacactgccagaaaaggaaaaggtgccttttgt

SEQ ID NO: 482402 - DNA, 127 bp, Homo sapiens
cagcaagcggcccccacccaactacctgtgccacctgtgcttcaacaaaggacactacatcaaggactgcccccagattatggagagaattatggatctacccactttactgaggcatgcattcagg

SEQ ID NO: 482403 - DNA, 121 bp, Homo sapiens
cgagcagcgccagcggccgagcgggcggcttcctggcctgggcgctccggtggcggcggaggagcaggccgggctctcgccatgggtcactgtcgcctctgccacgggaagttttcctcga

SEQ ID NO: 482404 - DNA, 98 bp, Homo sapiens
agacacctcgctggagaccccatgaactcccccactggaaaggattctgaaagaaatgaagtcagccctcagaaatgaagttgactgcctgctggctt

SEQ ID NO: 482405 - DNA, 100 bp, Homo sapiens
ccgggcagctggagggggaaagcgtcttggatgatgcctagttccccgagagcgttcagacagtgggggctcaagctcagagccatttgaccgtcatgca

SEQ ID NO: 482406 - DNA, 112 bp, Homo sapiens
tcagctgctgtttgcctggagggataaaacagctcgcagggaagatgaaagttacgggcaaaagagagccagtgaagatacaacttcaggttcaccacccaagaaatcttca

SEQ ID NO: 482407 - DNA, 90 bp, Homo sapiens
aagaaaagaaactgacaaaaacatttctgaggctgagaagtttggcgactcctttgtctttgaaggcatgttgagtgagcaagtgaagac

SEQ ID NO: 482408 - DNA, 74 bp, Homo sapiens
tgtatgaaaaccttactgcttctctcttcaggtgatctgtgaaaatggttcgctattcacttgacccggagaac

SEQ ID NO: 482409 - DNA, 82 bp, Homo sapiens
cgcgggtctggctagtcaggcgaagtttgcagacctgcctagagctggaacgttacctccagagcgagccctgctatgtttc

SEQ ID NO: 482410 - DNA, 76 bp, Homo sapiens
gtttcctcctagaccgacttctgcagtacgagaacgtggatgaagactcttcgggcattgtgtcgggcagaagatg

SEQ ID NO: 482411 - DNA, 51 bp, Homo sapiens
ggggtctcctccaacatccagaagcttcgacggagtttcgctcttgatgcc

SEQ ID NO: 482412 - DNA, 91 bp, Homo sapiens
gactcagagagggaagagattcagccagcacactcctcgcgagcaagtaagactttgaccccgacgcaggcttcagtgattgccgcggatc

SEQ ID NO: 482413 - DNA, 90 bp, Homo sapiens
tacgtgagcacctccccctgtggagacgcaagactccactctccctacgagatcaccacagaccttagaacctggcccattagatgaaac

SEQ ID NO: 482414 - DNA, 82 bp, Homo sapiens
cctttaaatccggagggggaaaaaatcccaaggtctgcaaaggctgaactcacgggaatcaaatggcgtaggtacaattttg

SEQ ID NO: 482415 - DNA, 82 bp, Homo sapiens
aaagttttgcagatcttcaacaagaggacccaggagaaattcgccctcaaagtcatcatcagatttgaaatatttaaagtgg

SEQ ID NO: 482416 - DNA, 96 bp, Homo sapiens
tgctgctcgtcctgtgggccaagtggacagacatatccagctgctggtccatggtgttgggcaggcaggtggactgggtggttatggatcaggaga

SEQ ID NO: 482417 - DNA, 83 bp, Homo sapiens
caaaaccacaaacttgcctacgtcagtaacagccaccaagttcttccctgtggaacagtagagacctagtctgccttctttca

SEQ ID NO: 482418 - DNA, 50 bp, Homo sapiens
atctggcggaggtttctgcagaggcagtttgaagagaacacatgaagaag

SEQ ID NO: 482419 - DNA, 100 bp, Homo sapiens
aaaactgtcattttgggactgctgtgcctcctcctcctgtggtggaggagaaggaaagatgaagatgctggacagtgagaacaccagactgggccgggag

SEQ ID NO: 482420 - DNA, 50 bp, Homo sapiens
ctcacagctctgctaaaaaacagctcctacagaagaatggtcagctgtcc

SEQ ID NO: 482421 - DNA, 96 bp, Homo sapiens
gggagatgcggccgcttcgtcctctgcagtcaagacgctgggcgcgtcgaggactgggacctgctgtaccggcggctgcgggcactggccgactac

SEQ ID NO: 482422 - DNA, 74 bp, Homo sapiens
ggaacccgagctggagctgaagcgcaggctgcggggcgcggagtcgggaggtgtcgtgaaaactacccctaaaa

SEQ ID NO: 482423 - DNA, 100 bp, Homo sapiens
aatccaccaaaggacttgaagaaacctcgcggaaagaaatgcttctttgtgaaattttttggaacagaagatcagaggctaacgagccggcagcagagcc

SEQ ID NO: 482424 - DNA, 80 bp, Homo sapiens
aagagagaaggcaaagaacctctggtgttgaaagcaaaatgatgcttcaacacccaggccaggtctctgcctcggaagtg

SEQ ID NO: 482425 - DNA, 95 bp, Homo sapiens
aagaatgacagcaagaggcaaaacttcggacatagaggccaaccaacctttggaggaaacctgtaggaagtgtcagggactctggaaagaacata

SEQ ID NO: 482426 - DNA, 100 bp, Homo sapiens
cagatgcgggccctgctggaccagctcatgggcacggctcgggacgggactttgaacatgtcggggatcgccctcagcagactcgcccaggagaggaaag

SEQ ID NO: 482427 - DNA, 75 bp, Homo sapiens
atcatgagcgatgttaccattgtgaaagaaggttgggttcagaagagggcaaaagatgatggaagcattgctgtt

SEQ ID NO: 482428 - DNA, 98 bp, Homo sapiens
ccgaggtggacctgcgggatctgcaccgcgaccagggccgcaggaagacgcaatggttggtaaaggctttttcctagttcagacaaaggaagtgtcca

SEQ ID NO: 482429 - DNA, 100 bp, Homo sapiens
gagatggatcaaagaagatcaaaggctgctgggattccatccacgtggtagaagtgcaggaagaggagcaggacttggatggtgagaaggggccatcatc

SEQ ID NO: 482430 - DNA, 90 bp, Homo sapiens
atcagcttctgaggaatctgtgctttctgtcccagaactccagattgtacctgagcctggttctggggaacgtcaacgtcacgctcctga

SEQ ID NO: 482431 - DNA, 75 bp, Homo sapiens
gaatcagttgttggagaaaattaaagacaccaagctggatggtttccttttaggcaagaaggaggtcatcagcag

SEQ ID NO: 482432 - DNA, 100 bp, Homo sapiens
aagttcagtgatgatgaagaggaggaagaagttgtgaaggacggcaggccaaagtggttgctccttgagggcaggacagttcttatggctttatccgttg

SEQ ID NO: 482433 - DNA, 100 bp, Homo sapiens
cagctgcggggcaagatggaggcgctgattttggggtgggaaccgccaaacctctcccttctttttgacttcacccttggataccatcaaggccagagga

SEQ ID NO: 482434 - DNA, 117 bp, Homo sapiens
gatgaacaacatgggtggtgatgaggatgtagatttaccagaagtagatggagcagatgatgcagagatggagttggtccagcatattggaatccctgccagtaagatcatctgcgc

SEQ ID NO: 482435 - DNA, 100 bp, Homo sapiens
ctacggtgtgctgttagaaggttctggtcttgcactaagctgtcttgtcgacggtctcactgatgcctcttctgcattcaaagttcctcgacccgggcca

SEQ ID NO: 482436 - DNA, 75 bp, Homo sapiens
cgacccagggcccgcgggccaggagagcgctcggcggggacctcaggatggaaaccagcagcctgcaccgcccga

SEQ ID NO: 482437 - DNA, 100 bp, Homo sapiens
tgcagtggaggccatcaggggccttgacaacacagagtttcaagagtgaagttcccagaccctacgccccgctgtcaggcagcccgccgatcagatggag

SEQ ID NO: 482438 - DNA, 100 bp, Homo sapiens
gacacacgaggagatggagtcccttacggccacgaccaagcccggtctaaaattcccaggactccacagctttgcaccagataagcctggaggaatacta

SEQ ID NO: 482439 - DNA, 98 bp, Homo sapiens
actatgcatcttcaccagatgaaaaggctctagtagaagctgctgcaagggctgaccagtttgagtatgtaatgtatggaaaagtgtacaggattgag

SEQ ID NO: 482440 - DNA, 98 bp, Homo sapiens
gtcatccgcatcaacaagatgttgtcctgtgctggggctgacagttctctacagaaagaaccaatgaacccaataggaacaaattctctgtggaaaac

SEQ ID NO: 482441 - DNA, 98 bp, Homo sapiens
acttgtcagtaccattcaacaagatgctgactgggacagcgttctgtcatctcagcaaagaatgacaggtgatttggcttctgcacagttaggaggag

SEQ ID NO: 482442 - DNA, 112 bp, Homo sapiens
ggatgagctgctaagcaagatgagatttgccctcgttcctaaacttttgaaattggcacaatggaagaagctggaatttgtgggctaggggtgaaagcagatatgttgtgta

SEQ ID NO: 482443 - DNA, 85 bp, Homo sapiens
tcggcggagaccctcgaagtgcgcaaacttgacactcaccctgaccggctgaccggttccctgatgtgttacctgcttctgctac

SEQ ID NO: 482444 - DNA, 75 bp, Homo sapiens
tttgattcaagtcctgttctacctactgccaattggaaaggctttcaaggggggctgcaaagctcctcatgctat

SEQ ID NO: 482445 - DNA, 90 bp, Homo sapiens
gatgccagggccaagacctcggaagggccctcaggccagaggccaaggggtggccgctgccaagcagtagggacggggtttcaccgtgtt

SEQ ID NO: 482446 - DNA, 127 bp, Homo sapiens
aacggctcgctggagctgcccggggcggtccctggctgcgtgcacagcgccttgttccagcagggcctgatccagtgtttaactgctgaagagatcttttcccttcatggcttttcaaatgctaccc

SEQ ID NO: 482447 - DNA, 88 bp, Homo sapiens
agagcctcgcctgggttctggaggctgcggggccatcgctccaggagaaaagccttacagatgctcatgggaagggtgtgagtggcgt

SEQ ID NO: 482448 - DNA, 75 bp, Homo sapiens
gatggcataagacagtttaaacatctcccagatggcgaatctttctgcattgaatttgaagatttctgaacagaa

SEQ ID NO: 482449 - DNA, 83 bp, Homo sapiens
gttggatatttgcttggaaaaacgtgtgggtacgaccttggatttctctgcctcttccaaacttttcctccctgaacctgagg

SEQ ID NO: 482450 - DNA, 82 bp, Homo sapiens
ctaagagctgggggcggatggaattctcctgcctgcgggtctttaaagactgagcccgtggaccgggagcccgtggaccggg

SEQ ID NO: 482451 - DNA, 110 bp, Homo sapiens
aggaggcctccactgaggaccccagtggcgagcaggcccaggaggaagaccaggctgattcaggtgccgtgagcgatgtggagatgcaggaacactatgatgagtttttt

SEQ ID NO: 482452 - DNA, 100 bp, Homo sapiens
gcgaaggccgggacccggttccccggcccacagtgggggtgtgcaaacccgagagaactggcagtggacacgcatgtgcacagaatcgccaacaggctga

SEQ ID NO: 482453 - DNA, 80 bp, Homo sapiens
actcatctgtacctcacttagaaaggagcaatgatgtctgggtccttgaccttgagcagtgggcgtggtccaagccgaac

SEQ ID NO: 482454 - DNA, 75 bp, Homo sapiens
attcgcagtggtcgcttcttctccttggaacctagaaagattgtacaatgaatggtgattctcgtgctgcggtgg

SEQ ID NO: 482455 - DNA, 133 bp, Homo sapiens
tgctgatgagcgagagaagtggatccatgccttagaagaaacaattcttcgacatactctccagcttcaagcatgtactggcattgaaaacattgacgaagctattacattgcttgaacaaaataattgggac

SEQ ID NO: 482456 - DNA, 83 bp, Homo sapiens
aggagctgtgcagccgcgaggaggcgcgggaggtgttcgagaacgaccccgagacggccgactcgcgggccgctgcacccacc

SEQ ID NO: 482457 - DNA, 95 bp, Homo sapiens
gaaggccctggacacagcaatatctctgggctttcacagaacactcgtgaaactgctcaggccatcaagggtatgcatatacgaaaagccacgaa

SEQ ID NO: 482458 - DNA, 90 bp, Homo sapiens
ctcagcccacaactcttgtcctaccacctcagctacagatgcacatgttgaatggagctcttctggcattgctgtttcctgtggtaaaca

SEQ ID NO: 482459 - DNA, 82 bp, Homo sapiens
gcggaccccgcatcttcgccgtctggaaagcaaattgtggctactaatttgccccctgaagatcaagatggctctggggatg

SEQ ID NO: 482460 - DNA, 98 bp, Homo sapiens
gtactccaccatccccaagtttggcatcgagaaggaggtgcgcgtgtgtgagccctgctacgagcagctgaacagcattacccagaacgccatggagg

SEQ ID NO: 482461 - DNA, 82 bp, Homo sapiens
tctccttaacaccgaacaccattgagaggatccagaatccagatctctggaatagctaccaggcaaagaaaaaaactatgga

SEQ ID NO: 482462 - DNA, 100 bp, Homo sapiens
ccctccccttggaccgagccgatcgccgcggggcagttcgggccggctgtcctggcgcgaatgaagactattctcagcaatcagactgtcgacattccag

SEQ ID NO: 482463 - DNA, 73 bp, Homo sapiens
gctgtctgtggtgtcggttaatcgtcacggcttccgggagttaaagctgtcgcctggttgggcccggaaatgg

SEQ ID NO: 482464 - DNA, 87 bp, Homo sapiens
aggctcaagcaatcctaccatgtcagccttcccagtagctggaactacagctgtccctttccccccaacacatcgcttgacatctga

SEQ ID NO: 482465 - DNA, 93 bp, Homo sapiens
gacaagtttgcagatcgggagcgcaaggtcgccctcaaggccatgatcaaaacgatgttccctttctacagctgctggaggactggactgcta

SEQ ID NO: 482466 - DNA, 90 bp, Homo sapiens
gttgctcacacaaagcctgtttggtggtctcttcccacggacgcgcgagacaatgaggagaaccattccccttgcaatatgtatatccat

SEQ ID NO: 482467 - DNA, 76 bp, Homo sapiens
cttaaggtcttcagcggggcgctccaggaggcactcacaggtgctggagaatctggtaaaagcaccattgtgaagc

SEQ ID NO: 482468 - DNA, 98 bp, Homo sapiens
actgaggagcgcggccagccctgctcgcagaattaccgcctcttctttagctgatgaaccaattgcagattatgctgcaatggatgatgtcatgcaag

SEQ ID NO: 482469 - DNA, 100 bp, Homo sapiens
cgaagatgaacagggttcctggggcatcgacgatctccatatttcattgcaaggggttgccctgctgtcagacgtctatcctgagaaaatcttgccggac

SEQ ID NO: 482470 - DNA, 83 bp, Homo sapiens
gtctcggtagcagccttcgccacgccggggtcttcagttgcagagtgggcaggatcttaagacccgataggtgcagaacccat

SEQ ID NO: 482471 - DNA, 75 bp, Homo sapiens
cccgaggaggggaccatgacacactacgagttccagggagctctgtcctggtgaccgtgcccgggttatgacgac

SEQ ID NO: 482472 - DNA, 82 bp, Homo sapiens
ggatcatgtctgcgagccaggattcccgaactcctctttcctaaaatggagtcgagtaaaaagatggactctcctggcgcgc

SEQ ID NO: 482473 - DNA, 100 bp, Homo sapiens
aagccgcctctgtattacttaccagtggggacgccctactacatgtcaccggagaggatccatgagaacggctacaacttcaagtccgacatctggtccc

SEQ ID NO: 482474 - DNA, 101 bp, Homo sapiens
ctgactctggctctgctgatgaggttgatgaatttgaaatccaagatgaagcccatgaacgtggaatatctcatgatggacgcctccatcctgctgccccc

SEQ ID NO: 482475 - DNA, 75 bp, Homo sapiens
tggtttgaatccttccttgatgatgaagaggttctgtacagagtaatgagatgtgtgacggctgcaaaccaggtg

SEQ ID NO: 482476 - DNA, 75 bp, Homo sapiens
gtccttattatcggaccccgaggatcaggaaaaactatggaaaatgtttataggaggccttagctgggacactac

SEQ ID NO: 482477 - DNA, 100 bp, Homo sapiens
ccacaacccgcagagacttctactggctgcgctcctttctggccggagcagagagtgaggaagaagatgaaatggaagttgaagaccaggatagtaaaga

SEQ ID NO: 482478 - DNA, 138 bp, Homo sapiens
ttgattcatcatggataatctgtcatcagaagaaattcaacagagagctcaccagattactgatgagtttgggcttcctgtagacacccttttcctgcgcaacagagctgggcctccctttctctaatttccccctta

SEQ ID NO: 482479 - DNA, 49 bp, Homo sapiens
ttctgaactcaggacttggcaagaacggcagagtcgaaacaaacaatga

SEQ ID NO: 482480 - DNA, 83 bp, Homo sapiens
atggcggcggtagcggcagtggcggcgcgtaggaggcgacaatgcagatcttcgtgaagactctgactggtaagaccatcacc

SEQ ID NO: 482481 - DNA, 100 bp, Homo sapiens
ttctattttgggacagggacaagtttgacggtcattccaaagaccatcatgcagacatcagagactgggtcggacacaggctcgacagtgaccttacaaa

SEQ ID NO: 482482 - DNA, 73 bp, Homo sapiens
gtaaagtcaccaacgagatcttccgccactacgaagttcttcgtaagtacatcttaaagctgtcaagatggtt

SEQ ID NO: 482483 - DNA, 75 bp, Homo sapiens
gaaacatgaactcggcctaatgaagctaaagaatcgactatacttgtagcaagcagaaacatcgatctaatacaa

SEQ ID NO: 482484 - DNA, 89 bp, Homo sapiens
gggcaggccctgggcaccactcacggggccctcagtgccaccaccatcttcaggggccggccaggacgtgggccgaagctgcatcctgg

SEQ ID NO: 482485 - DNA, 90 bp, Homo sapiens
acaaaaccgattcttcaatgtgcggaaccgagtcatgggggctggacaacgttcatggctctcgggtagaacctagtgaaacggccagaa

SEQ ID NO: 482486 - DNA, 50 bp, Homo sapiens
atgagatggtggatgaacccacagaacaactctgctcatggtgattacat

SEQ ID NO: 482487 - DNA, 99 bp, Homo sapiens
aaaaaagggcctccttcgacttgccaggaaaggctctatgagagcaggtttgttcggacagtgttaccattttctcaggaatttcaaagagataagcag

SEQ ID NO: 482488 - DNA, 100 bp, Homo sapiens
ctacagcgacacagcctggatctcctccatcctgctggccatgctctacgggacaggggtcaacgtctcagccaatcaggatgatgaactagaccacgag

SEQ ID NO: 482489 - DNA, 74 bp, Homo sapiens
cacagtgttaacaatgcatccacagaggctcagcttgtcaatcggaaacagaaattagagtctgtggaactttc

SEQ ID NO: 482490 - DNA, 90 bp, Homo sapiens
cgatgaacaaaaaccagttgcgaaatggtctgaggcagagtgtggttcacatcaagatggtgctcatgtggaccagtggtgacgccttca

SEQ ID NO: 482491 - DNA, 98 bp, Homo sapiens
acaagattaatcaatgtcaactgacagaactcccccactggaaaggattctgaaagaaatgaagtcagccctcagaaatgaagttgactgcctgctgg

SEQ ID NO: 482492 - DNA, 96 bp, Homo sapiens
gaaaatgcccaggaggaagcaggagcagcccaagcgccttccctcaccaactgcatgtccagccagacgaagaacgtggtcagcggcgtgctgttt

SEQ ID NO: 482493 - DNA, 51 bp, Homo sapiens
tagtcacccacctacatgttgagagcatatcatgtcccgagtgggaaaata

SEQ ID NO: 482494 - DNA, 97 bp, Homo sapiens
tcgccttcgccctttccacctcgcggcagttcgactcaccccacacagaccgcgtttctctccagtgtcgacctacacactcactgctcttaccaga

SEQ ID NO: 482495 - DNA, 99 bp, Homo sapiens
catgatacgaggcgaatgggtgacggccgggcaggagcaggcatgataacccaacattcaaggattttgggctcgtgaagtaggtaaaatgattggact

SEQ ID NO: 482496 - DNA, 100 bp, Homo sapiens
gtgcctaaaccataacctcacaatcttctttgatgtcaaaggccatgcacacaagctcttaacattgaagtggaacaaaatgggaaaccgtccctggttg

SEQ ID NO: 482497 - DNA, 82 bp, Homo sapiens
ctctcgttctgcgacttataaaggaccagacaaatcaaattagtggttttgcttattctaccagattccatgaaagtattgc

SEQ ID NO: 482498 - DNA, 87 bp, Homo sapiens
atccacctcggctgacggcgcgggatccctggctccgcgaggttacacgacagatccatgagcatgagcaggagaacgagttgcggg

SEQ ID NO: 482499 - DNA, 74 bp, Homo sapiens
ttccttagttgaaaggtgcgccctgctgtgacagtggactgctgggacgggcccgatgggaagccggtcatcta

SEQ ID NO: 482500 - DNA, 114 bp, Homo sapiens
aagtaggccgtctcgctctgggtctccaggcccgcgaccgtccgccagtcgtcccgagctcaccatggatgatgatatcgccgcgctcgtcgtcgacaacggctccggcatgtg

SEQ ID NO: 482501 - DNA, 75 bp, Homo sapiens
gaccagaggaactcagccctgattgcggattccagacagcattggaaaagacatagaaaaggcttgccaatctat

SEQ ID NO: 482502 - DNA, 97 bp, Homo sapiens
ggcgtcatcaagtcaccaagctggcaacggccaaaccaaggagaatacttcagagagtcagagttgtgccagaagtctcttaatggcagatagaatg

SEQ ID NO: 482503 - DNA, 82 bp, Homo sapiens
cgcccttcatctctgcctctgattataagcgccatggctatggctagtgttaaattgcttgccggtgttttaagaaagccag

SEQ ID NO: 482504 - DNA, 97 bp, Homo sapiens
gttgctcggctcctgtgtgcagctaatggtcgtcgtcggcatcctcctggcctacctggcaggctgggctgggcgagtatctcttcgaaaggctcac

SEQ ID NO: 482505 - DNA, 50 bp, Homo sapiens
cccgcggtgaccgaggcctgggccccggaattagacctttacgagaagca

SEQ ID NO: 482506 - DNA, 100 bp, Homo sapiens
gactgctttggggagtatgtggaaccgcaggactgcagggtctctccagcaaatgatgtgcttgcttttggaacattggtcagtacttccaatacctacg

SEQ ID NO: 482507 - DNA, 82 bp, Homo sapiens
ctgggattggctgcctcacccactcacagtgccatccctgccccaggttggaagtgtatcctcccttcttattttttctagc

SEQ ID NO: 482508 - DNA, 98 bp, Homo sapiens
ttccattgtcaaacccagtacagaaggattcacgagaagaaaattggcaagagtggagacaaagagatgagcagatgtgttcagagcaacattgtttt

SEQ ID NO: 482509 - DNA, 102 bp, Homo sapiens
tgaaatgtttgacgacactgatggtttgggttacacatcattttggaatgactgtatatcatctggattacgtggctgtatgttaattgaattagcattgag

SEQ ID NO: 482510 - DNA, 95 bp, Homo sapiens
gtgatatttctcttttgtctgcccctattgtaagtgcagatggaacacaacaggaagccgaacacttgataaaaagttcatcagcgtaaataaga

SEQ ID NO: 482511 - DNA, 75 bp, Homo sapiens
cccaggggaccctgtgaaatactgtaaaggaaacaaagcttagcaggagaggagagccagagaagtgacagggaa

SEQ ID NO: 482512 - DNA, 100 bp, Homo sapiens
agcgagtacacctgcaccatccagtaccatgcggagaccatcaagaatgtgcgcacagccacggaaagctttgcttctgaccccatcctctaccggcccg

SEQ ID NO: 482513 - DNA, 101 bp, Homo sapiens
aggacatcatcgcctgtggctttgacatcaacaagactttcatattctctgacctggactacatggggtatcttggagatggccgcttccatctggagtct

SEQ ID NO: 482514 - DNA, 50 bp, Homo sapiens
cggaggtggcagccatctccttctcgccagtaatgttaaagtagagactc

SEQ ID NO: 482515 - DNA, 74 bp, Homo sapiens
cagagaatgagatgggcgtggcgaagaaagtggtgatcctcgtcctgcagagtatctacgagaccccagcaggc

SEQ ID NO: 482516 - DNA, 100 bp, Homo sapiens
cttggatttggctacacacttatagatcttctgcactgtttacaggcacagctacatctacatccaccactgggacaagccatcttgtaaaatgtgcgga

SEQ ID NO: 482517 - DNA, 97 bp, Homo sapiens
gcgggctcggagccggagacgccgagctggggccggagctgcagagagacaaggcggcggcggctgctgtgctgggtgcagtgaggaagaggccctc

SEQ ID NO: 482518 - DNA, 100 bp, Homo sapiens
gataagcacaaagtcaagagacagcgattggacagaatttgtgaaggctcctgggtagaactgcacttcagcaataatgggaacgggggcagcgttccag

SEQ ID NO: 482519 - DNA, 82 bp, Homo sapiens
tgggccgcaggggcgcgcagcgcggggagctgccaggactttctgcagggcgactgcaccaaagcgaaacagaagctgaact

SEQ ID NO: 482520 - DNA, 75 bp, Homo sapiens
gcaacctgttccccaaagacactttaatggcccggaggctgtttgatgtcctgcacgagcccttcttgaaagtac

SEQ ID NO: 482521 - DNA, 83 bp, Homo sapiens
ctcatccggcagaataagagactggacgctgtgagctgcctgtggaggaaccgattgtgtccacagatgaggtcatcttccca

SEQ ID NO: 482522 - DNA, 82 bp, Homo sapiens
cccacatgcccgctcacctgcgctgtgatgcctgcagagctgtggcttaccagctttccccagacatggccaacaagggtcc

SEQ ID NO: 482523 - DNA, 50 bp, Homo sapiens
tgccagttaattactttgaatgttctatattggctgtgatctttgtacta

SEQ ID NO: 482524 - DNA, 100 bp, Homo sapiens
gtgctgggaggcccggccagctcgatcgcaggcttccacctggcggccatttgaagaaaacaggtctgaaacaaggtcttacccccagctgcttctgaac

SEQ ID NO: 482525 - DNA, 88 bp, Homo sapiens
acgagaccagaggccgaactcgggttctgacaagatggccgggctgccccgcaggatcatcaagttacatagcaaacttctggagaca

SEQ ID NO: 482526 - DNA, 83 bp, Homo sapiens
gaaaaagagaagaagatgaagaaaccagcttgatatgttgcatgattccacctttccactgatagactcaagttcccagaacc

SEQ ID NO: 482527 - DNA, 100 bp, Homo sapiens
ggggaggacaacttcgcccgggacttcatgactgagaactatgagcagagaatacgtgaacaacaggaacagctgtcacttcaacagactattattgaca

SEQ ID NO: 482528 - DNA, 98 bp, Homo sapiens
agttcgccaaagcgacaggagctggaatatggttgcacaatccagtgacgttattgctgtctgtcagagcctcagacagatggcagaaaaatgtcagc

SEQ ID NO: 482529 - DNA, 75 bp, Homo sapiens
gccacccgcctcccaccatggctctgaagagaatccacaaggctggacgtaaagaaagaagtgatgcactcaatt

SEQ ID NO: 482530 - DNA, 83 bp, Homo sapiens
gcctgttaccacgagctagtgttggagtgcaccaagaaatggagcttgtggaaacacttccgtgctgtaagcctttgtttatt

SEQ ID NO: 482531 - DNA, 80 bp, Homo sapiens
accacgtcccctctgacactgaggaaccatattacgttcgttgcatcaaacccaatgacaagaaatctccacagatattt

SEQ ID NO: 482532 - DNA, 90 bp, Homo sapiens
gcactatgtctgcggaagtccccgaggcagcctccgcggaggagcagaagagcatatcatgtcccgagtgggaaaatattagctgtaaag

SEQ ID NO: 482533 - DNA, 75 bp, Homo sapiens
ggacccagagctagactacaccctcatgagggtctgcaagcagatgataaaggggtggcctatgtatgcacagct

SEQ ID NO: 482534 - DNA, 101 bp, Homo sapiens
ggggatttagtgatgaatgcctcacaatgacagatttcctcaaggaccaccatctcagatgggttcacctatggggagtagaacaggttctgaaacccctc

SEQ ID NO: 482535 - DNA, 90 bp, Homo sapiens
cgaagtgctatccgtgcgagaacagctattccacgagaggatccgcgagtgtatttatcaagtggggcagctgtattctgtggctgaggc

SEQ ID NO: 482536 - DNA, 96 bp, Homo sapiens
aacgctcgccacacccttgttttgagatcctctctaagcggctatgtgactacgtttgtgacctcctcttagaagagtcaaatgttcagccagtat

SEQ ID NO: 482537 - DNA, 78 bp, Homo sapiens
acgactcctcggccgagctgagtgagtcctcctccgcctcctcctctctgcatgcgcgtcagagcccgtgccaagaac

SEQ ID NO: 482538 - DNA, 50 bp, Homo sapiens
gctcgtccagctgcgtgcctagattgttaaaggaaatgggctggcaggaa

SEQ ID NO: 482539 - DNA, 75 bp, Homo sapiens
ggatcgctgtgatcgtcacttgactgattgaggagttgaagctgtctttgaagagcaaagaagctttaattcagt

SEQ ID NO: 482540 - DNA, 75 bp, Homo sapiens
cccacagtgggggtgtgcaaacccgagagaactggctgctggaaacgcgttctgccaggctgcacagctgcacct

SEQ ID NO: 482541 - DNA, 101 bp, Homo sapiens
ctcaagttgctactcgggacgctgcacctcccgcgccgcacggtggacgagccctgggcgctgcctatggcacagccaagagcggtaccggcattgcggcc

SEQ ID NO: 482542 - DNA, 74 bp, Homo sapiens
agaacccaggcccacggaggaagagccgggcagtccctggagcgggccagaaaatgcatccgatgcagatttat

SEQ ID NO: 482543 - DNA, 80 bp, Homo sapiens
ggcgagcgagcggctaggttcgtgatctggagagacgctcagcaaaatgatgcttcaacacccaggccaggtctctgcct

SEQ ID NO: 482544 - DNA, 75 bp, Homo sapiens
gctagtttggatgtggaggggaatagactccatctatccatatgagacctttgatgaatgtgtagcagaaggtgg

SEQ ID NO: 482545 - DNA, 88 bp, Homo sapiens
ctctcgcgctgcactgtctctccgacgcaagactgtcccggcccgggaaatggtgctcttgcagaacattctgaaaatgtgcatattt

SEQ ID NO: 482546 - DNA, 97 bp, Homo sapiens
ataattttgatacaatgatatatgtgagattggctgtgggagaactaactgaaaatggtttgacattagaagaatggttgccatcaacatggattac

SEQ ID NO: 482547 - DNA, 95 bp, Homo sapiens
gtgtgctcgacaatggtgacattgtggttggtgcgaggatctagtttgaagcactaagaagaataagacatcagtttgaaaagaggctctatcag

SEQ ID NO: 482548 - DNA, 75 bp, Homo sapiens
cctgtggtcatctccctgacaacccagataacagggacctgatgcccagaaccctggacgggcagatcaccatgg

SEQ ID NO: 482549 - DNA, 50 bp, Homo sapiens
gcaatcacacctctaatcagcaccaagttgctgccttcactgaagtcttg

SEQ ID NO: 482550 - DNA, 100 bp, Homo sapiens
aatttgaagaaggcagaaggaacccatggctttagccggctgcccagattcctttttgcaccatccgtactaccaggcaatgaatcgctccctggctaat

SEQ ID NO: 482551 - DNA, 96 bp, Homo sapiens
ggccagccccagcagcaacagcagcacagacaccagagaagcctatgatgacaagcaggtggtcacagagatcatggcaagatgttttattccaac

SEQ ID NO: 482552 - DNA, 75 bp, Homo sapiens
caggacatcactttagatgatggtctctaattaacagaagatggcaaagcccagccacagcagctatgtccttca

SEQ ID NO: 482553 - DNA, 83 bp, Homo sapiens
ttggatttatgcaaacttgggccaaaggacagttagaagacagtagcaggaggatgcattagcacaacaggcctttgaagagg

SEQ ID NO: 482554 - DNA, 96 bp, Homo sapiens
ccaacttctgcgggatcttcaaccacctcgagcggctgctggacgaagatgacgtccggttgtttgccttcgtgcgcttcaccaccggggatgcca

SEQ ID NO: 482555 - DNA, 50 bp, Homo sapiens
gcacatcaatgatatcatcccaggccctgaagaggaaagtgaggatgact

SEQ ID NO: 482556 - DNA, 100 bp, Homo sapiens
agcgtagctttcagccctgatgggaagtacttggccagtggatccttcgacaagtgcgtccatatctggaatactcagtttgtgatggacgcctctgacc

SEQ ID NO: 482557 - DNA, 75 bp, Homo sapiens
gccccggctcgcccgtgtgcagagctccctgtgctgtcaggaatctacaggacttggctcgtatttacattcgac

SEQ ID NO: 482558 - DNA, 101 bp, Homo sapiens
gcagagttggtgagcagcgctctggggctcgccttgtatctcaacaccctgagtgcggatttctgctatgatgacagtagccggatcgagctgggagatgt

SEQ ID NO: 482559 - DNA, 50 bp, Homo sapiens
gggagggcctggactgggacctcatggtgtgctccgtgcgctccgtggac

SEQ ID NO: 482560 - DNA, 101 bp, Homo sapiens
acgaggtgcgccggctgatcggaggatttgttggtattgaggaaaacggtgaaatcctttttggctgtttgccagcagtgcctgtctaatgttaatactcc

SEQ ID NO: 482561 - DNA, 115 bp, Homo sapiens
gccgcaccatgccgctcctaagcctgcacagccgcggcggcagcagcagtgagagcagcccctgtcaaagggaacaggaagcagtccacggagggtgacgccctagacccacctg

SEQ ID NO: 482562 - DNA, 90 bp, Homo sapiens
ggcttctccagttgctagctttcagtttcttagttctccagtgctgatgaagcggctttaaaagagcccatcattaagaagtttgaagag

SEQ ID NO: 482563 - DNA, 90 bp, Homo sapiens
gctatggtgatgattagagacatactaatgtacatgtcaccttcaggccattcagaggaggaaagagaggggaatatgaagtcagccaag

SEQ ID NO: 482564 - DNA, 98 bp, Homo sapiens
gctatggaggcacagctgctgtcttcaatgctgttaactggattgagtccagctcttgggatgcttgtccagatgccctgtttaatgaactggtaaaa

SEQ ID NO: 482565 - DNA, 97 bp, Homo sapiens
taatctgttggattctaatgcagttcatcacatcattcatgattttcagggtcttgcctatttgcatactaaaggcaaaatgcatagagatatcaaa

SEQ ID NO: 482566 - DNA, 100 bp, Homo sapiens
ccaagatggtgaagcagatcgagagcaagctttttgacattcatactagtggcctattgggagaaatccacacgggccatcacagcaccatccagtactg

SEQ ID NO: 482567 - DNA, 82 bp, Homo sapiens
ctttccgtctgcttggctcccccaggtggtgatctttgtgaagtctgtgcagcggtgcattgccttggcccagctactagtg

SEQ ID NO: 482568 - DNA, 98 bp, Homo sapiens
tgcccggcgcctggcggggcctccgcgaggacgagttccacatcagtgtcatcaggaggaaaaggcttctcttttacatcgtactcaggaagaaagaa

SEQ ID NO: 482569 - DNA, 82 bp, Homo sapiens
cccttccccacgcaaccccagatccatttacactttacagtgaaaggtgtagcagtcactcggcctacacccacagcatcga

SEQ ID NO: 482570 - DNA, 97 bp, Homo sapiens
gggccgcgtgaaggccttcgataggaacaagccagctcacaccagctggaacatgggcgccatcctggaggggaagcgcagtggctttgcaccctgt

SEQ ID NO: 482571 - DNA, 100 bp, Homo sapiens
ccctgtgacctggccgatgaggaagtactgagcctgttggaggaactggcccggaaacaggaggaccccgagcgggaagaagttccgcagcaagccgcag

SEQ ID NO: 482572 - DNA, 73 bp, Homo sapiens
gcagagcgcgggaggcggcggcggcgcggagcccaggatgggagcaaagtgtttacggcatcgtgtgataaaa

SEQ ID NO: 482573 - DNA, 98 bp, Homo sapiens
agagagggctgctcagtcttttgaatgatttccactctggaaaacttcaagcatttgctcctctggtgcaagtgtggtagctattgacaacaaaatcg

SEQ ID NO: 482574 - DNA, 102 bp, Homo sapiens
atggaggatgatttcatgtgcgatgatgaggaggactacgacctgggagagctggaccaggaacgactgaccaggcagcaagaactcacagccttataccag

SEQ ID NO: 482575 - DNA, 83 bp, Homo sapiens
cgcgcccagagccccgcgtttcagccctagggaaggaggatacgaagcgttttcggcttcctgcccggagctgtgcagcaaac

SEQ ID NO: 482576 - DNA, 76 bp, Homo sapiens
cagagatgcttctaagatccttgttgacgctctgcaaaagggttattttggagctgttggagcactccttgagctg

SEQ ID NO: 482577 - DNA, 90 bp, Homo sapiens
cgtccttccaagttacctcagacagaaccctctggtcacagtcttggaggaggaactttttttggtctctgctgtcttcttactggctgt

SEQ ID NO: 482578 - DNA, 75 bp, Homo sapiens
gcgatggggaatccaacagaattctggagcagcatggacctgtcagcaactaaggaacaaaagtaatgaagattt

SEQ ID NO: 482579 - DNA, 100 bp, Homo sapiens
aggaccgccatggggacacggcactgcatgctgctgcccgccagggcccagatggtggtcctgaagagcaaggatgaccaggtgaccgttatcggggctg

SEQ ID NO: 482580 - DNA, 95 bp, Homo sapiens
cctgaagaaagctgctgatggggctgctgagagagacgtcttcaaccagctgctgattcacgcggccttaaactgcacctccagcgtccataaga

SEQ ID NO: 482581 - DNA, 96 bp, Homo sapiens
agaccctgaaagcaaccaggaggcagtaaattcttcagctgctcggacagatgaagctccccaaggagctgcagatgctgtctttgcatttcaact

SEQ ID NO: 482582 - DNA, 74 bp, Homo sapiens
atccctgagctcgtcaagcagctgtcggccaagctcatcgccaacgatctcacattcttgaaggtggcattgaa

SEQ ID NO: 482583 - DNA, 90 bp, Homo sapiens
gcaatactacaatattaaaagacaaaacgctgaaatgcagctagctattgctaaagatgaggttacagaaattatctcagagattcgggc

SEQ ID NO: 482584 - DNA, 75 bp, Homo sapiens
ccacgtggatgtgaagatttcctctaaaaggtgtccatcctggtcagaagatgaaactctttgtgcccgcaatgt

SEQ ID NO: 482585 - DNA, 76 bp, Homo sapiens
gccgcatacattttcgaagagcccttcgacatcagggatctgcaggaatgtatcctgtcaggtataatgtcagtga

SEQ ID NO: 482586 - DNA, 78 bp, Homo sapiens
gcgcggccttcccatcaccatcacagagagcgatagtagctgtgctatgtgtttccagatctgcttattgtttgggtt

SEQ ID NO: 482587 - DNA, 100 bp, Homo sapiens
gcccccttcgcccgtttccatcacgagtgccgccagcatgtctgacaaactgccctacaaagtcggtgtgggacgtgcgtgcggcgagatggacactccc

SEQ ID NO: 482588 - DNA, 83 bp, Homo sapiens
gcgagtcgccgctgcagccctagtgactgcggcctgcatcccgccccagtggaccacctgcatttgccgcccacccctccgag

SEQ ID NO: 482589 - DNA, 90 bp, Homo sapiens
gcactttaccagaaaaaacatggtattaaactctataaacctctcattctccctgtgactcagggaaaaaatgcatttttcaaagaccta

SEQ ID NO: 482590 - DNA, 74 bp, Homo sapiens
atggtctcaagggtcgtgtgtttgaagcagtcgatgatgtgaagaaaggttacatcaaagcagaagaaaagtcc

SEQ ID NO: 482591 - DNA, 100 bp, Homo sapiens
tgcagggttgtcgagctgctctgcagctcctacagaagaagggaaaaaagagctgctgttcctaagtaacgcgaacccctcgctgctggagcggcactgt

SEQ ID NO: 482592 - DNA, 83 bp, Homo sapiens
cttaatcagcgcactggcaagtgcagcgcctgtaatgtttggcgagtctgagcaaggtccgtggtcctgtcagtggaagcccg

SEQ ID NO: 482593 - DNA, 82 bp, Homo sapiens
ggccactgtggccttctgcgacgcgcagtccacgcaggagatccatgagaagatgccatggacaatattaccaggcagaacc

SEQ ID NO: 482594 - DNA, 90 bp, Homo sapiens
tcactcattaaacgatgacgattgacagtgactgcaaagggctgctggtggggtgaggccatcccacgcaactctggggtctgtgaagcc

SEQ ID NO: 482595 - DNA, 98 bp, Homo sapiens
agatgctatggtggcaacagatgtatgctcatcagtattatatgcagtagatgttgctggagcactgtcagtagaagaaatcactgaactactcagtc

SEQ ID NO: 482596 - DNA, 83 bp, Homo sapiens
ttcaattatgaatctcaggaacaccaccttctgtcagagctccaaacgagaatggaagccgctggaggaccgtagctgcacag

SEQ ID NO: 482597 - DNA, 100 bp, Homo sapiens
gggctacgtccactacggggactggctgaagccggctgtgaccacaaggtgacatccaccagtggtaccatcaccagccccaactggcctgacaagtatc

SEQ ID NO: 482598 - DNA, 51 bp, Homo sapiens
catctacatgcattttggggaggtcaagccactgatctggattgagtctgt

SEQ ID NO: 482599 - DNA, 50 bp, Homo sapiens
tgggcagttcaggggctgggcggctgagatatggaatgtgcagatgtccc

SEQ ID NO: 482600 - DNA, 89 bp, Homo sapiens
gaatggagtcgccttctgcctggtcgggatcccgccccgcccggagccccggcccccacagataaaataccatgaggagtttgagaaga

SEQ ID NO: 482601 - DNA, 50 bp, Homo sapiens
gtggtgctcagcttccctgagctcgaggtgcagagcattgtagaccaagg

SEQ ID NO: 482602 - DNA, 100 bp, Homo sapiens
cccgacgcgacgcgccagcagcgcagcaccgattcctctcgggctcttgggcgctgctctgaggacctggacccttcccagggatcattgacatctttgg

SEQ ID NO: 482603 - DNA, 83 bp, Homo sapiens
atcgcccaagtccctctactcgcgaggttagcatcttgcaaggaggtagtaacatatccagtcgtgaaactgggaaagaccag

SEQ ID NO: 482604 - DNA, 100 bp, Homo sapiens
atttgactgagcaggactattttggtttacagttggctgatgattccacagataacccagccatccggctgtccttagagcaagccctgcctcctgagcc

SEQ ID NO: 482605 - DNA, 100 bp, Homo sapiens
ctgtaggaaggaacttggttccccctccctcagcttccgccccaaaagtggaaggaggcaaaaccggaagaccttatggattcaaaacttagatgtgtgt

SEQ ID NO: 482606 - DNA, 100 bp, Homo sapiens
gggaggcgcccgcgccgacgcggggcccatggccaggaccaccagccagctgacatggcagggaggtttaatagacatggataagaagtccactcacaga

SEQ ID NO: 482607 - DNA, 102 bp, Homo sapiens
cggggacccagaccctggagcctcagttggaagcagccgatccagcctgcggagcctgtggggcaggaaatctactttcttcaatgtgttaaccaatagtca

SEQ ID NO: 482608 - DNA, 75 bp, Homo sapiens
ctggtgttccttgactggagacaacctgcagcctcctggcaccaaagataaacaatcagattctgtatggaagaa

SEQ ID NO: 482609 - DNA, 74 bp, Homo sapiens
accagtccaggcccagcctctcgaatgggcacacctgtgtaggcggtgcagtatgacaaccactacaccaacac

SEQ ID NO: 482610 - DNA, 101 bp, Homo sapiens
agttgatttctgcgattaagaggacgttggctcgccttctcgtgatcattgtgagcctgggctatggcattgtgaaggaggttcccctgaaggatgctaag

SEQ ID NO: 482611 - DNA, 90 bp, Homo sapiens
agagcgtgaccgagagcgcgaatatcgtcatcgttagaagtgtgggccaaactgaaattgcagaaggcttcagaacgatggcagcctgac

SEQ ID NO: 482612 - DNA, 100 bp, Homo sapiens
atgtggcttcactgcttacctatatcccaaacagtgctgtctggtggcccttctatcacttctatgcaggatgacatgaccttgtggtagatcccagaac

SEQ ID NO: 482613 - DNA, 98 bp, Homo sapiens
tgcccttggtgcggaccgtgtgcgtccgaagcccgaggcagaggaaccggctcccagatgatacagcagtgttcgagttgatacagctagttccacca

SEQ ID NO: 482614 - DNA, 101 bp, Homo sapiens
gcgccgagccggaggctgcaggatgctcgccctcccctacctgcggaagagtcaagggaatgtcatcaacatctccagcctggtgggggcaatcggccagg

SEQ ID NO: 482615 - DNA, 101 bp, Homo sapiens
ctttcgcggagaaaaggctgacatgcccgtcctatatgacaggatgaagatgggtttcaagaactaaatgagaatggaaatgctaaggatgagaatattca

SEQ ID NO: 482616 - DNA, 48 bp, Homo sapiens
cacccgcgggagcgcacggcgctatgatggagtcttgctctgtcgccc

SEQ ID NO: 482617 - DNA, 88 bp, Homo sapiens
ctgccggggctgccccgcgcacgaaattgcaggtgctgcagtgtctgaaatttccgggcctttctcaacagaggatgtagccagcaac

SEQ ID NO: 482618 - DNA, 98 bp, Homo sapiens
gcagagggcctgggctcttccagcctcagtgtgcctctctggccgcccactggatgagcgaaacctgctaatattttagttatgggtgaaggtcctga

SEQ ID NO: 482619 - DNA, 82 bp, Homo sapiens
cttcaatgagtaaacatattcctagctggccttgctgaacacctgagctcaacccctaccatccgactcccgaggtgttctg

SEQ ID NO: 482620 - DNA, 100 bp, Homo sapiens
ttggtgtcgtttttccttgagctgaacgtcttgcaacagtggccgcacgcatagaaacagtcaagtgcttgatgaagataatatattgaatgaaacacca

SEQ ID NO: 482621 - DNA, 97 bp, Homo sapiens
gtcctgccctcacaagtgcagcgtccagactctcctgaggagcgagggcttccgagtggacctgccaatcaagtcggcccgctaccgtggccagtac

SEQ ID NO: 482622 - DNA, 50 bp, Homo sapiens
agagaatccttgtcaaatgaactcagtagaactaatgagaggctagcaga

SEQ ID NO: 482623 - DNA, 75 bp, Homo sapiens
cagggcctgcagcgggagctggacggcgagcgcgagcggcgcgagaaaattgacgagatgcctgaggctgccgtg

SEQ ID NO: 482624 - DNA, 100 bp, Homo sapiens
cggtggaacgaggacgcggactgcgaaggcagtttacagaagcacttgcagaactcatcagaagccaccccgcttatcagcagatctcaagagagcgttc

SEQ ID NO: 482625 - DNA, 97 bp, Homo sapiens
gatcagacaggtctcctggagatgaaatgctgtcccaaccttactggtttgcctgagaatacagatcaacccacagaacaaagcggatttccaaggc

SEQ ID NO: 482626 - DNA, 95 bp, Homo sapiens
ccagggtattctgaagaagacaagagtcatggaaaaaaccaagtggctggatatcaaaggaaatcatggtgttggagcgggccggagagaagtag

SEQ ID NO: 482627 - DNA, 83 bp, Homo sapiens
acacatgcgccaagaccagatcaccaatggcatggtgaatgctatttctaccgatgacgtagctttgccaaagacttagaagc

SEQ ID NO: 482628 - DNA, 90 bp, Homo sapiens
cggcgccgaaagaagctacccagtgtcctggagaatgacatcttcctgggctgggaaaaaggagcttataagaaatggggaaagagtaag

SEQ ID NO: 482629 - DNA, 100 bp, Homo sapiens
ggcagccaagctcgtggcctgcctctgcgtgcggagccgtgaggctgccttcacgtacgccatcaccgcggctggcgtggcgcacgccgtcaccgctgcc

SEQ ID NO: 482630 - DNA, 97 bp, Homo sapiens
ctctgtatctggaactggtggcgtcggcccaggtcggcgggaaccccctgaaccggacgaccgtggcagccatgtattacagctactacatgctacc

SEQ ID NO: 482631 - DNA, 75 bp, Homo sapiens
gatgccagtaagcgaaaggctattgttgcagaccgggtggttgaagatggatatgaattttttgcaaagaggcag

SEQ ID NO: 482632 - DNA, 82 bp, Homo sapiens
cactgctactgcgaagacagctggcagatggtatagctgcatgctgggaaagaaatgcagcctggcgcctctgaaggaggag

SEQ ID NO: 482633 - DNA, 88 bp, Homo sapiens
ggcacggtggatgaggactcgtcaggctccgaaagttcaccatgtctattctcaagatccatgccagggagatctttgactctcgcgg

SEQ ID NO: 482634 - DNA, 90 bp, Homo sapiens
agaagagccaggctgccccgggcagctccccctgccgagggcatgtgctgcggaaggccaagcatgtggaggaaggaggcccagcccagg

SEQ ID NO: 482635 - DNA, 100 bp, Homo sapiens
attgctcaactaagaccaagtcctcgctggactgctcagggtgccagacctcatcatgaaagctcaagaagtggagctggctttggaagaagtagaaaaa

SEQ ID NO: 482636 - DNA, 100 bp, Homo sapiens
ttaaccttgatgcaactgaattgagtataagaaaagccttcattacaagtactcggcaagttgtcaggatgtcgcacgcggccacaagcgccttatgccg

SEQ ID NO: 482637 - DNA, 73 bp, Homo sapiens
cttcacctcagaaaggtggaagaaggccggaaggtggtggtcgtacgctgtgaaggcatcaacatttctggca

SEQ ID NO: 482638 - DNA, 100 bp, Homo sapiens
agggccgtgccgcagatgcccaccggaatggagaaggaagaggagtcggactcacaccacccggcaagaactgctcactacggctccctgccccagaagt

SEQ ID NO: 482639 - DNA, 75 bp, Homo sapiens
gaagattcttacctctttgatctcgacaataagaaatgagccgtcagactgctacagcattacctaccggtacct

SEQ ID NO: 482640 - DNA, 108 bp, Homo sapiens
tttgaagctacccttggggcatctgatcctaattcccttgctgatgatattggcagctgtttctgatcaggaaaggaagaaaatgaagcgcaaaggagatcggtattc

SEQ ID NO: 482641 - DNA, 75 bp, Homo sapiens
agtgtggtggtatccttacaatcatcctgcttcttgtacatcactggtttttcgttggaatatacgttgcacatt

SEQ ID NO: 482642 - DNA, 100 bp, Homo sapiens
gtcgaaccccgggacacgcaggaacggctccagcatcaagatccgtctgacagggtattgttggaattcagcaaagcccaggtaaactctgtgccaacca

SEQ ID NO: 482643 - DNA, 89 bp, Homo sapiens
ggggcagttcgggccggctgtcctggcgcggtttggcaaacatcgaaaagatgacaagattgagaaaacgggtaaaataaaaatacagg

SEQ ID NO: 482644 - DNA, 100 bp, Homo sapiens
tactggatcaaggacagacagctcaccaaccgtgacagcaccatactggaacttcaaaaagttctgaaaacatgttgatatcagttttagagaatgtggc

SEQ ID NO: 482645 - DNA, 89 bp, Homo sapiens
ctgacggccgccaagaagcacggcaccaaaaacaagcgcgaacctgtggcatattccttggagtatctccaggttgagaattcatgatc

SEQ ID NO: 482646 - DNA, 88 bp, Homo sapiens
catcaagtgctgtttgtatgcacgacttgaagacacgcacttatcattcagtgggtcttattgaagttaaaacagatgagtttcctcg

SEQ ID NO: 482647 - DNA, 83 bp, Homo sapiens
ccttggaatatggaatcacaagtgatgacatcttctggctgaaggaatcccctggaaaaacaactgcatgaacttgcccccag

SEQ ID NO: 482648 - DNA, 100 bp, Homo sapiens
gtcgtggggaatggacatgcattgcctactcgcagcttcgaggcttgttagcagtggcacaagatcttacagaggatgaagaaacagtagaagattccat

SEQ ID NO: 482649 - DNA, 101 bp, Homo sapiens
gtgagaaaggtcaccgcaagtacagagagtacagccccccatatgcgccgcaggttcaggagaagtggcacctggtggaggacctgtcgcgactgctgccg

SEQ ID NO: 482650 - DNA, 74 bp, Homo sapiens
gggacggcaaggagagggtgacagcctgtagccaccaatgtttcaagaggagcccccaccctgttcctgctgct

SEQ ID NO: 482651 - DNA, 83 bp, Homo sapiens
ggaaaaagcggccaaagaagtgaagctgctgctactcggtaaaatgtcggttccaggaccttaccaggcggccactgggcctt

SEQ ID NO: 482652 - DNA, 74 bp, Homo sapiens
ggtgcaggaaggcagtctttgctacgtacagcaaaaggttttttgcatgtctgacacccatgactccacctgga

SEQ ID NO: 482653 - DNA, 100 bp, Homo sapiens
ttcaagcctgagtgtgaagattactgacttccttttggtagtactgcgtgatgttgttcaggcttatcctgaagttcgcattgttcttatgtctgctact

SEQ ID NO: 482654 - DNA, 100 bp, Homo sapiens
gcgcctttctcattattataggctccctcctgctgtcaggctacatcagcaaagggggtgtgaagaagtttgatgtgccgtgtggaggaagagattgcag

SEQ ID NO: 482655 - DNA, 113 bp, Homo sapiens
ggcattgacatttaattttagggtcctttatatagaagggagagtagacacatcgttcatgtacatgatcgccggactctgcatgctgaagctctaccagaagcggcacccgg

SEQ ID NO: 482656 - DNA, 83 bp, Homo sapiens
ctggggccccctgctcctgtgcctgctgcaggccgctccagggggattcccgaagtcttccgttttctgagaatgtgagtgct

SEQ ID NO: 482657 - DNA, 100 bp, Homo sapiens
agtatcggacatgatcctcatcttttatacactcttagtgctgtccaggtatgtaactgctctgcgcctgacacgggcaacatggagctgctggtgaggt

SEQ ID NO: 482658 - DNA, 100 bp, Homo sapiens
cgcgtcgctctgggtcctggcagaaggagacttatgaaaatatgcatcagtttaatactgtcttggaattcatgagatggaagcataggtcaaagctgtt

SEQ ID NO: 482659 - DNA, 100 bp, Homo sapiens
atctgcgaggcccacaaggtgctgggcaaccgctgggccgagatcgccaagatgttgccagggaggttcaagcgattctccagcctcagcctcctgagta

SEQ ID NO: 482660 - DNA, 51 bp, Homo sapiens
ccatgaaaaaggatgttgaccggacagctgagtcagtgctgattctctcaa

SEQ ID NO: 482661 - DNA, 82 bp, Homo sapiens
tgcaatatgcaatcatcagcgaggcctggcggctagtggaggagccttcacgtaaatgggtccagtcatgcctcccagtaag

SEQ ID NO: 482662 - DNA, 100 bp, Homo sapiens
ggcaagtcggcgctcaccatccagttcatccaggccctttctggttactgtggctttatggcagccaacctttatgctcgttccatatttggtgaagatg

SEQ ID NO: 482663 - DNA, 83 bp, Homo sapiens
ctacaggaagctgctggaaggcgaggagagcaggctgggtggagaaggaaacctactattagccccccgtcctgcacgccgtg

SEQ ID NO: 482664 - DNA, 50 bp, Homo sapiens
gcgaaggcgggcggcagaggcgatcaggttgaagaagcctcagcggaggc

SEQ ID NO: 482665 - DNA, 90 bp, Homo sapiens
gctgccctcgcgacatgggtcacccgccgctgctgccgctgctgctgctgctccacacctgcgtcccagaagctggcagggcggagatgc

SEQ ID NO: 482666 - DNA, 98 bp, Homo sapiens
aagagctggctcggatgctgatggggctggacctgctggtgttcgcccacgaccatgatgatcatgacgcagtcctgaggtttaatggggcacccaca

SEQ ID NO: 482667 - DNA, 98 bp, Homo sapiens
ctcaccatacaggaacagggcagacgttagcgtgagtgatcactctcaatcccgggtcatttcttcagatagctccccagctgtggaaaatgagcatc

SEQ ID NO: 482668 - DNA, 50 bp, Homo sapiens
gttggagccacttgttacacaggttacaacccttgtaaacaccaatagta

SEQ ID NO: 482669 - DNA, 100 bp, Homo sapiens
cttgacgccttagataacagccatcctattgaaattggaaccaaccagatggctgtgtgtgccaaagcacagaacaaacctttctatgtggttgcagaaa

SEQ ID NO: 482670 - DNA, 75 bp, Homo sapiens
gagcgccggccgcaccaccgccctctggccgttgcctcaccggtgatcccggccgctgatctgtcgcagcagatc

SEQ ID NO: 482671 - DNA, 101 bp, Homo sapiens
taacgtcatggaggatgaacgacagagctttcagcagaggccaaggcagcattgcttgaatttgaagaaagggagcgacagcataaacaaggacgctacag

SEQ ID NO: 482672 - DNA, 90 bp, Homo sapiens
gtcaaatgacacaattaaaccaactcctgggagaggtgaaggaccttctgagacagcagtgcacagccagagaacaacacatcacacaca

SEQ ID NO: 482673 - DNA, 100 bp, Homo sapiens
cggtcggccgccaccaggtcaccctggaagagtcgctggccgaaggtagattatgataatcatgcactttataaacacggaaagacaggtcgaaaacagt

SEQ ID NO: 482674 - DNA, 109 bp, Homo sapiens
cgagcagcgccagcggccgagcgggcggcttcctggcctgggcgctccggtggcggcggagcatcaagatggtgctcatgtggaccagtggtgacgccttcaagacggc

SEQ ID NO: 482675 - DNA, 75 bp, Homo sapiens
tctatgttaatgtcgtagaccctaagatcccaccaaatattttggttgtgagctgggagcacagacccagtttga

SEQ ID NO: 482676 - DNA, 74 bp, Homo sapiens
tggttgtttctggtgggatcgttggctatgtaaaaacagtggagcccacagtgaccatctccccatccaggaca

SEQ ID NO: 482677 - DNA, 75 bp, Homo sapiens
ccgccctgcgcttcaacagctccagcctgcagtgccagaattcctcgaactacctgaagaagcaggtcacacccc

SEQ ID NO: 482678 - DNA, 82 bp, Homo sapiens
tgaggtggctcacgttgaccaactctttgatgatgcatccagccgtgttgccgcccgctgtgctatgagcagtcagagcgcc

SEQ ID NO: 482679 - DNA, 75 bp, Homo sapiens
gggagggcttaaggaagtaaaatggcggacctggcgaacgaaggttttaaaacatgaatcctacactcatccttg

SEQ ID NO: 482680 - DNA, 90 bp, Homo sapiens
atatactaccccttctggagaggtgcgctatgctgctgtaacacagtttgaggaaaaactctgatgaggctgacctggtccctgccaagg

SEQ ID NO: 482681 - DNA, 88 bp, Homo sapiens
ggatacgttggagcagacttgaaagtcttgtgtaatgaagcagggaactctaatgatccaggacaaagaagttaccctggagtatgta

SEQ ID NO: 482682 - DNA, 98 bp, Homo sapiens
tgagattctacttattcatcagtttgttgtgcttgtcaagatcagatacagatccacgggttttagaaaaacaagaattacagcagccaacctatgtt

SEQ ID NO: 482683 - DNA, 75 bp, Homo sapiens
cccgacctcagatgctcccttctgctcctgcctggtccgacccccagtggcactaacgtgggatcctcagggcgc

SEQ ID NO: 482684 - DNA, 75 bp, Homo sapiens
gcgccccttcgcgtcccctgcaccatgagctggggcaccgagctctggggaagacatgtaaggaatttgcataag

SEQ ID NO: 482685 - DNA, 90 bp, Homo sapiens
cgccgagaggtaccgggggtgacagctccgggaccggccgaaaggcgaggaaccgtatctccagatgaaatggccactgcttgatgtcca

SEQ ID NO: 482686 - DNA, 82 bp, Homo sapiens
aagaagaaacgaattagtaaacagtgcaagttgatgcgtcttccatttgcaagtttttcagaagaagtgaagtcaagatgaa

SEQ ID NO: 482687 - DNA, 100 bp, Homo sapiens
tgtcatttatagatccttaccagcacattataccttggaatggatggctttggccaaccagttggcattcttggacgccctgccacagcatatggattcc

SEQ ID NO: 482688 - DNA, 98 bp, Homo sapiens
ggcggccgagggggcatcatgaagcgggctggcggcgctgccgctcccgggcggccgcgggcgggtgtcccgacccaggctaagcttgagcatggctg

SEQ ID NO: 482689 - DNA, 50 bp, Homo sapiens
ggacggtcgcgcggcggcaggcacaggtattgttgcagcatctggcagtg

SEQ ID NO: 482690 - DNA, 74 bp, Homo sapiens
cgacatactacctctggccccgagatcagaatgccggtgtcagcagttgagtctttggagggccccctgctcca

SEQ ID NO: 482691 - DNA, 100 bp, Homo sapiens
actaagaccaagtcctcgctggactgctcagggtgccagacctcatcgctaaagtaaataatgccagcctgattggactgggttatactcagacccttcg

SEQ ID NO: 482692 - DNA, 90 bp, Homo sapiens
ttcaaacgcggccgcttccgactcagcctcttcagcgacctgcccgagaacctaaaggcagacccagaagagctttttacaaaactagag

SEQ ID NO: 482693 - DNA, 90 bp, Homo sapiens
ggcgcagggaaggagggcgtccgagtcaacaaccgcttcgagctgtgccggtggtggtgtgcacattgagccccggtatagacagttccc

SEQ ID NO: 482694 - DNA, 51 bp, Homo sapiens
ctgaatcatagcccacatgtccagggacacgtgatggaccgtaggaagaag

SEQ ID NO: 482695 - DNA, 100 bp, Homo sapiens
ccccaccagccctgagcatgcagaggcccggcaggtgtcgtgaaaactacccctaaaagccaaaatgggaaaggaaaagactcatatcaacattgtcgtc

SEQ ID NO: 482696 - DNA, 100 bp, Homo sapiens
gccagccttgagcatgaagctgagatggacctgggaactccaacatatgatgaaaaccccatgaaggtaagaatgattgatgttggctgatattggagtg

SEQ ID NO: 482697 - DNA, 100 bp, Homo sapiens
ggtggagatgaatacagctgcagatatcttcaaacagtatatgaaggcttattgtgtaacagaacctggagcaggctctgatgtagctggtataaagacc

SEQ ID NO: 482698 - DNA, 100 bp, Homo sapiens
attttgaagtacaccgtggtgacattgtatcattggtgtatttacctcctgagtgttttgtagttggaaaagagccaccaaagatttccaacaaggttga

SEQ ID NO: 482699 - DNA, 82 bp, Homo sapiens
ggaaagaaaccatgtgctgaaatgtttgacgacactgatggtttgcagaaaaatatggctcaggagactaaccagaccccgg

SEQ ID NO: 482700 - DNA, 90 bp, Homo sapiens
gtttcttctctttttggaattttatctcctagtagtgatctcacacttcatattctccaattcagcctcattctctaataaaacatcagc

SEQ ID NO: 482701 - DNA, 82 bp, Homo sapiens
ccgggccacgcaccgcctgctgctgctggacacgatgaggcgagtggtacgacagagcaagtttcggcatgtatttgggcaa

SEQ ID NO: 482702 - DNA, 90 bp, Homo sapiens
cggcggtggcagcggcggaaaccgaaggggagccatggcggctgacagtcgggaggagaaagagtcccctttacttggtaaatcacggcg

SEQ ID NO: 482703 - DNA, 98 bp, Homo sapiens
tcgccacctgccccactggaacacccgctgtcctctggcctcccacacggtttattgttggccaaaaccaggctttgattgaaccaggatgaatgcgg

SEQ ID NO: 482704 - DNA, 80 bp, Homo sapiens
tgctacagcatcccacattaagtcaacgcagcttagccttctcctccatcaagagaatgtgtccggaattggtgggttct

SEQ ID NO: 482705 - DNA, 75 bp, Homo sapiens
aagtcatgaacttcacaattgagacagagctactggatctcagccttgtcaaagatgccagatgtgggagacacg

SEQ ID NO: 482706 - DNA, 96 bp, Homo sapiens
gctatggcagtggcagaagattttaattagacttcacagagaatgcagttgtcttgacttcaggtctgtctgttctgttggcaagtaaatgcagta

SEQ ID NO: 482707 - DNA, 74 bp, Homo sapiens
tgcggacttgttctgaggccgagacctgcctagagctggaacgttacctccagagcgagccctgctatgtttca

SEQ ID NO: 482708 - DNA, 50 bp, Homo sapiens
aacaatagcagtattacatcggactcctgagagcagcctccatgaggccc

SEQ ID NO: 482709 - DNA, 74 bp, Homo sapiens
agagaagaatctaacaaacggcaaagaacttactgattcttgagctgtggatggaaaagcaccacttgctactg

SEQ ID NO: 482710 - DNA, 82 bp, Homo sapiens
tcccagacctaagtttgaagattggctttgtaacaagggcttccgagtggacctgccaatcaagtcggcccgctaccgtggc

SEQ ID NO: 482711 - DNA, 75 bp, Homo sapiens
aaactggtcaaatgcactgtccagacggagatccgggtaaatgaaattgcctttataaatacccttgaagcccag

SEQ ID NO: 482712 - DNA, 75 bp, Homo sapiens
gtcagaatgccaatacaagcagttgcatacatcaagagagtgatcgcacacccatccttccataatatcaatttc

SEQ ID NO: 482713 - DNA, 98 bp, Homo sapiens
ctccgagggaaacaagaaaacatcaaagaggtctagcaaagaacagtaaatgtcctgagggaacaaaacccatgctgatatttgctggcgatgatttc

SEQ ID NO: 482714 - DNA, 75 bp, Homo sapiens
agcggatcaatgtgagggatgtgtcacccttccctgtgaacgcgggcatggatgtgctctttgtcctccaggcca

SEQ ID NO: 482715 - DNA, 100 bp, Homo sapiens
tcgtcgggccgccgcagcccgccgaaggcgcggtcacatcgatcagacaacaacatggcaggaccccaggaaggccatgctgtcccagatgaacgtcaca

SEQ ID NO: 482716 - DNA, 98 bp, Homo sapiens
attaacattggctggagtagcaaggatcttcaacactagaagatatttgctgcagcctttaggcaccagtctgctgagtggcggtcgtgaatctgtac

SEQ ID NO: 482717 - DNA, 82 bp, Homo sapiens
tttctggcctggaggctatccagcggctccttggtaatgaccagtctaagggattaggaccagcatcagaacagtcagagaa

SEQ ID NO: 482718 - DNA, 100 bp, Homo sapiens
tctggacctgcccaactcgggtggggaggcccaagccaagaagttaggaaacaactgcgttttcgccccagccgacgaaaaatccaagctggagagtgag

SEQ ID NO: 482719 - DNA, 76 bp, Homo sapiens
cagacagctttttctcaacagcccaatgtcacattgcttccatgctgtcaagccaagacctgaagatagtagtggg

SEQ ID NO: 482720 - DNA, 75 bp, Homo sapiens
gtggagaagatcctggacatgaagaccgagggggacacaactcagatgggaagttcatcgcccgggcacagcgga

SEQ ID NO: 482721 - DNA, 73 bp, Homo sapiens
atgagtatgcggaggacagctctgatgaggagtgcggcaccttcccgtctgatgctggcgttgtgcgtatggt

SEQ ID NO: 482722 - DNA, 100 bp, Homo sapiens
gctggccgacatcatccaccactggaacgccaaccggctggacctgttcgagatcagccagccgaccgagctgtccagaccaaaacgaagaagacgttag

SEQ ID NO: 482723 - DNA, 100 bp, Homo sapiens
tgttaaggattccaagtaactcttatttgatttaatccagagactgacttcactatagaacccacagttgtatcaatggttggggaaagatagtggcaac

SEQ ID NO: 482724 - DNA, 75 bp, Homo sapiens
tcgacagtacgcctacttctataaagtcatccagggtcatgtaggtacaacagcaaccaagaagatcgatgtcta

SEQ ID NO: 482725 - DNA, 76 bp, Homo sapiens
gacaaagtagatggcctccagaaacaaacgtactatactggcaattgctggagaagattttgcaattgttgcttct

SEQ ID NO: 482726 - DNA, 75 bp, Homo sapiens
tcttcattagggcaccaaagcgaaggggcaagattcttgccaagagaattaatgtgcgtattgagcacattaagc

SEQ ID NO: 482727 - DNA, 82 bp, Homo sapiens
cagcagctcaccgaggacggggactcgtgaacttcacggtagaccagatccgcgccatcatggacaagaaggccaacatccg

SEQ ID NO: 482728 - DNA, 82 bp, Homo sapiens
tttaatgaaaagggatggaactacattcttgaggtgtcaagcctgtggcagcagagcttcctggggagtcctcagagcaagt

SEQ ID NO: 482729 - DNA, 86 bp, Homo sapiens
agcgagcgcgcgcgcgaaaactccgggcaggagacaaggacggcagcaaggtgacaacagtggtggcaactcctgggcagggtcca

SEQ ID NO: 482730 - DNA, 75 bp, Homo sapiens
ggggttcgggtgtctcgtgtgtgaacatcacagaatccaactgccagatgagaacattggacagtgggatcggaa

SEQ ID NO: 482731 - DNA, 74 bp, Homo sapiens
ccctgtggctccgcaccctagagaaaaggtatttgattccaaatgcaggggatgcaactaaagccataaaacag

SEQ ID NO: 482732 - DNA, 100 bp, Homo sapiens
cgagagtgggcgagaacgtccactgcgggccggcgaaagctgctcaaagcttggattctgccgtgccactcacgaatggcgacacagaagacgatgctga

SEQ ID NO: 482733 - DNA, 78 bp, Homo sapiens
gcaaaaccaaaaccagatcctttcaaaggtcacagagatgcggcggaccctgacgcctgccagctccccagtgtcctc

SEQ ID NO: 482734 - DNA, 83 bp, Homo sapiens
cgctgccgtcgccgccgccaccatgcccaagagaaagggttgtgagtcccggcccagcccctccacccccctgcccccccgat

SEQ ID NO: 482735 - DNA, 100 bp, Homo sapiens
ggacaaagaagcagagaaggatgatcagaaggggacccccagcccttggaggagagacggcagcctcaggtcatgaatgtccataaaatgctaggcattc

SEQ ID NO: 482736 - DNA, 75 bp, Homo sapiens
gacggggtccccgagtggttccatggtgcaatctcaagagagtacaggtttgcagattccgccagcagcacagca

SEQ ID NO: 482737 - DNA, 100 bp, Homo sapiens
cagcgctttggatgccgagagcgagtatctggtcccacgtacctcggagatttatgtccaccgaagtggtcgaactgctcgagctaccaatgaaggcctc

SEQ ID NO: 482738 - DNA, 75 bp, Homo sapiens
cgcctggcaggccctgcgcaccagtgaaggagtcttcaagtgccctgaggaccagcttcctctggactatgccaa

SEQ ID NO: 482739 - DNA, 82 bp, Homo sapiens
aatggttgaaaacagatatacaggcatcacgttgggtggtttccatttagaccgaggccggttcagaacttcccaaatgatg

SEQ ID NO: 482740 - DNA, 90 bp, Homo sapiens
gcgcaaacaagccaatcccaggaggaaaaacgatcttagcaaagcaatgtctcaagatggtgcttctcagttccaagaagtcattcggca

SEQ ID NO: 482741 - DNA, 96 bp, Homo sapiens
gtagccatgatgccccacttggtgaatggagatgcagctcagcagtttccctgaaacctgggctcttgaagacgcatcactggagcagatggataa

SEQ ID NO: 482742 - DNA, 95 bp, Homo sapiens
gaagtccatccccatctgtaccctgaagaacttccctaatgccatcgagcacaccctgcagggacacagcaggtcaggagagattcaacagcatt

SEQ ID NO: 482743 - DNA, 101 bp, Homo sapiens
gagccacataccattgctgcattcttgggggggaggagtctgctactagtcttatcagctcttaaaaacagaaactcatctgtccaagttcgtggcagaaa

SEQ ID NO: 482744 - DNA, 74 bp, Homo sapiens
ccgaggctgggaagaaggggttgcccagaggaacctccgcagagacaaagatcgtcggaacatgttgcagttca

SEQ ID NO: 482745 - DNA, 75 bp, Homo sapiens
ttggaaagaatttcaggatcaccggtttctcctgcttcatgaagctattttgccagccacttcattatgggagga

SEQ ID NO: 482746 - DNA, 87 bp, Homo sapiens
ggggcgcccccacgcacccaggtcgtgctggtagctgacgggcgagaaggcctcgtgcaagcggaagctcttcgtgggcggtcttga

SEQ ID NO: 482747 - DNA, 101 bp, Homo sapiens
ctccatttgaagctgatgaggaaaattggcaaatctgttactgcagacagatgggaaaaatatttgatcaaggaaactctaaccagggaaagggaaaatgc

SEQ ID NO: 482748 - DNA, 82 bp, Homo sapiens
cggaatggacctgtgccacccagaactcccccactggaaaggattctgaaagaaatgaagtcagccctcagaaatgaagttg

SEQ ID NO: 482749 - DNA, 127 bp, Homo sapiens
gttccgggagcggatggagaagcagcaggttcgagtctccacgccgtcagctgagaagagtgaggttgattcgatgtcatcagtcccgtggtggagcctgtggagacaacattcagtcttatactgc

SEQ ID NO: 482750 - DNA, 74 bp, Homo sapiens
gaggccgagccgggatctcaggtcctcgggggcggcggccacgccaaggacggaggttgacggatatattcaga

SEQ ID NO: 482751 - DNA, 85 bp, Homo sapiens
aggagcgcggaatcggggagcgtccggagctagctggatcctctaggcagacagctcagcagctcctcctcctatagtggggaca

SEQ ID NO: 482752 - DNA, 83 bp, Homo sapiens
tgtgcgagagcctcctcacttggggtggcccagttgaaatccttcccttcctctaccttggaagtgcctaccatgcatccaag

SEQ ID NO: 482753 - DNA, 90 bp, Homo sapiens
ccagaggttctcagaccggaaacacccagaccagtggacattggttctggaggatttggtgatgtcggtggaaccgtcccaaaatgtccc

SEQ ID NO: 482754 - DNA, 51 bp, Homo sapiens
tgacagccggctcacactgcgagcctttgaagtaaattttatggatgatgt

SEQ ID NO: 482755 - DNA, 98 bp, Homo sapiens
ccattcggtttttggttgggacgcagtctcttaaatatgataatcagtgcaaatggtcaagaaaaggcttcatccggacgaggtggtgcattgcagac

SEQ ID NO: 482756 - DNA, 100 bp, Homo sapiens
aaagattcgaatatggaactactttatgaacaagctgcctgccttgtgcttggctgtatgattttccctgatggctgggactcagatgaagtaaaacgga

SEQ ID NO: 482757 - DNA, 75 bp, Homo sapiens
gttagaaacagtagtggagaatcaaggtgtcatcaatcttacagaagaagtgctgtgggtcaaagtgaatataaa

SEQ ID NO: 482758 - DNA, 100 bp, Homo sapiens
ccggactgtgcctccaccacacccatccccacacctcttgggcaaggaggaccagagcacatgtcaagaagcaaagtcctgtgaagatatccagtgcact

SEQ ID NO: 482759 - DNA, 51 bp, Homo sapiens
cacctaaaaattgtataccgcagattcaggaaatgcacaattttgaggaag

SEQ ID NO: 482760 - DNA, 106 bp, Homo sapiens
cttagctgtgctcgcgctactctctctttctggcctggaggctatccagccagttggaattgatcacaccttttcagttgtacttcaatcctgaattaatctttaa

SEQ ID NO: 482761 - DNA, 86 bp, Homo sapiens
ccacttgcacgaaagctttcctaggccaaaaagagggctgaactgtatcgggcctcagggaagtttgagctgcttgatcgtattct

SEQ ID NO: 482762 - DNA, 83 bp, Homo sapiens
tggaggccgtgaagaccttcaatagcgaggttttaaaatcaaagatgggaaaatcggagaaaattgcccttccccatggccag

SEQ ID NO: 482763 - DNA, 75 bp, Homo sapiens
caacaaccatgctgggcatctggaccctcctacctctggatttgcctcaaagggcactgcaaaaattgaacagag

SEQ ID NO: 482764 - DNA, 96 bp, Homo sapiens
gctgcgcaggacttctcctggcggcgctgcggatccagggggtcggctgccaggtacaggcgcattctacattctaaaggggagctcagtgaagat

SEQ ID NO: 482765 - DNA, 90 bp, Homo sapiens
cccgcggcgggaggagcctgttcccctgagatgatatcatcaagttgaatcgaaaggaagggaagaagcagaattttccaagactaaata

SEQ ID NO: 482766 - DNA, 50 bp, Homo sapiens
ccaagacctcatcaacaattaagagtcttgctgtgtcacccaggctggag

SEQ ID NO: 482767 - DNA, 75 bp, Homo sapiens
cagctgcctcagttcttagcgcaggtctcaccaacggctttgggggtgcgaggagcgagcaggagccgggcggcg

SEQ ID NO: 482768 - DNA, 75 bp, Homo sapiens
ggagcgaccctggggaccgactctggggaccctcgccgaagagatgaaacctggattggcatctatacagtcaag

SEQ ID NO: 482769 - DNA, 101 bp, Homo sapiens
attgaaaagtagttaatggcagtggtggtatgaagagcaatgttgatcccagggatgatgtatttggatatcctcaacaatttgaagataaaccagcatta

SEQ ID NO: 482770 - DNA, 75 bp, Homo sapiens
agcagcttatcacaactctgtagaatgtttgcaaatgttaattaatgcaggacattttctacattgaaaaccaaa

SEQ ID NO: 482771 - DNA, 50 bp, Homo sapiens
cagagctggaggatgaaggatcggactaagaaaaatggctttgtcagccc

SEQ ID NO: 482772 - DNA, 100 bp, Homo sapiens
cctcgctgctgtacttcgtctatgtggcgcccggcatagatcacaatgaggacctagggcatctgtctgctgacgccccctggcctgcagtgaccatggc

SEQ ID NO: 482773 - DNA, 74 bp, Homo sapiens
taaaccagaagaggaggttgcccagaagaaaaaggtttacaggtacatacattacacccctatttctacaaagc

SEQ ID NO: 482774 - DNA, 76 bp, Homo sapiens
caccaagatgcggatccgggcctttccgcaagtctggaaaagtttgaaattccagtaaaaattcgtttgagtcctg

SEQ ID NO: 482775 - DNA, 101 bp, Homo sapiens
tgagctgaccagctctctcttcagaacagagccaatggcttggaatgagattgaagatctcaaacagacaaatcatggcttggaagaatatgttaggaaac

SEQ ID NO: 482776 - DNA, 82 bp, Homo sapiens
gcaaacagtgtttgcctctggttcagctcatacaacagcttcttagttaaagctgatacattcctgtgggtcaactatgcaa

SEQ ID NO: 482777 - DNA, 90 bp, Homo sapiens
attaaagcagaaataaaggctgccaaagcagaattaaacaaccaccatgtcgagcaaaaaggcaaagaccaagaccaccaagaagcgccc

SEQ ID NO: 482778 - DNA, 82 bp, Homo sapiens
ggtggctggaaggagaactaaatgggagaagaggaatgttccctgacaatttcgttaagtgtactaatggtcacttgatgtg

SEQ ID NO: 482779 - DNA, 74 bp, Homo sapiens
ggagttccaggtcgagcagttaggccgcgagcgactgcggcgccgagccgtgagcaggggtgagcgcagccact

SEQ ID NO: 482780 - DNA, 83 bp, Homo sapiens
ggagcagttgctggaaggggacttcactgtgaatatgcggctgctgcagatgctgtgtgctgtggacccacctggggttcatg

SEQ ID NO: 482781 - DNA, 90 bp, Homo sapiens
gcggccccgcgccagagggccggtggctcctccgggcttctgaggacccgcagggagcgggagagaagatgactgaggaggaggtggaga

SEQ ID NO: 482782 - DNA, 96 bp, Homo sapiens
tatgtccaacgccaaacaatcagtttatgatgggaggccggtattataacaggtgtgtggaggtcattgcaaaggaaggacaaaacctgaaagagc

SEQ ID NO: 482783 - DNA, 87 bp, Homo sapiens
aagttcagcccagaggagaaactcgctcgccttcagaagacagtgttctaagaacggaagcatctgggctggatggaatttagcatc

SEQ ID NO: 482784 - DNA, 101 bp, Homo sapiens
caactcctataaacacagtggacgtcaataatgaaagctcttcagagcttttctctcaaggggcttttggctatgtgctgcccatcatttcattcatcctt

SEQ ID NO: 482785 - DNA, 82 bp, Homo sapiens
ccgtttctggctccgggctgagcttcctggagaagaggaaggtctctaattaacagaagatggcaaagcccagccacagcag

SEQ ID NO: 482786 - DNA, 74 bp, Homo sapiens
atcctttatcctggtcatcttctatttccaaagtatgttgcacccagaacgtgcgcatcgaccccagtagcctg

SEQ ID NO: 482787 - DNA, 51 bp, Homo sapiens
cggcggcgcccggatgggcagctgaggtgaatcaggtctaggaaaatcgac

SEQ ID NO: 482788 - DNA, 98 bp, Homo sapiens
ttcgagcagctcatgaccgacctcaccctgtcgcgggttaaagatcgaggtccggaagccactaggagattttttaattggttttattggagcattaa

SEQ ID NO: 482789 - DNA, 100 bp, Homo sapiens
ccggccgggggttcggtgcgtgccccgacggggcgcgcgcgaagcgagcgagaaggcacggagtcgccgcggagcgcagtgaatggtagtgtctagaaag

SEQ ID NO: 482790 - DNA, 82 bp, Homo sapiens
agcaaggtcggcagagcaaggggcttacgcagaaggacctggccacggccaccgaggtccgtatctgccctgtggaattcaa

SEQ ID NO: 482791 - DNA, 75 bp, Homo sapiens
gggaaatcagggctccttcttaactaaagtgcccttggtttctagaatatgcccaaatgatgtctgtcgcatctg

SEQ ID NO: 482792 - DNA, 101 bp, Homo sapiens
gagcagctcgcttctaactggactgcacgtatcactatgtatgctgttggggtaggaaaagccattgaggaggaactacaagagattgcctctgagcccac

SEQ ID NO: 482793 - DNA, 113 bp, Homo sapiens
cgaagcttctgtgatgaaggagttcaattgtcaccatgtggcatacacatccctgtgatcatgagtctggctcaaagccaatttatagcaaatcatccatttctgtttattat

SEQ ID NO: 482794 - DNA, 90 bp, Homo sapiens
cttcagaactactagcagataatttggggggacttcatattcagaagtctatataaaggtgttggagcgggccggagagaagtagagtgg

SEQ ID NO: 482795 - DNA, 90 bp, Homo sapiens
aaatatggtcacctatcagagtctgcatcccaatatcaagaggagaatgcatccgacctctgctgtctcatttcctctctggtgcaactg

SEQ ID NO: 482796 - DNA, 83 bp, Homo sapiens
ttgtaaatcaatcacatattctttaggcttccacgtgaaaaagaagcttctaacaaggagcagcccaaagtgaccaacaccat

SEQ ID NO: 482797 - DNA, 100 bp, Homo sapiens
gagaaattggacgaggagcttatggttctgtcaacaaaatggtccacaaaccaagtgggcaaataatggcagttaaagactcacaccacccggcaagaac

SEQ ID NO: 482798 - DNA, 83 bp, Homo sapiens
cccctcccagcctgtgacctttgtgaccaactccacctacgcagcagacaaggggtttgcagatggcgtgtacctggttctgc

SEQ ID NO: 482799 - DNA, 97 bp, Homo sapiens
gagtgagagagagctattagagattgtgaagaagaatttcgatctccgccctggggtcattgtcaggtatgccgagcagacagctggaggatcccgg

SEQ ID NO: 482800 - DNA, 74 bp, Homo sapiens
ctgctggtggctgctgaacacctgagtgcccgggcaggcttcactctgccctgtcaaaccctgttcctgaccga

SEQ ID NO: 482801 - DNA, 90 bp, Homo sapiens
catgggccggccgggcccagagctcctgtctctcagaatgtggaggctgtggacccacgaggtcgaacattattgcatcttgctgtttcc

SEQ ID NO: 482802 - DNA, 89 bp, Homo sapiens
ctatatggagataaatggaattcttttaccatcttattaattcactctgagcggagaccgcagcgcagagagcagaggcgctcaaggac

SEQ ID NO: 482803 - DNA, 90 bp, Homo sapiens
cgtggacggtgtggggcggtcccggccccgcagggcgaagctgtgctcaggcccgggctggacgcagagccagagctgtccccagaggag

SEQ ID NO: 482804 - DNA, 74 bp, Homo sapiens
tgattgcagcattaaattcccgaactggggagatctgttggatggcaagcatgtggtgtttggcaaagtgaaag

SEQ ID NO: 482805 - DNA, 100 bp, Homo sapiens
ctactgacatctatgagggctgcctcttagaagaacgagctctcctgttggggcgcatggggaaacatgaacaagctcttttcatttatgtccacatctt

SEQ ID NO: 482806 - DNA, 96 bp, Homo sapiens
ccctatctgcctgccagtgagttctgtcatgcatcagactttggacctcagaattttcacctggaacatgagagaactgataaatttcaaacggaa

SEQ ID NO: 482807 - DNA, 74 bp, Homo sapiens
ttagatgccatttctcctgttcaggtgatttgaagatattaaagctagaaattggaactagaaaatcaaaagaa

SEQ ID NO: 482808 - DNA, 100 bp, Homo sapiens
ttgaaacctgcatttgattaagcaagaattcgcttgcaagttaaggccctactgccaataaagggaaaataagagatgctcatcgacgaattatgctttt

SEQ ID NO: 482809 - DNA, 90 bp, Homo sapiens
atctacggggtcctggagcaccctgaagactcaagaccaaaagactgtcaggaaggcagagtgcagagacaaggggatgtggccttgccc

SEQ ID NO: 482810 - DNA, 100 bp, Homo sapiens
cgtttgtcctcaagaggtggcccccatgctacagcagtttataagaccctgattaacaggaaacttccaagatggaaactttgtctttccccagatataa

SEQ ID NO: 482811 - DNA, 90 bp, Homo sapiens
gaagaacacctttgatgaaagctgcaagagctggtcatttgtgcactgtgcagtttcttattagcaaagcttggatttacactgggcaac

SEQ ID NO: 482812 - DNA, 83 bp, Homo sapiens
ctgactggggttctgagactccctgtcccggaccgcagttggaatcgaagcctcttaaaatggcagatgacttggacttcgag

SEQ ID NO: 482813 - DNA, 100 bp, Homo sapiens
agagcggtgtgaggtgcttggtagcgcgccgtagctgcttccacgtccttgcttcacctcagttcaagacccggcaggccccctaagcgttctttgggag

SEQ ID NO: 482814 - DNA, 100 bp, Homo sapiens
gttgttgcttgggcgcttctccgctgcgtgtaggtgaagggggcttcctgaccgagtctccagagaatacagagggcaaagatggatccaaagtaactaa

SEQ ID NO: 482815 - DNA, 80 bp, Homo sapiens
caactcctacagtaaaaaccctcatcaagtcctttgacagtgcatctcaagggaccacgggatcattcgaactctggatt

SEQ ID NO: 482816 - DNA, 100 bp, Homo sapiens
attttttttcaagaactgccgtcttctttgcctgcactaatggatgcatcatctgcagacatcagaaaagcatatcgtaagctttcactaactttacatc

SEQ ID NO: 482817 - DNA, 100 bp, Homo sapiens
cctcctgaagaggcggcgctcagacagaagtgggccaccatatctggaaactacagtctatgctttgaagcgcaaaagggaataaacatttaaagactcc

SEQ ID NO: 482818 - DNA, 73 bp, Homo sapiens
ctttgcaacagaattacagagtatgatccaggtgattggtgaaaacactaaacaaccctgagcccagggccaa

SEQ ID NO: 482819 - DNA, 100 bp, Homo sapiens
gtttgaggcggccgtgaaggtgatccagagtttgccgaagaatgatgatgaccactggatcgtcgacacagactacgacacgtatgccgtgcagtactcc

SEQ ID NO: 482820 - DNA, 87 bp, Homo sapiens
cttcaccgccaggacctccttcttcaggagagcgccccagggcaagccccgctccggccaacaacggaaagaacacccggaaatgaa

SEQ ID NO: 482821 - DNA, 78 bp, Homo sapiens
acccgctacgggaagcaggcctcgccacagtgtccagctctgaagggcaaagtgcagaagatcctaatctggaagtgg

SEQ ID NO: 482822 - DNA, 88 bp, Homo sapiens
ctgaatccgcccgggctacgctcctccatcacgtgacctctgtgagtgaaagccttcagagggaagctgctaagaagcaggccatgaa

SEQ ID NO: 482823 - DNA, 100 bp, Homo sapiens
gcactacatccgcaagtacaaccgcttcgagaagcgccacaagaacatgtctgtacacctgtccccctgcttcagagttaatgttctcctcagaggtgga

SEQ ID NO: 482824 - DNA, 101 bp, Homo sapiens
gcggctgatttagaaggaggttcaggctacggtgagccgaaggatgttttagaagaatgtatgtctcttcccaagctatcttcttattctggatgggtggt

SEQ ID NO: 482825 - DNA, 93 bp, Homo sapiens
gatgaagttcgagcactaatatttaagaaagaagatgttaactttcagtttggtgccctggttgtcagatgttggaaagcagtaggacggaac

SEQ ID NO: 482826 - DNA, 83 bp, Homo sapiens
atacgcaggaaatgaccccaacgccaccgagagggcgcctggaatgtcaaaatgcagatcttcgtgaaaacccttaccggcaa

SEQ ID NO: 482827 - DNA, 51 bp, Homo sapiens
gatgaggaggaagaggaaggccagagggtttggaaatcccttgtctccagg

SEQ ID NO: 482828 - DNA, 100 bp, Homo sapiens
ggtgctgccccctgcccaggaccagcccctggtggaagccaaccacctgctgcacgagagcgacacggacaaggtctgtgcagacttttgcagacaaatc

SEQ ID NO: 482829 - DNA, 75 bp, Homo sapiens
cttagctgtgctcgcgctactctctctttctggcctggaggctatccagcaaaacttggaatataacgtggagcc

SEQ ID NO: 482830 - DNA, 100 bp, Homo sapiens
tgcctcagcctcccaagtatctgggattacaggtaaagcttgagagcaactttgcctccattgtgtttgccatcatggtgttggaggggcttggccgctc

SEQ ID NO: 482831 - DNA, 75 bp, Homo sapiens
ggcggaacaggctaccaagtccgtgctgtttgtgtgtctggattattttcgaaataccagtatttcgactccagg

SEQ ID NO: 482832 - DNA, 82 bp, Homo sapiens
gagaatccaccgccatccgccaccatgatctttgtggagttcacctctgtgtttgactgccagaaagccatgcagggcctga

SEQ ID NO: 482833 - DNA, 90 bp, Homo sapiens
gcatgtctactgggctcagcgacaccgcgagctatatctgcgcgtggagctgagtgacgtacagttgtattccctgaatgactataaacc

SEQ ID NO: 482834 - DNA, 76 bp, Homo sapiens
gcctgtctgcaagcttgtgcagggtcagtttacgttgcgagacatgtatgagcaatttcaaaatatcatgaaaatg

SEQ ID NO: 482835 - DNA, 75 bp, Homo sapiens
tgccactgtgaccacttggacgcggccctgagtattccctctttgtgggggacctgaccccggacgtggatgatg

SEQ ID NO: 482836 - DNA, 100 bp, Homo sapiens
cgccatcctgccgcagctggcgcagcccacgctcatgatcgacttcctcacccgcgcctgcgacctcggtggctattatcatggaaaactaatttttccc

SEQ ID NO: 482837 - DNA, 87 bp, Homo sapiens
ggactgcgggcggcgctgtgtccgtcgccatgacagatgtggaagatgtcaagtttgtgatcaactatgactatccaaacagctcag

SEQ ID NO: 482838 - DNA, 51 bp, Homo sapiens
gcagaagccgaaaccgccaaagccagtccaagtgggttccccggggcgact

SEQ ID NO: 482839 - DNA, 75 bp, Homo sapiens
cagaacaacatcgaaaagagagggaagaagcagctgccaggttattatcaacccttactttgctaagcaagaaac

SEQ ID NO: 482840 - DNA, 78 bp, Homo sapiens
aaattccccccgaagaagactcccccacatctggaacatggtccaagacaattcctgggaaagttcagttcttctcaa

SEQ ID NO: 482841 - DNA, 100 bp, Homo sapiens
ctactttttccagaattcatacaaagagtggtaagatgatcatgcaggataaactggagaaggagcggaatgatgctaagaacgcagtggaggaatatgt

SEQ ID NO: 482842 - DNA, 51 bp, Homo sapiens
ctcacagaaggcttccctcctggagttggctcgagagcatggaatccgatt

SEQ ID NO: 482843 - DNA, 140 bp, Homo sapiens
cgaagagggggtcgaggagagccggagtcggggacccaggagtttcctgtgtccagcgctgccggagccgcctgaggccagaagctgggcttacagagattctctaaaggcagaagaaaacagaaaattgcaaaagatga

SEQ ID NO: 482844 - DNA, 100 bp, Homo sapiens
ccatttcgtggttcacccgctgccgggcaccgaggaccagctcaatgacagtacctggagtagaacagaaaaattattatgtctgtgttcccttgggact

SEQ ID NO: 482845 - DNA, 100 bp, Homo sapiens
ccactactggcccaatttaaaacctcctggggcaataagcgagtacagggggttgcagtacacagcattaggtggtctcttcagtcagcctacacaagct

SEQ ID NO: 482846 - DNA, 124 bp, Homo sapiens
cgtccccccaacacgtctctgttcgtcaggaacgtggccgacgacaccaggtgctgggtaggccaggtttcagcatcgcagacaagaagcgcaggacaggctgcattggggccaaacacagaat

SEQ ID NO: 482847 - DNA, 75 bp, Homo sapiens
gggccgtcaccctgcctcccctgcgtcccgccaccggccgcttctgtcctcgggcttcataaacttcacttacca

SEQ ID NO: 482848 - DNA, 74 bp, Homo sapiens
ctcagcgccggtgcatgtcgatcatgattccacctttccactgatagactcaagttcccagaaccagattagaa

SEQ ID NO: 482849 - DNA, 51 bp, Homo sapiens
tgaggcctccccagccatgctgaactactgaaggagcattaggttatgcgt

SEQ ID NO: 482850 - DNA, 112 bp, Homo sapiens
aacggattcacacaggatggcttgcagaagacgctatttgtcagcccaaggccaaccccactgtcactctgttcccgccctcctctgaggagctccaagccaacaaggccac

SEQ ID NO: 482851 - DNA, 74 bp, Homo sapiens
tcaatcaatcatatttcacaagcatgttatttgaaagcaattgagacgcaaccgaactttgcagtagcttggag

SEQ ID NO: 482852 - DNA, 74 bp, Homo sapiens
caagcagcatcacaagctcagcctggacagcaacaggtggagatgaagaagagaatgatgagccacccaaagta

SEQ ID NO: 482853 - DNA, 75 bp, Homo sapiens
gacacttttgggatccgatggcctgaggagcttgaatgtgacaggcttctgaatgcttatgatgaacatcaaaca

SEQ ID NO: 482854 - DNA, 101 bp, Homo sapiens
tattatgcccagacaagtccccagggaatgccacagcatcctccagcacctcaggacaagatcgcagaggaaggtgggcggcgggagtgcccagccgtgtg

SEQ ID NO: 482855 - DNA, 75 bp, Homo sapiens
agagttaaatgccctcaagtcgacaggggatgggaccctaggtacggggctgatgttgacgtcaaccaccacctg

SEQ ID NO: 482856 - DNA, 82 bp, Homo sapiens
cgcatgaaccgggtcctcagcttccacagcgtgtctggtgaaaggtgtagcagtcactcggcctacacccacagcatcgacc

SEQ ID NO: 482857 - DNA, 90 bp, Homo sapiens
gaagtacttgtttagattcatcatccaatcccgagtgctctacttgagaaaccgaaacttcattgccccttcaatgtgggaatccagcca

SEQ ID NO: 482858 - DNA, 75 bp, Homo sapiens
aaaacattgccagatgatcaatacatcgagatatttccaagcagaaggaatgaagttcgaacacatgtcggttct

SEQ ID NO: 482859 - DNA, 75 bp, Homo sapiens
atttccatgtcaacatagtcctggatgcttgaagcccacatgcagagctacaagggcaatgaccctcttggtgaa

SEQ ID NO: 482860 - DNA, 98 bp, Homo sapiens
aaacttttggctttcggggggaagctctgagctcactttgtgcactgaggagcttcctgaaactgtgatagatcttttgaataagtgccttaccttcc

SEQ ID NO: 482861 - DNA, 51 bp, Homo sapiens
acggtggtgggccaaatcactgtggacatgaacctagaagtcggaatccgg

SEQ ID NO: 482862 - DNA, 97 bp, Homo sapiens
catcctgggcgtcttcccaggctgtcatataactcctgagaatagtggttcttaactctgtccgagcctccgtactgggtgcaatgaaagctccacg

SEQ ID NO: 482863 - DNA, 75 bp, Homo sapiens
gggttattcgagtgaccgagaccgcggccgggaccgaggatccacatgaagaccatgcccgccgccatgttcagg

SEQ ID NO: 482864 - DNA, 101 bp, Homo sapiens
ccaggacattccctggcccccaggccccaggtcccaggccccagggctgagctgtgggcaggccccacctgggaaatcctcattgacgattcaatttgttg

SEQ ID NO: 482865 - DNA, 88 bp, Homo sapiens
cagcaggaggagggctggttccggctgcagcccgaccagtccaagagccggcggcatgacgagtgtgcgagctggacatcatcttcaa

SEQ ID NO: 482866 - DNA, 137 bp, Homo sapiens
ttccggatcccttggaaacacgctggcaagcaagattataatcaggaagtggatgcctccatttttaagtaagactttgaccccgacgcaggcttcagtgattgccgcggatcagaagcctgagcactttggctcga

SEQ ID NO: 482867 - DNA, 90 bp, Homo sapiens
ggatgttgctgaagaagaaatcatagacgatgatgatgatgacatcacccttacagcggagtttaagagagctgtgaaagtagcaacagg

SEQ ID NO: 482868 - DNA, 74 bp, Homo sapiens
tttgaagccacctccagggccagaaactaatggagaggacccccttccaggttaccgaggagacctgcaccatc

SEQ ID NO: 482869 - DNA, 83 bp, Homo sapiens
cagaggtggaggcgctttgaaaggctctggcttcatcatgtgcagcggcaaagagaacccggacagtgatgctgacttggatg

SEQ ID NO: 482870 - DNA, 90 bp, Homo sapiens
tcacattatggcagttactaaagaagcacgtgaacagaacctgagccagcagaagagtacactgagcaaagtgaagttgaatcaacagag

SEQ ID NO: 482871 - DNA, 75 bp, Homo sapiens
tggctgcagataagcagacactccagagtgaacagcctttacaggttgccagctccaggtgctccttcagctcca

SEQ ID NO: 482872 - DNA, 95 bp, Homo sapiens
ggggctgcggctcttcgggcacaggcaagccggtatattcggggcccaggagcaaggaaaagtggccttttgcgtgacacagaagtggacacatc

SEQ ID NO: 482873 - DNA, 100 bp, Homo sapiens
tgattacaactatagaagatcgtatagtcctagaaaaatccagactccaaaatgatgcaaatcaacctgactggatttttgaatggaaaaaatgctcgag

SEQ ID NO: 482874 - DNA, 100 bp, Homo sapiens
aaaatctatcgtgaggttcagctgatgaagcttctgaaccatccacacatcataaagctttaccagtgactctgacagttggcagtgtgaacctagagat

SEQ ID NO: 482875 - DNA, 90 bp, Homo sapiens
gaagatctgggtgcccgtggaccacaggccctcgttgcccagatgtcctggacccaagccagaagcctctgcaaagcttccttccagacc

SEQ ID NO: 482876 - DNA, 74 bp, Homo sapiens
agcgggactcagaacagcaaaggctgcaggatggggaatttagcatggatcttcgtaccaagagcaccggtggg

SEQ ID NO: 482877 - DNA, 96 bp, Homo sapiens
agatggagaaataaaagtggccattagtactgtgagcatgaaccttgaggattaagttgtcatcattctgggaagaaaaaaaaaacattaatgaag

SEQ ID NO: 482878 - DNA, 74 bp, Homo sapiens
tgcggtggacccgagcgagtcccgacccctgcccccgcagctgtcaacagcatctccaccctggagcctgtgag

SEQ ID NO: 482879 - DNA, 83 bp, Homo sapiens
gtaaacaacagaagaactgagctatttttgaaagaacatgaccaccttcgaaaatttggagcaagaggtggtggtggccttcc

SEQ ID NO: 482880 - DNA, 75 bp, Homo sapiens
ccgccatgccgctctactccggcttgaccactatgctatcatcaagtttccgctgaccactgagtctgccatgaa

SEQ ID NO: 482881 - DNA, 100 bp, Homo sapiens
cggacagtcatcaccatgggccgggatcacattctgattcaaatggttatgagccttagagtttctgaactccaagtactgttgggctacgccgggagaa

SEQ ID NO: 482882 - DNA, 100 bp, Homo sapiens
tgtaatcccaacacttaggcaggaggatcactcgagcccagaagatcaagactagtgtgagcaacaaagttgaaatcacaaagattagacacctttttag

SEQ ID NO: 482883 - DNA, 98 bp, Homo sapiens
gattccaagtaactcttatttggcaatttatcatctcaagttccccttaagagacttctgaacacctggacaaacagatatccagatgctaaaatgga

SEQ ID NO: 482884 - DNA, 82 bp, Homo sapiens
aaaagttaaacccaggaagctttggatcagacttttgtgttgcagttcggggcaggatagcgtgtgccaatgtcctcagtga

SEQ ID NO: 482885 - DNA, 80 bp, Homo sapiens
gtcatctggggactaagcaacaggtgtttcaaggaactaattctctggaggaatatgtcacttgtcacacatgccgatca

SEQ ID NO: 482886 - DNA, 100 bp, Homo sapiens
gggaggacctcacttccccggggtgtaataatgttaactgagtactatactggcaattgctggagaagattttgcaattgttgcttctgatactcgattg

SEQ ID NO: 482887 - DNA, 83 bp, Homo sapiens
tatgagtacctttgtcatttggaagaagcgaagagggtttggaaatcccttgtctccaggttgctgggattgacttcttgctc

SEQ ID NO: 482888 - DNA, 75 bp, Homo sapiens
caatttcatttgttgatcccggcaccgccaggggctttgaccacgacctttgaagagcttcattttgagatcaag

SEQ ID NO: 482889 - DNA, 140 bp, Homo sapiens
caccagcgtgccaaaagagcagtctcacatgaagaccaatttttacgtctagatttccatgcccatggaaggtactaggttttgacaagcttgcatcatgcgtgagtataagctagtcgttcttggctcaggaggcgttg

SEQ ID NO: 482890 - DNA, 90 bp, Homo sapiens
ctgcagcagcagaagcagcagaaaggccgcggcatgggcggcgctggccgaggaattgaggaagctcagataggaaaacgaggatactta

SEQ ID NO: 482891 - DNA, 87 bp, Homo sapiens
ggatctttgctcctgcgccgcgttctagagcaagaaggaggccccaaccctgagcacaacagcaacctggccaatatcttagaggtg

SEQ ID NO: 482892 - DNA, 82 bp, Homo sapiens
ctgagctggcatcagaagacctacgccttcagggaactctaatgatccaggacaaagaagttaccctggagtatgtatcaag

SEQ ID NO: 482893 - DNA, 83 bp, Homo sapiens
atcttatctacgaaatgattcagcctcttcagaagaaacttgactccttcccagctcaggacccttgcaccaccatatatgtt

SEQ ID NO: 482894 - DNA, 96 bp, Homo sapiens
ccccacatcaatgcactgccaatggggaacatttgcctaaatctttggaaggattttttatctatgaagaagaaggttctggagttccaggttcta

SEQ ID NO: 482895 - DNA, 98 bp, Homo sapiens
ttaatctgcagatgctgacttacctgaacttgagaattctgcttggtcagaatcgtgatggcattgtgttcagcactgatgactattttcaccatcaa

SEQ ID NO: 482896 - DNA, 82 bp, Homo sapiens
ggaattcatggggtgaaccatgggcatgttatttgaaagcaattgagacgcaaccgaactttgcagtagcttggagtaatct

SEQ ID NO: 482897 - DNA, 114 bp, Homo sapiens
aggagctgcgcgagcgggtgtgggcgctgttcgacgtgcggcccgaatgccagcgcctcttctaccggggcaagcagagccgagactgtctgaagctgggcccacctgctgagg

SEQ ID NO: 482898 - DNA, 102 bp, Homo sapiens
agaaagatccaaaacaagtggctgcggccgtcgcccaggagtcatcggacgccagaatctgatgtgaagttcatttccaatccgccctccatggtggcagcg

SEQ ID NO: 482899 - DNA, 75 bp, Homo sapiens
cgcgggagttcgaggccctgcggagctgcttcgccgctgcgagctcccagctcctccagcagccgacaggaggcc

SEQ ID NO: 482900 - DNA, 101 bp, Homo sapiens
agagagcggtctatgagtgaaaatgctgttcgccaaaatggacagctggtcagaaatgattctctgtgctggagaatctggtaaaagcaccattgtgaagc

SEQ ID NO: 482901 - DNA, 100 bp, Homo sapiens
cgccaatggggagcagaaggactcggacacagttgatattcactgatggactccaaagaatcattaactcctggtagagaagaaaaccccagcagtgtgc

SEQ ID NO: 482902 - DNA, 90 bp, Homo sapiens
gggccttggaccccgcggcgcccctcggcctcggagcaacgagcgcagcgccggttggagaaacgtacggtaaggatataacctcccggg

SEQ ID NO: 482903 - DNA, 82 bp, Homo sapiens
cgggaaatcgggctgaagcgactgagtccgcgatggaggttcatgatcaagagggcccaaggacggaagcgctttgggatga

SEQ ID NO: 482904 - DNA, 100 bp, Homo sapiens
tgtgtgcaatgccccgggctgtggacaggacctgctgaagctcacacccgtggaccacccagactgcctgccgctacaggatgccctccgcatctcccag

SEQ ID NO: 482905 - DNA, 82 bp, Homo sapiens
gcatttacagaaagagtcaacagcagtggcaacaggagcatttcatactactgaagctgaagctagttctcagagtttgact

SEQ ID NO: 482906 - DNA, 51 bp, Homo sapiens
ttgtcctgtgctggggctgacagctctggacttattggacaaaatgttgac

SEQ ID NO: 482907 - DNA, 51 bp, Homo sapiens
cgcgttcacagccccagcgcagtcaattggtgtcaacactggtttgaatat

SEQ ID NO: 482908 - DNA, 116 bp, Homo sapiens
ccagaaagttccgccatgagctggggcacggagctgtggggacagcaatcagacctattgctttgagagctgtgacctccattgctcgtgctctgcctggatttcccattttggct

SEQ ID NO: 482909 - DNA, 75 bp, Homo sapiens
tcgcagcgagctggagccgccggagggttttttgattaactcaaaaccagagaatgcctgtgaacccatagtgcc

SEQ ID NO: 482910 - DNA, 90 bp, Homo sapiens
ctcaagtggtgaccaccgtccttccggccagttacgccccatggtgtccatcctgccagcagactgattcagaatgggaggcttttgcaa

SEQ ID NO: 482911 - DNA, 111 bp, Homo sapiens
tataaagataagattcctttactacagcagccaaaacgagaagaagaagaagtgttagaccagggtgaccaagaatatggcccaggtgaccaaagccctggacaaggccct

SEQ ID NO: 482912 - DNA, 90 bp, Homo sapiens
cgatggcggcggcggcggccggagcttctctcagccggacctgaaggagaagaaggagaaggtggaggagaaggcaagccggaaagagcg

SEQ ID NO: 482913 - DNA, 100 bp, Homo sapiens
ggcctgtatgaaggggagttcaccctggccaaccatgacagtcgcatcctgagtctcagctggcatccctctggtacccacattgcagctggttccatag

SEQ ID NO: 482914 - DNA, 83 bp, Homo sapiens
gttcctgggaaggtggagccaccagcctctccttgctggtagcagtgtttgatgagcaggatccacatcacggaggtgatggc

SEQ ID NO: 482915 - DNA, 90 bp, Homo sapiens
gctaaacaagacaccatccagctccaagaaagtcacctttgggctgaacagaaacatgactgccgagaatccgacaacagctgctccagc

SEQ ID NO: 482916 - DNA, 100 bp, Homo sapiens
atatcaatgtttctgtctgttcgtgaggactccgtgcccaccacggcctctttcagcgatgtgcattttgtaagcactttggagccactatcaaatgctg

SEQ ID NO: 482917 - DNA, 100 bp, Homo sapiens
aaagtgtctggagaagctggacactgacatttcactcattcgctattttgtcactgagggtggctgtgccagtgtcattgtgtcattaactactcagtgt

SEQ ID NO: 482918 - DNA, 50 bp, Homo sapiens
ggtggccctggagcagtatgccagcaagttccgccatggagtcatagttg

SEQ ID NO: 482919 - DNA, 100 bp, Homo sapiens
gctcaagagcaagtggcccaaggcctcagaagactagaaggaagttcctggccattcaggtctctaattaacagaagatggcaaagcccagccacagcag

SEQ ID NO: 482920 - DNA, 75 bp, Homo sapiens
agcagaggcacccacgctcctacaatgctgagttggctgtcattcttaaatttgtgctggaccatgaggacgggc

SEQ ID NO: 482921 - DNA, 75 bp, Homo sapiens
ttggggagcccagaagctgccaccgaaccaagttttcggctttgtgagaaaccttaccatcaaacacgatggcca

SEQ ID NO: 482922 - DNA, 90 bp, Homo sapiens
ggcggcggcgccatggcagggcttgcagagctgaagaagcaggtggagagtgccgagctgaagaaccagcggctcaaggaggttttccag

SEQ ID NO: 482923 - DNA, 80 bp, Homo sapiens
gaaccctggggactacgacgtccctcaaaccttgcttctaggagataaaaaggtaaacgcaaagcactgaagttgaattt

SEQ ID NO: 482924 - DNA, 89 bp, Homo sapiens
cagaagtggaagggacgctaattcgggtacccattccccagtccaggagagcctcagattattttttgtagaagtgaagctgcacatca

SEQ ID NO: 482925 - DNA, 100 bp, Homo sapiens
ctgctctcccagccgcgccagcctcctcactggcctgccccagatcccagatgcagtgactggttactacctgaaccgtgctggctttgaggcctcagac

SEQ ID NO: 482926 - DNA, 99 bp, Homo sapiens
gcaacgtgttggaccttccggagcttctcagaagacagagggttttcttttgagaatgccgaactggggaggaggcaagaaatgtggggtgtgtcagaa

SEQ ID NO: 482927 - DNA, 98 bp, Homo sapiens
cgtgtcccggcaccccgcacccgggcacacaaaaaacgggtcgcccgcgattctcagggattgatcgcctcttcagagtgtgaacatggctacgcctc

SEQ ID NO: 482928 - DNA, 50 bp, Homo sapiens
gtgcctttcagctttaaagagaattgaagatctcagtggttcaatagcat

SEQ ID NO: 482929 - DNA, 83 bp, Homo sapiens
cgatgattgaccccacttccaaggaagaccccaagttcaaggaactggtcaagactgaaccggccgctgacactctcggagaa

SEQ ID NO: 482930 - DNA, 82 bp, Homo sapiens
acaaagggacctgatgaagcgaagatcaagctgcacaatattggaccaagtaccatcagtgacaccatcctggaggtgggct

SEQ ID NO: 482931 - DNA, 75 bp, Homo sapiens
caacctgaatgacatcgagaaggtccttccagcctggcaggtggacaaaatggccagtctttacaacatccacct

SEQ ID NO: 482932 - DNA, 112 bp, Homo sapiens
ggggactggcctggcgtgcactccgcacctcggggacattattgcgcgtggaacggctgcttttggaaggtttacccaaggtccagcctagcccctaggcaccatgtcggac

SEQ ID NO: 482933 - DNA, 110 bp, Homo sapiens
caagatttgctgggtatgaataatgactttcctccaagagcacattgcctggtaagatggatcatcatgcctagggttcataacataaaaaagtctcttacacctcacat

SEQ ID NO: 482934 - DNA, 100 bp, Homo sapiens
cggtcttccgtcctgaaggagtctctggatcagctggtacaaaaggaaaaggagtggagactgctgcacggactctggaaccatgaacatatttgatcga

SEQ ID NO: 482935 - DNA, 83 bp, Homo sapiens
gacgtcatccaacaggaagcgtcagccctgagggaggagacagaagcctgggccaggccacactggtgtgtctcataagtgac

SEQ ID NO: 482936 - DNA, 75 bp, Homo sapiens
acgacgacgtgcggacgcagcggcgggggcaaaacaacagttttgttggcatgtgaagctccagtttcctcaaag

SEQ ID NO: 482937 - DNA, 82 bp, Homo sapiens
gaagtcgcgtgtctaggtgagtcgcggtgggtcctcgcttgcagttcagcgaccacgccaggcgggcaccacggcaggggct

SEQ ID NO: 482938 - DNA, 82 bp, Homo sapiens
gttaaagtctctcttcaccctgccgtcatgtctaagtcagaggtttggtgcacctcgatttggaggaagtagggcagggccc

SEQ ID NO: 482939 - DNA, 116 bp, Homo sapiens
gcgccggcagggctgcggcgcagggcgaggcggaggcgcccaccctctatctgtggaagactggaatttatcatggcatccagcattgaccactacaagtaaaatgcgaattccac

SEQ ID NO: 482940 - DNA, 75 bp, Homo sapiens
atcgtcactccttccttaaggctctttattaccaagtcttatgatgtaatcagcgcgatttcacttcctgaattt

SEQ ID NO: 482941 - DNA, 100 bp, Homo sapiens
caaagggggctgctgaccgagagagctcactcagccagggcgccctgcgtccggcagaggaggcgagcatcccgctcaggtgatgaggaacccctcgcgc

SEQ ID NO: 482942 - DNA, 80 bp, Homo sapiens
tggagctgggtcagtccgccgctcaccccgcggccgcaccttcccgccttctcaggtatcacctcttctgggctcaagat

SEQ ID NO: 482943 - DNA, 74 bp, Homo sapiens
ggggctgtgctccatggcgagctggattactcttgtctctgctgctcctgggaaagtgatttgtgaaatgaaag

SEQ ID NO: 482944 - DNA, 75 bp, Homo sapiens
gcgcgcgggagttcgaggccctgcggagctgcttcgccgctgcgattttgcaagaacgaggctcaaggatgtgag

SEQ ID NO: 482945 - DNA, 100 bp, Homo sapiens
gcacaacacttcaccctctcgcctcgggtctcgggggccgctctgggatcccggccaccagcaattgtccgctaaaccaggtggacaggtgaaatgtcag

SEQ ID NO: 482946 - DNA, 82 bp, Homo sapiens
tgttaaggattccaagtaactcttatttgaaccaagcgcctccaggtctctacacgaagacccaggacccagccaaagcccc

SEQ ID NO: 482947 - DNA, 82 bp, Homo sapiens
ctttaatgttcagctctgagccttccacatcagaagtccacagagatcaggaaaacaaagtgttgcgtacagttcctctact

SEQ ID NO: 482948 - DNA, 83 bp, Homo sapiens
caatatctgtcttcggtggactccttcggcagtccacccaccgccgccgcctcccaggctgcctgctgtttcccggggagatc

SEQ ID NO: 482949 - DNA, 98 bp, Homo sapiens
cagcatgagacccgccttcggagactggcatcagtactatgacatagtttatatgaagcctcatgggagactccagaaagtcatgaaccacatcacag

SEQ ID NO: 482950 - DNA, 90 bp, Homo sapiens
atagccgcttgcaggagatccgggagcggcagaagttacggcgacagctcctcgcgcagcaggctgccatttgtcgatgtagtcagccac

SEQ ID NO: 482951 - DNA, 101 bp, Homo sapiens
tgacttttcttatgctgggatgtgccttagaggattatgggaactttatattgctgttggaatatctggagccatccaacatttagctgggatgaaagaca

SEQ ID NO: 482952 - DNA, 83 bp, Homo sapiens
ccaagaatggcaagttaaacatacagtcgcctctgacaagccagatccgctttatcctcatccagaaccgggcaggcaagacg

SEQ ID NO: 482953 - DNA, 100 bp, Homo sapiens
cttcagagcgtcacggcgtacgccctcatggggaaaatctccccggtgactttcagttacattacttcgttcagaaccatttcacaagtgcaagaatggc

SEQ ID NO: 482954 - DNA, 75 bp, Homo sapiens
gtggccctcctggaagatgacagtggcatggaggacatggtctgctatacagctcagactctcgtccgaatcctc

SEQ ID NO: 482955 - DNA, 100 bp, Homo sapiens
caacaccctctacgaaggcggctacttcaagcctgatgtaaatgctgacattgtgcattggctctcttggactgcccaaggctttttatctccacttgct

SEQ ID NO: 482956 - DNA, 101 bp, Homo sapiens
atcgatctaagatggcgactgtcgaaccggcaaaggaaggatgaactggagcagaggatgtcggccctgcaggagagcaggcgggagctgatggtccagct

SEQ ID NO: 482957 - DNA, 95 bp, Homo sapiens
aaggataaggagatcatagcagagtacgatactcaggtcaaagagataattgacgaccttgccaacctagtggagaacacagatgaaaaacttcg

SEQ ID NO: 482958 - DNA, 100 bp, Homo sapiens
ctcagcgagctgcggcagaagggctacgaagaagtgcttcagcgggccaggaagcgcatccaggaggtcagtactcctgcatttgtaccaacgaaaactc

SEQ ID NO: 482959 - DNA, 82 bp, Homo sapiens
tagaaatgaatgtttccatctcttcagagatgaaccaggtgtccctggccagtgtccttccacctgtccacaagcatgggga

SEQ ID NO: 482960 - DNA, 101 bp, Homo sapiens
tgcgctttgagctactgggctgtgagctgaacgctctcctatgtggacgccgagggcaaccctgtgggtgtggtacagatgaccttcctgcggctgctgag

SEQ ID NO: 482961 - DNA, 124 bp, Homo sapiens
ttgcagatcaacagcctggggaaactgccgacgctcaaggatggtgatttcatcttgaccgaaagggctgtgggacagatgatgtctaccatgttctacccactggtcacctttgtcctcctcc

SEQ ID NO: 482962 - DNA, 100 bp, Homo sapiens
ttgtaaccacctaacaaattttgcagtactgatggcacatgtggaagttaaggcaacagcattattgagaaaagcccttacagaagagtgtggccgtagg

SEQ ID NO: 482963 - DNA, 75 bp, Homo sapiens
ctgtgctcgcgctactctctctttctggcctggaggctatccagcatgactttgggaaattgctgctggctgagg

SEQ ID NO: 482964 - DNA, 75 bp, Homo sapiens
gtggatcctgggaagcgctgtgaaatgggctggaatgggtaccacagaccatgtcatcgtcctggcgtccacgaa

SEQ ID NO: 482965 - DNA, 90 bp, Homo sapiens
aaacctctgagccagagaataacaataaaaaacccaaaacctcaggctcccagctggactgtgctgctgccatctcggctcactgcaacc

SEQ ID NO: 482966 - DNA, 100 bp, Homo sapiens
actcaatgctgctgtgtgggaagaagatttgtaaagaaaactcttagggcagcaattgaagagaggtatggcaaagatctgctcaacctctctaggaaga

SEQ ID NO: 482967 - DNA, 142 bp, Homo sapiens
ccaagccccctgaggcagctcggcctgcagatgagcctacccctgccagcaagtgctgcagcaagccacaggtgctattccaatcaagttctctgaaaagcaacaggcttctcactacctctatgtgagagcacacggcgtt

SEQ ID NO: 482968 - DNA, 82 bp, Homo sapiens
ccccggcctggtcctggccccggagctgttgctggacccctggcaggtctattatcctcccagtccacaacgctgaaccgtg

SEQ ID NO: 482969 - DNA, 75 bp, Homo sapiens
acagagcgctactcctggcagtgcgtcaatcagagcgtcctgtgcggtgttgacttcaaaatcaaaactgtagag

SEQ ID NO: 482970 - DNA, 75 bp, Homo sapiens
atcagcatcacatggccactgcttttctttgaatatgaagggaacttcatccagtagggacggggtttcaccgtg

SEQ ID NO: 482971 - DNA, 100 bp, Homo sapiens
agaatcaggattttgcaaggaaacacttcgtattactattgcagagtttcgctgttgttgcccaggctggagtgctggagtgcaatggcatgatctcggc

SEQ ID NO: 482972 - DNA, 100 bp, Homo sapiens
tgacatgcaatgtaatgcagtttaagaagtgcaccatagcgggagttgcttatggactattgggaagaagttacctgcaactacagcaactccagactca

SEQ ID NO: 482973 - DNA, 82 bp, Homo sapiens
ccaggctgatggagagctgaacattactcttccagaagaggagggccacacagaagagccggaagcagaggagcaagcccac

SEQ ID NO: 482974 - DNA, 82 bp, Homo sapiens
tttccccgtcagcatcccagccgtgctcacggttattcagcttctcaaggctggaaaagcgaaggaagtttcctacaatgca

SEQ ID NO: 482975 - DNA, 82 bp, Homo sapiens
cagaaggtctctggagacatcttcagcaggcttcagggatgacttcttagggggcaggggaggtagtcgcccaggcgaccgg

SEQ ID NO: 482976 - DNA, 95 bp, Homo sapiens
atacccacagtgggcttcaacatgaggaaggtaactaaaggtgctggagaatctggtaaaagcaccattgtgaagcagatgaggatcctgcatgt

SEQ ID NO: 482977 - DNA, 75 bp, Homo sapiens
aaggcccgcccgggagggccggggccgcgctcagatgatgaggagtctgatgaggaagctgtgaagaaaaccaac

SEQ ID NO: 482978 - DNA, 83 bp, Homo sapiens
aggagataccagtcggtagaggttccagtgtctcgccccatcctcaccctcagggttcccagggcccaggctgtggtggggga

SEQ ID NO: 482979 - DNA, 121 bp, Homo sapiens
gctggaccgcgtgtttgagaggcagcactactcagacatcttcaccaccacagagcccatcaagcccgagcagaccaaacctggaccacccaaaaagccgaagaccccttcaagaccatca

SEQ ID NO: 482980 - DNA, 104 bp, Homo sapiens
cttacctcagactagaggcgatggaaagaaaatagttagttaccaggttgcagctgctccctggtggttacctgtgaaaggcgctaactggagacacccagaag

SEQ ID NO: 482981 - DNA, 75 bp, Homo sapiens
gtctacctggacggacacctcatcaccacggtgcagggcgacgcatgtgcagtctttgccaacaaaaaaaattac

SEQ ID NO: 482982 - DNA, 83 bp, Homo sapiens
ggatcggggacggagagaacacgagcccatcagagccagacctggaggactgcagcttccggtgtcgggggacctcccctcag

SEQ ID NO: 482983 - DNA, 90 bp, Homo sapiens
ctgtaaggtatattcggaaacctatcgattacacagttctggatgatgtgggccatggtgtcaagcttttggaacacagttaccaccgat

SEQ ID NO: 482984 - DNA, 83 bp, Homo sapiens
acctggcggtggggctgcggcgcctgggactgcaccgcaccgagggcgagctccagtcgccaatatgcagctctttgtccgcg

SEQ ID NO: 482985 - DNA, 100 bp, Homo sapiens
caaaatctacaagatgatgcagggaggaggtggcaggatcccattttctcactggcgactcccctgcgtgctggtgaagaaggcagccacagtcggaagt

SEQ ID NO: 482986 - DNA, 75 bp, Homo sapiens
caacaccagtggaagatgatcacatcccagccaccccacgtcatgctgcagcgccgcagagatcatggctgtcct

SEQ ID NO: 482987 - DNA, 101 bp, Homo sapiens
ctcaaaactgtaatactaaatgtgttaccataccaaggtctttgatttgcgtcagtgtcatcgacagatgcagcagcaggcggctactgcacaagctgcag

SEQ ID NO: 482988 - DNA, 82 bp, Homo sapiens
tacctctgagttatgccaaagcaacgtctcaggatgaacgaaatgtcccttaacaagttctccaacatcttcaaataaagaa

SEQ ID NO: 482989 - DNA, 82 bp, Homo sapiens
gttcttgtttgtggatcgctgtgatcgtcacttgtttcagctgtgagttcaacatggaggcaaatcagtgccccctggttgt

SEQ ID NO: 482990 - DNA, 82 bp, Homo sapiens
ttagctcagcaattcttaccttggcatatcgatgcatttacttcaaaactttttctactggaagaaattacctcagaagaat

SEQ ID NO: 482991 - DNA, 100 bp, Homo sapiens
gcaggagcgcggagccgcgagccccgagccccgagcccggcgcctggctgagtaatgcctttgaagatgagaaacccccaaagaagagccttctctccaa

SEQ ID NO: 482992 - DNA, 100 bp, Homo sapiens
gagccctgcattcgcggcgtgtgcaggttagcatggcctcattgaaagaactagatcaaagactctttgaaaattacatcgagttgaaagcagatcccat

SEQ ID NO: 482993 - DNA, 90 bp, Homo sapiens
caatgatggaaagtggggtgagagactatagcaagcaggcccgccaagctgccccctgtgtgctattctttgatgagctggattcgattg

SEQ ID NO: 482994 - DNA, 100 bp, Homo sapiens
gactcgtcggcgaatgcaattaggaactgttctgccggaatttgaaaagtgcctgcgcattctacattctaaaggggagctcagtgaagatagacataaa

SEQ ID NO: 482995 - DNA, 51 bp, Homo sapiens
ggctcttccagcatctcacagtacagcagggaagaactggaaactcagaga

SEQ ID NO: 482996 - DNA, 80 bp, Homo sapiens
ctggaaaggaagtaccaggacttgcacaggtgaaagaacttgtcctggacaacagtcggtcgaatgaaggcaaactcgaa

SEQ ID NO: 482997 - DNA, 90 bp, Homo sapiens
ctggagtgtgtgcccactgaggagtccaacatcaccatgcaggtcctgcatctccagtatggaatgtatgtttggccctgtgctgtggtc

SEQ ID NO: 482998 - DNA, 50 bp, Homo sapiens
ctcctctgttctccgcagcctgatggaactctgcgaccttcaagtcgttt

SEQ ID NO: 482999 - DNA, 100 bp, Homo sapiens
tctgtacctactgatggtgctgtaaccacctcacagattccagcttcggaacaagagaccctgaaggaagaggcccagcagaagggactcgctgagccac

SEQ ID NO: 483000 - DNA, 100 bp, Homo sapiens
tggcttgtggtgcggcctcaccatacaggaacagggcagacgttagcgtgagtgatcactctcaatcccgggagttgtaagacgttcatcgccgtgttat

SEQ ID NO: 483001 - DNA, 89 bp, Homo sapiens
ggcggagacgcgcgtgtttctggaggtgcggggacagctgcagagcgcgcttctgatcctgggaaacttctgcagcatccagaactgag

SEQ ID NO: 483002 - DNA, 98 bp, Homo sapiens
gtggaatcctccctcagttcctgcagaaacagtagtagcactgtgtcatacctgaaaaaggcccagactctcacagtatggaggcaagctgataaaca

SEQ ID NO: 483003 - DNA, 75 bp, Homo sapiens
gccctacaacggcagaagagactgttcagaaaggcagaagtcaattcatctggaaagactatctctgagtcagac

SEQ ID NO: 483004 - DNA, 100 bp, Homo sapiens
ctgacctggtggtgatactcaagattctgccaacgtgatgtgggctctcttgatgagaagatgaagagcttggatgtgaatcaggactcggagctcaagt

SEQ ID NO: 483005 - DNA, 100 bp, Homo sapiens
tccatcaacctcacgctgcacctggtccctgactccacctcttctgccacaaacgtcagcatggtggtatcagccggcccttggtccagtgagaaggcag

SEQ ID NO: 483006 - DNA, 83 bp, Homo sapiens
gcagaagccggcgtcgtcggatgttgtgttgcccgccaccatgagctacacaggtatctgaacttaggactggagctgcagaa

SEQ ID NO: 483007 - DNA, 98 bp, Homo sapiens
gagagatctctgctgcctgcattgagggcatcaacaaagagagcattgtggatgtagaaggtgttgtgagaaaagtgaatcagaaaattggaagctgt

SEQ ID NO: 483008 - DNA, 74 bp, Homo sapiens
ggggggattctcgacctgctaacagaactggaccttttcggctggtgctcaggaagcccctatcaagaagaagc

SEQ ID NO: 483009 - DNA, 89 bp, Homo sapiens
ctcagtatgacaaggaagtcggacagtggaacaaattccgagacgaacttagtgatttggcccgtgaccctccagcacaatgttctgca

SEQ ID NO: 483010 - DNA, 100 bp, Homo sapiens
cacagtttcttaaagagctggtggagcctgtgtcccgtttcttcgaggtgctcttgactttgaacacattgaagaacaagcagaaggcatctttggagga

SEQ ID NO: 483011 - DNA, 75 bp, Homo sapiens
cgaggggctcggagaggtgctcggattctcgtagctgtgccgggtcagcccaaggccaaccccactgtcactctg

SEQ ID NO: 483012 - DNA, 75 bp, Homo sapiens
gcagtggtcgcttcttctccttggtacaccttgactgtccctggagacagcccctgtgctcgagttggccacagc

SEQ ID NO: 483013 - DNA, 90 bp, Homo sapiens
actctgggcggcgaggaaggcgtctcccggcttcttccagaccagctggtcttgcttctggagcatctcttggagcagaagactctgagc

SEQ ID NO: 483014 - DNA, 49 bp, Homo sapiens
gacgaaggtctcccagatggtctaagacacatcgttcatgtacatgatc

SEQ ID NO: 483015 - DNA, 76 bp, Homo sapiens
gggactgggagtcgttagtgaggaaggatctgagtctctccctgcggagacagccctgaagaactcctgtaacgtc

SEQ ID NO: 483016 - DNA, 85 bp, Homo sapiens
ctgaagcctggaaacgaggcactcagttggaagagtccagcaaggcccctgaggtgttcatgcactgatcctggaccttggatta

SEQ ID NO: 483017 - DNA, 98 bp, Homo sapiens
caagaatccgagtggaggctcaccgaggcgaaggggccaaccatgggaaaggagagtggatgggactcagggctttgttcgcgggggtcacagctctc

SEQ ID NO: 483018 - DNA, 96 bp, Homo sapiens
gcaaaggagacccaaggaacagtgccaagttagatgccgattacccacttcgagtcctttattgtggagaggctgccatgggctccgtggggagcc

SEQ ID NO: 483019 - DNA, 83 bp, Homo sapiens
ccatgccgctcctaagcctgcacagccgcggcggcagcagcagtgagaggcataatcaccagcaacacccgggacaataatac

SEQ ID NO: 483020 - DNA, 73 bp, Homo sapiens
aagattttgtagctggtcttggttgggaggtggtgttatcaaggagaagaaattcctgccttgaccagatgtg

SEQ ID NO: 483021 - DNA, 100 bp, Homo sapiens
actgcaggagatgcagctgaaggaggccgaggaggagctcatcaaagcccagaaggtgtttgaggagatgaatgtggatctgcaggaggagctgccgtcc

SEQ ID NO: 483022 - DNA, 83 bp, Homo sapiens
ctccccgagcagtttgagtccccttgcccgctccttcagggggatatgagactttctactcggaatatcctgagtgttgcgtg

SEQ ID NO: 483023 - DNA, 50 bp, Homo sapiens
gcttgcagttaggtcaagtggaggcacagagtaccaagacattgagactg

SEQ ID NO: 483024 - DNA, 100 bp, Homo sapiens
cccctcccggcttcggagccgccgaatagcctaacatggcagaccagagacagcgctcactgtctacctctggggagtcattgtaccacgtccttgggtt

SEQ ID NO: 483025 - DNA, 83 bp, Homo sapiens
gggaaagatctaccttctggaagctactactacgtggtgcttggaaaggaaactactttgcttcgcactttttcatgggagga

SEQ ID NO: 483026 - DNA, 99 bp, Homo sapiens
gctggtccttccgcaacctctataagtccatgctggagaagtcctcttcctcctctcagcacggcagaagctcctcctggggtagagacagatcttatt

SEQ ID NO: 483027 - DNA, 96 bp, Homo sapiens
accatcaacaaagaagaccacacactgggaaacatcattaaatcggggaaatttgcagtggtgagaaaatgtataaagaaagattctgggaaagaa

SEQ ID NO: 483028 - DNA, 89 bp, Homo sapiens
ggcgtgcagcgcaaccacgagacggccttccaaggaattacatgaatgacagtcttcgaaccaatgtgtttgttcgatttcaaccagag

SEQ ID NO: 483029 - DNA, 100 bp, Homo sapiens
gagtgaacagggagcggggcttttgtctgaaggtgggagtcaatcattttgacaagtctcctgaaaggaacagctagcaggaactgaaacctttttccat

SEQ ID NO: 483030 - DNA, 90 bp, Homo sapiens
tggcgactcccatgcatcggctaatagcccggagacaagcgtggcagcacaccctgggccccccactccccgccgcaagtcctgaggatg

SEQ ID NO: 483031 - DNA, 50 bp, Homo sapiens
atcagttttagattttggaatacacgcaaatctgtccaaggctgcctggg

SEQ ID NO: 483032 - DNA, 50 bp, Homo sapiens
aggaggcgttgggaagtctgctctgactgtacaatttgttcaaggaattt

SEQ ID NO: 483033 - DNA, 96 bp, Homo sapiens
cttgctgttcgtgattatatttcttggagttgtgttggtaatgaagaaaagacttacagattccagtctgctgttagatgattattcatccaagtt

SEQ ID NO: 483034 - DNA, 100 bp, Homo sapiens
tcagtttccatgataaccctgaaaaatataataacccagccatgcttcataacattgatcaggaggacagtcattttgtttactcattcagccctgttgc

SEQ ID NO: 483035 - DNA, 76 bp, Homo sapiens
gctggaagaagctgaaaaagctgctgatgagagtgagaggcctctactccagtgtttggggggatcctatccttga

SEQ ID NO: 483036 - DNA, 82 bp, Homo sapiens
gtcgcgttacgggcggtacggaggaggggtcggcgctttgcctgatgaccctacctctctgacagatctgagaagagtttac

SEQ ID NO: 483037 - DNA, 100 bp, Homo sapiens
gcacttcgcattttggcattgacatttaattttagggtcctttatatagaagggagagtagactgaggctgatgtgaatccaaaggcctatccccttgcc

SEQ ID NO: 483038 - DNA, 98 bp, Homo sapiens
aagatgtccttaccagctttgacaatacaggaaatgtttatcaaatttttggctctcatctgcacaaagtgtgtgaacgtgaaaattccacagttccg

SEQ ID NO: 483039 - DNA, 101 bp, Homo sapiens
cgctcagctttatcggccgcatccggcctttggcggagaaaaccggcatctgcaaaattcggccgcccaagtgccgtattcacctggaccaacctgctggt

SEQ ID NO: 483040 - DNA, 82 bp, Homo sapiens
gccaaacagcccagctcgcgcttcagcgtcccggcgccgtcgcgccactcctccgagtttggacatatttgactcttttccc

SEQ ID NO: 483041 - DNA, 74 bp, Homo sapiens
ggccaaagcagtacagctgggatcagcgcgagaaggctgttcgctgctatgaatctctaatcttaaaagctgaa

SEQ ID NO: 483042 - DNA, 101 bp, Homo sapiens
tcttggtttggacatactacatggatcaggtccgtggcactcaggtagttggttctgacatgactgtgacagttgagtttaccaatcctttaaaagaaacc

SEQ ID NO: 483043 - DNA, 75 bp, Homo sapiens
agacggagggccagagagtcacggcgacatgtcctggacttgaacagtatgctattaagaagtttgctgaggcat

SEQ ID NO: 483044 - DNA, 100 bp, Homo sapiens
gacctgcctgggcatagacttccttaaggtgtgatgaatgcagactctgctaccattttggctgtttggatcctcctttgaaaaagtctcctaaacagac

SEQ ID NO: 483045 - DNA, 100 bp, Homo sapiens
catcttcatcatcttctatatgacagctgcactgctccaggatgctataaaatcaccacggtctttagccatgcacaaacggtagttttgtgtgttggct

SEQ ID NO: 483046 - DNA, 89 bp, Homo sapiens
tatgcccgttcagtttacagttcattttttgcttggtttggaaaaatttcattagagggtgtcaaattgagaaccaggtagatccccac

SEQ ID NO: 483047 - DNA, 75 bp, Homo sapiens
gaagcattgaaaattcttcaaagcatggagtcttttagtcctgctatacagctgcaccttgtacatcaagctcca

SEQ ID NO: 483048 - DNA, 85 bp, Homo sapiens
ctcaatatctgtcttcggtggactccttcggcagtccacccaccgccgccgcctcccaggttctgcggggagtgtctccagccct

SEQ ID NO: 483049 - DNA, 75 bp, Homo sapiens
agcgcatccatcaaagctttgcgcaacgccaacctcaggcgagatgattctgaaaaagagttccacgtcctccct

SEQ ID NO: 483050 - DNA, 100 bp, Homo sapiens
gatgtcgtgatcctgaatgtggacaccaacaccctggaaacccccttcgatgacctccagagcctcccaaacgacgtggcccgttcctcccgccgtcagc

SEQ ID NO: 483051 - DNA, 75 bp, Homo sapiens
aaaacggcgatccaaaaattcagtggaaggatctccgtctgtgatgaggacaaatttggccacaatgaatttatt

SEQ ID NO: 483052 - DNA, 75 bp, Homo sapiens
ctttcagcatcataacaaagcccttgctgttatggttgatagagaaaaggaacagttccgtaagctctttattgg

SEQ ID NO: 483053 - DNA, 75 bp, Homo sapiens
ctcgccccgcgtcggtgcttcaggagggaatgtggccagaacgagaaagtgtaaacaggaacatcgataagtagt

SEQ ID NO: 483054 - DNA, 60 bp, Homo sapiens
ggcccctggctcccagaggtgcaccaaacagtgcttcatgttggcggaaccattgtattg

SEQ ID NO: 483055 - DNA, 82 bp, Homo sapiens
cttgggacccaccgctgccctcagctccgagtccagggcgagttggaatcgaagcctcttaaaatggcagatgacttggact

SEQ ID NO: 483056 - DNA, 90 bp, Homo sapiens
tcgcggaacacctgcccattaatcttgaccctgttaaaacaataactgcctatccaggtgattaaagtatacagtgaagatgaaaccagc

SEQ ID NO: 483057 - DNA, 97 bp, Homo sapiens
cggccagacgccgacgtcgaccagcagagactggtcaaaatgcagatcttcgtgaaaacccttaccggcaagaccatcacccttgaggtggagccca

SEQ ID NO: 483058 - DNA, 100 bp, Homo sapiens
gcactttactgggggatttgcctcagatggagttacaggcccttgtagctgaacaagaaagcaaggacagtgggggtgcagctgtggctgagcaggtgct

SEQ ID NO: 483059 - DNA, 98 bp, Homo sapiens
agggctgggtcccaagggccagaggcgaggtttatgttccagatgaaaataatactattttggggagaaatacaaataaacaagtttttgaaggcttg

SEQ ID NO: 483060 - DNA, 75 bp, Homo sapiens
cttcaaggataagggtgacagcaacagctcggcgggctggaaggaggtacagcatgtgtactgaccgggcagccc

SEQ ID NO: 483061 - DNA, 100 bp, Homo sapiens
ctgaaattaaaaagggaaggataaccccatcacaggttttggagccctctcttaagtcagaactctgtcccaaaaatcttctgagtgtcatctcaggact

SEQ ID NO: 483062 - DNA, 90 bp, Homo sapiens
ctgcccgagaaattgaggccgttgtacaaccatccagcagccccatctgctttgatatgattgaagaagcatacatgacaaaatgtggcc

SEQ ID NO: 483063 - DNA, 90 bp, Homo sapiens
gccacatgaaaaacaccacaatcaaccttattgtggcattgcgccgtacattcgagagtttgagatcctaagtgtgaacgtgaagtcccc

SEQ ID NO: 483064 - DNA, 75 bp, Homo sapiens
atgtttctctctcgcttgtgtgaagagaaactcagaaagggagttctgggaattatgtaacaagtgtaatttgat

SEQ ID NO: 483065 - DNA, 100 bp, Homo sapiens
gaaaattgtgaactaaggccccctgcccccttttcctggtgcatgtgaagttatcaaaaacaggtgtttcaggcctcacctgaagatcatgaaaaatacg

SEQ ID NO: 483066 - DNA, 98 bp, Homo sapiens
acgtctccaaaatgagtcgcatcttcaacccccatctgttttagattcaggaagactgaaagaatatgatgagccgtatgttttgctgcaaaataaag

SEQ ID NO: 483067 - DNA, 75 bp, Homo sapiens
cgggccagacagcagaagcaggccaagctcacagaaggacctgaagacccttccagcatgccagaggaaagttcc

SEQ ID NO: 483068 - DNA, 100 bp, Homo sapiens
agctctcggattccttatgcagagtggccgacttggttagcatggcctcattgaaagaactagatcaaagactctttgaaaattacatcgagttgaaagc

SEQ ID NO: 483069 - DNA, 90 bp, Homo sapiens
ctctagtcacaagagccttggggaagacagttggaagctcagacatgccaagctacatcagtgatgtgggaccccctggtcgaagctctc

SEQ ID NO: 483070 - DNA, 97 bp, Homo sapiens
acctgccgtcattgaggcccagaatggtcctgtccctgctatcagtggggcactgaagaaagcaggactgagtcttaaggacatggatttggtagag

SEQ ID NO: 483071 - DNA, 82 bp, Homo sapiens
agaccctggagcctcagttggaagcagccgatccagcctgcggagcctgtggggcaggtggctgcaaaattcgggttcaggg

SEQ ID NO: 483072 - DNA, 75 bp, Homo sapiens
cttttttgagaaaggaaggaatatatcctgactgattggagattggtggacggctcctcatggtagaaactcgac

SEQ ID NO: 483073 - DNA, 83 bp, Homo sapiens
gctcgcgcagccatgtccgaggagaagcccaagaacccagcgggtgccgcttctccacccgaggcttccacctccaacgagcc

SEQ ID NO: 483074 - DNA, 75 bp, Homo sapiens
tccataacccaggaggagactgagagcctgcggcgacgtgacgttgcctattgtaatgtagcagacccagccatg

SEQ ID NO: 483075 - DNA, 76 bp, Homo sapiens
tttgaccttctggatgtccttgagttcaaccaggaatttgctgacacaatatcttccgcctggtgctgggcatatc

SEQ ID NO: 483076 - DNA, 75 bp, Homo sapiens
gtggggtgaagaccccagttttgctgaccttattcaccatgacttatcagaaatcatagcccactaatgagtttt

SEQ ID NO: 483077 - DNA, 100 bp, Homo sapiens
gttgctgcgggggattgtgggagtctccgcgtcccgctcgctgggagagagatgtccagctcgccgctgtccaagaaacgtcgcgtgtccgggcctgatc

SEQ ID NO: 483078 - DNA, 75 bp, Homo sapiens
gacgttcaacgacttactggggagagaaagaaaaggaacgggagctgagagcccgcggcgccatggctcacgtcg

SEQ ID NO: 483079 - DNA, 117 bp, Homo sapiens
catggcgcggctcgcggactacttcgtgctggtggcgttcgggccgcacccgcgcggtgagaagccctaccactgcaactgggacggctgcggctggaagtttgcgcgctcagacga

SEQ ID NO: 483080 - DNA, 100 bp, Homo sapiens
agtcacttaaacactgtgtgatagttcctacacatctcattatagtttcctgcctagggtagttaaaagacgagtgaatgctctcaaaaacctgcaagtt

SEQ ID NO: 483081 - DNA, 50 bp, Homo sapiens
gaagtccctcgaccccggcctctttgatgatgaagactggcccatttgca

SEQ ID NO: 483082 - DNA, 101 bp, Homo sapiens
gcgggttgtcccccagacatggcaccagaggatagccttgaaggtggagctcattggttgccagattacacaaggatggtgccatgacaatggtgtgaact

SEQ ID NO: 483083 - DNA, 80 bp, Homo sapiens
agcaaagcctaccagtgtgcagctggcaaaggatgttcctaaacccaaaggaaagaaaaccaaagatatgaaaaaacctg

SEQ ID NO: 483084 - DNA, 100 bp, Homo sapiens
cggctccctcccccgcgtccctgcgaccgccgcggcgaagatggctgaccggttccctgatgtgttacctgcttctgctactgatccaaactgcagaact

SEQ ID NO: 483085 - DNA, 75 bp, Homo sapiens
tgagatcgtggacaagatcatgggcaaaggacagatccagattttgcaagaacgaggctcaaggatgtgagggac

SEQ ID NO: 483086 - DNA, 98 bp, Homo sapiens
acgacctcgctgtgctcccaaagtactttgtgcagtaggagggaaatctggactctttgcctgtttggatagaaatgaacacacctgtgagtactgga

SEQ ID NO: 483087 - DNA, 75 bp, Homo sapiens
agattgtgaagcaatagcctaagggcaatgccaggaagctggtgaagggtttcctctcctccaccatggttgaca

SEQ ID NO: 483088 - DNA, 96 bp, Homo sapiens
ggacagccagaacaagcggatagatatcatacataatctgaagtatggaatgctcctttaccagaattaccgaatccctcagcagaggaaggcctt

SEQ ID NO: 483089 - DNA, 76 bp, Homo sapiens
aacatcagggagataaattcaacccagtggaattggcagcaatgaaacagattctcgttaagatgcatagtaaaca

SEQ ID NO: 483090 - DNA, 100 bp, Homo sapiens
ttgatggagcagaatcagtactgacagtcaagacctcgaccagggagtggaatggtgaatattgaccacttcactaaggacatcacaatgaagaacctgg

SEQ ID NO: 483091 - DNA, 83 bp, Homo sapiens
gccggaccagctggtgctgcgcggcgcagactttaagtttgccatgtacccaccgtcgatgatcgcaactggaagtgtgggag

SEQ ID NO: 483092 - DNA, 74 bp, Homo sapiens
aagcactatgggctgccctggaagaggactgaagaagcagctgcagattgcttcacctgtggtatcagacatca

SEQ ID NO: 483093 - DNA, 88 bp, Homo sapiens
gtctttatcacactgactgcttcacctgcgactcgtgtgtgtgtaacggaataggtattggtgaatttaaagactcactctccataaa

SEQ ID NO: 483094 - DNA, 99 bp, Homo sapiens
aaaggactctaaaggagacagtgtgcttacacttcctgtgccagaggctaaagtaaataatgccagcctgattggactgggttatactcagacccttcg

SEQ ID NO: 483095 - DNA, 75 bp, Homo sapiens
agagcgcgaatatcgtcatcgttagaaggatccacgaactcagcagtgatgattattctacagaagaagaggccc

SEQ ID NO: 483096 - DNA, 75 bp, Homo sapiens
gccacctacagaaacaaaatgtcaacaaattgatggaaatggcaagttccaatcctgtgtatatggagatggaaa

SEQ ID NO: 483097 - DNA, 100 bp, Homo sapiens
aacctcgtctttttattgacggtgtcttgtgtgaaaggagtacaagcgcaagctagccagagtttccctggtgcgcaaagaactcaggtcccggatccag

SEQ ID NO: 483098 - DNA, 100 bp, Homo sapiens
ggcaaagactggcaaaagcacaaggattctcgctgtgacagagacaacaccgagtatgagaagtagtgaagctgattttagctcctcgagcagcacaggc

SEQ ID NO: 483099 - DNA, 76 bp, Homo sapiens
acccaaatacgtgtctccccaggatgtgacgaccatgcaaacctgtttgtctaggttccaaactgcagctgacccc

SEQ ID NO: 483100 - DNA, 99 bp, Homo sapiens
gcagtcggaggggcttctgggcgagtgcatgatccgccacgggaaggagctgggcggcgagtccaactttgacccacccccacagaggcctgaggagac

SEQ ID NO: 483101 - DNA, 74 bp, Homo sapiens
cctccccagccacgtggaactcatttcccccgtttcccgaggggcatccagccgtgttgcctggggaggaccca

SEQ ID NO: 483102 - DNA, 83 bp, Homo sapiens
gcggagcctggcgggcgtgggaacccaggccccgccgaggcggccagggaaagcaggcaggatgggagagtcgccgatagaac

SEQ ID NO: 483103 - DNA, 101 bp, Homo sapiens
gtgaccttcgcttggtgtcctcctggcctcagcaacctgacaattctgtcgtgtcccgtcactcaagactgcttgcaactgattgcagacagtgaaacacc

SEQ ID NO: 483104 - DNA, 73 bp, Homo sapiens
tctaacgttttagaaaatcataacaagcggttctctaccctgtaaagaagtggaacggatagtgaaagccaat

SEQ ID NO: 483105 - DNA, 75 bp, Homo sapiens
gggaggcagcgcgggatcccagcctcaggcgtgcgcggacggtgtgcggaaagttcaggagccctggaaaggaga

SEQ ID NO: 483106 - DNA, 90 bp, Homo sapiens
gctcgtaatagagccttaaatggggatctggtggtcgtgaaactgcttcccgaggagcattggaaggctgttcacggaagaccaggatgt

SEQ ID NO: 483107 - DNA, 83 bp, Homo sapiens
gtggtcggcagcatggagggccccgacgatagcgaggtcacctttgcattgcactcagtgcctccggagccagcgtggtggcc

SEQ ID NO: 483108 - DNA, 98 bp, Homo sapiens
cctctgcgtgcgctccggggcccggcgagaggatgcgcaaggtggagagccgcggggaagggggcagagagttggacagtgctccagggaagaatcgg

SEQ ID NO: 483109 - DNA, 82 bp, Homo sapiens
gttccatctgtggaaggacctaccaaccaggaagtttgtgtttttcaacatacctcagattcaatacaaaaacccttgggtg

SEQ ID NO: 483110 - DNA, 78 bp, Homo sapiens
cattggccgccccatcgagatgtccagcaaagtacagagatgtggacgaatgtcagcagaacccaaggctctgtaaaa

SEQ ID NO: 483111 - DNA, 101 bp, Homo sapiens
gagagaggacccaacatggggcagaagcttgaaatcctcattaaagatactctcgtactgctgcgcacggccactgccaacggcttccagatggtcaccag

SEQ ID NO: 483112 - DNA, 100 bp, Homo sapiens
ccagccgactacaaacccacgtttgcaccacctacctatgatgccgtggtacagatggagtaccttgacatggtggtgaatgaaacactcagattattcc

SEQ ID NO: 483113 - DNA, 101 bp, Homo sapiens
atagactccttcctactgggcagatgaggcagaatggggcacagaacatcagctttccaaaccagatgtggtatctcagttagaggaggcagaagatttct

SEQ ID NO: 483114 - DNA, 83 bp, Homo sapiens
catttctaagtactttctcctactccataaagacttcaagcacggaatgttaacactggtgaattagcagcaattaaagtaat

SEQ ID NO: 483115 - DNA, 75 bp, Homo sapiens
caggcgaagctggccgagcaggctgagcgatacgacggatgacgtcatgatgccccagcgggtgaggctgcaaca

SEQ ID NO: 483116 - DNA, 97 bp, Homo sapiens
acaacctcagaggacaacgaagtgttcggttgcagagcctgaggcctgtgatcagatgtacgagagcttagcgcgactccattcaaactactacaaa

SEQ ID NO: 483117 - DNA, 100 bp, Homo sapiens
cgaaccccgggcagcccgggaaatctccaagtcagaaaggcccagctagacaaaaagcgggatgacttttgtaaacagaatcaagaagcatcatcagatc

SEQ ID NO: 483118 - DNA, 139 bp, Homo sapiens
tgggacgctgagagggagacgctccaagaggctcctcagtgtgggcgagtaaaatgccctgcgtgtgagaagcaggtgtgtttccattgtagaaaacctggtcatggaattgcagattgccccgccgcccttgaaaatc

SEQ ID NO: 483119 - DNA, 80 bp, Homo sapiens
gtgctgaagacggggtagccacgaggtcaaaatgcagatcttcgtgaaaacccttaccggcaagaccatcacccttgagg

SEQ ID NO: 483120 - DNA, 51 bp, Homo sapiens
gaaccaggtcatgctccaaatggtatgactttgcagctgtccttgagtggt

SEQ ID NO: 483121 - DNA, 82 bp, Homo sapiens
ggatgagtcatgtggtggtgaaaaatgaccctgaactggaccagcaggtggcccagagtggcgagatccccccatcttgctg

SEQ ID NO: 483122 - DNA, 100 bp, Homo sapiens
gttagacagtgaatgtggaaaggagattgacagtcacaattttgtaataaggtaaaagagaacctgctttcatgcaagatgctgctgcactgcaaacggg

SEQ ID NO: 483123 - DNA, 96 bp, Homo sapiens
gctgtcagagcctcatggagtacgaatttcgaggatgtcagatgtaaatgtatctgccctccctataaagaaaattctgggcatatttataataag

SEQ ID NO: 483124 - DNA, 90 bp, Homo sapiens
gccctcttgatccccggcttgctgaagtcaaagtcacaaggcacttaaagcattgttgaggtcattggtaggtcttcaggaagagttgct

SEQ ID NO: 483125 - DNA, 75 bp, Homo sapiens
gcatggctccagggcatctcggaagatccaggtcccaactggaagctgaaggtattctggatggtgaaatggacc

SEQ ID NO: 483126 - DNA, 96 bp, Homo sapiens
ggagtcagtggaagacggagctggtcggcccgaagggtagaagagcagaggatggctctgtcattgattatgaactgattgaccaagatgctcggg

SEQ ID NO: 483127 - DNA, 100 bp, Homo sapiens
ggctatgaccacgagaagccaggagcccagtttcctccaattgcagcacaagaccttccttttgttctaaaggctggctaccttgaaaaacgcagaaaag

SEQ ID NO: 483128 - DNA, 75 bp, Homo sapiens
ccgggctgttcatctacttcaggaatcagaaaggactcaaaagcttattaccacctgcttgagcaggtggctcca

SEQ ID NO: 483129 - DNA, 90 bp, Homo sapiens
agatgatgaggagcaagaggaccctgcggactactgcaaagctaatggttgcagagaagaatggaacaatccggttttatgatcttttgg

SEQ ID NO: 483130 - DNA, 75 bp, Homo sapiens
gagttaccgggcccagctagacaccaaaacaaaaacggaagctgcgaattttcatttctaacactttcaatccgg

SEQ ID NO: 483131 - DNA, 100 bp, Homo sapiens
tggatggcaagctctcgatatttatccacaagcgggaagaccagtcatcccatgaagtcctccagccattgctaagatgttatacatccaggctctacca

SEQ ID NO: 483132 - DNA, 101 bp, Homo sapiens
gtacctcttctcttggtacacctcagccgtgtgtcctctgggtactatactggcaattgctggagaagattttgcaattgttgcttctgatactcgattga

SEQ ID NO: 483133 - DNA, 75 bp, Homo sapiens
gaagccatgaggccaaaggcagttgtattgggtatcagctctgtgataacagcgtgggggtgctcttcaatgact

SEQ ID NO: 483134 - DNA, 83 bp, Homo sapiens
tgacccgggaagtcggggtctccttcgccttctgtctttctgcgtcctactagcagatatttggagttcttacaacatggcag

SEQ ID NO: 483135 - DNA, 50 bp, Homo sapiens
ctgctgtgtggtgcgaggctgtgagcagatttccacaagacggcacccta

SEQ ID NO: 483136 - DNA, 75 bp, Homo sapiens
cagtgggataaatctcaaagatctcgtacaagatccttctttgtctctaattaacagaagatggcaaagcccagc

SEQ ID NO: 483137 - DNA, 100 bp, Homo sapiens
cctaaggagtaggcatatcttggcttacagttcagttatgcagccttttccagggggaagacgttttcatcccgctaatcttgggaataagaggaggaag

SEQ ID NO: 483138 - DNA, 101 bp, Homo sapiens
tccctgacccccagttacgcctggaatatgaaggcttccccgtcccgaactttgataatggtgattctcgcctggactccagtgaattcctgaagtttgtg

SEQ ID NO: 483139 - DNA, 51 bp, Homo sapiens
cgcagtggtcgcttcttctccttgagctctcgatgttctgaagtatgagga

SEQ ID NO: 483140 - DNA, 83 bp, Homo sapiens
aaaagaggtcacatcagcgttctgcgtcatgggggagtgctgatcaactaaaagagatttatggagagaattcttcttgtgca

SEQ ID NO: 483141 - DNA, 98 bp, Homo sapiens
gaggacagaagaactcagatgccaagtgtgtggctgaactgcagaaagagtgaccattgtcagtggccttctcatgctgctactgttcctgtccgagc

SEQ ID NO: 483142 - DNA, 74 bp, Homo sapiens
ccgagaacatctactctttcaactacaccagccagcccgaccagagggaaaccaaagggcagtttctcattgac

SEQ ID NO: 483143 - DNA, 101 bp, Homo sapiens
cggaaagctgcccagccaccagcaaccccccagattagtcagaagaagttgaaaaaatacgagaaagaatatcacaccatgagggaacagcaggcccagca

SEQ ID NO: 483144 - DNA, 100 bp, Homo sapiens
gagcaacttggcgaggttcagactcttggagccagaagctacatgacccctaaacggtagtcaaaccacacactccattaataaggtttcctgacagaag

SEQ ID NO: 483145 - DNA, 100 bp, Homo sapiens
tgcggctctgaaagactcagtgcagagagccagagactggcttcaggatgtagagggcctgcagtgtcttgggacaaggtgcgcattcctggtgtgctgc

SEQ ID NO: 483146 - DNA, 76 bp, Homo sapiens
acccccctacccacgctgaacgagagggacacggagcagcttgtctccttcagatggagcccgtgaactacgaacg

SEQ ID NO: 483147 - DNA, 101 bp, Homo sapiens
ttcaagaacagtaaagttggaacacagcagagggtgtgtaataaaatacagttagcaaaaggtgtgacaagcaacctgcctatgccccaaccaccacagac

SEQ ID NO: 483148 - DNA, 90 bp, Homo sapiens
ggagcgaccccttgttctttggtggcgctgatgctcccataatactctcagatagtgaagaagaagaaatgatcattttggaaccagaca

SEQ ID NO: 483149 - DNA, 98 bp, Homo sapiens
aaaatgtcggcgcccagagggaggtggaagatggagagttggaagaaggtgaattggaagatgatggggcagaggagacccaggatacctccggaggg

SEQ ID NO: 483150 - DNA, 50 bp, Homo sapiens
ccgagcaggaggcgccatcatgagatgttcgacaagcagcaggcgaacac

SEQ ID NO: 483151 - DNA, 100 bp, Homo sapiens
gggcgcggcagaggcttgcccgatcctcggccatgtcactgctctgcgtgcgcgacacagaatgttcagcttaacaaagaaatgacacttgccagcaacc

SEQ ID NO: 483152 - DNA, 82 bp, Homo sapiens
cgagtttccgatttaaagctgagctgcgaggaaaatggcggcgggagtttaatggatcgagaagtggcgttgcttgctgaaa

SEQ ID NO: 483153 - DNA, 100 bp, Homo sapiens
cggatcctgctggtgggagaacagggcagctgtgtacaggatgaatcggaaccacagaggcctctgtgtcattgtcaacaaccacagctttacctccctg

SEQ ID NO: 483154 - DNA, 100 bp, Homo sapiens
atcgacttcctcacccgcgcctgcgacctcgctctaagcgaaagacatgaggcctcagcctgaaatgaggttgttttgaggtcatctgatttctgactag

SEQ ID NO: 483155 - DNA, 95 bp, Homo sapiens
gcccaacagaatttatatagagatgtgatgttggagaactacagaaacctcgtctccctgggctctgtgtgctccgggatggagcaggtgtgcag

SEQ ID NO: 483156 - DNA, 83 bp, Homo sapiens
caaccattgacgccatgtcgggttattcgagtgaccgagaccgcggccgggaccgaggagcatgggcatgtgtttcatcggga

SEQ ID NO: 483157 - DNA, 100 bp, Homo sapiens
cttactcggagcgtagaatcatggggcctgcaggacaagctgaacaagagggacaaagaggtgacagccttgacctcccagaccgagatgctcagggccc

SEQ ID NO: 483158 - DNA, 96 bp, Homo sapiens
cgggaatgaagcgggcgctgggcaggtaatcttcagcaagtactgcaactccagcgacatcatggacctgttctgcatcgccaccggcctgcctcg

SEQ ID NO: 483159 - DNA, 50 bp, Homo sapiens
aaaaatcccaaggtctgcaaaggcacgtctgagaatggtggatgtggtgg

SEQ ID NO: 483160 - DNA, 78 bp, Homo sapiens
cgacgacatggcctccgctatgaaggcggtgaatgaaaactttgccattgatttgatagcagagcagcccgtgagcga

SEQ ID NO: 483161 - DNA, 90 bp, Homo sapiens
agaagaagaatgtgcccatcgaggaagcccccttcctaaaaaggacagtcattttgtttactcattcagccctgttgcaggtcccaataa

SEQ ID NO: 483162 - DNA, 100 bp, Homo sapiens
agtctgggactccgagcattctgacttgaccgaagctgttgttcggaatctagcaacacatctttatcttcctggggtggacccccaaaagtacaagggc

SEQ ID NO: 483163 - DNA, 75 bp, Homo sapiens
gcgagaccagtggttccattctctgcaatggaagaatttcgctaaggagtttgtgatcagtgatcggaaggagct

SEQ ID NO: 483164 - DNA, 98 bp, Homo sapiens
tgggctccggagcctcagcgccgcgcagctcttgaatgtcgtctctcaactagccaaacggaatctgcgactgctggtcctaggccggaagcacatgc

SEQ ID NO: 483165 - DNA, 120 bp, Homo sapiens
ccaacgggaagggccggcccgcctccctggccggggcgcagttcggaggttcagacaatgcagatcttcgtgaagactctgactggtaagaccatcaccctcgaggttgagcccagtgac

SEQ ID NO: 483166 - DNA, 100 bp, Homo sapiens
cgggcggcgaccggggcctgggtccacgccgagggcaggacgaacttcaccagaactccatccggcacaacctgtcactgcatagtcgattcatgcgggt

SEQ ID NO: 483167 - DNA, 100 bp, Homo sapiens
gagctctcactgtggtggacgttcggccaagggaccaaggtggaaatcaaacgagaagtgtgcccagtactggccatctgatggactggtgtcctatgga

SEQ ID NO: 483168 - DNA, 100 bp, Homo sapiens
gttggaagcagccgatccagcctgcggagcctgtggggcaggtatgacctggacgcgtgtgacattcaagaaaaatacccggatttatttcaagtgaacc

SEQ ID NO: 483169 - DNA, 96 bp, Homo sapiens
ccgaatcttccttcaggatatcaaggtgtgcctgcacaggagacagcaccagccaagctgattgtgtatctacagcgtttccggcctcaagactat

SEQ ID NO: 483170 - DNA, 82 bp, Homo sapiens
ctcatgtcccatggtgtgccagtgaacaaacagatgtaatggtgggaaagcaacagccaatggacaaaaaacaccctggaat

SEQ ID NO: 483171 - DNA, 75 bp, Homo sapiens
ggccactccagtgccaacagccaattctacaggatgaagcctgctgggagcgtgaatgacatggccctggatgcc

SEQ ID NO: 483172 - DNA, 101 bp, Homo sapiens
caggtgcttccctgcagatcctgcgcccccaaccaggtcaaagtggcagatgttttcagatcagttcctacaagaggagccacattttgttaagtggcctt

SEQ ID NO: 483173 - DNA, 100 bp, Homo sapiens
gtcgctgctgcacccaaactttgcaaggaattcggtccagaggattacggcgaagaggacttcctcgttctgcccatcttcctaacaaggctatggctga

SEQ ID NO: 483174 - DNA, 75 bp, Homo sapiens
aactccaatgggcctttccagcccgtggtccttctccatattcgagatcttatgccttcattcatccggcatggt

SEQ ID NO: 483175 - DNA, 82 bp, Homo sapiens
acagagatttattcgtaatgcgactcaaagctgcacggcagtctgtttatgaggtgacttgatggagggtgagctctattct

SEQ ID NO: 483176 - DNA, 97 bp, Homo sapiens
cgggtaggcaggactatgtctcaccatgcagcagctctcaagaattcaaagaagctttttcactatttgacaaagatggtgatggaactataacaac

SEQ ID NO: 483177 - DNA, 75 bp, Homo sapiens
atcaataataatactgctatatgtgtagaaggaaaattgatgaacacaaggtgctactcacaggaacaccattgc

SEQ ID NO: 483178 - DNA, 127 bp, Homo sapiens
ggcggggggcgggaggcttgccaccttcagcccccccgcgaacgcccaaggtatggttccagaacaggcgtgccaagtctcggcgtcagagtgggaaatccttccaacctttggctaggccggagat

SEQ ID NO: 483179 - DNA, 75 bp, Homo sapiens
gaggagcgagcgcgcctggcgggcgaggaggaggcgctgcgtcagtaccagcagaaaagtccaacctgatcgtgg

SEQ ID NO: 483180 - DNA, 116 bp, Homo sapiens
gtaccgggtggcccgccacttcaccaaggccaagttgaccatccctatcctctatgtcaagtgtctccagaacgctatagctatggcacctccagctcttcaaagaggacagaggg

SEQ ID NO: 483181 - DNA, 82 bp, Homo sapiens
tgaggccgactactacgccaaggaggtcacccgcgtgctaatggtggaaacccacaacggaacttgctactaccagcaccat

SEQ ID NO: 483182 - DNA, 100 bp, Homo sapiens
gcgtcaaggccctcttcgccatctcctggcaaacttgaagataaatcttttgactccagctctttagaggatctaaagtgaccttgatggacagtggaag

SEQ ID NO: 483183 - DNA, 75 bp, Homo sapiens
gtcccatcgcaaacccaaagatccccgttcctggagattctgattgagcatgtttggatgtaaccaagcagaaag

SEQ ID NO: 483184 - DNA, 89 bp, Homo sapiens
atcgcaactgggcccgcgcgcagtattcacaggcctccactgggctctcagtaggtgggatttgtcagcagttctcattgcctgagaac

SEQ ID NO: 483185 - DNA, 75 bp, Homo sapiens
caattttctgtacaccaatggaaagtgcgtcatcctaaggaacatcgacgtgtgccacggaccacaatgtggaca

SEQ ID NO: 483186 - DNA, 50 bp, Homo sapiens
ccggcctgggagaagcagcagcgcaagagaatgccacgggtgacctggcc

SEQ ID NO: 483187 - DNA, 88 bp, Homo sapiens
aacttttcgttcagtgggacttgcttcacggacagtcattttgtttactcattcagccctgttgcaggtcccaataaactcttcataa

SEQ ID NO: 483188 - DNA, 88 bp, Homo sapiens
gggcagaggcggcggccgcagcggcgcagctgatagcaggaacagcatgactatatgaaggaagaggaaggttttcctgaagatgagg

SEQ ID NO: 483189 - DNA, 74 bp, Homo sapiens
gagacccaagatctgtgggaacagagcaaagagttcctgagaatttacatagtacatgacgaagttaaggataa

SEQ ID NO: 483190 - DNA, 80 bp, Homo sapiens
ccagccgcaccatgccgctcctaagcctgcacagccgcggcggcagcagcagtgagaggacacctgctccacttcacctt

SEQ ID NO: 483191 - DNA, 100 bp, Homo sapiens
gtgttttggagcctcgccccccggggaagcggtggatgtatgaagtgtaacagaacagactttaccacctgaaactgctgcttcaagttcagatcaggca

SEQ ID NO: 483192 - DNA, 75 bp, Homo sapiens
gttggaagcagccgatccagcctgcggagcctgtggggcagatccctccctggtgccacagcagctgagtgcgca

SEQ ID NO: 483193 - DNA, 100 bp, Homo sapiens
caaaagatctctggaagcgattaatgataaaatttcatggagaagaaggccttgactacggaggggttgccaggtaacggaaggccattggaaatggggc

SEQ ID NO: 483194 - DNA, 75 bp, Homo sapiens
taggactctatgacacggccggacagctggccagctcagcgtccctggaagggaagggacaactgaagttcacct

SEQ ID NO: 483195 - DNA, 74 bp, Homo sapiens
gaagaagggaaggcgcgagtgaggaaaggaggtactgtagttctttaaggaaaaacagtagtgctctgcatagt

SEQ ID NO: 483196 - DNA, 83 bp, Homo sapiens
gtccagagctgaggactgcctgtttgcaggcccagggccccggccagtgcccagccccgctgggagacccggccagcaccacg

SEQ ID NO: 483197 - DNA, 82 bp, Homo sapiens
gctcatccgcgccgggagcccttggctgcgtcgcccggcagccgcgacaatgcagatcttcgtgaagactctgactggtaag

SEQ ID NO: 483198 - DNA, 73 bp, Homo sapiens
ggtcagccaccagagttctgtgatccctgatcgggagcgatatctggtttatgccatactctggtccctgtct

SEQ ID NO: 483199 - DNA, 100 bp, Homo sapiens
caaccttcgatctcctgacgactttgatgaccatgacccagctgtgatccatgagaacgcatctcagcccgaggtgctggtccccatccggctggacatg

SEQ ID NO: 483200 - DNA, 98 bp, Homo sapiens
caatgaccaacatttgccccccggaggaaagaactggaaccagcagagaaccccgcaggtcatcggggtcatgcagagtcaaaacagcagcgcgggca

SEQ ID NO: 483201 - DNA, 90 bp, Homo sapiens
cctccagagaagtagaatctgtagaccttccacactgccacctgattaaaggaattggcatttgacattatcacagactgacatggcagc

SEQ ID NO: 483202 - DNA, 105 bp, Homo sapiens
gtccagcggtcacctacccccagcaccacctccagcccctgcgcctcggttacctgtgcatgacagatgagtggttctctgagtatgtctacgaagtggtggtgg

SEQ ID NO: 483203 - DNA, 100 bp, Homo sapiens
ccgccaaacagcccagctcgcgcttcagcgtcccggcgccgtcgcgccactcctccgagtgatgatgaacagtctacacagatggctgcaagttgggaag

SEQ ID NO: 483204 - DNA, 83 bp, Homo sapiens
cgggagtcggggatagtgtcatcggttcggtaaagtttctgttctctggtagcagtagctgatgtgcagtttggccccatgag

SEQ ID NO: 483205 - DNA, 75 bp, Homo sapiens
acttctcctgtaggaagtttcctcgcatttctcaggcttgttagcagtggcacaagatcttacagaggatgaaga

SEQ ID NO: 483206 - DNA, 80 bp, Homo sapiens
atcacttgggttcattctattcaggggtaaaagcatgtctacgaagaaaagtatgtgaacaggaagaaaagtatgaaatt

SEQ ID NO: 483207 - DNA, 88 bp, Homo sapiens
tggagcactcggtcatgtacccggtggactcggtgaagagtatgcagagaacatcggggacggccggagcccggagttccgggagaac

SEQ ID NO: 483208 - DNA, 82 bp, Homo sapiens
caaaactgtcccgggtgggaagaggaacagcctatgtgggcttccacggagatgcaccagcaaggaatactgaagaccgatg

SEQ ID NO: 483209 - DNA, 50 bp, Homo sapiens
ccggagtccgccccgtgaggagaatggttcttaaagatgtgggattgaaa

SEQ ID NO: 483210 - DNA, 83 bp, Homo sapiens
cgccggcctccggggagaaacgttacacaacagccaatgcggagtctgacaatgagcgggactctgacaaagaaagtgaggac

SEQ ID NO: 483211 - DNA, 100 bp, Homo sapiens
tgatggcctttttaggagttcaggcttgggaacaatgggccgaggcattgtcatttcttttgcaagggccaggattcctgtgattgctgtagactcggac

SEQ ID NO: 483212 - DNA, 87 bp, Homo sapiens
ccggggccgcggcggcgcgggtgctccgggccgaggccgcggtcagtttaggggctggtgcaaaggatgagttgcacattgttgaag

SEQ ID NO: 483213 - DNA, 97 bp, Homo sapiens
caaaggcacattcagaacgtaaccaggatagctggagccaggattcaaggagagagaacaggacgcaggccttgatgccctttcctctatcataagt

SEQ ID NO: 483214 - DNA, 74 bp, Homo sapiens
ctttgtggttgatgttcggcgctgtgaggagctggagaagaccttcatgagtgagatcattggccgagacctga

SEQ ID NO: 483215 - DNA, 82 bp, Homo sapiens
ggcgttcacacaaactggtcagcgtttccctggagaggaagaggcaagttcacggaggagaaatttggccaggctgagaaga

SEQ ID NO: 483216 - DNA, 102 bp, Homo sapiens
ccaagagcacattgcctggtaagatgggacagagcagaatgggctgatatagatccggtgccgcagaatgatggccccaatcccgtggtccagatcatttat

SEQ ID NO: 483217 - DNA, 100 bp, Homo sapiens
ctgaaggtagcgaccgtcgccggcagcgccgcgaaggcggtgctcgggccagcccttctctgccgtccctgggaggggactcagaagaagatccttgaca

SEQ ID NO: 483218 - DNA, 75 bp, Homo sapiens
tccgtgtctccctctgcctggcggcagtcacggccaagtgtcctctcgcatggcagagcaagtgggaaggcccag

SEQ ID NO: 483219 - DNA, 101 bp, Homo sapiens
cagtattttgacatcagttatattccatctactgtctttttcttcaatgggcagcatatgaaagtggattatgggaactgatgaggagtttcaacagagac

SEQ ID NO: 483220 - DNA, 75 bp, Homo sapiens
cggaagatcgtcgccacctggatgctggagggtgcggggggcaatggcactgcagctctgggccctgaccctgct

SEQ ID NO: 483221 - DNA, 100 bp, Homo sapiens
tgaaccgagagtcaccaacagataagaagcagaaagttgagcgcattgcatcacatgattttgaccccacagaaactgattattgatgagaagaagtatt

SEQ ID NO: 483222 - DNA, 98 bp, Homo sapiens
ccgccgaagaagcatcgttaaagtctctcttcaccctgccgtcatgtctaagtcagaggagcttcatgaacaactgggaggtgtacaagcttctagct

SEQ ID NO: 483223 - DNA, 98 bp, Homo sapiens
agacctagaactacccagagcaagaccacagctggtgaacagtccagattccaactccacagagtgaccagagagaggacgtggctgaagacaccaaa

SEQ ID NO: 483224 - DNA, 90 bp, Homo sapiens
cctgaacggagtgtgcgacggattgggagagaaacagcacccaggactatcttccaaagagttctggatatcctaaagaaatcttctcat

SEQ ID NO: 483225 - DNA, 98 bp, Homo sapiens
tcgaggaggtcatgaaggacctgagcctgacgcgggccgcgcggcaatgtctcaggctgtgcagacaaacggaactcaaccattaagcaaaacatggg

SEQ ID NO: 483226 - DNA, 75 bp, Homo sapiens
gggagacgagaagcctgaaaagtcgcagcgagctggagccgccggaggtatcagaatggcaaagcaacttaacct

SEQ ID NO: 483227 - DNA, 75 bp, Homo sapiens
gaggcaccgaggcactcagaggagcggagcgtgctttggacaccatgaattttgatgttataaagggcaagccag

SEQ ID NO: 483228 - DNA, 100 bp, Homo sapiens
cggcgctccaccggcgtggtcaacatccctgccgcagagctaaaacccaatctcggatatactactaataggcgcggcgctcggactataaaacacaaca

SEQ ID NO: 483229 - DNA, 82 bp, Homo sapiens
gatcaagatctcattctagaaagaagcgatacaggttgctgctgactcagccattctagaagttcttcagtccaacattcag

SEQ ID NO: 483230 - DNA, 90 bp, Homo sapiens
aagtaggattcaagaactggaggaaaaggtcgcctctttgctgcaccaggtgtcctggagacagagaatctggacgaggctagagaacag

SEQ ID NO: 483231 - DNA, 98 bp, Homo sapiens
gacagaggcaccaaggacctccaagacagatgatcaagcggtgctgattcacgagagtggaagcctccagagcttggggctttctggctgctcttcat

SEQ ID NO: 483232 - DNA, 95 bp, Homo sapiens
gtggaaacgcttgtagggtttcaccagcactgcctcctaaaccaccaaaacctactactgtagccaacaacggtatgaataacaatatgtcctta

SEQ ID NO: 483233 - DNA, 75 bp, Homo sapiens
tccagctctgccctcgtgtcttccttgatgcagtgaaagcttgcacagatgagagccttgctgttgaggaaagaa

SEQ ID NO: 483234 - DNA, 88 bp, Homo sapiens
tattaacaaaagatatacaagaaggagatacattaaatgcaatagcccttcagtactgttgtacggacctcagcagccatgtcgaagc

SEQ ID NO: 483235 - DNA, 75 bp, Homo sapiens
gtgctgctgagctgcccaggcttcacggagcgtatttgtgtggaagtaatcgaaaagacaacatatttattgatc

SEQ ID NO: 483236 - DNA, 75 bp, Homo sapiens
gcctctcagccggccgggatggctaccacggccgagctcttcgaggctggacgtaaagaaagaagtgatgcactc

SEQ ID NO: 483237 - DNA, 98 bp, Homo sapiens
gaccaacaagttcatgaccgacccaatccgcatcttggtgaaacggtctctaattaacagaagatggcaaagcccagccacagcagctatgtccttca

SEQ ID NO: 483238 - DNA, 100 bp, Homo sapiens
ctcccgctgctgctgccgctgccgccctgagtcactgcctgcgcagctccggccgcctggctccccatactagtcgccgaactcccccactggaaaggat

SEQ ID NO: 483239 - DNA, 75 bp, Homo sapiens
agtgttggaaaatctactaaaactttcaccattaatccagagagaccaaatgagagggttgacactgtatcagaa

SEQ ID NO: 483240 - DNA, 90 bp, Homo sapiens
atatgctacagatagatgttaaggacatctgcaaatctttcaccaatactgacatcaatttgccctatcttacaatggattcttctggac

SEQ ID NO: 483241 - DNA, 90 bp, Homo sapiens
ctgaatggcatccgtcctaccggaaacctaggaaaaggttcaagccaaatgttaccagcttctcctctcagtcttccagcattccaatcg

SEQ ID NO: 483242 - DNA, 97 bp, Homo sapiens
aaatgttctgagtatttgctctgatgatgaactaatgactgaaggtgaagaccagtttgatgggtgacccagagaagacagctaaagtggaatgtgg

SEQ ID NO: 483243 - DNA, 100 bp, Homo sapiens
tgcggagactcaccccttcagcgtcgctgcccccagctcagctcttactgcgggccgctccgacggcggtccatcctggcagccacctggacagccaccg

SEQ ID NO: 483244 - DNA, 100 bp, Homo sapiens
ttcagatgtagccatggttaaagaagattgacattaagcagtgtggcaaaggagcagagaactttgacaagttcttcacacgaggacagcccgtcttaac

SEQ ID NO: 483245 - DNA, 75 bp, Homo sapiens
gaaggagcagatttacaaactggccaagaagggccttactccttcacagatcgattccatactcagccacttcca

SEQ ID NO: 483246 - DNA, 80 bp, Homo sapiens
tctcagtattatcctaagcttagagtggacatcagaattcctagaggacctgtgcaacaacctcttgaggatcgaatctt

SEQ ID NO: 483247 - DNA, 100 bp, Homo sapiens
gcagccccggcgccggcggcgggaccgcggaccggaggtgtgattgcctatatcagttcttccagctcagcctcaagccctgcctcttgtcacagtgagg

SEQ ID NO: 483248 - DNA, 75 bp, Homo sapiens
cagagactgaaaaacctgaggctgatgacccaaagatcctgggtttgagcagtttaaaatgtcagaaagattgca

SEQ ID NO: 483249 - DNA, 82 bp, Homo sapiens
gacaccatggtggacacttttcttcagaagctggtcgccgccggcagggaaaaagacctcgatgaagttctgcagacccact

SEQ ID NO: 483250 - DNA, 75 bp, Homo sapiens
ctccgattcgtgaccctcagcgccggtgcatgtcgatctccaaaaggaattcttcatttgtctcctgatgtttat

SEQ ID NO: 483251 - DNA, 100 bp, Homo sapiens
tgaccagagagacaggatcatgcggcaagagaattttctctacatgtgcacccatttaaaggactcggcttcaagggaagcagcttccaccgcattatcc

SEQ ID NO: 483252 - DNA, 75 bp, Homo sapiens
ccaggttcaagaataagccagtgcctgaccagattataaaacattcactactttcactgcctaagaatcctggac

SEQ ID NO: 483253 - DNA, 100 bp, Homo sapiens
ctaagaggaagcatgtggcagaagccatctgcaaggagcaacacctcttcctgcctttctcctacaagaatgggggacaagttgtccacatgacttcctt

SEQ ID NO: 483254 - DNA, 75 bp, Homo sapiens
gcccctgctgctgagaaacacatcagcccggtggtgcctgcgaggctcaagcgggcctctgcccccaccttcgat

SEQ ID NO: 483255 - DNA, 80 bp, Homo sapiens
ggcggcggcgcctcaggcacctcggcccgggttaaacccatccagagtaatggctgcggccttacccaggaccctggggg

SEQ ID NO: 483256 - DNA, 122 bp, Homo sapiens
aattaagcagatgctccagtttgagaaacctggatctgcgatctgtttgtggtaaaataccatgaagattttgaaaaaacaaaggggagaggctttactcccgtcgtggacgatcctgtgac

SEQ ID NO: 483257 - DNA, 75 bp, Homo sapiens
gggcgctcgagacttaccagagccacaagtacctggagtagaacagaaaaattattatgtctgtgttcccttggg

SEQ ID NO: 483258 - DNA, 75 bp, Homo sapiens
cgaagccaaactggaagtccgcgagtttgtggattatctgaaggtgaaaggtgtagcagtcactcggcctacacc

SEQ ID NO: 483259 - DNA, 100 bp, Homo sapiens
cgccctggccctctcgctgttgctggtctctggctccctcctcccagggccaggcgccgctcagaacggtccagcaagactatgaatctctgttccaaat

SEQ ID NO: 483260 - DNA, 90 bp, Homo sapiens
taagatttcaggagctgatattaactccatctgtcaggaggccaggagtggtggctcacacctgtaatcccagctctgggaggccaaggc

SEQ ID NO: 483261 - DNA, 100 bp, Homo sapiens
ggacggggcggcaggcgccttcgcggaccgagcctgacggagccggaggctgggagccgcggcggcctggggtaagaatgattgatgttggctgatattg

SEQ ID NO: 483262 - DNA, 82 bp, Homo sapiens
actgatctgaacggggcgcacttcgacccggaagtttacctagacaagggaccccagggcggggcagttcccctgcctctcc

SEQ ID NO: 483263 - DNA, 82 bp, Homo sapiens
ccgcgtcccgctcgctgggagagaggtacctctccttttccctctccctttccctaagttgggccggtgcacaaacagcgtg

SEQ ID NO: 483264 - DNA, 75 bp, Homo sapiens
aaacagcagtagtactccagaggagtgtgaggctgttttggagtcagcggaagatcaccaaggccagggagtggt

SEQ ID NO: 483265 - DNA, 101 bp, Homo sapiens
gttcgaggccctgcggagctgcttcgccgctgcgtacatcgacgccatcagcaacaagcagggcgagctggagaattacgtgtccgacggctacaagaccg

SEQ ID NO: 483266 - DNA, 97 bp, Homo sapiens
gaatacaaccatgatctcttccaaagaatgccacagaatcaggggaggcatgcttcagtcttattgttacaggtatcgctgtgctgctcggagccag

SEQ ID NO: 483267 - DNA, 90 bp, Homo sapiens
cggagctttggaacgaggagtggcgcccattaagcgtcaatctgctggaggttctgagtgacatagacgagatgtcccggcggagacccg

SEQ ID NO: 483268 - DNA, 100 bp, Homo sapiens
gatttgagactaagtttattcctccaaagcaaaccaactgagaatgcagttctctttgccatgaaggaggataatgagaaggtgcctactttgctaacgg

SEQ ID NO: 483269 - DNA, 100 bp, Homo sapiens
gaaagagctcaaggcctcccaccccattccggaggacaaaggaaagtgtgctaataagaggttggaaagaaccatgactgtattcaggaaggcacatgaa

SEQ ID NO: 483270 - DNA, 98 bp, Homo sapiens
ggagtgagaagcaagaaggccctggacacagcaatatctctgggctttcacagaggtggagcacagtgaaagaattcaagatgccacctaatataaac

SEQ ID NO: 483271 - DNA, 100 bp, Homo sapiens
ccagcacctttcggcttctgagacggcggcagcagcggcattcagacggaatcagtccccaatgcctggaaattcctcattggattactgtgttttaaac

SEQ ID NO: 483272 - DNA, 100 bp, Homo sapiens
tgcaccgctgtcccatctaaagaaacctgtcaggaatacgagcttctggtacaatgcttgcacactgcacggtggaaaaggccaggagcagcgagagttt

SEQ ID NO: 483273 - DNA, 100 bp, Homo sapiens
gtctaagtccaaagatttttacccaggccttataatgggactaattttacgatatgctacagcaccaactgatattgaaagtggaactgtctatgactgt

SEQ ID NO: 483274 - DNA, 82 bp, Homo sapiens
actaacgagattcaagattatttgcaacagctcacgggagcaagaacgggagttctgggaaatcgttcattcatttacagat

SEQ ID NO: 483275 - DNA, 100 bp, Homo sapiens
ccttccccttggccatcaagatgatgtggaacatctcggcaaaatttggtttctctaatattactggaattgattactctccttctgcaattcagctttc

SEQ ID NO: 483276 - DNA, 83 bp, Homo sapiens
gccggcggcagagaggatatcttgggcgggggatgtgagcgctgagcccttggcaggcttctggagttacagtgaatgatgaa

SEQ ID NO: 483277 - DNA, 100 bp, Homo sapiens
taacattcagatatcctggattgatgacacatcagcatttgtttcccttagccagcccgagcaagtaaagattgcgggagatacagatgacccaccaaga

SEQ ID NO: 483278 - DNA, 101 bp, Homo sapiens
cttagctccatcaaatctcaaacaatttatgagattattgataattctcaaggattctacgtcttgccttgcgccatggactggcagccagacgagcaggg

SEQ ID NO: 483279 - DNA, 83 bp, Homo sapiens
ttcgacatgggcggagttctcattccttctccagggagagtcgctgcagagtcatcttagtgggatttggggaagcaacaggg

SEQ ID NO: 483280 - DNA, 75 bp, Homo sapiens
actgggggattcgcagggaggatgtcgggacaccccggaagctgggaaatggaatcagtgatgctcctgttacag

SEQ ID NO: 483281 - DNA, 82 bp, Homo sapiens
ccgggagcggcggcagcggcggcgcggaggcggctgaggtgcgagccggaagccatcttcgacaagagcacagggaaggttg

SEQ ID NO: 483282 - DNA, 82 bp, Homo sapiens
gccgcgcaggagcctcccggagctgggggcagtacccaaaggaaacgctacgaaagaatacatggagagcttgcagctgaag

SEQ ID NO: 483283 - DNA, 83 bp, Homo sapiens
tgcgcagccgccgggaccctggcccctgtcgagacggccgaagccctgcagcccacgctacagccggagatgcagctcgagca

SEQ ID NO: 483284 - DNA, 96 bp, Homo sapiens
gacggtcaccgtggagtttttcctggtgggacaagacaacgggccggtggaggtgtccacattgcagtagagacggggtttcaccatgttagccag

SEQ ID NO: 483285 - DNA, 75 bp, Homo sapiens
atggtgcctggctgccaggcagattgctcgctgtaagcagctcatctgtgaccccagctacgtaaaagatcgggt

SEQ ID NO: 483286 - DNA, 100 bp, Homo sapiens
aaaagggacattatgcttatgattgtcatcgttacagccggcgaagaagaagcaggtcagaatggcggcagcggagcatcgtcattcttcaggattgccc

SEQ ID NO: 483287 - DNA, 75 bp, Homo sapiens
ccctggtggagtttgctattggcctctggctgtacctggcagggagcagcctgccctgtctcacgctgattggct

SEQ ID NO: 483288 - DNA, 98 bp, Homo sapiens
gcagcaaagattacaccaagatctgtgctgaccacaggaattggatctactagtgcagctctctatcaatatcagctcacatcattgaaaagataatt

SEQ ID NO: 483289 - DNA, 80 bp, Homo sapiens
ctggagtccctgatggaattatgcagtttattaagtactgccaaatctgtcgaaagggagataatgaagaactgcttctt

SEQ ID NO: 483290 - DNA, 90 bp, Homo sapiens
atgaacgtgtaaagaatggccttaatttcatgtatgaagccccaccaggagctaaaaaagtcctgagcctcctatttttctgcatctact

SEQ ID NO: 483291 - DNA, 80 bp, Homo sapiens
cggacagcggctgcagcgggggcgccggctgggaggcttgggcactgtttaaaggaaagttccgagaaggcatcgacaag

SEQ ID NO: 483292 - DNA, 100 bp, Homo sapiens
gtattgaaactctaggaggtgtctttaccaaacttattaataggaataccactattccaaccaagaagagccagagctcaaatgatacttttcccacagc

SEQ ID NO: 483293 - DNA, 100 bp, Homo sapiens
caatgccgactgcctacaacactgttgctctaggtcgtaaccagcctttgaaaaaggagaaaccaaaatggaaaagcgattatcctatgacagatggaca

SEQ ID NO: 483294 - DNA, 75 bp, Homo sapiens
tgtaatctcattccatcttcattcatgactccagacagctgctggttgcgcagccacctcgggatactgcacacg

SEQ ID NO: 483295 - DNA, 124 bp, Homo sapiens
cataatcacagctatgcatctattcaaagtgatgatctgtgggatagttttaatgagtatgactatgaatatgatgaaaatggtgacagagtcgttttaggaaaaggcacttatgggatagtct

SEQ ID NO: 483296 - DNA, 111 bp, Homo sapiens
tgggattaatgctaaatttgtgaatgctgtgtatgataccttacttaatactaacattaaccaggtggtatttgttggaaatttcttgagaattaatacgatcgccatgcg

SEQ ID NO: 483297 - DNA, 82 bp, Homo sapiens
tgggagacaggaattgagagtcacagaggaaggacagtggagtctggcatcttattggtgctgactgggttacttttttaaa

SEQ ID NO: 483298 - DNA, 82 bp, Homo sapiens
gtttggagccccggagtggggtgtcggcgcctcattcgggtggagctgagccggagacagccggcagcaaaagtggaccaag

SEQ ID NO: 483299 - DNA, 100 bp, Homo sapiens
tgagtcagacaagcggtggtgaggcaggctcgcctcctccagctgttgttgctgctggttaaggtgagctcatcgattcagcacccagaaacacctctgc

SEQ ID NO: 483300 - DNA, 100 bp, Homo sapiens
gaagctctacgtgtacgacctgtccaaaggcctggcccggcggctcagccccatcatgctggcagtagcagccagatgaagaagcggccaacatctgcag

SEQ ID NO: 483301 - DNA, 51 bp, Homo sapiens
ccaagtctcccaacaacagagacagagcaaatcatggaggaagataaaaaa

SEQ ID NO: 483302 - DNA, 100 bp, Homo sapiens
gcagatggagcctaccaagaagggaaaagaagatctcccggagcagtgccctgaaagtgctggaccatgccatgattggccccgaaggcacagacaactg

SEQ ID NO: 483303 - DNA, 90 bp, Homo sapiens
gacctcacaaccgagcaaattgaagagacgttaaaatacttcctgattcgcctttgccagtctcatctcgtgtctgctttgttaagttcc

SEQ ID NO: 483304 - DNA, 100 bp, Homo sapiens
agctgcaattggaagcagcaaatgagacgtatgcatgtaaagttgaagatctgggcaaagtggattttgaagatgaaattaagaaaagatttaaaatggt

SEQ ID NO: 483305 - DNA, 100 bp, Homo sapiens
tgaatggattcaagacttcaaaacccattttcttggagtctccccaggacagtgctatcacccgggatattaaccgaacattcccagcccatgactactt

SEQ ID NO: 483306 - DNA, 101 bp, Homo sapiens
aaattctgaatatagggacaccacactgctgcacaggttctggaacctctggcggtctcagattgagcagaaaaaggaaagagagctgctccccttactgc

SEQ ID NO: 483307 - DNA, 83 bp, Homo sapiens
atttagaattgttttcagaatctttgacaatatgaaattgccagaacaacagacagagtgtaattgcttactcggtcatcgtg

SEQ ID NO: 483308 - DNA, 100 bp, Homo sapiens
tatgaccaggcctctccggacaagaggactgaagcagatggcaactctgatcccaactctgcacctgcggtatgcagctatatacaaggctgatggagag

SEQ ID NO: 483309 - DNA, 74 bp, Homo sapiens
cagctaccagcagtgcataaacgaggcgcagcgggtgaaggttatccggtgttggctcctgctgcttactatga

SEQ ID NO: 483310 - DNA, 82 bp, Homo sapiens
ccaaacttgcagctgttcagaccgcgctccgccgagctagttgctacattgcctgatgatgttcagcctgggcctgattttt

SEQ ID NO: 483311 - DNA, 98 bp, Homo sapiens
aagcaggtcatgatgttcagtgctaccttgagcaaagagatccgtccagtctgccgcaagttcatgcaagatgtggtgaaggtgggtctggttgaaga

SEQ ID NO: 483312 - DNA, 74 bp, Homo sapiens
tccgctattcagcagagagctattattccctgtattaaaggaagcaattttggaggtggtggaagctacaatga

SEQ ID NO: 483313 - DNA, 76 bp, Homo sapiens
cacgcacctggacgacgcccggcgccagcacatcgcagaaatgctgctcatggattctcccttattcaggtggaca

SEQ ID NO: 483314 - DNA, 97 bp, Homo sapiens
tccacctcgacctctggttctacttcacactgcagaactgggttctggactttgggcgtcccattgccatgatgcacccactgggcctatgtaataa

SEQ ID NO: 483315 - DNA, 107 bp, Homo sapiens
cggtggtggcgggtggaggttcgagcgctgttctcgctccggagccgctgcacatttcgacaatgcagatcttcgtgaagactctgactggtaagaccatcaccctc

SEQ ID NO: 483316 - DNA, 75 bp, Homo sapiens
cggcggagacactggcagggccagaaacgcgcgcagcgggggcgggaggcaggagcgggccaggagctgctgggc

SEQ ID NO: 483317 - DNA, 90 bp, Homo sapiens
cggtgtccccggctgaggcagcgcggccgcagcagccctcccttagagatttgtttgattccatggataaaacttcttccagtattccac

SEQ ID NO: 483318 - DNA, 90 bp, Homo sapiens
aggccgtccagcagatggcggatgccctgcagtacctgcagaaggtctctggagacatcttcagcaggactatggcaaggagtctcaggc

SEQ ID NO: 483319 - DNA, 100 bp, Homo sapiens
aaccagctgctgacaaaaggcatggtgatccttcgggacaagattcgcttctatgaggcaggggaaatgctgtctgtagctgagcacttcctggagcagc

SEQ ID NO: 483320 - DNA, 50 bp, Homo sapiens
acgtgaggccgtggatgcaggcattaagtgccagaacagataaagcccag

SEQ ID NO: 483321 - DNA, 100 bp, Homo sapiens
agccgctggcggcagtcacttgtacagcgccggtcaacatcgcggtcatcaagtactagacccctggcacaagatccctgccctggacccagagaagctc

SEQ ID NO: 483322 - DNA, 100 bp, Homo sapiens
ctcaagatggcggccaatgtgggatcgatgtttcaatattggaagcgctttgatttacagcagctgcagggcgccctgcgtccggcagaggaggcgagca

SEQ ID NO: 483323 - DNA, 73 bp, Homo sapiens
cgacttcgatgatcgtgtgtcggatgaggagaagggtgtgtccgcagccggccaggtggtatccctgaaggtg

SEQ ID NO: 483324 - DNA, 75 bp, Homo sapiens
cagatatagccgttggtacaaagacctcctgccccccgaggtctgcagtctcctgaacccagcagccatctacgc

SEQ ID NO: 483325 - DNA, 101 bp, Homo sapiens
aagataaagtgattttttgcctttgttgattaactggacaaattcaggtactaggttttgacaagcttgcatcatgcgtgagtataagctagtcgttcttg

SEQ ID NO: 483326 - DNA, 75 bp, Homo sapiens
aagatgcctttgggaagcatgtcaccaacccggccttcaccaaactccctgttcagattcagaacaagaaagtgg

SEQ ID NO: 483327 - DNA, 82 bp, Homo sapiens
tctactttctgtctctatgaatgtgactaccctggttacctcatatccagagactgctgctactttgaaacgtacgatagag

SEQ ID NO: 483328 - DNA, 100 bp, Homo sapiens
atgtgcttggtggagcagctgcctgggagaatgttgactctactgcagtgatcagggccaaagcggtcagtgagaaggaagtggactctggaaacgacat

SEQ ID NO: 483329 - DNA, 90 bp, Homo sapiens
gttttcatggatgcccctgtttctggtgaaaatgtttcgatgaaagatcctccggacttattggacaggcagaaatgcctgaacgccttg

SEQ ID NO: 483330 - DNA, 100 bp, Homo sapiens
ggagagtaaagtcagcatgagcaaaaactccaaactcctctccaccagcgccaagagggagcatcgagtacagctgtccggcctccaacgagtgtgagat

SEQ ID NO: 483331 - DNA, 98 bp, Homo sapiens
tccgggctacctgtttgaagagattgctaattatggcgatgagatcgccattgagctgcggagcagcgtgggtgcacctgtggaggtgactcacaact

SEQ ID NO: 483332 - DNA, 82 bp, Homo sapiens
tttcgcggccccgaggcagcgaggcaagggggagatcactcccgctgcgattcagaagttacagaatgtctgaaggggacag

SEQ ID NO: 483333 - DNA, 100 bp, Homo sapiens
cctctccagccaacgatgaccagtccaggcccagcctctcgaatgggcacacctgtgtagatttggagtccaggaatgagactaagcatttatctgtagg

SEQ ID NO: 483334 - DNA, 83 bp, Homo sapiens
tttcagtgtacgtgggcgtgtttgggaagaagctgcgagctgataggagtgcctccggagccagcgtggtggccatagacaac

SEQ ID NO: 483335 - DNA, 50 bp, Homo sapiens
tccgcttcgaccttcccccacaagatttgcttgctgaaaatggtcgatta

SEQ ID NO: 483336 - DNA, 100 bp, Homo sapiens
caagacgcggcccaaggtgtcccttggcggcgcgagcaggaaggctgctggtggtctacccttggacccagaggttctttgagtcctttggggatctgtc

SEQ ID NO: 483337 - DNA, 100 bp, Homo sapiens
gccgagggacgtgccaagaagcgcaaggttctccagaagctggggaaggcagatgagaccaaggatgagcagtttgagcagtgcgtccagaatttcaaca

SEQ ID NO: 483338 - DNA, 100 bp, Homo sapiens
ttatcactgccttcttgggaattgcttcgtttgccattttcttatggagaactgtccttgttggtttttaatgaccacaacaagcaagcatgcagcttac

SEQ ID NO: 483339 - DNA, 97 bp, Homo sapiens
gatatcaccaaactggaggatgcctatgtattccctggggatggcgcatcacacaccaaaggcatagaatgtcaagctaaccaggcgtccgctactt

SEQ ID NO: 483340 - DNA, 100 bp, Homo sapiens
gctggctgggagacattctggactggcaggatattgtttcctttgttcacgagaacattgagacatttctttcgataatttctgctgctgaaacattgac

SEQ ID NO: 483341 - DNA, 82 bp, Homo sapiens
gagctctcctccttcttcctcaactatctcgctgacacgcagaggtattgtggccagtattttggttttcttatgttttgga

SEQ ID NO: 483342 - DNA, 100 bp, Homo sapiens
gctgtgggacttcgaaggagggctctcctgtctgccaccatcctgggttgacaattctacacaaggaggattcactccttctccagttgcacagccacac

SEQ ID NO: 483343 - DNA, 75 bp, Homo sapiens
aggcacggacaacatcaccgtgaggcagggggacacagccatcctcaggagtcgtaagaaagcagtgggagttga

SEQ ID NO: 483344 - DNA, 100 bp, Homo sapiens
catgtctgatcccttgctcccatccctgcagcatgaacaagaccttacacataggaagctcacacctggctccgccaaatccagacaagcagtttctgat

SEQ ID NO: 483345 - DNA, 71 bp, Homo sapiens
gagtcgcatctgctcaacgacgaggacctgacgcaggacctgggcatggagtcgacctcgctagacgacgt

SEQ ID NO: 483346 - DNA, 100 bp, Homo sapiens
tctcatttaagctactcaagaaagagtgcccaattccaaatgtacagcccatcaccacgggaggggtcacttaccgggagcagccctggcacaaggagtg

SEQ ID NO: 483347 - DNA, 120 bp, Homo sapiens
ctggttagtgtgctctgagggagggtccgagccagccgctgttttgccggaggagcccctcaggccagttgcatgctgagaatttgaaaaatgaagatgatgtagacactggactattag

SEQ ID NO: 483348 - DNA, 90 bp, Homo sapiens
cttcaagatagacattgaccccgaggagacggtaatggaactgctggtccatctgaataaacgtataaaaagccgccccaaaatacaact

SEQ ID NO: 483349 - DNA, 75 bp, Homo sapiens
ccagaggcgagccctggtggaggaagaggctgtgttggaaagcaagtggccgtctggcacaccaggtgggcgtct

SEQ ID NO: 483350 - DNA, 83 bp, Homo sapiens
aaaaaagttatcagccatgggggtactccaaagattcaggtttactcacgtcatccagcagagaatggaaagtcaaatttcct

SEQ ID NO: 483351 - DNA, 75 bp, Homo sapiens
acttaccacctgccgccggttgccggaggccatcgaggaagtgaagaactggacccgcaggccctgcaggacaga

SEQ ID NO: 483352 - DNA, 88 bp, Homo sapiens
caggcccacgtcgcgggggagaccgtggcccggcccctcttcctggagtctgctggagtttgttggagttccactccagaccctgttt

SEQ ID NO: 483353 - DNA, 100 bp, Homo sapiens
atggtgcccatgctgttgttatttgcactgagtgggacatgtttaaggacttctgtaacgataagagttatatttcagaagagacaagagtacttctgtt

SEQ ID NO: 483354 - DNA, 98 bp, Homo sapiens
gcgcgggaagatggcggaacaggctaccaagtccgtgctgtttgtgtgtctgggtgaatgattccaattgtgaccaagaacttctttccctgctcctg

SEQ ID NO: 483355 - DNA, 75 bp, Homo sapiens
gaagcggccgccgcggggtccgcggcgcgcccggcccgggtatgcacctgtgggcatcctgttcctgattgctgg

SEQ ID NO: 483356 - DNA, 98 bp, Homo sapiens
aaaactgtgccttgtggaaatgaacttcacaagttcctcatctgggacactgctggtcaggaacgggtacctgcaaggtgtggagttacagtccgaga

SEQ ID NO: 483357 - DNA, 82 bp, Homo sapiens
ctgccactcccgggagcatgaaggaccgaacccaggagctccgcacgcgtgagtgcatctccatccacgttggccaggctgg

SEQ ID NO: 483358 - DNA, 100 bp, Homo sapiens
tcttgtggaactgaacttagctcgacggggctgaccgctctggcccagggtgagtccggcagcgtcttctcttgagggagcaatttggagaagagctgga

SEQ ID NO: 483359 - DNA, 74 bp, Homo sapiens
gatctggggtaggaaaattacaggcccgacaacaagctcaaatacgtcaccaaatggcagaggacagcaaagca

SEQ ID NO: 483360 - DNA, 145 bp, Homo sapiens
ctctgatggaagtaccatcctggtccaaacatgaaagaattcccaacatcaagattgattgaaacatattcaatgggacccatgagcttcctggctggcctgggccttgctgtgggactggccctgctcctgtactgctatccgc

SEQ ID NO: 483361 - DNA, 50 bp, Homo sapiens
ggagattatgaccttaacatcagtgatgaagtggccattctgcctgcccc

SEQ ID NO: 483362 - DNA, 90 bp, Homo sapiens
tatttctttggcatcactgcagctagtaatttgccttctggattagatgaagcactacccagtcttacccaagttcgaagagaaaacgac

SEQ ID NO: 483363 - DNA, 100 bp, Homo sapiens
ccagctggaccagtggctgcgcgcgtccaccgcgggcatgatcctgcctaagatgcccgacttcaactgtttgtggaatcttgcttcccttttttccaac

SEQ ID NO: 483364 - DNA, 82 bp, Homo sapiens
cgcggcggccccgggaccaaggaggtcaaaatgcagatcttcgtgaaaacccttaccggcaagaccatcacccttgaggtgg

SEQ ID NO: 483365 - DNA, 100 bp, Homo sapiens
gaaaactatgggaagattttggtagagaagaatgaacattgtattgagaacaatatagatttgcagaccattcctcaagaattttgtatccaaggcccaa

SEQ ID NO: 483366 - DNA, 100 bp, Homo sapiens
aggaattagaaggtgacgaggagggagaagacgaggatgatgcggaaattaaccccaaggctcttgcagccaatgccggaacaggatttgctgttgctga

SEQ ID NO: 483367 - DNA, 98 bp, Homo sapiens
ctcattccaagttccaggattaattctggtgctttacaaggccaagtacggtccaatgtggatgtcctacttagggcctcagatgcacgtgaacctgg

SEQ ID NO: 483368 - DNA, 75 bp, Homo sapiens
gttcctcatctgggacactgctggtcaggaacggaaccacgaccatgcctgcatcgcctgtcggatcatctatcg

SEQ ID NO: 483369 - DNA, 75 bp, Homo sapiens
ggataatggaggcctggactctgaggaatcctatccatatgaggcaacaaccatctgcctgtgggacatcagtgc

SEQ ID NO: 483370 - DNA, 98 bp, Homo sapiens
cactgcggatgagaccggtgcgactcatgaaggtgttcgtcacccgcaggatacccgccgaggccgagtcgtccggaaatccattgcccgtgttctca

SEQ ID NO: 483371 - DNA, 80 bp, Homo sapiens
caaagagcccctcatcgagctcttcgtcaaggtcagttcaccgggacctggaggcccagattgcgatcgtgacggagaac

SEQ ID NO: 483372 - DNA, 83 bp, Homo sapiens
acatcctgggatattctttgttgagagattgagaggatccagaatccagatctctggaatagctaccaggcaaagaaaaaaac

SEQ ID NO: 483373 - DNA, 99 bp, Homo sapiens
ggcaaagaagctactacctcaggaaaagaatgttctgtctcagtactggactatgggctctcggaacaccaaaaaatataaagatgaagcgcagctgta

SEQ ID NO: 483374 - DNA, 98 bp, Homo sapiens
agcacagagcctcgcctttgccgatccgccgcccgtccacacccgccgccagggtgctttcttctgcgacctggtactcatctacctcatcaaaaaga

SEQ ID NO: 483375 - DNA, 98 bp, Homo sapiens
taggggaaaaggggcctcgtcggagagtagagatcctgcagctccaccaaagaaaccgcctcgccctggagctcccggtcatctgggaagccttgcca

SEQ ID NO: 483376 - DNA, 100 bp, Homo sapiens
tgtcatcaaacatgattgaacgatctgtggtggaagcagcagtccaggaatgcagtcagtctgttgatgaaactatgatggggctggtaagtagcaaaaa

SEQ ID NO: 483377 - DNA, 100 bp, Homo sapiens
caagctgcaacccttctgatgtccactcccacacaaaccagcttcaggcctttttcaagaggccacaatcagagaatggaattcctaggtgactccataa

SEQ ID NO: 483378 - DNA, 82 bp, Homo sapiens
cctagcgctatgcctgcggcggagactgcatcaggctctcgatatctcccggggccaattcagcatctctacctggccatcc

SEQ ID NO: 483379 - DNA, 100 bp, Homo sapiens
aagcgctcagaagaacgcttcgcccgttggtgctatgtccttccatagtgacgccccccaaggacatctggaatgtcactggtgcccaggtgtacttgag

SEQ ID NO: 483380 - DNA, 82 bp, Homo sapiens
cccatggatatacatgccttcagccaacagaggcagccaaatgacaacagcagttctgtagagagtttaaatatgaaggaat

SEQ ID NO: 483381 - DNA, 75 bp, Homo sapiens
tggtggggccttcagactgcaccctgcacggctttgtgcacggagattggagaggacgaaggccctgaggtccaa

SEQ ID NO: 483382 - DNA, 136 bp, Homo sapiens
tggcggctgagctgggcatggagcaccaggcggtggtgggcgccgtgaagagccttcaggcgctgggcgagatactcgcaggcaagccagctgcccagaagtcacccagcgacctgctggatgccagcgcagtctc

SEQ ID NO: 483383 - DNA, 100 bp, Homo sapiens
gataaatgaacctccgcatttgggaatgacagaggaagaggaagacaaacttctggcactgaaagacttcatgatgaaatctaataaagcaaaggccaat

SEQ ID NO: 483384 - DNA, 101 bp, Homo sapiens
aaatcttgcggcaacgcccccgggacatgcatcgtcccctggactctctcaatttgcatttatgtcggatcctcagtgaaaataaaagccatgatagttca

SEQ ID NO: 483385 - DNA, 100 bp, Homo sapiens
gcccagcagaatttgtatagagatgtgatgttggagaactacagaaacctggtctccctaggaaggtgcttcaatattggatattcacacagagcccagt

SEQ ID NO: 483386 - DNA, 75 bp, Homo sapiens
cttaaaaaaacattggaattctgcttatctagggcaattttgttgttacagactgcagaagaccaagatacttac

SEQ ID NO: 483387 - DNA, 50 bp, Homo sapiens
ctcagctacgaggaggcgctgaggagagtgtctcctttcctcttgggccg

SEQ ID NO: 483388 - DNA, 83 bp, Homo sapiens
cacgtctctaccgagcacaaactccacgaagccaacgcccagggggatatgagactttctactcggaatatcctgagtgttgc

SEQ ID NO: 483389 - DNA, 83 bp, Homo sapiens
cctgcctcagcctcctaagtagctgggactacaggaaacatttactagggacaacttttgagtgtcagaccctgtggacacaa

SEQ ID NO: 483390 - DNA, 80 bp, Homo sapiens
gcctggatgggccccatctgccagctggccttcccggagatcatgcacgccctgaagatgacctggcacgtgcactgctt

SEQ ID NO: 483391 - DNA, 98 bp, Homo sapiens
aaactcagtgagacacaatttatcattgaataagtgttttaagaaagtggacaaagagaggagtcaggcccttccttctaccatgattatagtagcag

SEQ ID NO: 483392 - DNA, 83 bp, Homo sapiens
gagcgacaagccgctggcagccgcggatctcaccgccgctcagggacagagcgggatgccaccagcttgtccaaagggaagtt

SEQ ID NO: 483393 - DNA, 88 bp, Homo sapiens
ggtgaagtggaaaggatggcccccaaacaaacggggattcagcgtccgatcctttggaacagggactcacgtgaagcttccaggacca

SEQ ID NO: 483394 - DNA, 74 bp, Homo sapiens
cgaggcaagccggggctcccaggagagaagggagaagccggagatcctggggagaggcccgaggaaggagtggc

SEQ ID NO: 483395 - DNA, 101 bp, Homo sapiens
tttgtttgacaaagataagaagcagtatcactgtgaaaactgtggaatttgtaggtgtgcaactgaggaacatggctcaagaaactaatcacagccaagtg

SEQ ID NO: 483396 - DNA, 100 bp, Homo sapiens
ggcgtggagtgctggacctgccaacacccagggtacaggtttgcagattccgccagcagcacagcaagctctacagatgagtggctctttggcatttggt

SEQ ID NO: 483397 - DNA, 88 bp, Homo sapiens
tctattcctggattcaatgtcatccagagcccagagcaggttgcccccaagtttcctggcagtgtgtgatactgaggaggtgagcttg

SEQ ID NO: 483398 - DNA, 75 bp, Homo sapiens
gccccgaaacttctgtggctgaaagagaccttacacataggaagctcacacctggctccgccaaatccagacaag

SEQ ID NO: 483399 - DNA, 80 bp, Homo sapiens
aacagggcccctgcagcctctgagggcaaccacacagtcccctatgacatctgccggccagaccactcagtgttgaccct

SEQ ID NO: 483400 - DNA, 85 bp, Homo sapiens
cttctggcggccatggtgttgctgctgtactccttctccgctttatcttcaagccaggatgaagggagactgggcaagactctta

SEQ ID NO: 483401 - DNA, 100 bp, Homo sapiens
ggctgcaccagcaccacagcctatataagcatccacaagtatcttggagatggccgcttccatctggagtctgtcatgattgccaaccccaatgtccccg

SEQ ID NO: 483402 - DNA, 99 bp, Homo sapiens
atcggagcgtgtggatttgagccgccgcattttttaaccctagatctcggatgtacagttacccagcacgtgtacctcctcctcctcctattgctcggg

SEQ ID NO: 483403 - DNA, 100 bp, Homo sapiens
agaagccgacaaggcgttcaagcgaaaacatgaccgctgagcccatgagaccatgaacgagtttgagtacctgaagctgctgggcaagggcactttcggc

SEQ ID NO: 483404 - DNA, 76 bp, Homo sapiens
gcgatattcccaggacagcttcagcaaacactacaagtccacggtgggaggtttgtgttgctagttaagctagctt

SEQ ID NO: 483405 - DNA, 80 bp, Homo sapiens
gtctctcctggcatgctacctcaagtcaagattcacctggtaactgaagaggagggatcagctaatatgtatgcaataca

SEQ ID NO: 483406 - DNA, 82 bp, Homo sapiens
tgccttttcgtgcaactgaaaatgacattgctaatgaagaacttcagatgtcacttttaaaattgaacaatgaatatgaagt

SEQ ID NO: 483407 - DNA, 100 bp, Homo sapiens
cgagcgcgcccagaggacggcggggagccaagccgacccccgagcagcgccgcgcgctgccccccaagagggacgagacggccctgcaggaggaggagga

SEQ ID NO: 483408 - DNA, 90 bp, Homo sapiens
caacaagtgtcacggcatacaagcaggtggttgtgtcaaaccgattggtgacatctccatgctgtattgtcacaagcacatatggctgga

SEQ ID NO: 483409 - DNA, 100 bp, Homo sapiens
gcttttcctccgaccctgatgctcttcaattcggtgctccgccagccccagcttggcgtcctgagaaatgttttgtcagcctggcgggtggcagctgtcc

SEQ ID NO: 483410 - DNA, 75 bp, Homo sapiens
taaaatctacaaccttctcattcagacacacgatgttcctcctgctgatcaagagaagctttttatccagaagtt

SEQ ID NO: 483411 - DNA, 74 bp, Homo sapiens
tccagatggatccctctgtgcttctggaggcaaggatcagttccatgacaagaccccttatacgattatgtttg

SEQ ID NO: 483412 - DNA, 80 bp, Homo sapiens
actctagggaccctgctgaatagctggggctacaggcgtgtgtcactgcgcccagaatcgggaccagtattcacatctgc

SEQ ID NO: 483413 - DNA, 120 bp, Homo sapiens
gggcaagtcggggcagggctactacgtggagatgaccgtgggcagccccccgcagacggttcacaataaaggtgctaagaaagagaatgtaagacaggaaaataattaaatattcttacc

SEQ ID NO: 483414 - DNA, 75 bp, Homo sapiens
ctaaagcctggaatttcagagggggggacttaggagccattgatgaaaaatacgacgtggctatatcatcctgtt

SEQ ID NO: 483415 - DNA, 100 bp, Homo sapiens
agttggagcagggagaggagctgtggataacgggaggtgaatttccatgtcaacatagtcctggtgaacagtgtgaaagagctagacgccttcaagctaa

SEQ ID NO: 483416 - DNA, 75 bp, Homo sapiens
ttagaagcagcctggcctcatctacagggctgagaaagggcaatgagatcatgaccttaaatggggaagctgtgt

SEQ ID NO: 483417 - DNA, 100 bp, Homo sapiens
ctctgatggcgagaggctgcggctgtaccaggtgctgctggtgagtagcagccggtacccagaccagtggattgtcccaggaggaggaatggaacccgag

SEQ ID NO: 483418 - DNA, 90 bp, Homo sapiens
ttctgggtcattacaagtgggagaagtttgtgtacctctatgacacagaacgaggcgcctaaccaaggaaaatgtgaagccttctggaag

SEQ ID NO: 483419 - DNA, 98 bp, Homo sapiens
tcggaccacagcttccctctcacatgataaagatttggagtccaggaatgagactaagcatttatctgtaggaaaagatattattcaaaacactggtt

SEQ ID NO: 483420 - DNA, 75 bp, Homo sapiens
tagaaagggtgctaaatgttcaagagagaaaaggaacagttccgtaagctctttattggtggcttaagctttgaa

SEQ ID NO: 483421 - DNA, 98 bp, Homo sapiens
gagaggagcatgaatggagcaaaatggcggatcatgtgcagggagatgtgcattgagcaggatgggagagtccatctcactgttgtttactttgggaa

SEQ ID NO: 483422 - DNA, 100 bp, Homo sapiens
gaatgaagccaagcgcagagaggaggacctgttccagacccctggaatgcaggaagagctccagcagatcattgattgtctggataccagcattcctgag

SEQ ID NO: 483423 - DNA, 82 bp, Homo sapiens
ccgggaggaaggaacgaggcaaggagctaaagcagcgtgcgttcagccctgggtgggtaattccagaattgattggccatac

SEQ ID NO: 483424 - DNA, 83 bp, Homo sapiens
caacgccgagcgcaccgacatctgcctgctcaaaggtgctggagaatctggtaaaagcaccattgtgaagcagatgaggatcc

SEQ ID NO: 483425 - DNA, 50 bp, Homo sapiens
accgcccctcctggaagaaggaagaggtgtggtatctgtgcgctttgaag

SEQ ID NO: 483426 - DNA, 96 bp, Homo sapiens
catttgaattggcttatactggttttgtgaaactcactgaagtactaaacagtgaaactctctgggaaattgcaaaagctgaagtggaaaaaaggg

SEQ ID NO: 483427 - DNA, 82 bp, Homo sapiens
gcgaggcctttcaccaagtccatggggaatttggcttacggagatcatctttatattttctgaagccttcatattggtcaaa

SEQ ID NO: 483428 - DNA, 51 bp, Homo sapiens
cagcctcccgaatagctgggattacagagcaactaagaggtctttcttggc

SEQ ID NO: 483429 - DNA, 75 bp, Homo sapiens
cctggagcaacaacctggcggtgctcgagtgcctgcaggatgtgagggaggagaagatggtataaactggtccat

SEQ ID NO: 483430 - DNA, 82 bp, Homo sapiens
agaagagcacagaatgtaccagagaggcctttctgtatagagcccacaaacatcgtgaatgtgaatcatgtcattcagaggg

SEQ ID NO: 483431 - DNA, 100 bp, Homo sapiens
aaaaactactaggatcacgcggcatgtattgaggtgttggaaatcaatagctcttctagcctttgcattgtttaaatataatagtgtcattggactaaga

SEQ ID NO: 483432 - DNA, 100 bp, Homo sapiens
actgactgggcaacatgttattcaggtgcagcggaactgctgcctgacgctctgcaacttcagcatccccgaggagctggaattccagtaccgccgggtc

SEQ ID NO: 483433 - DNA, 100 bp, Homo sapiens
cggagaattccccttcctagaaggaccaagatggcagcagtgactctgctggctttggcgtatacacagcccccaaatacatcaagatgtttgtactgga

SEQ ID NO: 483434 - DNA, 100 bp, Homo sapiens
aggaacttgcagaaatcacattggaccctcctcccaactgtagacccttctcaggtgcagccagagagacactagcccactgatggacggacagacgtgg

SEQ ID NO: 483435 - DNA, 51 bp, Homo sapiens
cctcccacagtgctgggattacaggtggtttcctagaaacatgattgttta

SEQ ID NO: 483436 - DNA, 83 bp, Homo sapiens
ctgctgaaaacagcctcaagaaaccagtaacagattgtgttatttcagtgactgaacttgaatgtgttagtagccaagcaaat

SEQ ID NO: 483437 - DNA, 75 bp, Homo sapiens
caacagcccagtgcttctgtctcgactgcactttgagaagggcaattgaaggaacagactaaaaatcgtgtcctg

SEQ ID NO: 483438 - DNA, 97 bp, Homo sapiens
cttaaaaagacggacagcccatcgtgtgaactatagagtttgtggacagatttatattgtaagactttgaccccgacgcaggcttcagtgattgccg

SEQ ID NO: 483439 - DNA, 100 bp, Homo sapiens
caactcgcgggtcctcgtggatcagactacaggttcttttttcgatcggggaaacagacctagatccaaggccacaagtaaggctatggctctgattcta

SEQ ID NO: 483440 - DNA, 90 bp, Homo sapiens
gcgagggaggctactgagaagcccggcgacggaggaacgcaggtctgctgccaggtgacgccttctgggccccatctgtccttcctcaca

SEQ ID NO: 483441 - DNA, 75 bp, Homo sapiens
aaggatctggggatcttcgcactatcccaagataacgaaggaggcccaacttcattcaataaggagcctgacgga

SEQ ID NO: 483442 - DNA, 100 bp, Homo sapiens
aatcatggagccgctggggtcccttttgcctcagatactattttgaaggatcttagtaagagccctaagaccatgaaaaagctgctgcccaagcgcaaac

SEQ ID NO: 483443 - DNA, 75 bp, Homo sapiens
ttcaagtttaccaaaagagaggcaccgctggaacactaatgaggtaagaatgattgatgttggctgatattggag

SEQ ID NO: 483444 - DNA, 50 bp, Homo sapiens
ctggaatattgcaggtgcctttagaggaagctcttcgtgtggtgaagatc

SEQ ID NO: 483445 - DNA, 50 bp, Homo sapiens
acgataaccaaggacgaccgcgaaccaagatccagagacaatggccccga

SEQ ID NO: 483446 - DNA, 49 bp, Homo sapiens
gtggagcgcagagcgggcgagcgcgagtgaattactggaactgaaacgg

SEQ ID NO: 483447 - DNA, 80 bp, Homo sapiens
tccaactttgcgacggaaatgtgtcatcgaaagccagcacaggaagtcctggagaacctgaaggaccgctggtaccaggc

SEQ ID NO: 483448 - DNA, 82 bp, Homo sapiens
ctggcatctacaggttctaccccatctacatacagcctgaagacttcaaacgcactgggaagtcttccagaaggtgacagag

SEQ ID NO: 483449 - DNA, 82 bp, Homo sapiens
ttcagcgaggaagctacacttttcaccaaggaactggtgctgcagcgagaggctactgcagcactggggtgtcagttgttgg

SEQ ID NO: 483450 - DNA, 103 bp, Homo sapiens
ggtctggtctgaggagacggggacccttctcacaccggccgctgccgccgccgcgctccggaacaggcttatcaggagggcagacttcaaaagctactaaaaa

SEQ ID NO: 483451 - DNA, 100 bp, Homo sapiens
tagttactgtggaatcaataagccatggcatctaagaaatttgctgttaaagtggttgaccagattgacaccctgacctctgacctacagctggaggatg

SEQ ID NO: 483452 - DNA, 82 bp, Homo sapiens
tggaagaagaagaagagcatgatcggcatgtccaccaagcaattctgtggtgttcttggtcacacatttatggagtttctga

SEQ ID NO: 483453 - DNA, 100 bp, Homo sapiens
gcggctctaacggggctttctacaagctgctgaaatagttcgagaaatcgaaaatatagagaagactaggatgcgtcttgaagctagtaaactcaatgaa

SEQ ID NO: 483454 - DNA, 128 bp, Homo sapiens
acttgactaatcttcgggcagagagaaggaaacacttagaggaagttctggagatgaatttaatgcgctgaaggttcccgtgccagaggataaatatactgcccaggtggatgccgaagaaaaagaag

SEQ ID NO: 483455 - DNA, 100 bp, Homo sapiens
tggaccagcaccttgatcttggattttctagcctccagaactgcgagaagtcgctgcagctggtcatggagtacgtgcccctgggcagcctccgagacta

SEQ ID NO: 483456 - DNA, 100 bp, Homo sapiens
ggctggtttcctggacagagaacatccaaggttccattaaatacatcatgcttaaccctagttcacgaatcaaggaaaggaaacagattcattgtctgtc

SEQ ID NO: 483457 - DNA, 107 bp, Homo sapiens
tcaatatctgtcttcggtggactccttcggcagtccacccaccgccgccgcctcccagctcaccaaccaccaggagctgtgggccttcatcgtcaccaacctggcga

SEQ ID NO: 483458 - DNA, 100 bp, Homo sapiens
ctcaccatcaccgcccacgacgacaggggcatccgcttcctggacaatcggacagagtgaagttcccagaccctacgccccgctgtcaggcagcccgccg

SEQ ID NO: 483459 - DNA, 96 bp, Homo sapiens
gtagtggaaggagtacagggaagtctataagctttgcaacagaattacagagtatgatggggcttgtacatgacagctggaatagcctccagttga

SEQ ID NO: 483460 - DNA, 100 bp, Homo sapiens
gcagtgcggcaaccaaatcggcgccaaggtgtgcaactgaggaacatggctcaagaaactaatcacagccaagtgcctatgctttgttccactggctgtg

SEQ ID NO: 483461 - DNA, 76 bp, Homo sapiens
aaatcatttgctgagtgtgcatatggtgactgttgtaaagactgtcggaacattaaccaggtggtatttgttggaa

SEQ ID NO: 483462 - DNA, 90 bp, Homo sapiens
cggcgcgggaagtttggatcctggttccgtccgctaggagtctgcgtgcgagggaccattgcaatttagagatgtggccatagaattctc

SEQ ID NO: 483463 - DNA, 98 bp, Homo sapiens
aatcaaatgcaacaggaaaaagagctaacagaaaacattttgaaagtgtatgcaaccgaggatggacttatacacacaaatgaccaggccaggactct

SEQ ID NO: 483464 - DNA, 101 bp, Homo sapiens
ctgttgaaaatgagcagctgtcctcatgtctctccagcaggcattggaatggatacttgtgtcattcctttgaggcacggtgggctttccttggttcaaac

SEQ ID NO: 483465 - DNA, 95 bp, Homo sapiens
ccccggtacatctgaaagccgggaaatgctgagatctgtatctgtggacctgaatgttgatccctcgcttcagattgacatacctgatgcgctca

SEQ ID NO: 483466 - DNA, 99 bp, Homo sapiens
gtttgaggacctcctggtgcgcatcctgctgctggctgcccttgtctcctttagatgaccaagcgagacgtgcctggcttcgccatcgggggcctgagc

SEQ ID NO: 483467 - DNA, 75 bp, Homo sapiens
aaaaggttgatctcatagacaagtttgtacatccaaatttcagctcctggcatcagctctattcaaatctggttc

SEQ ID NO: 483468 - DNA, 96 bp, Homo sapiens
cagctgcgctccagtcggcccaggcgccgcggcgaggagcgagcgctgcgaggtggcggcctgagaatgccaatctggccccctgtggagcagacc

SEQ ID NO: 483469 - DNA, 80 bp, Homo sapiens
gctctgaaggcgaacgcttcgctggccatttaggagctctgctcaaagccagacgttttccaagagataacttcaccaag

SEQ ID NO: 483470 - DNA, 75 bp, Homo sapiens
gccgggagttcaagaagaacactccagaggttattcagcttctcaaggctggaaaagcgaaggaagtttcctaca

SEQ ID NO: 483471 - DNA, 97 bp, Homo sapiens
cgtggccatgaactcacccgtggaccctggcgctaggcaggcgttgaggaagaagccacccgagcggactcccgagagctgaaatatgctaataccg

SEQ ID NO: 483472 - DNA, 98 bp, Homo sapiens
tgagctacccgagcggcggcggcggcagcagcggcagcggcaagcaccgttgattcttcaccacactgaaaccattaggaaaaatccttgtggttaac

SEQ ID NO: 483473 - DNA, 82 bp, Homo sapiens
tgatctccctcttggtgtacaacagatcgccaaactgaggcagcaactacaacgcagtaaacagagtagtcgtcacagtaag

SEQ ID NO: 483474 - DNA, 97 bp, Homo sapiens
cttctctacagaagagcttctcctcatcaactggggatgattacagttcttcctaaaaaaggaaaacacagatcctggtgccgaacatgaggacagg

SEQ ID NO: 483475 - DNA, 96 bp, Homo sapiens
cgtgaaggggaagaggcccaccctggagtaaccctcactggagaatccagagacttcccaagtaagaagcggaagaggagccgctggaaccaagac

SEQ ID NO: 483476 - DNA, 89 bp, Homo sapiens
cacagtagagacggacctgtttaagaggcagcaggcgatgccctccacaggtatggcagaggaagaatacaagcgattgagtgaagcac

SEQ ID NO: 483477 - DNA, 82 bp, Homo sapiens
tttcgatctccgccctggggtcattgtcagggactatgttcggagtgaactggagtttgcctatgagggaccaatgtattta

SEQ ID NO: 483478 - DNA, 74 bp, Homo sapiens
cttttaggagggttcttgagtattttaacacaggatgattctgattttcaagacttaattcagtgcacaaatga

SEQ ID NO: 483479 - DNA, 100 bp, Homo sapiens
agcagctccagcaggcgctggctcctgctcaggtatccgttacagcactgatgtgagtgtagatgaagtaaaagctttggcttctctgatgacatacaag

SEQ ID NO: 483480 - DNA, 103 bp, Homo sapiens
gattccccccgcatcgcctcccgtggaagcccaggcccgcttcgcagacaatgcagatcttcgtgaagactctgactggtaagaccatcaccctcgaggttga

SEQ ID NO: 483481 - DNA, 83 bp, Homo sapiens
ttctttacaactgtacccggacagcgaccgtcaagaggtgtcggttggtggaaatatgaattctgctatggcaaacatgtaca

SEQ ID NO: 483482 - DNA, 110 bp, Homo sapiens
ggcgcggattcgccgaggcaccgaggcactcagaggaggtgacttaagagattaaaattaatttggttgctgttggttctgaacaaataatgagttcttttatttgaggt

SEQ ID NO: 483483 - DNA, 75 bp, Homo sapiens
cattttactgtcaagacatttcttcggcattctgcaacaggtgcaatggatgagcttcatagtctggatccaaga

SEQ ID NO: 483484 - DNA, 90 bp, Homo sapiens
gccgggatctgagcgagcgccggggccagcggagccggagccgccgggacatggagctcttcagtatccccatcagccagtttccgaggt

SEQ ID NO: 483485 - DNA, 50 bp, Homo sapiens
ctgggttcgcctgcccagcaaatgcgaagatctgaactcagaagtcacct

SEQ ID NO: 483486 - DNA, 80 bp, Homo sapiens
ccggaagcgcgagcaaggccgccagatgtgcagacagccagctaaaggtgtggatgagcaaatacggctggagtgccgac

SEQ ID NO: 483487 - DNA, 95 bp, Homo sapiens
gttattaattagcccaacctgttcttgcaaacaagcagatatttgtgtgtatggtggtgatattacccgaaaaatgaagcttttgaagagacaag

SEQ ID NO: 483488 - DNA, 90 bp, Homo sapiens
cattctatgagaagaattatgtgtgtgttgaagcctggaatggtcccccctccgccgggagaagaaagccagacggtcatccttccacct

SEQ ID NO: 483489 - DNA, 82 bp, Homo sapiens
cctcgctgcgggccaacggtgtggagatcaaccgtgagcagtggatccagccagctgaggtgggtgtcctggttggcaaaga

SEQ ID NO: 483490 - DNA, 75 bp, Homo sapiens
actgtcaatgggaccgttctcagctccagtggaaccaggtaagccaagatgggtgcatacaagtacatccaggag

SEQ ID NO: 483491 - DNA, 100 bp, Homo sapiens
caagccagctgcaagcggcgcgtgctcggtgtcggcagaggagaccgaaaagtggatggaggaggcgatgcacatggaacaggaaatatagtggtcatta

SEQ ID NO: 483492 - DNA, 100 bp, Homo sapiens
aaccagttcacgctggttccgggacagctgtctaccttcaagtacctgcagctcgtagcccacaggcggttttgtgagctgcttccccaggagcagcgga

SEQ ID NO: 483493 - DNA, 82 bp, Homo sapiens
acggcgggctgtcgtcacgacgacgtgcggacgcagcggcgggggcgacagagcgggatgccaccagcttgtccaaagggaa

SEQ ID NO: 483494 - DNA, 123 bp, Homo sapiens
gaggccggggaccaggacagtcgcgaggttcgagtgttgcagagcctgcggggcaagatctgatttttagactctgaggagcagttggagctaatccacattatggaaatggaaaccaccgaa

SEQ ID NO: 483495 - DNA, 95 bp, Homo sapiens
gccccgtacccacgagtttgggtcccctgaggcatctctccaggcctctgcctggcccgatttcccgccaaccactcggggcgacctcgggtgcc

SEQ ID NO: 483496 - DNA, 75 bp, Homo sapiens
ctgtaaagtcaccaacgagatcttccgccactacgatccagttacaacacagggatcacaacaaacacaaccgcc

SEQ ID NO: 483497 - DNA, 82 bp, Homo sapiens
ggcgtacagtcaaggaggcggcaaaaaaaaagtctgctactactacgacggagattacctggggcaattgatgttatcggtc

SEQ ID NO: 483498 - DNA, 100 bp, Homo sapiens
ctgctgggcgggaaggcggcgccccggccgaggtggcggcggctcctcagaaagcataacccctactgtagaactaaatgcactgtgcatgaaacttgga

SEQ ID NO: 483499 - DNA, 90 bp, Homo sapiens
aagtggttctggcacccctgtaaccataatcattccgaagcaaggtcagtcatatcatttggatcaaaaaatagaacaatcggagttgca

SEQ ID NO: 483500 - DNA, 83 bp, Homo sapiens
gaaacagctcgggaatcggcgaggctgcagccgaaggaaaatgaattcccagttcctgagcagttcaagaccctatggaacgg

SEQ ID NO: 483501 - DNA, 100 bp, Homo sapiens
acgtgtcttcagaagatgaagatgaggagatgcctgagatcgtcagtatttaaacagatcacatcatgcgtgagtacaagctagtggtccttggttcagg

SEQ ID NO: 483502 - DNA, 85 bp, Homo sapiens
cctggagaagggattgcccagtcagcaaaggttcagccctccaaggaatggtagtgctattggccttccagtcccacctatcaca

SEQ ID NO: 483503 - DNA, 90 bp, Homo sapiens
ccacctgaagaagattgtacatcagtcacagacctgcccaatgcctttgatggaccaattaccataaatggagtctcactttgtcgccca

SEQ ID NO: 483504 - DNA, 51 bp, Homo sapiens
cctgaaccaagccagcaagatcaccgtgaatgttggatgtgtacccaaaaa

SEQ ID NO: 483505 - DNA, 100 bp, Homo sapiens
gaactgctgacgcttgatgagaaggacccacggcgtctgttcgaagatgcgacctaaagtcatgtggcacctccttcgaaggtacatggcatcccggctc

SEQ ID NO: 483506 - DNA, 108 bp, Homo sapiens
ctccgcctcgccgcagtcggggcagccgctcgcccctcttttccatgtatccgtccagaaaatgaaactgaagccgtggtcacgtgacaggacatgtagtatatagca

SEQ ID NO: 483507 - DNA, 101 bp, Homo sapiens
tatccagtacccaaactactgttccttcaaaagccagcagtgtctgatgagaaaccgcaatcggaaggggcctttacaacaactaaacggacaggcattcc

SEQ ID NO: 483508 - DNA, 100 bp, Homo sapiens
ctgaggacccacctgcagccgccgccgcgatgcccaccatgcggaggaccgtgtcggagatccgctcgcgcgccgaaggcaaccactgagaaaacggaac

SEQ ID NO: 483509 - DNA, 75 bp, Homo sapiens
tgtatatgaaaagatcgtacattgtcagaaggcaggtgaagatggagctggaaaaacaagcttaataagaaaaat

SEQ ID NO: 483510 - DNA, 100 bp, Homo sapiens
ggagggaaatgggaatgtacacgataattaaagagtaaagttgtgctcaacgttttgtaccaatggctagaagcagatcgtcatggcaagagccaaggtg

SEQ ID NO: 483511 - DNA, 88 bp, Homo sapiens
cgtggagagcactggccaggaaagcctcgaggccgtggcccagaggctggagctgcgggaggaactcaacagaggcaattattatccc

SEQ ID NO: 483512 - DNA, 50 bp, Homo sapiens
gtttggtcccgggagcctcgccggctggaagctctttgacatcctttgga

SEQ ID NO: 483513 - DNA, 98 bp, Homo sapiens
agcagactagccagccggctacaattggagtcagagtcccaaagacatgggttttgcagccactcttgatgatgacaaaccttggtactccatttttc

SEQ ID NO: 483514 - DNA, 74 bp, Homo sapiens
cctggggaacctgctcaaagccctgggtcgcttggaagaagccaaggagacggtggctcagggagtaaaggaag

SEQ ID NO: 483515 - DNA, 75 bp, Homo sapiens
ctcatgcacagaggcaacaaatggcaactttctgatgttctaagaacggaagcatctgggctggatggaatttag

SEQ ID NO: 483516 - DNA, 100 bp, Homo sapiens
aaaaacctcaaaatatgatggtggttggacagtcagcatttgcagactttgattctggacaatcaggaagtccaagccacaatgatcctgccaagaatcc

SEQ ID NO: 483517 - DNA, 75 bp, Homo sapiens
ggagtttgacgaagaggtggtttttgaggtaaagtcagtgataaatcttttgtttgctgcatatactggagatgt

SEQ ID NO: 483518 - DNA, 83 bp, Homo sapiens
gtgtgcttggagcagtgttcaatgccttgaactactggctgaccatgtttcgaatcaggtgtggatgtggaagcagccaagcg

SEQ ID NO: 483519 - DNA, 83 bp, Homo sapiens
cgccgtcagctgtgccgtcgcgcagcacgcgccgccggttgaaaggattgttgacaaaaggaaaaataaaaaagggaagacag

SEQ ID NO: 483520 - DNA, 100 bp, Homo sapiens
cggcgccgtcgcgccactcctccgaagatcctgaactttcaactgtttgccggaagtctggtacattaatattatatccaggggctgaagctgctaattt

SEQ ID NO: 483521 - DNA, 99 bp, Homo sapiens
atcaccgagagcagcacctttggagacagtgtttcacaaaatgattttccttctgaagctcccatctccttgaatctttctcataacatctgcaatccc

SEQ ID NO: 483522 - DNA, 100 bp, Homo sapiens
tggcatcctctgacatcactccagcagaagaaagggaaggaacacgctgcattactgcgtgatgggttgttgttgtcccagagtcgccaacgcattgtct

SEQ ID NO: 483523 - DNA, 89 bp, Homo sapiens
tatcagatcaaccaccaaagtgggaaacattgaaatcaaggttgcagtgtaggattttggaagtcctccctccatcacatcaaaatggt

SEQ ID NO: 483524 - DNA, 82 bp, Homo sapiens
cgtgtccgagggcaccaaggcggtcaccaagtacaccagctcgaaattacaccaccaccttcactgtcagatccacttaaag

SEQ ID NO: 483525 - DNA, 75 bp, Homo sapiens
ccggtttttagtccattgactatgcagcctaatgcttgtgaacaccttcttcagcttccttcgacgcaaaacaga

SEQ ID NO: 483526 - DNA, 101 bp, Homo sapiens
cctgaagatcagcatccgccagctcaagtggaaggaggggcctttatcatctgctggactcctggattggttttgttacttctagacgtgtgctgtccaca

SEQ ID NO: 483527 - DNA, 82 bp, Homo sapiens
gatggtgaaaagggtcctcctgctcacagtgtgaataacaggagagatggagccatctcagtgtgtggaggagctggaggat

SEQ ID NO: 483528 - DNA, 100 bp, Homo sapiens
gcaggcagccagccaggaagggaggcagaagcatgctaagaacaacagtcaggccaagccttctgcctgtgatgacgaaggggaggaccaggctggcgat

SEQ ID NO: 483529 - DNA, 96 bp, Homo sapiens
cttttgtgctgctcacagtcaccgctgtcattgtggggaggagtctgctactagtcttatcagctcttaaaaacagaaactcatctgtccaagttc

SEQ ID NO: 483530 - DNA, 50 bp, Homo sapiens
ctcgcctcctccagctgttgttgctgctgtgtgaagagtggccagattcg

SEQ ID NO: 483531 - DNA, 101 bp, Homo sapiens
gccatttctccgtcgattaaagagccatctgtggtgccaattgaaggtcaatgtctggtctgggtccagtgttccttcccaaactgtgggaaatggaggcg

SEQ ID NO: 483532 - DNA, 101 bp, Homo sapiens
cgcggccgtgcgacagcgacccagccacccccggagcgcagtccccgaagggaggtggggaagacagggctccagctaccacaggacgggctctgggtata

SEQ ID NO: 483533 - DNA, 74 bp, Homo sapiens
taaggctaaacttgcaatatgggtggagatcctagaaggcaaggatgccgggaagcagggcaaagtggttcaag

SEQ ID NO: 483534 - DNA, 75 bp, Homo sapiens
aaccgcacccctgaatttctccgcaaatttcctgccggcaaggccccatttacatcatcacagagtattgcttct

SEQ ID NO: 483535 - DNA, 98 bp, Homo sapiens
gaagaccagcatggctgaagcgagccctggggaggagtgttatgaaagaagagcttactcacatagcatattggtatatcaaaatgaaatgcaaggaa

SEQ ID NO: 483536 - DNA, 97 bp, Homo sapiens
aaaaaaacaggagatcagtgagctagcagcagagaagccttcctggaaaagatgcttgtgaccacaccagaaaaatgggatgtagtgacaagaaaga

SEQ ID NO: 483537 - DNA, 98 bp, Homo sapiens
caaggccatctacctggacatcgatggacgcattcagaagattgtctaaagccccaggaaaaatggtggaaaattcaccgtcgccattgccagaaaga

SEQ ID NO: 483538 - DNA, 83 bp, Homo sapiens
ccagcccccatcgagaaaaccatctccaaagccaaaggccagcaggagatggaaccttccagaagtgggcagctgtggtggtg

SEQ ID NO: 483539 - DNA, 83 bp, Homo sapiens
ggttctcccggcagcagcccgacgcaaaccaaggatctggggatcttcgcactatcccaagcaaaggaaggagtctgaaactc

SEQ ID NO: 483540 - DNA, 90 bp, Homo sapiens
accaatcccttcgatcaggatgttgaaaaagcttgtggtgaaggggggcaaaaaaaagaagcaagttctgaagttcactcttgattgcac

SEQ ID NO: 483541 - DNA, 83 bp, Homo sapiens
ccctgaggctgcaccaagtggcgaaggagccggctccaaggaacccaagacagaccaggatgaggagcattgccggaaagtca

SEQ ID NO: 483542 - DNA, 100 bp, Homo sapiens
cctgaaaagtcgcagcgagctggagccgccggagacccactatgaaaatggagaatatattatcaggcaaggtgcaagaggggacaccttctttatcatc

SEQ ID NO: 483543 - DNA, 97 bp, Homo sapiens
ctaaagcccagaagaatgtggctaccagcgaagagaatttggatggagagacccggaactgccggaagtgattcagatgttgcagcaccagtttccc

SEQ ID NO: 483544 - DNA, 100 bp, Homo sapiens
taatgagctcctgacaagctggctacggtggatcaatcttcctgtcctacaactgacaaaggatcccctaaagacccctggaaggctggaccatggcaca

SEQ ID NO: 483545 - DNA, 98 bp, Homo sapiens
ctgagcgtgttcttccaggagatgtttgagaccttcacggaaagcaggattgtcgagtggaccaaaaagttcctgggcttcccgatggactcgagttt

SEQ ID NO: 483546 - DNA, 100 bp, Homo sapiens
cagactggtgacttcacttttgagtgcaactgccttccaggctcccagccaacctctgataaaccctcccagcggccatcagagagcacaaattgtagcc

SEQ ID NO: 483547 - DNA, 83 bp, Homo sapiens
aagacaaaaatccagaagtacaagcagtctggtgccttatgcctctggcatgcccatcaagaaaataggccatagaagtgttg

SEQ ID NO: 483548 - DNA, 83 bp, Homo sapiens
attaatatttggatctaaaatcagatcaatgaactgagccatgttcaaatccctgttatgttgatgccagatgacttcaaagc

SEQ ID NO: 483549 - DNA, 99 bp, Homo sapiens
ggtcggggccggctgaccaggaacctgggcgagcagcggcgggggcccgagggagatcctgaaggagctagacgagtgctacgagcgcttcagtcgcga

SEQ ID NO: 483550 - DNA, 100 bp, Homo sapiens
ggacagtctgcaccttctcttactgctggcctgctccagaacctgggtatcaacccagcaaacattggcttcagtaccctgactatggagtctgacaaat

SEQ ID NO: 483551 - DNA, 75 bp, Homo sapiens
tccaggggatagtggtgtggatcagttggtagaaataatcaaggcatttatgtttgaatcatctttaagtctggc

SEQ ID NO: 483552 - DNA, 75 bp, Homo sapiens
aaatcctacaccttactttgaaacaccactggcatgccagaggaacagagagaagggctccaggaagaactgatt

SEQ ID NO: 483553 - DNA, 98 bp, Homo sapiens
acggggagccgagctggagctgccgcggcgcagccagagagaagaagaaggaggttcctgctgtgccagaaacccttaagaaaaagcgaaggaatttc

SEQ ID NO: 483554 - DNA, 90 bp, Homo sapiens
gccttctgaactgagtgaaaatacagccaagatcttggcaaagcttctccctcagtatttagaccagcatggacaaggacagcccggagg

SEQ ID NO: 483555 - DNA, 100 bp, Homo sapiens
tcccgcctcagtctcccaagtagttgggaccacaggcaccacagtgatgcggatgacagcctttgatgcagatgacccagccaccgataatgccctcctg

SEQ ID NO: 483556 - DNA, 83 bp, Homo sapiens
tcagagaagtgaagcaacttgcccagctatgagagacagagccaggatttgaaaccagctgtgtcagcgtgttatgatgccgt

SEQ ID NO: 483557 - DNA, 50 bp, Homo sapiens
agacagagggttttcttttgagccttgttgtcctcctggtgcgaagagct

SEQ ID NO: 483558 - DNA, 83 bp, Homo sapiens
cctcatcgagctcttcgtcaagatcgggagcggtgccgagaaaaatttccttactagatgacatttcatcgcaatgtccgatc

SEQ ID NO: 483559 - DNA, 100 bp, Homo sapiens
cacgtcactcacgccccacctcggacctcgggccgctcatttccgggctcggctttgcaaggatcttcagcctgttaaacaagaaaacgaaaaacccctt

SEQ ID NO: 483560 - DNA, 82 bp, Homo sapiens
gggatgagtcatgtggcagtggaaaatgcgctcgggctggaccagcaggtacatgtcccagagcaagcacacggaggcccgg

SEQ ID NO: 483561 - DNA, 98 bp, Homo sapiens
agggcccagtccctcggacccatcgccgcttctagaccctactgcggtctcggatattgccggctccatgatgcgttatctgggtctggaaacccaaa

SEQ ID NO: 483562 - DNA, 100 bp, Homo sapiens
ggtgacttggtgattttcctggaaaattatagcaccttatgaagctaggcagccccttgtccagcccgagggatcctcatcagggggcccaggaaccaag

SEQ ID NO: 483563 - DNA, 82 bp, Homo sapiens
ggaggatctcccacctttccaagcaaggccaggaggagctgtaaaattgacaagcttggcatgtggaaatcagcacatctgg

SEQ ID NO: 483564 - DNA, 86 bp, Homo sapiens
gcgcaggagcgggactgagagcgcctggaggctcgagcggaggttttcagataactattatcgtgcagaaatgattgatgccctgg

SEQ ID NO: 483565 - DNA, 100 bp, Homo sapiens
tgtcccttcaggaggccccgtgccatcgccacagacctacagggcgtctgcctgagcccgcttttctacaagatgtggggatttttgaagcgccctgtag

SEQ ID NO: 483566 - DNA, 88 bp, Homo sapiens
ggaggaacttggaaatcaaactcactgatgtttgagccagcatgtcgcggaggaagcaagcgaagcctcaacatttccaatccgaccc

SEQ ID NO: 483567 - DNA, 100 bp, Homo sapiens
gcatgactcatccccgggagtgttgactatctcattatcgagagcatttgaacattcaggaccctgacaaacgaaaagaatttcttaaaacctgtgttgg

SEQ ID NO: 483568 - DNA, 90 bp, Homo sapiens
agactaaatgaagattttaggcggtatcaaatggaaagtttttccaaatattcatctgtacagtaaaggcatgacttcctggcaccacag

SEQ ID NO: 483569 - DNA, 100 bp, Homo sapiens
ggagttcagcttttagagcaggtgtatgatcttttggaggaggaggatgaatttgatagagaggttcaagggcagacggggtttttgaggaggattcgca

SEQ ID NO: 483570 - DNA, 76 bp, Homo sapiens
atagttatccttgttagcttcggtctcttcatgtatgccaaaagatctggaatatgaagaccacagaatgttcaaa

SEQ ID NO: 483571 - DNA, 83 bp, Homo sapiens
cctctccaccgtgcctgacctgctgctgccactggtgaaaacttttggcccgtttggaagcggcagccaggacaacctgacta

SEQ ID NO: 483572 - DNA, 51 bp, Homo sapiens
cccagctccccggatgaaacagcggaagaagtccctatagaaccatacaac

SEQ ID NO: 483573 - DNA, 50 bp, Homo sapiens
ccgcagtcctaccccattgtgacagatcgccggggagtggcctgtacagc

SEQ ID NO: 483574 - DNA, 98 bp, Homo sapiens
ttcagggtaatgtcaaggttcttaaatctgagagagacaagatcttccttctttatgaacagtggctccacccacaaggttaagatataatgtaatat

SEQ ID NO: 483575 - DNA, 74 bp, Homo sapiens
agtctccaaattcgcctccatctgtaccatgggaatgggtactgttcaaaaaggaatgccccacaagtgttacc

SEQ ID NO: 483576 - DNA, 96 bp, Homo sapiens
ccaactgcctgcagccatggtcctccaaacagcctgagggaactggcatgatagatgaagagttcactgttgcaagactctacattagcaaaatga

SEQ ID NO: 483577 - DNA, 83 bp, Homo sapiens
gtccatttttagttttcctcacaagtttgaaatttcctttgtcatctggtgcatagtctacaaggaagtcttcacgaggagca

SEQ ID NO: 483578 - DNA, 100 bp, Homo sapiens
cggcgctgggctggaggcggcggagcgcgagagcttcgagcggactcagactgtgccctgtccacggtgcctcctgcatgtcctgctgccctgagctgtc

SEQ ID NO: 483579 - DNA, 75 bp, Homo sapiens
gctggattgtgataggaagcagagtgttcgtgtggtatcgaaggatgatcgcagtgatgtggagagcagctcaga

SEQ ID NO: 483580 - DNA, 100 bp, Homo sapiens
cccctctgggcggcctgcgggggcggcgcagttgcgaaactgagtacaggagtctaaagcactttaattatgacatctgccaaagctgctttttttctgg

SEQ ID NO: 483581 - DNA, 95 bp, Homo sapiens
tgcgttcattccttttggagacatcacagatattcagattcctctggattatgaaacaggatacatgtgctgcccttttgttctggacaaagatg

SEQ ID NO: 483582 - DNA, 74 bp, Homo sapiens
agcggatcgcatggagtgatggtcccaccgcagcgggacactagactttcagggatgtggctatagatttctct

SEQ ID NO: 483583 - DNA, 50 bp, Homo sapiens
tggcaagaggttcctgggctctggaggaaagaccacagcaagattctttc

SEQ ID NO: 483584 - DNA, 51 bp, Homo sapiens
tgtgcccacagctcctggagccccacagtaagactttgaccccgacgcagg

SEQ ID NO: 483585 - DNA, 82 bp, Homo sapiens
ccagagctgaggactgcctgtttgcagctgtggcggggccttcgtgggcccgcgatgccaggaccccaacccgtgcctcagc

SEQ ID NO: 483586 - DNA, 87 bp, Homo sapiens
ccgtggggccgcagcgcgtggccgaggcgggcggcggccagctgggctccacagcccaggattgtcttctcctccaaggtctacatg

SEQ ID NO: 483587 - DNA, 75 bp, Homo sapiens
catgttgcacatgttttaaatgacgaaactcagcggaaatatattcagacatgaagagtatttctggagaagaat

SEQ ID NO: 483588 - DNA, 90 bp, Homo sapiens
gagagagactattttcgttattacaaggcagaagtcaattcatctggaaagactatctctgagtcagacttaaaccactctttttcacta

SEQ ID NO: 483589 - DNA, 83 bp, Homo sapiens
caactcggctgcccacaaggaggactcagtggcctttgaggatgtggctgtgaacttcacccaggaggagtgggctttgctga

SEQ ID NO: 483590 - DNA, 73 bp, Homo sapiens
ggagcaaatccaaacagaagcttctcagacgtgcacaccatggatctggggtgtgtccgcagccggccaggtg

SEQ ID NO: 483591 - DNA, 75 bp, Homo sapiens
cggtggtgaagggccggctgcacctgactttggccaacgtggctggagaagaagcaggcgctccctccattccag

SEQ ID NO: 483592 - DNA, 74 bp, Homo sapiens
gaaaactgggccaaagcagtgaaacgctccatgaattgtgcctttactttcccgaattctgccttccgatgcat

SEQ ID NO: 483593 - DNA, 100 bp, Homo sapiens
agccagttatccacggactggaagatcaaaagaggcgcttctctgaagtagctttggaaagtagagaagaaaatccagtttgcttcttggagaacactgg

SEQ ID NO: 483594 - DNA, 75 bp, Homo sapiens
gctgtcattaaaaattaagcgtggcttttgaggaagatgtgacaactaccggagagattctacattgcattgact

SEQ ID NO: 483595 - DNA, 80 bp, Homo sapiens
ggcagatccttcagcaaaagctgtccttacagggcttccaagtgttagtggagtctgactggctggattttgggcacaag

SEQ ID NO: 483596 - DNA, 100 bp, Homo sapiens
aagaaacagaaagaaatcacaaaagcaattaagagagctcaaataatgggttgaagaggagaagaggaagaagaaagaggaggcggcccggaggaaacag

SEQ ID NO: 483597 - DNA, 75 bp, Homo sapiens
ctatggtggcatcaaccgagttcggggctccaaggtgggcaaactgaccctcaagaccacagagatggagaccat

SEQ ID NO: 483598 - DNA, 50 bp, Homo sapiens
aaaggatcccagaaagtttcagcttcagtatcagacacagcacagcagcc

SEQ ID NO: 483599 - DNA, 82 bp, Homo sapiens
cgtggggtcactggtgtatgtcatggaaggaatcattgtagtcaatcattttccagttctcagccgctcagttgtgatcaag

SEQ ID NO: 483600 - DNA, 75 bp, Homo sapiens
caccatggggaatgggatgaacaagtttaaggaagaaatctctaaacgttttaaatcacatactgaccaacttgt

SEQ ID NO: 483601 - DNA, 80 bp, Homo sapiens
tggagcctgacgagctggcgggtcccagccctacctgtcctgatgcctgaccagcaggatgcaagcccaggaggccatcc

SEQ ID NO: 483602 - DNA, 99 bp, Homo sapiens
cggatgagtacgataccgaagcgggctgtgtgccccttctccacccagaggaagccttggaatcctgccagactcgcatttctaagctggagctccacc

SEQ ID NO: 483603 - DNA, 83 bp, Homo sapiens
caaggaggcagccgtgtcacatgcattacgtgtgaaaatgaacttgtgcaaacccaaccccatgctgataatccatctaatac

SEQ ID NO: 483604 - DNA, 90 bp, Homo sapiens
gaagctgaagctataccagtcagccacccaggccgtattccagaagcttactaccagcccagtctgactgcggagtatgatgaagacagc

SEQ ID NO: 483605 - DNA, 95 bp, Homo sapiens
tgtgatccctcaagactggtccacggagtgtatgaccacaaacagccatcaagaatgggagctgactgatatggtggtgtgggtgactggagcct

SEQ ID NO: 483606 - DNA, 50 bp, Homo sapiens
agggagtgcatcaaaggtgtgaacacagagtctcgctctgtcacccaggc

SEQ ID NO: 483607 - DNA, 101 bp, Homo sapiens
aaaaaggacatctttggagccagtgttggaaaaccttggacagacaattgtccccgatttgggatcactggaaagtcagcatgattttcgaaccccggagt

SEQ ID NO: 483608 - DNA, 90 bp, Homo sapiens
aaacaaagtgtcaattatttcaagaattaccatagattgtatctgctgtacagtattgtcatcaaaagtacattgttcaccgtgatctta

SEQ ID NO: 483609 - DNA, 110 bp, Homo sapiens
gctgaagagcgacaagccgctggcagccgcggatctcaccgccgctcaggccgcggcgagtcctttgcacatgttggcaacacacgcatccgcatcggcctccctgccca

SEQ ID NO: 483610 - DNA, 75 bp, Homo sapiens
ccgggagatgatcctggcggattttcagaaaggcctaaagaatgtatttgacgaagcaatattggctgccctgga

SEQ ID NO: 483611 - DNA, 90 bp, Homo sapiens
ggagaaggcaagccggaaagagcgaaagaaagaagtggtggaggttggtggagtccacattcaaactggtattgactgcgaacctctact

SEQ ID NO: 483612 - DNA, 75 bp, Homo sapiens
ctggctgcagggacccggtgacagcgtgagagattggcggcagtaagcacacaatgaatgatcacctgcatgtcg

SEQ ID NO: 483613 - DNA, 100 bp, Homo sapiens
atagccacgtgtacgtgtcccgcaaggccgaggtctgcagcgacttcctcaaaggctactgccccctgggtgcaaagggtctccctctgttgcccaggct

SEQ ID NO: 483614 - DNA, 75 bp, Homo sapiens
gcctcttgaggagctgggactacagtgatatcagtatcaagataaaagtttggaatgggagaaaaattctcaaag

SEQ ID NO: 483615 - DNA, 100 bp, Homo sapiens
cggcctagtgcgccagggcctcaagtgcgatgacctagaggatcaagacataatgggagcatttttagacaagccaaagatggaaaagcataatgcccag

SEQ ID NO: 483616 - DNA, 129 bp, Homo sapiens
cccggcggcccgagcgcgccccaagcccgggcgccaccgctgccacctccgcgagaccaagatcactccatggatgaaatgacagctgtggtgaaaattgaaaaaggagttggtggcaataatgggggc

SEQ ID NO: 483617 - DNA, 83 bp, Homo sapiens
ccaagggcctccgtctggatttccaaggaagaatttcctctgaagcaccgtgtggacgaatgtggaacctcgctctgtggctg

SEQ ID NO: 483618 - DNA, 74 bp, Homo sapiens
cgcgcccggccggacccgggcccgaggtcgcctgcgaggccgctggccaggcctgagcctctgccaccatggcc

SEQ ID NO: 483619 - DNA, 75 bp, Homo sapiens
actggatattaaaagaagactaattagcccatataaggtatgagcattctccaaggaaaggatgacatatttttg

SEQ ID NO: 483620 - DNA, 83 bp, Homo sapiens
gggccgcgccagcgccgctccaccgagggccgcgcgtcggccgccgccgggcctggcacagccatgacagtgcagatcctgct

SEQ ID NO: 483621 - DNA, 100 bp, Homo sapiens
cgtgctggagggaaggctgctgttggaggttgcactgctgtgatccatcctcatctcctaaagatgcatcctgacttatctccacacttgcacactgaag

SEQ ID NO: 483622 - DNA, 75 bp, Homo sapiens
accgtgccctgaggttggacgtggggaatttctcctggggctcagagtggggcaatggcggcttcctgtgttcta

SEQ ID NO: 483623 - DNA, 83 bp, Homo sapiens
ccgagaccgcggccgggaccgaggatgagcgggatcgtgtgcagaagaaaaccttcaccaagtgggtcaacaagcacctcatc

SEQ ID NO: 483624 - DNA, 83 bp, Homo sapiens
caactctttgatgtactactataatgggaaagcggtagttggcaaaaaaggagaaagccactaaggtacaaaagacactggac

SEQ ID NO: 483625 - DNA, 75 bp, Homo sapiens
gggaaaattcatctggaattactacccaatcaaggaatgctgatcaacaacaggtgtgccctggggctatgaaga

SEQ ID NO: 483626 - DNA, 123 bp, Homo sapiens
ctggggctccgcgaggaaaacgagggcgtgtataatggaagctggggaggccggggagagggcagcaggatgggtgtggaagcagtgatggcacttttggaggggaccccagataccccagcc

SEQ ID NO: 483627 - DNA, 98 bp, Homo sapiens
aaccaaagctccctgctgcataagaccttgtcagagaaattacagaagacatccccgtgaagactttgaatatgaagactgtgtatgtttctgtgtta

SEQ ID NO: 483628 - DNA, 100 bp, Homo sapiens
gctccagacatgagcacaggtgagcgggagatgtcctggatcgctgatacctatgccagcaccatagggcactatgcacatccatctggaaggccttttt

SEQ ID NO: 483629 - DNA, 75 bp, Homo sapiens
ctggacctggtcagagcgcggatggccgtaaccccgaaggaaatccccacccctgcagaggacacacctcctcca

SEQ ID NO: 483630 - DNA, 80 bp, Homo sapiens
agccagaaaccggggaccttaacaatccacctaagaaattcagagatatatggcagtgtatgggagaaattacatcgagc

SEQ ID NO: 483631 - DNA, 82 bp, Homo sapiens
gaggcgagctagccgggagttacaccgccaccgccaggctcaggccacagggtcaccacatacatcgcccacccatggaggc

SEQ ID NO: 483632 - DNA, 100 bp, Homo sapiens
cgggcggggtggagcagccagctgggtccggggagcgccgccgccgcctcgatgggatatcctctgagagccaagcaaagaacattaaggaaggaaggag

SEQ ID NO: 483633 - DNA, 98 bp, Homo sapiens
tactttcctgataaagtggccctgctgcagagaaagcttggtgtaaaaattgccaaagcagttgcctgccacaactttgtaaaagccaaaaaggaggt

SEQ ID NO: 483634 - DNA, 83 bp, Homo sapiens
gggcatcgacgatctccatatttcattgcaagtgtctgtcacctgcaaatccggggacttcagctgtgggggccgtgtcaacc

SEQ ID NO: 483635 - DNA, 75 bp, Homo sapiens
gatcaagctcattacagctgtgggcataagccgaagaacagttgagaattgttgaagaacaaagaaagattcatg

SEQ ID NO: 483636 - DNA, 50 bp, Homo sapiens
tgaaaatcgagcactatttttctccgctggatattgcgtgatcacctata

SEQ ID NO: 483637 - DNA, 75 bp, Homo sapiens
gcggcgcgtggtctacgccgagtgacagagacgctcaggctgtgttctcaggatgctccggaaagacaaggagga

SEQ ID NO: 483638 - DNA, 123 bp, Homo sapiens
cagaggccgccatcaaccgccagatcaacctggagctctacgcctcctacgtttacctgtccatgctggccaaatttcgcagtctcctgtgcacagcggagggtgaagcagcagcttttctgg

SEQ ID NO: 483639 - DNA, 100 bp, Homo sapiens
cgtgcgggaagagaagatcatcgagcatttcaaacggtgcagagcattgtagaccaaggagccatggataggagaagtatgggtgaaacagaaagtggag

SEQ ID NO: 483640 - DNA, 100 bp, Homo sapiens
cgtcaatcagagcgtcctgtgcggttttgacctgtagcagagaaccaattctggagaacagcctcacttctttgattgaatacttacataatgcattgga

SEQ ID NO: 483641 - DNA, 75 bp, Homo sapiens
caaggtcggcagagcaaggggcttacgcagaaggacctggccacgattgagtttgtgacgggcaccaaaaaaggc

SEQ ID NO: 483642 - DNA, 100 bp, Homo sapiens
ggatccagggataaatcccaaacttcttaacccctagaccggtttttagtccattgactatgcagcctaatggggtctgtcctccagcctcagcagatga

SEQ ID NO: 483643 - DNA, 96 bp, Homo sapiens
cagcacaaccagtgcaccttcatttggtacaaccagtggcgggctctttgctgactttggtttctgtgcccagatcacccctgagcagagcaaacg

SEQ ID NO: 483644 - DNA, 90 bp, Homo sapiens
ctttgaaggattttctatgtttgcacatgcccccctgaccaatctgtggacgtggctggaggagctgcagaaggagctgctggacgacgt

SEQ ID NO: 483645 - DNA, 100 bp, Homo sapiens
ggcagcggttgctgggagtgcctatcattgtacaggcttcacaggactccctggaggaaaagcggaagcggcagcggtctgaacgcctggaacggatttt

SEQ ID NO: 483646 - DNA, 80 bp, Homo sapiens
aggcagtctttgctacgtacagcaaaagcagctgctggagtgtaataagtgccgaaacagctatcaccctgagtgcctgg

SEQ ID NO: 483647 - DNA, 50 bp, Homo sapiens
atcatcataccatgaaatcatcaggaagatatggggatgacatatgcgga

SEQ ID NO: 483648 - DNA, 75 bp, Homo sapiens
agggatctcttcaaatgagcaggaccaagggtgccctgaaaaccttgaaggaattttaacgaacgatgttggaaa

SEQ ID NO: 483649 - DNA, 100 bp, Homo sapiens
tccagatttctactgatttgcaagatctggtcaaatttcagccatcagcaagtactccaaagattcaggtttactcacgtcatccagcagagaatggaaa

SEQ ID NO: 483650 - DNA, 74 bp, Homo sapiens
cgaaaagagaagcagaagccccggtggcaagagtctgaagcatgtgtgaactgtgtgcggtggtcaaacagtgg

SEQ ID NO: 483651 - DNA, 83 bp, Homo sapiens
gtcgtaagaagaggtcccaatcccccactctttccgccctaatggaggtctccagtttcggaaggagtcaagactgagaacaa

SEQ ID NO: 483652 - DNA, 119 bp, Homo sapiens
gaagtgttatgatgcccttcgaaaaatgatcaactattgaccatataggtggataagattgtggaccagctgcagcagttaatgcaggtgtatgacttggctgcccttcgggattattg

SEQ ID NO: 483653 - DNA, 100 bp, Homo sapiens
agattcgcagtggtcgcttcttctccttgcttattgcaggagtgaccaggacactacctcctagaagtaatgcccacagaaagcgcaagttgttcgactg

SEQ ID NO: 483654 - DNA, 100 bp, Homo sapiens
cgggggctctggtcccctcctcggaagtgcccaccgcgtgccccgattggagaggggaccttctgcaggttgtgcaagaggcctttgaaaaagagcagga

SEQ ID NO: 483655 - DNA, 98 bp, Homo sapiens
ggctgggcccaggaagagaggcagagctcttctcacctggctaaaggagaccagcctaagaggcatttgaggagactcatctgacctcccttgaccca

SEQ ID NO: 483656 - DNA, 75 bp, Homo sapiens
gtcacgggcctcagctgggattcccgcgcccctcggacggccacgagactcgggagttgtaagacgttcatcgcc

SEQ ID NO: 483657 - DNA, 98 bp, Homo sapiens
gggactcaaggcctccatccttccacgtgaaggagggtgccaacaaggaggtgctgggaatcctggtgtcctacagggtcaaggtgaagctggtggtg

SEQ ID NO: 483658 - DNA, 75 bp, Homo sapiens
cgcagagttccgtcgatcaggactggaggaagccacgtttcaacagagactaaggtgtcagtatgttcttcaagc

SEQ ID NO: 483659 - DNA, 100 bp, Homo sapiens
ctcagctctaggatgtgcgttcttccactagaagctcttctgagggaggcattgaatgccccagaggagcccgaaacctcccaggcttggtgcaggaagg

SEQ ID NO: 483660 - DNA, 74 bp, Homo sapiens
cccggccctgctctgttctgcccggaggagccgcccattagaagcccaggacccaggaaggagacacaggaaat

SEQ ID NO: 483661 - DNA, 97 bp, Homo sapiens
atccgcaggaagatgtcgagtttcaaaaggaggtggcgcaggttcgcaagcgcataacccaggtacccactgatggtaatgctggcctgctggctga

SEQ ID NO: 483662 - DNA, 101 bp, Homo sapiens
cgttcaaccatgctcggtcatctgtggcagtatatcaaggtgtcttctctttagggatggtgaggttggaaaaaggctcctgtaaccctcctccaggatga

SEQ ID NO: 483663 - DNA, 100 bp, Homo sapiens
ctgaacaggggtcagatcattggtgaagtgcggaagggatgaatgctggagggtacggaaacctcttgatgaacagtgaacagcctcagggcgagtatgg

SEQ ID NO: 483664 - DNA, 115 bp, Homo sapiens
gaaataaggacaaaagccaagaggaggacagttcgctacacagcaatgcatcgagggaaatcctcattgacgattcaatttgttgaaggccaatttgtggactcctacgatccaa

SEQ ID NO: 483665 - DNA, 98 bp, Homo sapiens
agtcaaaggtcagctgatcagctctcctaccttcaatgccccaggtccccagtcccaagcggaagttggaagaaccagttctggagttcaggcctccc

SEQ ID NO: 483666 - DNA, 98 bp, Homo sapiens
gaagacctcttccatctaaatgacagtatttatgagcctccatttcttatactactgcagtgaaccaacattggatgtgaaaattgccttttgtcagg

SEQ ID NO: 483667 - DNA, 100 bp, Homo sapiens
gtttaggaaatagaggctttcaaagataattcgcagtgatgtgaaactggcctcccaagccctgataagtacaagaaaattccccaggacacagagctgg

SEQ ID NO: 483668 - DNA, 123 bp, Homo sapiens
ggagaaggaactccaaagacattgtcaaccgattctattcagtaccaccttcagatggaggataagaatggacgtcagtttttactgcttcaggccctccaaacatactctgatgacatcttg

SEQ ID NO: 483669 - DNA, 90 bp, Homo sapiens
ggagaaacaggcgccgcgggctccgcgcccggccggacccgggcccgaggtgaaatgacaatggatgctctgttggctcgattgaaactt

SEQ ID NO: 483670 - DNA, 101 bp, Homo sapiens
agccaggaacatggactgaagtatccagcgctcattgggaatttagttaagtctcatcggatcagatcgagcagctccatcggagatttaagcagctgagt

SEQ ID NO: 483671 - DNA, 98 bp, Homo sapiens
gaaaaggctaatggcacaactgtccacgtaggcattcaccccagcaagtggcatggcagagagaaatgctaattttgaagcccttcctgaggattgga

SEQ ID NO: 483672 - DNA, 114 bp, Homo sapiens
gagagccttcaaaagcagtgcaactggctcagtattcacagggaaagctgtgaggttacagccaagttctacttctgaatctatggatcaactactaaacaaaaatagagaggg

SEQ ID NO: 483673 - DNA, 50 bp, Homo sapiens
gagcagaggaaccacacgctgatcatgcaccctggaggggtattatgtgg

SEQ ID NO: 483674 - DNA, 95 bp, Homo sapiens
ggtggacccagaagacccccacaaaggttgcagcttcacaggattcaaagcaaatgaacttactcagctacccagacatttggatgctgaacaaa

SEQ ID NO: 483675 - DNA, 105 bp, Homo sapiens
ccggctggctgaggaaatcgcctcccgagaagaagttgaggcgctatgactacttccagcaacccagtctcctgccatgtccgaccccatcacgctgaacgtcgg

SEQ ID NO: 483676 - DNA, 101 bp, Homo sapiens
gatgatgccttcaatactacctttatttccaccataggaattcgatgtcttctttccgtcctgggagaggacataatgatagtcggaggactgtgttttat

SEQ ID NO: 483677 - DNA, 83 bp, Homo sapiens
gtgcttctcccgaatcagcttcgtttggttccttgcaaaatgatgcttcaacacccaggccaggtctctgcctcggaagtgag

SEQ ID NO: 483678 - DNA, 100 bp, Homo sapiens
tcttagtgtagttgaagatcataaagagattcacttgttttcagaaccacagtttcaaggtcacagtcaaagttttgaagaaacaacaagtcaaattgat

SEQ ID NO: 483679 - DNA, 76 bp, Homo sapiens
gaaacagcccgctatgggacagggaggtatgaaggttattgaaaaccgggccttaaaagatgaagaaaagatggaa

SEQ ID NO: 483680 - DNA, 75 bp, Homo sapiens
ctttctctaattttcccatatctgaagaaactattaaacttctcaaagccaacttctctttgcctgaaaaatgcg

SEQ ID NO: 483681 - DNA, 75 bp, Homo sapiens
ccaaagccaccaggaccctaagtatcatgatagaggaaaccagttttgggaaaagttatgcacagctgaatttcg

SEQ ID NO: 483682 - DNA, 83 bp, Homo sapiens
ctcaacacacttttctccagggatgaaacaggcgcctatttaatcgacagagaccccacctactttgggcctgtgctgaacta

SEQ ID NO: 483683 - DNA, 101 bp, Homo sapiens
gggccccgggacctgggctgggaacccgcggtggagcgggacacgaacgtggacacagcaggctctgagcgctatgaggccatgagtagaatctactatcg

SEQ ID NO: 483684 - DNA, 87 bp, Homo sapiens
gagatcctggagctgtactgtgacctgctgctggctcggtttggccttatccagtctatgaaccctgggcgctgcctatggcacagc

SEQ ID NO: 483685 - DNA, 50 bp, Homo sapiens
ggggaccacaagatcctcatcgacaggctgaccaactgactgaagagcag

SEQ ID NO: 483686 - DNA, 90 bp, Homo sapiens
ggaggagcgatttgccatcgtgctgggcacctttcacagccagcaggcattggaatatggcaccaaactcgttggaggaaccactccagg

SEQ ID NO: 483687 - DNA, 96 bp, Homo sapiens
gtcgtgtccttcgtcgtcgggggcctcggatctgcggcggaaagcggcccggctggtggccgccaagtgcacactggcagcccgtgtggacagttt

SEQ ID NO: 483688 - DNA, 100 bp, Homo sapiens
cctcttccaatggaagtgtttaagatcaagtctcgggttctcatgactcccttagccctctcacctccgcggagtaccccagagcccgacctcagctcca

SEQ ID NO: 483689 - DNA, 82 bp, Homo sapiens
tcgacattggagtgcttcattaccacgagataggcaatacgaaagacctgcctagagctggaacgttacctccagagcgagc

SEQ ID NO: 483690 - DNA, 74 bp, Homo sapiens
gggcgccgcgccgcacgagcaccagcctagagccaggccctgggaggagcggggacactgaggacctctctcca

SEQ ID NO: 483691 - DNA, 100 bp, Homo sapiens
ggggaggctcctcagagtgcactgagatcccaggaggatggccacatccccccgggctacatctcacaggtggaagttaaacgagctgagcctcgggaca

SEQ ID NO: 483692 - DNA, 90 bp, Homo sapiens
ggcccctcccccaggcctctgggctctgagtttaaaaagcagaaactcctcctagaactggaccagtatgccccagatgtggccgaactc

SEQ ID NO: 483693 - DNA, 75 bp, Homo sapiens
tttttcaatgagaagaatgaacagacctagtgggcgttgcctttagacccaggtttgagtacaagctcagcttca

SEQ ID NO: 483694 - DNA, 75 bp, Homo sapiens
cgtttggatcacaaccgagctaaagctcaaagtttcgctcttgttgcccaggctggagtgcaatggcgcaatctc

SEQ ID NO: 483695 - DNA, 90 bp, Homo sapiens
cgagactgcgcgcagggcggtcctcgggtccgcggaggctgcgctctgcgccttgccaacattccactaacccccgagactcagcgggac

SEQ ID NO: 483696 - DNA, 98 bp, Homo sapiens
aatgtcatccagcgagtgattaggtcatcatcagatttgaaatatttaaagtggatacaaaactatttcagcaatgcagacaattaagtgtgttgttg

SEQ ID NO: 483697 - DNA, 87 bp, Homo sapiens
tgacggtggaggttcgcggctctaacggggctttctacaagattttaggtgatgggcaagtcagaaagtcagatggatataactgat

SEQ ID NO: 483698 - DNA, 83 bp, Homo sapiens
aagaaaattttaaaaggaatcttggattataatcatgagtcgtcattgaattttgagaagcattctgaaaactttgcatggac

SEQ ID NO: 483699 - DNA, 100 bp, Homo sapiens
tgcccttcacgctccaggagctagccgagttcctgttctgggcttcgctgtgcatgacccatctcagcaggatggccgaggacctcatcctctactgcac

SEQ ID NO: 483700 - DNA, 75 bp, Homo sapiens
ggttagagaagaattttccaaatgaatttgcaaaacttactgtaggcacgagatgtgcgtaccaatgaagtggtg

SEQ ID NO: 483701 - DNA, 50 bp, Homo sapiens
gctcacagccaccggtaccttcttccagagtgtgaacatggctacgcctc

SEQ ID NO: 483702 - DNA, 75 bp, Homo sapiens
ttatgtggttgaagcatgaagctacccgaggcaatgcagcagctcagggtcatgatcagagttcgactcttgccc

SEQ ID NO: 483703 - DNA, 100 bp, Homo sapiens
cggggtacagttactcccggaccggcggcgtgaaagtcgtgatatcatcgttgaactggctctgaagcagaagatctggcctggcatcccgagcccagag

SEQ ID NO: 483704 - DNA, 100 bp, Homo sapiens
ctcaaagccaatgttaagtcagctgcagacttgattagcctgcctaccactgtagagggacttcagaaggatacaaatcactcactttgtctaagtgact

SEQ ID NO: 483705 - DNA, 83 bp, Homo sapiens
tcggcggcgccctgcaccgcgcctcgcaaataaggtacctgccgtgggcagatctgagctttcttcttggacaccccataccc

SEQ ID NO: 483706 - DNA, 83 bp, Homo sapiens
tgggaccagccgggcctgaggttgaactggggtgaaccgggggatatgagactttctactcggaatatcctgagtgttgcgtg

SEQ ID NO: 483707 - DNA, 82 bp, Homo sapiens
aaactggagagcttcatcaaaaatagtgatagctttgataactatccagtcagttcgctgctattcccatgggtcacaggag

SEQ ID NO: 483708 - DNA, 90 bp, Homo sapiens
ctgttgtaggcaagatcaacaaagagaaaaaagagtgccggcgggaccaccgcccaccgtgtgctcaggaggcgccccgcaacatggtgc

SEQ ID NO: 483709 - DNA, 90 bp, Homo sapiens
aacgatggttctgcttaacaagcagagagctcacctaccacaaacagccaggagctgggaatcccaagtgcaaaattgcaattgttttgg

SEQ ID NO: 483710 - DNA, 100 bp, Homo sapiens
gtgaaaatggtaacaaatttgggtgttaatctttatgtgaaaaatcttgatgatggtattgatgatgaacgtctccggaaagagttttctccatttggta

SEQ ID NO: 483711 - DNA, 75 bp, Homo sapiens
acaaagatacgaatctcttaagggggacacacacctcctctacgtactggcagctgccaacctgtatgcccagat

SEQ ID NO: 483712 - DNA, 98 bp, Homo sapiens
ctcggcctgcggcctcttctccgtctgctacccccgagtgtccagtgctgtgaaggcggaacttcgacagaatagccaggtctggctgggtcggcaca

SEQ ID NO: 483713 - DNA, 95 bp, Homo sapiens
aaacaattaaacttaacgtggaggctgtgaacacgcaccgtgacaagccaactcagagcactgtccagagcttcctccagtggacaatagcatat

SEQ ID NO: 483714 - DNA, 98 bp, Homo sapiens
cgggacgtcagtcctggaggaggcgaggagcctgccttctggtacaagatgcctgtggaatgttcggtgaagtgcacttggagttcaccatgtcgaag

SEQ ID NO: 483715 - DNA, 75 bp, Homo sapiens
aggtccgcagcctgtctgccatctacctggagaaacctgcgtaaattcaggacctataaaggtggttctgtcaga

SEQ ID NO: 483716 - DNA, 97 bp, Homo sapiens
gttatttgtggaaacagggaaggctttattggcagaaggtgtcattttaagacgagtaggcgaagcaaggactggacgtccagatcggtgacatcgt

SEQ ID NO: 483717 - DNA, 82 bp, Homo sapiens
aaaggcttttaaagccatatacagattatcttagaagacctaggactccaaaaatgtttcccctgaaggacgctgaaatggg

SEQ ID NO: 483718 - DNA, 89 bp, Homo sapiens
tccggcaggcgccccccgggggcgggaagctggccctccacgcccttcaggaggagcaggccagactcaagatgaggctgtgggacctg

SEQ ID NO: 483719 - DNA, 90 bp, Homo sapiens
cgggcaggccttccgagaggaacctctatgccgacatcgacgccgcctggcaggccctgcgcaccagaccaagagcagtgatgacctttt

SEQ ID NO: 483720 - DNA, 75 bp, Homo sapiens
ggccctgcgcctcgtccagcctaggttccacccttttctgggaacggcgaatgaggaaagatccagctctgacag

SEQ ID NO: 483721 - DNA, 100 bp, Homo sapiens
cggagcttcagcagtacctggggaacccacaggagtcgctggatagactgcacaaggtgaagactgtctgcagcaaggtgctactaaaaattttagatca

SEQ ID NO: 483722 - DNA, 100 bp, Homo sapiens
ttgagatacataagctggccttagaaaataaattgcctctaacttagctaccatagaggaggcatactccaggtcaatgacaaaactagcaaaatctgca

SEQ ID NO: 483723 - DNA, 90 bp, Homo sapiens
cctgtgcagtcctgttggaatttggacgggtaaattgaagcaaaaagcagacaagttctatgggatttgctggcattgatttcccaggat

SEQ ID NO: 483724 - DNA, 100 bp, Homo sapiens
aagcagcggcatttggacaaagcagatcatctgcaggatgtcctatgaggatttcatctaccatttcacaaagttggagatctgcaacctcacggccgat

SEQ ID NO: 483725 - DNA, 80 bp, Homo sapiens
cggccgcgcccaagcgcaggggctcctcgggctcagtggacaatgcagatcttcgtgaagactctgactggtaagaccat

SEQ ID NO: 483726 - DNA, 83 bp, Homo sapiens
cagcagagagctattattccctgtattaaaggactgaagcgggtcacgggcgggtttaactccaagaacagatgtgatgccag

SEQ ID NO: 483727 - DNA, 100 bp, Homo sapiens
atggcctacccgggatacggaggaggggaacaggaaatatagtggtcattatgattagctatccaaaaggaagagaaattttggagctggtgcaaaaagg

SEQ ID NO: 483728 - DNA, 100 bp, Homo sapiens
gcctcttctgaaggaaaagacagtgtagtcctgcaaaacattttgagatgttacaagaacgattccgggagtttgcccgagacaccgggaacattgggca

SEQ ID NO: 483729 - DNA, 98 bp, Homo sapiens
gacgcaagactgtcccggcccggggccaattcctgtccccccagcagcatggcatcgtgtgctgaaccctctgagccctctgccccactgcccgccgg

SEQ ID NO: 483730 - DNA, 90 bp, Homo sapiens
gatggacctgtggagcgccggctgtgtgttctacgagatcgccagacaatcccatgaggttggtagaacagagattctcatctccgtttt

SEQ ID NO: 483731 - DNA, 100 bp, Homo sapiens
aactggaccgtggggaaactaaaaacgcatctatctaacgtttaccctagcaaaccaggccttgggaactccaagacagaatggcccgaggcctggacac

SEQ ID NO: 483732 - DNA, 75 bp, Homo sapiens
cctcaatttaagcctgatctaacccctagaaacaggttatggaggttttgatgactatggtggctataataatta

SEQ ID NO: 483733 - DNA, 100 bp, Homo sapiens
ttacaactgtgtaactgtcttcatctttacagaggaatagtctacaaaggaagacttgtaacctggagaagagcttgtgccccaattagttcgtatttta

SEQ ID NO: 483734 - DNA, 100 bp, Homo sapiens
cagagaccctgatgctggaattgatgaagctcaagttgaacaagatgctcaggacctggtggcaaatggggcccttgtcagcatctgtaacaagtatgga

SEQ ID NO: 483735 - DNA, 96 bp, Homo sapiens
agaaaacttgtcagttcctctcagttcaccaatttttaaaatccaaatatatctcatggtacagtggaagaactggccagagagtctggaagtttg

SEQ ID NO: 483736 - DNA, 100 bp, Homo sapiens
aattgattcgtttacagatggagcaaatgcagacagggtttcaccatgttggccaggatggtcttgatctcttgacctcgtgatcctcccacctcggcct

SEQ ID NO: 483737 - DNA, 75 bp, Homo sapiens
atgcaccagcacgcctggctaacactggcagcagcgacccctactgcatcgtgaaggtggacaatgagcccatca

SEQ ID NO: 483738 - DNA, 98 bp, Homo sapiens
tgcgagcatggggccctggggctggaaattgcgctggaccgtcgccttgctcctcgccgcggcggggactgcagggggtgagtggtgcactgacagtg

SEQ ID NO: 483739 - DNA, 82 bp, Homo sapiens
gaggtagtagaccttacagaaatagggggcacggcagacgcggtcctggatatacttcagctacacagaggatcagagcagg

SEQ ID NO: 483740 - DNA, 83 bp, Homo sapiens
ggtctctgcacctcctttctggtcctgctgcgtgtccgcatgctgtactacctaagacaagaagtgataggagaccaggcgga

SEQ ID NO: 483741 - DNA, 90 bp, Homo sapiens
ctgcaggaaccagactgggggcgagctgagcacctgtagtcaatcacacgcagcttcatcagcaatggaagtggctgatatgtggactct

SEQ ID NO: 483742 - DNA, 88 bp, Homo sapiens
cagaaacaaactacatctcaggatatggagtctggagaacggttaccatcctcagcagcctcctctactacaccaacttcatcttcga

SEQ ID NO: 483743 - DNA, 100 bp, Homo sapiens
tgaccgctctggcccagggtggtacatgtcccagagcaagcacacggaggcccgggagctcatgtactcgggagccctgctcttcttcagccatggccag

SEQ ID NO: 483744 - DNA, 83 bp, Homo sapiens
cccggaaactccagcgtgtctccagccgtgggcgaccattgacgaggtggagacggacgtggtggagattgaggccaaactgg

SEQ ID NO: 483745 - DNA, 116 bp, Homo sapiens
ggtcaccagtcccaagtcgtccccctctccgccccccaggaggggcgagagggagccgcagctgatgtcaggcagtgctcggaatgtgaccaggcagggagcagtgacatggaagc

SEQ ID NO: 483746 - DNA, 100 bp, Homo sapiens
cttgctgctgctcaaagctgctgccgccccttgggctaaaagttcccagtgacctgacagcagaggagcgtcaagaactggagaacatccgacggagaaa

SEQ ID NO: 483747 - DNA, 82 bp, Homo sapiens
tctgggggagcagttttccttgagcggagattcaggttttttcagggtaagggacgagtcttctggaaggctctgccatgga

SEQ ID NO: 483748 - DNA, 75 bp, Homo sapiens
tgaatctactcatcctttatgtcttgagcaaccagccacccaggaaagtgaaaaggtttctgaatatccagcagt

SEQ ID NO: 483749 - DNA, 100 bp, Homo sapiens
cgcatgcgcatattcagggcggaaggcgcgctaagagcaggtgagcgaaatgcagaagctggatgcacaggtcaaggagctggtgctgaagtcggcggtg

SEQ ID NO: 483750 - DNA, 75 bp, Homo sapiens
gcctactggtgactcggctgcaggacaactacacctttgcccaacctgggattcaaatgaaagtgaaaatgttag

SEQ ID NO: 483751 - DNA, 78 bp, Homo sapiens
attcaggagcctccaggagcccagacaccagccccccaccatgggttggggtctgctaggtccccggaatgagttgtt

SEQ ID NO: 483752 - DNA, 51 bp, Homo sapiens
attcgcgaagctgccaaagccttagacaataaaccaagaggagttcattgc

SEQ ID NO: 483753 - DNA, 50 bp, Homo sapiens
aagatgaaacaagacctgctaagtactcgcagaaggaagacagatatgag

SEQ ID NO: 483754 - DNA, 75 bp, Homo sapiens
ctggatgccctgaagatcagcatccgccagctcaagtggaaggagtttaaggaagaaatctctaaacgttttaaa

SEQ ID NO: 483755 - DNA, 75 bp, Homo sapiens
gatctttccggatcaatccagatggcagccagtcagtggtggaggctcagctggaagctcagaaagccacgcagg

SEQ ID NO: 483756 - DNA, 50 bp, Homo sapiens
taagccgattttccggaaaaagatgccacctcagtatggacagcaaggtg

SEQ ID NO: 483757 - DNA, 83 bp, Homo sapiens
ctcagtttgtgcaggacaccgacatggaacagggactcactggggctctccacgtggcctcccagccttggaatcggtttttg

SEQ ID NO: 483758 - DNA, 75 bp, Homo sapiens
cagatgttctgggcagtgagaatccaagcaaacatgacagcttctggaacttgacacctgaaagaccccgccgtg

SEQ ID NO: 483759 - DNA, 83 bp, Homo sapiens
gactccagctcagactcagacttcgagccatcccagaaccacagccaagtttgacaagtatgcgcccaagctggacagcccct

SEQ ID NO: 483760 - DNA, 100 bp, Homo sapiens
tctcgtactaaagagggagtgggctcccctaaactggggcctggaaaaggagatctggttggagttggagggtgagagaaaatgaattctaatttacctg

SEQ ID NO: 483761 - DNA, 75 bp, Homo sapiens
tgtcaccatttctttcacaaaccttgtgtctcaatttggctacaaaagcttctaccctcctcatctttggaagtt

SEQ ID NO: 483762 - DNA, 89 bp, Homo sapiens
agtggaggcccaaggacagtgaggagctgggtggtcccagcctggagctgtgccagcctgacatggcccggcatgccagtgcttcctcc

SEQ ID NO: 483763 - DNA, 82 bp, Homo sapiens
tgaggaagacccggaaacttaggggccacgtgagccacggccacggccgcataggatgaagcagcaaaggaatttcaggaga

SEQ ID NO: 483764 - DNA, 100 bp, Homo sapiens
cggggcagttcgggccggctgtcctggcgcgagatggcatagaatttgcttttaaagagcctaatccgcaaggggagagccatccacctttaaatttggc

SEQ ID NO: 483765 - DNA, 100 bp, Homo sapiens
tgtggcatcttctacaaacccatttcagaccaatgccagaggagcaacagagctcttcagaaaccaggctgctttcaggaacattgctgtggattcccag

SEQ ID NO: 483766 - DNA, 97 bp, Homo sapiens
atgtgatagtgatggaagatatgctgaaagactttctccttggagaacacttattattggttggcaaccagaccagtattaaagagggacagctatt

SEQ ID NO: 483767 - DNA, 100 bp, Homo sapiens
gacccttcctctttgtggtccggcacaaccccacaggcctggccgtggattatcacaatgagcggctgtactgggcagacgccaagctttcagtcatcgg

SEQ ID NO: 483768 - DNA, 83 bp, Homo sapiens
cagacaaggagctcagtgacctcctggacttcagcatgtggtggacctggtttctgcagacctggaagaggtagctcagaaat

SEQ ID NO: 483769 - DNA, 83 bp, Homo sapiens
tccagaggccctgtgtccgtgacgcagttggatcagtcggctttaaattactcagacacgatgaggcgagtggtacgacagag

SEQ ID NO: 483770 - DNA, 90 bp, Homo sapiens
agaagtatttggggagaatgactgaggagccattgatgtgtcatctgtgagcgggtcacccccaggctctcccatgccaactccgctgtg

SEQ ID NO: 483771 - DNA, 100 bp, Homo sapiens
gcatcttccagtagtgacatgtctctctcagaacctccacagcctcttgcaaggtgaccaagaatatggcccaggtgaccaaagccctggacaaggccct

SEQ ID NO: 483772 - DNA, 80 bp, Homo sapiens
cgtagataagacactgcaacaacgagccaaactcaggctgtaccttgagcagctcaagcaactggtgcccctgggccccg

SEQ ID NO: 483773 - DNA, 133 bp, Homo sapiens
aggccctccggccgcaggcgggacccggcggggcgcaccacagagaccggcttcaatatcttcacccagcatggagtccatagaggccactgtattctattgaagaacatgtctaacagtaacactactcaag

SEQ ID NO: 483774 - DNA, 111 bp, Homo sapiens
agctgcccggtgcccgaggaggcagccaagctcatggcctgccactgcgtgcagcacgaacttccaggagccggtgcagccgctgacacagcagcaggtggcgcagatgca

SEQ ID NO: 483775 - DNA, 101 bp, Homo sapiens
gcctggaagaactcgtcatgctctttgtagcgtggtgcttctgttgctcacaggtgtcttctctttagggatggtgaggttggaaaaaggctcctgtaacc

SEQ ID NO: 483776 - DNA, 74 bp, Homo sapiens
caacaccacaataatccacagccaaggcattttgttcccaacatcacctttggtcaccctgtggtagaaagcct

SEQ ID NO: 483777 - DNA, 50 bp, Homo sapiens
tcactggtttggatgcattggagcatctaaatccccttgctatattccca

SEQ ID NO: 483778 - DNA, 76 bp, Homo sapiens
cggcgctgctactgctgctgctgctccggccgccggcgacgcgggattgctcgctgtaagcagctcatctgtgacc

SEQ ID NO: 483779 - DNA, 143 bp, Homo sapiens
aaactgaacaccaatgatctccagtccgaaagaacaccatttgatggaactatggtctatgcacaaaacaagctggattgtagtcacatattccacttacagtgctgtcggcgagtattagaaaatcgatggcttggcccaag

SEQ ID NO: 483780 - DNA, 75 bp, Homo sapiens
aagactttccaggaagaggaacagcatcttcaggaccgggactttgtagccaagcagaaggaggacctggagctg

SEQ ID NO: 483781 - DNA, 75 bp, Homo sapiens
gctgttgtctcagggagcacagaaaccatcatctgcaaatagcataagcagcagcacatcttcaaatcatagcgg

SEQ ID NO: 483782 - DNA, 101 bp, Homo sapiens
tggggccacagggcccccactgaagcctgcagttacactgacctctacacctacccagtgacctagagtcccgcagggatgtgaagagagaagaaggagag

SEQ ID NO: 483783 - DNA, 101 bp, Homo sapiens
agccagcatggctcacaccacaaaggttaacggcagtgcctcagatgaagaacatggagaaccgccatgcaatgagctcccagtacaggatgcattcttac

SEQ ID NO: 483784 - DNA, 100 bp, Homo sapiens
ctttcagccccactgacccaggctggcccgcattcatgcgcatcaacccactgctgcacccagaggcctccattcaggctgttttttcagatgcccaaat

SEQ ID NO: 483785 - DNA, 99 bp, Homo sapiens
agaaagcggaccttctggaactcatgccactctcagaggtgcccctgggcgctgggattgctctagcctgtaagtataatggaaaagatgaggtctgcc

SEQ ID NO: 483786 - DNA, 100 bp, Homo sapiens
aatgggagcagttttcatggatgcccctgtttctggtgttgtcgagatgtccacagaaggaggatttggtggtactagcagcagtgatgcccagcaaagc

SEQ ID NO: 483787 - DNA, 120 bp, Homo sapiens
cagatgcggggatcacccccttgttccttacaaggcaggaagaccggcagctcatcaacgctttgcagcaccactgccggaactgtggccacatcttctgcaacacctgctccagcaacg

SEQ ID NO: 483788 - DNA, 100 bp, Homo sapiens
agcgagcgaccgacgcgccacccgccgacgcctcagccgcttggggcccgcacggaccctctacttcagtgtcatggagaaactccagctgggcccagag

SEQ ID NO: 483789 - DNA, 97 bp, Homo sapiens
gagtgaggagccagacgacaagcacacactatggcgctgaaacggattaataagaatagcattgaagaacttgatggtgtccttacatccatattca

SEQ ID NO: 483790 - DNA, 89 bp, Homo sapiens
ctgagctgggaggccactagcagccagttccggcccgaggacaccgactaccagcagccatcccaggcctcaggacctgagttctccga

SEQ ID NO: 483791 - DNA, 75 bp, Homo sapiens
caaacagaaatttgtgctcaaaacccccaagggcatgagccagaaggagagctctaagtctgccatgatgtatat

SEQ ID NO: 483792 - DNA, 83 bp, Homo sapiens
ttgcgctggaccgtcgccttgctcctcgccgcggcggggactgcaggtgatgtgtccaatctagatcccaacttctcatttga

SEQ ID NO: 483793 - DNA, 75 bp, Homo sapiens
gtcgtccgttctctcaggctcccgttcagcaaacggggattcagcgtccgatcctttggaacagggactcacgtg

SEQ ID NO: 483794 - DNA, 75 bp, Homo sapiens
cgtgtactgcttgagaacagaatacattgctgattatctcatgcaggttgcacgttttcaaaaaatacctaatgg

SEQ ID NO: 483795 - DNA, 98 bp, Homo sapiens
tggtacgcggcactcagcggccagaaagtgtcacccgcaactacctagactggctcacgtccatcccttggggcaagtacagcaacgagaacctggac

SEQ ID NO: 483796 - DNA, 100 bp, Homo sapiens
tttcaccacaagaagggctgccagaatccagggcctgaaaacccagaatgaacttgtgtccatcccagagatcactgcagatgtcatgaggtaccctttg

SEQ ID NO: 483797 - DNA, 107 bp, Homo sapiens
agagcggacgggccatacccaataaccaggtgcttggcaaaatcgagcgggccattgggctgaaatctctttaatgatggagggaagcaggcagacgcgagtgtctc

SEQ ID NO: 483798 - DNA, 75 bp, Homo sapiens
gagaccatacagacctaccggtctgtcagtgagatggcttctaacaaggtcacaatccaaggtccggctcctccg

SEQ ID NO: 483799 - DNA, 100 bp, Homo sapiens
ctggccacccggattgttcctactgacatgaatgaccagaatctagaagagccatccagatatgaggggtgctgtcatcctggtctcttccattgcagct

SEQ ID NO: 483800 - DNA, 83 bp, Homo sapiens
ccagcctgcggagcctgtggggcagaacatccatgatagcagtcttctgtaaatcgaacttttcaagaattctctgaaggaac

SEQ ID NO: 483801 - DNA, 75 bp, Homo sapiens
cgggaataaaactgaccaagacaatattcaaaagcagtttgatcaaggattcactccttctccagttgcacagcc

SEQ ID NO: 483802 - DNA, 95 bp, Homo sapiens
cctggaggagccgcagtgggtcccggacaaggaggcatgcggatcctggtcactctgctgctggatacgctgcccatgctcgggaacgtccttct

SEQ ID NO: 483803 - DNA, 80 bp, Homo sapiens
cttagctgtgctcgcgctactctctctttctggcctggaggctatccagcaatgattacggacctgaagccaaagaacaa

SEQ ID NO: 483804 - DNA, 82 bp, Homo sapiens
gccgcgccctggcggctctagggaccccccccgcgcctgcacttagccccgcgcccgagaattggctgtgaaaggactgagg

SEQ ID NO: 483805 - DNA, 83 bp, Homo sapiens
actcgtgttccctgccactgtcttgttccgaggcggccccagagatgatagtatttctgctgcaagtacttctgatgttcaag

SEQ ID NO: 483806 - DNA, 50 bp, Homo sapiens
gtgaccgaaggctccgctcacgcccgggttttgagcaaaattttggactg

SEQ ID NO: 483807 - DNA, 82 bp, Homo sapiens
ctttgacaagtttgagtgttgctggaacggttcggataggcttggcttggactcatcgtcaacagcagcagcatcatcatca

SEQ ID NO: 483808 - DNA, 90 bp, Homo sapiens
gaagcataaacctatcttctttcattatggagggaggtttggcagatggagaacctgatcgaacttcggaaggggaacagtttgtgaaga

SEQ ID NO: 483809 - DNA, 83 bp, Homo sapiens
atggagtaagaggggttggctgtgaattgatttagaatctagaagagaagtaaaaaaagaagaaggtgaagcttttgcacgag

SEQ ID NO: 483810 - DNA, 75 bp, Homo sapiens
atcagtgatgttgcattccttgtggttggtgatccatttggcaaatccagtttgctgatgacatgcaggagttca

SEQ ID NO: 483811 - DNA, 100 bp, Homo sapiens
accaaattgatgtgtctgacgtcatcaggcttgttcaagacacaccggaggcgacggccatggccacaggtctatcagccacagtctctgcaagtttcca

SEQ ID NO: 483812 - DNA, 97 bp, Homo sapiens
gttcttacaacatggcagacattgacaagtaacaaacctgaatttggcaactggcatcataaacagaagcagtgcttcagctcccccaaccctccga

SEQ ID NO: 483813 - DNA, 121 bp, Homo sapiens
acgaaaacgtagggaccacatcaaagacagctttcacagtttgcgggactcagtcccatcactccaaggagagaagataaaccgagactactccttccttgactacatcctgggaggctgc

SEQ ID NO: 483814 - DNA, 80 bp, Homo sapiens
gaggcaaggagctaaagcagcgtgcgttcagccctggggtggaacacctgcagcaggagactgctgctctgaaaaagcaa

SEQ ID NO: 483815 - DNA, 82 bp, Homo sapiens
cagattcctccgggcagcaggccacagcctggcagctctgatcaggaaagtgaggaacagcaacaattccggaacattttca

SEQ ID NO: 483816 - DNA, 75 bp, Homo sapiens
ctgctcgcgcctccccaactcggatgtagccgcctgtcccgggagcctggactgtgccctgaagaggcgggcaag

SEQ ID NO: 483817 - DNA, 97 bp, Homo sapiens
aaagagatgtggggggattctcgacctgctaacagaactggaccttttcggtatcgtgatttccgatacccacctggacacccccaggagtataaac

SEQ ID NO: 483818 - DNA, 74 bp, Homo sapiens
ctacctgcggcgtcggcagctgctgctccgaggcaagaaacctattggaattcgagacttaattaatgaagctt

SEQ ID NO: 483819 - DNA, 75 bp, Homo sapiens
gacggagagaaggcggcgcgggaggtgaagttgctgctgttggctctcaaaggtctatggccctgtgttcactct

SEQ ID NO: 483820 - DNA, 50 bp, Homo sapiens
gtggaggaaaacaacttcgagggcagagatttaagaggggtgcagatccc

SEQ ID NO: 483821 - DNA, 82 bp, Homo sapiens
ccaggagcagctgagcaacttgtcaagaccgggccttgtttgtatgaagtccagcacatctgtggttgagcttgttatgctg

SEQ ID NO: 483822 - DNA, 74 bp, Homo sapiens
atcaacctggagctctacgcctcctacgtttacctgtccatgcccaactatggaaaccagcaatatggaccaaa

SEQ ID NO: 483823 - DNA, 97 bp, Homo sapiens
tcgggtgcagcgcagctcagcgcagcgctgcggcctttcggcagccgaacggccgcggcagcatgaagcgtgccagctctctgaatgtccttaacgt

SEQ ID NO: 483824 - DNA, 50 bp, Homo sapiens
ctggacacacacagccctggagactggagtgttcccagtgaagcggcgga

SEQ ID NO: 483825 - DNA, 90 bp, Homo sapiens
acacgctgtaggtgagcaagtgcaccaaggacaaggcggccactgaatggagatgtatgcatttcgattcttcatccgcctgtagatgac

SEQ ID NO: 483826 - DNA, 100 bp, Homo sapiens
gtgaaagtttggaaggtcagacctttttctccaagaaggacaagcccctgtgtaacctgtgtatggtgactggaggtgctaacctaggaagaattggtgt

SEQ ID NO: 483827 - DNA, 98 bp, Homo sapiens
cgatgaggaggtggatgagatgatcagggaggctgacatcgatggagatggccaggtcaattatgaagatgttgatgatgatggctctgctggtgccc

SEQ ID NO: 483828 - DNA, 100 bp, Homo sapiens
cgccgccctgcgtggagccgccgccggccacccggcatgtgcagtctttgccaacaaaaaaaattaccaagaaacctattccagatgagcacctcattct

SEQ ID NO: 483829 - DNA, 83 bp, Homo sapiens
gttttccttgtcccggggagtccgcgcctcccacgccggacctggtgagaagccctaccactgcaactgggacggctgcggct

SEQ ID NO: 483830 - DNA, 100 bp, Homo sapiens
aagacctgcctcctgttccgcttctcagaggacgccttcaacaccaccttcatctccaccatcgacaggcaggattgaacccaactaccccaaggtctgc

SEQ ID NO: 483831 - DNA, 75 bp, Homo sapiens
aggggatgtcgctgctggttcgggcagagtccgacggggatcttctctggatcaagcaatggtggtgaaaaatgt

SEQ ID NO: 483832 - DNA, 101 bp, Homo sapiens
ctttgtttttcctgggaactgcagcgggtgccaaagcctttgtctgtgatcagtgcggtgcacagttttcgaaggaggatgccctggagacacacaggcag

SEQ ID NO: 483833 - DNA, 83 bp, Homo sapiens
catcatgctgcgcggccttcccatcaccatcacagagagcgatctgggatagatgggcagcagaagatcatgtgcttcgtgat

SEQ ID NO: 483834 - DNA, 89 bp, Homo sapiens
tttggacaagttgataggatatactttccaagatcgttgtctgttgcaggttacaaaagtggatgaaaccagagggatcgcacatgttt

SEQ ID NO: 483835 - DNA, 99 bp, Homo sapiens
attgtgatgaattgtgctgatattgatattattacagcttcatatgcaccagaaggagatgaagctgtcaccactgactaaagaagagaaaactgcggc

SEQ ID NO: 483836 - DNA, 100 bp, Homo sapiens
tggaccccaagaagaccattcagatgggatctttccggatcaatccagatggcagccagtcagtggtggaggtcatcgggaccctggaggaggtccacat

SEQ ID NO: 483837 - DNA, 74 bp, Homo sapiens
agaaactccaatgagagaacgttttaggaatctagatgaagaaggtggtgtgtcagtgtggctacacgcatgag

SEQ ID NO: 483838 - DNA, 89 bp, Homo sapiens
cttggttcgtccctcgcccgaggagcgcggtggcggcgtgggagggagcctctgacggcgtctgtagagacggggtttcgccatgttgg

SEQ ID NO: 483839 - DNA, 75 bp, Homo sapiens
ctatcatggcctttgatgccctggtgaccttctgtgaagaactgggatcatggaagggaagtggttgctgtgtat

SEQ ID NO: 483840 - DNA, 82 bp, Homo sapiens
gaccctggagcctcagttggaagcagccgatccagcctgcggagcctgtggggcaggttcaatttcagaagcttcagcaact

SEQ ID NO: 483841 - DNA, 75 bp, Homo sapiens
cgctgctgctgggcctgaacgcagtgaacacttgtcctgctccttcacctttttcttgcatggagacagcaatgt

SEQ ID NO: 483842 - DNA, 100 bp, Homo sapiens
aatgcattactacaggactcagagaagaagaggagtcattcttctccatcacagattcctaaaaagattctcagagcatatcatgtcccgagtgggaaaa

SEQ ID NO: 483843 - DNA, 98 bp, Homo sapiens
tttcagagcaaggtcgtgcggtgtgtgtagaagaatgattcagtggtggctggtggcggggccattgagatggaactctccaagtacctgcgggatta

SEQ ID NO: 483844 - DNA, 100 bp, Homo sapiens
tggtcgcgtctcggaaaccggtagcgcttgcagcatgtctgaagatgatgagaaactgaaaaagaggaaggagcgatttgggattgtcacaagttcagct

SEQ ID NO: 483845 - DNA, 101 bp, Homo sapiens
aggatccggggatcaaagagcagtgggggttgctgacccagaggagagttctccaaacatgatcgtttactgcaaagttaaacccatccagagtaatggct

SEQ ID NO: 483846 - DNA, 90 bp, Homo sapiens
ctccccgacctctacgctgctgccgggtatctccagatgaaatggccactgcttgatgtccaggcagggagcctccagagtagacaagcc

SEQ ID NO: 483847 - DNA, 100 bp, Homo sapiens
tgagagcatccttcactttgctggctacaacaagcagaacacaactcttgggctcaagactgcagtgcagatgacgacaacttccttgtgcccatagcgg

SEQ ID NO: 483848 - DNA, 100 bp, Homo sapiens
gatactttctccataaggcgaaaagactatatcatcatgtacatagaaaaatccaaaggattctgcaaaaaagctactagaaccactgacttcatcaaga

SEQ ID NO: 483849 - DNA, 50 bp, Homo sapiens
cctcgatttcagagattatttcaggagtccttcaataatgttaaacagtg

SEQ ID NO: 483850 - DNA, 88 bp, Homo sapiens
ccgtcgtacctgatggtaggaggcagtagttccccgcttcccttccgcgggagggagagttaggttggagcaaaacgtcccactcact

SEQ ID NO: 483851 - DNA, 75 bp, Homo sapiens
actgttgttcccggagatgcggcgcgcaggaaacttttgagaagaactttgaaagagaaacccataaaataagtg

SEQ ID NO: 483852 - DNA, 83 bp, Homo sapiens
gaaatagcaagaactgaggagcaccaggagacgcaactcatcgggttaaccccaaagattggctttccttggagtgaaatcag

SEQ ID NO: 483853 - DNA, 100 bp, Homo sapiens
tgaaaagagacagtggtcaatactggcccagcatttaccacacaatggcctgaataagtttgtggagtttgacatgaagccagtctgtaagaagtgctat

SEQ ID NO: 483854 - DNA, 83 bp, Homo sapiens
cgctggaagagctcgtggcgtgcgacaacgcggcgcagaattgactggtctgagtgtctccaatggaaaggaccaacttgtag

SEQ ID NO: 483855 - DNA, 100 bp, Homo sapiens
ctatttcattagcctcagaacgatatgataaagacgatgaagccccctctgatggttgcatatggccaagtccttggagttataggatattcattacttc

SEQ ID NO: 483856 - DNA, 102 bp, Homo sapiens
tttgaaagcccagcccatttcattcacagcaggatggcagcatgtttcgccaagggatgcatgacttgaaagtctggcctaatgtagaagcagatggatcag

SEQ ID NO: 483857 - DNA, 100 bp, Homo sapiens
atggaagttgattactcagtctctaaaaagctaagagacggtaaagaacaggtccaagaaaagctcaaagaaagcaaataccagcagcagcagtagcaac

SEQ ID NO: 483858 - DNA, 98 bp, Homo sapiens
ccggctctctggaccttgtctcgctcgggagcggaaacagcggcagccagagattgagaggatccagaatccagatctctggaatagctaccaggcaa

SEQ ID NO: 483859 - DNA, 83 bp, Homo sapiens
tacaagaggggacaagtacctttatgaaccagtgtatcccaaagcattgaatgaaatgtggaaatgtcaaaatctgctccgac

SEQ ID NO: 483860 - DNA, 100 bp, Homo sapiens
gatcactactcttggaatcaaagataaatccaaatactgcatatcagaaacaacagttaaaataatcgatggggatgtgtagcccccccgtgtgaggatg

SEQ ID NO: 483861 - DNA, 100 bp, Homo sapiens
aatcggtatttctggagatagtgcaggagggaatttagctgcagcagtgactcaacagagatggagtctcactgtattgcctaggctggtcttgaactcc

SEQ ID NO: 483862 - DNA, 144 bp, Homo sapiens
ggcggatctggacacccagcggtctgacatcgcgacgctgctcaaaacctcgctccggaaaggggacacctgggccaattcctgtccccccagcagcatggcatcgtgtgctgaaccctctgagccctctgccccactgcccgc

SEQ ID NO: 483863 - DNA, 98 bp, Homo sapiens
gaaaccagatctttcagactgggagtggtgtaggagtaaatcagaaagaacccctcgtcaggtgaaaagaaagggattatctcagacagtaagccagg

SEQ ID NO: 483864 - DNA, 87 bp, Homo sapiens
gcgcgggaacaacgcgagtcggcgcgcgggacgaagataaactcaagccatggagggattactgcattacatcaaccctgcacacgc

SEQ ID NO: 483865 - DNA, 96 bp, Homo sapiens
gtttgatatttttggtcgcaccaccactccacagcagaccaaggatctggacaactctcctctgtccccaccttcaccaaggaccaaaagcagaac

SEQ ID NO: 483866 - DNA, 80 bp, Homo sapiens
cggagcctgcgggacggcggcggtggcgccgtaggcagccgggacagtgtcttgggacaaggtgcgcattcctggtgtgc

SEQ ID NO: 483867 - DNA, 100 bp, Homo sapiens
cccactggtttctctggaaacctctgtcagatcagcacctgccaccagctcctgcacccccaggtcctgcagctgcttgttaagctttttgagactgagc

SEQ ID NO: 483868 - DNA, 100 bp, Homo sapiens
cggcgcctgttctcgggctgtttggcgggtgtgaatgacagaggtggtgccatccagcgcgctcagcgaggtcagcctgcgcctcctctgccacgatgac

SEQ ID NO: 483869 - DNA, 100 bp, Homo sapiens
gcgcgggttgttcacaggcttaactccaagactgtgttcgggagtccttggaactgtggtccatggtaaagttttacagaataactgaagtgaagtgatg

SEQ ID NO: 483870 - DNA, 121 bp, Homo sapiens
cttcattcagatgtggtggaatatgccaaggaaaaactggagagcttcatcaaaaatagtgatagctttgataagaactgtggctgcaccatctgtcttcatcttcccgccatctgatgag

SEQ ID NO: 483871 - DNA, 75 bp, Homo sapiens
agctatatccgcttttccacgcagcccttctccctgaagaacctggacaagacagagcgggatgccaccagcttg

SEQ ID NO: 483872 - DNA, 80 bp, Homo sapiens
ctgaaggcctcgctggagatcgagtaccaacctaatcacacggatgctacagagagatcccaagagaagggcttctttag

SEQ ID NO: 483873 - DNA, 101 bp, Homo sapiens
aaactaaggcgtctgcgagatgagctgagggctgtggtgcggcaccggcgagccagcgtccagtccaggtgcagcagcaaggagaacattctcagagccag

SEQ ID NO: 483874 - DNA, 148 bp, Homo sapiens
ggagattccagtcgctgctcctgcttctcgggctgctggtgctgtgcgcgaggctcctcactgcagcgaagggttaaaaagatcaagtggcatgagcagccttttggggaaaattggtgccaagaagcagaaaatgagcacccttgag

SEQ ID NO: 483875 - DNA, 100 bp, Homo sapiens
gccatttattaccatgcttcaagagccattccttttggaacaatgctgtcttttggggagacattgccttagatgaagatgacttgaagctgtttcacat

SEQ ID NO: 483876 - DNA, 75 bp, Homo sapiens
caggccggctggtgagggtacaggtcattaagaaggcaaatgataccttaaatggaatcagtagtagttctgttt

SEQ ID NO: 483877 - DNA, 100 bp, Homo sapiens
atttggagttcttacaacatggcagacattgacaaaggtgtgctctgaacaagccgagacggggccgtgccgagcaatgatctcccgctggtactttgat

SEQ ID NO: 483878 - DNA, 82 bp, Homo sapiens
agtcgcgtgtctaggtgagtcgcggtgggtcctcgcttgcagttcagcgaccacggcggctatgagaggttttcctccgagt

SEQ ID NO: 483879 - DNA, 75 bp, Homo sapiens
cagtacttggcaagatttgatgctcttgtgctcagtgacatcattcagattctggatgaaattgaagaacataac

SEQ ID NO: 483880 - DNA, 100 bp, Homo sapiens
cctactgaagccgcagacaacgccagttatccaggctctgcgaaggacccgcatccgcgccgtcatggtgacagagatgaccaagcgagacgtgcctggc

SEQ ID NO: 483881 - DNA, 74 bp, Homo sapiens
atgagaagagctgtcctgagtgaaacttttagggcatggattccgtgaaggaacaacacctaaacccaagaggg

SEQ ID NO: 483882 - DNA, 100 bp, Homo sapiens
ggaggggcacaccgtccttttgtctctgcctttgaggttggcgggaactgaaactgagccccccaagatgaacccagtggtggagccactgtcctggatg

SEQ ID NO: 483883 - DNA, 100 bp, Homo sapiens
ctgggacttcccgtccgcggcgtggaggaccttcacggcatggtgcaactcccacctgcggaaggcaggcacacagatcgagaacattgatgaggacttc

SEQ ID NO: 483884 - DNA, 100 bp, Homo sapiens
acacctccattggatttaaaagacagtcctcgtcagcactgactttcagctatggaatcggttaaccccaaagattggctttccttggagtgaaatcagg

SEQ ID NO: 483885 - DNA, 105 bp, Homo sapiens
tcaggtcctcgggggcggcggccacgccaaggacgggttaaacccatccagagtaatggctgcggccttacccaggaccctgggggagttgcagctgtatagaat

SEQ ID NO: 483886 - DNA, 75 bp, Homo sapiens
ggacgattacgagctgcaggaggtgatcgcatgcagcagaactgattaaaacagtggcatctcgctatgatgaat

SEQ ID NO: 483887 - DNA, 100 bp, Homo sapiens
ttccagggcggatggtggtgatggaagcaggtggaattatgccctgttggttccaatgctgggattggctgcttttcgtctgccatcatggatgttctcg

SEQ ID NO: 483888 - DNA, 97 bp, Homo sapiens
ggggctgagggaattgtcctctgtggaagggactttcttttggccctaggccccttcctgcccctgtcgtcagcagaatctgtctatgatcttctcc

SEQ ID NO: 483889 - DNA, 75 bp, Homo sapiens
ctgttgcttggcctggtgggcccagtcctcggtgcggcgcggccaggaagctcttcgtgggcggtcttgactgga

SEQ ID NO: 483890 - DNA, 100 bp, Homo sapiens
gaagaattttccaaatgaatttgcaaaacttactgtagaggagaggagacgccgtgagcgggacgaccagatgtaccgagagcggctgcgcaccttgctg

SEQ ID NO: 483891 - DNA, 98 bp, Homo sapiens
ctccgcagcccgccgggagctctgaccgaggcgcctcgctggggcggggaccttgccttgcccggggtaaaaatgtctccatcgtatcatcagtccaa

SEQ ID NO: 483892 - DNA, 100 bp, Homo sapiens
atgagatggaaaatgttaaaaaagcaactgctaccaccacttggatggtaccaactgctcaagaagtattgcctaagtgtaatcttgaacatgggcggtg

SEQ ID NO: 483893 - DNA, 100 bp, Homo sapiens
cccttctccagcaccactgaagaggtcctgagaagtatttctcgttttcattggagatcacagcatacaaaagccaatcgacaacgtgaaccaggattag

SEQ ID NO: 483894 - DNA, 75 bp, Homo sapiens
gggggctagtggccacgctgcagagcctcggccaccaggaaaccctccccgaagaatgggtagaatcaatcatct

SEQ ID NO: 483895 - DNA, 100 bp, Homo sapiens
cgctgctcttccccgcggagcccgcgcagtccgcgcagccctcatcgcaactgggcccgcgcgcagccctagggtggtcccaaccatgtgatgtctggag

SEQ ID NO: 483896 - DNA, 99 bp, Homo sapiens
cagtttttatgctgtgtgctggagttacgcttgtacagtggaaaccagcccaagctacaaaagtggtgttgaaagatgcatgagtgtgatgcagtccgg

SEQ ID NO: 483897 - DNA, 100 bp, Homo sapiens
cgacgcgcagtccacgcaggagatccatgagaaggtcttcagaggagcagctgagccgcgcctaccgcctgctgatagcacagctgacccaggagcacgc

SEQ ID NO: 483898 - DNA, 101 bp, Homo sapiens
caaaccacttctaaatgataaggtttttcgttggaatatacgttgcacatttatggcgattctgagtgtgagggcagacttctgccaggctcagcacagca

SEQ ID NO: 483899 - DNA, 75 bp, Homo sapiens
ccagccttcacgggatatggagagaaaatcaattgtgagtttggaaattttagcattcaggtgccaggaatgcag

SEQ ID NO: 483900 - DNA, 82 bp, Homo sapiens
gctcttttcgatccgggacggccggtcaggctcgccgccgagctgggtttccaggcctgaggtgcccgccctggccccagga

SEQ ID NO: 483901 - DNA, 75 bp, Homo sapiens
aaggattccaagtaactcttatttgttcgtgccctcgtgaggctggcatgcaggatggcaggacagcccggccac

SEQ ID NO: 483902 - DNA, 75 bp, Homo sapiens
gcatttggattttggccgaactacgtatccagccaggaaaccccaattacacgagctctcatttggaagacagtg

SEQ ID NO: 483903 - DNA, 89 bp, Homo sapiens
gggacgtctagtccacaggaagacctgcaccactgtcgccttcacacaggtgaactctactatactggcaattgctggagaagattttg

SEQ ID NO: 483904 - DNA, 75 bp, Homo sapiens
ccccgcaggtcttcacccaggccctggagtgcatgcgcaggtctgtgcagacttttgcagacaaatcaaaacaag

SEQ ID NO: 483905 - DNA, 100 bp, Homo sapiens
tgaacttgcagtagctagtggagaggcaggtaagtgatgtcttggcattgcccattttcaagcaggaagattccagccttccattggatggtgaaacaga

SEQ ID NO: 483906 - DNA, 80 bp, Homo sapiens
tttcggctcagggacgacccccgtggccatgctgaagcggaggcggccgctgctcgagagcaatggtggaacaaagcggc

SEQ ID NO: 483907 - DNA, 100 bp, Homo sapiens
taattagcccaagaaacattatattcatgttatgatgtgattgctcaagcccaatctgggactgggaaaacggccacatttgccatatcgattctgcagc

SEQ ID NO: 483908 - DNA, 83 bp, Homo sapiens
aacaagacgctgcccgtcgccttcaagacagcccacctgaggatattgaccataaggactcatatctcattacaagaagcatc

SEQ ID NO: 483909 - DNA, 82 bp, Homo sapiens
ctgacaatggctttggtccccagcgcagtgaagtggtgagcctttttgtcactggcatccgtgtcattctggaccttactcc

SEQ ID NO: 483910 - DNA, 100 bp, Homo sapiens
ccaccagcatcctccaaagcactgaacgcccggcccaggtgaaggatcccaatgaagatacagaatggaatgacattttaagagatttcggcattcttcc

SEQ ID NO: 483911 - DNA, 100 bp, Homo sapiens
gcttcccagtgcctccaagataaagcaccaacacctgaggacagcaggtccttgaatgggcaagagggcacatgaagtacggcgtcctccacattcacgg

SEQ ID NO: 483912 - DNA, 83 bp, Homo sapiens
ctcacatgattgaccggattgttatgcaagaactgcaagatataccgattattgaccgacctattcgaggtcgtggtggtctt

SEQ ID NO: 483913 - DNA, 100 bp, Homo sapiens
cctccatcttcggcaccgagaaagacaagctaatgctgatgtccctatacaatgtaagcatcaatttgaaaggcttgaaatacatcagcgagagtccagg

SEQ ID NO: 483914 - DNA, 75 bp, Homo sapiens
gtttgagaattccaggcttctgcagcctccaaaaggatgatcagaagctacaggagagtttaaggcaaggtgcta

SEQ ID NO: 483915 - DNA, 75 bp, Homo sapiens
ggaagctgagcgcgtggtggagttttcctgtgctggagcagatccgcagggacatccgagacttccggtctagcg

SEQ ID NO: 483916 - DNA, 100 bp, Homo sapiens
ccctacgctcaaggtgttcatgcacgaaaacctctacttcaccaaccggaagaataatgcatatactgccatgtcagattcctacttacccagttactac

SEQ ID NO: 483917 - DNA, 75 bp, Homo sapiens
ggagatccaagagattcagtatcactcgctcccttgatgatcttgagtgatgagccctcctcttcagctaggaaa

SEQ ID NO: 483918 - DNA, 89 bp, Homo sapiens
cattcagtatggaaccgggagcttgtccgggatcattggagccgaccaagtctctttggatgaaaaatctgacaaacagtatgctgaaa

SEQ ID NO: 483919 - DNA, 100 bp, Homo sapiens
ttatcgcagtttgactctggagccactcaggtttttcctaagctcaactctagccagctaggttcctggtgctttggggatggagtttcgctcttgtcgc

SEQ ID NO: 483920 - DNA, 75 bp, Homo sapiens
gggatcgctacggaccttaaaatacccgcaacagccccttcgtcccaactgcggttggatttctcacgatgtcca

SEQ ID NO: 483921 - DNA, 100 bp, Homo sapiens
accaacacgcctgtgctgcccggctcagcggccactgccaccagcaaggaatcctgttcacgatgctggtatttggaccagcctgcgggtttatcctggg

SEQ ID NO: 483922 - DNA, 96 bp, Homo sapiens
gatgggagaagcaagagagggatccacacacctgcgcttagctttctatgacctgggcggatggaggccaaagggtaatagaacttctaccctcag

SEQ ID NO: 483923 - DNA, 90 bp, Homo sapiens
tgagcccagatattgtggctgaacaaaagaagctggaagccgcagaccttgtgatattccagggagctgagcacataacgacttacacgt

SEQ ID NO: 483924 - DNA, 100 bp, Homo sapiens
cccaaggccgctcattcaggaggactgaagcttcaagatggctgaccaggaccctgcgggcatcagccccctccagcaaatggtggcctcaggcaccggg

SEQ ID NO: 483925 - DNA, 75 bp, Homo sapiens
gcaagctgtccatgaaaccccttggtgaaggccctccagacccaaagccaactcaggaaatgaaaggacgattct

SEQ ID NO: 483926 - DNA, 98 bp, Homo sapiens
tctccctgggccggaggccactgtcttctcttcctcctccaccgagtcgtgctctcgccccaacccgcgcgccagtacttggggtgcattgaagttct

SEQ ID NO: 483927 - DNA, 113 bp, Homo sapiens
gccgcgagttcgaccagaaggcgctgctggagttccgcgacaccatcttcgacaacatcctcaaggaggagggccagagatggatgactacatggagacgctgaaggatgaag

SEQ ID NO: 483928 - DNA, 75 bp, Homo sapiens
agagcgtgaccgagagcgcgaatatcgtcatcgttagaaggtgcatgaatacctcagaagtaaactctgttcact

SEQ ID NO: 483929 - DNA, 98 bp, Homo sapiens
ctaccaccaagggagagagaggaatgtgctcttgtcctggcattgcatccacaggaggggcaggaaattctttgaagagtacccaaaggcaagtggaa

SEQ ID NO: 483930 - DNA, 87 bp, Homo sapiens
ccaatccccggcagctctctcaggagttaaagttcctcgtaattttcgcttgttggaagaacttgaagaaggacaaaaaggagtagg

SEQ ID NO: 483931 - DNA, 75 bp, Homo sapiens
ctgggatttttgggtggtgcaaagactctttttgatcagaacaatgctgcaaaaaaagaagagtcagaaactgcc

SEQ ID NO: 483932 - DNA, 82 bp, Homo sapiens
gtccgcccaggcgcagatgcgggccctgctggaccagctcatgggcacggctcgggacgaacatccagtcatggataaaaat

SEQ ID NO: 483933 - DNA, 101 bp, Homo sapiens
cttgccctggtcttgctcggccgatgaagtgcagaggtttttttctgattacaggctgtgccagccctggaaaaacagttacaattgttgttcgtggttct

SEQ ID NO: 483934 - DNA, 75 bp, Homo sapiens
tgaatacatgatttaaacaagagatttccacagaagaatctcattttcagcttctgccagagccagtagcagttg

SEQ ID NO: 483935 - DNA, 90 bp, Homo sapiens
cgcagcgcagtgacagtgcagaaccccggcgcggcccttgagaaagagatgacttgatgtctgcactagtttccgtaaggagcagcttgg

SEQ ID NO: 483936 - DNA, 95 bp, Homo sapiens
gaggcctctccagccacgcagaactgagccaaaaacctgtatatcatctccgtgaaggggatcaagggacggctgaacagacttcccgctgctgg

SEQ ID NO: 483937 - DNA, 75 bp, Homo sapiens
acgtggtgatcatgctgctaggcaacaagacctgcaggctgggacaatgaaaagaaaatagctattttacatgaa

SEQ ID NO: 483938 - DNA, 75 bp, Homo sapiens
tgtcttcttccttactgtaatgggactatttctactccacataatctgtgagaaagatcagtctaaagaaaagga

SEQ ID NO: 483939 - DNA, 82 bp, Homo sapiens
cagccgctgccgccgccgcgggagccgctgcccgaactcccggcccgaactccaggggacggcaaaacagaacagaaaggcg

SEQ ID NO: 483940 - DNA, 59 bp, Homo sapiens
tttctgggtgacactcaacaggattcccgctgatggatttacaactgagtgacagtaac

SEQ ID NO: 483941 - DNA, 98 bp, Homo sapiens
ttttggctgaggactgaagagatggccttggaagaaatggtgcagagattaaatgcggtttccaagcacacgggtgccgtgagcgatgtggagatgca

SEQ ID NO: 483942 - DNA, 83 bp, Homo sapiens
tctcgacctgctaacagaactggaccttttcggtatcatgatattagctggtttgacatcaagtcatttgtgagtcatcagat

SEQ ID NO: 483943 - DNA, 54 bp, Homo sapiens
cgggggacgagctcggagcagcagccagttacgccccatggtgtccatcctgcc

SEQ ID NO: 483944 - DNA, 95 bp, Homo sapiens
atagaattaggcctctctggaagcattacttccagaatacccaggaaggaccatcgagacctgttcttgaatacatcgatctggtctgtggtgat

SEQ ID NO: 483945 - DNA, 100 bp, Homo sapiens
tggacgggaaagattgcaaggtgaataaagaagtggagcgtgtcctgaaggagttccaccaggccgggaagcccatcggccacccctttgctgtgaagtt

SEQ ID NO: 483946 - DNA, 100 bp, Homo sapiens
gcaggagcagccaaccagcagcagccatcatggaggtacaccttgactgtccctggagacagcccctgtgctcgagttggccacagctgttcatatttac

SEQ ID NO: 483947 - DNA, 75 bp, Homo sapiens
tggggagatgaacccaacctagtgggtgtaatacatcatgaactgcagggatttgcagatttacagaatggctgc

SEQ ID NO: 483948 - DNA, 100 bp, Homo sapiens
cgggcggcgcagtcgccgcagcagccgagtctgacggcgccggttcgctgcccggtccgcccgcgaatttcgctaaggagtttgtgatcagtgatcggaa

SEQ ID NO: 483949 - DNA, 100 bp, Homo sapiens
cccgcctgaaggcaccttggccaggtccccgtccattgatagcattcagaaagatcccagatatctgtgtgaggctggattttctttgcctactccaacc

SEQ ID NO: 483950 - DNA, 95 bp, Homo sapiens
tgtaggaatagcacataaattctttggagctgaaaatagcgtgaacttgaaggtttgtctgccattgtggatttcctgggcagagtggagtgaag

SEQ ID NO: 483951 - DNA, 75 bp, Homo sapiens
cgtggctctagcaggctccactaactggggctacgactctgatgggcaggcctttggacaagcacacacaaacca

SEQ ID NO: 483952 - DNA, 99 bp, Homo sapiens
agaaaacgagcgcgagagggggaaaagcgagcgatcgagcgagcgcgcgcgcgaaaactccgggcagacaaagaaacagccttggtataatagcacgtt

SEQ ID NO: 483953 - DNA, 90 bp, Homo sapiens
gcgacctggtgcgctctcgtgaggtctcggtggatggaatcttcctcatcctcattttcacccactggaccatgtcaaggaagaaggacc

SEQ ID NO: 483954 - DNA, 105 bp, Homo sapiens
agagctttcacgaaggcaccgacgtcatcatgctgaccaccaatcagatccgtaaggaaacatgccctgaactgtcacagaatgaaaccagcgctcttcagcgtc

SEQ ID NO: 483955 - DNA, 74 bp, Homo sapiens
gtctgacaatagcagtgctatgttactgcaatggcatgaaaaggccaagaagcttgagagaagaaaaatttcag

SEQ ID NO: 483956 - DNA, 82 bp, Homo sapiens
gatggcgtgcagcgcaaccacgagacggccttccaagcactgccagtgaaagatgtagaagataaacctgaacaacaaacca

SEQ ID NO: 483957 - DNA, 73 bp, Homo sapiens
gctggggtcccttttgcctcagatactattttgaagatttatgtgatcagtttggctgaaccccgtctgcccc

SEQ ID NO: 483958 - DNA, 82 bp, Homo sapiens
cggggacgactcggacgaggactatgagaagatcggggtctgccggcacggggaccggtgctcccggcttcacaacaagccg

SEQ ID NO: 483959 - DNA, 76 bp, Homo sapiens
aaaggatcgccatgtgacacactggcatcaagctgcacatcattgactcctgggcccaactgtgaccgatttaaac

SEQ ID NO: 483960 - DNA, 98 bp, Homo sapiens
ccgggaggagccgcagcgccgggcgaccccgcccgggcctcgggtggacttacacactgggctgtcggagttctcggtgacgcagcgccggctggccc

SEQ ID NO: 483961 - DNA, 74 bp, Homo sapiens
cttcccgtcgccgctcccgaagcttttccagatggactcaccctgtcacccaggttggactgcactggcctcaa

SEQ ID NO: 483962 - DNA, 122 bp, Homo sapiens
ggaagataaatgaaggggtctagatgtaaatgtcagtggaaaggagagctaccatcactaagatcctggttagataacaatgggaaaagtgctgttaaaaagctaaagaacagtttgccact

SEQ ID NO: 483963 - DNA, 101 bp, Homo sapiens
gtcagagagagagcttggttaacttgggagaaagtttcatctgtggatggagtattgagaccgtccaggctggacttgaactccttcctcggctgaagtga

SEQ ID NO: 483964 - DNA, 99 bp, Homo sapiens
gaagggtgtcacccttagcggaggacagcgtgcccggattgcccttgctcgtgctgtctaccaggatgattatgtacttgaagtgaggcactttcagtg

SEQ ID NO: 483965 - DNA, 89 bp, Homo sapiens
cgaggaatggcggcggctgccgcaggacctgcagcatcccagagaaagaatcttcaagagggagacatagggaaaaggaagacataaaa

SEQ ID NO: 483966 - DNA, 97 bp, Homo sapiens
aagcggcagaaggagctgtacagagacgtgatgcggatgaactacgagctgttggcatccttgggtcagaagccaatgacctggccctgaggctggc

SEQ ID NO: 483967 - DNA, 83 bp, Homo sapiens
gacgaagggagaatgacagaagttaaaaacaaccaaacaaaagccaggttgaggcctctagtaagactttgaccccgacgcag

SEQ ID NO: 483968 - DNA, 99 bp, Homo sapiens
gctgcggcagcaagggcggcggtggcggcggcggcagctgcagtgacatgtccagcatgaatcccgaatagaaagttcacatccttggctccttccaaa

SEQ ID NO: 483969 - DNA, 89 bp, Homo sapiens
gaaggctagaagaatcagacgtgctccaggaggccagaaggaaatacagcccccctccatgcgcctgaaggcccgacccagcagccctg

SEQ ID NO: 483970 - DNA, 100 bp, Homo sapiens
ccctcatcaactccctccggaggcagcacctcaggaaagcactctcgagtggaccctgaggagctcttcaccaagctcgaccgcattggcaagggctcgt

SEQ ID NO: 483971 - DNA, 100 bp, Homo sapiens
ggaacaacatacagtgacgcttcacaggttgcacccggaaggagcggtgtgagcggtccaaggagccccgcaggtttgcctcggagatgaagcagtgtgt

SEQ ID NO: 483972 - DNA, 100 bp, Homo sapiens
agcgcctgaggaccggcaacatggtgcggtcggggaataagagccttttgaagaaactgaagagaaatggttatcttcactggaaaatactcgatggtta

SEQ ID NO: 483973 - DNA, 75 bp, Homo sapiens
gccactggccagaggtacttcctcaagatttttagactctgaggagcagttggagctaatccacattatggaaat

SEQ ID NO: 483974 - DNA, 50 bp, Homo sapiens
ccagtgctacatatggaaaaaggttccggagtctcaccactgcatttttc

SEQ ID NO: 483975 - DNA, 101 bp, Homo sapiens
cctgagtcatttctctctgcagcccgtcctggactctttgtacagcaagggcctcgtgttccagcaaatatgttgatgaggagaactcagacggggagact

SEQ ID NO: 483976 - DNA, 100 bp, Homo sapiens
gcctccatgcgccaatccaaaccgaaagccagaagagtcatcagaaattgggccttccctcgtgattcacaccactgtcccatttggagttacatacttg

SEQ ID NO: 483977 - DNA, 100 bp, Homo sapiens
gaaggcacttagtgcccacaaccgcaccaagaagcacgacctgctgagcaaaccagtccagctacgggggcccagccagccagcagctgagtgggggtta

SEQ ID NO: 483978 - DNA, 100 bp, Homo sapiens
gaaatcctactccacccataggaagacccacgtccacacctactcctcctcagcagcgatggattttgggtggggaagtcctccttgcggagttggcgcc

SEQ ID NO: 483979 - DNA, 100 bp, Homo sapiens
ccgtccggcggcctcacggacgaggccgccctcagttgctgctccgacgcggaccccagtaccaagctccaaagacaacaggccctccctctgccctccc

SEQ ID NO: 483980 - DNA, 100 bp, Homo sapiens
cagtgcagcgtgtgtggggtcgagcttcctgataacgaggctgtggagcagcacaggcaagataacccctgtgacagaaggctactgttgctgtaacaaa

SEQ ID NO: 483981 - DNA, 75 bp, Homo sapiens
tggctggagtagcaaggatcttcaacactagaagatatttgctgcagcctttagttgatcagatgttttgggagg

SEQ ID NO: 483982 - DNA, 75 bp, Homo sapiens
agagatggccgagtggcacagctggagcaggtgctggagaatctggtaaaagcaccattgtgaagcagatgagga

SEQ ID NO: 483983 - DNA, 82 bp, Homo sapiens
ctggaagatcagaggctcacattccagaattgccattgccttcagaaagtgttgatattattatttctgacattccatttgg

SEQ ID NO: 483984 - DNA, 98 bp, Homo sapiens
tttaatattcctgccatcacaaaagctggacaagcgaaggagaatggccaccagtccttactgagcagcgatgatcaactttttatttatgagacagc

SEQ ID NO: 483985 - DNA, 75 bp, Homo sapiens
gcctcccaaagtgccaggattacaggtatctcttaaatattccaggaccaattgacattccatctcgtttatgta

SEQ ID NO: 483986 - DNA, 50 bp, Homo sapiens
gacctacgacgggagcacctgtgcagtgtctccagaacgctatagctatg

SEQ ID NO: 483987 - DNA, 75 bp, Homo sapiens
cgggaggcaaacttgtaaaacctggaacagcagcatcattgtcaaagatgctgcagttggagaagaaacttgaac

SEQ ID NO: 483988 - DNA, 74 bp, Homo sapiens
agccaaaacagttcattcatattcagctttcaacgaaccaaacttttaaatggaccgggagatgttgaaacggg

SEQ ID NO: 483989 - DNA, 100 bp, Homo sapiens
agtcggatcgcagcttggatggccacttacctgaatgaccacctagagccttggatccaggagaacggcggctggcccacccggagagagctgccctgct

SEQ ID NO: 483990 - DNA, 118 bp, Homo sapiens
ggaggtcatgcaggaggtggcacagctcagccagtttgatgaagaactttataaggtgagcactgtgaggtgagtgctcgctcaggccgttgcaccccgggtgtctgcaagaatgggg

SEQ ID NO: 483991 - DNA, 83 bp, Homo sapiens
ctcagttggaagcagccgatccagcctgcggagcctgtggggcaggttttacacacgctggaaagattgggaatcatggtatt

SEQ ID NO: 483992 - DNA, 81 bp, Homo sapiens
atggcggctgtggtggagaatgtagtgaagctgcttcaagctcaacaagaagctgtacgagctcatcatcacccgctactc

SEQ ID NO: 483993 - DNA, 51 bp, Homo sapiens
cttctggggcaggggccagggccaggaattgaatgatctggcacgggaccc

SEQ ID NO: 483994 - DNA, 50 bp, Homo sapiens
cgggagtgaagctgcagaccttcgcaacggcgaggggaccgacctgtttg

SEQ ID NO: 483995 - DNA, 100 bp, Homo sapiens
gtgcttgcgcgcgtgagctgagccggtgggtgagcggcggccacggcatcctgtgctgtgggggctacgaggaaagattgaatagggaaaacctgctttc

SEQ ID NO: 483996 - DNA, 100 bp, Homo sapiens
aagatgttgaagattttgctagagctgaaggctgtgataatgaggaagatcttcaaatgggcattcacaaggtatctgtggaccaaacagccactcctat

SEQ ID NO: 483997 - DNA, 100 bp, Homo sapiens
gcgaccgcctctgcttcaatgtgggccgggagctgtacttctatatctacaagggggtccgcaaggtggtgatggcacttctcaaatactggccaaagac

SEQ ID NO: 483998 - DNA, 90 bp, Homo sapiens
gcgtcgttgtcgccccctcctcgtcgggaagaatcgtttggtctcctgccgtgcccgcgtttgcctcagcatggagggcggggccgcggc

SEQ ID NO: 483999 - DNA, 100 bp, Homo sapiens
ctggacagctgtccctccactacagaaacctcacagaacacagcaaaggatcgtagggcatcagaaaaacaaaaagaaatagagagagtaaaagagaagc

SEQ ID NO: 484000 - DNA, 83 bp, Homo sapiens
tttcaacatgcctctgacaatctctagtatacttgccagaactaatacagctgatgaaatacctgaccttttctgctccaggt

SEQ ID NO: 484001 - DNA, 83 bp, Homo sapiens
aagcaataccaggatagctgttgtttcagagaaaggcatccgtgtcattctggaccttactcccaactaccggggtgagaact

SEQ ID NO: 484002 - DNA, 75 bp, Homo sapiens
cgacggcagtccatgacggtgaagaagggagaggtgggaaactacctccgtatgttccgaggttctctgtacaag

SEQ ID NO: 484003 - DNA, 74 bp, Homo sapiens
tagactccatctatccatatgaggtctctaattaacagaagatggcaaagcccagccacagcagctatgtcctt

SEQ ID NO: 484004 - DNA, 96 bp, Homo sapiens
caaaaagactggagaaattttctgatgaacgtgctgcatatttcaggtgttatcataaggtaaatgagctggatggtatcccgttgatcctggaca

SEQ ID NO: 484005 - DNA, 88 bp, Homo sapiens
cgtgaccgagagcgcgaatatcgtcatcgttagaaggaaatctgagaatgaagatgacagcgagtgggaagatgtggatgatgagaag

SEQ ID NO: 484006 - DNA, 83 bp, Homo sapiens
gaggaggtcatcgacggcttcgccatcgccagcttcagcaccctggaggccctggagcgtgagtgcatctccatccacgttgg

SEQ ID NO: 484007 - DNA, 83 bp, Homo sapiens
ctgctgctccgtggagatcgtcccgcgcctgccgggcagctgtgcggagggtagtggcagccatgaaccggatggaccagaag

SEQ ID NO: 484008 - DNA, 90 bp, Homo sapiens
ctccaggaaacaagggcatgaatatgtcatattatacaggataggatttttgggccttggtctcatgggaagtggaatcgtctccaactt

SEQ ID NO: 484009 - DNA, 90 bp, Homo sapiens
atgccccgctacgagctggctttaatcctgaaagccatgcagcgggggcagtgatcggtgatggacagtctgctgtggccagtaacattg

SEQ ID NO: 484010 - DNA, 50 bp, Homo sapiens
cctcagaggacaacgaagtgttcggaaatctggcattttttaaagtttgc

SEQ ID NO: 484011 - DNA, 82 bp, Homo sapiens
ccgcagcctggtgcagatcatctacgacgagaaccgggtctcctctgagcctccggcctccataagacccaaaacagatgac

SEQ ID NO: 484012 - DNA, 98 bp, Homo sapiens
tgtgatccatgtggaaaccattcttctgtgtatagtgtaaggtgttcagtggaatcacacttacaaaatttggagggattgtggtgttggcttttgcc

SEQ ID NO: 484013 - DNA, 100 bp, Homo sapiens
cggggcggcccttggccgcattcccgcccgtcccgcagcggcgcgcggagccagactatctgttatagtccctgggtcaagacaacaatttttatacctt

SEQ ID NO: 484014 - DNA, 100 bp, Homo sapiens
cgaggaggaagaagcagctgcggcggccacaccctggatgaggtttcagcacagccagtcccacaggagcccagcagaaaagattacgagacctaccagc

SEQ ID NO: 484015 - DNA, 100 bp, Homo sapiens
agagtgtgcagccgagtcactactgcctgcctgcctgcctgctacgggcaggtgacattacggagttaaaaattctggagataccaggacctggagacaa

SEQ ID NO: 484016 - DNA, 83 bp, Homo sapiens
ttgaagccgcctctgtattacttaccagtatggtttgaagtggtgaacatggatttttctcggcttcacatgtacagtcctcc

SEQ ID NO: 484017 - DNA, 100 bp, Homo sapiens
ccagaacccaagagcagtggattcccagtgtccccacgagctgtgtggtccatgatgagcatgactatatgaaggaagaggaaggttttcctgaagatga

SEQ ID NO: 484018 - DNA, 75 bp, Homo sapiens
agttcttcggaacctttcttcccctggatgggaaaacatctcaaggtcttgggcgtctttggtactggctttttt

SEQ ID NO: 484019 - DNA, 100 bp, Homo sapiens
tgatggcccaagaacagaagttgccagaggaagtggccacacccactacagatgagataatcagggaggctatggatcagttggaagaatgggaatgggg

SEQ ID NO: 484020 - DNA, 100 bp, Homo sapiens
aatactatgaagtacatggaaacacttaagaataaactgtgcagcggatgtcaatttggatatatcaaagcctttgaaagcaaacctgagtttcaccaaa

SEQ ID NO: 484021 - DNA, 100 bp, Homo sapiens
tttgaatcaactgatgagacaattgcagaggattttggcattagagaagctcggtgctgtcttcaatcaagtagccttcccactgcagtacacacccagg

SEQ ID NO: 484022 - DNA, 96 bp, Homo sapiens
ccgccatgggcttcctgcaccagctgcagctgctgctctggaagaacgtgacgctcaaacgccggagcccggtttacatggaataccaggagagaa

SEQ ID NO: 484023 - DNA, 100 bp, Homo sapiens
ggtgccctggctaccatggaccatcctgctggtcagcactgcggctggccttggagtaccttttcaagttcattgtacagtcacggatcctgtactcacg

SEQ ID NO: 484024 - DNA, 100 bp, Homo sapiens
atggttgagggagactgtgatgagtatgacctgtcagcctctacattctctcctgacggaagagtttttcaagttgaatatgctatgaaggctgtggaaa

SEQ ID NO: 484025 - DNA, 87 bp, Homo sapiens
aaatcagtgattctacatctcaagctcatattttgaagtgtttacggattggcccggatcctcgttcgcctgccggcactcaggctg

SEQ ID NO: 484026 - DNA, 124 bp, Homo sapiens
gggaaccacactgtttaccggatctcagctccgacgcccgaggagaaggaggagtggattaagtgcattaaaaggacagaataacgggctcccagattcacaagccccaccaagaggatcaccc

SEQ ID NO: 484027 - DNA, 75 bp, Homo sapiens
caccacacgactgggtatatttcctctctgacctgtcatttactccatcctttatagtgatgctacaggacgaag

SEQ ID NO: 484028 - DNA, 100 bp, Homo sapiens
cctgtcatcccacctgagaaccatgctcaccgaccctgcatcaagcatgatggaaccatgtgtgatacctgccgccagcaaccaatcattggcattcgat

SEQ ID NO: 484029 - DNA, 51 bp, Homo sapiens
tggtggtgctgcgctgtgtgggttttgggccacacatgttccacccaatgg

SEQ ID NO: 484030 - DNA, 97 bp, Homo sapiens
gcgagctgagtggttgtgtggtcgcgtctcggaaaccggtagcgcttgcagcatgcctcctctattggcccaggaagcccacccagccccgccacgc

SEQ ID NO: 484031 - DNA, 98 bp, Homo sapiens
agcggaggtttgaccacatgcagcagcattcagggaaatcctcattgacgattcaatttgttgaaggccaatttgtggactcctacgatccaaccata

SEQ ID NO: 484032 - DNA, 100 bp, Homo sapiens
cctcgacgtcttgcctgtgtcccacttgttcgcggcctataggcagagattgtcaagaggctgaatgctatctgtgcacaagtcattcctttcctgtccc

SEQ ID NO: 484033 - DNA, 100 bp, Homo sapiens
ctgccggcttgttcttactggccctgagtctttgggggcagcctgcagaggctgcggatgatccgttggtgctgaatgagatcagagaagaccttcgagt

SEQ ID NO: 484034 - DNA, 100 bp, Homo sapiens
gatagtgaagtagagattgtgggagttcaggaacatgcaaggtgccccctttcaaaggtctcagcatcctcacgctacctcctgccgccacttccacctg

SEQ ID NO: 484035 - DNA, 90 bp, Homo sapiens
cccaagggcagcgcttcctggtgagcatgccctccaaataccgcaagaacatctggatcaagagagctctggaggctgccatcgagaacc

SEQ ID NO: 484036 - DNA, 78 bp, Homo sapiens
aggacttgagtaacagcaacatgggtgtccgcaatgttgccagtgtctgtctgcagattggctacccaactgttgcat

SEQ ID NO: 484037 - DNA, 80 bp, Homo sapiens
tgggtccgctgagcggggcgacccgaggtgctgactgggttacttttttaaacactaggaatggtaatttctactcttct

SEQ ID NO: 484038 - DNA, 83 bp, Homo sapiens
tttgcatctgtaaatgcaccttcaaacccaccaaggtaaaacatggctaaaagcttacggagtaagtggaaaagaaagatgcg

SEQ ID NO: 484039 - DNA, 128 bp, Homo sapiens
gtttcttccagtcactggcactttgaagcaaaatattccaagactcaagctaacctacaaaggacacattcagctaacgtattttagcaggtggagtgaggttgaagattcctgtgacagcgatgcca

SEQ ID NO: 484040 - DNA, 100 bp, Homo sapiens
gatcactgaagttggatggtctgttagaagaaaatcacccagaggcctccattcaggctgttttttcagatgcccaaatgcatatttgggcattagaagg

SEQ ID NO: 484041 - DNA, 50 bp, Homo sapiens
cctggtgccaatcattgacaatattatgaatacaactgagagctttgtcc

SEQ ID NO: 484042 - DNA, 75 bp, Homo sapiens
cgccgagctggacccggaccggttttggtacacagtgtatagtcaagccagcaccatgagcattccggttgcaat

SEQ ID NO: 484043 - DNA, 83 bp, Homo sapiens
ctcttcgatgtgcgagactttggaaaggattttttatcaagcagaaatgcatcgaacaacgagaatcaagatcactgagctaa

SEQ ID NO: 484044 - DNA, 75 bp, Homo sapiens
tacggctgcctgggggagctgaggctgaaatctggtattgatgtcaagctgaaccatcgtaggaagttgaaagcc

SEQ ID NO: 484045 - DNA, 95 bp, Homo sapiens
agatgtgcaaccgatccaaacagttataaaagcttggtagacagctttcgaatgattttccaaatggaagggttcacactagaaggccaaaactt

SEQ ID NO: 484046 - DNA, 98 bp, Homo sapiens
gggcccgtcaagctgcgcctgacagattggattatggaagtgggaagtgaagaagaaaaatgggagaagctggatgcagaatttgatcactttgtggt

SEQ ID NO: 484047 - DNA, 137 bp, Homo sapiens
gagctcgcccaagccgcgtccccagagagcgccctgagagaacagggtggccgcttggtccaggtactccaaagattcaggtttactcacgtcatccagcagagaatggaaagtcaaatttcctgaattgctatgtg

SEQ ID NO: 484048 - DNA, 76 bp, Homo sapiens
catacaccagtactaccaaggacagcttttttcctgcaagaagagaagctgaatttggacgacagccagtgggagg

SEQ ID NO: 484049 - DNA, 101 bp, Homo sapiens
caagaagatccacattgaggtagtggacaaaggaccagctgtactggcgctacgatgaccacacgaggcacatggaccccggctaccccgcccagagcccc

SEQ ID NO: 484050 - DNA, 100 bp, Homo sapiens
aatgaacatgtatttaaccaagttccaacaaaagaatgctgccgcagaggcatttcatccttcatgaagccattcaggattttgaattgcatatgagtgc

SEQ ID NO: 484051 - DNA, 100 bp, Homo sapiens
gtcagatggaaaaattgatgtttcggtcaacatatttcactggcacctattcacaagcttgaagaagctctgtatgaataccagccactgcagatagaga

SEQ ID NO: 484052 - DNA, 120 bp, Homo sapiens
gaaaagccatcgtaagagaagatctattaagtgcaaaagtttgtgacttgaagtggatacatattacctagaaaagtacgagaaagttcatcattttggggaggatgatgatgaggtacc

SEQ ID NO: 484053 - DNA, 100 bp, Homo sapiens
actactatgtgaagatacaagacacaaatgtaacttctgaggacaaaaagggcttccgttacaagatgaggtctgtgtatgctcacttccccatcaacgt

SEQ ID NO: 484054 - DNA, 99 bp, Homo sapiens
cagctgccgaggcgttcggtcctgctgttgcggccgctgccccagggctgcggggacggaatgggcaaagaagtggggaatctgctactggaaaactca

SEQ ID NO: 484055 - DNA, 90 bp, Homo sapiens
ctgcacctcgcagtctccccaggtccgcccagcagccgcgcttcagccagaatgccgaactggggaggaggcaagaaatgtggggtgtgt

SEQ ID NO: 484056 - DNA, 75 bp, Homo sapiens
cgcgcctcgcggcatggcgtcggaggggccgcgggagcccgaaagcgaggagaagatggtataaactggtccatc

SEQ ID NO: 484057 - DNA, 74 bp, Homo sapiens
tggaggaaacttcagtggtcgtggtaactatggccaagatcaatcctccatgagtagtggtggtggcagtggtg

SEQ ID NO: 484058 - DNA, 74 bp, Homo sapiens
cgccagatcaacctggagctctacgcctcctacgtttacctgtccatgaggtccagttccggccgtaccgcaca

SEQ ID NO: 484059 - DNA, 50 bp, Homo sapiens
caaggatagttttggctgatgtgttgtaggtggcctagatatccacaaaa

SEQ ID NO: 484060 - DNA, 90 bp, Homo sapiens
ggcatgggttaccgctgctgcccctgctgtcgctcctggtcggcgcgtggctcaagctaggagcccagcagccggggccgccctattaca

SEQ ID NO: 484061 - DNA, 82 bp, Homo sapiens
gtgtctgcccataagatcagcaaacattccaggtcgttcttccctctttccaatagatgatggcttgcttgatgatggtcac

SEQ ID NO: 484062 - DNA, 95 bp, Homo sapiens
gcttctatcatttttgttactcttcagtacaatgtcaccctcccagcaacaggccagagatcctcagcaggagcctatggaagagatagaaaatt

SEQ ID NO: 484063 - DNA, 103 bp, Homo sapiens
aacaacttgtcttcgattgcacagctaacaagagctagctgtgttccgccatgtcagaatggagggatgtgtctccggccacaactctgtgtgtgtaaaccag

SEQ ID NO: 484064 - DNA, 80 bp, Homo sapiens
ggcttttgggggatcactgtcctctctcggcagcaggctctacagattctcccctgcccctggagaaggaggagcaggtc

SEQ ID NO: 484065 - DNA, 117 bp, Homo sapiens
aacccatcctgccgtccttctccactttcgccagcccgtgccgcgagcgcggcctgcaggagtcagagcaccataacatggtgtgggaagtgaagacaaatcagatgcctaatgcag

SEQ ID NO: 484066 - DNA, 73 bp, Homo sapiens
tggggagctcagatttcttggaaacaagcagacccttttgcgtccttaaaaaaagtcggccaagattccatag

SEQ ID NO: 484067 - DNA, 75 bp, Homo sapiens
tgggtcaccaagagaggctgagagaccagatcccaagcactgcaagtccagatgcaacgggagcctggctcaagg

SEQ ID NO: 484068 - DNA, 75 bp, Homo sapiens
ctttgataaaagaaaaactttaggagatctccggcagtcaatatttcaggagctacagaaggcccaaaagaagaa

SEQ ID NO: 484069 - DNA, 100 bp, Homo sapiens
cctagagctgccaagaagcattcttcatctaaagataaggcttcgccgtggcccagtgcataaaccagcacagctccccgtccctgtcctcacagtcgcc

SEQ ID NO: 484070 - DNA, 75 bp, Homo sapiens
gcctcattggacagcattcgaggcacttccgttccggcgcccctccggtcatcaacccgctgggcaccagcttcc

SEQ ID NO: 484071 - DNA, 83 bp, Homo sapiens
caatgatgcagacatggcgcgtcttctggagcaatgggagggggcagctggcattttatgctatgtgggagcctatgtcttca

SEQ ID NO: 484072 - DNA, 73 bp, Homo sapiens
aagcaaacagatgagtgtattcgaggtgtgtcagcagcctgagtgtgggaaatgtaaagcctgcaaggacatg

SEQ ID NO: 484073 - DNA, 74 bp, Homo sapiens
cgagcccggaacattcttcacaagaaaggtatgacgattactactattatggtccacctcatatgccccctcca

SEQ ID NO: 484074 - DNA, 50 bp, Homo sapiens
ctaacatccagaagatcacacagtgttggggacttgatctcatcttcatg

SEQ ID NO: 484075 - DNA, 124 bp, Homo sapiens
gccaatctggccagccccacccctgctgacatcgggagcagtgtgccaggcccgcagtcctaccccattgtgacagcttcaaggttactgactttttatgatgtttggtggctatgagactata

SEQ ID NO: 484076 - DNA, 100 bp, Homo sapiens
ctcgacgcagcagaggcgacgcgagatggcggcagcttcagcggcggcgatctcaggcctgtctcctccctcctacacatttccagctcctgctgcagtt

SEQ ID NO: 484077 - DNA, 89 bp, Homo sapiens
aacacagaatcgtcctctttggcaatgttttcttggacgaggctgtggccctgagaaagatcacgtctacctgcagctgcaccacctac

SEQ ID NO: 484078 - DNA, 100 bp, Homo sapiens
gtcatatggcatggacaatcacagtggtggtggtgggggtagcagagctgagaatgaagcggagagcatcagacagaggagctggggaaacgtcggccag

SEQ ID NO: 484079 - DNA, 90 bp, Homo sapiens
ggctgaggctacctgtgaacagtacgcagtgaatgttagtccctgtcatccagactggagtgcagtggtacaatcccggctcactgcaac

SEQ ID NO: 484080 - DNA, 100 bp, Homo sapiens
tccttggcttcaaacatacgtagaaactgtgggtaatagcctgcagctggtgttttgagaagccctactgctgaaaacttaacaattttgtgtaataaaa

SEQ ID NO: 484081 - DNA, 82 bp, Homo sapiens
tgcgcgcctaccaggctcgaccccagaattaccaggaacactggtctcaatatgaaagtacaaaatcaagcaatgtaccaag

SEQ ID NO: 484082 - DNA, 100 bp, Homo sapiens
ctgttacaccaaaagtggcatgatcctttgcagaaatgactacattaggactcaagcacagagggttcggaaaccgcgttgctgcacggggccccagggg

SEQ ID NO: 484083 - DNA, 100 bp, Homo sapiens
ccaacacgatcccggggctcaagtggcttaacaagatccttccgctgaggaattgagaaaactaatgatgttgcatggaggtcaataccatgtatattat

SEQ ID NO: 484084 - DNA, 74 bp, Homo sapiens
tcggggcgctcatgctgctgcagctgaactgccattggatgtccagaatcccctgtagttgataatgttgggaa

SEQ ID NO: 484085 - DNA, 51 bp, Homo sapiens
atttaaagtttgatatggaacaactgaagccctggaggctgcccgaatttg

SEQ ID NO: 484086 - DNA, 100 bp, Homo sapiens
gggctgcgggcgctgaagaagatgggtattctctactgccgctgatggtcaaacgcaagtggaaattaaagtgtgtcagggtgaaagagagatggctgga

SEQ ID NO: 484087 - DNA, 60 bp, Homo sapiens
cctccactgccactacagggaagtgcatcacatgtcagtgcctgaaacagtacatgcagc

SEQ ID NO: 484088 - DNA, 99 bp, Homo sapiens
cctcctgacacaacaccactcagttcagaaacagcatatttagaaaacagatctaattctagacctttagaaagcaaaagatacggatcaaaaaagaaa

SEQ ID NO: 484089 - DNA, 103 bp, Homo sapiens
ccagttacattccagaggatgaggcgctgatgcttcgggatggacgtgactgtgaagtgctgaccacactcaccccagacactggccgtatcctgtccaagct

SEQ ID NO: 484090 - DNA, 75 bp, Homo sapiens
catttttcagggacgtagccatccagagatactggctttggcactactagtggaggggcatttggaacatctgca

SEQ ID NO: 484091 - DNA, 83 bp, Homo sapiens
tgtgcagctgcaggacaacggcaggacgtgtaaggcaggttgtgaccgagattcccgacgagagagactgaggggaagagagg

SEQ ID NO: 484092 - DNA, 80 bp, Homo sapiens
ccaaagaatatgaaattcatcatgtctatgcaaggaaagctttctaaagagaaactgaccactcaaaagatgatggaaga

SEQ ID NO: 484093 - DNA, 75 bp, Homo sapiens
aaacggaccaatggactgcgaagaactcctaaacaggtggatccagagtacccaagtggccttggaccatctgga

SEQ ID NO: 484094 - DNA, 110 bp, Homo sapiens
cacaataaaggtgctaagaaagagaatgtaagacaggaaaataattaaatattcttaccgagctgtcaataccagcaaatatgcagaaagctatcggatccaaacctatg

SEQ ID NO: 484095 - DNA, 90 bp, Homo sapiens
gcagattacagtgggacaaagaattggatctggatcatttggaacagtctacaagggaaagtggcatgccaagaaaaccatgtgggaaag

SEQ ID NO: 484096 - DNA, 75 bp, Homo sapiens
ccaccattcaagcccaaagtgcttctgacaaggcttctaaagagcaaccaccccgaggaccttcaggctgcaaac

SEQ ID NO: 484097 - DNA, 100 bp, Homo sapiens
gcagctgaactgagcgtatgtgccacgccgcccaggagacccctctgctgcaccacttcatgtgccccgcaccttctggaatcccctggagacttgccgt

SEQ ID NO: 484098 - DNA, 136 bp, Homo sapiens
gctgctgctgccgctgccgccctgagtcactgcctgcgcagctccggccgcctggctccccatactagtcgccgaatccagcaagctaaagtgcaaattcttcccgaatgtgtgttgccttcaaccatgtctgcag

SEQ ID NO: 484099 - DNA, 100 bp, Homo sapiens
cgccggagccgaggcgagcgccgcgcgcaccactggtgtcatggagaaactccagctgggcccagagattctgcagcgggaaaatccaaggcttatttat

SEQ ID NO: 484100 - DNA, 100 bp, Homo sapiens
tggcccccaccacccggaggagcagctcctgcccctgtccgggggatgactgattctcctccgccagggggggccctcagcctcttggccttgaacgggc

SEQ ID NO: 484101 - DNA, 101 bp, Homo sapiens
ggtcacgaggtggaagaggtagaggacgatactctgaccgttttagtagtcgcagacctcgaaatgatagacggatattatggggatggattaaatgccat

SEQ ID NO: 484102 - DNA, 100 bp, Homo sapiens
gtgactgctcaggaaattttccaagacaaagaattttctctacatgtgcacccatttaaaggactcggcttcaagggaagcagcttccaccgcattatcc

SEQ ID NO: 484103 - DNA, 100 bp, Homo sapiens
gcagctggctggcttcagtggaccatgtcctctcgcatggcagagcaagtgggaaggcccagaagatcccttacaatacctgagaggtcttgttgcccgt

SEQ ID NO: 484104 - DNA, 100 bp, Homo sapiens
cggagaaggactccctggacccctccttcacgcacgccctgcgcctggtgaaccaagattcctgggaacaccaccatggagggcctggcctttggcggtg

SEQ ID NO: 484105 - DNA, 75 bp, Homo sapiens
gtggacaacctgtcatcactgacttctgaaaacaagtctggaaaagtttgaaattccagtaaaaattcgtttgag

SEQ ID NO: 484106 - DNA, 74 bp, Homo sapiens
aatatcctcggaagagcgctcccaggagaaacaatgaaggagaacgacctgctcagaatgagaagaggaaggag

SEQ ID NO: 484107 - DNA, 90 bp, Homo sapiens
tggacattgaccccactggactgcagtcacagtggactcccaaggggcaggtacatgtactgggcagattggggtgagacgccctggatc

SEQ ID NO: 484108 - DNA, 50 bp, Homo sapiens
cggattagaaccaacctcttacaggctggcagtgatggggccaagattgg

SEQ ID NO: 484109 - DNA, 76 bp, Homo sapiens
caatttaagcctgatctaacccctagaaacaggaagcagtcaattatagatttcttcaaaccagcttcaaaacaag

SEQ ID NO: 484110 - DNA, 89 bp, Homo sapiens
gtcatcatgtcgcgttacgggcggtacggaggaggttttaaaatcaaagatgggaaaatcggagaaaattgcccttccccatggccagc

SEQ ID NO: 484111 - DNA, 98 bp, Homo sapiens
ttcgcgtcacccccgccgctaaggctccaggtgccgctaccgcagcttaccgtacacgagaagaaattcaggaagtaagaagtaagagtgaccctatt

SEQ ID NO: 484112 - DNA, 98 bp, Homo sapiens
tcatactaaagaacacatctggaagttacatggacacagaacagtatgaagaagcagtacgagactatgaaaaagtataccagacagagaaaacaaaa

SEQ ID NO: 484113 - DNA, 75 bp, Homo sapiens
aaaagcttgaaacggagttacaagaggctaccaaagaattccaggacgggaacgcgcttacgcctagcccgcggc

SEQ ID NO: 484114 - DNA, 101 bp, Homo sapiens
ctaaattacatattccagtaatggtggatgaagttgttcattgtttgtcaccacaaaaaggacagttccagaaagctgagtctgatctggattacattcaa

SEQ ID NO: 484115 - DNA, 75 bp, Homo sapiens
gccaaagaattgagctgaagcagggctacacatttttcatcccttccgatggtggagccagggcaagatttactg

SEQ ID NO: 484116 - DNA, 49 bp, Homo sapiens
gctcaccttaataagagaagaggatggcaatgattcagatgaattcatg

SEQ ID NO: 484117 - DNA, 100 bp, Homo sapiens
ccctttccgtttccagggttccgaccagattgggaaaatgaggtacgttagtgttcgcgattttaaaggcaaagtgctaattgatattagagaatattgg

SEQ ID NO: 484118 - DNA, 82 bp, Homo sapiens
tcgacaagaatctgcaggacttggtccgcggcatccgtaaccacaaggaggacgaggaagccatcttcgacaagagcacagg

SEQ ID NO: 484119 - DNA, 100 bp, Homo sapiens
tggactgtcaagatgcatttcctgagatgtgagatgtcatgaccctgtgtttgaagttatagaccttactcatgataacaaagatgatcttcaggctgcc

SEQ ID NO: 484120 - DNA, 82 bp, Homo sapiens
ctactgcgattccaaggagggcaaagcgtcctgcgggggatatgagactttctactcggaatatcctgagtgttgcgtggat

SEQ ID NO: 484121 - DNA, 75 bp, Homo sapiens
tattttggagaccgttgtggaaatcaaactgttcaaaggccctaaagctgatggatttacaactgagtgacagta

SEQ ID NO: 484122 - DNA, 51 bp, Homo sapiens
ctcttcctcctcctcccgcgacgtttaaggaagaaatctctaaacgtttta

SEQ ID NO: 484123 - DNA, 74 bp, Homo sapiens
gaaatgtatcgccgctcagctttccctaaggcagccatcaaaaggggttatgagagaatttacaatgaaattcc

SEQ ID NO: 484124 - DNA, 51 bp, Homo sapiens
ggcggcagagagcggggcggcggcagcttccacttcaccatcggatgtttg

SEQ ID NO: 484125 - DNA, 83 bp, Homo sapiens
gtgggccaccatcgagcagctgtgcaaagctggcagggcggagatgctggaccacgccgtcctgcttcaggtgatcaaagaac

SEQ ID NO: 484126 - DNA, 100 bp, Homo sapiens
ctgagcggcgactcagcgccccagagcccccttgtgcccatcaagatggaggacaccacccaagttgtcacaggtagtactgatggaattggaaaatcat

SEQ ID NO: 484127 - DNA, 100 bp, Homo sapiens
taactacaactggaactgtttgtggcattgatgaagatcatgacattgtagtacagtatccaagtggcaataggtcagctacacaacctggatcttacca

SEQ ID NO: 484128 - DNA, 75 bp, Homo sapiens
acaggccgacaagatacctctcgcatgtccacctcacagggcagctggtggaatttttgaagaaaatggaatctc

SEQ ID NO: 484129 - DNA, 80 bp, Homo sapiens
ggccgggagctcgacatctacaacaacctacggcagggacttgtacagcaaaagcacagcagccatgagcacttacacag

SEQ ID NO: 484130 - DNA, 83 bp, Homo sapiens
cctcgcctcccggccgagctgacgccatcactggtgcaagctatatttaacggagatcctgatgaagttcgagcactaatatt

SEQ ID NO: 484131 - DNA, 98 bp, Homo sapiens
ctcgctcctcgatcgaggacgacttcaactatggcagcagcgtggcctccgccaccgtgcacatccgaatgggtcttcatcctccaggtccaccttta

SEQ ID NO: 484132 - DNA, 89 bp, Homo sapiens
aggcccggtactacccaaacgtcagtcgaatcacaggcaggaggctccacataaacacggtttccttgaaggccgccatgcagagctgt

SEQ ID NO: 484133 - DNA, 100 bp, Homo sapiens
agtcaagaaagcattggctcaggtcttctgtgaggaatctggattgtcacctttgctgcaaaaaattacggtgagttccttcggggttactcctgcagta

SEQ ID NO: 484134 - DNA, 97 bp, Homo sapiens
tcgaagccgccacccaaaccagtcaaaccagtgaagctgtggtctaccaatctagacaactcagtggcaagcattgaggcaaaggctaatgtgtgct

SEQ ID NO: 484135 - DNA, 100 bp, Homo sapiens
gggcaataagctgctgttcaggtaccccttccagagaagccaggagcacccggcgtcccagacaaattgtagggaatggaagtgaacagcagctgcaaaa

SEQ ID NO: 484136 - DNA, 98 bp, Homo sapiens
aatgagacagggcacaccaaactccatctgtggagacctttggcgacttggcctttggcgacatcttcctccacctgctcacgggcaaccttgcgctg

SEQ ID NO: 484137 - DNA, 100 bp, Homo sapiens
gaaagtagaagagatcaaggcagagttatttggtcatggaagaacaactgacttgtccaagaccattgccctcttgaacatttaccgtaaccctcaaaac

SEQ ID NO: 484138 - DNA, 97 bp, Homo sapiens
acaacctgctgatgagggaggtgcccctgcgttgtaccatccgcctgtgggacacctaccaggtggacccccaaaagtacaagggcatatttaacgg

SEQ ID NO: 484139 - DNA, 50 bp, Homo sapiens
ccctgtactgcccagaggagaaggaggaagagagaagggcacagttacct

SEQ ID NO: 484140 - DNA, 95 bp, Homo sapiens
aaaaagttaaacaagcaagcctgccataagtgagaagactatctggcttcctggtgatgctcacgctttgctaagtgttggcggccatcgtggtt

SEQ ID NO: 484141 - DNA, 75 bp, Homo sapiens
agataaaagcggaagtttgccacacgctccagaaactaaaacgatcactttctttcaagaccaagagtttacgga

SEQ ID NO: 484142 - DNA, 51 bp, Homo sapiens
gggagaacctgcggcggccggagcgctattggatgaactcccaatgatata

SEQ ID NO: 484143 - DNA, 83 bp, Homo sapiens
ggcgtgcactccgcacctcggggacattattgcgcgtggaacggctgcttttggaaggacgtggcccagtggaacatcgggag

SEQ ID NO: 484144 - DNA, 75 bp, Homo sapiens
caaacttgctaaaggaaataggttattcatgagatttgctacaaaaggtttgtttctgcgtcacatgatcttggc

SEQ ID NO: 484145 - DNA, 100 bp, Homo sapiens
gatatcacagtgaagttgatggtctgccttgtacatctcaacattcttgaaccacttaatgaagttggtatgccagcggattatgtaaacaagcttgcta

SEQ ID NO: 484146 - DNA, 75 bp, Homo sapiens
atccgtgacgtgggtcgccatcgatatgggttgggggccgtcccgctcctaaggcaggaagatggtggccgcaaa

SEQ ID NO: 484147 - DNA, 100 bp, Homo sapiens
cggatccagcttcctggacttgggggatctgaacgagtcggacttcctcaacaatgcgcttgcgcgatctctggcctcttcaactgcatcaccatccacc

SEQ ID NO: 484148 - DNA, 90 bp, Homo sapiens
attacagaggagcccatggcatcatagttgtgtatgatgtgacagatcagcagaaacagtcctgctccagctgtaacagcagcatctgtg

SEQ ID NO: 484149 - DNA, 100 bp, Homo sapiens
acctgctctgtaccaactgccggaaagtgctgcggaaggagctctttctgagatgaagagaattctcaatgtcaagatttgaacaagaagagaatggaat

SEQ ID NO: 484150 - DNA, 83 bp, Homo sapiens
gccccatagatggccagctttcccccgagggtcaacgagaaagagatcgcgtcgagggcgaggcccccagcagtgagactggc

SEQ ID NO: 484151 - DNA, 83 bp, Homo sapiens
cagcgctgctgggatggcgcgggccgggccggcgtggctgctgctggcaatctggatcatggaagggaagtggttgctgtgta

SEQ ID NO: 484152 - DNA, 82 bp, Homo sapiens
cgggcactgctttccactcggctcctgtcgtccgttctctcaggctcccgttcagggcgtgatggtgggcatgggtcagaag

SEQ ID NO: 484153 - DNA, 100 bp, Homo sapiens
ttcttcttcgagtatttgtagaaggtacctaggtgctgatatggaagaatttcatggcaggactttgcacgatgacgacagctgtcaggtgattccagtt

SEQ ID NO: 484154 - DNA, 75 bp, Homo sapiens
cgtgcgcccgcgccaccatcttcggctgaagtacggcaagaagaagctgaaatacctgccctacaatcaccagca

SEQ ID NO: 484155 - DNA, 75 bp, Homo sapiens
cacagaagttgtattagatgatgacagagaagatctttttgcagaaaataatgttgagtttccatgaagaacagg

SEQ ID NO: 484156 - DNA, 97 bp, Homo sapiens
taaagcccagaagaatgtggctaccagcgaagacacatcaccttcactttgggatatggaatttgataagcagttagccacagaatatgaacaaccc

SEQ ID NO: 484157 - DNA, 50 bp, Homo sapiens
attgaaggaggactctttggatgatgcaaacttaaaactgattagagaac

SEQ ID NO: 484158 - DNA, 50 bp, Homo sapiens
caaagtcagcccaggcagacctccaggtgccctacgagacgctgaacaaa

SEQ ID NO: 484159 - DNA, 74 bp, Homo sapiens
gaaactggaagaaaaaagaaaagaaactgacaaaaacatttctgaggcccagtttgagatgccttatgtggtac

SEQ ID NO: 484160 - DNA, 105 bp, Homo sapiens
acggaagcccgtgtgcaaatggaggtcgttgcacccagctgccctcccgggaggctgcctgcctaattcagtttgcctgttctgtatgcaagttccgtagctttg

SEQ ID NO: 484161 - DNA, 83 bp, Homo sapiens
aggagaacaaacagatcatccgcaaacacgcgcagaccttcgttgccctctgtgccacagagctgcctggagttcagcctcag

SEQ ID NO: 484162 - DNA, 75 bp, Homo sapiens
actggagaacagggagatccagccaccattcaagcccaaagtgtgatgctacaggacgaagaggaatggataaaa

SEQ ID NO: 484163 - DNA, 83 bp, Homo sapiens
agagagagacgtgattgagcccctgtttttgctggcggagccaatggagatcttcgtggatgatgagacgaagttgacgctgc

SEQ ID NO: 484164 - DNA, 100 bp, Homo sapiens
gattaggcatcttggctggcttgcagaaaaggatgacccctccggcgaaggtgtcctgccctcggcccgcggcccagccaccttcctccccttcctcact

SEQ ID NO: 484165 - DNA, 83 bp, Homo sapiens
caagtttgcagatcgggagcgcaaggtcgccctcaaggccatgatcaaaactgcagagcagagcgggcggaggaccccgggcg

SEQ ID NO: 484166 - DNA, 100 bp, Homo sapiens
gtgcgagaactgcgcagacctggtggaggtgttaaatgaaacaagagtgagccatggagctacgtgtggggaacaagtaccgcctgggacggaagatcgg

SEQ ID NO: 484167 - DNA, 101 bp, Homo sapiens
gccgaccccggcgtctccttctatgtgctgtgtccggacaacggctgcggcgacaattttggccgttgctccagggagaactgcaaatatcttcatccacc

SEQ ID NO: 484168 - DNA, 50 bp, Homo sapiens
cagaatctgatattcttaagccaacaggatttctctctgatcaaacggac

SEQ ID NO: 484169 - DNA, 74 bp, Homo sapiens
gtgaccctgcagctcctcaaagtgatgttcgaaatgatatctatgtaacattagttcaaggagattttgataaa

SEQ ID NO: 484170 - DNA, 101 bp, Homo sapiens
gttcaaagccaccacccaagatcagctgtgtctcagtttgaaactgaattctacatcagtggacttgcacctctctgtgatcagcttgttgtactttcgta

SEQ ID NO: 484171 - DNA, 82 bp, Homo sapiens
cgaccatgtcttcatttgcttccacaagaaccgcgaggacagaggctgaccccgcactacatctacccaccagccatcgtgc

SEQ ID NO: 484172 - DNA, 73 bp, Homo sapiens
agcaacccatacctgatccggagaatcgaggagctcaacaaggattatatctgtccaagatgcgagtctggtt

SEQ ID NO: 484173 - DNA, 76 bp, Homo sapiens
cttgaacatcctttgactggttagccagatcctggctctgcagagagaacagcccagaaaagaaagttccccagcc

SEQ ID NO: 484174 - DNA, 82 bp, Homo sapiens
cagacggcgagacctcctgcacaggtttttagaacttcagccataaaaatgggcagaattttccttgatcatatcggtggta

SEQ ID NO: 484175 - DNA, 100 bp, Homo sapiens
ctggggccttggaagatgcccttgccaagaagtgggccaccatatctggaaactacagtctatgctttgaagcgcaaaagggaataaacatttaaagact

SEQ ID NO: 484176 - DNA, 100 bp, Homo sapiens
tggtttcttgtgaggacgcggcagcccgtggagtcggctgagggaaaagcgaggcaaggcaggcggccaccattggttcaggcaatcttcagcggtgatc

SEQ ID NO: 484177 - DNA, 100 bp, Homo sapiens
acaggctcttaaaggtacttctcagattaaattactctcatctgaagatatagaagggatgcgacttgtatgtaggagagcagcacttgaggcatgtcac

SEQ ID NO: 484178 - DNA, 80 bp, Homo sapiens
ttctggggagcgcctcgtcgacatgagtgatgtggaggaaaacaacttcgagggcagaggtcctgtattaataggaagtt

SEQ ID NO: 484179 - DNA, 100 bp, Homo sapiens
tgctgaccgtgggagccgaccgaggagtttcaattactgaaaattacttggaaatagaaggaatggctaattgtctcccattctatggagtagcagattt

SEQ ID NO: 484180 - DNA, 75 bp, Homo sapiens
cgcccgtccccctgccccgttcacaatccctgggcgctgcctatggcacagccaagagcggtaccggcattgcgg

SEQ ID NO: 484181 - DNA, 83 bp, Homo sapiens
gagatggaccaaaagcctctccagcaataatcccaagacactaagggcgactaccagaaagcgctgctgtacctgtgtggtgg

SEQ ID NO: 484182 - DNA, 75 bp, Homo sapiens
tttgttaaggattccaagtaactcttatttgtttaaaattggtggtgaatggtggacatggatcgattataaccg

SEQ ID NO: 484183 - DNA, 75 bp, Homo sapiens
cggccggagcgggcggctgagacaaaggcgacgatcgcaccccctccctccctggcggagcccctgaaggagctg

SEQ ID NO: 484184 - DNA, 100 bp, Homo sapiens
agtccctgccagcaagccggagcctgccagagccaaggccaagctctccaagttcagcatccccaagcagggggaggaacattttagtggacaaaccaaa

SEQ ID NO: 484185 - DNA, 115 bp, Homo sapiens
ccgtcagggacacaactgccacaagccggacacgtaattgtattcccattggagagcagcttcagtcggtgttgggcaattctggatacaagcatatgattggactacaatcctc

SEQ ID NO: 484186 - DNA, 74 bp, Homo sapiens
taaaaccacatgtgcatctaaagacagttggcacgggatttaagcgagagcctcactggttcccaggacatcaa

SEQ ID NO: 484187 - DNA, 82 bp, Homo sapiens
gcggtcttgactggagcacgacccaagggggatatgagactttctactcggaatatcctgagtgttgcgtggatgtaaaacc

SEQ ID NO: 484188 - DNA, 85 bp, Homo sapiens
ttgccacgttcaaacaagcagctttttgaattactttgttatgcagaaagtgttatcaatactctggctgaccatcatcatcgtg

SEQ ID NO: 484189 - DNA, 100 bp, Homo sapiens
gtgaagctggatttctcctgccaggagaatctcctgcaggatctcagtgatgggtttggaaatcccttgtctccaggttgctgggattgacttcttgctc

SEQ ID NO: 484190 - DNA, 101 bp, Homo sapiens
aaaagggcaaggccctgatgtatagtctgcgctcctcagaccaccggcaggtgaacagcctgatgcagaccgaggagtgcccacctatgctagacgccaca

SEQ ID NO: 484191 - DNA, 80 bp, Homo sapiens
cccccactctttccgccctaatggaggtctccagtttcgccctgggcgctgcctatggcacagccaagagcggtaccggc

SEQ ID NO: 484192 - DNA, 100 bp, Homo sapiens
aaagaagagtttgtgttcaaagggagagattaaagatgtgcaacttcagtcttgtgaaaatgccattgtgtgctggaaacctggcaagatggaagatgat

SEQ ID NO: 484193 - DNA, 83 bp, Homo sapiens
ggcctgccgctccccgggagagaagtgctggagaatctggtaaaagcaccattgtgaagcagatgaggatcctgcatgttaat

SEQ ID NO: 484194 - DNA, 75 bp, Homo sapiens
cggcttatcgaacagagccgggagttcaagaagaacactccagagggcattctacttggacaagtcaaattcacc

SEQ ID NO: 484195 - DNA, 98 bp, Homo sapiens
tctgatgaggatgttacagatgctggtcttaccacttatcatctccagtcttgtcacagcatcggcgtgtcataagatccatcacagctgcaaaatac

SEQ ID NO: 484196 - DNA, 100 bp, Homo sapiens
gtgctgcggagcgacgcggcctgggaggataaggtggagaaaatccgttactgcatcaccaaacttgacagggagcttcgaggactggatgacatcaagg

SEQ ID NO: 484197 - DNA, 101 bp, Homo sapiens
ttaaatgcaaaacactcagagaaatcaccaccttctacaggtgtccttcttcacatcattatggaatcacccatttttcaccattagctgtatcactctaa

SEQ ID NO: 484198 - DNA, 49 bp, Homo sapiens
ggaggtcagcggtggtgctcgctgctccactgcttttaaggccctgcac

SEQ ID NO: 484199 - DNA, 96 bp, Homo sapiens
gtcgtgaagaagcaggaggctaagaaagtggtgaatcccctgtttgagaaaaggcctaagaattttggcattgtggaatgcagtagccctctgggc

SEQ ID NO: 484200 - DNA, 82 bp, Homo sapiens
atcaaggccaagtatccgccagtcaataggaagtacgagtaaaacccgcctagtgccaagcaaccctccaagatgctagtta

SEQ ID NO: 484201 - DNA, 90 bp, Homo sapiens
cttcgcgacacccttgaagctgagaaatggcattgatgacggggagccttcctggctttgtcgacgtcatcaggaacctcaattctcctg

SEQ ID NO: 484202 - DNA, 50 bp, Homo sapiens
cggacgccagcggacacgcgggcgaggttatgggtgctacatgtgtgctt

SEQ ID NO: 484203 - DNA, 90 bp, Homo sapiens
gcgggaatgaaggccagcttccagagggtggtggtctggaagcggtacagcgacttccgcaagctgcatggagacctggcctacacccac

SEQ ID NO: 484204 - DNA, 75 bp, Homo sapiens
gcccaaatcacctgtacttggtcatgcagctgtggaggagttactgatggccatggagaaggtaaagcaggaact

SEQ ID NO: 484205 - DNA, 100 bp, Homo sapiens
gtgtaccacctgtcgcggcgcgagacctctggcatgaacaaccgggaggtgctggagcaggtggagcgaggctacaggatgccctgcccgcaggactgcc

SEQ ID NO: 484206 - DNA, 74 bp, Homo sapiens
gcagttctacaaggcgagccaggaaccactcgttttgactattattttatcactctttgtgaaacttcacaatg

SEQ ID NO: 484207 - DNA, 100 bp, Homo sapiens
cctgctttcacagaattattccagggtttatgtgtcagctcacctcagcctgccagacccacaagccttgaagagagatgtcccctgtgataatgtcagc

SEQ ID NO: 484208 - DNA, 78 bp, Homo sapiens
gagcggcgggcggcggcgcgcggacccaggcgcggatggcgaggccagcagatgaaggtcaccgtgtccaaagggggc

SEQ ID NO: 484209 - DNA, 78 bp, Homo sapiens
gttcctcttgctcacagagctctgtaaaggtgtcgtgaaaactacccctaaaagccaaaatgggaaaggaaaagactc

SEQ ID NO: 484210 - DNA, 89 bp, Homo sapiens
ctgcagcctgcggacgaggccgggacttggccgagcggatcctaataaggggaaaatgggcgaagctgtgctcaggcccgggctggacg

SEQ ID NO: 484211 - DNA, 75 bp, Homo sapiens
agcgaggacaaggacaaagaaggcaaacccctgctgaaggctgagaacgggaagcttgtcatcaatggaaatccc

SEQ ID NO: 484212 - DNA, 75 bp, Homo sapiens
gtcagcatcccagccgtgctcacggttctgggccggagaaggggcgacgttcgggcaccccccgaatggacaatc

SEQ ID NO: 484213 - DNA, 97 bp, Homo sapiens
atggttattgcaagttccaacctggaaaggccatcggctttgtcaaggatgtagccaacatcacaatcgggctcttcagagcagcaggacacctgct

SEQ ID NO: 484214 - DNA, 88 bp, Homo sapiens
tggagccactgattatacctctagtatagaaatgggacgtcggtcatcagatactgaagaagaaagcagaagcaagagaaaaaagaaa

SEQ ID NO: 484215 - DNA, 83 bp, Homo sapiens
cggcccgcttcctggaatggcaagcgcagcaacaacagagagcacgtgccttcatcccgcgtggagtctacccccaagccctt

SEQ ID NO: 484216 - DNA, 100 bp, Homo sapiens
tgaaaatgatgttggaaatgcacaagctggagcccaactgataatccttgaacatgaaacctctgtagaggagcaggatgcaaccgacaggctgtggccg

SEQ ID NO: 484217 - DNA, 75 bp, Homo sapiens
tgagctgtccctgctggaggagcgcttccgggtccagtccaggtgcagcagcaaggagaacattctcagagccag

SEQ ID NO: 484218 - DNA, 96 bp, Homo sapiens
ccggatctggtaacatggcaaaagatctgcggataaccgtctggtccttgtgcacaaaatccgtgtcttacatcaaatacccgaaagcttgtctgc

SEQ ID NO: 484219 - DNA, 105 bp, Homo sapiens
cgtccgtccgccgccaccacccactccggacacaggtgctggagaatctggtaaaagcaccattgtgaagcagatgaggatcctgcatgttaatgggtttaatgg

SEQ ID NO: 484220 - DNA, 74 bp, Homo sapiens
aaattgtttgcaagtgtcacaagactgaaactgttgaggagcccatggaggaagaagaagcagccaaagaagag

SEQ ID NO: 484221 - DNA, 98 bp, Homo sapiens
aaaaggggagcgcggagaggaggctggaagaggaagatgcctagcacagaccttctgatgttggtgaccattgtgaggtagatattttgttctaattt

SEQ ID NO: 484222 - DNA, 52 bp, Homo sapiens
tggtgcagaaatttaaccacagccacagacagagtcttgctctgttgcccag

SEQ ID NO: 484223 - DNA, 75 bp, Homo sapiens
ttcttaacccctagaccggtttttagtccattgactatgcagcctaatggtttttacccagtcttgctaggtcag

SEQ ID NO: 484224 - DNA, 75 bp, Homo sapiens
ccgcaggcgcagacccacccgccatgaagccccccgcagcaggttcaggagaagtggcacctggtggaggacctg

SEQ ID NO: 484225 - DNA, 90 bp, Homo sapiens
caagcaaaagccttggagaggaggagaatgtatcaagctacatccgatactcccagatctgtgcaaaagcagtgagagatgcactgaaga

SEQ ID NO: 484226 - DNA, 75 bp, Homo sapiens
gctgcagagaccccgctatggctatgcagaatcctgatacactatcagcaatgtcaaaccctagagcaatgcagg

SEQ ID NO: 484227 - DNA, 76 bp, Homo sapiens
cgtgccgcggcggctggcgctacgcccaggcccactccaccatcgtcagcgaggtgtacctgaaggaaatcttaaa

SEQ ID NO: 484228 - DNA, 74 bp, Homo sapiens
cttgtgcatatgtcaatcttaacatttgtgcaaatggcagtgaacaagaacatacatatgatagttgagaaaga

SEQ ID NO: 484229 - DNA, 100 bp, Homo sapiens
ggaccccctagaagcctagaaatgagctgaagccatttattggtatcttggatggttaacatctaaatgcttaattcctgaaaccactcaagagtcatag

SEQ ID NO: 484230 - DNA, 98 bp, Homo sapiens
gcttagtgaatatgatcaagttctcgtggagtcagacaatgagcgttacagtgtttctgccacctctgtacaaaagacaattttacttgtgtgacaga

SEQ ID NO: 484231 - DNA, 51 bp, Homo sapiens
gaccacggtcaccgtctcctcagttaccggtattgtaagaacaagccgtac

SEQ ID NO: 484232 - DNA, 99 bp, Homo sapiens
aaagatttcgctgcgaagctgtctttaatacccagcccgccacctggaccgctccatttggcatggctttgggaagaagacaagaatttgagatctggc

SEQ ID NO: 484233 - DNA, 83 bp, Homo sapiens
tccgacggcgacggcaccgtggagaaaggggaaaggccatacaaatgtcagacctgcgagcgaaccttcaccttgaagcacag

SEQ ID NO: 484234 - DNA, 100 bp, Homo sapiens
ccttctggtgctggtgaacttggtcaaattcaatagctgttacctcgacgagtacatcgcaaggatggttcatcgggaacatgccctgtgtgccgccgtc

SEQ ID NO: 484235 - DNA, 98 bp, Homo sapiens
gctgggcgttcatctaccacgcctacgtgtcgcaatggaagaagagatcgccgcgctggtcattgacaatggctccggcatgtgcaaagctggttttg

SEQ ID NO: 484236 - DNA, 82 bp, Homo sapiens
tggctctgagcgtgctgccgggcagccgggcgctgcggccgggcgactgcgaagatatctccggagcatttggataatgtga

SEQ ID NO: 484237 - DNA, 83 bp, Homo sapiens
caagtcctcgcacctaaagtcgcacctgcggacgcacacagcaattctgtggtgttcttggtcacacatttatggagtttctg

SEQ ID NO: 484238 - DNA, 75 bp, Homo sapiens
tggaactactctacggcatctggagcaactggaatgtttacccttgcggaagttgcatcacttaatgacattcag

SEQ ID NO: 484239 - DNA, 75 bp, Homo sapiens
gaccagcagcgacggtagcagcagcatggccgcgatctatgggggtgtagagggcatccagcagattcagtgctg

SEQ ID NO: 484240 - DNA, 96 bp, Homo sapiens
aatcgagtgcacctgggatgacaaaaagtcatagtggtgtgacaaatggagtttgacgagaaggacttacgacgggagatcagctatgccattaag

SEQ ID NO: 484241 - DNA, 95 bp, Homo sapiens
agagttggccccgatatccgctcagggtgtcctatgccagacccagttcagcatccatccgggatgctaacctgtacgtcagcgggctccccaag

SEQ ID NO: 484242 - DNA, 100 bp, Homo sapiens
caaacagtccttccactcataggtcatacaggggctgcttgctctcggtgactacatgaatgtccagtgccatgcctgcattggaggcaccaatgttggc

SEQ ID NO: 484243 - DNA, 100 bp, Homo sapiens
agggggttcagctttccaagacaaagtcctggaaagacaagcatcatgcctctgaccagtgccttcagggctgtggacaacgaccctgggatcattgtct

SEQ ID NO: 484244 - DNA, 75 bp, Homo sapiens
cggctgtgtcgcagcctctcgggatgacaccactctgaatgcactgaacacaattgctgctaaaattgattcaat

SEQ ID NO: 484245 - DNA, 82 bp, Homo sapiens
gattattcacaagaaagggtaaactgtttttgatgagagtccggagtgttgtcatgtgaagcctgccatccaggaacctcca

SEQ ID NO: 484246 - DNA, 73 bp, Homo sapiens
ggaaatcgggctgaagcgactgagtccgcgatggagagtggggccaaaggctgcgaggttgtggtgtctggga

SEQ ID NO: 484247 - DNA, 100 bp, Homo sapiens
tctcgcttgcttccctcggccgggccgtcctcggcggcagtgtcagggggaaggtgctattaacctggctttggctcagaaccgaagccaagatgtgaga

SEQ ID NO: 484248 - DNA, 80 bp, Homo sapiens
gggcgacctgggcaccagcaggacccgaggccaggagccaggggcccagaagtgctgatgggcccgtgcaacagttgctg

SEQ ID NO: 484249 - DNA, 75 bp, Homo sapiens
gcctattcagctgtaccagtccgccattttgctaccaagaaagccaaaggagtctactcttcatcttgtgttgag

SEQ ID NO: 484250 - DNA, 100 bp, Homo sapiens
acagctcccagcgtgagcgacgcagaagacgggtgatttctgcatttccatctgaggatttaggactgagaggtgtataaacctaggagctgcagttcta

SEQ ID NO: 484251 - DNA, 75 bp, Homo sapiens
gcagcgggctttgccagcaaaaccgaaacaggtattagaaaactactcggatgctccaatgacaccaaaacagat

SEQ ID NO: 484252 - DNA, 83 bp, Homo sapiens
cggaagaccgcgcgcagggcctgcagcgggagctggacggcgagcgcgagcggcgcgagaaaactcgagttgccgcgtcgggc

SEQ ID NO: 484253 - DNA, 82 bp, Homo sapiens
aaaaaggaggaaacaaccacatatgtcacctttccaaggtgaaatgacaatggatgctctgttggctcgattgaaacttctg

SEQ ID NO: 484254 - DNA, 100 bp, Homo sapiens
cggcgtcggtcaaggtcaattggcagggaatgaaagctactggttgattttaaagtgcctgggcctcacaggtttggagatgtcccagaataaggcacaa

SEQ ID NO: 484255 - DNA, 75 bp, Homo sapiens
tgggatccagtacgagttgaatcattgttcaaataaggccgctttgaagaggaatttatcaaaatgcgcatggag

SEQ ID NO: 484256 - DNA, 100 bp, Homo sapiens
gctgctcgtcgaggggcggcgagtgcggctgccgcagtcagccggggacctcgtccgagcccacccgcctttggagggtgatcagcccatgacctaaacc

SEQ ID NO: 484257 - DNA, 50 bp, Homo sapiens
acgatatatgtcagatctaaagggaatatggagccattgatgatgtagat

SEQ ID NO: 484258 - DNA, 82 bp, Homo sapiens
ccggccggtccctcgcctcccggccgagctgacgccttatgccagcctggaccatcttggaggcagtgtaggatcatggaag

SEQ ID NO: 484259 - DNA, 98 bp, Homo sapiens
gcaggcggagctggggtccggactgcgagatggaggaggggcggcgctgcggccacccggcagcttccaaacagtttcataatgaggtcctgaaggcc

SEQ ID NO: 484260 - DNA, 74 bp, Homo sapiens
tccggtccctctctccacggtaaggggatggagagcaatacatcatcatctttggagaatttagcgacggcgcc

SEQ ID NO: 484261 - DNA, 82 bp, Homo sapiens
ccttttcggcaacatcaatggagccgggcagctggagggggaaagcgtcttggatgatcaggtcaatggccagcaaggaggg

SEQ ID NO: 484262 - DNA, 50 bp, Homo sapiens
gaagacgcggtgggccgcccctccgaattatatccagatcgagagacaga

SEQ ID NO: 484263 - DNA, 90 bp, Homo sapiens
gcagattttggcagattatggctttgtccccacccagcactgatgatattataaagccgctgtgctcgctgtggagaaaacgtagttggg

SEQ ID NO: 484264 - DNA, 100 bp, Homo sapiens
actgtctgcagttgcaccgcagatcctcctgcccggctggcccgacccaatcccacaccctgaccagctggggcccactgtgggctctgctgaggggctg

SEQ ID NO: 484265 - DNA, 75 bp, Homo sapiens
cttatgaggagcacagacgagataaggtgcctggcaggctgatgacaatgccgtcagtcggaatgcccagcgccg

SEQ ID NO: 484266 - DNA, 98 bp, Homo sapiens
gtctccgtccgcttccacaacctcaaccatggcacctccatccgcgaagacatcctggatccatatggctttggagacagtcgagattcaaggcgtga

SEQ ID NO: 484267 - DNA, 83 bp, Homo sapiens
agagtcaccacaaggccaaggaaaatgatgcatcctgttgccagcagtaatccagctttctgtgggcctggcaagccttcctg

SEQ ID NO: 484268 - DNA, 132 bp, Homo sapiens
tttgaatatgcactctttggaaaattcccttatcgatattatgagagcagagcatgatcctcttaaggtctggagagatggccctccacgtggcagctcgctatggccatgctgacgtggctcagttactgt

SEQ ID NO: 484269 - DNA, 75 bp, Homo sapiens
ccggaattctgagcaccaaaagggtggatgtgaacactgaccggaagatcagtgccaaggagatgcagcgctgga

SEQ ID NO: 484270 - DNA, 50 bp, Homo sapiens
acaccgaggctcggccgccccgccgcgagcttcgcagaatcaagaacggc

SEQ ID NO: 484271 - DNA, 91 bp, Homo sapiens
ccggcaacccggagaaggtctacagagcggcctgcgccagcgaaccatggtgaatccgggcagcagctcgcagccgcccccggtgacggcc

SEQ ID NO: 484272 - DNA, 87 bp, Homo sapiens
ttcttccgctggctcagccgcaagtacccgtccatcatagtcaactgcgtggaagagaagcttttcatgcaacacccaacacttata

SEQ ID NO: 484273 - DNA, 100 bp, Homo sapiens
acctcggtgtctgcagcaccctccgcttcctctcctaggcgacgagacccagtggctaggcagaagtcaattcatctggaaagactatctctgagtcaga

SEQ ID NO: 484274 - DNA, 83 bp, Homo sapiens
gaccagtccatttggggaaatccttcggatggtgaactcattagaatcggcgtggcacaagcctaatggaagatgatgaagag

SEQ ID NO: 484275 - DNA, 100 bp, Homo sapiens
gtgaggaagtcttgaagaatagagccataaagaaagcaaagcgcagaaatgttggatttgaaatgacacccccaaccatggttgtgaagatgctagcgac

SEQ ID NO: 484276 - DNA, 85 bp, Homo sapiens
tgctgctgtcaagtgttaaaatggaaagaggcaaaacctgatgaattaatggattccaaattgagatgcgtatttgaaatgccca

SEQ ID NO: 484277 - DNA, 100 bp, Homo sapiens
aggcaccttggataagctggagtctattcctggattcaatgtcatccagagcccagagcagccggcccaggcctttgtggtgaagcggggcgtccacgtg

SEQ ID NO: 484278 - DNA, 51 bp, Homo sapiens
cccggcgcagcagcatcatcaagcaacatggccaacgccctggccagcgcc

SEQ ID NO: 484279 - DNA, 83 bp, Homo sapiens
ccgcaagcatgctcagaccttcattgctctgtgtgccaccgactgtgccctgtccacggtgcctcctgcatgtcctgctgccc

SEQ ID NO: 484280 - DNA, 100 bp, Homo sapiens
cagaaagagaccacttagagggtctctatgccaaggtcaacaagccataccatccactggttccagctgacagatatgaatgccacaatacgaaggattg

SEQ ID NO: 484281 - DNA, 74 bp, Homo sapiens
ggggaggcaaggtggttttggaccagacaggcgtgtctaagatttgttaaggattccaagtaactcttatttgg

SEQ ID NO: 484282 - DNA, 101 bp, Homo sapiens
tgaacctttgctgtctatggatctgctctaaaccttatagcctgcttatgggggaagacaagttggatggcttgaggactggtactaaaaggaaacgtgac

SEQ ID NO: 484283 - DNA, 75 bp, Homo sapiens
ctccaatgggcctttccagcccgtggtccttctccatattcgaggtgtctgcaattgaactccaaggtgcagaat

SEQ ID NO: 484284 - DNA, 100 bp, Homo sapiens
cgccatgaatgaggagtacgacgtgatcgtgctgggcaccggcctgacgtcaccaggagactaaagtccatcaaaaacatccagaaaattaccaagtcta

SEQ ID NO: 484285 - DNA, 101 bp, Homo sapiens
catggagagagtaactctgtccttattatcggaccccgaggatcaggaaaaactatggttttctaaatagctttgaggagttacaggctgaggaatgcggc

SEQ ID NO: 484286 - DNA, 75 bp, Homo sapiens
caggcgaatccataactctgataagccgtacagatggttcacaggcaccagccagaccccctaaaccacgaccgc

SEQ ID NO: 484287 - DNA, 100 bp, Homo sapiens
cccgtatgaacttctcttcgcatcggcggcggcttccgtcacctccgctcccccgatcctattcccagtcgtggtgatcagcccatgacctaaacctcca

SEQ ID NO: 484288 - DNA, 90 bp, Homo sapiens
gtgtctcccaccagagcacggaacatgaaggactttgaaaatgtccttatgtcgtcagaagatcgagaagctcaggaggatgaattgctg

SEQ ID NO: 484289 - DNA, 83 bp, Homo sapiens
cttcctggcctacctcctgatcggatggggtgtttcccattaaacactaccaggacaaaatcaggccttacatccagctgcca

SEQ ID NO: 484290 - DNA, 74 bp, Homo sapiens
aacatttcctgaagaactgtctcctggaattacattgaatatacagagtcctgatgggaaatacctagccagtg

SEQ ID NO: 484291 - DNA, 82 bp, Homo sapiens
ttcaagaagctttgaatcaactgatgagacaattgcagaggtcagtcccttgttccaaaaattggaaaatgaccagattgaa

SEQ ID NO: 484292 - DNA, 75 bp, Homo sapiens
tcttcagttcctttaaatgagccgaggtcatggtggttcggagacaccagagaagcctatgatgacaagcaggtg

SEQ ID NO: 484293 - DNA, 96 bp, Homo sapiens
gcccccattgagcccctacttcaagtactccgtcatgatcaacaaggccacgccctacaactacccaggaccgtgtttcttcgcctcgcctccctg

SEQ ID NO: 484294 - DNA, 101 bp, Homo sapiens
aggattcatgctctacatccccatagaggctttccttaaagtttcccatgtctcaatggactcctgaatataacgagctctacaccttaaaagtggatatg

SEQ ID NO: 484295 - DNA, 83 bp, Homo sapiens
ctagtgttggagtgcaccaagaaatggatccctctgtgacccagctgaccaacgccccgcagggcggcctggcggaattcaac

SEQ ID NO: 484296 - DNA, 100 bp, Homo sapiens
ggagccgctgccgctatggatgatcgagaggatctggtgtaccaggcgaagctggccgagcaggctgagcgatacgacgtttgtttcgacgccggaccgc

SEQ ID NO: 484297 - DNA, 90 bp, Homo sapiens
taaaaccagggctccacagttaggaggtgtgatgttagctgttgatgctgtaattgctgaacttaaaaagcagtctaaacctgtgaccac

SEQ ID NO: 484298 - DNA, 82 bp, Homo sapiens
ttaaaagacagtcctcgtcagcactgactttcagctatggaatcgacaaatttacatgtattggagaccagaccagaagccc

SEQ ID NO: 484299 - DNA, 75 bp, Homo sapiens
atctaatcacagactcctatttgaagtatttgacgaaaatagactggctggagcattggatttgctaaaggagct

SEQ ID NO: 484300 - DNA, 100 bp, Homo sapiens
gtactcagaccaatccagcccgaacttgtaaagacctgcaactcagccatcctgacttcccagatgcttgaaaataaggaacttcgagaattattgtcca

SEQ ID NO: 484301 - DNA, 101 bp, Homo sapiens
actcagaatgagctcaccagggagctgaaactcaaattgaatagggaaaacctgctttctgcaaacaactgaaaaagctgcatttagaaactgtttctttg

SEQ ID NO: 484302 - DNA, 97 bp, Homo sapiens
acgggaggtacctgggagtcacagtggtccaagacctcgcagcctggaaggatttttactgggagaggtaagacaagaggaaacgtttagcatcagt

SEQ ID NO: 484303 - DNA, 82 bp, Homo sapiens
tccactttcctcaccccaaatatgtggacctgtacaaggacttcctcgttctgcccatcttcctaacaaggctatggctgat

SEQ ID NO: 484304 - DNA, 98 bp, Homo sapiens
agcaaaagtccattcagaaaagacaagagccctgtgagcttcttggacacttaatgattgttggcaagaaatgtgctgctgatctgggcctgaataag

SEQ ID NO: 484305 - DNA, 98 bp, Homo sapiens
gaagattgtctatcatgaaggaggtacgacaacaattccacgatgccaaattcatggcagacattgatctggatccaggctgtacattgaataaaaag

SEQ ID NO: 484306 - DNA, 87 bp, Homo sapiens
aaaagtctgctactactacgacgtattgcggaatgctgcagcactccttactctcttttgggtttggtcttcacggtttcttttgtt

SEQ ID NO: 484307 - DNA, 76 bp, Homo sapiens
gtctactctgatgtcaatcttgagggctagagaaaattcctgttccaagagaaaataaggcaacatcaatgaagga

SEQ ID NO: 484308 - DNA, 100 bp, Homo sapiens
aaaaaggagagcctctgagctcaacggaggattgtgcctgagaagaacccacagagaaacccgggatggacgtggccgacgcctacgtgactttcgtccg

SEQ ID NO: 484309 - DNA, 110 bp, Homo sapiens
agattcaacaggctgccaataaaggagcaagatggctaggggatgaatttcatcctttcatcgaagcacttctgccccacgtccgagcctttgcctacacatggttcaac

SEQ ID NO: 484310 - DNA, 83 bp, Homo sapiens
ccttcacccagcatttcatccctcgtcgaaaggattggattggcatctttagagtgtgagccatgcaatgggagggagaggag

SEQ ID NO: 484311 - DNA, 99 bp, Homo sapiens
ccttggccactgatcccccgaagagcttctgtcgccgctctagggaggagacatcacagctttcccagatcgggaggaaaaatatggaatgtgttttac

SEQ ID NO: 484312 - DNA, 89 bp, Homo sapiens
ctaagatctagagtatctcctcgaggaagtacaactgaccaagatcactccatggatgaaatgacagctgtggtgaaaattgaaaaagg

SEQ ID NO: 484313 - DNA, 100 bp, Homo sapiens
atctggaagctgagggcacgtgtttgcggttcagccctttgatgaccgcagcagccaaaactggacaagccaaggcatctgtagccaaagtaaacaaatc

SEQ ID NO: 484314 - DNA, 50 bp, Homo sapiens
atttatgtcatcaagaagaatgacgatgagccctatgagtttgtctctct

SEQ ID NO: 484315 - DNA, 76 bp, Homo sapiens
gccttactccttcacagatcggaaatgttcaggctggagactatgtgctaatccatgcaggactgagtggtgtggg

SEQ ID NO: 484316 - DNA, 101 bp, Homo sapiens
ggaagagccagattcctgcatcaggtttttcttcccccagtccctcagctgctgctgctgctcaggaggtcagatctgccactgatggtaataccagcacc

SEQ ID NO: 484317 - DNA, 74 bp, Homo sapiens
agggccttgatgggcacagccatcttgtcatgtacctgggaaccaaactctgacagcgtcccacctggctacga

SEQ ID NO: 484318 - DNA, 100 bp, Homo sapiens
aagaccccggagcccctttagccatgtggatacctacggagcacgagaaatacggcgtggaataagaccacagcttgccaaagagaagattgaaggatgc

SEQ ID NO: 484319 - DNA, 92 bp, Homo sapiens
tccttgtggagccggagctgggcgcggattcgccgaggcaccgaggcactcagaggagggactttgaacatgtcggggatcgccctcagcag

SEQ ID NO: 484320 - DNA, 51 bp, Homo sapiens
acagcgaacatgtcgcggcctgtcagatgtgccgtttgggggtgctaaagc

SEQ ID NO: 484321 - DNA, 100 bp, Homo sapiens
cgtgccctgggtgattctgtccgacggcgacggcaccgtggagaaagattcagaatctgataattcagataacaacacaatctttgtgcaaggacttggg

SEQ ID NO: 484322 - DNA, 80 bp, Homo sapiens
gacggtccctctggacaccaggaatatcagagccataagtgtgatccttggtgacaggtggaagaaaatgaagaatgaag

SEQ ID NO: 484323 - DNA, 97 bp, Homo sapiens
cttcaatcaaggttataagaaaggtgcagaagtcattttaaactatggacgactccgaggaacattgagaatgcaggctcaacagtaccagcagcag

SEQ ID NO: 484324 - DNA, 75 bp, Homo sapiens
ttcgaagtgacctcagcagggcatccagaccagcatctcagacatgtcgaaaaagatgttttgatccctaaaata

SEQ ID NO: 484325 - DNA, 83 bp, Homo sapiens
ggtcttcagcggggcgctccaggaggcactcacaggggatgaacgtagggcacttagcttcttccaccagaagggcctccagg

SEQ ID NO: 484326 - DNA, 80 bp, Homo sapiens
ttattaatctcagggaactggatgtcagcaagaatggtttactaactgtggaatctccagaattacaagtcccatataag

SEQ ID NO: 484327 - DNA, 101 bp, Homo sapiens
gcgtcggactggtctgtctgagggagatggtgacaagctcaaggcctgcgagatcaatgaactgagccatgttcaaatccctgttatgttgatgccagatg

SEQ ID NO: 484328 - DNA, 82 bp, Homo sapiens
catgatctggaagcggctcaatgaccatggcaagaactggcgtcacgtttacaagaggggaggtatggtgtcaagaaaacat

SEQ ID NO: 484329 - DNA, 100 bp, Homo sapiens
cttaagaagaggtcccattaccccactctttccgccctaatggaggtctccagtttaggttggaaaagagactgttcaaaccactgaggatcagattttg

SEQ ID NO: 484330 - DNA, 51 bp, Homo sapiens
tccacgtaggcattcaccccagcaagtatgatccatttgctgagcacagac

SEQ ID NO: 484331 - DNA, 157 bp, Homo sapiens
tacaacgtgtatgaagtggtccaccaacagctgtggagcacgaggggcttgtaggatatataattccacatatttgggcctcatattcctgaagcccaacctggagatgctggacttctttgacctgctatggattgtggggatcgcagactttgtt

SEQ ID NO: 484332 - DNA, 75 bp, Homo sapiens
ggagccctcgttttcgagatcaggcctgaccgggataagctccaggtcacagggattatggacccagaacagatg

SEQ ID NO: 484333 - DNA, 50 bp, Homo sapiens
ctccagctgaaagcggaattgcaggggaaagaccacagcaagattctttc

SEQ ID NO: 484334 - DNA, 100 bp, Homo sapiens
atggattcatacctgctgatgtggggactgctcacgttcatcatggtgcctggctgccaggcagattgtctccagctttaagaccacgacatcgagagct

SEQ ID NO: 484335 - DNA, 100 bp, Homo sapiens
ttagatccaaagccattcccaaattatagagctaattacaactttcggggcatgtacaatcagaggttgatcgggatcgagatcttctcattcagcagac

SEQ ID NO: 484336 - DNA, 100 bp, Homo sapiens
gtggaacggctgcttttggaagcaagccagggctgagcaggaagaagaattcattagtaacactttattcaagaaaattcaggctttgcagaaggagaaa

SEQ ID NO: 484337 - DNA, 83 bp, Homo sapiens
cacggctgtcaagctggcgcgccagagcggcatcgagggccaattcctgtccccccagcagcatggcatcgtgtgctgaaccc

SEQ ID NO: 484338 - DNA, 100 bp, Homo sapiens
tgaaatgattctccagaatttctcctcataaaaaagatgagctttgatccaaaccttctccacaacaatggacataatgggtaccctaatggtacttcag

SEQ ID NO: 484339 - DNA, 100 bp, Homo sapiens
acttctatgagcttgtggaagacacaaaagatggcatctggctggttcaggcttatctaattaactgtgtttggaactgctataaatacatcaacaaccg

SEQ ID NO: 484340 - DNA, 73 bp, Homo sapiens
gagaaccccagaaacagaaagcagctacaacctgatatctacgtctgcatgatctcctttgcgcacaatgtag

SEQ ID NO: 484341 - DNA, 100 bp, Homo sapiens
tcctttccaaacttggtgtcttttctacaaactctgtgcctcaacaaccatttctaagtgaatgtttctccatcccagagagatgaagtaattcaatggc

SEQ ID NO: 484342 - DNA, 98 bp, Homo sapiens
cagccagatgaaaatggacgttttgacaatggctcacagattcctggagatgtctgtgcatattgggtacttccagaagtatgaattcagtgatgcaa

SEQ ID NO: 484343 - DNA, 75 bp, Homo sapiens
ccggctcccgcaccatggaggaggacgacagctacggaacaggaaatatagtggtcattatgattagctatccaa

SEQ ID NO: 484344 - DNA, 75 bp, Homo sapiens
tatctctgtatgaaaaccttactgcttctctcttcaggtcactgagtcaaggaagcacaaattcaaacatgctgg

SEQ ID NO: 484345 - DNA, 95 bp, Homo sapiens
atgtgtgtcagtttacgcctctgagatcacacagctgcctgggggccgtgtgatgcccaagcttttggagtgtatgaggaagactctgagcaaag

SEQ ID NO: 484346 - DNA, 100 bp, Homo sapiens
tgattttgatagaagactttcgagagtgtatacaaatgacagggtttctatcttactaaaggatatttcagaaaatctatattcactgaggaggatgata

SEQ ID NO: 484347 - DNA, 100 bp, Homo sapiens
agccgggatcccgccagcgaccagatgcagcactggaaggagcagcgggccgcgcagcagagtcacctgatatgaaaaaggagcaagacccccctgccaa

SEQ ID NO: 484348 - DNA, 75 bp, Homo sapiens
acagtctatgatgtcaaggataagtctcatgacaccgtatttataacagcaatgatgtagcagtatcgtttccaa

SEQ ID NO: 484349 - DNA, 100 bp, Homo sapiens
cgcgtggctcccagcccgggaccccacccccgctggacagtgggggaaactgaggcctgagcggcccctggtggcggcggcgtgtaacaccttcccgagg

SEQ ID NO: 484350 - DNA, 74 bp, Homo sapiens
agcctccctgacaacacaatggtgacccacgtggacagaggcccagtgaggactgtgactaagcgggtgcagcc

SEQ ID NO: 484351 - DNA, 75 bp, Homo sapiens
atgggaacttgtgtgttaaagtaacagatgatttagttgatgctttcattggatttggaggaaatgtgatcaggc

SEQ ID NO: 484352 - DNA, 100 bp, Homo sapiens
gaaggaagattatcatccctccattcctggcctatggcgagaaaggctatgacttaattcagtgcacaaatgagatgaatgtgaacatcccacagttggc

SEQ ID NO: 484353 - DNA, 83 bp, Homo sapiens
agcactggaaccgctgccacaagctcatcatccgacacttagcttctggaactgtggctgcaccatctgtcttcatcttcccg

SEQ ID NO: 484354 - DNA, 133 bp, Homo sapiens
tcaccataggagaaggggagtcaatacctccggatactcagtttgtaaaaacatggcggatccagaattctgatcacccggaagttcaggctgaattctgaaggcaaacttgagcagacggtctccatggcaa

SEQ ID NO: 484355 - DNA, 74 bp, Homo sapiens
tcaaatttgtcagcaactcgtcagactgatgaagagaagcagcagggcttacctgtggtgatgccagtgtttga

SEQ ID NO: 484356 - DNA, 101 bp, Homo sapiens
agtgaaatggggtgaatcatttgacaaactgctttcccatagagtggtattcatgggtagtttgaaatatccagatgagaatggatttgatgccttcctga

SEQ ID NO: 484357 - DNA, 100 bp, Homo sapiens
aaaattgctggagtcatcgcgggcatcttgctgttcgtgattatatttcttggagttgtgttggtaatgaagaaaagattgctatgctatgccttgtatg

SEQ ID NO: 484358 - DNA, 100 bp, Homo sapiens
caatttgaaattatgattgacagacttgaaaaagccagttctaatcagatgattcaagagagccggtttctcatagaaatggcggacacagtccaggaaa

SEQ ID NO: 484359 - DNA, 100 bp, Homo sapiens
gtgccggagattgctgtgtaccctgcctttgaagcacctcctcaggaaagtatgcctcagactcctcccttttcagcaatgtttgacagcagtggttaca

SEQ ID NO: 484360 - DNA, 73 bp, Homo sapiens
tggtgtcgccatgggccgccgccccgcccgttgtgcaaggtcctgaaccccgatgatgaggagcaggtgctca

SEQ ID NO: 484361 - DNA, 90 bp, Homo sapiens
ggagaaactaagttgctgaacggggtaaagttctttacaaagttcgctggaaaggctatacatcggatgatgatacctgggagcccgaga

SEQ ID NO: 484362 - DNA, 98 bp, Homo sapiens
caggctaagcccatccattcttgagagcttcatacatctcactggggctgatcagaaaatatttacaccagcagctccagttcataccaataaagaag

SEQ ID NO: 484363 - DNA, 100 bp, Homo sapiens
ccggaggccattgagctgtgcacgaccacaccgctgatgaagacaaggactcacagtggctgcaaggaaagtgactattttaccccacagggagaattcc

SEQ ID NO: 484364 - DNA, 110 bp, Homo sapiens
ggagaggcccgcggtgaccgaggcctgggccccggcggacaaggcaaaatctcagcaagttcggacctctagtacaataaggcgaacctcctctttggatacaataacag

SEQ ID NO: 484365 - DNA, 78 bp, Homo sapiens
ggcttctgtgggccggaaccttaaagcaaagctggaatcagtgagatgtttgaggggcatcaaggaccaatcactggc

SEQ ID NO: 484366 - DNA, 82 bp, Homo sapiens
ggcgcgggggacgctggtgaccaagatggcggcggagctggtggaggccaaaagcactacaaacaccactggtttcccgaaa

SEQ ID NO: 484367 - DNA, 96 bp, Homo sapiens
atcggaggacctccctgccctgtataccgagggaacagggcccctagaagcctgtttctccgtacagtccaggacctccagccccatggagccccc

SEQ ID NO: 484368 - DNA, 83 bp, Homo sapiens
ttgactggaaacaatggcatttacagaaagagtcaacagcagtggcaacagtgtgaaaaactcaaattactgtcttccatcat

SEQ ID NO: 484369 - DNA, 83 bp, Homo sapiens
gatggtcttctgtccctactacgatgcaatcctgaaatgtgacagtgatgataacatgggtgccaaaaatacttcaataggag

SEQ ID NO: 484370 - DNA, 90 bp, Homo sapiens
ggcgaataggagtctggtcaggcgtcaggctagtccgacgaagagtgggtccaggtgcaggtacagcagtctccgcaacaggtctcggct

SEQ ID NO: 484371 - DNA, 100 bp, Homo sapiens
gcactccccgctcctgccccttccgtatggggacataaatctcaactctgtcggaaaaggtaacagaagatggaactcgaaatcccaatgaaaaacctac

SEQ ID NO: 484372 - DNA, 100 bp, Homo sapiens
aacactattttggtgcagactttgctgagggtgacccagaatttgccatctgccttagtaagtcatgtactaaatcctcaacctggagagaagattctag

SEQ ID NO: 484373 - DNA, 75 bp, Homo sapiens
gcaagtacagagagtacagccccccatatgcgccggcccagctgtcaactcaagagaaagaaatggagaagcttg

SEQ ID NO: 484374 - DNA, 96 bp, Homo sapiens
gccggttgggccggtgtactttcccgatggagtcccctgtttccacaccagcagtgctgccaatacaccttttggtgccagtggtcaacaatgaca

SEQ ID NO: 484375 - DNA, 51 bp, Homo sapiens
cactcagttggaagagtccagcaagttaattccatgtaccatgaaacttcc

SEQ ID NO: 484376 - DNA, 75 bp, Homo sapiens
gtaaatgttgagcctttttggcctggcttgtttgcaaagggcatgagccagaaggagagctctaagtctgccatg

SEQ ID NO: 484377 - DNA, 76 bp, Homo sapiens
atgctgatcgggacccccccgcagaagcttatgttcctgaggaagaattgaaggcagcagaaatagatgaagagca

SEQ ID NO: 484378 - DNA, 82 bp, Homo sapiens
cccgtccccgccacccgtgatcgtgcgccgaggcccgcgaggggtcgccgcccagtggtggactgtcccgtgtgcaagcaac

SEQ ID NO: 484379 - DNA, 100 bp, Homo sapiens
cctggggcggccggccaggaaccacccgttaaggttacctgtcctgctgccgattcctggatgacaatcagatcgtcaccagctctggagacaccacgtg

SEQ ID NO: 484380 - DNA, 100 bp, Homo sapiens
ttggaaaatgccaacgccgtgtctgaagcagcagtgttgtactgctacttctataaacggacagccgtaagactaggcgatcctcacttctaccaggact

SEQ ID NO: 484381 - DNA, 98 bp, Homo sapiens
ggaccactgttaccatgcccccgcccgtggacgacacctggttgcaggtgcagagcatccctgacgcacacagcccaggcagtgactgacccgtgacc

SEQ ID NO: 484382 - DNA, 90 bp, Homo sapiens
ccaaagtgtgtccagagttatgcaacttgacccaggagcaccagcgaaagcagccagtctgagatattgacactacagaaaaaactgaca

SEQ ID NO: 484383 - DNA, 82 bp, Homo sapiens
gatagagacgttttccggagggattccatcataggtgacttaagagattaaaattaatttggttgctgttggttctgaacaa

SEQ ID NO: 484384 - DNA, 82 bp, Homo sapiens
cgccaagctcctggccctggccctgatcatcctgctgggcttcgtccagatcgggaaggggaaagcaggcaggatgggagag

SEQ ID NO: 484385 - DNA, 100 bp, Homo sapiens
tcttctgatagcaactttaatgtgacacatagagaactggcgcagtcttcacacgctcaacgccgtggacatggagctctacaccggacttcaaaagctg

SEQ ID NO: 484386 - DNA, 100 bp, Homo sapiens
ctacactgtacatgctttttattacaagactacggagcataggaggaaaattcatcatctgatgcggaaaacgccatgcggtacataaatgggacgcgtc

SEQ ID NO: 484387 - DNA, 100 bp, Homo sapiens
agcatcccggctggagcagagccagatgtaggtgcaaaaaactacagacatctctgtgctgtttattacaacaagaatcctgggtttgagatcattcatg

SEQ ID NO: 484388 - DNA, 72 bp, Homo sapiens
gagacacgctgggccgaccccagagcggcgctggacagcaattctgtggtgttcttggtcacacatttatgg

SEQ ID NO: 484389 - DNA, 90 bp, Homo sapiens
ccgcgctccaaccgcctcctcctcctcagtaacgcggggtatatttacttctggcacatgggaagagaaatcagatgaaatttcctttgc

SEQ ID NO: 484390 - DNA, 75 bp, Homo sapiens
attctgtgcggcggattgcagagctggtaaaagagaacctgctttcatgcaagatgctgctgcactgcaaacggg

SEQ ID NO: 484391 - DNA, 83 bp, Homo sapiens
cctcgcgtccggagtccccgtggccaggcataatcaccagcaacacccgggacaataatacgggggccacctacccccacctg

SEQ ID NO: 484392 - DNA, 112 bp, Homo sapiens
gccggagcccggaatcccgctcggagccagccagccgtcccgagctaccagcagttgttgacctcctgtactggagagacattaagaagactggagtggtgtttggtgccag

SEQ ID NO: 484393 - DNA, 90 bp, Homo sapiens
tcgccaggactaccttaagggactgagtatcattgggaagttgattcaagtcagttgagacgccagttgtgtggaggaagtcaggccgcc

SEQ ID NO: 484394 - DNA, 98 bp, Homo sapiens
gtcaaccagctcaagaagatcatcaagcgcaagcacaccctaccgaattacaagatcagaatccaaaggactgcatgacacaccataggatatagtca

SEQ ID NO: 484395 - DNA, 100 bp, Homo sapiens
cggcggaacccgtgggcctgtggactgcagcctcggcggtcagcaggaactcgctttgaacgcttgcttatgagaataggacatcaatcaaagaatgccc

SEQ ID NO: 484396 - DNA, 74 bp, Homo sapiens
caaatatggaaacaaatactatgaagacaacaagcaattttttgggaggagagagcgatggcttttttcaccca

SEQ ID NO: 484397 - DNA, 100 bp, Homo sapiens
cttttgtgctgctcacagtcaccgctgtcattgtggatattgatgatgttaagaagttcaaaccgggttacctggaagctactcttaattggtttagatt

SEQ ID NO: 484398 - DNA, 90 bp, Homo sapiens
aaaaattcagataattggcctgggcactcaagtatctcagcgaccaggagcacaagcacttaacttccagtgtgctaggtctacctctaa

SEQ ID NO: 484399 - DNA, 94 bp, Homo sapiens
tgccgctcgccctctgcctgctggctgcacccgcctccgcgctcgtcagcggagctggagtttgttcagatcatcatcatcgtggtggtgatga

SEQ ID NO: 484400 - DNA, 100 bp, Homo sapiens
ccactctggtctcgaactcctgagctcaagcaatcctccctccttggccttccaaagtgcaggttaatgttgaagaaggaaaatgcggaagtcgtcattt

SEQ ID NO: 484401 - DNA, 49 bp, Homo sapiens
ccaacgccccggtggagaagctgagatggagaaggatgaaactgtgagt

SEQ ID NO: 484402 - DNA, 100 bp, Homo sapiens
gccccgctgaccaggtggctgcaggtcaaggtgaagatgttcttaaagggtcccagattacgtatgttacaggtgtagaaggggacgacgttgtttctac

SEQ ID NO: 484403 - DNA, 90 bp, Homo sapiens
gattcgcagtggtcgcttcttctccttggattacggggcgctgaaagacatcgtgatcaacgcaaacccggcctcccctcccctctccct

SEQ ID NO: 484404 - DNA, 75 bp, Homo sapiens
ggaagcctgcgtaactttctcccttgatccgggagtctttccactgggtcagcagcaaggacaagatggagtaaa

SEQ ID NO: 484405 - DNA, 80 bp, Homo sapiens
cgcatcaatgcccagtacctggaagtcaagtgcggtgctatgatccttaagctgagggtactgatggtgctgggagcagg

SEQ ID NO: 484406 - DNA, 82 bp, Homo sapiens
cgacgggccgagcctgccactcccgagcgggaagaagttccgcagcaagccgcagctggcgcgctacctgggcggctccatg

SEQ ID NO: 484407 - DNA, 75 bp, Homo sapiens
tccgccgccaacgcgcaggtgctagcggccccttcgccctgcaggatttttagactctgaggagcagttggagct

SEQ ID NO: 484408 - DNA, 83 bp, Homo sapiens
ccatgatggaagacgacgggcagccccggactctgaatcccgttctgcttccagaagtggaagtgctcacggatcggggaaat

SEQ ID NO: 484409 - DNA, 100 bp, Homo sapiens
accacctcctttgcggagagctgcaagccggtgcagcagccttcagcttttggcagcatgaaagttagcaaaatgggacgtcggtcatcagatactgaag

SEQ ID NO: 484410 - DNA, 98 bp, Homo sapiens
tggccctgatcatcaagccagacaacttctggcagaaacagaggactaattttggcagttctaaatttgaatttgagcttttgtctggccctctgagc

SEQ ID NO: 484411 - DNA, 73 bp, Homo sapiens
ctaattctagatttggatcattgcccaaagttgcacatccttgccagctcctaaaacctatggtagcatgaaa

SEQ ID NO: 484412 - DNA, 117 bp, Homo sapiens
tcaaagatggtttaaaaaatacatctcatgagactgcagcaaaccacaaagttgctaagatatgttccatttaaggctctgaagatggggagagaattctggatgatccaggtgggc

SEQ ID NO: 484413 - DNA, 75 bp, Homo sapiens
gcctttggccagaagatcggccacttccaggaaactctgatgaggaagaaagtgcttcagaatctgaactttgga

SEQ ID NO: 484414 - DNA, 100 bp, Homo sapiens
cttaagagaagaagttaaaacatttcagggcaagccaattatggtctgtttctgtcgactgtggaccacttatgtgcgatccgtggaccacttgcgtgcg

SEQ ID NO: 484415 - DNA, 99 bp, Homo sapiens
aggataacaatgcccacacagtgaagagcaggctagaagagctcgatgagaggcagtatttggcagtcgtattcagagataaacccctggagctatggg

SEQ ID NO: 484416 - DNA, 82 bp, Homo sapiens
ccgacagtgccctgagggccttcgagagctaccgcgccagacaggacacaccagcccctcggataccacttggccactcccg

SEQ ID NO: 484417 - DNA, 78 bp, Homo sapiens
tgcaaagagggttgtccgtgatccacaaggcattagagcatggttggatggcaagcatgtggtgtttggcaaagtgaa

SEQ ID NO: 484418 - DNA, 75 bp, Homo sapiens
gatcttcactgtattagtgaatccgataaggtgaatgaaaactttgccattgatttgatagcagagcagcccgtg

SEQ ID NO: 484419 - DNA, 100 bp, Homo sapiens
ccaccgggtgggatgccccatccaggaaagaattgggatgtgaatgccgccctcagtgattttgaacagctacgtcaagtccatgctggaaacctacccc

SEQ ID NO: 484420 - DNA, 83 bp, Homo sapiens
catcaagaaggtgatggcggccatcgagaaagtgcggaaatgggtggcccagttgaaatccttcccttcctctaccttggaag

SEQ ID NO: 484421 - DNA, 75 bp, Homo sapiens
ttttagggtcctttatatagaagggagagtaggcccataagatggcctggcctttccttgaaccagtagacccta

SEQ ID NO: 484422 - DNA, 75 bp, Homo sapiens
gaagggcttcgtgcccaacatgcagactcggcggtggcgaggactgggctccctcttccggagggcgtgctgtgt

SEQ ID NO: 484423 - DNA, 111 bp, Homo sapiens
ctggggtttacgaggatatatagtcatagaagatttgtggaaggagaactttcaaaagtatgaacccagcatcacagtgcacttgtggcagatggcagtgcatacccggga

SEQ ID NO: 484424 - DNA, 100 bp, Homo sapiens
aagtcatcaaacaagaaaacgagtcaggctacgagaggagaccactggaaatggagcagcagcaggcctatcgtccagaccagaggtcaggcaaggactc

SEQ ID NO: 484425 - DNA, 96 bp, Homo sapiens
gtgctgcgggtgttcttttggggtagtgtctgggatccagtacgagttgaatcattgttcaaataaggtatcgaaggatgatcgcagtgatgtgga

SEQ ID NO: 484426 - DNA, 75 bp, Homo sapiens
cctgaacctttgatgacttttaatctgtatgaagaatggacacaagttgcaagatataaaccacagtacttcagg

SEQ ID NO: 484427 - DNA, 80 bp, Homo sapiens
catttttatcaccttctacatcctgaccatctatcagaactaccagcgtatccgaatccaggagagtccaggcaaagtgg

SEQ ID NO: 484428 - DNA, 75 bp, Homo sapiens
tggagaaaaagaagaaaatgttaaaaagaacagatacaaggacatactgccattggtctggagccgaaccggcaa

SEQ ID NO: 484429 - DNA, 95 bp, Homo sapiens
gtatatggatacggagtacaaaaacggcccttggatgatggagcctttgaagtaaattttatggatgatgtaggtcagactctattaaactgggc

SEQ ID NO: 484430 - DNA, 83 bp, Homo sapiens
cgttttcatgttgctggtggaccagattggtaactcccatgtgcattctactgacgggatggaagcttcctggcgccaggtgg

SEQ ID NO: 484431 - DNA, 96 bp, Homo sapiens
tctgcgtggggatgaacatcgacatcgccagcatcgacatggtttccgaagtcaacatgcaacaactccaggcccagcatttatcacatggacatg

SEQ ID NO: 484432 - DNA, 100 bp, Homo sapiens
attaagtgaattgatttggttggaatgctcttttaccgatgctttaacatacagccactaggaaaaccagtagattcccagacatcgcgaagtgaatctg

SEQ ID NO: 484433 - DNA, 100 bp, Homo sapiens
gtttacactatgggactaaatggtggacaactggaactttacagactagcatggcaaagcttctctccgatcttagtgtggacagtgctcgctgcaagcc

SEQ ID NO: 484434 - DNA, 75 bp, Homo sapiens
tatttgaaataaaaatggatgcaagtttaggaaatctatttgaataatcatgggccagactgggaagaaatctga

SEQ ID NO: 484435 - DNA, 96 bp, Homo sapiens
gtcgccgccatgacagcgagcgaggcggaggagcagtctcacaggtgctggacagcctggaagagattcatgcgcttacagactgcagtgaaaagg

SEQ ID NO: 484436 - DNA, 100 bp, Homo sapiens
gccatggtggcttctggctcagagctaggaaaaaagctgaaggcaactatggatgctgggaaactgccttttcaggagccaaaaaaacaaatacaaacaa

SEQ ID NO: 484437 - DNA, 100 bp, Homo sapiens
tcctggtccacaacgtcaaggagctggaagtgctgctgatgtgcaacaaaattcagaaggagctggcggacatcactttagaccctccacctaattgcag

SEQ ID NO: 484438 - DNA, 75 bp, Homo sapiens
atgtgatgtccactgcctgtggaactccaggctatgtcggtctagatgttgatggaatatatcgagttagtggca

SEQ ID NO: 484439 - DNA, 100 bp, Homo sapiens
cgcggagctggtttctgccgacaagttgtggcagcactgcctgaaggtatgagaccagattctaatctttatggttttccatgggaattggtgatatgtg

SEQ ID NO: 484440 - DNA, 117 bp, Homo sapiens
tcaaatcagagagaaggaatccaccttcttacgctatggcagctatcatggtgaacttacttcagattgtgcgggaccactgggttcatgttcttgtccctatgggatttgtcattg

SEQ ID NO: 484441 - DNA, 100 bp, Homo sapiens
ggatttgttaaggattccaagtaactcttatttggaactctaatgaatcattgattgaccagcactattttaccagttggaatgaatgatcagaaatggg

SEQ ID NO: 484442 - DNA, 98 bp, Homo sapiens
gggcatccacccggccaggttcccaggaagagctgctggtgacagaggcggcccacgtgcgcatgctgcgggtgctgcacgacctcttcttccagccc

SEQ ID NO: 484443 - DNA, 82 bp, Homo sapiens
gtgactacccctaacgcacaataatatggctccgatgggctcaaaggagccgggtgtgggctgagccctgcctgattgatgc

SEQ ID NO: 484444 - DNA, 83 bp, Homo sapiens
caacaacaactgcgaggaaaatgagcagtctctgcccccgccggccggcctcaacagctttctccagtctggctgaagctgct

SEQ ID NO: 484445 - DNA, 98 bp, Homo sapiens
ctaaaaagcaccaccaagatgtctctaaatgagcgaagtctcaggggatccagaactgcagccagtccttgctgggctgttcctgtccatgtgcctgg

SEQ ID NO: 484446 - DNA, 74 bp, Homo sapiens
aaggcagtctttgctacgtacagcaaaagaaatctcctgcaaagaagctgagccatgcaattagtaaatctttg

SEQ ID NO: 484447 - DNA, 100 bp, Homo sapiens
gcttggctccatttatgaagcacccgttaaaaatagttctacgaggagtgaccaatgatcaggttgacccttcaattaacttcatctaccttgccaagag

SEQ ID NO: 484448 - DNA, 105 bp, Homo sapiens
cttcatcaaaaatagtgatagctttgataagtctggctctgggagaggagtggacagcagctggttgagatacatccccatctggagacaggactgccactgaca

SEQ ID NO: 484449 - DNA, 82 bp, Homo sapiens
aaggcagacagcgagtggcgacgatttccaaagaactactggttcagattttagctcttcccaagttgtgaaaatagtgaag

SEQ ID NO: 484450 - DNA, 82 bp, Homo sapiens
gccgtccctaaagccctctgcagttagtagtgtgacatcgtctacctccttgtcaggaaggctacaacaatccccccatctc

SEQ ID NO: 484451 - DNA, 75 bp, Homo sapiens
tcggtcccgcgctgcgcatccccgcggacgccacagcgctaggttccgaaaacagaacagacttttgaagagcgc

SEQ ID NO: 484452 - DNA, 100 bp, Homo sapiens
acaccaagatctgtgctgaccacaggaattggatctactagtgcaggtttattgactggtgtagtggtagactctggagatggtgtgactcacatttgcc

SEQ ID NO: 484453 - DNA, 88 bp, Homo sapiens
tggagctgttagaaaagcagaggctatactttaagactgtgaaagagttcaaggagatgatgactttgaccagtttgataagcctggc

SEQ ID NO: 484454 - DNA, 75 bp, Homo sapiens
cttgtcatgaagctgctaagtggaggtgctgaagacgcggctgaccttgcgccggacgggccagtataaggggct

SEQ ID NO: 484455 - DNA, 87 bp, Homo sapiens
tccgttggagtagaagtgtccagcgacagcttctgggagctttaccactcctgaaggccctaaaccccgttccagatgctctgactg

SEQ ID NO: 484456 - DNA, 90 bp, Homo sapiens
cggctggaccagccccaaaagaggaggtggttgtgtcaaaccgattggtgacatctccatgctgtattgtcacaagcacatatggctgga

SEQ ID NO: 484457 - DNA, 98 bp, Homo sapiens
gctgagcagtcaactcaaatgcaagtccaagaggaggaggaggcggaggtccaagcggaaagtcgtgccaagcggacctcgtgaaggacaacggccac

SEQ ID NO: 484458 - DNA, 83 bp, Homo sapiens
ccgaccgcgtgctggagctcttcgacccacccaaggctcttgtcaggatggtgaagctgttcatcggaaacctgccccgggag

SEQ ID NO: 484459 - DNA, 101 bp, Homo sapiens
ggagggatgagggagcctgccctcgcatggtggccagggcacgtcactgcaggccaggccctgtctctgcccctggtggtcatcgtccatggcaaccaaga

SEQ ID NO: 484460 - DNA, 100 bp, Homo sapiens
gctcagggtttaattccaccagttgaagattttcctgtttgttcacctaatcagatccacaagaaggtgctgtggtggttctccctgcagactctcagca

SEQ ID NO: 484461 - DNA, 100 bp, Homo sapiens
caataatagtctcgtggaactgcgcctgcctccagcaccctgaagatgctgtgtgatatgtcctccttaccaagttggtgatggctgcctcatggtgggc

SEQ ID NO: 484462 - DNA, 74 bp, Homo sapiens
ccgaaatcatgctgtgttaactgctaacttttctgtaaccaacctgcatgttggcagataaattgaacatgact

SEQ ID NO: 484463 - DNA, 100 bp, Homo sapiens
agcggagccaagccccacgctggccggacagggccgcctgtcgccgggtcatcatcagatttgaaatatttaaagtggatacaaaactatttcagcaatg

SEQ ID NO: 484464 - DNA, 75 bp, Homo sapiens
tcccacccccggcggcggcacgatgccctttgacttcaggaggaattgaatgatctggcacgggaccctccagca

SEQ ID NO: 484465 - DNA, 100 bp, Homo sapiens
gaaggggttcctggtcatacaccagtactaccaaggacagcttttttcctgcaaggacccagatgatgtggtaccagttggccaaagaagagcctggtgt

SEQ ID NO: 484466 - DNA, 50 bp, Homo sapiens
atacagttgataaaattgttgattaatatttttggggacagatttgtgat

SEQ ID NO: 484467 - DNA, 99 bp, Homo sapiens
aggaggcagtagccaaacacccagttgatttggagcatatgcgaacaataaaacctgaaaaacacttacggttttgccaggaaaatggttttagtagcc

SEQ ID NO: 484468 - DNA, 102 bp, Homo sapiens
gagggcgccgtgctgcccgtgtggagtgcgcacggggaaggtggttatcactaggctaaaactggacaaagaccgcaaaaagatcctcgaacggaaagccaa

SEQ ID NO: 484469 - DNA, 100 bp, Homo sapiens
ttacctgtttcggaatgcttttgtgctgctcacagtcaccgctgtcattgtgggttatgatgtgattgctcaagcccaatctgggactgggaaaacggcc

SEQ ID NO: 484470 - DNA, 90 bp, Homo sapiens
ttttagcctagctgttctcaaggcggattaattagcccaagaaacattatattcatatatgaggccccaggattcctggcgaggtcctcc

SEQ ID NO: 484471 - DNA, 98 bp, Homo sapiens
aggatgtcgccgtcccgggcggcgtggacctcctcaccctgccgcagctgtgcttcccagggcgaactttctgaccaagtatacaactacccagaggg

SEQ ID NO: 484472 - DNA, 99 bp, Homo sapiens
ggagtcatcatgagcgatgttaccattgtgaaagaaggttgggttcagaagaggggcttgttgattggtgctggctgtgccctctaccccttgggctgg

SEQ ID NO: 484473 - DNA, 96 bp, Homo sapiens
gactctcggactgagaaacgcaagacctggaatggccaaatatcaaggtgaagttcaaagtttgaaactggatgatgattcagttatagaaggagt

SEQ ID NO: 484474 - DNA, 83 bp, Homo sapiens
atcgggctgaagcgactgagtccgcgatggaggcagaagtcaattcatctggaaagactatctctgagtcagacttaaaccac

SEQ ID NO: 484475 - DNA, 90 bp, Homo sapiens
ctataaatctatattagaaaaagatccatcaatacatcaagcaagagaagcttgtatgttaagtgggcagaccaacatccacctcagcaa

SEQ ID NO: 484476 - DNA, 74 bp, Homo sapiens
caaacagaggcgctcatccacagagccacatctgttagtcgtgagatggagaataaagaaactctcaaagggtt

SEQ ID NO: 484477 - DNA, 100 bp, Homo sapiens
atgtatacatcgccagttttatcaggactatggcagccagggacgccacttcaggcagcctgtcagaggagagcagtgctttggacctgccatcagcgtg

SEQ ID NO: 484478 - DNA, 100 bp, Homo sapiens
cagatggccgcgctgcgtcgaatgctccacttgccgagcctgatgatggggacgtgccgcccctttgcgggtttcccaaaccactccttatgatccagtg

SEQ ID NO: 484479 - DNA, 96 bp, Homo sapiens
aactgcacgcggaagagcacgcagtccgacttggccttcttcaggttcccgcgggaccctgccaggcgcattggagtgactgtctggcatcaccaa

SEQ ID NO: 484480 - DNA, 75 bp, Homo sapiens
acgacagcagcagcagcgcgtctccttcagcaagaggtggaaacatacagaagaagcaaggaaattacagttaga

SEQ ID NO: 484481 - DNA, 100 bp, Homo sapiens
gacactgaagaaagcatcgtcctaggaatggatttctcctctaatgacagttacatccttgctaagccccactccggctacagctcttgctgtcagatac

SEQ ID NO: 484482 - DNA, 101 bp, Homo sapiens
gttcaaggcaagaccgaattcagaaggatatcgacgtcgtgatccagaagtccagagctgaggactgcctgtttgcagcgtctgcttctgcgctttgcctg

SEQ ID NO: 484483 - DNA, 74 bp, Homo sapiens
ctacagccccgacgaacatttctgggtgacactcaacaggattcccgactgctgagaaggaagaatttgaacat

SEQ ID NO: 484484 - DNA, 90 bp, Homo sapiens
cggctacagagggaccagctgcaaaagtttgctcagtacctcatcagtgagctccctcagcagatcgtgtctcagaaggacgagcactgc

SEQ ID NO: 484485 - DNA, 83 bp, Homo sapiens
gcctcaggagctgaagccctttgtgactgcaatctcgaggcctccggtgtggctgtctctgatggtgtcatcaaggtgttcaa

SEQ ID NO: 484486 - DNA, 98 bp, Homo sapiens
ttgggcaatggtgaatttgaaaaggctttgccagatacaagctgaagtgctaccagaaaaccagttgttaagtctatctggaaaaatagactgtgaag

SEQ ID NO: 484487 - DNA, 75 bp, Homo sapiens
cgtgggtgctgcgggccgcgttcgggggcgcagtctgcgctcctcagaccaccggcaggtgaacagcctgatgca

SEQ ID NO: 484488 - DNA, 71 bp, Homo sapiens
agccatcaaacagctgcggaagctgcaggtggtgtggaccctgcaagatcctggggccgaggttagagaag

SEQ ID NO: 484489 - DNA, 82 bp, Homo sapiens
gcggcgtccccggtttggtgttgcggcgcccaccttcgggaggatcaggacaatcctccaaacacagactgtttgacttaga

SEQ ID NO: 484490 - DNA, 100 bp, Homo sapiens
gcatgcctgggtttggaggccgcacctgcagcgagtgccaggaactcttctggggagaccccgacgtggagtgccgagtcaagtaagggagaattgacta

SEQ ID NO: 484491 - DNA, 100 bp, Homo sapiens
ccaagtgcgcgccctggcgggtccggaccaaggcttgtagtggcggtggaggaggccttcactcacattaagcggctgcaggaagaggagcagaaaaacc

SEQ ID NO: 484492 - DNA, 134 bp, Homo sapiens
ccaacctggacgcttgcaccggagtattaaatccagctagagaatggcatgtgcaaagatacagagttgatcatggccttgccaggttggtgacagtatattgtgagcatggtcataaagctgccaaaatcaac

SEQ ID NO: 484493 - DNA, 97 bp, Homo sapiens
ttcaggccagagttgtgggccgccgtcggcagcaagaacagagagagaggtggacagatctgagagatactgagctggacctaccatgaaagacttc

SEQ ID NO: 484494 - DNA, 80 bp, Homo sapiens
cttcggcagtccacccaccgccgccgcctcccaggaaactactttgcttcgcactttttcatgggaggagagaaattcga

SEQ ID NO: 484495 - DNA, 100 bp, Homo sapiens
tgttggtgcacaaaaagacacttatactatgaaagagaagtcaaattttctactactctactgggatgactgtgggaattgtggcctctctgctaatcat

SEQ ID NO: 484496 - DNA, 122 bp, Homo sapiens
ggcacaagcatgtacggcaaaggcaagagtaacagcagcgccgtcccgtccgacagccaggcccgggagaagatgatcggctgaatgtaacagaggaactaacgtccaacgacaagacgagg

SEQ ID NO: 484497 - DNA, 98 bp, Homo sapiens
gacattgccgtcgacggcgagcccttgggccgcgtctcctttgaggttttcttccacccctgagatggcaagaccagccccttgtcttcctcagcctg

SEQ ID NO: 484498 - DNA, 75 bp, Homo sapiens
cctcagcctcctgagaagctgggattacaggtggcttctggcacagcagcttaattgaccggaacctcattgatt

SEQ ID NO: 484499 - DNA, 98 bp, Homo sapiens
cggacaggccgtacaggtcactggttgaaccatgggaaggaacactgcttggtggcttcccacacttctgactcggacgttccttccggtgtcactga

SEQ ID NO: 484500 - DNA, 74 bp, Homo sapiens
tcagtagacgcgattagatcctcagatgtcagtattgaatatggtggtgaggcgtgaccctggcaacactgaac

SEQ ID NO: 484501 - DNA, 76 bp, Homo sapiens
ctcagggaagctggggctggtgcaactttcagaagtggtcccaggtcgttctggaccagcggatgagggagagccc

SEQ ID NO: 484502 - DNA, 96 bp, Homo sapiens
ggagcctatgtgctggccaagtttgcagaggagctgacaagcacaagtgtggaacacatcattgtcaatcctaatgctgcctatgacaagttcaag

SEQ ID NO: 484503 - DNA, 50 bp, Homo sapiens
tggacggtcactcagcctatggagaatgtcgtactctcaggaggctccac

SEQ ID NO: 484504 - DNA, 88 bp, Homo sapiens
tgtgcaatttgagaccggtcggcactgtgcagagatcagagtactaagagacaggaatgcacggtgcagagtggtgtgcacaggagcc

SEQ ID NO: 484505 - DNA, 83 bp, Homo sapiens
cgcgaatcctccgctccgagcccgtccggactcccccgatcccagacaatgcagatcttcgtgaagactctgactggtaagac

SEQ ID NO: 484506 - DNA, 102 bp, Homo sapiens
tgttggatatgggatttgctgatcaagtggaagagattttaagtgtggcatacaagaaagggactggtttggctgaaagacaaagaagcaacacattgtaaa

SEQ ID NO: 484507 - DNA, 100 bp, Homo sapiens
tcaagtcctgttctacctactgccaattggaaagattacctctctagtgacccttcagctgttaaccctggttggccatgacgatcagcttgatggacca

SEQ ID NO: 484508 - DNA, 100 bp, Homo sapiens
tatataaaacacgattcttaccactcagctgcggtaaatagccactatggagactaaggaccagaagaaacacagaaagaaaaacagtggacccaaagct

SEQ ID NO: 484509 - DNA, 85 bp, Homo sapiens
gccctgaggcccagctgtgggtcctgaaggaatcttccacttgactcagatcaagaaagtcaggaagcaagacttccagaaagag

SEQ ID NO: 484510 - DNA, 100 bp, Homo sapiens
ctggaagccagtgggagtcaacagtagtgaaggatgccctgcagtggtctcgccatccagctacagtggagggagaggagccagaggacacggctgatgt

SEQ ID NO: 484511 - DNA, 83 bp, Homo sapiens
caagagtgcttatcccagctaagctccaggggcgaccattgacgaggtggagacggacgtggtggagattgaggccaaactgg

SEQ ID NO: 484512 - DNA, 88 bp, Homo sapiens
ggattaaagctaaagacatagttcctggtgatattgtagaaattgctgcaggggaacaggaacctgataaagaatcaggagcctcagt

SEQ ID NO: 484513 - DNA, 50 bp, Homo sapiens
cctacttctataaagtcatccaggtgatgctactaggaggtggagccttt

SEQ ID NO: 484514 - DNA, 98 bp, Homo sapiens
ctgggagccatcacgcccagctagccatcttctaattttcattccttcaaagctatcatggtgaacttacttcagattgtgcgggaccactgggttca

SEQ ID NO: 484515 - DNA, 51 bp, Homo sapiens
ttcctgtacagcctgcagaactgtgggtcatgataactgggtacgtggagt

SEQ ID NO: 484516 - DNA, 75 bp, Homo sapiens
ccacagcggcctcggcctccccttggattcagacgccgattcgcccaggagatcatttggcatttagctgtgatg

SEQ ID NO: 484517 - DNA, 75 bp, Homo sapiens
attcgaccagaatggattgtggaaagcacccaggctgaactctgtaccatttggaagaatggaagctgatgcatc

SEQ ID NO: 484518 - DNA, 82 bp, Homo sapiens
tccccttccggcgaccgcggacgacgtgaccagaagtcccgccgcttaaaggactgtgccctgtccacggtgcctcctgcat

SEQ ID NO: 484519 - DNA, 101 bp, Homo sapiens
gggattcgcctacctcaagcctccattctccatccgctgcgtggaggtgtcggacgatcagttttatggtcccaggattggcgcactttatatacgaggac

SEQ ID NO: 484520 - DNA, 75 bp, Homo sapiens
gggcaggggcggaggcggaggcagaggtggaggcgctttgaaagaaacaccgtgctggacagccagcgtcaacaa

SEQ ID NO: 484521 - DNA, 98 bp, Homo sapiens
ccggactcaccgccgccgccgccgcgggatccgagtgcgggcgcgggcgcgggcgctcccggcgagccacggatatggaatattatcttgtaaaatgg

SEQ ID NO: 484522 - DNA, 82 bp, Homo sapiens
ggagatggtgcagaagatggaggagttgcctcttgaagtggatttaactaaagcgaagagacaagatcttgaaccgtctgtg

SEQ ID NO: 484523 - DNA, 90 bp, Homo sapiens
agaaggtctggttagaccccaatgagaccaatgaaatcgccaatgccaactcccataaaataccatgaggagtttgagaagagccgcatg

SEQ ID NO: 484524 - DNA, 108 bp, Homo sapiens
ccgggcacctccgagcgcaaggacagcgcgaggtccgcgcagcccagcgcagccatggggcgacgcttcagagactgacaacctctgggctgatggggaagatggagt

SEQ ID NO: 484525 - DNA, 80 bp, Homo sapiens
ccccgctacgagctggctttaatcctgaaagccatgcagcgggaagtgctctctggcgtggtggtcatatcgagtaagga

SEQ ID NO: 484526 - DNA, 100 bp, Homo sapiens
gacttggagtctttgtccaggacggtgttatgaagcggagattgaggagatagatgaagaaaatggcaccgctgcaatcacctttgctggttatggcaat

SEQ ID NO: 484527 - DNA, 100 bp, Homo sapiens
agcctcttgagtagctgggattacagtcagctgtcggccacgaatatcagtcgaaactttccaagcactgctcgcaggtggactcggtccgtggcttcgg

SEQ ID NO: 484528 - DNA, 100 bp, Homo sapiens
cgctacggaccttaaaatacccgcaacagccccttcgtcccaattggttgaatctggcgatgtggaacccatggatatggagggctgactatatacacca

SEQ ID NO: 484529 - DNA, 74 bp, Homo sapiens
cagagagagaggtggacagatctgagagatactgaggaggttgtgcccagacatttccttcttccagagggcca

SEQ ID NO: 484530 - DNA, 100 bp, Homo sapiens
gaggctgcccggagtccggataagccgggcgggagcccctcggccaggttatctgtgctacaattgcatttggaatggggattgacaaaccggacgtgcg

SEQ ID NO: 484531 - DNA, 74 bp, Homo sapiens
ttcaggaaccaccagtgacagaggtgtccgcaatgttgccagtgtctgtctgcagattggctacccaactgttg

SEQ ID NO: 484532 - DNA, 100 bp, Homo sapiens
atttttcatgacctttctcatctgactcgtgatctgcccatcttgttactccctagcagtgtggtaaggttttgcacactagggaccaagaagccctcgg

SEQ ID NO: 484533 - DNA, 90 bp, Homo sapiens
tccaggcgcggccgctaagaggagaccaagaggcgggggctgcacttgacaaccagcatgccgagatggctggtctcgaactcctgacct

SEQ ID NO: 484534 - DNA, 88 bp, Homo sapiens
gaagcagtgaccgtgcccacgccaagggttggggtgctggaggactgcttcaccttcctgggcatcttcctggccatcatcctcttcc

SEQ ID NO: 484535 - DNA, 75 bp, Homo sapiens
cgggacctcaagtccagcaacagtgaaggaaatactcatgaccagccagatgtcttaaggaatgcttttgaaaag

SEQ ID NO: 484536 - DNA, 90 bp, Homo sapiens
tgcaagtgtccttcgacgggagcctctacggcagacacatgcaggccaacccagaaccaccgaagaagaataatgacaaatcgaaaaaga

SEQ ID NO: 484537 - DNA, 88 bp, Homo sapiens
gatgccctgcagtacctgcagaaggtctctggagacatcttcagcaggtgaaggacttaactaagtacttggatcccagtgggctcgg

SEQ ID NO: 484538 - DNA, 90 bp, Homo sapiens
atttggaccttggagctgaaccagggagctagcaaaaattgatcagggaccatgaaaagaaacttgtgcttcaccgaagaaaaatatcta

SEQ ID NO: 484539 - DNA, 75 bp, Homo sapiens
tcaaagctgctgccgccccttgggctaaaagtggccataaaatgcagtaaaaacaaatccagttcccaagaagct

SEQ ID NO: 484540 - DNA, 100 bp, Homo sapiens
cccaggacccccaagccgccgcggacgcaggtccgggcccaccagctggtcttgccaccttgcgacgtagtgatcaaagccgttgctgactatgtacgca

SEQ ID NO: 484541 - DNA, 76 bp, Homo sapiens
tgtacagctcatgaacacaaccagatggcgttcaggaagtggcttatattcactcaaaccagaatgtaattggatc

SEQ ID NO: 484542 - DNA, 90 bp, Homo sapiens
gcgctcatccgcttccacgtcaagaataccctctaccatctgctttggtcagggtgccgctcgaggatttaaaagcaacaagaagaaaac

SEQ ID NO: 484543 - DNA, 100 bp, Homo sapiens
gtcctcctaggcatcttattgatcctccagtcgaggaagcgcctcttggacgcgtgtgaccgatgcccagattgcacgaccacttctggagctgctcctg

SEQ ID NO: 484544 - DNA, 100 bp, Homo sapiens
cctgtttggcttcaacattgtcttctggggcaggctgtccctgcaggatcccacgtacggctgaatcttcagactggggaaagagaggcaaaactccaat

SEQ ID NO: 484545 - DNA, 74 bp, Homo sapiens
cagtctgccagacaatagagcatatggacacgaatgcagagtttgagtccagatcccaaagcccagtacacaag

SEQ ID NO: 484546 - DNA, 74 bp, Homo sapiens
cgaatacccgctaagctggatgaaaggctgtaacagaagacaagtacgaaatactgcaatctgtcgacgatgct

SEQ ID NO: 484547 - DNA, 74 bp, Homo sapiens
cttaaaaacgtgtcattccagattttcaaggaaaggctgttcggctcttgaatcccagcgatgaaaccaggaac

SEQ ID NO: 484548 - DNA, 100 bp, Homo sapiens
gaggaatattcttcgcagcctaaggaggaacactaagactatttggagttttcctcgtcttactggatgtcactctcgtccttgccgacctaattttcac

SEQ ID NO: 484549 - DNA, 100 bp, Homo sapiens
atcgacacacaaagaatagagttgagcctgtgggacacttcgggttttcatctctgtgaactgcttaagcacagatttctcttcccagaagggagtgaag

SEQ ID NO: 484550 - DNA, 86 bp, Homo sapiens
gtgtcttccccggccggtccctcgcctcccggccgagctgacggtgagaagccctaccactgcaactgggacggctgcggctggaa

SEQ ID NO: 484551 - DNA, 51 bp, Homo sapiens
cacactgccagtcaggcaagtcttgccaagccaagatgatattgctaccat

SEQ ID NO: 484552 - DNA, 96 bp, Homo sapiens
gttttctgcacagctcctatcaacaagaagcagccttttgtgtgttcttcactgttacaggcacttaagtattcatcgaagagtcaccccagtagc

SEQ ID NO: 484553 - DNA, 82 bp, Homo sapiens
ggactaagaacgcattgccgccggtcctgaccaccgtgaacggacagtcccccccagaggttttatacacctgaaagaagag

SEQ ID NO: 484554 - DNA, 75 bp, Homo sapiens
actgtgcgctcgatccagcaccatggggaagcgggacaatcgggtggtgatgtgtccaatctagatcccaacttc

SEQ ID NO: 484555 - DNA, 75 bp, Homo sapiens
ctcagcctctcgagtagctgggactacaggtgtggatgtcagcatgaatacacatcttaaagctgtgaaaatgac

SEQ ID NO: 484556 - DNA, 114 bp, Homo sapiens
ggaggaggatgaacactatgattaccaccaggagattgcaaggtctccgtgaggccgggtgacgctccagaatgggagacaagccaatttgggagcagattggatccagcttca

SEQ ID NO: 484557 - DNA, 90 bp, Homo sapiens
catcaccaagggagacctggaggtggacccaagtggagagattgtggaactggcgaaaggtgcatgtccctggaaggagcatctctacca

SEQ ID NO: 484558 - DNA, 89 bp, Homo sapiens
acttcactgcccaaacaggaagtctatgatgagtacaagcgtttaaatgcagaattgcaggcaaaaacagctgacgtggttcaacaagc

SEQ ID NO: 484559 - DNA, 83 bp, Homo sapiens
gctactacaaccagagcgaggacgctcggtagcgcggcgggcaaggcaggcgccatgaccctgattgaaggggtgggtgatga

SEQ ID NO: 484560 - DNA, 75 bp, Homo sapiens
atttaattttagggtcctttatatagaagggagagtagatgctgagggttggaaaagcaaaagcagatgtgtggc

SEQ ID NO: 484561 - DNA, 90 bp, Homo sapiens
cctacgtgctgcctggcgcccgggggcctcccggggacaacggggtgagcccctccagactccgaataggagatcaagagtttgattcat

SEQ ID NO: 484562 - DNA, 83 bp, Homo sapiens
atcagaattactagattttctctcaaactacgaggctcgattccttttgtccaaagtgaacccatctcagacacacaataacc

SEQ ID NO: 484563 - DNA, 80 bp, Homo sapiens
aagagacccggtttctaatccctgctctgtcactaacaagctgcgtgatcttcgaatgaactgacagatacacgtgcaaa

SEQ ID NO: 484564 - DNA, 100 bp, Homo sapiens
ccagtacttgggcttgccagtggcggattacttcaagcagtggattaatctgaaaaaggtacattgaacggaaagccttccttgaccgagtggatcacag

SEQ ID NO: 484565 - DNA, 98 bp, Homo sapiens
tacatgcccagtgtttctcttcagtcactgtgtcaaatttgttcaaggatttaagtgccctgtatgctcaaaatttgtatcctcagatgaaatggatt

SEQ ID NO: 484566 - DNA, 100 bp, Homo sapiens
gactgtgatggtacaggaagggaacgtggaaagcgcatacaggaccctaaacaggtgagcacctgcggatctgtccccagggctacacctgctgcaccag

SEQ ID NO: 484567 - DNA, 100 bp, Homo sapiens
caggactcggtggagtgcgctactcaggcgctggagaaatacaacatagagaaggacattgcggctcatatcaagaagagtctcgctcttgtcgcccagg

SEQ ID NO: 484568 - DNA, 90 bp, Homo sapiens
aatggcttctaagaagttgggtgcagattttcatggcgcatattaaatttcctattgactacccctattcaccacctaccttcagattct

SEQ ID NO: 484569 - DNA, 100 bp, Homo sapiens
tcttccaaggttgatgcatctctctcagagatatttgtgggaaagatcccaagagatctatttgaggatgaacttgttccattatttgagaaagctggac

SEQ ID NO: 484570 - DNA, 98 bp, Homo sapiens
gtggctatccctggctacaccttcacaagcccggggatgaccaccaccctacatagaagagtgatggatgtcatttctcgttcacagctttacttgga

SEQ ID NO: 484571 - DNA, 75 bp, Homo sapiens
gatatctcaaaaggtgatctggacaaaggaacaggtatctcaggaattgtcttagaagaaagaaggcaagccacc

SEQ ID NO: 484572 - DNA, 100 bp, Homo sapiens
taaagttatccaggagccacaaagtgaggtgaccaagaatatggcccaggtgaccaaagccctggacaaggccctgagcaccatggacctgcagaaggtc

SEQ ID NO: 484573 - DNA, 76 bp, Homo sapiens
tggtcttgaaacacaaatggtttttgctgttttcactcattagctcctgaggtaaacaaattgaaaaaatgagcga

SEQ ID NO: 484574 - DNA, 50 bp, Homo sapiens
ggaaaacaagtgtctgcttatgtcggaggcaagtgaggcctatctggttg

SEQ ID NO: 484575 - DNA, 100 bp, Homo sapiens
tccagtagctccaaggaggttaagcttcttggacacttaatgattgttggcaagaaatgtgctgctgatctgggcctgaataagggttatcgaatggtgg

SEQ ID NO: 484576 - DNA, 82 bp, Homo sapiens
tgtttacttgtaaatatgcagattatatttctagggacaaacctatcacatttactcaggtttctgatcagaaacccttggg

SEQ ID NO: 484577 - DNA, 100 bp, Homo sapiens
agtatggcgaaatccactaaatttatttaggggtgctgaatacaatcggagatacaactcgtcaacgaatcaaattcagtgatgacagagtatgcaagag

SEQ ID NO: 484578 - DNA, 100 bp, Homo sapiens
ggggagtggctggtgcccatcgggaaatgcatgtgcaaggcaggatatgaagagaaaaatggcacctgtcaaggaatgaccatacctgaagaagacgctg

SEQ ID NO: 484579 - DNA, 74 bp, Homo sapiens
gcgaggaaaatggcggcgggaggaggtgttcctgctcatatgtttggcgtgacaaagtttggggataacattga

SEQ ID NO: 484580 - DNA, 100 bp, Homo sapiens
aaactaggtttggatagagatgctctggttggattagcaatacttcttggctgtgattatctcccaaaggtgagagtgattttccagtgattgctttggc

SEQ ID NO: 484581 - DNA, 83 bp, Homo sapiens
cgctactctctctttctggcctggaggctatccagcagtccctgtgaagcaggaagagtgagggcaggttcactgcagctcag

SEQ ID NO: 484582 - DNA, 83 bp, Homo sapiens
cgactaccggcagctcgagaaggagctgcagggccagacaatgcagatcttcgtgaagactctgactggtaagaccatcaccc

SEQ ID NO: 484583 - DNA, 83 bp, Homo sapiens
cttctttctggttccgtgttcatcaaggaatccatgtttcttccaagaagcagggccaaaagagaaacattggctactttgac

SEQ ID NO: 484584 - DNA, 83 bp, Homo sapiens
agaatgttgcaaactgttgcaaagaaattcgacttcagtaatttgagtagtaggtttaatgagttaatctcacttggtgaata

SEQ ID NO: 484585 - DNA, 83 bp, Homo sapiens
ccggggaccaggacagtcgcgaggttcgagtgttgcagagcctgcggggcaagatctaaactcattttaaccagcagtgccag

SEQ ID NO: 484586 - DNA, 101 bp, Homo sapiens
tgcacccttgcacttcctggaggtgaaactgggcaagaggccccagcccgtgaaaagtgagagattttgattcgctttccaaggacaatgtcttcgagaat

SEQ ID NO: 484587 - DNA, 100 bp, Homo sapiens
gtccgcctcaggggccatggcgaagcacgagcagatcctggtcctcgatccgcccacagacctcaaattcaaaggtgtgatgaatgcagactctgctacc

SEQ ID NO: 484588 - DNA, 87 bp, Homo sapiens
ttgaggtggtgtccaccagcaagtccccttcccctgagcccatctacaatagcgaggggaagcggcttaacacccgagagttccgca

SEQ ID NO: 484589 - DNA, 82 bp, Homo sapiens
ctacctgcagccttttatcacccaggtgccactatgcacgtgaagaagtacctgctgaagggcctgcatcggctgcagaagg

SEQ ID NO: 484590 - DNA, 49 bp, Homo sapiens
ccattattttggatgaagaaagggaaaggcgtaggaggaggagcaggag

SEQ ID NO: 484591 - DNA, 90 bp, Homo sapiens
atgggcttcccgaaggaatccatctgggaaaaccagtagattcccagacatcgcgaagtgaatctgaaattgtgccaaaagttgctaaaa

SEQ ID NO: 484592 - DNA, 82 bp, Homo sapiens
gctggccaccaccagatgccaagagttcaaactcaacaatattatccccatgttttgaacgaagaatgtgatcagaactggt

SEQ ID NO: 484593 - DNA, 100 bp, Homo sapiens
tttaatgactttggtgccctcaacatctctcagagacgaaagggcaaatttattcggatcaactttgatgtaactggctatatcgttggggccaacattg

SEQ ID NO: 484594 - DNA, 71 bp, Homo sapiens
aattctatggatcccacacgacaacaaggccaaccccaacagtgaggagatctggctggcagccgtgaagc

SEQ ID NO: 484595 - DNA, 100 bp, Homo sapiens
gcggcggcaatgctggagacccttcgcgagcggctgctgagcgtgcagcaggatttcacctccggagtctcactctgtccttcaggctgtgagtgcagtc

SEQ ID NO: 484596 - DNA, 87 bp, Homo sapiens
caaaattctgaactcaggacttggcaagtcagaagagatcaattctacagaaatttccagtggttctgttgaggctttatggaattc

SEQ ID NO: 484597 - DNA, 75 bp, Homo sapiens
gtttcaatattggaagcgctttgatttacagcagctgcaggacatggatttgattgacatactttggaggcaaga

SEQ ID NO: 484598 - DNA, 100 bp, Homo sapiens
tcacttgcttgacctacaaggaatctgagggtgccctcaatgagcacatgaccagcttagcttctgtcctaaaggtggcatttttctgaagttgttcatt

SEQ ID NO: 484599 - DNA, 75 bp, Homo sapiens
ccgcgtgaggagcacctgctgagcccagccagctcagaagtgtcatactctgcaaagcatgaataatcatttgga

SEQ ID NO: 484600 - DNA, 75 bp, Homo sapiens
cttctgcagagagagtgcgcagaaggattccgggagcacagttccgccgatatttaggtcagttaacgtccatac

SEQ ID NO: 484601 - DNA, 100 bp, Homo sapiens
tgatgtttgagaaaggtgaaccaactcaaactaagcatgccaatgaagatgtggaaagaatgttactaggaaacaagtgtgatatggacgacaaaagagt

SEQ ID NO: 484602 - DNA, 98 bp, Homo sapiens
ccttgcccaccaacttcagagatttgtccaagatggagtgaaggtacctgagcgcaggaaccatggtcttcattgctgcctcagcattagcggaagtg

SEQ ID NO: 484603 - DNA, 75 bp, Homo sapiens
ggcttctgagacggcggcagcagcggcattcagcaacgaaggttttgggaacagtaaaatggttcaatgtaagga

SEQ ID NO: 484604 - DNA, 100 bp, Homo sapiens
ataggaccaaagatgcctcaacttggagccagaattccttgtgtggatatcagatccggatggaatctcgagcttgtgaatctaccaggttactctattg

SEQ ID NO: 484605 - DNA, 82 bp, Homo sapiens
ggcgtgcggaggacactcctgcgaccaggagcatcagatccatgctgctgctgactcggagccccacagcttggcacaggct

SEQ ID NO: 484606 - DNA, 74 bp, Homo sapiens
ttccatcgtcgggcgccccagacaccaggggcaacaccctccactaaagagtcaagccagccggacgcattctc

SEQ ID NO: 484607 - DNA, 101 bp, Homo sapiens
ctgcttcctgcgtggctcgtgatggtcgcctgcagcccgcactccttgaggatcgattcacagtctgagaatgaggcttcaccagtaaaacggccacgact

SEQ ID NO: 484608 - DNA, 83 bp, Homo sapiens
gctgggcgcggattcgccgaggcaccgaggcactcagaggagggacccagacatggagctgcgggaagaagcctggtctccgg

SEQ ID NO: 484609 - DNA, 100 bp, Homo sapiens
atgtcatcagcaacaaaaacataaagctctcagaaagagtactgattcctgtcaagcagtatccaaaggaagcaggctgtgagccaaggggaaggcagag

SEQ ID NO: 484610 - DNA, 50 bp, Homo sapiens
aaggaattctttcgaggattaaatggtgtccgcaatgttgccagtgtctg

SEQ ID NO: 484611 - DNA, 101 bp, Homo sapiens
tgctgctgagccccggcactgcctggctgcgagcacatgatggcgatacgggagctcaaagtgtgccttctcgggacatccacgacagcgatggcagttcc

SEQ ID NO: 484612 - DNA, 98 bp, Homo sapiens
tatggacccggccgaggcggtgctgcaagagaaggcactcaagtttatgggaagtcgagataacatgagtattgtactagtttgcttttcaaatgctc

SEQ ID NO: 484613 - DNA, 90 bp, Homo sapiens
aaatctgggaggttgaacttattaatcaaccaggttttcctgtgactgtgacagtagagagtccttcatcctctgaagttgaagaggttg

SEQ ID NO: 484614 - DNA, 100 bp, Homo sapiens
ggagaggccagttctgtcgttggcagcttaaccctggaatgtatcagcaccggacagtcatcgctgaccaacttaaaggagctgctcctttgaagatact

SEQ ID NO: 484615 - DNA, 100 bp, Homo sapiens
cctgccagtccctgctgagaatactgtcatcctacccaccataccacagagggagacgtggtgggcggtccttcctgtgacacgacccttgagtgacagt

SEQ ID NO: 484616 - DNA, 100 bp, Homo sapiens
ggcgtcgcgcggcgtgccctgcttgtcacagaatgacctggatgaccctgaaagaggaatgatttttgtctgctctgcaacccataaaaccaaatcgatg

SEQ ID NO: 484617 - DNA, 97 bp, Homo sapiens
catcacaaaagagttgattgaaattatctctggtgctgcagctctagatgacctgatcagagccatcaagaaactaaaggcacttggcactggcttc

SEQ ID NO: 484618 - DNA, 83 bp, Homo sapiens
tttccgggtggttcgcgctccttctgaattggcagcgaggtcgcggcaggttcgagacaatgcagatcttcgtgaagactctg

SEQ ID NO: 484619 - DNA, 75 bp, Homo sapiens
ctggatctgcggggagttctcagataatccttcccctctaccaccggatatggctcctgggcagagttatcaacc

SEQ ID NO: 484620 - DNA, 74 bp, Homo sapiens
acgcggagcccggagctggggcgacgaggcgattgcgggggcctgggctagataacccagcagccaactggctt

SEQ ID NO: 484621 - DNA, 100 bp, Homo sapiens
ctcattgtaatagcccctgtacttttggtggttggatcatttgaagtggtgtctacacttataaaagccaccccagcagacatgtttgccaaggcctttc

SEQ ID NO: 484622 - DNA, 90 bp, Homo sapiens
ttaaaaaatttattaaaggaagcacacctaagggctcaccagcatttcagcttcaggatggttgtgagtacgtgtttatctggagaactg

SEQ ID NO: 484623 - DNA, 86 bp, Homo sapiens
attctcgcctgcgcagaagttgcttacgccttgtacaaacttgcagcccaagagaacagaatgatctctgcctttcacaaagacca

SEQ ID NO: 484624 - DNA, 100 bp, Homo sapiens
cataaaggcagctttgaaacagtggccctcatgacactgacgctcttcccggtccggctcctggttgccgctgccatgatgctgctggcctggcccctcg

SEQ ID NO: 484625 - DNA, 90 bp, Homo sapiens
caaagctgtcctaggccaaccagagattcatctttcatgcagtgacatgttgataaaaaatgatggttcagccgtctgtatatctcccca

SEQ ID NO: 484626 - DNA, 75 bp, Homo sapiens
ccacaagctactgtgagttgctgcaaaataaagtccctttgctcgatgataccatcttccaaaatcctatggtac

SEQ ID NO: 484627 - DNA, 100 bp, Homo sapiens
tgccagcttcacacttggccccggcaaactccccatccagctccaggtgcagacaaccatgcgtgaaaacctggccacagttgaggggaactttgccagc

SEQ ID NO: 484628 - DNA, 100 bp, Homo sapiens
tccgtatctgcctaggcattttgctgtctcctcctaatacgaatcaaatggctatagcatgtggatctcgagctcatttagaaaaagaatcaattgctca

SEQ ID NO: 484629 - DNA, 100 bp, Homo sapiens
ttaaccagcatggctacttcatattttggaaagcagtttttaagacaagccaaatttgagtttcatcatggtgactatgaaaaacagtttctgcatgtac

SEQ ID NO: 484630 - DNA, 75 bp, Homo sapiens
ctggggactctgcctcgtgccgctgagcctggcgcagatcgccctgggcgctgcctatggcacagccaagagcgg

SEQ ID NO: 484631 - DNA, 96 bp, Homo sapiens
cggcgtctggctgctgcggaccccgccgagtcctagcgcctggcctgcgcgccgctgcccgcgccacagttagagatgtttatgattacttccgag

SEQ ID NO: 484632 - DNA, 100 bp, Homo sapiens
ttcagccgctcgctctccgccttccagaagcatctgggctgatgggccgtaccctgcaccgtgagccacccgcaggagaccaggagggcacagcactgca

SEQ ID NO: 484633 - DNA, 82 bp, Homo sapiens
cacctcatcccctggatgggggaccacaagatcctcatcgacaggctctacagattctcccctgcccctggagaaggaggag

SEQ ID NO: 484634 - DNA, 101 bp, Homo sapiens
ggatcaagcaggttttaaatcaagatttaacattccaacacataaaaattatttatccaacagctcctcccaggccaggagtggtggctcacacctgtaat

SEQ ID NO: 484635 - DNA, 95 bp, Homo sapiens
acactggaaatgaccctagcaaaaatcctctacactagcaaaaccaccaagttttatatgacagagataattattcagtcatctgagaggagttt

SEQ ID NO: 484636 - DNA, 98 bp, Homo sapiens
gccggcgccgctgccgttggtgatctggcatgggatggcctatgaacttcaagagtgcccagacccagagccctttgccaatggcattgtgaggggag

SEQ ID NO: 484637 - DNA, 100 bp, Homo sapiens
gccttcccagttatcataaccttgaatggcgactagatgtacagagtacccaaaggcaagtggaacagctctaatggggttgaagaaaaggagacttggg

SEQ ID NO: 484638 - DNA, 114 bp, Homo sapiens
ccacatgatttcatgtttgtgaagaggaatgatccagatggacctcattcagacagaatctattaccttgatttggaaatagtgggatttattgatatagctgatatttcaagt

SEQ ID NO: 484639 - DNA, 90 bp, Homo sapiens
cttggaactcttactaatgtctataaagccagtatgatagcaatgatggcagccatattttcagaagacagaaacaccatggagcctgtt

SEQ ID NO: 484640 - DNA, 100 bp, Homo sapiens
ccgcctgagcgcaactagcggcgggtcgtgggcacctccagatagaccatgagcagccatggcaacagcctgttcctgcgggagagcggccagcggctgg

SEQ ID NO: 484641 - DNA, 100 bp, Homo sapiens
gtccgtcacgtgaatgtttaaaagttgttaccttggagaagaaatggaggaaaggattggctttcggagccgaggcctgcctggagccccagatcacccc

SEQ ID NO: 484642 - DNA, 74 bp, Homo sapiens
aggagcctcggccccgtacccaggtttcagtgtagctcagaagccatttggagccacgtatgtatggagcagca

SEQ ID NO: 484643 - DNA, 100 bp, Homo sapiens
atttcaagaacagtaaagttggaacacagcagagggtgtgtaataaaatacaggtaagaatgattgatgttggctgatattggagtgctcattcacatga

SEQ ID NO: 484644 - DNA, 127 bp, Homo sapiens
gcattttcctctccagcggccatgttaaccaggaaaccttcggccgccgctcccgccgcctacccgaccgatccttatgtgaagattcatctgatgcagaatggtaagaggctgaagaagaaaaaga

SEQ ID NO: 484645 - DNA, 50 bp, Homo sapiens
ctctccttttccctctccctttccctaagttcgatcctttggtacagaag

SEQ ID NO: 484646 - DNA, 98 bp, Homo sapiens
aggattgggagagaggtagctacccggatgcagtcctttgggatgaaggtcatcatggtcacaggagaccatccaatcacagctaaagctattgccaa

SEQ ID NO: 484647 - DNA, 90 bp, Homo sapiens
cattatgcaaatgcttcaaaatcaactgggcacctccgggctgtgaaaagttagggaagtgtctgacacctccagaatccattcccaaga

SEQ ID NO: 484648 - DNA, 75 bp, Homo sapiens
atttacaataagaagagaagatggacagtttcagtgcattacagtattgtgtatggatgcaaagatcaattttga

SEQ ID NO: 484649 - DNA, 75 bp, Homo sapiens
cagattcgcagtggtcgcttcttctccttgacccaagaaactcgagagatcttacatttccactataccacatgg

SEQ ID NO: 484650 - DNA, 100 bp, Homo sapiens
caggtggtggtggccaagtatgcgcccagcggattctacattgcctccggagacaatgcagatcttcgtgaagactctgactggtaagaccatcaccctc

SEQ ID NO: 484651 - DNA, 100 bp, Homo sapiens
cggcgccgccgcgtcttcccggtctcctttcccggccgcacagggtgcagtgccatacttacactgggtactgctggtgtgtcaccccggatgggaagcc

SEQ ID NO: 484652 - DNA, 95 bp, Homo sapiens
gagatccagttcaattatgaatctcaggaacaccaccttctgtcagtgcacctggtggacatatggaatgtcatagaagcattgcgggaaaatgc

SEQ ID NO: 484653 - DNA, 87 bp, Homo sapiens
tttggaatcctcctatacgaaattgtcacctatgggaaaattccctacccagatttaacccttagtggcttctgaagaaaatggcag

SEQ ID NO: 484654 - DNA, 100 bp, Homo sapiens
tagaagtcaatggcaccgacacattgtggggagaaacaggactgaaagaggtgtccccactgcctctaaatctcaaacgtttatacaaagagacactgga

SEQ ID NO: 484655 - DNA, 50 bp, Homo sapiens
gtgtttcaaagggtggtgaagaactaaggcaccgaccgtcacgagctaac

SEQ ID NO: 484656 - DNA, 90 bp, Homo sapiens
gttttcgaagatgccttggaaaccatctcaattgcttttttaggaccaaaggatatatttccttactcagaaaataaggaaaagtatggc

SEQ ID NO: 484657 - DNA, 98 bp, Homo sapiens
ggaggaggaggtgcaatccttcggttacaagcggtttggatttgaagcattcattaccatctggacttggtctctcagaaacccaaattacatctcat

SEQ ID NO: 484658 - DNA, 100 bp, Homo sapiens
ctatgttggtgccttgtttaatggtctgacactactgattttggtcatgacttgtgctgaccctggcgagattgccaacgggcaccgcaccgcctcggac

SEQ ID NO: 484659 - DNA, 100 bp, Homo sapiens
cggcggcagcagcggcagcggcaagcaccgaatggcatcaccagctgccggatgcggactgagagtgagccatcttgtggctccccagtggtcagcggag

SEQ ID NO: 484660 - DNA, 115 bp, Homo sapiens
cgtggatgaggctctgcggctggtccaggccttccagtacacagacgagcatggggaagaacctagaagtcggaatccggaagaagatcgaacatgacgtggtgatgaaagccag

SEQ ID NO: 484661 - DNA, 100 bp, Homo sapiens
acaaagtagaggagtcggggtacgctggcttcatcatgcccatcgaggtgcacttcaaaaacaaggaggaggaggagaggaaggcccgcgaggagcaggc

SEQ ID NO: 484662 - DNA, 98 bp, Homo sapiens
ctgacgcgagcagccaaggtgttggagcagctcacagggcagacccctgtgttttccaaaggaaggggccctggaccttctgaagaagctgcacagct

SEQ ID NO: 484663 - DNA, 98 bp, Homo sapiens
ggcgtggagatatggcgcaactgcggcgcggccatgaagcccccaggaggagaatcgagcaatctttttggaagtccagaagaagctactccttccag

SEQ ID NO: 484664 - DNA, 51 bp, Homo sapiens
atagcacctgaggacagaacatatcagacagccctcagcgcctttttccag

SEQ ID NO: 484665 - DNA, 75 bp, Homo sapiens
aacttcctgcttgcagcgtttgatccgtttttaacatgtggaactaaacttctatatctttggacttcatcacat

SEQ ID NO: 484666 - DNA, 82 bp, Homo sapiens
cagcctcttatgagaacgtccgcgccaagttatctccagaagaagaagagaaaaggagaatccgaagggaaaggaataagat

SEQ ID NO: 484667 - DNA, 96 bp, Homo sapiens
ctggcaatggtggactatccttatgcctctaactttttacagcctttgcctgcttggcctatcaaggcaacaagattgacctggctgaaaggagag

SEQ ID NO: 484668 - DNA, 100 bp, Homo sapiens
gcagcattatttcagttcaaaatgaactatatgcctggcaccgccagcctcatcgaggacattgacaggagtctgaagatacagtattgctcgtcctcaa

SEQ ID NO: 484669 - DNA, 51 bp, Homo sapiens
ccgagaaccgtcagtttgagccagatggaactgtggctgcaccatctgtct

SEQ ID NO: 484670 - DNA, 75 bp, Homo sapiens
tcctcttgtcaccgacagggcgattgcagtgcgttccggttggcaaaagcagcttttgatgatgcaattgcagaa

SEQ ID NO: 484671 - DNA, 100 bp, Homo sapiens
cgtgggctgggacgcccctaccttggtctttcaggcaattaccagctctggctgggtcgccacaacttgtttgacgacgaaaacacagcccagtttgttc

SEQ ID NO: 484672 - DNA, 75 bp, Homo sapiens
cttcgcggcgcgtcctccgcagaggcccccgacggagacaaggacgtcattgaaattatgagactatcattcaaa

SEQ ID NO: 484673 - DNA, 131 bp, Homo sapiens
tcccgagcgcccgagcactgtgagttagtggtggacctgtttgtgcgcacagtgctggtctgcctgacatgtgtcatggagaaactccagctgggcccagagattctgcagcgggaaaatccaaggcttat

SEQ ID NO: 484674 - DNA, 75 bp, Homo sapiens
aattagccactgccaaagatccctgctggccaaaacattctgattaccgaatgtgacagtgatgataacatgggt

SEQ ID NO: 484675 - DNA, 83 bp, Homo sapiens
cgaggcaaggagctaaagcagcgtgcgttcagccctgggtctctgctttctatccgtcaagatgataaagtcgtgtgcccgag

SEQ ID NO: 484676 - DNA, 73 bp, Homo sapiens
cctgtggaaaacatccttggagaggtcggagatgggtttaaggtagcccgggaccctcgctttgatgatctgt

SEQ ID NO: 484677 - DNA, 74 bp, Homo sapiens
atgatttccctgattgctctcttcacaaacttctacattcagctccaactaccgtgaatgtaacacatcgtcca

SEQ ID NO: 484678 - DNA, 98 bp, Homo sapiens
aagaagggcctcgaaagcgggacggtgctgatccagtttgaggtcactcagctctatgtgccagcatccagacatgtgtggaggttccggcggatggg

SEQ ID NO: 484679 - DNA, 100 bp, Homo sapiens
atatgtatggactagaaggattaaaagaagtagcaatctatattttaagaagagattactgtaatttctttcagaaggtcgggcccctcggggccgcgtg

SEQ ID NO: 484680 - DNA, 83 bp, Homo sapiens
tgcttctggcctctgggcatcgcagccttctacttgtcccatgagctatgtttccagtgtcctctgggtgtttccaagagcaa

SEQ ID NO: 484681 - DNA, 98 bp, Homo sapiens
ggggagcgcccccggcgcgatgcccttcaggaaaggcaatgagaagcacgaccttcatgttacctcccagcagggcagcagtgaaccagttgtccaag

SEQ ID NO: 484682 - DNA, 80 bp, Homo sapiens
ttcagcgagggtactgtatttatggagaccgctgcagggcccagaggctttctccgatgtctaactctttgtgccttgag

SEQ ID NO: 484683 - DNA, 75 bp, Homo sapiens
tacccgaagttgccgcggggccttccgatcccctgcctccacggtgtgcacctggagtcaggagcgcgcttgtgc

SEQ ID NO: 484684 - DNA, 100 bp, Homo sapiens
ggcgctggcagagctgggcaggagaggcctgttgctgccgtctcgactcgtggatggacatcaacaatggctggcagcacttggagcaggctgagaaggg

SEQ ID NO: 484685 - DNA, 100 bp, Homo sapiens
tggatgtagccgactcattattgcggtttccaggtcttggcaacctttgaaattccaattccatttgagagagctttgacgaggccatatgctgatttca

SEQ ID NO: 484686 - DNA, 88 bp, Homo sapiens
agaacttcaggaacctgctgtcagtgggcttacggagttcctatgctagtcagcatagtcagcttgggcaagaccttcgttctgccgt

SEQ ID NO: 484687 - DNA, 100 bp, Homo sapiens
ggggacagacccgaggcctccatgacccccgatgccaaacacctgtggctgagctgaagatccctgaaaacgccaacgtcttctatgccatgaactctac

SEQ ID NO: 484688 - DNA, 84 bp, Homo sapiens
tcagttggaagcagccgatccagcctgcggagcctgtggggcagcagttggaattgatcacaccttttcagttgtacttcaatc

SEQ ID NO: 484689 - DNA, 50 bp, Homo sapiens
aggtgtcttagaggacattaaagctgataccccaatgtccttctttgact

SEQ ID NO: 484690 - DNA, 117 bp, Homo sapiens
ggcgttcccgacccttagctacccacgatgtttcagacagtccccgacacgtcgtcttacatcaaggtactccaaagattcaggtttactcacgtcatccagcagagaatggaaagt

SEQ ID NO: 484691 - DNA, 98 bp, Homo sapiens
ttttcatttccatttctaccttgtatgcctcaatttgctggatttaagcactgctgcactttatgaggtattgttgcagcatctggcagtgagactga

SEQ ID NO: 484692 - DNA, 90 bp, Homo sapiens
aggcagaaggcctctctcctgatacagcaggcgctcaccatgttccctggagctggatcagatctgcatttcttttgacgaaggcaagac

SEQ ID NO: 484693 - DNA, 82 bp, Homo sapiens
cagatcttcaacaagaggacccaggagaaattcgccctcaaaaaactatgttccaacttcctgtcaacaatcttggcagttt

SEQ ID NO: 484694 - DNA, 100 bp, Homo sapiens
aggatccagtgttcaccatcctggccccggaagatgctgagccagggaggcggcccttccagcagccatgagggaaggacaggagatggggcccacccca

SEQ ID NO: 484695 - DNA, 95 bp, Homo sapiens
cccctgttgtgttgctgcggagagacacgatgaggcgagtggtacgacagagcaagtttcggcatgtatttgggcaagcggtgaaaaatgaccag

SEQ ID NO: 484696 - DNA, 100 bp, Homo sapiens
atgatgtggccatcacagagctgagctttagccgagagtacacagctgctgtagaagccaaacaagtggctatcatggtgaacttacttcagattgtgcg

SEQ ID NO: 484697 - DNA, 75 bp, Homo sapiens
tcatccctgatatccctgaccacttcctgtgtctgtgggagcactgtgagaaagtgactgagaccgaagatgata

SEQ ID NO: 484698 - DNA, 95 bp, Homo sapiens
cagtgttgaggaccatcttgcctggagcaaggcgcatcccggggaaatggtgggggctctggctgcgcagtcccttggagaacctgccacccaga

SEQ ID NO: 484699 - DNA, 51 bp, Homo sapiens
gatcagaggaatgcatcagagtacccagctcacagtcctcaggcccatgac

SEQ ID NO: 484700 - DNA, 88 bp, Homo sapiens
ggtgttgggaaaggggagttttggaaagagacgagttgtactgctgtcacaggaaatggacgctggattacaagcatggcagctcagg

SEQ ID NO: 484701 - DNA, 100 bp, Homo sapiens
gctgcagctcgtgggtgctcagggcatatcgatgcatttacttcaaaactttttctactggaagaaattacctcagaagaattaaaagaaaagctttcag

SEQ ID NO: 484702 - DNA, 100 bp, Homo sapiens
atgtgtcggaactagatctttctgacaacaaactcgaagactggcatgagcttatgtccctgatgccaaaaatgcacctactctttcctctaactctggt

SEQ ID NO: 484703 - DNA, 83 bp, Homo sapiens
agcatctgctgcgaatctccggcctcgcatatcccagtagaatacgggcttttccagggcaggaacctttagctggtttgctg

SEQ ID NO: 484704 - DNA, 82 bp, Homo sapiens
tgaaacaggcttgaatctgcaaagaatatctgaacgttgttgggcctatgaaaggaggttccctacatgtcctttgattccg

SEQ ID NO: 484705 - DNA, 97 bp, Homo sapiens
gggtaaagctcctcggcctcggcgtgctgcgcctccgcggctgccctgcgccagggaagaatgacatctttggggagcctctgaacctgtatgcaag

SEQ ID NO: 484706 - DNA, 51 bp, Homo sapiens
attccactggattgggaaagaccatggcagtacctccctgcacttggctat

SEQ ID NO: 484707 - DNA, 99 bp, Homo sapiens
ctcggatccctgaatttgatccagcattttgaaagcgaagcagaagccgtagaatcagcggcgagcctgttgaaagaacccacaggtgcatttcacagc

SEQ ID NO: 484708 - DNA, 75 bp, Homo sapiens
tagagttcctgctgacttacgcttgtttgagggacgtgtggtgtgctactgcggaaggtgaatggcacagccatt

SEQ ID NO: 484709 - DNA, 100 bp, Homo sapiens
cagaagtttatcaaggctgtcacacatcaagttaaatttggtcaacaaaatccacgtcagccaaaattgaccaagaggcagaggaaaattcactgacaga

SEQ ID NO: 484710 - DNA, 100 bp, Homo sapiens
cggaaggttaatgttcttcagaagaagagcagcccgacggccatggaggctgaagagacgatggaatgccttcaggagttccctgaacatcataaaatga

SEQ ID NO: 484711 - DNA, 90 bp, Homo sapiens
tagacttgtttcttatatgtgatgccattccagcactggactcatggaggctgagcatttattcagatggagtctctctctgttgcccag

SEQ ID NO: 484712 - DNA, 100 bp, Homo sapiens
ccatccagcaactggctgagggactcacagctgatgacctgctgctcgtgctgatctcagttcaggcttcagagagcccctgacgcctgcaggaacatgg

SEQ ID NO: 484713 - DNA, 90 bp, Homo sapiens
agaagaaagtggacaagctgaacgctaacattgatgatggcacctcagatcgcccctacagccatgctctggtggctggaattgaccgct

SEQ ID NO: 484714 - DNA, 100 bp, Homo sapiens
ggggtgcatttttacactggacagcactttaatattcctgccatcacaaaagctggacaagcgaagcccagaccagaagagttccaccagcgatccaacg

SEQ ID NO: 484715 - DNA, 83 bp, Homo sapiens
cagcagaagccggcgtcgtcggatgttgtgttgcccgccaccatgagctacacaggtcagcccaaggccaaccccactgtcac

SEQ ID NO: 484716 - DNA, 90 bp, Homo sapiens
cccctatccagacggctgcccttcaagtaccaggcaattgaaggaacagactaaaaatcgtgtcctggaaggaaactacaggtactacca

SEQ ID NO: 484717 - DNA, 49 bp, Homo sapiens
cgttatgtgggaagcgaatccagttctgatctacaatggccaactggac

SEQ ID NO: 484718 - DNA, 100 bp, Homo sapiens
cacgggcatccttgactccatcgggcgcttctttggcggtgacaggggtgcgcccaagcggggctctggcaagcttgctgagcgagagcgagaagcggcc

SEQ ID NO: 484719 - DNA, 100 bp, Homo sapiens
ctctgacaggcattgatctaagtgtgtgcacacaatgatcaaccagatggcaacagcaccagattctcagagattaaagctattaagagaagtagctggt

SEQ ID NO: 484720 - DNA, 90 bp, Homo sapiens
gccgaatcttccttcaggatatcaaggaggagaagggggacgtccccaaagacacactggatgacctgttccccaatgaggatgagcaga

SEQ ID NO: 484721 - DNA, 73 bp, Homo sapiens
ccttctccacgctgggccgggtgttgcgcctggcctacagcgaggctgggtgataaaagaaaatgtggctgaa

SEQ ID NO: 484722 - DNA, 101 bp, Homo sapiens
gagttccagccatcacagctgttcgacttcgatgatttactgaaatttgatgacctagatggaacacatgctctgatgatttggtacacacagaggggcag

SEQ ID NO: 484723 - DNA, 83 bp, Homo sapiens
caactacctgcagccgcagctggactggcaggcccgagggcgagacaatgcagatcttcgtgaagactctgactggtaagacc

SEQ ID NO: 484724 - DNA, 96 bp, Homo sapiens
aactgctggtactgcaatcattcattttgtgccttgcagggatttgcttcctaaggagaagaacttggaaactctgttgaccttggcttttctaga

SEQ ID NO: 484725 - DNA, 100 bp, Homo sapiens
ttacgacatggctgagatcaccaatatccgacctagctttggacttctgcacggacctggccgtctccagtgccaacttcattcccacggtcactgccat

SEQ ID NO: 484726 - DNA, 100 bp, Homo sapiens
gccggacagcggctgagtagagccatgagccgatgtgttttggagcctcgccccccggggaagcggtggatggaagaagaaattgtcgagacgaataaca

SEQ ID NO: 484727 - DNA, 88 bp, Homo sapiens
cgagaccatcttggctaagaaggtaccaggatcatctatgaccggaaattcctgatggagtgtcggaactcacctgtgaccaaaacac

SEQ ID NO: 484728 - DNA, 100 bp, Homo sapiens
gacttcatcacctctttgtacatcttctgcaattactcggcccgcacccgaggatctgacggtggtgctcggccaggaacgccgtaaccacagctgtgag

SEQ ID NO: 484729 - DNA, 98 bp, Homo sapiens
gtggacctgagcacctccaccgactggaaggaggcgaaatgtcaatgagctgaaggagaaaggcaacaaggccctgagcgtgggtaacatcgatgatg

SEQ ID NO: 484730 - DNA, 83 bp, Homo sapiens
ggaaaaagtctgggacatgttgttggaaaaatggctatgcccttcaacaaaacctggtgaactgtcggaaaaggtaacagaag

SEQ ID NO: 484731 - DNA, 155 bp, Homo sapiens
aataactcaccatggcgtatggagtgccaagaaagaacacagtgaaaaccattttgcggggcagttgttataatgtcatcagtatgacaacctgttccaccgtggccgccctgggaatgatgccactctgcatttatctctacacctggtcctgg

SEQ ID NO: 484732 - DNA, 82 bp, Homo sapiens
gatcgctgtgatcgtcacttgaagtccattggaatattaagcccaggagttgctttggggatggctggaagtgcaatgtctt

SEQ ID NO: 484733 - DNA, 50 bp, Homo sapiens
gcaccttcctcagtcgcgccgtgcagctctcttggcctcctagtttctac

SEQ ID NO: 484734 - DNA, 102 bp, Homo sapiens
atgagatcgtggacaagatcatgggcaaaggacagatccagtgtactaatggtcacttgatgtgcgctggctgttttatccacctactagcagatgcccggc

SEQ ID NO: 484735 - DNA, 90 bp, Homo sapiens
gacccatcctcctggcaacatcaccaagagatggctaaagacacatggtccagggtcggctttcggcctaaaggggagtggccccagtgg

SEQ ID NO: 484736 - DNA, 101 bp, Homo sapiens
aatgtggccaagtctctgcagaagatagggcccatcctggacaacagagttatggtgaatggttgcatggatttgaaaaaaaggcaaaagaatgtatggct

SEQ ID NO: 484737 - DNA, 83 bp, Homo sapiens
cttagctgtgctcgcgctactctctctttctggcctggaggctatccagcagggaagtcttgccggaccatcacctttgagca

SEQ ID NO: 484738 - DNA, 144 bp, Homo sapiens
tatcggccggaggaccacaggcttccagtacgagctggttaggaggcacagggcgtcggacctgcacgagctgtctggtaagtaaggaggtctctgtaccatggctcgtacaaagcagactgcccgcaaatcgaccggtggtaa

SEQ ID NO: 484739 - DNA, 82 bp, Homo sapiens
ttcttccactcagcctgtgggagtctctatgctgcagtgttatcctgaatacatgtctaacaattttccttgcaacgttagc

SEQ ID NO: 484740 - DNA, 100 bp, Homo sapiens
ttccaagtcttcagaattcattaaatggatcttctgctggcaggctgcctttaatattggttgggaacaaatctgatctggtggaatatagtagtatgga

SEQ ID NO: 484741 - DNA, 102 bp, Homo sapiens
agatcgtgtcgcacacgcacctcggagtaaatttaaaagcctgttgattcaagaactttctaaagtatttccggaagacatggctaagtatcgaagcatccg

SEQ ID NO: 484742 - DNA, 82 bp, Homo sapiens
atgtcccttcagcatcatgcagccgccgccgaggaagcagcctcccgcgacgatgcccctcaacgttagcttcaccaacagg

SEQ ID NO: 484743 - DNA, 114 bp, Homo sapiens
ggaaatggtgctcttgcagaacattctgaaaatgtgcatatttcaggagtgtcaactgtggtattggaaggaactggccctgggcctctggaggcagcagtattctggcagaat

SEQ ID NO: 484744 - DNA, 100 bp, Homo sapiens
tccaaaagaggttgccagtgctaaacccaaagtattgctagacgtgaaactgaaggctgaagattttatagtggataaaaagcttgtggtgaaggggggc

SEQ ID NO: 484745 - DNA, 100 bp, Homo sapiens
tgatgaggatgacgatgacgatgaggaagatgggaggagatatcaccaaacatgatggaacaggcggacagtccatttatggagacaaatttgaagatga

SEQ ID NO: 484746 - DNA, 90 bp, Homo sapiens
cgagacatcttccctgtgggctggtgttccttgactggagacaacctgcagcctcctggcaccaaaggactccctggaggaaaagcggaa

SEQ ID NO: 484747 - DNA, 88 bp, Homo sapiens
tgcaggtctcctgcggccgagctcactctcttgtgttgactgacagggaaggagaagaattattgtcatcacaagagaaatctcctgg

SEQ ID NO: 484748 - DNA, 73 bp, Homo sapiens
gcgctgcgggccggggcgcggaccgcggagcggccggaagtaccactgcccagtgctgtttaccgtgttcacc

SEQ ID NO: 484749 - DNA, 80 bp, Homo sapiens
gggggatcgaccgggacagctaccggcgcatccttatgggaaccttctgaccagcctcatgggctcctcagagcaggagg

SEQ ID NO: 484750 - DNA, 50 bp, Homo sapiens
tcccgagtggctgggattacaggacttggatgttgtgggtgatggtatgc

SEQ ID NO: 484751 - DNA, 72 bp, Homo sapiens
agacccggacgacccccattgctgagccagcggagctgcttgttgcagcatgagaaagccgaactagaacag

SEQ ID NO: 484752 - DNA, 96 bp, Homo sapiens
cccaggtgacaccaggagaagtgtctatccagctgcgtccaggattctgctggtatgtgctatccttcagcaaagaatcatgaacagacattttct

SEQ ID NO: 484753 - DNA, 97 bp, Homo sapiens
cagactctgaagatgatcagacaaggcaaagcgaaattggtcattctcgctaacaactgcccagctttgagaggcttcgtgacggagttatcagaga

SEQ ID NO: 484754 - DNA, 100 bp, Homo sapiens
ctgagatcaaatggcacttcattggccacctacagaaacaaaatgtcaacaaattgatggcacttttcaggattagaagaggctgtgtatagaaacatac

SEQ ID NO: 484755 - DNA, 100 bp, Homo sapiens
ggcgtgcgcggctatcccaccatcaagttcttcaggaatggagacacggcttcccccaaggaatatacagcctatacggttcagacatccgagagcatga

SEQ ID NO: 484756 - DNA, 100 bp, Homo sapiens
gaatttcctgtgttccctttgccgctcctggagttcactggagccccctggtgaaggccatcttccatgcctgcagagccatgcatgcctcactccctgg

SEQ ID NO: 484757 - DNA, 75 bp, Homo sapiens
tgaaaatggacgagtaatcgcctgctttgattcattgaaagtcagcagcaaggacaagatggagtaaaagtccag

SEQ ID NO: 484758 - DNA, 100 bp, Homo sapiens
gaaaagcacactggtggtggcagggagtctggcagtgatgcctggaaacagtacatgagaaggtctacttgcaggctatggaactcagtcaactccccag

SEQ ID NO: 484759 - DNA, 75 bp, Homo sapiens
gaccgccgccgccgccgccaccatggtgaccattgtgaggtagatattttgttctaattttccagatgaggaagc

SEQ ID NO: 484760 - DNA, 50 bp, Homo sapiens
ctcaaagtgtgccttctcgggattacatgaagcagatgacatttgaagcc

SEQ ID NO: 484761 - DNA, 90 bp, Homo sapiens
cttcaattctcccaagtcgctctttctgggaaaagttatagctcaggtacctgacaatgatgagcagtttgtaccagactatcaggctga

SEQ ID NO: 484762 - DNA, 100 bp, Homo sapiens
gctgatgcccagcaaagacaacagccagaagacgtctgtgtccacaatggtgcgcatgaatgtcctggcagatgctctcaagagtatcaacaatgccgaa

SEQ ID NO: 484763 - DNA, 100 bp, Homo sapiens
ccaggggaagaagaagaaacgggccgcgaaccgcagtatcatgctggccaagaagatcatcattaaggacggaggcacgagagtgataatgaactctcaa

SEQ ID NO: 484764 - DNA, 75 bp, Homo sapiens
gggattgggaaaatctcttcagggggggacacagcgattgccacgcgccattggaatgtccctggccaaggagct

SEQ ID NO: 484765 - DNA, 75 bp, Homo sapiens
ccgtctgcttcgggcctctggaatttagcgctcgcccagctagccgcagtgattcataatcttcactgctcacgc

SEQ ID NO: 484766 - DNA, 82 bp, Homo sapiens
ggggacccggccatggcgctggacttcttggctggatgcgcgggggccatgccagtgacggtaacccgcaccaccatcacaa

SEQ ID NO: 484767 - DNA, 100 bp, Homo sapiens
ccacctgggccccagaccgtgctgatcttcgatgagctctcggattccttatgcagagtggccgacttgttctttatagctccaagctctacagattctt

SEQ ID NO: 484768 - DNA, 82 bp, Homo sapiens
gaaacttatcccagagctttgctacattggaacagggccgcctctcaagtaagcaagctgtgtgggaagtgcagccccactg

SEQ ID NO: 484769 - DNA, 83 bp, Homo sapiens
ctcctccaccgagtcgtgctctcgccccaacccgcgcgccaggttggaatgttgcatcagcaggtagaagaacatgaaaaaat

SEQ ID NO: 484770 - DNA, 90 bp, Homo sapiens
gaagggaacgtggaaagcgcatacaggaccctaaacaggagttccaggaagcgctcgcccctggccgaggatatgtccttgcaaaacacg

SEQ ID NO: 484771 - DNA, 104 bp, Homo sapiens
cctgcatgtctggctacctcgtggacaagtttgcagatcgggagcgcaaggtcgccctcaaggccatgatcaaaacggccagatattcgaagcttacaacatgg

SEQ ID NO: 484772 - DNA, 74 bp, Homo sapiens
ggaggttgcccagaagaaaaaggtcctgtccctgctatcagtggggcactgaagaaagcaggactgagtcttaa

SEQ ID NO: 484773 - DNA, 105 bp, Homo sapiens
actgttgcaagagaatgtgccgtcatatgaaaaagctatgtgttctcatttcacccaagaccattggccagtgcagggcatagaagattcattccacaaacttat

SEQ ID NO: 484774 - DNA, 82 bp, Homo sapiens
cggtcaggctggacgtgcacgcagcccggcgggaggataaagaccaccacgtcgagtaatcctgcctgtgtctgtagatgag

SEQ ID NO: 484775 - DNA, 100 bp, Homo sapiens
atgaccacgtctgccggtccatgttttcagcacccattgcctgaagtgttagcaccttcactccggtgaaagaaaatggcccgaaccaagcagactgctc

SEQ ID NO: 484776 - DNA, 100 bp, Homo sapiens
tggcggacagtgcggaactaaaggaagaagaaattgtcgagacgaataacatgaggtcatatagaatcccacttttggtgatttcaagtcaagaaagtaa

SEQ ID NO: 484777 - DNA, 100 bp, Homo sapiens
atgaagagatgttacccagtatcttggtgttgctgaagagggtgtccgcaatgttgccagtgtctgtctgcagattggctacccaactgttgcatcagta

SEQ ID NO: 484778 - DNA, 80 bp, Homo sapiens
aaaccccctactatcatggtacttacatttttgtgggctggataataaacaaggttctcccatgggcaggtggtctctct

SEQ ID NO: 484779 - DNA, 75 bp, Homo sapiens
gtggctgctgaacacctgagtgcccgggcaggcttcactgtgacaaccagggcatccccatcatgtccagcatca

SEQ ID NO: 484780 - DNA, 98 bp, Homo sapiens
cagaactggatgaaaagcatcaaggaggctccttctcctgaaaaagccgaggaggagagtgagaggcttctgagggaactctatttgtttgatgttct

SEQ ID NO: 484781 - DNA, 98 bp, Homo sapiens
aaaaagcattctctgaaaaccttgatcctgaggctctgcgaacatcaatagatgcttatgacaactttgacaatatctcgcttgctcagcgtttggaa

SEQ ID NO: 484782 - DNA, 100 bp, Homo sapiens
cgaaggttcaattatgtggtcaaagcatgaaggaactgactctcaagcagacctagaagatatcattgttgtattaaacagcttcaaaagcaagatactc

SEQ ID NO: 484783 - DNA, 82 bp, Homo sapiens
tccgtgtggccaacgagctcaacgccaggcgccgctcctttacaggtcccaagctctttaaggagcccagtagtaaatcaaa

SEQ ID NO: 484784 - DNA, 97 bp, Homo sapiens
aatagatactcatcagaacaaaatggagccaaaatagttgcaacaaaagagtggagggctctgagagatttcatttctgtcctgctgatgaagtcta

SEQ ID NO: 484785 - DNA, 50 bp, Homo sapiens
gacttttgtgttgcagttcggatccattacaagattttggcttttctgtt

SEQ ID NO: 484786 - DNA, 75 bp, Homo sapiens
cgggagttcaagaagaacactccagaggacttgaaaatactggaaatctgtccggatccaaattattttgcaagc

SEQ ID NO: 484787 - DNA, 90 bp, Homo sapiens
cggacctggactgcccaagaactcccaagactgggacatgttggatgttgatgaagatgaaaagctaactggtgaagaagaatttgaatt

SEQ ID NO: 484788 - DNA, 100 bp, Homo sapiens
gatgatccaccagcggttccatcctacacttgggtgactgcttagaaaactgcacagcatctgatgaaattagcgaataagaacatcaaccatgtcttac

SEQ ID NO: 484789 - DNA, 75 bp, Homo sapiens
cagccgaggtcttcgggaattccagcgaggaaataaactatcaatcttgcccagactggagaaaggactgcagca

SEQ ID NO: 484790 - DNA, 100 bp, Homo sapiens
gaaaccacagacatgactgagtcctccatgaagagtctcctctgagcctccggcctccataagacccaaaacagatgacacctcttcccagtcccccgcg

SEQ ID NO: 484791 - DNA, 75 bp, Homo sapiens
aggacggagccacatactgctgacggcccagaactggcagagagaagtgagaaagatcagtctaaagaaaaggag

SEQ ID NO: 484792 - DNA, 96 bp, Homo sapiens
cgagagccgcgggagagtgtgcagccgagtcactactgcctgcctgcctgcctgctacgagcctgttcatccgagcagtgcgggcatacaacggtg

SEQ ID NO: 484793 - DNA, 82 bp, Homo sapiens
gtgccaaataccacatggaaatgaattctaaggaggtgtgattgcctatatcagttcttccagctcagcctcaagccctgcc

SEQ ID NO: 484794 - DNA, 98 bp, Homo sapiens
agttttcttcagaagaaggacttcggaatgcactacaacaggaaaatcatattatagatggagtaaaggtaaatttggaaggcaaagccagccctctg

SEQ ID NO: 484795 - DNA, 100 bp, Homo sapiens
tggagactatggaaaactaggcttaggaaattccactgcaaaatcttcacctcaggcatagtgaatggagtgattctcccgacagaaacacgacttccca

SEQ ID NO: 484796 - DNA, 97 bp, Homo sapiens
aagaagcagtagagggtgccatgcacattcagatagaatgagtccatttaagtcccaggacggtggaaactagctagtagattgcagccatgttgtg

SEQ ID NO: 484797 - DNA, 90 bp, Homo sapiens
cctcccaagtaactgggattacagccttctgagagaaattgagtggatccggagccggagatattggcctcaaggtatgagccagcaaca

SEQ ID NO: 484798 - DNA, 50 bp, Homo sapiens
gtgctggtgatggcctacgggagcctgaactgccattggatgtccagaat

SEQ ID NO: 484799 - DNA, 74 bp, Homo sapiens
cggagagcacgccatgaaggcctcgggcacggctattgagggcacctacattgacaagaaatgccccttcactg

SEQ ID NO: 484800 - DNA, 98 bp, Homo sapiens
gtggagtgacggtgccaccgcggcgcgttctggcctataggaacaagacattttcagtaatggaagaaggagcttccaggctggggaagatcatcatt

SEQ ID NO: 484801 - DNA, 100 bp, Homo sapiens
gtgtaattacctgtcccatcatctgacaattagcccacagagtggcaacttccgccaattgctacttcaaaggctgctttgactctcccgcgaagacctt

SEQ ID NO: 484802 - DNA, 80 bp, Homo sapiens
cctccaggagcccagacaccagccccccaccatgagggtggttctgggctggactccagccccttcctgtcggaggccaa

SEQ ID NO: 484803 - DNA, 100 bp, Homo sapiens
ctgactgggcaacatgttattcagatgaaagccttgagggaattagacagattttctgttttgaatagccaacacatgtttgaagtactagctgccatga

SEQ ID NO: 484804 - DNA, 98 bp, Homo sapiens
ctgggaagcagcactgttactcaggctttacaggaagtatggtgctggcatctgcttggcttctagagagtcttacaatcgtggaggaaggtgaatgg

SEQ ID NO: 484805 - DNA, 100 bp, Homo sapiens
tcctaccatggtatttgctaacgtttagagagtgcttccccttgccgagcactggatctcacattcttgaaggtggcattgaagagcactaagatcggaa

SEQ ID NO: 484806 - DNA, 74 bp, Homo sapiens
cggcagaacacagcagggcggaggaaagtgcaggctatgactttgcagccgtcctggagtggttcgcggagcgt

SEQ ID NO: 484807 - DNA, 75 bp, Homo sapiens
aactatgtttggatgttggatctacactttctcaagcactgtgatcttcaaatgaagcccagtgaatatattgcc

SEQ ID NO: 484808 - DNA, 100 bp, Homo sapiens
agcggccccacctcgctgttcgcggtgacggtggcgccgcccggggcgaggcagggccagcagcaggcgggagccgattacacctcaacaagaaggcaac

SEQ ID NO: 484809 - DNA, 83 bp, Homo sapiens
gtcaaggatcgatattttgtcgaagaaactgtggaagtcattaggaacaatggtgcaaggcagaggacatgaatgtcaagttg

SEQ ID NO: 484810 - DNA, 51 bp, Homo sapiens
cttcagaacacctcacaactttgtgattctgaaggaagatttccattaggt

SEQ ID NO: 484811 - DNA, 118 bp, Homo sapiens
cgccgccagggtctgcagggcctgggccgccgctgctacctgcagcgccgtgtggcacgacacaaaaatcaggtatcttggagatggccgcttccatctggagtctgtcatgattgcc

SEQ ID NO: 484812 - DNA, 100 bp, Homo sapiens
ggacacccagcggtctgacatcgcgacgctgctcaaaacctcgctccggaaaggggacacctggatgagcacaagcctgggagatggcagtgatggaaat

SEQ ID NO: 484813 - DNA, 100 bp, Homo sapiens
cctgtgtgaaattgcttctgtcaaagacaatattttctatgtgatggagtaccgagaactattcctggcactttttcgaaagtttgatgagagatgccag

SEQ ID NO: 484814 - DNA, 83 bp, Homo sapiens
cccccgcgggtctgctctgtgtgccatggacggcttcgagagctgtgcccaggagtgaacaaccagccctacctctgtgagag

SEQ ID NO: 484815 - DNA, 100 bp, Homo sapiens
gcaaattaaagcaattatgaaagaagtcattccttttttgaagttatctcagggatctccagaaccgattgagcccaactttttcacagcagattaccat

SEQ ID NO: 484816 - DNA, 100 bp, Homo sapiens
atcaaccgctccatgcagaactggcaccaggttttgcgtgtgaagctgtgtggaaatgtgaaatactaccagtcacaccattatagtaccgtggtgccac

SEQ ID NO: 484817 - DNA, 75 bp, Homo sapiens
actttttatcaaaaactatgtacttggaggatcgaacaagacaaggtctcaccatgttgcccagaatggacccga

SEQ ID NO: 484818 - DNA, 51 bp, Homo sapiens
gtggtgtaaagcgcctgtaaaaccagctctttcaccatgcctggatcactt

SEQ ID NO: 484819 - DNA, 100 bp, Homo sapiens
caaaccactgaggatcagattttgaagagagatatgccaccagcatttattaaccatgaagactttgaatttatttcaggaacacgaatgcgcaaacttg

SEQ ID NO: 484820 - DNA, 74 bp, Homo sapiens
tgataacacctgggatcctgaaataccagtttgtgaaaaagaaatggcaagttccaatcctgtgtatatggaga

SEQ ID NO: 484821 - DNA, 50 bp, Homo sapiens
gagcggacaaggctccggcctgcgaggagatctgttacctaaagcaataa

SEQ ID NO: 484822 - DNA, 100 bp, Homo sapiens
ggagaggctaatgctgagctctgtcggtatctttccaaggtcctagaactcaggaagagtgatgtggttttggataagatggctcagcgacttcttctga

SEQ ID NO: 484823 - DNA, 100 bp, Homo sapiens
cgcttttcccctggccttctgtatcttcatggtgcggctcatcttcgagagtttgccaaggcacgagtaacaagctcacgcagttgggcacttttgaaga

SEQ ID NO: 484824 - DNA, 100 bp, Homo sapiens
tttgcaaaggaagtaaaagaaagaaatattttgttatatgggcttctcatatcttacccacagaacaaattggagctctggcagatcagcatatcattca

SEQ ID NO: 484825 - DNA, 90 bp, Homo sapiens
ggctctgctgctgccgccggcgaaggaggaggcgttgccggcccctgaaaatgcactgcagggactgtgccctggtgaccagctcagggc

SEQ ID NO: 484826 - DNA, 101 bp, Homo sapiens
gcggcagcggcggcgcggaggcggctgaggtgcgagccggtgcacattcaggttcccgagcacaaacatcaagataacgttcactgccctgtccagcgaga

SEQ ID NO: 484827 - DNA, 50 bp, Homo sapiens
cccagcccctgatgtcccagcaggtgcagattcactttataggaacagct

SEQ ID NO: 484828 - DNA, 100 bp, Homo sapiens
gcgctgttcaaacccatgaagtgttccattgcctaaagaggagaacatttctgctcccttgatctccagctccccagtgaaggcagcccgggagtatgaa

SEQ ID NO: 484829 - DNA, 138 bp, Homo sapiens
agggctctgaaagctagaagaaaaggtgtacttgcaagaaacctcaggacttgagtaacagcaacatgacttcagattttcctgtccttgatcccagctggactgctcaagaagaaatggcccttttagaagctgtga

SEQ ID NO: 484830 - DNA, 100 bp, Homo sapiens
aaacaagacagttctgtctgcagaagcccattatggctgtaactggagatgacacaggttttagctaaagaagatactgaggcagctattcaatcaatat

SEQ ID NO: 484831 - DNA, 86 bp, Homo sapiens
gtttgctgcatgctgcatgagacccagggtcctggtacaactccaaaaggagacattggagaagaaccaagctgggtctataagga

SEQ ID NO: 484832 - DNA, 83 bp, Homo sapiens
tacaatcactacggacacaggattcatgcggaactgtggctgcaccatctgtcttcatcttcccgccatctgatgagcagttg

SEQ ID NO: 484833 - DNA, 95 bp, Homo sapiens
gccatagtacctacagcagcactccagtgtgaaataaaagtagccatgtcgaaggaacaatatcagcaacagcaacagtggggatctagaggagg

SEQ ID NO: 484834 - DNA, 97 bp, Homo sapiens
tctagcaggctccactaactggggctacgactctgatgggcagaatccagactccaaaatgatgcaaatcaacctgactggatttttgaatggaaaa

SEQ ID NO: 484835 - DNA, 50 bp, Homo sapiens
aaaacaacttcgagggcagagccaccatcgactgccaagtccatctccat

SEQ ID NO: 484836 - DNA, 98 bp, Homo sapiens
ttcgtgcccctcggacccggccacgcagtccccaggggcccggcccggggcgcgttgaaggcaggtgacagcagggacatgtctcgggagatgcagga

SEQ ID NO: 484837 - DNA, 100 bp, Homo sapiens
atcacctcatcttcaatatgtgcctcattgaccgctgggactacatgacagcagttggaccttttggagagcgagacgatcaacaggtgtttatccagaa

SEQ ID NO: 484838 - DNA, 100 bp, Homo sapiens
cagaaaggaactggctaccgttcggactatttgtagtcatgtacagaacatgatcaagggtgttacactgggtctgggtctgccgcccaggatggagtac

SEQ ID NO: 484839 - DNA, 96 bp, Homo sapiens
gaaccatcctctctccaccaagttgttggtaccttccctgatgaagttttatacaggacacaactcagatgggaagttcatcgcccgggcacagcg

SEQ ID NO: 484840 - DNA, 75 bp, Homo sapiens
ggcggcgaggagcgcctgcctgaggagagcagacagattacatcaatgccagtttcatggatggctacaagcaga

SEQ ID NO: 484841 - DNA, 50 bp, Homo sapiens
ccaagacctcatcaacaattaagacaaatttacatgtattggagaccaga

SEQ ID NO: 484842 - DNA, 83 bp, Homo sapiens
ccacaatcttcaatgagtaaacatattcctgagaatggggtactaagagaaaagcacgaagctgtggatcatagttcccagca

SEQ ID NO: 484843 - DNA, 100 bp, Homo sapiens
cagactccaactgtacaagaggagagtgaagaggaagaggtctgtgtgccattgcccaggcagagtctctgcgttacaaactcctaggagggcttgctgt

SEQ ID NO: 484844 - DNA, 100 bp, Homo sapiens
cagcgagtcaccgagccaccggccctcgggtattggtaaaggttttcaaggtgtcatgaaaagatggggatttaaaggccagcctgctacgcatggtcaa

SEQ ID NO: 484845 - DNA, 82 bp, Homo sapiens
cgaacaatggggaaagcttacagactgtgtggtctactggggttcatcccatctgagccaggcctggcttttcttggctgca

SEQ ID NO: 484846 - DNA, 150 bp, Homo sapiens
tggcctgtcgctggagcacaaaagagtctccgcggtggaggtctgcgttgctcttgcttttcctcgctggggtgtacgggcttcctgttgcagctgttccaggagctctgagtcctttggccattccaaatgctgctgcagcagctgctg

SEQ ID NO: 484847 - DNA, 74 bp, Homo sapiens
cccaaacaagggaaggagaaggccaagaaggcagagcagccccaaactggataccacccacatgtccatcatca

SEQ ID NO: 484848 - DNA, 75 bp, Homo sapiens
gcaacgctgtgggcgttccaggaggtggtcgtggcgaacctggcagctgcgatgccatggacaatattaccaggc

SEQ ID NO: 484849 - DNA, 100 bp, Homo sapiens
gtgaccactgcttgctctgccgcaaccacaccaaggagctgctgaaggagacgcggaaggagcacacgctgcgggcagtggagctgctctactccatctt

SEQ ID NO: 484850 - DNA, 100 bp, Homo sapiens
gcgagccggccggggcttcctccccggccggcagggtggacggtgggctcgtaaaataccatgaagattttgaaaaaacaaaggggagaggctttactcc

SEQ ID NO: 484851 - DNA, 100 bp, Homo sapiens
gaggtagaggtggcgctcatgcatatttgagacaacatctggatggttggggagaacgggccgtctcagtctcataaaaggggatcaggcaggaggagtt

SEQ ID NO: 484852 - DNA, 98 bp, Homo sapiens
agcattaccgggttcgctaggctcacagagccccacaatgaagatccaggagcatcccagcctatctgacaccaaacagcagagaaatcaagatgccg

SEQ ID NO: 484853 - DNA, 75 bp, Homo sapiens
gagcccagtgctggtccgcattcttctcagagaactggagaagggtcaccgaagtccccacacgctggctctcca

SEQ ID NO: 484854 - DNA, 82 bp, Homo sapiens
gcagagacaaaagaaacgggccccgactggccctgagcctgtgcaattatttcgagagtcaaaatgtggatttccgaggcaa

SEQ ID NO: 484855 - DNA, 99 bp, Homo sapiens
gaggaagcgtgcgtccctggcgcttccttcttctcttccggcggagagcatgacgacagagatgatggtgtggattattgggccaaaagaggaagaggt

SEQ ID NO: 484856 - DNA, 90 bp, Homo sapiens
tccccagccctgcctctccctgggctctggtccctttctagagataggagaagagagagatcgctgtctcgggagagaaatcacaagccg

SEQ ID NO: 484857 - DNA, 85 bp, Homo sapiens
ctttagaccctccacctaattgcagaccagcatctcagacatgtcgaaaaagatgttttgatccctaaaataatgagagaaaagg

SEQ ID NO: 484858 - DNA, 75 bp, Homo sapiens
ccagccaggccgctgcacctgtcaggtgaaatgtaacgagcagcctaacagagtggaaatctacgagaaaaccgt

SEQ ID NO: 484859 - DNA, 75 bp, Homo sapiens
aacactgtacaagctttcaaagtcaatgcatcctctggtatcacgattccaaaacccccaaagccaccagataag

SEQ ID NO: 484860 - DNA, 100 bp, Homo sapiens
tagctgatgataggggggttccatctcccaacttgtccataagccgctggagttctggagtgggtggaagtggtggaggatcctctggtaggtcatcagc

SEQ ID NO: 484861 - DNA, 75 bp, Homo sapiens
aaatggaagagacgcccctgctaacgggaatgctgaagctcttcgtgggcggtcttgactggagcacgacccaag

SEQ ID NO: 484862 - DNA, 82 bp, Homo sapiens
aggagaacaagcgctgcaaatacaatcactctaaaatgtgtgataggtgagaaaccttaccactgtgactgggacggctgtg

SEQ ID NO: 484863 - DNA, 101 bp, Homo sapiens
tgccccgtgccggggcgtccaccggagtcctgccagctgtccggcgctggggtctctaattaacagaagatggcaaagcccagccacagcagctatgtcct

SEQ ID NO: 484864 - DNA, 75 bp, Homo sapiens
gaaagatttgggcttgaagacccagaagatgacatatgcaaaaccactcacgaattcttgtttggtgcccttgct

SEQ ID NO: 484865 - DNA, 98 bp, Homo sapiens
tcatctgcaactccccaagcagcatccccgtcacaccgccaggccaggggtgattctgggggtccacttgtctgtaatggtgtgcttcaaggtatcac

SEQ ID NO: 484866 - DNA, 100 bp, Homo sapiens
gacccatttatgaggaggtggcttatgaaagtgtgatgttcgcgtatttcttgacaggtgacgcatccaaagaagacattgacactgctatgaaattagg

SEQ ID NO: 484867 - DNA, 51 bp, Homo sapiens
ttgcagtatttatgggagtatgggttacctagaaaagtacgagaaagttca

SEQ ID NO: 484868 - DNA, 100 bp, Homo sapiens
cgggaggctcggcggcgggcggcagcatgtcggtggcggggctgaagaagcagttctacaaggcgagccagcaatggcagatgagtctggggaccagcga

SEQ ID NO: 484869 - DNA, 83 bp, Homo sapiens
attccattagctgctgtcatcaagccctttgccaccattccttcaaatgagatgaagaaactgaggttcagagaggttaagag

SEQ ID NO: 484870 - DNA, 100 bp, Homo sapiens
ctgggaggaagccgactaggcgaattcacttactgaccggcctgggctgctctgagacatggtcacttttcaataggatggactttgaagacttggggtt

SEQ ID NO: 484871 - DNA, 110 bp, Homo sapiens
gtgctggtgcagcgggttgtgaaggacatcactaacgccttcaggaggaacccacacataatcgaagcaaacgcttggagaaggtccatgtggttattgggcctaaatcg

SEQ ID NO: 484872 - DNA, 80 bp, Homo sapiens
cggctgcagtgctgacaccactcagggcaagggtgtccgacggctggagcggaaatctggcattttttaaagtttgcgcc

SEQ ID NO: 484873 - DNA, 98 bp, Homo sapiens
ctgtatgtctttgctctgatgttcttgtatgcaccatcccataaaaactatggagaagaccagtccaatggtctgtgcagacttttgcagacaaatca

SEQ ID NO: 484874 - DNA, 98 bp, Homo sapiens
gaaagagtgtctcatcttcttcaagataacttgccaaaatccttatgtttgatcatcggccaaggtcctggcgagaactgcctctgcggctagctgat

SEQ ID NO: 484875 - DNA, 74 bp, Homo sapiens
tgatcatgattttcttgaaaaggaccttgtagaacctctttgcagcacaaatggacccccgaggcctatctccc

SEQ ID NO: 484876 - DNA, 100 bp, Homo sapiens
gcagcacttttcacagcatcagcagtcatctcactagttatgttcaaaaaagagtcttttagtcctgctatacagctgcaccttgtacatcaagctccat

SEQ ID NO: 484877 - DNA, 74 bp, Homo sapiens
cctgccttgtcccagcggctggagggtctcagaattatgatctagcccttaagtatttccagaaagctgctgaa

SEQ ID NO: 484878 - DNA, 100 bp, Homo sapiens
gtaccagaattattcgtgctataaacactggcaatttgaacttctgaattatacaccagcagattatgattcttggatctcccagtcagcttcatttccc

SEQ ID NO: 484879 - DNA, 100 bp, Homo sapiens
gcaggtttaaaattttacataagaagttacctttttcaggatcaggagaaggtctggggaaaataatccagagatttccacagaaggactgggatgatac

SEQ ID NO: 484880 - DNA, 100 bp, Homo sapiens
ctgtacttctatatctacaagggggtccgcaaggaatgatgagaagacagcagctgattacaagattttaggtggttcagtccttcacctggtgttggct

SEQ ID NO: 484881 - DNA, 100 bp, Homo sapiens
ttcttgtttgtggatcgctgtgatcgtcacttggtctggagcccggcactgtggtcataacagagcaggcagtggatacctgcttcaaggcagagtttga

SEQ ID NO: 484882 - DNA, 75 bp, Homo sapiens
caagccgcctgcacctcccaactccctgaaacctccacagctgttgagaaaaaggagaaacctcttccaagactt

SEQ ID NO: 484883 - DNA, 83 bp, Homo sapiens
acaggatatgaagaaattgagggttcttgccatggtgaccctggcagcaaccccaacaaacgccagaggcagccccctctcct

SEQ ID NO: 484884 - DNA, 100 bp, Homo sapiens
gaatacattgctgattatctcatgcagagttttccgtctgatgaaggttggccatttgcaaagtatcttggagcttgtggaagaatggtggctgtaaatt

SEQ ID NO: 484885 - DNA, 98 bp, Homo sapiens
gtatctgccgctcctggctcctagggcagcgcctagagcacagttcctctgtgacgagggtgcaggtatctctggggactacatcgatcgcgtggacg

SEQ ID NO: 484886 - DNA, 100 bp, Homo sapiens
ggaccggccacctccatcactggcgtcaccatgggggctgtgctgggtgtcttctccctcgccagctggcttaagagttggacagtggaggaccttcaga

SEQ ID NO: 484887 - DNA, 82 bp, Homo sapiens
ccttaactccttgattcaggtgttcgtaatgaatgtggacttcaccaggatattgaagagctgggatggaaattctatgatg

SEQ ID NO: 484888 - DNA, 118 bp, Homo sapiens
aagatggcggacaaaacgccaggcggatctcagaaggccagttcaaagtattggtaaaggttttcaaggtgtcatgaaaagatggggatttaaaggccagcctgctacgcatggtcaa

SEQ ID NO: 484889 - DNA, 100 bp, Homo sapiens
acctcagatagggtccacagaatggtcagaaaccctccataacctgaagacttaattcagtgcacaaatgagatgaatgtgaacatcccacagttggcag

SEQ ID NO: 484890 - DNA, 75 bp, Homo sapiens
gttatgcagctcagcaaggtgaagtacccagaaaccaggactggcttggtgtctcaaggcaactcagaaccaaag

SEQ ID NO: 484891 - DNA, 75 bp, Homo sapiens
ctcagaagccgtggtctggtctccgggatcaggtgtcaagttacatcaaagagcaaactcaagaccagtttcaga

SEQ ID NO: 484892 - DNA, 80 bp, Homo sapiens
cagcgggacccggcgaagacgcgaccgcggcgcgagtcaccatgagacacctatggctgccgatgaaggctcagcagaga

SEQ ID NO: 484893 - DNA, 75 bp, Homo sapiens
tcaaccataaagacatcttaattgggcacgaaagagtcactcagcctctgaagaagcttcgggttcagactcagg

SEQ ID NO: 484894 - DNA, 90 bp, Homo sapiens
cgttattcctactaacgtcctgtgtcactgaggcagcaaagcacctgctctgagtggccatggggaagcgatacttctgtgactactgcg

SEQ ID NO: 484895 - DNA, 98 bp, Homo sapiens
ctgcaccgttgtcctacttccagaatgcacagatgtctgaggacaaccacctgagcaatactggttatgtaccgaaggactctaccgtgtcagcggga

SEQ ID NO: 484896 - DNA, 76 bp, Homo sapiens
ggaaaatgaggcagaggggcaggctttaaggagttttaagctgagtgtcactgtagaccccaaataccatcccaag

SEQ ID NO: 484897 - DNA, 100 bp, Homo sapiens
aaggaccttgcatactgtctcaatgatggcgagtgctttgtgatcgaaaccctgaccggatcccataaacactgtcggttgtgggctgcacactgcagaa

SEQ ID NO: 484898 - DNA, 76 bp, Homo sapiens
aaccagtcccagcttccagtcacagcataggtggagccgccaccaaaatgcagattttcgtgaaaacccttacggg

SEQ ID NO: 484899 - DNA, 100 bp, Homo sapiens
gcagtgaaacgctcactggctcgaaccctggtcatcatagtcagtctgggatatggcatcgtcaagtaaagtaatctcacaagctgccaaagaacacatc

SEQ ID NO: 484900 - DNA, 51 bp, Homo sapiens
ctgaaagccagcagataccatcgcgcaggagactccatcctctgccaatgg

SEQ ID NO: 484901 - DNA, 100 bp, Homo sapiens
gttgatgccaactccttcttcccacgctgctactgcctgggggctgaggatgacaaaaaagccttcatagagtgttgcggagataggaacatgggagaga

SEQ ID NO: 484902 - DNA, 99 bp, Homo sapiens
ggaaattccagcgctgcttcatcttccagtgctgataattatggcattagccatcctgtctatgactttgaaagaagccatcaagtcttcactcatcat

SEQ ID NO: 484903 - DNA, 111 bp, Homo sapiens
ggtggctctgctagtgaatctgacccgactggattcctccatgactcaaggcacagactctccagaggatttcttggtccagtttaagggcatgtgctacttcaccaacgg

SEQ ID NO: 484904 - DNA, 82 bp, Homo sapiens
cgagcggtggtttggacgccggcggagacgcgggcgagaagagccgaatgcacataaggtcgccagcccaccctccggaccc

SEQ ID NO: 484905 - DNA, 75 bp, Homo sapiens
atttgctcattaacatccgacgggggagtgtcagttgtacccgaggcgttctcagcagcagcaagtacctgtggt

SEQ ID NO: 484906 - DNA, 75 bp, Homo sapiens
aatgctcagccttccaattttttaagaagcgggttcattccgacaggaccaccccagtagcatgggtgtttatgg

SEQ ID NO: 484907 - DNA, 100 bp, Homo sapiens
gtcatcatgagcgatgttaccattgtgaaagaaggttgggttcagaagagggatcacagattctgctggccatattctctactccaaagaggatgcaacc

SEQ ID NO: 484908 - DNA, 100 bp, Homo sapiens
cgctgctcctcgccctcaagttcacctgcagaaagcgtggatacccatcaacgaagttttgatattggaattcagattggctatcagcgacgcaataagg

SEQ ID NO: 484909 - DNA, 75 bp, Homo sapiens
tcaggatccagatcatagacagcaatggatagatgccattgaacagcacaagagtgcaatagagtctctttttgg

SEQ ID NO: 484910 - DNA, 95 bp, Homo sapiens
ggcggatcaggatcggaagcctgcgtaactttctcccttgatccgggagtctttccactgggaagtggacgttgtggtagcaccatgccaaggcc

SEQ ID NO: 484911 - DNA, 83 bp, Homo sapiens
gcccagcgcgctaaccctttactcgcgacctttcgcttcaccttcacagcagccctgcgaggaacttagtgatttggcccgtg

SEQ ID NO: 484912 - DNA, 100 bp, Homo sapiens
ctttaagacgaattaaagggagattacacagaagcaaaagccttgatagcatggatttctgtgagctcactgttgttggaaaggacaccaatgtcatgtt

SEQ ID NO: 484913 - DNA, 100 bp, Homo sapiens
ggccgcctgggttccacttccagcaacagctcctgcagcagtaccgagtgccccggggaagccattccccaccccccagtagagacggggtttcgccgtg

SEQ ID NO: 484914 - DNA, 100 bp, Homo sapiens
ctacaacacatggtggaatgtatccgggaggtcaacgaggtcatccaggaagagagagaaaatccttcaaaacggagtagaattgaacgtgatatagata

SEQ ID NO: 484915 - DNA, 73 bp, Homo sapiens
tcgcgagcgtggttctcccacgtgggcccctttaacgagggaggtcagtcttcccgaggctgctgtccatgac

SEQ ID NO: 484916 - DNA, 100 bp, Homo sapiens
tgaattgcgtccccgaaatagctgacacactaggggctgtggccaagcagggagcccgaacccagccctcaccttctgcgtaaagacccatgaccggctg

SEQ ID NO: 484917 - DNA, 74 bp, Homo sapiens
ccagtcatgaggctgtggtggatctttctgattcatggaaacagctattctcataaagtggacatcttttcttt

SEQ ID NO: 484918 - DNA, 50 bp, Homo sapiens
tcccagctctttgggaggccaaggctgatgaattcatccgagcaaatgcc

SEQ ID NO: 484919 - DNA, 100 bp, Homo sapiens
gtcgccagaaggaagatggcggatctggaggagcagttgtctgatgaagagaagactcattctgatgaaggaaagagcgtccctgtgcagctgcgtgtcc

SEQ ID NO: 484920 - DNA, 90 bp, Homo sapiens
tgctaaatgtagacaatggttagagaagaattttccaaatgaatttgcaaaacttactgtagcaaaccagtccagctacgggggcccagc

SEQ ID NO: 484921 - DNA, 75 bp, Homo sapiens
atcacctgtacttggtcatgcagctgctaagtgctatttatggaggtacctatatgctgaataaacccattgaag

SEQ ID NO: 484922 - DNA, 100 bp, Homo sapiens
gacgcaggagaagcgcttcaaggacccgggactagtggaccagctggtgaaggcagacagcgagtggcgacgatctgttcatgccaagagcctggtggcc

SEQ ID NO: 484923 - DNA, 74 bp, Homo sapiens
ccactcctaaaggctggtcctgccactgggacaggacagaactgtaccgctctctttttggccagctccaccct

SEQ ID NO: 484924 - DNA, 75 bp, Homo sapiens
tcctgctccttctacatctgcagataaagtggagagattttctctgtgggcagttctttttgttttgggaagact

SEQ ID NO: 484925 - DNA, 50 bp, Homo sapiens
ctacatttagcgcatcatgtgatccgggttggacgtgataagtatgagcc

SEQ ID NO: 484926 - DNA, 87 bp, Homo sapiens
cacctaacaccgcagcagcaaccgggcccggccaggttcggcgttccgtgagtgaacgggatgcttgaagatggaaagaaatttgat

SEQ ID NO: 484927 - DNA, 95 bp, Homo sapiens
catgttatccgctgcaggctctccaagcgtcaacgctgtctctatgatgacttcatggcacagaccactcagggcctttctacttacaaggaact

SEQ ID NO: 484928 - DNA, 90 bp, Homo sapiens
ggcagatggtgcaggtcagcgaccaggacatgaacacacacctggcagagatttcccggatcccaaggtccccttcagttggtcacaaga

SEQ ID NO: 484929 - DNA, 89 bp, Homo sapiens
atggcggagaagactcaaaagaggtttacccaaggtccagcctagcccctaggcaccatgtcggacagtgatctaggtgaggacgaagg

SEQ ID NO: 484930 - DNA, 130 bp, Homo sapiens
ttcagactgaccgcggggcagctgcggagcatgtcgaccccggcccggaggaggctcatgcgggatttcaagcgtaattcgccaaaatgacgaacacaaagggaaagaggagaggcacccgatatatgtt

SEQ ID NO: 484931 - DNA, 98 bp, Homo sapiens
aagtgaagcattatctcatcctgccgttctattgtttccaccctgctagctcttatggatggattggacagcagaggggaaattgtggtcattggtgc

SEQ ID NO: 484932 - DNA, 98 bp, Homo sapiens
tggaagcagaattccattttactcatctcataatgactttcaagggtcatgtgaaggtggtgcgctacttagtcaaagaagtcaatcagtttccatca

SEQ ID NO: 484933 - DNA, 73 bp, Homo sapiens
ctgaagaatgcagcaggaaggttgaaaggttctgccattacaggaccagtagcaaaggagtgtgcagacttgt

SEQ ID NO: 484934 - DNA, 75 bp, Homo sapiens
atctcagagaagaggaggaagaaggcgagaagcacaggctcatccatggaataccaattctttttcttagtgttc

SEQ ID NO: 484935 - DNA, 104 bp, Homo sapiens
gggggttgcggcggcgctgagccagcggggccgttcctgggcttcccgatggactcgagtttttactatgtgagcatcccggtgcctgcacagcaaggactctc

SEQ ID NO: 484936 - DNA, 82 bp, Homo sapiens
cacggtgctggccgccggttgcaagcagatactggtgcctgtcagcccaaggccaaccccactgtcactctgttcccgccct

SEQ ID NO: 484937 - DNA, 75 bp, Homo sapiens
gctgccctagggcccggccgacccgcggcccgacaaagatcattccactcagcctgggacgatggggaggaaaaa

SEQ ID NO: 484938 - DNA, 100 bp, Homo sapiens
gaaatacattaatgtgggtgatttagctcgagaaggatgttttgagcagtgacattataattctgacaataacacgatgcatagccatcctgtatattta

SEQ ID NO: 484939 - DNA, 101 bp, Homo sapiens
ggagagtctgcggacagcccagaagactgcgctgctgcaggacgctcttttgtgacagggacggcttgttgcgggcacttctcacccctgagaatctggga

SEQ ID NO: 484940 - DNA, 82 bp, Homo sapiens
atttgaagccctcatgcggatgctcgataatctgcttggaagctcgaagtctggctgtggccatgggagatacagtagtgga

SEQ ID NO: 484941 - DNA, 82 bp, Homo sapiens
cacaggcacactccctctgggcgtcctctcaggaggcaagcagactatcgagacagttaaagagaagttgactgcggatcca

SEQ ID NO: 484942 - DNA, 75 bp, Homo sapiens
taggtcgatggtcggcggcgcccggatgggcagctgaggtgtggacactgccagcggctgcagccgacttggaat

SEQ ID NO: 484943 - DNA, 75 bp, Homo sapiens
cagatctatgagaagatcgtctctgggaaggttatcattgggagcatcttcgaggtcatctgggctgtcataaaa

SEQ ID NO: 484944 - DNA, 100 bp, Homo sapiens
gcggaccagttcttctgaagcacacattccagaccaagaaacgacatccctgacctcaggcacagggtcttgtccagaaggctaaaaaagcaaaggacag

SEQ ID NO: 484945 - DNA, 97 bp, Homo sapiens
agtgggtgtaatacatcatgaactgcaggagttgctggagaatgtaaccctaatccataaaccagtgtcgttgcaaccccgtgggctgatcaataaa

SEQ ID NO: 484946 - DNA, 98 bp, Homo sapiens
gtgacacgccacagcctcttttggattttgatacagatgatcttgatctcaacagtctcaggatacaactgatgcagtatgtcatctatggaattgcg

SEQ ID NO: 484947 - DNA, 102 bp, Homo sapiens
aagaggaggcggaaaaggacgcaaagttctccggcgaggttgaaatcacaaagattagacacctttttagataggtgttcttcagcaccactgacaacacgg

SEQ ID NO: 484948 - DNA, 75 bp, Homo sapiens
ccgcacttccgggtgccattgcaggaactgtggctgcaccatctgtcttcatcttcccgccatctgatgagcagt

SEQ ID NO: 484949 - DNA, 75 bp, Homo sapiens
ctcttggctgcactgcactcccaggtagcagggcgccaagcagtgacttctgaccaacagagtgtggggagaagg

SEQ ID NO: 484950 - DNA, 101 bp, Homo sapiens
gctaccagcagtgcataaacgaggcgcagcgggtgaaggaatgagcacacctggctcctctccacagcaccgcccagctggcgtcagccccctgtccctga

SEQ ID NO: 484951 - DNA, 50 bp, Homo sapiens
aaagcctggaatttcagaggggtggaatgcaagctttaggacttcacctg

SEQ ID NO: 484952 - DNA, 75 bp, Homo sapiens
tttctggcctggaggctatccagcgtctgggatctgccgatatgggggatatgaagacccctgattttgatgacc

SEQ ID NO: 484953 - DNA, 82 bp, Homo sapiens
gctcctccgggggacccgcggtccccaccgtgcagcggggcatcatcaagatgctgtatgcaggagctattcttgaagtttg

SEQ ID NO: 484954 - DNA, 82 bp, Homo sapiens
gtcggcagcaagaacagagagagaggtggacagatctgagagatactgaggtttctgctttgggacaaccatacatctaatt

SEQ ID NO: 484955 - DNA, 89 bp, Homo sapiens
tgtgccagaatcttctgatggattattgacggtggagcagcttgttcagattattatcaatacaacacatttggagaaatcctgtaagt

SEQ ID NO: 484956 - DNA, 90 bp, Homo sapiens
gctgtgtatgataccttacttaatactggtaagatgatcatgcaggataaactggagaaggagcggaatgatgctaagaacgcagtggag

SEQ ID NO: 484957 - DNA, 82 bp, Homo sapiens
gatgaatggacaccttgaagcagaggagcagcaggaccaggttcgtgctggccgtgggcagcgccgtctttgatgccatgtt

SEQ ID NO: 484958 - DNA, 100 bp, Homo sapiens
cgcgcgccagcaagaagatcctgctgcccgagcccagataagaccatcatcatgtggaaactgaccagggatgagaccaactatggaattccacagcgtg

SEQ ID NO: 484959 - DNA, 97 bp, Homo sapiens
accgcagtcgtgcaggatctgaaggagctgagatctgtatctgtggacctgaatgttgatccctcgcttcagattgacatacctgatgcgctcagtg

SEQ ID NO: 484960 - DNA, 78 bp, Homo sapiens
ctattaggagaacatttaacagcaattctgcagaaagaccctctttcccagctgcccgctcctcagcacccgaagatt

SEQ ID NO: 484961 - DNA, 83 bp, Homo sapiens
agttagtgacagctaatcccagcataattcggcaaaggaaagtgactattttaccccacagggagaattccgtgtagacaaag

SEQ ID NO: 484962 - DNA, 116 bp, Homo sapiens
cagatgcagctcgagaatgtgtccgtggcgctcgagttcctggaccgtgagagcatcaagctcgtgtccatcgagaagctgatcgtcgaagggcatctaaccaaagcggtagaaga

SEQ ID NO: 484963 - DNA, 75 bp, Homo sapiens
tgatagaagtagaagctccaatcacaggtgcaatggatgagcttcatagtctggatccaagaaggcaagagttat

SEQ ID NO: 484964 - DNA, 75 bp, Homo sapiens
gattggcaacggaagaacaggagaatgattacggacctgaagccaaagaacaagatgcgctagtggacagattgc

SEQ ID NO: 484965 - DNA, 75 bp, Homo sapiens
tccatcccttccgaggcccgacttcgcaatctgcacatcgtgctgccacacgaggcttcattcgttatggctggc

SEQ ID NO: 484966 - DNA, 75 bp, Homo sapiens
aaaaattaatatgaatggagtaaatagttctaatggagtggtggaccccaagttcctgaggaacatgcgctttgc

SEQ ID NO: 484967 - DNA, 98 bp, Homo sapiens
ttagatgccgattacccacttcgagtcctttattgtggagactgtgagaacattctctttgaagggaatgactaccaagctctttggtcaagaaactc

SEQ ID NO: 484968 - DNA, 80 bp, Homo sapiens
tcgaatgaggcacctaaaaattgtataccgcagattcagctatccagtcagttcgctgctattcccatgggtcacaggag

SEQ ID NO: 484969 - DNA, 51 bp, Homo sapiens
gttcacatcctggagatgtacgaggatcctcagacagattctaagcctcct

SEQ ID NO: 484970 - DNA, 75 bp, Homo sapiens
ccgcgccgccgctacgggaccgcctgagctttctacaccgggtccctgtgcgttttattgcgacctgccggtggg

SEQ ID NO: 484971 - DNA, 98 bp, Homo sapiens
gcagctccagcaggcgctggctcctgctcaggctaagcttctatcaccatcagagaaagaaatacccgagcaaaataacaccacatctccaaagactt

SEQ ID NO: 484972 - DNA, 75 bp, Homo sapiens
cagcaacttttcctggcctattaaaatacagggagatgcagttaaagacttgatgcttcgctttctgggtgaaaa

SEQ ID NO: 484973 - DNA, 100 bp, Homo sapiens
tcaactggaacaccaagtcctggaccccgagggaatcaggtgccacttcggataaaccctttggactcctaactccaatcaggtgtctgctttgttgagg

SEQ ID NO: 484974 - DNA, 51 bp, Homo sapiens
tggggcagaatacagagatatggaatcagggatgtcagagacgcccatgct

SEQ ID NO: 484975 - DNA, 75 bp, Homo sapiens
ccgggtccccaagacccttgtgctcgttgtcgccgcggtcctgctgttgccgcggcccatggagcccgccggccc

SEQ ID NO: 484976 - DNA, 100 bp, Homo sapiens
cgctgattcccggctctgcggaggcctctaggcagccgcgcagcttccgtgtttgctgcgcccgcactgcgtctattgcgtctgcagacatggatttcaa

SEQ ID NO: 484977 - DNA, 80 bp, Homo sapiens
ctggagcctcagttggaagcagccgatccagcctgcggagcctgtggggcaggtcatcgtgatgtcaggtcatgagacca

SEQ ID NO: 484978 - DNA, 75 bp, Homo sapiens
caatatattgctggaagggaattcagacacaacttaattcagtgcacaaatgagatgaatgtgaacatcccacag

SEQ ID NO: 484979 - DNA, 101 bp, Homo sapiens
ctgccccggtgcgcagacagagctattccagcaccagcagaggagtatgctgctgctgttccgctttgcgtcctcgctacaaacgcctggtggacaacata

SEQ ID NO: 484980 - DNA, 96 bp, Homo sapiens
ccggcccaaccatggcgtcctccgcggccggctgcgtggtgatcgttggcaggttaatgttcgtgaagaaattgaagagttttttccaagaatgtg

SEQ ID NO: 484981 - DNA, 96 bp, Homo sapiens
ttggtacagaaccagattcagacgtcctctcagaaataatgcattcttttgcaaaggtgcagcggaactgctgcctgacgctctgcaacttcagca

SEQ ID NO: 484982 - DNA, 96 bp, Homo sapiens
agaaggcgtgtacgagctattctaccttacacaaaagtaccagacactgatgaaataaggctcacttgtgcatttttggcctgcaaagtagatgaa

SEQ ID NO: 484983 - DNA, 75 bp, Homo sapiens
agtccaccatgtgcttttgcacatccagatgcctaaatcaaaggaacttgtttcttcaagctcttctggcagtga

SEQ ID NO: 484984 - DNA, 51 bp, Homo sapiens
gagaccgggctggccatgatctatggaaagaccacagcaagattctttcat

SEQ ID NO: 484985 - DNA, 51 bp, Homo sapiens
cctgctcggaggaatggcgccgccggatggcccactgcgtgaccttggttc

SEQ ID NO: 484986 - DNA, 74 bp, Homo sapiens
tgaacctgaccattggggtcacggtgtttgccgtggggaatactatgagatgtcctatggcttgaacattgaaa

SEQ ID NO: 484987 - DNA, 80 bp, Homo sapiens
tgaccacttttggaccaaaggcctgtgtgctgcagaacccccagaccatcatgtatcatgatattagctggtttgacatc

SEQ ID NO: 484988 - DNA, 100 bp, Homo sapiens
taaaaacaagactggggctgctcccatcattgatgtggtgcgatcgtgttggctgcaccaattctagaagtaagctctccaagttcagactccattcttg

SEQ ID NO: 484989 - DNA, 100 bp, Homo sapiens
ctgggacatgaagcttcgggaacagtcgaaaaagtgggatcatcggtaaagcacctaaaaccaggtcccgttgtaacacaggacattaccacgtatcaca

SEQ ID NO: 484990 - DNA, 101 bp, Homo sapiens
caacttgcagctcatctctattgatggacaatcatatcctgattcagcccttcctccacaaaggcaagacagattttgttctaattctggtagactgtctg

SEQ ID NO: 484991 - DNA, 95 bp, Homo sapiens
gggactttattaccgctttaccaggttaaacccatccagagtaatggctgcggccttacccaggaccctgggggagttgcagctgtatagaatat

SEQ ID NO: 484992 - DNA, 101 bp, Homo sapiens
agtccaagaagcaaaaaagggactgctaagaagataccaccaggtgagcttcagcattgaggccaaggtgcgaggctgtccccaggagaaggagaagtcct

SEQ ID NO: 484993 - DNA, 98 bp, Homo sapiens
gctgaattctataaagaggctctaagaaatgattcttcttgtactgaagcactttataatattgcgtgaaataactaagaagttgggcaaccccaaac

SEQ ID NO: 484994 - DNA, 83 bp, Homo sapiens
ctgccttccggggacagccagccctcgctggaccagaccatggccgcggccttcggttttggctacgggcctccacctccacc

SEQ ID NO: 484995 - DNA, 97 bp, Homo sapiens
tgaccatgatcaacgccattcctgtagcctctcttgaccccatcaaggaatggttgaagtatgcccaagaggacagagaacgaatgcacagaaatat

SEQ ID NO: 484996 - DNA, 100 bp, Homo sapiens
agggggctgtcgcccgaatgcaggaagaccgtgatgggagctgcagcacagtcgggggtgtaggttatggggtaagaagccattaatggttattcatcac

SEQ ID NO: 484997 - DNA, 100 bp, Homo sapiens
agagccgcctttccagcatgcaggggctgctcaggtgaatcagctcccggccgactttaggattcttctggattttaaattttttctttttaaaaaaact

SEQ ID NO: 484998 - DNA, 82 bp, Homo sapiens
gttccatccggcgctcagctgggcttgaggaatcccagtcagaagttccagcctgccactgttctctgatgccatgccagca

SEQ ID NO: 484999 - DNA, 99 bp, Homo sapiens
actacaaaggctatgaaaagaagccctattgtaatgcctccaccagcccattggagaaaagttactgttcagtccctgaaggcttgtgccataaaagag

SEQ ID NO: 485000 - DNA, 98 bp, Homo sapiens
agaatttcaacagaggttcattctcaagagagatgatgccagtatggaccgagatgataaccagctcgatgaacttcgggatgaagggaaggcttcgt

SEQ ID NO: 485001 - DNA, 98 bp, Homo sapiens
gaatggagctcatgccactggtcaccctccccaaaggaggctattacttgacaagcgcatatggagcactttctctgataaagaatttccaagaagaa

SEQ ID NO: 485002 - DNA, 74 bp, Homo sapiens
ttgtggccacatggtgtcagatgaatatgagcagctgtcctctgaaggtatgtgcactgcgcgtgaccagccgg

SEQ ID NO: 485003 - DNA, 98 bp, Homo sapiens
cattatttatgtcatcaagaagaatgacgatgatgagcagaactacattctccgagatgctgaggcagaagtacttttctctttcagcttggaagaat

SEQ ID NO: 485004 - DNA, 145 bp, Homo sapiens
agaccttttctaaaactgccttcctggctggagaggggctgttcacactaagtctcaacatcaggttcaaaaaaaatatggctacacacacctttctgcaggagagctgcttcgtgatgaaaggaagaacccagattcacagtat

SEQ ID NO: 485005 - DNA, 90 bp, Homo sapiens
gcgccgtgtggcacgacacaaaaatcagatttccacaagacggcaccctatgtcgtcactggcagcgtagatcaaacagtaaaagtgtgg

SEQ ID NO: 485006 - DNA, 76 bp, Homo sapiens
tctatatccatccttccagtgccctcttcaacagacagccagaatggtactctgtggatatccccttggacaaaac

SEQ ID NO: 485007 - DNA, 88 bp, Homo sapiens
gacttcctgccctacatgagctggcagggggagccccaagaagccgtcaggaaccagagaatggatcttggagaatgtctgaaagtcc

SEQ ID NO: 485008 - DNA, 74 bp, Homo sapiens
cctgtcctatgtggacgttggcactgggaaggtgacttaagagattaaaattaatttggttgctgttggttctg

SEQ ID NO: 485009 - DNA, 75 bp, Homo sapiens
tccctggatcaccgacagcacagacagaatccctgctaccaaaggagctggcaaacagccctgactgtccccaga

SEQ ID NO: 485010 - DNA, 75 bp, Homo sapiens
ttcagagcactggcctccaattactcatgatagtaaagagcacctggcaatgatggaacgaatattaggacccat

SEQ ID NO: 485011 - DNA, 90 bp, Homo sapiens
aggaaccccaggcccttccagcggtggccacacgtcacacagtggggacaacagcagtgagcaaggatatgttcaaggaatgagtgattt

SEQ ID NO: 485012 - DNA, 88 bp, Homo sapiens
ggacttgaagcagaaagcaagtgaatacgagtcagaagccttttaaagatcgctgtgaatggttctatgaacatttgcattcaggaca

SEQ ID NO: 485013 - DNA, 96 bp, Homo sapiens
ctgactccacttctatggtgagagagaggagtgcatcaaagattactcccagaggagaaggcagagcccccccaggctatgaatgccctgatgcgg

SEQ ID NO: 485014 - DNA, 104 bp, Homo sapiens
ctctagccgacattgttttgtggggagccctatacccattactgcaagatcccgcctacctccctgaggagctgagttggcagaccgggcccccctgaaccgca

SEQ ID NO: 485015 - DNA, 49 bp, Homo sapiens
cgggccgtcctcggcggcagtgtcagggatccctctgtgacccagctga

SEQ ID NO: 485016 - DNA, 82 bp, Homo sapiens
ctttgggtcctgaatcttctgggagctgaggaaccagatatcttgaaaagctgccagaaagacagagtctcgctctgtcacc

SEQ ID NO: 485017 - DNA, 50 bp, Homo sapiens
ctgctcttctccaggctctgtgaaacggctcccacatctgcatattcatc

SEQ ID NO: 485018 - DNA, 75 bp, Homo sapiens
tctgacatggatattggaaagcgaaagaacccttcttcagcatcttccctgggcattgctgtgagtttaggccgg

SEQ ID NO: 485019 - DNA, 88 bp, Homo sapiens
ctcgcgcactcgaaagggaatcctcctgtttgctgagattgctgcagcccagacgccccccaggccggggccaccatcagcaccacca

SEQ ID NO: 485020 - DNA, 101 bp, Homo sapiens
ctcccccgcatgacccccttgatgccttcaattaagttgcagagttctgatggagagatatttgaagttgatgtggaaattgccaaacaatctgtgactat

SEQ ID NO: 485021 - DNA, 100 bp, Homo sapiens
cacctacccccagcaccacctccagcccctgcgcctcggtactaggttttgacaagcttgcatcatgcgtgagtataagctagtcgttcttggctcagga

SEQ ID NO: 485022 - DNA, 87 bp, Homo sapiens
gagaagggcctttttatccaaccctaagattacttcacaaatatggttccaatccctatacattgaagctttgcttttctacatcat

SEQ ID NO: 485023 - DNA, 83 bp, Homo sapiens
cttctcttctctgcttggaggggatgtggtttccgttaagctggacaacaggtcaaaatgcagatcttcgtgaaaacccttac

SEQ ID NO: 485024 - DNA, 100 bp, Homo sapiens
gaaccatcagattagccagcagacccagctacgtggactagaggagattttagttcctaaaaatgggaagaacctacattgtagaagagactgttggcca

SEQ ID NO: 485025 - DNA, 99 bp, Homo sapiens
tggaaaaagactcatccttggaggctcgccagttcttctaccttcgggcgttcctggttgaagattgtgttcagtgtggacccctccgagggcagccct

SEQ ID NO: 485026 - DNA, 82 bp, Homo sapiens
cgggaggtcaacgaggtcatccaggaaaaatgccagctgtgggacaaggagtgcaggccgcacaacctcggcaggcaccggg

SEQ ID NO: 485027 - DNA, 109 bp, Homo sapiens
gttggaacaaggaaaagcaccctggatggtgaagagagagctgacaaaaggcttgtgctcaggatctaatccaggatcatatgctgcctttaggtgacacatcccttta

SEQ ID NO: 485028 - DNA, 100 bp, Homo sapiens
tgcttttaggagtacccgccaacaagcgggaccgagcaggaatccgtatctgggaacaggttacgtcgctggatttgtagacttggaggtgagcaacaga

SEQ ID NO: 485029 - DNA, 101 bp, Homo sapiens
ccgacatggcgccggagctgaccccggaggaggagcagacctgaaagatgtctgaaaattccagtgacagtgattcatcttgtggttggactgtcatcagt

SEQ ID NO: 485030 - DNA, 100 bp, Homo sapiens
gactttgtcatgtcttacctctttgctcaggtacagcaggtacagactgtgcagcaggtacaacatgtctatcccgctcaggtgcagtatgtggaaggaa

SEQ ID NO: 485031 - DNA, 100 bp, Homo sapiens
caataatgagaactctacatagtggagaaataaccagtcatgagcagggcttctctgtggaagggtatagaacaggctatgcttacaggcatcctctcat

SEQ ID NO: 485032 - DNA, 89 bp, Homo sapiens
tcgcagggagtcgccgctggagaggggctcggcgcccggcggggactgcaggatgaaattgattctgcagtaaagatgttggtgtcatt

SEQ ID NO: 485033 - DNA, 82 bp, Homo sapiens
tgcaccctgcacagctataagagaagatttctggtgttcagcaaattcagttttcatgatctgaagaaatgatggaatgggg

SEQ ID NO: 485034 - DNA, 75 bp, Homo sapiens
ccttattattggccctccagatacactttatgagaaagatcagtctaaagaaaaggagaagaaagtgaaaaaaac

SEQ ID NO: 485035 - DNA, 80 bp, Homo sapiens
gtatcgtatgtccgctatccagaacctccactctttcggaacaagatcactcaaggtgaaggataatctactaataccag

SEQ ID NO: 485036 - DNA, 75 bp, Homo sapiens
cagagacactgccaagcagccttagccctagtgtagagatacaccctccgtggacttggaaatgatcgatgtgca

SEQ ID NO: 485037 - DNA, 98 bp, Homo sapiens
ctctgacggtgaccaacttattagaaaagggtgaaaaattagacgatttcaagaattggagctgaatctgatgttaagtaatggcaacaggtgactta

SEQ ID NO: 485038 - DNA, 88 bp, Homo sapiens
ataaaactaacagtctatgatgtcaaggataagtctcatgacacccccaataggggcacaaaacgtccccgggatgatgaagaggagg

SEQ ID NO: 485039 - DNA, 83 bp, Homo sapiens
cgcgtctccgcgttcccagcccgggtccccgcgttcacagccccagcgcagctgtgatggccttcctctttgacctgaaggac

SEQ ID NO: 485040 - DNA, 103 bp, Homo sapiens
cgccatggctttacttactgcggccgcccggctcttgggaaccaagtgtactaatggtcacttgatgtgcgctggctgttttatccacctactagcagatgcc

SEQ ID NO: 485041 - DNA, 74 bp, Homo sapiens
aatcccagacctaagtttgaagattggctttgtaacaaggattatccaccaggacgggtactcgctggaagagt

SEQ ID NO: 485042 - DNA, 101 bp, Homo sapiens
gtctacaagtacccgtttgagctggtcatggcggtaaacactacacgtgaagagtggtgaaagggaacattgattactgaagtgccctggagagggaaagc

SEQ ID NO: 485043 - DNA, 75 bp, Homo sapiens
tggccatttaggagctctgctcaaagccagacggctctgacgcccgctctgcggcttcggtgtttgaacaggcca

SEQ ID NO: 485044 - DNA, 50 bp, Homo sapiens
ggaactcaaagtggatgaggaaagtgctccagaggctggtggacctgagc

SEQ ID NO: 485045 - DNA, 100 bp, Homo sapiens
accatggaccaggccctcaagtccctgatggcctcagaggaggaggcaccatgactcctgtgaggatgcagcactccctggcaggtcagacctatgccgt

SEQ ID NO: 485046 - DNA, 75 bp, Homo sapiens
catgtccaaaccaggaaatggacagggcaagtgtccagagaatggctgggatgaaagtacacttgaactcttttt

SEQ ID NO: 485047 - DNA, 102 bp, Homo sapiens
tccatgtttctggacgcggatttttggcctcatactctgttatagataaacaagggtgtcaaattgagaaccaggtagatccccaccacctacagtaaaaag

SEQ ID NO: 485048 - DNA, 82 bp, Homo sapiens
atgaagttcgagcactaatatttaagaaagaagatgttaactttcagatgccgtgaaggactgccgtgggcgcgtgctggtg

SEQ ID NO: 485049 - DNA, 101 bp, Homo sapiens
gcagccagtactcgggcagcctgtccctggccaaagatttatttctcttgacaaccaagggcctccgtctggatttccaaggaagaatttcctctgaagca

SEQ ID NO: 485050 - DNA, 94 bp, Homo sapiens
tcccagtgggcgagctggacgctgtctctccaatcgtgaatgagaccctgcagaacgtcctgaaggagcacgcagatgatgaccctagtctggc

SEQ ID NO: 485051 - DNA, 100 bp, Homo sapiens
atgagtctctgcagttgaatctgacaaagatcgaacagttgtgctcagattacctctctagtgacccttcagctgttaaccctggttggccatgacgatc

SEQ ID NO: 485052 - DNA, 74 bp, Homo sapiens
tgaatgccatgtcaactttgttcggaagtttgtgaagtgtggatatgcaggctctaactttccagaacacatct

SEQ ID NO: 485053 - DNA, 97 bp, Homo sapiens
aagaggcaccacacccggctcttctgcactgacaagaacgagcggcttgttctcatgccatactgtaaatcactggacatcttcaccgtgggaggtt

SEQ ID NO: 485054 - DNA, 107 bp, Homo sapiens
ctgggagaaacctcgtggcctggtctccattatttgagatgagttacatcttggaggtcagcccaaggctgccccctcggtcactctgttcccgccctcctctgagg

SEQ ID NO: 485055 - DNA, 90 bp, Homo sapiens
gtcagcctccagagtagctggtgatcctcccccctcagcctacagagtagctgggaatacaaattaaaaggagcccaagccccatctcat

SEQ ID NO: 485056 - DNA, 98 bp, Homo sapiens
tgaggcagggggacacagccatcctcagtgggcctttggagtgacgctgtgggaactcatgactctgggccagactccctacgtggacattgacccct

SEQ ID NO: 485057 - DNA, 50 bp, Homo sapiens
cttcaactccacttttatctccaccatagtgttgctaacaaccacaagca

SEQ ID NO: 485058 - DNA, 100 bp, Homo sapiens
gcttcccctttccagagagccagaaagaaagatctcgttccgcgtgtggcagtgtggtggcagcctggagatcatcccgtgcagccgtgtgggacacgtg

SEQ ID NO: 485059 - DNA, 91 bp, Homo sapiens
gcgaggaatcgccgtggcgtcttggtgttctccacgctggttcgcaggttacactcctggcacaccttacaaagtgtcctgttcccccacc

SEQ ID NO: 485060 - DNA, 136 bp, Homo sapiens
aataagggagggtggagtggaacacccctggcacaacaacgagattctacaagcctctgtagatggtccaggatgaatgctatcaagtaagacaagtgtttgcccagaaacttcacaaaggcctttcccgtttacg

SEQ ID NO: 485061 - DNA, 100 bp, Homo sapiens
ccactggagtcccagtcgccacgacaggcggcagccagatgagcgtgaagccgtgcagaagaagaccttcaccaagtgggtcaattcccaccttgcccgt

SEQ ID NO: 485062 - DNA, 100 bp, Homo sapiens
gacagagctggaagagaccacagcagaagctgaagaggagatccaggcactcacgaaggaagacagcctcctccaggagcatcttacccgacctcttgtc

SEQ ID NO: 485063 - DNA, 100 bp, Homo sapiens
cagcacaccagtggggcagtgcctcgtaccttctccaggcaaattccgttcccctgcagcaccatctcctttggctcttcggcaaccagtgaaagcattt

SEQ ID NO: 485064 - DNA, 90 bp, Homo sapiens
agcgtcccaggccgccccgcccaacccctcctcccagtgctgaagtcccaaggagccgccctgcaggctgtgggtgagcgtggaggatgc

SEQ ID NO: 485065 - DNA, 95 bp, Homo sapiens
cctacccatccgccaggagccctcttccttcagactcggtgaaatacctggagtgctcagctctcacccagagaggcctgaaaaccgtgttcgac

SEQ ID NO: 485066 - DNA, 75 bp, Homo sapiens
gggaagtcgcctggaaaaaccaatagttgatcgaactgtgagaatttggaaggctcgcaatttgcaagatggtca

SEQ ID NO: 485067 - DNA, 85 bp, Homo sapiens
ggcttgaacattgaaatgcacaagcaggtgaaagaacttgtcctggacaacagtcggtcgaatgaaggcaaactcgaaggcctca

SEQ ID NO: 485068 - DNA, 90 bp, Homo sapiens
aaggtgtctttttattgcttctagagacgttgaaagtgtgacctgaggatcgtagggcatcagaaaaacaaaaagaaatagagagagtaa

SEQ ID NO: 485069 - DNA, 75 bp, Homo sapiens
gccctcagcagctccctgcgggacctctcggaagccggagccatgtgtgagatacctgcccaggctgtacctgga

SEQ ID NO: 485070 - DNA, 82 bp, Homo sapiens
ctccatcctgaacgtgcagcggtacctggccaagctgtcgtcggtggggagcatctcagaggaggagacgtgcgagaaactc

SEQ ID NO: 485071 - DNA, 100 bp, Homo sapiens
aaaaaagaattcttggagccagatagctgggagatgaagaactgccagcatgcgaatgctgaacgtcctactgttgctcggatctcatctgtgcagttcc

SEQ ID NO: 485072 - DNA, 100 bp, Homo sapiens
caaaggcaagagtaacagcagcgccgtcccgtccgacagccaggcccgggagaaagggaggaagaaggagacttcagagaaagaggccgtgtgatggaag

SEQ ID NO: 485073 - DNA, 100 bp, Homo sapiens
gggacccaaatgtcaaactaccaaatgggcgagacacacctgcactcttcaacttcaccactcaagcggagattctggagctggctggcaatgcagcgag

SEQ ID NO: 485074 - DNA, 75 bp, Homo sapiens
gattcgtatctaagactctgggacactcctgaagtcgggaaatgacctgcctagagctggaacgttacctccaga

SEQ ID NO: 485075 - DNA, 75 bp, Homo sapiens
catcctggaagctgggaaatgggtgatacaattctggagactggagaagtaattccaccaatgaaagaatttcct

SEQ ID NO: 485076 - DNA, 100 bp, Homo sapiens
cgcgccgctgctcccggaccgggccgcgcacgccgcctcagccggcacagtcttcactaccgtagaagaccttggctccaagatactcctcacctgctcc

SEQ ID NO: 485077 - DNA, 100 bp, Homo sapiens
accttcagcagaaaagtatagcgtggcaacccagctgttcattggaggtgtcactggatggtcccttcatggtccacgagacttctggagctccagccag

SEQ ID NO: 485078 - DNA, 100 bp, Homo sapiens
ctgccgtgccacctgctgcacccacgaatctgcccacccctcctgtaacccagcctgtttcacttcttggaccgccgggagagcctgcccacctccccac

SEQ ID NO: 485079 - DNA, 100 bp, Homo sapiens
gtcagcgtgtgtcttcagctggatcgaggagcactgtaagcctcagttacatggacacagaacagtatgaagaagcagtacgagactatgaaaaagtata

SEQ ID NO: 485080 - DNA, 101 bp, Homo sapiens
tttcgctctttggactaatgggagttgcttttggaatgaatttggaatcttcccttgaagagaactggcattgcccgccttgtcgaggaatctgcaactgc

SEQ ID NO: 485081 - DNA, 97 bp, Homo sapiens
tctgagctaaaagcttccatgaaggtatttaccttgctgtggattgctgactggatggtccatcacttctggaggaaaggaaaggacccggatagtt

SEQ ID NO: 485082 - DNA, 100 bp, Homo sapiens
gtgaaccgaagtttagcaatggaaaagataaagtgttttggttttgatatggattatacccttgctgccagcagacatcaaggacttctgaggagcctgg

SEQ ID NO: 485083 - DNA, 100 bp, Homo sapiens
ttcgcctgcagctgctcaccgatttggtgcttccagatgtgagttatcaggtggaatccagtgaggaggatcagtctcagactatggatcctcaaggaca

SEQ ID NO: 485084 - DNA, 100 bp, Homo sapiens
ctttcgcttttcaactcacttagcagcaaaggggatcagatgatttctgttaacgtgtgtataaaggctggtctccaggaggtaaggcccgccctgcagg

SEQ ID NO: 485085 - DNA, 96 bp, Homo sapiens
tggtgaccgcatggggtgcctggcgaacacctctaacagaggatggatgtggagaaaggcaagattgaagacacaggaggcagtggcggctcctat

SEQ ID NO: 485086 - DNA, 75 bp, Homo sapiens
ggaagacctccagtctataagcccaggaagccgtcttcgaactcaggagaagtttttcggaggctggtacttcta

SEQ ID NO: 485087 - DNA, 75 bp, Homo sapiens
ggactgaaccacatgggctggccagagcacacaccaggcactggttattcagcttctcaaggctggaaaagcgaa

SEQ ID NO: 485088 - DNA, 96 bp, Homo sapiens
ctgggtgcgcttctccatctggctgctgatggatctgtgcatgggactgcagggcttcctcatcttccacagctttgggggcggcactggctctgg

SEQ ID NO: 485089 - DNA, 75 bp, Homo sapiens
aggagaagagtgcaaaaatactgatcaggaagagtctaccatttcatccaagtcataccatgggcagttttaccg

SEQ ID NO: 485090 - DNA, 75 bp, Homo sapiens
cctcacctggctgaagaggtgttccagcacataccttatattaaagggggtcctggtcttcatgatccttgtgag

SEQ ID NO: 485091 - DNA, 83 bp, Homo sapiens
gtttcttctatcattccaaactttcagatctctcaagattcagtagggaacagggcaattcaagctgctggaacaagaccgag

SEQ ID NO: 485092 - DNA, 100 bp, Homo sapiens
ttcctgagggccgagcaacagtgtagtggcgtattccacatagcaaacagttcaaaagaatgctgaaccgggagctgacacacctctcagagatgagccg

SEQ ID NO: 485093 - DNA, 100 bp, Homo sapiens
ggcgacggcgccttcggcaaggtttacaagataagtaatggaacatcatctgtgatcgtctccagaaagaggccatcagaaggaaactatcaaaaagaaa

SEQ ID NO: 485094 - DNA, 83 bp, Homo sapiens
ggaacgagcgagtcgccgctgcagccctagtgactgcggcctgcatcccgggattgaggagactgaagaatgctgaagacagg

SEQ ID NO: 485095 - DNA, 100 bp, Homo sapiens
agagggagtagtgcgatcctgcgcgcgggggaactagctggagggcaaggcgggaacacgtaagaatgattgatgttggctgatattggagtgctcattc

SEQ ID NO: 485096 - DNA, 101 bp, Homo sapiens
ctcatgtccctgtgggacacaatgcccccaaggggtatagaacaggctatgcttacaggcatcctctcattcgagagaagcctaggcacaagagtgatgtg

SEQ ID NO: 485097 - DNA, 49 bp, Homo sapiens
ggaaaaactttccagccattggtgctggagaatctggtaaaagcaccat

SEQ ID NO: 485098 - DNA, 74 bp, Homo sapiens
tcggagtgaggaagaggaagaagaggatgaagatgtggatctggcccagtcactttcgaagtatagatcctggc

SEQ ID NO: 485099 - DNA, 50 bp, Homo sapiens
gtggaaaagtctttcagaataaaatggttccagaatctcagcttttacct

SEQ ID NO: 485100 - DNA, 101 bp, Homo sapiens
cgggtgcgtctgccgcagagtcggcacctgaaggacatggaggacctgcaaatgcaactggttgatcctgaagacataccagctatggaacgcctgaccca

SEQ ID NO: 485101 - DNA, 74 bp, Homo sapiens
atctccgaccagtctgggggcgctggcggcctgcgcagccacctcaaggagtacatcgatgcccaccctgagac

SEQ ID NO: 485102 - DNA, 100 bp, Homo sapiens
atttatgattccctggattatgcaaagaaaaatgaacccaaacatagacttgcaagaacagcacccaagaaaacctcatttggctcgctgaaggatgaag

SEQ ID NO: 485103 - DNA, 144 bp, Homo sapiens
ggagtttctgacttaagccgatcccagaggctctttgctgctgtcagtatcaccactggtcaagcaggtgggtttggaggatttgggacaacatctacaactgcaggttctgcattcagcttttctgccccaactaacacaggc

SEQ ID NO: 485104 - DNA, 87 bp, Homo sapiens
atgcaatagcccttcagtactgttgtacggtgacatttacaaagaggaaatttgggttgatgaagaaggcttatgagctgagcgtgc

SEQ ID NO: 485105 - DNA, 100 bp, Homo sapiens
ccatcttggatccgcgggacaagaaaattcatgcggtcaccttcatgctgctggaccagaacaaccgtgagcacgccattgacgccttccggcctgacct

SEQ ID NO: 485106 - DNA, 101 bp, Homo sapiens
ctgagcggcgcgggctccagactcgccgtggtcaagttcaccatgagaggcttttctgggagaagaggctacaaggacttagtgcatcagatgtaacagaa

SEQ ID NO: 485107 - DNA, 100 bp, Homo sapiens
agaaatcctactccacccataggaagacccacgtccacacctactcctcctcagctgtaaacactttgactgaatcaacgttgaagaatgtccctcaagt

SEQ ID NO: 485108 - DNA, 100 bp, Homo sapiens
taggaatagcacataaattctttggagctgaaaatagcgtgaacttgaaggtcgttatgccatggtggtctgtggagacattgccgtctatcccagtggt

SEQ ID NO: 485109 - DNA, 75 bp, Homo sapiens
ggcgctcggactgcgcttcggccagggcgaggagccagaaggtcagtttgaaagatcgtgtcttctccagccccc

SEQ ID NO: 485110 - DNA, 75 bp, Homo sapiens
cccggattggcgctgaggtggcccgtggggcagggaagcgtgacagcaatgacagtgttttttcccctggataca

SEQ ID NO: 485111 - DNA, 75 bp, Homo sapiens
tgagcttgccgcacaaaaagctagagagatgttaccagacctaaaagcagacaaccagaggctaaaggatgaaaa

SEQ ID NO: 485112 - DNA, 51 bp, Homo sapiens
tttcctaaagttcgtgaatctcaacttgagggcctgaggctatggcaggag

SEQ ID NO: 485113 - DNA, 80 bp, Homo sapiens
ttctggaagctactactacgtggtgcttggaaaggttaaccagcttcgtggcatcctcaagcttctgcagctcctaaaag

SEQ ID NO: 485114 - DNA, 96 bp, Homo sapiens
cgagaccgtgaccgagagcgtgaccgagagcgcgaatatcgtcatcgttagaagggttggggtctgctaggtccccggaatgagttgtttgacgca

SEQ ID NO: 485115 - DNA, 82 bp, Homo sapiens
ttttaagaaaaggcattgaggaactcaatcaaaccagtattcttttcacacagagctggactggccattatggaggaggagc

SEQ ID NO: 485116 - DNA, 75 bp, Homo sapiens
aaaggagttggggcttgatgaaggcgtggatagcctgaaggcagccattcaggaaagagttcctagagagagaag

SEQ ID NO: 485117 - DNA, 100 bp, Homo sapiens
ttaaatcaggatggctggataaactctctcctcaaggccatttaaatggatgttccctggaaatgctaagcaggccttccctacttatcacagattcatt

SEQ ID NO: 485118 - DNA, 100 bp, Homo sapiens
agccaacaataaaggtggcaaaggacctgtcagaaggcctctgaaaaatggaaccaaattctctgaggactaaagtcccagctttcttatctgatttggg

SEQ ID NO: 485119 - DNA, 88 bp, Homo sapiens
gcacaaggagggactgttctgcctacagaacctcagtcagaggagcaactttccaaggtatgatccaaaaggtgattcatggtcaact

SEQ ID NO: 485120 - DNA, 51 bp, Homo sapiens
ggaggatggcggagtcggggctcctgacggggaaagttgctcagacagctt

SEQ ID NO: 485121 - DNA, 100 bp, Homo sapiens
aaatataccaacaatgaggcctattttgatgtgattgaagagattgatgcaattattgataaatcagatgagcccattattgaagagccaagccgcctcc

SEQ ID NO: 485122 - DNA, 75 bp, Homo sapiens
caggaatggagacacggcttcccccaaggaatatacaggcttcgaacctaatgaacaatccccagattcagcagc

SEQ ID NO: 485123 - DNA, 50 bp, Homo sapiens
aagaaacaaaagtgccaccgaagaggccaacagagattttgagaaacaca

SEQ ID NO: 485124 - DNA, 75 bp, Homo sapiens
gaagtgaacactgcagggccatttgcgacatcaccccgcccggagagcctgtgaacagccggcccaaagcagctt

SEQ ID NO: 485125 - DNA, 76 bp, Homo sapiens
caagcatgcagcttactgcttgaaagggtctggaacagaatctgacagtgatgaatcagtaccagagcttgaagaa

SEQ ID NO: 485126 - DNA, 100 bp, Homo sapiens
aaactacccctaaaagccaaaatgggaaaggaaaagactcatatcaacattgtcgtcattggacacgtagattcgggctggagcattggatttgctaaag

SEQ ID NO: 485127 - DNA, 74 bp, Homo sapiens
agctgtcatcacaaaagagttgattgaaattatctctggtgctgcagctctaaacattgctgaggctcttgtca

SEQ ID NO: 485128 - DNA, 96 bp, Homo sapiens
ggctggagatctacctggaacccttgaaggatgcaggtgatggtgttcgatacttgctcagacagagattgcgaagagactgaacacaattttagc

SEQ ID NO: 485129 - DNA, 75 bp, Homo sapiens
gagaatcaaatgataaactgcgaggacagagccactgggatcccggctactcaacagaaatgaaggaggaatctg

SEQ ID NO: 485130 - DNA, 100 bp, Homo sapiens
gcgctcccttgtcacgcctcgggaagcgcgcacctgccaagcaggaactcgaatcatttatgacagaaagtttctgttggatcgtcgcaattctcccatg

SEQ ID NO: 485131 - DNA, 117 bp, Homo sapiens
cgagagcgcgaatatcgtcatcgttagaaggtgtaaagatttctctctgtgttactggaatccctattggatgctgccctctgatgtttgtggaatgaactgcttttgggaagcggc

SEQ ID NO: 485132 - DNA, 90 bp, Homo sapiens
gcaacagtgagaagcatgtgacttttgaaaaccatcgcatagtctcacctaaaaatagtggtgaatttccaatcatcagcccaggtcggg

SEQ ID NO: 485133 - DNA, 100 bp, Homo sapiens
gaaaagcttaataggcaatgggcagtcaccagcattgcctcgaccacactcacctctctctgctcatgcagagcctggagaaagttcttgtggaattcag

SEQ ID NO: 485134 - DNA, 75 bp, Homo sapiens
ccctggtcaggacctgctgcgctgtaagatcctgatgaaggctcctggaccccgccaatacccagcaatttgatg

SEQ ID NO: 485135 - DNA, 100 bp, Homo sapiens
acagtctatatgtatcaccacccaacatcagcagccagcatcttctttattgagagagacaagagagacacctccaacttcgacaaagagttcaccagac

SEQ ID NO: 485136 - DNA, 98 bp, Homo sapiens
tttcacaataagagcagaggatggaacacttcagtgcattcaagcaccagcattggatgttgattggcagagcaacaacacctttgcttcttgtagta

SEQ ID NO: 485137 - DNA, 83 bp, Homo sapiens
gccatcgttgctgccttcttcgtcaagacagttaaatctcacacagaaacagatgagaaacaaacagagagccgcaccatcac

SEQ ID NO: 485138 - DNA, 90 bp, Homo sapiens
gcgagatcctctccaggccctgcggcgccgcaatcaggagctgaagcaacagttaagtgggcagaccaacatccacctcagcaaaaactt

SEQ ID NO: 485139 - DNA, 76 bp, Homo sapiens
atgtgcgcccattgtaaccaggtcatcagggatacctcagacaatggcagcttttggattgaaatatttgctgaat

SEQ ID NO: 485140 - DNA, 98 bp, Homo sapiens
gtagcagcgcccagtcgagcccggggcagcggctgccgggccgggactggtgcgcgagggggtgtccgcaatgttgccagtgtctgtctgcagattgg

SEQ ID NO: 485141 - DNA, 49 bp, Homo sapiens
tgagcgttacgacaaacttctccgagttcttagactctgtgagtaaaga

SEQ ID NO: 485142 - DNA, 74 bp, Homo sapiens
cgggcggccggtcgggcggggcggcggcgctgacaggcctgagacctgggaggaagctggagaaaagatgccct

SEQ ID NO: 485143 - DNA, 95 bp, Homo sapiens
cgcgtctctctgctgcggcgcggggaccgctgtgctctcggctttggaggagaagatacggaccacggagacacaggtgcttgtggcatctgcac

SEQ ID NO: 485144 - DNA, 97 bp, Homo sapiens
gggattccactctccagtgtaatgattattgacaacagaatagcctaacatggcagaccagagacagcgctcactgtctacctctggggagtcattg

SEQ ID NO: 485145 - DNA, 75 bp, Homo sapiens
agaggacagcacttccggtcacgccatcgttgctgccttcttcgtcaagagttcttggagtctctgcggagtccc

SEQ ID NO: 485146 - DNA, 80 bp, Homo sapiens
aggagaacgtcccgctggatctgacccgaggaaggtgggagtcaatcattttgacaagtctcctgaaaggaacagctagc

SEQ ID NO: 485147 - DNA, 100 bp, Homo sapiens
aagggacgtgagcccagccgaggtaccgctgaagaggaatcaattttggtctatgcttggggctgtggagcttgtctaggttgtggttcttcagaagcta

SEQ ID NO: 485148 - DNA, 100 bp, Homo sapiens
tcagtgttaaaggaacctctacaacgaaggtgaagccacggaagataaggcaacatgagtgagaatgaggaagaggaaatttctcagcaagaaggcagtg

SEQ ID NO: 485149 - DNA, 100 bp, Homo sapiens
gagtcctgagcagctggaggaggtgcgggaagccacacggcgagagacacacatccttcgccaggccagctcagtggagcagctgcggaaggagggcaat

SEQ ID NO: 485150 - DNA, 51 bp, Homo sapiens
gtggagatgaagcctaagaatatgatcaggccaaggtgatccgtgacaagc

SEQ ID NO: 485151 - DNA, 75 bp, Homo sapiens
agcgccgcggggcccaggccgggagccgaccggcacagcagcttgatcagttactggcagtcgcagactttggac

SEQ ID NO: 485152 - DNA, 100 bp, Homo sapiens
tccttcaaaccgacgcatactcaggagcagaggtgctggagaatctggtaaaagcaccattgtgaagcagatgaggatcctgcatgttaatgggtttaat

SEQ ID NO: 485153 - DNA, 82 bp, Homo sapiens
cggcacgcgactccccccgggcccaaagtcagcccaaggctgccccctcggtcactctgttcccgccctcctctgaggagct

SEQ ID NO: 485154 - DNA, 75 bp, Homo sapiens
cgccgccggacgtcggcaacggagaagtttttaacgatggcagttccagggaactaatgaacctcactggaacaa

SEQ ID NO: 485155 - DNA, 90 bp, Homo sapiens
atatgaatacggctccatcaagacccagccccacacgaaggttgaaatcacaaagattagacacctttttagataggtgttcttcagcac

SEQ ID NO: 485156 - DNA, 76 bp, Homo sapiens
ggagtgacggtcccacggcagcgccaagtgcagccgcggagccctgtacacaggcttttccatcctggtgactctg

SEQ ID NO: 485157 - DNA, 75 bp, Homo sapiens
ccgtcccgtccgacagccaggcccgggagaaggaaatcctcattgacgattcaatttgttgaaggccaatttgtg

SEQ ID NO: 485158 - DNA, 139 bp, Homo sapiens
cgcggacctacgaccgcgagggcttcaagaagcgggcggcgtgcctgtgcttccggagcgagcaggaggacgagggagaagaaatgggtgaccgttggtgacacatccctacgaatctacaaatgggtccctgtgacgg

SEQ ID NO: 485159 - DNA, 74 bp, Homo sapiens
accaaacccgccaccacctccgagggaggagccacgtcgccgacctcgcctttcaaggagaagctgcgccttga

SEQ ID NO: 485160 - DNA, 83 bp, Homo sapiens
cacagcacagttcctgggaaggtggagccaccagcctctccctgaaatacatgctacaggatttaactatcagaatgaagatg

SEQ ID NO: 485161 - DNA, 89 bp, Homo sapiens
caggccgcggggagcacctggcattactctactgactggcagagacaggagaggtagatgtccacgcccacagaccctggtgcgatgcc

SEQ ID NO: 485162 - DNA, 75 bp, Homo sapiens
cagagttctctaaaaaaactggctgtgaataatatagctggtattgaagagaatacagattctgttcatcttgct

SEQ ID NO: 485163 - DNA, 50 bp, Homo sapiens
tacagttggaccgagaaactgttgtaaacatgttaaaggcatcctgttat

SEQ ID NO: 485164 - DNA, 50 bp, Homo sapiens
gattcgcagtggtcgcttcttctccttgggggctgttgtggttccgacta

SEQ ID NO: 485165 - DNA, 95 bp, Homo sapiens
ggtgaagtcggccagcctgagcaagcggaggacctacgccggcctggagctagggccatgagtaccttgtttttgactggaaggagctgtggggt

SEQ ID NO: 485166 - DNA, 75 bp, Homo sapiens
gtggcttcttctccacctagatgtcagaatggcggcagtggagcatcgtcattcttcaggattgccctactggcc

SEQ ID NO: 485167 - DNA, 90 bp, Homo sapiens
ccgaggcctgggttacaagcagcaagtgcgcggttggggccactgcgaggccgttttagcattttatagaaatcactgatgaccagtttg

SEQ ID NO: 485168 - DNA, 100 bp, Homo sapiens
ttggattacttaagatcattcttaaatgattctacaaactttaaacttatttacagatatgcgtttgactttgcacgggcttaagcaggtaaagcagtca

SEQ ID NO: 485169 - DNA, 75 bp, Homo sapiens
cttgcatcaagctgggcatccagggctcgtacttctgctcgcaggtatctcattcagttgctaaacttatattag

SEQ ID NO: 485170 - DNA, 100 bp, Homo sapiens
cagcatttcagaaccaggttctccttcgaggaacagagaaaatgaaaccagcagacagaatttgtcagggcagagcggcttgggtaaatccaccttaatc

SEQ ID NO: 485171 - DNA, 51 bp, Homo sapiens
ctgaatccacatagagaaagtgatggggatcatgttctaattgagctcacc

SEQ ID NO: 485172 - DNA, 100 bp, Homo sapiens
tttggatccagaatgtcagtcttaagtttcagcaacaccagcaaacagtggttgaaggggcccggccaggactcggggaagggtggcctgagagcagcga

SEQ ID NO: 485173 - DNA, 105 bp, Homo sapiens
ctgtgcggctgcgtggggctcggccgcgcggactgaaggagactgaaggtgtcgtgaaaactacccctaaaagccaaaatgggaaaggaaaagactcatatcaac

SEQ ID NO: 485174 - DNA, 88 bp, Homo sapiens
ctacagcacgacccccggcggcacgctcttcagcaccaccccgggagacacgaatgcagagtttgagtccagatcccaaagcccagta

SEQ ID NO: 485175 - DNA, 101 bp, Homo sapiens
ggactccctctctcagagtgttcatgtgaagcctgagaacctgcgtttggcggagaaactaatctggattcactccctctggttgatacccactcaaaaag

SEQ ID NO: 485176 - DNA, 100 bp, Homo sapiens
ggaagtagtagttgttgagcagagggaaagggataggagaaggatgtggactgcagtgctgcagtgccaggttaaacccatccagagtaatggctgcggc

SEQ ID NO: 485177 - DNA, 51 bp, Homo sapiens
ctcccgtcctgggtcgctcggctgcaaatgtgcaataccaacatgtctgta

SEQ ID NO: 485178 - DNA, 75 bp, Homo sapiens
gaggccactggcgtcacctgctatgcagcccacccagatgttttactgtgcctggctaactatagtcgagggggt

SEQ ID NO: 485179 - DNA, 75 bp, Homo sapiens
gaaaacagccaaaagaaaggccagcacctgaagaattgatggaaactaaatatattttgccaactttggaaaaag

SEQ ID NO: 485180 - DNA, 101 bp, Homo sapiens
cttaccttgcccaccaacttcagagatttgtccaagcaacttgagttggtggaaccaagtggctggattcatgttcccttaactgacaatcataagaagcc

SEQ ID NO: 485181 - DNA, 100 bp, Homo sapiens
ctgcagccccaagacagagcgctactcctggcagtgcgtcaatcagagcgtcctgtgcggtgatttggatatctactctggagataaagttggttcatcg

SEQ ID NO: 485182 - DNA, 90 bp, Homo sapiens
tggaacacggctccatcatcacccaggcgcggagggaagacgccctggtgctcaccaagcaaggatgcttgaagcccacatgcagagcta

SEQ ID NO: 485183 - DNA, 75 bp, Homo sapiens
accttgcctgcttcagctagaaaagttaagtcttcggaatcaaagctatgaagacggccaagtgggagatgcaaa

SEQ ID NO: 485184 - DNA, 90 bp, Homo sapiens
gctatatactttggttacctatgtacctgttaccactttcaaaaacaaagtggtgaagaaagggaagaaggacaagaagatcaaaaaaac

SEQ ID NO: 485185 - DNA, 82 bp, Homo sapiens
caattccgatggcaaagccgttgccaaggtagttaacctgcagtacagtgaagttcaagatcgggtcatgctcactggccgc

SEQ ID NO: 485186 - DNA, 83 bp, Homo sapiens
agtacgagctcaacggcggcctgcctccgggcacacccggctccccggacgcctcgtttggtgccctggttgtcagatgttgg

SEQ ID NO: 485187 - DNA, 103 bp, Homo sapiens
gggctttcgcccgggtcctcctagaaattccccccgaagaagactcccccacatctggggtgaggtggctttgaccccgggttgcccggccagcacgaccgag

SEQ ID NO: 485188 - DNA, 100 bp, Homo sapiens
atctgtgaccagctcaagggccatctgaaggcaaacgccactggcatatctcttattaagagccccagtcccctacccggatcccctggagcccaggagg

SEQ ID NO: 485189 - DNA, 90 bp, Homo sapiens
atggcagtaaccctgagacaaccacttctggtggttgccactcacctgaggatttctcccaggagaaagccatgttcagttcgagcgcca

SEQ ID NO: 485190 - DNA, 85 bp, Homo sapiens
cttcagcctcaccgtgtggaaggccggccgcaaggaggaggccaccaaccagacgggtgtcaaattgagaaccaggtagatcccc

SEQ ID NO: 485191 - DNA, 100 bp, Homo sapiens
gggggcttttccgggcgggttttggaaagaagagggggaaatgcggcggcggccccaatcgagttctatggggcttctgttgcttatgaaaatgccctgc

SEQ ID NO: 485192 - DNA, 100 bp, Homo sapiens
gggagagaggtacctctccttttccctctccctttccctaaggtgaatccgccatactacatcccgctggttgagctggtcccccacccggagacggccc

SEQ ID NO: 485193 - DNA, 100 bp, Homo sapiens
cggtcatctgtatgcataatatggaatgttcttaacccagaagtagctgaatgtgttactccattgctgaggagtggcagacctgttatcctaaactagg

SEQ ID NO: 485194 - DNA, 98 bp, Homo sapiens
tcttctgccgcaccaggctcatcctgtccatcgtgtgcctgatgatcacgcagctggctggcttcagtggaccaggacagtatgatttggtgaaatgc

SEQ ID NO: 485195 - DNA, 85 bp, Homo sapiens
agtgggctaccataaacacatcaccttgatttttaatcccacggttggtgttcgaggaagagacattgttgttcttggtgtggag

SEQ ID NO: 485196 - DNA, 137 bp, Homo sapiens
ttcagttcttcagtctacaaaggactcttctaaaaggatatgtgttgctaatacccatctttactggcatcctaaagatcaggaagcaccatacctcctgcgaaacctcagtgatcacacagtggccatcagcagtt

SEQ ID NO: 485197 - DNA, 100 bp, Homo sapiens
ccggcgctcagctgggcttgaggccaagtcctgtatctgccatgtctgtggcgtccacctcaacaggctgcattcctgcctctactgtgtcttcttcggc

SEQ ID NO: 485198 - DNA, 97 bp, Homo sapiens
gagggacttcttggcttctcccagcatagccccaggttctggcctataggaacaagacattttcagtaatggaagaaggagcttccaggctggggaa

SEQ ID NO: 485199 - DNA, 80 bp, Homo sapiens
ctggcgctgagcctgcagccggccctgccgtacctggagtagaacagaaaaattattatgtctgtgttcccttgggactc

SEQ ID NO: 485200 - DNA, 101 bp, Homo sapiens
acaagccactgcctttggtcttctgaaggtgaatcagtggctaacctggttagaaactgctgaagaagaagaatcagaggaagaagctgactaaagaacca

SEQ ID NO: 485201 - DNA, 82 bp, Homo sapiens
cggaactggtgtaccctggtggacgtgcacccagaggaccaggcggcggcgagcaattcgaactgcatttaaaaacagaaag

SEQ ID NO: 485202 - DNA, 88 bp, Homo sapiens
tgcccttacggaccaatcttgggggatgacagctgttgacccatgggcctcctgggccaagacaatgcaaactccagtgaacattccc

SEQ ID NO: 485203 - DNA, 82 bp, Homo sapiens
agccgatgcccgcggccggagagctggaggagaggttcaaccgcgccctggttaatttggagtggcccctggagtcagtttc

SEQ ID NO: 485204 - DNA, 50 bp, Homo sapiens
atcatggatcaatctcaaacaaaggtcagaagagatcaattctacagaaa

SEQ ID NO: 485205 - DNA, 83 bp, Homo sapiens
agcaggtctaccgggccacgcaccgcctgctgctgctgggaaggatgcctgtggccctcggagagcacagtgtcaggcaacgg

SEQ ID NO: 485206 - DNA, 83 bp, Homo sapiens
aaggtcggcagagcaaggggcttacgcagaaggacctggccacgcaccactgccggaactgtggccacatcttctgcaacacc

SEQ ID NO: 485207 - DNA, 74 bp, Homo sapiens
gctgttccttggccatcccaaagctattctgggggcaacagagtttaacccagaactggtgctggtctcagctg

SEQ ID NO: 485208 - DNA, 100 bp, Homo sapiens
ctgtcttcagatcttcacagcacagttcctgggaaggtggagccaccagcctctccttggaaggaccattacgacctgttcttgaatacattgatctggt

SEQ ID NO: 485209 - DNA, 50 bp, Homo sapiens
gattgggatcaaccagacggaaaacccggcttggccttcgtgcctctgca

SEQ ID NO: 485210 - DNA, 100 bp, Homo sapiens
gtcgcgctggtccccggccggccggagcggcggcggtggcggcgcgaggcggcatgagggagccgctcggattttttatcaagcagaaatgcatcgaaca

SEQ ID NO: 485211 - DNA, 98 bp, Homo sapiens
gaatagataacaagtgcagtgtgttatgtattctctgggacatggaaactgaagaagttgaagacatactgcaggagtttgtaaataagtctctttta

SEQ ID NO: 485212 - DNA, 100 bp, Homo sapiens
tgccatggacacccactttgccaacatgcgctccctcatccaggtgaaaggtgtagcagtcactcggcctacacccacagcatcgaccttgtgaacccag

SEQ ID NO: 485213 - DNA, 74 bp, Homo sapiens
cggcagcatgtcggtggcggggctgaagaagcagttctacaaggcgagccagacagagtgttgctcagttaccc

SEQ ID NO: 485214 - DNA, 74 bp, Homo sapiens
gaatcagaccttcaactggaatacaacctaaattatacagatctgtgattgaagatgtcattaatgatgtgaga

SEQ ID NO: 485215 - DNA, 75 bp, Homo sapiens
tacagaggaatagtctacaaaggaagacttgtaacctggagaagaggaactgtggctgcaccatctgtcttcatc

SEQ ID NO: 485216 - DNA, 51 bp, Homo sapiens
gcatgcgccaggcaggccgttacttaccagatggagtctcactctgtcacc

SEQ ID NO: 485217 - DNA, 82 bp, Homo sapiens
ctagcagtgagcaccttttggcccaatgaatatcaggaactgtggctgcaccatctgtcttcatcttcccgccatctgatga

SEQ ID NO: 485218 - DNA, 95 bp, Homo sapiens
gatgtatgaaaattcctactggacaagaatatgctgccaaaattatcaacaccaaaaagctttctgctagggttaccttatcccatatcacacaa

SEQ ID NO: 485219 - DNA, 100 bp, Homo sapiens
gcgccgcttcagccggaaggagaagggcctgtggctgaacagccatgggctgtttgacccggagcagagctacgaagtgaagagtgtcctcggaaaggaa

SEQ ID NO: 485220 - DNA, 100 bp, Homo sapiens
cacggagcagcactcttcaccctgcacagccttgttaggcataatggttatgaaagcttctgtagatgatgacgattcaggatgggagctcagtatgcca

SEQ ID NO: 485221 - DNA, 83 bp, Homo sapiens
cccatctcaatcagaattactagattttctctcaaactacgaggacaaattgatggccaggagatcactgccaccgccgtgct

SEQ ID NO: 485222 - DNA, 96 bp, Homo sapiens
ggcgcgccactcctcccggaggcgacatggggcacccggtgtaccgcggcgagaagccccagctgcactacgcgggccgcgttcgcaccaaaaccg

SEQ ID NO: 485223 - DNA, 87 bp, Homo sapiens
ccctcttctcctccaacccagaactggacaatctgggcctgagcccaggctgctatgacacctacaatgcggacatcgactgccagt

SEQ ID NO: 485224 - DNA, 75 bp, Homo sapiens
gcggcggcttcgcggcgcgtcctccgcagaggcccccgacggagacaaggacgattgtcacagccctggccattg

SEQ ID NO: 485225 - DNA, 83 bp, Homo sapiens
ttgttaaggattccaagtaactcttatttgggcatatcaagagaggagatttctttcacaactcatccagaagtttatctctg

SEQ ID NO: 485226 - DNA, 75 bp, Homo sapiens
ccatccgcgacttcctggccatcgttttcttcgcctccatagtaagagttccctatttcattgatttgaaaaaac

SEQ ID NO: 485227 - DNA, 83 bp, Homo sapiens
cggagccgtgtggaccaggaggagcgctggagtggagcttggtttcgggatctcggtgctgcagacggcgagacctcctgcac

SEQ ID NO: 485228 - DNA, 100 bp, Homo sapiens
caacaggagaagctcaccatgtctctctcagaacttggtgctgctagaatgcaggaacagcagcttcttggacacttaatgattgttggcaagaaatgtg

SEQ ID NO: 485229 - DNA, 95 bp, Homo sapiens
tgttattggagaaacatgcagattatatcgcatcctatggctcaaagaaagatgattatgtggaatatgtgatcaagtgtgacatgtcagctctg

SEQ ID NO: 485230 - DNA, 75 bp, Homo sapiens
cggccggggaacgcgcgctgcgcggactgcggcgccccgggtgtaccttccggtttcccagcacggccatcaaga

SEQ ID NO: 485231 - DNA, 95 bp, Homo sapiens
atctccccgacaaacaccacgagaattccgcagcccacacggtcatcatcagatttgaaatatttaaagtggatacaaaactatttcagcaatgc

SEQ ID NO: 485232 - DNA, 75 bp, Homo sapiens
aattgaaccatgggattcaggagtgacatcaggattgggctttttagaccccgagaagaagcttttttctcaccg

SEQ ID NO: 485233 - DNA, 100 bp, Homo sapiens
acctgtacttgccgccgtcccggctcacctggcggtgcccgaggagtagtcgctggagtccgcgcctccctgggccaagtgcaggaacatggagcatgca

SEQ ID NO: 485234 - DNA, 75 bp, Homo sapiens
gcccgggcgagcagccctgcctccggacggttgccaacttggcctgttccatctcaaataatgaagaaggtgtaa

SEQ ID NO: 485235 - DNA, 75 bp, Homo sapiens
cacgcgcgggcgagaaggggtcccacgaggaggaggtctttggcaaagggaacacggcgttctggatcgtcttct

SEQ ID NO: 485236 - DNA, 100 bp, Homo sapiens
tgcagatcgccgtggccaacgcgcaggagctgctgcagctacgagttccagggagctctgtcctggtgaccgtgcccgggttatgacgactaatcccaaa

SEQ ID NO: 485237 - DNA, 74 bp, Homo sapiens
tggagaatgtcaagtacgaagatatctatgagagtcatcttagtgggatttggggaagcaacagggctgtgtgg

SEQ ID NO: 485238 - DNA, 46 bp, Homo sapiens
acacgaaaatcccaggaatcagagatgacttcaaacctgcttctat

SEQ ID NO: 485239 - DNA, 90 bp, Homo sapiens
cacagatagtcgatttattccctatactgaggagttcagtgaaaaactagagagctgtccgtggcacagtgcacgcagcggcccgtggac

SEQ ID NO: 485240 - DNA, 73 bp, Homo sapiens
cagagctggccgacaaggtcaccaagctgcaggtactgggtgcctgtggagtacgaggaggaggaaaagaagg

SEQ ID NO: 485241 - DNA, 100 bp, Homo sapiens
aagactgcaggcgatcataaagaaaatcgacttggactcagatggctttctcactgaaatacaagttgtgcaaagtgaggaagattactgtgggagtgaa

SEQ ID NO: 485242 - DNA, 82 bp, Homo sapiens
gggactcaagtacaactcccggcacgaggagggagccatggatttgctgcgggagctgaaggccatgcctatcacgctgcac

SEQ ID NO: 485243 - DNA, 80 bp, Homo sapiens
ggtttttcgcaacccgggcggcgagatggcgctttggtgtaagcgagacaatgcagatcttcgtgaagactctgactggt

SEQ ID NO: 485244 - DNA, 75 bp, Homo sapiens
actgtgacacggttcaggctgtccagaagtaaaagggtggccaaacaggagaagaagaagaagaagacaggtcgg

SEQ ID NO: 485245 - DNA, 98 bp, Homo sapiens
gcaccttttcaaaaagctgcaaaaaagaagactaagaaaagagataccaaagtcgggactatcgatgatgattctgcctgatcaatgcaggagtcctg

SEQ ID NO: 485246 - DNA, 97 bp, Homo sapiens
ctacctcattgccatcaagtacggtggcccccagcacatcgtgggcagccccttcaaggccaaggtcactgagatttgaacaataatgctataatgt

SEQ ID NO: 485247 - DNA, 75 bp, Homo sapiens
attagatgatccaagtcaccaagaaattactgtctcaagtgatacgatttctcacattggcaaactgagagattt

SEQ ID NO: 485248 - DNA, 100 bp, Homo sapiens
atatcagcagaggtggcttgctattgatgctaatgctcgacgagaagtcaagaactatttccagaaagctgagtctgatctggattacattcaatacagg

SEQ ID NO: 485249 - DNA, 100 bp, Homo sapiens
gccgccatcaaagccgccttggctcagggctaatgcgccctgaaggcagaggaccagtatcagctgtgctaccgtgcggccctggagtacctcggcagct

SEQ ID NO: 485250 - DNA, 100 bp, Homo sapiens
caacacttctccgagccagcgagccagcgagccgccgacccgccgagcaaaatggactcacaccacccggcaagaactgctcactacggctccctgcccc

SEQ ID NO: 485251 - DNA, 101 bp, Homo sapiens
ctaactttgaggggtttcttgcaaaacgcttctccggctgcaccctgaccgatgggaccctggggaaactcccaatttgggagaggtcgtggtggccgagg

SEQ ID NO: 485252 - DNA, 88 bp, Homo sapiens
cacatctcagtgaatttgcaagtgatgttccatttaagcagacctcttccatagctgtagctggagcggtaattggagctgttcttgc

SEQ ID NO: 485253 - DNA, 75 bp, Homo sapiens
gcaacgtgcggtgggaccacgagagcgatgccggaccagatctctgtctcggagttcatcgccgagaccaccgag

SEQ ID NO: 485254 - DNA, 82 bp, Homo sapiens
ctacaccatgacaacgccttacccttcgctcccagcccaggagttcctgaagaaggagttcagcgcggaaaacgtgactttc

SEQ ID NO: 485255 - DNA, 95 bp, Homo sapiens
tttacttggtgcaggaaggcagtctttgctacgtacagcaaaaggtttgttggcatccaaagctgttggggttgatggtgctgaaaaaaaggaag

SEQ ID NO: 485256 - DNA, 129 bp, Homo sapiens
ggaagttcaagatcaaagtgccagcagattcagtgtcatgtgaggacgtgcttcctgcttcatagataagagtttccaggagactgacaaggcgtggcatgggggatgtctggcgctggcagagctggg

SEQ ID NO: 485257 - DNA, 101 bp, Homo sapiens
ccgggggcgcgggcggcggcgccggcaggaagactgtgccctgtccacggtgcctcctgcatgtcctgctgccctgagctgtcccgagctaggtgacagcg

SEQ ID NO: 485258 - DNA, 100 bp, Homo sapiens
aaatgaatgccaaatgggacacgggactggtttggctgaaagacaaagaagcaacacattgtaaactttgtgaaaaggaattctcactctctaagagaaa

SEQ ID NO: 485259 - DNA, 74 bp, Homo sapiens
ttttaatctgaccactggaccagcccattgggagttacttcagcgaagccgtgtcgagttatagcagtgctgga

SEQ ID NO: 485260 - DNA, 101 bp, Homo sapiens
agcagctctcgctccagaagcttcactttgattctggctacattggagattggttgctttctaaaactgaaggagaagcccatgaagagatggtggattct

SEQ ID NO: 485261 - DNA, 90 bp, Homo sapiens
aggacctcacgcccttcaaggatgaccgctactacagtgatcctgccatgaagcagtttctgctgtacttggatgagtccaatgccctgg

SEQ ID NO: 485262 - DNA, 90 bp, Homo sapiens
cgccgaagaagcatcgttaaagtctctcttcaccctgccgtcatgtctaagtcagaggacacagcttgggctatggctttgtgaactacg

SEQ ID NO: 485263 - DNA, 74 bp, Homo sapiens
ttcaaagatgaagatgaaaccaagcccttgacttgggaagatccccatgaaaaagataagagcacgaactgctt

SEQ ID NO: 485264 - DNA, 50 bp, Homo sapiens
aatgaatccttctagagacgtccacgacttcacatgtatcattctccgag

SEQ ID NO: 485265 - DNA, 75 bp, Homo sapiens
ggagagaggaattcctcaagacaccattccagggatctcaagggcatttccctttgcccacctcaccttttcata

SEQ ID NO: 485266 - DNA, 100 bp, Homo sapiens
gacaagatgcgccgcgccagctcctactcctccctcaactccctcatcggcaaggtgcccggcgacgactgcccgctggtgtggggccagtgctcccact

SEQ ID NO: 485267 - DNA, 100 bp, Homo sapiens
gggagaacaaagctgaggtccagatgaaagagaagtttctggtcactccccaggattatgcgcggtacgcaataactgtttggtattttgatgcagatga

SEQ ID NO: 485268 - DNA, 51 bp, Homo sapiens
ctcagcttatctacaatcatatcacatactatggactacaaattttggaaa

SEQ ID NO: 485269 - DNA, 82 bp, Homo sapiens
cagacggctcacctgtgcgggatggaacaaaagctgcatcttcctcccgtgaggctggccgagctccacgctgatctgaaga

SEQ ID NO: 485270 - DNA, 104 bp, Homo sapiens
ttcttaagatccaagaagaactagaaaaaaagttgtttgcaggttgcaagaaagctcaagtagcctatggagaggatgcaaggcttccagctgatgccctcagc

SEQ ID NO: 485271 - DNA, 100 bp, Homo sapiens
gcaacactcctgaccaagcccctgagcacatcagcaaagaaggatctgagtctctccctgcggagacagccctgaagaactcctgtaacgtcaagctggc

SEQ ID NO: 485272 - DNA, 74 bp, Homo sapiens
gggggatggttccatcatggcgtcaatgcagatgcatatgaaacagccaagatgctgtgtgaacagtattacct

SEQ ID NO: 485273 - DNA, 75 bp, Homo sapiens
cctgataaacaacaagtgcttcaggaggcatatcgggtgctgaagaaattcatctgttgccatgggagcctcact

SEQ ID NO: 485274 - DNA, 75 bp, Homo sapiens
ccaaaatatggcaaagaaacctattctgagatcggcttcaccaccgaccctcggatggcccgctcctccccctac

SEQ ID NO: 485275 - DNA, 100 bp, Homo sapiens
aaaatgtatatggaatttcctcaactgtataataatagtgtggtctgttctttcttgccagaagttatctacaagggttattttagggacacagtgatgt

SEQ ID NO: 485276 - DNA, 99 bp, Homo sapiens
aggtcagcatcaatggtgttctcagctacccatgttgagcttgcttggctcaggaacaacagaagagaataaagaaaatgacctcagaccttccttacc

SEQ ID NO: 485277 - DNA, 100 bp, Homo sapiens
tttcagctgcggggacttgaattcagaggactgatcctttgaaatactccagccatgactaaaagagaagcagaggagctgatagaaattgagattgatg

SEQ ID NO: 485278 - DNA, 100 bp, Homo sapiens
cagctcttcaccatgaaatggatagatgaggaagatttaaggaccatagtacagctatggatactgaaccaaacccgggaacatcttctgtgtcaacaac

SEQ ID NO: 485279 - DNA, 90 bp, Homo sapiens
gtagccgcgtcccctccagtccgctccgggcaggtcgcccagagcaattttgaggcccttcaagatttcttccgcctctttccggagtac

SEQ ID NO: 485280 - DNA, 100 bp, Homo sapiens
cccagcgtgagcgacgcagaagacgggtgatttctgcatttccatctgaggagtccaacctataccttctcagggaggcaaactagaaatagctggcact

SEQ ID NO: 485281 - DNA, 100 bp, Homo sapiens
ttgtggaactgatgtttaaaatcattggaccatttagtaagaagaattccagtcttataaacattccaggatgccttgaagattttctgtaggataaaag

SEQ ID NO: 485282 - DNA, 90 bp, Homo sapiens
gctgaactgggtgctttatatagggcaagtcttgcagaaatccacagcaatatgtgggtaagaaatggtctgcaaatcaaaggacaagcc

SEQ ID NO: 485283 - DNA, 75 bp, Homo sapiens
ctccaccctgctgggaatcccgttcttcgccatgggtatcgatatcctgaagcttgtagcagcccaagtgggaag

SEQ ID NO: 485284 - DNA, 90 bp, Homo sapiens
ctccctgcaggcggaaggaaggcaattagagcggagtgcctggtgaagaatgtgatgggatcactagcatgtctgcggagagcggccctg

SEQ ID NO: 485285 - DNA, 100 bp, Homo sapiens
gccattgctcttagcaggaaggacaaaactattcaacatgtggaagtattttgttatgccaggaagatgagaatgtgcctactgctcctgatcctccaag

SEQ ID NO: 485286 - DNA, 100 bp, Homo sapiens
ggttttccactccattgttgttagaagccagaaagatgtgcgggacatcctcaccccaattcagattgaagctgcttaccaccttggtcctcatgtcatc

SEQ ID NO: 485287 - DNA, 75 bp, Homo sapiens
agcagctcaacctcgcctatgtgggcgccgtccctcaccgcggcatcaagcagacaatgcagatcttcgtgaaga

SEQ ID NO: 485288 - DNA, 90 bp, Homo sapiens
gttcgccttgccgacagtgtccttgctgcccgcaatcactctggggctgcccgcccctgccagggttggtgttcgaggaagagacattgt

SEQ ID NO: 485289 - DNA, 101 bp, Homo sapiens
gcctttgacctttttgaagcctttgcaaaaggtgttactatcgttaaaccaatagtttacggtaatgttgctcggtattttggaaagaaaagagaagaaga

SEQ ID NO: 485290 - DNA, 88 bp, Homo sapiens
gaggaagaacgcgccagagcaaaatgggacacaggggcagtacccaaaggaaacgctacgaaagaatacatggagagcttgcagctga

SEQ ID NO: 485291 - DNA, 50 bp, Homo sapiens
gccatcgttgctgccttcttcgtcaaggatctgccagagcatcttttgga

SEQ ID NO: 485292 - DNA, 90 bp, Homo sapiens
accgtgtgtttgcagtaagttgtgagatggtgttcccttcccaaagaacttccttcagatctgcaagaagatcctgtgccgccttttccg

SEQ ID NO: 485293 - DNA, 83 bp, Homo sapiens
acggagttctacgtgtcccccgaggatctggaggcacagctgcagtctgacgagaggggtgaccctggcaaagatgagagtgc

SEQ ID NO: 485294 - DNA, 75 bp, Homo sapiens
ggcaccgggaggccgggccgagcgcagcctcccgcgacgatgcccctcaacgttagcttcaccaacaggaactat

SEQ ID NO: 485295 - DNA, 75 bp, Homo sapiens
gagccggcgaggatcaaaatcttcgaaggaggactgtgccctgtccacggtgcctcctgcatgtcctgctgccct

SEQ ID NO: 485296 - DNA, 81 bp, Homo sapiens
actgacccctcgggcacataccatgcctggaagattccaactccacagagtgaccagagagaggacgtggctgaagacacc

SEQ ID NO: 485297 - DNA, 98 bp, Homo sapiens
cgattgtcgatgggctcgctccagaggacatgagcaaggagcaggaagaaaaaatgctgggcatcttggtgcagcacaaagtccggagtggcgtctcg

SEQ ID NO: 485298 - DNA, 97 bp, Homo sapiens
ctccgctgaggtggacgtgtacaacccgacgaggaacgaatgggacaagatcccgtccatgaatcagtttgtgaatagcacaatggaagaagctgga

SEQ ID NO: 485299 - DNA, 100 bp, Homo sapiens
cacagacatctgccaaggagccctggatgccatcccgcccactttctacagaccctacttcagaattgttcgatttgacgtctcagcaatggagaagaat

SEQ ID NO: 485300 - DNA, 49 bp, Homo sapiens
cgtggactggaagtcacactgcggcgatactttcattcagaaaaccaag

SEQ ID NO: 485301 - DNA, 101 bp, Homo sapiens
cagtgcctcgagcgctcaggatggaggaagactcgatccgcctgcctgcgcacctgcgtgtgcaactgaggaacatggctcaagaaactaatcacagccaa

SEQ ID NO: 485302 - DNA, 98 bp, Homo sapiens
gattgagctgcactgtattcctgagacaaggacggcagcaaggtgacaacagtggtggcaactcctgggcagggtccagacaggccacaagaagtcag

SEQ ID NO: 485303 - DNA, 82 bp, Homo sapiens
gaacaaattgcagttgtttgaggtcagtcattggcaccatgaactggaataaaggtggtcctggcactaagcgaggatttgg

SEQ ID NO: 485304 - DNA, 100 bp, Homo sapiens
agccattatgagatcttcacagagcagttctcctttaaggagagagcagcacttgaggcatgtcacaagggctggggcgtcagcgtcgtggttggagtag

SEQ ID NO: 485305 - DNA, 74 bp, Homo sapiens
gccacgcgaggctgcggcgcacggtcgcaatggaagaagagatcgccgcgctggtcattgacaatggctccggc

SEQ ID NO: 485306 - DNA, 100 bp, Homo sapiens
tattaattcaaaaaaggaggaactcaatcaatctgtaaatcgtgtgaaagaacttgaggttgtgtgtgtcccgctgtggattctcatgtcctttctgtgc

SEQ ID NO: 485307 - DNA, 87 bp, Homo sapiens
tggaggcctcaccgtgagaccttacaaagccgggttttttgcatgtctgacacccatgactccacctggaccttatggctccaccca

SEQ ID NO: 485308 - DNA, 83 bp, Homo sapiens
aaggtcattttcgtggagaaagccccagagggaagtcttgccggaccatcacctttgagcagttccaggaggcgctggaggag

SEQ ID NO: 485309 - DNA, 95 bp, Homo sapiens
taaccacctcacagattccagcttcggaacaagagaccctgttgaaaccaagactgaagactgaacctgaagaagtttccatagaagacagtgcc

SEQ ID NO: 485310 - DNA, 100 bp, Homo sapiens
gggcataactgctggcagcaccgacgaacccccaatgctgaccaaggaggagcctgttccagaactgctggaagctgagaattacctctctgaacaggac

SEQ ID NO: 485311 - DNA, 98 bp, Homo sapiens
cttgaacccacagatgacaactcactgcaggcactgactatcctttaccgggagatgcaccgacaatgaagaaggagccccacaggaaggaattctgg

SEQ ID NO: 485312 - DNA, 75 bp, Homo sapiens
gcgcagaaagcaggcgaacccgcggcgcaataacgtgacactccattcagggtaatggacaagatggagtttgca

SEQ ID NO: 485313 - DNA, 50 bp, Homo sapiens
atccagcctgcggagcctgtggggcaggtttattcttcagtccaaggaag

SEQ ID NO: 485314 - DNA, 75 bp, Homo sapiens
tatgttcagaaaacctactcagaagacacctaccgagacagggcagggcattgttcatgcactgaccgacctcag

SEQ ID NO: 485315 - DNA, 100 bp, Homo sapiens
gacaggcttctccggaaggaacagattttagctgtggccagatggcccactgcgtgaccttggttcagctgtccatttcctgtgaccatctcattgacaa

SEQ ID NO: 485316 - DNA, 75 bp, Homo sapiens
cagctttgacaatacaggaaatgttttttccagagtgtggattctttggcatgtatgacaaaattcttctctttc

SEQ ID NO: 485317 - DNA, 89 bp, Homo sapiens
gtcgactcaacaccactctttcagagtcacctaaggtcctgcgagtacaagggtcgacccccaaaggcaggggcagagccagcatctga

SEQ ID NO: 485318 - DNA, 100 bp, Homo sapiens
agcgcgtttggctgtgacctgacggagtatctggaaagctcgggacaggatggtgttatccacgtgaccaaggaagtgaaagaagtggcaacgctgtcct

SEQ ID NO: 485319 - DNA, 60 bp, Homo sapiens
cttacgtgtactttaccaacgagctgaagcaggatagcaaaacctgatctcataaaacct

SEQ ID NO: 485320 - DNA, 82 bp, Homo sapiens
tgtgaaagaccgattttctgcagaagatgaagctttgagtaacattgccagagagactctttttgatcagaacaatgctgca

SEQ ID NO: 485321 - DNA, 75 bp, Homo sapiens
tcggcggcctgatggagtaagaggggttggctgtgaatgtgtgaccatgaagctcatggatgaggtcgccgggat

SEQ ID NO: 485322 - DNA, 96 bp, Homo sapiens
catgaaagagatcctggacctatgaatatccagtttgagccatcggatctaagatccaaaaggaatttgctcgccctgatacatcgaatgatagag

SEQ ID NO: 485323 - DNA, 75 bp, Homo sapiens
ggggacaagtacctttatgaaccagtgtatcccaagtatcacacctgtgtatcataatatgtttgctttaatgag

SEQ ID NO: 485324 - DNA, 75 bp, Homo sapiens
tctggaagggtgttttggaggagttgctgtggtttatcaagggccgcctttttgcctatcctgacactcaccgcc

SEQ ID NO: 485325 - DNA, 75 bp, Homo sapiens
gcggcggacagattgaccttcagagcgaggttaatttggagtggcccctggagtcagtttcctacaccatccgag

SEQ ID NO: 485326 - DNA, 74 bp, Homo sapiens
gccggaaggacaccaagatgcggatccgggcctttccggttttgacacaagggcgcatatcttcaaagcaccta

SEQ ID NO: 485327 - DNA, 90 bp, Homo sapiens
gcggacgtcggcttctccccgcgggagcccccagcatggaaatgcactcggtgatggaaagagagccactattctgaagaacacttggcc

SEQ ID NO: 485328 - DNA, 100 bp, Homo sapiens
ctcagtgaagcatttcgcctgaccattacacgcaaagatattcaaactctaaaccatctgaattggctcaatgatgaggcagaaggttatgtaattggaa

SEQ ID NO: 485329 - DNA, 90 bp, Homo sapiens
gcggttcccgagttgctgcagcagcaggaggaggaccgcagcaagattctgcttctcagaagatgcactattatagatactctaacgcca

SEQ ID NO: 485330 - DNA, 100 bp, Homo sapiens
gcaaaaccagcgtggcggccgcgctctcttccaggacatcaagacttcacagagaatgcagttgtcttgacttcaggtctgtctgttctgttggcaagta

SEQ ID NO: 485331 - DNA, 100 bp, Homo sapiens
cctcccttgcggcgcgccggcgtcggaggggcgacctgcgggggctgggcttcggcggaacccgagcggggcctaccgggtctcactctgtcgcccaggc

SEQ ID NO: 485332 - DNA, 100 bp, Homo sapiens
agaaccccagcttggagaaccaccgcatcaagagcttcaagaacaagggccgcgatgtggaagttttgatgatgatggttcagaatttcatgaacatata

SEQ ID NO: 485333 - DNA, 100 bp, Homo sapiens
gaaaccgatctgcccgttgtgtttgtgaaacagagaaagataggcggccatggtccaaccttgaagatgaagaaaacctgcttgatatcacacagtcagg

SEQ ID NO: 485334 - DNA, 100 bp, Homo sapiens
caggtggtccgcggcttctcggagctttaagactttgaccccgacgcaggcttcagtgattgccgcggatcagaagcctgagcactttggctcgagacaa

SEQ ID NO: 485335 - DNA, 100 bp, Homo sapiens
cagaaagcggcttatcgaacagagccgggagttcaagaagaacactccagagtcccctccagggcaggtgactgaggccgtgaaggtggccattgacgtc

SEQ ID NO: 485336 - DNA, 110 bp, Homo sapiens
ggaacagccagaattggacccgaaaccatgcctcactgtcctaggcaagatgaacaagagaactgggcaacccatgatccacatctacctggacaaggaaacaggaaagc

SEQ ID NO: 485337 - DNA, 100 bp, Homo sapiens
cccaaaggcccatgaggggatgcagttatgggctctgtcgccgtgggagctctttctgagatgaagagaattctcaatgtcaagatttgaacaagaagag

SEQ ID NO: 485338 - DNA, 75 bp, Homo sapiens
tcaacagagagctcaccagattactgatgagtatgaaaacccatggacaatcccgaatatgttgtcaatgacgag

SEQ ID NO: 485339 - DNA, 100 bp, Homo sapiens
acggggagctgaacgtggacagcctcatcacccggctgctggagggtggtgtttggactctagaccatgtgcctaggtagaagtttttcctttctccgca

SEQ ID NO: 485340 - DNA, 98 bp, Homo sapiens
tagggttctaagtgatgtccaggaaggaggaggaataatatttatggagcatatattatggaacacaatctccagatcacactaagtttgtgggaagc

SEQ ID NO: 485341 - DNA, 90 bp, Homo sapiens
cgtctacactgtacatgctttttattacaagactacggagcataggaggaaaattcatcatctggatgaatctggttatagatggacaag

SEQ ID NO: 485342 - DNA, 121 bp, Homo sapiens
ggaccaacaagttcatcaaagagctcattaaggacgggaagaacctcatcgctgcgacgaaaagctgcctgctgtttcccggggagatcatgaaacgaggtcgccttcccagcagcagtga

SEQ ID NO: 485343 - DNA, 50 bp, Homo sapiens
ccacctgccggttcttcatgaaagaggactaccccaatggcacctggctg

SEQ ID NO: 485344 - DNA, 100 bp, Homo sapiens
ctgcgggagcctgtgcctgctgggagatcgagatggtgatcatggagcgtagcaagctctcagagctggccgccagcacctccgtgcaggagcagaacac

SEQ ID NO: 485345 - DNA, 100 bp, Homo sapiens
cggtccccaagggcagtaggcccagcgcagaggggctgctcctggaggagctgcacgtgtttgagagcgacgagctggggctgcagaagaagctacgcac

SEQ ID NO: 485346 - DNA, 100 bp, Homo sapiens
aaaggtcatctcggagactagaggctggataccaaatagcagtggaaaccggaactctaatgaatcattgattgaccagcactattttaccagttggaat

SEQ ID NO: 485347 - DNA, 51 bp, Homo sapiens
cttgactggctccttttaactggatatgatttggagttccatggagtgatg

SEQ ID NO: 485348 - DNA, 90 bp, Homo sapiens
gtaccagttcgcgtcctgctccaaggactgcactgtgaaggtctgtgggctgcatcatgggggagctgttgaatgggtccccccttttcc

SEQ ID NO: 485349 - DNA, 100 bp, Homo sapiens
agcgagaaggcacggagtcgccgcggagcgcagcctctgaagagccaatccattcaggatgggaaaccacgcaggcaaacgagaattaaatgccgagaag

SEQ ID NO: 485350 - DNA, 116 bp, Homo sapiens
ctggtgcgaggagaactactccgtgacctggtacatcgccgagttctgtactaggttttgacaagcttgcatcatgcgtgagtataagctagtcgttcttggctcaggaggcgttg

SEQ ID NO: 485351 - DNA, 98 bp, Homo sapiens
agagacaaaggtggcagctttggagcaagtggagagccagaaaaggatccagaactggagtggaagtgcaaacttggatgaggaggcacaggctggta

SEQ ID NO: 485352 - DNA, 98 bp, Homo sapiens
cttctggatgttggttctctttgtcattttcaacagtctgcagtttgcctgagaatacagatcaacccacagaacaaagcggatttccaaggcatctc

SEQ ID NO: 485353 - DNA, 100 bp, Homo sapiens
acggcatctgccagagaatcttcggggagaaggcctaaagatccctcctggctgtgagctggtggtcggcggtgagccccagtgctgggctgaggggcac

SEQ ID NO: 485354 - DNA, 85 bp, Homo sapiens
gaaattgtcccgaatccctgcagtgaagtaagaactctgctagagaggaaatggctgcttcatcatcatcctcctcagctggtgg

SEQ ID NO: 485355 - DNA, 74 bp, Homo sapiens
caagacgctgcccgtcgccttcaagcgtggtaccatgcgacgacgctatgaagatgatggcatttcagatgatg

SEQ ID NO: 485356 - DNA, 82 bp, Homo sapiens
aaatgaacttcaactggttgatcttccaacaggcggcatttattcttcagaatctccttgtaattccaatgcctacagaaat

SEQ ID NO: 485357 - DNA, 75 bp, Homo sapiens
gcctcagccaattcctctctccttcttgaattccaggaaaacccgcctagtgccaagcaaccctccaagatgcta

SEQ ID NO: 485358 - DNA, 101 bp, Homo sapiens
gagggaggatgttaaagccccgcgtatgagcccagaggacctggtcggcccttgtaccaaagaagaatctcatctagctcagttcaaccttgttctgaaga

SEQ ID NO: 485359 - DNA, 100 bp, Homo sapiens
cgtacccgggacccgcccgcccgcgggagggaaatcctcattgacgattcaatttgttgaaggccaatttgtggactcctacgatccaaccatagaaaac

SEQ ID NO: 485360 - DNA, 100 bp, Homo sapiens
ctgccatccactgactcgtaaaggccgttgctccagggagaactgcaaatatcttcatccacccccacatttaaaaacgcagttggagataaatggacgc

SEQ ID NO: 485361 - DNA, 73 bp, Homo sapiens
ccagagctacccccgcctctccccgggaggaggaaggacgaggaacgcgttgtggtgatcagcagctcggaag

SEQ ID NO: 485362 - DNA, 100 bp, Homo sapiens
cagcccacaacctggtcctcatactattttgacctgcagctcctcgtcttcatgtttccagagcagtgtcccaagagacagcgaaaaccccagctcggag

SEQ ID NO: 485363 - DNA, 100 bp, Homo sapiens
agagaaaaatcggcagatgttacagctgctcatgaaccacttggcaaagttatatcttaagtgtggtgctgctaacattgcccaggcagcatctggttca

SEQ ID NO: 485364 - DNA, 101 bp, Homo sapiens
tcccagagtatggctaccctgccgacaccgtctggcctgccatggagcaagactgcctctgtcaccgggtccctccacccttgtctcctgtgcggccagcg

SEQ ID NO: 485365 - DNA, 90 bp, Homo sapiens
cgtctatttcatcacaaaactgtcccgggtgggaagaggaacagcctatgtgggcttccacggaggaccctgatgctcccataagacaga

SEQ ID NO: 485366 - DNA, 100 bp, Homo sapiens
tataatgtggaacctggatgaatgtagagagaaagtacttcaagagatactttctagttgggagcaataatgcagaaacgaaatatcgtgtcttgaagat

SEQ ID NO: 485367 - DNA, 75 bp, Homo sapiens
aagcgtatccgttacgtggtggacctgtacctcaacacccccgacaagatggtcgcaatggaagaagagatcgcc

SEQ ID NO: 485368 - DNA, 100 bp, Homo sapiens
tctacttcacaggaattgccatttacctcgaagtagggggaaaactgcagtggaagatgaggacagcatggatgggctggagacaacagaaacagaaacg

SEQ ID NO: 485369 - DNA, 83 bp, Homo sapiens
tgagtgctgaccgtcttggggacctggccttgttactagagaccctgaatggcagccaggccctggccaacgtcaacattggg

SEQ ID NO: 485370 - DNA, 90 bp, Homo sapiens
cgcgaagctgccaaagccttagacaagtgcaggtgatggtcctaccagtgtgtctgttgaggtcacccgtcctaaagtgacctccctgaa

SEQ ID NO: 485371 - DNA, 100 bp, Homo sapiens
tctcttctagatataatatcagaccctgatgaatccaaaggcctggaacacaatggtactcaaaaacatagctgcctcggggaaattctccagtgaccga

SEQ ID NO: 485372 - DNA, 75 bp, Homo sapiens
gttgttggattttttgctgttctcttttttttgtggagaagttttagatcggacaagactgatacactggaacac

SEQ ID NO: 485373 - DNA, 75 bp, Homo sapiens
caagggcgcccttcccctggatacggtcactttctacaagtgcaaaatggcaactcttaaggaaaaactcattgc

SEQ ID NO: 485374 - DNA, 75 bp, Homo sapiens
tttcctcatccctgcagctgtgtttgaacagaatcgtccgcaggcaagtgcctggaagaaattggagctatcaca

SEQ ID NO: 485375 - DNA, 51 bp, Homo sapiens
ccttttccctctccctttccctaagcagggaggagagagcgatggcttttt

SEQ ID NO: 485376 - DNA, 100 bp, Homo sapiens
tattcagctcaggaccaggcaccttctgtggaaggcgtagcgtgcctcctgtgattgttgaagagctgtggtgtgctgctgagtggcgtgtgtattccat

SEQ ID NO: 485377 - DNA, 100 bp, Homo sapiens
agtcaacctcttccccaatttcaatgcggaattcattgaagagttgctgtctcccccttttgggggtttagtggcatttgtgaaggaggctgaggctttg

SEQ ID NO: 485378 - DNA, 50 bp, Homo sapiens
cccagtatcttggtgttgctgaagagagaggaaaatatgatgttcccaag

SEQ ID NO: 485379 - DNA, 118 bp, Homo sapiens
tggaccttcgagcctagctgctcgcacaggactcggccacctgcccttcctgcaccgactggccagtccttcagcctcaagtccaaagcctggtgacatcctcccaggtacagccggt

SEQ ID NO: 485380 - DNA, 91 bp, Homo sapiens
aaaacaactactctctgagcagctgttcgaatcatctgatatttatactgaatgagttactctcatcatgtcactacagtgaacagtacaa

SEQ ID NO: 485381 - DNA, 90 bp, Homo sapiens
caagtgattcattccaaggacaggcagcccagtctggtgtttggaatgacgacagtatggtgccagatgcaattaaaaagtgtcagaggg

SEQ ID NO: 485382 - DNA, 90 bp, Homo sapiens
tgagcggagcagctgcgccacgggtatgttagagcccaccaaggaaccactgaaaccactttctgctgcagaaaaaatagcttccatcgg

SEQ ID NO: 485383 - DNA, 120 bp, Homo sapiens
ggagaaacctcgtggcctggtctccattatttgagatgagttacatcttggagtgttgcctcagcttctcaaagtttctggtgtttatgaagatccataacagctggctgcaaacccaac

SEQ ID NO: 485384 - DNA, 82 bp, Homo sapiens
ccgtccgccgccaccacccactccggacacagaacaccttccaccatgaccacctcagcaagttcccacttaaataaaggca

SEQ ID NO: 485385 - DNA, 90 bp, Homo sapiens
ctcagatgttgttgatgaagtaatacagaactgccccatcgatgtgcggcgtccgctgtataaggcccacccttcctccattctgagcac

SEQ ID NO: 485386 - DNA, 90 bp, Homo sapiens
cagttttaccactacttcgaggacaaagaaaacatttacattctcttggaatactgcagtagaagggcctggttgcagcatgcttgaaat

SEQ ID NO: 485387 - DNA, 74 bp, Homo sapiens
tcttccctggcaagattcttctgaattgtgctgccttggccaaaagagatttcagaagaaagtggtagcttcct

SEQ ID NO: 485388 - DNA, 74 bp, Homo sapiens
aatggcatgctggtgacggacagtgcagggaagcaactgcagaggatttgttaaggattccaagtaactcttat

SEQ ID NO: 485389 - DNA, 76 bp, Homo sapiens
gggaggcagcgcgggatcccagcctcaggcgtgcgcggacggtgtgcggataagctgtcattggaaggaatagtgg

SEQ ID NO: 485390 - DNA, 88 bp, Homo sapiens
gaatggtcagaaaccctccataacctgaagctagtatgttcaacacaccaggaatgcagagcttgttgcaacaaataactgaaaaccc

SEQ ID NO: 485391 - DNA, 90 bp, Homo sapiens
tcttacttgaagcatgtctttcagagcccggcaccacccatcttgagtatctgatcagacctattgtgaccgcctggtgcaggacacgcc

SEQ ID NO: 485392 - DNA, 83 bp, Homo sapiens
aagctaatattgtctccatatggcttgaagtagaaaatgccatgatgagaaaaactattaaaaaacaggatgaccaaattgag

SEQ ID NO: 485393 - DNA, 100 bp, Homo sapiens
cacgaagagtccgagtcatttctcagaaggttttgataggtgggccttagaggagacgccgccgtgggtgcctgatagacatcctaggactatacagaag

SEQ ID NO: 485394 - DNA, 50 bp, Homo sapiens
gtgatgacagaatcagcttttgttgcaaaagcttctcatttcagagagat

SEQ ID NO: 485395 - DNA, 100 bp, Homo sapiens
gcgagcgcctcgtaccacatttccaatttgctggaaaaaatgacatccagcgacaaggactttaggttacaggaggttccagtggcatcgggaagtgcat

SEQ ID NO: 485396 - DNA, 80 bp, Homo sapiens
ccaggcggcggccgccgccttcctgcagcagaggaactcctataaccaccaccaggtacatgtcccagagcaagcacacg

SEQ ID NO: 485397 - DNA, 98 bp, Homo sapiens
ctctcgtcggcagtgaagctcaagttgctactcgggacgctgcacctcccgcgccgcacggtggacgagctgattgctgaggaaggggtggacagcct

SEQ ID NO: 485398 - DNA, 74 bp, Homo sapiens
cgcctttcggctctggcctgaagcagtactcccgcctcctggagcggcggtttgctgtgtttcaaagaagggtg

SEQ ID NO: 485399 - DNA, 80 bp, Homo sapiens
cacccaggcgactgcctcatcttcaaggagaactacgatgacccgcacaaaacccctgcctccccagttgtccacatcag

SEQ ID NO: 485400 - DNA, 100 bp, Homo sapiens
attcctgcctttgagcggactcccttttaaggctgttgtctgccattctcagagtttcagaagttgaatctcgagcaataagagcagatctcactcatct

SEQ ID NO: 485401 - DNA, 82 bp, Homo sapiens
gagaagtcgaaggggtgctggcgagacgggggtgatgcccacccgggcgagaaagccgcttacaaacacgcagatggcaaga

SEQ ID NO: 485402 - DNA, 100 bp, Homo sapiens
ttgatgctgaacttcaccgttaaggtatatgccctcattttgcttaagacctctggccagagcagggcatggaagattccttttaaaaagtaatactgag

SEQ ID NO: 485403 - DNA, 83 bp, Homo sapiens
ctaaggaaaccctattacctccagggtttccaggcctgaggtgcccgccctggccccaggagaatgaaccagccgcagaggat

SEQ ID NO: 485404 - DNA, 96 bp, Homo sapiens
ctggaataaaaacagagtccgatgaaaggaatgggtctgggaccttaacagggagccatggagacaaaccgcacaagtgtgagttctgtgacaagt

SEQ ID NO: 485405 - DNA, 100 bp, Homo sapiens
acggacactttcgcaacatcaagggagttttccggggccctctcagcaagaacgggaacaaaactctggttggaaaaagactatgttagcaagtgtcacg

SEQ ID NO: 485406 - DNA, 50 bp, Homo sapiens
gcggagcggacgcgcgtggcgctgcccgccacagcctggcagctctgatc

SEQ ID NO: 485407 - DNA, 82 bp, Homo sapiens
ctgggacaagttgcatgaagagcatatcaatgcaggacgtacagttcaggtttaactatagatcaacacatcatcttgcatc

SEQ ID NO: 485408 - DNA, 75 bp, Homo sapiens
gtggctgtgcttgccaggcctggctccagtcccagagaactacttctatgtgccagacctgggccaggtgcctga

SEQ ID NO: 485409 - DNA, 100 bp, Homo sapiens
caaaaactaccattcgcctgatgaactctcagcaacccaaggagatctgtgcgctggttgggttctgtgatgaggtgaaagagatgcccatgcagactct

SEQ ID NO: 485410 - DNA, 90 bp, Homo sapiens
ctggaacagaacctgagtcggactttcaaaagcctcttcagagcaagcgatgagcttggatttacactgggcaacgtggttggaatgtat

SEQ ID NO: 485411 - DNA, 75 bp, Homo sapiens
acctccaaggaagccacgtgcagacatctacaaccttcgatctcctgacgaatggagtctcattctgtcgctcaa

SEQ ID NO: 485412 - DNA, 95 bp, Homo sapiens
tcctttcttggcaactggaggtcaaggcgaatatttaacttatatctgcctgtcagatcagattgatgaaaatctcaaactggctttgcaacagg

SEQ ID NO: 485413 - DNA, 75 bp, Homo sapiens
tgattcgtagctaagacttcgcgacacccttgaagctgagaaatgattcacatattcttcccttctcgactcctg

SEQ ID NO: 485414 - DNA, 89 bp, Homo sapiens
gcccccgaactctgcaaagcctccagaggacataccacctccaggatcaggatgcagaggttgcatctggaggtggtggggttggagat

SEQ ID NO: 485415 - DNA, 101 bp, Homo sapiens
actcagatatcagacctctctaaaaggaagcctaagacagaagattttcttacctttctctgccttcgaggtgactgcttagaaaactgcacagcatctga

SEQ ID NO: 485416 - DNA, 82 bp, Homo sapiens
cggtccctgtattggtctcctgctcctagagatggactcaccctgtcacccaggttggactgcactggcctcaacctcctga

SEQ ID NO: 485417 - DNA, 85 bp, Homo sapiens
cgctatggctggcagtcaggacatattcgatgccatcgtgatggcggatgagagggagtaccctgacttctaccggaagctctac

SEQ ID NO: 485418 - DNA, 129 bp, Homo sapiens
tcaagcaggttttaaatcaagatttaacattccaacacataaaaattatttatccaacagctcctcccagatcactgtgtccactactatgatcttcgtaacactaaacagccaatcatggtattcaaa

SEQ ID NO: 485419 - DNA, 75 bp, Homo sapiens
gatttcttctgacttgagcctgcagtgtgctgtgagagatctaccactaggctgttaccttctcctctcaaggat

SEQ ID NO: 485420 - DNA, 90 bp, Homo sapiens
ttcagaggatgacagttgcaagctccttcctcagagaagcttcctgttatgtaccttatggattctattgtgaaaaacgttggaagagag

SEQ ID NO: 485421 - DNA, 75 bp, Homo sapiens
aaagaaatcattgaacacggcatcgagctgtgaatggaagagaatccgaagaagaaaatctcaataaatctgaaa

SEQ ID NO: 485422 - DNA, 50 bp, Homo sapiens
gccagcgcagccgccagcgccggattttggggtaagtgcgttcctagcaa

SEQ ID NO: 485423 - DNA, 49 bp, Homo sapiens
gttggaataccggctctcagcggctgtggtcctggctctgccatatgac

SEQ ID NO: 485424 - DNA, 115 bp, Homo sapiens
atgccagtcgtggtactttaagcagctatagtcttgtattgatggttttgcactatttacaaaccatgctgtgacctacaagcaaactaaatagccaacatttctgaacccctaa

SEQ ID NO: 485425 - DNA, 112 bp, Homo sapiens
caccatcctgcgtgacctcacccggctgcagccccacagtacaggtttgcagattccgccagcagcacagcaagctctacagatgagtggctctttggcatttggtgctgtg

SEQ ID NO: 485426 - DNA, 96 bp, Homo sapiens
aaaaaggaaaaagaaaaaggaagttccagtcttctctaaagctgaaacaagattcatgatgttgctatcaaaagttgagaaattgtcagaagaaat

SEQ ID NO: 485427 - DNA, 90 bp, Homo sapiens
aaatgtcttaatcattggcaaaaatcccttttctgacagagatttgggattagaatctaccttaatatcgtcaaaacctcagtctcattc

SEQ ID NO: 485428 - DNA, 78 bp, Homo sapiens
ccgttgttgcctaatccgtatattatggctccagggctgttacatgcctacccgtacataccgagcatcaaatattaa

SEQ ID NO: 485429 - DNA, 115 bp, Homo sapiens
tcaaactagtgctccgcgctggcagtctggaaaaggcagatgtatttccctgtattgaacactgatatacaaggaatgaatagaagtcaagaaaaacagacctggtgggaaaaag

SEQ ID NO: 485430 - DNA, 97 bp, Homo sapiens
tgtctcgctccgtggccttagctgtgctcgcgctactctctctttctggcctggaggctatccagctacgagctcaactggaggcagtcctgtgcgg

SEQ ID NO: 485431 - DNA, 100 bp, Homo sapiens
gggctatgtgcacccagatgagttcttccagtcccctgaggtgatggcagcctcgaagcggaggatccctgtgtcccagccgggcatggccgacccccac

SEQ ID NO: 485432 - DNA, 80 bp, Homo sapiens
agcagcagttgagcgagcccgaggacatggagatggaagggaaaagcttcactctgaccatcactgtcttcacaaaccca

SEQ ID NO: 485433 - DNA, 90 bp, Homo sapiens
cttcgcttcacggcgccgagccgcggtccgactctccagtgaaatggatctccgctgtgctgagatgaaacagaactttgaaaacaagaa

SEQ ID NO: 485434 - DNA, 100 bp, Homo sapiens
ggcagctgtgactgaggcagtgcgggccctgctgctcgccctcccctacctgcggaagagtcaagggaatgtcatcaacatctccagcctggtgggggca

SEQ ID NO: 485435 - DNA, 100 bp, Homo sapiens
cctgaatcgagctgagagggcttccccggttctcctgggaaccccatcggccccctgccagcacacacctgagcagggccaattcctgtccccccagcag

SEQ ID NO: 485436 - DNA, 51 bp, Homo sapiens
agcaacagaatgcagagtctcaaggcaaagatcaaggaatcaacatttacc

SEQ ID NO: 485437 - DNA, 90 bp, Homo sapiens
gcacgctcctcgcgcaaggagggtagagctcaagggagagacaaaggcagcgctgccctcgggggagtattggccctggcggaacgcagc

SEQ ID NO: 485438 - DNA, 75 bp, Homo sapiens
ctgcttaccatttaatcattgagctctatgataggactcaaaagcctcgaaagtttgactgtgaacttccagata

SEQ ID NO: 485439 - DNA, 80 bp, Homo sapiens
ccaaggaacatcttgccaatttcaaatcggatattgatgatgttaagaagttcaaaccgggttacctggaagctactctt

SEQ ID NO: 485440 - DNA, 110 bp, Homo sapiens
ggccgcgctgctgctgctgccgctgctcgccgccgtggaaggtcaagagacaactgcctttgaaagagagtgagtgactgtttccaaaacagcaagcatagggagagccg

SEQ ID NO: 485441 - DNA, 75 bp, Homo sapiens
ataagctatatactttggttacctatgtacctgttaccactttcaaaagaacaggaaatatagtggtcattatga

SEQ ID NO: 485442 - DNA, 100 bp, Homo sapiens
agaaggtgtatgagatccaggacatctatgagaacaggttggcaaaagcagcttttgatgatgcaattgcagaactggatacgctgagtgaagaaagcta

SEQ ID NO: 485443 - DNA, 100 bp, Homo sapiens
ccaagactcctgtgaaattctggttcttgaagaattacttgtcccccacatttaagcttcagacagcaaagtcctgacatgtgcagccgtgtggaggatg

SEQ ID NO: 485444 - DNA, 75 bp, Homo sapiens
cccaggccccgccgaggcggccagcaaaatgatgcttcaacacccaggccaggtctctgcctcggaagtgagtgc

SEQ ID NO: 485445 - DNA, 75 bp, Homo sapiens
tccgcttcttgaatttctctctgtaaaggagcggacaaggcaaaatctcagcaagttcggacctctagtacaata

SEQ ID NO: 485446 - DNA, 100 bp, Homo sapiens
ctcagcgaggtctccacccgctcgcgctccaagctccctgcggggaagaacgtgctactgctggggaggtggggaagacagggctccagctaccacagga

SEQ ID NO: 485447 - DNA, 82 bp, Homo sapiens
agtggcccccaaggcccagaagaaggttccagtccccgaagggcggagttcgccatgttcagcgggacccacgtggagcggg

SEQ ID NO: 485448 - DNA, 90 bp, Homo sapiens
aaaccgcctggcagagagaatgggaggcaagatgacttctctgccccaagcttggaacagctaaagggaaaaacagtgcaagatgagaac

SEQ ID NO: 485449 - DNA, 100 bp, Homo sapiens
accactgtgaaggatggcatcttggtccgcatcgacagtgctccaggacttggtgacttcctccagcttcacataaccactaaggcttttcttcctacga

SEQ ID NO: 485450 - DNA, 119 bp, Homo sapiens
gcggccgtgtctctgcccacgtcgagcgtgcccgagacccgagcaccttgcagagtgaagtcaagcccatcctagagaagctgacccaggaccaggatgtggacgtcaaatactttgcc

SEQ ID NO: 485451 - DNA, 99 bp, Homo sapiens
agaggcccctcttctcctccaacccagaactggacaatctggctccaggaggccagagctctactgaagcggcggcggccccgggggccagggggccgg

SEQ ID NO: 485452 - DNA, 100 bp, Homo sapiens
cccagtccattgctgcctgctacaaggctgagtcatcactagagagtgggaagggcagcagcagcagagaatccaaaccctaaagctgatatcacaaagt

SEQ ID NO: 485453 - DNA, 87 bp, Homo sapiens
agaaatgccttgcagtggggatgtctcataatggagatgttgcagtaaagatcctaaaggttgtcgacccaaccccagagcaattcc

SEQ ID NO: 485454 - DNA, 75 bp, Homo sapiens
cgcgaggggaacggaggccagagctgcgtatcttcagctcaagaagaagttagaagatgagttccccggccgcct

SEQ ID NO: 485455 - DNA, 82 bp, Homo sapiens
cgcgctggccggagcagtgaaccagcacggggggtgtctcccagtctgctaaagccctaaggccatcaccatggacttccag

SEQ ID NO: 485456 - DNA, 100 bp, Homo sapiens
ttgcagtaccaacctatgcagccaagcaacctcagcagttcccatcaagaaatctgacccggtcgtctcgtaccgcgagacggtcagtgaagagtcgaac

SEQ ID NO: 485457 - DNA, 103 bp, Homo sapiens
gatatgtagcgaggaggaacgcgctaaggcaaagcacctgggtgctgataagactgtgaaaggcccagatggactgaccgcctttgaagccactgacaaccag

SEQ ID NO: 485458 - DNA, 100 bp, Homo sapiens
cttctgccactgctgctccgtggagatcgtcccgcgcctgccggttgaagaagcctcagcggaggcgatacggcctcctcgccaacactgaggaccccac

SEQ ID NO: 485459 - DNA, 82 bp, Homo sapiens
ccattggatttaaaagacagtcctcgtcagcactgactttcagctatggaatcgaggactaccccaatggcacctggctggg

SEQ ID NO: 485460 - DNA, 75 bp, Homo sapiens
attgaccaactggcatcccacagcctcctcttccagaatgcctttgcgcagggaaagaatcatgtgatgtacagc

SEQ ID NO: 485461 - DNA, 89 bp, Homo sapiens
tcaggaacgtgtcccggggccgacccggcccgtagtgtggaagcagcttcagaatcttgacaaaacttttggaagtgtcagatgatccc

SEQ ID NO: 485462 - DNA, 101 bp, Homo sapiens
ccaccatcaacaatgagtacaactaccgctgctggaccacaaaccgctgccagaaaaagtggatcatgacccatgaagagcaccatgcagccaaaaccctg

SEQ ID NO: 485463 - DNA, 74 bp, Homo sapiens
ttgctttgaacatctcatacgactgctacagaactgcaaggtgacacaatttcttgcaacgtaacctaccctgg

SEQ ID NO: 485464 - DNA, 95 bp, Homo sapiens
cctgtaacgtcccactggtttggacatattcctctcctgatctggcctcatctgttccagggaggtgggattgaatttgaagaacccaagtgatt

SEQ ID NO: 485465 - DNA, 82 bp, Homo sapiens
atgatagttcagatgacagtgattttaaagttggagatgcctcagggatatcccagagaaggaaggaaataccctttgccac

SEQ ID NO: 485466 - DNA, 75 bp, Homo sapiens
aagatgtcggagcgaaaagtattaaacgattacaagaagttctgggcaggcctgcagggtctcaccatttatttc

SEQ ID NO: 485467 - DNA, 74 bp, Homo sapiens
cgtgctactgtgcgctcgatccagcaccatggggaagcgggacaatcgggtgagccacccagagttccctcact

SEQ ID NO: 485468 - DNA, 82 bp, Homo sapiens
ccgacgaaagccagcgagctcctcagcctcaggtgtttcccattaaacactaccaggacaaaatcaggccttacatccagct

SEQ ID NO: 485469 - DNA, 100 bp, Homo sapiens
gtggaggttgctagacctgggatccagcccttctggtgtcacctcccagggtgactcaactccagaatggatgatgaacttgttgttggacatagtgcaa

SEQ ID NO: 485470 - DNA, 75 bp, Homo sapiens
agatcgagaaaatctggcttcggctccgcgggctctcaaggatctaaatttacttgatcgctgtataaaagaaac

SEQ ID NO: 485471 - DNA, 90 bp, Homo sapiens
caagaaaatcacagcctttgtacccaatgacggttgcttgaactttattgagatacactgcctctaggactgggacagatagccactgag

SEQ ID NO: 485472 - DNA, 75 bp, Homo sapiens
ccactgttcggttaaaggagcctcctgtggatatctgtctaagtaagttagtgtgactctggatccagatacagc

SEQ ID NO: 485473 - DNA, 100 bp, Homo sapiens
acagatgagaaacccggcaatgaaagcacgacctggatgatcgagatcatctgcttaatcctgaaggaaggggatccatcctggatccgctccgtgccca

SEQ ID NO: 485474 - DNA, 96 bp, Homo sapiens
tcctgatggagctgtaaagccacccacaaacaaactacccattttcttttttggaactcatgagacgttctttatagagttggaagcaagacatca

SEQ ID NO: 485475 - DNA, 100 bp, Homo sapiens
ctggcctccgctgcatacaaatcaggcaaccagaattctacatatataaggcgtgcaatggaattgagttttgccctggtaaatgggaataatatccgag

SEQ ID NO: 485476 - DNA, 100 bp, Homo sapiens
agaagaggatctgggtaaaagtagagaaggatcaaggacggatgatgaagtagtacagaggaagaagaatttggacttgatgaagaagatgaagatgagg

SEQ ID NO: 485477 - DNA, 50 bp, Homo sapiens
gtcctcgtttgtaccgtccctcttcaggtgaatgaaaactttgccattga

SEQ ID NO: 485478 - DNA, 88 bp, Homo sapiens
gctgcatagtttcggtcatctaaaggaggttttaaacagtataacaggtactccaaagattcaggtttactcacgtcatccagcagag

SEQ ID NO: 485479 - DNA, 75 bp, Homo sapiens
gtcaactcaaatgcaagtccaagaggaggaggaggcggaggtccaagcggaaagctcctgcccctcctaaagctg

SEQ ID NO: 485480 - DNA, 100 bp, Homo sapiens
ccaggctcaagcagtcctaccatgtcagccttcccagtagctgggaccacagtgctactatatcggggccacagatgatgcagccaccaaaatcatcaat

SEQ ID NO: 485481 - DNA, 75 bp, Homo sapiens
aagcagtctaaacctgtgaccacccctgaagaaattgcacaggaacacgatgaacctattctgaagcacttgaaa

SEQ ID NO: 485482 - DNA, 100 bp, Homo sapiens
cttccaagcaataatgaatcgtatttccagctatccgtggtcctgaaccagttatgtgtgttgcatgagaaaacgccagtaagtgacagagtcaccaaat

SEQ ID NO: 485483 - DNA, 98 bp, Homo sapiens
ggagctgaccccggaggaggagcagaagacgtaaagcaggctaccagcaattttgagaacttgcaaaaacagcttgcaaggaaaatgaagcttcctat

SEQ ID NO: 485484 - DNA, 90 bp, Homo sapiens
tgacatctgatgctgtggaacttgcaaatcgaagatacacagtaaaggttcagcgagagctggagttggatgaattagccctgcgtgcac

SEQ ID NO: 485485 - DNA, 74 bp, Homo sapiens
caccagtccccaatgtagaagaggtgacacttcccaaaacaggcaagtatatcgcgtcaacacagcgacctgac

SEQ ID NO: 485486 - DNA, 100 bp, Homo sapiens
cggaaatgtccggcaagatcgagaaagcaggaaaaccagtagattcccagacatcgcgaagtgaatctgaaattgtgccaaaagttgctaaaatgactgt

SEQ ID NO: 485487 - DNA, 100 bp, Homo sapiens
agggaattgtcctctgtggaagggactttcttttggccctaggccccttcctgcccctgtcgtcagcaggagaactatcctatccctgaaccaggcccaa

SEQ ID NO: 485488 - DNA, 83 bp, Homo sapiens
cgtgatggtgccgtcgctcatcaagcagcaggtccttaaggtgtgaacccacatccctgcccccagggccacctgcaggacgc

SEQ ID NO: 485489 - DNA, 50 bp, Homo sapiens
gatcgtcaggctctaaacaaaattctgatgatttgtcattaattcggaag

SEQ ID NO: 485490 - DNA, 50 bp, Homo sapiens
tcccgaagtgctgggattacagggtgaagcaagaagcatttcatttgcac

SEQ ID NO: 485491 - DNA, 100 bp, Homo sapiens
caagctagactttcagcctgacactgtggccaacattcagcagcgtcagaaggtggctttaaccaagagagcagatccagctgagcttagaacaatattt

SEQ ID NO: 485492 - DNA, 75 bp, Homo sapiens
agaactacagaaacctggtctccctagataaggagggttcctgcccccaggtgaacattaactttccccagctcg

SEQ ID NO: 485493 - DNA, 51 bp, Homo sapiens
ggcggagtcggggctcctgacggtccctccttgtggtccatttctgggcac

SEQ ID NO: 485494 - DNA, 82 bp, Homo sapiens
cgcgggtgtgacgttgaagatgtcggccttctgagccgactgcggtggtcaagaggtcagcccaaggccaaccccactgtca

SEQ ID NO: 485495 - DNA, 83 bp, Homo sapiens
gccgccaccacccactccggacacaggccgccatggcatcagatgaaggcaaactttttgttggagggctgagttttgacacc

SEQ ID NO: 485496 - DNA, 82 bp, Homo sapiens
ggatctttccggatcaatccagatggcagccagtcagtggtggagctgcttttctaacccaaactgtatgtcttgatgacac

SEQ ID NO: 485497 - DNA, 100 bp, Homo sapiens
gacagagtcaccatttgatttggaacagcagtggcaagatctcatgtccatcatggaaatgcaggtggtgctggacaacacagccctgaaccggattgcc

SEQ ID NO: 485498 - DNA, 83 bp, Homo sapiens
gaacacagttggagaaaatcggcagctgagacggccttggccggcaacggacagccaagacgtagatccatccaagacttgac

SEQ ID NO: 485499 - DNA, 100 bp, Homo sapiens
agatacctacacagaggcttttgtagattcgggaggtgataagacttacagtttcctaacagcagtgcagggtcccctcctaaccgcaagcgtcctgcta

SEQ ID NO: 485500 - DNA, 100 bp, Homo sapiens
atcagtatgttgtgcaagaggtactgtccatcaaacatcttccaccacagcttagaggttatgatgtgattgctcaagcccaatctgggactgggaaaac

SEQ ID NO: 485501 - DNA, 97 bp, Homo sapiens
ccaggatctgtctatgtgctgtattgtgtggccactgggactttgcagacatgatggtgataaggagcctgagtctccacaaaccggaggactaccc

SEQ ID NO: 485502 - DNA, 119 bp, Homo sapiens
aagaaacagaaagaacacgaaacctttaccggcggttgcttcaacggacgcagcatgtcaagacactcctatcttaaagccagtatctcttttgcgaaaacgtgatgtgaagaattctc

SEQ ID NO: 485503 - DNA, 80 bp, Homo sapiens
tggatggatggatggatggatggtggcaactatggcggtggtcctggttatagtagtagagggggctatggtggtggtgg

SEQ ID NO: 485504 - DNA, 100 bp, Homo sapiens
gccgccgttgcctccgccgccaagagtgagcgagcggacccgcgatgggggatgttggaaattactattatggacaaggccacccaatgaagcctcaccg

SEQ ID NO: 485505 - DNA, 85 bp, Homo sapiens
aggctcgggaactcatcagccgcatcaaacagagtgaactttctgccaagatgcggtcgccctggagactcttctgctccgaggg

SEQ ID NO: 485506 - DNA, 75 bp, Homo sapiens
atgacacccaggaggcatttgaagttccagtggagccgccaccaaaatgcagattttcgtgaaaacccttacggg

SEQ ID NO: 485507 - DNA, 100 bp, Homo sapiens
tatccctcctggtcagtacatggattcttcacttgttaagatctgggacatgagcgatgatgagaccatctgagatggccccgctgtggggctgacttct

SEQ ID NO: 485508 - DNA, 50 bp, Homo sapiens
gggaaaatctccccggtgactttcagttacagaatgtctgaaggggacag

SEQ ID NO: 485509 - DNA, 75 bp, Homo sapiens
gaagcaagcagttcagaagagccaaggaataaacatgcaatgaacccaaaaggtttaattagacacttcagaatt

SEQ ID NO: 485510 - DNA, 83 bp, Homo sapiens
tggattgaagccgcctctgtattacttaccaggcaaaacaacgagtggatgagaaacccagcctgggagccgtgaagctgcag

SEQ ID NO: 485511 - DNA, 128 bp, Homo sapiens
ggagctgatgctgcccgagaaattgaggccgttgtacaaccatccagcagaagacctatttggagactgcttcctgtcaccataaaatcctgaacatttgtcttgaacatgaacactccaaaagaaga

SEQ ID NO: 485512 - DNA, 75 bp, Homo sapiens
ctcccgcccacgtcccatttcgcccctcgcgtccggagtccccgtggccagatttggagcaagaggtggtggtgg

SEQ ID NO: 485513 - DNA, 75 bp, Homo sapiens
tttctctcgatgaggataacatccctccagaagatgatcactttgggaagcagtgacatccaacctgtatcaagt

SEQ ID NO: 485514 - DNA, 73 bp, Homo sapiens
tcctctcctgggcggcggggatgggaggaagccagttgagggaagttctccatgaatgtacgtcacaatgatg

SEQ ID NO: 485515 - DNA, 74 bp, Homo sapiens
gctggctgtcctgaaatattataaggtggttgtgtcaaaccgattggtgacatctccatgctgtattgtcacaa

SEQ ID NO: 485516 - DNA, 92 bp, Homo sapiens
tcacgactgatgagagggaaggcatcggtttctaagttctcaaaacttacagactgattcttgctattccaaatcctcttccacgttgacag

SEQ ID NO: 485517 - DNA, 82 bp, Homo sapiens
gtcctcgtccccagcggtcccgcccaacgcccgactctatgcctttgaagatgagaaacccccaaagaagagccttctctcc

SEQ ID NO: 485518 - DNA, 90 bp, Homo sapiens
aaggccgcggggaaggggcccttggttgcagcaatatcagtactacagtgcaggcctgctctccacatatgaccctttctatgagcaaca

SEQ ID NO: 485519 - DNA, 75 bp, Homo sapiens
ggaagtgtgaaagcattgatggaatgtgctttagaagttaaaaaggtgaagaagaccttaaacagaatataccac

SEQ ID NO: 485520 - DNA, 80 bp, Homo sapiens
ggagcaccagccagacaacatcaaggctctcttccgcaagggcaaggtcccagcatttgagggtgatgatggattctgtg

SEQ ID NO: 485521 - DNA, 103 bp, Homo sapiens
agcctcagttggaagcagccgatccagcctgcggagcctgtggggcagagcttactcacatagcatattggtatatcaaaatgaaatgcaaggaaccaaaaat

SEQ ID NO: 485522 - DNA, 101 bp, Homo sapiens
ttactgctatagctctcatcggtgtctgtgttttcatcttggcaataattggcattttacattggcaggaaaagtgcaaagaaaggaggtacaggcccgag

SEQ ID NO: 485523 - DNA, 75 bp, Homo sapiens
aaatcaacgacaacttgagcacaggtttgcctgcaatgagatttcattctctacatttaaaggacatcctttctg

SEQ ID NO: 485524 - DNA, 100 bp, Homo sapiens
cagtactagtttggataagtttagcaaggtgaacctgagcaaggtgggcgagtattggtggaacgccatcctggagggagaagagcccatcgacattgac

SEQ ID NO: 485525 - DNA, 100 bp, Homo sapiens
ggtgagcccgcccgcccgccggcccagtttcaccagtgatcattaaagaatgggcagcttacaaaggaaagtctcctcaaaccccggaactggttgaagc

SEQ ID NO: 485526 - DNA, 88 bp, Homo sapiens
tccaagtcaaacgcagaaggactgcctcactgagcaaccaagacagtaccatcccactgatatcacgggcccgctcaacctctcagat

SEQ ID NO: 485527 - DNA, 76 bp, Homo sapiens
ggactcctcttctacatcaacttggctgaccattggaaaggaggagatgttaaagtaacccatcttgcaggacgac

SEQ ID NO: 485528 - DNA, 73 bp, Homo sapiens
accatcttcctcttgctgccagtggtagcgctcgtctggcggagctgggcctatggcatgtctgcgttacctt

SEQ ID NO: 485529 - DNA, 82 bp, Homo sapiens
tatttcaacttcacctcggcaacaattacttacctggcccaggaggatgggcccgttgtggaattaagtagactggctggac

SEQ ID NO: 485530 - DNA, 75 bp, Homo sapiens
ggctacagatactgaaattttgattgattataccggaacagagccttccagtccctgtaataaatgtttatctcc

SEQ ID NO: 485531 - DNA, 90 bp, Homo sapiens
cgacttcctcacccgcgcctgcgacctcgcccgtggaccgggagcccgtggaccgggagccggtggtgtgccaccccgacctggaggagc

SEQ ID NO: 485532 - DNA, 75 bp, Homo sapiens
ccactttagaaactcaattaaaaaggggccaggggtcaagctttctgcaggctctgctgccctgaggtgccatgc

SEQ ID NO: 485533 - DNA, 74 bp, Homo sapiens
cagaagaagctggaggccggcaaagccaaggtgaagtacatgatgacctggatcagaagacagaaataactcag

SEQ ID NO: 485534 - DNA, 75 bp, Homo sapiens
cagagacatcccgatctggggaagaaaccatcaagatctcattttacagctgggattctctggttcacagaggta

SEQ ID NO: 485535 - DNA, 90 bp, Homo sapiens
cgcttcgaaagcatcatccacgagttcgacccgtggtgcagaccatgaattacgtggggcagttagccggccaggtgtttgtcaccgtga

SEQ ID NO: 485536 - DNA, 83 bp, Homo sapiens
ccggctacttctcggcgctgccgtctctggaggagtactggcaacagactgcaaatggaaatgtggaggcaaaggttgtctgt

SEQ ID NO: 485537 - DNA, 100 bp, Homo sapiens
gcgggactcacggcagaagtgagctggaaggtcttggagcgaagagctcggaccaagcgctcagggcaattgaaggaacagactaaaaatcgtgtcctgg

SEQ ID NO: 485538 - DNA, 90 bp, Homo sapiens
gcacaaggaaaggctgcaagccatagcaatcagcttgaacgggtctttttacgacttggccatgctgaaacagatgaacaattacagaat

SEQ ID NO: 485539 - DNA, 83 bp, Homo sapiens
ctgacaccagaagagagcaaggaaaggcttggcaaatggttatgagccttagagtttctgaactccaagtactgttgggctac

SEQ ID NO: 485540 - DNA, 100 bp, Homo sapiens
tgccttgctgatctgagctcagacctgccaatttaccagagataattgataacaccctgtaacagctgagacacaactcagatgggaagttcatcgcccg

SEQ ID NO: 485541 - DNA, 100 bp, Homo sapiens
aaaaaatgcagaatggcttttcccgaactttgaagtcgggggatggtattacttttggagtgtttggaagtaaattcagtaattcgccaaaatgacgaac

SEQ ID NO: 485542 - DNA, 100 bp, Homo sapiens
ctgcggcctcagctccgactgggtcaggttgcggagactccaggccgcttccagggcgagacctgtcggccatggagcctaatgatagtaccagtaccgc

SEQ ID NO: 485543 - DNA, 129 bp, Homo sapiens
ccgctgccgctatggatgatcgagaggatctggtgtaccaggcgaagctggccgagcaggctgagcgatacgacggttcgaccttgaaactacaagagtgaatctgaaagttagttcaaaaagtcaaac

SEQ ID NO: 485544 - DNA, 75 bp, Homo sapiens
caaggacacggtctacaccgacttcgacgaaaggacccaggagcgataacagtaaatcaaataagatatttgtcg

SEQ ID NO: 485545 - DNA, 75 bp, Homo sapiens
cggcgctggagtactgcaagctcatcctgaggtgctgcagggtgcacagctgatcgccgtggcctcctcggaccc

SEQ ID NO: 485546 - DNA, 75 bp, Homo sapiens
gtcaatatcccacttaaatcattccagattgtcctgggtcacataatgccagctgagcgtaaaaagccagcaagt

SEQ ID NO: 485547 - DNA, 75 bp, Homo sapiens
tgccgagagggctacaagcgtctacttggttcaaaaggatagctagcggccaggagaaatacagtggaaaatgca

SEQ ID NO: 485548 - DNA, 100 bp, Homo sapiens
aaaagactcccctactccggaaacattccaaatgctcagccccccaaagttgcagcaatatcagtactacagtgcaggcctgctctccacatatgaccct

SEQ ID NO: 485549 - DNA, 51 bp, Homo sapiens
ctttctggacacagaagtatttgtgacaggagcagtatagcatcaagttct

SEQ ID NO: 485550 - DNA, 90 bp, Homo sapiens
ctccagatcggatcacggtgagggaaagatgagcgaggagacggcgacttctgacaacgagaggctgaagtgggaggatcgcttgagtct

SEQ ID NO: 485551 - DNA, 51 bp, Homo sapiens
cggaatgtcatccagcgagtgattaggttctctacttaaaagacaatgact

SEQ ID NO: 485552 - DNA, 75 bp, Homo sapiens
tagtgatcctttgcaccctgcttggagacggacttgcttccggcaaataagggcgagactgaaaaatcaagtcac

SEQ ID NO: 485553 - DNA, 83 bp, Homo sapiens
gcgagggaggacagggggttcatcatggtgcagagcagagcgggcggaggaccccgggcgcgggcgcggacggcacgcggggc

SEQ ID NO: 485554 - DNA, 100 bp, Homo sapiens
gagatccagtttgggcacctgcagcgacctacccactacaatacctcttgggactgggctcgatttgagggtgtcaaattgagaaccaggtagatcccca

SEQ ID NO: 485555 - DNA, 96 bp, Homo sapiens
agccagtacatcaagttcatcagcgagactctgcggcgcatggaggaggaggaggtattgttgcagcatctggcagtgagactgaggatgaggaca

SEQ ID NO: 485556 - DNA, 100 bp, Homo sapiens
tgatgaaatcaacaaagcctttgaactgatgcattctggaaagagtagccggatcgagctgggagatgtgacaccacacaatattaaacagttgaaaaga

SEQ ID NO: 485557 - DNA, 75 bp, Homo sapiens
gttgccattgtaggacctcaactctctatgtttgccagtggtttattttacaggctgactcttgcttgtggtggg

SEQ ID NO: 485558 - DNA, 82 bp, Homo sapiens
cgcgaagtcgcagcgccagacccaaggcccccgagtgagcgcgggcgccgagcgtccgtctccaagagagtatgaagagagt

SEQ ID NO: 485559 - DNA, 78 bp, Homo sapiens
taatgcgactcaaagctgcacggcagtctgtttatgagggtacccagtgtgttgaacaaattcaagagttggttctac

SEQ ID NO: 485560 - DNA, 100 bp, Homo sapiens
gcatcagcagtttctggagaaacacaagcagcagttccagcagcagcaactgcagatgaacaaggtgtgtggtctggacgggcgatgaccgagttttctt

SEQ ID NO: 485561 - DNA, 95 bp, Homo sapiens
cgcgggccggcgagcgcgtcgccaccatgggcgccctgcgtccggcagaggaggcgagcatcccgctcaggtgatgaggaacccctcgcgcaccc

SEQ ID NO: 485562 - DNA, 100 bp, Homo sapiens
tgatgttcttcaaaacatggtgaaaacatgcaactctgaagaatcagggatgaagaactggtggatgtttctgcatctgtcttaccagaattgaaaagag

SEQ ID NO: 485563 - DNA, 101 bp, Homo sapiens
ggcccgcggcccgttttcgggaggaggcggagggcgcaaagcgagccgactggtattgctcgagttccacttgctggagctgccgggggcccagggatcgg

SEQ ID NO: 485564 - DNA, 85 bp, Homo sapiens
tggtgcagcgggttgtgaaggacatcactaacgccttcaggaggaacccacacatcactgctccgtgtggagatggcgccctctt

SEQ ID NO: 485565 - DNA, 76 bp, Homo sapiens
gtggatgaaacgtgtctatttgaatcggaaggtttggttgcatccaagaattgatgcccggagagctgatgaaaac

SEQ ID NO: 485566 - DNA, 98 bp, Homo sapiens
agagctcaacagctacccccgcttcagcgactggctgtacactttcaacgtgaggccggaggtggtgcagattaacgtgacagtgtcaggtggaccca

SEQ ID NO: 485567 - DNA, 100 bp, Homo sapiens
cgaggagaaccaactggtcccgaaagagtgaactttgaggcgctgatcatcaccatgtcggtagtcgggggaaccctcctcctgggcattgccatctgct

SEQ ID NO: 485568 - DNA, 75 bp, Homo sapiens
ccaattctaccaggatggctctcttcgctggtggcaaactggccctgaagcagagaccacgatttgtagctttaa

SEQ ID NO: 485569 - DNA, 98 bp, Homo sapiens
gcttccaggacaagtcctgcgcttggggatcctctgtacgcccgttcactgtcaagtaagggagaattgactacgcttatacatcagcttcaagaaaa

SEQ ID NO: 485570 - DNA, 100 bp, Homo sapiens
aagaagttgaagagactgctacagctaagaatgttctgaaactcctttctgatttcttagatagtgaggcaaataaccgtttgctgctcacaggcacacc

SEQ ID NO: 485571 - DNA, 127 bp, Homo sapiens
gaaaatggcggacgggaaggcgggagacgagaagcctgaaaagtcgcagcgagctggagccgccggaggcacagaccccacaggctcctcggacactgggtccatcacctcctgccccatcatccac

SEQ ID NO: 485572 - DNA, 101 bp, Homo sapiens
cgccccatttgcgacagcatttgctacctgctccaggaccagtatcagctgtgctaccgtgcggccctggagtacctcggcagctttgaccactatgcaac

SEQ ID NO: 485573 - DNA, 83 bp, Homo sapiens
gagcgctcaagacagaaagccggtggcttcctcacctccacctgtaatgcaggcgtctacggtgacgtgcagcgcgtgaagat

SEQ ID NO: 485574 - DNA, 75 bp, Homo sapiens
ctcagcactatcccaagactgctggcaacaggtgctcagaattttgatgtcatacgactatcaacttacagaaca

SEQ ID NO: 485575 - DNA, 90 bp, Homo sapiens
ctcccgcccgccccggagcagccccgggcccgcccgcccgcatccagggcgccctgcgtccggcagaggaggcgagcatcccgctcaggt

SEQ ID NO: 485576 - DNA, 100 bp, Homo sapiens
tccttcttatcggttcaatcctaacaaccaccagtcagaacagactttgagtacaagcgcaagctagccagagtttccctggtgcgcaaagaactcaggt

SEQ ID NO: 485577 - DNA, 90 bp, Homo sapiens
cttacgacgaggacgtcatgggtcagaaggtggacaagaacgttgtcaacaggctatatctgtcttttgttctttataccttgctcaaag

SEQ ID NO: 485578 - DNA, 82 bp, Homo sapiens
gccgtcgctgcagagaccccgctatggctggggatatgagactttctactcggaatatcctgagtgttgcgtggatgtaaaa

SEQ ID NO: 485579 - DNA, 75 bp, Homo sapiens
gcatgtgtgggaaatcctgcgtttcccctgtgaaagatggataatgtgcttatggtgtaaccaggtttgagggag

SEQ ID NO: 485580 - DNA, 76 bp, Homo sapiens
cttctcgcagtccccgcgcgtggtcatccagggtgactatgaccagagcaggaccaaagtgctgcacatgagcctg

SEQ ID NO: 485581 - DNA, 74 bp, Homo sapiens
ttggagccgtctgcaaagtgtccccggcaagaaggtttttcgttggaatatacgttgcacatttatggcgattc

SEQ ID NO: 485582 - DNA, 98 bp, Homo sapiens
ccgagtccaggtgtcccgcgggcctcgatttggggagcaggcgcattggagtgactgtctggcatcaccaagatgacactccacgccacccggggggc

SEQ ID NO: 485583 - DNA, 75 bp, Homo sapiens
gcgtgaggtcaacctgcgcccccagatgtcccaggtgattgaaatctctgaatatcgaacccagctctatgaata

SEQ ID NO: 485584 - DNA, 101 bp, Homo sapiens
ctcggccgcctgaccagcccggcagcctcagagaagcctgacctggccggctatgaggcccaggccgtggtccttcagcatatctctgtgctgcagacaac

SEQ ID NO: 485585 - DNA, 99 bp, Homo sapiens
acgccattggatgttttgtccagggcagcatctctggtgcatgctgatgacgaaaaacgagagaagatgactgaggaggaggtggagaccgttctggca

SEQ ID NO: 485586 - DNA, 82 bp, Homo sapiens
agaagtttttagatccaaacaactattccgcaaactatactgatggagatcttataacaatttttgatagttctgacctttc

SEQ ID NO: 485587 - DNA, 98 bp, Homo sapiens
gccagaccaggaacccaccagaaggaaccaattccggacacataacaagcagcagtgaggacaccaaagcattgggaatggtaccacctcccgaaaat

SEQ ID NO: 485588 - DNA, 100 bp, Homo sapiens
gccaccgtggctacactctggaccccaatggcaaaacctgcagccctgactggaaataccggcatgcaggattgatggccttatctgccattggtgaagg

SEQ ID NO: 485589 - DNA, 100 bp, Homo sapiens
ctgctctcaggcagcaccagtggttggaaggacatgttcaataaggaagaggcccagcagaagggactcgctgagccaccccccgccccactccatgttg

SEQ ID NO: 485590 - DNA, 98 bp, Homo sapiens
cagcagcggtttcccaagtttcctgacttcttccatcctctggaaatcagctgtgttacatggacacagaacagtatgaagaagcagtacgagactat

SEQ ID NO: 485591 - DNA, 90 bp, Homo sapiens
cagaactgagaagctgtcaccacagaatatgacagatacctagcatctagcaaaataatggcagctgcttaccttgaccccaacttgaat

SEQ ID NO: 485592 - DNA, 100 bp, Homo sapiens
gcttctatgcttcaagtctttgatcttcggaaagtactcaccacttactatgtcaagcatcagacaacagtcagcgctttcgagaaacctgttttgcatt

SEQ ID NO: 485593 - DNA, 76 bp, Homo sapiens
cgaatctgctgtgacctggatgtcttggccagcaagaaggtaccgaaagcacagtaatcactggtgtcgatattgt

SEQ ID NO: 485594 - DNA, 87 bp, Homo sapiens
tcaatcaacggtggcttctggcacagtggcaagagtagagccaaatattaaatggtttggtcatcagactagtgctgagtcttgggg

SEQ ID NO: 485595 - DNA, 75 bp, Homo sapiens
agaagatgtggtggcttccgtttgttggtggaggaggtggcaggcctcggcgataacgaaggaggcccaacttca

SEQ ID NO: 485596 - DNA, 100 bp, Homo sapiens
ctgtgttctgcttttttcattgttccactggacgctcatcagagggaagatctttttcctcaattggagtcagtggatcggtggggaaaatgctgcttac

SEQ ID NO: 485597 - DNA, 51 bp, Homo sapiens
tgccgtctttcacacactgatagggaaaactgaggctgccatcaaaaactt

SEQ ID NO: 485598 - DNA, 96 bp, Homo sapiens
ttgctcagcgtctcggccgccgcgggtgcctcatctccagacatggagcccagctatgggggaggtctctttgacatggtaaaaggaggtgcaggg

SEQ ID NO: 485599 - DNA, 100 bp, Homo sapiens
ccggacctcctcctctaccacccccaatcgaaaggcatttgaccaagccgtgaccaaggacacctgcatggcggttggcttcttccagcgaggagtggcc

SEQ ID NO: 485600 - DNA, 82 bp, Homo sapiens
cccagaccctggagcctcagttggaagcagccgatccagcctgcggagcctgtggggcagccggattgagcacctcaaatcc

SEQ ID NO: 485601 - DNA, 110 bp, Homo sapiens
attcgattcaacggggttccggaccgcgctgcgctatggagcaggtggcccaacagtcaacccctgaaaaaggcggtcacaaaacccccaggagacgaagatgacggcac

SEQ ID NO: 485602 - DNA, 96 bp, Homo sapiens
acggaggcagaattggcaaaggaagagcaggagcacctcaggaagctggaggctacggaaaaacctgcgagccctggtggttgtccatgctacatg

SEQ ID NO: 485603 - DNA, 109 bp, Homo sapiens
cctttagccgccgctggcccaacggtttccccagcagtagcctctgcgaccagcaatggctgccatccggaagaaactggtgattgttggtgatggagcctgtggaaag

SEQ ID NO: 485604 - DNA, 82 bp, Homo sapiens
cttcgagagctaccgcgccagacagggacccagacatggagctgcgggaagaagcctggtctccggggccgctggattctga

SEQ ID NO: 485605 - DNA, 76 bp, Homo sapiens
gggcagaggaccaacatgggcattttgtttatgagcaaggtggaggagtctggcgagcatgtgatcctgggcactg

SEQ ID NO: 485606 - DNA, 138 bp, Homo sapiens
gtttttgcatgctgattcatcttcatatttgacacctatgaaacatatgttggctgcctctgctggagaagtgcctacaacacagcagtcccctcaggatgagcaggaaaagctcttggatgaagccatacaggctgt

SEQ ID NO: 485607 - DNA, 100 bp, Homo sapiens
gagatgctgagccctagcttccggggcctgggccagcctgacctccccaaggagatggcctctctgtgtgtcctcatgacttctcttgtggaccatgtcc

SEQ ID NO: 485608 - DNA, 97 bp, Homo sapiens
aagaaaaatccaggtgccggaggagcagaaggctgtaacagaagacaagtacgaaatactgcaatctgtcgacgatgctgcgattgtgataaaaaac

SEQ ID NO: 485609 - DNA, 101 bp, Homo sapiens
gctctcagtcagcctggggaatgagacccaaactgctcatacagaattacgcatttccacttctaatgggtttttaatgaccacaacaagcaagcatgcag

SEQ ID NO: 485610 - DNA, 90 bp, Homo sapiens
caaaatccacagcaccccccaggccaggaggaaagaatgggagagaaggagaggaacgcgcggaggaagaagaagaaagcgccggcggcg

SEQ ID NO: 485611 - DNA, 96 bp, Homo sapiens
cctgggactgcaccgcaccgagggcgagctccagataaaataccatgaggagtttgagaagagccgcatgggccctagcgggggcgagggcatgga

SEQ ID NO: 485612 - DNA, 96 bp, Homo sapiens
ctccatcctggcgtacctggtcgtgttgtacgtggacactataaaggtcagcaaattggcaaagtagtccaggtttacaggaagaaatatgttatc

SEQ ID NO: 485613 - DNA, 99 bp, Homo sapiens
gcggttccagccagagagcatcgcctgtgcctgcatttatcttgctgcccggacgctggagggatgcaagacttcaattaccttagcagcaactgtttt

SEQ ID NO: 485614 - DNA, 83 bp, Homo sapiens
cgcgcggcttcctccagacctctcggcgcggccctgggcgctgcctatggcacagccaagagcggtaccggcattgcggccat

SEQ ID NO: 485615 - DNA, 75 bp, Homo sapiens
ccagatcttggcacgcaggagaatgttggatggcaagcatgtggtgtttggcaaagtgaaagaaggcatgaatat

SEQ ID NO: 485616 - DNA, 87 bp, Homo sapiens
ttaaaccagacaagtgtcctaggagagtgaacaggtggtggtatcatggatacagaaatgtctgaagatatagaccacaacttaact

SEQ ID NO: 485617 - DNA, 98 bp, Homo sapiens
cagaagtgtccaaaccacaagttctcaaaactctctgaaaaatggctccctccgagttaaggaaaacaggaaatcattttcacaactttataagttgg

SEQ ID NO: 485618 - DNA, 100 bp, Homo sapiens
gggagcccggccggagctgggtctggagacgccgtggcagcctgaacggagtgtgcgacggattgggaggcatttatgtttgaatcatctttaagtctgg

SEQ ID NO: 485619 - DNA, 98 bp, Homo sapiens
gatgttggagaactacagaaacctcgtctccctggagatgtggtctgaagctattaaaatcctgaaaggggagtatgctgtccgggcaatcaaggaac

SEQ ID NO: 485620 - DNA, 76 bp, Homo sapiens
gcggcctcggcctccccttggattcagacgccgattcgcccaggtaagaatgattgatgttggctgatattggagt

SEQ ID NO: 485621 - DNA, 98 bp, Homo sapiens
tctcagccacccggcggaggcggcccgggaatccgcaaggacgctttcgccgacgccgtgcagcgggcccgccaggttaaacccatccagagtaatgg

SEQ ID NO: 485622 - DNA, 90 bp, Homo sapiens
tgaaggcacaggaatatccatgtcggcttgtagagagattgcagtacaacaaataacactgtgactccaacctcacaacctgtgcgaaag

SEQ ID NO: 485623 - DNA, 99 bp, Homo sapiens
ctcaaccattgggaaaaaaggttattagagctgccacgtgccgtgggtacccagacattgagtggtgctggtctcctcaagatgttcaacaaagccaca

SEQ ID NO: 485624 - DNA, 49 bp, Homo sapiens
cacaagagcaccatactttgagggtctgacggtaactgctgtaaaagac

SEQ ID NO: 485625 - DNA, 83 bp, Homo sapiens
aagacttgtaacctggagaagaggatctcacttgcttatctgaagaagattgtccaggctcatattgggaatgcttatgagga

SEQ ID NO: 485626 - DNA, 83 bp, Homo sapiens
gttcaggccagaccctctgggagcttctcagccattttccacagatcagttcatgcgggagatggcaggggctggcacatgac

SEQ ID NO: 485627 - DNA, 100 bp, Homo sapiens
cttggaactctgggacaaatagagtcttccacctggaagccctctctggctaaggacaggcaggtgcccctctctccatcagaggacacctgtactggag

SEQ ID NO: 485628 - DNA, 76 bp, Homo sapiens
ttgatgcataaaggcagctttgaaacagcttgggaacaatgggccgaggcattgtcatttcttttgcaagggccag

SEQ ID NO: 485629 - DNA, 75 bp, Homo sapiens
cttggggtgaggcagaagatgggaagttggggcatggcaacagaagaaagatttgatcaccaggagatttttcgg

SEQ ID NO: 485630 - DNA, 90 bp, Homo sapiens
gtgggtgtctggtgccggcgtttgggctacggttgttgttggcgactgtgcttcaagcggttccagcaacagatagaaatgctttaagtt

SEQ ID NO: 485631 - DNA, 80 bp, Homo sapiens
agcgcctggcctgcgcgccgctgcccgcgccacaggttggctgttgaaggcacgaatggaatagataatcatgtacctac

SEQ ID NO: 485632 - DNA, 100 bp, Homo sapiens
gtgtgcttttattactttcatctatacacttccagtgtcgaaggctggacaggttggagatgcttgatgctgcaaagaacaagatgcgagtgaagatcag

SEQ ID NO: 485633 - DNA, 100 bp, Homo sapiens
tatagccagtgtgcagctccctaatgatgatgctcagtttgatgcgtcacactacgacagtgagaaaggaggtttgctgggatgggaaacctgctcaaag

SEQ ID NO: 485634 - DNA, 101 bp, Homo sapiens
ggcggagatccagtgggaagagccggcggctgcccgggcgtaaacactacacgtgaagagtggtgaaagggaacattgattactgaagtgccctggagagg

SEQ ID NO: 485635 - DNA, 51 bp, Homo sapiens
cctcccaagtggctgggattacaggagacgttgacatttagggatgtggcc

SEQ ID NO: 485636 - DNA, 122 bp, Homo sapiens
cttccgcttcccctcggctttcttctcgtcggtgttcccggctgctatagagccggatacctgctatacaacttcccgatgacctgcgccttcataggtgttgccagcaacttcaccttcct

SEQ ID NO: 485637 - DNA, 51 bp, Homo sapiens
agatgcagtggataatagtaattgctggcagcctgttatcgattacattga

SEQ ID NO: 485638 - DNA, 101 bp, Homo sapiens
gtcggtgccagattcgggccgcctctgggacgtacatacctcagcctcatcacagtcagccaaggccacctttgatgccatttctaagacctacagctacc

SEQ ID NO: 485639 - DNA, 83 bp, Homo sapiens
gaacggaatgctggagtcagtggaagacggagctggtcggcccgaagttgaagaggtcagaaacccaggatgatccacctgtc

SEQ ID NO: 485640 - DNA, 75 bp, Homo sapiens
cgagtgaggccgcagcccagcgggcctcgggcgggacgcatggaatacctcgtgaaatggaagggatggtcgcag

SEQ ID NO: 485641 - DNA, 100 bp, Homo sapiens
agctgctacactgaagatgaagcaaggcccaatgacccaggcggatcagtgaatgcttgtgaaaagacctcatttatgtttctgcggcaagagttgcctg

SEQ ID NO: 485642 - DNA, 100 bp, Homo sapiens
cgacgcggccgagggccgggcggccaagaggtgcgagaaggccgagggggctcagaaccagggcaaaaaggccgagggagcccagaaccagggccaaaaa

SEQ ID NO: 485643 - DNA, 100 bp, Homo sapiens
cttcgttccccgccaaccgcaaccattgacgccatgtcgggttattcgagtgaccgagaccgcggccgggaccgaggaaaaagagccgggaggagtctag

SEQ ID NO: 485644 - DNA, 83 bp, Homo sapiens
acatcgagcctgagggaggggaaaggcgcagggccctgggaggagcggggacactgaggacctctctccaaattggcctctca

SEQ ID NO: 485645 - DNA, 83 bp, Homo sapiens
cggggcggacggcgacgcagcccgcggcagaagggctgaaggcctttcggcagcagctgaggaagaccacgcggaccaaaggg

SEQ ID NO: 485646 - DNA, 74 bp, Homo sapiens
gtatatgtatgacttttaaaagagagagcttgtgaaactgagggaataggtctgcattactagcgtacatggaa

SEQ ID NO: 485647 - DNA, 83 bp, Homo sapiens
agagagaggtggacagatctgagagatactgaggttttaccaccgttgagggatgtgacaaatcgacctgaagttggctcaac

SEQ ID NO: 485648 - DNA, 100 bp, Homo sapiens
atttacagtcggaggagtactcggtgaaatcctgtcctgaagactgtaaggtgctggctgccagctgctgcgccccccatgtagaaggtgcacctcctgg

SEQ ID NO: 485649 - DNA, 100 bp, Homo sapiens
gtcccagagacaacgagatgaactagaattctgccagatatcaggacagatggggaacagcagaagccgtgtggggcggagcttttgttcacagtttctt

SEQ ID NO: 485650 - DNA, 108 bp, Homo sapiens
gtttgcacacaaagacagcctgtctacatcattatggaactggtttcagtcgggaacatgccctgtgtgccgccgtcatttcccacctgcggttattgaagcatctgc

SEQ ID NO: 485651 - DNA, 82 bp, Homo sapiens
gctgctgctgctccggccgccggcgacgcggggctatgactttgcagccgtcctggagtggttcgcggagcgtgtggaccgc

SEQ ID NO: 485652 - DNA, 75 bp, Homo sapiens
taatggtgtatttcccaaaggacaagaatgcgaatacccacccacacaagatggagttttgctcttgttgcccag

SEQ ID NO: 485653 - DNA, 100 bp, Homo sapiens
cactccagaagtagcatggaaatggagggcatcttcaaccacaaaggtcaaatttgtcaagatgtccacaatcccgagacactttggcctgaaatacaaa

SEQ ID NO: 485654 - DNA, 89 bp, Homo sapiens
gaggctcggagaaacaggcgccgcgggctccgcgcccggccggacccgggcccgagacgaattgtacgtgggcagaccgcagagagttt

SEQ ID NO: 485655 - DNA, 75 bp, Homo sapiens
gacatgttccaggtcccggatagcgagggcggccgcgccggctccaggtatccagctcacatagaagacattgac

SEQ ID NO: 485656 - DNA, 126 bp, Homo sapiens
ctgcaagaggcctacgtgcgggtggtcaccgagaagtccccgaccgactggcagtggagtgggagtgaagaagctgtgtgaactgcagcctgaggagaagtgctgtgtggtgggcactctgttcaa

SEQ ID NO: 485657 - DNA, 75 bp, Homo sapiens
cactacctcctggctgccgtgaataggcagcctaaaggcagcctggcatcctcgctacaacctcattgttgtggg

SEQ ID NO: 485658 - DNA, 90 bp, Homo sapiens
gccagactgaacacgatgaggaataatccagaatggctactctgatctatgttgataaggaaaatggagaaccaggcacccgtgtggttg

SEQ ID NO: 485659 - DNA, 80 bp, Homo sapiens
gatatcagcctgtctgactacaaagtcccctaggttaaagagcaagtgtacaggaggattgcagcctcccgttcagtacg

SEQ ID NO: 485660 - DNA, 49 bp, Homo sapiens
aaaggattcgttacagccagagattgatcctgcagctcctgaaaggcaa

SEQ ID NO: 485661 - DNA, 86 bp, Homo sapiens
gcccttgttcccccaaatgtctgactctgactctcggactgagaaacgcaagttacagaatgtctgaaggggacagtgtgggagaa

SEQ ID NO: 485662 - DNA, 100 bp, Homo sapiens
cgggatcctctgctgcatagtttcggtcatctaaaggaggttttaaacagtataacaggtgaccaagtcagccatcggggtgctctaactgggggttatt

SEQ ID NO: 485663 - DNA, 101 bp, Homo sapiens
cactgggtcttatgtgactggcttctatcaaagtttgcaaggttcatttatgttcatggttaagaaatatcctctcagttgtcggtactgatgccttgaaa

SEQ ID NO: 485664 - DNA, 100 bp, Homo sapiens
cgaggttgcaggactctttctgttcaggccagaccctctgggagcttctcagccattttccacagatcaggttgggcccgaaggcatcctgcagaacggg

SEQ ID NO: 485665 - DNA, 83 bp, Homo sapiens
ctgaagccggcggacggttttcgtacgggcggccgtgcgcgaggcgagttaatatgatcctctgttgaagcaagaagacaaac

SEQ ID NO: 485666 - DNA, 101 bp, Homo sapiens
acgggcggcggcgtgagggctccgggtcgctggcggcgtggacacctgagtcccggggtaggggtctcccgcgagacaagttggatggcttgaggactggt

SEQ ID NO: 485667 - DNA, 83 bp, Homo sapiens
taaagatgcagtacgccacggggccgctgctcaagttccagatttgatacagcagagggtgtctctcaggaactcatttctgc

SEQ ID NO: 485668 - DNA, 90 bp, Homo sapiens
agaaaccctggaacaagtctgccggcagccaataaaagagtaacagttacccctcaatgagcgacccctacctgtccagctattacccgc

SEQ ID NO: 485669 - DNA, 74 bp, Homo sapiens
ttttcatcacttctctccagaagtctacatcagcatcagcatctgcgtcaccatttcaatctgcatggtatagt

SEQ ID NO: 485670 - DNA, 83 bp, Homo sapiens
gccagcgctccgggactgaggcagctctctgatgtaaaggatggagtaaatcaagcagcacctgcatttggatttggcagcag

SEQ ID NO: 485671 - DNA, 100 bp, Homo sapiens
atgctgtatcttacactgacaaatatttcaacaagttaaaaggaggcctgctgtccacagatgacaaggtcatccactgcagtggctacttgaagatcag

SEQ ID NO: 485672 - DNA, 82 bp, Homo sapiens
aaatccgaggcaatgtacttgtattgagtcagcacaaatttgcaagatatctgtatgcccttggacagaaggtttggaaaag

SEQ ID NO: 485673 - DNA, 83 bp, Homo sapiens
aattttgtgactattgaagctagtcttaaacagaaagagcgaaaagctgttgctatatgatacagtccagagtgaactagagg

SEQ ID NO: 485674 - DNA, 100 bp, Homo sapiens
ttggatgtgaaggcatttcaaaaagctatgtcttcagaggaacaaaagatttgtctgccaaacaactgcagccaactcagacagtaatgccaggacaagt

SEQ ID NO: 485675 - DNA, 90 bp, Homo sapiens
atttttttgtggagtggtttgaatatcgtaagcgcacgtttaaacatctcaaggtactggtgaccccggccggggcaggccccgggactc

SEQ ID NO: 485676 - DNA, 51 bp, Homo sapiens
aagatgtttccggaacaacagaaagagatggttcccctcatcagccaagcc

SEQ ID NO: 485677 - DNA, 48 bp, Homo sapiens
aacaaaatgtcaacaaattgatgggccccagcccacgcagcaggagga

SEQ ID NO: 485678 - DNA, 100 bp, Homo sapiens
cagggcaaagcccaacaccttcccccactggacacagcattgttggttttgccatgtactattttacctatgacccgtggattggcaagttattgtatct

SEQ ID NO: 485679 - DNA, 100 bp, Homo sapiens
cctctcagctgccacctgcctttgacctttttgaagcctttgcaaaagttgccgaggagcccaagtagaagaaatatggagtttagagcctgagaatttt

SEQ ID NO: 485680 - DNA, 75 bp, Homo sapiens
gaggaagtactttctggggtcttagatacagaactacgatataagccagttgaaaatgaactacctccaccagaa

SEQ ID NO: 485681 - DNA, 95 bp, Homo sapiens
ggagtgtgactgcctgttcatgcagagagatgtgtacatatcccacgtgaggaaggagcacgggaaggtgtttaatcaggaaggagaattcatgt

SEQ ID NO: 485682 - DNA, 83 bp, Homo sapiens
atgaagaaagacgtgcggatcctgctggtgggagaacgctactgcagcactggggtgtcagttgttggtccgacccagaacgc

SEQ ID NO: 485683 - DNA, 50 bp, Homo sapiens
cagcctcccaggtagctgggattacaggtgcacaccaccacgcccagcta

SEQ ID NO: 485684 - DNA, 98 bp, Homo sapiens
gacagaaagctggaagttgaaatggtggagaagactaggcactacctgctcctgcgggagaagctggagaccgcccagcggcctgtcccggaggcact

SEQ ID NO: 485685 - DNA, 75 bp, Homo sapiens
ctgacatggaggatgatttcatgtgcgatgatgaggaggactacgacctgaatcccctactttgaaactagtgct

SEQ ID NO: 485686 - DNA, 74 bp, Homo sapiens
agcagctgagtgaccttcccaaggacacacactgagtcggaacgagctgattgcccgctacatcaagctccgga

SEQ ID NO: 485687 - DNA, 100 bp, Homo sapiens
tctgccacatcttcctgacccgcttcaagaagcctgctgagttcaccacagaccctgtaggccccctggacaaggtgaggaaggccaagatccgagtcaa

SEQ ID NO: 485688 - DNA, 83 bp, Homo sapiens
gtcggttgagcggcggcgaacatgcgcttttgacacattggagggagagcctggggatgtacaggagatgcctgctccagaat

SEQ ID NO: 485689 - DNA, 74 bp, Homo sapiens
tgaccgagagcgcgaatatcgtcatcgttagaaggtctagtgacggagcccgcgcgcggcgccaccatgcggca

SEQ ID NO: 485690 - DNA, 100 bp, Homo sapiens
ctggagcagcattccagggcctgatggaatcttgctctcttgctcagactggagtgcagtggcatgaccttggctcactgcaacctcacctctcgggttc

SEQ ID NO: 485691 - DNA, 98 bp, Homo sapiens
cacccccgcgccgtgccagggccggccagcgtccgcagggggggccctcagcctcttggccttgaacgggctgttcatcttgattcacaaacacaacc

SEQ ID NO: 485692 - DNA, 75 bp, Homo sapiens
caagaatcgtaggccaggctgatggagagctgaacattactcttccagaagaggaatatattaaaggaatctgtg

SEQ ID NO: 485693 - DNA, 50 bp, Homo sapiens
aagccattgctgaaagcctgaatgttcttacgtctgttgctagattatcg

SEQ ID NO: 485694 - DNA, 90 bp, Homo sapiens
ttcgcattttggcattgacatttaattttagggtcctttatatagaagggagagtagatgacagcatattaaagtgagtgaccctgcgac

SEQ ID NO: 485695 - DNA, 83 bp, Homo sapiens
cgctgagggcccgccggagatgttttccttgtcgagcacggtgcaaccccagacaatgcagatcttcgtgaagactctgactg

SEQ ID NO: 485696 - DNA, 82 bp, Homo sapiens
ggcggatcggatcccgcagatcggagacggggcctggagccacaatggtgcgcatgaatgtcctggcagatgctctcaagag

SEQ ID NO: 485697 - DNA, 100 bp, Homo sapiens
atgctatgaggatgacaaactctggagtaattggagccaagaaatgagtatagagaatagtgacagtggtacaggaaagaaagaaaaagaaaagaaaaac

SEQ ID NO: 485698 - DNA, 100 bp, Homo sapiens
tgctcctctcagccacctctgatcagccatggtatcggcaaggatgtggagtcctgccatgatatgcctaatagtcccagtgaatattgtttttatgtgg

SEQ ID NO: 485699 - DNA, 80 bp, Homo sapiens
aaatgtacaccctcgagagcggcctgattgggaagaaactcttagcgcaatgtaatctatgccagcaattatgacaatgt

SEQ ID NO: 485700 - DNA, 83 bp, Homo sapiens
tgtgaactctcctcatctgtgcagcagaaagatgaaggtcttagaatcattgattggaatgatccagaaattcccttatgatg

SEQ ID NO: 485701 - DNA, 83 bp, Homo sapiens
cttgtcctggctcttgccctcatcctggttctggaatcctcagttcaaggacttcggcagtctgtccaaccttcaggtcactc

SEQ ID NO: 485702 - DNA, 96 bp, Homo sapiens
aactggttggccgaaagacttggtgaaggttgaggaacaggttagcaccactgagagagtgtttcaggatagacaatatcagattgatgctgctat

SEQ ID NO: 485703 - DNA, 98 bp, Homo sapiens
acctcgttcagcagtcatgtaactataagcagcttcggaaaggagccaatgaggtgtggggtgatcagccccagatttgacgtgcaactcaaagacct

SEQ ID NO: 485704 - DNA, 100 bp, Homo sapiens
ctaaattaaagaggaattatgccaaagcagtggaactactggtggaactagcttctctgcagaataatgcaggatcaaagtgaaggtaacagcctgcaga

SEQ ID NO: 485705 - DNA, 90 bp, Homo sapiens
aggaggacggcgagagcacggacagactcatggggaagggccaggtccaggtttccaacaactgtgattccatttttgtgaatgggaagg

SEQ ID NO: 485706 - DNA, 82 bp, Homo sapiens
aaagaatagagttgagcctgtgggacacttcggcgtctgcttctgcgctttgcctgggagaggccctggtggcctcgttcct

SEQ ID NO: 485707 - DNA, 100 bp, Homo sapiens
ccggaggggccctcgtgtaaattcatgcagtgggtttgcaagcacatcaagaagcccatccgctccaccgtcctcagcctggactggcaccccaacaatg

SEQ ID NO: 485708 - DNA, 51 bp, Homo sapiens
tgctggccgtgctgctctggaagattctctttctgagaagggcaagaagac

SEQ ID NO: 485709 - DNA, 83 bp, Homo sapiens
attcaactagccaaggaaaaaaagcagagaggagcggggagcaatgcagagaagctgttgttttagggagcacggacttccta

SEQ ID NO: 485710 - DNA, 75 bp, Homo sapiens
tatgcttgcttctattaaaagtggtgatgaacttcaggatgaggaaggaccattacgacctgttcttgaatacat

SEQ ID NO: 485711 - DNA, 75 bp, Homo sapiens
cctaggctcggaagcacgttcagtctggatacctccatggaatggaagttggatacactttgtgacttgtacgag

SEQ ID NO: 485712 - DNA, 75 bp, Homo sapiens
tgatttcatgtgcgatgatgaggaggactacgacctggctggacgtaaagaaagaagtgatgcactcaattctgc

SEQ ID NO: 485713 - DNA, 50 bp, Homo sapiens
ggctttttggagcaaaggtcacaaatgagatgaagtcttgctctgtcgcc

SEQ ID NO: 485714 - DNA, 89 bp, Homo sapiens
cgtgtacatcatttacggcatgtacttctgcatgaacatctccagccagggtgtccttaagtttgctcgcttggtcaagtcctacgaag

SEQ ID NO: 485715 - DNA, 82 bp, Homo sapiens
gtattccaaagaactcggagatgcctggaatacagtaaggaaaaatatattcagggggaagagatgtaatagatttcacatt

SEQ ID NO: 485716 - DNA, 76 bp, Homo sapiens
gtttgaagttgttaaaatgggcaagagtgctatgcagggcaccccggctctgccccagactggcataccaacagag

SEQ ID NO: 485717 - DNA, 100 bp, Homo sapiens
gtccgggtaaggcccttcaattctcgagagaccagcaaggaatccaaatgcatcattcagatgcaaggcaactcgaccaaatggactgctgaattatgaa

SEQ ID NO: 485718 - DNA, 51 bp, Homo sapiens
gtaggagggagcctttggtgggtggggaccacaagcagaagttttactggg

SEQ ID NO: 485719 - DNA, 75 bp, Homo sapiens
gaatgaacattgtattgagaacaatatagatttgcaggttcgatacaagaggctgttttcctagcgtggcttgct

SEQ ID NO: 485720 - DNA, 82 bp, Homo sapiens
aggcaaagaaagctcatcacagctcacgcagcaattccatttccgtgagggcgtttctagatgaagatgacatgagcttgga

SEQ ID NO: 485721 - DNA, 98 bp, Homo sapiens
cctcggtgcctaaacaagcagcagaagccactggaagagtgtgaagatgatgatcactttgccagctgtgtggaggatggatttgagggagacaagac

SEQ ID NO: 485722 - DNA, 100 bp, Homo sapiens
acgatctgcacttcgcattttggcattgacatttaattttagggtcctttatatagaagggagagtaggtgaagtgtcagactctgacagcaacagctcc

SEQ ID NO: 485723 - DNA, 74 bp, Homo sapiens
gtaccaaggattggagcacagaggctcagaagcaagtccagcaccaggagcagcactcggagggccgcagtgcc

SEQ ID NO: 485724 - DNA, 98 bp, Homo sapiens
ggatttgttaaggattccaagtaactcttatttggaagaattttaaatcgtttctccaaagacattggacacttggatgatttgctgccgctgacgtt

SEQ ID NO: 485725 - DNA, 82 bp, Homo sapiens
ctgcaatccgagagcaacaagaagcccatccacatgtacatcaacagccctggtgtccaggatgtggaggtgcacttggagg

SEQ ID NO: 485726 - DNA, 100 bp, Homo sapiens
tgatgacacctttattttaaaagctgatgttccaaggttttaaaatcaaagatgggaaaatcggagaaaattgcccttccccatggccagcttgttcatg

SEQ ID NO: 485727 - DNA, 75 bp, Homo sapiens
ggcagagagcagaagatattcacagacatgcggaatttgaggctcgggttatgtatgattttgctgctgaacctg

SEQ ID NO: 485728 - DNA, 100 bp, Homo sapiens
ctgcgaaggccgggacccggttccccggcccacagtgggggtgtgcaaacccgagagaactggattgactttgaagatgtgattgcagaaccagaaggga

SEQ ID NO: 485729 - DNA, 90 bp, Homo sapiens
ttgttgaacttgaagagacatatggacaatgaatctgcaaagagtccgaatgtcattcagaatttgaaaatactacccgttctgtcttca

SEQ ID NO: 485730 - DNA, 90 bp, Homo sapiens
tgcatgtactgggggattcgcagggaggatgtcgggacaccccggaagctgggaaatgttgctgcagcaaacgagattgctaaggaaagg

SEQ ID NO: 485731 - DNA, 100 bp, Homo sapiens
gttggagttgcggcggcgggaacgattgggctgagcagaggacgacatgttgcttttcgtggaggatgccaaagaagaccatgaaagaacacatcaaatg

SEQ ID NO: 485732 - DNA, 74 bp, Homo sapiens
tagaaaaggtattcattaaagaaaataatgggaaggaagaagtatccaaggcagcaggagccattcgacctctt

SEQ ID NO: 485733 - DNA, 90 bp, Homo sapiens
ccagaacccaagagcagtggattcccagtgtccccacgagctgtgtggtccatgatgaggagagttttcactactaatctggtgccagag

SEQ ID NO: 485734 - DNA, 75 bp, Homo sapiens
cctgactcaggccacagtcttctgtgtgtcggagcccctgcagagtgtggtggaccacatggccacccaccttgg

SEQ ID NO: 485735 - DNA, 75 bp, Homo sapiens
caagattgggatatttgagagtccaactggcactattcctgacattcagacaactgacttgtaactgacttataa

SEQ ID NO: 485736 - DNA, 89 bp, Homo sapiens
aacgtctctgataacagaacctgggcagacctcacacagactctccacgccttcctagcaggctccccacaggtgcaggaagccgccgc

SEQ ID NO: 485737 - DNA, 98 bp, Homo sapiens
gcatttggcacagaagtgctgccaggagaaactaagttgctgaacggtctccttatatacatttgacaaagccaaacagtgtattggcacaatgacca

SEQ ID NO: 485738 - DNA, 95 bp, Homo sapiens
aagaacttaaaactcaaagttgtatggattgtatagagcaacagccaactcagtttataaatccagaaacacctggctatgttggatttgcaaac

SEQ ID NO: 485739 - DNA, 75 bp, Homo sapiens
tggttccccctccctcagcttccgccccaaaaggtgtgtcaaggatgccacaatgccatcgacccagaagtgcag

SEQ ID NO: 485740 - DNA, 83 bp, Homo sapiens
acggagcagcgcgtcgtggggcgagcggcagattgacgagatgcctgaggctgccgtgaaatcaacagccaacaaataccaag

SEQ ID NO: 485741 - DNA, 80 bp, Homo sapiens
ccccagacccctcagcgtctggcatctcattttgaaagcgaagcagaagccgtagaatcagcggcgagcctgttgaaaga

SEQ ID NO: 485742 - DNA, 100 bp, Homo sapiens
ggacgctgccagtttgcacagcagcagatatggctcgtggacagcagaaaattcagtctcagcagaaaaatgccaaaaagcaagctggacaaaagaagaa

SEQ ID NO: 485743 - DNA, 100 bp, Homo sapiens
ccaggatccacccgatgaatgtgggaagactgaggatcagttccatgacaagaccccttatacgattatgtttggtccagataaatgtggagaggactat

SEQ ID NO: 485744 - DNA, 50 bp, Homo sapiens
acgtgcttcctgcttcatagataagaggcaaagaacagagcagttcacca

SEQ ID NO: 485745 - DNA, 75 bp, Homo sapiens
tctggacaatcaaaacttaactcctggatacaggttgcacagagcattgaggatcaccatcaggaagtgattggt

SEQ ID NO: 485746 - DNA, 97 bp, Homo sapiens
taagtttaagacttcgcgagaacagaatttcttttggcacctcctctccgcgcgttcttgggagctggtccctgcagaagagacggaacaggataaa

SEQ ID NO: 485747 - DNA, 75 bp, Homo sapiens
caggagcttctgggagccaccgtctgaagcatcagaagctgctcgcccagctactagtactttgaatcgcttctc

SEQ ID NO: 485748 - DNA, 90 bp, Homo sapiens
ggaggtgatccgaggctgggaagaaggggttgcccaggtaaactttggagtcggagtttaaaactagcttatactctacttaataaactg

SEQ ID NO: 485749 - DNA, 83 bp, Homo sapiens
cacacgcacatttgagatgagaaagaagccaccaccattgtcactcagcccagtccatcagtttctcagcccagtacttctca

SEQ ID NO: 485750 - DNA, 82 bp, Homo sapiens
gacaagccgctggcagccgcggatctcaccgccgctcaggaagcaaggtctcgctgtgttaccctggctggagtgcagtggc

SEQ ID NO: 485751 - DNA, 100 bp, Homo sapiens
agcctattgagttaacacctctgccgctgctaaaagtaacaaatgtggcaattattttggatctatcacctgtcatcataactggcttctgcttgtcatc

SEQ ID NO: 485752 - DNA, 100 bp, Homo sapiens
cctatgaataccgcttcctggagttcacgactctgagtgctggcaaccacacctccaaatcaaggaaggccagattctcctgtctatgctaaccttcaag

SEQ ID NO: 485753 - DNA, 98 bp, Homo sapiens
cgagaccatgtcggacctgggctcggaggagttggaggaggagggagagaatgatattgggaaattgcaggtgctgcagtgtctgaaatttccgggcc

SEQ ID NO: 485754 - DNA, 75 bp, Homo sapiens
ccaccatctccatcacccaccaacaacaccacaataatccacagccaaggcctggtactgtggcgctccgtgaaa

SEQ ID NO: 485755 - DNA, 101 bp, Homo sapiens
ggtggccgggctcatctgctggtggatagatacttctcaagacatcacacagcgtgagtcaatcaaggagggaagccacaagcagactgacaacgtttcta

SEQ ID NO: 485756 - DNA, 80 bp, Homo sapiens
tttttagagccaaagaagcatgtagtggcatggcagagagaaatgctaattttgaagcccttcctgaggattggagagca

SEQ ID NO: 485757 - DNA, 101 bp, Homo sapiens
gccgctgcgggcccgctccgacgcggaagatatttgtcaggatacgaatcaggttctcttcaagtgctgccagggatctgaagaggtaccctgcaacaaac

SEQ ID NO: 485758 - DNA, 139 bp, Homo sapiens
ggaggcccgggagcgccgagcgtcgccgccgccgccgccatgaacaactcgggcgccgacgagatcggatcatggaagggaagtggttgctgtgtatgttactggtgcttggaactgctattgttgaggctcatgatgg

SEQ ID NO: 485759 - DNA, 96 bp, Homo sapiens
gcgcggccgagtcgcggaggcgcctccgctgcagtcgctgcgtctccaagcgtttagtgggctacagatggcatggcatctaaaaccttacaatgc

SEQ ID NO: 485760 - DNA, 101 bp, Homo sapiens
gaaaaaaaccagactttctgcctgatcatcccattgtactgcaaaaaccaatgatgtctgtcctcatgaacaccattgtctttgaagactgtcggaaccag

SEQ ID NO: 485761 - DNA, 60 bp, Homo sapiens
tatccggtcttagaatacattccagaaaatgtatcaagccgaggcctgcctggagcccca

SEQ ID NO: 485762 - DNA, 108 bp, Homo sapiens
tgctcccccaggtggggaaggatggtgtcctccgggacggagatggagccgtggtccttcccaatgagcatcttctctttctgaagaattgaaacattttgcagacgg

SEQ ID NO: 485763 - DNA, 75 bp, Homo sapiens
ctttggcttccatcccatttatagacaaggtctttactaggtgtatttgaagaagatgccacagctatttccaac

SEQ ID NO: 485764 - DNA, 90 bp, Homo sapiens
ttttgcgaggtgctgcagccatagctacgtgcgttcgctacgaggattgagcgtctccacccaaacgcctgacagacaatctcagagttg

SEQ ID NO: 485765 - DNA, 100 bp, Homo sapiens
tggcacttatgtcctccctggaccaagatcactccatggatgaaatgacagctgtggtgaaaattgaaaaaggagttggtggcaataatgggggcaatgg

SEQ ID NO: 485766 - DNA, 98 bp, Homo sapiens
ctcagaagacagagggttttcttttgagtcctgtgcctcctgattgctgagtgttcacctggaccttctgactaccttccctgtgctattccatcagc

SEQ ID NO: 485767 - DNA, 100 bp, Homo sapiens
gctcttcctcttctccaagttcattgagctgatggacacagttgttcccacagcctggaagtctcttccctgacttgttccacgatcaacctctactcac

SEQ ID NO: 485768 - DNA, 100 bp, Homo sapiens
tggtgaagctcacgcacatctcagccacagccagcatggccgtcccactgctggagttcctgtccattgctgaacctgtttgcatgagttgctcctgacg

SEQ ID NO: 485769 - DNA, 90 bp, Homo sapiens
attcagaaggcagtggagtatttccaggacaacagcccagacagcccggaactcaacaaagtgggaaatcctcattgacgattcaatttg

SEQ ID NO: 485770 - DNA, 100 bp, Homo sapiens
agagacgcacagctaagatgtcaggacatcctggaagctgggaaagggaagagagaagggcacagttacctaagtatcaacgtaatcttcctcggccagg

SEQ ID NO: 485771 - DNA, 90 bp, Homo sapiens
cccttcgcctccttcaccgccgcagaccccttcaagttctagtcatgatctccaagacgacatagatccacatctccttccccttctcga

SEQ ID NO: 485772 - DNA, 86 bp, Homo sapiens
ctggagcctcagttggaagcagccgatccagcctgcggagcctgtggggcaggaaaccacccctactcctaatcccccgactacag

SEQ ID NO: 485773 - DNA, 74 bp, Homo sapiens
ctcagttttcccttccacaaaatgagctaaagctgttgatggatacgtgaagccacagatcaagcaagtggtcc

SEQ ID NO: 485774 - DNA, 100 bp, Homo sapiens
gcggcggccgtggtcaccaggaaggggacgggacggacggtgatggtggtcgccgcggcggcgtgtgcgcccctcaggtgagcgagtgctgtgctttcat

SEQ ID NO: 485775 - DNA, 82 bp, Homo sapiens
ctgcggaagtgcagctgcctcagttcttagcgcagatgccgctcctacgaggactgctgtggctccaggtgctgtgtgcggg

SEQ ID NO: 485776 - DNA, 75 bp, Homo sapiens
cgatccagcctgcggagcctgtggggcagaggaattacggaggttgagctggtccggaatccctaagccagtgcg

SEQ ID NO: 485777 - DNA, 75 bp, Homo sapiens
atgagtgcacctgtcaagtcgggtttacaggaggctgtaggagtgcaattggaacctgagcgcttggtcaagatc

SEQ ID NO: 485778 - DNA, 90 bp, Homo sapiens
atagacttcaaagcaacttaggccactgaactgtcaggcgggaaaacagggttatatcctgtgttgtgacctcatggtttaagtgggaat

SEQ ID NO: 485779 - DNA, 100 bp, Homo sapiens
ccggggcatctatgccagtgagaggcccaagtccctaggaacgcggcaggcaaagatggcaaagagcgcttgggcggctcagtgctggggcagatcccct

SEQ ID NO: 485780 - DNA, 83 bp, Homo sapiens
cgctcaaagccgggagatcgactgtttgagcccggaagcgcagaagctgttggaggtccccctccccactaagtgcctctttg

SEQ ID NO: 485781 - DNA, 50 bp, Homo sapiens
tgggccagccacctggtgtccggattgacaagcccaaggccctgtctcta

SEQ ID NO: 485782 - DNA, 97 bp, Homo sapiens
ctgggtctacgataacgcgcttttgctcctcctgaagtgtctttggtccaacgttgttccagtattggtaaaggttttcaaggtgtcatgaaaagat

SEQ ID NO: 485783 - DNA, 100 bp, Homo sapiens
tgaaagtcatctgtcttctgagtcaacactcccgacctggtaaacaacctgctcagggctctggtgaacaagctgtaggccaagaagcttgagagaagaa

SEQ ID NO: 485784 - DNA, 100 bp, Homo sapiens
tgccatctggggactgcctttaccaacaagactaaaagattacttggaagaatataaattccagggctcaaaatttgggcggggaactggactcactcag

SEQ ID NO: 485785 - DNA, 83 bp, Homo sapiens
cgaagatgctgatggtggaaatttcttgaaaccgctctcgtaatttgccacgggaactctaatgatccaggacaaagaagtta

SEQ ID NO: 485786 - DNA, 75 bp, Homo sapiens
ccgcctgccaccgctgcccgagcccggcatgaacgctgctgtccgggctgtgacgcgcatgggcatttatgtggg

SEQ ID NO: 485787 - DNA, 51 bp, Homo sapiens
caaaacttcctctccatcttccttaaaaaggttttggccaaattgggcgag

SEQ ID NO: 485788 - DNA, 98 bp, Homo sapiens
ggacgtggaggagctggcagccaaggaggtggacaccatcacggcagagctgaagaagcaggtggagagtgccgagctgaagaaccagcggctcaagg

SEQ ID NO: 485789 - DNA, 75 bp, Homo sapiens
atcagttctactgccctctgcctgcgtcctccagcggttgtggggcacccaggatgtatcccaagacatccagga

SEQ ID NO: 485790 - DNA, 82 bp, Homo sapiens
cggggacattattgcgcgtggaacggctgcttttggaagatcttcgtgaagactctgactggtaagaccatcaccctcgagg

SEQ ID NO: 485791 - DNA, 74 bp, Homo sapiens
aattatcaacaccaaaaagctttctgctagggcaattaccagctctggctgggtcgccacaacttgtttgacga

SEQ ID NO: 485792 - DNA, 100 bp, Homo sapiens
tacttgccagaactaatacagctgatgaaatacctgaccttttctgctccagggttctcggaccagcagtgaccttcaaagtgagcgccaatgtccaaaa

SEQ ID NO: 485793 - DNA, 100 bp, Homo sapiens
caggagtcgtcaagaggctctgcaccctggatggaaagcaggcacggaatgttaacactggtgaattagcagcaattaaagtaataaaattggaaccagg

SEQ ID NO: 485794 - DNA, 100 bp, Homo sapiens
aaggacggtgagaaaggccagtacacacacaagatctaccacctgcagaggctctactgaagaaacacgaagctttgatgtcagatctcagtgcctacgg

SEQ ID NO: 485795 - DNA, 75 bp, Homo sapiens
acgtacccgccgccgccgttggctggagtttgtacaatgacgacagaaacctgcttcgaattagagagaaggaaa

SEQ ID NO: 485796 - DNA, 82 bp, Homo sapiens
gatcgagaggatctggtgtaccaggcgaagctggccgagcaggctgagcgatacgacggcgccatgtcagaaccggctgggg

SEQ ID NO: 485797 - DNA, 100 bp, Homo sapiens
cggatccctcgggtctcacctgcaggtcctccagaccgggggccgccgccagccccggaaggccgagaggtccacaaggcgattacaatttccagtcccc

SEQ ID NO: 485798 - DNA, 75 bp, Homo sapiens
aaagcagcgtgcgttcagccctgggatggggacccagagcctgctcttgggaacagccagagtaagattggaacc

SEQ ID NO: 485799 - DNA, 126 bp, Homo sapiens
cggtgttggaacttcgttgcttgcttgcctgtgcgcgcgtgcgcggacatggcctcaaacgacaatgcagatcttcgtgaagactctgactggtaagaccatcaccctcgaggttgagcccagtga

SEQ ID NO: 485800 - DNA, 100 bp, Homo sapiens
ctccaatgatatctacagcacctatcacttgttccctccaagacaactgaatggtgccgtgagcgatgtggagatgcaggaacactatgatgagtttttt

SEQ ID NO: 485801 - DNA, 100 bp, Homo sapiens
gagagaaggacaacaaggtcccagtggcccctcctcagaatctcactctgttgccccggctggagtgcagtggtgcgatctcagctcaatgcaacctccc

SEQ ID NO: 485802 - DNA, 74 bp, Homo sapiens
agcccaaatatcctcggaagagcgctcccaggagaaacaataagaagactgttagaatgccctcggtaacacag

SEQ ID NO: 485803 - DNA, 101 bp, Homo sapiens
atgtgaccaagagcctgcattaagcatcaacagctgtattatagtcaagatgactccaacagaaagaactttgatgcatacagattgtatttgcagtctcc

SEQ ID NO: 485804 - DNA, 99 bp, Homo sapiens
aaccaggatccaaatgaagagaactcttttaaatatttgataaaactactcacccagtaaaagctgctgaaacatgtcaagagccgaaggaattcagat

SEQ ID NO: 485805 - DNA, 83 bp, Homo sapiens
tgaagctcaccgagacggcgatccgggcgctcgagacttaccagagccacaaggtctctaattaacagaagatggcaaagccc

SEQ ID NO: 485806 - DNA, 74 bp, Homo sapiens
attgacctcaccaagagggcgggagaactcactgaggatgaggtggggacgcacatccgcgccaagaggaagcg

SEQ ID NO: 485807 - DNA, 82 bp, Homo sapiens
ctcccgcccggaaagctgcccagccaccagcaaccccccaggctcccagccaacctctgataaaccctcccagcggccatca

SEQ ID NO: 485808 - DNA, 90 bp, Homo sapiens
atgtggaacctggatgaatgtagagagaaagtacttcaagatctacggaatccagaggcagcattgtctccaaccttccgtagtgacagc

SEQ ID NO: 485809 - DNA, 75 bp, Homo sapiens
gagctccgccgccccgaaactttcaccgcgagcgggaagagcctaggctggatgtcttgatcaataacgcaggga

SEQ ID NO: 485810 - DNA, 98 bp, Homo sapiens
gcgctgcgcgccccgcgccgcagccagccacccgctcagcaggatggattggatgctttggtatatgatttggattttcctgccttaagaaaaaacaa

SEQ ID NO: 485811 - DNA, 75 bp, Homo sapiens
tctggagctccagccagcacatctccattgagggccagaaggaagaggaaagcttgcaaaccatactgggtacat

SEQ ID NO: 485812 - DNA, 96 bp, Homo sapiens
tgggactcagcagccttggtgctcaggtgccagatgcaaagaccactgtgtgcagcataacgaagcgtccagacttctccgaaactggtcagtggg

SEQ ID NO: 485813 - DNA, 100 bp, Homo sapiens
gcatgggcagcgctcgcgccccgccgctgagccgccggggagccgtccagtcttcgaatcccagcgacgctctccgaaagcctcgcctccagaagcccat

SEQ ID NO: 485814 - DNA, 82 bp, Homo sapiens
ctggtcacttccccaccggaggtttatcacaaggaccctgctgggatctttgagcttgtggaggtggtcggcaatggaacct

SEQ ID NO: 485815 - DNA, 101 bp, Homo sapiens
gttccatggatgaactgaatcatgattttcaagcacttgctctggagggaagagcgatgggagagcaatgagtattacccagcagatctgcaagttgctcc

SEQ ID NO: 485816 - DNA, 83 bp, Homo sapiens
ctggccgagcaggctgagcgatacgacgcgcctgcttcgcggtttcctgcttgctgattgcgtacggagcaagtaaaccaaac

SEQ ID NO: 485817 - DNA, 75 bp, Homo sapiens
gccggggcctggggctgcctgccgggcggccgggcgcggcgagcccagccaagacaatgcaaactccagtgaaca

SEQ ID NO: 485818 - DNA, 75 bp, Homo sapiens
attattggtttggtcaagcattcttctattttcagcccatcacaacattgatagctgatgttgaaactgcttgag

SEQ ID NO: 485819 - DNA, 50 bp, Homo sapiens
aagacggcggcggcgagggtggtggcggactccagaagacctttccagat

SEQ ID NO: 485820 - DNA, 75 bp, Homo sapiens
gagcagctattcttcttatggccagagccagaacacttctccaaacaggctggtgtacagggagcaacaccggag

SEQ ID NO: 485821 - DNA, 50 bp, Homo sapiens
cgccttgcagcactgctggaccagtggaagatagatgataagcctgtaaa

SEQ ID NO: 485822 - DNA, 50 bp, Homo sapiens
gtcggcgccccagagcggacgagaagtgtatgctgacttgtaaagtgaag

SEQ ID NO: 485823 - DNA, 100 bp, Homo sapiens
attcaacaaagatacagtgattatagtcttccgggaggatttccattataatgacacagctgggtacttcattattggagggagcaggtatgtggctggc

SEQ ID NO: 485824 - DNA, 71 bp, Homo sapiens
ggaggggctccggctggtctgtggtgagacatactttgaagacaaccctagggacctccagctgctgcggc

SEQ ID NO: 485825 - DNA, 82 bp, Homo sapiens
cgaacgatgtgcgagaactgcgcagacctggtggaggtgttaaatgaaaatacttgccagaactaatacagctgatgaaata

SEQ ID NO: 485826 - DNA, 100 bp, Homo sapiens
cagtagagtctgcactacacctataaaccgaggaattcatgatcatttgccaggcctcattgctacgatttcagagtaccctggtaatagctgagcatgc

SEQ ID NO: 485827 - DNA, 88 bp, Homo sapiens
gacgccctgtgcggttccggggagctcggctccaagttctgggcggccggcgcggggcgcaggcggcgcggccatgggctcgcagggc

SEQ ID NO: 485828 - DNA, 101 bp, Homo sapiens
tctcttggctcctgtcccgctggccctctgtctgcctgtgtccctgaccatggctccctgcagtaccctttaacgtgttcagactgcatcacagtgcttcc

SEQ ID NO: 485829 - DNA, 100 bp, Homo sapiens
cccaccaagccccgctaggagccacctagactggatgcagagcatgtccatgctccgagggagaggaggttgttacaaacacacattctatggaattgag

SEQ ID NO: 485830 - DNA, 82 bp, Homo sapiens
cttggactgagtcctgcaggacacaggccctgggaggagcggggacactgaggacctctctccaaattggcctctcaactca

SEQ ID NO: 485831 - DNA, 83 bp, Homo sapiens
caggaggaccggctgccgccgccgccgccgccagcaataccaagaaggagggtgacctgatagctgctcaggctcggctgaag

SEQ ID NO: 485832 - DNA, 80 bp, Homo sapiens
tctcgccattacctgccactctctagcatcctggacactctgatgaggagcgggaaggcctcctgcaccctggagaccgt

SEQ ID NO: 485833 - DNA, 101 bp, Homo sapiens
cagcacctcatcccctggatgggggaccacaagatcctcatcgacagtttggcaatgaggagcagcagctggcgtgggccaagcgggagagcgagaaggcg

SEQ ID NO: 485834 - DNA, 82 bp, Homo sapiens
ccgcgctccagcctcgctctccgccgcccgcaccgccgcccgcgccctcaccaggccgacgcctccccccagggtcagctgc

SEQ ID NO: 485835 - DNA, 75 bp, Homo sapiens
cacaaatgctccttctcctggagacgcaactcaagggtgcaaatagctatgggcaacttggcctcggccataagg

SEQ ID NO: 485836 - DNA, 75 bp, Homo sapiens
gcgcttcttccccactcccgagacagaggaaacctcggactttgctgaacccaccacctgcctcaccaacaacca

SEQ ID NO: 485837 - DNA, 100 bp, Homo sapiens
gggacttcctctttcctcacctgcgggaggagatcctcagcggcgccttgcggagggaccccaacatggaaggtctttaatgtaactttaaatggttcac

SEQ ID NO: 485838 - DNA, 96 bp, Homo sapiens
tggaatatctatttcaaataaatttggtgtatttaagaatctggattgtttataatttgggcatttggggtgaccattgtgaggtagatattttgt

SEQ ID NO: 485839 - DNA, 100 bp, Homo sapiens
cgcaaattcagatgcaaagccgtggccaacgggaagttctgggaggtgatcagtgatgaacatggcatcgaccccaccggcacctaccacggggacagcg

SEQ ID NO: 485840 - DNA, 100 bp, Homo sapiens
tgttcatcctgataagatgcaccttgtcttacaaaacatttacaagggagaactggagaagttaaatcagtccacggatgatatcaacagacgggagact

SEQ ID NO: 485841 - DNA, 75 bp, Homo sapiens
tgaggacacacccaggaaaagactcaggacggacaagcacagtcttcggaagatatttgaatggtggtacttcca

SEQ ID NO: 485842 - DNA, 74 bp, Homo sapiens
gtggtgcagacacccacttcggctgatgaataatgcatatactgccatgtcagattcctacttacccagttact

SEQ ID NO: 485843 - DNA, 88 bp, Homo sapiens
atgaccaagatgcccgagtgctacttctactccaagttcggcgctttgctctgtccaccaagattcctgacaccaaaggctgcttgca

SEQ ID NO: 485844 - DNA, 83 bp, Homo sapiens
caaggggttcgtgcgctgtggagacgcggagggtcgaggcggcgcggcctgaggatagcaaaacctgatctcataaaacctag

SEQ ID NO: 485845 - DNA, 74 bp, Homo sapiens
gagcgtcccgctggggctggccacggtgctgcaggacctgctgcggtctcagctgagtctgctctgatcaccca

SEQ ID NO: 485846 - DNA, 75 bp, Homo sapiens
cggggagacgctgtggtgtgactggggcaggaccatcaggtactactgagcgagtgtgcttgatccagggaacgg

SEQ ID NO: 485847 - DNA, 75 bp, Homo sapiens
ctccaaggaagtgaataagtttcagatgaggatcagcactgccagtggagatgggcgtcactactgctaccctca

SEQ ID NO: 485848 - DNA, 100 bp, Homo sapiens
gctggcaggctgtggaccccctgcgaaggacagtggagaagtacagcatggaggattcggggaaactgcaaggcttatttcaggcagcattggagctcag

SEQ ID NO: 485849 - DNA, 90 bp, Homo sapiens
cggggggccaccgaatcgctgtcacgccggcagatcatgatgctgccgccaccgccgccaccacggagcgagaagcccagatagacgccc

SEQ ID NO: 485850 - DNA, 89 bp, Homo sapiens
cattattgagaaagtgaaacctgagatccggctgttgattgagaaatgtaacacgatataaagatgaagcgcagctgtataaagaagag

SEQ ID NO: 485851 - DNA, 100 bp, Homo sapiens
cgagaccgtgaccgagagcgtgaccgagagcgcgaatatcgtcatcgttagaagggtatgttagagcccaccaaggaaccactgaaaccactttctgctg

SEQ ID NO: 485852 - DNA, 100 bp, Homo sapiens
tgtcctgagatcaaatggcacttcattggccacctacagaaacaaaatgtcaacaaattgatggtgggcatccccaccatcagatggtgcggggcagagg

SEQ ID NO: 485853 - DNA, 82 bp, Homo sapiens
caataatttgcttgatggcttagaactctccacagccatcactcatgtccataaggagatctcgacatggcaggagctgagg

SEQ ID NO: 485854 - DNA, 100 bp, Homo sapiens
agaaactaaaaaatggcagctctcagaatgggaagaatgagagaagtcatatgcccggcacacaagattaccttatgctggctactttggatgagaatga

SEQ ID NO: 485855 - DNA, 83 bp, Homo sapiens
acctctccacctgtcctaggggagtctgtcctgcaagagcactgcagtttcctcctgaaggctggctccggctctccctcaat

SEQ ID NO: 485856 - DNA, 100 bp, Homo sapiens
cagaatgtgaatgtattgactggagtgagagaagaaatgctgtggcatctgttgtcgcaggtatattgcaagaagttgagaagtttacagacctagagaa

SEQ ID NO: 485857 - DNA, 100 bp, Homo sapiens
tgcagttttgaatcctttatgctttcaggatgccaacccgcccctgaaggttattccccaacacttcaatggcaacagcaacaagtggcacagttttcaa

SEQ ID NO: 485858 - DNA, 98 bp, Homo sapiens
gcacgtacaatacagaaatgctgatgtctgagctgagtcctgaagaccagagagttccttttgaggatggccacacagacaaccacttacctctttta

SEQ ID NO: 485859 - DNA, 75 bp, Homo sapiens
gggggcctcaaacgtggagatcaactcctctctgttaatggagtgatatgcacccaatgtccagggagcgtgcaa

SEQ ID NO: 485860 - DNA, 80 bp, Homo sapiens
ttggaaattaattgctatcaatgcgaatgatcctgaagcctcaaagtttcatgggacatattaaattggctaaatttgga

SEQ ID NO: 485861 - DNA, 50 bp, Homo sapiens
gagtgcatcgaggacctgtctgaagataccatgtttgtgtggaagtgccc

SEQ ID NO: 485862 - DNA, 115 bp, Homo sapiens
caggaaagataatggaggagaaagaagagttttgggattgatacaggataaagggaacagtcactgaggataagaacaatgcctcccatgttgtgtatcctgtcccggggaatct

SEQ ID NO: 485863 - DNA, 100 bp, Homo sapiens
gatgccctgcagtacctgcagaaggtctctggagacatcttcagcaggagttcaaagaaggacgcagagccagccacacagccccacaggtcctctttag

SEQ ID NO: 485864 - DNA, 74 bp, Homo sapiens
accctcagtacgccacctactattacccccagtatctgcaagccaaggttattcagcttctcaaggctggaaaa

SEQ ID NO: 485865 - DNA, 100 bp, Homo sapiens
ttcacttccctcggtctgggcttctctgaggcggcgagagatggtcaggtctggagctcgaccgggccaggcaaatacgccatgcgagacctagtccaca

SEQ ID NO: 485866 - DNA, 100 bp, Homo sapiens
ctgcactttgccttggaggagcccaggtgtgatttgccagaacaggagatattccagatgagaggtggtgggcccagaaaccagcctggacaccaagtct

SEQ ID NO: 485867 - DNA, 100 bp, Homo sapiens
ctacccaagtacatatgatttcagctgcaatggcagatgttccatttaagcagacctcttccatagctgtagctggagcggtaattggagctgttcttgc

SEQ ID NO: 485868 - DNA, 80 bp, Homo sapiens
acttcaatgcccagtccccagctcgccagcgtttgggatgtacattccgttcctgcagctgaattgcgacctccgcaaga

SEQ ID NO: 485869 - DNA, 90 bp, Homo sapiens
aaactgaggcctggagaggttaaagagacccgttcagagtcctacagtggcagccccaagactagcatctaccaactcctcagtcctggg

SEQ ID NO: 485870 - DNA, 74 bp, Homo sapiens
catactatccgtttgttcaggaaccaccagtgacagagtcaaagattctaaactgcctgcatataaggatctcg

SEQ ID NO: 485871 - DNA, 90 bp, Homo sapiens
gtccctcagcccttctgagctctgtgctgaacaagatccaacttagaaataatgtttcattcaagataaggctcgtggcttaggagattg

SEQ ID NO: 485872 - DNA, 82 bp, Homo sapiens
catgagtatacattcagtatcatggatgaatttcagacaagcaaagtggatcagcaaaggctgcagtcaccagcatcttttc

SEQ ID NO: 485873 - DNA, 75 bp, Homo sapiens
agaaggagttcgtgcaggcgtacgaggatgtgctggagcggtacaaagacattcaggttttgatgggaagccttg

SEQ ID NO: 485874 - DNA, 90 bp, Homo sapiens
gctctgccgaagaccttaaaatggccagaagtctggtccccaaggctctggagccatacgtgacagaggaggcactgaagctgcacaatg

SEQ ID NO: 485875 - DNA, 90 bp, Homo sapiens
gccagcgagagccgcgggagagtgtgcagccgagtcactactgcctgcctgcctgcctgctacgtctgcgctcctcagaccaccggcagg

SEQ ID NO: 485876 - DNA, 82 bp, Homo sapiens
ccctggattcaggggccttccagagggtgttgatgatgccttctatacattagttcgagaaattcgaaaacataaagaaaag

SEQ ID NO: 485877 - DNA, 51 bp, Homo sapiens
taccactattccaaccaagaagagccaggtttgatgacaaatacaccttga

SEQ ID NO: 485878 - DNA, 76 bp, Homo sapiens
tttgccctgaacatcatgaattcccaagaaggaggaactcaacagaggcaattattatcccgactgcaaatcgacc

SEQ ID NO: 485879 - DNA, 73 bp, Homo sapiens
agttccaaggttacgtttcagtctatgaaaattatcctacttatgatttaactgaaagaaaagatttcataaa

SEQ ID NO: 485880 - DNA, 100 bp, Homo sapiens
tgcagcagatcatggccatcaccgaccagagcctggacgaggcacaggccagtttaattggttggggtcagataagaagaggagtgacaatcaagccaac

SEQ ID NO: 485881 - DNA, 87 bp, Homo sapiens
tgggtcatgaaacttaatccacagcaagctcccttatatcaggaacgaatttcatatacacctccagagagcccagtgccgagttac

SEQ ID NO: 485882 - DNA, 100 bp, Homo sapiens
cccatttctcctcctttgacagggacatcagtggagccttctcagacccacagctcattgctatggacagtgctatcaccctgtggcagttccttcttca

SEQ ID NO: 485883 - DNA, 100 bp, Homo sapiens
acggccgcggggactcggagctgagaggagctgctgctcggaccagcgcgattagccgatgaattacatatgccatctctccctgaaatgatgtttggag

SEQ ID NO: 485884 - DNA, 87 bp, Homo sapiens
gctctggccgcgcctggcctggccgggaccatgggtttccaggcctgaggtgcccgccctggccccaggagaatgaaccagccgcag

SEQ ID NO: 485885 - DNA, 75 bp, Homo sapiens
caaagatttactttcccatccgtgactcctggaatgcaggacataagcagctctatgaccaatagcacagctgcc

SEQ ID NO: 485886 - DNA, 74 bp, Homo sapiens
tcaagtcaaacagccacgctggatggaaacagtcaagatgagacaaaggctcagagaggtgaggtcacttgctc

SEQ ID NO: 485887 - DNA, 75 bp, Homo sapiens
cttcggctgccccaatccccggcagctctctcagcctcccaaagtgaaatgcctgaccaagatctggcaccccaa

SEQ ID NO: 485888 - DNA, 96 bp, Homo sapiens
cgagaggccgtgcgggacgcgggcgccaggaccggccgaacgcagaggctgaaggtgatgtggccgccctcaaccgacgcatccagctcgttgagg

SEQ ID NO: 485889 - DNA, 100 bp, Homo sapiens
atcagactcatttccgtttaagagaagctcaaggccgaagccgagcagaggatctaaatacaagagtggcctattggctgagagcagtttcagtgaagaa

SEQ ID NO: 485890 - DNA, 100 bp, Homo sapiens
accaatcagaaataatatccaatcagtacaacaatgagccttcaaacatatttgagattttctggcatccttaaatcttgtgtcaaggattggttataat

SEQ ID NO: 485891 - DNA, 97 bp, Homo sapiens
tcttctgcctcagcctctcgagtagctgggattacaggtcaggaataaattagatggtcagtattatgcaataaaaaaaatcctgattaagggtgca

SEQ ID NO: 485892 - DNA, 82 bp, Homo sapiens
cttggactgagtcctgcaggacacagcttgtagacaaaagacgtcactctcattccttaatcgaccagaccttccaaacctg

SEQ ID NO: 485893 - DNA, 90 bp, Homo sapiens
ccggagtttgacgaagaggtggtttttgaggggaacaggaacctgataaagaatcaggagcctcagtggatgaagtagcaagacagttgg

SEQ ID NO: 485894 - DNA, 82 bp, Homo sapiens
aagccctgggtcgcttggaagaagccaagtactgccaaatctgtcgaaagggagataatgaagaactgcttcttctttgtga

SEQ ID NO: 485895 - DNA, 100 bp, Homo sapiens
tcaactgctgtattgcagaacagcctcagcctggagcaatggaccacagaaattctgcattgaaaaagttgggaaagaaaattggctacccagaagtcat

SEQ ID NO: 485896 - DNA, 101 bp, Homo sapiens
caccaacaaaatccaacacataaagattcacacttgaaacagattaatcagggtactactgagcgagtgtgcttgatccagggaacggttgaagcactgaa

SEQ ID NO: 485897 - DNA, 100 bp, Homo sapiens
accgtgggcatcgacttcaaggtgaagacagtctaccgtcacgagaagcgggtgaaactgcagatctgggaaatactcttaattctaaggaaaacctgga

SEQ ID NO: 485898 - DNA, 100 bp, Homo sapiens
gcttgaaggaaatggaggcggagatggccctgtccgagtacaacgccttctggaaatgcgtccaggctggagtcacctacctctttgtccaactctgcaa

SEQ ID NO: 485899 - DNA, 89 bp, Homo sapiens
ttcctgcagatcaccgggggcgccctggaggagtccctgaagatctatgctcctctgtacttgggagaaggttttatacaagaaaatgg

SEQ ID NO: 485900 - DNA, 101 bp, Homo sapiens
gaagtttcccagaaaaaatgcccagcgcggcgcggggctgcggagtcgtccggagccgctgcgcgggctcgtgcaatccgcttcagacaggatggtaacga

SEQ ID NO: 485901 - DNA, 100 bp, Homo sapiens
cccgcgccgacggctgctcaaacatcaggatccagacaaagacggtagctcagtgcgttgagtattattacatctggaaaaaaatgatcaagtttgactg

SEQ ID NO: 485902 - DNA, 143 bp, Homo sapiens
gctactcccgcatgcgggccctgagccaggagatcacccgcgacttcaacctcctgcaggtctcggagccctcggacccactgatctcagcatgaagagacaattggcgactagctcaggatcctccagcagctcaaactcca

SEQ ID NO: 485903 - DNA, 75 bp, Homo sapiens
aacccctcacctggccagcgggacagcaggttcaacttcccagagtcaagaattgaaggttggctttcagtacca

SEQ ID NO: 485904 - DNA, 75 bp, Homo sapiens
gtcagtagcctctcactgaatgagcctgaagacaaggatgtgactgcacagcatcagaaaaccttcagtgtttct

SEQ ID NO: 485905 - DNA, 73 bp, Homo sapiens
gcctccaggagcccagacaccagccccccaccatgaaatcctaagtaatgcactgaagagaggagagatcatt

SEQ ID NO: 485906 - DNA, 82 bp, Homo sapiens
caggccagaccctctgggagcttctcagccattttccacagatcaggtggcagtagagaagagcatcacagaagttgctcag

SEQ ID NO: 485907 - DNA, 98 bp, Homo sapiens
caaaactacagttctgtcactcacttacacagtattgggaaatctgtgaaaggcatccgtgtcattctggaccttactcccaactaccggggtgagaa

SEQ ID NO: 485908 - DNA, 75 bp, Homo sapiens
cctcacttcctgctgtatccccagacccaaaggaatcttttgggtgagttgtgaggctggcacctacattcggac

SEQ ID NO: 485909 - DNA, 58 bp, Homo sapiens
gcggccaagactccgtcctgcaagccacccaggctactttgggaaagttggtatgaag

SEQ ID NO: 485910 - DNA, 51 bp, Homo sapiens
tggccactccagagcctcctccccagtgcaggtcagctctgcggacgctcg

SEQ ID NO: 485911 - DNA, 100 bp, Homo sapiens
tttggcaggtttgggagctgagcgaccagaaacaggaagcaagaggctactatgagcagactggagttggacctctgcccgttgtgctgttcaatggaat

SEQ ID NO: 485912 - DNA, 75 bp, Homo sapiens
tgagagcagacacgatgtgaagatccattgctcccattgaggcagacaaggcaatctgaaagcaaatcctgttta

SEQ ID NO: 485913 - DNA, 80 bp, Homo sapiens
agatgtggaaacagagatgcaacagtttcagctgtgagttcaacatggaggcaaatcagtgccccctggttgtggaacca

SEQ ID NO: 485914 - DNA, 90 bp, Homo sapiens
ttccggccacccattgatttgatgcataaaggcagctttgaaacatggatcaatcttcctgtcctacaactgacaaaggatcccctaaag

SEQ ID NO: 485915 - DNA, 123 bp, Homo sapiens
tccaaccgagtggtctgccgagaagccagtcacgccgggagctggtacacagcctcaggagaagttgccccagtgcaaggcactgcattcgacctgagaaagccagtggagcttggaaaacac

SEQ ID NO: 485916 - DNA, 101 bp, Homo sapiens
gatctcctcatgagctttggtatccttaaacctgacttaaggattgtctttgtacataacaagctacaggaccgcactcagttcagtgaccgagacttagc

SEQ ID NO: 485917 - DNA, 100 bp, Homo sapiens
ccgcctcccgccgccccggcccggcgcgcagcaaatccagtttgctgatgacatgcaggagttcaccaaattccccaccaaaactggccgaagatctttg

SEQ ID NO: 485918 - DNA, 75 bp, Homo sapiens
tcaagaccaaggaaaagctggcacagaccgccacggagacaagaggagcagcagcggcaccgcccctcaccctgg

SEQ ID NO: 485919 - DNA, 100 bp, Homo sapiens
atccagaggccctgagcagctttcagcactggagtctgtagatggacggcagatccgagtagaccaggcaggcaagtcgtcagacaaccgatcccgtggg

SEQ ID NO: 485920 - DNA, 100 bp, Homo sapiens
gcaacatagagctgacattaactgtcaggagtctccccaggacagtgctatcacccgggatattaaccgaacattcccagcccatgactactttaaggac

SEQ ID NO: 485921 - DNA, 50 bp, Homo sapiens
gagagtgctacccggtgtactggaaccgatttcttcaagaagttcttata

SEQ ID NO: 485922 - DNA, 100 bp, Homo sapiens
ctgggacgctgagagggagacgctccaagaggctcctcagtgtgggcgagtaaaatgccctgcgtgtgagaagcagatcatggaagggaagtggttgctg

SEQ ID NO: 485923 - DNA, 50 bp, Homo sapiens
caccgacgctgacagggatggtgcctgccactgaggcggctcccagctgc

SEQ ID NO: 485924 - DNA, 102 bp, Homo sapiens
tgcacaccaagggcgcccttcccctggatacggtcactttctacaaggctggcatggctctatataagattgtccccaaaaatccctactacttttggtctg

SEQ ID NO: 485925 - DNA, 100 bp, Homo sapiens
tcgggtcgtggagccaggagcgacgtcaccgccatggcaggcatcaaaggacactcatgaggaccatgatacttccactgagaatacagacgagtccaac

SEQ ID NO: 485926 - DNA, 98 bp, Homo sapiens
ggcatcttggatcctcggccaaccatcatcaaagcaagggtcaacagaagaggtgaatccatttaccttcataaccgagccaactgggtgaccgtagg

SEQ ID NO: 485927 - DNA, 132 bp, Homo sapiens
aggttctgggagacgcacagctaagatgccaggacatcctggaagctgggaaaaggccgagacgcatccagagctttcgtgaccggggactgttctgaagcaggcctcgtggatgacgtatccgacctgtca

SEQ ID NO: 485928 - DNA, 101 bp, Homo sapiens
agctgaggaaccagatatcttgaaaagctgccagaaagttgctgattgttggaggttcttttggtcttcgtgagttttctcaaatccgatatgatgctgtg

SEQ ID NO: 485929 - DNA, 106 bp, Homo sapiens
cacggcgcagacgcgggcgagctgcggctcggacgccagcggacacgcgggcgaggtgagaagccctaccactgcaactgggacggctgcggctggaagtttgcgc

SEQ ID NO: 485930 - DNA, 51 bp, Homo sapiens
gaggaagtgtcagcgctactgccgcagggcggcgactggcggcgcgatgga

SEQ ID NO: 485931 - DNA, 75 bp, Homo sapiens
tctaaccttcagtactaaagaagatgcagtttcctttgcagaaaaaaatgggatttatttaatggggatgtgttc

SEQ ID NO: 485932 - DNA, 100 bp, Homo sapiens
caggcgtggcagagggagcagtgcccgagcgcgatcatagcaatggatcatttaacttgaaagctttgtcaggaagctctggatataagtttggtgttct

SEQ ID NO: 485933 - DNA, 82 bp, Homo sapiens
gaacatccacagaatagacctgaagacaaaaatccagaagtacaagcagtctggttaattatagaaaatgccaagtaggaaa

SEQ ID NO: 485934 - DNA, 98 bp, Homo sapiens
tttgggaggggaagttcaggaaacatccaagaaaaatgtccttaaagcaattgagcaggctgatctactgcaggagaggaaatatcattctgcaaaag

SEQ ID NO: 485935 - DNA, 100 bp, Homo sapiens
catacaatgaaactaaatatatcagatatgagaggggtaatgtgtgaagtgctgttttcagctacagcaaatgtgcatgaaaatttaacatcttccatcc

SEQ ID NO: 485936 - DNA, 90 bp, Homo sapiens
aggaggtgtcctggatttcctggttctgtgggctccgtggcaatgaattcttctgtgaagctccccaaaaaggccacaaagacagcccca

SEQ ID NO: 485937 - DNA, 82 bp, Homo sapiens
aggcatgccccgctacgagctggctttaatcctgaaagccatgcagcggcttcgagagctgtgcccaggagtgaacaaccag

SEQ ID NO: 485938 - DNA, 75 bp, Homo sapiens
cctcaatagcctcatctcttcagggatgcagttattaaatgctgttcttctctcctaagttgaaaatcagaaact

SEQ ID NO: 485939 - DNA, 51 bp, Homo sapiens
ctggctggcttcagtggaccaagtatgtattcccgtgtgccagagtgccag

SEQ ID NO: 485940 - DNA, 100 bp, Homo sapiens
agtgacatgtacattctcaatgagagcctcacagacccagccatcgttaagtgcagagtggacctccagcaaactccagcagacctgcagcagaggggcc

SEQ ID NO: 485941 - DNA, 75 bp, Homo sapiens
tgaacggagtgaccaagagcaggtttgaggctgctctttggcgtaaattgcaatcgattagggatcgtttctcag

SEQ ID NO: 485942 - DNA, 75 bp, Homo sapiens
cgagccggccgtcccgggccgggggacccgcccgccatggccaccaagctccagaagaaaaggaagtcattaaag

SEQ ID NO: 485943 - DNA, 87 bp, Homo sapiens
aggctctgcaccaggcccggctgctggccctcctggtcatcccgcctgccatcacccccggctgggagtgtccactcgccttccacc

SEQ ID NO: 485944 - DNA, 74 bp, Homo sapiens
tttacgattccaggacaagcttttgtccccaaaccagagatgaacgactttcgaagtaaaatgcaatcaatatt

SEQ ID NO: 485945 - DNA, 98 bp, Homo sapiens
cagtgcacagcccaggagctggtgaaactcctcaatgagctcttcggcaagttcgatgaattagccacgatccaggtgattgagaatgatagagccag

SEQ ID NO: 485946 - DNA, 100 bp, Homo sapiens
ggtttataaagccacttaccacttcatctttgcacagaaaaacttctttacagggctgtcacatggtgactgaagaacttcattccataacgtttgaaac

SEQ ID NO: 485947 - DNA, 50 bp, Homo sapiens
gaggcacggagggtggcgaggcagtttggcaatgaggagcagcagctggc

SEQ ID NO: 485948 - DNA, 90 bp, Homo sapiens
cccacttgaagctttaaaagagaaatacttgaggccttctccaggattcttgtttcacccacaagagtcagtggatcggtggggaaaatg

SEQ ID NO: 485949 - DNA, 100 bp, Homo sapiens
cagcattcaggaagtaccaacaaacagcagcaatcaccacccaagaaccggccctccgtgatcacctgtgcctcggctggcgcccgcaactgcaacctct

SEQ ID NO: 485950 - DNA, 90 bp, Homo sapiens
tcgcgctgctgggcacccacggagcctccggggctgacttcccaagtaagaagcggaagaggagccgctggaaccaagacacaatggaac

SEQ ID NO: 485951 - DNA, 89 bp, Homo sapiens
cctatcagaaccatctaattctgaaagttttagtgtttctccacagacactacccaaagcagtccttcactacagtggcagacagacct

SEQ ID NO: 485952 - DNA, 82 bp, Homo sapiens
tcgagagcgtcatgaacccgagctatagagaaaggagatgagacctgcctagagctggaacgttacctccagagcgagccct

SEQ ID NO: 485953 - DNA, 100 bp, Homo sapiens
gctcgagaacgaagtaggccgtctcgctctgggtctccaggcccgcgaccgtccgccagtcgtcccgagtccctgaagaggaaggagaaggaatatgagc

SEQ ID NO: 485954 - DNA, 51 bp, Homo sapiens
tggggaaaggcagctttggcaaggctggggctgccccgacctcgtctgcta

SEQ ID NO: 485955 - DNA, 75 bp, Homo sapiens
tgcaggaggctatacttcaaatcctacttataaagaagtctgctcagatcatagcaatggatcatttaacttgaa

SEQ ID NO: 485956 - DNA, 98 bp, Homo sapiens
cccgtgaaggcaatgatttataccatgaaatgattgaatctggtgttatcaacttaaaagatgccacctctaagcatgaagaggaaccacctcagaat

SEQ ID NO: 485957 - DNA, 80 bp, Homo sapiens
cggtgcccgaggaggcagccaagctcgtggcctgcctctgcgtgctgtactaatggtcacttgatgtgcgctggctgttt

SEQ ID NO: 485958 - DNA, 100 bp, Homo sapiens
gattatggcaatgagaagaccttggagcactatacccacaacactgtccgagggtgctcttatttctacagaaactggcgatggaatatgagaggagccc

SEQ ID NO: 485959 - DNA, 74 bp, Homo sapiens
ccggcctctcgggagccgtggggcagaggctgcagagccccaggagggtggagctgatcagaataatgttcagc

SEQ ID NO: 485960 - DNA, 100 bp, Homo sapiens
gctgcgtgttgtccacccaagatggagttcctcctggggaacccgttcagcacaccagtggggcagtgcctcgtgttcctaaacccaaaggaaagaaaac

SEQ ID NO: 485961 - DNA, 75 bp, Homo sapiens
gaagtcttttgtacagtggttaggaaaggtcctcaaagattcagtgtgcttggttactggtattcttagcaggat

SEQ ID NO: 485962 - DNA, 83 bp, Homo sapiens
gattgggctgagcagaggacgacatgttgcttttcgtggaggtttggtgcacctcgatttggaggaagtagggcagggccctt

SEQ ID NO: 485963 - DNA, 75 bp, Homo sapiens
ctcgccgcaggactccgactaccaggcaccggtaagctgctgtactgccatcctcctcctggaagagatcctgta

SEQ ID NO: 485964 - DNA, 74 bp, Homo sapiens
atttttagaactccacatttgaggtgtgtggcttttgaagaaaataacagctttgctgagccatcaaggtctaa

SEQ ID NO: 485965 - DNA, 75 bp, Homo sapiens
gatgaaagataaagcccttaaggacaagtgtactaaaggaagtataccaagcctttaatcccaaagcagtggtct

SEQ ID NO: 485966 - DNA, 100 bp, Homo sapiens
gagtgtgtaggccagccccggtcacagagtgcaccgtatcctgtcacttctggatgtgagatgagctttgagaaaggccagggcgtgctcattgggaatt

SEQ ID NO: 485967 - DNA, 75 bp, Homo sapiens
cgaggaggttgggatcttcttcactgcctctggcatggatgaggatgatgatgctgaagctatccttgctgcaga

SEQ ID NO: 485968 - DNA, 83 bp, Homo sapiens
tttgcaatatgactttggaggaattctcggctggagagcagaagaccgaaaggctgaaggtgatgtggccgccctcaaccgac

SEQ ID NO: 485969 - DNA, 75 bp, Homo sapiens
aatttagcagtgtagacaatattgtccaggtatcttggagatggccgcttccatctggagtctgtcatgattgcc

SEQ ID NO: 485970 - DNA, 75 bp, Homo sapiens
ggtgacctgaatacagcccaccgccccattgaccactgggatgcagtcaacctgtcttatgatgtaatcagcgcg

SEQ ID NO: 485971 - DNA, 100 bp, Homo sapiens
gccggtgagatgatcgaagccccttcccaggtcctcaactttgaagagatcgactacaaggagatcgaggtggaagagattgggaaaatgaggtacgtta

SEQ ID NO: 485972 - DNA, 82 bp, Homo sapiens
gaacatcctctttaacccagttcccaccctcacagtcaggacatggatttgattgacatactttggaggcaagatatagatc

SEQ ID NO: 485973 - DNA, 100 bp, Homo sapiens
ccagatccatttacactttacagcttctcacggcattcagcagcagcgttgctgtaaccgacaaagacaccttcgaattaagcacattcctcgattccag

SEQ ID NO: 485974 - DNA, 100 bp, Homo sapiens
ttggtgtttgctacacccctgtgttgtgccctgtttcctcagaaaagcttcttggacacttaatgattgttggcaagaaatgtgctgctgatctgggcct

SEQ ID NO: 485975 - DNA, 75 bp, Homo sapiens
gacttccttgctactgcagaacttgcaggaacagagtttgtagctggtaccagcatgtgttacatagaaatctca

SEQ ID NO: 485976 - DNA, 102 bp, Homo sapiens
tctacgagtttttgccagctcagacaccatcaagtacggacattgctgcaggagaagaggttgccatcaagcttgaatgtgtcaaaaccaaacaccctcagc

SEQ ID NO: 485977 - DNA, 88 bp, Homo sapiens
caggcggcaccctgtccccgaggaggggaccatgacacataaatcttggtgccaataatggaacgaacactggacacaggactgggga

SEQ ID NO: 485978 - DNA, 50 bp, Homo sapiens
gaaaaatattgctgtacctaaattcaagatatgaatgattatcctcctgt

SEQ ID NO: 485979 - DNA, 74 bp, Homo sapiens
cttatgctgccagccgcctgctggctgctgcctgcatttgcatggaaggaagttcgactgcataagacaacatg

SEQ ID NO: 485980 - DNA, 100 bp, Homo sapiens
tatttggcagatctgaagggaaagctccagatactatcaccattactttaagtactgcaaaatctcagcattggctctgctgaagatggtgatgcatgcc

SEQ ID NO: 485981 - DNA, 83 bp, Homo sapiens
tcctgggatcagatgtgcattgaggtgatttgatgaaggctgctgcaggagagttcgcagatgatccctgctcttctgtgaag

SEQ ID NO: 485982 - DNA, 97 bp, Homo sapiens
aagaatatctggttattatcaggttcacgccaacagtacctcattgctctttggcgactcttattgtgaaaatgcctcgtgtaaaagcagctcaagc

SEQ ID NO: 485983 - DNA, 48 bp, Homo sapiens
gccaccggcgttgagtacttcaacacgatttcctcctctgatgctcct

SEQ ID NO: 485984 - DNA, 83 bp, Homo sapiens
gttcagtcaggacgtctacctgtccaccattgtgaccgaggttaatgttcgtgaagaaattgaagagttttttccaagaatgt

SEQ ID NO: 485985 - DNA, 100 bp, Homo sapiens
cacagaattatcaaagacttcatgatccaaggaggtgacccaacagggacagctcatttagaggcgagttttgaggaggtagagaacaacctgctgcatc

SEQ ID NO: 485986 - DNA, 100 bp, Homo sapiens
gaaaactttatgaaatgccaaaatgttccaaatcagaaaaaatagaggatgctttattatgggaatgcccagtgcatgataccagtagtcctttgctaat

SEQ ID NO: 485987 - DNA, 100 bp, Homo sapiens
aagcataagagccagcaagatacattccctcaagtgtccagaatttccaattacagacgacaaagtagcactgcgtggaggtcctgaataaccatggtgg

SEQ ID NO: 485988 - DNA, 100 bp, Homo sapiens
gcctccccgtccagaagcctgtaggaaagcggaagcggcctggcaggggaaggatcgaggtttcaagtgccccatttgctccaagtctgtggcttctgac

SEQ ID NO: 485989 - DNA, 116 bp, Homo sapiens
gaacaattaggtcctccacaatgaagacaggtaatgtggaggaaagagagcttgtcatgcccctagtccaattcctgacccttcagtagcaactgttgccacaggggaaaatggca

SEQ ID NO: 485990 - DNA, 98 bp, Homo sapiens
tccattgactatgcagcctaatgaattatatccagatcgagagacagaagattctgaaagggttcaatgaaatgagagtcatcttggacaatgaggag

SEQ ID NO: 485991 - DNA, 100 bp, Homo sapiens
gctcagcaatgcggttccagttccaggatgtcactgtatacccgaaatcttgtggatcaaggaaatggaaaatttaatctgatgattctctgttggggtg

SEQ ID NO: 485992 - DNA, 98 bp, Homo sapiens
tttaaacagccaaaacagttcattcatattcagcctgctgtgacttactcgaagcctcgattggccacattttggtactacgccaaggttgagctggt

SEQ ID NO: 485993 - DNA, 97 bp, Homo sapiens
aaaggtgtgctgtgcctgaggccagaaatcgagctatagcagattatcttcgttcaaatggctatgaagaggcatattcagtttttaaaaaggaagc

SEQ ID NO: 485994 - DNA, 83 bp, Homo sapiens
cgagaagctgccgccgaacgacaggacgttggggcggcctggctccctcagggtggaagatgtctatggatgtgacattcctg

SEQ ID NO: 485995 - DNA, 74 bp, Homo sapiens
aggagaatttgggtgtcaaagtcaaaagaggagataaggatgctaaattccgtctgattctaatagagagccgg

SEQ ID NO: 485996 - DNA, 82 bp, Homo sapiens
ccgtagggaggacaccgtgacttcccggacgctgggaaatgcacatctccatcccccagcctgactgccccgcagaggcgcg

SEQ ID NO: 485997 - DNA, 74 bp, Homo sapiens
gagaacagccgtgtcatcgtcatgaccacccgagaggtggagaaaggccggtggcgagtaagaaaagaagctat

SEQ ID NO: 485998 - DNA, 129 bp, Homo sapiens
caaacagcccgcctttttctctcacactttggatttttgtccttagaagcactgaagctctggcccctcctcaggccgaatggatcagcttccccagaagaatctcctgcgactacaccctgctggctc

SEQ ID NO: 485999 - DNA, 76 bp, Homo sapiens
cgcctcccgagaagaagttgaggcgctatgctcagtagatgaaggcgtttctgagggcttgcctacacttcaaagc

SEQ ID NO: 486000 - DNA, 90 bp, Homo sapiens
ctggccgctgccaaacatgtgcaggattaaagcaaggagagccaatcatgactggcaaaacacagaccagcaacgtcaccaataagaatg

SEQ ID NO: 486001 - DNA, 50 bp, Homo sapiens
caccttttctctaagaagtaatgattcactgcgtgctgtcctcacttgtt

SEQ ID NO: 486002 - DNA, 90 bp, Homo sapiens
ctctgctgcggcgcggggaccgctgtgctctcgacttttggaacagcgatcgtaatcaatcctgagaaagacaaagacatggtccaagac

SEQ ID NO: 486003 - DNA, 75 bp, Homo sapiens
cgtctacataacaagcgtgctctccgaagcacgaaagtcaaagaagttgggaaagttaaaagggattcacgagga

SEQ ID NO: 486004 - DNA, 100 bp, Homo sapiens
aaattaagaaatgatttgagagaaaacagaaatcttgaaacagtgtctcctgaaaggaaggattgcacccaaaattatagagacaactggagttcatttt

SEQ ID NO: 486005 - DNA, 100 bp, Homo sapiens
ttcagctcgtttccttttgaagctgcccgtagatttcagcaatatccccacataccttctcaaggcatcctctggtatcacgattccaaaacccccaaag

SEQ ID NO: 486006 - DNA, 100 bp, Homo sapiens
gtgggacttgtgtagtggagaaaaatggtcctatgtgtcggatcaggtctcctgggcatggctaacattgacctggaaaagagcaggactggtgatgaaa

SEQ ID NO: 486007 - DNA, 100 bp, Homo sapiens
cttgaccagccgagggccatcgccttggaccccgctcacggttcctgggcttcccgatggactcgagtttttactatgtgagcatcccggtgcctgcaca

SEQ ID NO: 486008 - DNA, 101 bp, Homo sapiens
gcagagtcggcacctgaaggacatggagaacatgccagcagaagcattcaccaactgacatgtgccctgaaagaaggcgatgtcactattggagaagatgc

SEQ ID NO: 486009 - DNA, 50 bp, Homo sapiens
cacctgtgcgggatggaacaaaagcctacaaggagaagatgaaggagctg

SEQ ID NO: 486010 - DNA, 100 bp, Homo sapiens
agagacccgggcagaaccaggcgtccaggacgccgctgaccaccctcaacacggatatcagcatcctgtccttgcagggccgttgctccagggagaactg

SEQ ID NO: 486011 - DNA, 74 bp, Homo sapiens
cgcgacttcaacctcctgcaggtctcggagccctcgcttggttctacagccattgggatccagacatcagaggg

SEQ ID NO: 486012 - DNA, 100 bp, Homo sapiens
agtctaaacctgtgaccacccctgaagaaattgcacaggtaaagtcagtgataaatcttttgtttgctgcatatactggagatgtgtctgcacttcgaag

SEQ ID NO: 486013 - DNA, 98 bp, Homo sapiens
cgcgctcaaccagatcgcgcgggagtgagcagtgaagattcagaagattctgattttcaggaatcaggagttagtgaagaagttagtgaatccgaaga

SEQ ID NO: 486014 - DNA, 100 bp, Homo sapiens
ctaacacccacagatccctctatgactgcaatgtgaggtctcctctgagcctccggcctccataagacccaaaacagatgacacctcttcccagtccccc

SEQ ID NO: 486015 - DNA, 74 bp, Homo sapiens
gattcctggatgacaatcagatcgtcaccagctctggagacaccacgtggaagatcccagtgtctgagtgaact

SEQ ID NO: 486016 - DNA, 76 bp, Homo sapiens
aagttgtatagctgtatcattggcaacatgatttcggttaccacattctcatctggagccaggaggaagccaggac

SEQ ID NO: 486017 - DNA, 83 bp, Homo sapiens
cgaggccgtgggtacgaccggaagccgcaggaactgtggctgcaccatctgtcttcatcttcccgccatctgatgagcagttg

SEQ ID NO: 486018 - DNA, 82 bp, Homo sapiens
agccgatccagcctgcggagcctgtggggcagctgtgagttctttggaattgtgaacattcttttgaaatatggagcccaga

SEQ ID NO: 486019 - DNA, 99 bp, Homo sapiens
agagtgtaacttcattacttgaacatttaccagcttcagtgtcatttgaggacgtgactgtggacttcagcaaggaggagtggcagcacttggaccctg

SEQ ID NO: 486020 - DNA, 83 bp, Homo sapiens
ccggcccttctccctcctgggtttcggagacattttggtgccagtaaaggcatgacttcctggcaccacagggaaaatcgggt

SEQ ID NO: 486021 - DNA, 50 bp, Homo sapiens
tgagcctgagcccgacattattcctgagatcagtggaccatcccctgccc

SEQ ID NO: 486022 - DNA, 100 bp, Homo sapiens
agcaggggtcagctgggccgcaggggcgcgcagcgcggggagctgccagtcttacttctcgtttgccaaaaactggagaaaccatccatggacataagtt

SEQ ID NO: 486023 - DNA, 80 bp, Homo sapiens
aaggtctcagagctttacgatgtcacttgggaaggaatataaatagtttctggaaaggacactgacaacttcaaagcaaa

SEQ ID NO: 486024 - DNA, 75 bp, Homo sapiens
gccaaggaggagcggcgcatggaccagattgaggtggtgccttctgcctctgccctgatcatcaaagccctcaag

SEQ ID NO: 486025 - DNA, 90 bp, Homo sapiens
gccagaacttaattctgaacatgaatgaccacggctttgtgggcaattgaaggaacagactaaaaatcgtgtcctggaaggaaactacag

SEQ ID NO: 486026 - DNA, 90 bp, Homo sapiens
ggcttcagtgcctgccttgggaactctcttcctgccaagatgtctattggtgtgccgattaaagtactgcatgaggccgagggccacatt

SEQ ID NO: 486027 - DNA, 87 bp, Homo sapiens
aagccgggcgggagcccctcggccagggtgtccgcaatgttgccagtgtctgtctgcagattggctacccaactgttgcatcagtac

SEQ ID NO: 486028 - DNA, 100 bp, Homo sapiens
gctttttgtgctgccagcaagaaatgatcagtagcaccagtgtttatgttttccaagagataacttcaccaagatgtccagtgataggcaaaggtccgat

SEQ ID NO: 486029 - DNA, 121 bp, Homo sapiens
cagcacagttcctgggaaggtggagccaccagcctctccttggacccagatgatgtggtaccagttggccaaagaagagcctggtgttggtgcatgtgctttggactagcatttatgcttg

SEQ ID NO: 486030 - DNA, 99 bp, Homo sapiens
agatggaagattttgatgcaaatatcgaagaacagaaagaagaaaagaaagatgcagaggaagaggaaagcgaactgacccatcctcatgccaacaaac

SEQ ID NO: 486031 - DNA, 100 bp, Homo sapiens
ccattgctgaagagagagacaaaagactggcggccaaacagagcaaaactcccgttattgaaaatcgtagttcacaacaacctgtaagtgaagtttctac

SEQ ID NO: 486032 - DNA, 83 bp, Homo sapiens
ccacatcggggcagctgtatggcctggccagagaactctcggatgagatccaagtccagaacccagcttagactagaaagtct

SEQ ID NO: 486033 - DNA, 50 bp, Homo sapiens
gatatggaggagatgtatttagatgaaaactttcggaagagaaagttgcc

SEQ ID NO: 486034 - DNA, 90 bp, Homo sapiens
gcagatgttgtcaaggtggcctaccaggaggccaggggtgtcgccatgctttggacatcagacagtgcaggagaagaatgtgatgcggca

SEQ ID NO: 486035 - DNA, 98 bp, Homo sapiens
tcctcagttcagttgctggaaactatagatgaacctttgacacatgacataacagttccgatgaagttaaattccgtcaagatttaatgaatattgcg

SEQ ID NO: 486036 - DNA, 51 bp, Homo sapiens
ctgggttctgcccgcacggacccccatggttacacatcattttggaatgac

SEQ ID NO: 486037 - DNA, 75 bp, Homo sapiens
gtgtatttgatgctttctgaatgtgatttcaaagggcatcttctctgcattcagtttcatccaagtcattccggg

SEQ ID NO: 486038 - DNA, 75 bp, Homo sapiens
ccagacactgagagccgctttcatcaaggtgtctcgaaataatgatgtgtggcagaaccatgaagcagttcctgg

SEQ ID NO: 486039 - DNA, 98 bp, Homo sapiens
aagcattatgcacctcagtgggataaattcaaacttctcatggaacatctggaccctgatgaagaagaagaagaaggggaggtttcagctagcacaaa

SEQ ID NO: 486040 - DNA, 98 bp, Homo sapiens
gtctgtctgtccgtggtggatctaaggtcagaagacatgtcttcatctacatggcatctttccttacctctatgtgccatacgatggttatggacagc

SEQ ID NO: 486041 - DNA, 100 bp, Homo sapiens
gtttgtggaagatggcgcctgttgtgacagggtgctggagaatctggtaaaagcaccattgtgaagcagatgaggatcctgcatgttaatgggtttaatg

SEQ ID NO: 486042 - DNA, 83 bp, Homo sapiens
aagcaagcagttcagaagagccaaggaataaacatgcaatgaacccaaaagggattttgacacttcatgacatgtcattattt

SEQ ID NO: 486043 - DNA, 100 bp, Homo sapiens
cgcggactatgagagcggacgggccatacccaataaccaggtgcttggcaaaatcgagcgggccattgctcggcttattccaggggtgtgtttcgtcgag

SEQ ID NO: 486044 - DNA, 101 bp, Homo sapiens
agctggaggacctgaacctgcggcctgacccagagccacttctcaccgagatgattcatgaattactaaaagatgtaactgaactgcagatccttggtgaa

SEQ ID NO: 486045 - DNA, 119 bp, Homo sapiens
actgctgacgcggctaaagcagattggagctctgcagtaaccacagaaactggcgatggaatatgagaggagccctctggaaagaaaaggacagaccctgtgctttcatgaaagtgaag

SEQ ID NO: 486046 - DNA, 100 bp, Homo sapiens
ggagaggtacagaatttagctgtcaaatgggaaattggttacagtaaaatatttacgactagatagataccaccatcgctttccccaggctctcacttcc

SEQ ID NO: 486047 - DNA, 100 bp, Homo sapiens
cacactccaggaatgccagtgcatcttttgcacagctcctgaggaagaacttgatcctgaagagagggacaacttcctccagcagctttataagtttatg

SEQ ID NO: 486048 - DNA, 99 bp, Homo sapiens
ctcggagcgcggtccctgtattggtctcctgctcctagagtgtggacgaatgtggaacctcgctctgtggctgtgttcccttggcactccttagtcccc

SEQ ID NO: 486049 - DNA, 98 bp, Homo sapiens
gtgaccgagagcgcgaatatcgtcatcgttagaagaccctacagcttggggcctgggctcctctgaccatcctcattgagaaaggaaagtgagtccag

SEQ ID NO: 486050 - DNA, 90 bp, Homo sapiens
ctgcgggattggtatgacttcgtgtggaaccgcacgcgtggcatacggaagtggccctcatggagcacagcaactgctcgtcggagcccg

SEQ ID NO: 486051 - DNA, 83 bp, Homo sapiens
gttctcggaatcctatctagagcttacagcacttgcacctcctgcgccgccgccccccatccaaggatatgccttcaagcctc

SEQ ID NO: 486052 - DNA, 101 bp, Homo sapiens
caactcggcgccttgggaaccgctcgagcctaccagctgatcactggagattccatcgttagtgctgaggcagtatgggatcacgtcaccatggccaaccg

SEQ ID NO: 486053 - DNA, 100 bp, Homo sapiens
ccgaagttgggaaatgaagactttaactcagtcattcaacagatggctcagtatgacaacattttgatggaagaggctgctcagattctggagatagaaa

SEQ ID NO: 486054 - DNA, 110 bp, Homo sapiens
cgagcctctttcccccctctggagacgggccggaacctcaagaaggaggtcagccgggtgctgtgcaagcggtgcgggaacaacctatcttcagcactcgagctcatgtc

SEQ ID NO: 486055 - DNA, 75 bp, Homo sapiens
gggaagacctccagtctataagcccaggaagccgtcttcgaactcaggagaagatcaagcttcaggagtctccgg

SEQ ID NO: 486056 - DNA, 83 bp, Homo sapiens
gaagaagcagttctacaaggcgagccagatgaagacactgaggctcagagaggttaagtgactcagccaaggtcaaacagcta

SEQ ID NO: 486057 - DNA, 109 bp, Homo sapiens
agaaaagtcaggagaggagaaggtcatccaggctaagaatattgtacacaaagattcttgatgttcttgaggaaatccctaaaaatgcagcatatagaaagtatacaga

SEQ ID NO: 486058 - DNA, 82 bp, Homo sapiens
caaccacgatcaataacccctttagggttccagaccatcaggatatagcttttggggccttgcagcagggaactaactgcct

SEQ ID NO: 486059 - DNA, 74 bp, Homo sapiens
gcagtggtcgcttcttctccttggttcacctagaaatcaatgacccaaacgtcatttcacaagaggaagcagat

SEQ ID NO: 486060 - DNA, 98 bp, Homo sapiens
gagcaagagcttctgcctgttcagaagcattaccaacttgatgatcaagagggcatttcgcatgtgagcagcagtgacagagtgggcaagccttaccg

SEQ ID NO: 486061 - DNA, 82 bp, Homo sapiens
gttgacaaggcactgctttttcatgacgacttcccaagtaagaagcggaagaggagccgctggaaccaagacacaatggaac

SEQ ID NO: 486062 - DNA, 74 bp, Homo sapiens
cggggctcggtttggctgactggggagtcggcaggcggcaggtggccgtttgttgcatctgtttttttgttatt

SEQ ID NO: 486063 - DNA, 98 bp, Homo sapiens
atggtttctctcaaggactactgcaccagaatgaaggagaaccagaaacatatctattatatcacagaaactgttcaggttccattatcaaaacgagc

SEQ ID NO: 486064 - DNA, 75 bp, Homo sapiens
gaggagctcatcgggcagattagcgacatccgagtgcagaacctgcaagtgtctcaatgagatcttggagtcagc

SEQ ID NO: 486065 - DNA, 99 bp, Homo sapiens
cttggagcagcacttggaagacacgtcctatcagcagtatcctggtgaataaatatggaagtcgtatagtcatgattgttggtggctgcttgtcaggct

SEQ ID NO: 486066 - DNA, 82 bp, Homo sapiens
atggagaaggaagaggagtcgcttcctgcctgacacagctcacttcaagaagtgcacaatgtcagaacgtggaattaagtgg

SEQ ID NO: 486067 - DNA, 98 bp, Homo sapiens
tgcttctgttggctcagatacactctctgatttggggatctctagcctacaggatggcttggccttgcacataagaaatacatgctacaggatttaac

SEQ ID NO: 486068 - DNA, 101 bp, Homo sapiens
ccaagccccacgctggccggacagggccgcctgtcgccggtaatttgccatcttccatgtatgaatggtggccagtgcagttcaagggacaaatgtcagtg

SEQ ID NO: 486069 - DNA, 90 bp, Homo sapiens
acgcgaggtcacccctgggaaggagcgcagcccacccggcccctccgcatccgagcaggcctcccagaagttcctgccgaatcgtcttcg

SEQ ID NO: 486070 - DNA, 100 bp, Homo sapiens
aatcaccgtccttacacggcctctgatttcatagaaggcctctccttccgatgaaaagagaaaggaagaatggactacagccaccaaacgtccctagtcc

SEQ ID NO: 486071 - DNA, 50 bp, Homo sapiens
tccattcacactccccaaaccaggaggaaaaggcttctcttttacatcgt

SEQ ID NO: 486072 - DNA, 123 bp, Homo sapiens
ctttatctatggttatgtggatgcagcatataagccaggcatgtctcccgaggagtgcaggcgcttcaccacagacggcaccgcatgcgtggggagaccaccctgtggaaccctggctgtgac

SEQ ID NO: 486073 - DNA, 101 bp, Homo sapiens
gggactttgccgagaaggagttgtttcccattgcagcccaggtggataaggaacatctcttcccagcggctcagtgccagccatttttggagtctcctttg

SEQ ID NO: 486074 - DNA, 83 bp, Homo sapiens
atgaatgctacttggatgcctcttaaggtccacgctgcttttatgagctgtaacactcaccgcgaagatctgcagcttcactc

SEQ ID NO: 486075 - DNA, 73 bp, Homo sapiens
catatcatggggagatagacgctgctgcctagatggacagagacgtatgtgcgttggtctcctaagggcacct

SEQ ID NO: 486076 - DNA, 74 bp, Homo sapiens
agagaacgcaaacagtttgaagctgaggattttgtgagggtctgcccttccgctgcgccccggacagcctggag

SEQ ID NO: 486077 - DNA, 83 bp, Homo sapiens
caggttcccatggttgccggctcccctctcaggacaacccagatgtgcaacaaagtgcgatgccacaacacatgcgtgtatct

SEQ ID NO: 486078 - DNA, 100 bp, Homo sapiens
ccgagaccgtgaccgagagcgtgaccgagagcgcgaatatcgtcatcgttagaagtggactaaagaggatggacatagaacttccacctctgctgtccct

SEQ ID NO: 486079 - DNA, 75 bp, Homo sapiens
gcgggcggagctgtgcgagagcctcctcacttgggaagaattcctttggctaccggaagaaaagggaggagaagt

SEQ ID NO: 486080 - DNA, 90 bp, Homo sapiens
ggctttccttctgatgcctcagccaattcctctctccttcttgaattccaggcttggatttacactgggcaacgtggttggaatgtatct

SEQ ID NO: 486081 - DNA, 100 bp, Homo sapiens
ctggctctgctgaaggccatcgtgcaggggcagatgccatggacaatattaccaggcagaaccaattctacgatacccaagtcatcaaacaagaaaacga

SEQ ID NO: 486082 - DNA, 139 bp, Homo sapiens
gtgcagtttgccttttactccatatttggcctaatagaacttcagcttattcaggacaaaaggaggagggaaggggaagactggcagcgggtccggagtgcctttcaaaagaaactaatgaaaccaggggaagtgatga

SEQ ID NO: 486083 - DNA, 100 bp, Homo sapiens
ctttgttgattaactggacaaattcaggccatggtaggggaggagtgtgtaggtgccatcgtttgcaagttggatatgcacaaaaagatgttccgcagag

SEQ ID NO: 486084 - DNA, 100 bp, Homo sapiens
tagcaatattaccccagcctactgaggtgaccaagaatatggcccaggtgaccaaagccctggacaaggccctgagcaccatggacctgcagaaggtctc

SEQ ID NO: 486085 - DNA, 90 bp, Homo sapiens
cggctagtgccgctagcgcctcgagcgatgcacctcctttccaactgggcaaaccccgcttccagcagaacacaccacagccatcagcac

SEQ ID NO: 486086 - DNA, 100 bp, Homo sapiens
cggcgaggccctcatgtaccacacgggtcaaggtggaaggtccaaggactgagaaagaccctcgaaggcatccactttagtcctccattccattcctaga

SEQ ID NO: 486087 - DNA, 120 bp, Homo sapiens
cccagaccctggagcctcagttggaagcagccgatccagcctgcggagcctgtggggcaggctttgagcataagatcacagtccaggcctctccaactctggataagcggaaaggatccg

SEQ ID NO: 486088 - DNA, 50 bp, Homo sapiens
aaaagattgagctgcactgtattccttgccggtggtggtgtgcacattga

SEQ ID NO: 486089 - DNA, 100 bp, Homo sapiens
cttagctgtgctcgcgctactctctctttctggcctggaggctatccagcgtcgcacggggcaggcggttgcagttcgagccaaggcctttggattcagc

SEQ ID NO: 486090 - DNA, 99 bp, Homo sapiens
ggaggccttccagctgtttgaccgaacagggaacctcgagtggttggataagagcaagtccagcttcctgatcatgtggcggaggccagaagaatgggg

SEQ ID NO: 486091 - DNA, 75 bp, Homo sapiens
caagggggagatcactcccgctgcgattcagaagatggcccactgcgtgaccttggttcagctgtccatttcctg

SEQ ID NO: 486092 - DNA, 75 bp, Homo sapiens
agaccaggttcaagggtctctccagaaaatcttgtggacaaatccaggggaagtctcctacggtagtgtgcagct

SEQ ID NO: 486093 - DNA, 99 bp, Homo sapiens
attacctaaacacagcacgtaccttagaactctatggagttgaattccactatgcaagggttcatgtgtgcccagctgcccaaccccgtcctggacagc

SEQ ID NO: 486094 - DNA, 98 bp, Homo sapiens
gggtgaaggatccgtggccaggcagaggtctgtggagtggagaggcgaggcctcacggtggaactctcagatgaggagccgaggaaggtctgcttcac

SEQ ID NO: 486095 - DNA, 100 bp, Homo sapiens
cacagcttcctggtggagcccatcagctgccacgcctggaacaaggaccgcacccgtggtgaaggttgtcgtattgaactgtgagccatccaaagagagg

SEQ ID NO: 486096 - DNA, 74 bp, Homo sapiens
ttaaaaaggctcagaaagatggatttttgcatgagacgcttctggacaggcggtgtggctacagcaaagcaaaa

SEQ ID NO: 486097 - DNA, 83 bp, Homo sapiens
gtctcctttcccggccgcacaggggagtgaggattctttggacaccagcctgagagctcacggggtccatgccactaagcatg

SEQ ID NO: 486098 - DNA, 74 bp, Homo sapiens
catccccgagcagcggtggaagctggtgctggagaatctggtaaaagcaccattgtgaagcagatgaggatcct

SEQ ID NO: 486099 - DNA, 75 bp, Homo sapiens
ggggtgagggcgcgtgggggcgcacaggaactgtggctgcaccatctgtcttcatcttcccgccatctgatgagc

SEQ ID NO: 486100 - DNA, 82 bp, Homo sapiens
ctctgcagttgaatctgacaaagatcgaacagttgtgctcaggcgcccaggatacatctgatttaatgtcacctagcaaacg

SEQ ID NO: 486101 - DNA, 100 bp, Homo sapiens
gaaagaaggatctagcgaaatatggctacagagagccctgctacgcgtcgggtccaggtggcagaacatcctaggttattcaaggacacggaaaagccaa

SEQ ID NO: 486102 - DNA, 75 bp, Homo sapiens
aggcatctgttctatcttcccatcataaaaaagggcataaggaaatggtggcaggcacttcctcctaacaagaag

SEQ ID NO: 486103 - DNA, 82 bp, Homo sapiens
tacatgctttttattacaagactacggagcataggaggaaaattcatcatctgggacgtgaacaccaccatcatggagctcc

SEQ ID NO: 486104 - DNA, 75 bp, Homo sapiens
agaacccgggagtaggagactcagaatcgaatctcttctccctccccttcttggaaactgtgtttgcaatgctgg

SEQ ID NO: 486105 - DNA, 75 bp, Homo sapiens
tcggcgggcatcgccctctacagccgacgtggcccagtggaacatcgggagcctccggaccatcctggacatggt

SEQ ID NO: 486106 - DNA, 100 bp, Homo sapiens
ggccgagccgctggccgacgagcggagcctcaggagccggcggggacgccatgcgagccagaattgatgaattgcaagtttgtgccccatagctgcacag

SEQ ID NO: 486107 - DNA, 111 bp, Homo sapiens
cgcgcgcagggcctgcagcgggagctggacggcgagcgcgagcggcgcgagaaagtgaccctggcaaagatgagagtgcacatttcgtcctgcctgaaggtccaggagcag

SEQ ID NO: 486108 - DNA, 83 bp, Homo sapiens
ctgtcgaatgccccccagccaccagctcgaccacagcaagctcctgggtcaccttcaggccattcagaggaggaaagagaggg

SEQ ID NO: 486109 - DNA, 90 bp, Homo sapiens
cagagatccaagtgcgcgccctggcgggtccggaccaagagtgatcagcagctggactgtgccttggacctaatgaggcgcctgcctccc

SEQ ID NO: 486110 - DNA, 51 bp, Homo sapiens
tatcaagccagacaatatcctggcagactgccagattcacttacagcccca

SEQ ID NO: 486111 - DNA, 100 bp, Homo sapiens
ctacaggacctgtctgacgatagtccaaaaactgaagaagatggtggataagcccacccaggacagctgtatgaagacacagagagaaggcagccatctg

SEQ ID NO: 486112 - DNA, 74 bp, Homo sapiens
gcgtcacggcgtacgccctcatggggaaaatctccccggtgactttcagatgaagcgccctcagttcagcaagc

SEQ ID NO: 486113 - DNA, 50 bp, Homo sapiens
ccgcaactttaaagtcatgatctaccagtttgactttggggacaccatgg

SEQ ID NO: 486114 - DNA, 75 bp, Homo sapiens
gaagcatctgatgcacgttccatccggcgctcagctgggcttgaggcgctttgacttccgtccaaaacctgatcc

SEQ ID NO: 486115 - DNA, 50 bp, Homo sapiens
tgcgatgtgcggaagggcacctccacccgctacccagaatggaatcctga

SEQ ID NO: 486116 - DNA, 82 bp, Homo sapiens
cggctgtaaggagccgcggcggggggaaaatggagcccttcaccaatgtttggtgccctggttgtcagatgttggaaagcag

SEQ ID NO: 486117 - DNA, 82 bp, Homo sapiens
aaagaatgaacactgtccttcaaaacgagatggacaaccggaaattttctacacattttggaattcagttactcaggcactt

SEQ ID NO: 486118 - DNA, 100 bp, Homo sapiens
tacgcagcaaaccatccagaaggttttttattggcacctcagtctcaacattttcttttcggattcatgaggaaagagaaatcctggggttggaccccaa

SEQ ID NO: 486119 - DNA, 100 bp, Homo sapiens
tctgtgttctattatgagattctgaactccccagagaaagcctgctctcttgcaaagacatgagcaatgaggagctgcggggaagtactccagaggcagc

SEQ ID NO: 486120 - DNA, 50 bp, Homo sapiens
ggggagcggagccatggcctccggaagttgccttaaagaatagacaagag

SEQ ID NO: 486121 - DNA, 100 bp, Homo sapiens
gggagccagatgacgaccccattgggtaggagccaaacagcatgaattacaagtgaactcaatgcagctgctgtactaccaggctccgatgtcatctgcc

SEQ ID NO: 486122 - DNA, 125 bp, Homo sapiens
acgatatcacatggatgccagtggtgaggctgtaagcgaaactcttcagtttaaagctcaagggtaaagcccacagcttgaagccaagcataaaggagaagctggcaggcagccccattcgtact

SEQ ID NO: 486123 - DNA, 75 bp, Homo sapiens
ccaagaatggaaacagcgaaggatacagcctgtgcacatcctgacttctcttaatcttctccatacagagctggc

SEQ ID NO: 486124 - DNA, 100 bp, Homo sapiens
tctatagagtgtttaccacccaagagagacgtctcagagaggctgtgcagctgctggaggactataagcatgggaccctgcgcccgggggtcaccaatga

SEQ ID NO: 486125 - DNA, 88 bp, Homo sapiens
tggaactctggtggtttcaggaaggtctcatagatgatggtgaaaccccagaagcagctgctctccgggagcttgaagaagaaactgg

SEQ ID NO: 486126 - DNA, 76 bp, Homo sapiens
ttcggtcatctaaaggaggttttaaacagtataacagatgctgcagttggagaagaaacttgaacgtgaacttgag

SEQ ID NO: 486127 - DNA, 98 bp, Homo sapiens
ttctatgccaagaagatggacaagcccatgctgaagcaggccggctctggcgtccacgccatctcaatcagtgaccacactgcccttgctcaattctg

SEQ ID NO: 486128 - DNA, 105 bp, Homo sapiens
agaggcccaacaacacctgttgcttttgttggtgctgttgttgcagctgctcctgctgaactgtcccaagcaataaacagtggtacattgttatcaaaaccgtcc

SEQ ID NO: 486129 - DNA, 100 bp, Homo sapiens
gtggcctccggctaccactatggtgtggcatcctgtgaggcctgcaaagccttcttcaagaggaccatccagggtgccgtgagcgatgtggagatgcagg

SEQ ID NO: 486130 - DNA, 75 bp, Homo sapiens
cggacttagagctggacacaccgaagcttgctgtcttcgatacgtggagctccttggcggtccacattgcaatgg

SEQ ID NO: 486131 - DNA, 100 bp, Homo sapiens
attgaaaaccatcagaacatgattaagcagtttaaaggatcgcagtatgtggtagggaagtgatgctgtctgaaggtgacatcctgttctcctctcttct

SEQ ID NO: 486132 - DNA, 90 bp, Homo sapiens
gctctccgccgtccccagccctgcctctccctgggctctgatttgcaaagtgcagagcaggcatggattgccaattctggaacagagcaa

SEQ ID NO: 486133 - DNA, 75 bp, Homo sapiens
ggcagtgcgtcaatcagagcgtcctgtgcgatgttaaaaagtgctctgggtgatcggattaaagaaaagactgac

SEQ ID NO: 486134 - DNA, 100 bp, Homo sapiens
tgtattcgttctgtgcctgaactcaaagatgcccttaaaagaggccagctccaccagggcaagggtttttccctgcctgccactgtatgccgagtgtcca

SEQ ID NO: 486135 - DNA, 83 bp, Homo sapiens
ctcttctatgacggagaatccgtttcaggaaaggcctggacagcgagtccgcctccagcagcatccgcttcagcaaggcctgc

SEQ ID NO: 486136 - DNA, 100 bp, Homo sapiens
agtattgaaatgcatttgccttatacagctaaagccatggaaagggctggtgaattaccatatctccgtcaagtgcagtaaccagttcaagttggaagtg

SEQ ID NO: 486137 - DNA, 100 bp, Homo sapiens
ccaaacaaccagaagaagtatttgatgtcttagagaaacttggagaaggggcaagcagtatccatggcatttttgcaatcctatattgatgtggcagtta

SEQ ID NO: 486138 - DNA, 100 bp, Homo sapiens
atattcgagccccgtggaatcccgcggcccccagccagagccagcatgcagaacactgggagtgtccactcgccttccaccagcatggcaacgtcttcac

SEQ ID NO: 486139 - DNA, 100 bp, Homo sapiens
gcttggatagaggcctccgaacaggagtaaagaatggctgttgaacatccacaaggcacctgcaagaagaagcctgagaagatgatgcacagatagagag

SEQ ID NO: 486140 - DNA, 82 bp, Homo sapiens
atcgctacggaccttaaaatacccgcaacagccccttcgtcccaagtagttgatgtcacttggcgatattcctgcaaacatg

SEQ ID NO: 486141 - DNA, 103 bp, Homo sapiens
gacagcgccttcctcaacgacgcggacatggtcatgagctttgtgaacctggcaattctgtggtgttcttggtcacacatttatggagtttctgaagggcagt

SEQ ID NO: 486142 - DNA, 101 bp, Homo sapiens
gtcagaagaggactggaagacgagtggtgaaatagggccttctaaacctgtggagaagtgagagatctgaatttggagaggacatggggaagaatcaatct

SEQ ID NO: 486143 - DNA, 97 bp, Homo sapiens
ggagcgcgaacgagcgacggcggaacccgtgggcctgtggactgcagcctcggcggtcagcagagtggccaaatcaatgaaggtccctgtatatgag

SEQ ID NO: 486144 - DNA, 75 bp, Homo sapiens
gtcaaaagcaccttggacaaattgaaaaggcatgacgcgcctcctgctcaccaagattcccttcttcagagaaat

SEQ ID NO: 486145 - DNA, 87 bp, Homo sapiens
ttgtcatgtagccaagactggagaaacaataatgtgacagtgatgataacatgggtgccaaaaatacttcaataggagaagaattta

SEQ ID NO: 486146 - DNA, 88 bp, Homo sapiens
ggaaatgatgtggatgttgtctctgactctgaagtggttcacgggggcaagtgacagccctggtttctctgaaggctggactaattca

SEQ ID NO: 486147 - DNA, 83 bp, Homo sapiens
cccccaatactgcggctcctgctgggcccacgccagcaccagcgctatggcggcagcccctgtcaaagggaacaggaagcagt

SEQ ID NO: 486148 - DNA, 75 bp, Homo sapiens
ctccaactttgcgacggaaatgtgtcatcgaaagccagctgcatatctatgtgagactgaattttcctcttagac

SEQ ID NO: 486149 - DNA, 82 bp, Homo sapiens
cctctgtctatggagactttagctgtaaggaggagccagaaattgacagcccagggggtgtggacactgccagcggctgcag

SEQ ID NO: 486150 - DNA, 50 bp, Homo sapiens
gagaccactggattggcagacccaggatagtggccaaagcctccaagaac

SEQ ID NO: 486151 - DNA, 80 bp, Homo sapiens
cgagatcccctgtgtggccaagaagctggtgtgcggagatgaaggcagccctgcaagttgggggccatggagagaggcta

SEQ ID NO: 486152 - DNA, 80 bp, Homo sapiens
caggaaccagaacccaggcccacggaggaagagccgggcagtccctggagcgggccaggagtgtggccatctggggccgt

SEQ ID NO: 486153 - DNA, 100 bp, Homo sapiens
aattacccaagaggacatggcagaagttgcagaggaaagtggtcgcttatggtcagaggagcagcctgctcaccctctccaggtgggggctgtgtacctg

SEQ ID NO: 486154 - DNA, 100 bp, Homo sapiens
tggtcttgctcggccgatgaagtgcagaggtttttttctggtatcctgaagaacttgcctggcacacaaatttaagtcgaaaaatcttgagaaaatcgcc

SEQ ID NO: 486155 - DNA, 48 bp, Homo sapiens
ttggcagatcactctcttagcagcaaagaatggctcaagaagtactga

SEQ ID NO: 486156 - DNA, 87 bp, Homo sapiens
cctcagcgcgcacctatgggctcgctaccaggacatgcggagactggtgcacgacttctgcctggtgtcgaaggtggtgggcagatg

SEQ ID NO: 486157 - DNA, 100 bp, Homo sapiens
ctcgactgtgaggatggagtggctgcaaacaaaaaggatttatacatggctttacaagcattttcatttaagacaaaggacattgaagatgccatgacca

SEQ ID NO: 486158 - DNA, 147 bp, Homo sapiens
aatgagcccaaccacgtggagctgggacgtaaggatgacgcaaaagttcacaagatgttccttgaccatactgtgaccctccaggactatcgcctcccagacagtgatgacgacgaggatgaggagacagccatccaaagagtcctg

SEQ ID NO: 486159 - DNA, 101 bp, Homo sapiens
aataccttatggttggttgcagttggctattatatctatgtaactttcctgggatacagtgctccacagcacctgttgccttcattagcagcttttcctcc

SEQ ID NO: 486160 - DNA, 82 bp, Homo sapiens
agagccaccggaggagcagctcacctgagagacggagccccggctcgcccgtgtgcagaggcacctatgtctcagctaaatg

SEQ ID NO: 486161 - DNA, 75 bp, Homo sapiens
cagctggactgtgctcggttcgcgaaagccattgctgacgaccagttaacaagcacaagccctggctggagccca

SEQ ID NO: 486162 - DNA, 98 bp, Homo sapiens
gcccaccagagtgtccacccgaactgtacgcactcatgagtgactgctggatctacaattggtgttggtattaggagatctgcacatcccacaccggt

SEQ ID NO: 486163 - DNA, 75 bp, Homo sapiens
ttctgtcactcacttacacagtattgggaaatctgtgaaagggactggtgattgcagctggaagtgcccatgacc

SEQ ID NO: 486164 - DNA, 100 bp, Homo sapiens
gagacctgccgtgggaccccagagattcccaaacgtgcgcatcgaccccagtagcctgtccttcaacatgtggaaggagatccctatccccttctatctc

SEQ ID NO: 486165 - DNA, 100 bp, Homo sapiens
gtctccgcgtcccgctcgctgggagagaggtacctctccttttccctctccctttccctaagggttgtgagtcccggcccagcccctccacccccctgcc

SEQ ID NO: 486166 - DNA, 75 bp, Homo sapiens
aaccagataaagattctgggaaatcagggctccttcttaactaaagaaacctctgtagaggagcaggatgcaacc

SEQ ID NO: 486167 - DNA, 97 bp, Homo sapiens
agtaccaagtgaagactttgaacgcactcctcagagtccgactctcccacctgctaagaataactgaagtgaagtgatggactccgatttggagagt

SEQ ID NO: 486168 - DNA, 75 bp, Homo sapiens
cagaagtactggaatcatacttcctttcagggcttaaaagacaaccttcttgcttctgggacatccagcctgaca

SEQ ID NO: 486169 - DNA, 76 bp, Homo sapiens
tccaggttcacctcctcctcctccaggtgctggagaatctggtaaaagcaccattgtgaagcagatgaggatcctg

SEQ ID NO: 486170 - DNA, 83 bp, Homo sapiens
ggatcaccgccctggagctggccaaggccaaggctgtccgcgtgatgaacactcattcaggacccatggatgaaggaccagat

SEQ ID NO: 486171 - DNA, 131 bp, Homo sapiens
cggcgagaggaggccgtccagcagatggcggatgccctgcagtacctgcagaaggtctctggagacatcttcagcagaataccctctaccatctgctttggtcagggtgccgctcgaggatttaaaagcaa

SEQ ID NO: 486172 - DNA, 83 bp, Homo sapiens
agaaaaccagctgagacagggcgccacttactagaacacaccacagccatcagcactggaatgcaaagaccagaacaaacaga

SEQ ID NO: 486173 - DNA, 48 bp, Homo sapiens
acttctgatccatggatgccatcagctttaccgatttgttacaactca

SEQ ID NO: 486174 - DNA, 100 bp, Homo sapiens
aaaagtcaagaaagcattggctcaggtcttctgtgaggaatctggattgtcacctttgctgcaaaaaattacggctgttccatttcctccaagtcaccgg

SEQ ID NO: 486175 - DNA, 75 bp, Homo sapiens
gttccattgccaaagaaatcggtaagcagaattttgtacagtttctgtacagcattcaaacgttcttccagacaa

SEQ ID NO: 486176 - DNA, 50 bp, Homo sapiens
atcccactgatgaggatcagcccatggaaaaatgccagctgtgggacaag

SEQ ID NO: 486177 - DNA, 97 bp, Homo sapiens
ggaaattgggaatgaattggatgaacaaaatggcactcaaggagttgcccctggtcctgtaattggacttcaggcaccatctactggtcttcttggc

SEQ ID NO: 486178 - DNA, 96 bp, Homo sapiens
gtcccattctcgtcctcatggtggacaagaaactggtggtggttttcggaggcacagagaaaaaagagtgccggcgggaccaccgcccaccgtgtg

SEQ ID NO: 486179 - DNA, 90 bp, Homo sapiens
ctgcccagacggctcacctgtgcgggatggaacaaaagagtgcctggtgaagaatgtgatgggatcactagcatgtctgcggagagcggc

SEQ ID NO: 486180 - DNA, 75 bp, Homo sapiens
ctaaagcagcgtgcgttcagccctgggatgcctgaggaaacccagacccaagaccaaccgatggaggaggaggag

SEQ ID NO: 486181 - DNA, 97 bp, Homo sapiens
ctccctttacctactaatgaggcaaaactttgagattgggaatgatcttcaagatgaagttcaaagggagaatactaatctgcaaaaactacaggcc

SEQ ID NO: 486182 - DNA, 74 bp, Homo sapiens
cgcatctaccagggctccagcggaagctacttcgtcaaggaccctcagggggctgaagtgcaatgttgtgatct

SEQ ID NO: 486183 - DNA, 73 bp, Homo sapiens
tcgtagctgcggtcgcgccgagaaaggatgacactcctgtccaggacactaaaatgtgaagaacagctcattg

SEQ ID NO: 486184 - DNA, 100 bp, Homo sapiens
tgtgcaaatggaggtcgttgcacccagctgccctcccgggaggctgcctgcctctcatgatggagcagtccaagaagtcctccctcatggtggcccgcag

SEQ ID NO: 486185 - DNA, 98 bp, Homo sapiens
gtttgagaggtcatgtggttggactacgctattacacgggagtagatggtgatgggaatctttgcaaattgtatcttctgtttgaaagtgaagtactt

SEQ ID NO: 486186 - DNA, 98 bp, Homo sapiens
gttcggcagccaggttggcctctgcccaggaagttgctggttccacgtctgccaagacagcatgtctggtgtcctgcttcaatgagttagaggtctgt

SEQ ID NO: 486187 - DNA, 75 bp, Homo sapiens
gccgaaacgacccccagcagcccccgagcctgtgactgtgaccccaggggcattgagacgccacagtgtgaccag

SEQ ID NO: 486188 - DNA, 100 bp, Homo sapiens
tatgtttccacatcggtcagaaaaagatttttacagctcccagcacagtaggaaagagaaatttgagtcctagtcaagaggaagctggcctggaggacgg

SEQ ID NO: 486189 - DNA, 102 bp, Homo sapiens
gcggccatggtgttgctgctgtactccttctccggacagtcattttgtttactcattcagccctgttgcaggtcccaataaactcttcataaggttgacaga

SEQ ID NO: 486190 - DNA, 106 bp, Homo sapiens
gagcctcagttggaagcagccgatccagcctgcggagcctgtggggcaggtgctttacaaggccaagtacggtccaatgtggatgtcctacttagggcctcagatg

SEQ ID NO: 486191 - DNA, 75 bp, Homo sapiens
cacctgcggccacatcaacctggtgaagatcctcgttcagtaccaaaccccctaaaggtctccacactgctgttt

SEQ ID NO: 486192 - DNA, 100 bp, Homo sapiens
ggcaccgccagacggccagaaagttccgccatgagctggggcacggagctgtggtttcaccagtgatcattaaagaatgggcagcttacaaaggaaagtc

SEQ ID NO: 486193 - DNA, 100 bp, Homo sapiens
cgcagcccacgctcatgatcgacttcctcacccgcgcctgcgacctcgatgactttgggaaattgctgctggctgaggccctcctggagcagtgtttgaa

SEQ ID NO: 486194 - DNA, 75 bp, Homo sapiens
gtgacagcctcaagggcttcagcaccgcgcccatggcagagccagaccgctccaactattatgtgcgcatcctga

SEQ ID NO: 486195 - DNA, 100 bp, Homo sapiens
gcttctcctggccgcagttgtaggagtggcttgctttctctatggatatcttaatcaagataactgtacatggagaacactcctatgccaccttcaccag

SEQ ID NO: 486196 - DNA, 74 bp, Homo sapiens
tgtgattgcagcattaaattcccgaactggggagatctattcatgttacatgtaaagctgtcctcatttgtgac

SEQ ID NO: 486197 - DNA, 109 bp, Homo sapiens
tttctctcgcttggaggaaactaacatttaatgagcatcagctgagggccagttcccatccgctcttgtagggtaattaaaaccatggaggcgatcagcgaggttctcc

SEQ ID NO: 486198 - DNA, 75 bp, Homo sapiens
gcggcgctcggcgatggtaggcgtccctggagcggccgccttccagcacttaattcagtgcacaaatgagatgaa

SEQ ID NO: 486199 - DNA, 73 bp, Homo sapiens
ggtgcccggcgaggagaaccaactggtcccgaaagaggtgtcgtgaaaactacccctaaaagccaaaatggga

SEQ ID NO: 486200 - DNA, 100 bp, Homo sapiens
gatggccaagaagagaaagccccccagcatcaagggtgtgaccatgaagctcatggatgaggtcgccgggatcgtggctgcacgccactgcaagaccaac

SEQ ID NO: 486201 - DNA, 75 bp, Homo sapiens
gtgtggggcggtcccggccccgcagttggaatcgaagcctcttaaaatggcagatgacttggacttcgagacagg

SEQ ID NO: 486202 - DNA, 50 bp, Homo sapiens
agaagatcatcattaaggacggaggcacgagatcctgaaggagctagacg

SEQ ID NO: 486203 - DNA, 83 bp, Homo sapiens
ctcggattaaacgccggagagagcgtgaatttgcctcggggacgcctctccaggaatccagacgctctgcagtgtcccatcgt

SEQ ID NO: 486204 - DNA, 75 bp, Homo sapiens
cgtggtcaagttcaccatgagaggcccttagagatttgtttgattccatggataaaacttcttccagtattccac

SEQ ID NO: 486205 - DNA, 82 bp, Homo sapiens
acctttccaaaggacgcgaccataactctaaaaggcaacagcattattgagaaaagcccttacagaagagtgtggccgtagg

SEQ ID NO: 486206 - DNA, 100 bp, Homo sapiens
atgattgtgaggcctccccagccacgtgaaactcttgaccacatattatcccctccacccatgccgtttcggaaatgcagcaacccagatgtggcttctg

SEQ ID NO: 486207 - DNA, 85 bp, Homo sapiens
caccaagtgcatcaccatccccaggactctgtctactagtgacgatgtcgaagacagggaaaatgaaaagggtcgccttgaagaa

SEQ ID NO: 486208 - DNA, 100 bp, Homo sapiens
ggcctgttgaatctgattcggactatgccaggcaagaaatccaagtatgaaatagcagttgaaactgagtatgtccgtggttcagaccctgtattaaagc

SEQ ID NO: 486209 - DNA, 131 bp, Homo sapiens
cccggccgcgggagcctcgtggctgcgtcaccgccgcccccccagacaagatggacaccgcggaggaaggcaaaggcagctcgagcatctcatctgacgtgagttcaagtacagatcacacgcccactaaa

SEQ ID NO: 486210 - DNA, 52 bp, Homo sapiens
ggaaagccagctttataccaacccagacggagtttcgctcttgttacccagg

SEQ ID NO: 486211 - DNA, 78 bp, Homo sapiens
cggaagtgcagctgcctcagttcttagcgcaggggagcaaattttactttctgacaatgcagcttctcttgcagtgca

SEQ ID NO: 486212 - DNA, 100 bp, Homo sapiens
cctcctgccgtcgagatcgccgccgacgccgctgctgtggccgctgctgctgctgctgctcctggaaaccgggtgtcaaattgagaaccaggtagatccc

SEQ ID NO: 486213 - DNA, 82 bp, Homo sapiens
gcggacatcgtctcctgtgtggcgatggtcttcctgctggggctcatgtttgaggccaagtcctgtatctgccatgtctgtg

SEQ ID NO: 486214 - DNA, 75 bp, Homo sapiens
cgagtctgggctctgcctcaccacttgtctcagaggtgaaatgctaccacaagaaataccgctcggccacccgtg

SEQ ID NO: 486215 - DNA, 98 bp, Homo sapiens
cgcagggggacggggaccagcagctgtcgccgccgctctcaggctcctgtaaccgccaggcagcggccccgccatgtcccagccccggaccccagagc

SEQ ID NO: 486216 - DNA, 74 bp, Homo sapiens
agaactccgtcttccactgccccacgcagagccaggactgcaagaactgatcccctttgtgaagcctgcgccca

SEQ ID NO: 486217 - DNA, 75 bp, Homo sapiens
aaagtcgatctggagcttttcccctccccggcagatataatttctacagtagaatttaatcattctggagaatta

SEQ ID NO: 486218 - DNA, 100 bp, Homo sapiens
attccaagtaactcttatttgagttctcttggaacggttgattgtaaataggccacatccttggggtcttcttattaccttcattgagctgattaaaaac

SEQ ID NO: 486219 - DNA, 90 bp, Homo sapiens
gtctgggccgccgaatctccggccgaagagcggcggcggcagcggcgtgctttctcctgctcaagacagccacacgaacacggatctccc

SEQ ID NO: 486220 - DNA, 50 bp, Homo sapiens
aatttgaaaggcttcgaggcagcggcaccatgactcctgtgaggatgcag

SEQ ID NO: 486221 - DNA, 90 bp, Homo sapiens
gcttggttaaaacctgacacttttaacagccgggccagcacatggctcccagcccccatctgaccgtgtacaccgggacctgcatgcccc

SEQ ID NO: 486222 - DNA, 97 bp, Homo sapiens
cgacacaattgtctgtgacagtaacagtacttgggatcccccagttccaaagtgtcttaaagacccatttacccaatattaaagtccacgcctactt

SEQ ID NO: 486223 - DNA, 90 bp, Homo sapiens
gaagtcggagtttgagccccggaggcagagcggctgccatggtttacccaaggtccagcctagcccctaggcaccatgtcggacagtgat

SEQ ID NO: 486224 - DNA, 100 bp, Homo sapiens
tccttacctgtttttccagctcacccactgccagcagaggtgtgtgtgtgcaggccacagcagcatgcccttggtgtagtcagtgccgaaaggggtctgt

SEQ ID NO: 486225 - DNA, 113 bp, Homo sapiens
aggtcttcggctttgttcagaccctgacaggttgtgaggaccaagcacgcctcttcaaagacgaggtgaccaagaatatggcccaggtgaccaaagccctggacaaggccctg

SEQ ID NO: 486226 - DNA, 100 bp, Homo sapiens
catggatgggctggagacaacagaaacagaaacgattgtggaaacagtggatcaatcttcctgtcctacaactgacaaaggatcccctaaagacccctgg

SEQ ID NO: 486227 - DNA, 96 bp, Homo sapiens
gagctttgatagtcgtaccatatgcagaagatgaccttgaatgatgccatgaggaacaaggcaaggctgtcaattacaggaagtactggagaaaat

SEQ ID NO: 486228 - DNA, 100 bp, Homo sapiens
gtaaaccacgatcgttatgctgaaccctcaaactgacacaagacctacagagaaaaccctttgccaaatctgctctcagcaagtggacagtgataccgtt

SEQ ID NO: 486229 - DNA, 106 bp, Homo sapiens
gccgaggcaggtcaaagctgaaaagtggaatcggagctgttgtattacctgggatgggaaagggctccttcaagtatgcctgggtcttggataaactgaaagctga

SEQ ID NO: 486230 - DNA, 74 bp, Homo sapiens
tgttgcaagagctgctcaacatggatttctctcaaaagtcccatctgccgtctattgtggtggaatccagtgag

SEQ ID NO: 486231 - DNA, 82 bp, Homo sapiens
caagatccctccacatgtactgagaagaagatagtggtgagctggcaaagccaaagattggttttccagagacaacagaaga

SEQ ID NO: 486232 - DNA, 75 bp, Homo sapiens
ttggagcacttcctattccactggattgggaaagaccatggcagggcatgagccagaaggagagctctaagtctg

SEQ ID NO: 486233 - DNA, 82 bp, Homo sapiens
ggacacagaagtatttgtgacaggccggaaggtggtggtcgtacgctgtgaaggcatcaacatttctggcaatttctacaga

SEQ ID NO: 486234 - DNA, 75 bp, Homo sapiens
ggcagctgtaagcaaatgcttctaatgctgctgatagttcaggtgtatgtggaatttgatgatcttgaatgggat

SEQ ID NO: 486235 - DNA, 73 bp, Homo sapiens
attgaatctggtgttatcaacttaaaagatgccacctctaagaataaatccaccagtaccccaacttctccgg

SEQ ID NO: 486236 - DNA, 100 bp, Homo sapiens
gagttcttacaacatggcagacattgacaatttaggcaggaatatttagatacactctacagatatgcaaaattccagtacgaatgtgggaattactcag

SEQ ID NO: 486237 - DNA, 74 bp, Homo sapiens
gatgagggcgcggcagtatccttggggcactgtgcaggatctcaggaaacaggctcgacagctggaaaatgaac

SEQ ID NO: 486238 - DNA, 100 bp, Homo sapiens
ttcaagaatgaagccgcggacccttgcggtgacatggttttctggtgccttggcaactgctcacgatgcatgggaagactaaacactttgtgtacagcat

SEQ ID NO: 486239 - DNA, 75 bp, Homo sapiens
aacttaacatcagcagatatcctgtctcagatgaagagttgaaaacgaggcccactgcgactttgtgaagctgcg

SEQ ID NO: 486240 - DNA, 83 bp, Homo sapiens
caagactctcttcgctctttgcatcttaactgcaggccacaccgtagtcatagagcaagaggactcagatacagtttggttgg

SEQ ID NO: 486241 - DNA, 100 bp, Homo sapiens
caggtggaattgctgatagacatgggggcctcaaacgtggagatcaactcctctctgttaatggagtgctgattgtgaatgataagagccaaaacctccg

SEQ ID NO: 486242 - DNA, 101 bp, Homo sapiens
gaaattcaacagagagctcaccagattactgatgagggcaatgacatcattgcagcagccaagcgcatggctctgctgatggctgagatgtctcggctggt

SEQ ID NO: 486243 - DNA, 60 bp, Homo sapiens
ctcaaatgctgctcatggaagatccaaatccgggcgtctctggccgagcctctttttgtg

SEQ ID NO: 486244 - DNA, 82 bp, Homo sapiens
gtgaatttctaatgcagcctgaactccaaagtccatgggcagtgatcaggaacctccctattcaatgataacattacacgaa

SEQ ID NO: 486245 - DNA, 81 bp, Homo sapiens
gcaacatcctgtcacaggccatgctctggcaaaaactttttcagaagaagtgaagtcaagatgaagaaccatttgcttttc

SEQ ID NO: 486246 - DNA, 75 bp, Homo sapiens
acagcaagaagaagagcccagctagcaccttcgccctctccagccaggtaccttggatcaatcttcctgtcctac

SEQ ID NO: 486247 - DNA, 90 bp, Homo sapiens
tgggaccttcttggtccgagatgcctcaacaaaaatgcagggagattatactttgactttgcgcactgccccccaggtgttgagtaccag

SEQ ID NO: 486248 - DNA, 75 bp, Homo sapiens
caaccttcgatctcctgacgatgaacacttgtcctgctccttcacctttttcttgcatggagacagcaatgtttg

SEQ ID NO: 486249 - DNA, 92 bp, Homo sapiens
ctccagatggcgtcttccgtgggcaacgtggccgacagcacagttaccggtattgtaagaacaagccgtacccaaagtctcgcttctgccga

SEQ ID NO: 486250 - DNA, 75 bp, Homo sapiens
gaagaagcagatcttcttttggagcagcagagactggctggactctgtgaagctgagcaggagcagatgcggaag

SEQ ID NO: 486251 - DNA, 101 bp, Homo sapiens
gcctttgccgatccgccgcccgtccacacccgccgccagctgtatgaactggacggtgatcctgaaaggaaagagttcctggatgacctcttcgtctttat

SEQ ID NO: 486252 - DNA, 98 bp, Homo sapiens
aaccctgaagtcggtgtctgctgcgttcacggcaggattcggttagagtggtggatatgttcttggctttaaaatagatcctgtggaaaaactacaag

SEQ ID NO: 486253 - DNA, 74 bp, Homo sapiens
ttggttccccctccctcagcttccgccccaaaaggctataccccagctttggcctgtgctcccaataaggatgt

SEQ ID NO: 486254 - DNA, 82 bp, Homo sapiens
attgacgccatgtcgggttattcgagtgaccgagaccgcggccgggaccgaggagctgccatcagtcatgctcttaaacggg

SEQ ID NO: 486255 - DNA, 100 bp, Homo sapiens
cagaagaactgaagataggcaacaagatgatgagggcgcggcagtatccttggggcactgtgcagggctgaattggaagccaagaaagcgaaaatgaagg

SEQ ID NO: 486256 - DNA, 75 bp, Homo sapiens
agcttctctgtgaaagagcacagaaactgatgatggtgttgatgatctgaaaataaatcccgaaaagaaggaatt

SEQ ID NO: 486257 - DNA, 101 bp, Homo sapiens
ctcagagaaagcagagggtgagatggatgagtccagcattctaagacgaagagggctccagccacagcagctatccttagcagagcaccctggagtctgca

SEQ ID NO: 486258 - DNA, 100 bp, Homo sapiens
gagctgaggcggtcgcggccatgaagaactcccccactggaaaggattctgaaagaaatgaagtcagccctcagaaatgaagttgactgcctgctggctt

SEQ ID NO: 486259 - DNA, 75 bp, Homo sapiens
ctgcgcggctgcggggcttccctgcggctggaggagatggtaacctgcacctcaatgtgacggcggaggccttca

SEQ ID NO: 486260 - DNA, 100 bp, Homo sapiens
cggagaggagcatgaatggagcaaaatggcggatcatgtgcaggatggccgagcctcgatttaacaacccctacttctggccccctcctcccaccatgcc

SEQ ID NO: 486261 - DNA, 75 bp, Homo sapiens
caaaaacaaggttctggaaacaactgggcatatgggagacggtggctcagggagtaaaggaaggccagttgagca

SEQ ID NO: 486262 - DNA, 75 bp, Homo sapiens
ccggcagcgaagacgcggagaaaaaagttctcgagaacaccttctgcagtggggaccatgtgtcctggcacagcc

SEQ ID NO: 486263 - DNA, 90 bp, Homo sapiens
gaaggaagaggtgtttgaaaaggtgggaatggaagtggccccacatctcaaagaaaccctaaataagaacttttttgacttcctccttac

SEQ ID NO: 486264 - DNA, 101 bp, Homo sapiens
ctggaaaggactggaattgatttgggaacaactggtcgtcttcagttaatggcaagacttgcagaggttggccagttctacttcttaatccggaagagaat

SEQ ID NO: 486265 - DNA, 98 bp, Homo sapiens
tcctggagaatttaatgaggttttcaatgctgtccagaccaaaacgaagaagacgttagccaaacccaatataaggaatgttgtggtggtggatggtg

SEQ ID NO: 486266 - DNA, 98 bp, Homo sapiens
gctctagcaggctccactaactggggctacgactctgatgggcagggactttgaacatgtcggggatcgccctcagcagactcgcccaggagaggaaa

SEQ ID NO: 486267 - DNA, 83 bp, Homo sapiens
caaatcccggaaactccagcgtgtctccagccgtgctacccgtacagtgaggacgcccgccagggtgagcagtacatgaacac

SEQ ID NO: 486268 - DNA, 75 bp, Homo sapiens
ctcatttatgattttgccaattttggtgttctcaggttatcgattgatatcagtaaatgccattatttagtggat

SEQ ID NO: 486269 - DNA, 50 bp, Homo sapiens
ccgcccccgacgtttgcactgtctaaagaaggtgcatttattgtcagaga

SEQ ID NO: 486270 - DNA, 75 bp, Homo sapiens
ggccccgagatcccaggcactgagtgactgcatactgttgtactggtcagtggacatctggacagctgggatgtt

SEQ ID NO: 486271 - DNA, 100 bp, Homo sapiens
ggacgcgcccgcgcccccgcggctggagggtggttttaaaatcaaagatgggaaaatcggagaaaattgcccttccccatggccagcttgttcatggtat

SEQ ID NO: 486272 - DNA, 100 bp, Homo sapiens
ctgtgtgagggcttcagcgaggccctgaagcagtgcaagtactaccatggagggccctcctggacccgggagcggaccctggtggcggtgaagcccgatg

SEQ ID NO: 486273 - DNA, 80 bp, Homo sapiens
gacagattcgcagtggtcgcttcttctccttggttagagccacagctgaaacaactacaaacaaaatatgatgaacttaa

SEQ ID NO: 486274 - DNA, 50 bp, Homo sapiens
ctctcaggacaagaacaaagtgtgctgggactgacgaagacacaatcatc

SEQ ID NO: 486275 - DNA, 74 bp, Homo sapiens
tgtgggctctcccaagtcgcggcccctcctctgagagccacagtcagtgaaggagaacgacctgctcagaatga

SEQ ID NO: 486276 - DNA, 74 bp, Homo sapiens
taatggaaaatcgcttggttaaaacctgacacttttaacaggatgatgtctataaactaagcactgacagctca

SEQ ID NO: 486277 - DNA, 90 bp, Homo sapiens
cgaccccacagacgagggcatcttcatctccaaggcccctggccccaacatggcccgtcgctctcagagctcctcgcagggggacaaccc

SEQ ID NO: 486278 - DNA, 120 bp, Homo sapiens
agttaatcctcaatttaagcctgatctaacccctagaaacaggtggttatccaaatgccaacccagtccaggtttcaacagcaacattttttcttttcttcaacgaagagtagagaatgg

SEQ ID NO: 486279 - DNA, 74 bp, Homo sapiens
gcggagtcggggctcctgacgtgtggtttattgacaatcatttacaatgccgaagagtgctgtagtgagccagc

SEQ ID NO: 486280 - DNA, 82 bp, Homo sapiens
ctaaggatcatgtctgcgagccaggattcccgattatgatgcatcattatcacagaagaaattcgtgtctatagcttttaag

SEQ ID NO: 486281 - DNA, 113 bp, Homo sapiens
gccccgcgagcacagagcctcgcctttgccgatccgccgcccgtccacacccgccgccaggaagccatcttcgacaagagcacagggaaggttgttttgaagacgttcagcct

SEQ ID NO: 486282 - DNA, 99 bp, Homo sapiens
ggacgctgcacagcggaatctatatagggatgtgatgttagagaactacagaaacctgatcttccttgcaaacttggaaatcatgtcttagagatcaag

SEQ ID NO: 486283 - DNA, 50 bp, Homo sapiens
cacggtgcggcgtaaagtggtttttgcggagaacgtttgtctgcctgatg

SEQ ID NO: 486284 - DNA, 90 bp, Homo sapiens
ctgggactttcttcgttgccatgaggaaagaattctccgagggaagagtgacccattttgcttgttggagttaggcaatgaccgacttca

SEQ ID NO: 486285 - DNA, 75 bp, Homo sapiens
caagctctgtgattggtggtcgcttggggtgatcatgtatgagatgctcatcgtcctcaagtaccgtaagggtga

SEQ ID NO: 486286 - DNA, 83 bp, Homo sapiens
gaagaaaccagccgaacttcagggtttccaccgttcgttcaagggcgaccattgacgaggtggagacggacgtggtggagatt

SEQ ID NO: 486287 - DNA, 100 bp, Homo sapiens
tttaagtcccatcagtggtttggagcatctgtgaggtcgaaacaggataaaattttggacaaaactttcggtttgaagaataagaaaggagcaaagcaac

SEQ ID NO: 486288 - DNA, 90 bp, Homo sapiens
cccggcttcaaggcccgcggaacagcggaggacgaagagcgggacccgagccctgcagagtcacctgatatgaaaaaggagcaagacccc

SEQ ID NO: 486289 - DNA, 100 bp, Homo sapiens
ggatgtgggcccaggacggtgctctgtggcttctgccagccttgcaggaggactctggcacctacgtctgcactactagctggcagccggtcaagttccc

SEQ ID NO: 486290 - DNA, 126 bp, Homo sapiens
ctgcatctggctgctgcagaccctcgtccacctcctgcagctcggccaggtctggaggtggctcctggaggtcaatgcgtccccatcactgacagccagcagccaggaagactatgagctcaagac

SEQ ID NO: 486291 - DNA, 100 bp, Homo sapiens
gggaacgagcaatgggaattcacgctgggttgtgcccacgtgcctcagggccttggtagaaatggcccgggtagggggtgcctcctccctggagaatact

SEQ ID NO: 486292 - DNA, 98 bp, Homo sapiens
gcagccgccccgaaggagccagacaggggcaagtgtccgagtggtgaatcagctacttacagagatggatggtctggaagcacgccagcaggttttta

SEQ ID NO: 486293 - DNA, 83 bp, Homo sapiens
cagcaacagctctgccggctggaagtacctggagtagaacagaaaaattattatgtctgtgttcccttgggactcattggaaa

SEQ ID NO: 486294 - DNA, 88 bp, Homo sapiens
cgatgctacgctaacctatcgggttctctctccgcgcgttcaggttacggcctccgctgccacagggccatcatcaccatctgccggc

SEQ ID NO: 486295 - DNA, 100 bp, Homo sapiens
gaagtggaccacgtctggggggaccccaactccactgcacagtacacacgtcaccaggcagcagggattggaaaccaggcaacaggaattggacatcaga

SEQ ID NO: 486296 - DNA, 97 bp, Homo sapiens
acgtccgtatcatcaagaacagaacaggccctatggggcatacctatggctttattgacctcgactcccatgcgggaaatgtttcaacgtgcgcaag

SEQ ID NO: 486297 - DNA, 100 bp, Homo sapiens
aagcaggagctgggagccccaggggtttgtgaccatgactctggaaagcctagaggaaatacaggatgtcagctgtgcttggaaagaacttaacagaaag

SEQ ID NO: 486298 - DNA, 75 bp, Homo sapiens
ttggcaagagagctctgcatcaatgcgccggccataggtgtacctgaaggaaatcttaaaagaaattggtgttca

SEQ ID NO: 486299 - DNA, 100 bp, Homo sapiens
gtgtctacgtgtttggagaactgctggacatgcccaatgttagagagactgcaggcaccacctgtgtgaaccggacatgaaactggtgtggcctagtgcc

SEQ ID NO: 486300 - DNA, 100 bp, Homo sapiens
gtccagttaacatcaaggagagaaatcaggaagattatgggaggttggatacactccagattggatatttctgctgagaaatgtaatgcgaatcagtcca

SEQ ID NO: 486301 - DNA, 82 bp, Homo sapiens
aggcgcaatacgagtaccggacgacgcgcgtcagccgcgagggtggcgttctcaaggtgagaagccctaccactgcaactgg

SEQ ID NO: 486302 - DNA, 50 bp, Homo sapiens
cggcggctccgcaagaagtaccgagaaggatttgcagatttacagaatgg

SEQ ID NO: 486303 - DNA, 96 bp, Homo sapiens
tcggcactaggcagcggaggagcccgaccgacccgaaccagtgctgtggcgcatatggccctgaagactgggacctcaacgtctacttcaattgca

SEQ ID NO: 486304 - DNA, 51 bp, Homo sapiens
aaggattccaagtaactcttatttggacgggctctacgagtgcattctctg

SEQ ID NO: 486305 - DNA, 89 bp, Homo sapiens
cggcctccccttggattcagacgccgattcgcccagaaatttaaaagcctgttgattcaagaactttctaaagtatttccggaagacat

SEQ ID NO: 486306 - DNA, 96 bp, Homo sapiens
caggatggattgccagggcttcctggcccgaaaggagagcctgtgccttggtggatcaggcagtctttgaagaacttatcagggatcaccttcctc

SEQ ID NO: 486307 - DNA, 140 bp, Homo sapiens
ttgtctcttatttagttctggggagcgcctcgtcgacatgagtgatgtggaggaaaacaacttcgagggcagaggcctgctttcttccccgggcgatgtgcagagatctttgccaggggtcaaagcgtcgggaagcttgg

SEQ ID NO: 486308 - DNA, 98 bp, Homo sapiens
gatgcaccttcccctgccttggaaagctactttgaaacatatggtacatttgtgttaaggctagtcaccctgctgtggaatagaaggccagaattgat

SEQ ID NO: 486309 - DNA, 100 bp, Homo sapiens
gctacagtgatggatgaagtacagaagtttctaggagtcttgcctcattataattactcagaagctttaacgaagctgagctgaacacattacgatggat

SEQ ID NO: 486310 - DNA, 98 bp, Homo sapiens
atggtcgaggtgatgagaaacggaaaaataaaggcacttcgattgagaaaatcatgagttctattggagaagggattgacttttctcaggaacggcag

SEQ ID NO: 486311 - DNA, 75 bp, Homo sapiens
tcggcctcggagcaacgagcgcagcgccggtatgtgaggagcagcgctgtgaggaggaagtcttccccctggcca

SEQ ID NO: 486312 - DNA, 100 bp, Homo sapiens
cctgcggacgtccaagctgctgcttccggatgactttaagtcatctcaactcgaactccacctccaccttcaccgttgccatttccaacacaagctatcc

SEQ ID NO: 486313 - DNA, 100 bp, Homo sapiens
ggaaaatggtaaacaaagacatgaatggattcccagtcaagaaatgctcagccttccaattttttaagaagcggctggtctgatcagcccctggaatttg

SEQ ID NO: 486314 - DNA, 98 bp, Homo sapiens
gccttcgactggctgcttggggagattgagtccaagttcaaccaagccattgttggcaaaagcagcttttgatgatgcaattgcagaactggatacgc

SEQ ID NO: 486315 - DNA, 51 bp, Homo sapiens
gaggagggttgctagtggagaagctcaaggacatggtgccaaaggagacaa

SEQ ID NO: 486316 - DNA, 51 bp, Homo sapiens
cggaagagcgctcccaggagaaacaaggactttcagttaccttgatgatgt

SEQ ID NO: 486317 - DNA, 82 bp, Homo sapiens
tgtcgctctgcctttgacaggagaggctgcttcttgtagagggcgatgccagtccctccactccagaggagaacgaaaccac

SEQ ID NO: 486318 - DNA, 101 bp, Homo sapiens
gactcagaggccgccatcaaccgccagatcaacctggagctctacgcctcctacgtttacctgtccatggcagctcgaaactgtttggtaaacgatcaagg

SEQ ID NO: 486319 - DNA, 100 bp, Homo sapiens
tatcatggaaccagcagcaaagaagtgctatctggaaagagaggtcattgaatctttgggaattattatttataaagcactggactatggtttgaaggag

SEQ ID NO: 486320 - DNA, 75 bp, Homo sapiens
ctggatttcttcatggtgtccattttatttagcaagagtttcagattgccaaaagacaaaacgggtaccacaagg

SEQ ID NO: 486321 - DNA, 75 bp, Homo sapiens
gttgatgtattgcctaaaatcatccaggtttttcgttggaatatacgttgcacatttatggcgattctgagtgtg

SEQ ID NO: 486322 - DNA, 98 bp, Homo sapiens
ttacgtctgcggaagtgcagctgcctcagttcttagcgcagattcaaacatctacttctttgggaacatcacagatttcacagaaaataattcctctc

SEQ ID NO: 486323 - DNA, 50 bp, Homo sapiens
ctaggtatccgcactgctcagggaccctgcatgtgatggatcagctgaca

SEQ ID NO: 486324 - DNA, 80 bp, Homo sapiens
aggaactcggcagaggagaaattcagacggctcccgagggtcttgagtcaccacgtccgaatataattcttgggttagta

SEQ ID NO: 486325 - DNA, 50 bp, Homo sapiens
ctttgccgacttcagccagatgtccaagccaaaagaatgcaatggtgtaa

SEQ ID NO: 486326 - DNA, 102 bp, Homo sapiens
cccgactcagtgcggaactacataaccaacatcccgggtaaccgggtggctgaaggacaggtgacgtgtccctacctcccccccttccctgcccgaggctcc

SEQ ID NO: 486327 - DNA, 126 bp, Homo sapiens
ccatgtgtagagccaacaaggaaagcagcgatggcgcccatggcctcctggatggtttccatgaaatgagccatggtttgcttcttatgctggagaacattgacagaaggaaaaatgaaattgtcc

SEQ ID NO: 486328 - DNA, 82 bp, Homo sapiens
agaagatcatcattaaggacggaggcacgatgccttcaattaagttgcagagttctgatggagagatatttgaagttgatgt

SEQ ID NO: 486329 - DNA, 100 bp, Homo sapiens
gaccccagccagcgcagcgacggggcgctgcctggcccaggcgcacacggaagtgagttttgccgaattgacaagcccctgtgtcacagtgaggatgaga

SEQ ID NO: 486330 - DNA, 98 bp, Homo sapiens
aggtccaagatgcagcaggtcggaggaaacagccagaccgagagcagcctgccggggcggagagcgtcacggggttcggacgtcagatgatcgagaaa

SEQ ID NO: 486331 - DNA, 100 bp, Homo sapiens
caagcctggctatgcttcagccttgatgacggccatcttcccccgatacgatgaatggattaaagcagataaaatagtaagacctgctgataaaaatgtg

SEQ ID NO: 486332 - DNA, 76 bp, Homo sapiens
ggagcgcctgcctgaggagagcagaaattccaacagaatgggtttcctgaaacggatttgcaggaattcctgaagg

SEQ ID NO: 486333 - DNA, 101 bp, Homo sapiens
ccaagaccttgcacacatccaggagaggcctgcttcttgtatagtgaaatccatgagcgtggatgagacagataaggcagtggagctactgctgtggttca

SEQ ID NO: 486334 - DNA, 82 bp, Homo sapiens
ctgcgacctggggccctgggtgaagtgctccgtcgcccttgcctccagcagcccctgtcaaagggaacaggaagcagtccac

SEQ ID NO: 486335 - DNA, 98 bp, Homo sapiens
cggcggtggcggcgaaggccgaggcggtttactggactcatgcgggtggtagacacgcatgtgtgtgggagtcacgttttctgaaggacctacaggct

SEQ ID NO: 486336 - DNA, 80 bp, Homo sapiens
cagcagctgctgaagcgggtgctcgtccggccctgaatgaagccttgaagctcttcaagatgcactcccctcagacttct

SEQ ID NO: 486337 - DNA, 74 bp, Homo sapiens
tcgcatctgctcaacgacgaggacctgacgcaggcattcctagccgagtgtgacacagtggagcagaacatctg

SEQ ID NO: 486338 - DNA, 75 bp, Homo sapiens
acaacggcttcagggagtcggaccagcttttcaaacaatacagccctgggcgctgcctatggcacagccaagagc

SEQ ID NO: 486339 - DNA, 100 bp, Homo sapiens
tttggactttatccagtcacacctgcggaggttctgccttcagttacatgatcatccttggtttggtcttcatcttccaatttgtaatctcttgctcatg

SEQ ID NO: 486340 - DNA, 83 bp, Homo sapiens
cagagaagtcaaaggaaatgctgcttggggatgagcatatcatcatggcaaaaccagctggtgggcccaagcctccaagtggg

SEQ ID NO: 486341 - DNA, 50 bp, Homo sapiens
ctggggagcccttctgcgccacagatccaaaaagttggcagctcttgcag

SEQ ID NO: 486342 - DNA, 82 bp, Homo sapiens
gagcatggctacatctcccggtgcttcacgcggaaatacacttatcaagtgggaatcctgtatatgaaaaatactatagaca

SEQ ID NO: 486343 - DNA, 102 bp, Homo sapiens
acatccatatcataagtggaattttggagatattcaaaggtcctgcaaccctggttccagtctggcaagcattgtagacctggctgctgaagactgacgggg

SEQ ID NO: 486344 - DNA, 87 bp, Homo sapiens
agatgacacctgtttggagaagctcctggactggtttaaaacggtcactgaaggaggtggttatcactaggctaaaactggacaaag

SEQ ID NO: 486345 - DNA, 95 bp, Homo sapiens
cgccaacgcgcaggtgctagcggccccttcgccctgcagcatttaaatcaaacggtattgagatggattgggttatgaaacataatggtccaaat

SEQ ID NO: 486346 - DNA, 100 bp, Homo sapiens
actgccgacctccgggagcagcgcagagcatgtcctttgcaacctgatcacacaaatgatgaaaaagaatagaactttctcattcatctttgaataacgt

SEQ ID NO: 486347 - DNA, 101 bp, Homo sapiens
acctctacaacgaaggtgaagccacggaagataagctacatatgctcagcaagtgccgcgtgcctcccatccttggtcggtggtaaatgcaggaggtaatt

SEQ ID NO: 486348 - DNA, 100 bp, Homo sapiens
gaactgcttcaagccccgcgagtcgcatctgctcaacgacgaggacctgacgcagaagttgaactaattgacacctaccaccgcttgctggaggttgagg

SEQ ID NO: 486349 - DNA, 84 bp, Homo sapiens
ctgtcttgttccgaggcggccccagagcaattctgtggtgttcttggtcacacatttatggagtttctgaagggcagtggagat

SEQ ID NO: 486350 - DNA, 90 bp, Homo sapiens
gacatatcgctgaccgaatgggaaccccacacctgcagaaggtccttaatcagggcccagtcatatatgcacagttagaccactccggcg

SEQ ID NO: 486351 - DNA, 133 bp, Homo sapiens
ggggagagcgaggcggggccgccggggccgccatggagcccgactcggtgattgaggacaagaccatcgagctcatggtttgacatctacaggaaggtgcccaaggaccttacgcagccaacgtacaccgggg

SEQ ID NO: 486352 - DNA, 128 bp, Homo sapiens
atctacctccatcaggaccccagatgtctgacagccctgtgtgacaccaagataagtaacttttccacctatttccctggatattttgatggtcagtactggctctggtgggtgttccttgttttagg

SEQ ID NO: 486353 - DNA, 75 bp, Homo sapiens
caagagcaacacgtttccacagccctgaccctctattctgcaccctgtgagccaccgagactgaaccaaacccag

SEQ ID NO: 486354 - DNA, 60 bp, Homo sapiens
cctggcactgaagccgagctcaaaggaaaatatatgcagatgatgaacattcttaagcca

SEQ ID NO: 486355 - DNA, 96 bp, Homo sapiens
cagcaattaaacacagaaggaaatacccagactgttactacaacctcgggcgtctggcctccagaggaagaagtccaagttccgcttgtccaagat

SEQ ID NO: 486356 - DNA, 95 bp, Homo sapiens
ggaagaactgatggaaagccgcatgagaattgagagcctttcatcccagctttctaatctacagaaagaggttagaacctgcaaatgaagaacac

SEQ ID NO: 486357 - DNA, 100 bp, Homo sapiens
ctcggagtgcagcggggttaggatggacgaggacgtgttgcaccctgaagagcctcatcatcgagtatggtgtttgcgaaaacttgcggaagctggagat

SEQ ID NO: 486358 - DNA, 100 bp, Homo sapiens
aagctgcggcgggagcgggggctgcaggctgagtatgagacgcaagtcaaaggtccaggagagcctcagattattttttgtagaagtgaagctgcacatc

SEQ ID NO: 486359 - DNA, 98 bp, Homo sapiens
taggattctcaccacgtactggctagacttatacttctcaaatcttaatttcctaaaggaaggatgataaagactatgctttaaaacaaatagaagga

SEQ ID NO: 486360 - DNA, 101 bp, Homo sapiens
aagagtccaccttgcgaccgtatccgctagcgcggcctgggatgcgcttgggctccctgaggtatgaaggttattgaaaaccgggccttaaaagatgaaga

SEQ ID NO: 486361 - DNA, 75 bp, Homo sapiens
tttcccctggccttctgtatcttcatggtgcggctcatcttcgagagccagaaagtggtgatgcaaagaacttag

SEQ ID NO: 486362 - DNA, 100 bp, Homo sapiens
gttacaatgctcaaatgccaccacctaaaaggcaaccaactctgggagtatgacccagtggaaaccctgatagattggtgtgatgaaaaggaacttaatt

SEQ ID NO: 486363 - DNA, 98 bp, Homo sapiens
ggcggtggccgcactgggaccccggaatcccgcgcgctgcccacgattcgcttctgaggtgctacctttttacccacacttaagtgacgcaaaatgcc

SEQ ID NO: 486364 - DNA, 89 bp, Homo sapiens
cgacggggcgctgcctggcccaggcgcacacggaagtggtgcctcatctccagacatggagcccagctatgggggaggtctctttgaca

SEQ ID NO: 486365 - DNA, 87 bp, Homo sapiens
ttctggggcaggggccagggccagataaagcatatgatggctttcattgaacaagaagccaatgagaaagcagaagaaatagatgca

SEQ ID NO: 486366 - DNA, 100 bp, Homo sapiens
gtttttattgacagagctctgatagttgttccttgtgcagaagacttctgctggatgtgtctaggagattggaagactcatggcagtgaatactatgagt

SEQ ID NO: 486367 - DNA, 100 bp, Homo sapiens
gtcctactaccactgtttttgttggcaacatttccgagaaagcttcagacatgcttataagacaactcttagctcatcctaccattctaaagaaatcctc

SEQ ID NO: 486368 - DNA, 98 bp, Homo sapiens
gaacagaggtgtttaccatgacgataagcaaccagcatttagagctgtttatgaagcactgagaaatatttagtccatattatcgaaccaaggaaaaa

SEQ ID NO: 486369 - DNA, 100 bp, Homo sapiens
ccaagtcatggcttccttcaagatcctggctggggacaagttgttagaactgtggccagagtcagccccaggtcagaatgctggtcagcagcagactcac

SEQ ID NO: 486370 - DNA, 80 bp, Homo sapiens
gggaagatggcgaaggtctcagagctttacgatgtcacttgggaagatgctgcttgctggggcagtaagaattgctgata

SEQ ID NO: 486371 - DNA, 82 bp, Homo sapiens
ggcgaagcgggcgagcggtggtttggacgccggcggagacgcgggcgagggggaaatttgcagtggtgagaaaatgtataaa

SEQ ID NO: 486372 - DNA, 100 bp, Homo sapiens
tctgcagatggacagaagaggcctactcaaatcctttctgagggaaattggccttgcctctctgggtgcacctgatgaatacattgaaaagctcgccaca

SEQ ID NO: 486373 - DNA, 100 bp, Homo sapiens
gctggccccgcggcctacagcagctcctcgtgcctggcggcgtgggcccgggcgagcagccctgcctccggacgaatgtacatggcaagtcaaagcaaac

SEQ ID NO: 486374 - DNA, 100 bp, Homo sapiens
cagaccttctgctaccagaaaaccttctccaccagaatccagctcacgctgatggcactgatggggaaacagaagttggagaaatacaacagaataaaag

SEQ ID NO: 486375 - DNA, 90 bp, Homo sapiens
cagttccacaaattaaaaatgaaaataaagaaatacattgcagtgatggttggtctccgccagctggacatgtccttgctctgccaactg

SEQ ID NO: 486376 - DNA, 75 bp, Homo sapiens
catgaatttgtcacattctcctgccctggcgctgacaagggtccagcctccgatccgtggtccttcagcatatct

SEQ ID NO: 486377 - DNA, 100 bp, Homo sapiens
cgtcttccgctttcttaaggtctgccctttggagtgaatcaacctggaccttatatcatgtatacaactgtagatgcaaatgggtatctgaaaaatggat

SEQ ID NO: 486378 - DNA, 75 bp, Homo sapiens
cgctgctgcagcacctgcgccaggtccagcctgatgagtgaagaggctaagcgaggagcacccaacccttggctc

SEQ ID NO: 486379 - DNA, 100 bp, Homo sapiens
ccaagtttggcatcgagaaggaggtgcgcgtgtgtgagccctgctacgagcagctgaacagacgaaggggaggaccaggctggcgatgaagatgaagatg

SEQ ID NO: 486380 - DNA, 100 bp, Homo sapiens
tagttaattggggccttcgaaatcaaggactaagaactgccattggatgtccagaatcccctgtagttgataatgttgggaataagctctgcaactttct

SEQ ID NO: 486381 - DNA, 73 bp, Homo sapiens
tcttttctggcatcgtaggaggtggcctgctgctatcagttgagggatttgcagttgataaaatggctggaga

SEQ ID NO: 486382 - DNA, 101 bp, Homo sapiens
gaagctgcccttcaccgcgggcgccaatggggagcagaaggactcggacacaggaatgggtaccacagaccatgtcatcgtcctggcgtccacgaaccgag

SEQ ID NO: 486383 - DNA, 88 bp, Homo sapiens
acttggtgaattgggatgttcagagacaagtttgggattacctttttggaaaagaaatgtatcaggttcctgagggtctgtgtgccag

SEQ ID NO: 486384 - DNA, 99 bp, Homo sapiens
tacgctcctgagtagctgctgggtcctcacagcagcacactgtttcaagagctaaaagatggcggcaaggcagcccaggcaaatgtaagaataggcgat

SEQ ID NO: 486385 - DNA, 96 bp, Homo sapiens
tcagccaagccatatctaacagaactatcttcaacttttcagagccggcgattagatactgaagaattaagtttgccagatatttctgcagaaatc

SEQ ID NO: 486386 - DNA, 50 bp, Homo sapiens
attcctcatgacattgctgtctgtaaacctatgatggacttgttgatatt

SEQ ID NO: 486387 - DNA, 82 bp, Homo sapiens
aaagctcattgacttttctgctcaggggagctatccagtttgggaagatttcataaacaaagcaggaaagctgcagtcccag

SEQ ID NO: 486388 - DNA, 100 bp, Homo sapiens
caagatcatgggcaaaggacagatccaggccactcttcacctccaccatgagcctggacatccagagcctggacatccagtgtgaggagctgagcgacgc

SEQ ID NO: 486389 - DNA, 75 bp, Homo sapiens
ggggtggagctgggaacattcctcataaagcgagtcgtcaaggagttgcagattggccttaagagaaggacggag

SEQ ID NO: 486390 - DNA, 75 bp, Homo sapiens
cgcttggtgtcctcctggcctcagcaacctgacaattctgtcgtgtcccgcacttttccagccattaactccagg

SEQ ID NO: 486391 - DNA, 90 bp, Homo sapiens
caggagaaagaagacagccatcatttgaaagatcaatgaactgagccatgttcaaatccctgttatgttgatgccagatgacttcaaagc

SEQ ID NO: 486392 - DNA, 50 bp, Homo sapiens
ggcagatggagaacctgatcgaacttcgtatctggagtccatctttcacc

SEQ ID NO: 486393 - DNA, 98 bp, Homo sapiens
tggctttcacaaattacagcagtctgaatcgagctcagctaacctttgaatatctgcacacaaattcgagaagctgtgcctgaggatgaacagatcag

SEQ ID NO: 486394 - DNA, 74 bp, Homo sapiens
cccgcagagcaagcgcggggaaccaaggagacgctcctggcactgcagggagttgaccacatttggccatttcc

SEQ ID NO: 486395 - DNA, 101 bp, Homo sapiens
ccggtgccagcacctttcggcttctgagacggcggcagcagcggcattcagttccaatttgagccgctgtgaaaaaggcctccaccagcctctcaccagaa

SEQ ID NO: 486396 - DNA, 100 bp, Homo sapiens
tgggggctgcggcctagaggtccgggcttggagttcgcctcagacgcggtggagccgccggagtctgagaagggctacagaactggctacccttatcgat

SEQ ID NO: 486397 - DNA, 101 bp, Homo sapiens
gtgccaacagccaattctacaggtgtggatgaggtcaccattgtcaacattttgaccaaccgcagcaatgcacagagacaggatattgccttcgcctacca

SEQ ID NO: 486398 - DNA, 80 bp, Homo sapiens
ggagtctccgcgtcccgctcgctgggagagaggcatgaagaccaagcacgcgctgcgccaccacatgaagctgcacaagg

SEQ ID NO: 486399 - DNA, 83 bp, Homo sapiens
ctgtggtgtacctgaccaagtccagccccagcatggcaaggccctctacacagagacaaggctgcagtttgacgagacagcca

SEQ ID NO: 486400 - DNA, 100 bp, Homo sapiens
gtggctaaggacctcaacccaggagttaaaaagcttccagtggtgtctgtagtgagagaaacagagtcccagttactgccagatgtgggagctattgtaa

SEQ ID NO: 486401 - DNA, 96 bp, Homo sapiens
aagaaaaggcgaaaaacttggccaaaatcaggaataagcaagaagtgatgatctcagatttagaaggaatgggtaccacagaccatgtcatcgtcc

SEQ ID NO: 486402 - DNA, 100 bp, Homo sapiens
agaaagctgggagccctgcgtggaggcgcatttctcctgggaggaatcctctactcctggcagtttcctcatttcaacgccctgagctggggcctccgtg

SEQ ID NO: 486403 - DNA, 100 bp, Homo sapiens
gaatcgtcactgaggttgcagttggcgtgaaggtccccagtctatgtgaggatctcctgtcttctgttgaccagccactgaaaattgccagagacaaggt

SEQ ID NO: 486404 - DNA, 100 bp, Homo sapiens
aggaggctgtgactgtgctggaggatttagagaaaggacttgaaccagagccgcagcgcacaactacgggattggcgccgccgcctgcgtgtactttggc

SEQ ID NO: 486405 - DNA, 75 bp, Homo sapiens
cgggagcagggcagcacccccagccgcagcccccgctggcctccggtgtggctgtctctgatggtgtcatcaagg

SEQ ID NO: 486406 - DNA, 100 bp, Homo sapiens
ccatgtcgccgagtggggctggaaacagacccggcgcccagcggtagccctccttgcgcctccgattcccaggtggacccaggcccaacgccgatccccc

SEQ ID NO: 486407 - DNA, 101 bp, Homo sapiens
acgacagcgaaaaaatagggaatctttccaggatggtgaagtggatgctgaagaacttcagagatgtttgacacagtctggaattaatggaacttactctc

SEQ ID NO: 486408 - DNA, 75 bp, Homo sapiens
gacgggttgtgcctggaggtggaggggaagataaggctttcaagcagaaacaaaaagaggagcagaagaaactcg

SEQ ID NO: 486409 - DNA, 51 bp, Homo sapiens
tggcaaagactggacaagctgcagggagactcatgcatctgtatgccgtgt

SEQ ID NO: 486410 - DNA, 99 bp, Homo sapiens
tactcagtaccattccaccatacgccaatatcaagcatgtcatcagatttgccagatggtgagaacaagaccaagattggaaagccagcttcagaggag

SEQ ID NO: 486411 - DNA, 90 bp, Homo sapiens
aactggttccaaatactaaaatccagatgtcatattcaggattaacatctgctcgtgcagctgagatcctggcgcgagatggtcccaacg

SEQ ID NO: 486412 - DNA, 95 bp, Homo sapiens
tggaggaggggtgtttctggccacgtgcttcaacgctctgctgcccgctgtgagggaaaagggcggcgactggcggcgcgatggacctgaccggg

SEQ ID NO: 486413 - DNA, 87 bp, Homo sapiens
cgcctcctcctcctcagtaacgcggatgttttcacctcctgtgagcagtgggaaaaatggaccaacttctttggcaagtggacattt

SEQ ID NO: 486414 - DNA, 82 bp, Homo sapiens
gaaggacgttcaacctccaaagcagcaaccaatgatatatatctgtggagatggtttagctgcattgtcattttctatcagt

SEQ ID NO: 486415 - DNA, 75 bp, Homo sapiens
ctggactgtgcagtatttccagtctgtctcagctgcagaatcctactggatgtccacttggatgtcctgaagcca

SEQ ID NO: 486416 - DNA, 100 bp, Homo sapiens
cgccacatctcctgagattatttgcaatggccaatgtacatggtggactatgccggcctgaacgtgcagctcccgggacctcttaattactagacctcag

SEQ ID NO: 486417 - DNA, 87 bp, Homo sapiens
accccagacaccggagactgggaaatggttactataacaacagtaccaaggtggctgtgaaaaccctgaagccaggaactatgtctg

SEQ ID NO: 486418 - DNA, 75 bp, Homo sapiens
caccagcggttccatcctacacttggtttttgaaatcatgaatcctgtttatagtcctggatcttctggggttcc

SEQ ID NO: 486419 - DNA, 90 bp, Homo sapiens
gacacacagacatgcaagttgcagctggaaagctgttttttgcatgtctgacacccatgactccacctggaccttatggctccacccaga

SEQ ID NO: 486420 - DNA, 75 bp, Homo sapiens
ccgagcgcttgatgtgcgcggagagcaatcgccgggacagctgcaagggtgaggtggctttgaccccgggttgcc

SEQ ID NO: 486421 - DNA, 87 bp, Homo sapiens
ggcttctctctaacaacaaccaggctttgaggagattcatgcaaacgtttgtccttgctcctgagctgctgaaaatggcctttgacg

SEQ ID NO: 486422 - DNA, 90 bp, Homo sapiens
gtctctgcccacgtcgagcgtgcccgagacccgagaaaagagtctgccgcctgcagcaacagggcctggagctgatgggcagcctgcgcc

SEQ ID NO: 486423 - DNA, 75 bp, Homo sapiens
gactacagccactactacacgaccatccaggacctgcgggacaaggaatgacaccaaggaagatgtctttgttca

SEQ ID NO: 486424 - DNA, 73 bp, Homo sapiens
tcagggatcaaagagcaaacagattcagtggcctgcattggtggttatcactaggctaaaactggacaaagac

SEQ ID NO: 486425 - DNA, 51 bp, Homo sapiens
gagaagctgatccgcgagaaagacgaagagattctgaaatatgtggagtgc

SEQ ID NO: 486426 - DNA, 75 bp, Homo sapiens
gctgaccctgggagacatcgacgggccatgatccaaaggaaccagagcagttgagaaaactgtttattggtggtc

SEQ ID NO: 486427 - DNA, 90 bp, Homo sapiens
atcgccttcagccctgtctggtgcatccttggcagaaagtgaggaggaaaacacccccattgaatgtatcctgtcaggtataatgtcagt

SEQ ID NO: 486428 - DNA, 75 bp, Homo sapiens
ggcgccgctaggatgaagctcgtgaggcctggttggtttacacaacattggacagacctgctgccttaactcctt

SEQ ID NO: 486429 - DNA, 72 bp, Homo sapiens
ccgacctgcgagcgccgcccgggcatgcgaagccgtccctccccgggccaaccaactcaaacttgaagacat

SEQ ID NO: 486430 - DNA, 87 bp, Homo sapiens
ggatgtcgggacaccccggaagctgggaaatgaaggacagaataacgggctcccagattcacaagccccaccaagaggatcacccca

SEQ ID NO: 486431 - DNA, 86 bp, Homo sapiens
ggcattgttgggagcgctgttttcgtgatcttcagaccccaggttctttgacaatgcagatcttcgtgaagactctgactggtaag

SEQ ID NO: 486432 - DNA, 100 bp, Homo sapiens
caacgactaccaccgcagcgacgagcagacgagccaaactcaggctgtaccttgagcagctcaagcaactggtgcccctgggccccgacagcacccgcca

SEQ ID NO: 486433 - DNA, 75 bp, Homo sapiens
cccgagtgcagacctgcatcaacctgatcaccagccaggagtacgccgtcaagggagtgcatccgccccaaccct

SEQ ID NO: 486434 - DNA, 85 bp, Homo sapiens
ctctttctggcctggaggctatccagcgaggaatcattatagattctaaaaatatattttcccttctctgtggacttggtataaa

SEQ ID NO: 486435 - DNA, 75 bp, Homo sapiens
agccagcagccactgcacctacaagagcagtccacggatattttgattcaagacagaattactctgagaaggagt

SEQ ID NO: 486436 - DNA, 87 bp, Homo sapiens
tcctcgatccgcccacagacctcaaattcaaaggcatcaagcatgatggaaccatgtgtgatacctgccgccagcaaccaatcattg

SEQ ID NO: 486437 - DNA, 99 bp, Homo sapiens
gaaagccccagccacccatcaaatcagagagaaggaatccaccttcttacgctatggcaggacagagcgggatgccaccagcttgtccaaagggaagtt

SEQ ID NO: 486438 - DNA, 101 bp, Homo sapiens
atgatattccacaggaagaaacagaggaggaggaagtttctacagtaaatcttctcccgttggcaacggttacatcaagcctccggttccacctgcttctg

SEQ ID NO: 486439 - DNA, 76 bp, Homo sapiens
cgcagggacaagaactgcgccaagagcctctctgctgtcaccactgactaaagaagagaaaactgcggcagagcaa

SEQ ID NO: 486440 - DNA, 75 bp, Homo sapiens
ggacatatccatgatgactggctttgctccagacacagatgacctgaagcaggaaaagaagccagaagcccccaa

SEQ ID NO: 486441 - DNA, 90 bp, Homo sapiens
cagccggtagatctccttgaatatccagatacagttgatatattagttggatggcatatagatcatactcagaaaccttcgctcacgcag

SEQ ID NO: 486442 - DNA, 90 bp, Homo sapiens
aatcccttcgatcaggatgttggttcatcatgcctagtggcgtataagaagaccccgccaccggtccctccacgcaccacttcaaagccg

SEQ ID NO: 486443 - DNA, 100 bp, Homo sapiens
aatttccatggcaatttacaacccccatactgtaccaggcaagcaggcttatggctatgggccatacggtggtgcgtacccgccaggaactcaagttgtc

SEQ ID NO: 486444 - DNA, 50 bp, Homo sapiens
catctatgccaaagtggaccggctagagaccctgtacacgtatcctgaaa

SEQ ID NO: 486445 - DNA, 90 bp, Homo sapiens
ctttgtgtcatcctccacagctccagggaaggcactcaaaagtggggggcaggaaagggccatcgatgcacccctcggagctaatagcgg

SEQ ID NO: 486446 - DNA, 100 bp, Homo sapiens
accagagtcattgcaggaagtggatgagttccacctcattttagagtatcaagcaggctatgaaaatgattctgtagaagacctgaaggaggtgacttca

SEQ ID NO: 486447 - DNA, 78 bp, Homo sapiens
ggaaatgtccgaaggccgcagtacttgaccctgtattttgggagtcgaacggagatgaaactgattccaagacagcct

SEQ ID NO: 486448 - DNA, 98 bp, Homo sapiens
cggagagctgtgtcaccatgtgggtcccggttgtcttcctcaccctgtccgtgacgtggattggttcgggtctggcggtacttgaagggcaaagacct

SEQ ID NO: 486449 - DNA, 80 bp, Homo sapiens
aggaggggccccagcagcccccgaaggccctatcaggacatggagtatgaaagacggattttttatcaagcagaaatgca

SEQ ID NO: 486450 - DNA, 75 bp, Homo sapiens
gtggcgtcgcaatgcagaggctgcaccagctggtgcccccccagacagactctcttccagaacccagaagagggc

SEQ ID NO: 486451 - DNA, 74 bp, Homo sapiens
gccctttccgtttccagggttccgaccagactatgaagaaatcgggagtgcactttttgactgtagattgttcg

SEQ ID NO: 486452 - DNA, 83 bp, Homo sapiens
atatgcagctggatgaaggcagcctcacctttaatgccaacccagatgagacagtgatgtgtgttctgaaattgtgaaccatg

SEQ ID NO: 486453 - DNA, 75 bp, Homo sapiens
ctctatctgtactgccggcacctcaaccagatgaggaagtacaactttgaggaaagaccacagcaagattctttc

SEQ ID NO: 486454 - DNA, 100 bp, Homo sapiens
tgcaaatgcaatatcagttgtttcaagtaatggcccaggtaatcgggctggatcatcaagtagccgaagcattaacacccttgtgaagatcagcaaaagt

SEQ ID NO: 486455 - DNA, 100 bp, Homo sapiens
agtgataaaataatatgggaaaaacatcaaattcttgaccaatctaggactctttttgatcagaacaatgctgcaaaaaaagaagagtcagaaactgcca

SEQ ID NO: 486456 - DNA, 100 bp, Homo sapiens
acagtgactgttaagtcttcccaaagacgagggttcctgggagccccaggctacaggccaaatttgagcaccttaagagacttcaccaagaagagagaat

SEQ ID NO: 486457 - DNA, 82 bp, Homo sapiens
ggcttctcccaccccctcacgcagagtgcagtcatgggccaccgcagcggaaggagagttttacatggaagtggcttacaga

SEQ ID NO: 486458 - DNA, 100 bp, Homo sapiens
acagacctcagggacacagataatttgaaaattgcatgggctaccacccgatgccccatgaagtggagatcgcacacaccaagaagctgttccgcaggag

SEQ ID NO: 486459 - DNA, 83 bp, Homo sapiens
cggtggatgggagtgaaggacggaagaggccctgcggaggcggcggtgcagcgctccggttctctccataaatgaagaagggc

SEQ ID NO: 486460 - DNA, 90 bp, Homo sapiens
tgttaaactaaaaaagcccctggaagaaagccacaggtcctgttttgctgcgttcctactgtctctatgttctcctgcttgccatcaatg

SEQ ID NO: 486461 - DNA, 100 bp, Homo sapiens
ctttctcaagcactgtgatcttcaaattgccatcagctcacacttgcaaacctgtggctgttccgttgtagtaggtagcagtgcagagaaagtaaataag

SEQ ID NO: 486462 - DNA, 100 bp, Homo sapiens
aatgtccattcatctgatccacatgcgtgtggcagcccaaggctttgttgtaggagcaatgactgttggtgtcatggagaaactccagctgggcccagag

SEQ ID NO: 486463 - DNA, 75 bp, Homo sapiens
tttcagaactgcagggaaacagccatcatgagtgcctgtagtagaagaacatccatctcatgagcagatcatttt

SEQ ID NO: 486464 - DNA, 100 bp, Homo sapiens
gaagagtctttaggagtcggctgtgggacgcgagagctcctggtgccatggctctcgaacagtgctccagaaactgcagtgggggcttcaagatacgcga

SEQ ID NO: 486465 - DNA, 100 bp, Homo sapiens
aaatatttacagtcggaggagtactcggtgaaatcctgtcctgaagactgtaagacaaagaaacagccttggtataatagcacgttagcatcaagacgaa

SEQ ID NO: 486466 - DNA, 100 bp, Homo sapiens
accatctccaagccctgtggcaaactgaccaagcccaaacctcaaggtgaatctggattgggaaagtcgacattaatcaactcattattcctcacagatt

SEQ ID NO: 486467 - DNA, 74 bp, Homo sapiens
agtcatcatgacctggccccagccctagatactggcactactgaggagcaatttacagcaatgagggatttata

SEQ ID NO: 486468 - DNA, 100 bp, Homo sapiens
gaatggagttctgacaccgcagagggcaggccatgcccttatccgcactgccaggtgctgtcggcccagcctgaactgataaatttcaaacggaagagag

SEQ ID NO: 486469 - DNA, 76 bp, Homo sapiens
tctcatgagagcaaggcagccttccaccggaagagaaagtctccagagaatacagagggcaaagatggatccaaag

SEQ ID NO: 486470 - DNA, 99 bp, Homo sapiens
atcagacaccgagcttcagcaagctctctccaacggtgcaggctgccccatggatgccacacgtggcagcggggagaaaagaagtgattcggtccctgc

SEQ ID NO: 486471 - DNA, 76 bp, Homo sapiens
tattaaacctaccatccaaatcaaacaggagtcagacagtgatctgacacaaacacagctgaagcaaacagaggtc

SEQ ID NO: 486472 - DNA, 119 bp, Homo sapiens
ctggatctggccaacaccaccggcacagtgacggcttcagaggaaatatacagcctctgcagacactgcttctgaatgaacgggctggagtttccttgggatcctgaactcatattgga

SEQ ID NO: 486473 - DNA, 98 bp, Homo sapiens
tcctgagtagctgggactgcaggcctcatgtggaatgcagcctctgagaaaagcacttctcaccactcaaaacccaccgaagcatgcccagccctgag

SEQ ID NO: 486474 - DNA, 90 bp, Homo sapiens
gtgcccacctgcgtaagggggcagagacagattttatggaaagaactcttcttatgtccatgggggattggattcaaatggaaagccagc

SEQ ID NO: 486475 - DNA, 100 bp, Homo sapiens
tggatttgccaggaatgaccaagtgtgtgtttactgtcacaaaggcacattttcagacccctactcctgtggtgacggacaccctgagggtccccatggc

SEQ ID NO: 486476 - DNA, 97 bp, Homo sapiens
aggcatcattgcgctggccctggaagccaactcgatcaagtcatccgccaaagaagcctgtccagtttggaactgttcctctcctgtgcacagaaac

SEQ ID NO: 486477 - DNA, 100 bp, Homo sapiens
tgaagaccgtggagatgcgggatggagaggatcccctaacaacagtgagagagcaatgcgagcagttggagaaatgtgtaaaggcccgggagcggctaga

SEQ ID NO: 486478 - DNA, 75 bp, Homo sapiens
tcaccacaaccctgctgtctggaaaaacccaaaggtatgatgaaaggagacagatgatggaccctggttatccca

SEQ ID NO: 486479 - DNA, 85 bp, Homo sapiens
ttatagtcctggatcttctggggttccctatgcaaatgccaaaggaattggttatccaggcaccaccttccatggtcaataatga

SEQ ID NO: 486480 - DNA, 74 bp, Homo sapiens
aggattctgcctggccctgggaagagaagcctagatatctgggaatgggtactgttcaaaaaggaatgccccac

SEQ ID NO: 486481 - DNA, 90 bp, Homo sapiens
attttggcagctactaaccgtccagataggatagacaaggtatgataagtattatcagcaacataatagttctgggcatcttcattaagt

SEQ ID NO: 486482 - DNA, 75 bp, Homo sapiens
agcaaatggttgacacctttacacagagcagttgcatcttgtagtgagaacattctagtatgccagtagaaaaaa

SEQ ID NO: 486483 - DNA, 75 bp, Homo sapiens
acaagcttaataaaataaccgtccccgccagtcagaagttgagctcctgttggaacaccaggatgcaattgcccc

SEQ ID NO: 486484 - DNA, 100 bp, Homo sapiens
tagatgtgtcctatgaataccgcttcctggagttcacgactctgagtgctgtgatatcagtatcaagataaaagtttggaatgggagaaaaattctcaaa

SEQ ID NO: 486485 - DNA, 75 bp, Homo sapiens
gtaacgtcatggaggatgaacgacagtacaaaattggacagctgtacatgatcagcaaacacagccatgaacaga

SEQ ID NO: 486486 - DNA, 49 bp, Homo sapiens
gactatggcatctatgttatcaaccagatggaacagattaaaagggcca

SEQ ID NO: 486487 - DNA, 100 bp, Homo sapiens
ctcgcgtgacgaccgcattcgtggcagaatgagtccctggaacgccagatgcgtgaaatggaagagaactttgccgttgaagctgctaactaccaagaca

SEQ ID NO: 486488 - DNA, 100 bp, Homo sapiens
cagcaacgtgcagaagaagctcacccgcgcgcaggagaaggtttttagaacttcagccataaaaatgggcagaattttccttgatcatatcggtggtacc

SEQ ID NO: 486489 - DNA, 98 bp, Homo sapiens
tcatggcagaaacacagttcaccagtggtgaaaaggagcaggtagatgagtggacagttgaaacggttgagggtgatcagcccatgacctaaacctcc

SEQ ID NO: 486490 - DNA, 100 bp, Homo sapiens
atctgttgcagcgagccccagattattgcccagagacaatgatgccaattctcggaagcaagaagcagagtggaaagaaaaggcaataaaggagctagaa

SEQ ID NO: 486491 - DNA, 96 bp, Homo sapiens
ccaggctggagaatatggtgcagaggccctccacggaagacagcgcttcttgtgagtcaaacaaagagaagaggcgagtaaaaaaaaaggtttctt

SEQ ID NO: 486492 - DNA, 75 bp, Homo sapiens
cggcgctcccggagatgccccgcggcagccgcgctcggggctctaagtagcaggacccagtgctccataaaggat

SEQ ID NO: 486493 - DNA, 100 bp, Homo sapiens
ctgcctacagaaccgtcccaaaatatggcaaagaaacctattctgagatgaggagctctatgctggtgtgtacatcgattttatgggcactgatgcagcc

SEQ ID NO: 486494 - DNA, 83 bp, Homo sapiens
cagttggttgggacccgctccaaccctcggaaatctggcattttttaaagtttgcgccccacaaagaggaaatattccaaagg

SEQ ID NO: 486495 - DNA, 83 bp, Homo sapiens
gcctttgggaagcatgtcaccaacccggccttcaccaaactccctgctcgtggtcccaagaagcatctgaagcgggtggcagc

SEQ ID NO: 486496 - DNA, 75 bp, Homo sapiens
ggagcagttgtctgatgaagagaaggtgtcagttgtacccgaggcgttctcagcagcagcaagtacctgtggtgg

SEQ ID NO: 486497 - DNA, 82 bp, Homo sapiens
ttcgctgcccggtccgcccgcggtataccgctgggccgaccactcaagcacggtgctgcagcggctgaacgagcagcgtctc

SEQ ID NO: 486498 - DNA, 101 bp, Homo sapiens
agcaggagctgcgtccggcaggagacgaagagcccgggcggcgctcgtacttctggccactgggcgagcgtctggcagcaggactctggactgtcttcaca

SEQ ID NO: 486499 - DNA, 100 bp, Homo sapiens
aagatctgctgcaaggaactgatagcttatggttctccattgtgatgaaagcacatggtacagcctcaagttgaagtgttatcagaggaagaaggggaag

SEQ ID NO: 486500 - DNA, 100 bp, Homo sapiens
ctgagatgcttcctcctcatcttcttcgccaagcacctcttgtcactgatcttggaagttagaggtgggaaaaggcagtttggatttaggtggcgagtag

SEQ ID NO: 486501 - DNA, 50 bp, Homo sapiens
aaatcgagcagaaagaatgtctttcaggtgtttgatcagtatgtaaagac

SEQ ID NO: 486502 - DNA, 74 bp, Homo sapiens
gcagcctcaaggaggaggagtgtccagcagccattgatctgatgtacggaggcatctactgttttctgtgccag

SEQ ID NO: 486503 - DNA, 83 bp, Homo sapiens
atctgttgttgcttctttttcagggactatggcagttccaagaggaaatcagacaatgcagatcttcgtgaagactctgactg

SEQ ID NO: 486504 - DNA, 82 bp, Homo sapiens
ttggcccttgttcccccaaatgtctgactctgactctcggactgagaaacgcaagaggccacaagaggaagctgaatgaaga

SEQ ID NO: 486505 - DNA, 50 bp, Homo sapiens
ctactctatactctcagtggcttaggtgtgatgaatgcagactctgctac

SEQ ID NO: 486506 - DNA, 75 bp, Homo sapiens
ggtcccaatcccccactctttccgccctaatggaggtctccagtttcgagaatgtaactggtcactacatttccc

SEQ ID NO: 486507 - DNA, 84 bp, Homo sapiens
accatcttcaggtcctactccaggggcgctcagacaatgcagatcttcgtgaagactctgactggtaagaccatcaccctcgag

SEQ ID NO: 486508 - DNA, 100 bp, Homo sapiens
gtcaagcgaagccttgaaaaagctgccctgagacggtgtcccgccgaaagaagctttgcatcgtccctatggttgtgatgttgaaccccaggcactaaat

SEQ ID NO: 486509 - DNA, 74 bp, Homo sapiens
aggcttctttgtacagtgtatgtatgcaaaagatttatgaatccaggtggaccaaactacgaattaacatgctt

SEQ ID NO: 486510 - DNA, 89 bp, Homo sapiens
acacaccggactaccaagaccagctacggtcaccagacttcccagactcccggccagccatcgaggacctcaagtactgcctggagagg

SEQ ID NO: 486511 - DNA, 83 bp, Homo sapiens
cagggcccgcgggccaggagagcgctcggcgggtttccacttgagcggcacagtgacagaacctgcaatacaatcggagccag

SEQ ID NO: 486512 - DNA, 100 bp, Homo sapiens
gaagagctgaacgtttagaggcaacagaataccttgtctcagctgctgaagctgggttttgcaatcccaagaagagtcagcgtttgaattttgaatttat

SEQ ID NO: 486513 - DNA, 111 bp, Homo sapiens
gcttctcgtagtcctgggagcacagcagaagtattcagaatggacagtttagaagaacctcagaaaaaagtctttaaggctcgaaaaacgatgagagtgagtgatcgtcag

SEQ ID NO: 486514 - DNA, 74 bp, Homo sapiens
tcactaaaaattatccctactacaggactgcggacaagggctggcagattttgcaagaacgaggctcaaggatg

SEQ ID NO: 486515 - DNA, 83 bp, Homo sapiens
caagaggcagcctgggggccacagctgcttcagtgtgatgaatgcagactctgctaccattttggctgtttggatcctccttt

SEQ ID NO: 486516 - DNA, 75 bp, Homo sapiens
gagccacacagaccagaacggcagagggcgaacaagggcagcaaggctacggagaggctgaagaagaagctgtcg

SEQ ID NO: 486517 - DNA, 100 bp, Homo sapiens
gctccaggtcttgggactccctgccgcccagcaagaggaagaaggcacctctggtttctgttatgggtacaggggtcgtgactcccgctctaatctgttt

SEQ ID NO: 486518 - DNA, 83 bp, Homo sapiens
caagctctttgggaagtggagcaccgatgatgtgcagatcaatgacatttccctgcaggttctctacttttagagtcgaaaat

SEQ ID NO: 486519 - DNA, 90 bp, Homo sapiens
tggaggggtgaagaaacctcatcgttacaggtcctggtgcttgatggtcgaggccatctcctgggccgcctggcggccatcgtggctaaa

SEQ ID NO: 486520 - DNA, 133 bp, Homo sapiens
caagaagaccattcagatgggatctttccggatcaatccagatggcagccagtcagtggtggaggaatgtatcctgtcaggtataatgtcagtgaatggcaagaaagttcttcatatggatcgaaacccttac

SEQ ID NO: 486521 - DNA, 74 bp, Homo sapiens
ttattcttcaactcagcatgttcctggaagaggaagaacgtctgagaaataaaattcgagctgatcatgagaag

SEQ ID NO: 486522 - DNA, 49 bp, Homo sapiens
cggtagacctgcccaagtctcccaagaaatggcgaaaagtcttttgaag

SEQ ID NO: 486523 - DNA, 83 bp, Homo sapiens
tgcgtgctacggccctgtgggcctgggagctgcctctgaggaacacgccgcagagttgcatgctgagaatttgaaaaatgaag

SEQ ID NO: 486524 - DNA, 101 bp, Homo sapiens
gggaggtgaatttccatgtcaacatagtcctgaatgaactctggaagcccagccagggacaatgcaccttcacagagattctgcactaatctgagtgaagg

SEQ ID NO: 486525 - DNA, 100 bp, Homo sapiens
gaagatacccgccctgcgccccgctctgctgtgggcgctgctggcgctctggctgtgctgcgcgacccccgcgcatggacactcatgaggaccatgatac

SEQ ID NO: 486526 - DNA, 100 bp, Homo sapiens
catgtgcttggtgtcgtttttccttgagctgaacgtcttgcaacagtggccgcacgcataggagacctgtgaatccatcctcaattgtgcattggaagag

SEQ ID NO: 486527 - DNA, 100 bp, Homo sapiens
gctcctcggctggtggcaagtattgctgtgggtgctgggacttcccgtccgcggcgtggaggatgaggacggggacttggttgccttttccagtgacgag

SEQ ID NO: 486528 - DNA, 100 bp, Homo sapiens
gtaggaggacgccagttactgcacggaaagcagcgtcaggagccatagtacctacagcagcactccagggagcatttcctgaagacgtagtcatgcagca

SEQ ID NO: 486529 - DNA, 82 bp, Homo sapiens
ttcaggccagaccctctgggagcttctcagccattttccacagatcaggtgaggcggaaccaaccctcctggccatgggagg

SEQ ID NO: 486530 - DNA, 74 bp, Homo sapiens
ctagaccacagaagtaaatggtttgtctcggaagaaaatgttggggcttttcaggaagcataataagattccta

SEQ ID NO: 486531 - DNA, 97 bp, Homo sapiens
aaacatctgcaagtttttagtcttgctcatcccactcttccttttactaggtacaccaggggttggaaaaaccacactaggcaaagaacttgcgtca

SEQ ID NO: 486532 - DNA, 83 bp, Homo sapiens
aggagacatcggcctctgcaggcttgccgaagaagggaggcagctgctcccaaccccagaacctttgctgtcttgggacggat

SEQ ID NO: 486533 - DNA, 100 bp, Homo sapiens
caaaggagactgtactgtactgaagcccacacttatggctgctgttccggtgcacccaccctatccccaagtcttctcggcttactgctgcctgcctttg

SEQ ID NO: 486534 - DNA, 100 bp, Homo sapiens
cgcaaccacagacgcagcaacaacagcagccggcccttgttaactacaacagaccatctggacacattggcgtgagacctgggagtacgttgtgccaaat

SEQ ID NO: 486535 - DNA, 100 bp, Homo sapiens
tgcaatcagcagtaacaagaagacaatgagcaaaagcccttccctttcatccagagccagtgctggtatcgagaaccttccctgcgaacttcagaggaac

SEQ ID NO: 486536 - DNA, 50 bp, Homo sapiens
cacgatgtgacagtggatgcagacagttctggaagctggaaactcctgga

SEQ ID NO: 486537 - DNA, 75 bp, Homo sapiens
aatcagtcaaaatcgtcttttcctgctggtaaataacactgaaatcagaggctgaccatgtggaggccgccatcc

SEQ ID NO: 486538 - DNA, 82 bp, Homo sapiens
tttcatgagcacaggcatcagtcaggcagatgtttgtcgactggaatgggtcatcatcagatttgaaatatttaaagtggat

SEQ ID NO: 486539 - DNA, 100 bp, Homo sapiens
ctcggtgattgaggacaagaccatcgagctcatgatcactgtgtccactactatgatcttcgtaacactaaacagccaatcatggtattcaaaggacacc

SEQ ID NO: 486540 - DNA, 96 bp, Homo sapiens
cggggacggcgaggccctcatgtaccacacgaaccgggctgtgggtcggcccaaggggaagctgggcccggcctccgcggtgaagttggccgccaa

SEQ ID NO: 486541 - DNA, 50 bp, Homo sapiens
cgcggggaccgctgtgctctcgggggagtggccacagcaggtcctatctg

SEQ ID NO: 486542 - DNA, 82 bp, Homo sapiens
ctgcggccaattcggtggaacgaggacgcggactgcgaaggcaggtggccagcatcgaaatgttcagccttttagtgatgaa

SEQ ID NO: 486543 - DNA, 100 bp, Homo sapiens
gaaagcgtgcgtgcggctaagagagtgggcgctctcgcggccgctgacgatgatgataattccgaagaaggcttccacactattcattcaggaaggcatg

SEQ ID NO: 486544 - DNA, 75 bp, Homo sapiens
aaaacagaaatcgaaacagatacagagatgtaagcccatgggcactatgaacgaagaggagcagtttgtaaacat

SEQ ID NO: 486545 - DNA, 100 bp, Homo sapiens
caaacggaggcgtgaggaggacgccaggtggacacgcccatccttggacttcctgaaaatgacccaggtagtccaggggatcctgctcatctcagctgtg

SEQ ID NO: 486546 - DNA, 75 bp, Homo sapiens
ctcaccgaggacggggactcgatagagactcttaatggaacaatgattctgaaaagaacggagcttgaagcaaag

SEQ ID NO: 486547 - DNA, 101 bp, Homo sapiens
gcaaaacttatgtgaccccgcggagacccttcgagaaatctcgtctcgaccaagagctgaagctgatcgggtgaggccgagttcaaccgcatcatgagcct

SEQ ID NO: 486548 - DNA, 100 bp, Homo sapiens
ggaggatgcctatgtattccctggggatggcgcatcacacaccaaagaccgaagccaggacagcacagccgtagcactctcagactctagctcaacgcag

SEQ ID NO: 486549 - DNA, 100 bp, Homo sapiens
tggcccatggacctgaaggagaagcacctggtcacaaggcacttaaagcattgttgaggtcattggtaggtcttcaggaagagttgcttttccagtaccc

SEQ ID NO: 486550 - DNA, 75 bp, Homo sapiens
tgcagcaggacatcttcctgacctggtaataattagttttagaaagagcgttttcgctacgtaaagcacattcga

SEQ ID NO: 486551 - DNA, 88 bp, Homo sapiens
aacatggaagagatgtttcacaagaagtctgaggccgtcagggtgacatctgttcccgagctgttcctgactgcagtgaagctcaccc

SEQ ID NO: 486552 - DNA, 76 bp, Homo sapiens
ggcgggggcgtccccaggagccggacaggacgtagacaagtttggcaacgagatcacccagctggcccggcccctg

SEQ ID NO: 486553 - DNA, 50 bp, Homo sapiens
gggaccacggtcaccgtctcctcagtgcgccccggagaacaccttgccca

SEQ ID NO: 486554 - DNA, 100 bp, Homo sapiens
tgcacacctttctgctttatctggaaacagagcaaatgcagcgttacaatcaaagacttattgaggaattgaaaaacagacagactcaagaaagagcaag

SEQ ID NO: 486555 - DNA, 76 bp, Homo sapiens
actccctggatgactggaagctctttgccacaaatcacccagaatgcctgcaggttacattagttatacactctgg

SEQ ID NO: 486556 - DNA, 75 bp, Homo sapiens
gagattcctctggttctggtgggaacccagggtgtggatgaggtcaccattgtcaacattttgaccaaccgcagc

SEQ ID NO: 486557 - DNA, 75 bp, Homo sapiens
ggtggcagcggcaggagagtccggccgcgacaggacggtgccagaaccctgtggagcatcatgaactgggaagag

SEQ ID NO: 486558 - DNA, 91 bp, Homo sapiens
gtccccactttcccctgagcctcagcacctgcttgtttggaagactgtatgaaaacaagggagaggctgacttcgtggaatctttgctgca

SEQ ID NO: 486559 - DNA, 49 bp, Homo sapiens
gctatcggcgccgcggcaagagccagtgtaagaagaagcttgggaagct

SEQ ID NO: 486560 - DNA, 88 bp, Homo sapiens
gaggaagctgtgaagaaaaccaacaaatgtgtactagtctgggaggtgaccattgtcgaaaaagctgacagctccagcgtgctgccca

SEQ ID NO: 486561 - DNA, 80 bp, Homo sapiens
aaaaaatattcacagttcataaactttcctatttatgtatggagcagcaagaagatgggtgtgaacctgacacgcagcaa

SEQ ID NO: 486562 - DNA, 75 bp, Homo sapiens
tcgcacttccggtggggagattccggcctggagctcccagggccgagggccgcgatgggcctcttggaacattgg

SEQ ID NO: 486563 - DNA, 90 bp, Homo sapiens
tgcgatggactattccctggctgcagccctcactcttcatggtcactggcacagactgtggggctcccagtgaccatgcattcaccgaac

SEQ ID NO: 486564 - DNA, 74 bp, Homo sapiens
agaagatcatcaagcgcaagcacaccctaccgaattacaagatcagtcacccacaaaagctgtatataatgcca

SEQ ID NO: 486565 - DNA, 85 bp, Homo sapiens
agctgttcccactggctctgctgaccttgtgccttggccgcagcctgggattccccagggacccccccggagccgccgcgtctcc

SEQ ID NO: 486566 - DNA, 80 bp, Homo sapiens
gcctttccccctgcaggtggtttctgtcggaggaccagctagaggctgaataccactagaaacatacctgtaaccagaga

SEQ ID NO: 486567 - DNA, 90 bp, Homo sapiens
ggcggatggccccaggtgtaagcgcagaaagcaggcgaacccgcggcgcaataacggtctctaattaacagaagatggcaaagcccagcc

SEQ ID NO: 486568 - DNA, 83 bp, Homo sapiens
cgccggctcccaccccggcccgaccccgacccggcccggtcaggccccatactcaggtgagaagccctaccactgcaactggg

SEQ ID NO: 486569 - DNA, 82 bp, Homo sapiens
gcacctagggggcggctaccccgtggggccaagaagcttgagagaagaaaaatttcagaaaaattgtctcaatttgactaga

SEQ ID NO: 486570 - DNA, 101 bp, Homo sapiens
tgtatccgcggccgtagcagccgggctggtcctgctgcgagccggcggcccggagtggggcggcggctgccaaggggccaagggatgagctggggccctcc

SEQ ID NO: 486571 - DNA, 75 bp, Homo sapiens
cgggcggcacgcacgcggtgcagggtaacatggcggatgcggaagcgtcaaaaggaacggaagcgacaggagcgt

SEQ ID NO: 486572 - DNA, 50 bp, Homo sapiens
ctgagacccggacagtggcagtgaaacagatttggagtcaaaatatggac

SEQ ID NO: 486573 - DNA, 98 bp, Homo sapiens
gcagtttcgatggaaaatgaagtctggtggaaaggacagaggactaagtccatggactggaaattggaagggagtactcagaaagtagagtcacctgt

SEQ ID NO: 486574 - DNA, 100 bp, Homo sapiens
atggtcttcgccgatggggccttccccgagattgcaacacctgctcggtataccgtgactttgggaggaacatctgtcactgtgaagtatctgcgcagtc

SEQ ID NO: 486575 - DNA, 75 bp, Homo sapiens
ttgtgaccctgcagctcctcaaagagccaaaaacctgtatatcatctccgtgaaggggatcaagggacggctgaa

SEQ ID NO: 486576 - DNA, 74 bp, Homo sapiens
ggaatgctgctgttcgctggtgggaaggatcaacggccaccccgggaagtccacgcgcctggcgggcttgtgga

SEQ ID NO: 486577 - DNA, 100 bp, Homo sapiens
ctgcttcctccatcctggtattttttggagcttccatcctggttcttccaaagtgcccggacccaaaacaggaagcctgctgggaacgggacttctaaaa

SEQ ID NO: 486578 - DNA, 100 bp, Homo sapiens
ggtcccgcgctgcgcatccccgcggacgccacagcgctttaaacaggtgttcaaggagctggagtttctgggttggtataccacaggggggccacctgac

SEQ ID NO: 486579 - DNA, 101 bp, Homo sapiens
ccgcagtatcatgctggccaagaagatcatcattaaggacggaggcacggctgaaggtgatgtggccgccctcaaccgacgcatccagctcgttgaggagg

SEQ ID NO: 486580 - DNA, 100 bp, Homo sapiens
tatatcctgacactatgaatgctacttggatgcctcttaagatgatccataattatatggaacatttagaaagaacaaaacttcatcagctctcagggag

SEQ ID NO: 486581 - DNA, 83 bp, Homo sapiens
ctgctgggcctgcccttcaccctctacatgggaaatcctcattgacgattcaatttgttgaaggccaatttgtggactcctac

SEQ ID NO: 486582 - DNA, 50 bp, Homo sapiens
gattcgcagtggtcgcttcttctccttgctgtcggcagcatccagcccct

SEQ ID NO: 486583 - DNA, 82 bp, Homo sapiens
cgaaggtgaagagttgtcccagctcggcccgcgggggagccccgggagccgcacgggcgtctctggccgagcctctttttgt

SEQ ID NO: 486584 - DNA, 82 bp, Homo sapiens
gcaggagattatagctctgtatgagaaggacaacacctacttagaattcagaaggagctggcggacatcactttagaccctc

SEQ ID NO: 486585 - DNA, 90 bp, Homo sapiens
cccgccctccctcaccgccaaggtcctgcttcaccgaacagcacctcaggagcagatgtatcggcaagcagtgtaaacggaggacttggg

SEQ ID NO: 486586 - DNA, 51 bp, Homo sapiens
catgaactaaataatctcctgtctaaagtcagctccgccgaaggcgccgcc

SEQ ID NO: 486587 - DNA, 97 bp, Homo sapiens
cagttgcagctaaaccaggagaaggccaacctgcagctggaaagtgaagaactgaatatcctcatcagggtcccctcctaaccgcaagcgtcctgct

SEQ ID NO: 486588 - DNA, 98 bp, Homo sapiens
tgacatggcttccagaatcactgagctgtaacaaagcactctgtgctagtgatgtgagcaaatgcctcattcagatttgataatgggctgcattaaaa

SEQ ID NO: 486589 - DNA, 83 bp, Homo sapiens
ctctcattggcttctttgagactgaaatggcaggacagagcgggatgccaccagcttgtccaaagggaagttccaggagctcc

SEQ ID NO: 486590 - DNA, 100 bp, Homo sapiens
cccgggccactgtctgtgaagcagccgccctggagaaacagatcgccctcccaggcccaatacttcaaagcatcctacctctgctcaatatatattactt

SEQ ID NO: 486591 - DNA, 50 bp, Homo sapiens
tgtgaaaactctgttactgaaggttttgattcccaccatggccatcaccc

SEQ ID NO: 486592 - DNA, 98 bp, Homo sapiens
aaatttcatggagaagaaggccttgactacggaggggttgccaggagttaaagttcctcgtaattttcgcttgttggaagaacttgaagaaggacaaa

SEQ ID NO: 486593 - DNA, 100 bp, Homo sapiens
gaaacgtctgtgtgagaacattgccggccacctgaaggatgcacaaattttcatccagaagaaagcgaaaaatagtagtctagtcattcaagtgaaaggt

SEQ ID NO: 486594 - DNA, 82 bp, Homo sapiens
aaacttcaagccaaacatcaagcagaatgtgatttgcttgaagatatgagggaaaatggagctgatagtatcctggatcttg

SEQ ID NO: 486595 - DNA, 100 bp, Homo sapiens
ccggcccgggggtgagcgccgggctccgtggggaggaagcgggggccaccaagaaagtttcctacactactgaggtttaggggcactgtgaagcaaaagc

SEQ ID NO: 486596 - DNA, 100 bp, Homo sapiens
gcactcaagtcctggctcagcaagactctcgagcccatgtctgacagcagccgctgcagcagctgctgctgctaccaatgcagctattgctgaagcaatg

SEQ ID NO: 486597 - DNA, 88 bp, Homo sapiens
agctgtactaggactgggaacgggtctagcacataccgctccaagggctttgacgtcacagtgaagtacacacaaggaagctggacgg

SEQ ID NO: 486598 - DNA, 101 bp, Homo sapiens
cggaggccatgggcgacccagcccccgcccgcagcctggacgacatcgacctgtccgccctgcggagctgccatcagtcatgctcttaaacggggactgcc

SEQ ID NO: 486599 - DNA, 50 bp, Homo sapiens
agaacttttattccttccagaagcaggctgaccaactgactgaagagcag

SEQ ID NO: 486600 - DNA, 75 bp, Homo sapiens
gcgtggagttcagttacccggagctgctgctgtgcggagaacaacggggcttcataaacttcacttaccaaatac

SEQ ID NO: 486601 - DNA, 97 bp, Homo sapiens
aagtgaattgatttggttggaatgctcttttaccgatgctttaacatacagccactaggtgcaaagttccccatcaagtggacggcccccgaggcag

SEQ ID NO: 486602 - DNA, 75 bp, Homo sapiens
cgatttcttcgaggtggagtcggagctgggacgatccaaggttttgccatcaaggggggacgatttaccaaagcc

SEQ ID NO: 486603 - DNA, 90 bp, Homo sapiens
atttatttaaaaataaaatgtcaagtgaattccagtgttgaagaaagaggttttctagtgcaagttttgaaactgcttttgaatttgtct

SEQ ID NO: 486604 - DNA, 83 bp, Homo sapiens
cacaccaccgcactgtcgctgcccgcctgccctgaggagtccccgctgcttgatctgactgcagccatgagcagcaatgagtg

SEQ ID NO: 486605 - DNA, 90 bp, Homo sapiens
tgtattggcatttcatggctagagttctaagtgtaaacaggaacatcgataagtagtgtaaaaacttgcacaatgaaatccgaagccaag

SEQ ID NO: 486606 - DNA, 100 bp, Homo sapiens
ggtggcctccgaacccgggaaaagaggaactaaggcggaggaactgagacgtttcgaattccagcttgcattgaaaggctctagttacagtggacttctt

SEQ ID NO: 486607 - DNA, 103 bp, Homo sapiens
attccgtttagcagctgttgggccaactacacagaccttactccccttagaacagtacctggagtagaacagaaaaattattatgtctgtgttcccttgggac

SEQ ID NO: 486608 - DNA, 97 bp, Homo sapiens
ttggaagcccgggaccgtttaaaaaactgttggtcctgagaaaagggtgccagcgatgcctggatcgcctgtggaagtgaagatacagtccagatcc

SEQ ID NO: 486609 - DNA, 49 bp, Homo sapiens
cgtgcggtgggaccacgagagcgtgtctttcctgaagactatcttcccg

SEQ ID NO: 486610 - DNA, 100 bp, Homo sapiens
aacagaaggtacccaaaccaccggcacagagcaagaataaatactgactttgagtaacggccttgagctattgtacacatgtgacaacctatgaagaatc

SEQ ID NO: 486611 - DNA, 76 bp, Homo sapiens
cagccattgggatagctggccttggtggaggatttgaaataggaattgagagtttgccttctgccaggtggatgcc

SEQ ID NO: 486612 - DNA, 100 bp, Homo sapiens
agaatggacaagcttaataaaataaccgtccccgccagtcagaagttgagatttgaacatggaattcaatccttcagatcatcctcgggccagcacaata

SEQ ID NO: 486613 - DNA, 100 bp, Homo sapiens
cctccgcttccctgggtccaccgcggatccctcccgcttgtcaggaggcggccagcgggtaagtaaggaggtctctgtaccatggctcgtacaaagcaga

SEQ ID NO: 486614 - DNA, 100 bp, Homo sapiens
gcgcgaggccgcagagctaaatgggggcctctccagggagtgctctgttcacggctccatcgctgttactccataatgggagaagtaaagaacaaagact

SEQ ID NO: 486615 - DNA, 75 bp, Homo sapiens
gatccatctgcaccacggtgctggatctgcccaataacatgattcatcaggtgccaattaaatccctccctcaag

SEQ ID NO: 486616 - DNA, 90 bp, Homo sapiens
gcagcagacagcacggacgtcaccctggtcgctcagctgtccatggacaggtaccaggatcatctatgaccggaaattcctgatggagtg

SEQ ID NO: 486617 - DNA, 101 bp, Homo sapiens
cgcgggagtcgtagggaggacgccgggacacctggaagccgagaaatgattggccttaagagaaggacggagccacatactgctgacggcccagaactggc

SEQ ID NO: 486618 - DNA, 83 bp, Homo sapiens
taaaccaagaagaaatccacagatttagttctttgctgatagtccaactccaccgccaccacctccaccagatgacattccca

SEQ ID NO: 486619 - DNA, 100 bp, Homo sapiens
gaggagaatgtgagaaaagggggaaaatgcccaggaggaagcaggagcagcccaagcgccttccctcacgttcccgtgtcagtggctatgatgacacctc

SEQ ID NO: 486620 - DNA, 99 bp, Homo sapiens
ggcggatctggaggagcagttgtctgatgaagagaagtttttggctttcacccccaaccagtgaccaaagacttgaccactcaaagtccagctccccag

SEQ ID NO: 486621 - DNA, 100 bp, Homo sapiens
ggagactgtgccgtggagggcctcgccatgtcctgctgcccgagaatgcagaatctattgatcttaaacagtttttcgaccaacatttttcacatatata

SEQ ID NO: 486622 - DNA, 75 bp, Homo sapiens
gaggttttctatggatttctggcaaaaggaggagatgttaaagtaacccatcttgcaggacgacattgaagattg

SEQ ID NO: 486623 - DNA, 51 bp, Homo sapiens
accaggaggcgttggccaagggtcatcatcagatttgaaatatttaaagtg

SEQ ID NO: 486624 - DNA, 74 bp, Homo sapiens
agctgcttccattggccagtatgaagtggtgaaggagtgtgtgcagcgcctgctcctgcaaccagcacgcccga

SEQ ID NO: 486625 - DNA, 101 bp, Homo sapiens
ttttgaaggtgcaagatactatataaagtatgtgatagtggaatgtgaagatcaagatactcagcagagagatccaaagacccatgagatgtacttgaacg

SEQ ID NO: 486626 - DNA, 100 bp, Homo sapiens
ctccaggccgcccgggacttcctctttcctcacctgcgggaggagatcctcagcggcgccttgcggagggaccccaaatttaattccttttcgaccttca

SEQ ID NO: 486627 - DNA, 100 bp, Homo sapiens
aaaaacctgagaacttcctgatctctctcgctgtgagacatgtctgagactcctgctcagtgtagcattaagggtgttttgaatgctgtatcaaatgcct

SEQ ID NO: 486628 - DNA, 103 bp, Homo sapiens
gggctgctcccatcattgatgtggtgcgatcgatcatggaagggaagtggttgctgtgtatgttactggtgcttggaactgctattgttgaggctcatgatgg

SEQ ID NO: 486629 - DNA, 75 bp, Homo sapiens
ggctccctgcgcgcccagctggaggcgcagcggcggcagctgaagaaatcaggggagaaacccctgcttggtgga

SEQ ID NO: 486630 - DNA, 98 bp, Homo sapiens
aaaagatccctggaatatgaagagacacagtatggtagccacacccccaggttctggcctataggaacaagacattttcagtaatggaagaaggagct

SEQ ID NO: 486631 - DNA, 97 bp, Homo sapiens
ccaacttcggcaagatccagatcgggatttacgtggagatcaagcgcagcgatggtcatgatgatgggcagcgcccgagtggcggagctgctgctgc

SEQ ID NO: 486632 - DNA, 153 bp, Homo sapiens
aaacagcagcacccgagcaaaccccagcaagatgcggaggctgcctcggcggagcagaggaaccacacgctgatcatgataatcaatatgcatttccaagccttttggctatgtttgggtcttctgttcatctcaattaatgcagaatttatg

SEQ ID NO: 486633 - DNA, 100 bp, Homo sapiens
cttccctcggtctgggcttctctgaggcggcgagagatggtcaggtctggagctcgaccgggccagcgccatcatgaccgggtcctataacaacttcttc

SEQ ID NO: 486634 - DNA, 75 bp, Homo sapiens
cgcagccgacgcgggaatgaagcgggcgctgggcaggtttttcacgactgaaaacaacatagcaaaataagccaa

SEQ ID NO: 486635 - DNA, 100 bp, Homo sapiens
tggaatatgatcatggaaaactcaacctctatttagattctttaaaagaagatggatgcacagtgttcagccaaggtcaatgcaaggaagaggagaaaag

SEQ ID NO: 486636 - DNA, 80 bp, Homo sapiens
ttatgtaaaataaaacagcacgtggaaggtattgtaagcgctctatacagaaatggatcctgtcatcattgcttctgaag

SEQ ID NO: 486637 - DNA, 83 bp, Homo sapiens
aagaacctgcgggaggacggagagaaggcggcgcgggaggtgaagttgctgctgttgggctgatcagctgaccgaagaacaga

SEQ ID NO: 486638 - DNA, 82 bp, Homo sapiens
ctatgacctgtatgctgtgtgcaatcaccatggcaccatgcaaggggggcactacacagggctggtgaattaccatatctcc

SEQ ID NO: 486639 - DNA, 94 bp, Homo sapiens
cttcggccatggaagctgccggcagccctgcggctacggagacagacaatgcagatcttcgtgaagactctgactggtaagaccatcaccctcg

SEQ ID NO: 486640 - DNA, 99 bp, Homo sapiens
cttgctgccaggaagcttcggccccgcagctcggcttgctgcggtctcaggtggctgtgttactgcaacgtgccacagttctgcgacagtctacctcgg

SEQ ID NO: 486641 - DNA, 74 bp, Homo sapiens
tatcttcatacatcaccacacctgaaagcagggcgaggaggcttccgaggaggcagaggaggaggaggtgacca

SEQ ID NO: 486642 - DNA, 82 bp, Homo sapiens
cttatgcttataagagtggaacaggatcccatgacagattctgttgtcacgtctccttacagagtttgagcggtgctgaact

SEQ ID NO: 486643 - DNA, 83 bp, Homo sapiens
atggtggtctggggcaacgcggaaggcgcctgtgtctggcagagctggtgtgagacgagacaatcctgccccgccgccgggat

SEQ ID NO: 486644 - DNA, 100 bp, Homo sapiens
ctgagagagggaagtcgcctctgtgctctattggtaaaggttttcaaggtgtcatgaaaagatggggatttaaaggccagcctgctacgcatggtcaaac

SEQ ID NO: 486645 - DNA, 75 bp, Homo sapiens
tactctcgctcacgcagcaggagcaggggacgaagctgtcggaaaaggtaacagaagatggaactcgaaatccca

SEQ ID NO: 486646 - DNA, 100 bp, Homo sapiens
tgccttttgcctcccaccgtgattctgaggcctccccaaccatgtgcaattgtgtggacactgccagcggctgcagccgacttggaatgacctgggagac

SEQ ID NO: 486647 - DNA, 82 bp, Homo sapiens
cctgaaggaggccggtgactttcacttccagccagctgtgaagaagactgcttttggcttctggatgccctcctccagtaca

SEQ ID NO: 486648 - DNA, 100 bp, Homo sapiens
gttcattgccagagagccatgactttctgaagaccttttcccccgatgtcttccggttcttctgcctgcggagcagctaccgctcaggtgagccgagcac

SEQ ID NO: 486649 - DNA, 74 bp, Homo sapiens
cccatggggatcagccccaaaaagatctcctacaagaagcctgggcatgagccagaaggagagctctaagtctg

SEQ ID NO: 486650 - DNA, 101 bp, Homo sapiens
caaggcacgaactgagctgatccttgccccaggtgctggagaatctggtaaaagcaccattgtgaagcagatgaggatcctgcatgttaatgggtttaatg

SEQ ID NO: 486651 - DNA, 75 bp, Homo sapiens
aaagttattgaacggctgggccagagcgtggttgctgaccagttgaaaggttcgatacaagaggctgttttccta

SEQ ID NO: 486652 - DNA, 90 bp, Homo sapiens
gacggtcgtagctgcggtcgcgccgagaaaggatgaccaactcttggatgatggcaagacactgggcgagtgtggcttcaccagtcaaac

SEQ ID NO: 486653 - DNA, 80 bp, Homo sapiens
gtgcttgcctgcgtccccagactcagagataagctgtcattggaaggaatagtggtacaaagagctgaatgccgaccagc

SEQ ID NO: 486654 - DNA, 100 bp, Homo sapiens
cgcgcctggtatcgggaggtgccgaacactggagatgtaatcagtgtagagaaaaccgtgaagagatgccttttggacactttcaagcatactgatgaag

SEQ ID NO: 486655 - DNA, 75 bp, Homo sapiens
tgaagctcatgaagactgtgtaaataatatcagtttgcagaaaaaacttcagcatgtgccaggaacacaacctca

SEQ ID NO: 486656 - DNA, 76 bp, Homo sapiens
caacctttaagcagcagaggagcacgaggatcgtgggagctaagaatgagatggaagattttcgaggtatagcaga

SEQ ID NO: 486657 - DNA, 43 bp, Homo sapiens
aaagttggatgtgctggaacagtttcaacgaaccaaactttta

SEQ ID NO: 486658 - DNA, 82 bp, Homo sapiens
gttcggccaagggaccaaggtggaaatcaaacaaactgctgatataactcatgctttgtcaaaattgacagagccggcatca

SEQ ID NO: 486659 - DNA, 89 bp, Homo sapiens
ggtggtgactaagaaattcagcaaccaggagacctggtgaaaggtgtagcagtcactcggcctacacccacagcatcgaccttgtgaac

SEQ ID NO: 486660 - DNA, 74 bp, Homo sapiens
tcagtgggaagcatgtcgtctttatcgctcagcagtccggagtaacactggccagaagactcagcctgatgtca

SEQ ID NO: 486661 - DNA, 90 bp, Homo sapiens
gagccgcggagccggcgctgagaggggctgcggccggagcgggcggctgagacaaaggcgacggtgtggacactgcaagaaacttgcccc

SEQ ID NO: 486662 - DNA, 100 bp, Homo sapiens
ctgcttgcgcattcccaagtcagatgtcgtgtacaccgattggaaaaagtataatgcttcatcccagcagcaaagagaaataattaaaagtaggagcctg

SEQ ID NO: 486663 - DNA, 100 bp, Homo sapiens
tggatacagcctcatgttttcaccagtcacatctcttactactgctagtcgctgcaacactcctctacagtttgaggtggcttcccacacttctgactcg

SEQ ID NO: 486664 - DNA, 75 bp, Homo sapiens
tgcataatcaaccctgggaaccccacagatgacagatttgaagatctggaagaggcaaatccattctcttttaga

SEQ ID NO: 486665 - DNA, 90 bp, Homo sapiens
gatgtattgagcgcgtcgtatgcggccagcactaagtggtttgagtccagccaatgacactggagccaaaaagaagaaaaagaaacaaaa

SEQ ID NO: 486666 - DNA, 83 bp, Homo sapiens
cgcggctgatttgccttaaactccctaaaatctccgcagctctggttcctgttgcggccggaatctctgaaggaagaagatga

SEQ ID NO: 486667 - DNA, 75 bp, Homo sapiens
cgcagggaaggagggcgtccgagtcaacaaccgcttcgagctgttgatattcactgatggactccaaagaatcat

SEQ ID NO: 486668 - DNA, 98 bp, Homo sapiens
cgatgactcggactccacactcaagaagatgaagctggcctctactcttcatggatcttttggatgaaagaacactcgtggcagtagaacggcctctg

SEQ ID NO: 486669 - DNA, 99 bp, Homo sapiens
tgtggtgattctcccttgtcagcacaacctgtgtaggaaatgtgccagtgatattttccaggtgattcgcatctaggtggcggcagtcgagaaggctcg

SEQ ID NO: 486670 - DNA, 100 bp, Homo sapiens
gcctgctttgctggctgcaacagcacggttaaacccatccagagtaatggctgcggccttacccaggaccctgggggagttgcagctgtatagaatatta

SEQ ID NO: 486671 - DNA, 121 bp, Homo sapiens
cggcgcccgccaccggctccctcgggagctcatcttcgtggggcgtgaggagtgtgagctcatgctacagggggggccctcagcctcttggccttgaacgggctgttcatcttgattcaca

SEQ ID NO: 486672 - DNA, 75 bp, Homo sapiens
aaagcagcgtgcgttcagccctgggaatccacattcatctcaatggaaggatcctgccttaagtcaacttatttg

SEQ ID NO: 486673 - DNA, 75 bp, Homo sapiens
gcacccgcctccgggcatcttcaactgtgaaatgtatagatgttgttcaggcttatatcaacagaatcaaggacg

SEQ ID NO: 486674 - DNA, 78 bp, Homo sapiens
cggatgctccggtctttcagggcctgagcctgattaccaaagaagattttgccacatttgattatatactatgtatgg

SEQ ID NO: 486675 - DNA, 107 bp, Homo sapiens
cagctggcttagaagcagatctggaatgcaaacagatctggcaaaatttgggggcctgagttccctggcggaagaggcagcgcgtgcgaccgagaacccggagcagg

SEQ ID NO: 486676 - DNA, 100 bp, Homo sapiens
cgcctgcgaggcggaggcaggatgaagatgactgtggatttcgaggagtgtctgaaggactcgccccgcttcagtaatctatgccagcaattatgacaat

SEQ ID NO: 486677 - DNA, 100 bp, Homo sapiens
aagccaagctatgcagacagttggtgtacattcaattgttcaggtgccaaatcaatcattcaggagtttccagagatcacaattttaactactgaagttc

SEQ ID NO: 486678 - DNA, 100 bp, Homo sapiens
aaaatgaatgccaaatgggacacggagtcagtggatcggtggggaaaatgctgcttaccctgggccctgggctgtagaaagaagacaccaaaggcaaagt

SEQ ID NO: 486679 - DNA, 100 bp, Homo sapiens
tctgctcagcatcactggattatgttataatgtggaacctggatgaatgtagagagaaagtacttcaaggtctcaccaacggctttgggggtgcgaggag

SEQ ID NO: 486680 - DNA, 73 bp, Homo sapiens
ggagaggagtcctttgagcaattcagccgagaacggagctttgactgtaagatctgtgggaagagcttcaaga

SEQ ID NO: 486681 - DNA, 100 bp, Homo sapiens
aaacttcatcttctgtaggatctgatgaaaattctcttcattctcttggactgaacttaaatactgatagaggaagaatacaagcgattgagtgaagcac

SEQ ID NO: 486682 - DNA, 100 bp, Homo sapiens
tggctatccagacgctctggtcatactaaagaacacatctggaagatgttggctgaacaggcgtcagatcgatgggtctttgaatagaactcccaccggg

SEQ ID NO: 486683 - DNA, 75 bp, Homo sapiens
cagcagcagctccagcaggcgctggctcctgctcagccccagccacgtaccccatgtttgctcaatcgatcacga

SEQ ID NO: 486684 - DNA, 100 bp, Homo sapiens
aggccctatcaggacatggagtatgaaagacgtctgcgctcctcagaccaccggcaggtgaacagcctgatgcagaccgaggagtgcccacctatgctag

SEQ ID NO: 486685 - DNA, 82 bp, Homo sapiens
aaggactcttgtcatctgccttaggcgggaaatgctgttgctggattgcaaccccgaggccatcgaagacggcaatttggag

SEQ ID NO: 486686 - DNA, 90 bp, Homo sapiens
gttcttgagaggaacgtctctgtgcgaagagataatgagtttagctctgaggttcttctgtgtggcagttcagaatgatggatcaagcta

SEQ ID NO: 486687 - DNA, 83 bp, Homo sapiens
gaatgatcagctttgactgctttatgaccatattaatgcagatgaggcgttctttgtgttctaagaacggaagcatctgggct

SEQ ID NO: 486688 - DNA, 100 bp, Homo sapiens
ttgaacaatctttttattacagaagaagattatcaggctctgggaatgtgctgaaggtgcagcagctgctccacatttgtagcgaacactttgactccaa

SEQ ID NO: 486689 - DNA, 90 bp, Homo sapiens
gttgtctaaatttcggtagccatggcacaagaatataaagcgcatactgtgctgcctccgtagcctcgctgaccaacatcatcactccag

SEQ ID NO: 486690 - DNA, 74 bp, Homo sapiens
cgagaaggcgctgaagcacatggatggagaggtgaatacgctttggccgaatacacagaagtgaaaactgtcac

SEQ ID NO: 486691 - DNA, 99 bp, Homo sapiens
tcccggccaccttctgtcagaagaatgacattgagctcacaccgccaaaagtctgcagatctccaggggagcccaccagcctagtcaacatggcctcgg

SEQ ID NO: 486692 - DNA, 75 bp, Homo sapiens
ggataggcctgtgacgaaggtgctaccatcgtgagagtaagtggaggccatagtggagtttgactaccaggccca

SEQ ID NO: 486693 - DNA, 100 bp, Homo sapiens
ccgctgccaccggcgcgcccgagttcctagaaggtgagcgcggacggtatgcaaagttgtgaatccagtggtgacagtgcggatgaccctctcagtcgcg

SEQ ID NO: 486694 - DNA, 100 bp, Homo sapiens
agaatgcacattaaagccatgcccgaggatgctaaggggcagtctctagtgatccctgaaaagttccagcatattttgcgagtactcaacaccaacatcg

SEQ ID NO: 486695 - DNA, 100 bp, Homo sapiens
gcagacctattgggacaccttctggagtatgggatcctagctgggagcctgaaggctccactctggcttcgtgcttacttccagggcctgctcttctctc

SEQ ID NO: 486696 - DNA, 89 bp, Homo sapiens
aagctgtgctgcggcaggacggatgtgttctgagctggatgccgggttccagaatcgctgcacagttccaacaggacagcgccttcccc

SEQ ID NO: 486697 - DNA, 74 bp, Homo sapiens
gtttgcagatcgggagcgcaaggtcgccctcaaggccatgatcaaaacgagccttcacgtaaatgggtccagtc

SEQ ID NO: 486698 - DNA, 100 bp, Homo sapiens
aaacagtacaagtactacactccctaccaggagcatgtggccttacacgcccccatcaatcaccacgcttattaatcataaagataataccaaaaagtct

SEQ ID NO: 486699 - DNA, 82 bp, Homo sapiens
cgggcacccagtctcctttcttcctgctgctgctcctcacagtgcttacagatattgatgatgttaagaagttcaaaccggg

SEQ ID NO: 486700 - DNA, 75 bp, Homo sapiens
ctgcaggaagctgagaattatccttggacttacataaagcattttggactttatagacagggtttcgccgtgttg

SEQ ID NO: 486701 - DNA, 100 bp, Homo sapiens
ctgggcgcggattcgccgaggcaccgaggcactcagaggagtgtggacgaatgtggaacctcgctctgtggctgtgttcccttggcactccttagtcccc

SEQ ID NO: 486702 - DNA, 98 bp, Homo sapiens
cccacgatgaagaccctcagtgacgacctagtgcacttatgcagtggggaatcatgacttcatagaggcatacaagtgccagaccgtgatagtccaat

SEQ ID NO: 486703 - DNA, 101 bp, Homo sapiens
gttcagcttccaaagagatacagggcagaggaaaatgcaagaagactgatggagcaggcttgcaatattaaagcatgtggagaccccaaggcaaaaccatc

SEQ ID NO: 486704 - DNA, 100 bp, Homo sapiens
gttcgattattagctttagtgaaatgggctaataatgctggcaaagtggaaaaatgtgcggttctgcttggattctgctagacagacccgacaaagactg

SEQ ID NO: 486705 - DNA, 89 bp, Homo sapiens
agccccctggttctgtctctaaaaaaggcagaaaaagtacatgagttaaatgaagaaataggaaaactccttgctaaagccgaacagct

SEQ ID NO: 486706 - DNA, 98 bp, Homo sapiens
ttggctccatttatgaagcacccgttaaaaatagttctacgaggagtgaccaatgatcaggttgacccttcagtctctgcttggggtggttatgtatt

SEQ ID NO: 486707 - DNA, 75 bp, Homo sapiens
ccgcttgtcagtgtgatgaagattggcacccaggtactccaaagattcaggtttactcacgtcatccagcagaga

SEQ ID NO: 486708 - DNA, 75 bp, Homo sapiens
ctgggaaatagtaaccctgccaaatacatcagcttgtaggagacagagtgataatatgcagcatgcatactggga

SEQ ID NO: 486709 - DNA, 91 bp, Homo sapiens
ggatatcgggtggcggctcgggacggaggacgcgctagtcaatggctgccatccggaagaaactggtgattgttggtgatggagcctgtgg

SEQ ID NO: 486710 - DNA, 100 bp, Homo sapiens
tccagaagacgaaatacgcgagattgtctacaaagcctggctctgttcccagtattttgaagtcacacagtttaactgcagaaagacaattccttgcaag

SEQ ID NO: 486711 - DNA, 99 bp, Homo sapiens
tgggcggcggggacagcggggacggcacggcgcgcgcagatcatggaagggaagtggttgctgtgtatgttactggtgcttggaactgctattgttgag

SEQ ID NO: 486712 - DNA, 58 bp, Homo sapiens
cgccgtccccagccctgcctctccctgggctctgtgagaaagatcagtctaaagaaaa

SEQ ID NO: 486713 - DNA, 100 bp, Homo sapiens
agtatctccgtttcctggatgtgaacgtgactctgacatcattagaagcatgccagaacagactggtgaaaagtaaaccttttcacctacaaaatttcac

SEQ ID NO: 486714 - DNA, 83 bp, Homo sapiens
ggaggggatggatttccataagttttactttgagaatcgccgagtatgaagtgaccccggatgacaagcggaaggcatgtggg

SEQ ID NO: 486715 - DNA, 96 bp, Homo sapiens
gccgatcccggcctgagcaagcggccgcgcactgaggaggcggcggccgacggtggcggcgggatgcaggagaaagtgtcaagactggatagaatc

SEQ ID NO: 486716 - DNA, 100 bp, Homo sapiens
gaaccatcaagatcttcacagagaacttcttatgaatcaaaaaaggtttgatctgtggatgaaatgaatcatgattttcaagctcttgcattagaatctc

SEQ ID NO: 486717 - DNA, 50 bp, Homo sapiens
cttcgacatcgagatcaaccgggagccggatctcagaaaactgatcttca

SEQ ID NO: 486718 - DNA, 82 bp, Homo sapiens
gtgccaggccttggagaacagcacgtccccgctgagtgatttggtgcttccagatgtgagttatcaggtggaatccagtgag

SEQ ID NO: 486719 - DNA, 87 bp, Homo sapiens
aggtcgccctcaaggccatgatcaaaacgaagcgccgcggagccatcaacagcaagcagctcacctacctggagaaataccggccca

SEQ ID NO: 486720 - DNA, 100 bp, Homo sapiens
ggtcgctgcattgacctggtcaatggctaccagtgcaactgccagccaggcacgtcagatattcttactgattctccgggctctgcagctcttgacccgg

SEQ ID NO: 486721 - DNA, 90 bp, Homo sapiens
gagagggcctgggagcttgctgcagcttcagggagaagaaatgggtgaccgttggtgacacatccctacgaatctacaaatgggtccctg

SEQ ID NO: 486722 - DNA, 73 bp, Homo sapiens
gtcatgggagcagagctcagacatgttctcaccacccttgatatggctcgtggacagcagaaaattcagtctc

SEQ ID NO: 486723 - DNA, 51 bp, Homo sapiens
tgggaaacaaggcttccagtgccaaggtcagtcattggcaccatgaactgg

SEQ ID NO: 486724 - DNA, 74 bp, Homo sapiens
tggccccgagatcagaatgccggttgtggaacttttagcaagtgctcttatggacttggtacaaggagtatatc

SEQ ID NO: 486725 - DNA, 75 bp, Homo sapiens
atcttgacgaggctgcggtgtctgctgctattctccgagcttcgcaatgaccccacactgtggacacaggagcat

SEQ ID NO: 486726 - DNA, 82 bp, Homo sapiens
ggcgcggggaccgctgtgctctcggtcagcccaaggccaaccccactgtcactctgttcccgccctcctctgaggagctcca

SEQ ID NO: 486727 - DNA, 82 bp, Homo sapiens
tggaatcctcctcccacatccctggatctgccctcgcatacctggagtagaacagaaaaattattatgtctgtgttcccttg

SEQ ID NO: 486728 - DNA, 98 bp, Homo sapiens
gaaaaggcaaaaatcccatctaccgcaactctcagttcgagagtaaaggttggaagctgtgtactgtgggtgttacccactttgtcctaaagatttgg

SEQ ID NO: 486729 - DNA, 90 bp, Homo sapiens
cagatttttgctcattaacagaaaagaagaggagaatgctaagcagaagtggaatgttggctgtccgtgaaaaccgctacattgtcctgg

SEQ ID NO: 486730 - DNA, 88 bp, Homo sapiens
gggtgtctcaagaaggctcagctagcagcaccaaaagcacagaattgttactaggtgtggatgaggtcaccattgtcaacattttgac

SEQ ID NO: 486731 - DNA, 90 bp, Homo sapiens
caaagttaagagactcatcagattctgagctgctgcgggatattttgcagaaggcctcccagaagttcctgccgaatcgtcttcgtcacc

SEQ ID NO: 486732 - DNA, 100 bp, Homo sapiens
tcattacttcctctcattgtaatagcccctgtacttttggtggttggatcatttgaagtggtgtctacacttataaaaattccaataatgagagaccctg

SEQ ID NO: 486733 - DNA, 100 bp, Homo sapiens
ttgatggagaagctctaagtacactcgtcttgaataggtgtgggcacaggcagttcctcactgtggaatctgatgggcaatgccatggtgatgacccagt

SEQ ID NO: 486734 - DNA, 51 bp, Homo sapiens
ggccgggaggccgtgcccggagaattaaacaaccaccatgtcgagcaaaaa

SEQ ID NO: 486735 - DNA, 76 bp, Homo sapiens
cttgttcctatggcctaatgaacaacttccagataacaacgaacttgatgcaagtgataggtttgccaaggtcaga

SEQ ID NO: 486736 - DNA, 75 bp, Homo sapiens
cgcagtatcatgctggccaagaagatcatcattaaggacggaggcacggtacagcagttgcaaggagtttacagt

SEQ ID NO: 486737 - DNA, 89 bp, Homo sapiens
ggagtccgcgaagattcgagcgaaatatcccgacagggttccgatgcttgtggttggtggcatcgaccgggtttatgaaattggacgcc

SEQ ID NO: 486738 - DNA, 101 bp, Homo sapiens
ccaaagccagcctggcatactttgaagatcgtcatgggaatacagaaactgcagccatgaccacgcacgtcaccctggaagatgccctgtccaacgtggac

SEQ ID NO: 486739 - DNA, 50 bp, Homo sapiens
ccagcccagcgattctcagtcagctcaactgagaagtcatttccttggag

SEQ ID NO: 486740 - DNA, 90 bp, Homo sapiens
attcaccaaataagctatatactttggttacctatgtacctgttaccactttcaaaagtccagctgggagctccccgacctccaggaggg

SEQ ID NO: 486741 - DNA, 101 bp, Homo sapiens
tttcatgaagacacccgctccagtagatctgggcacttggccaaagaaacaaggcatacacatccctgtgatcatgagtctggctcaaagccaatttatag

SEQ ID NO: 486742 - DNA, 135 bp, Homo sapiens
atcaccggcgtgccccaccatgtcagacgcagccgtagacaccagctccgaaatcaccaccaaggtcaaaatgcagatcttcgtgaaaacccttaccggcaagaccatcacccttgaggtggagcccagtgacac

SEQ ID NO: 486743 - DNA, 75 bp, Homo sapiens
ggcgcggggaccgctgtgctctcgcgagtccctgtggcccatcgaggccagaaacgcagccattgccaatcactg

SEQ ID NO: 486744 - DNA, 98 bp, Homo sapiens
tttgaccgagagattgtggtcaccatcagctgggccaagagcatcccagggtggcattgtgtgtcccagagtgccggagcgagtcccagaagagaggc

SEQ ID NO: 486745 - DNA, 75 bp, Homo sapiens
aagttgataaggaaagtactgtccaaatgaattatgtcagcaacgtatccaagatgccttcaattaagttgcaga

SEQ ID NO: 486746 - DNA, 100 bp, Homo sapiens
aaattgaggtcacaccttcagtccttcgagcaaatttgagttctgtgaacctgcatttgttgttggtaattgcctccagatagcttctgacagtcatcag

SEQ ID NO: 486747 - DNA, 97 bp, Homo sapiens
ataatcaccagcagcatcaagaaaatcgcagactttctcaactcgttcggttgattccaaagatagttctcataactccacaaactctgaatttgca

SEQ ID NO: 486748 - DNA, 90 bp, Homo sapiens
cgccatgtcatccacttcgcccaacctccagacaatgccatccccatcaaatcctggttcagtgaccccagcgacacagcccttctcaac

SEQ ID NO: 486749 - DNA, 75 bp, Homo sapiens
agacggcctcctgttccaccttcacttccacgagttctgcatccgtggctggtgcatcgtgggaaagaagcaaac

SEQ ID NO: 486750 - DNA, 100 bp, Homo sapiens
cagcgccctgccgccgccgccgcggcccagcgagcggccctgatgcaggccatcaagtgtgtggtggtgggagacgggtaagaatgattgatgttggctg

SEQ ID NO: 486751 - DNA, 100 bp, Homo sapiens
cccgccggcctccgcggtgcctgccttcgctctcaggatctcttccgttccctgctggcagttcatcagctggatcagccacatggtggccttactggac

SEQ ID NO: 486752 - DNA, 75 bp, Homo sapiens
aatatcgatacaacaccaacagtccaagtggtaagaagttcagaagcaagcctcagttggcaaggtacctgggaa

SEQ ID NO: 486753 - DNA, 75 bp, Homo sapiens
cgttaaagtctctcttcaccctgccgtcatgtctaagtcagaggctaactcaggtgagatggagccgctatagtc

SEQ ID NO: 486754 - DNA, 82 bp, Homo sapiens
acccagtgaacaaatccgggggcaaggccaaaaagaagtcttactactttgaccgcgatgatgtggctttgaagaactttgc

SEQ ID NO: 486755 - DNA, 50 bp, Homo sapiens
aggccacgtcagagctgcccaggagcttactccacgggaacagcctctag

SEQ ID NO: 486756 - DNA, 74 bp, Homo sapiens
cgacgccgcctggcaggccctgcgcaccaggtgatggtgcacagttggatttcgatgccctatgtgacaatgat

SEQ ID NO: 486757 - DNA, 101 bp, Homo sapiens
catattcaccttgaagaggaagacggggcggaagaccaagatcatcgagatgaacacgacttaaaagtggcttcagaggaaaagcaagaaacgcttgaaag

SEQ ID NO: 486758 - DNA, 75 bp, Homo sapiens
aagaagtcggctctgggctccagtgcgggaatcacacacatacctcaggtccagtccaggtgcagcagcaaggag

SEQ ID NO: 486759 - DNA, 98 bp, Homo sapiens
tctcgccacagcggcctcggcctccccttggattcagacgccgattcgcccaggtcaaaatgcagatcttcgtgaaaacccttaccggcaagaccatc

SEQ ID NO: 486760 - DNA, 82 bp, Homo sapiens
ccctctgcgacctggggccctgggtgaagtgctccgtcgcccttgcctccagtgcagagcagagcgggcggaggaccccggg

SEQ ID NO: 486761 - DNA, 90 bp, Homo sapiens
aggattcgttacagccagagattggtcttgggcgtctttggtactggcttttttaggggtctgcctggggattacccttgctgtggatag

SEQ ID NO: 486762 - DNA, 75 bp, Homo sapiens
cagattcgcagtggtcgcttcttctccttggtatgatgaatatcatcctgaggaggatctgcagcacacggccag

SEQ ID NO: 486763 - DNA, 83 bp, Homo sapiens
gcgatacctgcctgcaggagttcctcaggcctccaggcccaaggtcagcatcccactgtcagccatcattgaggtccgcacca

SEQ ID NO: 486764 - DNA, 100 bp, Homo sapiens
acttcctcatgaagagactccagaaaggggatgggtttgtggagttcttccatgtagaggacctagaaggtggcatcaggaatgtgctgctggcttttgc

SEQ ID NO: 486765 - DNA, 100 bp, Homo sapiens
gtcttccccagctctgcagccacatactatccgtttgttcaggaaccaccagtgacagactctaagcgaaagacatgaggcctcagcctgaaatgaggtt

SEQ ID NO: 486766 - DNA, 83 bp, Homo sapiens
ctggagcctcagttggaagcagccgatccagcctgcggagcctgtggggcaggtgggcattcacgctgatcatcatctcatcc

SEQ ID NO: 486767 - DNA, 75 bp, Homo sapiens
cgggaagatggcggctgggttcaaggacactttgtgagaaatttaggtgatgttggagagaaagagactgaaaca

SEQ ID NO: 486768 - DNA, 100 bp, Homo sapiens
cacggtgcagttcagaatattgctcacctactaacctcactgtcctacaaaataactggagtgccaaggctaaaagacgaaataccaccggaactggtcg

SEQ ID NO: 486769 - DNA, 90 bp, Homo sapiens
aagaaggcggtggtggcgggtggaggttcgagcgctgttctcgctccggagccgctgcacatttcgattcctcagttccttttagatgat

SEQ ID NO: 486770 - DNA, 75 bp, Homo sapiens
aagaagaagagggatactcccatgctgccaaaggcacaaagcagacattcgtagagaaacatggatgaaacagga

SEQ ID NO: 486771 - DNA, 106 bp, Homo sapiens
ccgacatgttcacgcacgggatccagagcgccgcgcacttcgtcatgttcttcgcgccctgactcggtgaaatacctggagtgctcagctctcacccagagaggcc

SEQ ID NO: 486772 - DNA, 83 bp, Homo sapiens
aggacacggtgctggccgccggttgcaagcagatactggtgcctacacatgcctcactcctgtcagcagttccaccttttcat

SEQ ID NO: 486773 - DNA, 100 bp, Homo sapiens
cgtcgccttgctcctcgccgcggcggggactgcagataaacaacttgatgcagatgtttcccccaagcccactatttttcttccttcaattgctgaaaca

SEQ ID NO: 486774 - DNA, 100 bp, Homo sapiens
cttattaataggaataccactattccaaccaagaagagccagatcattgagcgcttgaagctggtgcccctgaatcaggaaagtgtggaagagagagtgg

SEQ ID NO: 486775 - DNA, 100 bp, Homo sapiens
ccatggcagcctgcagctaggactttaatgtcctcgatgggcttcctggaatattggtgtgtttatttgcatcagatgtgctggaattcatagaaatctt

SEQ ID NO: 486776 - DNA, 75 bp, Homo sapiens
gaaattggtcattctcgctaacaactgcccagctttgagggcaaacttgaagataaatcttttgactccagctct

SEQ ID NO: 486777 - DNA, 74 bp, Homo sapiens
acccactacaatacctcttgggactgggctcgatttgaggagaactgtgtttatgaaactgtagttttgccttt

SEQ ID NO: 486778 - DNA, 100 bp, Homo sapiens
agaaggaggttcaggctacggtgagccgaagggatcaagcatgaattgcaagcaaactgctacgaggaggtcaaggaccgctgcaccctggcagagaagc

SEQ ID NO: 486779 - DNA, 73 bp, Homo sapiens
gtgcacctgggatgacaaaaagtcatagtggtgtgacaagtccaagcatctcattttgaaggcctaatcacaa

SEQ ID NO: 486780 - DNA, 100 bp, Homo sapiens
cattcgagggcagccggcgggaggaacgctcactgtcagcgcctggaaacttgctcacattacctaaaacctcgggcagaagaggagaggaggatagcag

SEQ ID NO: 486781 - DNA, 89 bp, Homo sapiens
gtcagcctggtgctcctctatctcaacacagtcactcctggcggcaaaccaaacaaaaccagagtcatctggggaaaagtaactcgggc

SEQ ID NO: 486782 - DNA, 101 bp, Homo sapiens
cgccgaggcaccgaggcactcagaggagggccatgaagcccccaggaggagaatcgagcaatctttttggaagtccagaagaagctactccttccagcagg

SEQ ID NO: 486783 - DNA, 51 bp, Homo sapiens
ctgagttgggagaagagctccagagagagaggaaggcaagcctgagattaa

SEQ ID NO: 486784 - DNA, 100 bp, Homo sapiens
tactgtgggtgatatttgcctttagtgcactcttctccttcacagtaaagtggctgtcaagtaagggagaattgactacgcttatacatcagcttcaaga

SEQ ID NO: 486785 - DNA, 75 bp, Homo sapiens
agaacacatacggcaggagctggcgtgtcttcgtcaaattacagaagccaaatgctgccatccgagactgtgaca

SEQ ID NO: 486786 - DNA, 90 bp, Homo sapiens
atggcacatggcccaggcagaccttgcagtcaaagctacagatgcacatgttgaatggagctcttctggcattgctgtttcctgtggtaa

SEQ ID NO: 486787 - DNA, 100 bp, Homo sapiens
cgcgaccgtctggatccccgcccaggaagcccctctgaagcctcctcgccgccgtttctgagaagatgtgtgcattgcaatgttgtgtactctgatgtgg

SEQ ID NO: 486788 - DNA, 91 bp, Homo sapiens
tggggccagggaaccctggtcaccgtctcctcagaagtcccgggcccagagcccggccagcaggagcagttggtcttcggcagcggggatg

SEQ ID NO: 486789 - DNA, 75 bp, Homo sapiens
attcctttggctaccggaagaaaagggaggagaagtttacaaggctgaggggatctggcggtggagcgctaggat

SEQ ID NO: 486790 - DNA, 101 bp, Homo sapiens
gcggcaaaatggcggaccgcttctcccgcttcaacgaagaccgagactttcagtacaaaattggacagctgtacatgatcagcaaacacagccatgaacag

SEQ ID NO: 486791 - DNA, 82 bp, Homo sapiens
gatgacatatttttggacctgaaacagaaattctggaacacctatatggtggaaagcggtgacacgccaaaggaccctgcgg

SEQ ID NO: 486792 - DNA, 90 bp, Homo sapiens
attgatctggagcttcacaatcctaaagcaatagcagtagatccaatagcagggtgtgactgcacagaaaagttacaaaacaaatttgac

SEQ ID NO: 486793 - DNA, 96 bp, Homo sapiens
gagaaaatgaatgccaaatgggacacggtggttggaggcaaagtaaagaagcccggtaaacgtggtcggaagccagccaaaattgacttgaaagca

SEQ ID NO: 486794 - DNA, 82 bp, Homo sapiens
ttcagatcttcacagcacagttcctgggaaggtggagccaccagcctctccttgaaaggacctaagtgtgaaataccccgaa

SEQ ID NO: 486795 - DNA, 75 bp, Homo sapiens
cttacagaagctgatgcttacctacaaatcttgattgaacaattaaagagaaagcttcttgctatctacctccac

SEQ ID NO: 486796 - DNA, 112 bp, Homo sapiens
gacgatctcattgacagctgcattcaatcttttgatattacagtgacagagagaaacacagaaaactggatgatcacaggagtagagatcacaggtcaaatttggaaggaag

SEQ ID NO: 486797 - DNA, 51 bp, Homo sapiens
cagactgttatgtctttcagaatacggattaaactgcaaatatctcatgaa

SEQ ID NO: 486798 - DNA, 83 bp, Homo sapiens
aaaaggagttcgagcagatcgacaagtccgggagctgggcggccatttaccaggtgtgttccagagaacaagccttcagacat

SEQ ID NO: 486799 - DNA, 82 bp, Homo sapiens
ccccggccgaggtggcggcggctcctcaggaactgtggaaggtgcatcagtgaagaaatggaccaatgtgtataatcatgga

SEQ ID NO: 486800 - DNA, 100 bp, Homo sapiens
agaagatcggcttgaaattaccaactgctttcctttccctcagcacacagaggatgatgctgactttgatgaagtaccttgcagaagccggctggacagc

SEQ ID NO: 486801 - DNA, 98 bp, Homo sapiens
tgttaaagcatatgcctcagaagtatggtcctgatgccttttttaactttccaggaaagagtgctgcaggatggggaaagacaccatagtcataaaag

SEQ ID NO: 486802 - DNA, 76 bp, Homo sapiens
tccatcgcggagaggtaccttgcacagtgacctctgcatctatcttcttggaaacagaattgttctacaaaggtat

SEQ ID NO: 486803 - DNA, 49 bp, Homo sapiens
agtggaagatgatcacatcccagagcaaagccgtcgagatgacctggag

SEQ ID NO: 486804 - DNA, 100 bp, Homo sapiens
ccggaccgagccacgttcctccgtctcagacctcgtcaactccctcaccagcgagatgctcatgatgtgtctgagggctcagtccccaatggagattccc

SEQ ID NO: 486805 - DNA, 98 bp, Homo sapiens
tccaggacagcacctagtcgtggccggaggagtctcagagctgtcagaaagccttgcaaaataccctactaaataaatcattttagacatggagtgca

SEQ ID NO: 486806 - DNA, 50 bp, Homo sapiens
gacgcgcccgccaccgacatctacttttcaagctacaacttcaagcagaa

SEQ ID NO: 486807 - DNA, 83 bp, Homo sapiens
attttaaccaaggcagttggtggaaatgaggatctggaaatagtatattcctatttacatggtatggaagccttatcaaactt

SEQ ID NO: 486808 - DNA, 83 bp, Homo sapiens
cccaggtgtaagcgcagaaagcaggcgaacccgcggcgcaataacgttcaaggagcagggacaagttacaggaatgttctcca

SEQ ID NO: 486809 - DNA, 97 bp, Homo sapiens
ggcgagcccggtccccgccggcaccatgtacgctgggagcggactcttggagctattgtaagacaaaagaatcacccaatgactcctgaggcagtca

SEQ ID NO: 486810 - DNA, 74 bp, Homo sapiens
gcatgtaaacaaatgaagcagcgctttgaaaggtacaactccaaaaggagacattggagaagaaccaagctggg

SEQ ID NO: 486811 - DNA, 100 bp, Homo sapiens
actgaacttataatcgtcactggatttaataaaagactagtggccttagtgcccatgcccagtgaccctccattcaatacccgaagagcctacaccagtg

SEQ ID NO: 486812 - DNA, 90 bp, Homo sapiens
ggagccgagctggagctgccgcggcgcagccagtcatctcaactcgaactccacctccaccttcaccgttgccatttccaacacaagcta

SEQ ID NO: 486813 - DNA, 82 bp, Homo sapiens
gccggcctgcagcacccgccaccgtcgccggccgcccgcacgtccgtccgaagaaagaatttgactgatgggcgtaaggaag

SEQ ID NO: 486814 - DNA, 88 bp, Homo sapiens
gaccccagatgtctgacagccctgtgtgacaccaagataagtaaccctatcaagactcttccacctgctacttctaccgagccatctg

SEQ ID NO: 486815 - DNA, 73 bp, Homo sapiens
gctagtgttccatctatcttctgtcatgtgtgcaggtggtaccattataacgaattttgagaggttggtaaaa

SEQ ID NO: 486816 - DNA, 100 bp, Homo sapiens
tacacggcccaacacctgctaaaggtaatgatcaataatggctttacaccagataaaaatgattatgaattttgtgccaaagtggaaaatatgattatcc

SEQ ID NO: 486817 - DNA, 122 bp, Homo sapiens
agtgttccaagttgcagaatctaagcctggaaggcctgcggctttcggatcccattgtcaatggacgtgatgctgaatccaggcagtgccacttcgaatgttgctatttctgtggatcagag

SEQ ID NO: 486818 - DNA, 50 bp, Homo sapiens
agctcactggagtatctgtttgctcagacctacctggtggttctgtgcct

SEQ ID NO: 486819 - DNA, 50 bp, Homo sapiens
cctttgttttggaagaaactgttgaggatttgtagtctatcatctggaaa

SEQ ID NO: 486820 - DNA, 90 bp, Homo sapiens
ggagagaagtttgtcatgcaggaggagttctcctaatgtgactgtgtccttgcctgtccggggctgtgtccaggatgaattctgcactcg

SEQ ID NO: 486821 - DNA, 100 bp, Homo sapiens
agcagctgcagccgcagccgcctccgaagatgggggatttctacgacccggagcacccgacccctgattggcttttgaaacgatgagtgttatatctgtg

SEQ ID NO: 486822 - DNA, 86 bp, Homo sapiens
acgtggcatctgtcgaccctggacaaaagacggggttttgccacattggccaagctgatctcgaactcctggcttcaagtgatcca

SEQ ID NO: 486823 - DNA, 100 bp, Homo sapiens
gaagctaaggatttctggaaggctgtgattcaagtgaggcaaaagatactggtagacacagtctgggccctctcttaccttactgatgctggcaatgaac

SEQ ID NO: 486824 - DNA, 100 bp, Homo sapiens
cttcgttttccatgtactgcatgctgtttgtggcatacgcctgcctcacaccttgcgatgcgccaacatcaccatcattgagcaccagaagtgtgagaac

SEQ ID NO: 486825 - DNA, 100 bp, Homo sapiens
ggctggttcctcttggaaggtgcatctgcagtacaggatatgaagaaattgagggttcttgccatgttcatggggagatttccttttggataccatctcg

SEQ ID NO: 486826 - DNA, 51 bp, Homo sapiens
gtgacgctgctgctggggtcagcaatacgaggattctctccaccacataga

SEQ ID NO: 486827 - DNA, 50 bp, Homo sapiens
gcactgaaatgaggcatagatgaggaggcaccgacatcatctcctgcttc

SEQ ID NO: 486828 - DNA, 101 bp, Homo sapiens
cgccccggatgtggcgcggctgcgcgaggagcaggaaaagggcagcagctcatcccagctccagtcgtggactgtccagccctcctttgaagtgatctcag

SEQ ID NO: 486829 - DNA, 125 bp, Homo sapiens
aaataccagtccccagtgagggtgtacaaatacccctttgaattaattatggcttattctaccttgtaaatactgttatttgtatatactgtaaatgatgacatcggtgggcactaaccgagccc

SEQ ID NO: 486830 - DNA, 100 bp, Homo sapiens
ggacaaggacagaatcaccagcactggctgaaggagcaagtaatactgcagacacattgtttcaagaagtattaggtcggaaagacaaggcagattccac

SEQ ID NO: 486831 - DNA, 87 bp, Homo sapiens
tacctgcggcgtcggcagctgctgctccgaggtttacccaaggtccagcctagcccctaggcaccatgtcggacagtgatctaggtg

SEQ ID NO: 486832 - DNA, 100 bp, Homo sapiens
gccttttgtgctgatcaacttgatgtctttttacaaaaagcggatgtgatgctggtacaacccagagtagaatttattctgtctttcattgaccacattg

SEQ ID NO: 486833 - DNA, 90 bp, Homo sapiens
gttgcacattgctttgttgcctccttctcaaaactcaaatactctttattcatctaaggcaagaggaggaacgacgtagaagagaggaag

SEQ ID NO: 486834 - DNA, 75 bp, Homo sapiens
agggaggccgtccacactggaaaggaggagttaaagttcctcgtaattttcgcttgttggaagaacttgaagaag

SEQ ID NO: 486835 - DNA, 100 bp, Homo sapiens
gccaaggaataaacatgcaatgaacccaaaaggggtgaatcgaaacgcatcaccctggtcctccagcagccacagtctggaggtccccaaggacatcggc

SEQ ID NO: 486836 - DNA, 100 bp, Homo sapiens
gagatccacagctaagacgccaggacccactggaagcctagaaatgttcgatcctttggtacagaagacagaccgacagatcgtccaataccacctcgag

SEQ ID NO: 486837 - DNA, 100 bp, Homo sapiens
agagtcagagagaggagagactaaggacgctaggtgggcagggctcttcacttgcaggagctggctgctgaatgtaagagtgcaggctaccccgggactt

SEQ ID NO: 486838 - DNA, 101 bp, Homo sapiens
aaaacaataatgcaccttatgatcaataacgttatcaatactctggctgaccatcatcatcgtgggactgactttggtggaagtccttggttacatgtcat

SEQ ID NO: 486839 - DNA, 75 bp, Homo sapiens
gtgggccagctgccctctgaggagatggtcatgacaggctctacagattctcccctgcccctggagaaggaggag

SEQ ID NO: 486840 - DNA, 100 bp, Homo sapiens
gtccttatgctgccctttttgctgcagtcttgacatcttaacgtggatagaaaaaggttaaagctcgagctactactcgagaggtaatggctacttatac

SEQ ID NO: 486841 - DNA, 74 bp, Homo sapiens
cagcctcccctgcaccggcaggtgagaggcggatctacagacataggttttaaaatcaaagatgggaaaatcgg

SEQ ID NO: 486842 - DNA, 75 bp, Homo sapiens
ccagggttgaccgaacactcgtggaggatctttttgctgataaacatattcagggttcttgatggtgctagacat

SEQ ID NO: 486843 - DNA, 74 bp, Homo sapiens
agttcagacaaagacagttcagctgagagctcagcccctgaggaagttattaccccattcaagttgacaactga

SEQ ID NO: 486844 - DNA, 101 bp, Homo sapiens
gagcccgccagaccttcctctgaaggcaaagtgacctgtgtgtcacaccatgtctgaccggaaggcagtgatcaagaacgcagacatgtctgaggacatgc

SEQ ID NO: 486845 - DNA, 98 bp, Homo sapiens
gagaaacatgcagattatatcgcatcctatggctcaaagaaagatgattatgtggtgatctttgtgaagtctgtgcagcggtgcattgccttggccca

SEQ ID NO: 486846 - DNA, 82 bp, Homo sapiens
cgccaccctatctccagctgcctttaaaggggttcttgaagcttttgagattaacaatggcaggaaaatcatcactttttaa

SEQ ID NO: 486847 - DNA, 100 bp, Homo sapiens
cagcaagacccgcgccgccgggacccccaggacgacgtgtacctggacatcaccgaagcccttcagcggccagtagcatctgactttgagcctcagggtc

SEQ ID NO: 486848 - DNA, 100 bp, Homo sapiens
gcagaaatgagcagaaaggagttggggcttgatgaaggcgtggatagcctgaaggcagccattcaggtgtaaaaccagtaagtgtacagcttaattctat

SEQ ID NO: 486849 - DNA, 90 bp, Homo sapiens
gagcagcggcgcagaaaggtggaggccgggaggacgaaggttttgggatttgagattgacgcggtgaactctgtccagttttcaaaccac

SEQ ID NO: 486850 - DNA, 90 bp, Homo sapiens
atcttcgtacccattttgcagtagtgatctctgaaggatgataaagactatgctttaaaacaaatagaaggaactgggatctctatgtcg

SEQ ID NO: 486851 - DNA, 100 bp, Homo sapiens
gtcgacatactcggataccagcgctcagcccacctgtgattatgggactcttgacgtttaggtatgtggccatagaattctctctggaggagtagcagtg

SEQ ID NO: 486852 - DNA, 83 bp, Homo sapiens
gtggctgtgccgttggtcctgtgcggtcacttagccaaggtccagtggtttacgtcttggatcttgcagatagactgatctca

SEQ ID NO: 486853 - DNA, 102 bp, Homo sapiens
actccagctaggagctgatgctgcatcgtaataacatttgcagagcgctttcacagaaagttactgtggcccatgtcctaaaaactggatatgttacaaaaa

SEQ ID NO: 486854 - DNA, 96 bp, Homo sapiens
cgtcgccgccgccgccgccgccgcagcttgggaggtgctgccaccacaggtcagataccaggcccaggttccatgatgcccgggcagcacatgcca

SEQ ID NO: 486855 - DNA, 50 bp, Homo sapiens
ttgaaatctaatgaaccgaaactttgggactaccgaccagactcccggaa

SEQ ID NO: 486856 - DNA, 98 bp, Homo sapiens
ccttactggacagtcaaatcagttatgtgtctcggtaccacgtgaaagactcctcacgccacgtcatcctaggcacccagcagttcaagcctaatgag

SEQ ID NO: 486857 - DNA, 100 bp, Homo sapiens
ctagctaaagaagttgatcctcaaggacttcctccgtcaggcagctggcaggacctgaaggatcacatgcgagaagctggggatgtctgttatgctgatg

SEQ ID NO: 486858 - DNA, 98 bp, Homo sapiens
tggagtctgcgaaggccgggacccggttccccggcccacagtgggggtgtgcaaacccgagagaactgggtgtttgatatcagctgctaccaggaatc

SEQ ID NO: 486859 - DNA, 100 bp, Homo sapiens
gcccactgcagatgctatggtggcaacagatgtatgctcatcagtattatatgcagtagtccagagggggcaaacctctttatttaccaccttccacagg

SEQ ID NO: 486860 - DNA, 75 bp, Homo sapiens
gaggacacacccaggaaaagactcaggacggacaagcacagtcttcggaagcctttgtcatcctcttcaatcaag

SEQ ID NO: 486861 - DNA, 50 bp, Homo sapiens
catttactaactgtgtgaccttagcctgtggtcagctgttagatgaggca

SEQ ID NO: 486862 - DNA, 87 bp, Homo sapiens
cggtgagcgcgtttcccgcctgagcgcaactagcggcgggtcgtgggcacctccagttttacagctcccagcacagtaggaaagaga

SEQ ID NO: 486863 - DNA, 82 bp, Homo sapiens
agtccctcggacccatcgccgcttctagaccctactgcggtctcggatattgccggaatatgcttttaaggctattaaccag

SEQ ID NO: 486864 - DNA, 100 bp, Homo sapiens
gagatacctaggccgggagagggagaacacagttggagaaaatcggcagctgagacggccttggccgctgttgaaggaggatgttcccatcttggtcagt

SEQ ID NO: 486865 - DNA, 82 bp, Homo sapiens
tggggaatctatagttaatcttggcgacattgacaatgatggctttgaagggatagctgggagtatggccaccctgctccac

SEQ ID NO: 486866 - DNA, 75 bp, Homo sapiens
cttggattctatccctcctggtcagtacatggattcttcacttgttaaggcggctgagccagaggccaactgcag

SEQ ID NO: 486867 - DNA, 74 bp, Homo sapiens
gtccgcatcgccacagctgaaggctgcgagggactaagagcagaattctggaaaccaaaatggaggaaatgatg

SEQ ID NO: 486868 - DNA, 97 bp, Homo sapiens
aggcacacaccaaatgataatccagatcagcagcacttggaagaagctggtgcaacaccggaggatttcagcaacctcccacctgaacaaagaagga

SEQ ID NO: 486869 - DNA, 90 bp, Homo sapiens
cggctccatcatcacccaggcgcggagggaagacgccctggtgctcaccaagcaaggaggagctgacaagcacaagtgtggaacacatca

SEQ ID NO: 486870 - DNA, 98 bp, Homo sapiens
gagcttgcggaggtgcggctgcaggccgttgttggtcgagctggcgggtcccgcgggccaggccgtggaggttttgggatttgagattgacgcggtga

SEQ ID NO: 486871 - DNA, 85 bp, Homo sapiens
caacagaagtgtggcaatctgtaatagaaaagttggcaaagaaaggattatggcatggagctcactcagtgggtttgatgtggtg

SEQ ID NO: 486872 - DNA, 75 bp, Homo sapiens
ctacagtatgcacttaatgtccctgtcagcccaaggccaaccccactgtcactctgttcccgccctcctctgagg

SEQ ID NO: 486873 - DNA, 51 bp, Homo sapiens
tgcggagcgacgcggcctgggaggataagacatgtcatgctgcccaaggac

SEQ ID NO: 486874 - DNA, 100 bp, Homo sapiens
aggacctggcagcagaggatgatgagggcttcagtgcagacgcagtggtggccctggagcagtatgccagcaagttccaagatgagatgggattctccaa

SEQ ID NO: 486875 - DNA, 75 bp, Homo sapiens
ctacctaccaatcgtgaaaactatattcacagtagccggatcgagctgggagatgtgacaccacacaatattaaa

SEQ ID NO: 486876 - DNA, 82 bp, Homo sapiens
tggccgtgccctggggctgagccctcagatgagccccgctagggccgccccgcgctgagagcccagccccgccgctgcccgc

SEQ ID NO: 486877 - DNA, 83 bp, Homo sapiens
ctattttactgataagaaaacacatctttacacactaaccaaaactggacaagccaaggcatctgtagccaaagtaaacaaat

SEQ ID NO: 486878 - DNA, 101 bp, Homo sapiens
agccggtcaggaacggtttcggacgatcacaacggcctactacaggggtgcaatgggaagcaaatcccttgctccagccctggctgctgcctcagttttcc

SEQ ID NO: 486879 - DNA, 105 bp, Homo sapiens
gtgaagcaagtgcagatagatggccttgttccagcaacagatagaaatgctttaagttcactctggggaaagctggcctctgaaatcttaatgcagaattgggat

SEQ ID NO: 486880 - DNA, 74 bp, Homo sapiens
cagaaactacaaggcaaatgcagtcaaccagaggtccagttccggccgtaccgcacagacgacttcatcacgcg

SEQ ID NO: 486881 - DNA, 100 bp, Homo sapiens
atcctggctttccctcctactgtcaggaccaaactcttacccaggatctactggagcagctgttggagcccatgacgcctgtcgggatgcaaaagagaag

SEQ ID NO: 486882 - DNA, 75 bp, Homo sapiens
cccgactgcaactgctggattgctgcaaggctgagggacgagaacgagatgaaatcagacatcactgaaggagtt

SEQ ID NO: 486883 - DNA, 100 bp, Homo sapiens
tgaggaattttgaagtacaccgtggtgacattgtatcattggtctacaggaccgcactcagttcagtgaccgagacttagccacccttaagaagtattgg

SEQ ID NO: 486884 - DNA, 100 bp, Homo sapiens
cgcgccgccaccgtctgaactaggatgtcccgacatgaagactatcaagatctccacttagggaagtgggaatcttatttgcggaacattgggcagaagc

SEQ ID NO: 486885 - DNA, 83 bp, Homo sapiens
gggtaggcatatggaggcgctggagattgctgcaaacttggagctctttgttcaatgcctagccacctattcctacagacacg

SEQ ID NO: 486886 - DNA, 87 bp, Homo sapiens
gccgatgaggaagtactgagcctgttggaggaactggcccggaaacaggaggacgagtggctaagcaggttcggttacctgcccccg

SEQ ID NO: 486887 - DNA, 113 bp, Homo sapiens
caccttttcgagaaattgcatttttagaacctagagaaatcacactgcctgaggccaaagataagtcagaggctaactgttctgccatgtttggaaaactgatgaccatagca

SEQ ID NO: 486888 - DNA, 100 bp, Homo sapiens
aggcaactgtgctgatgaattactacaaaactcccatcgcgtcgtggaggagtactttgtggcccccccagataccatctatgatgaagatgaggtcctc

SEQ ID NO: 486889 - DNA, 100 bp, Homo sapiens
ctcgagtcctgccgcctcccgggagtgccgtgcgccgcagcccgggcccaggccccggcagcgcctgggacaagcccgacggccatggaggctgaagaga

SEQ ID NO: 486890 - DNA, 82 bp, Homo sapiens
cctcacctttgtctccccgatctacggggctgacatcagcggctctttgtatgatgaccgggagatacagatgacccaccaa

SEQ ID NO: 486891 - DNA, 100 bp, Homo sapiens
ggccttcatgttgactccaccccaagagcttggcccttcccattgcagcttccagacaacagggcactgttcatggagcccacactgctgatgctggatg

SEQ ID NO: 486892 - DNA, 75 bp, Homo sapiens
gcagctgcgatctctgtggtaggcccagagataattgacgaccttgccaacctagtggagaacacagatgaaaaa

SEQ ID NO: 486893 - DNA, 82 bp, Homo sapiens
ggtatgagccacacatccccgaccacttgcggcctgagtatggatgcagcagtctcggccctggctgctctatgcagtgaat

SEQ ID NO: 486894 - DNA, 75 bp, Homo sapiens
caagctctcatcgtgtgtccccccggcttccaagtgtgcaacttgctttggtgtttgctgttttattgccacaga

SEQ ID NO: 486895 - DNA, 100 bp, Homo sapiens
aaagaaccatgaagtacacaacagccacaggagtggctgagcagtttgccatcgcggaagccaagctccgagcatggtcttcggtggatggcgaggactc

SEQ ID NO: 486896 - DNA, 100 bp, Homo sapiens
cactgaactggtactggatgatcaaggtcagctggtccacatgaacaggcttccaggaggaaatgaggcagcctgcttctgcaaagtggtacgatcgaag

SEQ ID NO: 486897 - DNA, 83 bp, Homo sapiens
ctgggctgcagtgaccccgctttcctcacgcccagaatgattacggacctgaagccaaagaacaagatgcgctagtggacaga

SEQ ID NO: 486898 - DNA, 75 bp, Homo sapiens
gatattcagttgcacatccccacatcaatgcactgccaatgatagttttgaggcagctgtgccatcaaatagcca

SEQ ID NO: 486899 - DNA, 100 bp, Homo sapiens
gagaaggcagctgtgactgaggcagtgcgggccctgctgctcatgatggagcagtccaagaagtcctccctcatggtggcccgcagtattctcaacaaca

SEQ ID NO: 486900 - DNA, 148 bp, Homo sapiens
gtgccagcgaaaccacgagggtgatgaggacgacagccacgtccgggcccagcaggcctgcattgaggccaagcacaacgagtccctggagaggcagatgcgcgagcaggaggagcggcacgtgcgggaggcggccagttatcaggag

SEQ ID NO: 486901 - DNA, 75 bp, Homo sapiens
ccaccatcttcgacttgagcgaagttttatgcaagctccagtgatccacaagctcagaaatacatcgcggaaagt

SEQ ID NO: 486902 - DNA, 51 bp, Homo sapiens
agagatgtattcagtggaggaagctgcaatgtgtattcctccatcatatgc

SEQ ID NO: 486903 - DNA, 74 bp, Homo sapiens
agcccccgggcacgacctctcggacacggtgcaggcagctcctacagaagaagggaaaaaagagctgctgttcc

SEQ ID NO: 486904 - DNA, 73 bp, Homo sapiens
aggctatggccagagcagctattcttcttatggccagagccagaacagtgtgatccctcacatccacaaatct

SEQ ID NO: 486905 - DNA, 100 bp, Homo sapiens
tgtcgctgagagcctcacgagtcgaggtcctgcaggtggagctccggcagccgccctgcagtagaagactcagaaagtggtgtttacatgcgattcatga

SEQ ID NO: 486906 - DNA, 90 bp, Homo sapiens
actgactatgacctatctgacaagagcatcaaccctctgataactgttcccaggaaaaaaaggaggaaatcctggaaaatgaaaagccca

SEQ ID NO: 486907 - DNA, 75 bp, Homo sapiens
cttggactgagtcctgcaggacacaggcctccatccctgggatttgctggtagaagaaagggaatcagcgctgac

SEQ ID NO: 486908 - DNA, 89 bp, Homo sapiens
tcctttctgtagctacgcctgtagaagaagggacgccctcacaggacacctcaggacccattctggtgaaggtacaagtaagaagctgg

SEQ ID NO: 486909 - DNA, 74 bp, Homo sapiens
gaggaagtgtcagcgctactgccgcaggcttgcttccggcgtcatggctcaaagggccttcccgaatccttatg

SEQ ID NO: 486910 - DNA, 75 bp, Homo sapiens
ggagaatggagtcttccatcaatcatatctcacagatactagagtaaaaggatggtttcttctggacaattatat

SEQ ID NO: 486911 - DNA, 100 bp, Homo sapiens
atccattgtgtttatcatctggacaaccatgaagttcagaatagtgacatgtcagtcgtaactctgggtggattttaactacaactcttgtcctctcggt

SEQ ID NO: 486912 - DNA, 74 bp, Homo sapiens
ccaatgaacatctgggatgacatcatcacaaatcgctctgagtctcttccaaacatcccacacacttcacctga

SEQ ID NO: 486913 - DNA, 90 bp, Homo sapiens
ggagagggggcgctgagctgttggggaattggcagcaatgaaacagattctcgttaagatgcatagtaaacattctgagaacagcttact

SEQ ID NO: 486914 - DNA, 100 bp, Homo sapiens
gagagagaccagaaggaacggcctcaggactcagtgacctttgaagatgtggctgtgaacttcacccaggaggaatggactttgctggatccttcacaga

SEQ ID NO: 486915 - DNA, 100 bp, Homo sapiens
aaaaacagaccttttgattttcattcagtgatggaagagtctcagtctctcaatgaacctagcccaaagcaggcatttgcaagtaaaatcactggcatgt

SEQ ID NO: 486916 - DNA, 100 bp, Homo sapiens
cggagccgggctcgggtcgccggagccgcgccccaccccgccagctccagagccacgtacggtcagtatgggaatcctttaaataaatatatcagacatt

SEQ ID NO: 486917 - DNA, 99 bp, Homo sapiens
cggccgccctgggagcgagcggaggagcaggcgccggaggtgtggccgacgacgatgccctcgctgaggagcgcatgcggagaggccagaacgccctgc

SEQ ID NO: 486918 - DNA, 75 bp, Homo sapiens
aaaaataccagcgaactcctgtttaagtatctggagtccatctttcaccatcttctcctgagattgtactggacc

SEQ ID NO: 486919 - DNA, 75 bp, Homo sapiens
catctaccgcaactctcagttcgagagtaaaggaacattttagtggacaaaccaaatgaccaatcttcaagatgg

SEQ ID NO: 486920 - DNA, 98 bp, Homo sapiens
agagacctgagcagctctgcaaggttctaacagggggacttgatctcatcttcatgccaggccttgggtttgacaaacatggcaaccgactggggagg

SEQ ID NO: 486921 - DNA, 82 bp, Homo sapiens
agggcaattccaagaagagggaaaagcttgtgcacagtgtggacgaatgtggaacctcgctctgtggctgtgttcccttggc

SEQ ID NO: 486922 - DNA, 75 bp, Homo sapiens
aacatggctagcaggaatgcttactgttgcgtggttcgttattaacagccaaaggatccagttggggatctcctg

SEQ ID NO: 486923 - DNA, 100 bp, Homo sapiens
gccttggcaaccagacagacgctgttcccagccccgcgcaggatggagtacatattattaaggagactaaggaagaagtaaccccagaacaactaaagct

SEQ ID NO: 486924 - DNA, 89 bp, Homo sapiens
aaatatgtccctccggaggcacattgggaaccctgaggaacattttagtggacaaaccaaatgaccaatcttcaagatggtcttcagag

SEQ ID NO: 486925 - DNA, 100 bp, Homo sapiens
aagattacaaccttgtggtcaggttagtgtgactctggatccagatacagctcatcacgaactaattctctctgaggatcggagacaagtgactcgtgga

SEQ ID NO: 486926 - DNA, 101 bp, Homo sapiens
tattcactcatcttgtggaaagaccaatgaccaagacggcttgatttcaggaatattacgtgttttagaaaaggagaatccatatgctacactgaccatga

SEQ ID NO: 486927 - DNA, 100 bp, Homo sapiens
gcccccgggcgcccgcgtgtgcctgagccgtggcggccgcgtcttctgcgtcagcgacagccagtatccggagtgtgatgcagaagtaccttgcagagag

SEQ ID NO: 486928 - DNA, 98 bp, Homo sapiens
ggcgtttactcttagcagaagctcacctcataagctgtggccatgactactgaagtaggctctgtgtctgaagtgaagaaggactctagccagttagg

SEQ ID NO: 486929 - DNA, 95 bp, Homo sapiens
tcaaggtggcctaccaggaggccaggggtgtcgccatggtcagcacgagggaccattgcccaggcagcatgctggattattgccagaatctctta

SEQ ID NO: 486930 - DNA, 100 bp, Homo sapiens
atatcgacgtcgtgatccagaagtccagagctgaggactgcctgtttgcagacccagccgatgcccaatcctgtggcgtactacctgcaccactcaccct

SEQ ID NO: 486931 - DNA, 100 bp, Homo sapiens
caaatccctctttggctgtcccatccaacaggtggcctgtggctgggattttacgattatgctcacaggaaccttatgcaaaaatccagatgtaatgagg

SEQ ID NO: 486932 - DNA, 100 bp, Homo sapiens
acataaagttggccttacctcagagatcctgaactcttttgagcatgaggccttcccttcttcttggtggtgttcttgagtaagataatctggactggcc

SEQ ID NO: 486933 - DNA, 82 bp, Homo sapiens
gacacacccaggaaaagactcaggacggacaagcacagtcttcggaaggtactccaaagattcaggtttactcacgtcatcc

SEQ ID NO: 486934 - DNA, 90 bp, Homo sapiens
agcgtcatgagatgcctccacacatctatgctatatctgaatctgcttacagatgcatgcttcaaggcaactgtagatgtggtgatgaac

SEQ ID NO: 486935 - DNA, 75 bp, Homo sapiens
gctaccacttggccccctctgatctgcgccgggtcgccacatactgctgactggaaataccggcatgcaggattg

SEQ ID NO: 486936 - DNA, 76 bp, Homo sapiens
atgtagcccagtcgacccatgttctcctttctacaccagcattagacgaccctaataggagtattcataccagcag

SEQ ID NO: 486937 - DNA, 100 bp, Homo sapiens
agttcagaagactttaacatgggctcttcctctagcagccagtatactttctgtcagccagaaactggctctctaggaaacaccagaattatcagtgaag

SEQ ID NO: 486938 - DNA, 100 bp, Homo sapiens
agacaacgttgaggtacagacaggtatcagtttttggaagaagcttttcaaaatcagaagggtgcaattgagaatctactggcgaaacttcttgagaaga

SEQ ID NO: 486939 - DNA, 100 bp, Homo sapiens
cgacagcggcgagcagaactacggcgagcgggaagacgtattttagcagatgaagcactcaagctgggcattctagataaagttgtaaactcagacccgg

SEQ ID NO: 486940 - DNA, 100 bp, Homo sapiens
cttttatggacgagttcttttctgaggttttgattcccaccatggccatcacccagtttcggttatttaaattttgtacctgcctagcaacagtattctc

SEQ ID NO: 486941 - DNA, 75 bp, Homo sapiens
cacatctttacgattccaggacaagcttttgtccccaaaccagaggcagagaaagctgatggatttgtcaacctg

SEQ ID NO: 486942 - DNA, 100 bp, Homo sapiens
ggacactaagagctctgagacctctaagagccttatctcgatttgaagggatgaggtttctgtagaaaatgtttcctgactgcaatgagggaaagcggag

SEQ ID NO: 486943 - DNA, 98 bp, Homo sapiens
ggtttggctgtgataggagtatttttaaagaaacaatcccagtatcatcctctacagactggcaagcagcttttggctttggttcttctaaacaacca

SEQ ID NO: 486944 - DNA, 100 bp, Homo sapiens
atgacaaaaatggtgatggatttgttagtttggaagaatttcttggtgattacaggtgggatccaagtgtggatgaggtcaccattgtcaacattttgac

SEQ ID NO: 486945 - DNA, 100 bp, Homo sapiens
cggccgtcgatctcaagccgactctcaccatcatcaagacggaaaaagtcgatctggagcttttcccctccccgggcagcagtgaggatgccagagttca

SEQ ID NO: 486946 - DNA, 98 bp, Homo sapiens
gcaacttaattgcttccgagccagacatcgcaaaggtgaagcaactcgtgcccatccgcgatcaatccctgcaggaggagctggctcgccagcatgct

SEQ ID NO: 486947 - DNA, 83 bp, Homo sapiens
cgccggcaaggggacccagtgcgcccgcatcgtcgaggaactgtggctgcaccatctgtcttcatcttcccgccatctgatga

SEQ ID NO: 486948 - DNA, 75 bp, Homo sapiens
ggcggaaggactcctggaatgccacaaatgcaaatacttgtgcactgggagaggacgagattgaggagctgcggg

SEQ ID NO: 486949 - DNA, 75 bp, Homo sapiens
aggcttcttaccattcagcaatttagttactcatctggatcatagacggtatttctatgtaaacgaacagtcggg

SEQ ID NO: 486950 - DNA, 100 bp, Homo sapiens
acaatgtgtcccagccacttttcccctggtcttcaatgccagaatggtgtttgaaaaggccatccggctgtccttagagcaagccctgcctcctgagcca

SEQ ID NO: 486951 - DNA, 100 bp, Homo sapiens
gccatggaggaagtcaagaaatttctagtaccggctgaccggttccctgatgtgttacctgcttctgctactgatccaaactgcagaacttctcattcat

SEQ ID NO: 486952 - DNA, 90 bp, Homo sapiens
accgccgctgccccggctgcctcctccctgaggaccatggccaacctggagcgcaccttcatcgccatcaagccggacggcgtgcagcgc

SEQ ID NO: 486953 - DNA, 90 bp, Homo sapiens
cttacaattaccaaacagaatggacaagcttaataaaataaccgtccccgccagtcagaagttgagttttacagctcccagcacagtagg

SEQ ID NO: 486954 - DNA, 100 bp, Homo sapiens
cagcggcggcgggggcaccagcaggatgtactattctcggcgcggcgtgatcaccgaccagaactcggacggctactggggaaaggccatacaaatgtca

SEQ ID NO: 486955 - DNA, 100 bp, Homo sapiens
tggaagggaggagactcctgaccctcagaatggatgccctggcccagccccagccctggtggaagacccagctgttcatgtgggagcctgtgctgtttgg

SEQ ID NO: 486956 - DNA, 74 bp, Homo sapiens
ccagctccctgctcagccagcagtatgccgcctccctgggtctagagacgagttgtactgctgtcacaggaaat

SEQ ID NO: 486957 - DNA, 75 bp, Homo sapiens
tcatggaagaacaactgacttgtccaagagaataatgtttcttcagtctctaaggactcagctccttacatgagc

SEQ ID NO: 486958 - DNA, 100 bp, Homo sapiens
gtcctcctccccaggcccgccgcctccctgccaagaatgtcgtactctcaggaggctccaccatgttcagggatttcggacgccgactgcagagggattt

SEQ ID NO: 486959 - DNA, 72 bp, Homo sapiens
taagttggcaagacactccaagtttggcatgaaagggccaaacagcctttgatgtagcagatgaagacattt

SEQ ID NO: 486960 - DNA, 90 bp, Homo sapiens
cccaactcaagttcggagtggtacagacatcaaaccagtccagctacgggggcccagccagccagcagctgagtgggggttacggaggcg

SEQ ID NO: 486961 - DNA, 100 bp, Homo sapiens
gactggacgctgtgttcccccacgaacttctgctgggctgaacaagacatcctctttctcctgcgaagcccataacgccaagggggtcaccacatcccgc

SEQ ID NO: 486962 - DNA, 136 bp, Homo sapiens
ctaaaaccaatgcatcagctgatgatgacagcagagagtggcagggctgaggacccaaagtcatttcccaggctggcggagagatcgaatcatcaatttagttgttggcagcttaacatccttattgattctagta

SEQ ID NO: 486963 - DNA, 74 bp, Homo sapiens
gcggcagccgaggccgcgaactgcatcatggaggcgaggccttcttgggcagctttgtggccagcgggatgggg

SEQ ID NO: 486964 - DNA, 90 bp, Homo sapiens
cactcgctctcctctggggactgcagagaagcaggacctcgggccatgggcaaacatgtcccaggtaaggcaagtgggattgctggctgc

SEQ ID NO: 486965 - DNA, 100 bp, Homo sapiens
cctagcgtcctggaattacttcaatcaagcaaacagacactggctgcctttgttccactcttgcttaaagtctgtaacaacccaggcctctatagcaacc

SEQ ID NO: 486966 - DNA, 51 bp, Homo sapiens
gggaccttggcctttctaaaaaggcggagctggtcaccacccacaagtgcc

SEQ ID NO: 486967 - DNA, 100 bp, Homo sapiens
aaattaaagatgattatagccaaaaatggcccagacacagaaagggcaatctagagcagccatgatacctcccaagcagccacgacagcccaagggagct

SEQ ID NO: 486968 - DNA, 75 bp, Homo sapiens
agaagtcattttaaactatggacgactccgaggaacattgagctttaaggaagcctcctatttcagtttctcaac

SEQ ID NO: 486969 - DNA, 100 bp, Homo sapiens
gtaggggagagccccacagagctattccagcagcactgtgtgtcttggcttcggagcattcagcaggtgttacaggccaccctggagaaatgtgccacgt

SEQ ID NO: 486970 - DNA, 110 bp, Homo sapiens
gggcttcgtggatgccctgcaccgggtccggcagcaatcatcctcttccagtggtagcgtgtttgggtctggaaacactggaagagggggaggtttcttcagtggccttg

SEQ ID NO: 486971 - DNA, 101 bp, Homo sapiens
tggattgccagggcttcctggcccgaaaggagagcctgatctagtttgaagcactaagaagaataagacatcagtttgaaaagaggctctatcagaacaac

SEQ ID NO: 486972 - DNA, 75 bp, Homo sapiens
tgatggtgttaagaaactctcagtttgtgtttctgagaaagctctggatgagggggatattgccttgttgaaaac

SEQ ID NO: 486973 - DNA, 100 bp, Homo sapiens
ccaggatgacgacaggcccgccgatgagtacgaccagccttgggagtggaaccgggtcaccatcccagccctggcagttctactcagtgaatgtggatta

SEQ ID NO: 486974 - DNA, 100 bp, Homo sapiens
gccaaggagatgtacagaatgggccaagctccactgttcagatgcaaaggcaaaagtcaacaactctagcttaattggagtaggctatactcagactctg

SEQ ID NO: 486975 - DNA, 82 bp, Homo sapiens
agtcctgagcggccaggacgacgaggagcagggcctgactgcgcagatcaatgtccgagttaccaccatggatgcagagctg

SEQ ID NO: 486976 - DNA, 98 bp, Homo sapiens
tcacagacacgactcaggcttagtggcatgttggcacaattctgtcttctcttgaactgcataactgagaactctgcaaattccccaaagaaggagga

SEQ ID NO: 486977 - DNA, 75 bp, Homo sapiens
tacggatttactggaccccagtgtgaaagaggatccagcattcggaggcaaacatgaagctccatcctctccaat

SEQ ID NO: 486978 - DNA, 100 bp, Homo sapiens
tcttctgattccctgtgttctgcttttttcattgttccactggacgctcatcagagggaagatctttttcctcaattggactcagaattcatgattgaag

SEQ ID NO: 486979 - DNA, 74 bp, Homo sapiens
ccaagttgtcgacgaccgacagggtggtgaaagtttggggatatggattcctgtcagtgacgattattaatctg

SEQ ID NO: 486980 - DNA, 75 bp, Homo sapiens
tttgggggtctctgcacacaccatgatggcgatgctgtagctgatggagggccacccgttcatcgtgcagttcaa

SEQ ID NO: 486981 - DNA, 96 bp, Homo sapiens
ctggaaaggaattgttttggcctaggatcatccagggttttggccaaattgggcgagggcacaaaataaccacttaccccttctcaccgaggaaga

SEQ ID NO: 486982 - DNA, 100 bp, Homo sapiens
tgcagatggacagttgcacacactaggagatctcctcaaagaagtttgtccttctgctattgatcctgaagggtcctaacctgattataaaacaaccaga

SEQ ID NO: 486983 - DNA, 100 bp, Homo sapiens
ggagccctttaccacaacaatgaagagaaaaataggctgccagcaaacagtcttccgcaggaaggagatgtgcagaagaaggaggaggagtcggcgggcg

SEQ ID NO: 486984 - DNA, 90 bp, Homo sapiens
cgcgctccctgcccggcagcgactcggaggtggcgacatgtctaagaatgtgagccagtcacagatggcaaaattgaaccaacaaatggc

SEQ ID NO: 486985 - DNA, 75 bp, Homo sapiens
cctcccgagtacctgggaccacaggttctgggtctggtaatgaagtcatagaaggcccccaaaatgcaagagtcc

SEQ ID NO: 486986 - DNA, 80 bp, Homo sapiens
gacatgtctgagactcctgctcagtgtagcattaaggaatttcggcagaaagtaatgttaggaactcctttcctagttat

SEQ ID NO: 486987 - DNA, 74 bp, Homo sapiens
ggaggagactcctgaccctcagaatgcggcagtacatacctgtgaaaatgaagagcaaagccttctggatcttt

SEQ ID NO: 486988 - DNA, 100 bp, Homo sapiens
ctgcgttgtaaatattgctttaccaaacagggaagacaaaggcgctttggctaagctggtggaagctatcaggaccaattacaatgacagatacgatgag

SEQ ID NO: 486989 - DNA, 75 bp, Homo sapiens
aagttctcgaatcattctttgtacagaaattgaaaggcttcaaagctagcagctgtgaagagggataccaaggaa

SEQ ID NO: 486990 - DNA, 75 bp, Homo sapiens
acgaggttccggtgtgtccaattttgctcaacttattgtgagagttgtattccctgaatgactataaaccaccca

SEQ ID NO: 486991 - DNA, 75 bp, Homo sapiens
tttttgtcagattatcaggatgaggctcttttggtacaccagaaggccagaatggaacgacttcaaagagaactt

SEQ ID NO: 486992 - DNA, 51 bp, Homo sapiens
cccggagcccccagcgcagcggccgcggtttacccaaggtccagcctagcc

SEQ ID NO: 486993 - DNA, 90 bp, Homo sapiens
cacaatctactcctacgtcaggccagagaggccttctggcggccgcccctggtttctcctggggggtgatgagcgggagcggctctgggc

SEQ ID NO: 486994 - DNA, 51 bp, Homo sapiens
tgcctggctagccggcgacttgagtgacgataccatgcggagaccatcaag

SEQ ID NO: 486995 - DNA, 75 bp, Homo sapiens
ttacgtgtactttaccaacgagctgaagcaggaaatctggcattttttaaagtttgcgccccacaaagaggaaat

SEQ ID NO: 486996 - DNA, 98 bp, Homo sapiens
gggggtgcgcgcctgcgacctgcccgcctggctctgcagcgcttcagcgagggtgccctggagtacctagccaacctggaccgagccccagaccccac

SEQ ID NO: 486997 - DNA, 100 bp, Homo sapiens
ctgtcttgggcagcatgcagtgctttctggatcaaagtggtcaaagcgttccatagttccctccacgaaagcattcagaaaccctacaaccaaaagtcca

SEQ ID NO: 486998 - DNA, 75 bp, Homo sapiens
tttttccagaattcatacaaagagtgaacggaaaacagttcttccttcaaagcatgcagtacctgaagtaataga

SEQ ID NO: 486999 - DNA, 75 bp, Homo sapiens
ggcgtctctgtccccatctggttttaggtgccaagtcctgccctgccaacttcttggcagctgccgacgacaaac

SEQ ID NO: 487000 - DNA, 96 bp, Homo sapiens
gaacttcggaggatggaagagctgcacaaccaagaggtgcaaaaacgaaagcaactggagctcagattcctggtcgggtggcttccagtggtcttc

SEQ ID NO: 487001 - DNA, 100 bp, Homo sapiens
gaggatggagagggcaacgtttggattgcaaagtcatcagccggtgccaaaggtactattttgaagcgctggaagaagaactggtttgatctgtggtcgg

SEQ ID NO: 487002 - DNA, 100 bp, Homo sapiens
gtggatgaacatgtgcttggtgtcgtttttccttgagctgaacgtcttgcaacagtggccgcacgcatagtggatgcctggactttggccttttctcctg

SEQ ID NO: 487003 - DNA, 101 bp, Homo sapiens
gcagaaggagcacgaggccatgaagctggtgaccatgtttgacaagctctccaggaattcctcctgatcagcagagactgatctttgctggcaagcagctg

SEQ ID NO: 487004 - DNA, 90 bp, Homo sapiens
ttgcggaataattccatccaaaaccggcagctgttagccgagcaaaatgattgaagatagtgggaaaagaggaaataccatggcagaaag

SEQ ID NO: 487005 - DNA, 103 bp, Homo sapiens
ctcgggtggcgacttcctccccgcgccccctccccctcgccatgaaggctgaaggtgatgtggccgccctcaaccgacgcatccagctcgttgaggaggagtt

SEQ ID NO: 487006 - DNA, 100 bp, Homo sapiens
gaggacaagagtggacggcagagttttcaagctgtgacagataaaactacccctgagtgtggtcccacaggatatgtagagaaaatcacatgcagctcat

SEQ ID NO: 487007 - DNA, 74 bp, Homo sapiens
ggcgcggggaccgctgtgctctcggtttaggaatgtatgaaacacccctgttcctagctcatgaagaagagtca

SEQ ID NO: 487008 - DNA, 74 bp, Homo sapiens
gaaaggcatctgtcccaagcaggagaacattgcagtgcctccggagccagcgtggtggccatagacaacaagat

SEQ ID NO: 487009 - DNA, 50 bp, Homo sapiens
ctggtggagccggacgcgggcgcaggtaccgggtgtctggtccgagccgt

SEQ ID NO: 487010 - DNA, 100 bp, Homo sapiens
agcgagcgaccgacgcgccacccgccgacgcctcagccgcttggggcccgcacggaccctctacttcagacgctgtgcagagctgcaagtccgtatcact

SEQ ID NO: 487011 - DNA, 100 bp, Homo sapiens
cccactccggcggcgcgtcccccgagcttggagaactacgatgacccgcacaaaacccctgcctccccagttgtccacatcaggggcctgattgacggtg

SEQ ID NO: 487012 - DNA, 87 bp, Homo sapiens
tggttgtaacatttgtagcaggttacatagctttttgacattcatactagtggcctattgggagaaatccacacgggccatcacagc

SEQ ID NO: 487013 - DNA, 87 bp, Homo sapiens
caagaccgctgacaagatcgagggcttctatgaagccaaggaggagttcctggatctgcttgatgtgttgctgccccatgcccagac

SEQ ID NO: 487014 - DNA, 100 bp, Homo sapiens
ctcgtcagcttgggatggctgctgctgagtcagacaaggactctggcttttcaggtatcatgatattagctggtttgacatcaagtcatttgtgagtcat

SEQ ID NO: 487015 - DNA, 100 bp, Homo sapiens
attagaacttattatggatgaaatgaaacagattctaactccaatggcccaaaattcagggcgacagctcagtgaagtcttcattcagttaccttcaagg

SEQ ID NO: 487016 - DNA, 83 bp, Homo sapiens
aaaaggaactccctgacatccttgatacactctgtgcagttttagagagagacacactcagtattcgagaaagtcgacttttt

SEQ ID NO: 487017 - DNA, 87 bp, Homo sapiens
tcggaggcgttcagctgcttcaagatgaagtccaagtggtaagaagttcagaagcaagcctcagttggcaaggtacctgggaaatac

SEQ ID NO: 487018 - DNA, 75 bp, Homo sapiens
cggggctgggccgtggagcgaggtggtgcggggccggacgcgggagtcagctgctctgttaaaagcgaaaatgaa

SEQ ID NO: 487019 - DNA, 100 bp, Homo sapiens
catcagcctcggtgacagtgtggagatccctgccctcaagatcattcaacttcaagtggcacattatcttttaagcctagtcaatcattgattactcttc

SEQ ID NO: 487020 - DNA, 100 bp, Homo sapiens
ggatcatgcggccactcatattaccaaccgcagagaggcctatatgaacccaatagcaatggcgagatcaaggggtccaatccagtcttcagggccaaca

SEQ ID NO: 487021 - DNA, 90 bp, Homo sapiens
ctaaaataatgagagaaaaggccaaagagaggtgttctgaacaagttcaagggccacaacacacagtgatcttgttctaagagcaacaaa

SEQ ID NO: 487022 - DNA, 100 bp, Homo sapiens
tttggcagcatgaaagttagcaatgcagccgctctctgctccctgccccaatgaacatctgcactaggcccaagccttggagtaatttacctgaagagtg

SEQ ID NO: 487023 - DNA, 75 bp, Homo sapiens
cccggtgcaagaggcgcaaacaagccaatcccaggaggaaaaacgaagatattgatgctgatggacagggatttt

SEQ ID NO: 487024 - DNA, 100 bp, Homo sapiens
gcaacttcggggagctccgcctagatttgatgagcctgtcccagacctctgcagcctcaagcggttgtcttaccagagtggggatgtccctctgatcttt

SEQ ID NO: 487025 - DNA, 90 bp, Homo sapiens
gctgcacctaaattctctgttccagaatctgtcatgaaggaaactctatatccaaaatatgagctctggttgaagaagtgtattttgcgc

SEQ ID NO: 487026 - DNA, 82 bp, Homo sapiens
cggcgctggactggagcagaaccccaggactgcgcccccgggagcgggcgcccagaggtcagcccaaggccaaccccactgt

SEQ ID NO: 487027 - DNA, 98 bp, Homo sapiens
ggatgaggaaactgaggcctggagaggttaaagagacccgttcagagtcctacagtggcagatggatgctcctccactctctccctatccatttgtaa

SEQ ID NO: 487028 - DNA, 75 bp, Homo sapiens
gatccacttccgcaaggaccctttggaaggccgggtgggccgagggaaatcctcattgacgattcaatttgttga

SEQ ID NO: 487029 - DNA, 102 bp, Homo sapiens
agatacctgtgcatcccaacgatcatgttaataaaagccagaaatcctgccagaaacctgtagacaaatatatcgagtatgatcctgttatcatcttgatta

SEQ ID NO: 487030 - DNA, 100 bp, Homo sapiens
gccttacgcggccccgcgtcgggagaactgggatcgccccaagagcaccgcgaggtactatactggcaattgctggagaagattttgcaattgttgcttc

SEQ ID NO: 487031 - DNA, 75 bp, Homo sapiens
gcgacccggtggactcggcccgcggcggcgcgctcacccgccccgttcagccatgtgaagatgtgcttgcttccc

SEQ ID NO: 487032 - DNA, 99 bp, Homo sapiens
gtacagtagaagaggatctgggtaaaagtagagaaggatcaaggacggatgatgaagtagtacagagcactaagtcaggagattggaaaagcaaatgct

SEQ ID NO: 487033 - DNA, 75 bp, Homo sapiens
cgccgcaccaggtcttgtagcagcgcctcctcggttgcaaaacttcctcaagttgttcaacagcaaacacccgtg

SEQ ID NO: 487034 - DNA, 76 bp, Homo sapiens
atgtgaagatgtcagtgggctgtgcctgtcctggttggtgaaaattgcccctcaatattatgacatgagcaatttc

SEQ ID NO: 487035 - DNA, 95 bp, Homo sapiens
gtgactctagggttagcagaaccatccaccaacataagtttcccattggtcactgtacacttggaaaagaagctcttcgtgggcggtcttgactg

SEQ ID NO: 487036 - DNA, 75 bp, Homo sapiens
agatgaaattgatttatcagatgtcctttcagcacgtagacagactatgctcttttctgccacccaaactcgaaa

SEQ ID NO: 487037 - DNA, 100 bp, Homo sapiens
tctccttgagcaccatccggggtcaccagattggccgcgtaatccaggttgctgctgggagcagcaacctcaagagagtgaccttggagctgggggggaa

SEQ ID NO: 487038 - DNA, 75 bp, Homo sapiens
ccacccccagacctcctcagctccagggacgtgtctcaaaccagtgtcactgcccttccatccaaaggcctggag

SEQ ID NO: 487039 - DNA, 87 bp, Homo sapiens
cacatatgacagtggacatagaggacaacgcagatatagaacatttcttttatcacaattagagataaccttggcatttcaactgat

SEQ ID NO: 487040 - DNA, 74 bp, Homo sapiens
agaaactcaccaaaaaagctcttattaaggagccgtgtaaagccagtggaatatagtcagatgtacagttatag

SEQ ID NO: 487041 - DNA, 100 bp, Homo sapiens
ggcggcgccatcttcgaacttagacttccggaaggactttggcgagggaactgtggctgcaccatctgtcttcatcttcccgccatctgatgagcagttg

SEQ ID NO: 487042 - DNA, 100 bp, Homo sapiens
ctcttatttagttctggggagcgcctcgtcgacatgagtgatgtggaggaaaacaacttcgagggcagactctggaagagaaatggccccagttcatcac

SEQ ID NO: 487043 - DNA, 75 bp, Homo sapiens
tgcctgggagaatgttgactctactgcaggctctcaaaattagagagatgtgtaattgtccaccactgtctaatc

SEQ ID NO: 487044 - DNA, 100 bp, Homo sapiens
tgacgagggcctggagtgtgtgcccactgaggagtccaacatcaccatgcagcagaagatggctgtgccacccacgtatgccgatcttggcaaatctgcc

SEQ ID NO: 487045 - DNA, 106 bp, Homo sapiens
ggacagtgaggagctgggtggtcccagcctggagctgtgccagcctgacatgggttttaaaatcaaagatgggaaaatcggagaaaattgcccttccccatggcca

SEQ ID NO: 487046 - DNA, 74 bp, Homo sapiens
ttctgggagctgaggaaccagatatcttgaaaagctgccagaaagtccagcctagggtgaatgtttccccctcc

SEQ ID NO: 487047 - DNA, 74 bp, Homo sapiens
cacgaatctgcccacccctcctgtaacccagcctgtttcacttcttgatctttgccgccgttcattatcagaag

SEQ ID NO: 487048 - DNA, 95 bp, Homo sapiens
gcgatatattcatctggagaaccttttggccaggtcttactttgatcctcgtgagactcttattgaacaaatagaactgcggtctgaaaaaatac

SEQ ID NO: 487049 - DNA, 74 bp, Homo sapiens
cgatgtttcaatattggaagcgctttgatttacagcagctgcaggagaacaacatgaagtactgggagaagaac

SEQ ID NO: 487050 - DNA, 100 bp, Homo sapiens
gcggtggtgcctccggactgcacttgcgaagggagcttggggaggaagaggagatgaccgccgggttctgctatggcacatggaacaagccatccactcc

SEQ ID NO: 487051 - DNA, 74 bp, Homo sapiens
atgacagaggaccatgtgatgcacctgctccagattgctctggaagcagccaaagcactggatgacaagaactg

SEQ ID NO: 487052 - DNA, 74 bp, Homo sapiens
gctcgtgtgcaacgcgctactggcccagtctattatcctcccagtccacaacgctgaaccgtggctggacgaat

SEQ ID NO: 487053 - DNA, 91 bp, Homo sapiens
agtggcgcttgagttggtcgggggcagcggcagataacgaaggaggcccaacttcattcaataaggagcctgacggatttatcccagacgg

SEQ ID NO: 487054 - DNA, 100 bp, Homo sapiens
aaataaaacagctgttttgcagattggactacaagaaataagcgggttttgaaaacaaaaaaaagaaggagtggaagagggggccaggatccaggcctcc

SEQ ID NO: 487055 - DNA, 96 bp, Homo sapiens
tcaaggcgaatatttaacttatatctgcctgtcagagctttcattgttgaggttcctcagtgctgaactaacaagagggtacttccttgaacataa

SEQ ID NO: 487056 - DNA, 50 bp, Homo sapiens
cagacaggctgtgtgcatgcaccaaagaagctgtacattggaatgcgttt

SEQ ID NO: 487057 - DNA, 75 bp, Homo sapiens
gctgctggcgctctggctgtgctgcgcgacccccgcgcatggaactgtggaaggtgcatcagtgaagaaatggac

SEQ ID NO: 487058 - DNA, 90 bp, Homo sapiens
ccggcccggcggctgctgctgctgctgacgctgctgctgcccggcctcgggcaaattgtggctactaatttgccccctgaagatcaagat

SEQ ID NO: 487059 - DNA, 129 bp, Homo sapiens
aaacaatgaaatttcatgggccatagaagatgctagtgaagcctttgctggactcacaagtctcactaaactgaacagccagctgaaaactctcctggccattggaggctggaacttcgggactgcccc

SEQ ID NO: 487060 - DNA, 50 bp, Homo sapiens
gaggggaccaaactctccatcacccaggattgtagaaggcatgaaacaaa

SEQ ID NO: 487061 - DNA, 100 bp, Homo sapiens
gacacctggtgagctgcgacaactggatgaacattaacctgcgagaagtcatctgcacgtccagggggaggaaaccaagactccagggtggagtgattgg

SEQ ID NO: 487062 - DNA, 96 bp, Homo sapiens
caggagctaaccatgaaggctcaggtgctggagaatctggtaaaagcaccattgtgaagcagatgaggatcctgcatgttaatgggtttaatggag

SEQ ID NO: 487063 - DNA, 76 bp, Homo sapiens
tgcaactgtagcctgggcaacttcgacagccagatctgtgacttcctccgcggagccacagtccatagaatcctcg

SEQ ID NO: 487064 - DNA, 96 bp, Homo sapiens
cgatggagcagcgaaaacgtggttgtagagttccgtgactcccaggtgtcatggagaaactccagctgggcccagagattctgcagcgggaaaatc

SEQ ID NO: 487065 - DNA, 90 bp, Homo sapiens
cagcgatcaagcaggcagcgggctttgccagcaaaaccgaaacaggagctgtcattgactggcccacagaggagggcaaggaagtatggg

SEQ ID NO: 487066 - DNA, 74 bp, Homo sapiens
ttggacacgtcccagctctctctgggcatctggaaagttggaaaatggatataccttatttgattatgatgttg

SEQ ID NO: 487067 - DNA, 74 bp, Homo sapiens
aggaagccatagcactcgcagagaaatatggttgatgcgatgaagagagttgaagaaatcaaacagaagcgcca

SEQ ID NO: 487068 - DNA, 50 bp, Homo sapiens
cgtgaaccacatgcccagcacggtttggaaattttagcattcaggtgcca

SEQ ID NO: 487069 - DNA, 75 bp, Homo sapiens
ttaggaacttggattcaaggcagtggaactgcctcctgagcgtggagcctgccattagcaccaagcacctccctt

SEQ ID NO: 487070 - DNA, 90 bp, Homo sapiens
gtttctcaagcctcagggccatccccgcctgctgctctggtttaagaggaggagatgttaaagtaacccatcttgcaggacgacattgaa

SEQ ID NO: 487071 - DNA, 74 bp, Homo sapiens
gaagaaactgcggagggaaagctgggaacgagagccggttgctgaaccaatccccatctgtagtttctgtcttg

SEQ ID NO: 487072 - DNA, 75 bp, Homo sapiens
aaatgaaccatttgtctttagtcttggcaaaggaacattttagtggacaaaccaaatgaccaatcttcaagatgg

SEQ ID NO: 487073 - DNA, 91 bp, Homo sapiens
ccttcatgcccaaatcccggaaactccagcgtgtctccagccgtgcaagagtgagccatggagctacgtgtggggaacaagtaccgcctgg

SEQ ID NO: 487074 - DNA, 101 bp, Homo sapiens
ttgggacttgggaatcccagcttttcagatccatttacaggatccaattgatccagcaagcactgtgattataattcgttctttggtgcctggcggcattg

SEQ ID NO: 487075 - DNA, 100 bp, Homo sapiens
taccacgccttctctggagcccagaagctatccccttttccagggcacagtgaggccagcagatattgagtaaaccggagaaaatcaggaaggagaaaag

SEQ ID NO: 487076 - DNA, 100 bp, Homo sapiens
gtgaagataaagccaggcaagggcgcgatgtacaatacggtgtggagtatggaccgcgatgacgcagactggagggaggtgatgatgccctattcgacag

SEQ ID NO: 487077 - DNA, 75 bp, Homo sapiens
cccggatgcaggacagacccctcagggggcaagcgcgatgaagagctggttctgcccatcaactcctccctgagc

SEQ ID NO: 487078 - DNA, 98 bp, Homo sapiens
aaagcagttaacagtgccaccggtgttccaactgtttaaagaccctgatgctcccataagacagaaaatgccccttgatgatctggatagagaagatg

SEQ ID NO: 487079 - DNA, 89 bp, Homo sapiens
cttcgcccggctttgcagcggggacttcggcggcggcgcctcaggcacctcggcccgggttgtctgcattcaaaagagcattctattaa

SEQ ID NO: 487080 - DNA, 97 bp, Homo sapiens
cgaagtccgcaacccggggatgggcccgcggctgcgagcctcaaggaataggttctcctagtgtctatcatgcagttatcgtcatctttttggagtt

SEQ ID NO: 487081 - DNA, 82 bp, Homo sapiens
ctgttgccatctacatagctttctctctccagaggatgttaaacgtctgaatgaaaaacttaaagaaagcaatacaacaaag

SEQ ID NO: 487082 - DNA, 100 bp, Homo sapiens
cagaccatggctcctggaccccaagatccttaagttcgtcgtcttcatcgtcgcggttctgctgccgatgaaactgctgcccttccggcagaagaaggcc

SEQ ID NO: 487083 - DNA, 106 bp, Homo sapiens
atcccttcagtgaatgcaaaattgaaagtagttaagcatttgataagaggctccagcatatctcatagacctaatgcatgataagaataatgaaatccgaaaggtc

SEQ ID NO: 487084 - DNA, 75 bp, Homo sapiens
attttgacaactgtgttcttaagccggccacagaaggaaaacggccacggcgtatgcctccgaggacggggtcct

SEQ ID NO: 487085 - DNA, 74 bp, Homo sapiens
ccaacttcgccaccctgcggtggattgactacggcaaagtggccactcaggttctgcggggagtgtctccagcc

SEQ ID NO: 487086 - DNA, 82 bp, Homo sapiens
cttcgctcagcttcagaccctgggctgcagctgcctaatgagggcgtctctggccgagcctctttttgtggaaaacgacagc

SEQ ID NO: 487087 - DNA, 97 bp, Homo sapiens
ctcgctgctccagttctgcaacgtccagttacaacacagggatcacaacaaacacaaccgccacagaagcactatggcattacttctcctatcagct

SEQ ID NO: 487088 - DNA, 100 bp, Homo sapiens
tgcaagattgccttcatggaattgagtccaagtcttatggttctggatcaaggcaaatgaaatctccagccatcacagccaccctagagggaaaaaatag

SEQ ID NO: 487089 - DNA, 82 bp, Homo sapiens
gatggaaccaaggatgacagcactaattctaacaatgcagatcttcgtgaagactctgactggtaagaccatcaccctcgag

SEQ ID NO: 487090 - DNA, 75 bp, Homo sapiens
acgagtccggaggggctgccgcgggagatgtaaaaaaagattggtctgaccatgctctctggtgggaaaagaaga

SEQ ID NO: 487091 - DNA, 75 bp, Homo sapiens
tcgtgccctgcgcaaggttgttggggagttcaagggccgttgctccagggagaactgcaaatatcttcatccacc

SEQ ID NO: 487092 - DNA, 100 bp, Homo sapiens
tgacctttcttctgtccttgccacacaacatcattgaactcgatgttagagcctacgttcctgcactgcagtatcaccttttgccatgatagcatttctt

SEQ ID NO: 487093 - DNA, 97 bp, Homo sapiens
aacaagccggggaccaagccggggaccaagccggggactaaggcgagccggagaccgagcccgaacagcagggggggccctcagcctcttggccttg

SEQ ID NO: 487094 - DNA, 83 bp, Homo sapiens
accctaagaagaggcgccagaggagccgccttctgcctcagaacggcgtgactcggagactcagattgatggacaacttttct

SEQ ID NO: 487095 - DNA, 75 bp, Homo sapiens
atgatggagctcagccctccacctccacagattcagaatctgataattcagataacaacacaatctttgtgcaag

SEQ ID NO: 487096 - DNA, 83 bp, Homo sapiens
aggcaagaaggcaacgacgttccatctgtggaaggacctaccaaccagcggaatggccaaagactatgacgggtcttcctagc

SEQ ID NO: 487097 - DNA, 101 bp, Homo sapiens
ctcgcactaccctgactacagctggagcgcccagaggcgagccctggtggaggaagaggtggccaagactaagcagcagattgaggagcagcgggtgcagg

SEQ ID NO: 487098 - DNA, 75 bp, Homo sapiens
accattgcaagacatttgctcagtgatccctgaaaagttccagcatattttgcgagtactcaacaccaacatcga

SEQ ID NO: 487099 - DNA, 100 bp, Homo sapiens
ggcgattatggacccggccgaggcggtgctgcaagagaaggcactcaagtttatggtgtgtgtctggggaagagacttacagaagtggagttgctgagtc

SEQ ID NO: 487100 - DNA, 76 bp, Homo sapiens
tggccacctacagaaacaaaatgtcaacaaattgatgggttacttcttgctgcagattctgcgcaggatcggagct

SEQ ID NO: 487101 - DNA, 82 bp, Homo sapiens
actgcggtcacttaagttttccgtgtgcgggttgcaaggagcgtgcgtgcgtctgataaatgtggagaggactataaactgc

SEQ ID NO: 487102 - DNA, 101 bp, Homo sapiens
ggcggctgagcgtggaggttcttgtctcccctggtttgtgaagtgcggaaaaccagaggtctcggcgcggaagatggccggcggcgtggacggccccatcg

SEQ ID NO: 487103 - DNA, 100 bp, Homo sapiens
cacgaccaggtgaggggggtacgggaccgccagggcctcccctcaccaccaggaccaagtgtgcagatacactgcctctaggactgggacagatagccac

SEQ ID NO: 487104 - DNA, 74 bp, Homo sapiens
aatattgatattattcaccggattgatagaactgcaagctatgaggagactgaaactgttgaggagcccatgga

SEQ ID NO: 487105 - DNA, 75 bp, Homo sapiens
agaggatctggtgtaccaggcgaagctggccgagcaggctgagcgatacgacgatcaggcctttgtgacactaac

SEQ ID NO: 487106 - DNA, 88 bp, Homo sapiens
cgcaccgctcccgggatcatggtgttctacttcaccagcagcagcgttattgattctgcagaactgcaggcgtatccagcacttgtgg

SEQ ID NO: 487107 - DNA, 100 bp, Homo sapiens
aagtggtacaggagagaatttgtgatgatgagctgatcttaatcaaaaagggagttgctgagtcagcccagaccggaaggagtggcagagatcatttgcc

SEQ ID NO: 487108 - DNA, 82 bp, Homo sapiens
tttgtcattaaacccatcgacaagaaggcacctgaattacatgaatgacagtcttcgaaccaatgtgtttgttcgatttcaa

SEQ ID NO: 487109 - DNA, 82 bp, Homo sapiens
ggtaccctgggtccattttcacctggaacaagcggagtggcctgcagatgttcagcccacaagagcttactggtgaaggaat

SEQ ID NO: 487110 - DNA, 74 bp, Homo sapiens
cctactcgcccgccaccctgcgctgccgccgctctgaggagttaaaggataaggagccccgtggaatcatccct

SEQ ID NO: 487111 - DNA, 100 bp, Homo sapiens
tggagaccaagctcaaacccctccggaagaacgctttggataaacaagaagaattgacacctcttggagtccacttggcacgattacccgttgagccaca

SEQ ID NO: 487112 - DNA, 101 bp, Homo sapiens
aggaggacatggagatgaagaagaagattaacctggagttaaggaacagatccccggaggaggaaagaattgggatgtgaatgccgccctcagtgattttg

SEQ ID NO: 487113 - DNA, 90 bp, Homo sapiens
agcccaattctcgggggcccctccagtgcaagggggctgctcccccgcgatgccagccgcccccatactaccagcttgactccatgccca

SEQ ID NO: 487114 - DNA, 100 bp, Homo sapiens
aggggaagaatcatgtgtctaatgttgtaagcaaagctagagaagatttgctgaaaattcagaaagaacgtgattttcatcgaatgcatcataagcgaat

SEQ ID NO: 487115 - DNA, 100 bp, Homo sapiens
ctaaaaatgcagcatatagaaagtatacagaacagattacaaatgagaagctggctatggttaaagcgtacgtaggaagcctggacgtgccaaggcccaa

SEQ ID NO: 487116 - DNA, 100 bp, Homo sapiens
ggttgagggtctccagggttctttggggcccgagtaataatttttcaccatgcatcggaaaaaggtggataaccgaatccggattctcattgagaatgga

SEQ ID NO: 487117 - DNA, 90 bp, Homo sapiens
cctccagtagacggtacagcgaaggcagagagttcagggactttgaacatgtcggggatcgccctcagcagactcgcccaggagaggaaa

SEQ ID NO: 487118 - DNA, 100 bp, Homo sapiens
ctgccaaagcgttgaggatcctgcagaatgagcccctgccagagaggctggaggataccatggccaagcggaatacagtgataggaacaccattttggat

SEQ ID NO: 487119 - DNA, 82 bp, Homo sapiens
gaagagatgatttctccatcctgaacgtgcagcggttgatgataattagaagcatgctttccactgaacttcccgacaacat

SEQ ID NO: 487120 - DNA, 145 bp, Homo sapiens
gggccagcaccatggaggacgtgaagctggagttcccttcccttccacagtgcaaggaagacgccgaggtggattttcggaaaagacatatgaatggagctcagaagaggaggagccagtgaaaaaggcaggaccagtccaagtc

SEQ ID NO: 487121 - DNA, 100 bp, Homo sapiens
gcttgcatttgtttctgctgaccgcgggccctgccctgggctggaacgaccctgtgatcctgccatgaagcagtttctgctgtacttggatgagtccaat

SEQ ID NO: 487122 - DNA, 82 bp, Homo sapiens
gacacgacctctactggccttgcccagcgcctagagttcttggagtctctgcggagtccctgggccagatctcacagtgaaa

SEQ ID NO: 487123 - DNA, 101 bp, Homo sapiens
tttagaaaaacaagaattacagcagccaacctatgttgccctgagttacataaatagatggactcaccctgtcacccaggttggactgcactggcctcaac

SEQ ID NO: 487124 - DNA, 75 bp, Homo sapiens
aggactccttcgaaatggaagaggggaaagacgcctcagccttcgccgccaagatgagggggggcttctggccgg

SEQ ID NO: 487125 - DNA, 50 bp, Homo sapiens
cctcccaatgcattgggattacaggtcgtcgtcccgcagacacacaatcc

SEQ ID NO: 487126 - DNA, 110 bp, Homo sapiens
ttacgtttcaaaaattttagaaaatggacctgctgacagagcagatggcctggagattcatgacaaaatcatggaggaactgaagcatctcatccttgaagcagctgatg

SEQ ID NO: 487127 - DNA, 90 bp, Homo sapiens
ccgagcgcaaggacagcgcgaggtccgcgcagcccagcgcagccatgttatgaagacagtatggagtttccagaccatagtagacatttg

SEQ ID NO: 487128 - DNA, 83 bp, Homo sapiens
caaatgcagtcggcttgtcctggctcttgccctcatcctggttctggaatcctcagttcaagattttcttcaatcacatctga

SEQ ID NO: 487129 - DNA, 98 bp, Homo sapiens
gtgtgctgggctctggacaggtggtaaagacacttgtggggtggggaagctgaggcaggaagccctttagtcacttgccgaaggccacgctgttaccc

SEQ ID NO: 487130 - DNA, 96 bp, Homo sapiens
tcaccactctacctccagcacagaatttggcttatgatgggaatttcttagccataggctcacatgacaactgcatctatatatatggcgttagtg

SEQ ID NO: 487131 - DNA, 90 bp, Homo sapiens
ggacgggaccccagggcagcgaagcaggaagctcttactcctcagaaatgtattcctcacatcatcgtccggggtctcgtgcgtattcga

SEQ ID NO: 487132 - DNA, 100 bp, Homo sapiens
tgaactcagaagacaaggagatggtgacgactgtgaagggggtcatcaaggctgtgctggatggagtgaagagccagccccagtgcctgctgagccgttt

SEQ ID NO: 487133 - DNA, 87 bp, Homo sapiens
ggccggaactggagccgaggcgcaggtggcgctgggacctgaaggagaagaaggagaaggtggaggagaaggcaagccggaaagagc

SEQ ID NO: 487134 - DNA, 101 bp, Homo sapiens
ggagtgacagtgctgacaagaaggctcaaggtcccaaaggtggtggcaatgcagtaaagcaccaaatcagatgaaagccaaggaagggaggaatgtgtaca

SEQ ID NO: 487135 - DNA, 100 bp, Homo sapiens
cttcaccagctatggcattagcccacaggccaaggtcacaatttgcgctgaagtttctagacccgtcattcgtgcccattacgaattctctcacccagga

SEQ ID NO: 487136 - DNA, 75 bp, Homo sapiens
tgatgaacttagcagcagctccactgaacagataagggtaaaatagaactgcacgggaaacccatagaagttgag

SEQ ID NO: 487137 - DNA, 105 bp, Homo sapiens
cgaggaagctcttaagagcgcggccggaaagcagcttgccatgaagtggatgactcatctgttgttggattaaagtatttgcttcttggtgccatacacaaatgt

SEQ ID NO: 487138 - DNA, 98 bp, Homo sapiens
gtgtcccctgtggcctcggttccctggagaagccacagcttctgcaaagacaggaggagtgggccctttgtggtttcaagtgccccatttgctccaag

SEQ ID NO: 487139 - DNA, 82 bp, Homo sapiens
tttatgagaggacagaggctatatgaaaagcctccccatggccacccatggaccagtcggcattcacttcctcccttctgcg

SEQ ID NO: 487140 - DNA, 100 bp, Homo sapiens
gcgccgccgagagaagcagggagccgggcagcccgcgactgacggaggaacatacggtccctaatgagcacagagaagaccaagggcttctgccagctgg

SEQ ID NO: 487141 - DNA, 50 bp, Homo sapiens
gcactcctgagagccatcttcaaagagccattgctgctgagattgttcta

SEQ ID NO: 487142 - DNA, 120 bp, Homo sapiens
agggaaatagaagaactatacaacaatccacagaatccagagaggagcttgaagtttgatggcatgtggattaatcaggaaacccaggcccaacggcaggtggatgcaagaagaaatgtt

SEQ ID NO: 487143 - DNA, 82 bp, Homo sapiens
ccccagccgcttctgaccttccaggcctacgagcagattctcgggatcacctcgtccgtctccaagagagtatgaagagagt

SEQ ID NO: 487144 - DNA, 75 bp, Homo sapiens
gcggggcccgagggcaaggagcaggaggcaagatccaaactgagatggagactgttccagaagcaggaacacatg

SEQ ID NO: 487145 - DNA, 95 bp, Homo sapiens
gacagagccaaaatcagagctggaacctgaggagagaggtgaaagaacttgtcctggacaacagtcggtcgaatgaaggcaaactcgaaggcctc

SEQ ID NO: 487146 - DNA, 100 bp, Homo sapiens
tcagactggattcaatagtcattcaacaagtgcaactgcagatagaagacctgactcgtaaactgcgcacaggagacctgggcatcccccctaaccctga

SEQ ID NO: 487147 - DNA, 89 bp, Homo sapiens
actctccagctagaacaagaagtgagaaaccaagatagattcatctcgacactgaaattacagatcttcaaagctgctgcgggcattct

SEQ ID NO: 487148 - DNA, 88 bp, Homo sapiens
ggccgcggccttcgggctgacgctgctgctcgccgcgctgcgcccttcggccgcctacttcgggtcagccatgtcatctgagcctccc

SEQ ID NO: 487149 - DNA, 100 bp, Homo sapiens
ggaggagctgtgggtccaggctcagtacatcacagacgcagaagaccatcatggagcagttcaaccctagcctccggaacttcatcgccatggggaagaa

SEQ ID NO: 487150 - DNA, 83 bp, Homo sapiens
ccgcatctggctggagccctgcattcgcggcgtgtgcaggttgacatcatggacatatgtgagtccatcctggagaggaagcg

SEQ ID NO: 487151 - DNA, 90 bp, Homo sapiens
gcgggactgtgatggccagagagatgacgatcttaggccacggacacagtcattccctctttaatggtgctctagatcaggcacatggcc

SEQ ID NO: 487152 - DNA, 75 bp, Homo sapiens
caaccatgagaatgtgtctcttgccaaagcgaaggatcatctcaaaaatggctacagaagaagattttgtcgacc

SEQ ID NO: 487153 - DNA, 74 bp, Homo sapiens
cgaacaggcgcttgccctctcttttatgaatgtgacagtgatgataacatgggtgccaaaaatacttcaatagg

SEQ ID NO: 487154 - DNA, 88 bp, Homo sapiens
gaaaagttgcaaagtaaatgagagactagaatgctcaaaggccttcagtggtggctattatagaggtgggtttgaacccaaaatgaca

SEQ ID NO: 487155 - DNA, 75 bp, Homo sapiens
gtcacaccgccctctgcagaggcccactgggctgtgaggggcggcaaggagtacctgatgcgggcccacttcggc

SEQ ID NO: 487156 - DNA, 99 bp, Homo sapiens
ttgtctccttgcccgccaaagttctgcccagtccaacgactccacgcagctcgcccttggttttgaacgaagaatgtgatcagaactggtacaaggcag

SEQ ID NO: 487157 - DNA, 100 bp, Homo sapiens
cctttcggggacattggacactactctaggaccggaataagaccacagcttgccaaagagaagattgaaggatgccatatttgtacatctgtcacaccag

SEQ ID NO: 487158 - DNA, 101 bp, Homo sapiens
agtttcaccctctggagtggttggcaagggaagcctgcaaccaggacgctctccaggaggcgggcacattcaggttaaaacgtttggacctctggccgcag

SEQ ID NO: 487159 - DNA, 82 bp, Homo sapiens
gattgaggacgttcccttcacggagaaagattttgattctaggcacgggcgcggaggtggattacctggagcagtttggaac

SEQ ID NO: 487160 - DNA, 74 bp, Homo sapiens
ggagggaaagtagccaccagtccaactcgggtcgcccccaccattatttcgactagacgcttgaagcaaagctg

SEQ ID NO: 487161 - DNA, 50 bp, Homo sapiens
tttctggacacagaagtatttgtgacagatgtgtatatctcatgattgat

SEQ ID NO: 487162 - DNA, 82 bp, Homo sapiens
cagccgctcgcccctcttttccatgtatccgtccaggcattacgagattggacgaccaaatatttctgaacaggaaccccgg

SEQ ID NO: 487163 - DNA, 74 bp, Homo sapiens
caccaggcccggctgctggccctcctggtcatcccgcctgccatcacccccggctctcgtggcattatccttca

SEQ ID NO: 487164 - DNA, 50 bp, Homo sapiens
tgaagagggaagacacgcggaaacagtttttcagaagaagtgaagtcaag

SEQ ID NO: 487165 - DNA, 100 bp, Homo sapiens
gaaaaactgattgactgggctggcgttaactgtgcggaggcagccttgtgcaaaggaccttctcaccacagatcagccagaccatcttcctccttccaag

SEQ ID NO: 487166 - DNA, 74 bp, Homo sapiens
attggctgttttcctcacattcctcaagcagggtggttctcttcccaaagtggaagccaaattcatcaattatg

SEQ ID NO: 487167 - DNA, 98 bp, Homo sapiens
tggtgtttggaattagcaagaaatcctttggacccaagactgctgacttcagcctgggttactaggtgtctttcagaagctgattgcatccaaagcaa

SEQ ID NO: 487168 - DNA, 82 bp, Homo sapiens
tggaagcgctttgatttacagcagctgcagttactccacaggatccgctgaacataggatgttgccacaaaatctacctcgt

SEQ ID NO: 487169 - DNA, 100 bp, Homo sapiens
cgaagaatgaaaccggcttgttgtcttcaattaaaaaatttattaaaggaagcacacctaagaacattaaccaggtggtatttgttggaaatttcttgag

SEQ ID NO: 487170 - DNA, 99 bp, Homo sapiens
ctcagtatgacaaggaagtcggacagtggaacaaattccgagacttcatagccctgatgaagcaagttactctgctctcctaataaatgcaagaaaatg

SEQ ID NO: 487171 - DNA, 82 bp, Homo sapiens
cttcgacattgccgtcgacggcgagcccttgggccgcgtctcctttgagggaagaggaagaacgtctgagaaataaaattcg

SEQ ID NO: 487172 - DNA, 75 bp, Homo sapiens
aagaggcaaaggggaggttacgcagcaaaccatccagaagcgctgtgcttcgccgtgagccgctcgctgctgctg

SEQ ID NO: 487173 - DNA, 101 bp, Homo sapiens
gccagccttcgtccccgcagaggaccccccgacaccagcatggactgctgcacccatccccagtgcctgacctatagtaggtgctacgtatctgcttttgg

SEQ ID NO: 487174 - DNA, 100 bp, Homo sapiens
gttgctgttgcctcagagagtagcatcatcttgtggagtgttcaggatgggggaagtggaagtgaaattgaatggagaagctgatgccatgagcttggat

SEQ ID NO: 487175 - DNA, 75 bp, Homo sapiens
gcggaggtcgataagctggaactgatgaacttcagcgagagggaagcatcgagactctgagtaacagctcaggct

SEQ ID NO: 487176 - DNA, 82 bp, Homo sapiens
tacctaaaccagtcatatggcatggacaatcacagtggtggtggtgggggtagcagaagtgatggtgaaagttcatgttgtt

SEQ ID NO: 487177 - DNA, 83 bp, Homo sapiens
ataacaagcagcagtgaggacaccaaagtatggtttgaagtggtgaacatggatttttctcggcttcacatgtacagtcctcc

SEQ ID NO: 487178 - DNA, 100 bp, Homo sapiens
ctggcgctacccggacatctctcagggtgccggcaccatgaagatctggacttcggagcacgtctttgaggtttggaaatcccttgtctccaggttgctg

SEQ ID NO: 487179 - DNA, 50 bp, Homo sapiens
gtactggagagaaatcctacaagtgtgagtgcatcggatggcttctggaa

SEQ ID NO: 487180 - DNA, 80 bp, Homo sapiens
acttggactgagtcctgcaggacacagaatacagatatggtccagaaatcagtcagcaaaaccttgccctctacttggtc

SEQ ID NO: 487181 - DNA, 96 bp, Homo sapiens
ggccgcgccgctgctggtggcggtggccgcgctgctactgggcgccgcgggccacctgtaccccggagagggagctatgaagacatgattggtgag

SEQ ID NO: 487182 - DNA, 90 bp, Homo sapiens
gtgtcatcaaggatttcatgattcaaggaggtgacatcaccactggagatggcactgggggtaccccaatctgaagtcagtaaatgaact

SEQ ID NO: 487183 - DNA, 82 bp, Homo sapiens
actatcggggccgcactgtggtattcgccggcacgcgaagtggccgcatccgcaaggtgagaagccctaccactgcaactgg

SEQ ID NO: 487184 - DNA, 75 bp, Homo sapiens
tccatgtacagccgctccatccagggccaccatgtctgcctcctggtgaaaaagatgtggcaaaatctggcaaag

SEQ ID NO: 487185 - DNA, 85 bp, Homo sapiens
tagcgctcgtctggcggagctggtcaagtccatcatctccagaaccagctagtcttcctgcagaagatattagtgcaaactccaa

SEQ ID NO: 487186 - DNA, 100 bp, Homo sapiens
aacaagcacattaacatcagcttccacagccttgttatcagctacagctctgaattatctgctgtctttagttgctatcgtcctgttctttgtctactac

SEQ ID NO: 487187 - DNA, 74 bp, Homo sapiens
caggacgaaggccctactgggcaaggcaaatgtttgcagactacggctgaccgtacctcctgagagtccagttc

SEQ ID NO: 487188 - DNA, 90 bp, Homo sapiens
ttttgcttcaccgacatagtcattatgccgaagagaaagggtgagcctggtctgcctggatacccagggaaccctggtatcaaaggttct

SEQ ID NO: 487189 - DNA, 75 bp, Homo sapiens
gctgaggcttggcatgacaaatccgccctatattttagagcatctggaggctgcgtcatcaccatctcgggacgc

SEQ ID NO: 487190 - DNA, 98 bp, Homo sapiens
cacagaggaaggagactgtgaaagtgacttgctggaggctcagcctctgaggaaagaacctgaaataatcactgtgaccctaaaaaagcagaatggaa

SEQ ID NO: 487191 - DNA, 75 bp, Homo sapiens
gtgaagtttgcattttcctgatgaaaatgttggaagaggaagaaatgttggctatttggcgatgagaggtggtga

SEQ ID NO: 487192 - DNA, 100 bp, Homo sapiens
attggattcagtcacaacagatgaagacagcaccaggttccaaatcatcaatgaagcaagtaagtgctgtgctgtggctttcattgagaagctagacgcc

SEQ ID NO: 487193 - DNA, 100 bp, Homo sapiens
tgcttctgtagaccagctccaacaggattccatggtagctgggatgttagggctcagaaaaggcgacggcggattgacagaagtatgattggagagccca

SEQ ID NO: 487194 - DNA, 100 bp, Homo sapiens
tgaatcttggttgtaaacttgacctaaagaccattgcacttcgtgcccgaaacgccgaatataatcccaagggaggtggggaagacagggctccagctac

SEQ ID NO: 487195 - DNA, 90 bp, Homo sapiens
gaccttggacttctcagcctccagaatggactgggccggggtctgcagggctcagctgagcccatgagctcccagagctaacccctgaac

SEQ ID NO: 487196 - DNA, 90 bp, Homo sapiens
agacgctactggaggcggcccgcttcctggaatggcaagcgcagcaacaacagagagcacgtggctggagtgcagtggcgagatctcgac

SEQ ID NO: 487197 - DNA, 87 bp, Homo sapiens
tgagtgcacctgtcaagtcgggtttacaggatttggtgctatggagaaatttttggtagaatataagagtgcagtggagaagaaact

SEQ ID NO: 487198 - DNA, 50 bp, Homo sapiens
gcacctggccccgctacagcaaaccagctgtttgcagacaaggtcccaaa

SEQ ID NO: 487199 - DNA, 100 bp, Homo sapiens
gctccctcgggcacctccggtaccgctgcagccaccgcggcccccgcggatggaggagatgtataagaaagctcatgctgctatacgagagaatccagtc

SEQ ID NO: 487200 - DNA, 98 bp, Homo sapiens
tccctggaaaacttcccttccctttcggtgaagcggtgagtgctggagatgcattatgtgaaattgagactgacaaagctgtggttaccttagatgca

SEQ ID NO: 487201 - DNA, 75 bp, Homo sapiens
ctgttgccaagtttgatttcactgcttcaggtgacagccctcactggctgatgaatggtgagcttctctgaagcc

SEQ ID NO: 487202 - DNA, 133 bp, Homo sapiens
ccggctaaggtttgcgctgccatccgcaaaggctttctcgcttgtcaccttgccatgtggaagaaactggcccttctataaagaggactcttgagctggcagcagagcccatccaggcagcacggctggctga

SEQ ID NO: 487203 - DNA, 100 bp, Homo sapiens
taagcatgaaaatattgttgccctggaagacatttatgaaagcccaaatcacctgtacttggtcatgcagctggtgaaaatcctatttataagagtgccg

SEQ ID NO: 487204 - DNA, 75 bp, Homo sapiens
ctctatcaaggggctggtgtactccagcaacttccaggcaactcgagatgtggtgctgagccgggtgccggagca

SEQ ID NO: 487205 - DNA, 98 bp, Homo sapiens
aggctgaccagcaccagccctgatccaggtggttatcactaggctaaaactggacaaagaccgcaaaaagatcctcgaacggaaagccaaatctcgcc

SEQ ID NO: 487206 - DNA, 90 bp, Homo sapiens
ctcggcgtgagcgacagcggcaaagattacggggcgctgaaagacatcgtgatcaacgcaaacccggcctcccctcccctctccctgctt

SEQ ID NO: 487207 - DNA, 83 bp, Homo sapiens
gggcgacctgggcaccagcaggacccgaggccaggagccaggggcccagaagcttcggaaccaaaaagaagcttcccagagcc

SEQ ID NO: 487208 - DNA, 98 bp, Homo sapiens
gccggtcttggggggatggttccatcatggcgtcaatgcagggaatgaaagctactggttgattttaaagtgcctgggcctcacaggtttggagatgt

SEQ ID NO: 487209 - DNA, 75 bp, Homo sapiens
agcgcttctcgggcaccgtcagatgtggacgagtgctcactagcagaaaaaacctgtgtgaggaaaaacgaaaac

SEQ ID NO: 487210 - DNA, 82 bp, Homo sapiens
ctgcacggcccactccgacgtgtgctccgcccagggggtgcgaggataccccacatatggctcgtggacagcagaaaattca

SEQ ID NO: 487211 - DNA, 101 bp, Homo sapiens
ggaagaagaagaaacgggccgcgaaccgcagtatcatgctggccaagaagatcatcattaaggacggaggcacggaggccccgtgtgggccgcggcccggc

SEQ ID NO: 487212 - DNA, 85 bp, Homo sapiens
gaatgccctgtgcagaagactatataccttacttgtaaaagctcttttgctctatgacctggctcaaacttaaacttggatttga

SEQ ID NO: 487213 - DNA, 76 bp, Homo sapiens
ccatccccagaagatcctggtcccctgctttaaccatcgaaaatgaggatgtggagctggccgagcacctcaacgc

SEQ ID NO: 487214 - DNA, 102 bp, Homo sapiens
aaggatcatgtctgcgagccaggattcccggtgctggagaatctggtaaaagcaccattgtgaagcagatgaggatcctgcatgttaatgggtttaatggag

SEQ ID NO: 487215 - DNA, 90 bp, Homo sapiens
ggaagacaccctgttctcggaacccaagtttgcacagatgccggtggccgtgggtccctacggacagtcccagccaagctgcttcgaccg

SEQ ID NO: 487216 - DNA, 75 bp, Homo sapiens
gcctgttctgcaagcagttgtcaacagtattaagcatagagctgaacaggagaaaatccttgtaagtgggagaga

SEQ ID NO: 487217 - DNA, 80 bp, Homo sapiens
cggatcgaccggagcagagagctggcgagcaaggtaagtaaggaggtctctgtaccatggctcgtacaaagcagactgcc

SEQ ID NO: 487218 - DNA, 82 bp, Homo sapiens
tttgccgtacccaccggagcctggcgcagcctccctctattaccagttggatgaaaaatctgacaaacagtatgctgaaaat

SEQ ID NO: 487219 - DNA, 99 bp, Homo sapiens
cgaggagagccggagtcggggacccaggagtttcctgtgtccagcgctgccggagccgcctgaggtgctggagaatctggtaaaagcaccattgtgaag

SEQ ID NO: 487220 - DNA, 75 bp, Homo sapiens
ccgctatcgaaaatgtcttcaggctggaatgaacctggaagaagaagaagatggagtgtgggagaatggactttc

SEQ ID NO: 487221 - DNA, 82 bp, Homo sapiens
ctggagcaggccggctgccaccttctgggctcctggggccctgcccaccacaaccaggcgggcaccacggcaggggctgagc

SEQ ID NO: 487222 - DNA, 115 bp, Homo sapiens
atggccgacttcgatgatcgtgtgtcggatgaggagaagattaaaggcctacctgaaggtttcgctcatcccaaaatagggtcgaattattcagttaagactgtagagaagacat

SEQ ID NO: 487223 - DNA, 99 bp, Homo sapiens
cacgtgcgtccttgacaaggctggatcttacaagtgtgcctgcttggcaggctatactgggcagcgctgtgaaaatcattgtaaaccatggctgtgtgg

SEQ ID NO: 487224 - DNA, 87 bp, Homo sapiens
tctcgtagtcctgggagcacagcagaagtgttggtgttcgaggaagagacattgttgttcttggtgtggagaagaagtcagtggcca

SEQ ID NO: 487225 - DNA, 82 bp, Homo sapiens
aggattcactgcacatcgaattaagagagcagaaggatgggaggaaggtcctcctacagaaaggcctaaagaatgtatttga

SEQ ID NO: 487226 - DNA, 100 bp, Homo sapiens
gaactgggaagtgttaactgcagttgagcgcagcgtcggcccaaacttcagcagaccagagaccatggcgagcccagggaaagacaattatcgaatgaag

SEQ ID NO: 487227 - DNA, 84 bp, Homo sapiens
gaaagcaacgttttgagccacaactgtcacaactccagttgtcgagatgtccacagaaggaggatttggtggtactagcagcag

SEQ ID NO: 487228 - DNA, 83 bp, Homo sapiens
cgagagcagcatccaaccaaaatcccggagtctgcactatggaaacaacctgtcaatccagctcaaggcacacatagcccaga

SEQ ID NO: 487229 - DNA, 103 bp, Homo sapiens
gggagctcaaagtgtgccttctcgggaattaaacaaccaccatgtcgagcaaaaaggcaaagaccaagaccaccaagaagcgccctcagcgtgcaacatccaa

SEQ ID NO: 487230 - DNA, 100 bp, Homo sapiens
cataggcttatgtcttgctgcagctcagcaaaacccagcagctcagattcctgccaggcagcgggagattgaaatgaaccgacagcaacgcttcttccgc

SEQ ID NO: 487231 - DNA, 50 bp, Homo sapiens
gttgaagattgtgaagcaatagcctaagggcctattccactagaagcaag

SEQ ID NO: 487232 - DNA, 90 bp, Homo sapiens
ctggtatcacagtgcttctgttcagtgtgaagcctcagtttaggtcatctggtggttcagaacactcaacagagggctctgtatccttgg

SEQ ID NO: 487233 - DNA, 100 bp, Homo sapiens
caaaaggaaaagtaaataaagaagaagctcctcatgattgtgctgctagagaggaagaggctctgcgtcgccagcgggagcaagaaattgcattaaggcg

SEQ ID NO: 487234 - DNA, 98 bp, Homo sapiens
tagcagcagcgggagccaggactaaggacaagcaggagctgggagccccaggtgaatgaaaactttgccattgatttgatagcagagcagcccgtgag

SEQ ID NO: 487235 - DNA, 51 bp, Homo sapiens
tgatgacatcgacatgttgaaaggttcttcagacccagaagaagaaagtgt

SEQ ID NO: 487236 - DNA, 85 bp, Homo sapiens
ggccgcgagaagcagcgggggggcaggcgatcgaagatgttcctcctgctgatcaagagaagctttttatccagaagttacgtca

SEQ ID NO: 487237 - DNA, 75 bp, Homo sapiens
gaattttgccgatttcatgactaaccagtggtggttctcttcccaaagtggaagccaaattcatcaattatgtga

SEQ ID NO: 487238 - DNA, 75 bp, Homo sapiens
ttccttctgtcacatcacacccaatggagaagataagcgaggacctcagggccacactgaacgccttcctgtacc

SEQ ID NO: 487239 - DNA, 100 bp, Homo sapiens
tcttcttcaacatgctcttcgtatctccatccagttcctggtgtacaggcgcagcaccgccgcctcggagcttgagcccctcctccccagctgaccagaa

SEQ ID NO: 487240 - DNA, 97 bp, Homo sapiens
aaaaagatgctgtaaatgatgatgattttgagccatacttaagtagccagacaaatcaggtcctcgatgggcttcctggaatattggtgtgtttatt

SEQ ID NO: 487241 - DNA, 86 bp, Homo sapiens
tcagctttgaagtgggagcccagttggaagcccgggaccgtttaaaaaactgggttctgagcaaggttcaaccagtcaagaacagg

SEQ ID NO: 487242 - DNA, 50 bp, Homo sapiens
gggagaggcgccggggccgcacaggatcgaagtagaatgtatgacagttt

SEQ ID NO: 487243 - DNA, 83 bp, Homo sapiens
ggaccaccaaacagaactttctaatttagccaaggaaggaggagaaagtgcaggccatgccacttcctctcaggagcctagtg

SEQ ID NO: 487244 - DNA, 101 bp, Homo sapiens
agcttggccaagcagagctgggggggcggtggccggcaccgcaggaactgggaacagccaggtgccccaaagcaaatacgcggagctgctggccatcattg

SEQ ID NO: 487245 - DNA, 100 bp, Homo sapiens
tgctgggggagatggaggcgaagacaagagagctcattggccactgcagaacaaattagacttgcacagatgatttcggaccataatgatgctgactttg

SEQ ID NO: 487246 - DNA, 74 bp, Homo sapiens
gaggagaagatggaactgcaggagatgcagctgaaggaggccaagtataaggagcgagggacggtcttggctga

SEQ ID NO: 487247 - DNA, 76 bp, Homo sapiens
tgtggttggctatggtgatcttaatgggaaagaatactggcttgtgaaaaacagatggagtctcgctctgtcaccc

SEQ ID NO: 487248 - DNA, 101 bp, Homo sapiens
ggcttccgcctgaactgcttctttcctgcctcaaaggtgcttgaagtttctgggaagtcggcatccaaccctggtgcttcccttggtgccagagcttctga

SEQ ID NO: 487249 - DNA, 97 bp, Homo sapiens
caggaccgtggccgaccggcagctgatccggaagaccacggccagccaggtgtacgagacattgctcacctacagtgacgtcgtgggcgcggatgtg

SEQ ID NO: 487250 - DNA, 98 bp, Homo sapiens
gcacgcggttcctttttgcgagctttccgagtgccaggcgccggccggctgcgaagacgcggtgggccgcccctccgcccttcagagacttgaagaca

SEQ ID NO: 487251 - DNA, 50 bp, Homo sapiens
gtaacaatctgttgccatttcaggtgaagtggatcctaaagagaggatag

SEQ ID NO: 487252 - DNA, 100 bp, Homo sapiens
gcttcatgatcgagtgtgacatgtgccaggactggtttcatggcagggctgcaccagggaaaccggatcctggttaaaagtttgtcccttgaccctggcc

SEQ ID NO: 487253 - DNA, 100 bp, Homo sapiens
tgaaagcagagttcagagtctttcgtttgcagaacccaaaagccagagtgcctgaacaacggattgagctatatcagcttgataactatggacagcaaga

SEQ ID NO: 487254 - DNA, 80 bp, Homo sapiens
ctccgccgcgctgcgcacgcccaggtcaaaatgcagatcttcgtgaaaacccttaccggcaagaccatcacccttgaggt

SEQ ID NO: 487255 - DNA, 88 bp, Homo sapiens
aagccaggtcactatgactgtccaagtgtcagatctctctcagccttgtctgcttatcacactggcttgatcgcgcccatgaagatcc

SEQ ID NO: 487256 - DNA, 100 bp, Homo sapiens
gtccgagttaccaccatggatgcagagctggagtttgcaatccagccaaatacaactggaaaacagctttttgatcagggttttggccaaattgggcgag

SEQ ID NO: 487257 - DNA, 90 bp, Homo sapiens
gtagcgggcgggaggagcttgagagggtcaggctctggagcaggccatcatcagtcagaagcctcagctggagaagctgatcgctaccac

SEQ ID NO: 487258 - DNA, 98 bp, Homo sapiens
ccgaggcgttcggtcctgctgttgcggccgctgccccagggctgcggggacgtttctaagctgactaaacaactaatgctcctggaggcaaaaaccca

SEQ ID NO: 487259 - DNA, 100 bp, Homo sapiens
atagcgttgcaaatccttaaaagagtcttaacgattctttcttgtggagaagttattcatgtgaagatccttggaattttggctcttattgatgaaggtg

SEQ ID NO: 487260 - DNA, 100 bp, Homo sapiens
caggctaactgcctcctctggtatatggacaacccccaggttgaaatcacaaagattagacacctttttagataggtgttcttcagcaccactgacaaca

SEQ ID NO: 487261 - DNA, 95 bp, Homo sapiens
aagaaaaagacaaatacaagtgaaaaaaatagactaatggattaacgtccctgtcgtgtgacattttctggttgaaatcacaaagattagacacc

SEQ ID NO: 487262 - DNA, 75 bp, Homo sapiens
tggggagaagcagaggatcagccggggtgctggagaatctggtaaaagcaccattgtgaagcagatgaggatcct

SEQ ID NO: 487263 - DNA, 100 bp, Homo sapiens
aacaaagaacagttgattcagcggttgcgaagaatggaacgaagcttaagtagctacaggggaaaatattctgaggtgactctgacatcattagaagcat

SEQ ID NO: 487264 - DNA, 98 bp, Homo sapiens
aacccccggccgtcccacgagctcacagagctatgaacagaatatcaaacagattggcacctttgcctctagatggaaaataatgtcctgcaagatga

SEQ ID NO: 487265 - DNA, 75 bp, Homo sapiens
aatcagcagcatggagggagaggcttgtggtcgcttcataaacaacaacgcggttaccaagatggcccaatcatc

SEQ ID NO: 487266 - DNA, 74 bp, Homo sapiens
ggcctgcgggcgatcgggccgagtcttagagtttgaaagagtctatcttgataatctccccagtgcatccatgt

SEQ ID NO: 487267 - DNA, 80 bp, Homo sapiens
gctgcgctcgcgcccggatccctcagcttcatggcggctgaagagatgcattggcctgtccctatgaaggccattggtgc

SEQ ID NO: 487268 - DNA, 100 bp, Homo sapiens
cgagtgtgcgcacctgtcggagacccgccagtccgccggccgcggtctcagtcagtctctccacctccagttctctccccaccaaggagtcccatctacc

SEQ ID NO: 487269 - DNA, 75 bp, Homo sapiens
cagataccatctcaaagggtaatcttccaggcatcttgacagcagtagcaatgagcgtccagacatcagttccat

SEQ ID NO: 487270 - DNA, 75 bp, Homo sapiens
gtgtaccctggtggacgtgcacccagaggaccaggcggcggcatgttacatggaattggaaaatttatagttgaa

SEQ ID NO: 487271 - DNA, 89 bp, Homo sapiens
gagaatcattctacacatggctagaagggttattttggagctgttggagcactccttgagctgttgaagatcccgtgatcattacctgg

SEQ ID NO: 487272 - DNA, 75 bp, Homo sapiens
attgggacatccctagctgacgccaggacacccgggaagccgaggaatgcttctcggacaaactatttagtggaa

SEQ ID NO: 487273 - DNA, 100 bp, Homo sapiens
aattggtacagaagtccacttcagaaggtctgcttggtgacttggatacagaaatttcctgggctaaaggtgatttggttacctgtggaattttatctgg

SEQ ID NO: 487274 - DNA, 101 bp, Homo sapiens
aataacctccagtatgttgccatctctaacctaccagctgccactttccagggccttgggaactccaagacagaatggcccgaggcctggacactctctga

SEQ ID NO: 487275 - DNA, 100 bp, Homo sapiens
cggcggcggcggcggcggcgcgcgggggcgacgcgcgggaacaacgcgagtcggcgcgcgggacgaagcctcttagcaaatatccggctgtgatcaatga

SEQ ID NO: 487276 - DNA, 82 bp, Homo sapiens
tggagtgttggctgcatatttgcagaaatgtttcgtagaaagattttttatcaagcagaaatgcatcgaacaacgagaatca

SEQ ID NO: 487277 - DNA, 51 bp, Homo sapiens
agttaatggtctaatttatgataggaggttcatcaagaacgaattgcattg

SEQ ID NO: 487278 - DNA, 75 bp, Homo sapiens
ccaggccctggagtgcatgcgcagatgatggtggtgctaccccagtacaggatgaacgggattcagggtcagacg

SEQ ID NO: 487279 - DNA, 83 bp, Homo sapiens
caagaggctgaatgctatctgtgcacaagtcattcctttcctgtcccaagaggctactgcagcactggggtgtcagttgttgg

SEQ ID NO: 487280 - DNA, 75 bp, Homo sapiens
cgtagggagccgtgggcgctcggtgcccgggccgggcaggtcttcatcctccaggtccacctttagcaagaccta

SEQ ID NO: 487281 - DNA, 75 bp, Homo sapiens
gtctcggagcagatttgagaggcccctgaatcgtcccgggaattttcttcgtgagatggaagattttcgaggtat

SEQ ID NO: 487282 - DNA, 82 bp, Homo sapiens
tcattggtcccaaacccacttctcagaatcaattcagtgaacatgacaaaactctgtacagaatttgaaagacatattggct

SEQ ID NO: 487283 - DNA, 100 bp, Homo sapiens
cagagatctatgttgaccaaaacatccatgagcaactggtagatttgatgttagaagccatccagggagcccggactgctgagatgtcctctattcttga

SEQ ID NO: 487284 - DNA, 100 bp, Homo sapiens
gtttgagcggtacatggtcaacctgcaagtgaaaggcaaacctgtgcacctccacatctgggacacagcagggtcctaaaaaggtggggacgctgtggcg

SEQ ID NO: 487285 - DNA, 100 bp, Homo sapiens
ccgtggccttagctgtgctcgcgctactctctctttctggcctggaggctatccagcgtggacggcctgttcatcatcgggtggatgtacctgcctcccc

SEQ ID NO: 487286 - DNA, 75 bp, Homo sapiens
gaaactgcgaggcgaaggtgaccggggaccgagaacctccaataccatgtggaatagaagtgatgggaagatagc

SEQ ID NO: 487287 - DNA, 96 bp, Homo sapiens
gcgaggagaagcgcagcgacggcgtcgggagagcgcgcctagccggctcgcgacctcacgattttgatgaatgtcgatttgatattagtgtaaatg

SEQ ID NO: 487288 - DNA, 96 bp, Homo sapiens
gggaggtggagcgggcggagctgcaggtttttgtcatccattggagggacactgtatgaggttggaaagcctgaaatgcaacaaaaaataaattca

SEQ ID NO: 487289 - DNA, 132 bp, Homo sapiens
ggcagcgaactgggtggcgaacggggcgagcctggaggattgtcactccaacctcttttcgctgttgtggaatacagactcacgttcaaaggtggctgattgcagaggacatttaagttgggttcatggtgt

SEQ ID NO: 487290 - DNA, 98 bp, Homo sapiens
agagggaaaaaggagaaagttaactgaattggtgacacttcgggtctctcacagaggaagtggccccagatgagccagtcccgagcatgtggtggatc

SEQ ID NO: 487291 - DNA, 46 bp, Homo sapiens
cgacattatgttcatcttgagagactacacttgctgctttgaagga

SEQ ID NO: 487292 - DNA, 75 bp, Homo sapiens
tcaagggtctctccagaaaatcttgtggacaaatccaggggaagtgagaaagatcagtctaaagaaaaggagaag

SEQ ID NO: 487293 - DNA, 90 bp, Homo sapiens
gggaggatgtcgggacaccccggaagctgggaaatggtggagccgccaccaaaatgcagattttcgtgaaaacccttacggggaagacca

SEQ ID NO: 487294 - DNA, 85 bp, Homo sapiens
gccactgacgccgggaccgggaccgccgccgccgccgccaccatgcttcgcctcaacagcatcaagaagctgtccaccatcgcct

SEQ ID NO: 487295 - DNA, 50 bp, Homo sapiens
ggatggtcagcgacagctactgcaggatttggggtggaaggcaggcatgg

SEQ ID NO: 487296 - DNA, 73 bp, Homo sapiens
attttcgtgtggtccatgcagacaggcaggctccttgatatgcagaacccagagtcactctccatccttacca

SEQ ID NO: 487297 - DNA, 75 bp, Homo sapiens
ctgccaccctcgttcccccgattggggccgcagattgagcttctagagcctcagagatggaattcgccgttttgc

SEQ ID NO: 487298 - DNA, 90 bp, Homo sapiens
ccgagccagtgggcagattcgggtttagatgtagattctctggtcattgagcatatccaagtgaacaaagcacctaagatgcgccgccgg

SEQ ID NO: 487299 - DNA, 100 bp, Homo sapiens
agaaaagactgcgaggtggccgcagctgtggccggagagtgtgttttatggaccatgtgctgctatgtatgcctgaagaagtacttgaaatgcaaatttg

SEQ ID NO: 487300 - DNA, 90 bp, Homo sapiens
agggcgactacgaccagtgaggcggccgccgcagcccaggcgcgggggcgacgacagcccaggatggcggcccaggtgactctggaggac

SEQ ID NO: 487301 - DNA, 90 bp, Homo sapiens
gtgcagggagttcccgttacaatcactagtgttgcagtttctctacccacatattgaaagtcatcctcttccagagaaccatctgttact

SEQ ID NO: 487302 - DNA, 82 bp, Homo sapiens
tttcgccagcccgtgccgcgagcgcggcctgcaggagaaaggacccaggagcgataacagtaaatcaaataagatatttgtc

SEQ ID NO: 487303 - DNA, 95 bp, Homo sapiens
gtcctgtgccattaaaaacaacaaggaagctttcagtgtcgagtctatgctgtcttgtcaaagagagaaggtcgggtacttcaagaagaaatgaa

SEQ ID NO: 487304 - DNA, 100 bp, Homo sapiens
tggatctctggtgagacatttttcttccttctgtcacatcacacccaatgttaacttaccaagactggttacacctggagctggaaattcaacctgaagc

SEQ ID NO: 487305 - DNA, 100 bp, Homo sapiens
cggccttcatcgacatcagtgaagaagatcagaatctaccgttgaagaagatcccatgcaaaaccagtgcaccctcgggctccttttttgccagagacaa

SEQ ID NO: 487306 - DNA, 73 bp, Homo sapiens
cggatttctatgtgcagatgaaatgggaattcaccagctggggttttggcttggtttgaagaaggtgaagaaa

SEQ ID NO: 487307 - DNA, 97 bp, Homo sapiens
tcctccttccaggaatcattgagattcagtctttacagaagctgacgagagatttccttgtattttatggtggtatgattggccttagagcacttca

SEQ ID NO: 487308 - DNA, 100 bp, Homo sapiens
atttgccccccggaggaaagaactggaaccagaatgattacggacctgaagccaaagaacaagatgcgctagtggacagattgctgaccaggggcttgag

SEQ ID NO: 487309 - DNA, 75 bp, Homo sapiens
aacatcacttcttctgtttgcagtggtgccagctattcaacagaaaagaacggtggcttttctaaaccaatttgt

SEQ ID NO: 487310 - DNA, 83 bp, Homo sapiens
gaggattgtaaatgcaccaatcagcatgctgtgtctagctcaaggctggactctgtgaagctgagcaggagcagatgcggaag

SEQ ID NO: 487311 - DNA, 96 bp, Homo sapiens
ggcaacccgccgcccgtcatcgcctggaccaagggagatgcggaaaacgccatgcggtacataaatgggacgcgtctggatgaccgaatcattcgc

SEQ ID NO: 487312 - DNA, 75 bp, Homo sapiens
tcaagtcgacaggggatgggaccctaggcaaccggtgaccaaaaacactttcaggcagtatcgagtgctaggaaa

SEQ ID NO: 487313 - DNA, 83 bp, Homo sapiens
gtgcccctgcgttgtaccatccgcctgtgggacacctaccagctgctggccaacgcagtcatcttcctgtgtgggaacctgac

SEQ ID NO: 487314 - DNA, 101 bp, Homo sapiens
cgacaaggcaccaagtccacctggcctcagaagaggactctttttgtcctcaatgtgcccccatactgcacagagagacgagttgtactgctgtcacagga

SEQ ID NO: 487315 - DNA, 88 bp, Homo sapiens
ccaagatggcgacgagtcagtatttcgacttcgcgcagggcggcggcccgcagtacagcaaacatgtcttgacggaagacatagtaca

SEQ ID NO: 487316 - DNA, 83 bp, Homo sapiens
ttccgagccccgacccctgcagctgtgagaaaaggtggacaagtcctattttcaagagaagatgacttttaacagttttgaag

SEQ ID NO: 487317 - DNA, 75 bp, Homo sapiens
ggaggtagccgcagcgccagcaccagtatttcagacaacttttaagaggtgcagaatcaccaacacgcaattcaa

SEQ ID NO: 487318 - DNA, 100 bp, Homo sapiens
tggaggtgggatccacacagctcagaacagctggatcttgctcacactctttcaagagaagcttccttggaagtccaacccagagatccaggactttatg

SEQ ID NO: 487319 - DNA, 80 bp, Homo sapiens
ctgcgcccggggcgcgcccaccgcgccgcatccatgttcgaaggagaaggcagagcccccccaggctatgaatgccctga

SEQ ID NO: 487320 - DNA, 75 bp, Homo sapiens
tgcaccgcaccgagggcgagctccaggatatcaatgcttacaattgtgaagagcccacagaaaagttaccttttc

SEQ ID NO: 487321 - DNA, 83 bp, Homo sapiens
tttcagagcgcagccatcggtgcgctgcaggaattacatgaatgacagtcttcgaaccaatgtgtttgttcgatttcaaccag

SEQ ID NO: 487322 - DNA, 90 bp, Homo sapiens
tgtttgaagacatggacctcaacaaggatggcgaggtccctccggaggaggacctgggccttgagaggaccctccttcctgatatcctct

SEQ ID NO: 487323 - DNA, 90 bp, Homo sapiens
caaaattatccgaaaccgcctcactggaatacttcagagagtcagagttgtgccagaagtctcttaatggcagatagaatgcaaatagtt

SEQ ID NO: 487324 - DNA, 100 bp, Homo sapiens
cacgggagtcggggtggtggcttctcggaaccgagccccgacaggctatgacgtagtatccaattggtttggcaacaaacgaatcaggtacaagaagaac

SEQ ID NO: 487325 - DNA, 98 bp, Homo sapiens
ctcaaaagatctgcagagctcccagggcggacagcagcctcgggtgcaatcctggagccccccagtgagggtccagcaagactatgaatctctgttcc

SEQ ID NO: 487326 - DNA, 100 bp, Homo sapiens
aagaagaggacctgtgcagggcagagcaggaggccccccgagtgaccaaacagatccctttaaccgtagtcccctcaccatggaccagatccggccaaac

SEQ ID NO: 487327 - DNA, 88 bp, Homo sapiens
agccgcggatcgccgcgctcagcgacaaacaagttcgaaaacatggccaaaagaaatgccgagaaggaactgacagataggaattggg

SEQ ID NO: 487328 - DNA, 90 bp, Homo sapiens
aaagaagcaggatgcattctacaaagaacagctggctagactggaggagaggcagccattgtggatgagaagatcttctgttgtcatgga

SEQ ID NO: 487329 - DNA, 96 bp, Homo sapiens
aattcactaggctgctctactatggaaggaagaaggaggttcagcaacatcagatgaccatgaatttgatccatcagctgacatgctggttcatga

SEQ ID NO: 487330 - DNA, 80 bp, Homo sapiens
tgcttggggactattgacagcacccaccttggtgtgggtaattccagaattgattggccataccattgtcactgtattac

SEQ ID NO: 487331 - DNA, 74 bp, Homo sapiens
aggggaagaaaagaaggggaagaagatcaaaacccaccatgccccagataacgaaggaggcccaacttcattca

SEQ ID NO: 487332 - DNA, 100 bp, Homo sapiens
ctctggtcttcgatgcacaggagtggccgttatggaacgcagggcctattccctggtggattccagtcaagtgtctacatttctgatttccattcttctt

SEQ ID NO: 487333 - DNA, 98 bp, Homo sapiens
ggaagtccgtggattggtgggcatttggagtcctgctgtatgaaatgttggctgggcaggctgctggtggtctacccttggacccagaggttctttga

SEQ ID NO: 487334 - DNA, 50 bp, Homo sapiens
ccgcgctcagcgacaaacaaaattgcctctgcctcgctttatgatgtcaa

SEQ ID NO: 487335 - DNA, 101 bp, Homo sapiens
cgccgcccctcctgcagcagcagcagcgagaagatttggagtcaaaatatggacctgagaaaatatctccagaaaatgatatttttgaaataaatttaccc

SEQ ID NO: 487336 - DNA, 100 bp, Homo sapiens
ccgagcagcgccagcggccgagcgggcggcttcctggcctgggcgctccggtggcggcggagcttcccagtgatcctgtccatcgaggagcactgcagcg

SEQ ID NO: 487337 - DNA, 75 bp, Homo sapiens
acgtgttcaatacacctcccacctgtcctcaggcatatcaaaggggagttgctgagtcagcccagaccggaagga

SEQ ID NO: 487338 - DNA, 100 bp, Homo sapiens
atttggaaggatgtgtacattataaagttggttacaggaaatacaggaggcagaggaacaaataaaagacaccacgagaaacagacacatccagaacgtg

SEQ ID NO: 487339 - DNA, 83 bp, Homo sapiens
tggaaacaattgatttgctcttacgtatttgtgtgacttgactcttcaaacacaaagcatcatggatggcatgaccgaagcat

SEQ ID NO: 487340 - DNA, 75 bp, Homo sapiens
cgcagaaggattccgggagcacagttccgccgaattgcaaatagaagagtcttccaaaccagtgaggctatcaca

SEQ ID NO: 487341 - DNA, 99 bp, Homo sapiens
tgttgactttacaagaatatgaattcgaaaagcagttcaacgagaatgaagccatccaatggatgcaggaaaactgaggacgggaggggcaagctgcgg

SEQ ID NO: 487342 - DNA, 100 bp, Homo sapiens
ggagatgtccgagcccaaggcaattgatcccaagttgtcgacgaccgacagggtggtgaaaggactgagcagggggaggaacatttaagctgatggaagt

SEQ ID NO: 487343 - DNA, 74 bp, Homo sapiens
aggtgattccgtgaaggcttcgaagttagtggttacttggatgattgtacctgtgatgttgaaaccattgatag

SEQ ID NO: 487344 - DNA, 75 bp, Homo sapiens
tgctcttcgctctcttcctggctgcgtccctaggtgaaatgacaatggatgctctgttggctcgattgaaacttc

SEQ ID NO: 487345 - DNA, 100 bp, Homo sapiens
acccaacggggcaacagaagaagatggggttccttccaaagtgcagcgctgtgcagtgaaaactgattgggaggtagctattaaaagtattaataaaaag

SEQ ID NO: 487346 - DNA, 90 bp, Homo sapiens
ggcccgataaaagtgaaggatgtaatagatcgtggcccttcaatttagaagagattaaggcagggcctggtcactgaccaagtctcactg

SEQ ID NO: 487347 - DNA, 75 bp, Homo sapiens
tcctgagtagctgggattgcagtataccaaatactacattcaccgaattccaagaagccgggaggttcagcagtc

SEQ ID NO: 487348 - DNA, 75 bp, Homo sapiens
ccccggagtgagcggagtagcgagtcggcaacccggagatttccatcgttgcatttacaactgctacaaaaatgc

SEQ ID NO: 487349 - DNA, 100 bp, Homo sapiens
ttcaacgctgagccaccttgggaacctagctgatgataggggggttccatctcccaacttgtccatctccagtcagtctcagtcatcctacatcatcagg

SEQ ID NO: 487350 - DNA, 83 bp, Homo sapiens
aggtgaaccctgagagcctggacttaattcagtgcacaaatgagatgaatgtgaacatcccacagttggcagacagtttattt

SEQ ID NO: 487351 - DNA, 100 bp, Homo sapiens
gtcaactactgctccaccttctgccaacgcaaggaagacggaagaaagtgccgggaagaaagaaaaccccgtccggaccatccgcaaaaagtaagagctc

SEQ ID NO: 487352 - DNA, 75 bp, Homo sapiens
gcagtccacccaccgccgccgcctcccagaatttaattccttttcgaccttcaatccagttccaaggactccacg

SEQ ID NO: 487353 - DNA, 100 bp, Homo sapiens
ggccacctcggcctcttcctgttgcaccaggttcttcgaaaactgaagcagatgttgaacaacaaggcctctgaggaaacactacattccagtaatgaag

SEQ ID NO: 487354 - DNA, 82 bp, Homo sapiens
tgccgccgcgagtctgccatcgtccaaggaggtggcagttgcagagtgggcaggatcttaagacccgataggtgcagaaccc

SEQ ID NO: 487355 - DNA, 136 bp, Homo sapiens
cggagcgcccggcggcggtttcggcgcgcggccgggctggcgatggaagatggaaggaaggagcgcagcggagttaaagttcctcgtaattttcgcttgttggaagaacttgaagaaggacaaaaaggagtaggcg

SEQ ID NO: 487356 - DNA, 100 bp, Homo sapiens
agctgtgcagccgcgaggaggcgcgggaggtgttcgagaacgaccccgagacggtttatcggcgggggcttcaggcaatacctcttagtgttgacctttg

SEQ ID NO: 487357 - DNA, 83 bp, Homo sapiens
agatgtaattaatcaaacttggacagctctctatggaacgtcaaggtcgtgggaaataaaaggcagttctacacagactgcag

SEQ ID NO: 487358 - DNA, 50 bp, Homo sapiens
ccgtgcgggcccaccttgaacaaggaagtgggaaaactcttgcctttgcc

SEQ ID NO: 487359 - DNA, 85 bp, Homo sapiens
gaattgaagaatattcccaagtccttcacccggagtcaagggtccagagaaggaggagaagttgagacaggcggtcaagcaggtg

SEQ ID NO: 487360 - DNA, 101 bp, Homo sapiens
ctcccaagtagctgggattgcagttactaaaagatgtaactgaactgcagatccttggtgaaatatctttcaacaaatctctatatgagggactgaatgca

SEQ ID NO: 487361 - DNA, 52 bp, Homo sapiens
cagtactggcatgtgccttatgaccctccctcttagcaatgcataccacgag

SEQ ID NO: 487362 - DNA, 82 bp, Homo sapiens
gccggtccaaggcggtgcgctgggggccggggcgcgtcgcaggacactcatgaggaccatgatacttccactgagaatacag

SEQ ID NO: 487363 - DNA, 98 bp, Homo sapiens
aaaggcccaaagagacagctcactgcttttgcgagaattgaagcaccctaatgtgattgcattgcagaaggtgttcctttctcacagtgacaggaagg

SEQ ID NO: 487364 - DNA, 51 bp, Homo sapiens
cggaggcagagcggctgccatggcttctgggaacttggcagacgcagctta

SEQ ID NO: 487365 - DNA, 100 bp, Homo sapiens
aatatgctgccaaaattatcaacaccaaaaagctttctgctagggatcttagcaaagcaatgtctcaagatggtgcttctcagttccaagaagtcattcg

SEQ ID NO: 487366 - DNA, 82 bp, Homo sapiens
ataaactgaaagtgcgaactgcctatccgtcattgagacttattcatgctgtcagagggaactgtggctgcaccatctgtct

SEQ ID NO: 487367 - DNA, 103 bp, Homo sapiens
acaggagctgtagagaggaccccggtacatctgaaagccgggaaatggttggttcctgtataccttgggccagagagcaaacataggtggcctgagagagccc

SEQ ID NO: 487368 - DNA, 100 bp, Homo sapiens
tattgtcattattgatcagttcattgacagagaaatggtcaatgcatggtttgctgagagagttcacaccatccctgtgtgcaaggaaggtatcagaggc

SEQ ID NO: 487369 - DNA, 100 bp, Homo sapiens
cctgttggccggagcccagcagctgtgggagccccgagaacgcctccagcggggatgacacagaagctcagatcatcctgcacttgaaaaatgaagtttt

SEQ ID NO: 487370 - DNA, 100 bp, Homo sapiens
gctgcggacggcgctgcggtacatccaggccctgggcagtgacggggttcgggtgaccatggagagtgcgctcaccgcccgtgaccgggtgggggtgcag

SEQ ID NO: 487371 - DNA, 82 bp, Homo sapiens
gaagctctagaaatgaatgtttccatctcttcagagatgaaccagattgtctaaagccccaggaaaaatggtggaaaattca

SEQ ID NO: 487372 - DNA, 100 bp, Homo sapiens
gcaggcgccgagactgacaacgcggtcccacaggtacttaagagattatggcatcagaaacccacaatgttaaaaaacggaacttttgtaataagattga

SEQ ID NO: 487373 - DNA, 75 bp, Homo sapiens
ctggagcctcagttggaagcagccgatccagcctgcggagcctgtggggcagtacaacagggtctggattcccga

SEQ ID NO: 487374 - DNA, 100 bp, Homo sapiens
gtggctatggcaggtcttcggagagctcccagatggacgtatcatcaaagttgggggagagagatttgaagcaccagaagctttatttcagcctcacttg

SEQ ID NO: 487375 - DNA, 75 bp, Homo sapiens
ccgactatgcagaggagaaggagatccagagttccaatctggagacggcagcctgccgcctctcattgtgtatga

SEQ ID NO: 487376 - DNA, 83 bp, Homo sapiens
cctccctcagcttccgccccaaaagcaagagtgagccatggagctacgtgtggggaacaagtaccgcctgggacggaagatcg

SEQ ID NO: 487377 - DNA, 100 bp, Homo sapiens
gcgagccgtgagatgcgtggtccaccatcggtgacctcaccgcctcggttcgccctcagccgccccggttgctccttcaggctggctacgacccagagct

SEQ ID NO: 487378 - DNA, 100 bp, Homo sapiens
agactctgggattaatgctaaatttgtgaatgctgtgtatgataccttacttaatactgaactgcaagcacatgttgaccagataactgaaatggcagca

SEQ ID NO: 487379 - DNA, 100 bp, Homo sapiens
ctcatctcgctcggctgcgggaaatcgggctgaagcgactgagtccgcgatggaggtggaagttaaacgagctgagcctcgggacagcaagagccaagcg

SEQ ID NO: 487380 - DNA, 100 bp, Homo sapiens
gccgcgggcgccgggagcgagctgggagggagccgcgcgcctttgtgcgcgcgccgaggtgaattatgtaacctcattacgctggatgtagctcacaatc

SEQ ID NO: 487381 - DNA, 74 bp, Homo sapiens
attttttgaaatttttaagacacgctgcaacaaagcagggatgacaaaagtgaaagttgggaaggaagattctt

SEQ ID NO: 487382 - DNA, 97 bp, Homo sapiens
ccgatgggcctctacagactgataacaacgaacttgatgcaagtgataggtttgccaaggtcagacctctcatcatccggatgaactgcaatttcca

SEQ ID NO: 487383 - DNA, 100 bp, Homo sapiens
agtatccagcgctcattgggaatttagttaaggatatgctgcaggctgctagtcattatcgccaaaatagaaactctttgtatagaagagaagaatcact

SEQ ID NO: 487384 - DNA, 97 bp, Homo sapiens
ggaggaagcccccaagcgggtcagcctggccctccagctccctgaacacggcagcaaggacatcggaacctaaatgcgatggccaggtattactgac

SEQ ID NO: 487385 - DNA, 82 bp, Homo sapiens
ggcgggaacgattgggctgagcagaggacgacatgttgcttttcgtggagaatatcctccgaatcctaaatctagagctcca

SEQ ID NO: 487386 - DNA, 82 bp, Homo sapiens
gagtgatgtggaggaaaacaacttcgagggcagagaaagccatcaccaagtcgggcctccagcacctggccccccctccgcc

SEQ ID NO: 487387 - DNA, 82 bp, Homo sapiens
agcccaaaggcccatgaggggatgcagttatgggctctgtcgccgtggcagtacttctggaatagaaattctaaacattagc

SEQ ID NO: 487388 - DNA, 90 bp, Homo sapiens
ggccgttggctccagacaaataaacatggagtccatcttccacgagaaagcaaaaagggcagctagctgtagaaagagctaaacaagtag

SEQ ID NO: 487389 - DNA, 50 bp, Homo sapiens
tatgccgctgcactctacaggcaaggttgtaggtggcctagatatccaca

SEQ ID NO: 487390 - DNA, 100 bp, Homo sapiens
ggtggtgcctccggactgcacttgcgaagggagcttggggaggaactgctcgactgatccaaaacatggatgccaccactgagccttgtacagacttttt

SEQ ID NO: 487391 - DNA, 90 bp, Homo sapiens
ctcagccgggcagtttgaggagctgctgcgcctcaaagccaagtagctttggatatgttaaatcctcatgttactttgcctgttttttac

SEQ ID NO: 487392 - DNA, 75 bp, Homo sapiens
agcccacatccacgggagctggtgagaagccctaccactgcaactgggacggctgcggctggaagtttgcgcgct

SEQ ID NO: 487393 - DNA, 74 bp, Homo sapiens
agacatcttaattgggcacgaaagagattgaagatggatacgtgacaatcccagggaccgctgcactgacttca

SEQ ID NO: 487394 - DNA, 100 bp, Homo sapiens
tgctgagctggttggccctgtgatccctcaagactggtccacggagtgtatgaccacaaacagccatcaaggtacagtatatcagaagtatgagccgatc

SEQ ID NO: 487395 - DNA, 100 bp, Homo sapiens
atatgccatttgtttgacaaagataagaagcagtatcactgtgaaaactgtggaatttgtaggatggagggtacagagtctgcctacatcagctcctttg

SEQ ID NO: 487396 - DNA, 83 bp, Homo sapiens
gttccgatttttatcaaacttcttaattctgaacatgaagatgttcaggaacagtttgaaattggcacaatggaagaagctgg

SEQ ID NO: 487397 - DNA, 93 bp, Homo sapiens
gaggggctccgggtcttccagagcgtgaagatcaagatcggcgtggtgtccctcgtggccgttcacccctccaccgtcaacccgctcgggaag

SEQ ID NO: 487398 - DNA, 82 bp, Homo sapiens
attcgccgaggcaccgaggcactcagaggaggccacggcatatgcctccaaggacggggtcctcactgaggccatgatggac

SEQ ID NO: 487399 - DNA, 100 bp, Homo sapiens
agcggctccacgaggaggaccagaaggagatcggtgacctccgtgcccagcagcagcagagctcgtccgcatggtgctgaatggctgaggaccttcccag

SEQ ID NO: 487400 - DNA, 50 bp, Homo sapiens
gcagggcagagcaggaggccccccgagtggtgctgattactatgattacg

SEQ ID NO: 487401 - DNA, 115 bp, Homo sapiens
gtgattagcttcgcagtctggaaagctttaggagttcacagtgaatggaagttggatacactttgtgacttgtacgagacactgaccattacacaggctgttatttttctcaata

SEQ ID NO: 487402 - DNA, 100 bp, Homo sapiens
gacgaagacagcggagaggagagcggtgcggaggactgaggtcagagtggggccggcaacaactgggccaagggtcactacacggagggggcggagctgg

SEQ ID NO: 487403 - DNA, 101 bp, Homo sapiens
gctgtgctcgctggcaccccgaacgggttgcttcccccgctgcgaggctgaccccgcactacatctacccaccagccatcgtgcagcccagcgtggtgatc

SEQ ID NO: 487404 - DNA, 100 bp, Homo sapiens
caaggtgctgctcaagtacacggagtacaatgagccacacgagagccgcaccaacgccgacatcatcgagaatgagctgaaagccagtggtggcgaaatc

SEQ ID NO: 487405 - DNA, 86 bp, Homo sapiens
tgctgcttaaggagatacatatccagcctcatcttgcatctcttgcaattttgcacagtaataagttgactcacacagacttaaag

SEQ ID NO: 487406 - DNA, 99 bp, Homo sapiens
tgaagcatgtctttcagagcccggcaccacccatcttgagtatctggttgtccttctattcaggccactcttcgttttccatgtactgcatgctgtttg

SEQ ID NO: 487407 - DNA, 50 bp, Homo sapiens
ggcagcctcaggcggcccccaccccaggatctcactctgttgcccaggct

SEQ ID NO: 487408 - DNA, 82 bp, Homo sapiens
ctgtggaccctcgtgagcgacccggacaccgacgcgctcatctgctggagcccgagcaacagcgagctcgccatcctgtcca

SEQ ID NO: 487409 - DNA, 100 bp, Homo sapiens
caaattctgctccgattcagtgcaaagagcggtgcctctgcccgcggcttccacttcgtgtatcaagggaaatcctcattgacgattcaatttgttgaag

SEQ ID NO: 487410 - DNA, 100 bp, Homo sapiens
gaataatttatgaagctccgttgactaccgtggagagatcataatttggggttcaagattccagttttacaggcgtttatcagaggaaatgacacaaaga

SEQ ID NO: 487411 - DNA, 130 bp, Homo sapiens
gactgcgttccagccccagttccccggcagcgggacccggcgaagacgcgaccgcggcgcgagtcaccatggtgctggagaatctggtaaaagcaccattgtgaagcagatgaggatcctgcatgttaat

SEQ ID NO: 487412 - DNA, 75 bp, Homo sapiens
cacactgacagcaggaaggactcaccaccagctggaagtccaggtcgtttatacgcaatgcagactggaatgaag

SEQ ID NO: 487413 - DNA, 73 bp, Homo sapiens
gacgagagcttcagccatcacgaggatgatttcggaacctggagaaaatgtcaaaatgcagatcttcgtgaaa

SEQ ID NO: 487414 - DNA, 90 bp, Homo sapiens
gcccagcgcctcggccgaacccctccgcagcagatttggacacctcccacactgagtccccaaccccccatgactcaaattcacaccgcc

SEQ ID NO: 487415 - DNA, 75 bp, Homo sapiens
ctttgcaccaatggatggatttttttcaagatgagaatgaagatttaaggaaacttgcagagaatgaaatcactt

SEQ ID NO: 487416 - DNA, 98 bp, Homo sapiens
attgccctgtcttcatcaacatttaatcaagggattgaagtctcaagttgcccgccacagtctaaactacatacaggaaattggaaatggctggtttg

SEQ ID NO: 487417 - DNA, 82 bp, Homo sapiens
ctcggggcctcctcctgtccccaaagagacggtggactctttcctcgacctggccagtgggttggcagctggagaagataat

SEQ ID NO: 487418 - DNA, 98 bp, Homo sapiens
gacacacagacccagctggaactcgtataaggatgcatttatgaaagcaaatcctggctacaaatggtgtcctaccacaaacaagcctgtgaaatccc

SEQ ID NO: 487419 - DNA, 82 bp, Homo sapiens
cccgggcctgccagctacgctgctctgtgctggaggccagggatctggccccaaaggaccgcaatggcacatctgacccctt

SEQ ID NO: 487420 - DNA, 98 bp, Homo sapiens
ggggagccccgcgcgcggcgtcgaggtcctgctgtactagccaccaaagcagctgctggtactaagaaatatgatcttagtaaatggaaatatgcaga

SEQ ID NO: 487421 - DNA, 100 bp, Homo sapiens
aggagctgggcccagagacgcggggacgggccgtgggcccccggaacgagattcgaattgctgcagaaggaatcaatgggacagttggtggaagcaaatt

SEQ ID NO: 487422 - DNA, 143 bp, Homo sapiens
acgcagctgactttgtcttctccgcacgactgttacagaggtctccagagccttctctctcctggaaagaccacagcaagattctttcattcgtctcctcctagcctgggggaccaggctcgaactgaccctggacatcaaag

SEQ ID NO: 487423 - DNA, 83 bp, Homo sapiens
caggaacaaatagagctgccagaggttccctccgagccccttcctgagaagatcccaggtcttgaggaccggcccagctcagg

SEQ ID NO: 487424 - DNA, 82 bp, Homo sapiens
ctgggaaatagtaaccctgccaaatacatcagcttgtaggagacagaggttcaagaagacgtggaagctgcgggctctgaag

SEQ ID NO: 487425 - DNA, 83 bp, Homo sapiens
gaaggaaggatcttctcatgcacagaggcaacaaatggcaactttctgagatcttacctagccatatggcctgctgcctctgc

SEQ ID NO: 487426 - DNA, 100 bp, Homo sapiens
cttcactgcttggaagtgtgagtgcgcgaagatgcgaaaggtggttttgatcaccggggctagcaggacttttccagatttctcagaataaagtagcagt

SEQ ID NO: 487427 - DNA, 75 bp, Homo sapiens
gagagtcggagccgaataccaagctcggatccctgaatttgatccagatgtctttggtggacttgggaaagaggt

SEQ ID NO: 487428 - DNA, 74 bp, Homo sapiens
ccaccctgggcacagcaggcatcggagcatcatcggctggttcgtgcgaagcttcaagtacttttacgggctcc

SEQ ID NO: 487429 - DNA, 90 bp, Homo sapiens
ggcctgcaggaagcccttccgcggaccgaaagccccatctgctttgatatgattgaagaagcatacatgacaaaatgtggccacagcttt

SEQ ID NO: 487430 - DNA, 100 bp, Homo sapiens
ctcatctggaattttgccgatttcatgactaaccagtcgccatcatgaccgggtcctataacaacttcttcaggatgtttgatagagacacgcggaggga

SEQ ID NO: 487431 - DNA, 82 bp, Homo sapiens
acaaagctgtggttaccttagatgcaagtgatgatggaatcttggccaaaatcgtgaaaacctttccaacctatgagagaaa

SEQ ID NO: 487432 - DNA, 102 bp, Homo sapiens
cagttggatggcggtgactgcgtgaatgattatgagcctagctgtgggcgttctttacgcaggacacagcgcaaacgtcagcatacttaccaaacacggtcc

SEQ ID NO: 487433 - DNA, 75 bp, Homo sapiens
caactggtggcagagttatgaggcagacctcaacaccaacatcgaggatgaaggcagctccttctatggggtctc

SEQ ID NO: 487434 - DNA, 80 bp, Homo sapiens
gcctcaagtttcacctatcctcactgatccgtggacttctgtatgatcagctgcccagagcccagaccaagcatggacgc

SEQ ID NO: 487435 - DNA, 75 bp, Homo sapiens
ggacgctgcgcacaacatgggcaaccacctgccgctcctgcctggctgtattcatcaccaaagaaaaaacttaca

SEQ ID NO: 487436 - DNA, 82 bp, Homo sapiens
agaagaaagtaaagttggaagttaagggagacaaagttgaaaacaaagtgctggatgcagaaaatgcgattgtgcatatggg

SEQ ID NO: 487437 - DNA, 98 bp, Homo sapiens
gcagaggcgggaacaaactagccctcaagacgggaatagtagccaagaagcagaagacggaggatgagagcctgatccagggatgtctggatggccgg

SEQ ID NO: 487438 - DNA, 75 bp, Homo sapiens
gcccagggccagtttctttatgcctaccgctgtgtcctaggccctcatcagctgccattcgatttcacatggaag

SEQ ID NO: 487439 - DNA, 50 bp, Homo sapiens
tttggcaagtggacattttactggctcaacctttctgagaaaagtctaca

SEQ ID NO: 487440 - DNA, 100 bp, Homo sapiens
ctgcactgaagcaagctgtccagtcatgtctgcaggtccgagagcttttatctcagttatcaggagtgagacgttctgcaggaggacagcttaattcctc

SEQ ID NO: 487441 - DNA, 83 bp, Homo sapiens
tttcttctagcaaatgcctgcaatggactagctctgctacagaacaccaaggaagctgcagtaaaggaagatgaagaagaagt

SEQ ID NO: 487442 - DNA, 75 bp, Homo sapiens
caaaaactgaaagaacatcacacagttgaagctccaggaggtcaaaaggttggcttatttggacgtctaggcagt

SEQ ID NO: 487443 - DNA, 75 bp, Homo sapiens
agttgtcccagctcggcccgcgggggagccccgggagccgcacgacacgttggtcgtcattgcctccgagcccac

SEQ ID NO: 487444 - DNA, 83 bp, Homo sapiens
gtccgagtctccgccgctgcgggcccgctccgacgcggaagcccgtgtcattaaaactccgctggcgtgaaagatgacgtcct

SEQ ID NO: 487445 - DNA, 99 bp, Homo sapiens
agcgagctgagtggttgtgtggtcgcgtctcggaaaccggtagcgcttgcagcatgtgagatgagtcagaaaccggccaaggagggtcccagactctcc

SEQ ID NO: 487446 - DNA, 100 bp, Homo sapiens
agccccttgtcagccagggctgaacccccgcagagggagaaccgaagattacaggaggccagcatgaggttggaacaagagaatgatgaccttgcccatg

SEQ ID NO: 487447 - DNA, 97 bp, Homo sapiens
acctgctggcgtgcgggacctaccagctgcggcggccggaggaccggcctgccggcccccagaacaaggtgcagcggaactgctgcctgacgctctg

SEQ ID NO: 487448 - DNA, 100 bp, Homo sapiens
gaggtggaactggcaccagtgggggatggagatgtagttgctgacatccaggatcgaatccaggatggccgagcctcgatttaacaacccctacttctgg

SEQ ID NO: 487449 - DNA, 75 bp, Homo sapiens
ccacacaaggggagctcgtaaggtccctcaaagcgggaaatgcgtcaaaggttggcgtgcagtggtgtgatctca

SEQ ID NO: 487450 - DNA, 50 bp, Homo sapiens
ccggtcacacagctccttccagggggaaggtcatggcctccatgttctat

SEQ ID NO: 487451 - DNA, 74 bp, Homo sapiens
ggccccactggaggagatgaggaaggctgccgaggatctggaaattaacatgctgtttgagagcatccaggagg

SEQ ID NO: 487452 - DNA, 51 bp, Homo sapiens
ttcgacttgagcgaagttttatgcaaggcggagacagcagccaatcgcatc

SEQ ID NO: 487453 - DNA, 100 bp, Homo sapiens
gacaaggaccgattgactttggagaaggagcggacatgtgcagaacagattgttgccaaaattgaagaagtattatggagtctcccaggcgggaatgcaa

SEQ ID NO: 487454 - DNA, 75 bp, Homo sapiens
caattggaaaacaattacttaaggttcatgaaagaagtgtccagtcagacttcctactaattatcttgaaggaaa

SEQ ID NO: 487455 - DNA, 101 bp, Homo sapiens
aaaactgtaatactaaatgtgttaccataccaaggttactcctggatggagcacctctgatagcaatccacaaagccaggtattacaagaggaaagatggc

SEQ ID NO: 487456 - DNA, 100 bp, Homo sapiens
gttattacagaggagcccatggcatcatagttgtgtatgatgtgacagatcagagctccttaataagcatttatagtcagtttttggcagcaatagaatc

SEQ ID NO: 487457 - DNA, 85 bp, Homo sapiens
tgtgagcagggtctgcacgaaataaagctcctgggcaaggggacgtctgcagctgaatggcagatgatcagggctgtattgaaga

SEQ ID NO: 487458 - DNA, 97 bp, Homo sapiens
cgagagcgtgaccgagagcgcgaatatcgtcatcgttagaaggcactggtgaggtggattgatgatgaatcttctggcacacctggagcaactccag

SEQ ID NO: 487459 - DNA, 75 bp, Homo sapiens
ccgagtgctggtagacggagaagagcacgtcggtttccttaaaatatggttgagccccttatacccacgaattgc

SEQ ID NO: 487460 - DNA, 83 bp, Homo sapiens
ctggcttcacgccggctccgcctcaccagcaagcgcattcccaggttatcaatactctggctgaccatcatcatcgtgggact

SEQ ID NO: 487461 - DNA, 75 bp, Homo sapiens
tgctgggcctgtgtgcctggaaaggaattgttttggcctaggatcatccaggtacatgactcaaggcttggacat

SEQ ID NO: 487462 - DNA, 100 bp, Homo sapiens
gcgacgaaggcaaagggaaggtggtggacctgctggcgcaggacgccgacatcgtgtgccgctgccagttgccaccttccagagaagaggtacgagatga

SEQ ID NO: 487463 - DNA, 100 bp, Homo sapiens
gctgcttccacgtccttgcttcacctcagggtccacatatagcctcagttacattagctgcttatgaatgcaattcagttaattttcccgaaccacccta

SEQ ID NO: 487464 - DNA, 96 bp, Homo sapiens
ttagcttaaaaacagctcattctcctaatgttttccttcagcaaggacaaagctattccgcgaagtaagaataatgaaggttttgaatcatcccaa

SEQ ID NO: 487465 - DNA, 119 bp, Homo sapiens
gggtgatatttgcctttagtgcactcttctccttcacagtaaagtggctgtactgtaagattgatgttaaaggcatggtgttcaccccacttcatcagcgtacataagttatctcttct

SEQ ID NO: 487466 - DNA, 100 bp, Homo sapiens
aagaacttggactgattattgatttaacatatactcaacgctattataaaccagagttcctggccattttctatccaagatgtggtacaacctcttaccc

SEQ ID NO: 487467 - DNA, 90 bp, Homo sapiens
aggcctcttcacagagcatctcccaacatgacggcctgcttcagcagagtgagcagttactccacaggatccgctgaacataggatgttg

SEQ ID NO: 487468 - DNA, 75 bp, Homo sapiens
ctggctcggatgctgatggggctggacctgctggtgttcgcccacgaccatgttgattatggaagattcccacaa

SEQ ID NO: 487469 - DNA, 75 bp, Homo sapiens
gcgcacttcgtcatgttcttcgcgccctgcaggttcaggagaagtggcacctggtggaggacctgtcgcgactgc

SEQ ID NO: 487470 - DNA, 97 bp, Homo sapiens
cttatagatcttctgcactgtttacaggcacagatcctgatgaatttgagcgaatatatgagcctctggatgtcaaaagtaaaaagattcatgtagt

SEQ ID NO: 487471 - DNA, 74 bp, Homo sapiens
attcgtaatgcgactcaaagctgcacggcagtctgtttatgaggtaagaattctctacgcctgtggttttagcg

SEQ ID NO: 487472 - DNA, 138 bp, Homo sapiens
cgtctgcctggactgttgcgggccccgggacctgggctgggaacccgcggtggagcgggacacgaacgtgaacatccagtcatggataaaaatgagctggttcagaaggccaaactggccgagcaggctgagcgatat

SEQ ID NO: 487473 - DNA, 96 bp, Homo sapiens
tgttagtgaacgtggacaaagctgttgtctcagggagcacagaattacccagcatgccacaatctgattgctgacctggatggaacagagtgaaat

SEQ ID NO: 487474 - DNA, 75 bp, Homo sapiens
ggaaacctgggggctccctggacaactccgagcagaagactgtgcagtctttgtaactgatgaagagcaaggctt

SEQ ID NO: 487475 - DNA, 76 bp, Homo sapiens
gcgctttcctcatgggattcgccagctagctaattatattaccagagactgatgactgtggcggagacgattacag

SEQ ID NO: 487476 - DNA, 100 bp, Homo sapiens
ctactggaaggacgacgacaaacacgtcatgaggaaggagcagcgcaagattgccttgggtccccagtgtttactcccatcaaggcagacataagcggca

SEQ ID NO: 487477 - DNA, 110 bp, Homo sapiens
cagaaggcaggaggggaaatctggcacaacggctgggagaggaaacttgatgcttctgggccaccatttgccagggcctcgctcgaggtgttacacataatattgcatta

SEQ ID NO: 487478 - DNA, 74 bp, Homo sapiens
gtgtggcgcgcccagagccccgcgtttcagccctagggaagctgcagacctattcacagacttggaaaatgcat

SEQ ID NO: 487479 - DNA, 100 bp, Homo sapiens
atagagaacaaaaaacaccacagtactatcgtctatcattggatgaagtggctccggagatgttatggaggttttgatgactatggtggctataataatt

SEQ ID NO: 487480 - DNA, 96 bp, Homo sapiens
cagaaatgggacgggcaagagaccacacttgtgcgggagctaattgatggaaaactcatcctggtgctggagaatctggtaaaagcaccattgtga

SEQ ID NO: 487481 - DNA, 100 bp, Homo sapiens
gcatatcatgaaatcctccccacttatgtttgtaaatgtgagtggaagccatgaggccaaaggcagttgtattggtgagcgagtgctgtgctttcatggg

SEQ ID NO: 487482 - DNA, 83 bp, Homo sapiens
gtccacccaccgccgccgcctcccaggagaacgtatttaccgggcagtcaaagatctattcctacatgagcccgaacaaatgc

SEQ ID NO: 487483 - DNA, 50 bp, Homo sapiens
cttggatggacacagttataagacagtcatcaccgagtggtcttctcaca

SEQ ID NO: 487484 - DNA, 75 bp, Homo sapiens
actatggaacaaaacagatccttggagaagtatgccactttttggaagtggtcactgtcaatatcttgttatggt

SEQ ID NO: 487485 - DNA, 90 bp, Homo sapiens
gtcttgaagaatagagccataaagaaagcaaagcgcagaaatgttggatttgaacccaatattggccacctgggcctgccccatgggccg

SEQ ID NO: 487486 - DNA, 75 bp, Homo sapiens
gtggacgttgtctaaatttcggtagccatggcacaagaatatagagtgacagttcatttagattctttgtattct

SEQ ID NO: 487487 - DNA, 83 bp, Homo sapiens
gtgtaagacgggatattctcttctgtgctgtcaagggtggagtttgtccatatgctcaatgctaccatgtgcgccactacccg

SEQ ID NO: 487488 - DNA, 90 bp, Homo sapiens
cacaagtatctgaagatgggaaagcccatcctttcaaaatcaacttagaatcagaaccacagatgatgaaagttgttcaagtttatgcag

SEQ ID NO: 487489 - DNA, 100 bp, Homo sapiens
gccgctgctgtcctgcgaccccaagcagtcctccgggcctcatatgaacaggagaaagaagcgcttacccactctttccgggaggccagttctacccagc

SEQ ID NO: 487490 - DNA, 130 bp, Homo sapiens
cctgtctggagcaaggaaaagatccctggaatatgaagggacacagtacggtagtcaaacccccaggagagaagcaatactgcagagaaactgtatgactctaaccattctggaaaagtcttcaatgaac

SEQ ID NO: 487491 - DNA, 82 bp, Homo sapiens
ttcagagagtctccatcaggaaaacaagcctggttcagttaaacctactcaaactattgacctggagtggaagatcatttat

SEQ ID NO: 487492 - DNA, 101 bp, Homo sapiens
tgtcaatgacgctttaaagagagataaagatgccatttatgggttcagaaacagcatatttagaaaacagatctaattctagacctttagaaagcaaaaga

SEQ ID NO: 487493 - DNA, 90 bp, Homo sapiens
ggggctctgggagtggctgccaggctaaaacactgtcttatgaaccattatcttcagcaactgtttccactgggagccttttaagttatg

SEQ ID NO: 487494 - DNA, 74 bp, Homo sapiens
actattacccccagtatctgcaagccaagtcaggatggctaaaggtgaccccaagaaaccaaagggcaagatgt

SEQ ID NO: 487495 - DNA, 87 bp, Homo sapiens
gccaaggggggcaagggttcggccgtgccctccgacagccaggcccgcgagaagtgtcgtgaaaactacccctaaaagccaaaatgg

SEQ ID NO: 487496 - DNA, 83 bp, Homo sapiens
ccagacctgacccttggggaaggtgacggtcctggtcatgtgccacacgagggagctggccttccagatcagcaaggaatatg

SEQ ID NO: 487497 - DNA, 100 bp, Homo sapiens
aggagtacttcatcatccagtaccaggagagcctgaggatccaaggcatagcgcgctggctaggactccagtaccgtgaagggaggcagtgagagcagac

SEQ ID NO: 487498 - DNA, 100 bp, Homo sapiens
gacagtgtatggtgcaaggttgtgagctgtatggagcagttgacacgtagtcactgggaaggatttgcctctggcctgtctacaagtcattttgcttggg

SEQ ID NO: 487499 - DNA, 90 bp, Homo sapiens
atgcatcgctggaagtagccatttcccgcatgaaaattacttaaacgttgcacacaacgtttcacaaaatcttttgtgaaagaagaaaag

SEQ ID NO: 487500 - DNA, 97 bp, Homo sapiens
cggtttaacctgcttgccaaagaagctaaaaaagaattacttgaagctggtacatatcatgcagctaagatggagtctcgctctgttgtccaggctg

SEQ ID NO: 487501 - DNA, 87 bp, Homo sapiens
ggacccaaagtgccatgtctttaatgatgttgagaaagagaaggaaacccacagttacctcagcaaagaggagatcaaagagaaagt

SEQ ID NO: 487502 - DNA, 75 bp, Homo sapiens
ctggcagatttacatggggatggggaatacaaggtgaccttgagtatctttgagctggcatctgctgcaggtgtg

SEQ ID NO: 487503 - DNA, 96 bp, Homo sapiens
tcctctcccgcgggcaccgaggactccgctcctgcccaggtgttgatcctattatctgggaacaggccaaggtagataaccctgattctgaaaagt

SEQ ID NO: 487504 - DNA, 82 bp, Homo sapiens
tcaaggacaacctcggcctgagacaccggaggaccggaattcggttccctcaaaattataaaggcaggaaagctcaagacaa

SEQ ID NO: 487505 - DNA, 50 bp, Homo sapiens
gaagaccagaagtggatggagagaaagaccacagcaagattctttcattc

SEQ ID NO: 487506 - DNA, 96 bp, Homo sapiens
tgttgctgttggttccctctcagattcagtaactattttcaggttgatctcctatcaagagtttttggcatttgaatctgttttatgtgctccaga

SEQ ID NO: 487507 - DNA, 75 bp, Homo sapiens
accagttattgaatatcaagaggaggagttgttgttatcaggaactgttgccgttattacatcagatgggagaat

SEQ ID NO: 487508 - DNA, 50 bp, Homo sapiens
tggagaagtccccttatgaccagttgctgattgttggaggttcttttggt

SEQ ID NO: 487509 - DNA, 87 bp, Homo sapiens
ggtggagcactacgagttccagacgcgccagctggagctgaaggccaagaactatgccgatcagaccatcgacgagtacaagcccca

SEQ ID NO: 487510 - DNA, 73 bp, Homo sapiens
taagatgccaggaccacctggaagcctagaaatgggtttggatccagctcgagtcaacgtccctgtcattggt

SEQ ID NO: 487511 - DNA, 75 bp, Homo sapiens
ggtcacttccccaccggaggtttatcacaagaggctgggaggcggcagaatgcagccagaggagggcacaggctg

SEQ ID NO: 487512 - DNA, 83 bp, Homo sapiens
ctcagggccggttgtggccatgctcacccgacgactgccacccatcaaagaagctaagcctcggttacagaagctcttccgag

SEQ ID NO: 487513 - DNA, 75 bp, Homo sapiens
cagtagctcccccgcctcccgggctgaggggatcaagtcttccataccagggaccaggccaaaaccagactgcca

SEQ ID NO: 487514 - DNA, 83 bp, Homo sapiens
gagagactggaccagaccatgggcctgagcatcagacaaatttacatgtattggagaccagaccagaagcccttctgaattaa

SEQ ID NO: 487515 - DNA, 98 bp, Homo sapiens
acatgggagacatcctctataaactttcctccatgaaattcaagaatcaggaaacccaggcccaacggcaggtggatgcaagaagaaatgttccccaa

SEQ ID NO: 487516 - DNA, 76 bp, Homo sapiens
ccgcctccgacctgggcgctcagcccccggatcagcctgcctctggactttgatgatgacggaaccttgaacagag

SEQ ID NO: 487517 - DNA, 90 bp, Homo sapiens
gttgacatcctaggatgcacagctttacacagagggaaaaccatgagctgttttccaagagcttcatctccatggaagtgcctgtcatgg

SEQ ID NO: 487518 - DNA, 73 bp, Homo sapiens
ctcgaagaacagctgtggaaagaagttgcaaaacactgggatagaatttttgcggcatttgaagagctttttc

SEQ ID NO: 487519 - DNA, 98 bp, Homo sapiens
gacatctctccaggagagaaactcacgctctctcaccagaactcagagtcttcctaatattaccaggtcagctacacaacctggatcttaccacagtt

SEQ ID NO: 487520 - DNA, 105 bp, Homo sapiens
catgtccgcccaggcgcagatgcgggccctgctggaccagctcatgggcacggctcgggacgctgaaggaagaggatcaccttccaagacaaaacagtcttcatg

SEQ ID NO: 487521 - DNA, 100 bp, Homo sapiens
gaacttgtacagagatgtgatgttggagaactatagcaatctggttttcttggggaagaaggagaaagggccaacccctgaagaagcaatacagaaactg

SEQ ID NO: 487522 - DNA, 75 bp, Homo sapiens
atgcggggtccgagcggggctctgtggctgctcctggctctgcgcaccggcccaggaagtacacgagaagctccg

SEQ ID NO: 487523 - DNA, 100 bp, Homo sapiens
gcagattgaaaatcagcagcagatgttggttgccaagctaaacctattcgtcccgggcaacatccagcagcttctccaactcacccaagtgcaattcgtg

SEQ ID NO: 487524 - DNA, 50 bp, Homo sapiens
ctcctttaaagtgggcactgcaaaagtgatcaactcacaatgaaatggag

SEQ ID NO: 487525 - DNA, 90 bp, Homo sapiens
ctctctcatctcgctcggctgcgggaaatcgggctgaagcgactgagtccgcgatggagggtgtcaaattgagaaccaggtagatcccca

SEQ ID NO: 487526 - DNA, 101 bp, Homo sapiens
tcaatggggacacctgcagttggatgctacctctgtgtacctgctcttcttagcccaaatgactgcctcaggtcactctggaatatagacccgtgatcgac

SEQ ID NO: 487527 - DNA, 82 bp, Homo sapiens
ccgtttccacgactttctgggagactcaatgattacggacctgaagccaaagaacaagatgcgctagtggacagattgctga

SEQ ID NO: 487528 - DNA, 82 bp, Homo sapiens
cgcgtctcggaaaccggtagcgcttgcagcatgctacccgtacagtgaggacgcccgccagggtgagcagtacatgaacacc

SEQ ID NO: 487529 - DNA, 82 bp, Homo sapiens
gccagccctcgctggaccagaccatggccgcggccttcgaaagaagcttccggttctgaggtcctggaggtgccatttccct

SEQ ID NO: 487530 - DNA, 96 bp, Homo sapiens
ttccttgctcggagtcgcagcgcggtcacactgccccgcaacggccgggaccaggggatcgtccattatatcttcatgttcagggccagacacggg

SEQ ID NO: 487531 - DNA, 82 bp, Homo sapiens
tgagtcacagggaagaaagcgatttcctccgcctcttccaaagcgggggatatgagactttctactcggaatatcctgagtg

SEQ ID NO: 487532 - DNA, 96 bp, Homo sapiens
gtcgccatcttggatccgcgggacaagaaaattcatgcggtcatcatcagatttgaaatatttaaagtggatacaaaactatttcagcaatgcaga

SEQ ID NO: 487533 - DNA, 90 bp, Homo sapiens
cacccaggtaccaccttatccacagccacagcgttcgggatgagtatcggcaggactacgatgctgggagaggaggctatggaaaactgg

SEQ ID NO: 487534 - DNA, 100 bp, Homo sapiens
gagctgtccgactctgagaatgctaatgttctctatgggccactccacaccaagcaggcagtgagcatgtttcttggagcagtggaagaagcaaagaaag

SEQ ID NO: 487535 - DNA, 83 bp, Homo sapiens
ggaaggcaaatgattgtggcagtaaagaagtgtatgtggttgtaagttctacaaatggagagttaaacacagatgaccccacc

SEQ ID NO: 487536 - DNA, 88 bp, Homo sapiens
ggaagctgatgctgctggacgccactttccggggtgcacagcaagtgcaacacagtcactcctggcggcaaaccaaacaaaaccagag

SEQ ID NO: 487537 - DNA, 83 bp, Homo sapiens
cttttcgtttccggaaacatggatccctctgtgacccagctgaccaacgccccgcagggcggcctggcggaattcaacccctt

SEQ ID NO: 487538 - DNA, 82 bp, Homo sapiens
gaaccgcgcggccgaaccctccgctgaaactagaggaccgttctgtggtgccccgagatgtggtccggcacatgcgatccac

SEQ ID NO: 487539 - DNA, 75 bp, Homo sapiens
cccaaaggaaggcttcggtgactcaggtccctgtgcgttttattgcgacctgccggtgggaactttgtctccgag

SEQ ID NO: 487540 - DNA, 75 bp, Homo sapiens
cgaagttggaagtgtctcttagcagcgcgcggagaagaacggggagccaggaatgctgtctctgcaatttgagag

SEQ ID NO: 487541 - DNA, 75 bp, Homo sapiens
tgtcggtgggcgagctctacagccagggtaaaccagacttgaatacaacattgccaattagacaaacagcatcaa

SEQ ID NO: 487542 - DNA, 75 bp, Homo sapiens
gccactcatcagattggctgccagtgtggatagatacttctcaagacatcacacagcgtgagtcaatcaaggagg

SEQ ID NO: 487543 - DNA, 98 bp, Homo sapiens
atttgcttccacaagaaccgcgaggacagaggtatcacctcttctgggctcaagatggacaacaagaagcgcctggcctacgccatcatccagttcct

SEQ ID NO: 487544 - DNA, 100 bp, Homo sapiens
cctcggcccgcgtccgccactcctgccccttctgggcaggcttctcgaaagatttgatcaccaggagatttttcgggacattaccaaaccactcatttta

SEQ ID NO: 487545 - DNA, 75 bp, Homo sapiens
cgagagtagccttcgttaaccttaattgaaactgggtatcatagcaacgatttatatcatccctggtgacataaa

SEQ ID NO: 487546 - DNA, 74 bp, Homo sapiens
tatccctgaccacttcctgtgtctgtgggagcactgtgaggaatgatgagaagacagcagctgattacaagatt

SEQ ID NO: 487547 - DNA, 87 bp, Homo sapiens
attaaagatgcagtacgccacggggccgctgctcaagttccagatttggtgccagatgtgacatccagatgacccagtctccatcct

SEQ ID NO: 487548 - DNA, 78 bp, Homo sapiens
tcgactgctctggaggtagcggccgcggtgaggagagccatgggacgggcagtcaagcagaagatggctgtgccaccc

SEQ ID NO: 487549 - DNA, 98 bp, Homo sapiens
ggccctcattccttctcctccactgggaactgagtcaaaatgcagatcttcgtgaaaacccttaccggcaagaccatcacccttgaggtggagcccag

SEQ ID NO: 487550 - DNA, 117 bp, Homo sapiens
cctcggtgcggcggcgagcgcggtcgagatcgccatgcctacccaaggacagaataacgggctcccagattcacaagccccaccaagaggatcaccccaggaacgcttggaggctga

SEQ ID NO: 487551 - DNA, 98 bp, Homo sapiens
gaagccccctgcaggaactctacaacccaatccagctgagatgagtgaactgagtgtggcacagaaaccagaaaaacttttggagcgctgcaagtact

SEQ ID NO: 487552 - DNA, 91 bp, Homo sapiens
aggacaaccacaaggcagacatcagctcctggttcaacgaggccattgacttcatagctgccaatggctctaatgaagatagaggagaggt

SEQ ID NO: 487553 - DNA, 100 bp, Homo sapiens
cacctgtctggagcaaggaaaagatccctggaatatgaagagacacagtatggtagccacacccccaggtaaaaagcttcctacaactggagaagtgcac

SEQ ID NO: 487554 - DNA, 100 bp, Homo sapiens
aaaacatgacgtctccagccaaattcaaaaaggataaggagatcatagcagagtacgatactcaggtcaaagaggcgtggagctatttcctatgacagtt

SEQ ID NO: 487555 - DNA, 90 bp, Homo sapiens
gggagatcccaggcggtgacagagtggagccatggctagagtaatctatgccagcaattatgacaatgttagcagaccatgcagctcgtc

SEQ ID NO: 487556 - DNA, 75 bp, Homo sapiens
ctgccgactctgggcggcgaggaaggcgtctcccgggcagatcgggagcggtgccgagaaaaatttccttactag

SEQ ID NO: 487557 - DNA, 100 bp, Homo sapiens
gtcaccgtgaagaccccgaaggaaaaggaggaattcgccgtgcccgagaatagctccgtccagcagcctggtctgccacctcagaacttttcaatgtctg

SEQ ID NO: 487558 - DNA, 100 bp, Homo sapiens
gaaaaatgccagccagaagaggcgttcgctgcgcgtgcacattccggctgaaggtgatgtggccgccctcaaccgacgcatccagctcgttgaggaggag

SEQ ID NO: 487559 - DNA, 100 bp, Homo sapiens
atacctatcggagcaaagcctaccagtgtgcagctggcaaaggagcagttatacttaagcatgaacattgacgacaaactggaaggattgtttcttaaat

SEQ ID NO: 487560 - DNA, 50 bp, Homo sapiens
tcaatactacctttatttccaccatagagcaagtgcaccggcacctggac

SEQ ID NO: 487561 - DNA, 74 bp, Homo sapiens
cttaaggaaggctttatgaataaggaggcctctgaagaacacctgaagcagcactacattgacctgaaagaccg

SEQ ID NO: 487562 - DNA, 83 bp, Homo sapiens
agcactgactttcagctatggaatcggtttggataatgcaggcaaaaccactcttcttcacatgctcaaagatgacagattgg

SEQ ID NO: 487563 - DNA, 76 bp, Homo sapiens
gggtacaaagtgagaatttacagagatcatcctcttcagaaacaacttacaataacagcactaggagaaaagctga

SEQ ID NO: 487564 - DNA, 100 bp, Homo sapiens
cccaggatgtgagcaacacgggaccgaattccctgaccaggagcgcacccctccccaacgactcccaggcccgcagtggagctcgttttcacacttccta

SEQ ID NO: 487565 - DNA, 137 bp, Homo sapiens
ctgtaaacagcgatatcagtaagaagagcaaagtaaatgctgtcttttcccaaaagacaggctcttcacctgaagtgccggtggtggtgtgcacattgagccccggtatagacagttcccccagctgaccagatccc

SEQ ID NO: 487566 - DNA, 100 bp, Homo sapiens
ttctcctagttgcagtcaggcttcatacgctattgtcctgcccgtgatgaggagctgctgcgcttctccaactgacaactggccggtctgcaagtcagag

SEQ ID NO: 487567 - DNA, 74 bp, Homo sapiens
aacgactaccaccgcagcgacgagcaggacatggatttgattgacatactttggaggcaagatatagatcttgg

SEQ ID NO: 487568 - DNA, 75 bp, Homo sapiens
tgtggctgctaccccactcctgggccgtccctgaaggcagacctgttatcctaaactaggtgagtcagcttttgg

SEQ ID NO: 487569 - DNA, 75 bp, Homo sapiens
cacctacacggagaacggacaagtcaagtggatcaagtttgaagaaaaagtggaacagggtggggaaagatggag

SEQ ID NO: 487570 - DNA, 49 bp, Homo sapiens
aattcaccatagttttctttaagatggaattggctgctctagaaaaaat

SEQ ID NO: 487571 - DNA, 75 bp, Homo sapiens
gcttggtttcgggatctcggtgctgcagacggcgagacctcctgcacagactgtgccctgtccacggtgcctcct

SEQ ID NO: 487572 - DNA, 75 bp, Homo sapiens
ctttccaagtctggggatggccagcctctgtgtccagatgtttgactggtttgactaccatggccacatgtgtat

SEQ ID NO: 487573 - DNA, 90 bp, Homo sapiens
ctgggtgttccccaccttgggcatcatgcaccacaacaaacaggcaccattcaggaagattacctaagagagctgctgacaaccatgggg

SEQ ID NO: 487574 - DNA, 83 bp, Homo sapiens
cagccccccgcccggccagccgccccgtccgggagggtgtgagatggcagacaggtttgcaggaaaccctcagaaagggggct

SEQ ID NO: 487575 - DNA, 100 bp, Homo sapiens
ctgggagtcagcaaagacagccgcccagaacctgtacgagaagacatacctgcccgctgtagatgagaaactcaggtgcgctacaaggaggagtttgaga

SEQ ID NO: 487576 - DNA, 90 bp, Homo sapiens
gagaggttccgtcagtgtctgatgtcagatttatctcatgctgtgcagaaaaggcgacggcggattgacagaagtatgattggagagccc

SEQ ID NO: 487577 - DNA, 100 bp, Homo sapiens
aggtgaaggaagcttatggtacctgcacaccgacaggctggagcgcgagattattaccccattcaagttgacaactgaggcaacgcagactccagtctcc

SEQ ID NO: 487578 - DNA, 75 bp, Homo sapiens
gatgcaagaccagtccatttggggaaatccttcggatggtgaactcattagaagggcactatgaacgaagaggag

SEQ ID NO: 487579 - DNA, 98 bp, Homo sapiens
gacaaaagccaagaggaggacagttcgctacacagcaatgcatcgagattgatgaactcccagagggcgctgtgaagcctccagcaaacaagtatcct

SEQ ID NO: 487580 - DNA, 100 bp, Homo sapiens
agcctggattttctttgctaagggattaaagcctgtggtttccacagaagcaccacctatcatatttgccacaccaactaaactgacctccgattccaca

SEQ ID NO: 487581 - DNA, 75 bp, Homo sapiens
acaagctggccttggcagtttcggtgcatagaaaatcaggaggatttgatgaagatgttaaagcgaaagtggaga

SEQ ID NO: 487582 - DNA, 58 bp, Homo sapiens
gaggcatggagtacttggcttcccaaaaaagctgcaaaggaccctgatgctgtggctg

SEQ ID NO: 487583 - DNA, 75 bp, Homo sapiens
gagagcccacaggtgctaaagagagcagtaccctgatggagtcccttgcagcaaaccagtccagctacgggggcc

SEQ ID NO: 487584 - DNA, 98 bp, Homo sapiens
ccaagaactatttttccaacaagtaccatatctttcgaacattttggtaatcagtggagttttattaacaataatctacacactcagagcttaaatag

SEQ ID NO: 487585 - DNA, 100 bp, Homo sapiens
tctcaactccacaggcgcctcctgccaggtctgctcctcggtcgcccacccgcctgcccgccatgtagaaacttgcccaggccaaagaagagaacgtggg

SEQ ID NO: 487586 - DNA, 100 bp, Homo sapiens
agagcgcgaggtggagggtggaacgcgggcgcctgaaggagttgttgtctcggcagcgcccgcggagacgtgaagaggcacccgacaggaggatccttta

SEQ ID NO: 487587 - DNA, 140 bp, Homo sapiens
cgttatagtatttgtcagaagttggggtctccgtgggcattgtgatccgtcccaggcagtgatgctgagatgaatcgtcacctgtgtgtttggctttttagacatccatctcttaatggttacctccagtgtcacatcca

SEQ ID NO: 487588 - DNA, 71 bp, Homo sapiens
ggaaagacacacctaccaagaagccagtcaagcggccaggtgaggcggaaccaaccctcctggccatggga

SEQ ID NO: 487589 - DNA, 100 bp, Homo sapiens
gctgcacgacctcagctcccagaggatcaccagcgtggatgatgtgcgaggtgatgccgaccatcagcgaagcagaaggcccccctggaggaggtggagg

SEQ ID NO: 487590 - DNA, 75 bp, Homo sapiens
agggcagacgttagcgtgagtgatcactctcaatcccgggaaaatgtttataggaggccttagctgggacactac

SEQ ID NO: 487591 - DNA, 98 bp, Homo sapiens
gaactcgaccggatccaacccagttagttacttcctgtctagagttgtagcttccacctgagaccccgcagatgtgtcttcagagagtgacagtgcca

SEQ ID NO: 487592 - DNA, 75 bp, Homo sapiens
cctctacgatgtgtttctggaggtctcccagcactggcagagcaagcacccttacccttctgaagaacagaaaaa

SEQ ID NO: 487593 - DNA, 98 bp, Homo sapiens
cagtggtggagaatggactggacccccaggctgccatcccgattctcatggaccaactggtattcaaagagacaatctggaatgatgcgttctggcag

SEQ ID NO: 487594 - DNA, 101 bp, Homo sapiens
aaaaaggagattgtgacatatcactgcattcaatacctagatgatggtgttgaaagcagcaggggcctagaagacattaaaccgataccacagaaatacaa

SEQ ID NO: 487595 - DNA, 100 bp, Homo sapiens
agtcagtctgttgatgaaactatgtaacagtacttcaatttctaccttaaggacttcctgtctactgggttgtgcagtaatgcaagataacccagactgc

SEQ ID NO: 487596 - DNA, 75 bp, Homo sapiens
tgaggactgccagctggcgctgcagattggctctaccagtgcacctggacagggaggaatcctggctcagcggga

SEQ ID NO: 487597 - DNA, 100 bp, Homo sapiens
cattgctgaacggagaggtagccatgatgccccacttggtgaatggagatgcagctcagcagctagaacgagtaaatctgtctgcagcccagacactgag

SEQ ID NO: 487598 - DNA, 97 bp, Homo sapiens
ggctgagacccgagcagagtttgccgagaggtctgtggcaaagttggagaaaaccatcgatgacctagaagatgaggacggggacttggttgccttt

SEQ ID NO: 487599 - DNA, 88 bp, Homo sapiens
agcggcggcagcagcaccaggctctgcagcggcaacccccagcggcttaagccatggcaatgtggccccgtcccagagcaccacccga

SEQ ID NO: 487600 - DNA, 100 bp, Homo sapiens
ttaataaagcttttcttggttccttcagtggtgttggtagtaaaatggtgacgcatccaaagaagacattgacactgctatgaaattaggagccggttac

SEQ ID NO: 487601 - DNA, 100 bp, Homo sapiens
ggcggaacatctggaggctgggaaatggtgaccagtatgcactgaagatgaggtttgtggaccatgtgtttgatgaacaagtgatagattctctgactgt

SEQ ID NO: 487602 - DNA, 120 bp, Homo sapiens
ctgagactcaccggaggaagcggcgcgagcgccccgccatcgtcccggatacaagaccctcctgaaaggaatttccgggaagttcaatagtggtgagttggtggccattatgggtccttc

SEQ ID NO: 487603 - DNA, 100 bp, Homo sapiens
ccgccaacgcggtcatctcgcagaacgccatcaaccagctgttcacctttccttgccagtgaagatggcgtgcttggcggagtgattgtcctccgttcat

SEQ ID NO: 487604 - DNA, 75 bp, Homo sapiens
ggaagggaaccaacccactttctcggcgccgcggctcttttctaaaagtgtaattatgaggaattagaaaactca

SEQ ID NO: 487605 - DNA, 90 bp, Homo sapiens
aggcgatccacatttgttcagtctcctgcagatgcctgcacacctcctggtgctggagaatctggtaaaagcaccattgtgaagcagatg

SEQ ID NO: 487606 - DNA, 80 bp, Homo sapiens
atatatgcatgagaaaggactgggcattaaacagtgctcccaagaagatattgctgataaactaggtgtggatatctctg

SEQ ID NO: 487607 - DNA, 90 bp, Homo sapiens
ccagaatctaaaaatgctgcgtatagtggaaccttatgtgacctggggggttccccactgaaggacttggtccagctgtctggcagggag

SEQ ID NO: 487608 - DNA, 82 bp, Homo sapiens
cgagccccttcctgagaagatcccagggaagaaggccgtgctgggttccagtcctttcctgtccgaggccaatgcagagcgg

SEQ ID NO: 487609 - DNA, 82 bp, Homo sapiens
accagttcagcctattccttgttatttgtttacctacaaaatgcttcggtatccatatttttgtagaatgtataaagaatgc

SEQ ID NO: 487610 - DNA, 59 bp, Homo sapiens
gaaaacatcaaagaggtctagcaaaggcactaagtgaccgcttcagcggtgagatcccc

SEQ ID NO: 487611 - DNA, 90 bp, Homo sapiens
gctttcttttcctcagaactactatattcagtggctaaatggctccctgattcatgcattcctctgaatattgatttgctgaatagccca

SEQ ID NO: 487612 - DNA, 101 bp, Homo sapiens
gcaaaggagattctcacaagatgataccagtagccggatcgagctgggagatgtgacaccacacaatattaaacagttgaaaagattgaatcaggtcatct

SEQ ID NO: 487613 - DNA, 50 bp, Homo sapiens
gctaggccatctgaataactttactaagcctaccgtatgtgaacgggagc

SEQ ID NO: 487614 - DNA, 90 bp, Homo sapiens
gatgccaacagtgtaccagcagggcgttggctatgtgcccatcacaggtcctgcacacccatgaagcgactgacccagctggtctgaagc

SEQ ID NO: 487615 - DNA, 96 bp, Homo sapiens
taaagtgttacatgacagatgtatgagggggaaaaaaatagtggctttgatgtcctctaccataatatgaaacatggacagatatcaacaaaagaa

SEQ ID NO: 487616 - DNA, 100 bp, Homo sapiens
tccacagcctagatgaagtcaatttcatacagaaccttgtgttttacattgaagctgcatataaaactgctagtgaccgccttctgatcagaggtgggag

SEQ ID NO: 487617 - DNA, 82 bp, Homo sapiens
catcgacttcggttcgggtgcgctgctcaaggacacggtctacaccgacttcgacgggcgtctctggccgagcctctttttg

SEQ ID NO: 487618 - DNA, 98 bp, Homo sapiens
tatatacaacaaaaaatagttatggcgactttcagaaacaatcacatgaagactaaagcatctgtcagaaaatagagacggggtttcaccatgttagc

SEQ ID NO: 487619 - DNA, 95 bp, Homo sapiens
gacaagccgctggcagccgcggatctcaccgccgctcagggatattagaaatggctactccccagtcaattttcatctttgcaatctgcatttta

SEQ ID NO: 487620 - DNA, 100 bp, Homo sapiens
ccagaaggagagagatgttatcatgagggaattccggtcagggtcaagtcgtgttctgatcactactgacttgttggatgaggtggtagtaaatgaccga

SEQ ID NO: 487621 - DNA, 113 bp, Homo sapiens
accgctccggcaacgccaaccgctccgctgcgcgcaggctgggctgcaggctctcggctgcagcgctgggtttggagcaggtatgttaagaagttaggggattttgctaagcc

SEQ ID NO: 487622 - DNA, 82 bp, Homo sapiens
cgcatccaccagctgcaggctgagcgcgcgcagggcttccgccgactggaggagtgagaagccctaccactgcaactgggac

SEQ ID NO: 487623 - DNA, 87 bp, Homo sapiens
ttacaatctgaaaactcgtgaggggaacgtgcgcgtgagtcgtgagctggcaggacacacagtgtctgcacatcaccgaacgatgag

SEQ ID NO: 487624 - DNA, 80 bp, Homo sapiens
ctgctccgtcatccatgccactgacagctgggaagtggtggaaggactgaggggggagatgaattacacccaggagccac

SEQ ID NO: 487625 - DNA, 75 bp, Homo sapiens
ccgactggaccgggaaggagcatcccaggacctaccagaatctggtaagaatgattgatgttggctgatattgga

SEQ ID NO: 487626 - DNA, 100 bp, Homo sapiens
ctcgaattccagaatgatgaaattgtatgtgttcagagcaacattgttttgttgacacaagcatttagaagaaagtttgtgattcctgactttatgtctt

SEQ ID NO: 487627 - DNA, 50 bp, Homo sapiens
gaaagctttaggagttcacagtgtttacaacatcattaagaaggagagta

SEQ ID NO: 487628 - DNA, 75 bp, Homo sapiens
cagcattggcgaccagcgcttcacgacttgggaagatccccatgaaaaagataagagcacgaactgctttggaga

SEQ ID NO: 487629 - DNA, 90 bp, Homo sapiens
caaatgcctcctgaggatttctgtgcctggaaaatatctgttaacagactgcttttacacctacgaaacatcgtgggaatcggccagtgc

SEQ ID NO: 487630 - DNA, 83 bp, Homo sapiens
gtttgcagaagtggaaggagcagaacgtgagggtgtaacttacaaaaagctatacacagaatgggattttacatatgctggac

SEQ ID NO: 487631 - DNA, 98 bp, Homo sapiens
aaaactgtggctgttggtttgtggaacagacagctccttctttattggaagccctgcatgttgcaggagtggaaatgcagttaacggctgcgatgtca

SEQ ID NO: 487632 - DNA, 100 bp, Homo sapiens
gaccaatgacatccttcacgagatgacgagccaaactcaggctgtaccttgagcagctcaagcaactggtgcccctgggccccgacagcacccgccacac

SEQ ID NO: 487633 - DNA, 87 bp, Homo sapiens
ggaccaacttctttggcaagtggacattttactggctcaagtagcacaggcggagtgcagcggaggcccctgccgctgccgtcatgc

SEQ ID NO: 487634 - DNA, 83 bp, Homo sapiens
cgaagtttgtcggcccttgccttggcagagctgagacaatgcagatcttcgtgaagactctgactggtaagaccatcaccctc

SEQ ID NO: 487635 - DNA, 74 bp, Homo sapiens
aaaagactcaggacggacaagcacagtcttcggaaggtatgatacatacagagatattcttgaacaccacctgc

SEQ ID NO: 487636 - DNA, 100 bp, Homo sapiens
aagcgattctcccgtctcagcctcccgaatagctgggactacaggttgctgcagcaactggtcacacagtagtgttggtagaccagacagaggacatcct

SEQ ID NO: 487637 - DNA, 99 bp, Homo sapiens
tttgaactctattcttcagctggcccagacagaagagaagagtcacatcatctagatgatgaatgaaaagatatgtcattattctcctttgggcagtgc

SEQ ID NO: 487638 - DNA, 82 bp, Homo sapiens
cactgggaccccggaatcccgcgcgctgcccacgattcgcttctgagcactattcctgatcagagaactccagttgcttcaa

SEQ ID NO: 487639 - DNA, 99 bp, Homo sapiens
cgaaatgagctttttgctctcaggccagctcctattcagacaaacctacctatcttcaagctaaaggagtcctgcgtacggcggcgctacagtgacttt

SEQ ID NO: 487640 - DNA, 100 bp, Homo sapiens
tcaggggaagatatgcatcagttccatcgagccattactacaggaaaaggggaagatagtgatgtactcagtataaatgcagatgcttatgacagcgaca

SEQ ID NO: 487641 - DNA, 100 bp, Homo sapiens
ctggtgtgcatgcagtgggcggctgaaactgccgccaaccggatctgtaaggtgctggctgtcaaccaagagaacgagcacctgatggaggactacgaga

SEQ ID NO: 487642 - DNA, 101 bp, Homo sapiens
gtcaggctctcggtggcggcggaggcggcggaggccagggaggaagatgtcgtaatgagcggctgaccggttccctgatgtgttacctgcttctgctactg

SEQ ID NO: 487643 - DNA, 51 bp, Homo sapiens
gacaagttggatattccaatgttctttgggcactccacagaaggatgttat

SEQ ID NO: 487644 - DNA, 100 bp, Homo sapiens
cggggatcctgctggactgcacgaaaaagatgaaacaggcgcctatttaatcgacagagaccccacctactttgggcctgtgctgaactacctgagacac

SEQ ID NO: 487645 - DNA, 51 bp, Homo sapiens
ggggctaactccagaatcccccattggtaaaacttcagtcaagaagctgac

SEQ ID NO: 487646 - DNA, 100 bp, Homo sapiens
ggaaaactcagggtacagtgcagcacctgcaggcaggcaacgctcaccttgacccaggtatcttgcaatatattcagaactctccctcctagtgacagca

SEQ ID NO: 487647 - DNA, 99 bp, Homo sapiens
ccgcctgtggccggtgacctccctcctccgagggaggggggttgtgaccccagattcttcaaagaaggaaccaaggtggaatttttggaagtatcttgt

SEQ ID NO: 487648 - DNA, 75 bp, Homo sapiens
gtgaacactcaagtgaagcaaaagccttccatgattacggattttttaacctggccctgctaatcgaggaaggta

SEQ ID NO: 487649 - DNA, 83 bp, Homo sapiens
ctaccaagaagccagtcaagcggccagatgccatggacaatattaccaggcagaaccaattctacgatacccaagtcatcaaa

SEQ ID NO: 487650 - DNA, 101 bp, Homo sapiens
tgcagccatcaaggttatggatgtcacaggggaggaagaggaggtagaacgggaaatcattaaacaggaagaaagtgtggatcctgactactgggagaaat

SEQ ID NO: 487651 - DNA, 80 bp, Homo sapiens
ccgacagtctgtctgttcgcgatcctgccggagccccgccgccgccggcttggaagttcagaaaaaagtgtcacgtttta

SEQ ID NO: 487652 - DNA, 100 bp, Homo sapiens
gccagagcgacctcccagcggtgaaagcgaggagacaggctgaatttgaacactttcagaggaggggggacacagcgattgccacgcgccattggaatgt

SEQ ID NO: 487653 - DNA, 88 bp, Homo sapiens
ggaacggctgaaggccctacgggagaaaaccgggcgcaaggattactacagcatcccatttcccacacccactactccgctgactggg

SEQ ID NO: 487654 - DNA, 101 bp, Homo sapiens
ccgagcgggacagcgcggcggggagcgacgagcgcatattaaatttcctattgactacccctattcaccacctaccttcagattcttgaccaaaatgtggc

SEQ ID NO: 487655 - DNA, 98 bp, Homo sapiens
gcaagaccgacgttattttcctggtggctgtgttcaaaaccacccaaagtgacaaatggcctacagctgtgagagcaaatggacatctcctcctgaac

SEQ ID NO: 487656 - DNA, 98 bp, Homo sapiens
taaatgggggcctctccagggagtgctctgttcacggctccatcgctgttagttggtcaaagaaaaagtgatgtatgaaaaagaggcaaaacaacaag

SEQ ID NO: 487657 - DNA, 80 bp, Homo sapiens
ggggagactgtgccgtggagggcctcgccatgtcctgctgcccggagatacaactcgtcaacgaatcaaattcagtgatg

SEQ ID NO: 487658 - DNA, 87 bp, Homo sapiens
gtgcattgactgttccggggtgcaccgctccctgggcgtccatctgagcttcatcaggcatgaacgctgctgtccgggctgtgacgc

SEQ ID NO: 487659 - DNA, 87 bp, Homo sapiens
cggcccggaggacctgcctctcgtcagaataatcatgggccagactgggaagaaatctgagaagggaccagtttgttggcggaagcg

SEQ ID NO: 487660 - DNA, 50 bp, Homo sapiens
cgaatcaagttgtccccaacagtgggatttgcagatttacagaatggctg

SEQ ID NO: 487661 - DNA, 100 bp, Homo sapiens
tcctgctggtgaccagcgtcacgctgctggtggcccgggtcttccagaaggctgtagaccagagtatcgagaagctcaggtaacggaggccttggaaaga

SEQ ID NO: 487662 - DNA, 98 bp, Homo sapiens
taagcctgtgaaggaccagcatgggaatcctatactctgagcatgttggcagataaattgaacatgactccagaagaagctgaaaggtggattgtaaa

SEQ ID NO: 487663 - DNA, 51 bp, Homo sapiens
tggaaattcctgacgttcattgatctgggtggacaagcttcatttacacga

SEQ ID NO: 487664 - DNA, 100 bp, Homo sapiens
cagatgcaattggaccaagagaacaatgggaaccagtctttcaaaatgttccagcaacagatagaaatgctttaagttcactctggggaaagctggcctc

SEQ ID NO: 487665 - DNA, 85 bp, Homo sapiens
cccattgggagttacttcagcgaagccggtactgcataagccgaccacagtataagacttcttgtggcatctcttcattaatttc

SEQ ID NO: 487666 - DNA, 83 bp, Homo sapiens
cagcctgctacagacgttatttttcacgaatcagctacgaaagaagaccacgtggccttaaaccaactgctgcaactctgtgt

SEQ ID NO: 487667 - DNA, 75 bp, Homo sapiens
tcaagtggttcagcagtttcttcatcaaaggccatcgaagacggcaatttggaggaaatggaagaggaagtacgg

SEQ ID NO: 487668 - DNA, 75 bp, Homo sapiens
aaagatccccgttcctggagattctgattgaggcttcctgtgtccagtaccggttagtggtccgggatgtgaaca

SEQ ID NO: 487669 - DNA, 89 bp, Homo sapiens
ggggacttgaaccagctgagcgctgccatcccggccacgcgggtggaggtgtccgtgtcctgcagttaactatgaaggcattgcccgaa

SEQ ID NO: 487670 - DNA, 80 bp, Homo sapiens
atgaagcctaagaatatgatcaggtgatgaacagcctccttctaaatcattgaccacatttcttattctttcctgaggat

SEQ ID NO: 487671 - DNA, 75 bp, Homo sapiens
agtgtgtccagagttatgcaacttgacccagaattccttgtgtggatatcagatccggatggaatctcgagcttg

SEQ ID NO: 487672 - DNA, 115 bp, Homo sapiens
caaccccctgccacctcagatatttaatggcgaccgatactgtggagttgctttcaagatgtacctgggaattacaccaagtgtgacctgtaacaattcaagcaaaaatgaattt

SEQ ID NO: 487673 - DNA, 100 bp, Homo sapiens
tttgtggaaccttagacaaaaaaggccagccatactccattctcttaaatttaaccgggaacggaactttccgctgtactttttgccatacagaggtaga

SEQ ID NO: 487674 - DNA, 100 bp, Homo sapiens
agtcaccccagattcgttcgaaccatcccggagctgagtgttcggccaagaccatttcagagatgtcttccagaagtaccaaagatttaattaaaagtaa

SEQ ID NO: 487675 - DNA, 100 bp, Homo sapiens
ccaccagtggagtccaggatgaggttattgcttacaactcagaaggtaaaagtaatccaagtgaagtagtagaatttactacttgccctgataaaccagg

SEQ ID NO: 487676 - DNA, 100 bp, Homo sapiens
cttcggtctggaaagcagtggcattgcaggaaccacctctgatgagcctgagcggattgaataattgcagtgagttatgaagctcgtgcatttggagtca

SEQ ID NO: 487677 - DNA, 75 bp, Homo sapiens
ccgggatccagttaggaaccttcacccccccaaggatgaaggacccaaggtgaagttattgccagtggactgtga

SEQ ID NO: 487678 - DNA, 75 bp, Homo sapiens
gtggccgattactgcgagaacaactacatacaggattccagtggaatgacactggtgatgcttgccgccgccgga

SEQ ID NO: 487679 - DNA, 101 bp, Homo sapiens
caaggccagaggccagcccaagtcggcccattccccgtttgcctcggaagtgagcagctactcttacagctgacttgacaggaattaagtggaaaaaatat

SEQ ID NO: 487680 - DNA, 98 bp, Homo sapiens
aaacaggccagttcgttggatggctcttgaaagtctggttaataacgagttctctagcgctagtgatgtggtgattttacaacgagatgctgctctcc

SEQ ID NO: 487681 - DNA, 100 bp, Homo sapiens
ctggactccatgccgaaggtatctggaagtcgtgacacgatgctctctgtgtgggtatgtgtgtagccatcctccttctttgaagtctcatatgtggaaa

SEQ ID NO: 487682 - DNA, 82 bp, Homo sapiens
ctcgcatcttcagggacagttatctgctttttaaaggagccagtctcagttggagggctgatagtaaaccttattggtatct

SEQ ID NO: 487683 - DNA, 100 bp, Homo sapiens
ggtgtctcctccaccaaggctgagctccgtgtggactgtcactggagttctggatgattgcttgtgtgatattgacagcatcgataacttcaatacctac

SEQ ID NO: 487684 - DNA, 100 bp, Homo sapiens
ttgattgtgtattatggataccaaggaagagaagaaggaacggaaacaaagttattttgctcggtgaagtattacagacacttagcacctgatcacttgc

SEQ ID NO: 487685 - DNA, 75 bp, Homo sapiens
tgtttgtaaattctccttttaccaaggtgacaagtcagcagcaggagatggctgtcttggacaggcagttagggc

SEQ ID NO: 487686 - DNA, 74 bp, Homo sapiens
cagaatctaatcaagcgagacccgccggcctacatcgaggagactcaccccacacagaccgcgtttctctccag

SEQ ID NO: 487687 - DNA, 83 bp, Homo sapiens
cccagaccctggagcctcagttggaagcagccgatccagcctgcggagcctgtggggcaggcagtgaaatcaactgtgcagac

SEQ ID NO: 487688 - DNA, 80 bp, Homo sapiens
cgaaacagatacagagatgtaagcccatagatgaggatgacatcaatgatgtgacttctatggcaggggtcaaccttaat

SEQ ID NO: 487689 - DNA, 100 bp, Homo sapiens
cgttcacagagctagccggacgtcctccgactcaagggaggtggggaagacagggctccagctaccacaggacgggctctgggtatagccgttccagtca

SEQ ID NO: 487690 - DNA, 90 bp, Homo sapiens
gaagcgtccttggattacaggagatgagagtattgtaggccttatgaaggacattgtaggaactagaagatcttctgccatctagaccgg

SEQ ID NO: 487691 - DNA, 90 bp, Homo sapiens
atgatgtcaacaaccgtggctcacaagatgaaagagcacaaaggaagctgttgaagttattgaagtacctgttgctatattctaagaaat

SEQ ID NO: 487692 - DNA, 75 bp, Homo sapiens
tttggtgcaaaactgcctccagatggaaggatatctcacgaatttgctttggttgtaaggatgcgaggcagcggg

SEQ ID NO: 487693 - DNA, 74 bp, Homo sapiens
aggacttagcagcagcggatgtaaaaaaacagcgttcagacccgttaccacattctcatctggagccaggagga

SEQ ID NO: 487694 - DNA, 80 bp, Homo sapiens
tgagttggacccagaccaagaagtggtgaggacaaggcctgaaggtggtcttcaagctgacagagaagctgacggaacag

SEQ ID NO: 487695 - DNA, 74 bp, Homo sapiens
tgaagtggcaggaggaggaggaggggctccggctggtctgtggtgaggaccagctggaagcagaaagaagaaag

SEQ ID NO: 487696 - DNA, 100 bp, Homo sapiens
ccgggacccggtgtctgctcctgtcgccttcgcctcctaatccctagccactatggtactccaaagattcaggtttactcacgtcatccagcagagaatg

SEQ ID NO: 487697 - DNA, 100 bp, Homo sapiens
cgatccgctgctcgcacgggagccagctgggtggtatttctggtggtcgcattcatatgtcagttttaggaaggcttgggacatttgaaactcagattct

SEQ ID NO: 487698 - DNA, 89 bp, Homo sapiens
ataacattccccagctggaagacgtttctcagttcctgcagacattaggtggtctcttcagtcagcctacacaagctcctacccagtcc

SEQ ID NO: 487699 - DNA, 100 bp, Homo sapiens
tgaccgagagcgtgaccgagagcgcgaatatcgtcatcgttagaaggtgaccattgtgaggtagatattttgttctaattttccagatgaggaagctgag

SEQ ID NO: 487700 - DNA, 100 bp, Homo sapiens
gctggagagcgtggacaagagcgcggggcaagtggctcggaacacaggaggagaacatttgcctgcactgggcggcgttctccggctgcgtggacatagc

SEQ ID NO: 487701 - DNA, 100 bp, Homo sapiens
cagttccagctccagtgggcaccgccagcacgcccaggagaataaaggcagccccgttgatgactgaaaatgacaaagcatccacctaacagacgaggaa

SEQ ID NO: 487702 - DNA, 83 bp, Homo sapiens
ctgagttgcaaacaaatgtcagatcccaggcataaacatttttttggatggctatgttccaacagaaaacttgagattcagag

SEQ ID NO: 487703 - DNA, 83 bp, Homo sapiens
atttgagccgccgcattttttaaccctagatctcgcagcccctgtcaaagggaacaggaagcagtccacggagggtgacgccc

SEQ ID NO: 487704 - DNA, 100 bp, Homo sapiens
cggatcccgagccgggcaggatggatcaccaccagccggggactgggcgctaccaggtggttttatgacttacctagtggagcctttatttacagaatgg

SEQ ID NO: 487705 - DNA, 90 bp, Homo sapiens
catcctgggcgtcccgcccggcgccagcgagaacgagctgaagaagttggtagctggcagtgttgtgatggcttttgaagaagtatgccc

SEQ ID NO: 487706 - DNA, 100 bp, Homo sapiens
ggaggctgtcggctaataacggaatgaagcaaagtcaggtggacgaagtgatttgataccaactatcaaatttcgacactgttctctgttaagaaatcga

SEQ ID NO: 487707 - DNA, 90 bp, Homo sapiens
ctggaatgtgaagagacaggaggcagcagacggacatccagccttgaaaagatcttttgaggtcgaggaggtcgagacacccaactccac

SEQ ID NO: 487708 - DNA, 75 bp, Homo sapiens
cgaaaagcaaatgggagatggacacatctgaggcaaagctaggggaactgccctctagggagacgttccctgcct

SEQ ID NO: 487709 - DNA, 101 bp, Homo sapiens
gggggtggttcggcgtgggggccgttggctccagacaaataaacatggagtccatcttccacgagaaagtgatggaattttactgccagtcctgtgagact

SEQ ID NO: 487710 - DNA, 75 bp, Homo sapiens
caactacaacaaggaggatgacatttgcagtcattggagaaatcgatgaagaaacagattctgcgcttgatttgg

SEQ ID NO: 487711 - DNA, 83 bp, Homo sapiens
ctgaccacgagcttttcctccaggcctttgagacaaaatgatgcttcaacacccaggccaggtctctgcctcggaagtgagtg

SEQ ID NO: 487712 - DNA, 122 bp, Homo sapiens
ctccaattctaccaggatggctctcttcgctggtggcaaactggttggatggcaagcatgtggtgtttggcaaagtgaaagaaggcatgaatattgtggaggccatggagcgctttgggtcc

SEQ ID NO: 487713 - DNA, 75 bp, Homo sapiens
gctgctcgcacgggagccagctgggtgagatttaccgcattgtttctcagaagcaaatgtcagacagacgcgaaa

SEQ ID NO: 487714 - DNA, 80 bp, Homo sapiens
gccgactgacactcgcagccccctcgggaggcccgacgcgactgggcccctcaggcctatatgaacccaatagcaatggc

SEQ ID NO: 487715 - DNA, 100 bp, Homo sapiens
ggagttcgactggcgaactggaaggccacgcctcctcccgcctgccccctcagccctgtggctgggggcagagctcagtttcagacccaaagtttacgcc

SEQ ID NO: 487716 - DNA, 100 bp, Homo sapiens
gctggattctgaggaccagcagatggccagtcacgagaacccagggtcctcactgagcagcgagtcgtcccccgtgtcctctccggccaccaaccacagc

SEQ ID NO: 487717 - DNA, 100 bp, Homo sapiens
ttatgctgatcacaaacaaatccttgaaagaagaagatggagaagaaatagttacctatgatccagcgctggagagcgaggtggcttcaataagcctggt

SEQ ID NO: 487718 - DNA, 98 bp, Homo sapiens
ctcagatctcggacaacccccattgcaatgagctttgcacagtttgaaaatctactggactgtccaacccattccggggtctcatgaagctgggcacc

SEQ ID NO: 487719 - DNA, 100 bp, Homo sapiens
atctgacagatgccagcgtagctgaatccagtaccaaaaacgtcaacaacagttttacggtgacttaagagattaaaattaatttggttgctgttggttc

SEQ ID NO: 487720 - DNA, 75 bp, Homo sapiens
catgagacaaatgcgctcagcttcaattgccaaaattgcctggaaaagagcagtgagaggagtccgggagatgtg

SEQ ID NO: 487721 - DNA, 90 bp, Homo sapiens
gccccaggaaccccagggccagccactgcagtgcccctggtgtccaagatctgccctagtgacacctacaaagtgtggaagagcggccag

SEQ ID NO: 487722 - DNA, 75 bp, Homo sapiens
aagattagcaaaggtgctaatccagtggaaatcaggagagatagggatgaggaagaaatgaccaaacgagatgac

SEQ ID NO: 487723 - DNA, 90 bp, Homo sapiens
ctatgcaggatcttttggaagaagcatcctccagggacatgcaaatggctcccagccccattgccaataccttcctccactatcgaacca

SEQ ID NO: 487724 - DNA, 123 bp, Homo sapiens
cgccatcatgccggccgtgtccaagggcgatgggatgcgggggctcgcggtgttcatctccgacatccggaactacgcaaacatgcagatctttgtgaagaccctcactggcaaaaccatcac

SEQ ID NO: 487725 - DNA, 75 bp, Homo sapiens
agtagaaggaaaaaaggaaccaggatacatccggaaagatatgatccgccaaatgatgattaaaatatttcgctg

SEQ ID NO: 487726 - DNA, 75 bp, Homo sapiens
tacgagcgcaccagcgaccacaagatcgtcttctttaaagttactccacaggatccgctgaacataggatgttgc

SEQ ID NO: 487727 - DNA, 100 bp, Homo sapiens
acagaacaggccctatggggcatacctatggctttattgacctcgactcccatgcgtacgaattggagcaatgttggcttatacacctctggatgagaag

SEQ ID NO: 487728 - DNA, 75 bp, Homo sapiens
cagttctctcaatacataaagaacagcgtaactccagacatggtgagaagccctaccactgcaactgggacggct

SEQ ID NO: 487729 - DNA, 100 bp, Homo sapiens
agaggcggcggtggcgagaggtgcggcgaaggaggcagaggcacttatgcttgtcagcagttgcgattcttgcagcatcaaatggctatggcagcagcag

SEQ ID NO: 487730 - DNA, 75 bp, Homo sapiens
ccgagctggttggtggcggcggtcgtgcgggctgccacctaaaagactttggagatttgagttttactccagtcc

SEQ ID NO: 487731 - DNA, 75 bp, Homo sapiens
gatcatcattaaggacggaggcacgggttatgtggtccgaatcagtggtgggaacgacaaacaaggtttccccat

SEQ ID NO: 487732 - DNA, 83 bp, Homo sapiens
caaagcagcgcccgtctgcttcgggcctctggaatttagcgctcgcccagctagccgcaggatcagtttgacaacttagaaaa

SEQ ID NO: 487733 - DNA, 120 bp, Homo sapiens
cactgaggaggccgagagatgaggccggagcccaccaagttctgggaagtttctgggtgtctctggggagcccctgggccagattttcctctagactccagcccatctcttcagagcagc

SEQ ID NO: 487734 - DNA, 100 bp, Homo sapiens
ccgattacagcccgggggaatcttttttcactgtctttggggttttcttcccagcggctacagatatggctcgtggacagcagaaaattcagtctcagca

SEQ ID NO: 487735 - DNA, 95 bp, Homo sapiens
ccggaaggaggtgctgaggtttgcagtcagctgccgtatcctgactctgatgctgcagggactttgaacatgtcggggatcgccctcagcagact

SEQ ID NO: 487736 - DNA, 99 bp, Homo sapiens
gcagacgctgtgctcgctggcaccccgaacgggttgcttcccccgctgcgagtgcaccgtccaggtgaggttagagctggggcatcgcgcccaactgcg

SEQ ID NO: 487737 - DNA, 97 bp, Homo sapiens
gaagagtactacgccaaggaggtttacaaaatagacatgccgcccttcttcccctccgaaagtgtgataaagcggaattgggaatatatatgtagcc

SEQ ID NO: 487738 - DNA, 75 bp, Homo sapiens
cttcgcgtcccctgcaccatgagctggggcaccgagctctggatgtcgtgatctcaacagcttgtcacccaacag

SEQ ID NO: 487739 - DNA, 90 bp, Homo sapiens
tgtgtggagcacacattgaatgggccaaggaaaaatcgagcagaaagaatgtctttcagggccatcgatgcacccctcggagctaatagc

SEQ ID NO: 487740 - DNA, 100 bp, Homo sapiens
acctccagatccatcacgtggggcaggacggtcaggtcagcccaaggccaaccccactgtcactctgttcccgccctcctctgaggagctccaagccaac

SEQ ID NO: 487741 - DNA, 74 bp, Homo sapiens
ggacaggttaagggactcccaggaatatcagtgacaaaggagagcatgcttccagctggagctgagtccaagca

SEQ ID NO: 487742 - DNA, 74 bp, Homo sapiens
agcagccgatccagcctgcggagcctgtggggcagcgagttgaaaatggtgacttcaactggattgttccagga

SEQ ID NO: 487743 - DNA, 100 bp, Homo sapiens
aagagagcaacgccagagcccaggtgcccagaggactttcttccagcttctgctgtccttctttgtggagagcaagtttgtcctgaagaattatggagag

SEQ ID NO: 487744 - DNA, 120 bp, Homo sapiens
agcagatgacaaaacttcaagccaaacatcaagcagaatgtgatttgcttgaagatatgagaaactcaagccagtggattatgagtaccgagaagaagtccactgggccacgcaccagct

SEQ ID NO: 487745 - DNA, 75 bp, Homo sapiens
cctcggaaaatggttcccactgccgggcgagtatacgctcaacggcaagaaagtggaagttgccgtcaaacagat

SEQ ID NO: 487746 - DNA, 100 bp, Homo sapiens
ctacttctcagctttaccatccctggaggagacctggcagcaggtgtgatgaatgcagactctgctaccattttggctgtttggatcctcctttgaaaaa

SEQ ID NO: 487747 - DNA, 50 bp, Homo sapiens
ttcctggtgctgcccctgggcaagcccttcctagggtgtggagagcgggc

SEQ ID NO: 487748 - DNA, 80 bp, Homo sapiens
cctgggccttggcaagcggcccttcgatgcagtgcaagctgtttgtctttgacaagacctcacagtcctgggtggagaga

SEQ ID NO: 487749 - DNA, 100 bp, Homo sapiens
gactgcagtcacagtggactcccaaggggcagttggcctttaccagagtttgatccaagccagattcgactgattgtatatcaagactgtgaaagacgag

SEQ ID NO: 487750 - DNA, 100 bp, Homo sapiens
gagaagaggatggccatcttttttcccaggctggttatatgattatacccagacatacaatggctctttctacttctctggcatatgctatctcctctct

SEQ ID NO: 487751 - DNA, 75 bp, Homo sapiens
ccgttggatatccacaccatccttctcgctgcaggaaacaagtcaccaagctctccagaacatgcccaaagtgct

SEQ ID NO: 487752 - DNA, 90 bp, Homo sapiens
gggacccacactggcttttaaggaggacacccggacacctggaagctgggaaatgtccaaggacaaaatgatgagaggctctcgcagagg

SEQ ID NO: 487753 - DNA, 123 bp, Homo sapiens
cgcgccgggagcggcgctggccccaaggcgctgccctgcgcaggcccttgccagcatccagccatgggggatatgaaaaccccagattttgatgaccttctggctgcctttgacatcccagac

SEQ ID NO: 487754 - DNA, 100 bp, Homo sapiens
gagctcaagtgtgctcagaatgaggtgcttcggtttcagacctcccacagtgtcacccaggtgatttccatggtgatggtggctgtgggtgtctacgctc

SEQ ID NO: 487755 - DNA, 50 bp, Homo sapiens
gaggagctgagcgagcgcggaaggtgttccccctcccctccctggggcag

SEQ ID NO: 487756 - DNA, 90 bp, Homo sapiens
ccgggcgattggcatcctcagccgcttttctgccttcaggatcctccgctcccgagatctatccatactaatggaaatgtaactggaact

SEQ ID NO: 487757 - DNA, 90 bp, Homo sapiens
ctgcggggaagtcaatggtgtcattgcagagcatgtctgttcgatcctggcttccctcctgcggaacctgagagggcagcagcggacccg

SEQ ID NO: 487758 - DNA, 100 bp, Homo sapiens
agaagaccagaagtggatggagatacatagtggaatgtcatgggatcacccttcttccccagttcttgggcatgtaccggcttaatgttgatggagttga

SEQ ID NO: 487759 - DNA, 100 bp, Homo sapiens
aacaatattgatgatgtagtaagttctaatacccgatttacaattacattgaactacaaggatcccctcactggagatgaagagaccttggcttcatatg

SEQ ID NO: 487760 - DNA, 88 bp, Homo sapiens
ccgcaccatgccgctcctaagcctgcacagccgcggcggcagcagcagtgagagttacagacgttccacgttccgtctccctgtgcca

SEQ ID NO: 487761 - DNA, 101 bp, Homo sapiens
cagcgagaggcgaagcggtttaccatggaacccgtgaccaagtggagccccaaacaagtggtggactggactagagaattctctggtggttgagatcccgc

SEQ ID NO: 487762 - DNA, 90 bp, Homo sapiens
ggatcttctgcggattgttggaatctacctgttcaaagcttctttcagacaccagtgttattcagttctacccaagcaaatttgtcctta

SEQ ID NO: 487763 - DNA, 75 bp, Homo sapiens
gaaaggagcagcacttcaggagtttctcctggcggcgctggtcctgtctctcattctgccgaggagcagccagta

SEQ ID NO: 487764 - DNA, 76 bp, Homo sapiens
aaccttcccttcttgaacccccagtgctgctgcagcacggagctgacccaaacattcggaacactgatgggaaatc

SEQ ID NO: 487765 - DNA, 90 bp, Homo sapiens
caccgccatggctgccccgtgtttgctgcggcaaggacgagccggggcgctgaagcatggcctgtatgagaagaaaaagacctcaagaaa

SEQ ID NO: 487766 - DNA, 83 bp, Homo sapiens
tcgaggacttcacggagctctggagaaacatgaagttcgggactatcttctgacagttgaatttctgaatgaaaagctggaaa

SEQ ID NO: 487767 - DNA, 90 bp, Homo sapiens
taagaaggcgctgaagggcaaggaaagcagcatagagaatgagatagccgtcctgagaaaacagtgatctgacacaaacacagctgaagc

SEQ ID NO: 487768 - DNA, 75 bp, Homo sapiens
cctgcactctgtcaagtcgctgtctgtcttccatgcccaggccaatgagtgccaggagcgccctgttgagtgtaa

SEQ ID NO: 487769 - DNA, 75 bp, Homo sapiens
ccggactaaggaccggggacttcttgattgagcctcgccgctcctgctatttgccaaccgccgggacgtacggct

SEQ ID NO: 487770 - DNA, 100 bp, Homo sapiens
cccaacttcatcacccctctcttccaaatcctgtagccataaatgtctggctaatggcatttacaggagggagtaatgtggtcattgcatcccgtaagtt

SEQ ID NO: 487771 - DNA, 98 bp, Homo sapiens
cagccataaccactgaggccacagcacagtgcataccagtggttagcaggaagaagatgagccttaagtctgaacgccgaggaattcatgtggatcaa

SEQ ID NO: 487772 - DNA, 101 bp, Homo sapiens
aggacatcgacatccaggcgaactcggcctatcgctaccctccgaagtccgctgggatctagcaattgggaggcagcagacttgggtaatgaagagagaaa

SEQ ID NO: 487773 - DNA, 50 bp, Homo sapiens
attttttcaccatgctaaaaagcatttgctggacaaattatgcaaagaaa

SEQ ID NO: 487774 - DNA, 100 bp, Homo sapiens
gagtcttggattcgtgaacagaccacagtggaccacttctggggtgctggagaatctggtaaaagcaccattgtgaagcagatgaggatcctgcatgtta

SEQ ID NO: 487775 - DNA, 50 bp, Homo sapiens
ggcccgtcaagctgcgcctgacagatttttggaagtaccagcacagtgac

SEQ ID NO: 487776 - DNA, 98 bp, Homo sapiens
gcagccgcagccgcctccgaagatgggggatttctacgacccggagcacccgacccctgacccctggcgaagcggtgctgcctccagcccagagatgc

SEQ ID NO: 487777 - DNA, 117 bp, Homo sapiens
agacggcggccttcgaggaggtcatgaaggacctgagcctgacgcgggccgcgcgggtgagaagccctaccactgcaactgggacggctgcggctggaagtttgcgcgctcagacga

SEQ ID NO: 487778 - DNA, 100 bp, Homo sapiens
aaactggaaagaagatgctaattaaagtgaagctgaaccttagccggccgatcgaggagcagggccccctggacgtcatcatccacaagctgactgacgt

SEQ ID NO: 487779 - DNA, 51 bp, Homo sapiens
aaggtcctcgaggtgcctcctgttgtggtgattgtagagaaggctccaaaa

SEQ ID NO: 487780 - DNA, 100 bp, Homo sapiens
tgtagaagatcggcttgaaattaccaactgctttcctttccctcagcacacagaggatgatgctgactttgatgaagaaactggcgatggaatatgagag

SEQ ID NO: 487781 - DNA, 96 bp, Homo sapiens
agtcgcagcgagctggagccgccggagaaccccagctcaaagggattgtgacaaggttattcagccagcagggatacttcctgcagatgcacccag

SEQ ID NO: 487782 - DNA, 82 bp, Homo sapiens
gaaacagatacagagatgtaagcccatgttacaggaggttccagtggcatcgggaagtgcattgctatcgagtgctataaac

SEQ ID NO: 487783 - DNA, 100 bp, Homo sapiens
tgagggattagatcttgtcattcagtggtgtcgaatgctcaagtgcaatgtcaagagctttctggtgttctagaacagatcagacattttgtaatgatgc

SEQ ID NO: 487784 - DNA, 100 bp, Homo sapiens
ctgtcatgatcgtgatggtgccgtcgctcatcaagcagcaggtccttaaggacaaatatcagtggatgggttcatgcgctatctgagtggagaagaaaac

SEQ ID NO: 487785 - DNA, 100 bp, Homo sapiens
cccaccgacacgaattggccttattaatgatatgtaggagagaagtttgctgaggaatgccttcaagcacaaagtgatgaatgactgccttcaagtctca

SEQ ID NO: 487786 - DNA, 89 bp, Homo sapiens
gcgagggcgccgagcaacttcggctggcgcccatgcggctctacacgctctccaagcgccactttgtcctcgtgtttgtcgtcttcttc

SEQ ID NO: 487787 - DNA, 102 bp, Homo sapiens
gagtctcggcgggaaaatcaggtggaccttcctggacatatcctggaccaggcttttctgactttatattcagagcaccaatcaaattaagcaagcctgggg

SEQ ID NO: 487788 - DNA, 100 bp, Homo sapiens
tactctttctagtggaatatcaatagcatttaaatcaaacggtattgagatggattgggttatgaaacataatggtccaaatgacgctagtgatgggaca

SEQ ID NO: 487789 - DNA, 100 bp, Homo sapiens
ccgcgtgcaacctgtcccgactctagccgcctcttcagctcgccatggatcccaactgctcctgcgccgccgactttctgctgacccctctgtcacccac

SEQ ID NO: 487790 - DNA, 90 bp, Homo sapiens
aacagggctcgagtctacctggatgaaaactacaaatcccaggagcacttcacgcttggtgtaaaaattgccaaagcagttgcctgccac

SEQ ID NO: 487791 - DNA, 133 bp, Homo sapiens
ccagtgagagcattttggaagaggaaccacaagaaaatcaaaagaaacttttgcccttatcagtaacacctgaggtatgtatattaggttaggctgggaagttttttttaaaaacagaaaaacgtgatggagg

SEQ ID NO: 487792 - DNA, 100 bp, Homo sapiens
cacctctgcgtttttccctccagaaaactgtcgctgaaaagcaggagaagagaaatcaggatcgcttgaggaggagagaggagagggaacgggaggagcg

SEQ ID NO: 487793 - DNA, 100 bp, Homo sapiens
cctcctccaagaccgtgctggtctttctcaacctcatcttctgggtattccaaagttgattacgtctgatatggttaaagaaggtgctgctgtaattgat

SEQ ID NO: 487794 - DNA, 100 bp, Homo sapiens
gctgcctgcaccatgtccgccagagggtgttttgaatgctgtatcaaatgcctggggggcattccctatgcctctctgattgccaccatcctgctctatg

SEQ ID NO: 487795 - DNA, 82 bp, Homo sapiens
cgggtgcctttgaaaatcaacgacaacttgagcacagccttatgccagcctggaccatcttggaggcagtgtaggatcatgg

SEQ ID NO: 487796 - DNA, 82 bp, Homo sapiens
tgtcattaaaaattaagcgtggcttttgaggaagatgtgacaactaccggagagtaacagactagctagagacaatgaatta

SEQ ID NO: 487797 - DNA, 78 bp, Homo sapiens
gcgcctccctgcgactcctggaccaccgggcgctggtctgctcccagccgatagcctgggctggaagctcttctacgt

SEQ ID NO: 487798 - DNA, 75 bp, Homo sapiens
tctacaaccttggagcccagagccacgtcaaaacaacgactgaaagacctttcattcagaagctgtttcgtcctg

SEQ ID NO: 487799 - DNA, 75 bp, Homo sapiens
ccgcagttcatcttcctccctgtgtactttccatttgccttcctggacgaagttatacggaagcgtctcctcatt

SEQ ID NO: 487800 - DNA, 87 bp, Homo sapiens
gccgccgtcggcagcaagaacagagagagaggtggacagatctgagagatactgaggatgagacctgcacgcagtggctcacagcag

SEQ ID NO: 487801 - DNA, 74 bp, Homo sapiens
tcggctcagccgggcagtttgaggagctgctgcgcctcaaagccaaccaatcctgaggcaaaagaaacatttta

SEQ ID NO: 487802 - DNA, 82 bp, Homo sapiens
cgaaagaagaagaagagcaaagggccttctgcaggcggctatgagaggttttcctccgagtacccagaattctgttctaaaa

SEQ ID NO: 487803 - DNA, 75 bp, Homo sapiens
cgcagaaagcaggcgaacccgcggcgcaataacgacctggaatggccaaatatcaaggtgaagttcaaagtttga

SEQ ID NO: 487804 - DNA, 118 bp, Homo sapiens
cggccgccccgggcaccgcggtgctgctggtcacggccaacgtgggctcgctcttcgacgacacaatgcagatcttcgtgaagactctgactggtaagaccatcaccctcgaggttga

SEQ ID NO: 487805 - DNA, 100 bp, Homo sapiens
acagtgacgaagagaactgtctcctggtgaccgagcacccgcctccgggcatcttcaactgtccagacatcatctggtctccctgaacctgaaatcacac

SEQ ID NO: 487806 - DNA, 75 bp, Homo sapiens
tatccttaaacctgacttaaggattgtctttgtacataacaagatcgaaattgcccagaagcatcctgatatcta

SEQ ID NO: 487807 - DNA, 119 bp, Homo sapiens
caactgctcgggccgcgggctgcggacgctcggtcccgcgctgcgcatccccgcggacgccacagcgctgaccaagaatcgccttcagccctgtctggtgcatccttggcagaaagtga

SEQ ID NO: 487808 - DNA, 95 bp, Homo sapiens
agagctccgggacaatgataagactcgctatatggggaaggaatttcagaaactgtggaggagtgtcactgtagattccatggacgaggagaaaa

SEQ ID NO: 487809 - DNA, 100 bp, Homo sapiens
ttggtgggccgctgggtgccctttgccgctgtggctgcggctaactgtgtcaatatccccatgatgcgacagcacatgaagaggaaccacctcagaatat

SEQ ID NO: 487810 - DNA, 100 bp, Homo sapiens
cggcgcttcctgacgcagccgcaggtggtggcgcgcgccgtgtgcttggagacgttcggagcccaggacatgtcgggaatgaggagatacgaggtggcgc

SEQ ID NO: 487811 - DNA, 100 bp, Homo sapiens
cacagatttgcttttacaccaactccgccgcatgcaagagatgattgcaaggatgcaggcgcagatgcagatgcagatgcagggcggggatggcgatggc

SEQ ID NO: 487812 - DNA, 90 bp, Homo sapiens
ccatgagcgacgtggctattgtgaaggagggttggctgcacaaacgaggttgttcctcaaagtcattcaagctgtactcgccgaaggagc

SEQ ID NO: 487813 - DNA, 98 bp, Homo sapiens
ctttcaaaaatgatgcttatgagtactgcaactgcattctatagattgacaagaaagtgtcactactccatccagaagggagctgcgtttctgggact

SEQ ID NO: 487814 - DNA, 98 bp, Homo sapiens
ttatagaagtacgtccaggaatagaagtgacctgctttttcgcaagggatggtttagacaacagtgtagcttcacctggtacaggtgacgatgatgat

SEQ ID NO: 487815 - DNA, 83 bp, Homo sapiens
cctgtcacaggccatgctctggcaaaaactctccatctgctgctgcctcttcatcctcttcctcttcctctcggagctcaccg

SEQ ID NO: 487816 - DNA, 90 bp, Homo sapiens
tgaatcacacgccgccatccgggaggcccagggaaggcagtggagctactgctgtggttcaggcagccctatgcaaacccaggcaagaac

SEQ ID NO: 487817 - DNA, 50 bp, Homo sapiens
gaaagagtcaacagcagtggcaacagcccaagaagatgaaaggattgttc

SEQ ID NO: 487818 - DNA, 98 bp, Homo sapiens
accggtagcgcttgcagcatggttttgtagtgcatccctgagcatgagcacagaatgaagcggcgtttggatgaccaggagtcaccggtgtatgcagc

SEQ ID NO: 487819 - DNA, 75 bp, Homo sapiens
acagcacagacagaatccctgctaccaattattcagagctgggagagcttcccccacgatctcctttagaaccag

SEQ ID NO: 487820 - DNA, 100 bp, Homo sapiens
tttaattctggaattctagagcctaaagagcaggaatcatggactgtggatgagactgtgatgcctggatgtacagccatctgttgaccataatactgaa

SEQ ID NO: 487821 - DNA, 100 bp, Homo sapiens
gagagggagccgcagctgatgtcaggagcctggctcaacccgtcagtgattcaagtaagactcaaggtcctgtagccacagagccagacaaggatcaagg

SEQ ID NO: 487822 - DNA, 82 bp, Homo sapiens
cctctcttggagcaaatgatgaagacatccggaagaaggttagcatggcctcattgaaagaactagatcaaagactctttga

SEQ ID NO: 487823 - DNA, 100 bp, Homo sapiens
ccatcagcaagcagtttattgtcccatgttttcttcaaacaggttgatcttggaggtggattgaaacctcctggatattatgtgcagaggtcatgtggac

SEQ ID NO: 487824 - DNA, 82 bp, Homo sapiens
cgtgggaggccaggacaagattcggcctctgtggcggcactacttccagaacactcagctgcctgtggaggaaccgattgtg

SEQ ID NO: 487825 - DNA, 50 bp, Homo sapiens
gctgtactaggactgggaacggcttattcagctgattctgaatcatctta

SEQ ID NO: 487826 - DNA, 97 bp, Homo sapiens
ggaagccatttccaaagacaacatcctttacctacaggactacttccagcaacccagtctcctgccatgtccgaccccatcacgctgaacgtcgggg

SEQ ID NO: 487827 - DNA, 90 bp, Homo sapiens
ggctcgagaatacagagagaaaattgagacggagctaagagatatctgcaatgatgtactgttcaactttgtggggaaacttttgggtcc

SEQ ID NO: 487828 - DNA, 96 bp, Homo sapiens
aaaccgatctgcccgttgtgtttgtgaaacagagaaagataggcggccatggtccaaccttgaagtggtggtgaccgcggtggcttcaaaaatttt

SEQ ID NO: 487829 - DNA, 100 bp, Homo sapiens
gaactgtttgtagccctcgtccagacgccccaaacaaacatcacctctgacaaaattctggggacgctgggaacactgaatcaacatgggcaatgagaac

SEQ ID NO: 487830 - DNA, 96 bp, Homo sapiens
ccgcatctcaacaaattccgcgacaaccagatcagaactatgttgtgcttctggactccacactccccagatcccagtatgactacatcttgcctc

SEQ ID NO: 487831 - DNA, 75 bp, Homo sapiens
tttgtgctgtacaagtgtttgcaggtcttcgccttgatcgtgttctcctgcatctatggtgagggctacagcaat

SEQ ID NO: 487832 - DNA, 100 bp, Homo sapiens
tttcagcattatagagcaattccaggagtagtagagagcaagtgtcgtggacttcgtactgctaggaagctccgtagtcaccgacgagaccagaagtggc

SEQ ID NO: 487833 - DNA, 98 bp, Homo sapiens
cattgggagaaatccccactcctccaagaaccaacccccaaattggctgggacaggaagaaggagagacgaccatcttgcaactagaaaaagatttgc

SEQ ID NO: 487834 - DNA, 83 bp, Homo sapiens
ctcctactgcttcgcgtccagacaggtgttggaaatcaatagctcttctagcctttgcattgtttaaatataatagtgtcatt

SEQ ID NO: 487835 - DNA, 74 bp, Homo sapiens
ctgcctatagaccaggcgtcttttgccagccaaaacaggcatctccttggaaacaatgccatctttgaatgtga

SEQ ID NO: 487836 - DNA, 100 bp, Homo sapiens
ccggagcaagcggagctcccccaagagccggaaagtgttttccaagcagtgaagcacttgccgtgttgaactgaatgcactactggagaatgttctgggt

SEQ ID NO: 487837 - DNA, 99 bp, Homo sapiens
cagacagcagatcgagtcctaccccacggacagcatcctggaggaccagtcagaccagcgcgtcatcatcaaggagctcgcccgtcagcgaggagtcct

SEQ ID NO: 487838 - DNA, 50 bp, Homo sapiens
ggacgagcggcggggagcgtcctgggtgctggagaatctggtaaaagcac

SEQ ID NO: 487839 - DNA, 78 bp, Homo sapiens
tggaggatatgttgctcaccaccctttctgggcttcagcatgtactcccaccgatgaagacttccggggcaggcgtca

SEQ ID NO: 487840 - DNA, 48 bp, Homo sapiens
agaaacaaactacatctcagggccataggaaaaggatacagagtagag

SEQ ID NO: 487841 - DNA, 100 bp, Homo sapiens
aggtggcttatcaaacttgggaataaaaagtattgtaacagctgaagtgtcttcaatgcctgcttagttttgccgaattgacaagcccctgtgtcacagt

SEQ ID NO: 487842 - DNA, 76 bp, Homo sapiens
atcttctgggagctgaggaaccagatatcttgaaaagctgccagaaagcttttctccatggaatccttctgtacat

SEQ ID NO: 487843 - DNA, 101 bp, Homo sapiens
gcggggctttggacgccggtggagacgcaggcgagaactgataaatttcaaacggaagagagtggcagcatttagaaagaatctaattgaaatgtctgaac

SEQ ID NO: 487844 - DNA, 96 bp, Homo sapiens
gactctgcatgtgcccgagcacttcatagcagatgacaagttggatggcttgaggactggtactaaaaggaaacgtgactgggaggccattgccag

SEQ ID NO: 487845 - DNA, 100 bp, Homo sapiens
gccgtgtcccgaggaagtgcaagacccggactccatgttttcgttggccctgaaatgccttatcagtctgtccaccatcatccttttgggcttgatcatc

SEQ ID NO: 487846 - DNA, 100 bp, Homo sapiens
aagaaaaagagcaggaagtcattacatgattggtccagaaaagggcgtggtgcacctggcgacagcggccgtcctaaacgcggtgtgggacttgtgggcc

SEQ ID NO: 487847 - DNA, 75 bp, Homo sapiens
gctctggtacacgctggacagagcccctgaaggcttaatgccagaccgggagttggaggtgtccgatctcgagtt

SEQ ID NO: 487848 - DNA, 76 bp, Homo sapiens
tcagatggcagacatacatcatttaaaggcatcagacaacagtcagcgctttcgagaaacctgttttgcatttgcc

SEQ ID NO: 487849 - DNA, 82 bp, Homo sapiens
ctctttccgccctaatggaggtctccagtttcgcaaattgtggctactaatttgccccctgaagatcaagatggctctgggg

SEQ ID NO: 487850 - DNA, 100 bp, Homo sapiens
tgaagaagaagacagtaatagcagggaatcattatccttggctgatttttgaatcagagccgacaggcacttgaattgaaaatggaaaaccctactgctg

SEQ ID NO: 487851 - DNA, 75 bp, Homo sapiens
ggcctgggaagccaacgaccacacgcaatccagagacaatggccccgatgggatggagcccgaaggcgtcatcga

SEQ ID NO: 487852 - DNA, 101 bp, Homo sapiens
caaaccctagtgaataaagccaagagagaccttggagtaattcgtcgacagctccagtggctgttggacaattatgagacagcagaaggagtgagccttcc

SEQ ID NO: 487853 - DNA, 98 bp, Homo sapiens
ctacttaatcctactcagaagaacttgtacagagatgtgatgttggagaactatagcaatctggttttcttggaaattttggacggtgtggaacttgg

SEQ ID NO: 487854 - DNA, 82 bp, Homo sapiens
atttcatccaccacattacttaggtactccaaagattcaggtttactcacgtcatccagcagagaatggaaagtcaaatttc

SEQ ID NO: 487855 - DNA, 82 bp, Homo sapiens
gaaacaagatggtccttaaaaccgaagaggaggacggtcagcccaaggccaaccccactgtcactctgttcccgccctcctc

SEQ ID NO: 487856 - DNA, 101 bp, Homo sapiens
ctcaaaatgaggaaattctgtatgttcttcgccattatattcaggtagtggctctttatgactacacagcgaatcgatcagatgaactaaccatccatcgc

SEQ ID NO: 487857 - DNA, 100 bp, Homo sapiens
ggaaaatgcaggctgcaacaaaattggcaacttcagtactgacatcaagggcgtgatggtgggcatgggtcagaaggattcctatgtgggcgacgaggcc

SEQ ID NO: 487858 - DNA, 102 bp, Homo sapiens
gctgtttacatctttgccaagaagaacgacattcccttcgagctgcgcatcgtggatctgattaaagatggcctgaagcaactgaagatccacaaaagaagt

SEQ ID NO: 487859 - DNA, 101 bp, Homo sapiens
tgaagacaaccaggatgaagacctttataatgatccacttccacttgatgaatagagaatggtgttgaacgcgtgtgtcctgagagcctgctgcagtccag

SEQ ID NO: 487860 - DNA, 100 bp, Homo sapiens
tcagtttcagccatgatgggaaaatgctggcgtcagcatcggaagatcattttattgacattgctgaagtggagacagatcggcttcagctccccaggaa

SEQ ID NO: 487861 - DNA, 102 bp, Homo sapiens
gggaaatcgtgcacatccaggctggtcagtgtggcaaccagatcggtgccaagtgtgatgtgctggtggaagagtttgaggaggtgatcgaggactggtaca

SEQ ID NO: 487862 - DNA, 90 bp, Homo sapiens
ttttgcctttagtgcacccgctgccagaagggctgagggcttctgcagatgctaagaaggtatcctccatgaaatgtgggatccttccaa

SEQ ID NO: 487863 - DNA, 100 bp, Homo sapiens
cgaaaagctgactaattattcgatggctgtatgggcgaaaaagatgaccgaaattcaaactcctgaaaatactcctcgtttatttgatttagtaaaagta

SEQ ID NO: 487864 - DNA, 82 bp, Homo sapiens
agtacatgaagcacaccgtggtagtatactggtagggaaaagtggcaatgtaccagcaggcactacagtggatagtaccatc

SEQ ID NO: 487865 - DNA, 74 bp, Homo sapiens
gaaggtaccaaggattggagcacagaggctcagaagcaagtccaggattcagtccccgtgggggtggctttggc

SEQ ID NO: 487866 - DNA, 100 bp, Homo sapiens
gcgagctcgcgatgagtggtctcggcaggctcttcgggaaggttaagtgggcagaccaacatccacctcagcaaaaacttcttcctgacgaatcgcgcca

SEQ ID NO: 487867 - DNA, 80 bp, Homo sapiens
cagctgaaagatttactgcctgaacatctgaaattgacactaatggcagcattagccgctgttgggcctcctaatcctcg

SEQ ID NO: 487868 - DNA, 97 bp, Homo sapiens
gcttgtggtgcggcctcaccatacaggaacagggcagacgttagcgtgagtgatcactctcaatcccggtggacttggcagtggagtgtgcccatca

SEQ ID NO: 487869 - DNA, 90 bp, Homo sapiens
gccaggccccccaacatggactgtctctgtatagtgacaaccaagctcatgatggagcagtccaagaagtcctccctcatggtggcccgc

SEQ ID NO: 487870 - DNA, 83 bp, Homo sapiens
agacgttttccggagggattccatcatagtgtactaatggtcacttgatgtgcgctggctgttttatccacctactagcagat

SEQ ID NO: 487871 - DNA, 101 bp, Homo sapiens
cccgggtgctgctggttagtgtgctctgagggagggtccgagccagccgctgttttgccggaggagcccctcaggcccttagaccatgctcagcctccaag

SEQ ID NO: 487872 - DNA, 75 bp, Homo sapiens
cgggcagattagcgacatccgagtgcagaacctgcaagtgaaaatgcctcgtgtaaaagcagctcaagctggaag

SEQ ID NO: 487873 - DNA, 75 bp, Homo sapiens
cggacgtagcccggcttgtattggcaataggagtgaaacatccacatctgataacacagaaacttaccaagagaa

SEQ ID NO: 487874 - DNA, 75 bp, Homo sapiens
gtttgagaaaaggcctaagaattttggcattggttcgatacaagaggctgttttcctagcgtggcttgctgcctt

SEQ ID NO: 487875 - DNA, 75 bp, Homo sapiens
aaaagtttgcctatgtgccatttggagctgaatcctcactatggatgggctcattgaggacattaagcatcggcg

SEQ ID NO: 487876 - DNA, 100 bp, Homo sapiens
aatgccaacgccgtgtctgaaggctcccagtaccagccttgcaagagaacttttcttcactgttgggagtattgaaagagtctgtacagttgaatctagc

SEQ ID NO: 487877 - DNA, 80 bp, Homo sapiens
cgagcccatgaccctccaagagcgggaagacgtgaccgccagcgcccagtgatgaccagatcctggaatggtgtggggag

SEQ ID NO: 487878 - DNA, 50 bp, Homo sapiens
atggcacctatggacaagtctataagtctattgcgtctgcagacatggat

SEQ ID NO: 487879 - DNA, 75 bp, Homo sapiens
ttgatgtcccttcagcatcatgcagccgccgccgaggaaggtactccaaagattcaggtttactcacgtcatcca

SEQ ID NO: 487880 - DNA, 75 bp, Homo sapiens
aagaaacaagccgtggaataggtgtatcaagtaatggtgcaaagcctgaaataataccactagtctgacggataa

SEQ ID NO: 487881 - DNA, 111 bp, Homo sapiens
tgacaaccaagggcctccgtctggatttccaaggaagaatttcctctgaagcaccggtgagaagccctaccactgcaactgggacggctgcggctggaagtttgcgcgctc

SEQ ID NO: 487882 - DNA, 80 bp, Homo sapiens
gaagccagtaccagcgtttcacctaccttcccgccaacgcctacaacacagcagtcccctcaggatgagcaggaaaagct

SEQ ID NO: 487883 - DNA, 75 bp, Homo sapiens
ccaaggacagcttttttcctgcaaggacccttcaaagttgtacaagaaagcagatgatgttgcagccattgaatg

SEQ ID NO: 487884 - DNA, 116 bp, Homo sapiens
gtgcttgccctgtcatcccacctgagaaccatgctcaccgaccctagctgaggcttcgaagacctcagaggacttctctcagcactcacagaaacctcctacaccctcggatggca

SEQ ID NO: 487885 - DNA, 75 bp, Homo sapiens
ccgctcacctgcgctgtgatgcctgcagagctgtggcttaccagaccgccctggtggtgcaggctgtgaagaaag

SEQ ID NO: 487886 - DNA, 101 bp, Homo sapiens
attagttcatttagaccttaaaggagctccaccaaaggtctcgtacctctcagagggacctgatgcccagaaccctggacgggcagatcaccatggagaag

SEQ ID NO: 487887 - DNA, 100 bp, Homo sapiens
atgacatccacacactgttgaagatattgatgatgttaagaagttcaaaccgggttacctggaagctactcttaattggtttagattatataaggtacca

SEQ ID NO: 487888 - DNA, 100 bp, Homo sapiens
cggcgtacgccctcatggggaaaatctccccggtgactttcagggtcccactccattgcccaagctgaagttcagtggcacgaacatgtttcactgcagc

SEQ ID NO: 487889 - DNA, 100 bp, Homo sapiens
cgtcaccttcaaggccgtcagacaaggcaccttctaaaaatgaacaagagcagctctgatttggaaaaagtgagccagggctctgcagaaagcctcagcc

SEQ ID NO: 487890 - DNA, 100 bp, Homo sapiens
agggtggcactggctctcctggtccagctctcaggacaagaacaaagtgtgctggacttcatagacctcacgttgtcgaagactcaacgaaagactccaa

SEQ ID NO: 487891 - DNA, 74 bp, Homo sapiens
cctgggccgcctggcggccatcgtggctaaacaggccactgagaatgcaaaggaggaagtgaggcgaattctgg

SEQ ID NO: 487892 - DNA, 99 bp, Homo sapiens
cggtggcatgagggtcggaccccagtaccaggcggtggtgcccgacttcgaccccgctattcaggattatgaaactgctcaggaacacaatgaaaatga

SEQ ID NO: 487893 - DNA, 49 bp, Homo sapiens
gtgcagctgcctcagttcttagcgcagggttcatcatttacaacccaac

SEQ ID NO: 487894 - DNA, 95 bp, Homo sapiens
tacagcctactggtgactcggctgcagaataccctctaccatctgctttggtcagggtgccgctcgaggatttaaaagcaacaagaagaaaacca

SEQ ID NO: 487895 - DNA, 101 bp, Homo sapiens
gtcgctgagagcctcacgagtcgaggtcctgcaggtggagctccggcagccgccctgactcctgaaacagactactctttgcctttttgctgcagttggag

SEQ ID NO: 487896 - DNA, 74 bp, Homo sapiens
cggcggcggcggctccagcgtcctaagagctctcgtgctcattcccccatgatcgccgtaggaagtgatgacag

SEQ ID NO: 487897 - DNA, 101 bp, Homo sapiens
cctgaggcctccccagccatgcagaactgcattaagtgtaactgaaaccctgattaaacccttggaaaaattcagaaaagagcaacttggagctgtaaagg

SEQ ID NO: 487898 - DNA, 80 bp, Homo sapiens
gccttagctgtgctcgcgctactctctctttctggcctggaggctatccagcttgcagagtgggcaggatcttaagaccc

SEQ ID NO: 487899 - DNA, 80 bp, Homo sapiens
acattgtcaccgagtacatggccagaggccctgggaggagcggggacactgaggacctctctccaaattggcctctcaac

SEQ ID NO: 487900 - DNA, 75 bp, Homo sapiens
gctgctaagtacatgctggattgtagaacttctctctctgaagctgccacttttgctagagagcaaggctttgag

SEQ ID NO: 487901 - DNA, 75 bp, Homo sapiens
gatctctttgccaaattggcattgaattttgctactcagataaaagaaggtctgaagaaaaccctgcgggatgag

SEQ ID NO: 487902 - DNA, 100 bp, Homo sapiens
agacgttctgtatttcagcttcctgctatgtgccctctttgttcctaaaggctccctggcattgggcagtgttacagtgcactcttctgaacctgaagtc

SEQ ID NO: 487903 - DNA, 76 bp, Homo sapiens
ctgccaaaaggaaatgcatctttatgtcagaaacacaaagcagcccaaccaaaggatgagacctgccagagccaaa

SEQ ID NO: 487904 - DNA, 97 bp, Homo sapiens
agaagaaagtaaagttggaagttaagggagacaaagttgaaaacaaagtgctgggcaagactggagagttaaatcagcttttaaatgcagttaaatc

SEQ ID NO: 487905 - DNA, 95 bp, Homo sapiens
agagtccgatgaaaggaatgggtctgggaccttaacagggagccatggtacaggtttgcagattccgccagcagcacagcaagctctacagatga

SEQ ID NO: 487906 - DNA, 75 bp, Homo sapiens
agtccaacatcattgaggcgattaatgagctgctagtggagctgggcaccatgagccaggacaccgaggtggata

SEQ ID NO: 487907 - DNA, 98 bp, Homo sapiens
cacgtccaagcaaaccgggaaaggagaggatcccggagccgggaaagcaggcaggatgggagagtcgccgatagaaccacctcttccctgcctcctgg

SEQ ID NO: 487908 - DNA, 75 bp, Homo sapiens
gttctccttcgaggaacagagaaaatgaaaccagcagacagaatttgtcagggtacaggcatccttcacctgcta

SEQ ID NO: 487909 - DNA, 100 bp, Homo sapiens
tacataagatcgtagccagacccccaggtgccttggaacactatgttaattgcctggatctggtaaacaagaggctaccttatggccttgctcagattgg

SEQ ID NO: 487910 - DNA, 75 bp, Homo sapiens
atttaacaaggcggtgtggtttactccatgcagttgtcaggagcctcacgattttgatgaatgtcgatttgatat

SEQ ID NO: 487911 - DNA, 100 bp, Homo sapiens
caacaacctcaccgtgcaccttcgcaagaagcaccagttcaagtggccctcagggcatccccgttttcggaaatggtgttcacactggccctgaatcaag

SEQ ID NO: 487912 - DNA, 82 bp, Homo sapiens
gcagaaagtcaagaagacagcggaagctggaggagtgacagccccgtgctgatcccattccaatatgtagcttctgtttggg

SEQ ID NO: 487913 - DNA, 90 bp, Homo sapiens
gttccagccccagttccccggcagcgggacccggcgaagacgcgaccgcggcgcgagtcaccatgggaggctgccggcgtggaccgcggg

SEQ ID NO: 487914 - DNA, 88 bp, Homo sapiens
cgggaacaacgcgagtcggcgcgcgggacgaaggtgaggatcccaaccccactgaacacaagcggggtgcaggtgatctgcatgaagg

SEQ ID NO: 487915 - DNA, 100 bp, Homo sapiens
gggggagtcgtaaacaaccctgaagagaacagccaggcctgatagacgatcagctgaacactctcttgaaggagttccagctaacagaggagaacactaa

SEQ ID NO: 487916 - DNA, 89 bp, Homo sapiens
aacaaacatgtctctaaaagctctgagacaccaactctacaacattacctgtcatatactgaagaatctcttcttccagttatgcagca

SEQ ID NO: 487917 - DNA, 50 bp, Homo sapiens
aatttttggtattgcagatgactcaaacgcttcagagaaccaaagcatga

SEQ ID NO: 487918 - DNA, 100 bp, Homo sapiens
ggctgcggggcttccctgcggctggaggaagagctaaggagcaaatccaagatctgtgccaatgtgttttgtggagccggccgggaatgtgcagtcacag

SEQ ID NO: 487919 - DNA, 75 bp, Homo sapiens
gccacacgctacaattacaccagtgaggaaaaatttgccttcgttgaggcctgtggactttctcctcgagacatt

SEQ ID NO: 487920 - DNA, 83 bp, Homo sapiens
attccccgattccatatggcatgtccaacattcagggtgtctatagcccgattgggacgtccagatcggtgacatcgtcacag

SEQ ID NO: 487921 - DNA, 100 bp, Homo sapiens
gtcttatcaggggaagaaaaatattccacgcatcacgatctcccttgagtttagaaatctggctgagaaataccaaacagtgattgccgacatttgccgg

SEQ ID NO: 487922 - DNA, 100 bp, Homo sapiens
tgctgctgtactaaaagaacaactagaacgaaagagaaaggaggcttatgagagagaaaaaaaagtgtgggaagagcataattataaggctgtctgcaga

SEQ ID NO: 487923 - DNA, 75 bp, Homo sapiens
tatgacaccaagggtcgctttgctgtacatcgtattacacctgaggaggccaagattggcacttctctgtttgat

SEQ ID NO: 487924 - DNA, 75 bp, Homo sapiens
ctttcaagagaagcttccttgatttggaacattgctaccaataaactgacgttcttgaactcctttaagatgaag

SEQ ID NO: 487925 - DNA, 100 bp, Homo sapiens
agaagcggggaccatgttccgacgcaagttgacggctctcgactaccacaaccccgccggcttcaactgcaaaggttcactattatgaagatggcaatgt

SEQ ID NO: 487926 - DNA, 100 bp, Homo sapiens
cgcattcagaatttgaccatcttggtgagaaacattaagacctactaccagattgtccccttggggcggaaagaagccaaggccaaggagctggtgcggc

SEQ ID NO: 487927 - DNA, 82 bp, Homo sapiens
tggcccagtatgccagcaacatcacctcggtgctgtgccagttccccagccagcaggtgaaatgacaatggatgctctgttg

SEQ ID NO: 487928 - DNA, 123 bp, Homo sapiens
cccggtgcaagaggcgcaaacaagccaatcccaggaggaaaaacgaactcccccactggaaaggattctgaaagaaatgaagtcagccctcagaaatgaagttgactgcctgctggctttctg

SEQ ID NO: 487929 - DNA, 80 bp, Homo sapiens
cctctctcaagagaagctgcaagagcaacatctttcctcaccccaagggagtgcatccgccccaacccttttccccctcg

SEQ ID NO: 487930 - DNA, 51 bp, Homo sapiens
ctcagtgcctgccacctccccaaaggcaaaatgcaaccttaaaatcagtga

SEQ ID NO: 487931 - DNA, 99 bp, Homo sapiens
gcaagggcatgatgcctccactagattggctaaaagatgtgtgtgaaaagaataagtggagtcacaagaattcccctatcatctggagagagctgttgg

SEQ ID NO: 487932 - DNA, 75 bp, Homo sapiens
aaacaggacctgcctaattaccttcaaacctggcctcaacaccctcccccagcctcccattccctgctggacgcc

SEQ ID NO: 487933 - DNA, 98 bp, Homo sapiens
ggaggagcagttgtctgatgaagagaagtgtaaactggagttgctggtgggcagccctgcttcctgcatggaactggagctgtatggagttgacgaca

SEQ ID NO: 487934 - DNA, 87 bp, Homo sapiens
ccaattcgtcgcggcggcggtggagatcgcaggtcgctcaggatgctcgacatgcagcagaaggagaaatatataccaaactgaatc

SEQ ID NO: 487935 - DNA, 88 bp, Homo sapiens
gatccacagctaagacgccaggacccactggaagcctagaaatggtaatggaactgctggtccatctgaataaacgtataaaaagccg

SEQ ID NO: 487936 - DNA, 75 bp, Homo sapiens
cccgaacaaagagcagccttggaaagtttgacaaagtagctcgtaagctggtcatcctggagggtgagctggaga

SEQ ID NO: 487937 - DNA, 98 bp, Homo sapiens
gccgaccccagagaggcgctggacagatcgagacgctccctccggagctcttccagtgccggaagctgcgggccctgcacctgggcaacaacgtgctg

SEQ ID NO: 487938 - DNA, 51 bp, Homo sapiens
cagattcgcagtggtcgcttcttctccttgattggaggtggacacaaagga

SEQ ID NO: 487939 - DNA, 74 bp, Homo sapiens
gctgtataatcaaacctccaatccacctggctctccggtgggcaaacgcagaggcgggaacaaactagccctca

SEQ ID NO: 487940 - DNA, 100 bp, Homo sapiens
cagccccgccccagctcccagtataaccagagactctttgggggagacatggagaagtttatccaggtggagctggccctgctacagcgctcctaccagg

SEQ ID NO: 487941 - DNA, 89 bp, Homo sapiens
cggaagtctttcattggcacaccatattgagagcgaaccatgtgctggatttagccagtcctgcatttttctatacttcaaatcaaaac

SEQ ID NO: 487942 - DNA, 101 bp, Homo sapiens
gtaaaggaagctcaagtatatcaagcattcaaattgctcacagctgatcctaagggtatttgaagtataccatacaactgttttgaaaatccagcgtggac

SEQ ID NO: 487943 - DNA, 75 bp, Homo sapiens
cttccgtttggtaccatgttttccggggtgggaaggtcagtttaggggctggtgcaaaggatgagttgcacattg

SEQ ID NO: 487944 - DNA, 100 bp, Homo sapiens
aaggatgccctgctcaactggctgaagtccaagaacccgggacctatgaggaccagcacagcagtgaggaggaggaggaagaggaagaggaagaggaaag

SEQ ID NO: 487945 - DNA, 100 bp, Homo sapiens
tatgtgctgccccgggaattactgcaaaaatggtaaaaatgttgtacatcagctctcagtaaccctagaagacttatataatggtgcaacaagaaaactg

SEQ ID NO: 487946 - DNA, 82 bp, Homo sapiens
gacctgccaatttaccagagataattgataacaccctgtaacagctgagatgagctttctgatgttagccaaggcggatcta

SEQ ID NO: 487947 - DNA, 90 bp, Homo sapiens
gggatgagggaatacaagtgtcatgtctgtgggtatgagacatctttgttggatttggttcagtctctgagcccaaactctgcgcccaaa

SEQ ID NO: 487948 - DNA, 76 bp, Homo sapiens
agctcctattctgattgctacagatgtggcctccagagggctagctgaagtctctaagaaaactgttgtagaagaa

SEQ ID NO: 487949 - DNA, 82 bp, Homo sapiens
caggaattctcaaattgtcccaaactgattcagctacaacacgatcccagtgtgactgataagagagaatggagacctgtgc

SEQ ID NO: 487950 - DNA, 100 bp, Homo sapiens
gaaggctgctattgaaagagagtatgcacagacaccattcgcttttcacccaagatgatttgatgtcttataaaactctgatgaaccatgatggctacac

SEQ ID NO: 487951 - DNA, 75 bp, Homo sapiens
tggactcctccagctgcaataagccgtgtccagagtttaaacctgattcatgatgttgctatcaaaagttgagaa

SEQ ID NO: 487952 - DNA, 71 bp, Homo sapiens
cggagtgggagacgtggagtgcagaccaggatggagcagagcccagcgccaattccgtgtcagcccacaac

SEQ ID NO: 487953 - DNA, 85 bp, Homo sapiens
aaaaacccggtactgtgcactattctttcccaggaaccattggataaggataaagcctgactttgaaaccaaaagttggctaagg

SEQ ID NO: 487954 - DNA, 77 bp, Homo sapiens
gagtcatgagcgacagcggcgagcagaactacggcgagcggatgccttcaattaagttgcagagttctgatggagag

SEQ ID NO: 487955 - DNA, 100 bp, Homo sapiens
gctagagtattcatgagaatgaaactgccgtcctgcacccttcttaattttctcccatggaaatagtatctttaggattgacacagaaggaaccaattat

SEQ ID NO: 487956 - DNA, 51 bp, Homo sapiens
gtccttctgctattgatcctgaaggtaaacttatgagtgctttgctgagtg

SEQ ID NO: 487957 - DNA, 107 bp, Homo sapiens
cgcaaccattgacgccatgtcgggttattcgagtgaccgagaccgcggccgggaccgaggcccagctcaacattggcaatgtgctccctgtgggcaccatgcctgag

SEQ ID NO: 487958 - DNA, 73 bp, Homo sapiens
gccgggatctcaggtcctcgggggcggcggccacgccaaggacggcatcctggtggggaagaagttttaaggg

SEQ ID NO: 487959 - DNA, 100 bp, Homo sapiens
cccgttcttgcctcaggccagtcgcctccaggccaagagggatccttcacccgtgtctggtgcatgctattatgatgctaatcagtctatgtatgtgttt

SEQ ID NO: 487960 - DNA, 75 bp, Homo sapiens
cctgcagactggcaggagcagattccaaaggcacaggaagaagcttgcaggccatttcataattctgaatcatgt

SEQ ID NO: 487961 - DNA, 100 bp, Homo sapiens
tggagacagcgatcaagcaggcagctgagcagttggtgggccagtttattgctagagctgttggagatggaattttatgtaatacctatattgatagtta

SEQ ID NO: 487962 - DNA, 82 bp, Homo sapiens
cctgcctctcctcctgcctcctctttcctccctgaccatgctcccaaagagcaaacggggattcagcgtccgatcctttgga

SEQ ID NO: 487963 - DNA, 100 bp, Homo sapiens
tggctcggatgctgatggggctggacctgctggtgttcgcccacgaccatggtggcctcagccccgagtccaagaagatcctgacacccgccctcaagaa

SEQ ID NO: 487964 - DNA, 51 bp, Homo sapiens
caatgacatcaaaaattcctttgagagagcaacagcagcagcaacagcaac

SEQ ID NO: 487965 - DNA, 100 bp, Homo sapiens
actgcacattctaccatcccaccattaatgtcccaccacgacatgccttgaaatggattcgacctcaaaccagttttgtaccaatggctagaagcagatc

SEQ ID NO: 487966 - DNA, 75 bp, Homo sapiens
gtacatggatcctactggtaaaactaggtaaccaaggagcagtgaacagcagctactacagtagtggaagccgtg

SEQ ID NO: 487967 - DNA, 51 bp, Homo sapiens
aaaaaaagagcgacgagtgcaaggtcgcccggctcatggagatgggatttt

SEQ ID NO: 487968 - DNA, 74 bp, Homo sapiens
ctcagcccacaactcttgtcctaccacctcatactaaggctcgtacgtctgcatcgattatcttacgtggggca

SEQ ID NO: 487969 - DNA, 90 bp, Homo sapiens
cccgggacgcccgcaccaactcctgcgcgcgaatgctgagatgtataaactgtcttcagagcaattccatgaggcagcctcaaagatgga

SEQ ID NO: 487970 - DNA, 74 bp, Homo sapiens
tattcctcagtaaatctcagacggacgtgtttgccagctctgagcctgtgccaggattccagggggataccctg

SEQ ID NO: 487971 - DNA, 74 bp, Homo sapiens
ccagaagcctcccttccagtcaggggaagagtctaacctgtctctgcaagctcttgagtcccgccaagatgata

SEQ ID NO: 487972 - DNA, 100 bp, Homo sapiens
agaatctaggagagagcgaaattcgcgatgcaatgatggcaaaggccgagtacctctgccggataggtgacaaatacgtgatggttcaagacatgctctc

SEQ ID NO: 487973 - DNA, 98 bp, Homo sapiens
ccctttttgtcagattatcaggatgagggaatttagataatgggctgtgtgcaatgtaaggataaagaagcaacaaaactgacggaggagagggacgg

SEQ ID NO: 487974 - DNA, 124 bp, Homo sapiens
ctgtacaacacaagctggccttggcagtttcggtgcatagaaaatcagcttcttggacacttaatgattgttggcaagaaatgtgctgctgatctgggcctgaataagggttatcgaatggtgg

SEQ ID NO: 487975 - DNA, 50 bp, Homo sapiens
ctcacattggccggcaacttgttccaggttcaattcccatgaaagtgcag

SEQ ID NO: 487976 - DNA, 75 bp, Homo sapiens
tgggcacccacggagcctccggggctggagtccaaaactacttacctggaagaccttccaccaccccctgagtat

SEQ ID NO: 487977 - DNA, 100 bp, Homo sapiens
gtttgcggggaaggctgggcagaaaaaggatgcaaccttgttctcaaccacttgctatctcggcaaggtgaccgttctggatgctagagtgagtgtgccc

SEQ ID NO: 487978 - DNA, 74 bp, Homo sapiens
tgagggagaaggggattaacatcagcaatagtgtgacaccatcgccacaacaggctcgggtctgtcctccccat

SEQ ID NO: 487979 - DNA, 74 bp, Homo sapiens
cgatggcctagcacgtggaattcgcgaagctgccaaagccttagacaagtacttaaacttcacccttgtttagc

SEQ ID NO: 487980 - DNA, 82 bp, Homo sapiens
ccccgcagcctccttgttctcctccaggtggtagtgctcgctctggcgcagattggcgccctgcgtccggcagaggaggcga

SEQ ID NO: 487981 - DNA, 75 bp, Homo sapiens
cgcgagtttgtggattatctgaaggacttaaccaccaccatgtcgagcaaaagaacaaagaccaagaccaagaag

SEQ ID NO: 487982 - DNA, 89 bp, Homo sapiens
cctcagttgtgaccagtggtgagacacgaagagaggaaggggacccatcacctcattcagttgggagcagagagtggaccagcacgggc

SEQ ID NO: 487983 - DNA, 83 bp, Homo sapiens
cttcgctgtaggcttcctgtgccatgacctccggtcacacagctccttccagggcttccagacagttcgtgttgggacagtgg

SEQ ID NO: 487984 - DNA, 100 bp, Homo sapiens
aagccaaactccaggacattcacttacgccaccgccatcactttcatcacatggatcctcatccagtttgcatttaggttttagctaaagaagatactga

SEQ ID NO: 487985 - DNA, 100 bp, Homo sapiens
acctgagcctcttctacatcggtttctacctcaaggacatggagcgcttgaaagaggcctcaggcccaggcccaaggccaagtgagagagcccaggccac

SEQ ID NO: 487986 - DNA, 76 bp, Homo sapiens
atcctgtttctcacatttgtttcattgaagaaatagttaaggagtgtagcttttgtgaagaccctcgctttgctag

SEQ ID NO: 487987 - DNA, 100 bp, Homo sapiens
gctaagagtgttcagtagaaatgggaggcaggtggaagtcatcataaagtttctgtttcacccgtcgtccatgttcgaggactctgtgaatctgtggtgg

SEQ ID NO: 487988 - DNA, 100 bp, Homo sapiens
ctgtatgtacaaggaaataaaagagcccacggtcaagacttggccttgatgacttacaagccctcaaggggaagcattttctcctggactccttgatgcc

SEQ ID NO: 487989 - DNA, 83 bp, Homo sapiens
tatcgaaccgcccgcaggcccgtcgcagctccattaatgcaactaccattacactaagacgtccttctatggccgcttcaggc

SEQ ID NO: 487990 - DNA, 95 bp, Homo sapiens
agatactcgacaagactcggatcagtatcttgccacagaaaccatacaatttatacccatgcctgtactctatggtgtgttcctgtatatgggag

SEQ ID NO: 487991 - DNA, 100 bp, Homo sapiens
gttaggcagcagcagccgcggagcagtagccgccgtgggagggagccatgaagcattacgaggcagatcgggagcggtgccgagaaaaatttccttacta

SEQ ID NO: 487992 - DNA, 101 bp, Homo sapiens
ggacaggcgacagcgacctgcggcaggaactgatttcatctgaaattgaagagacaatcagagaaaaactatagaccactcatgatggttgttatatgtgc

SEQ ID NO: 487993 - DNA, 100 bp, Homo sapiens
tgggcacggacgcacgccactttttctctgctgatccagttttcggctttgtgagaaaccttaccatcaaacacgatggccagcaacgttaccaacaaga

SEQ ID NO: 487994 - DNA, 75 bp, Homo sapiens
cgacgccatgaagatcaaagatgccaagaaaccctgggagcttttggaagagtcccagatggaagcgaccaggct

SEQ ID NO: 487995 - DNA, 100 bp, Homo sapiens
ctgaagcctcttgtcccttcattgtcatctgcttttgaggttatctaccttgcctgctcctatgccacagtgtacctgatctacctgaaatttaaggcaa

SEQ ID NO: 487996 - DNA, 90 bp, Homo sapiens
gctggagcctgtgatgttcgctgctgctgtgaccagagtggctacacacttataaggaaagatagtgaggaagaagtttcattgctggga

SEQ ID NO: 487997 - DNA, 50 bp, Homo sapiens
ccaatcccttcgatcaggatgttggttcgagaacttgtcttggacaattg

SEQ ID NO: 487998 - DNA, 95 bp, Homo sapiens
ctgctggcgcaggacgccgacatcgtgtgccgctgccaggacagagcgggatgccaccagcttgtccaaagggaagttccaggagctcctggtgg

SEQ ID NO: 487999 - DNA, 50 bp, Homo sapiens
tcgagaagaaccatggcactcgccccaactggaccctaggcaaaagtgag

SEQ ID NO: 488000 - DNA, 75 bp, Homo sapiens
gggagatctatccacatacctcaggagtgattcgggaaagttacctcaaaggccacgaccagctggttcccgtca

SEQ ID NO: 488001 - DNA, 96 bp, Homo sapiens
cgagtgaggaaaggaggtactgtaggttgtctgcattcaaaagagcattctattaaagctaccttaatttggcgcttatttttcttaatcatgttt

SEQ ID NO: 488002 - DNA, 87 bp, Homo sapiens
cgtcgtgatcgactcggacacagaggacagcggcagcgacgagaacctggatcagtagagacggggtttccccatcttggccaggct

SEQ ID NO: 488003 - DNA, 88 bp, Homo sapiens
cttggctatgtgacgctgctggaggaaacacctcaggacacggcctacaacaccaagagattagtagcaaggaagtttgtaggagcag

SEQ ID NO: 488004 - DNA, 83 bp, Homo sapiens
tgattcgtagctaagacttcgcgacacccttgaagctgagaaatgaataccctctaccatctgctttggtcagggtgccgctc

SEQ ID NO: 488005 - DNA, 48 bp, Homo sapiens
ctattggaaagatctcggaaaatgaagcctccccagctttctgaggat

SEQ ID NO: 488006 - DNA, 75 bp, Homo sapiens
ctcaagctcatattttgaagtgtttacggctttcttcacagaagtcagtgccgtgggtacccattttaaaatccc

SEQ ID NO: 488007 - DNA, 100 bp, Homo sapiens
catttctccatttctcagaacggatctccatcgttaagtgacgcatgactcttagaccatgctcagcctccaagcagccttgtcatcgacaaagaatctg

SEQ ID NO: 488008 - DNA, 101 bp, Homo sapiens
gtccggggctcctgcgcactcacttggcggccgcgcccgctggcgtcctcttgttctcttccaggcaaatacgccatgcgagacctagtccacaggcttcc

SEQ ID NO: 488009 - DNA, 83 bp, Homo sapiens
caagaagcgggcggcgtgcctgtgcttccggagcgagcaggaggacgagagccgagactgtctgaagctgggcccacctgctg

SEQ ID NO: 488010 - DNA, 75 bp, Homo sapiens
cgcgtcccgagcccgcggggcagctaccgctcgcactgcctcctaaaccaccaaaacctactactgtagccaaca

SEQ ID NO: 488011 - DNA, 75 bp, Homo sapiens
taaatgccctcaagtcgacaggggatgggaccctaggaacatcatttacagcgagcaatttcagcacagcaagtg

SEQ ID NO: 488012 - DNA, 93 bp, Homo sapiens
ctcgtgtcacgggaatttgttatacagattatttcatctcccagtaggataagttctgaacgtcgaaaagaaaagtctcgagatgcagccaga

SEQ ID NO: 488013 - DNA, 97 bp, Homo sapiens
aacaattgaactgcgaaagctgtgatgagaatgaggatgatttcatccaagtcactaaaaatggatcaggtgtcatggagaaactccagctgggccc

SEQ ID NO: 488014 - DNA, 75 bp, Homo sapiens
cagcccccccgcgaacgcccaaggaagaagatgaagtaccggacgatgagactctgaaccaaatgattgctcgac

SEQ ID NO: 488015 - DNA, 75 bp, Homo sapiens
atgcagccactgcaagagtcaggttccgatgatcgcgctgcagcccccaggtttccctagatgacaaataaacat

SEQ ID NO: 488016 - DNA, 50 bp, Homo sapiens
cgggaggcaacggagctaccagccggaattgaatgatctggcacgggacc

SEQ ID NO: 488017 - DNA, 96 bp, Homo sapiens
gcggccacggcatcctgtgctgtgggggctacgaggaaagcccgtgatgctgatgagcgagagaagtggatccatgccttagaagaaacaattctt

SEQ ID NO: 488018 - DNA, 90 bp, Homo sapiens
ccaaagcaagaaagcctcatgttttgggggaaagtttgatatcagcaatgtccagacaagatccgatcacataggacagtatgcacctta

SEQ ID NO: 488019 - DNA, 100 bp, Homo sapiens
ttgttgtatccaggtgcatgttacaggtgatcgaggaaacatctcaacatcttctaaaccagcctctacatcaggaaaatcagagctgtcctctaaacac

SEQ ID NO: 488020 - DNA, 100 bp, Homo sapiens
tgggccctggcggtggacgagcaggaagctgcggctgagtcggagccagcaccgctctttgaccttgccatgcttgccttagatagtccagagagtggct

SEQ ID NO: 488021 - DNA, 90 bp, Homo sapiens
gtgcccctgggcatcaccaacatagccatcgacttcggggagcagagaatttggatggagagacccggaactgccggaagtgattcagat

SEQ ID NO: 488022 - DNA, 75 bp, Homo sapiens
tgttaattcatcttcacccgtgatgttggcctttaaataagagccgaatgcacataaggtcgccagcccaccctc

SEQ ID NO: 488023 - DNA, 101 bp, Homo sapiens
tgctacacaccaagccagaggtagctgcccaggaaagaatggtcgatgatggcaacggaaaagttgagggtctggaacagaatctgacagtgatgaatcag

SEQ ID NO: 488024 - DNA, 88 bp, Homo sapiens
agaaaaacggccaagaggcagacctaggaaatgggtattccagcgtcttcaggaaacagtttagactctcttcaagatgacaatcctc

SEQ ID NO: 488025 - DNA, 76 bp, Homo sapiens
gttcctaaaccagaagaggaggttgcccagaagaaaaagctggaagattctttatgggtatcattaacagatcagc

SEQ ID NO: 488026 - DNA, 74 bp, Homo sapiens
atggcagccagtcagtggtggaggctggagcattggatttgctaaaggagcttaagaatattcctatgaccctg

SEQ ID NO: 488027 - DNA, 100 bp, Homo sapiens
ccagcgcccggagcaagcggagctcccccaagagccggaaagattgccacggcagtgaagtttctacagaattcccgggtccgccagagcccacttgcaa

SEQ ID NO: 488028 - DNA, 98 bp, Homo sapiens
acaaagaacagttgattcagcggttgcgaagaatggaacgaagcttaagtagctacaggggaaaatattctgaggttggtgggacaagtgatgttgaa

SEQ ID NO: 488029 - DNA, 96 bp, Homo sapiens
ggggtgaaagagaagcacggctccgactactccaaggagtctactcttcatcttgtgttgagacttcgtggtggtgctaagaaaaggaagaagaag

SEQ ID NO: 488030 - DNA, 100 bp, Homo sapiens
ggcttggaataagctataagggaattggccaatatgatatacaagacaaggtgaagcctcggaaggtgctggagaatctggtaaaagcaccattgtgaag

SEQ ID NO: 488031 - DNA, 89 bp, Homo sapiens
cggcaaaacggccacggactctgacgaaagaaagggttcaaagacaccagtcagtatgtagtaggagaattggcagcactagagaatga

SEQ ID NO: 488032 - DNA, 100 bp, Homo sapiens
ccaagaatacaggacagcaggcattaccaatttttgtataagactttgaccccgacgcaggcttcagtgattgccgcggatcagaagcctgagcactttg

SEQ ID NO: 488033 - DNA, 83 bp, Homo sapiens
tctgtctgcctgtgtccctgaccatggctccctgcagtaccctttaacgtttggtgccctggttgtcagatgttggaaagcag

SEQ ID NO: 488034 - DNA, 100 bp, Homo sapiens
cctggagtctgcgaaggccgggacccggttccccggcccacagtgggggtgtgcaaacccgagagaactgggagcttcagtttcagcgactcacccgaga

SEQ ID NO: 488035 - DNA, 80 bp, Homo sapiens
cggcatttttcaacaatgcttcaggacatgaaagatcagatgtcaacttcatctgtgcaggcattagctgaaagaaaaaa

SEQ ID NO: 488036 - DNA, 75 bp, Homo sapiens
atcaagcactatgcaggggacgtcacgagcacgtgaattgcctctgcttacgttcaggccctgtcctaaacccag

SEQ ID NO: 488037 - DNA, 96 bp, Homo sapiens
tgcggacgctcggtcccgcgctgcgcatccccgcggacgccacagcgctaacgtgctggccaaagcgctctatgacaatgtggccgagtccccgga

SEQ ID NO: 488038 - DNA, 73 bp, Homo sapiens
gcctctacccataccctgttcatcacccatgtgacagacagagccaggtggtttgtgatgaaaatggttccaa

SEQ ID NO: 488039 - DNA, 75 bp, Homo sapiens
aaaaataaactcaaggagcctgggggaggttcgtttcggccgctggcccaacaggcaaaaatgaagaaaaaattc

SEQ ID NO: 488040 - DNA, 100 bp, Homo sapiens
cggcacctcaaccagatgaggaagtacaactttgagttcctgccagggaagaggaagcagctccgggaggtccgggagagcattcgcttcctgcgccagg

SEQ ID NO: 488041 - DNA, 83 bp, Homo sapiens
cctgcatcaacctgatcaccagccaggagtacgccgtcaagtgtccatgaaactgggaggcgaccgtgttagctgccagttcc

SEQ ID NO: 488042 - DNA, 90 bp, Homo sapiens
gtgtttttctagttaagtcccaaggtgtcaacgacaatgaggagagaacatcgtgtggatgactcaggaagacagtgtaaaagtattaat

SEQ ID NO: 488043 - DNA, 51 bp, Homo sapiens
tccagctcacccactgccagcagagatgccggtggccgtgggtccctacgg

SEQ ID NO: 488044 - DNA, 50 bp, Homo sapiens
gctcaaagttattttacattgccaagctataacatcagaaatggtgaatg

SEQ ID NO: 488045 - DNA, 101 bp, Homo sapiens
acgtgcctttgaccttctgccatgattgtgaggcctccccagccacgtgaaactccctgccttaccagctctctgcccatctctcagtgtggaccctaaag

SEQ ID NO: 488046 - DNA, 100 bp, Homo sapiens
ttttgagaacagagtgctgttttagagctggcagcagcatctcagcccaagagaagtaatgttgcaggtcagtggaatccagtttttatgcagcctctgc

SEQ ID NO: 488047 - DNA, 98 bp, Homo sapiens
gacagttcacataagaagttcttcgatgtatctaaacttggcaccaagtatggtactgaaatttgatgcctatttccaagaagatgttcctatgtcaa

SEQ ID NO: 488048 - DNA, 75 bp, Homo sapiens
ttatcccgggcccgccggccctgagctcccggcggcgcagaatccaagaaaacaggggcccgaaacccaaggcag

SEQ ID NO: 488049 - DNA, 120 bp, Homo sapiens
gtttaccggatctcagctccgacgcccgaggagaaggaggagtggattaagtgcattaaatttgtgggcagattcaagtctcgcaaagagcgggaagctgagcttggagccaaagccaag

SEQ ID NO: 488050 - DNA, 83 bp, Homo sapiens
gaaggaattcctcatttgcaagagagacagttactggaacatagagattttataggctggggccacaactttggtgaagaagg

SEQ ID NO: 488051 - DNA, 101 bp, Homo sapiens
cgatgaggaagtactgagcctgttggaggaactggcccggaaacaggaggacctgccgcagcgggaaccgcaagagcttggtggtaggaacgccctccccg

SEQ ID NO: 488052 - DNA, 50 bp, Homo sapiens
ccaaactgcaataagccgccttccaaggaaatatgagctgtacagcatgg

SEQ ID NO: 488053 - DNA, 98 bp, Homo sapiens
ggacagatgaagagtgacttgtttctggatgattctaagaggccatcatctgtgcgatctctgcggtggacgaggtggactacaagacggctgaggag

SEQ ID NO: 488054 - DNA, 50 bp, Homo sapiens
acagaagtcactgtgaaacagccaggtgccagatgtgacatccagatgac

SEQ ID NO: 488055 - DNA, 114 bp, Homo sapiens
gggggacggtaggagcctccgtgcggagaccactgttcaaggccacaggcttgccgctgttccgtaacccagtgattccagtcttggctgtggtatgaatcacttagggatcct

SEQ ID NO: 488056 - DNA, 95 bp, Homo sapiens
aaatttccagaaggtgcctgaccagaaaggaactcccaagcgactgcaggcagaagctgagacggctaaggttctgcacttttaaaagaaaagca

SEQ ID NO: 488057 - DNA, 101 bp, Homo sapiens
gaagtgttggatataagccagactcttcttggacacttaatgattgttggcaagaaatgtgctgctgatctgggcctgaataagggttatcgaatggtggt

SEQ ID NO: 488058 - DNA, 98 bp, Homo sapiens
gccgccgccgcggtttgtcgccagaaggaagatggcggatctggaggagcagttgtctgatgaagagaaggtctgaatttcctgctgctgttcacaaa

SEQ ID NO: 488059 - DNA, 87 bp, Homo sapiens
aagatgcagccgcgccaggggacgaccgaggcggcacacaggacttttttgtataacgagctctatgtctacaataccagaaaggac

SEQ ID NO: 488060 - DNA, 100 bp, Homo sapiens
ccagcgtcctgaagcttttgatcaccattggctgggaaggaaaaacagaatcagctgttccctgcgaaagatgctgctgcagattgctgatgattttatc

SEQ ID NO: 488061 - DNA, 73 bp, Homo sapiens
gcccgtctgcttcgggcctctggaatttagcgctcgcccagctagccgcagaaaagacagctttgatttctgg

SEQ ID NO: 488062 - DNA, 100 bp, Homo sapiens
ccttcaacctcaaggccagccgcggcaacgaccgcaaccgcatcgtgctgcctttcagtttcgcctggccggattactacagcatcccatttcccacacc

SEQ ID NO: 488063 - DNA, 98 bp, Homo sapiens
ggcatttgtaaaggatgttcatgaagattcaataacagttgcatttgaaaacaaatctcacattcttgaaggtggcattgaagagcactaagatcgga

SEQ ID NO: 488064 - DNA, 50 bp, Homo sapiens
cgaggccgcgaactgcatcatggagaaggaagaggcccagcagaagggac

SEQ ID NO: 488065 - DNA, 87 bp, Homo sapiens
aatttccatgtcaacatagtccagtatatgactctcaacccttctactaagaggaagaatactggatccccagacaggaagccctca

SEQ ID NO: 488066 - DNA, 90 bp, Homo sapiens
gcaaactctgcacaagatggcggcggtagcggcagtggcggcgcgtaggaggcgtacctttgtgttggatgaatttaagcgcaagtactc

SEQ ID NO: 488067 - DNA, 83 bp, Homo sapiens
cgcgggccggccccgcggggagcgcccccggcgcgatgcccttcaggaaagacaatgcagatcttcgtgaagactctgactgg

SEQ ID NO: 488068 - DNA, 82 bp, Homo sapiens
attttggctgctgcaggagccattttaggagtccaaaactacttacctggaagaccttccaccaccccctgagtatgaattg

SEQ ID NO: 488069 - DNA, 82 bp, Homo sapiens
ccttcatcgagtacgaacacgagcgagacatgcactgtatcgagaaccttccctgcgaacttcagaggaacttccagctgat

SEQ ID NO: 488070 - DNA, 100 bp, Homo sapiens
cgccaagatgccggcctattttcagaggccggaaaatgccctcaaacgcgccaacgcccagctgcagctccagcaggtggcgctgcagcagcagcagcaa

SEQ ID NO: 488071 - DNA, 75 bp, Homo sapiens
acaaaagcaggcaaatggagtcgttgggaatcatatatagcagtgacgaggatgatgaggactttgagatgtgtg

SEQ ID NO: 488072 - DNA, 100 bp, Homo sapiens
tggaaatgttctcaggaatgaaactgaaacatacagtcagatctcaggaatggaagataaaagaagccaatttctggggtgctaactttgtaatgagtgg

SEQ ID NO: 488073 - DNA, 75 bp, Homo sapiens
ggacccccgggaggccccttagctataagcaacgatgtgctgagctgaagaaagccttgtgtactgcccatgaga

SEQ ID NO: 488074 - DNA, 75 bp, Homo sapiens
gaaagccacacacatagggatcggccatcacaacagcagcctcttcgaaatcagtcgtgagatggagaataaaga

SEQ ID NO: 488075 - DNA, 100 bp, Homo sapiens
ctgacttcaagaatgaagccacggacccttgcgactgacttccttttggtagtactgcgtgatgttgttcaggcttatcctgaagttcgcattgttctta

SEQ ID NO: 488076 - DNA, 107 bp, Homo sapiens
gaacagctgctgtatgggaagaaatagtaggagaatcaaatgataaactgcgaggacagagccactggatagaagctttggagaaaatgaatgaagatcacgttcag

SEQ ID NO: 488077 - DNA, 98 bp, Homo sapiens
ctggctgttgggctaaggaagaaatttggacaatatgcaggacatcctccacaaatgggaagtgttcctgtaatgacgcaaccaaccttaatatacag

SEQ ID NO: 488078 - DNA, 51 bp, Homo sapiens
caagattttgaagaagcttgtcgaggacactcatgaggaccatgatacttc

SEQ ID NO: 488079 - DNA, 88 bp, Homo sapiens
aatttgtgcaatgtttagccaacccaaattaccttaattacatatctgaagagatggattaagaatgctttggattaaggattgtgga

SEQ ID NO: 488080 - DNA, 97 bp, Homo sapiens
atttctgaagctgaaagcgcctatagaaatgctttgtactaccgcagcaacatggctgacatgctttataatttctggagctctcaaacactgctgt

SEQ ID NO: 488081 - DNA, 74 bp, Homo sapiens
aggattccaagtaactcttatttgcaactccgaagtcaagcccgcactctgattacctttgctggaatgatacc

SEQ ID NO: 488082 - DNA, 100 bp, Homo sapiens
cagttccaggtagacatggaggccgtcggggagacgctgtggtgtgactggggcaggaccatcaggtcgtccttggtggaaggaaccatgaactggcatc

SEQ ID NO: 488083 - DNA, 82 bp, Homo sapiens
ttcatccggcaccagtcagaccgatatgtcaaaattaaggacttctgcacggacctggccgtctccagtgccaacttcattc

SEQ ID NO: 488084 - DNA, 100 bp, Homo sapiens
cttgccttgaaggacaagaacagcgccgtcaccagcagggttggggtgctggaggactgcttcaccttcctgggcatcttcctggccatcatcctcttcc

SEQ ID NO: 488085 - DNA, 100 bp, Homo sapiens
tctcagaagacagagggttttcttttgagggggcttgtacatgacagctggaatagcctccagttgaggggcttggtggtgctccttatctctaaagcag

SEQ ID NO: 488086 - DNA, 88 bp, Homo sapiens
gcaggagcggggccggaactggagccgaggcgcaggtggcgctggtccctgaagaggaaggagaaggaatatgagcatgaaatggagc

SEQ ID NO: 488087 - DNA, 74 bp, Homo sapiens
ccacctcctccagccagtcccactccagctccatgatctccaggaaaactcctccttaacttggtagatcatac

SEQ ID NO: 488088 - DNA, 100 bp, Homo sapiens
aggacgacgagagcctgcgaaagtacaaggaggccctgctgggccgcgtggccgtttccgcagctgatccgccccatcaatgccctggatgagctctgcc

SEQ ID NO: 488089 - DNA, 98 bp, Homo sapiens
cagaagctctttgtgtatgaccttcacgcagtcaagaacgacttccagggccagatattcgaagcttacaacatggcagctttgtggaaattaccttg

SEQ ID NO: 488090 - DNA, 82 bp, Homo sapiens
atccaggtgagactttcacaataagagcagaggatggaacacttcagtgcattcaagaagactgtgcagtctttgtaactga

SEQ ID NO: 488091 - DNA, 109 bp, Homo sapiens
ccgacctgcagcaaataattgtcagtctaacagaatcctgtcggagttgtagccatgccctagttggtcgcattatgtttcagctcttctcagacatatgtccaaaaac

SEQ ID NO: 488092 - DNA, 87 bp, Homo sapiens
tgaaaatttacttctggatgccaatctgaatatcaaaatagcaggggattacagtgacgcaattgagacgctgctcacagccattgc

SEQ ID NO: 488093 - DNA, 75 bp, Homo sapiens
gacggtggtgggccaaatcactgtggacatggacactttgccaccatcaccttgaccttcatcgacaagaacgga

SEQ ID NO: 488094 - DNA, 75 bp, Homo sapiens
caaggttcaaaaactaagcatccagaggccctgagcagctttcagcactggagggcacacgtgtttcacgttgac

SEQ ID NO: 488095 - DNA, 75 bp, Homo sapiens
gtgcccggacctgcgccttctgggatttacagctgttggaggatggtgatctgactgtgataggagatcggggaa

SEQ ID NO: 488096 - DNA, 89 bp, Homo sapiens
gaagaaactttgctacagcctcctttgaccagatccatgactgttggtgatctcaaagacggaattagattggttccttcaagatttgg

SEQ ID NO: 488097 - DNA, 100 bp, Homo sapiens
gccagagcagaagatgggcagagtctgcatgtggctgcaggacctctgtcagagaatgaaacactcatcgcatggatgatcggctgaatgtaacagagga

SEQ ID NO: 488098 - DNA, 90 bp, Homo sapiens
ggggagttttgccattacgagggttcttgggaatagcagggctattgagggcacctacattgacaagaaatgccccttcactggtaatgt

SEQ ID NO: 488099 - DNA, 75 bp, Homo sapiens
cttccaaggcctacagatataagtctttgaagccatcaaatcatgctaccatccagagtatagtgagagctgtgg

SEQ ID NO: 488100 - DNA, 82 bp, Homo sapiens
gccatatctaacagaactatcttcaacttttcagcattttgaaagcgaagcagaagccgtagaatcagcggcgagcctgttg

SEQ ID NO: 488101 - DNA, 97 bp, Homo sapiens
atcgagcagctcttcttcgtccgtttgggaccccaatgctggaggatgtagatgaggggggcatccggccctggcacctggtgaagccaagtgatga

SEQ ID NO: 488102 - DNA, 83 bp, Homo sapiens
gccgttgcatcggtgcagggcaaggcgccatgtcagaaccggctggggatgtccgtcagaacccatgcggcagcaaggcctgc

SEQ ID NO: 488103 - DNA, 75 bp, Homo sapiens
cagtctcatgattataactggtccttcaaaacattactactggatggaaatccattccgagttcctcgagcagcc

SEQ ID NO: 488104 - DNA, 74 bp, Homo sapiens
ctttaaggacctttggacaaaactaaaagaatgtcatgatagagaagtacaagatcctgacatgcatcctgacg

SEQ ID NO: 488105 - DNA, 75 bp, Homo sapiens
cagggtccctgaagagggaagacacgcggaaacaggtttttggctcttgtccaaggaagaacatgcagataacta

SEQ ID NO: 488106 - DNA, 100 bp, Homo sapiens
agtcaagttgccggtggaattggcccaggatgacagctggagaatggagtcagatcactggcgttatccttcttgcagttggcatttggggcaaggtgag

SEQ ID NO: 488107 - DNA, 75 bp, Homo sapiens
ccagtacctctacgccatgaccgagaagcaggtggcctctgtcagcctcttgcagctgggccaggagactgacaa

SEQ ID NO: 488108 - DNA, 100 bp, Homo sapiens
cggtgagcaaggcctgcggaaacatgttcggcctcatgcacgggacctgcccggagacttcaggaaaaattccggaactgttggcttcgggcatggttga

SEQ ID NO: 488109 - DNA, 112 bp, Homo sapiens
tgcaacaagtgtctttggttataaattatgatctacctaccaatcgtgaaaactatattcacagagccagcggtgagcctggagcagtgtgagcagctggtggcagagctcc

SEQ ID NO: 488110 - DNA, 97 bp, Homo sapiens
ggactaccaaggagaagctatagactacttctactccaccaggaaggatctaagcctttcccacgttatggttataaaccctccccaccgaatggat

SEQ ID NO: 488111 - DNA, 113 bp, Homo sapiens
cagatgacaagagtccttggaagtgcagagaggtgagacactcgccgcaccccgacagacaatgcagatcttcgtgaagactctgactggtaagaccatcaccctcgaggttg

SEQ ID NO: 488112 - DNA, 77 bp, Homo sapiens
agcggtgacaagagggctccgggagaccagctgctggctggtgtggcgtccaagccttggcgccttctacatccctg

SEQ ID NO: 488113 - DNA, 75 bp, Homo sapiens
aaaatgcaaaaaaggaggccaaagactttgaattggattcaagtacgtggctctgggagacctcatcatcctcat

SEQ ID NO: 488114 - DNA, 83 bp, Homo sapiens
caaaaggtcccggaccccccggatctgacggggcgggacctggcgccaccttgcaggtgaccaagaatatggcccaggtgacc

SEQ ID NO: 488115 - DNA, 100 bp, Homo sapiens
ctctatgatgagcactaacactgtgggacttggtttgcctatgtcaagatcacagctcatcctgtttgggctcagtaatcagctggctgtgacattccgg

SEQ ID NO: 488116 - DNA, 51 bp, Homo sapiens
cgggacacctggaagccgagaaatggactcaatgatctttgaggatgtggc

SEQ ID NO: 488117 - DNA, 75 bp, Homo sapiens
aatgaaagaaaccgctgaggcttatttgggaaagaagacactttttcaaaaatggcaatggtatcagaattcctc

SEQ ID NO: 488118 - DNA, 100 bp, Homo sapiens
gggatcgcgacggaccggcgggcggggcgggtaagatggcggccccgcggcgagagccatggaactgctaagagtaaaaggtcaaagatcctggtctgtt

SEQ ID NO: 488119 - DNA, 100 bp, Homo sapiens
ggaagatggcgcctgttgtgacaggctgaagaataagttcatgaaaaaattgccacgtgatgcagaagcttccaacgtgcttgttggggaggttgacttt

SEQ ID NO: 488120 - DNA, 83 bp, Homo sapiens
tattcacgagcatgcgaaggcgaagcggcacaacctggatcaatgtccgagttaccaccatggatgcagagctggagtttgca

SEQ ID NO: 488121 - DNA, 50 bp, Homo sapiens
tgctggtgaaaagcttctccgagagtgttctaagaacggaagcatctggg

SEQ ID NO: 488122 - DNA, 100 bp, Homo sapiens
tttgcctttctggacacagaagtatttgtgacagcttgagaatgccagactgtcatcagagatgaatacttctactgtcaacagtgccagggaagaactg

SEQ ID NO: 488123 - DNA, 96 bp, Homo sapiens
ccgggcgatccccactgccctgcactgctccgcccactctcgcacgctgtggtgagattggctggcgctcagttttgtcagcctggcgggtggcag

SEQ ID NO: 488124 - DNA, 90 bp, Homo sapiens
aaaatatgttggttggactatgcatgataagcaactcaagcatcccaaccttgttaacctcctggaagtcttcaggaggaaacggaggct

SEQ ID NO: 488125 - DNA, 98 bp, Homo sapiens
agggtctcatccgcatgtataaggccgagggccatgtgaaactttctgactttggtctttgcacaggactgaaaaaagcacataggacagaattttat

SEQ ID NO: 488126 - DNA, 75 bp, Homo sapiens
actcacgtggcatcagtccccactgcggtccacggccaggtgaacaatgaacggaaagatgctgaaggatgggag

SEQ ID NO: 488127 - DNA, 74 bp, Homo sapiens
atgcctggtgccccattacaacccgtgtgtatttgcatgcccgagtctttgagccgtgctataccagtttgtcc

SEQ ID NO: 488128 - DNA, 90 bp, Homo sapiens
agtagtggaaggagtacagggaagtctataagctttgcaacagaattacagagtatgataaatgctttgtggtctacagccacaccaccc

SEQ ID NO: 488129 - DNA, 90 bp, Homo sapiens
cacctggacaggtgtatgatgtggaggaggtggatgtgaaagatcctaactatgatgatgaccagggcaactttgtcaacggcatccggc

SEQ ID NO: 488130 - DNA, 100 bp, Homo sapiens
aaaacgtggacgtgaaggaggaatggcaggacgaagatcttcccaggttagaaaatggatttctgactggaatctcaccactgaaaaaaagcacaccctt

SEQ ID NO: 488131 - DNA, 100 bp, Homo sapiens
atgtgtgtgtgtcccgggcccagacgaattgtacttcgggatgacttcagacaaaacccttcggatgtcatggttgcagtaggagagcctgcagtaatgg

SEQ ID NO: 488132 - DNA, 100 bp, Homo sapiens
cggaaggaccactcagcctccaaggaggactacatggtcagaatggcggcagtggagcatcgtcattcttcaggattgccctactggccctacctcacag

SEQ ID NO: 488133 - DNA, 82 bp, Homo sapiens
cagagggatggctgctcagctgctgactgatgaggcactgatctttgtggagttcacctctgtgtttgactgccagaaagcc

SEQ ID NO: 488134 - DNA, 101 bp, Homo sapiens
atgtctccatccccgaccgccctcttctgtcttggagttgatccctgaattttattatctccctgagatgtttgtcaacttcaataattataatcttggag

SEQ ID NO: 488135 - DNA, 86 bp, Homo sapiens
ggacctggatcatggctgccgcgccgccgctacgggaccgcctgagctttctacaccggggaacggcaggagcagctgatgggata

SEQ ID NO: 488136 - DNA, 95 bp, Homo sapiens
tcccctcggcactaggcagcggaggagcccgaccgacccggtattgttgcagcatctggcagtgagactgaggatgaggacagcatggacattcc

SEQ ID NO: 488137 - DNA, 100 bp, Homo sapiens
cggcagggggcggaacaaggagccttggagcggggcaaaggtggagcagttctggaggttttatagccacatggtacgtcctggggacctgacaggccac

SEQ ID NO: 488138 - DNA, 100 bp, Homo sapiens
gaactcctgggctcaaaccatcctcccacctcagccttgtatacaatttactctccgaaagatggacagccttgcatggatcatgatagacaaactggag

SEQ ID NO: 488139 - DNA, 75 bp, Homo sapiens
aaaggctgctaaggatgtcttcaacaaaggatatgaacctgtctgtcctgaagcaagtgggagaggagatgcagc

SEQ ID NO: 488140 - DNA, 74 bp, Homo sapiens
tgcagtgaattttccccccaaactgcaataagccgccttccaagctctacgaactcgacggggaccccaagagg

SEQ ID NO: 488141 - DNA, 100 bp, Homo sapiens
aggaaatacccagactgttactacaacctcgggcgtctgggtgacatccagcagctgctctttgtctcggaccaccgggcagcttatgattactgtgagc

SEQ ID NO: 488142 - DNA, 82 bp, Homo sapiens
aggactgctgctcttatcagagctctgaacagcaacatggggtgcaaagtcctgctcaacattgggcagcagatgctgcggc

SEQ ID NO: 488143 - DNA, 74 bp, Homo sapiens
gctggaagggaaggaaaaacctgtatgtggaaccacctgtgaccaagaatatggcccaggtgaccaaagccctg

SEQ ID NO: 488144 - DNA, 101 bp, Homo sapiens
ttctcagaagacgttctgtatttcagcttcctgctatgtgccctctttgttcctaaagctatcagttgagggatttgcagttgataaaatggctggagagg

SEQ ID NO: 488145 - DNA, 99 bp, Homo sapiens
ggaaatctgaatgctgttatcacgatgaaaggcctgtgacgatccaagacacttggaggttgatccacagaggactgggacacaccacgagaatctccc

SEQ ID NO: 488146 - DNA, 74 bp, Homo sapiens
gagaccagagttagtggaatccacatatctcctctaccagttggtgttggtattaggagatctgcacatcccac

SEQ ID NO: 488147 - DNA, 82 bp, Homo sapiens
atggggaaaatctccccggtgactttcaggaagatctcagtgagcacgtagttcagggtgatgcccttcctggacatgtggg

SEQ ID NO: 488148 - DNA, 75 bp, Homo sapiens
acgtcaccccccagtggtgctgggtaatccacgacttcttattctccttgaaggaaagcccagaaaagtttcaga

SEQ ID NO: 488149 - DNA, 83 bp, Homo sapiens
ccacgcaccgcctgctgctgctggcctgaactctttgcttccggaatccgggattgttgctgacatagaattagaaaacgtcc

SEQ ID NO: 488150 - DNA, 100 bp, Homo sapiens
cggaaagaagaaatatgaatacggctccatcaagacccagccccacacgaagagtggcggaggcagtgtaccacccatgaaggtggtgactccgggggcc

SEQ ID NO: 488151 - DNA, 90 bp, Homo sapiens
caccatcccccatgccgccagaggcccccaaccaggtgacagattgactgggatcccctcgcacatcctcaacagctccccatcagaccg

SEQ ID NO: 488152 - DNA, 100 bp, Homo sapiens
agatctgggtgcatactattatagaaaatttttctaccagaaggcattcgttcagtcagagagcataatagaagtactgcgttttgatgatggagggcta

SEQ ID NO: 488153 - DNA, 74 bp, Homo sapiens
gggtttctttcttaaaggactgatttttagaactccacatttgagactatcttgctaatcatggccggttaaat

SEQ ID NO: 488154 - DNA, 106 bp, Homo sapiens
tctgggagaatatttaatggaaaatcgcttggttaaaacctgacacttttaacaggtgaagctcgtgtgtggagtgccacggtacaatcagacgacagatggacag

SEQ ID NO: 488155 - DNA, 98 bp, Homo sapiens
atttgtggcttaaactcttggcatttggctttgcctttctggacacagaagtatttgtgacagaatgccgggacattctgcttcctgtcatcaccaaa

SEQ ID NO: 488156 - DNA, 87 bp, Homo sapiens
tggatcttcgaacttttgacacggctttggaaacgacgtcatgtgttagctacccagaatggaatcctgacaatgatacaggacaca

SEQ ID NO: 488157 - DNA, 75 bp, Homo sapiens
atgcagatgagaaggttcagttggcaaaccagatatatgacttgaaggtagaagatagcaccatgccgattcgtc

SEQ ID NO: 488158 - DNA, 100 bp, Homo sapiens
acatgagagagacagagaagactttaacagaactcaacaaatgctgtggcctttgtgtctgcccatgtaataggctgcgctgaacatcttaaagttgctg

SEQ ID NO: 488159 - DNA, 103 bp, Homo sapiens
gaaggtctcacctgaggtgaaccttcgaccttggacttctcagcctccagaatgaccaagatcactccatggatgaaatgacagctgtggtgaaaattgaaaa

SEQ ID NO: 488160 - DNA, 100 bp, Homo sapiens
ggaaagttgactgaaaatggggcggaagaaaatacaaatcacacgcataatggatgaaaggaaccgacaggtattatagctgcaaatgtccttgtattct

SEQ ID NO: 488161 - DNA, 97 bp, Homo sapiens
tcatcctaactgaccagaagggccaggtgcatcagtgcaggaatagccaggtctggctgggtcggcacaacctgtttgagcctgaagacacaggcca

SEQ ID NO: 488162 - DNA, 100 bp, Homo sapiens
atggcgcgggccgggccggcgtggctgctgctggcaatctgggtactccaaagattcaggtttactcacgtcatccagcagagaatggaaagtcaaattt

SEQ ID NO: 488163 - DNA, 100 bp, Homo sapiens
cctaacacagagacctcttgtctgaagatcccagcccagggtgttcaggacagaagcgatttctgtggtccaaggtgattggtctgttggacgtttttac

SEQ ID NO: 488164 - DNA, 74 bp, Homo sapiens
cggaggcagaggtggaggcgctttgaaagtccacaagccctagccatgccgtggtagccaatgttcagcttgtc

SEQ ID NO: 488165 - DNA, 98 bp, Homo sapiens
aacgctctgctgcccgctgtgagggaaaaggagcagtatgtgtttatccacgatgcgatcctggaagcctgtctttgtggggacacctctgtgcctgc

SEQ ID NO: 488166 - DNA, 100 bp, Homo sapiens
ctgtattcagctcaggaccaggcaccttctgtggaagtttctctgcaggtggatattgttcccagccagggggagatcagcgttggagagtccaaattct

SEQ ID NO: 488167 - DNA, 100 bp, Homo sapiens
tgatgctgaaacagatgatgaaattagtattggccagtactgatgcaggcactgcaggagccctgactccacagcatgttcgagctcattcctctccagc

SEQ ID NO: 488168 - DNA, 74 bp, Homo sapiens
tgaagaggaggcggaagccaaggtcgtgatgtctcgggagtcggatgttgaggctcagcagtctcatggcagca

SEQ ID NO: 488169 - DNA, 88 bp, Homo sapiens
tgggccgcaggggcgcgcagcgcggggagctgccagatggtgtcctcagaccgaagccaactttcctttctgcccacagaagctcaag

SEQ ID NO: 488170 - DNA, 75 bp, Homo sapiens
aatttttctccctttcttctgtggataagctggaacagatctatgaatgcagaactgcaagcacatgttgaccag

SEQ ID NO: 488171 - DNA, 51 bp, Homo sapiens
catgaaggtggcattttttggcaggattcctagatgaggttatgaagaagt

SEQ ID NO: 488172 - DNA, 73 bp, Homo sapiens
gctctcttccatccccatcttacagatgtattaagaagcctcagcactgactcatatattgaagtccttgatg

SEQ ID NO: 488173 - DNA, 75 bp, Homo sapiens
gtcagacgtgttattgctgaaggagacctgggtattgtggagaagaatcctgaggttggcttgaagcctgtgtgg

SEQ ID NO: 488174 - DNA, 71 bp, Homo sapiens
gccgcccggccaagctatcttctcgctagcagctacaggaccgcactcagttcagtgaccgagacttagcc

SEQ ID NO: 488175 - DNA, 83 bp, Homo sapiens
caggaagctgctggaaggcgaggagagcagtttaagatttgttagtggaagtcgagatggaacggcaagaatttggcagtatc

SEQ ID NO: 488176 - DNA, 75 bp, Homo sapiens
ctttaggagaaagttgctgaaggcaggagggctttggaggaattttttacatcacttgtgaagcaagaaatggtg

SEQ ID NO: 488177 - DNA, 75 bp, Homo sapiens
agggacagcacctcatcccctggatgggggaccacaagatcctcatcgacagattggcggcagtaagcacacaat

SEQ ID NO: 488178 - DNA, 75 bp, Homo sapiens
cttttcccccaggctgctcggcaggaaaggaattaaatcaaaggtggatgagctaaaagcagcctatgaccggga

SEQ ID NO: 488179 - DNA, 100 bp, Homo sapiens
tcaatatgtattgtggcattcaaatcctagcactctgggagaggaggaagttaacatccctaataggagggttctggttactggtgccactgggcttctt

SEQ ID NO: 488180 - DNA, 100 bp, Homo sapiens
cgtgcctgtcttcagatcttcacagcacagttcctgggaaggtggagccaccagcctctccttggtgttcctccaagaaaagctggttatattgaagacc

SEQ ID NO: 488181 - DNA, 73 bp, Homo sapiens
gcggacgtggaagaacctcgtctgcggaggaaaaggttgggggccgtcccgctcctaaggcaggaagatggtg

SEQ ID NO: 488182 - DNA, 83 bp, Homo sapiens
ataatgggtatggaggaggacctggagctacatccgatactcccagatctgtgcaaaagcagtgagagatgcactgaagacag

SEQ ID NO: 488183 - DNA, 96 bp, Homo sapiens
ttggagaaagccagcctaatccaaagactgtggaacttttaagtggagtggtggatcagaccaaagatgggtatggggaggatgtcaggcaggacc

SEQ ID NO: 488184 - DNA, 72 bp, Homo sapiens
caaagaatttccttaagagctggactgggaaagaaaccttgactggttccccaggatgagagccatgtcatt

SEQ ID NO: 488185 - DNA, 100 bp, Homo sapiens
ggcggcggcggcggcggcggctgctgctgctgctgcccgcgtccgaggctcgcgggcggcgggcccggacaaagatcattccactcagcctgggacgatg

SEQ ID NO: 488186 - DNA, 100 bp, Homo sapiens
cttgcttgtttatgttgctgctttttcaattggtctaggaccaaatgtcaccagcacctgcctagctgtcaaggagtggtttgtgtatcctgggaaccca

SEQ ID NO: 488187 - DNA, 100 bp, Homo sapiens
gtgaggttgggccttggccgcctgagcccttgagttggtcacttgaaccttgggaatattgagtacgtttcaggagacggcagcgaggctaccttgcatg

SEQ ID NO: 488188 - DNA, 83 bp, Homo sapiens
gaacaagagatgcaagagtgtacttttgctgatggccgccaaagttggagttcgtatgttgatgacatctgattagcagaagt

SEQ ID NO: 488189 - DNA, 102 bp, Homo sapiens
ttctcagatgttggatatttgcttggaaaaacgtgtgggtacgaccttggagttgtatcccgcattttgtattcacaacggaggctccgaccttgagcggct

SEQ ID NO: 488190 - DNA, 83 bp, Homo sapiens
gcagaagtcgcgtgtctaggtgagtcgcggtgggtcctcgcttgcagttcagcgaccacgactgaaatcgccaagagattgaa

SEQ ID NO: 488191 - DNA, 101 bp, Homo sapiens
cgtctaccagatcaacgtcctccgggaccggagtcagaaccctccgcagagtaaagtaacagatcaactcctagcaatcatgatcggatacagcgtctgag

SEQ ID NO: 488192 - DNA, 82 bp, Homo sapiens
ccggcttcggagcgggagtgttcgttgtgccagcgactaaaaagagttgcaagaatgtagtaactctgatcagctacaagga

SEQ ID NO: 488193 - DNA, 100 bp, Homo sapiens
gaaggccctcaatgataaatttgcctccctaattggcaaggcctccaagcagcatcgtcttaaacgctaccacagccagacctatggcaatgggtccaag

SEQ ID NO: 488194 - DNA, 74 bp, Homo sapiens
gctctacgagctcaagacctaccacgaggtggtggacgagatctactttaagggcttccagcggctgaaggctg

SEQ ID NO: 488195 - DNA, 73 bp, Homo sapiens
gattctgttggactggcaaaacagatagctttgcatgctgaactgatggagtcgggtggtacagttttgagta

SEQ ID NO: 488196 - DNA, 75 bp, Homo sapiens
ctgtgggtggtgttcacaaacttctgcctgttcttctacaaatcacaccaggtcgttgaggaagaggaagactca

SEQ ID NO: 488197 - DNA, 82 bp, Homo sapiens
ctcaactacaagctacaagctcctctaagtgaacccacgctgagccagcatactcatggccctcgggaccaaggatcacgtc

SEQ ID NO: 488198 - DNA, 100 bp, Homo sapiens
ggacaagacccatctttatgcaaagccagcgttacagtaatgttccagattgaccgactcatcagtcacggggccgacatcctgaagcctgtaatgctca

SEQ ID NO: 488199 - DNA, 98 bp, Homo sapiens
ggaagaccaaagaggatgagaaggacgacaagcccatccgaggtggactcccattattgtcccagttgtttagaaaatatgccatcggctgaagccaa

SEQ ID NO: 488200 - DNA, 76 bp, Homo sapiens
tcctggagcagctcacgcgcctctacgactgccagcctggtccgacccccagtggcactaacgtgggatcctcagg

SEQ ID NO: 488201 - DNA, 83 bp, Homo sapiens
tgaataatgactttcctccaagagcacattgcctggtaagatggtgacttaagagattaaaattaatttggttgctgttggtt

SEQ ID NO: 488202 - DNA, 83 bp, Homo sapiens
cagtgtccgacagctctcagctcaagtttgatgaaggccggaacaactttgaaggggaggtcaccaaggagaacctgctggac

SEQ ID NO: 488203 - DNA, 110 bp, Homo sapiens
tgccggcggctgggactgaagagggacgggtcccgcggcgagcgagctcctgagctggcaggtttcatctacgcctgttatgttgtgaaatgtataactgaagaagagga

SEQ ID NO: 488204 - DNA, 74 bp, Homo sapiens
ggctggagacatggaccgcggcgagcaagacatgtgcattgccattgcgatttctcttctcatgatcctgatat

SEQ ID NO: 488205 - DNA, 75 bp, Homo sapiens
gattaagcagcggctgaaagaggagcagaggaagcttcgggaggagcaagagtgagccatggagctacgtgtggg

SEQ ID NO: 488206 - DNA, 80 bp, Homo sapiens
gtacatcgtgcatggcgtccagatacttctgacattgtgcacatttggtgtccagaaggaatgaaaaccagtgacatcaa

SEQ ID NO: 488207 - DNA, 74 bp, Homo sapiens
ggccaagggaccaaggtggaaatcaaacgattaaagcaaggagagccaatcatgactggcaaaacacagaccag

SEQ ID NO: 488208 - DNA, 100 bp, Homo sapiens
gtgatgcttggggagaccaatccagcagattcaaagccaggcaccattcgtggggacttctgcattcaggttggcagattccaacatgccatgggaggag

SEQ ID NO: 488209 - DNA, 100 bp, Homo sapiens
caggaacagggcagacgttagcgtgagtgatcactctcaatcccggaatttatccagttggcgaaggactttgaggatttccgtaaaaagtggcagagga

SEQ ID NO: 488210 - DNA, 90 bp, Homo sapiens
agagggctttatacagggccgtgatgttggagaactacaggaacctggagtctgtggacttcccaagtaagaagcggaagaggagccgct

SEQ ID NO: 488211 - DNA, 75 bp, Homo sapiens
tcatcactcgtgacttcactcagccgctaagtgctatttatggaggtacctatatgctgaataaacccattgaag

SEQ ID NO: 488212 - DNA, 50 bp, Homo sapiens
tctgcatgaacatctccagccaggacgcaaacatgcagatctttgtgaag

SEQ ID NO: 488213 - DNA, 75 bp, Homo sapiens
gtaatgaatgtggaaatcgatggaagattttctggcatccttaaatcttgtgtcaaggattggttataatataac

SEQ ID NO: 488214 - DNA, 100 bp, Homo sapiens
ataaatggcagaggtttgccaaatggaatggatgccgattgcaaagattttaagtgaagaaactgtgcaacatgcccagatcatacaacaaggaagtaat

SEQ ID NO: 488215 - DNA, 100 bp, Homo sapiens
aacagggctcgagtctacctggatgaaaactacaaatcccaggagcacttcacggagcgagaacccgagcagcgccatgagcaacactaccgtcgtcccc

SEQ ID NO: 488216 - DNA, 101 bp, Homo sapiens
ctgtaagaagtgtggcaagcaccaaccccataaagtgacacagtacaagaagggcaaggattctctgtacgcccagggagcaaagaatctgcagagtgttg

SEQ ID NO: 488217 - DNA, 73 bp, Homo sapiens
aagatggcacatggcccaggcagaccttgcagtcaaagagagctcaaaggatggctactgacatgcagaggaa

SEQ ID NO: 488218 - DNA, 100 bp, Homo sapiens
cgcatcattttcacctcgcgtcgcgcccgggaggaaggaacgaggcaaggagctaaagcagcgtgcgttcagccctgggtgtgcctgacgaggaggccaa

SEQ ID NO: 488219 - DNA, 82 bp, Homo sapiens
ttccgcagcgagtggggcagcctgctggaggagctggtggcggaaggaatcaagagagacccggccaaggcttttgtgccca

SEQ ID NO: 488220 - DNA, 100 bp, Homo sapiens
ctgtatgtgaacactgtgacccttgcaccaagttatttggaaatagcggtgcttgcagcgcttgcggacagtcgattcctgcgagtgaactcgtcatgag

SEQ ID NO: 488221 - DNA, 100 bp, Homo sapiens
ggcctttggcacgtcctgctccgtggtgctctatgaccccctgggcagcgaggtcacaggccccacctttgctgatggcgagctcatccccagggaaccc

SEQ ID NO: 488222 - DNA, 82 bp, Homo sapiens
ctctgggatccccgccgctctgtctacaacccgaggatttttagactctgaggagcagttggagctaatccacattatggaa

SEQ ID NO: 488223 - DNA, 50 bp, Homo sapiens
cttacagagacagaacgaagagctggaatcgggaacatgccctgtgtgcc

SEQ ID NO: 488224 - DNA, 82 bp, Homo sapiens
agaaaagagaggacagcggacgagcagatccggcttatgcatctggatgtgacattgtaatactgggaagcgattttgaaag

SEQ ID NO: 488225 - DNA, 100 bp, Homo sapiens
acaacaggaaaatcatattatagatggagtaaagcccttacgtcgtcctgactcatctgatgaccgttatgtaatgacaaaacatgccaccatttatcca

SEQ ID NO: 488226 - DNA, 98 bp, Homo sapiens
gtgaaggaggctcatttgacaaaacggcagcctgtgagtcctcctccaccaccacggccgatctcccctccacatacctatggctacatttcaggacc

SEQ ID NO: 488227 - DNA, 95 bp, Homo sapiens
aggaggcagaggcacttatgcttgtcaggcttgttgattggtgctggctgtgccctctaccccttgggctgggacagtgaggaagtccggcagac

SEQ ID NO: 488228 - DNA, 80 bp, Homo sapiens
gtcgttgtcgccccctcctcgtcgggaagaatcgtttggtctcctgccgtgcccggttgctgcttttgctcagaggacat

SEQ ID NO: 488229 - DNA, 100 bp, Homo sapiens
tacagcaacctggtttcaatgggaggaagaacgtgcaaaacgtgaggagctagagcgaatactggaagagaataaccgaaaaattgcagaagcacaagcc

SEQ ID NO: 488230 - DNA, 100 bp, Homo sapiens
aaacaagccaatcccaggaggaaaaacgcaattctgtggtgttcttggtcacacatttatggagtttctgaagggcagtggagattactgccaggcacag

SEQ ID NO: 488231 - DNA, 82 bp, Homo sapiens
tcgcatctccccgacaaacaccacgagaattccgcagcccacacggagcaggccgggctctcgccatgggtcactgtcgcct

SEQ ID NO: 488232 - DNA, 100 bp, Homo sapiens
accaccaccctcgtgtctgccaccatcttcgacttgagcgaagttttatgcaaggtctgtgcagacttttgcagacaaatcaaaacaagaagctctgaag

SEQ ID NO: 488233 - DNA, 75 bp, Homo sapiens
agagtcccaagaaacgacccagcgccaccaagatgctcagtattgactggggcgactttggggtagaggcagtgt

SEQ ID NO: 488234 - DNA, 100 bp, Homo sapiens
ccgctcacaacatgcacagcctggcgacggctgcggtaccccaagaagctagtgcagacttattcagtgtttccctaccaggacgagatgagcgacgtag

SEQ ID NO: 488235 - DNA, 96 bp, Homo sapiens
cgttttagtcttgggggtagagtgactgcttgcgaaccagttcagcagtgcctcaggtcatcaatgccatcgagcaggactaccggctgcccccac

SEQ ID NO: 488236 - DNA, 90 bp, Homo sapiens
tttgctgctgtcagtatcaccactggtcaagcagtgctcggccttgttctccccatgtgggccatagccctcatttcctttggtgtcgcc

SEQ ID NO: 488237 - DNA, 100 bp, Homo sapiens
ggcctgcccaacaacgccgagagagtcctccttaccacacaggaccagctcagctagtgagcaagaaacacaagctccgaagccagaagcgtccccgtcg

SEQ ID NO: 488238 - DNA, 98 bp, Homo sapiens
acagatctcagagaaattggccatggaagctttggagcagtgtattttgctatggtgaactaaacggtaatgctggagaaagagaaatatctttaaag

SEQ ID NO: 488239 - DNA, 75 bp, Homo sapiens
ccgccctcaccacccctatccagacggctgcccttcaagtaccagatcctggtgaacatggacgacaacattgtg

SEQ ID NO: 488240 - DNA, 82 bp, Homo sapiens
tcggttctacctgggagaatccaccgccatccgccaccatggtcagtgacttcctgtcgggccgttcgccactgacactggc

SEQ ID NO: 488241 - DNA, 100 bp, Homo sapiens
gcggatggccccaggtgtaagcgcagaaagcaggcgaacccgcggcgcaataacgttcctcctaagatatatgacatctcaaatgatatgaccgtcaatg

SEQ ID NO: 488242 - DNA, 80 bp, Homo sapiens
gccttgaacattccgaaactgtcaagattggcaaggacagttaatgattggacgtcatccaatgagaaagcagtgatgtc

SEQ ID NO: 488243 - DNA, 95 bp, Homo sapiens
acagcctgcagcggagcccacgagaggcagcgccatggcggagcagacctactcgtgaattactaatttcagctggattcaatttgttgtcagtt

SEQ ID NO: 488244 - DNA, 83 bp, Homo sapiens
ccgtcacccacctcatctttgacatggacggacttcttctgggtaaagcagctgagcagccattttcagatttaccccttctc

SEQ ID NO: 488245 - DNA, 82 bp, Homo sapiens
ctcccagtgacgggtctggagtgcgtgggggaccggctgttggcggggtaccgtgagggttttctctggaagcgtggccggg

SEQ ID NO: 488246 - DNA, 75 bp, Homo sapiens
gaactcgatttatatttggcatactttgtgcatgcagcaggccagctgcgggccgtccagcggctgtgccacttc

SEQ ID NO: 488247 - DNA, 96 bp, Homo sapiens
gcggcctgtgtgtcaacgacctggcggtggggctgcggcgcctgggactgcaccgcaccgagggcgagctccaggctcacctccacctccagtaaa

SEQ ID NO: 488248 - DNA, 101 bp, Homo sapiens
atggaactttaccagcacctggaatctaaggagtggtttgtgcagctctattaccacgggaagggacactccggacgcaggcccggccaggagagttcgtc

SEQ ID NO: 488249 - DNA, 50 bp, Homo sapiens
gcttagattctggatacattttgaagtcaccttcaggccattcagaggag

SEQ ID NO: 488250 - DNA, 75 bp, Homo sapiens
ggttcttttgctggagatatttgggtttttgaaatcatgaatcctgtttatagtcctggatcttctggggttccc

SEQ ID NO: 488251 - DNA, 75 bp, Homo sapiens
ctgggattcgcgctgctgggcacccacggagcctccggggctgtctacgagaacgaagaccagctgctctgggac

SEQ ID NO: 488252 - DNA, 75 bp, Homo sapiens
aaacgcaagacggtgccgagaagcagctgcgagcaaagccttctagacaagctcagtggaatctgaagggcccac

SEQ ID NO: 488253 - DNA, 90 bp, Homo sapiens
ttcaggtgatgccaccaatccagacagaatgtacgaccttgttgctgttgtggttcactgtggaaggtccgaataaatactggaaagaat

SEQ ID NO: 488254 - DNA, 98 bp, Homo sapiens
ccccattcggaaaaagaagtggagcttcattcaaggaatcctgcaatatggcgaacataagagaatattatgagagagctttgagagagtttggatcc

SEQ ID NO: 488255 - DNA, 100 bp, Homo sapiens
tccagtcgctgctgagctcagtggagagtgcggtggaggccatcgaggaacagaccagccagctccggtggtgaaatactggccagagatttcatcaagc

SEQ ID NO: 488256 - DNA, 98 bp, Homo sapiens
tgtagtccacatggagctctcagcataccgtgcaacaggacagaatgacttggaagataacggagcttcgaagcttctagcagaatatgaagtctttc

SEQ ID NO: 488257 - DNA, 74 bp, Homo sapiens
ctcaggacggacaagcacagtcttcggaaggccttttcagatattaatggcaaagttcagaccattgttttgac

SEQ ID NO: 488258 - DNA, 100 bp, Homo sapiens
gctgaggagagagtcgcgacgggtgtccgcaatgttgccagtgtctgtctgcagattggctacccaactgttgcatcagtaccccattctatcatcaacg

SEQ ID NO: 488259 - DNA, 82 bp, Homo sapiens
ggcggagctaacggactccgcgcgggatgaccgagtgggagacagcagcaccagcggtggcagagaccccagacatcaagct

SEQ ID NO: 488260 - DNA, 100 bp, Homo sapiens
gtccatgcctgctgatgggaactggatggggattgtggacccttttgccagacctcgaggtcatggcaggaaaggtctgggaattgggaacatgttctat

SEQ ID NO: 488261 - DNA, 100 bp, Homo sapiens
agcaggcggcgcagtacaccaacgcggtgcgcgaccgggagctggacctccggggtgctggtaaaccgcctatgtttggtgattatgaagctcagagaca

SEQ ID NO: 488262 - DNA, 50 bp, Homo sapiens
gggaacgcccggcccagccccgttttgacacaagggcgcatatcttcaaa

SEQ ID NO: 488263 - DNA, 50 bp, Homo sapiens
ctcagggtgatgacttggcaaggtgtctgtaaccctcgagacctttcaag

SEQ ID NO: 488264 - DNA, 98 bp, Homo sapiens
gcgcgggtgctccgggccgaggccgcggtgtctgtgacctttgaggatgtggctgtgacattcacccaggaggagtggggacagttggatgcagccca

SEQ ID NO: 488265 - DNA, 159 bp, Homo sapiens
tattcttcatgggaacagaggtgtttaccatgacgataagcaaccagcatttagagctgtttatgaagcactgagaaatctggagttggccacggccaagaacgacatgaaccggcacctgcacgagtacatggagatgtgcagcatgaagcgcggcct

SEQ ID NO: 488266 - DNA, 74 bp, Homo sapiens
ggaagaggaagaggaggaattagtggagctgaagaagaagctgttcaaacgccggcgggtgttgaatcgggagc

SEQ ID NO: 488267 - DNA, 90 bp, Homo sapiens
ggcgaggagccatggatattagaggaaaaatttccaagccagagtcatctgggctcttcagctcccctccctgcttctggaaacctctgc

SEQ ID NO: 488268 - DNA, 83 bp, Homo sapiens
aatcacttgggttcattctattcagggcctgctttcttccccgggcgatgtgcagagatctttgccaggggtcaaagcgtcgg

SEQ ID NO: 488269 - DNA, 75 bp, Homo sapiens
ttaaaagagcatcctgctcatgaacgagtactacagatggagaaactgaggccagaagaggtgagcttacctgcc

SEQ ID NO: 488270 - DNA, 100 bp, Homo sapiens
agagaagaccctcctggaagagaaggtcaagttggaggaacagctgaaggagactgtggtactgactgcattgcagaaagacagccgggaaatggagaag

SEQ ID NO: 488271 - DNA, 75 bp, Homo sapiens
ccacagagaatgctctgcacccgttgatggtctctattccaatgtggcctgtccaggtacagcattgaccaattt

SEQ ID NO: 488272 - DNA, 75 bp, Homo sapiens
cttcgtgctgctcgacgtgctgtgcttactggtcggagggtgtgaagacagagaatgaccacatcaacctgaagg

SEQ ID NO: 488273 - DNA, 50 bp, Homo sapiens
ggggaaccatggctgccccgagaggaggaaacacaattattactagaaaa

SEQ ID NO: 488274 - DNA, 88 bp, Homo sapiens
ctggaagttctgatgttccactgaaatcacaatggaaagtcttgacttgactggatcagctcagctactatttaataaaacaaaatct

SEQ ID NO: 488275 - DNA, 83 bp, Homo sapiens
gatcggagcacaccggagcaggctcatcgagaaggcgtctgcgagaccatggagaacggcgctggccgcgcgccgaacccgag

SEQ ID NO: 488276 - DNA, 97 bp, Homo sapiens
ccgtcgttgccttgtatttccagagaacagagccagagcccagaggtggagcagttagggagggttgtggaactggacagtgacatggtagatatca

SEQ ID NO: 488277 - DNA, 75 bp, Homo sapiens
actttggtctcctgggaccactcgttgctgacagtcagaaaatgctggctatgagtttgacatctgcttcacctc

SEQ ID NO: 488278 - DNA, 75 bp, Homo sapiens
gacagctggatttcaacagctccaaagatgtagctgtgatgcagttgcggaggcagacctgttatcctaaactag

SEQ ID NO: 488279 - DNA, 75 bp, Homo sapiens
tgcaaatcccctgctcagggtcttcatccagaaacgagggtacatccgtccccagtatcaagggtccggggcaat

SEQ ID NO: 488280 - DNA, 96 bp, Homo sapiens
gctgtaagaagcaacaacctctcctcttcgtctccgccatcagctcggcagtcgcgaagcagcaaccatggccgtggccccgctcatgaagtacct

SEQ ID NO: 488281 - DNA, 75 bp, Homo sapiens
ggctctgggtgcgcggaccgggccaggctgcttgaaggagcttgaagaaatccgcaaatgtgggatgaaaaactt

SEQ ID NO: 488282 - DNA, 90 bp, Homo sapiens
tgacagaactcattctcaccaataatagtctcgtggaactggaacttcaagagcagctgaagatcaccacctttaaagatcttgtaatca

SEQ ID NO: 488283 - DNA, 83 bp, Homo sapiens
agattatagctctgtatgagaaggacaacacctacttaggtgcaggtgatggtcctaccagtgtgtctgttgaggtcacccgt

SEQ ID NO: 488284 - DNA, 83 bp, Homo sapiens
aaattaatcctcctccacatacaatgaatactggccatggtgcaacttctggttttggcagtgcttttacaggacaacaagga

SEQ ID NO: 488285 - DNA, 100 bp, Homo sapiens
cgggaacatggcgctgggagcgctgtagcagctgagaaggggctgaggcaccgccgcttcgctgacagccggccaccagctgtcaaagctcgaaaaacag

SEQ ID NO: 488286 - DNA, 98 bp, Homo sapiens
ggagtgagcattgctgcatttggagagtcagatgccattttgttgccaaaacaaaggggatttggtgatggaggctttgttagaaggaatacaaaatc

SEQ ID NO: 488287 - DNA, 83 bp, Homo sapiens
cccgtccgccccagccgcgtctgggccaggagaaaaggttacaagaggacccacctgtgggtgtcagtggcgcaccatctgaa

SEQ ID NO: 488288 - DNA, 107 bp, Homo sapiens
ggtgaccacttttggaccaaaggcctgtgtgctgcagaacccccagaccatcatgtctcctctgagcctccggcctccataagacccaaaacagatgacacctcttc

SEQ ID NO: 488289 - DNA, 100 bp, Homo sapiens
ggcggccacccggagccagcggagggacaggcagaatccagagaccacatttgaagtatatgttgaagtggcctatcccaggacaggtggcactctttca

SEQ ID NO: 488290 - DNA, 100 bp, Homo sapiens
aggcaggagcagcttctggatgaaatacatcgtgagaagagagacctagaggatcaagacataatgggagcatttttagacaagccaaagatggaaaagc

SEQ ID NO: 488291 - DNA, 100 bp, Homo sapiens
gtttgtgttgcgggggccggacttcaaggaggttgtggctcactggattgctgaaagccgcattgccattgagaagatccgcttgttgactctgaaagct

SEQ ID NO: 488292 - DNA, 99 bp, Homo sapiens
ggtggatcctgtccttcatgcagtctctcattggcttctttgagactgaaatggcagctggagtcttttgtgcaattgtttctcaccctgctgattctg

SEQ ID NO: 488293 - DNA, 43 bp, Homo sapiens
gcaaaagcctttcatgattatacttcccaagtaagaagcggaa

SEQ ID NO: 488294 - DNA, 75 bp, Homo sapiens
tttgcatcatgagtattttactagagatggatttattgaaaatctctgctggatgaaccgaatcctaacagtcca

SEQ ID NO: 488295 - DNA, 100 bp, Homo sapiens
tggggaggagcggggggaggaggacccagaagcatacacaagctgagggagaatgtctttcaagagcatcagacccttaaggagaaggaacttgaaacag

SEQ ID NO: 488296 - DNA, 100 bp, Homo sapiens
tgaaggctcatcatgatattgtacgatttctggtacagttagatgactacaggatccatcagttacacaagtgacaagaaatgttccaccaggacttgat

SEQ ID NO: 488297 - DNA, 73 bp, Homo sapiens
cgggagaggctgctgtggaggctgaggaggcggcggcggagatctggatgcatcactgtaagcgataccgctc

SEQ ID NO: 488298 - DNA, 96 bp, Homo sapiens
tgtggagttcctcaaacgaaaagagaattgtacactgcaggcaccattcaggaagattacctaagagagctgctgacaaccatgggggatcggttt

SEQ ID NO: 488299 - DNA, 100 bp, Homo sapiens
tattgacgctgtaagagcatcagattttctccctgggccactgccctaaccaggactggctggcggtcggaatggagagtagcaacgtggagatcctgca

SEQ ID NO: 488300 - DNA, 83 bp, Homo sapiens
ccagtgtctctgctgctcaaaatttctcttccaggatggatagaatgacagaagatgctcttcgcttgaatctgttgaagcgg

SEQ ID NO: 488301 - DNA, 100 bp, Homo sapiens
atgattggacatgtcctagacatcacttagagatacagtctcgctgtgatgcccaggctggagtgcaatggcgtgattttggctcactgcaacctctccc

SEQ ID NO: 488302 - DNA, 75 bp, Homo sapiens
gacgtcctccacattctcccgaaacttggcggaacattccaggcctagttccccgagagcgttcagacagtgggg

SEQ ID NO: 488303 - DNA, 99 bp, Homo sapiens
cacgactgttacagaggtctccagagccttctctctcctgatgctagctaaacagttggaagctcttggtttagctgaaaagcctcagttggtgactcg

SEQ ID NO: 488304 - DNA, 89 bp, Homo sapiens
ctcctactcccagatgcatccgtgtcagtgtaaatgcagacaaagttggaattgaagctgccgaaatgctattagcaaatcttagacat

SEQ ID NO: 488305 - DNA, 75 bp, Homo sapiens
cagcttcccacagcaggttggacagttcacagcttcaaaagcagtggactgtcttttggattcaaagtgggcaaa

SEQ ID NO: 488306 - DNA, 100 bp, Homo sapiens
ccacgtatagctgaactcatggacaaggtattaatctctggagaagacacatccacagttagcactttcttcagatgctgacgctcggtgaacagttgcc

SEQ ID NO: 488307 - DNA, 83 bp, Homo sapiens
agaagaaactcaactggtgtcgagaagtccggaagcttgtggcgctgaaaacgaacggatgccctgcacagcgtaaagaagag

SEQ ID NO: 488308 - DNA, 88 bp, Homo sapiens
ggcggccagcaggaggctgatgaaggtgatgtgtccaatctagatcccaacttctcatttgaaggcaccaaactggatgtggggaaca

SEQ ID NO: 488309 - DNA, 100 bp, Homo sapiens
ggcgcgccgggactgtgagacgacaggctgtggatgtgtcccccctgcgccgtgtgaaccagggctgcaagtctatttcccagaggattaactacttcct

SEQ ID NO: 488310 - DNA, 82 bp, Homo sapiens
agaccagggccctgcagctggaagaggagctgttccaggcgggcagggctgggcagcggcctgagtctcagcggacttgtcc

SEQ ID NO: 488311 - DNA, 95 bp, Homo sapiens
caatgtggcaaaacgaaaaagctcaatgcctcagaaattcattgtgtgaaagcagctgtagacaacaaggaagtgaatgaatgttgccgtgctcc

SEQ ID NO: 488312 - DNA, 100 bp, Homo sapiens
agaaaaattaaagaagatgatgctccaagaacaatagcttgccctcataaagtaattttttctgcaggatgaattaagagaagagacacttgctcatcag

SEQ ID NO: 488313 - DNA, 83 bp, Homo sapiens
acaacattaatcagatactgcatttaaggaagccagttgagggaagttctccatgaatgtacgtcacaatgatgatgaccgac

SEQ ID NO: 488314 - DNA, 85 bp, Homo sapiens
cttgcggaactctcccgtcaacaccaagaatcaagctgtgaagagatgctgtctcaccatgttggccccggatagtcttggactc

SEQ ID NO: 488315 - DNA, 101 bp, Homo sapiens
agtttaatattgacagcatggttcataaacatgttattaccccattcaagttgacaactgaggcaacgcagactccagtctccaataagaaaccagtgttt

SEQ ID NO: 488316 - DNA, 83 bp, Homo sapiens
caatagctcaaggaaacctttccaacacagatgtccaagctgccaaccccatgttatagtacattgtgcagcagagagaagac

SEQ ID NO: 488317 - DNA, 74 bp, Homo sapiens
cagaagaggaactattggacagagaatttgaccttctaagatcaagtataaatgaccaaggattgtacagagtt

SEQ ID NO: 488318 - DNA, 82 bp, Homo sapiens
cctgcaccacagctctccaggacataagaccagtgagaagccctaccactgcaactgggacggctgcggctggaagtttgcg

SEQ ID NO: 488319 - DNA, 90 bp, Homo sapiens
cagttaccaaggttcgactccagctgcaggagtttcggagcaacatcccctgtcacctggttgatatctcttgcggattaccctgcagtg

SEQ ID NO: 488320 - DNA, 95 bp, Homo sapiens
agcatgctgcaggccactatgacgaagcaagaagccgatgacatgagcattcccatctcccacattgacggagtacaaaccaccaggaacccgta

SEQ ID NO: 488321 - DNA, 90 bp, Homo sapiens
ctggaactgccctaatcgactgaaaatgagccggctacagtcatatggaacagaaaggcttcccaactgatgcaactcttgatgacataa

SEQ ID NO: 488322 - DNA, 83 bp, Homo sapiens
ctggcgcgatgcgtcaagtacactgaaattcatcctgagatgagatactctggatgaatattttgaatatgatgcagaggagt

SEQ ID NO: 488323 - DNA, 99 bp, Homo sapiens
ggaaatggcaccgtcatgggtgctgaaatccggcatgttcttgtcacactgggtggaagaagagcccgaagaagaacctgaagagacagcagaagacac

SEQ ID NO: 488324 - DNA, 101 bp, Homo sapiens
acatactttggtgtcatgtgacttggatacatttcccagtgagcttgtggacaaatgtataggatcaagaattcacatcgtgatgaagagtgataaggaaa

SEQ ID NO: 488325 - DNA, 76 bp, Homo sapiens
cgtgtggggctgggtctcggagtgggagacgtggagtgcaggtcaccatggagtaacaagtatgaccctcccttgg

SEQ ID NO: 488326 - DNA, 83 bp, Homo sapiens
gcagtatcatgctggccaagaagatcatcattaaggacggaggcacgcgcttctctgaagtagctttggaaagtagagaagaa

SEQ ID NO: 488327 - DNA, 100 bp, Homo sapiens
aggacctcctcggccacttcggctgtgtcaatgccattgaattctccaacaatggaggccagtggctggtctcagctgtgctacagtgctgttctcctac

SEQ ID NO: 488328 - DNA, 83 bp, Homo sapiens
agttattggagtggtttaatgacccgagcctcagggataagaatccacattcatctcaatggaaggatcctgccttaagtcaa

SEQ ID NO: 488329 - DNA, 95 bp, Homo sapiens
ttccttcaacactgtagcagagatcactgggagcaaatatccagaacaggcatttgcaagtaaaatcactggcatgttgttggaattatccccag

SEQ ID NO: 488330 - DNA, 100 bp, Homo sapiens
aatgtgccagtgatattttccagaactgtcaagtaatccacctctggctaccatccttattcctcctcatgctcggattcaagcagctgcttcaaccccc

SEQ ID NO: 488331 - DNA, 90 bp, Homo sapiens
gctctttgtagcgtggtgcttctgttgctcacagatgtccagctcgccgctgtccaagaaacgtcgcgtgtccgggcctgatccaaagcc

SEQ ID NO: 488332 - DNA, 78 bp, Homo sapiens
ttttcgtacgggcggccgtgcgcgaggcgagatcgggagcggtgccgagaaaaatttccttactagatgacatttcat

SEQ ID NO: 488333 - DNA, 75 bp, Homo sapiens
cgccggaacaccattcttcgccaggccaggaatgcctcattgctacgatttcagagtaccctggtaatagctgag

SEQ ID NO: 488334 - DNA, 100 bp, Homo sapiens
gcctttgaagaccgggatcctacacagtttgaagagagacatttgaaatttctacagcaacttggcaagtggcaccactgcaagtggaggtgagaacgag

SEQ ID NO: 488335 - DNA, 98 bp, Homo sapiens
tcacactggtcagttccaaccttcccaggaatcttctgtggccatgttcactccggttttacagtgcaccgtccaggtgaggttagagctggggcatc

SEQ ID NO: 488336 - DNA, 90 bp, Homo sapiens
aggtccgggccccagcggcgggcccggtggcggaggtggtggtggcggcggaggcggcggcaccgagggccatgatccaaaggaaccaga

SEQ ID NO: 488337 - DNA, 101 bp, Homo sapiens
ttggatcgggtcgcctgtgtggcaagagtagaaggagcatcgatgcaggtatgatctcgtgaaatcttgagagaaactgaatgacgaatgaaactattgtt

SEQ ID NO: 488338 - DNA, 74 bp, Homo sapiens
tcacattgctcctgctgctgctgcaggagcgagaacccgagcagcgccatgagcaacactaccgtcgtccccag

SEQ ID NO: 488339 - DNA, 82 bp, Homo sapiens
gtgacctggggatcgctacggaccttaaaatacccgcaacagccccttcgtcccaaacctcctgccccccgaggtctgcagt

SEQ ID NO: 488340 - DNA, 90 bp, Homo sapiens
gagcagtgagctggagaccaccagcttctttgactcagatgaggatgactccaccagcagagttccacgggctggatgaagccactctac

SEQ ID NO: 488341 - DNA, 83 bp, Homo sapiens
tatgcatactccacagcacctgttggttgaatctggcgatgtggaacccatggatatggagggctgactatatacaccatgtt

SEQ ID NO: 488342 - DNA, 83 bp, Homo sapiens
aacatctgacagtgcttgcaggatctctcctggacaaatcaatcaggttatcaatactctggctgaccatcatcatcgtggga

SEQ ID NO: 488343 - DNA, 100 bp, Homo sapiens
gccccacagaccatggtcatgccaggtttggaaatatcttgggatggagacagttttgtagaagtcatggctgcgccgcatctcaagggcaagctctgtg

SEQ ID NO: 488344 - DNA, 50 bp, Homo sapiens
aagcgggcggcgcgggggagatgggaaggtggccatccagaaggaggact

SEQ ID NO: 488345 - DNA, 100 bp, Homo sapiens
cggctgtacctgtttgggctggagagtgcggagcaggctcatgagtgggtcaagtgtattgctaaggggatttcccggtcccatggggagatcacagaag

SEQ ID NO: 488346 - DNA, 83 bp, Homo sapiens
gtcctgcattacggtctctataagaagatgatccccagcctgactcctggagattgtgaatagctccatccagcctgagaaac

SEQ ID NO: 488347 - DNA, 50 bp, Homo sapiens
caccatagcctctcaccctaagggggtggtcaaagttgtcttcatcctct

SEQ ID NO: 488348 - DNA, 100 bp, Homo sapiens
gcccgcgccggcggcatcgagactatcgctaatgagtatagcgaccgctgcacgccgtaatactgcattgcatgattgtgcagaatctggaagtttggac

SEQ ID NO: 488349 - DNA, 99 bp, Homo sapiens
aatggttcacataaagaaaggcgagctgacccaggaggagaaggagctactggaagtcatcgggaaagttggttagtctgctgctaattggaattgctg

SEQ ID NO: 488350 - DNA, 75 bp, Homo sapiens
tgcgaacacagtagtggaagatgtaaagcaatatttcgagcagtttggcaagtgatgtccttgcattgcccattt

SEQ ID NO: 488351 - DNA, 100 bp, Homo sapiens
cggatgtattggatttagcagaaacaatggttgcatctgcagatggtttagtttatgaaccagaaattgaacttagctcattaagggaagctttgtcttt

SEQ ID NO: 488352 - DNA, 90 bp, Homo sapiens
aaaaagatttgaagagacgggtcaggcggccttctgatctgtttaccacgtgagcaagcagctcggttctgtgcagagataaagtccccc

SEQ ID NO: 488353 - DNA, 75 bp, Homo sapiens
ctctccttttccctctccctttccctaaggccaagaagcttgagagaagaaaaatttcagaaaaattgtctcaat

SEQ ID NO: 488354 - DNA, 74 bp, Homo sapiens
gcacacacatatccatgtgtgtgtgccagtgctttggggctctgttccacgggtttaaggaagaaatctctaaa

SEQ ID NO: 488355 - DNA, 75 bp, Homo sapiens
tcggtacctcggaccagctctgtaaaagccccgcctctgccttcggatagaaatgctgctcatggattctccctt

SEQ ID NO: 488356 - DNA, 82 bp, Homo sapiens
ccatttccctttggtgtccgcattgactacgtgctttacaaggagagtatacatatcttacctcgatagtgttcatttcttc

SEQ ID NO: 488357 - DNA, 83 bp, Homo sapiens
gcgccagcggccgagcgggcggcttcctggcctgggcgctccggtggcggcggagcctgtgggccaaagctgaccaactcccc

SEQ ID NO: 488358 - DNA, 100 bp, Homo sapiens
ctagcacgtggaattcgcgaagctgccaaagccttagacaagtcttcaaagcttcacctttctccaaaggcagatgtgaagaacttgatgtcttatgtgg

SEQ ID NO: 488359 - DNA, 100 bp, Homo sapiens
tgctcagcgtcctcatgtggggggtaaaccactcgcctcccctggtgaagacacaaactgtcaccatctcagataatgccaatgctgtgaaaagtgaaat

SEQ ID NO: 488360 - DNA, 74 bp, Homo sapiens
agttgttcattgtttgtcaccacaaaaaggacagatgttgaacgtcgacgcatttacgatatcgtgaacgtcct

SEQ ID NO: 488361 - DNA, 93 bp, Homo sapiens
ttggcaaaatcgagcgggccattggtgagaccgtggagccgcccccgccggcgcagctgcacttcatgtacgtggcggcggccgcctttgtgc

SEQ ID NO: 488362 - DNA, 75 bp, Homo sapiens
ggtcttcctgctggggctcatgtttgagatgaggagcgggaaggcctcctgcaccctggagaccgtgtgggaaga

SEQ ID NO: 488363 - DNA, 75 bp, Homo sapiens
ctgcaatttgcttgaagaacttaaaactcaaagttgtatggattgtatagagcagataatcaccagaatgggagt

SEQ ID NO: 488364 - DNA, 137 bp, Homo sapiens
ctgcgtctggaggatatgttaatatcattaagattctgcttaatgctggggcagaaattaattcaagaactttgaccagaataagctggaagaagaaatgagaaagcgaaaagaaagagtagaaaaatggcgagaag

SEQ ID NO: 488365 - DNA, 50 bp, Homo sapiens
ggaaattcctgacgttcattgatctgggttacattccgaaaagcaaatgg

SEQ ID NO: 488366 - DNA, 74 bp, Homo sapiens
gaaaaactgattgactgggctggcgttaactgtgcggaggcaggctgaccccgcactacatctacccaccagcc

SEQ ID NO: 488367 - DNA, 101 bp, Homo sapiens
ccacaatctcagttgcttgctggaattgttgtggataagccaccttctgtgctaaaatgatgtattttctggacaagtcaaggcaggagaaagcaattgct

SEQ ID NO: 488368 - DNA, 75 bp, Homo sapiens
cggccagccgccccgtccgggagaggctgaggggatctggcggtggagcgctaggatcagacgcccccgcgatga

SEQ ID NO: 488369 - DNA, 75 bp, Homo sapiens
ctgtcgggcggcgtttggtcccgggagcctcgccgggtgtgaatgacagaggtggtgccatccagcgcgctcagc

SEQ ID NO: 488370 - DNA, 100 bp, Homo sapiens
tacctctgccggataggtgacaaaggtccgcaagcaggtggtgaacatcccgtccttcattgtccgcctggattcccagaagcacatcgacttctctctg

SEQ ID NO: 488371 - DNA, 75 bp, Homo sapiens
gaagtgcagctgcctcagttcttagcgcagttttttaacaggattggggtgtccaaactgcatcgagtatttcac

SEQ ID NO: 488372 - DNA, 85 bp, Homo sapiens
agattgaaggaaggtgatacaatgatggggcagcaagtggccaaatctgggagcacagatggtgtatttggaccagttaaaaacc

SEQ ID NO: 488373 - DNA, 87 bp, Homo sapiens
accaaataagctatatactttggttacctatgtacctgttaccactttcaaaagctctcaccacacacttgttcatgggcgcagcaa

SEQ ID NO: 488374 - DNA, 90 bp, Homo sapiens
agagagccactcccgcccacgtcccatttcgcccctcgcgtccggagtccccgtggccagatgatgtgatgccagccacttactgtgaaa

SEQ ID NO: 488375 - DNA, 101 bp, Homo sapiens
gccggaaggaacagacccctgtagcggatttgctgaccatgaaagaatatcactgtttgctgcaattactgtgtcctgatttcccgctggagctcactcag

SEQ ID NO: 488376 - DNA, 82 bp, Homo sapiens
agactccagcagccaagatggtgaagcagatcgagagcaaggaattgcattttgtgaaaaaagaacaagaattttctgcaag

SEQ ID NO: 488377 - DNA, 50 bp, Homo sapiens
gtcggcgctcaccatccagttcatccagagtcctccctgctgctgtgtgg

SEQ ID NO: 488378 - DNA, 75 bp, Homo sapiens
gagagcagtaccctgatggagtcccttgcagtggtcctttggcgtgctcctctgggagctgatgacaagaggagc

SEQ ID NO: 488379 - DNA, 100 bp, Homo sapiens
aggattcgttggctgccgtccccgctgctgtgcattggaaatttctgaataaattggcagaagaacgcagacagaagaaggaaacttaagatgtgcaagg

SEQ ID NO: 488380 - DNA, 75 bp, Homo sapiens
cactgcctgcgcagctccggccgcctggctccccatactagtcgccgctcccactgcttcctgcactccacgtct

SEQ ID NO: 488381 - DNA, 90 bp, Homo sapiens
tgacccataaacatgtcttgtgagaggaaaggcctctcggagctgcgatcgggatggccgagcctcgatttaacaacccctacttctggc

SEQ ID NO: 488382 - DNA, 90 bp, Homo sapiens
cgtgaccgagagcgtgaccgagagcgcgaatatcgtcatcgttagaaggttggtgttcgaggaagagacattgttgttcttggtgtggag

SEQ ID NO: 488383 - DNA, 75 bp, Homo sapiens
cgcgatggagctgggggagccgggcggacgacctgcacatcatggactccctagagctgcccaccggagacccac

SEQ ID NO: 488384 - DNA, 75 bp, Homo sapiens
cgtgagccactgcacctggcacagttggattggatgctgctggcaagacaaccattctgtataaactgaagttag

SEQ ID NO: 488385 - DNA, 98 bp, Homo sapiens
aagaaaagagtgtgttgtgaacgaagtcagaatttcctgtgttccctttgccgctcctggagttcactggacctctggtcctcaatcgagttcctcta

SEQ ID NO: 488386 - DNA, 74 bp, Homo sapiens
cgggttctgacaagatggccgggctgccccgcaggatcatcaagtactatactggcaattgctggagaagattt

SEQ ID NO: 488387 - DNA, 100 bp, Homo sapiens
ggcggtgttcccggctccgtggggccgtcttcccggcgagtccgcgacggtcgccgcccacggcgaggcatagaatgtcaagctaaccaggcgtccgcta

SEQ ID NO: 488388 - DNA, 100 bp, Homo sapiens
ttctcgcaaacgagccgatccacaacccctgcaaacttggattcaggtatctgctgtgcgtttcagtcaacaatacagcttgtgttcgacaatattcctt

SEQ ID NO: 488389 - DNA, 100 bp, Homo sapiens
ggaaatcttagatttggctcctttttgcacccttaaatgtaagtgacttttttgaacgaaccattctgtgcaacagccttgtgtggagttgtgctgtgac

SEQ ID NO: 488390 - DNA, 100 bp, Homo sapiens
gagagaggcaccgggatcgtgaccgagaccgtgaccgagagcgtgaccgagagcgcgaatatcgtcatcgttagaagggttccctagtgtcccgggaagc

SEQ ID NO: 488391 - DNA, 101 bp, Homo sapiens
gacggtggccctgtcagtggctctcttggccctcctgaaatggtggatcctgtgaaactgcgccagtctatccgcacagttcttttcaaccagtgcatgat

SEQ ID NO: 488392 - DNA, 100 bp, Homo sapiens
cagaaatcaatgttagcagatagccagcccatacaagatcgtttttcggctttgtgagaaaccttaccatcaaacacgatggccagcaacgttaccaaca

SEQ ID NO: 488393 - DNA, 75 bp, Homo sapiens
agcgatggctgcttacttcacagcagcacagctgatgaaaggccgtgctggtatagaggactctaagaagtgggg

SEQ ID NO: 488394 - DNA, 82 bp, Homo sapiens
ttgtcggtctggactgatgaaaatccatatggtaacttacgacctatttctccgtggcgttggctgttttctgttgttgttc

SEQ ID NO: 488395 - DNA, 75 bp, Homo sapiens
ttcctgttcagagcaaccagctaatacttttaattcaggctggctatgaactcaatgttcaggattatgatggct

SEQ ID NO: 488396 - DNA, 99 bp, Homo sapiens
gcgctggggacggatcctaacatgtcctgacaccgcctgtgctcttcgtcttgtgcctctgaaatggggttctacgccagccagtggacaggatttact

SEQ ID NO: 488397 - DNA, 100 bp, Homo sapiens
cctcagttggaagcagccgatccagcctgcggagcctgtggggcagtaagagatgctaaaaaccttgtacctatggaccccaatggcctgtcagatccct

SEQ ID NO: 488398 - DNA, 75 bp, Homo sapiens
tggggcaaagggaccacggtcaccgtctcctcagaagttatagaccttactcatgataacaaagatgatcttcag

SEQ ID NO: 488399 - DNA, 75 bp, Homo sapiens
acttactaccgatcatgagaaagctttctacaagttctgattaaagtcagaaatagacacaatgatgtggttcct

SEQ ID NO: 488400 - DNA, 82 bp, Homo sapiens
ctttggtatccgcaaactctacatgaaaagtctgttaaaaatctttgcggtcttgagtcaccacgtccgaatataattcttg

SEQ ID NO: 488401 - DNA, 100 bp, Homo sapiens
ttatcctcaagagtcagctggcagggtgccaagaagctctgccctcagtgcaacacgatcacagcgcccggagacctgcggaggatctacttgtgagcta

SEQ ID NO: 488402 - DNA, 80 bp, Homo sapiens
aaacaataaagaccggaagctgagtttttatccggccgacgagattgaaatgatcatgacggaccttgaaagggcaaacc

SEQ ID NO: 488403 - DNA, 126 bp, Homo sapiens
ggaacttctacccgacacttacatgccatggccttctacgttgtgaaaatgcaatcagaaacggagactgttcatctgtttatcccagctctatcagtcggtgccatcatcggcaagcagggccag

SEQ ID NO: 488404 - DNA, 102 bp, Homo sapiens
cagctatcgtggacgtcactggccctggtggggattgacagccacgggaagacctccttgaggcccgccgcccgcgggcccacgagtgcctgggtgaggctc

SEQ ID NO: 488405 - DNA, 50 bp, Homo sapiens
ctcggagaacgactatctcaagaagtgtatgctgacttgtaaagtgaaga

SEQ ID NO: 488406 - DNA, 97 bp, Homo sapiens
cgccatgttcttctccgcggcgctccgggcccgggcggctggcctcaccgcccactgggattaacacagattcctcagatccagaagactgaaattt

SEQ ID NO: 488407 - DNA, 100 bp, Homo sapiens
cgccgtccgagtcgtttattggtcttgggcgtctttggtactggcttttttaggggtctgcctggggattacccttgctgtggatagaagcaactttaag

SEQ ID NO: 488408 - DNA, 148 bp, Homo sapiens
aggtgcaggcccggcgccgccactgccgcagccaggagatggttcgggcctagcggagccgggactggagatgccttcaattaagttgcagagttctgatggagagatatttgaagttgatgtggaaattgccaaacaatctgtgact

SEQ ID NO: 488409 - DNA, 100 bp, Homo sapiens
gtctgttttgatgattctgggaggtcactctgtgagactgctgggtcagaaaaaggataatggaaggcggcttgggggagcacgattggatttgccgaag

SEQ ID NO: 488410 - DNA, 50 bp, Homo sapiens
gcggcgtcggcgactcgggccccggagagaggctctccaaagaggtccag

SEQ ID NO: 488411 - DNA, 98 bp, Homo sapiens
ccgtgactacaggacctgtctgacgatagtccaaaaactgaagaagatggtggataagcccacccagcaggttcaggagaagtggcacctggtggagg

SEQ ID NO: 488412 - DNA, 98 bp, Homo sapiens
gcagatccggaagaactttgctcggacacactggaagaaggatgcatctcttcagcccccagagcgactggaacatcggctgaagcattctgggaagc

SEQ ID NO: 488413 - DNA, 128 bp, Homo sapiens
ttacgtccccgagtgcggcagtaccgcctccttcccagccgcgcggcttcctccagacctctcggcgcggcggccctccaggcactgaagcgtaagaagaggtatgagaagcagctggcgcagatcga

SEQ ID NO: 488414 - DNA, 75 bp, Homo sapiens
tttgaaacatggcggacgacgtagaccaggaaacctgtaggaagtgtcagggactctggaaagaacataatggcc

SEQ ID NO: 488415 - DNA, 100 bp, Homo sapiens
ttcacactgcggctaccccaggccatccttgaggccagcagcttcacggaccttgagaccatcgccaacctgggtctggctacccagaatggaatcctga

SEQ ID NO: 488416 - DNA, 75 bp, Homo sapiens
cagatccatttacactttacagttaagacatcagaattttatagatactcccgacagctccgttacgaagttgac

SEQ ID NO: 488417 - DNA, 51 bp, Homo sapiens
aacagacaagacacttttcagaaagacagctttccccacaaataaaccaga

SEQ ID NO: 488418 - DNA, 96 bp, Homo sapiens
tcccggcagcagcccgacgcaaaccaaggatctggggatcttcgcactatcccaagacctgcctagagctggaacgttacctccagagcgagccct

SEQ ID NO: 488419 - DNA, 83 bp, Homo sapiens
attaaaaccagggctccacagttaggagccaaaccccctaaaggtctccacactgctgtttaacggcacacttgacaatggct

SEQ ID NO: 488420 - DNA, 83 bp, Homo sapiens
cgctgctggcgctctggctgtgctgcgcgacccccgcgcatgttggaatcgaagcctcttaaaatggcagatgacttggactt

SEQ ID NO: 488421 - DNA, 75 bp, Homo sapiens
gtttgaaatgtatttgcagtttcctgggactgctaggagatctgtctcgtaactgtgtaatcaaggaactagcac

SEQ ID NO: 488422 - DNA, 108 bp, Homo sapiens
ggaagatggcggatctggaggagcagttgtctgatgaagagaagaaaccaatagagccatggcgactccctctgctgccttcgaggcccttatgaatggtgtgacaag

SEQ ID NO: 488423 - DNA, 101 bp, Homo sapiens
ggggaaggtccggggaatcatcgatgagctccagggcaaggcgctcaagagtaaccaacgagtagacctttacaagtggaaagacggcagtggggaagttg

SEQ ID NO: 488424 - DNA, 75 bp, Homo sapiens
gaactcgaagtggagcaaaaggtgacagtcacagcttagtaggtaagaatgattgatgttggctgatattggagt

SEQ ID NO: 488425 - DNA, 50 bp, Homo sapiens
cagtacttcacatcgtcgttcacatggggagtctgatgacttttcacagt

SEQ ID NO: 488426 - DNA, 90 bp, Homo sapiens
ctccgggccagcatccgagagcccggactggagtgtcaagatatgccataatactgagaatggaggagtctgaggccctggtccatcaac

SEQ ID NO: 488427 - DNA, 50 bp, Homo sapiens
gcagaggtggagccactgaggaagcacagatgtctcagctgctctacaag

SEQ ID NO: 488428 - DNA, 100 bp, Homo sapiens
gtgcctgagcccgtgcctgtcttcagatcttcacagcacagttcctgggaaggtggagccaccagcctctccctggtgtgactgaagaaatatcaaatgt

SEQ ID NO: 488429 - DNA, 101 bp, Homo sapiens
ggccaaggatataccatcaatgtgccttggaaccaggtattattcccctggatattcagatacacttctgcagagggtggacagctatcaaccacttaata

SEQ ID NO: 488430 - DNA, 98 bp, Homo sapiens
actgaaagtgctttccggaagttagatgaattgtacggcacttggcgtaaagccgcttccctcaagagtaactacaacccacttcgatgtgttgttct

SEQ ID NO: 488431 - DNA, 82 bp, Homo sapiens
aagtggccatggggagcctcagcggtctgcgcctggcagcagacaatgcagatcttcgtgaagactctgactggtaagacca

SEQ ID NO: 488432 - DNA, 100 bp, Homo sapiens
aatcatattatagatggagtaaagggtttagatgtagattctctggtcattgagcatatccaagtgaacaaagcacctaagatgcgccgccggacctaca

SEQ ID NO: 488433 - DNA, 50 bp, Homo sapiens
cgtcactgaggttgcagttggcgtgaagaggttggagcaatcactgaaga

SEQ ID NO: 488434 - DNA, 50 bp, Homo sapiens
cttcattccgcagcagcactccgacagatcaatgcaatgtcccggaatgg

SEQ ID NO: 488435 - DNA, 147 bp, Homo sapiens
gtataagaacagtaaccagctccgggagtaccagctggaagggatgaactggcttctttttaactggtataacaggaatgtggatacggagagacttggcaaccaccggcaggcacagcagcaccagctaaattgcagctcaccaac

SEQ ID NO: 488436 - DNA, 100 bp, Homo sapiens
cggcgaggccctggtcagccccgacggcaccgtcaccgaggcgccgcgcacagtcaagaagaaaccaatagagccatggcgactccctctgctgccttcg

SEQ ID NO: 488437 - DNA, 100 bp, Homo sapiens
agctggaagactctctcctggggaaatcaaagagcaggaggttgtggacaaagtcatggaaacactggacaatgatggagacggcgaatgtgacttccag

SEQ ID NO: 488438 - DNA, 100 bp, Homo sapiens
ggctgatggtggccggcctgacaacacagggcgtggatcaacaggcggtccttcgggtcggagtggacatcggatggtggcctggaagagacaattgatc

SEQ ID NO: 488439 - DNA, 80 bp, Homo sapiens
aaacaccagggcagagccagaaaagcaagagtttctgtttagatgaccagtctcctggccctgggaggagcggggacact

SEQ ID NO: 488440 - DNA, 100 bp, Homo sapiens
gcagccgagcggagctggaagcggacgagcactctggcccccagaagcttctccacattgcccaggagctcctgcacaccgaggagacctatgtgaagcg

SEQ ID NO: 488441 - DNA, 105 bp, Homo sapiens
tgaatgctgctaaaaacaagactggggctgctcccatcattgatgtggtgcgatcgattactcttgtctctgctgctcctgggaaagtgatttgtgaaatgaaag

SEQ ID NO: 488442 - DNA, 87 bp, Homo sapiens
ggaactggggcaataccaatagaggttgctccttgagggcaggacagttcttatggctttatccgttgcgtaagcacagagaggtct

SEQ ID NO: 488443 - DNA, 100 bp, Homo sapiens
acaatacttcccattataacaatgacctctggcagatttttgaaaatcctgtgcaattttccagattattcaaagtatcaggatgggcatgtgaagtgac

SEQ ID NO: 488444 - DNA, 101 bp, Homo sapiens
ggtggagaagggccccaccctgggcagtatagagacgtcggacttcacgtggagcggtgcatgggtgccatgcaagaggggatgcagatggtgaagctgcg

SEQ ID NO: 488445 - DNA, 74 bp, Homo sapiens
ggcgcctaaagtctgagagagggaagtcgcctctgtgctcattcacagttaatagaaggatctctatagttgga

SEQ ID NO: 488446 - DNA, 85 bp, Homo sapiens
agcatggcttggagcacttcctattccactggattgggaaagaccatggcagcaatgccctgccctaaggaagacactcccaatt

SEQ ID NO: 488447 - DNA, 113 bp, Homo sapiens
aaacttccagccatcaagcccaagactgaatttcaattgggtggcagaactggtgaagccattgtagatgctgcgctgagtgctctgcgccagctcgtgaaggatcgcctcgg

SEQ ID NO: 488448 - DNA, 90 bp, Homo sapiens
ggcagagaaggagctatgctcaagtgcctgagtgaagggcagccccctccctcatacaactggacacgagcctgtggggcccggatagtc

SEQ ID NO: 488449 - DNA, 83 bp, Homo sapiens
aaacgcaaaaggacagtaaactgtggaccttgaagttagcagaactccatccggcacaacctgtcactgcatagtcgattcat

SEQ ID NO: 488450 - DNA, 82 bp, Homo sapiens
acaagcagctcttgaatttcatggtgttgcccaagataaactaatctggattcactccctctggttgatacccactcaaaaa

SEQ ID NO: 488451 - DNA, 100 bp, Homo sapiens
ccgggcaatgcctcgcgggcgcaatgaatccgcggcagagaggatctgacgaactactctcaggcagtgttctcagtagtccgaactctaatatgagcag

SEQ ID NO: 488452 - DNA, 100 bp, Homo sapiens
tcagaagaacttgtacagagatgtgatgttggagaactatagcaatctggttttcttggtcgtcctcttgagttctggcgccttgactactgggaagatg

SEQ ID NO: 488453 - DNA, 100 bp, Homo sapiens
acaatgtcggggatggacctccagatttccttactgccccctccatcccatcggaagaggaaggaacaaaaggtcccggaccccccggatctgacggggc

SEQ ID NO: 488454 - DNA, 75 bp, Homo sapiens
cggaagagcgctcccaggagaaacaacatttggccaagagacgaatgtccctttgaacaacttcagtgctgatca

SEQ ID NO: 488455 - DNA, 83 bp, Homo sapiens
gccctctgcctgctggctgcacccgcctccgcgctcgtcaggtttgaacggtgtccccgggagcatctgggactttgtttccg

SEQ ID NO: 488456 - DNA, 100 bp, Homo sapiens
attgcagaagtcgaagagggcccagtatggttggtctgtaaaaacccagcttagactagaaagtctagaagacacacacataatgaagggggaagatgat

SEQ ID NO: 488457 - DNA, 117 bp, Homo sapiens
gctgaggggcggaggcgggagaggcgagctcgcgatgagtggtctcggcaggctcttcgggaaggttttcggctttgtgagaaaccttaccatcaaacacgatggccagcaacgtta

SEQ ID NO: 488458 - DNA, 100 bp, Homo sapiens
cctgaagatgacccattatttccacctattgagtactgaagatttaccccccaaaaaaaattgtcaatgagaaataaagctaactgatatcaaaaagcag

SEQ ID NO: 488459 - DNA, 97 bp, Homo sapiens
ttgtggcgaggcagatcctgccccgtggccgcggccgtctcgtagattctgaggttgggaccaagaaggaactatctattttaaaccaaaaattttc

SEQ ID NO: 488460 - DNA, 83 bp, Homo sapiens
cgagaagaggaaccacatctccacatggtttctaagaaataccgcaagacattgtgttggaggacacccagccgttctctcag

SEQ ID NO: 488461 - DNA, 90 bp, Homo sapiens
gccgcggcgacctcggaggaaccggctccttgcgtcccgcctccctgggagctccgcacggcttttaccctacgaaaggaaaacctggaa

SEQ ID NO: 488462 - DNA, 142 bp, Homo sapiens
gtcagtgttctcaactcccacacacaggatgtcaagcatgtggtttggcacccaagtcaggaggttttttgcgggaacatacaatgtaaatgggcagtcccccaaagaatgcctccggctgtggctgagcaatggtatccag

SEQ ID NO: 488463 - DNA, 100 bp, Homo sapiens
ggcttcctcaacttcacgctggcgcgagccccgtcctccttcgccgccgcgcacaaccgcacgtgcaggaaaatgttggggcttttcaggaagcataata

SEQ ID NO: 488464 - DNA, 100 bp, Homo sapiens
tccatccatcgcaagcgcatgcctgtcaaggaggtgcggggtggccagacagcatcctttgcgctgaagaaggtctgtgcagacttttgcagacaaatca

SEQ ID NO: 488465 - DNA, 100 bp, Homo sapiens
acagaagttgaagcagcagcttatgcagaaacgtatgtcaaacgaggatacagtgtctggaactattggttctaagatataagtggaatgagcctggatc

SEQ ID NO: 488466 - DNA, 110 bp, Homo sapiens
atttatttgcacatggggaaggcctggtaaagtgtgagaactcaacagaggcaaaagcagtagattctaacaatcagtcgaagtccccactggagaaatttatggtcaaa

SEQ ID NO: 488467 - DNA, 75 bp, Homo sapiens
ggaagagactctgatgcaaatagtagacccaaatgatttgtacattgtagaacccctcaagttttctccagaaaa

SEQ ID NO: 488468 - DNA, 100 bp, Homo sapiens
gccctgggccagaggcagaaaacggacggaagaaaaggtctggccgagctgatggaactgtgaatcaaatcgaaggtgaagccaccccagttaacctcac

SEQ ID NO: 488469 - DNA, 100 bp, Homo sapiens
aggagaaagagttttatggtgtgctttaagagccctgcagaaaaagtatggaaaatcgaggaccagggagagtaccttgccagcaattttgtagttatga

SEQ ID NO: 488470 - DNA, 100 bp, Homo sapiens
aaggattccaagtaactcttatttggtgtgagcctcagcagcgatttcattgctggcttttgtggtgagacggaggaagatcacgtccagacagtctctt

SEQ ID NO: 488471 - DNA, 73 bp, Homo sapiens
tttcagttttttgcagaagaatattatcccttctcagagttttctttttaaaagcggaaggagagttttacat

SEQ ID NO: 488472 - DNA, 100 bp, Homo sapiens
aactgccaacgtgtcctgggaaccaggctatgatggaggctacgagcagacattctcagtttggttttatgccgctgagataatgtgtggactgcagttt

SEQ ID NO: 488473 - DNA, 88 bp, Homo sapiens
ggcctcgagcgccccggcgggaggcatacagattctctctcctcaccacgcggctgctgctggaggatggaggaggggtggtgtcagc

SEQ ID NO: 488474 - DNA, 97 bp, Homo sapiens
caagtatctgaagatgggaaagcccatcctttcaaaatcaacttagaatcagaaccacagccctgccttaccagctctctgcccatctctcagtgtg

SEQ ID NO: 488475 - DNA, 83 bp, Homo sapiens
ctggctttgttgaccgggagaaacgagatgggggtgaagctggagatatttcggctcgagagctagccttgcagcaggaggaa

SEQ ID NO: 488476 - DNA, 90 bp, Homo sapiens
ggaaaatggcggacgggaaggcgggagacgagaagcctgaaaagtcgcagcgagctggagccgccggagctaaagtccaggaagagattg

SEQ ID NO: 488477 - DNA, 50 bp, Homo sapiens
ctctaagcctatggaaaagcttctgggatgtttcgtctgaactcactttc

SEQ ID NO: 488478 - DNA, 107 bp, Homo sapiens
tgatttcctcaggactccagattatctacaacactgatgagatcaaactcttcattgaagtactcatcaggcgtgatggctgtggggttgtttgcagtagcacattc

SEQ ID NO: 488479 - DNA, 83 bp, Homo sapiens
cgatgcagctgcatcccgtggccgactcttctcctgcgggtcagcagtcggctttgattataaaggagaagtggagaagcaca

SEQ ID NO: 488480 - DNA, 100 bp, Homo sapiens
tgggaggccggccggtgccagcacctttcggcttctgagacggcggcagcagcggcattcaggtgaaatgacaatggatgctctgttggctcgattgaaa

SEQ ID NO: 488481 - DNA, 83 bp, Homo sapiens
ccccgaactccaggacagcatccaggcctcattggacagcattcgaggctctacagattctcccctgcccctggagaaggagg

SEQ ID NO: 488482 - DNA, 97 bp, Homo sapiens
tgctgcagacggagctggagcgaccgagagagtgataaatgctgctcattctttctacaatggaacaacaaccctaccaatatcagatgaagataga

SEQ ID NO: 488483 - DNA, 100 bp, Homo sapiens
accgctaggccgtccccgaccttgcctgaacaaggtgactccccggacagctcaacaccaaagctttcgcgggcacagcggccgcagtcgtgcacgtcag

SEQ ID NO: 488484 - DNA, 143 bp, Homo sapiens
tgtcaatactgtgggggccttccggtgtgaatactgtgacagcgggtaccgcatgactcagagaggccgttgtgaggagacctggttcgagttcacccctcaccacgctggcttctctgcactgggggcctttgtttccataa

SEQ ID NO: 488485 - DNA, 75 bp, Homo sapiens
ctggagccccacctccaggcggagattgtggagaccatagacaatgccatccccatcaaatcctggttcagtgac

SEQ ID NO: 488486 - DNA, 100 bp, Homo sapiens
atgaagcaactgccagtcttggaacctggagacaagcccaggaaagcaacatggtctgtgaaagacccctgacaaaagacaatcatcttctgggtacatt

SEQ ID NO: 488487 - DNA, 90 bp, Homo sapiens
gctccccccattggacaagtggaagccgagtcgtccggaaatccattgcccgtgttctcacagttattaaccagactcagaaagaaaacc

SEQ ID NO: 488488 - DNA, 75 bp, Homo sapiens
ggctgaatgcactaaacatgaagagcttgaaagcgaagttcaggaagagtgacggctgatcccttatccaacatg

SEQ ID NO: 488489 - DNA, 100 bp, Homo sapiens
gaaactggagccaccatcaagctgtctaagtccaaagatttttacccagactaaatgtgttaaatgggcttgccaacaatatggatgatttgaagataaa

SEQ ID NO: 488490 - DNA, 90 bp, Homo sapiens
ttccactgcatgtatttgtgttgttactgatgcagagatacagcaaaagagtctacatagggaccagttactctccacaagaaaattcac

SEQ ID NO: 488491 - DNA, 51 bp, Homo sapiens
cagtgctcccaatttctttatgctgcaggacaaattcgagcatcttaaaat

SEQ ID NO: 488492 - DNA, 75 bp, Homo sapiens
aatttgaacttctgaattatacaccagcagattatgtgacttcggtttcaagatgagtgaagatttgtcattaga

SEQ ID NO: 488493 - DNA, 75 bp, Homo sapiens
gtgggacgggtttagcggcagcctcttcgcctcctgacaaggtgatccgggcgggccccgcaggaattttatccc

SEQ ID NO: 488494 - DNA, 100 bp, Homo sapiens
aaattgctgcagattttactttatgtgagaaaatctacaatttcttcgagacactcatataaaggacttaaagagagatctacttcagagccagcagtcc

SEQ ID NO: 488495 - DNA, 100 bp, Homo sapiens
ctccgaagtattcagcgcagcctcttgtcaaatcacatacttagatggatttgatcaggaggataatgaagcgccggactctgaagaggaggatgatgag

SEQ ID NO: 488496 - DNA, 78 bp, Homo sapiens
aaccaccgccctggccatctaccatgtggtgtgagatgcacaatgcgaaacctaggccccagcttttacaccatgatg

SEQ ID NO: 488497 - DNA, 77 bp, Homo sapiens
gcaagcagcatcacaagctcagcctggacagcaacagatcatgtttcaggcatatggagacaaacagggaccactgc

SEQ ID NO: 488498 - DNA, 100 bp, Homo sapiens
cccaggtgaaggccagtgctctcaaggtatctgaaaaggtttaaagtgatgaagatcaaagttctaagaagctggtgccgtcagatccttaaaggtcttc

SEQ ID NO: 488499 - DNA, 83 bp, Homo sapiens
aaccaacccactttctcggcgccgcggctcttttctaaaagtatgcctggagttactgtaaaagacgtgaaccagcaggagtt

SEQ ID NO: 488500 - DNA, 50 bp, Homo sapiens
cttctgcatccttaactgagaatgaggaattacatgaatgacagtcttcg

SEQ ID NO: 488501 - DNA, 100 bp, Homo sapiens
cttaatcctactcagaagaacttgtacagagatgtgatgttggagaactatagcaatctggttttcttgggttttgacaacttcgagcagctgctctcgg

SEQ ID NO: 488502 - DNA, 75 bp, Homo sapiens
ccacggctagtccgcttctaccagcgtttcttcacatgagagatcctaataatcaacttcacgtaattaaaaatt

SEQ ID NO: 488503 - DNA, 100 bp, Homo sapiens
ctgagtctaagttctctaagtactctgaaatgagtgaggaaaaacgagccaaacttcgtgaaattgagtaacaacatgctgtaccccaaggaagacaagg

SEQ ID NO: 488504 - DNA, 73 bp, Homo sapiens
ccctagcaccccgagaaccgtcagtttgagccagatgcctctaaggaaatggcttctggtgtttggcaactta

SEQ ID NO: 488505 - DNA, 50 bp, Homo sapiens
tgatgcgtgtctcattaccaaagctggaccctaaagtaaattggttgaag

SEQ ID NO: 488506 - DNA, 98 bp, Homo sapiens
gggaccatgggctccaggatcaattccagtgtctcgccccatcctcaccctcagggttcccagggcccaggctgtggtgggggacctgctggagcttc

SEQ ID NO: 488507 - DNA, 100 bp, Homo sapiens
ctctttcctgaggagtacaacttctaccctcgctcatggattctgcctgacgagttccagctctttgttgctcaggtgttccattgcctaaagaggagaa

SEQ ID NO: 488508 - DNA, 97 bp, Homo sapiens
ggtgaaaggagcagtagatgatgatgtagcagaaggcagccatttggcagttctccagatgacttgctatgtccacatcctgcagctgagtctccga

SEQ ID NO: 488509 - DNA, 50 bp, Homo sapiens
ctgcacgacatgctggcctcgctggtcttaggaaaagtcctcagtgctgt

SEQ ID NO: 488510 - DNA, 101 bp, Homo sapiens
ctcttttcctgatggaatccaatcctctgcttccaggacaagtcctgcgcttggggatcctctgtacgcccgttcactgatctaattatcatggacctgcg

SEQ ID NO: 488511 - DNA, 100 bp, Homo sapiens
ttgtgaaattattacttcttcatgatgctgatgtcaactcccagtctgcaacagtgtatgtggtagaagaccaaagaagagatgagctaggaccatccac

SEQ ID NO: 488512 - DNA, 82 bp, Homo sapiens
gacccgcctccccggcgccgccgtggctcgacggagaccagctaggcttcctgcctgacacagctcacttcaagaagtgcac

SEQ ID NO: 488513 - DNA, 73 bp, Homo sapiens
gaatttggacttgatgaagaagatgaagatgaggatgaggatgaagagggtggttttcctgaagcagctggct

SEQ ID NO: 488514 - DNA, 75 bp, Homo sapiens
gctgctatgtctcaggagtattttacgcattttattgtaataacgctaaatttattgtgaagaaatcagaagatg

SEQ ID NO: 488515 - DNA, 75 bp, Homo sapiens
ttttgaagtcatttcacatcgaagccatgatttaaatatcggcgttaagcttattgcaggagtgaccaggacact

SEQ ID NO: 488516 - DNA, 83 bp, Homo sapiens
ccaagcccctgcattcctgtacggcaaccatgtccaagggacctgcagttggtattgatcttggcaccacctactcttgtgtg

SEQ ID NO: 488517 - DNA, 75 bp, Homo sapiens
agtgatgaaaatgaagaagaagatgcctttaccgaccatcctgtggtattgtggaaattcccagaggactttgga

SEQ ID NO: 488518 - DNA, 83 bp, Homo sapiens
caaaggactcttctaaaaggatatgtgttgctaatacccatctttactggcatcctaaagactatctgttatagtccctgggt

SEQ ID NO: 488519 - DNA, 51 bp, Homo sapiens
tgtgagaaacaggcagcaggatgtgcgggctggagtgcaatggcgcgatct

SEQ ID NO: 488520 - DNA, 98 bp, Homo sapiens
accccgtgctgctgaccgaggcccccctgaaccccaaggccaaccgcgagaagatgacccagatgttcatgagagcgcagtttgactatgatcccaaa

SEQ ID NO: 488521 - DNA, 73 bp, Homo sapiens
gtggagacacggccagatctgccctccatattggtaaaggttttcaaggtgtcatgaaaagatggggatttaa

SEQ ID NO: 488522 - DNA, 80 bp, Homo sapiens
cgtctccgttgggtccggccgctctgcgggactctgaggaaaagctcgcaccagcttgaattagagtctgtcaaagccca

SEQ ID NO: 488523 - DNA, 98 bp, Homo sapiens
tgccgctgcagccatagcagcagcggaatggccaaagactatgacgggtcttcctagcacatcagggacaactgccagtgtggtcatcattcggggca

SEQ ID NO: 488524 - DNA, 100 bp, Homo sapiens
atctgatcctgattgcagaaccttccctgattacagaatcttgggtggtcctggctctgccatatgacacccccgtgcccggctacatgaataacactgt

SEQ ID NO: 488525 - DNA, 100 bp, Homo sapiens
ctacagactgctggctgtgtgtgctgcaaaccgagacaagttcaccccgaagtctgccggaaaggccgagggggacggcaagatgcacatcaccctctgt

SEQ ID NO: 488526 - DNA, 100 bp, Homo sapiens
aactattttcgtcatctttggaacaaagaaaccaatagagccatggcgactccctctgctgccttcgaggcccttatgaatggtgtgacaagctgggatg

SEQ ID NO: 488527 - DNA, 50 bp, Homo sapiens
attacctttgccttggaatacaggaggagcatctttccttgaagaagtac

SEQ ID NO: 488528 - DNA, 78 bp, Homo sapiens
gaatcctcatggccacaaggatttggccaactcacccaggcctgttcctgaacttcctgggaagtcaaccttcttcgg

SEQ ID NO: 488529 - DNA, 100 bp, Homo sapiens
tatggaaacgggctctaacaatgacagtcacaaacatgtcagacaaaagtgaattaaaggctgagttggaacgtaagaagcagcgactggcccaaatcag

SEQ ID NO: 488530 - DNA, 90 bp, Homo sapiens
gaccagacaggcggcgccatcttcgaacttagacttccggaaggactttggcgagggtgttggagcgggccggagagaagtagagtgggc

SEQ ID NO: 488531 - DNA, 100 bp, Homo sapiens
ttcatactctcttaacattggataataagcttttacaaactgatgttcatacgttttatgaagctgtggggtacatgattggtgcacaaacagatcaaac

SEQ ID NO: 488532 - DNA, 82 bp, Homo sapiens
cagtgccctgagggccttcgagagctaccgcgccagacagaagtccattggaatattaagcccaggagttgctttggggatg

SEQ ID NO: 488533 - DNA, 82 bp, Homo sapiens
ggtcccctttaccatttcagaatagatgcttgctctgtcaaggcacagcctattgtctcctttgctcagtgtgacatcattc

SEQ ID NO: 488534 - DNA, 50 bp, Homo sapiens
caaaactgcaccttggaaattgagagctgaatctatcttctggatttaat

SEQ ID NO: 488535 - DNA, 100 bp, Homo sapiens
gtgaggggtttgtactatcctcggtgctgtggtgcagagctagttcctctccagctcagccgcgtagatcaggatcctcatgaccagccaaagagaagaa

SEQ ID NO: 488536 - DNA, 51 bp, Homo sapiens
ctaggccttttagaaaacatggtactccaaagattcaggtttactcacgtc

SEQ ID NO: 488537 - DNA, 73 bp, Homo sapiens
ccgtgcactgggccgcgcatttcggcaagactgggccagtgccattcgcgtcgcagctctggactgcatggaa

SEQ ID NO: 488538 - DNA, 74 bp, Homo sapiens
gcgttgtaccatccgcctgtgggacacctaccaggtcatattgaacattccagatacctatcattactcgatgc

SEQ ID NO: 488539 - DNA, 74 bp, Homo sapiens
ggagccgcgggccggcgagcgcgtcgccaccatgacacatcgttcatgtacatgatcgccggactctgcatgct

SEQ ID NO: 488540 - DNA, 142 bp, Homo sapiens
tgcctgttcagtactgtgggtgatatttgcctttagtgcactcttctccttcacagtaaagtggctgcttctgtgccttattggagaatcttttgatgactacagtgatgatgtatgtggcgctgttgttaatgttagagct

SEQ ID NO: 488541 - DNA, 100 bp, Homo sapiens
cctgactaaagcttgaaatgctacatttccaagggggcaagcgcgatgaagagctggttctgcccatcaactcctccctgagcgtcactctgcaccagga

SEQ ID NO: 488542 - DNA, 74 bp, Homo sapiens
acaagttctggaggagatgaaagctttgtatgaacaaaaccagtctgatgtttggagttcagtgatgatattgt

SEQ ID NO: 488543 - DNA, 75 bp, Homo sapiens
taaaagtgaagaatcagctccgcttccttgcagaattagacctttacgagaagcacagttttgtcttcagtttcc

SEQ ID NO: 488544 - DNA, 75 bp, Homo sapiens
cgacaagcacacactatggcgctgaaacggattaataaggaatgcctgaactagatgaatacaccatggagaggg

SEQ ID NO: 488545 - DNA, 88 bp, Homo sapiens
tggagacaccctctgggggtcctctctgagtcaaatccagtgacatgtcatgctgcccaaggacatagccaagctggtccctaaaacc

SEQ ID NO: 488546 - DNA, 100 bp, Homo sapiens
ggaaggattgtctaatgatggagaaacaatggtaaatgtgccacatattcatgcaagccttctactagtcgaaagcggccccgtgaaggggaagccgagg

SEQ ID NO: 488547 - DNA, 51 bp, Homo sapiens
ttttatacactcttagtgctgtccagatcatgttggtggatggatttaaag

SEQ ID NO: 488548 - DNA, 100 bp, Homo sapiens
ggcctgagaggctgctgttctaactcgctcccaggttttggtaagactagtctgaatcgtagaggaagagtaatgcctggaaagagacgtcctaatggag

SEQ ID NO: 488549 - DNA, 50 bp, Homo sapiens
ttcgagtctgtgatggggccatccgggaaagctggtggagttgagatcta

SEQ ID NO: 488550 - DNA, 90 bp, Homo sapiens
cccagaattcaattaaagtggctcaggcctcattgctacgatttcagagtaccctggtaatagctgagcatgcaaatgattccctagcac

SEQ ID NO: 488551 - DNA, 98 bp, Homo sapiens
tctgcgccgccggcaccatgagatcctgaggaggatgaaggggctggccctggaggccgagagtgagctggagagacaagacgaagccctggatggcg

SEQ ID NO: 488552 - DNA, 90 bp, Homo sapiens
ctccaggacccactcgcaactcacacaggtcatcaacgagcttcggaacacctcctaccggtccagggagtcggtagtaagggatggcgg

SEQ ID NO: 488553 - DNA, 82 bp, Homo sapiens
tttgtaacaaatatttgcggtttcagcctcaacccagaggaatcgttactctttcaggccgagtgtactacttcaaccacat

SEQ ID NO: 488554 - DNA, 74 bp, Homo sapiens
aacttacgaagctcctgttaaatcacaattaccagctctggctgggtcgccacaacttgtttgacgacgaaaac

SEQ ID NO: 488555 - DNA, 75 bp, Homo sapiens
caggctgaccccttgagcagcagtcagcacagacttaattcagtgcacaaatgagatgaatgtgaacatcccaca

SEQ ID NO: 488556 - DNA, 80 bp, Homo sapiens
cagcaatctcagctctcaaagtgggggatatgagactttctactcggaatatcctgagtgttgcgtggatgtaaaaccca

SEQ ID NO: 488557 - DNA, 48 bp, Homo sapiens
ctgtggtccatggtaaagttttacagtagagacgggttttcaccgtgt

SEQ ID NO: 488558 - DNA, 100 bp, Homo sapiens
tgtactacagcagttcaaggaaagtgacttatcacatgttcaggaggaagagctgcgcaaaggtggagaccccaaatatgcccacttgaatatggatctg

SEQ ID NO: 488559 - DNA, 100 bp, Homo sapiens
agcaagagatcaacaagaagctgaacacccacaaccggaatgagcctgaatacaacgacatccctattcgtacctggttccccaaggaaaatcttttcag

SEQ ID NO: 488560 - DNA, 51 bp, Homo sapiens
ggaatgccacagcatcctccagcacctcagatcaccatctggttcaaggac

SEQ ID NO: 488561 - DNA, 75 bp, Homo sapiens
ggcggcagggcaagctgtgcgacgtgaccctcaagttgaatgcaatgataacagaaagcaagagaagtgtgagaa

SEQ ID NO: 488562 - DNA, 135 bp, Homo sapiens
gtgatgtctcttcttctattagcacttactgggattggtcagatagcgagtttgaatggcagtctgggttctgcccgcacacattcctcgccaccttcttggtgtctgagaacctccagcttcacctccttttct

SEQ ID NO: 488563 - DNA, 82 bp, Homo sapiens
atgaatggagaaggttacctctacccatcacagatccagtttgctgaccagaagcaagaattcaacaaacgtcccaccaaaa

SEQ ID NO: 488564 - DNA, 90 bp, Homo sapiens
ccgttcatgcagacttttttaacgatgccacacgctggcagctctgaccagccccacccctccatacaacaaggtttgcacgtaccacac

SEQ ID NO: 488565 - DNA, 118 bp, Homo sapiens
caccacagtccttctgcagtccctcgtccagccacccccagcatctacacgggcgacagcttcgtcaccccttgatggggcagcctcttcccctcatcacagactatgctgttcagcc

SEQ ID NO: 488566 - DNA, 90 bp, Homo sapiens
tgagcatcttcgtctgcagtgattggcagctcctgcgggctacgaggaacaccggcaagagtatcgccaataagaacatcgccaacccca

SEQ ID NO: 488567 - DNA, 50 bp, Homo sapiens
ggacctcgcttacctgcatgctgaaagatttgatcaccaggagatttttc

SEQ ID NO: 488568 - DNA, 100 bp, Homo sapiens
gcacccaaaattgcaagacctttcatagaggccaagtcctgtatctgccatgtctgtggcgtccacctcaacaggctgcattcctgcctctactgtgtct

SEQ ID NO: 488569 - DNA, 88 bp, Homo sapiens
cgaatgaggcacctaaaaattgtataccgcagattcaggcaccacactgtaactcgaggcatcaccaaaggcgtgaaggaggactttc

SEQ ID NO: 488570 - DNA, 90 bp, Homo sapiens
ggattcccaaggagaacagcttcttctcctggggctgggaatacagcaaggaaggggacaggaacctcctcagctgtgtgcaagagattc

SEQ ID NO: 488571 - DNA, 96 bp, Homo sapiens
aaagattttgcatctagaggaattgaaaacaacagtgcaggaggaaagcacagtagactcccagccagtgccaaacatagatcatttactcaccaa

SEQ ID NO: 488572 - DNA, 90 bp, Homo sapiens
gcgcggccgagtcgcggaggcgcctccgctgcagtcgctgcgtctccaaggtggtggggggctttgaccgagtactgctggatgctccct

SEQ ID NO: 488573 - DNA, 82 bp, Homo sapiens
cagcgcgagggccctgggcaaggcccgacagaaattcattgagtttgaagatgctctggaacaagagaagaaagagctgcaa

SEQ ID NO: 488574 - DNA, 117 bp, Homo sapiens
agacggccgtggttgtggggaccataactgatgatgtgcgggttcaggaggtacccaaactgaagattcatgatgttgctatcaaaagttgagaaattgtcagaagaaatcatggag

SEQ ID NO: 488575 - DNA, 75 bp, Homo sapiens
gcctcttgatctccgccaccgtcttcaggccagcgaccgtggcagccatgtattacagctactacatgctaccgg

SEQ ID NO: 488576 - DNA, 83 bp, Homo sapiens
aaagaatggcagcggaaacgcagacactgaactttgggcctgaatgagtgatggaccagcacaaacttaccagggaccagtgg

SEQ ID NO: 488577 - DNA, 85 bp, Homo sapiens
aggcctttttccctggactgcagagggctgtgctgaagtttgctgctgccactggagccactccaattgctggccgcttcactcc

SEQ ID NO: 488578 - DNA, 75 bp, Homo sapiens
gaaccttcgggcaaacaggattccacagtgtcctctggaaaatgacagcccacctgaggatattgaccataagga

SEQ ID NO: 488579 - DNA, 90 bp, Homo sapiens
aaagatttgggagaagaaaatttcaaagccttctacctgcctttctggaagaactttgccatgagaaagaaattttggagaagtacggac

SEQ ID NO: 488580 - DNA, 90 bp, Homo sapiens
ggctgaagatttaagaactgaatgtgcaacttgcaagggaactggagacaatgaaaatcttgtcagagatggggtctcactatgttgccc

SEQ ID NO: 488581 - DNA, 82 bp, Homo sapiens
atcgtcttctttagctgccgttccatcaggctttatcctgtggataaacgcagagtgaacgagtttggggagtcctacgagg

SEQ ID NO: 488582 - DNA, 100 bp, Homo sapiens
ctgcacttcttttttgagaaaggaaggaatatatcctgactgatttggatccaaacttctacagcaaaaacttacttcttttaggaaagacatacttgaa

SEQ ID NO: 488583 - DNA, 83 bp, Homo sapiens
aacggggaggcgctgtatcggcggcgctccagggacaggcggctggactcaggccgccatggcatcagatgaaggcaaacttt

SEQ ID NO: 488584 - DNA, 75 bp, Homo sapiens
cctgtagccataaatgtctggctaatggcatttacaggaggcaaccggtgaccaaaaacactttcaggcagtatc

SEQ ID NO: 488585 - DNA, 90 bp, Homo sapiens
gcagggtccaggctgaagaacttggaagagccttcaggtgtatgtatcctggaggtcaaggtatgatctcgtgaaatcttgagagaaact

SEQ ID NO: 488586 - DNA, 80 bp, Homo sapiens
ccaccatggtcgccatcgctgcgtgctatgtctaccggaagcaggtcctcctcgactggattaatgacgtgctggtggag

SEQ ID NO: 488587 - DNA, 50 bp, Homo sapiens
tggtataaatcatgccagtgctacgtcaacagtaatgaaggcaagcagaa

SEQ ID NO: 488588 - DNA, 100 bp, Homo sapiens
gtgaatatggccgtgatcgtgcccaaagaggagggcgtcatcagcgtctccgaggacagataaatttgcgcctcattttggtaagcggaaaaacaaaaga

SEQ ID NO: 488589 - DNA, 88 bp, Homo sapiens
gggactgcgccgcccggacggcctgcagagcgctgccatcatgaggggccctcctcgccaaagacagcctagagaggacggcaatgaa

SEQ ID NO: 488590 - DNA, 103 bp, Homo sapiens
cgcactcctcagagtccgactctcccacctgctaaggcaattaagttggaatatgcaaggttggttaagttggcccaagaagacaccccaccagaaaccgatt

SEQ ID NO: 488591 - DNA, 82 bp, Homo sapiens
ggtgggattaaaagcagcgaacctcgagaccaacgtggaggagctgtgggtggaagccagacccggtccgtttggaatgcct

SEQ ID NO: 488592 - DNA, 100 bp, Homo sapiens
gcggcggggacaaggcggtggttctgtgggatgtggcatcagggcaggtcgtgcgcaaattccggggccacgcaggggcatccgtgtcattctggacctt

SEQ ID NO: 488593 - DNA, 100 bp, Homo sapiens
gctgtgagacatgtctgagactcctgctcagtgtagcattaagttaataatgggacttggtacccagggggcagagaagaagagtgcagcatctattgcc

SEQ ID NO: 488594 - DNA, 100 bp, Homo sapiens
gggaccttggatagtaaaaccagtggcatcttcaagggggcggggcgtctacctgatcaacaatcctgagatcttctttgatgttgtcagcctctcaaca

SEQ ID NO: 488595 - DNA, 103 bp, Homo sapiens
aaggatttgacaaagccacttttgaaagtcagatgtctgtgatgaggggtcagggcaagtgtccagagaatggctgggatgaaagtacacttgaactcttttt

SEQ ID NO: 488596 - DNA, 95 bp, Homo sapiens
ctccaagactgtgttcgggagtccttggaactgtggtccatggtaaagttttacagggagtgcctgcagggcaccatccgcaacagccaggaggc

SEQ ID NO: 488597 - DNA, 102 bp, Homo sapiens
ctgagctgcgaggaggggaccccactcagtatcaccagtccctcaacaccttacactaagtcaaagcgtggccacagagaagaggagcaagaagacctgaca

SEQ ID NO: 488598 - DNA, 75 bp, Homo sapiens
tggagtaattcttgaacctcccaactatggcattgtcacaggaactcttggtgtaataacagaagctacaataaa

SEQ ID NO: 488599 - DNA, 100 bp, Homo sapiens
atatgggaacaacatacagtgacgcttcacagggtgaactactgagttcttcattatgtctgatggagattatgattacctcatcaagtttttagctttg

SEQ ID NO: 488600 - DNA, 83 bp, Homo sapiens
ccaggatctcgggctcggaacgagactgcacgttgcaagaatgtagtaactctgatcagctacaaggaaaggaggaaagagta

SEQ ID NO: 488601 - DNA, 90 bp, Homo sapiens
gccggaactggagccgaggcgcaggtggcgctggggggatatgagactttctactcggaatatcctgagtgttgcgtggatgtaaaaccc

SEQ ID NO: 488602 - DNA, 100 bp, Homo sapiens
tgtgaggggatccgacttgccggcagaacttacgctgcgggaccccgggcactgttgctgctgcgggaggtactccaaagattcaggtttactcacgtca

SEQ ID NO: 488603 - DNA, 82 bp, Homo sapiens
agatgaggccggagcccaccaagttctgggaagtgccaagtcctgccctgccaacttcttggcagctgccgacgacaaactc

SEQ ID NO: 488604 - DNA, 75 bp, Homo sapiens
cagacgtcaaaggcaagtacatctgtattcaactgggtaaagcacctggaatctcgactccgagccttgggcctt

SEQ ID NO: 488605 - DNA, 117 bp, Homo sapiens
cggggatatggaattgcattacaacatggcagtccttaccgagatgttttttcacaaagttctgagccatctgaagatgaagagtcccaaggccttcctaccatggcacgtagaaat

SEQ ID NO: 488606 - DNA, 74 bp, Homo sapiens
gactgcactcacacgacgtgcgctatgggtcaggtctctaattaacagaagatggcaaagcccagccacagcag

SEQ ID NO: 488607 - DNA, 90 bp, Homo sapiens
tggagacatggaccgcggcgagcaagatgaggtggaaagtgagaaatggtacctgtctacagacttcccttcaacatccatcaagacaga

SEQ ID NO: 488608 - DNA, 75 bp, Homo sapiens
agcttcacctccatgggcatcaacatgtcaggatggctaaaggtgaccccaagaaaccaaagggcaagatgtccg

SEQ ID NO: 488609 - DNA, 99 bp, Homo sapiens
tgaagagagcgacctggagcggggatacacgctctctatcaatatcagctcacatcattgaaaagataattttgaagacatgttttgctgaaaagacac

SEQ ID NO: 488610 - DNA, 90 bp, Homo sapiens
gttcccgtccagttccattccttgcacagggtggagccgccaccaaaatgcagattttcgtgaaaacccttacggggaagaccatcaccc

SEQ ID NO: 488611 - DNA, 83 bp, Homo sapiens
cgaccccgtcccgaccctggccgccccgagcggagcctggagagacagggcagggcattgttcatgcactgaccgacctcagc

SEQ ID NO: 488612 - DNA, 82 bp, Homo sapiens
taaagtcgagtatctggtgaagtggaaaggatggcccccaaaggcgtctctggccgagcctctttttgtggaaaacgacagc

SEQ ID NO: 488613 - DNA, 100 bp, Homo sapiens
gtgcgggaggcgacagtgaaaccctttgccatcgacatatttcctgtcaccaacaaagatttcagcttcgtgctctgtctgatgatggagtatctgatct

SEQ ID NO: 488614 - DNA, 103 bp, Homo sapiens
ctgaggatgaactggcgggtgtggacgccactacagttcatcaacatcaactacgtccctctgaagctggtggttaagcgtctgggatatgacacccgggtta

SEQ ID NO: 488615 - DNA, 100 bp, Homo sapiens
ttgcttttgtcacctttgaaagcccagcagacgctaaggatgcagccagagacatgaatggaaaggtactccaaagattcaggtttactcacgtcatcca

SEQ ID NO: 488616 - DNA, 100 bp, Homo sapiens
gtgggggagacggccatggtcactgctgactccaagtactgctacggcccccaaggcagagtccaccctgcacctggtgttgcgcctgcgaggtggcatt

SEQ ID NO: 488617 - DNA, 90 bp, Homo sapiens
agccttctgagtcagcctgaaaggaacaggccgaactgctgtatgggctctgacttcagaaatgggcttgggaaccagctgagttcagga

SEQ ID NO: 488618 - DNA, 85 bp, Homo sapiens
ggcatcgggccctgtctgcaatacacctgcaggaagagctcgatcaggttcaggggaccacttctataagagaaacaagaacctg

SEQ ID NO: 488619 - DNA, 100 bp, Homo sapiens
gacgggactggcagggaagggcctgcagcagctaggggcctggccaatccagagcctgccccagagcccaaggacgtctgctcactggagatgacacgtg

SEQ ID NO: 488620 - DNA, 80 bp, Homo sapiens
ggaggcaaagttccgaatagggatgaggcatacgtgtggttcagcactgagtcatgcttgcttctgctacgcactgattt

SEQ ID NO: 488621 - DNA, 75 bp, Homo sapiens
accgagagcgtgaccgagagcgcgaatatcgtcatcgttagaagggttctcatgtatcagccatcttctgtaagg

SEQ ID NO: 488622 - DNA, 83 bp, Homo sapiens
cggatctcaccgccgctcagggcagcagtgaggatgccagagttcatgggtttctagaagacaagttttcaactgcagataca

SEQ ID NO: 488623 - DNA, 137 bp, Homo sapiens
gtgtgggaccgggagcccctggccagcaatgacttcctgggaggggtcaggctgggtgttggcactgggcaccaggggccagggaggcccaatctcagagcgctgcgggctctgctggtgatagaaacaatatggtg

SEQ ID NO: 488624 - DNA, 100 bp, Homo sapiens
gcgaggcagctctgagccgcgcgtatctccagatgaaatggccactgcttgatgtccaggcagggagcctccagagtagacaagccctcaaggatgcccg

SEQ ID NO: 488625 - DNA, 82 bp, Homo sapiens
gctggtggcgggcccgggctgcggcgtgtgcgcgcccgccagctgctccggagatacggcgtccgagctgggccacagcctg

SEQ ID NO: 488626 - DNA, 80 bp, Homo sapiens
agaggaacctctatgccgacatcgacgccgcctggcaggccctgcgcaccaggaagcggggagaggtggtgagagatgac

SEQ ID NO: 488627 - DNA, 102 bp, Homo sapiens
tgtaaacttgagaatacattttgttgccaacaaaaaggctgcaaggtgtgactgttgtaaatctcaaggaactcttaaagagcgagttcagtggcgtgggga

SEQ ID NO: 488628 - DNA, 88 bp, Homo sapiens
tattctcctccgaaccccttcatgcccaaatcccggaaactccagcgtgtctccagccgtggtggaagatggatgcctgaagtgtaga

SEQ ID NO: 488629 - DNA, 101 bp, Homo sapiens
ccctctccgtccatggccccagatgacacttcagtgtctttggtgcaacactaacaaggcttgtctggactacccagttacaagcgtcttgccaccggctt

SEQ ID NO: 488630 - DNA, 100 bp, Homo sapiens
attgacccttgaaggaatcaaacagttttatattaatgttgagagagagttgtggacatcggatacccaaggagacgaagctgaagcaggagaaggaggg

SEQ ID NO: 488631 - DNA, 100 bp, Homo sapiens
ttctgtacagcctgcagaactgtttgtccacccccgttttgggcccatcaaatgcatccgcaccctgagagcagtggaggccgatgaagagctcaccgtt

SEQ ID NO: 488632 - DNA, 82 bp, Homo sapiens
ctttttgcaaagaccatccttcagacgcagtaaaacgcaggactcttcccgcttggattcgcgaaggtcttgaaaaaatgga

SEQ ID NO: 488633 - DNA, 100 bp, Homo sapiens
caagcacgacgcagccacctgctttgtggacgctggcaacgcattcaagaaagccgacccccaagttcaatcaaatgcctggtaggaattgctagcgttg

SEQ ID NO: 488634 - DNA, 97 bp, Homo sapiens
gctgaaggatgagatagcagaagtagctaatgaaattgaaaacctgggatccacagaggaaaggatctcatggtccggaatgacaccccctgtggaa

SEQ ID NO: 488635 - DNA, 97 bp, Homo sapiens
cagagttgtgggccgccgtcggcagcaagaacagagagagaggtggacagatctgagagatactgaggatcctggtgatgcggcccaacaggaagca

SEQ ID NO: 488636 - DNA, 50 bp, Homo sapiens
aggcactgctttttcatgacgataacagcgacttgattgcatgtacagtg

SEQ ID NO: 488637 - DNA, 100 bp, Homo sapiens
gaattgttacagtatatcaatgtggattgtgcaaaattaaaacgactcctgaaggagaggtggagatgctttctgaccccgtcgaggtcatccctgtact

SEQ ID NO: 488638 - DNA, 107 bp, Homo sapiens
aaggcgtgggcgacccggtgtgtggcgcgcccagagccccgcgtttcagccctagggaagggcgtgatggtgggcatgggtcagaaggattcctatgtgggcgacga

SEQ ID NO: 488639 - DNA, 75 bp, Homo sapiens
cagtcaggacatattcgatgccatcgtgatggcggatgagagatggccttggtggtattggcatggggttaggac

SEQ ID NO: 488640 - DNA, 90 bp, Homo sapiens
gtgcttttatattcatctcaaaaacaaaattctgaactcaggacttggcaagcaaggagagcctcatcactgacagtggaaagctgtatg

SEQ ID NO: 488641 - DNA, 80 bp, Homo sapiens
tcggcggccaccgcgcggaggccggtgtttgacgacaaggaggacgtggacagaggactgcagaaaatcaacctatcctc

SEQ ID NO: 488642 - DNA, 100 bp, Homo sapiens
gaacttcaccaccagaatctgaatctccaagaaacactgaagagagtagcaaattgttcagctgccactggtgacatgccaacttaccagatccgagctc

SEQ ID NO: 488643 - DNA, 101 bp, Homo sapiens
tgcagtccgtatgctgagaacctggagcaggaatgcggggaagctggtttgaaagattagaagtcctggctgtatttgcctccacagtcttggcacagttg

SEQ ID NO: 488644 - DNA, 98 bp, Homo sapiens
gcgacgcggcctgggaggataaggattatgatgttgatgaagaggacatgatgaatcaggtgttgcagcgctccatcatcgaccagtgagcagagtcc

SEQ ID NO: 488645 - DNA, 73 bp, Homo sapiens
tggagagtgacatgcagttggatggcggtgactgcgtggacacattggcgtgagacctgggagtacgttgtgc

SEQ ID NO: 488646 - DNA, 79 bp, Homo sapiens
acagaaggttcaagatgtaaagaagactattcagaaaaagatgattgacgctaattatatccagatcgagagacagaag

SEQ ID NO: 488647 - DNA, 100 bp, Homo sapiens
cccttccaggagctgcagatcgatgacaatgagtatgcctacctcaaagccatcatcttctttgacccagatggcctgatatgaaggagtcacgcctccc

SEQ ID NO: 488648 - DNA, 50 bp, Homo sapiens
cggcaccttcggcaaagtgaagggactgactgcattgcacagatgatgga

SEQ ID NO: 488649 - DNA, 100 bp, Homo sapiens
tgctgataatcggagcttggaattaccccttcgttctcaccattcagccactgataggagccatcgctgcagattcctattagcctgtcaaatgtaggct

SEQ ID NO: 488650 - DNA, 100 bp, Homo sapiens
agattgctttccgtgccaggacaaaaaggtatccgttacagcactgatgtgagtgtagatgaagtaaaagctttggcttctctgatgacatacaagtgtg

SEQ ID NO: 488651 - DNA, 75 bp, Homo sapiens
catctctttgagtagtattactgcctgcatacttctggaagagtggtggctgaatgttgcctatctggatgttcg

SEQ ID NO: 488652 - DNA, 75 bp, Homo sapiens
gtcttcccggcgagtccgcgacggtcgccgcccacggcgagctctaagcgaaagacatgaggcctcagcctgaaa

SEQ ID NO: 488653 - DNA, 75 bp, Homo sapiens
ctcgcgctactctctctttctggcctggaggctatccagcgatatgtgatggcgtccagtttggagctgggataa

SEQ ID NO: 488654 - DNA, 100 bp, Homo sapiens
gggaatatctggattctgctcagaggaacttgtactgggatgtgatgatggagaactacagcaacttactctcactgggatgaaacgaggaggaagagat

SEQ ID NO: 488655 - DNA, 50 bp, Homo sapiens
ctgtgatggcatctttcatctaacacgtccacattggccaactgtattca

SEQ ID NO: 488656 - DNA, 82 bp, Homo sapiens
ttccgtgccccccaccctcaccaaggtctccataacccctcggacaaacgccgccctgggctttgctcagatgctccccaga

SEQ ID NO: 488657 - DNA, 75 bp, Homo sapiens
atggccatgatcgccctcaacaccatcgtgcttatgatgaagaacctagaagtcggaatccggaagaagatcgaa

SEQ ID NO: 488658 - DNA, 101 bp, Homo sapiens
ggcatgccgccgctcctggcgcccctgctctgcctggcgctgctgcccgcgctcgccgcacgagaacgacaaatcctccacccctgggctcaagtccaaca

SEQ ID NO: 488659 - DNA, 100 bp, Homo sapiens
gccccaggtgaaggccagtgctctcaagaaatacatgctacaggatttaactatcagaatgaagatgaaaaagtcaccttgtctttccctagtactctgc

SEQ ID NO: 488660 - DNA, 98 bp, Homo sapiens
cccagaagggggaccaggagagcaagaaggccgacaccaaggcccagacaggaacttctacttgcagaaaagtgggctaaaatgaacaagctcccctt

SEQ ID NO: 488661 - DNA, 73 bp, Homo sapiens
cagcttgctggagagaagagcagtgagaagggccgtggtggagaagcgcctagcagcctgcgtcaacctcatc

SEQ ID NO: 488662 - DNA, 75 bp, Homo sapiens
ggcttctggggacctttacgagtactatactggcaattgctggagaagattttgcaattgttgcttctgatactc

SEQ ID NO: 488663 - DNA, 98 bp, Homo sapiens
cccggaagacctcactgaccccagagtggcagaaaggctgatgcagcagctgagatctgtatctgtggacctgaatgttgatccctcgcttcagattg

SEQ ID NO: 488664 - DNA, 82 bp, Homo sapiens
tcccaaatatggttccatccctaaacttatacgaactgtggctgcaccatctgtcttcatcttcccgccatctgatgagcag

SEQ ID NO: 488665 - DNA, 74 bp, Homo sapiens
tcaagcgaaaacatgaccgctgagcccatgaggtaaagtcagtgataaatcttttgtttgctgcatatactgga

SEQ ID NO: 488666 - DNA, 99 bp, Homo sapiens
attacgaggatgtatctgtggcccttccaaataagcggcataaagcaattgagaattcagtacctggttgactgtgatgaagtgatcttcatgaaagag

SEQ ID NO: 488667 - DNA, 85 bp, Homo sapiens
gagcgtgaccgagagcgcgaatatcgtcatcgttagaaggttacatgttctctcgcattgaggaagagcatttgtgggagtgcaa

SEQ ID NO: 488668 - DNA, 103 bp, Homo sapiens
ttcactcatgtacttgtacctgtctggattattcattattacatgaagtatcatgtttctactgtgaatgaaagctggaatgccttagcaaccccatcagata

SEQ ID NO: 488669 - DNA, 100 bp, Homo sapiens
tacacagccaactcaagtctctctcccacccaccgcagagccagcaaaaacagctcagtgtccaagacaaagattttggccacaggaggagcatctcaca

SEQ ID NO: 488670 - DNA, 82 bp, Homo sapiens
gacatggtcatgagctttgtgaacctggagagctggcggtcaccatggcaatgcgggagctggtggaggccgaatgcggggg

SEQ ID NO: 488671 - DNA, 82 bp, Homo sapiens
gctgtgtggatgtcggcgaagccgcgggcgaggccgtaagttcatcatcgccaacgctcgggtggagaactgcgccgtcatc

SEQ ID NO: 488672 - DNA, 75 bp, Homo sapiens
tgacagcactggaaactgaagtaccagttgtcgctagaacaggtttcacagacatattttcagagtcgaaggagg

SEQ ID NO: 488673 - DNA, 82 bp, Homo sapiens
agttcaagttcacaattggcgttgtggcagcactgcctgaaggtatgagaccagattctaatctttatggttttccatggga

SEQ ID NO: 488674 - DNA, 98 bp, Homo sapiens
accagaaggagagagatgttatcatgagggaattccggtcagggtcaagtcgtgttctgatcactactgacttgttgcagagcccatgttctgggaga

SEQ ID NO: 488675 - DNA, 100 bp, Homo sapiens
aaagccctcagtaccagagacagaagcagatggattcgtccttttaggtaaaaaagagtgtcaagtggacatgcaaagcttgtggagagaagcagtcctt

SEQ ID NO: 488676 - DNA, 103 bp, Homo sapiens
caccatgccgctcctaagcctgcacagccgcggcggcagcagcagtgagagtgcgcgtcccgggacgactggcgctgtgcgcgctccatgcacgagttttccg

SEQ ID NO: 488677 - DNA, 96 bp, Homo sapiens
ttccgagacaacaacggcaccgcgtaatctatgccagcaattatgacaatgttagcagaccatgcagctcgtcagctgcttgatttcagccaaaaa

SEQ ID NO: 488678 - DNA, 96 bp, Homo sapiens
ttggtttcgggatctcggtgctgcagacggcgagacctcctgcacaggaggcagttccctccatccccatcagccccgaagatcccctcctggcag

SEQ ID NO: 488679 - DNA, 100 bp, Homo sapiens
ggaggatgtgcggggtgcgccggcagaggatccagtgttcaccatcctggccccggaagggctggccctggccttccacgacggcagcgtccacatcgtg

SEQ ID NO: 488680 - DNA, 80 bp, Homo sapiens
gcttctgagacggcggcagcagcggcattcaggataaaagaatcagagtgtctcaacccttgacaagaggaccaagtgcc

SEQ ID NO: 488681 - DNA, 90 bp, Homo sapiens
ataagctatatactttggttacctatgtacctgttaccactttcaaaagtgacttcaggtggaacattcattggcattggacggaaaaca

SEQ ID NO: 488682 - DNA, 97 bp, Homo sapiens
ccgggagatgatcctggcggattttcagatagtgacgagaggctgcgagactgtggaaatgaccctgaggaggaacgggctgggccagcttggcttc

SEQ ID NO: 488683 - DNA, 82 bp, Homo sapiens
acttggactgagtcctgcaggacacagcaagtcaagccagagatctgttatcaaaaatgttagtgattgatcctgacaagcg

SEQ ID NO: 488684 - DNA, 100 bp, Homo sapiens
tagaaagaccacgaacttcaaaggggaaagcaaggccaaagacagggagaagggccaggaaggaatactgggagaatcttcggatagcctcaggccggcc

SEQ ID NO: 488685 - DNA, 101 bp, Homo sapiens
ccgccccaccaatctgcctacggcggcggacgcgactctcgacggcctccgaggagacggtgcagaaccggatggctgtatgggcgaaaaagatgaccgaa

SEQ ID NO: 488686 - DNA, 75 bp, Homo sapiens
gctgaaataacccttgatcctcctcctaattgcagatcagtcgcatcgaatacattcattcaaagaacttcatcc

SEQ ID NO: 488687 - DNA, 101 bp, Homo sapiens
atgaactcagtgctcatggggatgaagaaccagctcgtcaggtcaattcagtgaagatatgatacccacagtgggcttcaacatgaggaaggtaactaaag

SEQ ID NO: 488688 - DNA, 90 bp, Homo sapiens
agttcttacaacatggcagacattgacaatgcttagatgagtacgaagatgatgaagcagggcagaaagagcggaaacgagaagatgcaa

SEQ ID NO: 488689 - DNA, 75 bp, Homo sapiens
tctttcatgcagtgacatgttgataaaaaatgatggattcctgccagctcccaggggctttggttatagaagtga

SEQ ID NO: 488690 - DNA, 82 bp, Homo sapiens
ctataagagagtagaaagccctgttgactatattgtggagtatgactatgatgctgtacatgatgatgaattaactattcga

SEQ ID NO: 488691 - DNA, 83 bp, Homo sapiens
aaaggaccaagaagaggaagaagaccaaggcccaccatgccccagcaattctgtggtgttcttggtcacacatttatggagtt

SEQ ID NO: 488692 - DNA, 98 bp, Homo sapiens
gagcctggtgagccacgcgcctggggaggctctggcccgggctccgcgtacttcctgttcagcagacagagagacaagaccccagccagcccctgtcc

SEQ ID NO: 488693 - DNA, 89 bp, Homo sapiens
ttgctaaatgtagacaatggttagagaagaattttccaaatgaatttgcaaaacttactgtaggcgcagatcaggcctctataaccgcc

SEQ ID NO: 488694 - DNA, 100 bp, Homo sapiens
atcattggatgaagtggctccggagattgtggccagactccactgatgatagctgccgaacaaggcaatctggaaatagtgaaggaattaattaagaatg

SEQ ID NO: 488695 - DNA, 82 bp, Homo sapiens
ccgcgtttcagccctagggaaggagctgacatggacccaaatcctcgggccgccctggagcgccagcagctccgccttcggg

SEQ ID NO: 488696 - DNA, 97 bp, Homo sapiens
gccttcacagcatgtggttttgtgcaggtagatcgacacttgagaaagctggatcaggaactggctaagtttaaaatggagctggaagctgataatg

SEQ ID NO: 488697 - DNA, 100 bp, Homo sapiens
tcccttacagtttctttgagcagtttgtggaagcgatcaattcatgcccaagcacaaaacaacccatttaaagaagatgctcggccttaaaggaaatggc

SEQ ID NO: 488698 - DNA, 100 bp, Homo sapiens
gggccctgggcaaggcccgacaggcaatggatcacttggagtcctttattgctgaatgtgatcggagaactgagctcgccaagaagcggctggcagaaac

SEQ ID NO: 488699 - DNA, 82 bp, Homo sapiens
agaagaattcatgctcatccggatctgtttacccgaggtattgatatacaagctgtgaatgtggtaataaactttgatttcc

SEQ ID NO: 488700 - DNA, 100 bp, Homo sapiens
gccttcacaatccaagttccacaatatattgactactgccacaattccggctggccagctaaactatgtggatccagctactggctatgtggtgctcaca

SEQ ID NO: 488701 - DNA, 82 bp, Homo sapiens
cgccttcgcctcctaatccctagccactatgtacgagctcaactggaggcagtcctgtgcggaaatctgaagaaaaaacaga

SEQ ID NO: 488702 - DNA, 124 bp, Homo sapiens
caccactctcattagtgagaatggtcatgctgccgacaccctgacggccacgaacttccgagtgggtgaaggagtacctcctggcaactatgggaactatggctatgctaatagtgggtatagt

SEQ ID NO: 488703 - DNA, 82 bp, Homo sapiens
caggaatatccatgtcggcttgtagagagattgcagtcagtcatatgaaattcggatgctggataatcggaaaatgggtgat

SEQ ID NO: 488704 - DNA, 100 bp, Homo sapiens
gctggctgtgttggtcggtgcctgcgttctgaagcccgagaggagccacaatggagacgccgccgctgcctcccgcatttttcggacgccgcccgatact

SEQ ID NO: 488705 - DNA, 100 bp, Homo sapiens
ctgcttggccctggctgatgataagaagctgaaatccattgcatttccatccatcggcagcggcaggcttgtccattcctttgactttcaaggtttcaac

SEQ ID NO: 488706 - DNA, 100 bp, Homo sapiens
ggagcagctggaagccgtggctgcgctctcttccctctgctgggcgtcctgttcttccaggacttaattcagtgcacaaatgagatgaatgtgaacatcc

SEQ ID NO: 488707 - DNA, 87 bp, Homo sapiens
cagtaccaaaatgagctacataaattcctaatctgggatacagctggacaagaacgaactggatgttgaatttgttctctcagcacc

SEQ ID NO: 488708 - DNA, 100 bp, Homo sapiens
agctgggcgacatcggcacgtcctgttacaccaaaagtggcatgatcctttgcagaaatgactacattagagtacaggggctcaggtccaggtggcaggg

SEQ ID NO: 488709 - DNA, 75 bp, Homo sapiens
gcagcagcggtagaggcggcggcgaggactggcgacggcgaggagataccagcgggcaagcagaaaacaagaggc

SEQ ID NO: 488710 - DNA, 100 bp, Homo sapiens
gcatggcacattacaacttcaagaaaattacggtggtgccgtccgccaaggtggctttcttcctccagaagaaataaaagaaagatttgacagcaactgt

SEQ ID NO: 488711 - DNA, 99 bp, Homo sapiens
ctacaagctgaccagtgagaactgcgagcactttgtgaatgagctgcgctatggagtcgcccgcagtgaccaggttgcagttgttctgatggataccca

SEQ ID NO: 488712 - DNA, 88 bp, Homo sapiens
gttgcacatttcctgcaaggactccaaagtggtgaggtgatgatgaacagtctacacagatggctgcaagttgggaagatgataaagt

SEQ ID NO: 488713 - DNA, 100 bp, Homo sapiens
ccaacctagtgggtgtaatacatcatgaactgcaggaattactgggagatgtactcaaagatcggccccaggaagcagatggaatcgattcggtgattgt

SEQ ID NO: 488714 - DNA, 125 bp, Homo sapiens
aatctgttccgggtgagcccaggccgccccggatatgcgatggctgaggagcagacaccagggaccacactgagcaactgcttcgagaacgacagcagatggccagccgtccctttgcttctgtt

SEQ ID NO: 488715 - DNA, 98 bp, Homo sapiens
ccttgagctccaggagttcgtctcttacgtctgcggaagtgcagctgcctcagttcttagcgcagacaaactttccagaaatgatgaatagatataag

SEQ ID NO: 488716 - DNA, 75 bp, Homo sapiens
gtctgttagagttcgaaaagctgagaatcctcagtgtttgctagtagagacggggttttaccgtgttagccagga

SEQ ID NO: 488717 - DNA, 100 bp, Homo sapiens
cacagatgtccaagctgccaaggctgaaagacacacagaagtcttcatggatatagttgatacatttaatcatttaattcctactgaacacttagatgat

SEQ ID NO: 488718 - DNA, 75 bp, Homo sapiens
gcctgagaacagcgtggcatgcaaggcttcgatgtttttgaagcaggcatttgaaggagaataccctaaattatt

SEQ ID NO: 488719 - DNA, 96 bp, Homo sapiens
cctcccacagaaggtggcagaaagacttgatgaaatatttcagacagatgttccatttaagcagacctcttccatagctgtagctggagcggtaat

SEQ ID NO: 488720 - DNA, 101 bp, Homo sapiens
cagatcccccagccggctgagacagaaccttcgagatctgcggtctggggtctggttgaaagatggcggccctcactaccctgtttaagtacatagatgaa

SEQ ID NO: 488721 - DNA, 152 bp, Homo sapiens
gttgacatggaatttgctaagaatatgtatgaactgcataaaaaagtttctccaaatgagctcatcctgggctgtgagggccccaaggctgttgcagctcctcgacctgatcggttggtcaatcgcttgaagaatatcactctggatgatgc

SEQ ID NO: 488722 - DNA, 98 bp, Homo sapiens
cgccgagccgggcgcgcagcgacggagctggggccggcctgggaccatgggcgatgacagtcatgtccctttccagggacctcaaggacgactttcac

SEQ ID NO: 488723 - DNA, 75 bp, Homo sapiens
agcatgcctcaccaagtcacatgacaagcagatgttaccaagttgacgccactttcacacgaagttatcagcaga

SEQ ID NO: 488724 - DNA, 98 bp, Homo sapiens
ctgcttactcgctgaagtacccatcaaggaaagatatggagagagatttgaaggctgactcaaacatgccactcaacaattctagccaagaggtcaca

SEQ ID NO: 488725 - DNA, 74 bp, Homo sapiens
cccgccgccccgggccggggccggccctctcccgagctcagagagtaaatgaatgtctgatcacagatacgggg

SEQ ID NO: 488726 - DNA, 90 bp, Homo sapiens
gtggtggagcggctgctggaaacgcaagacggtgccgagaagcagctgcgagcgccgtgaagaacctggtggacagcagcgtctacttcc

SEQ ID NO: 488727 - DNA, 83 bp, Homo sapiens
cgtggccttagctgtgctcgcgctactctctctttctggcctggaggctatccagcgatggcagaggagcaggagttcaccca

SEQ ID NO: 488728 - DNA, 100 bp, Homo sapiens
gcagcaccagcgtgcctttgggtgataaggggataggatttttgggccttggtctcatgggaagtggaatcgtctccaacttgctaaaaatgggtcacac

SEQ ID NO: 488729 - DNA, 75 bp, Homo sapiens
cacgaatctgcccacccctcctgtaacccagcctgtttcacttcttgtgcctgagattgtgagggagacccagga

SEQ ID NO: 488730 - DNA, 100 bp, Homo sapiens
gacatcgatagggatgcagaggatcagaaccggtacctggatggcatgatcataaggcagcagtttcctcagttaaccaccagaagactcgggacccgag

SEQ ID NO: 488731 - DNA, 51 bp, Homo sapiens
ttacgccccctatcctatccgcaaacagttcagcttgttggtttagatgag

SEQ ID NO: 488732 - DNA, 98 bp, Homo sapiens
gtggatcgagcagctgaacgagtgcaagcagctgtccgagtcccaggtcaagagcctctgcgagaagatcttggcatatacagaagggctgcatggaa

SEQ ID NO: 488733 - DNA, 100 bp, Homo sapiens
tccaaaaagactcctgactgctgagcacctgtgagaatatgaacttctcttggaggaatgaatgcaaccagtgtaaggcccctaaaccagatggcccagg

SEQ ID NO: 488734 - DNA, 75 bp, Homo sapiens
tgttttctgccggctgtaaagtcatcacctcctgggatcagatgtgcattgagtagagacggggtttcactatgt

SEQ ID NO: 488735 - DNA, 90 bp, Homo sapiens
gccagggaaccctggtcaccgtctcctcagacagcccacctgaggatattgaccataaggactcatatctcattacaagaagcatcatgg

SEQ ID NO: 488736 - DNA, 100 bp, Homo sapiens
gtcccggcgttcttccgctggctcagccgcaagtacccgtccatcatagtcaactgcgtggaagagaaggactgggcacttggagtcctgcatgccaaaa

SEQ ID NO: 488737 - DNA, 90 bp, Homo sapiens
ggaaattggtacccctataatgggcagtgtctaccagatattgggatgccagatgatatgaacttcagtgatgtaaagcaaatccatcaa

SEQ ID NO: 488738 - DNA, 100 bp, Homo sapiens
gcatgttccgtggcctcgcccaggccgacggttgcctgtgtccctggagtgttacacagtgcctcctgaagacaacctggccctccttcagctctacttc

SEQ ID NO: 488739 - DNA, 90 bp, Homo sapiens
gaactatcagagcagttttacaaatatgcagtacaagttttcctttggaatatggataaatacaccatgatacggaaactagaaggacat

SEQ ID NO: 488740 - DNA, 75 bp, Homo sapiens
gtggtcttcagaatcttctttgatcatgaagactatgatccacaaacagtgaggcttggaagtcgatacagtcat

SEQ ID NO: 488741 - DNA, 103 bp, Homo sapiens
gtatcaaaaaagaaatggtgatgcagtacattaatactgcttctaagacagaggaagaaggcacctacgatcaaactctggagttccgtaggggaggtgatgg

SEQ ID NO: 488742 - DNA, 90 bp, Homo sapiens
gtactggctattggaaggaggagattctgaagataaggaggtggtggtcaccaatacaattccacatgaagtccagaagctccagtgccc

SEQ ID NO: 488743 - DNA, 98 bp, Homo sapiens
ataggatcaagatggccatgtggcaggagtaagagggaccatctcctcatgaacgtcaaatggtactaccgtcaatctgaggttccagattctgtgta

SEQ ID NO: 488744 - DNA, 78 bp, Homo sapiens
cgacctgaggagtcacagttgtgagcaagttcggtgccgcgggctgggaaaatcctttgagtttgaggatgcatccag

SEQ ID NO: 488745 - DNA, 75 bp, Homo sapiens
cccatccctgcagcatgaacaaggaatgcttctagtcacaacagacacccttggccatgactttcatgtcttcca

SEQ ID NO: 488746 - DNA, 83 bp, Homo sapiens
ctgcacctcccgcgccgcacggtggacgagatgttccaggtcatccagccagagcgtgcgctgtacatccaggccaacaactg

SEQ ID NO: 488747 - DNA, 83 bp, Homo sapiens
ggactgtccggggccgggctcaggagcagaggtcagcccaaggccaaccccactgtcactctgttcccgccctcctctgagga

SEQ ID NO: 488748 - DNA, 83 bp, Homo sapiens
ggccaagcggagggtgcgcgagctctaccgcgcctggtatcgggaggtgccgaacactgatgtggacgagtgctcactagcag

SEQ ID NO: 488749 - DNA, 100 bp, Homo sapiens
agccccggagcgcggccgagcaccgcaaggtttgccagaacccaataaagatgccatcttccaaggcctgacgcaggaccaggggttttatacatccaaa

SEQ ID NO: 488750 - DNA, 83 bp, Homo sapiens
gaacgaccaagagggtgttcgactgctagagccgagcgaagcaaagtcctacctccatctccgtgggccccagcaccagccga

SEQ ID NO: 488751 - DNA, 50 bp, Homo sapiens
ggactgcattgtcgaatggtccaagggatggtgccttgagtgaatgaccc

SEQ ID NO: 488752 - DNA, 83 bp, Homo sapiens
gcttgtccttgctggtgcatgcgtcgtcggcctctgggcagcagcaaaaccgctgagttcttgagcaaactgaacacagaatc

SEQ ID NO: 488753 - DNA, 125 bp, Homo sapiens
gcctctgacgcgacatctggacacggcgcggcgctggcgctgccggagctgtcgacccggcctggcgccggactagaagctgcacacatacatgtaagagaagcaaaaatgtcagatgatatcag

SEQ ID NO: 488754 - DNA, 74 bp, Homo sapiens
tattcttcaactctacattcttctggagcatggacaagcgaatttcagtcagtagttctatatacccctggcca

SEQ ID NO: 488755 - DNA, 90 bp, Homo sapiens
aactgttcgcaagggcagcagctggcgactttctccagtgactgggaaatccaggaagacagtaggacatgtttgacaagaccaagtcag

SEQ ID NO: 488756 - DNA, 83 bp, Homo sapiens
cggacagcgggctggagcctgacgagctggcggtgtggacgaatgtggaacctcgctctgtggctgtgttcccttggcactcc

SEQ ID NO: 488757 - DNA, 95 bp, Homo sapiens
gcggctttgaccgagaggctgctggagctcgtgtttggacgcatgttacagtggtttatcaaaatgggttacctgtgatatctgtgaggctacca

SEQ ID NO: 488758 - DNA, 75 bp, Homo sapiens
caagggtgcacagcccctggctacgggtttccaggcctgaggtgcccgccctggccccaggagaatgaaccagcc

SEQ ID NO: 488759 - DNA, 80 bp, Homo sapiens
cggttagccagccacgaagttctcgcgagagtcgtctcctcgataccaaacctgcctagagctggaacgttacctccaga

SEQ ID NO: 488760 - DNA, 100 bp, Homo sapiens
gaaggatatcgacgtcgtgatccagaagtccagagctgaggactgcctgtttgcaggacatggatttgattgacatactttggaggcaagatatagatct

SEQ ID NO: 488761 - DNA, 90 bp, Homo sapiens
gtccaagaacagacctatcaacatgaagaagatgaagaggacttctatcaagcggcttctacgctccggcactctgagttcatcagcaaa

SEQ ID NO: 488762 - DNA, 82 bp, Homo sapiens
gcagaagtccttcttcgccaaatacacagccctcagcgcctttttccaggagaccaacatcccctacagccaccatcaccac

SEQ ID NO: 488763 - DNA, 50 bp, Homo sapiens
tcactactgcctcttggccgtcacgcaagacctcaaaggaagaccttctg

SEQ ID NO: 488764 - DNA, 75 bp, Homo sapiens
caaaagtgaagcaagttcacaaagaagtattaaactgtggggtacacatctttctggaatgactgcatatcatca

SEQ ID NO: 488765 - DNA, 95 bp, Homo sapiens
tgctgttgctgctgctgctgccgctgctaggcaaaggtgctggagaatctggtaaaagcaccattgtgaagcagatgaggatcctgcatgttaat

SEQ ID NO: 488766 - DNA, 75 bp, Homo sapiens
tactgcttgagaacagaatacattgctgattatctcatgcaggcacttcaaaaaacgtatcagaagatacttcga

SEQ ID NO: 488767 - DNA, 75 bp, Homo sapiens
gcggctggagctgaggcaacagattggcaccaagctcaccagattataagcgccatggctatggctagtgttaaa

SEQ ID NO: 488768 - DNA, 82 bp, Homo sapiens
agaatgttttcgtgctgaccatctattaaaagatgagattgtggggaacctgggtgaaggcacctttggcaaggtggtggag

SEQ ID NO: 488769 - DNA, 50 bp, Homo sapiens
ccgctgcgtgggggtgaggggatcagctgtgaggtggagcagtgggactc

SEQ ID NO: 488770 - DNA, 74 bp, Homo sapiens
cgtctctctgctgcggcgcggggaccgctgtgctctcggccaggtcagagcagcccaccatgggatggggaggg

SEQ ID NO: 488771 - DNA, 90 bp, Homo sapiens
aagaagaaagtaaagttggaagttaagggagacaaagttgaaaacaaagtgctgtacactcctgatcatgtagttggacctggagcagac

SEQ ID NO: 488772 - DNA, 51 bp, Homo sapiens
ccagggaaccctggtcaccgtctcctcagatttggtcgtattgggcgcctg

SEQ ID NO: 488773 - DNA, 100 bp, Homo sapiens
gcctactggataggcttaggaattttgtcttctgttgggcttggaacagggctgcacacctttctgctttatctgctgtcacaagatgaaggtagaggca

SEQ ID NO: 488774 - DNA, 98 bp, Homo sapiens
aagacaaccgcatgagctgcaccgtgaacctgctgccaactgggtacatggaaaactcagtctcctacagcgcaattgaagacgttcagctgctgtcc

SEQ ID NO: 488775 - DNA, 83 bp, Homo sapiens
ctcaggctgcccagatggtggctcccggagtccagctcaccatggatgatgatatcgccgcgctcgtcgtcgacaacggctcc

SEQ ID NO: 488776 - DNA, 90 bp, Homo sapiens
aagtggaggccaaggcgtgagaattcctcaatgactgccctctaaaggaagaggaagagccaggacttctgaatttaccttgaatacaga

SEQ ID NO: 488777 - DNA, 100 bp, Homo sapiens
gaaaggtcccactgcagccctccaagcaggtgatgtgtccaatctagatcccaacttctcatttgaaggcaccaaactggatgtggggaacattgtgctg

SEQ ID NO: 488778 - DNA, 90 bp, Homo sapiens
ccactttagaaactcaattaaggggagctgatcaccttctattactattggaagaagacccccgaagcagccagctcccgagcccatcgt

SEQ ID NO: 488779 - DNA, 100 bp, Homo sapiens
cctcccgagtggctgggactacagttacctggctgagcagtgctggaatggcggctttatctacctgatcatgctgcgtcgctttaagcacaaagcccac

SEQ ID NO: 488780 - DNA, 85 bp, Homo sapiens
ggcagagcaaggggcttacgcagaaggacctggccacgttctgcctcctgggggcattgctggcccccatccgagtgcttctggc

SEQ ID NO: 488781 - DNA, 75 bp, Homo sapiens
cggccaggtgctgcagaagctcttgggtgatgacgcacttccaaatgggttagacgttacctttgaagtaactga

SEQ ID NO: 488782 - DNA, 100 bp, Homo sapiens
caagaaaaataaagaagaggctgcagaatatgctaaacttttggccaagagaatgaagccaaggccacctttgatgccatttctaagacctacagctacc

SEQ ID NO: 488783 - DNA, 100 bp, Homo sapiens
ctctctcctctcccagttccgcagtccttcctggcaaacagatgtggacgagtgcagctccgggcagcatcagtgtgacagctccaccgtctgcttcaac

SEQ ID NO: 488784 - DNA, 51 bp, Homo sapiens
gggatgtgaaaactctgttactgaaggatgtggagagcatcttgtgcgcac

SEQ ID NO: 488785 - DNA, 89 bp, Homo sapiens
tgggcaaggatgtggtcgtggaactaaagaatgacctgagctgccaatttgtggtgtctgaagaccaagactacacagctcattttgct

SEQ ID NO: 488786 - DNA, 75 bp, Homo sapiens
tggtcaaatcggaagcgattaagtgccagcaagctagagaccgttggatggcagcttaaccttcagatggctcac

SEQ ID NO: 488787 - DNA, 98 bp, Homo sapiens
ggccgtgtgcgccgtggggctgctgggcaacgtgcttgtcatgttcggcatcgtccggacaatcctccaaacacagactgtttgacttagaatcttcc

SEQ ID NO: 488788 - DNA, 100 bp, Homo sapiens
attggagtgaaccggagaccccgaaaacggaagcgcagggagaaggaagaggtgtttgaaaagctatgaaacccacgtagtcgaacaccgtgatgcttct

SEQ ID NO: 488789 - DNA, 97 bp, Homo sapiens
cccgcatcgcagcggccgggcagcggggcctgggacgcgccccgaggaggagcggggcggcgcaggcggtgctggagaatctggtaaaagcaccatt

SEQ ID NO: 488790 - DNA, 95 bp, Homo sapiens
cggatgttgcggacagtatgaggcaagcgcagggggacggggaccagcagctgtcgccgccgctctcagaatatgacagatacctagcatctagc

SEQ ID NO: 488791 - DNA, 100 bp, Homo sapiens
cagtatgctgtacgaacgccggatactcatcatttgcagcaaactcagcactgtactatcttggtcgtcggatgtttattgttatttctgagccagacat

SEQ ID NO: 488792 - DNA, 100 bp, Homo sapiens
gaagaagcagctgcggcggccacaccctggatgagagtatatgattgaacgaccagagccagaattccaagacctaaacgaaaaggcacgagcacttaaa

SEQ ID NO: 488793 - DNA, 75 bp, Homo sapiens
agatcggctgcggcaacttcggggagctccgcctaggagaactacgatgacccgcacaaaacccctgcctcccca

SEQ ID NO: 488794 - DNA, 75 bp, Homo sapiens
accgggatcggttgccttgagcctggtgtcccgacccaggctaagcttgagcatggctgagcaggagcccacagc

SEQ ID NO: 488795 - DNA, 101 bp, Homo sapiens
cggcagcggcggaggaaggcggcgcaccccgagagagaccatttgtttgtgactatgaagggtgtggcaaggccttcatcagggactaccatctgagccgc

SEQ ID NO: 488796 - DNA, 100 bp, Homo sapiens
gcctgctaagagggagaccaggtcatggcagccatgcctctgaaagctcaataccagtccagggagctcccagggaagtggtcgacccctccggtggctg

SEQ ID NO: 488797 - DNA, 87 bp, Homo sapiens
aacagcagatttcccaagagcagcggaaaatgatccagtcacaggactatttaagaaacaactgaggcatcagaccaactttcccca

SEQ ID NO: 488798 - DNA, 100 bp, Homo sapiens
atgaggccaaaggcagttgtattgcaaaccagtccagctacgggggcccagccagccagcagctgagtgggggttacggaggcggctacggtggccagag

SEQ ID NO: 488799 - DNA, 74 bp, Homo sapiens
tgccagcctatgctccatacctgccctgcgaggtgcattcatccctggagcgcccgtccagcctgtggttttac

SEQ ID NO: 488800 - DNA, 98 bp, Homo sapiens
gaagactatgatgttgtaaaagttattggaagaggtgcttttggtgaagtgcagttggtcaactttgtagtgtgccaactctttgccttgctagcagc

SEQ ID NO: 488801 - DNA, 75 bp, Homo sapiens
caggaactgtcggaacagaaccaaaggctattggatcagctcagcaggcactgccaaggagatgagctcctggat

SEQ ID NO: 488802 - DNA, 50 bp, Homo sapiens
cacgagcttttcctccaggcctttgagaggttggatgggctgtctgagcg

SEQ ID NO: 488803 - DNA, 75 bp, Homo sapiens
aacttcaagccaaacatcaagcagaatgtgatttgcttgaagatatgaggtgcagatgctaatttcagtgtctgg

SEQ ID NO: 488804 - DNA, 75 bp, Homo sapiens
aacagcttcatgaactccaagccaaaatcacagctttgagtgagaaacaggatcagttcttaagagcagccccgg

SEQ ID NO: 488805 - DNA, 100 bp, Homo sapiens
atgaggttgactggcaggatactcgtgatgatccctacagaccagtgccatggtctccatgaactgatttttttgtgcagtgggcaggaagaacccatcg

SEQ ID NO: 488806 - DNA, 90 bp, Homo sapiens
gagtggaagccatgaggccaaaggcagttgtattggttggaaaagagactgttcaaaccactgaggatcagattttgaagagagatatgc

SEQ ID NO: 488807 - DNA, 100 bp, Homo sapiens
taccagtatggtggactgaattctggacgtcctgtcactccacctcgaacagctaatccgccgaagaaaaggaaaggccgagggggacggcaagatgcac

SEQ ID NO: 488808 - DNA, 51 bp, Homo sapiens
tgactcatccccgggagtgttgagtggtgttgctttgtaatgcttcatgct

SEQ ID NO: 488809 - DNA, 90 bp, Homo sapiens
cggcgtgctactgtgcgctcgatccagcaccatggggaagcgggacaatcgggtggttctcagaggcactgtgactgacttccctggatt

SEQ ID NO: 488810 - DNA, 100 bp, Homo sapiens
cagccgcattgacaggatgtttcctgaaatgtccatccacttatccagacccaatggaacatcagcaatgcttctggttcagcagctggacatggagaac

SEQ ID NO: 488811 - DNA, 90 bp, Homo sapiens
cttttctggcatcgtaggaggtggcctgctgttccatgccattgcagtgtcaactaggcctcagttacttttcagtttgcccaaattgag

SEQ ID NO: 488812 - DNA, 100 bp, Homo sapiens
ggtggagaagctcaaggagcgctgcctcaagcacacttcccaagtaagaagcggaagaggagccgctggaaccaagacacaatggaacagaagacagtga

SEQ ID NO: 488813 - DNA, 80 bp, Homo sapiens
gccattccagcactggactcatggaggctgagcatttattcaggtccatccaagctgaatgatcgcgctgactcaagaag

SEQ ID NO: 488814 - DNA, 50 bp, Homo sapiens
caaaaggcaaagtttgatgtatcagaccactctgcttcatttttgggaga

SEQ ID NO: 488815 - DNA, 100 bp, Homo sapiens
aaaacacatcatgaaggcctgttttgaagagaaggggaataagactgcatctgttcatatgagatacagatgtggtgtataaaagcgagaatggacatgt

SEQ ID NO: 488816 - DNA, 82 bp, Homo sapiens
ccccgtcttcgacctcagttacttcatcgtctccatcctctacctcaagtatgagccagatttggagcaagaggtggtggtg

SEQ ID NO: 488817 - DNA, 75 bp, Homo sapiens
gctggagctgctgaatcagatggatggatttgatcagaatgtcaatgtcaaggtggagccgccaccaaaatgcag

SEQ ID NO: 488818 - DNA, 100 bp, Homo sapiens
gtcttcaccgccccacactggcggatgaagcagctggtggggctctactgcgacaagaatgttgtaccatctttgggtaggcagacttccctgacgacat

SEQ ID NO: 488819 - DNA, 83 bp, Homo sapiens
ctctcatctcgctcggctgcgggaaatcgggctgaagcgactgagtccgcgatggagcaatggctgccatccggaagaaactg

SEQ ID NO: 488820 - DNA, 127 bp, Homo sapiens
ggcgggactcacggcagaagtgagctggaaggtcttggagcgaagagctcggaccaagcgctcaggaactagaagatcttctgccatctagaccggaagttcctaacataattggagaaacagagga

SEQ ID NO: 488821 - DNA, 85 bp, Homo sapiens
ccgcgactggggcgcgctgttgctccacaaggcccagatcctggcgctggcagcgggcctccccttcctcatcatcgagacaagc

SEQ ID NO: 488822 - DNA, 98 bp, Homo sapiens
ccagaagactttggcattgtgtctggaatgctcaatgtcaaatgggaccggattgcccccttgcacaggcaactgaaatgctatacatgcgtttggac

SEQ ID NO: 488823 - DNA, 100 bp, Homo sapiens
atgaagttgtcagtgcctctgttgggagtggggacctctggatcccagtgaagagcttcgactccaaggtgggctaccctaatgttggtaagagttcaac

SEQ ID NO: 488824 - DNA, 97 bp, Homo sapiens
ttcgcctgctccaagtttgtctccactccctccttggagagaagatgactgaggaggaggtggagaccgttctggcaggacacgaggacagcaacgg

SEQ ID NO: 488825 - DNA, 80 bp, Homo sapiens
gagaaagcgacatgctattgaaggttcgtttaccaagcaaaagttgggggtcgctggttcccagccgtctgcgcacacag

SEQ ID NO: 488826 - DNA, 89 bp, Homo sapiens
aaattcttcaggatcaattacatgtttgcaaaatggatggtcagcacaaccaatttgcattagttcaaaccttgtactactcagctgat

SEQ ID NO: 488827 - DNA, 75 bp, Homo sapiens
tggggcaggaaattgggaatgaattggatgaacaaaatggtcaaaatgcagatcttcgtgaaaacccttaccggc

SEQ ID NO: 488828 - DNA, 98 bp, Homo sapiens
tccaacctcatcaagcaggattaagtaaagttcaagcagcagaacatactctgaggttatcaactggcaaacatctcttcacattccaccacaagcta

SEQ ID NO: 488829 - DNA, 75 bp, Homo sapiens
gagaccatcaagaattggatttggggaagaggattggagaatccatgttgaccaaatgcaccagcacagaagtgg

SEQ ID NO: 488830 - DNA, 91 bp, Homo sapiens
cgccctgctccagcagctgggccaggagaaccctcagcttttacaggtggagtttgaggacgggtcccagctgacggtgaagcgtggggac

SEQ ID NO: 488831 - DNA, 50 bp, Homo sapiens
tctgtgtttcgcaaaccctccagcactttttatgaagactggtcttttgt

SEQ ID NO: 488832 - DNA, 90 bp, Homo sapiens
ggatggttgagtcctgcttgggctcaccttgctgggccagcccccaactccttcggatgctcagcaacagcctcaccaaggactccatga

SEQ ID NO: 488833 - DNA, 83 bp, Homo sapiens
gagcgaggcagctgtactaggactgggaacggaacccagcgggtgccgcttctccacccgaggcttccacctccaacgagcca

SEQ ID NO: 488834 - DNA, 100 bp, Homo sapiens
acctgcagaaggtctctggagacatcttcagcagagcgcatcagcgaggaggtggggctgctgcagctccttggggaccccccgccccagcaggtcaccc

SEQ ID NO: 488835 - DNA, 100 bp, Homo sapiens
agaaagaatagctagagaagaacatgggtctgggaaaatcgctgtgatatcagcagatataatttctacagtagaatttaatcattctggagaattacta

SEQ ID NO: 488836 - DNA, 90 bp, Homo sapiens
gatactttgaagtagaagaagctgatggaaaaccgtcttcagatacagtccctaagcccaagagagccccaaaacagaagaaagtagtag

SEQ ID NO: 488837 - DNA, 75 bp, Homo sapiens
cgttccctcagcctctgcccaaagaaagaaggagtgcaccaattccagctggacatcactgtgaaaatgggacgg

SEQ ID NO: 488838 - DNA, 82 bp, Homo sapiens
ttcacctgcagaagcgtgtcgttctgcaccagcgccttgatcgagtacttgaggtgacttaagagattaaaattaatttggt

SEQ ID NO: 488839 - DNA, 100 bp, Homo sapiens
agcggcctgctagcatggcggtgatggaaggagacttggtgaagaaggaaagtggagaacctgaaaaggaacctggaaagaagcagctggaaaaggtgag

SEQ ID NO: 488840 - DNA, 50 bp, Homo sapiens
aagagagggaagaagcagctgccaggtctgctattgatcttgaagagatg

SEQ ID NO: 488841 - DNA, 100 bp, Homo sapiens
ggcaatatcatctctgatgcaatgaaaaaagttggaagaaagggtgtcatcacagtaaaggtgacatatatggaggaagagcgaaattttaccactgagc

SEQ ID NO: 488842 - DNA, 83 bp, Homo sapiens
gtgctgcgggtctgctcgggggtctacttcgagggatggcactggatctttaaaacgcagtggttcctttagcaaactccggg

SEQ ID NO: 488843 - DNA, 72 bp, Homo sapiens
tacgcctcctacgtttacctgtccatgtattctaccttgtaaatactgttatttgtatatactgtaaatgat

SEQ ID NO: 488844 - DNA, 98 bp, Homo sapiens
ccacagcggcctcggcctccccttggattcagacgccgattcgcccagagtgctgcagcagctcccagtccagtgctaggaaacattcccccaggaga

SEQ ID NO: 488845 - DNA, 137 bp, Homo sapiens
ccggcgtacacggggcaggtgccttacaactacaaccagctggaaggcagattcaagcagctgcaaggtcatcagactagtgctgagtcttggggtactggcagagctgtggctcgaattcccagagttcgaggtgg

SEQ ID NO: 488846 - DNA, 49 bp, Homo sapiens
ctgagatccatctgcaccacggtgctggccttagaaaatttacgtgtat

SEQ ID NO: 488847 - DNA, 99 bp, Homo sapiens
aatacaagatctaacaggactagatgtttccacagcagaggaattacaggatcatggggttgacagcagcattttccagaatcctaaaaagcttcatct

SEQ ID NO: 488848 - DNA, 75 bp, Homo sapiens
ttggttaaaacctgacacttttaacagcttagcagtgtctgcaaaaacgaatcttttcctacaacctgttaactg

SEQ ID NO: 488849 - DNA, 71 bp, Homo sapiens
aagagatcatagccgagtatgaaagtcaagtcaaagatgatgtgctgactaaagacgcgggtgagtgtgtg

SEQ ID NO: 488850 - DNA, 75 bp, Homo sapiens
gcgccgcgcccggggccgtgcgctctcgggccactcggccgcagttgtctgagggaagtcaaaagcatgcaagcc

SEQ ID NO: 488851 - DNA, 75 bp, Homo sapiens
ggcagcgacagagccaaaatcagagctggaacctgaggagagaggccatttgatgaccagcctgcaggcacaact

SEQ ID NO: 488852 - DNA, 75 bp, Homo sapiens
cgaatccagtagaaaactggtcaaggaagctgaaatgtggctttagataatctacagataaaagaaaatgccctg

SEQ ID NO: 488853 - DNA, 100 bp, Homo sapiens
tggactttctggccgagaccagccagtggagctgctgaatcctgcccgcgtgaaccacatgcccagcacggggcgttgaagggcaagattaagaaggaaa

SEQ ID NO: 488854 - DNA, 101 bp, Homo sapiens
tgccactcagctttgaggaaaagccagtttatatccaagacttagatgagtttttcagttatgggacaaaaatattatatcaaaacactgaagctttgcaa

SEQ ID NO: 488855 - DNA, 75 bp, Homo sapiens
gtgaagtggtgagcctttttgtcactgatttgttcccgacaaggagttttctggttcagaccgtagacagagagg

SEQ ID NO: 488856 - DNA, 100 bp, Homo sapiens
cccagcttggagaaccaccgcatcaagagcttcaagaacaagggccgcgatgtggaattcttcagtgccctactccacagccaaaacacctcacccagtg

SEQ ID NO: 488857 - DNA, 100 bp, Homo sapiens
cgatgcctctgacgtctgccatcctggagagcagcagagcgtcactagcagaagaacatgtgatcatccaggccgagttctatctgaatcctgaccaatc

SEQ ID NO: 488858 - DNA, 83 bp, Homo sapiens
aagtcatcaagctagtggacatcacggacatccagaaggaagggaaaaggccgaggcatcagcgtgtgaagaccgcaaagacg

SEQ ID NO: 488859 - DNA, 100 bp, Homo sapiens
ccacgctctcagtcagcctggggaatgagacccaaactgctcatacagaattacgcatttccacttctaatgatttgggaatggatgatgaaggagatga

SEQ ID NO: 488860 - DNA, 75 bp, Homo sapiens
ggcggagctgacggtggaggttcgcggctctaacggggctttctacaaggaaacccagcgtttgctggcagaacc

SEQ ID NO: 488861 - DNA, 100 bp, Homo sapiens
agttggaaaaaggagaggcccatcgggaagggtaccttgtggtctataatcctttagaacaagaccgaatctcgttggtctcagtctatgtgagttcccc

SEQ ID NO: 488862 - DNA, 75 bp, Homo sapiens
ttttgaaggtgcaagatactatataaatgttccttgcctgtatctccccttggttcaatagctaccagatttttg

SEQ ID NO: 488863 - DNA, 116 bp, Homo sapiens
accgcgcgcagggcctgcagcgggagctggacggcgagcgcgagcggcgcgagaaagttcgggtctggcggtacttgaagggcaaagacctggtggcccgggagagcctgctggac

SEQ ID NO: 488864 - DNA, 75 bp, Homo sapiens
cgcgtctctctgctgcggcgcggggaccgctgtgctctcgcaagagtgagccatggagctacgtgtggggaacaa

SEQ ID NO: 488865 - DNA, 75 bp, Homo sapiens
atacgatagaaaatgtaaaggccaagatccaggataaggaaggtgccacacctccctggatgatccaagatgaag

SEQ ID NO: 488866 - DNA, 83 bp, Homo sapiens
cgcagatccccaggccccctccacccagtcggctagccctcgcctctgccatccggttctgacttattctggagaggagtagg

SEQ ID NO: 488867 - DNA, 83 bp, Homo sapiens
tcccccagggcctcggcggccgctctgcctgcgcgctgctcctgctctgctacctggactcctcctattttgaggacttctcc

SEQ ID NO: 488868 - DNA, 82 bp, Homo sapiens
agctcagaggctgagcggcatggtcagcccaaggccaaccccactgtcactctgttcccgccctcctctgaggagctccaag

SEQ ID NO: 488869 - DNA, 83 bp, Homo sapiens
ggggacctcgtccgagcccacccgcctttggaggctgtgaacccaggcaggtccctgttcctgctatacgccctcaagagctc

SEQ ID NO: 488870 - DNA, 75 bp, Homo sapiens
tagcaatgtaattcagttgatcattgatgcatacaataatgtgtctttaccatatggaacaattttgaacttcta

SEQ ID NO: 488871 - DNA, 97 bp, Homo sapiens
aatgcccaagacattataaacatgcagcaggagttggaaaaaaatataactagagaactcaaagaaggtatgttgccaaacttcatgaattaaattt

SEQ ID NO: 488872 - DNA, 74 bp, Homo sapiens
ggacaatggctctttagagagttatctgagtaattaaacaaccaccatgtcgagcaaaaaggcaaagaccaaga

SEQ ID NO: 488873 - DNA, 100 bp, Homo sapiens
gacgcataccccaacggcctgcagggcagcaaggagcgcttccactggcagagccacaacgtgaagcagagcggcgtggatgacatggtgcttcttcccc

SEQ ID NO: 488874 - DNA, 75 bp, Homo sapiens
gtgcgtcaaggactccccgcgcttcagcatatgtaagtggaactcagaaggcaacattccctgaacatactcttc

SEQ ID NO: 488875 - DNA, 100 bp, Homo sapiens
caggccctcaggctcctctgccttctgcttgggcttcagggctgcctggctgcagacaccatcgacatcgtgcgggatgcagtggccccaggcgagtaca

SEQ ID NO: 488876 - DNA, 80 bp, Homo sapiens
gctctgcagccacatactatccgtttgttcaggaaccaccagtgacagagacctgcgcgaagtctggctcaattatcctc

SEQ ID NO: 488877 - DNA, 90 bp, Homo sapiens
tccccaccatcaacatggagaacaagaccacgtggctgaagaaatcaggggagaaacccctgcttggtggaagcctgatggaatatgcaa

SEQ ID NO: 488878 - DNA, 80 bp, Homo sapiens
cccagtcccaggacgtggcgcgggtctccagtgcttcagactctgagatttgcccacctgatgaccttgccagcttgcca

SEQ ID NO: 488879 - DNA, 76 bp, Homo sapiens
gaaaacaagctcagggctcccacggattctacattatgtctaccctgacatttgcactatcagccttgtagcagtg

SEQ ID NO: 488880 - DNA, 50 bp, Homo sapiens
ggagatctgagcctcaggatgcagttggtagctggcagtgttgtgatggc

SEQ ID NO: 488881 - DNA, 82 bp, Homo sapiens
cccacaggctctctccgctcgattttgtcaccgttatgtgggaagcgaatccagttccctctcccagcctgtgctgactcag

SEQ ID NO: 488882 - DNA, 50 bp, Homo sapiens
tttagaccctccacctaattgcaggaaaactcaatgtgagtagtgacact

SEQ ID NO: 488883 - DNA, 75 bp, Homo sapiens
cgctgttcctcaccatccctttcgccttcttcctgcccgagctggttgctgaaaagccaggagtcaaaatgactg

SEQ ID NO: 488884 - DNA, 82 bp, Homo sapiens
agcagtgacaatgggctttggagatcctctctcacctttgcaatcgggtgacgagaacaagtcagtgcgcgaccgtttcaac

SEQ ID NO: 488885 - DNA, 98 bp, Homo sapiens
cctggagtctgcgaaggccgggacccggttccccggcccacagtgggggtgtgcaaacccgagagaactggataaacaacttgatgcagatgtttccc

SEQ ID NO: 488886 - DNA, 75 bp, Homo sapiens
cagggtaacatggcggatgcggaagcttcgagagctgtgcccaggagtgaacaaccagccctacctctgtgagag

SEQ ID NO: 488887 - DNA, 90 bp, Homo sapiens
aatttgcaaaggaagtaaaagaaagaaatattttgttatatgggcttctcatatcttacccacagttgttgaatgttgggtcacgaagat

SEQ ID NO: 488888 - DNA, 96 bp, Homo sapiens
gcccaccgccgtgaacggctgcgtgaccggtgctcagcagggagaccccctttcccgctatatcttcaggaaggctggggagatgctgggcagaca

SEQ ID NO: 488889 - DNA, 100 bp, Homo sapiens
tttgccctggaagaggactttgatgtcctgtcggtgtttgatggtccaccccagccagagaatctgcgtacgaggaataagacgagttggaagaagacct

SEQ ID NO: 488890 - DNA, 100 bp, Homo sapiens
acttggaatagtagcaggcggcggcggcggaacgccaggcaggagagataccagaaggagcaggacaagctgaaagaagagtgggaaaaggcccaaaagg

SEQ ID NO: 488891 - DNA, 90 bp, Homo sapiens
acctggatccaggataacggaggctggaatgcctaccgcaggaatgggatggcttttctagcctgctgatgtgacaactgtgatgtgcct

SEQ ID NO: 488892 - DNA, 50 bp, Homo sapiens
gtggagtgtaggtcatatcgccgcgatggactcaccctgtcacccaggtt

SEQ ID NO: 488893 - DNA, 75 bp, Homo sapiens
cgcggggagctgcgcgaagccggggcggagcacgcgagctatgaaacgcttcgttaagggactcaggcagtacgg

SEQ ID NO: 488894 - DNA, 75 bp, Homo sapiens
cgacagcttttacagtcccaagcaacagaagcagagcactttgatatgcctcatgatattgttgcatctgaagat

SEQ ID NO: 488895 - DNA, 51 bp, Homo sapiens
ctgcaaatacagagactcggattaaagcaagtcaagccagagatctgttat

SEQ ID NO: 488896 - DNA, 75 bp, Homo sapiens
cagtggatctgcgccaaggcctacggccgaggaaactactttgcttcgcactttttcatgggaggagagaaattc

SEQ ID NO: 488897 - DNA, 96 bp, Homo sapiens
atgaaatcaaaaggcagaaccagtcccttgtgtatggcaaagtggatagcttctggaagctgcagaaccttggcctgaaaatgctacattatatca

SEQ ID NO: 488898 - DNA, 100 bp, Homo sapiens
gtccagagctgaggactgcctgtttgcagccccactgcaggccccaccatggcgccgttcctgcgcatcgccttcaactcctatgagctgggctccctgc

SEQ ID NO: 488899 - DNA, 74 bp, Homo sapiens
tgggcagacggattcatttagagctgcggaacaggacgccctctgatgtggtggtgaagtttattaagaaggag

SEQ ID NO: 488900 - DNA, 101 bp, Homo sapiens
cgcctggttactatcaaaaggagcggggtcgacggtccccactttcccctgagcctcagcacctgcttgtttggaagattccttttctggccgaagggatc

SEQ ID NO: 488901 - DNA, 89 bp, Homo sapiens
cttcaagtgcatgatgtgcgatgtgcggaagggcacctccacccgcctgcctagggtagttaaaagacgagtgaatgctctcaaaaacc

SEQ ID NO: 488902 - DNA, 83 bp, Homo sapiens
tccaggagtacccgaccctcaagcgccatcatgaccgggtcctataacaacttcttcaggatgtttgatagagacacgcggag

SEQ ID NO: 488903 - DNA, 90 bp, Homo sapiens
gataagtttaggccagacatggaggaacttgatactaaatttgggactctttgctgcgggagtttggctggccaggaacttgagtgacat

SEQ ID NO: 488904 - DNA, 82 bp, Homo sapiens
aaaatcctggatctgtatgctttgagcaaggtggctctgagggtcctgttccccgaccgctacgtcctacagggcttcttcc

SEQ ID NO: 488905 - DNA, 88 bp, Homo sapiens
cgctacagcaagttttttgacctccaggcgaggattaaatccaccacacagggtgaaatctatctccatgacaacattcacacaacag

SEQ ID NO: 488906 - DNA, 80 bp, Homo sapiens
tgagatccacagagctaaacgttttagagtaccaaccattgtgtgctgtgaggtaaaggctcatgcaacacttctgggtt

SEQ ID NO: 488907 - DNA, 76 bp, Homo sapiens
aactaaagccccacatttgcagctcattgaaggaaaggctatcagacccctaatattattctagatattcagcctg

SEQ ID NO: 488908 - DNA, 101 bp, Homo sapiens
aaaccgaataccccaacccccacccatcgcccacccgaggacgtccccccagccggagtcgggcatcaagcgactgctcactcagtaacttgatggatttt

SEQ ID NO: 488909 - DNA, 82 bp, Homo sapiens
cccagacaccggagactgggaaatggtcagcccaaggccaaccccactgtcactctgttcccgccctcctctgaggagctcc

SEQ ID NO: 488910 - DNA, 100 bp, Homo sapiens
gaggatttatagatcagaatctcagtccaacaaaagtgccatcagctcacacttgcaaacctgtggctgttccgttgtagtaggtagcagtgcagagaaa

SEQ ID NO: 488911 - DNA, 96 bp, Homo sapiens
gccagcccagccgcagccgccgccaccgccgccgccggggccgggccccctcgccgctgccccgggaaggaggccggatcacctcaacagtcacgt

SEQ ID NO: 488912 - DNA, 100 bp, Homo sapiens
ctaacttctactgacgaagcttggaagttgcagaaggattactacagcatcccatttcccacacccactactccgctgactgggagggatggtagcctgg

SEQ ID NO: 488913 - DNA, 116 bp, Homo sapiens
ggatcaccggcgtgccccaccatgtcagacgcagccgtagacaccagctccgaaatcaccaccaaggacactcatgaggaccatgatacttccactgagaatacagacgagtccaa

SEQ ID NO: 488914 - DNA, 75 bp, Homo sapiens
tgcagctgcctcagttcttagcgcagactgtctgcaactttacagatggtgcattggttcagcatcaggagtggg

SEQ ID NO: 488915 - DNA, 99 bp, Homo sapiens
cgcagatgtggacttgaaagaagctgcagcggaggaaggcgaggagggccgtgtagccatcacccgagtggccaaccttctgctgtgtatgtatgccaa

SEQ ID NO: 488916 - DNA, 80 bp, Homo sapiens
cctgattggtgctggcatcagcacagacaccgctttgccgataggattttttatcaagcagaaatgcatcgaacaacgag

SEQ ID NO: 488917 - DNA, 75 bp, Homo sapiens
gccaactccaatgggcctttccagcccgtggtccttctccatattcgagcccccaggtttccctagatgacaaat

SEQ ID NO: 488918 - DNA, 75 bp, Homo sapiens
gaagcaagcagttcagaagagccaaggaataaacatgcaatgaacccaaaaggggatttagtgcaagaagaagaa

SEQ ID NO: 488919 - DNA, 83 bp, Homo sapiens
aacaagtgtgtgcatctggctgttagaagaattcatgctcatccggtgcctccggagccagcgtggtggccatagacaacaag

SEQ ID NO: 488920 - DNA, 82 bp, Homo sapiens
gccttagctgtgctcgcgctactctctctttctggcctggaggctatccagccggctcagcacgtcactttggactgtcgcg

SEQ ID NO: 488921 - DNA, 100 bp, Homo sapiens
cttgggtcctccgagagcagcagcgttgattatggaagattcccacaagagtaccacgtcagagacagcacctcaacctggttcagcagttcagggagct

SEQ ID NO: 488922 - DNA, 90 bp, Homo sapiens
ccgggacaccgcacagccgggaaatggaaattgacaatggcccttcagctatgctaggtctataatgggaagtgtcacagttcggtattt

SEQ ID NO: 488923 - DNA, 100 bp, Homo sapiens
aatgtgaaagagttacaatactacgtcggacagagttttgccaatgggccagttctgtgactattgcaattctgaagaccccaggaaagcacatcctgtc

SEQ ID NO: 488924 - DNA, 75 bp, Homo sapiens
caaagggaaaactaaggtggaggtggcgaagatgattcaggaggtgaagcaagctgcgaatattgtgcgtgctct

SEQ ID NO: 488925 - DNA, 90 bp, Homo sapiens
gatcatcataggcttatgtcttgctgcaggaagcttttgtccagtgatcgaaatccaccaattgatgacttaataaaatctggaatattg

SEQ ID NO: 488926 - DNA, 87 bp, Homo sapiens
aaaccgggagacacacaatgcagtagccggatcgagctgggagatgtgacaccacacaatattaaacagttgaaaagattgaatcag

SEQ ID NO: 488927 - DNA, 88 bp, Homo sapiens
ggaaatcgtgcacatccaggctggtcagtgtggcaaccagatcggtgccaagcaaacggggattcagcgtccgatcctttggaacagg

SEQ ID NO: 488928 - DNA, 75 bp, Homo sapiens
gttggcgcccaagtccagaatccgcgcgcaccgcgcatactggagcatagtgaaagagtctattttgaagcttca

SEQ ID NO: 488929 - DNA, 75 bp, Homo sapiens
attggccctccagatacactttaagcaaatttttcagaacataaaacaagaatatagtcgttatcagaggtggag

SEQ ID NO: 488930 - DNA, 51 bp, Homo sapiens
agaggccagtggcactcccagctcgatcatgtttgagaccttcaacacccc

SEQ ID NO: 488931 - DNA, 90 bp, Homo sapiens
gaagaatattcagaggctaacaaagctgaaaatgtgtgtctgacatgcaagctcagtggggcagagacccgtggattgctgtgccctgcc

SEQ ID NO: 488932 - DNA, 51 bp, Homo sapiens
tgggcgtaggaccctctgagccaggactcaactattgttactccaattatt

SEQ ID NO: 488933 - DNA, 88 bp, Homo sapiens
ctcggtggcgccgcgctgctcctgctgctcatcccggtggccgccgcgcaggagcctcccggagctgataaggagggttcctgccccc

SEQ ID NO: 488934 - DNA, 75 bp, Homo sapiens
ggacgtgctggtgtctgagtggatggggacctgcctgctgagactaattgagcagcgtgatactttgaaagaaac

SEQ ID NO: 488935 - DNA, 100 bp, Homo sapiens
aaactcccatcaatgccagctgctgaggaaatgcataaaaatgtggagcaagatgagttgcagcaagtcatacgggagatgcatcaatctcaaataattc

SEQ ID NO: 488936 - DNA, 101 bp, Homo sapiens
atgtccctgggactcctgtctacagagaaaaagaagatatgtatgacgagattattgagttaaagaagaattctcagaagccaccgctgaactgaccgtct

SEQ ID NO: 488937 - DNA, 88 bp, Homo sapiens
acgaggtcttggagccctgcctcaactgcctgagtggccctagcagtgactccgagaaacctgctcctccaaagccagagcccaagcc

SEQ ID NO: 488938 - DNA, 100 bp, Homo sapiens
ctgctttccacacggaccgcctataaaggagcttttcagagactcctccactctctgggaatgacacggactccctctcctgcgacagtggcagttcggc

SEQ ID NO: 488939 - DNA, 100 bp, Homo sapiens
catgaagcatctgaaaaagctgtggaaggctctggataaggaccagtacctgcccaggaaactgttttcaaattgctgcaaacctcagcatggaacgcta

SEQ ID NO: 488940 - DNA, 83 bp, Homo sapiens
gcagtgtgtgcaaaaaagcgccccccaggaaaaccagtagattcccagacatcgcgaagtgaatctgaaattgtgccaaaagt

SEQ ID NO: 488941 - DNA, 97 bp, Homo sapiens
gcatgcctcccccaggacaagtgtaaagtgaagatcggtcgtcgcttcagtgaagaaaggaatacggggtgctttgcattcaggaatacagaaaaaa

SEQ ID NO: 488942 - DNA, 75 bp, Homo sapiens
atggaatgtaaccctagccaggtgaatggctcaaggttcagtgtggtgcagggctgaccttactttggagccccc

SEQ ID NO: 488943 - DNA, 82 bp, Homo sapiens
gccggacgtcctccgactcaaggcattttgttcccaacatcacctttggtcaccctgtggtagaaagccttcgaaagcagct

SEQ ID NO: 488944 - DNA, 100 bp, Homo sapiens
cgcttttgaagattttgcatgcagcaggtgcgcaaggtgaaatgttcactgttaaagagtacaagttgtgcaaagtgaggaagattactgtgggagtgaa

SEQ ID NO: 488945 - DNA, 75 bp, Homo sapiens
tttgctggaacatatgccaactttgtgacaactcatcagactctgctaactggaatggcttattgtgcaagaaag

SEQ ID NO: 488946 - DNA, 100 bp, Homo sapiens
atggcaattgacctcacctcaagcacacccaatggacagcatgcctcaccaagtcacatgacaagcactcagaattctgcaaatgcagattttgcaaact

SEQ ID NO: 488947 - DNA, 74 bp, Homo sapiens
aaaagataacagatagaaacctcatcaatgcaaccaacgcagccttgcaaacgatatgggccctcacattttcc

SEQ ID NO: 488948 - DNA, 101 bp, Homo sapiens
tatatcggttaatggatctgggccctgcacatataccatctctggctccagggaatgtgaggtcatgccttgactgcattggtaaaaattctatcatgtta

SEQ ID NO: 488949 - DNA, 90 bp, Homo sapiens
ctggtggctctacccagaattcaattaaagtggctcaggaacggaaaacagttcttccttcaaagcatgcagtacctgaagtaatagaag

SEQ ID NO: 488950 - DNA, 50 bp, Homo sapiens
gtggctggtaacgtgtgctactgaagtcgagatgacctcgacaggaaact

SEQ ID NO: 488951 - DNA, 100 bp, Homo sapiens
ggaacgcatttggcaatatgtctattctaaggaccagctgcagactttctcagaggagcttggtaaaatgcggctgacaattccgtgtcgggcccttaca

SEQ ID NO: 488952 - DNA, 104 bp, Homo sapiens
ctccccacactctgccgcttccttctttgggccttcaccatcttccacaaagcccaaggagacccaggagctggagctggtggaggatgtgtggcgaggggagg

SEQ ID NO: 488953 - DNA, 90 bp, Homo sapiens
cccggagcaggccaagttcggggccaggacgtcgggaggacctgatgaggacggggacttggttgccttttccagtgacgaggaattgac

SEQ ID NO: 488954 - DNA, 97 bp, Homo sapiens
atcaaaacggcgatccaaaaattcagtggaagggcgttgaagggcaagattaagaaggaaagctccaagagggagctgctttccgacactgcccatc

SEQ ID NO: 488955 - DNA, 50 bp, Homo sapiens
cttcctcacccgcgcctgcgacctcggccgagacgcatccagagctttcg

SEQ ID NO: 488956 - DNA, 51 bp, Homo sapiens
gctgctgtttctcttcgccgacggatgctgaaaacgccattcaacagatgg

SEQ ID NO: 488957 - DNA, 98 bp, Homo sapiens
cctggagcacctggtggaagaacaagtggcagtattgcctaagtgtaatcttgaacatgggcggtgctgtgagtgctggtgaagacaatgatgagctg

SEQ ID NO: 488958 - DNA, 120 bp, Homo sapiens
gactggctgtgttattctgcatattgcagttcttgtcaatgacctgggagcggcaccgggggggcgtggccccgggcttccaggtggtgcacctcaacgctgtgaccgtggacaatcgcc

SEQ ID NO: 488959 - DNA, 48 bp, Homo sapiens
cgcgaatatcgtcatcgttagaagatgaattttgataagaggcaacat

SEQ ID NO: 488960 - DNA, 100 bp, Homo sapiens
gcggcctgctgcggcaccgcggcggcctttctcctgggaagacggaacaggagtacagctgtgtagtaaagatgccttctggtgaatttgcacgtatatg

SEQ ID NO: 488961 - DNA, 127 bp, Homo sapiens
ccttcggagaggacacttcaaactgcggacacacgcaaaagcgactcccagctccgtttgataatgtaaccggaagactcctggtgggccttcgatggtggaaccagatagatgaagatgggaagag

SEQ ID NO: 488962 - DNA, 71 bp, Homo sapiens
aggacaaggacagaatcaccagcactggctgaagaccattgtggccgccatgagcaacctggtgccccccg

SEQ ID NO: 488963 - DNA, 101 bp, Homo sapiens
gaggccggcagctggcgctggggatccctgctcttcgctctcttcctggctgcgtccctagttggccacggacagagcgaaggggagaggatggtagtgtc

SEQ ID NO: 488964 - DNA, 100 bp, Homo sapiens
gccaggctggtttcggatcctttgtattctgtcagatgagaacacttgtttaccttccaggactgacctgagcatgagaactgaagaatttggaagtgct

SEQ ID NO: 488965 - DNA, 75 bp, Homo sapiens
tgctgctaaaaacaagactggggctgctcccatcattgatgtggtgcgatcgaggagaattctgcctaagccaac

SEQ ID NO: 488966 - DNA, 87 bp, Homo sapiens
gaagatgatgctgccattaccttggcatgtaatgaatttactacacatgtgatgaaccttctccgagaacagagtagaacacgtccc

SEQ ID NO: 488967 - DNA, 83 bp, Homo sapiens
caaccatgcggacatcggcttctgcctggtgctctgcgtcctcatcgggcttatgttcgaggctactgcagcactggggtgtc

SEQ ID NO: 488968 - DNA, 87 bp, Homo sapiens
gaagattcgatggacatggacatgagccccctgaggccccagaactatcttttcggaggatacgaagcgttttcggcttcctgcccg

SEQ ID NO: 488969 - DNA, 100 bp, Homo sapiens
aggaagatggcggatctggaggagcagttgtctgatgaagagaaggtaaagctacttcttcttctaatccaagcagcccagctccagactggtacaaaga

SEQ ID NO: 488970 - DNA, 100 bp, Homo sapiens
gatcatcaaatccaactatcaaggcctcccagtacgttgtgtgaagagtatcattcgacagttatttctcaaactctgaggctgcggagttcacacattg

SEQ ID NO: 488971 - DNA, 50 bp, Homo sapiens
ctggggatgtggccaaggcttttggtaacctggatgaggacatcattgca

SEQ ID NO: 488972 - DNA, 75 bp, Homo sapiens
cagcagtggagccaccagcagcgggtgggcgacctcttccagaagctgccgcggcgagtcctttgcacatgttgg

SEQ ID NO: 488973 - DNA, 96 bp, Homo sapiens
ggtctttacctgcttcatcgtgaccaccggcctggtattgggatggatcattttacttctccagatgaatatgatgaccctactgtgctctatgaa

SEQ ID NO: 488974 - DNA, 87 bp, Homo sapiens
cagcaagttagtggattaaaatctcccaagaggaatgacaaacaaccagctcttcagattgacgtgagtgaattcagatataactca

SEQ ID NO: 488975 - DNA, 82 bp, Homo sapiens
ctggggccccggcttgctgagctcaccagggcaggggctacccatgtggagagatgcatgtttttgaatcagagccgacagg

SEQ ID NO: 488976 - DNA, 100 bp, Homo sapiens
aaggcctctctcctgatacagcaggcgctcaccatgttccctggagattttgcaagaacgaggctcaaggatgtgagggacacagtattgacagctgaag

SEQ ID NO: 488977 - DNA, 101 bp, Homo sapiens
ggactgctaagaagataccaccagcttcagtatcagacacagcacagcagccatctgaagagcaaagcaagtctcttgaaaaaccgaaacaaaaaaagaat

SEQ ID NO: 488978 - DNA, 97 bp, Homo sapiens
cctcttcggctgcggaccctgccattccggaggaggtcctctcagggtgcgccatcattgtccgaggtcagcctcgtggtgggcctcctcctgagcg

SEQ ID NO: 488979 - DNA, 98 bp, Homo sapiens
agattggaccagcagaatactgtactgactcctttattatgtcagtgaccatagcatttgctacccagttggaacagatggaatctcactctgtcacc

SEQ ID NO: 488980 - DNA, 100 bp, Homo sapiens
ctgtgagtgcgctgacttggagcctctcttcctatacctgtgcaagatgctttcattggatttggaggaaatgtgatcaggcaacaagtcaaggataacg

SEQ ID NO: 488981 - DNA, 100 bp, Homo sapiens
gggagttacttcagcgaagccggtatattgaagcaagtcaaagattacattaaacagtgtagcaaatgccaggagaaactagatcgatcccgtccaatat

SEQ ID NO: 488982 - DNA, 80 bp, Homo sapiens
gatagtttatgcagccaccaccagtttgcggcaagcaaatcaggcgcaatgcctttgccaatgacaccatcccttcagag

SEQ ID NO: 488983 - DNA, 75 bp, Homo sapiens
ggcacctcaaccagatgaggaagtacaactttgagtggatccggattggtgccaatgtctccaacttcacttttg

SEQ ID NO: 488984 - DNA, 75 bp, Homo sapiens
aaagcctgaggaaaaagcggccgcgtcccttcaccgatgttgtcaccaccaacctaaagcttggcaacccgacag

SEQ ID NO: 488985 - DNA, 82 bp, Homo sapiens
aggggccgcgggagcccgaaagcgagtatcaccttttgccatgatagcatttctttcattggacagttccttacaagggctc

SEQ ID NO: 488986 - DNA, 50 bp, Homo sapiens
ctcacctgtgcgggatggaacaaaagaaagggtgctcctcgtgttgtggg

SEQ ID NO: 488987 - DNA, 83 bp, Homo sapiens
tgtccatgacccagcaggattcccacgctccactcagggactcaaggtccaggtcaagacctcgtctccgttctcatagtcgt

SEQ ID NO: 488988 - DNA, 75 bp, Homo sapiens
tgtcactccacctcgaacagctaatccgccgaagaaaaggaatcccttggcaccatgtcctgtgtgcattataaa

SEQ ID NO: 488989 - DNA, 100 bp, Homo sapiens
cttccagcagagcgtgcaggagtacaggaggagtgcgcaggacggcccagccccagcaggctacgactggcaaagatgagggaggctgaagcggcccagg

SEQ ID NO: 488990 - DNA, 128 bp, Homo sapiens
gtttttaccatatgttggtatggtcaccataataatgaatgactatccaaaattcaagggtggaattgcgtttgttgccataaaaggagcatttaaagtttacttcaaacagcagcaatatttacgac

SEQ ID NO: 488991 - DNA, 50 bp, Homo sapiens
gtggtttatctaaaaaccaaagatgaagatctccttcaacgacaaaagcc

SEQ ID NO: 488992 - DNA, 74 bp, Homo sapiens
ctgcggcagaagccgagttcaacatcctcctggccaccgactcctacaaggactacaggaatatgtggaagctg

SEQ ID NO: 488993 - DNA, 100 bp, Homo sapiens
cggacctttgagcatacaccgagagagtgaggagccagacgacaagcacacactatggcgctgaaacggattaataagatacactctgtgcagttttaga

SEQ ID NO: 488994 - DNA, 100 bp, Homo sapiens
aggccggaggaacgggcccgtcaagctgcgcctgacagatgagcagcaccagcagtaagagggctccgaccacggcaacccagaggctgaagcaggacta

SEQ ID NO: 488995 - DNA, 100 bp, Homo sapiens
gtgatcaccctgatgtcaccgaatggccacagcttgtaaaagccaaatttgtatcctactgtggggcttcaaacaccaggagaagtggtcgatgccaatt

SEQ ID NO: 488996 - DNA, 83 bp, Homo sapiens
gaagctgtctctgatccgcaagcatgctcagaccttcattgctctgtgtgccaccgcaatggctgccatccggaagaaactgg

SEQ ID NO: 488997 - DNA, 100 bp, Homo sapiens
tgtaaaagcaaggaggagtggaatgaaatacggcaccagattggaaacacactgatccgttttaagcagggtctgaaaacccttggtgttttggagaaaa

SEQ ID NO: 488998 - DNA, 101 bp, Homo sapiens
tggagatcaagcgcagcgatggtttgtctacagattttgagcgttcgaagttgacccctgactaagtatactttgctgctccctcagcctttgaaaaaatg

SEQ ID NO: 488999 - DNA, 75 bp, Homo sapiens
agcagcaggagggcatggagatggagcccggactcctgggggatgcaggtgctgaaggtcgccatcctggctgag

SEQ ID NO: 489000 - DNA, 100 bp, Homo sapiens
ggcacctgcgcgaagctggccaaagcctgcccagacggctcacctgtgcgggatggaacaaaagggtcgaagctgctgaagtggtttttcctaatggaaa

SEQ ID NO: 489001 - DNA, 100 bp, Homo sapiens
tccaggagctgctgcgcacgaccggcgcctcggacaccttcgagggttgggttggcgtgcagtggtgtgatctcagctcattgcaacctctgcctcccgg

SEQ ID NO: 489002 - DNA, 98 bp, Homo sapiens
ccacatactatccgtttgttcaggaaccaccagtgacagaagcctggaaccaatgattctcagcactctaaatgtgatgtagataagtctgtgcaacc

SEQ ID NO: 489003 - DNA, 83 bp, Homo sapiens
ccgacaactccatcaagcctcaggagctgctgctccttgaggagaatgaccagctgatccgctgtattgtggagtatcagaac

SEQ ID NO: 489004 - DNA, 75 bp, Homo sapiens
gccatcacagacaccgcctacaggagtatgatgcaagggccgtgggcaagacctgccttctcatcagctacacca

SEQ ID NO: 489005 - DNA, 50 bp, Homo sapiens
accgcggatctggggccgtcctcagtgaacagagtatctgtcaggcaaga

SEQ ID NO: 489006 - DNA, 121 bp, Homo sapiens
gtgatgccagaggtcaacaaggttctggacaagatgaagtctttctgccagggtgtgaccgagtgttatgagtgtcatcctaagccgacccagagaacctttcctggctgtacaattcgta

SEQ ID NO: 489007 - DNA, 101 bp, Homo sapiens
aaacactccaacgattgagagcatttaaagatatggcccactgcgtgaccttggttcagctgtccatttcctgtgaccatctcattgacaaggacatcggc

SEQ ID NO: 489008 - DNA, 100 bp, Homo sapiens
ttaaagatcagtatttcatgcaaagacatcagctacttaagcgccacgagaaggtgctatgcttacatttgaaaagatttcattggacagcatatttaag

SEQ ID NO: 489009 - DNA, 73 bp, Homo sapiens
ttcaaccatgctcggtcatctgtggcagtatatcaagcttcatcactggtccagctgtaataccagggtactt

SEQ ID NO: 489010 - DNA, 100 bp, Homo sapiens
accgatacatgtaccctgagatgaaggtgtttggcaatcaactcattcctcccaatgcacaagtgaagaaggccactgtttttctcaatcctgcagcttg

SEQ ID NO: 489011 - DNA, 98 bp, Homo sapiens
cggcccacagtgggggtgtgcaaacccgagagaactgggatggatctgtagtccttgactcttgtgaagtgtcaacagaaaatgatcaaagcactcga

SEQ ID NO: 489012 - DNA, 90 bp, Homo sapiens
ctgcaaaggttgcattgatgaaattaaagatgcatgctgatggcgataagtcattaccacagataattgagaagcgccgacgagaccgga

SEQ ID NO: 489013 - DNA, 100 bp, Homo sapiens
cctggggtcggcgccgagtgggaggatggcggaaagaatcacattttggaagatgtgaacaaatgtgtcattgctctccaagagaaggatgtggatggcc

SEQ ID NO: 489014 - DNA, 90 bp, Homo sapiens
ctgccttctgctcagctgatgatggacaaggagacctgtcttctggttacctggatgatactaagcaggaaacagctaatgggcccacct

SEQ ID NO: 489015 - DNA, 98 bp, Homo sapiens
ctctcatgtccagctcctttctggagaatctagagggtggaggcgggccttggtgcgcggctgtccatctccggaccgcccacccgggcactggccca

SEQ ID NO: 489016 - DNA, 75 bp, Homo sapiens
cctgtaaaaatggcatgcctaccatctcccggctcttacagatgccagacgagttgtactgctgtcacaggaaat

SEQ ID NO: 489017 - DNA, 98 bp, Homo sapiens
tcagttggaagcagccgatccagcctgcggagcctgtggggcagtgggcagctgatgacacacttgggcagtgactttcccccaggggctggggtgct

SEQ ID NO: 489018 - DNA, 100 bp, Homo sapiens
gaaggatgaggcagaaaaggagcacagagagttcagagcaaaaactaacagggatcttgaaattaaagatcagatggcccactgcgtgaccttggttcag

SEQ ID NO: 489019 - DNA, 83 bp, Homo sapiens
gcagccgcggatctcaccgccgctcaggcgcacaggcgatgccaagcccagcttcttccaggactgcctgatggaggtgtttg

SEQ ID NO: 489020 - DNA, 100 bp, Homo sapiens
gctccaccccttccacgtcatccgcatcaacaagatgttgtcctgtgctggggctgacagctttaaggatttttatgaactggagccagagaagttccag

SEQ ID NO: 489021 - DNA, 75 bp, Homo sapiens
agtgcctcacccctttctacaaggagggcaagtttgcttccaagtgggcatccccaccatcagatggtgcggggc

SEQ ID NO: 489022 - DNA, 82 bp, Homo sapiens
ggggcgcttcgccccgggccccccagcatgaagaccccggcggacacagctgtggcggggccttcgtgggcccgcgatgcca

SEQ ID NO: 489023 - DNA, 98 bp, Homo sapiens
tcaggagtcatttctgttccgcacaggcctgctgaactgggtgctttatataggaaacatgagtgtgagccggaccatggaggacagctgtgagctgg

SEQ ID NO: 489024 - DNA, 101 bp, Homo sapiens
ttgaggcggagaggaaggcgtggtgtggcgtctccaggtgctggagaatctggtaaaagcaccattgtgaagcagatgaggatcctgcatgttaatgggtt

SEQ ID NO: 489025 - DNA, 99 bp, Homo sapiens
caagaagtaggcattgaccccttgtccagttactctaacaagtctggagggtgtaccagtgatggcaataagaaacaaaatgatatcagaaggactaga

SEQ ID NO: 489026 - DNA, 100 bp, Homo sapiens
ccagccaggcgtggaggaagaggcattgaggactttccttacctgtttttccagctcacccactgccagcagagggtgaggacgcttgagcggaagttag

SEQ ID NO: 489027 - DNA, 74 bp, Homo sapiens
gttcattgtttgtcaccacaaaaaggacagttttctggatatgccgcagaaggatccgtgccagaagcaagcct

SEQ ID NO: 489028 - DNA, 75 bp, Homo sapiens
agtcgggcaagatggcgcctcccaagaacgctccgagagatgccttggcctgaaaagcctcacctgaacctgtgg

SEQ ID NO: 489029 - DNA, 101 bp, Homo sapiens
ggtcagggtgattaagctgtcaggtgggaattcaaagaagctttttcactatttgacaaagatggtgatggaactataacaacaaaggaattgggaactgt

SEQ ID NO: 489030 - DNA, 123 bp, Homo sapiens
aaaagatccctggaatatgaagagacacagtatggtagccacacccccaggttttgcggctagttggctattcaagaaacctcgcccctctgaatgtcatactgtaatctttaaggaagaaag

SEQ ID NO: 489031 - DNA, 75 bp, Homo sapiens
ccgccgccccgaaactttcaccgcgagcggatgccacttcaaatgaacaacaagagcttttctgtcagaagttgc

SEQ ID NO: 489032 - DNA, 107 bp, Homo sapiens
ttgcaggccgggcagtgcggcaaccaaatcggcgccaagccgtgttgccgcccgctgtgctatgagcagtcagagcgccgtctccacaagagtttacaaatgaaaat

SEQ ID NO: 489033 - DNA, 74 bp, Homo sapiens
ccaaaagaccacgggctcctgtgctagtaccaggttgagcaatgtttaaagcgtttgaaaaacatgaatttgga

SEQ ID NO: 489034 - DNA, 97 bp, Homo sapiens
gcgaggggcgcgcggagatggcagcgtccagcaactccagcctgtccggctcgtcggtgtcctccggtgatctgcaactctttcaccatctgtaatg

SEQ ID NO: 489035 - DNA, 99 bp, Homo sapiens
tgctaagactacctttttcagaaatgcgcagagcaaacatctttcaaagatgcttcaggactgccccaaggcccgcagggaggtggagctgcactggcg

SEQ ID NO: 489036 - DNA, 80 bp, Homo sapiens
gttcagaggaagcagaaagtgaaggagggacccggtcagcccaaggagcaggggtccagcagctctgcggaggcatctgg

SEQ ID NO: 489037 - DNA, 82 bp, Homo sapiens
tcaacctagaccaatggacagcagaacagatacaggatgagcaattcttaggttttggctcagatgaagaagtcagagtgcg

SEQ ID NO: 489038 - DNA, 75 bp, Homo sapiens
ttgcaataaaatagaacttccaactactggttctgacttattctggagaggagtaggaagtaatatgagcaggaa

SEQ ID NO: 489039 - DNA, 75 bp, Homo sapiens
gccctgagacggtgtcccgccgaaaggaggttcgtaaagtgaatgaaagcatcaagtataatcacccattgagaa

SEQ ID NO: 489040 - DNA, 100 bp, Homo sapiens
gccgggatgagcgggggctggacttctagaaaggggtctgcgggcgcaggagctggggtccgcggtctggggccgcagggagagcaacaagccccggccc

SEQ ID NO: 489041 - DNA, 100 bp, Homo sapiens
gagacgccgccgctgcctcccgcgaaaatggcaaatgcacgacagcggcctcctgaacatcaccaaggtatccttctcagaccgaggtaaatacacgtgt

SEQ ID NO: 489042 - DNA, 107 bp, Homo sapiens
taaaagaacctggtgaaagtcccatattctgttcaactagagagaaattgagaagaagcatccactgaagtatcacatggcttcttagaatttattacacattgtta

SEQ ID NO: 489043 - DNA, 101 bp, Homo sapiens
cgggacgtgcggcccagcgagttggtcggtcccggggtcacccgctacgggaagcaggcctcgccacagaaacttgtggtggagaatgttgatgtgttaac

SEQ ID NO: 489044 - DNA, 90 bp, Homo sapiens
tggccaagaatcagaggaagtggatgatgattattctccaccgtctaagagaccaaaggccaatgagctaccgcagccaccagtcccgga

SEQ ID NO: 489045 - DNA, 100 bp, Homo sapiens
gggaccagtgccagcactgccagggcaggttcaagcaggtgacaaacattaccaccccagctgtgcacgatgcagcagatgcaaccagatgttcacagaa

SEQ ID NO: 489046 - DNA, 75 bp, Homo sapiens
ttaaagtaacagatgatttagtttgccttcaacaacattctcagcaatctgggccacgtgcttctgggcttcctc

SEQ ID NO: 489047 - DNA, 74 bp, Homo sapiens
caatgtttagccaacccaaattaccttaattgttgcttatcaagtgtcccacaaatgaaaaaaatttctacatc

SEQ ID NO: 489048 - DNA, 75 bp, Homo sapiens
gtctcaccatgcaaactcccccacagcaggtactccaaagattcaggtttactcacgtcatccagcagagaatgg

SEQ ID NO: 489049 - DNA, 83 bp, Homo sapiens
actaaaaattatccctactacaggactgcggacaagggctggcaggtttggtgcacctcgatttggaggaagtagggcagggc

SEQ ID NO: 489050 - DNA, 100 bp, Homo sapiens
ggcctgacagtggtatacaaaagcagtatagatctctatttctatgtgattggcagctcctatgaaaatgaggaattgaatgatctggcacgggaccctc

SEQ ID NO: 489051 - DNA, 100 bp, Homo sapiens
gggactggaaccatctcagaagccatgcccctcaggctggaacttgccctgtctcctcgcagatgagcttgacccatcttatcaccgtcttctctggcac

SEQ ID NO: 489052 - DNA, 101 bp, Homo sapiens
cagcattctttctttccttaggaaaaacctactttggggataaaggattatttggtcttctggatttggaggcaatcagcggacagcatggaagatgtgtg

SEQ ID NO: 489053 - DNA, 100 bp, Homo sapiens
cagaaagtggacattgaccaatgctcaagtgatggctggttttcaggaactcataaatgccacctcaacaattcagaggagccagtctacttgatgactt

SEQ ID NO: 489054 - DNA, 100 bp, Homo sapiens
ccctcactcttcatggtcactggtcttgggcgtctttggtactggcttttttaggggtctgcctggggattacccttgctgtggatagaagcaactttaa

SEQ ID NO: 489055 - DNA, 50 bp, Homo sapiens
gttgagaagtttattcagaaaggtcggaatctggcagatcttcgccgtag

SEQ ID NO: 489056 - DNA, 101 bp, Homo sapiens
ccccttggatctgctgcccagtgaggagctattgacagacacaagtaactcctcttcatccactggggaggaaggcagctgagcctgaggtggaggtggag

SEQ ID NO: 489057 - DNA, 98 bp, Homo sapiens
gacaacaccgagctgcccttcttcaccctggatcagcaaacagcagctgcagacagtcaaggaccggtttcaggctttcctcaatggggaaacccaga

SEQ ID NO: 489058 - DNA, 100 bp, Homo sapiens
ctccgctgcgcattcctacaaccccagcaccaacgagtggctccaggtggcctccatgaaccagaagagatcaacgtaagagtaactacaatggatgctg

SEQ ID NO: 489059 - DNA, 83 bp, Homo sapiens
gaagacgagcgcatgtcagtgggtagtcgtggaagcctgaggtttgctggcctagacctgaactcttcagataatcagagtgg

SEQ ID NO: 489060 - DNA, 75 bp, Homo sapiens
atggtctttagattgatacaccaatcctctgaaattgcatgcaaaaatgttagcatggcctcattgaaagaacta

SEQ ID NO: 489061 - DNA, 98 bp, Homo sapiens
ccgtattgctatggttactggaaaaagtatgcagaccttgaaaagcggcacgacaacattaaaccatcagatgagctgccactggtgacatgccaact

SEQ ID NO: 489062 - DNA, 75 bp, Homo sapiens
ttgttggaattggtgacaaaatcagaggcatactttatagatgtgttcagagcaacattgttttgttgacacaag

SEQ ID NO: 489063 - DNA, 75 bp, Homo sapiens
cccacaaggccctctgcatcctgcctggagtgggcaccaaggagtacttcttgcaagcagagctgacaagcaacg

SEQ ID NO: 489064 - DNA, 75 bp, Homo sapiens
agagagttcgcctgagccagatcccaggcagaggttggcgatttgaaggagctgcagacactagacatttctacc

SEQ ID NO: 489065 - DNA, 83 bp, Homo sapiens
gcaagaactgaggagcaccaggagacgcaactcatcggcttaaagcttttcaagccaggccaagaagctgtgaagtaccaggg

SEQ ID NO: 489066 - DNA, 51 bp, Homo sapiens
atccagcctgcggagcctgtggggcagccctgcagagcccagggagatgga

SEQ ID NO: 489067 - DNA, 82 bp, Homo sapiens
ctctgcttgtgttcgtggccacgctgctgatcgtcctgctgctgatggtgtgcgcttcttggacacttaatgattgttggca

SEQ ID NO: 489068 - DNA, 74 bp, Homo sapiens
gtggccacaatgaccagaagatccggttctgggacagcaggtggaacggcacatgtgtgatggggacattgtta

SEQ ID NO: 489069 - DNA, 103 bp, Homo sapiens
gtctttggttataaattatgatctacctaccaatcgtgaaaactatattcacaggtgccaagactggctagaggccctgcactggtacaacactgccctggag

SEQ ID NO: 489070 - DNA, 75 bp, Homo sapiens
gccctggcggtggacgagcaggaagctgcggctgagtcgtggataaagcaacatttatggttggcagctatggac

SEQ ID NO: 489071 - DNA, 75 bp, Homo sapiens
ctgcgggaaatcgggctgaagcgactgagtccgcgatggaggtgtctttcctgaagactatcttcccgtctcaaa

SEQ ID NO: 489072 - DNA, 103 bp, Homo sapiens
acagatccgtagggaggacaccgtgacttcccggacgctgggaaatggtcaaaatgcagatcttcgtgaaaacccttaccggcaagaccatcacccttgaggt

SEQ ID NO: 489073 - DNA, 83 bp, Homo sapiens
gagatgcctggcagccccgctctctgcagaattacatgaatgacagtcttcgaaccaatgtgtttgttcgatttcaaccagag

SEQ ID NO: 489074 - DNA, 100 bp, Homo sapiens
aaatgaagagagaaatgtcatggaagagggaaaagactttcagccctcaagatctacagctcaacaggaacttgctactaccagcaccatgccctaccaa

SEQ ID NO: 489075 - DNA, 82 bp, Homo sapiens
agaaccttagcaaagaggagctgatagcggagctgcaggacccgtgcatctcttccgactctcgggcaagtgcttcagcctg

SEQ ID NO: 489076 - DNA, 98 bp, Homo sapiens
gtgtagacagtctttcacgggacatgtctcagatatcaatgctgtcagtgtagtagattccatggatgcattagataaagttgtccaggaaagagaag

SEQ ID NO: 489077 - DNA, 100 bp, Homo sapiens
gttctgcaagcctacatcagcaatgacctcttggactgttatagccacaaccagatacatgatcacggatatcatcgggaaggatgatggcttgggcgtg

SEQ ID NO: 489078 - DNA, 100 bp, Homo sapiens
ttggaatgctcttttaccgatgctttaacatacagccactaggcccgccatgttcatagaggataaagcagtagacaccctggcttacctcagtgacggt

SEQ ID NO: 489079 - DNA, 100 bp, Homo sapiens
cccacttgttcgcggcctataggtgaatgaaaactttgccattgatttgatagcagagcagcccgtgagcgaggtggagactcgggtgatagcgtgcgat

SEQ ID NO: 489080 - DNA, 75 bp, Homo sapiens
acgtagtctggaagacttgcttcgagaaaggaaacctgtgagtgtttaactgctgaagagatcttttcccttcat

SEQ ID NO: 489081 - DNA, 100 bp, Homo sapiens
gctattcaatatgaacttcagtcattgggggaatccaatgcacaaatggggacatcacccagaagggctatgaaaagaaaaggtccaaactcctatctcc

SEQ ID NO: 489082 - DNA, 75 bp, Homo sapiens
tgcggccccgcttcctggcggccgggtcccagttttatcttcaagacactaaaagtagtaatggtacttttataa

SEQ ID NO: 489083 - DNA, 75 bp, Homo sapiens
agccccccgcccggccagccgccccgtccgggaggtctcctctgagcctccggcctccataagacccaaaacaga

SEQ ID NO: 489084 - DNA, 50 bp, Homo sapiens
aagacttggaagctcatggacaaagtgctcccagatggacgtatcatcaa

SEQ ID NO: 489085 - DNA, 75 bp, Homo sapiens
cggcagaacattgcttatgaatatctgtgccacttagaggaagccaaaagactgaatctggatatggatctgaat

SEQ ID NO: 489086 - DNA, 82 bp, Homo sapiens
tggatcacggatgtaggaagtgattcagaccaggatgtagcactcaaacttgcccaggagcgagctgaaatagttgctaaat

SEQ ID NO: 489087 - DNA, 82 bp, Homo sapiens
gaggacatggacctgtacagcatcaactacctgcactttggggagcctaagtcctgggtttccaggcctgaggtgcccgccc

SEQ ID NO: 489088 - DNA, 100 bp, Homo sapiens
cgcgtcatgcggctcctcggctggtggcaagtattgctgtgggtgctgggacttcccgtccgcggcgtggagggtcagtactcctgcatttgtaccaacg

SEQ ID NO: 489089 - DNA, 101 bp, Homo sapiens
aggaacgaatctctcaggctgcatcaggatgaatgatgacccaagtatggaagggtctaaattatggataataatggaatacctgggcggtggttcagcac

SEQ ID NO: 489090 - DNA, 74 bp, Homo sapiens
ggaactgtcggaacagaaccaaaggctattggatcagctcagcagggttggtgttcgaggaagagacattgttg

SEQ ID NO: 489091 - DNA, 100 bp, Homo sapiens
agcgcaccgcggctagcctacggctacggcccgggcagcctgcgcgagctgcgggcgcgcgagttcagccgcctggcagaaatgcactcggtgatggaaa

SEQ ID NO: 489092 - DNA, 99 bp, Homo sapiens
cgccatgtcgggttattcgagtgaccgagaccgcggccgggaccgaggggactggtgattgcagctggaagtgcccatgaccgagctggcgtcctccgg

SEQ ID NO: 489093 - DNA, 90 bp, Homo sapiens
aaagaatggcccttgtggataagcacaaagtcaagagacagcgattggacagaatttgtgaagcaatgcagagtccctggacaggctcct

SEQ ID NO: 489094 - DNA, 88 bp, Homo sapiens
acaacaacccccaggtggactggaaggactggaagatcggcttccagctgcggggatctgatgagcttctttcttctggcatcattaa

SEQ ID NO: 489095 - DNA, 75 bp, Homo sapiens
ctgagattgacactcagcactttgcgccaccttactctaaccaggttgcttagccagacaatgaaggatcatcta

SEQ ID NO: 489096 - DNA, 98 bp, Homo sapiens
aacttccacctccctggctcaagtgatctcccaccttagcctcccaatgaggactcagaagacaaagatgtgaagaccaagaaggatgattctcactc

SEQ ID NO: 489097 - DNA, 75 bp, Homo sapiens
tgcgctcgcgcccggatccctcaggtgtgagatgcacaatgcgaaacctaggccccagcttttacaccatgatgc

SEQ ID NO: 489098 - DNA, 90 bp, Homo sapiens
gcattttgttaagaagcacctcatgcaagcgagggacctgggactgctcacagccagatttccatggagaatgattatctgggacctcga

SEQ ID NO: 489099 - DNA, 100 bp, Homo sapiens
ttcaagctggatttcctcccggacatgatggtcgagggccgcctgctcgttcctgacagaatgtaagaatgattgatgttggctgatattggagtgctca

SEQ ID NO: 489100 - DNA, 97 bp, Homo sapiens
tcaacgtcttgaaaggagtgcttatagaatgatgatggtggtgctaccccagtacaggatgaacgggattcagggtcagacggtgaggatgatgtaa

SEQ ID NO: 489101 - DNA, 82 bp, Homo sapiens
cgccatgaaggcctcgggcacggggttgtgtccactgtggtccccgactctgcccacaagctgttcatcgggggcttaccca

SEQ ID NO: 489102 - DNA, 98 bp, Homo sapiens
tgaaaatcaacgacaacttgagcacaggaccaagaatcgccttcagccctgtctggtgcatccttggcagaaagtgaggaggaaaacacccccattgt

SEQ ID NO: 489103 - DNA, 75 bp, Homo sapiens
cacggagccttctcctgcagggcgagagcgttcctccagttgtggccagaagcggactcctagaagaggggagca

SEQ ID NO: 489104 - DNA, 100 bp, Homo sapiens
cgaggaggaagacgaatcgttaaacatctgaaagggtcaggatcaagtcttccataccagggaccaggccaaaaccagactgccactgcccctacttggg

SEQ ID NO: 489105 - DNA, 134 bp, Homo sapiens
ccgagatgtctcgctccgtggccttagctgtgctcgcgctactctctctttctggcctggaggctatccagcgagtgtggccatctggggccgtgtggtatttgccactcaggagacatgtccctatgacatag

SEQ ID NO: 489106 - DNA, 73 bp, Homo sapiens
gagaactacagaaacctggtctccctagggtgtcaaattgagaaccaggtagatccccaccacctacagtaaa

SEQ ID NO: 489107 - DNA, 50 bp, Homo sapiens
aaaaatgcagtcccctcatgccaagggcagcatctcatcacggcagttgc

SEQ ID NO: 489108 - DNA, 83 bp, Homo sapiens
ctccgccggagcatccgggccgggcggcctccggggctgccagagcagcagggattggccatttgatgatggagctccacccc

SEQ ID NO: 489109 - DNA, 90 bp, Homo sapiens
aattagcatcatcattattctggctggagcaattgcactcatcattggctttggtatttcaggaaacaaaccatcaggcctcccagaaag

SEQ ID NO: 489110 - DNA, 100 bp, Homo sapiens
cctggcacttatatcctccctgggtgcactcagctaaacacaaaagtggccaaactcaccaacgagctcaaagaggagcaggaaatgaacaagtgtttgc

SEQ ID NO: 489111 - DNA, 98 bp, Homo sapiens
caggatttttggcctaccctccaaagaaaaggtagttacttttggtgacgctgtccagttcccacaatgtatcattccttatctgaaactagacatcc

SEQ ID NO: 489112 - DNA, 90 bp, Homo sapiens
tggcgcacgcaggggggcagcgggcggcagcaccatgtcctcatggagatccagctgagcaaggcatccgtgtcattctggaccttactc

SEQ ID NO: 489113 - DNA, 98 bp, Homo sapiens
gcaaacagccctcagtttctggagctgttccgaggcagaagaagagttcaacatagagaaaggtcggcttgtgcaaacccaaagactaaagattatgg

SEQ ID NO: 489114 - DNA, 100 bp, Homo sapiens
cggtgccaaatggaccaaggtgcacgagctcaaggagcacaacgggcaggtgacagatctttgcagattatcctgtggaaggaaaatgcctaaagtcaaa

SEQ ID NO: 489115 - DNA, 88 bp, Homo sapiens
cgccacctacggcccgagacacaccaggccggcaggctgagaaaagcgagaccgcgtgcgaggaccgattcttggtgccaccattgag

SEQ ID NO: 489116 - DNA, 100 bp, Homo sapiens
cttggttcaatgggtagcctcaccatgaaatcacagcttcagatcactggagtggaagctggacacactatgtgacttgtatgaaaccctgaccatcacc

SEQ ID NO: 489117 - DNA, 90 bp, Homo sapiens
aacaagcagaccatggaggagctgaaggacctgctgaagggagtgcatccgccccaacccttttccccctcgtctcctgtgagaattccc

SEQ ID NO: 489118 - DNA, 75 bp, Homo sapiens
ccagcatttttacggacccaatcatgagcactgctttaataggcagtctctggtcccagcccaccccatggcccc

SEQ ID NO: 489119 - DNA, 100 bp, Homo sapiens
cttttgaaagttgtgggtcagctgaccaggtagaggaaatgaaggagtcaaagcttccaggtgataaaggacttgtgttgatgtctcgggccaagcatca

SEQ ID NO: 489120 - DNA, 100 bp, Homo sapiens
atccttaccaaggaatctgcttttcaagtatgccaccaacagtgaagagggagtaactattcccagtcagaggcgctatgtgtattattatagctacctg

SEQ ID NO: 489121 - DNA, 99 bp, Homo sapiens
cgggcaggtggcggcgcggcgcgggctggcggtggctccacggtcagccatgtcatctgagcctcccccaccaccacagccccccacccatcaagcttc

SEQ ID NO: 489122 - DNA, 100 bp, Homo sapiens
ctcagggccagtccaacactgataagattgaatgccaagcagaaaattacctaaatgcactctttcgaaagaaagatggatgcggcagacaggagctgca

SEQ ID NO: 489123 - DNA, 100 bp, Homo sapiens
gttttattagggcaatttgtctcaataaaagcccaggaagaagacgaggatgcaacagcttgcacaactacagaaagaaaaatcagagattctgaaaaat

SEQ ID NO: 489124 - DNA, 104 bp, Homo sapiens
atatctgtcttcggtggactccttcggcagtccacccaccgccgccgcctcccaggtcgcgtggggcaggcagtggcgctgcgggccaaggccttcggcttcaa

SEQ ID NO: 489125 - DNA, 83 bp, Homo sapiens
gcgggtttttgggtgcgacttgcaggagcacctgcagcactcaggccaggagggtgccagatgtgacatccagatgacccagt

SEQ ID NO: 489126 - DNA, 82 bp, Homo sapiens
cacaatcccattattcagagcgcgtatggagtggaaacgcttgtagggtttcaccagtgagaaagatcagtctaaagaaaag

SEQ ID NO: 489127 - DNA, 82 bp, Homo sapiens
ccagaccagaagcccttctgaattaaggatttatggttggtagagagtatgaagctgaaggaattgccaaggatggtgccaa

SEQ ID NO: 489128 - DNA, 82 bp, Homo sapiens
ctggagcccccatgatccctaagaagacagcttgaacctagaaatgctgagagatatcatccgtgaatacactgatgtttat

SEQ ID NO: 489129 - DNA, 83 bp, Homo sapiens
gtggggcccaacgaggcgctggtggtttcagccctgggcgctgcctatggcacagccaagagcggtaccggcattgcggccat

SEQ ID NO: 489130 - DNA, 74 bp, Homo sapiens
aatcctaccatgtcagccttcccagtagctggaactacagtggatatcaaagtattgcagagtgccttagcagc

SEQ ID NO: 489131 - DNA, 100 bp, Homo sapiens
gcagatcggtgcaagaaaatccatgctggcgatgaagtgattcaagttaatcatcagactgtgaattctcccagtccttggctacatcagcccacccctg

SEQ ID NO: 489132 - DNA, 82 bp, Homo sapiens
ttggtcttgctgtaagagaagaacaactgatttttctgatttcttaagcattgtattgtatcacggactgattcaccgagcc

SEQ ID NO: 489133 - DNA, 90 bp, Homo sapiens
caacgaccgcaaccgcatcgtgctgcctttcagtttcgcctggccgccggaagaattaacctcgagtctgcacgcttttaagaacaaggc

SEQ ID NO: 489134 - DNA, 83 bp, Homo sapiens
gaaggagttcacccctgaatacaaagattgtcctaaagcagttggatgggaaaagaaccagaaaggaggcatgggaccaagga

SEQ ID NO: 489135 - DNA, 100 bp, Homo sapiens
gtggcgctcctgtgtccgagagagctctggcttcaccgagtgccggggctacttcaccctgctggggctgccaggcataattcttgggtcatcatttcta

SEQ ID NO: 489136 - DNA, 83 bp, Homo sapiens
gccctgcttgtaccttcattaacggggaagataaccgaagggtggtttgagaaacccaccaggccaactgggaattagaattg

SEQ ID NO: 489137 - DNA, 98 bp, Homo sapiens
ctctttaccttagatggagatatcaaattggagagaaaaggaacagttccgtaagctctttattggtggcttaagctttgaaaccacagaagaaagtt

SEQ ID NO: 489138 - DNA, 51 bp, Homo sapiens
ctcagaggtggtggattcgaatccctacagaggcagaggaggtggacacgg

SEQ ID NO: 489139 - DNA, 75 bp, Homo sapiens
cgcgctactctctctttctggcctggaggctatccagcgctcgcttctcatatgtgcggatgaaatatcttttct

SEQ ID NO: 489140 - DNA, 83 bp, Homo sapiens
aagaaacccagcttgatatgttggtagcaatgaagtgatgaggatactgatctctagaagcctgcttcaggagtagaacccac

SEQ ID NO: 489141 - DNA, 100 bp, Homo sapiens
gtgacctctgagaaagtgagccagaaacatgctgagcctttgacaggctactgcagcactggggtgtcagttgttggtccgacccagaacgcttcagttc

SEQ ID NO: 489142 - DNA, 74 bp, Homo sapiens
tggaaactgccattaacctccagctttttaagcaggtgatgatacagtgttttggtgtcccaaagaaataaaat

SEQ ID NO: 489143 - DNA, 97 bp, Homo sapiens
tgcatgctgcttttgatgtctgacaacgtggatcgttgttttgaaacgaaagaccacagcaagattctttcattcgtctcctcctagcctgggggac

SEQ ID NO: 489144 - DNA, 116 bp, Homo sapiens
ttcagtttgcatctctccctcctttaaacagcttctccgggtctcagcatggtgcctgtcctgagacccatggacctgatggtggaggccaccccacgaagagtatttgccaacgc

SEQ ID NO: 489145 - DNA, 83 bp, Homo sapiens
cggcaagagcggcggtagcgcaggggagattacttttctggaagaactcccccactggaaaggattctgaaagaaatgaagtc

SEQ ID NO: 489146 - DNA, 82 bp, Homo sapiens
tccaccccttccacgtcatccgcatcaacaagatgttgtcctgtgctggggctgacaggccatccacggcttccgagagaca

SEQ ID NO: 489147 - DNA, 100 bp, Homo sapiens
gtgctgctgtgtaaggagaagcccacaaccgccctcctggacaaggtggccgacaacctggccatccagcttgctgatccaccagaagatatgaagcagg

SEQ ID NO: 489148 - DNA, 98 bp, Homo sapiens
actctctccccagaaatccaacttctcaagggaggagtgagatgtggatgttgcttttgcacctacgggggcatctgagtccagctccccccaagatg

SEQ ID NO: 489149 - DNA, 100 bp, Homo sapiens
cggccgaggcggtgctgcaagagaaggcactcaagtttatggatcagagtgacagttgatggcgaatttctgcattacattttcccccttcagttcctgg

SEQ ID NO: 489150 - DNA, 90 bp, Homo sapiens
gccttccaagctctactgtgacttcagagacactgccaagcagccttagccctagtgtagagcaattctgtggtgttcttggtcacacat

SEQ ID NO: 489151 - DNA, 76 bp, Homo sapiens
gacccgggcgtcaccggagccagccagcggctgtcggagatgtatgcagtgtgacgccaagtttgactttctcacc

SEQ ID NO: 489152 - DNA, 83 bp, Homo sapiens
aaaccaacaggcagcacaggagtttggtgccctggttgtcagatgttggaaagcagtaggacggaacatactcttcgtggttg

SEQ ID NO: 489153 - DNA, 75 bp, Homo sapiens
ccaaaagcccagcagctgtccctgcagactctcaggactgcccagcgtccagaggaccagaggttaatttattct

SEQ ID NO: 489154 - DNA, 96 bp, Homo sapiens
caagtgtgtgcatctggctgttagaagaattcatgctcatccgggtcaaaatgcagatcttcgtgaaaacccttaccggcaagaccatcacccttg

SEQ ID NO: 489155 - DNA, 100 bp, Homo sapiens
accacccgacagaccagaaactcatcccagagttcattaagaaggatgaaaacaccgttcttcatctttaacctggcagaaactgctcacatgccttcaa

SEQ ID NO: 489156 - DNA, 50 bp, Homo sapiens
cccgaggcagaggaaccggctcccaggtccttgtacaagccatcaaggag

SEQ ID NO: 489157 - DNA, 83 bp, Homo sapiens
tccataaaaacaagtgtgtgcatctggctgttagaagaattcatgctcatccgggtgctccatctcgaaaagcgagaaaggcc

SEQ ID NO: 489158 - DNA, 98 bp, Homo sapiens
caaaagttcatctccttctgcatccttaactgagaatgagacaatgcagatcttcgtgaagactctgactggtaagaccatcaccctcgaggttgagc

SEQ ID NO: 489159 - DNA, 97 bp, Homo sapiens
gtggccttagctgtgctcgcgctactctctctttctggcctggaggctatccagcgttttttattggcacctcagtctcaacattttcttttcggat

SEQ ID NO: 489160 - DNA, 82 bp, Homo sapiens
tgcgtcctgcactgaaaggaaatgacggattttgtggcgtcatcacctacattggctccagtggctcctccccaagccgcac

SEQ ID NO: 489161 - DNA, 100 bp, Homo sapiens
cggagagcggctgatcgcagtccggaggtgaggcggaactctgagatcatgacaagatgtttaagatgagtgaaaagatattactcctgtgtgttggaga

SEQ ID NO: 489162 - DNA, 96 bp, Homo sapiens
ctgctactccgtgggcagcgtcggggatgtccccttcacgcaaaaatattttgattctggggattacaacatggctaaagcaaaaatgaagaacaa

SEQ ID NO: 489163 - DNA, 90 bp, Homo sapiens
tgacagacatccctgaatcttggtgtttggacataggaggttcgagaacttgtcttggacaattgcaaatcaaatgatggaaaaattgag

SEQ ID NO: 489164 - DNA, 82 bp, Homo sapiens
cacctgagattttagtctgtccgcggttccactttataactcctgcactgcggtaggagatcatcacctccatcctgctgag

SEQ ID NO: 489165 - DNA, 83 bp, Homo sapiens
ccaggggaccaagctggagatcaaacgccagaacacaaagcgtgaatccggaagaaaagttcaatctggaaacatcaatgctg

SEQ ID NO: 489166 - DNA, 100 bp, Homo sapiens
atagtcattcgtaatcagcaggccaaagactcagagccatggcaatgacaggctcaacaccttgctcatccatgagtaaccacacaaaggaaagggtgac

SEQ ID NO: 489167 - DNA, 100 bp, Homo sapiens
cccggctccgtgaccagccggctgggctcggtattccccttcctgctagtcctggtggatctgcagtacgaagggcaaagcccaacaccttcccccactg

SEQ ID NO: 489168 - DNA, 90 bp, Homo sapiens
aacaatccagataaccacgcacattacactgaagcagatgacgatgactttgagtatgccaagtacatggaaaaccatagcattgaagga

SEQ ID NO: 489169 - DNA, 83 bp, Homo sapiens
gctgaaggatgaagaccggattttcaccaacctgtacggccgccatgactggaggtctgaaggggcgtctcgattacctgagc

SEQ ID NO: 489170 - DNA, 96 bp, Homo sapiens
cgcagggtcgcgatgctgcccggtttggcactgctcctgctggccgcctggacggctcgggcgctggagaatgaaaaaggcaggcattgacctccc

SEQ ID NO: 489171 - DNA, 98 bp, Homo sapiens
gtgcagccggtgacccggcgagaggcggcgccgctcccaagatgtcgcagacggccatgtccgaaacctacgcatgtgcagtctttgccaacaaaaaa

SEQ ID NO: 489172 - DNA, 100 bp, Homo sapiens
aactgactcccaaggggccgggccagattttccaagatagcctccaacacccagagtcgccggactttcatcaagtcagtaccgccatttctgcgcaccc

SEQ ID NO: 489173 - DNA, 100 bp, Homo sapiens
tgagcaagagaatgggctgggcagcctgagtcccagtgatagactggtgaactagagaatgctgagtctggaggagacggaggcaggagaggagggaagc

SEQ ID NO: 489174 - DNA, 82 bp, Homo sapiens
ttggatatttgcttggaaaaacgtgtgggtacgaccttggattttttatcaagcagaaatgcatcgaacaacgagaatcaag

SEQ ID NO: 489175 - DNA, 99 bp, Homo sapiens
atggcgtcccgcgtagacgcagtggcctccaaggtgcagacagctgtgactatgaagggggttccagcaacagatagaaatgctttaagttcactctgg

SEQ ID NO: 489176 - DNA, 75 bp, Homo sapiens
gctggctgcaaagaagacccacacctaatgaagaagcagtacgacgtctcatctgggaaaagaatctaaagtttg

SEQ ID NO: 489177 - DNA, 83 bp, Homo sapiens
gaaatagcaagaactgaggagcaccaggagacgcaactcatcgggtatcatgatattagctggtttgacatcaagtcatttgt

SEQ ID NO: 489178 - DNA, 74 bp, Homo sapiens
gaaacacaatttcttgataagatactaccagatgtaaatcttgccgctgtgattggaaccaggctgcatgctgc

SEQ ID NO: 489179 - DNA, 87 bp, Homo sapiens
ctcaacatctctcagagacgaaagtgaagctgtggtctaccaatctagacaactcagtggcaagcattgaggcaaaggctaatgtgt

SEQ ID NO: 489180 - DNA, 145 bp, Homo sapiens
gggcagcacatttcctgcatggctgcaatagcaagaaagcctattttctgtatatgtattccagatatctgtaccataacagcttgggggaaagaccatgaaaaagatgcttttgaacatattgtaacacagttttcatcagtgc

SEQ ID NO: 489181 - DNA, 82 bp, Homo sapiens
gtgggagtctccgcgtcccgctcgctgggagagaggccatcatgcacggacgaggcagaggagtggccggtcccatgggccg

SEQ ID NO: 489182 - DNA, 83 bp, Homo sapiens
aagaccgcgcgcagggcctgcagcgggagctggacggcgagcgcgagcggcgcgagaaagcacgctacaccccaactgccaag

SEQ ID NO: 489183 - DNA, 51 bp, Homo sapiens
actaatatcagggcttattttggtctcctaaaaacccagaacagaagatca

SEQ ID NO: 489184 - DNA, 100 bp, Homo sapiens
ctgagcagcaggagagagccttcacgctggggctagcaggacttctcggcgagggagtttttaactttggagaactcagcaacagcgagctcgccatcct

SEQ ID NO: 489185 - DNA, 90 bp, Homo sapiens
ctgaaagctagaggcattgaggagcctgaagattctcaggaacttagtgatttggcccgtgaccctccagcacaatgttctgcaggtcca

SEQ ID NO: 489186 - DNA, 100 bp, Homo sapiens
tcaaaggctgtcgcaaggaggaagctcatcctgtttgggctcagtaatcagctggctgtgacattccgggaagagaacaccatcgccttccgacacctct

SEQ ID NO: 489187 - DNA, 100 bp, Homo sapiens
cccaagagccgccgggcccaccgttcaacttctgctgactctgcttcctcctccgatacttcccgcagtcggcgcttcctcccatcaacacagtcggcgg

SEQ ID NO: 489188 - DNA, 96 bp, Homo sapiens
agagggtgtgtaataaaatacaggacaactacacctttgcccaacctgggattcaaatgaaagtgaaaatgttagaagaactcgtgagccggattg

SEQ ID NO: 489189 - DNA, 75 bp, Homo sapiens
cccgtccgtccgccgccaccacccactccggacacaggacacaatgtttgcacgaggactgaagaggaaatgtgt

SEQ ID NO: 489190 - DNA, 89 bp, Homo sapiens
ggttcagtcaggtggcaaaaacattgaacttgctgtcatgaggcgagatcaatccctcaagagttacactgttagaccttatgatagcc

SEQ ID NO: 489191 - DNA, 75 bp, Homo sapiens
atgacattgggggcctgtggaaattttcagcatgcatatcattctgtttcaactccccctgtttaccctcctaaa

SEQ ID NO: 489192 - DNA, 75 bp, Homo sapiens
gccgatgggaaacccggagaccaaatccttgatttgaacatggaattcaatccttcagatcatcctcgggccagc

SEQ ID NO: 489193 - DNA, 75 bp, Homo sapiens
ggagtgggagacgtggagtgcaggagttgaggagtgctgaaacaattggtcgtaccatcatatctccagctattt

SEQ ID NO: 489194 - DNA, 75 bp, Homo sapiens
attctgaaaattggatatctaaatgatagacctacccgttccatcccgggctatcccagttccccactgccaggg

SEQ ID NO: 489195 - DNA, 75 bp, Homo sapiens
ccagcccccgcccgcagcctggacgacatcgacctgtccgccctgcgggttttcttacggaaactggaaaaacca

SEQ ID NO: 489196 - DNA, 87 bp, Homo sapiens
aatgcaatagaagctgtggatgaatttgcttttctggaagcggcaacctttggcactgcatccatgagcatgcccacaggattcggc

SEQ ID NO: 489197 - DNA, 98 bp, Homo sapiens
atggaataatgcccagcggcccgccaggtcccgtctgcgggccaggcatcgacatccgcaacgactatcagcagctgaagcgcctggagaactgcacg

SEQ ID NO: 489198 - DNA, 101 bp, Homo sapiens
gaagattttggtagagaagaatgaacattgtattgagaacaatatagatttgcaggtgtgatgaatgcagactctgctaccattttggctgtttggatcct

SEQ ID NO: 489199 - DNA, 100 bp, Homo sapiens
ccaaggtgctgagccggcgcggggtcggcgctgggctggaggcggcggagcgcgagagcttcgagcggactcagtttgtctttcctagatccagacacgg

SEQ ID NO: 489200 - DNA, 82 bp, Homo sapiens
agaacccgggagtaggagactcagaatcgaatctcttctccctccccttcttggaggctctgtcggtggtgagcgacgacca

SEQ ID NO: 489201 - DNA, 75 bp, Homo sapiens
gacagtcctcgtcagcactgactttcagctatggaatcggatttggacgtggcagagggagaggggcaggaaggt

SEQ ID NO: 489202 - DNA, 121 bp, Homo sapiens
gaaatcagccctggacctggcagatccttcagcaaaagctgtccttacagggaggacatgtatgcccaggactctatagagctactaacaacatctggtatccagtttaaaaaacatgagg

SEQ ID NO: 489203 - DNA, 90 bp, Homo sapiens
ggcgctgcagtgcgccctggcgctggagatcagctcagagagattaaacagattctagaaaatgaacttcagatacctgtgtccaaaatg

SEQ ID NO: 489204 - DNA, 90 bp, Homo sapiens
gatgaattgaacctcgcagccgctgctatctccagtgctcatcacagagtaattccctcctggtcccagacagtctaagaggcacagata

SEQ ID NO: 489205 - DNA, 97 bp, Homo sapiens
attacactgctgagtcacacacaacgcttgttatgttttcatcacttctctccagaagatgatttcaagctttttagatcagcaagccatcctgttt

SEQ ID NO: 489206 - DNA, 75 bp, Homo sapiens
ctgaaaagtcgcagcgagctggagccgccggagctctattaccaggttttaaacttcgccatgatcgtgtcttct

SEQ ID NO: 489207 - DNA, 75 bp, Homo sapiens
aggaacagcctatgtgggcttccacggagactattgcagatatcatccgaacatgtttgggacccaagtccatga

SEQ ID NO: 489208 - DNA, 100 bp, Homo sapiens
tcagatttatgaaaagattgtttctggaaagtatacagagcttggtaggagctggaaacccgactcacagatttaggaaacagtgggttcttgtccctgt

SEQ ID NO: 489209 - DNA, 75 bp, Homo sapiens
ccggccaagaggcaaaggggaggttacgcagcaaaccatccagaaggtgatgtatcacccatcagtatgtctccc

SEQ ID NO: 489210 - DNA, 74 bp, Homo sapiens
tcttctaatggatgggaacatggggatcgacgagaacgtgctaggagcccagctggacgttgaggccgcccatt

SEQ ID NO: 489211 - DNA, 75 bp, Homo sapiens
ctggagctctacgcctcctacgtttacctgtccatggtgagaatgagatggtgatcatgagacctggaaacaaat

SEQ ID NO: 489212 - DNA, 75 bp, Homo sapiens
cggtggcgagaggtgcggcgaaggaggcagaggcacttatgcttgtcagttttctgagtttaaccagtaatgcca

SEQ ID NO: 489213 - DNA, 100 bp, Homo sapiens
tgtgaggtcatcacggcgcgacgacgagctgcagttgtgggcaccttgtatgcgctgctgtcccccagcaacgtggccatctacggtggcctgtgcgcct

SEQ ID NO: 489214 - DNA, 100 bp, Homo sapiens
cttgtggccagtaggcaatcacctgaaggatctgacttccagaagccttttcaggagccaaaaaaacaaatacaaacaaacaaaaaaatacccagagaaa

SEQ ID NO: 489215 - DNA, 101 bp, Homo sapiens
cgctcctgcgggcttagcaggaaagggtgcctaagcatgatggaagtggttcattgcatgatattcaactgtcattgccatccagtccagaaccagaagat

SEQ ID NO: 489216 - DNA, 74 bp, Homo sapiens
accatttctggccaaaactacaaacaagacttcgcagcgggctgacgcacgaggcacacaggaaggaggtggag

SEQ ID NO: 489217 - DNA, 100 bp, Homo sapiens
accttccactggtctgtcaccaagcgggacgtcctggacctccgagggcggcaccacgagcaaccatgtccaagggacctgcagttggtattgatcttgg

SEQ ID NO: 489218 - DNA, 98 bp, Homo sapiens
tgattctagtcatccctggcttcatgagtgtatgattcgtctctttaatactggagtgaacatggaaaggtttgcagaagaagcagatgttgtaatag

SEQ ID NO: 489219 - DNA, 101 bp, Homo sapiens
cagaaatgtacacacaggagagctggctgcagtaaaaatcattaaattggagcctggaaagaaaggagaggctatccaaatttgaatctattcgtcattca

SEQ ID NO: 489220 - DNA, 100 bp, Homo sapiens
cccaacagaatttatatagagatgtgatgttggagaactacagaaacctcgtctccctggaccaaagagaaccctgtacagtaagaaatatggtgtggac

SEQ ID NO: 489221 - DNA, 87 bp, Homo sapiens
atgaagtgtggcatccaaaatcagagtgggatttgatccacaccatcacatgcgtgtgccagcaatacctccaaacctgacaggcat

SEQ ID NO: 489222 - DNA, 100 bp, Homo sapiens
tcctcgacatgtttctccagtgacacctcccagagaagttgcttctccagggaaagtgaccgaggcagtgaaagaggccattgacgcagggtaccggcac

SEQ ID NO: 489223 - DNA, 74 bp, Homo sapiens
gggccgctgggagccgttattggctgccgttaaggaccgttacgtttcccgggaaattggatacactcacatga

SEQ ID NO: 489224 - DNA, 98 bp, Homo sapiens
gcagacatgcttcaggctcctctctttactgctgaagctttacttcgagctcatgcttgcagttccccacaatgatgaatggacccgatttgccagga

SEQ ID NO: 489225 - DNA, 100 bp, Homo sapiens
cgccttcccacggagcagcactcttcaccctgcacagccttgttagctttttttctcaaggtgcaatgaaagccttccacactttctgtgttgtccttct

SEQ ID NO: 489226 - DNA, 74 bp, Homo sapiens
gcagcgggacccggcgaagacgcgaccgcggcgcgagtcaccatgccacccaggctactttgggaaagttggta

SEQ ID NO: 489227 - DNA, 75 bp, Homo sapiens
ctgcgcatctccaacagcgacctgagcggccctgagcctgtgcaattatttcgagagtcaaaatgtggatttccg

SEQ ID NO: 489228 - DNA, 82 bp, Homo sapiens
cgaggcaaggagctaaagcagcgtgcgttcagccctgggcttcctgggtctgcaggtccagccggctggcaccctccatgta

SEQ ID NO: 489229 - DNA, 83 bp, Homo sapiens
cgccctttccacctcgcggcagttcgccttatgccagcctggaccatcttggaggcagtgtaggatcatggaagaactttgaa

SEQ ID NO: 489230 - DNA, 74 bp, Homo sapiens
cttggtggagcagctgcctgggagaatgttgactctactgcaggcatgttgttccactggctaacttaaaacca

SEQ ID NO: 489231 - DNA, 51 bp, Homo sapiens
gaacccccgcaacatgggcacgtcaccaggagactaaagtccatcaaaaac

SEQ ID NO: 489232 - DNA, 82 bp, Homo sapiens
cgctcgctcgggtggcgacttcctccccgcgccccctccccctcgccatgaaggagccttcacgtaaatgggtccagtcatg

SEQ ID NO: 489233 - DNA, 82 bp, Homo sapiens
gcgcttgatgtgcgcggagagcaatcgccgggacagctgcaaggaccaagaatcgccttcagccctgtctggtgcatccttg

SEQ ID NO: 489234 - DNA, 100 bp, Homo sapiens
agaatagacacggcagcgcagtgcagatccgcaggcgcaaggcttcaggcgacccgtactgggcctactctgctctttccaacaactgatcctgtgggta

SEQ ID NO: 489235 - DNA, 78 bp, Homo sapiens
tgtagctaatgaccgtggttcccactgaggttacaggaaatacaggaggcagaggaacaaataaaagacaccacgaga

SEQ ID NO: 489236 - DNA, 87 bp, Homo sapiens
agcttgtgaacaatggggaaaaactggagtttttgcacaagccttatgtttgatcatcggccaaggtcctggcgagaactgcctctg

SEQ ID NO: 489237 - DNA, 74 bp, Homo sapiens
ttctccttcaagtacttggcagatcactctcttagcaggtaaagtcagtgataaatcttttgtttgctgcatat

SEQ ID NO: 489238 - DNA, 75 bp, Homo sapiens
gaataccactattccaaccaagaagagccaggtcagaatggcggcagtggagcatcgtcattcttcaggattgcc

SEQ ID NO: 489239 - DNA, 83 bp, Homo sapiens
caagagaatccctcaacatgctggtggtataagttgaaatccaaaccaggaaagaaggacaaggagcgaggagaaattgaggt

SEQ ID NO: 489240 - DNA, 95 bp, Homo sapiens
gttggacctcaccccagaaatcctcagccctggctccagaggatcatggcagctcctatgagtgccggtggtggtgtgcacattgagccccggta

SEQ ID NO: 489241 - DNA, 82 bp, Homo sapiens
acacatgaaggtggcattttttggcagggaggctgccggcgtggaccgcgggaaggcggggctggggctcggcgggaggcca

SEQ ID NO: 489242 - DNA, 100 bp, Homo sapiens
gtgaccgagagcgcgaatatcgtcatcgttagaagtttcaggcgacctccaagaagggtatcagtcgactggataaacagatgagaaagttcacagatat

SEQ ID NO: 489243 - DNA, 82 bp, Homo sapiens
gcctttgggactctgaaggctgaagtgcaagtggtgacccaggatgaaagagagcagctgtacacacctgcttccttaaaat

SEQ ID NO: 489244 - DNA, 100 bp, Homo sapiens
acagcccccatcttcccatgcttgtcaaaaatcagaggcaactaacactgcggcttcctgagtgagcctttgaatacatctttatcaatgaccagtgcag

SEQ ID NO: 489245 - DNA, 83 bp, Homo sapiens
attctcgctgtgacagagacaacaccgagtatgagaaccgaggtgctcggtggagtcatggcagtgccctttgtggaagactg

SEQ ID NO: 489246 - DNA, 74 bp, Homo sapiens
ttgacgctgcctacttcgggcagaaggactctgtgtgtgttggctggagttgtcttccttggagtcgggctgtg

SEQ ID NO: 489247 - DNA, 124 bp, Homo sapiens
ctcctgctgccgccgctgctgctgggggccttcccgccggccgccgccgcccgagtaagactttgaccccgacgcaggcttcagtgattgccgcggatcagaagcctgagcactttggctcgag

SEQ ID NO: 489248 - DNA, 74 bp, Homo sapiens
ccttatcccctcaacaacttttcagtggcaagactcaccgcttaaggctgtgcagatgctgtgggtaaacctca

SEQ ID NO: 489249 - DNA, 75 bp, Homo sapiens
acagtcatcaccatgggccgggatcacattctgattttccagtgtctcgccccatcctcaccctcagggttccca

SEQ ID NO: 489250 - DNA, 95 bp, Homo sapiens
cccagagggtcattcatgggcagcgatgaagaacacagatatgtagaactcttcttgaattctacagcaggagcaagcggtggtgcttatggtag

SEQ ID NO: 489251 - DNA, 82 bp, Homo sapiens
ccgggagtaggagactcagaatcgaatctcttctccctccccttcttggttgtggcagcactgcctgaaggtatgagaccag

SEQ ID NO: 489252 - DNA, 100 bp, Homo sapiens
accactttaaccccaaaattgagtcctacgctgctgtgaatcacatatcccaactgtcagaggagcaggctgctttgctggctctgcaagaaaatggact

SEQ ID NO: 489253 - DNA, 75 bp, Homo sapiens
caatgcaggacgtacagttcagaattcctggaaaactcaagcaattcgtatttgacttacattctggaaaactgc

SEQ ID NO: 489254 - DNA, 75 bp, Homo sapiens
tctttcctaccatctaaaatacgaaggtttctggctgggtgtcccgttcccaaagaatttcatgtctgtggcaaa

SEQ ID NO: 489255 - DNA, 76 bp, Homo sapiens
gtatgagcttctaactcattgtattcctcctgagataataatgaagcttttctgggagaagaggctacaaggactt

SEQ ID NO: 489256 - DNA, 51 bp, Homo sapiens
ccagtgttcaccatcctggccccggaaggccaggctaccaacgtctttgtg

SEQ ID NO: 489257 - DNA, 100 bp, Homo sapiens
cacccttagaaaagatgttttccatgaggatcgtctgcctggtcctaagtgtggtgggcacagcatggatttgggatgtgagaactaaagccagtgtaca

SEQ ID NO: 489258 - DNA, 82 bp, Homo sapiens
tttgaagagttctgcgttttgccagtcacctctcaactgtgtgccaaagaaggagcccagcgaagtgccaacacctaagaga

SEQ ID NO: 489259 - DNA, 100 bp, Homo sapiens
ggaagaccctcctgccaaaaggaaatgcatctttatgtcagaaacacaaagcagcccaaccaaagggattcaagttcgaaatatggcaactttgaaagat

SEQ ID NO: 489260 - DNA, 98 bp, Homo sapiens
ttctccggccggggcggcgggagggggctgtggactggccgcccgcagtcagtgcaaagagccgtctcactcttctctctgaacgacccggccctgag

SEQ ID NO: 489261 - DNA, 75 bp, Homo sapiens
aaagtctgtgccccaatggttcgatattcaaaaagtccatataatgcttgatggcctgttacctcctgacaccta

SEQ ID NO: 489262 - DNA, 74 bp, Homo sapiens
gatctgcagaacctcattgattttggccagaaaaaggagtcatgactctgttctccatcaagagcaaccacccc

SEQ ID NO: 489263 - DNA, 74 bp, Homo sapiens
cactctggccactctgatccgcatctggctgcaagagccccttggtgccattctcactggtcctccaggcactg

SEQ ID NO: 489264 - DNA, 100 bp, Homo sapiens
agcggattgaaatctcctgcgccctggcgaccgaggcctcccgcaggggccgcatgctgtctggccagcagctagaatccctgggcctcctggcccccgg

SEQ ID NO: 489265 - DNA, 98 bp, Homo sapiens
actggtggaactagcttctctgcagggacttctggagccccgtcctggacaggagacagaggaagaaccctggagtcggaagccagaagcaaaaggcc

SEQ ID NO: 489266 - DNA, 82 bp, Homo sapiens
ctgcggggccgtggcgctcggctgcgcgctgctcctcgccctcaagttcacctgcagtttcgagccagaggaagaggctggg

SEQ ID NO: 489267 - DNA, 75 bp, Homo sapiens
aggcaagcaggacttccgggaggaccaggatgctgccttcttcaagaacatccatgatagcagtcttctgtaaat

SEQ ID NO: 489268 - DNA, 100 bp, Homo sapiens
gaccggcacggcggctacaagcccagcgatgagcacaagaccgacctcaaccccgacaacctgcaggtacggttcctggagcagcagaacaagatgctgg

SEQ ID NO: 489269 - DNA, 75 bp, Homo sapiens
ttcaggaatggagacacggcttcccccaaggaatatacaggagcacggtctgaatctgcacagagcaagatgctg

SEQ ID NO: 489270 - DNA, 75 bp, Homo sapiens
gccagggtccctgaagagggaagacacgcggaaacagctacaacctcctgttctttgcgtctggaggaggcaagt

SEQ ID NO: 489271 - DNA, 100 bp, Homo sapiens
gtggacgtggatttggggatggctataatgggtatggaggaggacctggagaaggtggcccggaccatcggcatttctgtggatccgaggaggcggaaca

SEQ ID NO: 489272 - DNA, 100 bp, Homo sapiens
agagggacagcgcaacctcgagggccaggcagctgcagaaggcggtggctgagagtgaggaagacagccgctccgaccgctggtcccagatgccagcaag

SEQ ID NO: 489273 - DNA, 82 bp, Homo sapiens
aaatgcttgctgacctgggccagagctcttcccttacgcaagccgcattgacaggaagattgagttccccctgcctgatgaa

SEQ ID NO: 489274 - DNA, 82 bp, Homo sapiens
ggcgctcttcctggtgtcccgcccagtagggggatatgagactttctactcggaatatcctgagtgttgcgtggatgtaaaa

SEQ ID NO: 489275 - DNA, 139 bp, Homo sapiens
gccgaagtcagttccttgtggagccggagctgggcgcggattcgccgaggcaccgaggcactcagaggaggtgtcgtgaaaactacccctaaaagccaaaatgggaaaggaaaagactcatatcaacattgtcgtcatt

SEQ ID NO: 489276 - DNA, 100 bp, Homo sapiens
gacaccaagatgcggatccgggcctttccgcggaagatccatccaaaagctatgtgaaattacgagactttgtgcttgtgaagctttgtcaagatttgcc

SEQ ID NO: 489277 - DNA, 83 bp, Homo sapiens
caaagaactcttaaagcagctgacttcccagcagcatgcgattcttattgaccttgctaccagagattcactgactgctataa

SEQ ID NO: 489278 - DNA, 75 bp, Homo sapiens
gcctggagcctcaccgcttcaatgacacagagggaacttaggctgcggaactatgtcccggaggatgaggacctg

SEQ ID NO: 489279 - DNA, 75 bp, Homo sapiens
ggagcggatcccacacctccggaccgagggacgcgggagcccagcagccggggccgccctattacaccgacccag

SEQ ID NO: 489280 - DNA, 74 bp, Homo sapiens
agagcttggttaacttgggagaaagtttcatctgtggatggagtattgatacatatgaaccagatggttacaac

SEQ ID NO: 489281 - DNA, 90 bp, Homo sapiens
cctgtgtgtgtggaaccgaaaattagatctcctgtgtaagactagccacctttctgatacaggtgtggttgacctgcctgaggaaaatcg

SEQ ID NO: 489282 - DNA, 97 bp, Homo sapiens
gacgaagccggagtgtaggcggcagaggattcgctcccagagcagctgcggccaggttgggggccgtcccgctcctaaggcaggaagatggtggccg

SEQ ID NO: 489283 - DNA, 100 bp, Homo sapiens
gtaacttcatagactcccaaagggaaattcttgacttcacatgtatcattctccgagcctgatattccgtcctcaaaaagtactgagttacctgtggact

SEQ ID NO: 489284 - DNA, 100 bp, Homo sapiens
gacaccgggatagagaacgggaccggcaccactgagaaagaacactcctatgccaccttcaccagctgtacaagtgcagggccagcctaacagttctcag

SEQ ID NO: 489285 - DNA, 82 bp, Homo sapiens
gagaggtccattccaacacacagagaaattcagcaggaaaatggttctcctgaagaacatgcaatctatgtttgggatcatt

SEQ ID NO: 489286 - DNA, 80 bp, Homo sapiens
cctgcactctgtcaagtcgctgtctgtcttccatgcccaggcccaccgtttccatggtcgaaggtcagggcgagaagaac

SEQ ID NO: 489287 - DNA, 82 bp, Homo sapiens
aagctggcgcgccagagcggcatcgagggtatcgggtgctgcttcggtatgaaggctttgaaaatgacgccagccatgactt

SEQ ID NO: 489288 - DNA, 100 bp, Homo sapiens
ctccaaggccgtcgccgaccgctacgctgtctactggaacagcagcaaccccagattttaccaaatgttgcaagaactctggagttcttatggtagtaaa

SEQ ID NO: 489289 - DNA, 51 bp, Homo sapiens
aaggattccaagtaactcttatttggatctcgaacacccattatcataatt

SEQ ID NO: 489290 - DNA, 82 bp, Homo sapiens
gggaaccctggtcaccgtctcctcaggagaacctttacaaatagatcacttggtttttgtagtccatgggattggaccagct

SEQ ID NO: 489291 - DNA, 50 bp, Homo sapiens
tctgagcaatgttgaggtgtttatggtgagcagaagtggcctatatcgct

SEQ ID NO: 489292 - DNA, 145 bp, Homo sapiens
cgcgcatgcagatcctcgaagatcacaacaagcagctagagtcccagctgcagcgtctgagggagcttctcctgcaggttaacgtccctaaaacccgccggactttctgtaagaagtgtggcaagcaccaaccccataaagtgac

SEQ ID NO: 489293 - DNA, 51 bp, Homo sapiens
catgaccggttacttaatgtctggatttaccgaggagcattatggatcctg

SEQ ID NO: 489294 - DNA, 74 bp, Homo sapiens
attgacagcatggttcataaacatgtcatcttatcccatgcgtgtgaacagatgcaaggaaatcctcaataaag

SEQ ID NO: 489295 - DNA, 100 bp, Homo sapiens
attgcctgttcagtactgtgggtgatatttgcctttagtgcactcttctccttcacagtaaagtggctgagttgatctctctaatgtattagatcttcat

SEQ ID NO: 489296 - DNA, 75 bp, Homo sapiens
cgaccaagagggtgttcgactgctagagccgagcgaagcgccaaacgtaccaagaaagtcgggatcgtcggtaaa

SEQ ID NO: 489297 - DNA, 50 bp, Homo sapiens
tcgttttcaggagcatctccaggtatggaaggctttgttacaagaaatgc

SEQ ID NO: 489298 - DNA, 98 bp, Homo sapiens
cttcatatttggcttcaatgtcatattttggtgccgcgtatgatgctgtccttgacagaaatgtggccattaagaagctcagcagaccctttcagaac

SEQ ID NO: 489299 - DNA, 100 bp, Homo sapiens
agtttatctggagtgaggtggccggttcttggtgggatctgagcaggaaagaccacagcaagattctttcattcgtctcctcctagcctgggggaccagg

SEQ ID NO: 489300 - DNA, 82 bp, Homo sapiens
gccaccatgcccgactaaataggttctgcgttagacctgcatcttagcaatgtgaatattgcatccctagagaaggacctgg

SEQ ID NO: 489301 - DNA, 75 bp, Homo sapiens
ggaccgtggcttcggcttcatccgcttgggcggcgactggcggcgcgatggacctgaccgggctcctgctggacg

SEQ ID NO: 489302 - DNA, 100 bp, Homo sapiens
tgtggatcaagcctccccaaccccaccatcccaccaaagggggctgctgaccgagagagctcactcagccaggatgagagggccttaccaaaaggagatt

SEQ ID NO: 489303 - DNA, 75 bp, Homo sapiens
acataccattaggatcttaccgggctcgtcggaaaaaaagttctgctagaaaatttggtctacagaaactttggg

SEQ ID NO: 489304 - DNA, 100 bp, Homo sapiens
gttattggagaaacatgcagattatatcgcatcctatggctcaaagaaagatgattatatcacccggaagttcaggctgaattctgaaggcaaacttgag

SEQ ID NO: 489305 - DNA, 100 bp, Homo sapiens
ggaaaaacagaatcagctgttccctgcgaaagatttgaacatggaattcaatccttcagatcatcctcgggccagcacaatattcctcagtaaatctcag

SEQ ID NO: 489306 - DNA, 101 bp, Homo sapiens
atgtgccatatgatttatcggaaggtactaggttttgacaagcttgcatcatgcgtgagtataagctagtcgttcttggctcaggaggcgttggaaagtct

SEQ ID NO: 489307 - DNA, 100 bp, Homo sapiens
gctgctcagctgacggctgaatgtgccatcgtcaccctgccttgccaaactgaagcccgagaagagatgaacaacaaagcgattcaaaacatgtcttgaa

SEQ ID NO: 489308 - DNA, 87 bp, Homo sapiens
tggagctacatttgcccatatctgcaaaatgacagatgtctttgaagatgacaccgtacatgagtcagccgagccatcccgcggcga

SEQ ID NO: 489309 - DNA, 83 bp, Homo sapiens
accatgatgctgccatctttccaggaggctttggagcggctaaaaacctgctgctctttggcgtaaattgcaatcgattaggg

SEQ ID NO: 489310 - DNA, 136 bp, Homo sapiens
gaagccatcgcctggccccggctctctggaccttgtctcgctcgggagcggaaacagcggcagccagaggagagacagcgtctggagaccatcctcagtctctgtgctgaatacacaaagcctgacagtcgcttat

SEQ ID NO: 489311 - DNA, 124 bp, Homo sapiens
gtccacgacaccggctacttctcagctttaccatccctggaggagacctggcagcagggggccgaaggccagagaccaggatttggctacggaggcagagcgtccgactataaatcggctcaca

SEQ ID NO: 489312 - DNA, 100 bp, Homo sapiens
cggacccgcaagcatgcccaccactgccacaaacgccgcaccaggtcttgtagcagcgcctcctcgcatggcggacaccgacctgttcatggaatgtgag

SEQ ID NO: 489313 - DNA, 80 bp, Homo sapiens
atgtggagcagagatcttcgttggtgaccgattattgaccgacctattcgaggtcgtggtggtcttggaagaggtcgagg

SEQ ID NO: 489314 - DNA, 100 bp, Homo sapiens
caacgccctcacagagcgggagctgcactgctccgtgtggagatggcgccctctttgacaagtcctgcagcgaccgtgctatggaaagcacagaatcccg

SEQ ID NO: 489315 - DNA, 75 bp, Homo sapiens
tcgccaaggagccccacgtagagcaggatgaagctccacccgcccttcaggatgcaaagccctcctctataaagt

SEQ ID NO: 489316 - DNA, 75 bp, Homo sapiens
tttcttgtccgggtgcggataagggacccgacactgatattcgacacctcttagaggctgcaatcccagagagag

SEQ ID NO: 489317 - DNA, 100 bp, Homo sapiens
ctgcgtgagtgtggtctacgagctgtttctcatctttatactcttccaggttcgagaacttgtcttggacaattgcaaatcaaatgatggaaaaattgag

SEQ ID NO: 489318 - DNA, 100 bp, Homo sapiens
ctgcgggggcagcctcatcgcggagcagtgggtcctgacggctgcgcactgcttccgcaagtttctggcatttgaagtcaaagagtattcagcgttggat

SEQ ID NO: 489319 - DNA, 75 bp, Homo sapiens
attggaaatgtccatccagttgggagctatgagtcctctgaaatgaacagcataatcagtcgcatcgaatacatt

SEQ ID NO: 489320 - DNA, 97 bp, Homo sapiens
ccccctcagccctgtggctgggggcagagctcaggtcatactccctgtcacaaactccagctgaactaacttggaggaggatcttccctgacagctc

SEQ ID NO: 489321 - DNA, 100 bp, Homo sapiens
aaactatgttcgatttattgaagatgagcttcaaattccagatgttgcccatttaatgtggttcgaaagactctatgtttggcttcagtgttttgaaaaa

SEQ ID NO: 489322 - DNA, 98 bp, Homo sapiens
tcacactggccttgatttggcagctaatgagaagagttttgcggcctccaggtggtggatccaatttttcattaggttttgatgaaccaacagaacaa

SEQ ID NO: 489323 - DNA, 95 bp, Homo sapiens
catggggcattcagaatgggaccacaaacgagggccaagaggatcacagcccaggccagacccgatcgtctatggtccagtggcttaacccacag

SEQ ID NO: 489324 - DNA, 83 bp, Homo sapiens
agaagggagcgaaggtttttgctgcgccaacgcagtgaccgaaggctccgctcacgcccgggaacaagatcactcaaggtgaa

SEQ ID NO: 489325 - DNA, 50 bp, Homo sapiens
tcaaaaaccagtgctcaagtatttgagccaccacatttgctcaaagtatg

SEQ ID NO: 489326 - DNA, 74 bp, Homo sapiens
gccttcaacaccaccttcatctccaccatcggtcttctcgttcgcaactgcaccatcactgccaatgctgagtg

SEQ ID NO: 489327 - DNA, 75 bp, Homo sapiens
gaaagtggatgagcatctggccaaacaagatgcccaggcagcctggcatcctcgctacaacctcattgttgtggg

SEQ ID NO: 489328 - DNA, 76 bp, Homo sapiens
gtttggagtgaagtttaatgttgccaatggagtcactcaagactgcttgcaactgattgcagacagtgaaacacca

SEQ ID NO: 489329 - DNA, 74 bp, Homo sapiens
cccgccgccctcgcaacctggcagccgccgccgtggaagttacctagaaaagtacgagaaagttcatcattttg

SEQ ID NO: 489330 - DNA, 99 bp, Homo sapiens
cttgagctgaaagttggcgacatcatagaggtggtaggagaggtagaagaccatgatggagaaggtgatgtggctggagatgatgatgatgacgatgat

SEQ ID NO: 489331 - DNA, 100 bp, Homo sapiens
gcgcctgcagatcccggctagggcacggaccgcctaggccgagattgttgatccatttcagatacttgtggcagcaaacaaagcagttcacctctacaaa

SEQ ID NO: 489332 - DNA, 88 bp, Homo sapiens
agcggcgccaggagcccgtgcgcggcccgggcagccgcgctttcccagaagtttatctcgacaatgctagttgcagtctgtgtgaccc

SEQ ID NO: 489333 - DNA, 107 bp, Homo sapiens
agattcgcagtggtcgcttcttctccttggttgaaatcacaaagattagacacctttttagataggtgttcttcagcaccactgacaacacggttctgacagtattt

SEQ ID NO: 489334 - DNA, 75 bp, Homo sapiens
gatctgatgaaaattctcttcattctcttggactgaacttaaatactgataggccgcacttggtgagagtcttca

SEQ ID NO: 489335 - DNA, 100 bp, Homo sapiens
tggtcaaggcttcagtgtggagtaattgacactttcgaggtgaaaaaccatacaagtgtcaaatttgcaatcagtcttttagaattaagaaaacattaac

SEQ ID NO: 489336 - DNA, 98 bp, Homo sapiens
aggaaacgtcggaaactttagagaagttaagagaagaattagctatcaaatccggccagatgctgcagttggagaagaaacttgaacgtgaacttgag

SEQ ID NO: 489337 - DNA, 51 bp, Homo sapiens
gctctgggtggcccagatgctactggcagctcccccaaaggctgtgctgaa

SEQ ID NO: 489338 - DNA, 51 bp, Homo sapiens
attggagccaagaaatgagtataggtggagccgccaccaaaatgcagattt

SEQ ID NO: 489339 - DNA, 83 bp, Homo sapiens
aacaacacggtgttcatcttttctacagatcaggcctttgtgacactaaccacaaacgatgcctacgccaaaggtgccctggt

SEQ ID NO: 489340 - DNA, 75 bp, Homo sapiens
gaatgcagcatggatccctgcccatcaagtgtattctggaggtcgaatggtcacatatgaacatctccgagaggt

SEQ ID NO: 489341 - DNA, 100 bp, Homo sapiens
agttttcagcctcatccagcaggcggtgacccgctaccggaaggccatcgccaagtgctgggtcctgccaccaccatggttccagtggttgagctttgct

SEQ ID NO: 489342 - DNA, 75 bp, Homo sapiens
aacctgcttaacaccacccccgacagggcggagcaggacaaggaagatggggagccaaagaccaagcatctcaga

SEQ ID NO: 489343 - DNA, 82 bp, Homo sapiens
tgggcgagtgcatgatccgccacgggaaggagctgggcggcgagtccaactttggccacccgggaccttgcccagtacgacg

SEQ ID NO: 489344 - DNA, 88 bp, Homo sapiens
ttttttttcaatctgggttacctcaacctgttttagcacagatatgtctccccagtctccactttggtccccagcgctgtctgcccga

SEQ ID NO: 489345 - DNA, 82 bp, Homo sapiens
gttaccattgtgaaagaaggttgggttcagaagagggatacgatgaatggattaaagcagataaaatagtaagacctgctga

SEQ ID NO: 489346 - DNA, 73 bp, Homo sapiens
ccgctcgcctgctgcagtacggagcctcaggcggacagatggactgtaagacaatggcgatgaccactcagaa

SEQ ID NO: 489347 - DNA, 100 bp, Homo sapiens
ttcatggtgacgtttgcagccctttacagcactcacaaagggtcctgatgaagaagctgttgtggatcttggcaaaactagctcaactgtgaacaccaag

SEQ ID NO: 489348 - DNA, 75 bp, Homo sapiens
cgacccccattgctgagccagcggagctgcttgctgatcttgcatctttaatggataaaacatttgagagaaagt

SEQ ID NO: 489349 - DNA, 73 bp, Homo sapiens
gcggagtagcgagtcggcaacccggagttggaaaatggatataccttatttgattatgatgttggactgaatg

SEQ ID NO: 489350 - DNA, 101 bp, Homo sapiens
tatgtacctgttaccactttcaaaatgaagatagtgatccggggagacaggaacacgggcaagacagcgctgtggcaccgcctgcagggccggccgttcgt

SEQ ID NO: 489351 - DNA, 101 bp, Homo sapiens
ccaggtcgcgatcgaagagtccccccaagtctcctgaagaggaaggagcggtgtcctcttaagaaaatgataattttccccagatggcccatcagaagcgg

SEQ ID NO: 489352 - DNA, 75 bp, Homo sapiens
caaagaggaacaaagtcatcaagctagtggacatcacggacatccagaaggtaacgtgaagcacctggttctctt

SEQ ID NO: 489353 - DNA, 106 bp, Homo sapiens
cagggcttctcctatgactacgtctttgactggaacatgctgaaattcgttgatgccggcccaggatggatcagacctgtgaactacccagaagaaattgtctgct

SEQ ID NO: 489354 - DNA, 75 bp, Homo sapiens
ctcagccattactccatctgggaagagatgaggagcgggaaggcctcctgcaccctggagaccgtgtgggaagac

SEQ ID NO: 489355 - DNA, 74 bp, Homo sapiens
tttggataaagaccaagaagtgggattactggattatatgataacaacgaacttgatgcaagtgataggtttgc

SEQ ID NO: 489356 - DNA, 98 bp, Homo sapiens
tcccttctcggtgaacgttcagctgctgcaggaccacggggaaattgccaagaagcccacccacctttgggttcctgttggacatcgatggagtgctt

SEQ ID NO: 489357 - DNA, 74 bp, Homo sapiens
tccatccacgaggcctggactgacgtgattcgcctttgccagtctcatctcgtgtctgctttgttaagttccat

SEQ ID NO: 489358 - DNA, 98 bp, Homo sapiens
gagttctcacttaaagacctttatgccatccaagagattcaagctgaagaaaacctgtttaaactcattgtcaactgtgtcagcgtgttatgatgccg

SEQ ID NO: 489359 - DNA, 98 bp, Homo sapiens
tgaacaacaatgaattggagaccattccaaatctgggaccagtctcggcaaatattacacttctctccttacgaaagtaggcggtacgaaccctaatg

SEQ ID NO: 489360 - DNA, 82 bp, Homo sapiens
agcccggcaccccccgccgacaaggaggttccaagatgagatgggattctccaacatggaagatgatggcccagaagaggag

SEQ ID NO: 489361 - DNA, 76 bp, Homo sapiens
gcagaggatgaggatgaagaggaggaccaggaaaatctgctcttcactgggcagctgctgtcaataatgtggaggc

SEQ ID NO: 489362 - DNA, 102 bp, Homo sapiens
ggcgaacgcggagagcacgccatgaaggcctcgggcacgaccgtgcagtccctcggcttcgccatctaccgcgcgctggactgggggctggacgagagcgag

SEQ ID NO: 489363 - DNA, 75 bp, Homo sapiens
gcctgctgtaccggctgctgcaggcctccatcctggcgtacctggtcgtagtgcagcagctgccccgagccccgt

SEQ ID NO: 489364 - DNA, 95 bp, Homo sapiens
ttagataaatacgccaagaagtcagttaagggcttgggcaccgatgataacaccctcatcagagtgatggtttctcgagcagaaattgacatgtt

SEQ ID NO: 489365 - DNA, 100 bp, Homo sapiens
cacgactacgctctccgaaacctcatgggcagtttctcccgccggcgatctctccgtggacaggttgttcagttcaagctctcagacattggagaaggga

SEQ ID NO: 489366 - DNA, 75 bp, Homo sapiens
cttcatgagcatagacagtctgtgtaagaagtactccagggaaacctcccaggaaagaccacagcaagattcttt

SEQ ID NO: 489367 - DNA, 100 bp, Homo sapiens
tggaactgggacttcacctccgcgctcttcttcgccagcaccgtgctctccaccacaggggttgccctgctgtcagacgtctatcctgagaaaatcttgc

SEQ ID NO: 489368 - DNA, 83 bp, Homo sapiens
gcatcgtctttccgtcctctgaggcgacggccgcggctgcacaggaatgtatcctgtcaggtataatgtcagtgaatggcaag

SEQ ID NO: 489369 - DNA, 74 bp, Homo sapiens
ggcgggagaactcactgaggatgaggtgtacccttcagccaagccaatgatcaaattccaatcaccctatgagg

SEQ ID NO: 489370 - DNA, 83 bp, Homo sapiens
taacggaccttttaccatgaatagttctactccttctacagatgtattcggaaggaagtgacattgtacctcagagtaatgag

SEQ ID NO: 489371 - DNA, 74 bp, Homo sapiens
cctgcccttgccagaatttcctgcgctgttccacctcattcaacttcagagtttatgtggccgaggcagacaag

SEQ ID NO: 489372 - DNA, 90 bp, Homo sapiens
tggtgatggagattttgatgtggatgatgccaaagttttattagctgctgtaagtaaagatgattccattatttcaagtcttgatgtcac

SEQ ID NO: 489373 - DNA, 75 bp, Homo sapiens
cgcgccggcagcagccatgagcggcggcgtgtacgggggaggagcagcatggacctgtcagcaactaaggaacaa

SEQ ID NO: 489374 - DNA, 98 bp, Homo sapiens
cgaggaagaagaggacgacgacgacgaggaagaggaggtttctgagattttcagctgaactctcatctctcaacactggcaaatattcataagatcta

SEQ ID NO: 489375 - DNA, 90 bp, Homo sapiens
aatgattacttcagaattaccagtgttacacttctgtctggccccaaagagacccctgctgcccagagccccaccagaggcccctctgac

SEQ ID NO: 489376 - DNA, 100 bp, Homo sapiens
gccggagcccgggaggggccgcgccgccaccgtctgaactaggatgtcccgacatgaagatctcagtggttcaatagcatccccagatgtcaaattaaat

SEQ ID NO: 489377 - DNA, 76 bp, Homo sapiens
gtggcgtgcaggactcgggtggctctgaggtcgcctggggaccccagaagggcatccgtttccgaggctttagtat

SEQ ID NO: 489378 - DNA, 75 bp, Homo sapiens
agcaccgcacgccctgcaagggaggaaaagaagatatgcttcttaaacaaggtcagatgtatatggcagactcac

SEQ ID NO: 489379 - DNA, 75 bp, Homo sapiens
gtaggagtgacccagcctcgaagagtggctgctgttacagtcgacaaagatgctgaattagtggcccaatggaac

SEQ ID NO: 489380 - DNA, 82 bp, Homo sapiens
ccgatccagcctgcggagcctgtggggcaggaggaatgccagctcctgagcaggcctcattggtggaggaggggcaaccaca

SEQ ID NO: 489381 - DNA, 95 bp, Homo sapiens
tgcacctccactgaaacgcaaggagcagacagaacctacaccatccgtgaggtgtgactgcacagaaaagttacaaaacaaatttgactttttgc

SEQ ID NO: 489382 - DNA, 83 bp, Homo sapiens
gccagctccacccgggcggacccacacatgttccagggtctccctccactgctgtagtaacccgggtccggggcctcggtggt

SEQ ID NO: 489383 - DNA, 100 bp, Homo sapiens
ctggaaagtgaggaattttgaagtacaccgtggtgacattgtatcattggtttgatcatggccttgccaggttggtgacagtatattgtgagcatggtca

SEQ ID NO: 489384 - DNA, 100 bp, Homo sapiens
gggcaacaacctcaccgtgcaccttcgcaagaagcaccagttcaagtggccctcagggcatccccgttttcgttcttctcaccactaaatccaatacgag

SEQ ID NO: 489385 - DNA, 115 bp, Homo sapiens
atgatgaatcttttcttcttgaaattaggcagactcttcaaaacgcactcattcagtttgctactaggcttctctacagtttagcctttaatgccaggtttctgagacatctttg

SEQ ID NO: 489386 - DNA, 98 bp, Homo sapiens
acgtaatgaggatgaagattcaccaaataagctatatactttggttacctatgtacctgttaccactttcaaaagacctcctggtggccggagcctcc

SEQ ID NO: 489387 - DNA, 74 bp, Homo sapiens
gctgcggccgcgctgagggccccgactcagccaaaatgaagtttaatccctttgtgacttccgaccgaagcaag

SEQ ID NO: 489388 - DNA, 96 bp, Homo sapiens
aggacgactgggaccgggacctgctgctggacccggcctgggagaagcagcagcgcaaggtgaggacaccagtgatgaattctgaagcaaaagttc

SEQ ID NO: 489389 - DNA, 100 bp, Homo sapiens
tgatatcattatgctgacctctgacgagctgcaatttggttatgaggatcttatggttggtgatgaggcaagtgaattacgatcaatgttagaagttaac

SEQ ID NO: 489390 - DNA, 73 bp, Homo sapiens
agaacgaacatcttctggacctttgtccaggcacgtctgagaatggtggatgtggtggagaaagaagatgtga

SEQ ID NO: 489391 - DNA, 74 bp, Homo sapiens
tgcaaaatggagctggaggagctttatttgtggccccttcacagatgtagtcactacaaatcttaaattgcgaa

SEQ ID NO: 489392 - DNA, 75 bp, Homo sapiens
aagccaccagctgctcgtcgtatcagaggagcagttcaaggttgcccccaagtttcctggcagtgtgtgatactg

SEQ ID NO: 489393 - DNA, 82 bp, Homo sapiens
gccacgccggccgcgcgcgccagcaagaagatcctgctgcccgagcccagcacctgaactcctggggggaccgtcagtcttc

SEQ ID NO: 489394 - DNA, 75 bp, Homo sapiens
tgggactggttgaccaactggtggaacccctggctgctacaggagctgagagaccctaccctcactttccgtctg

SEQ ID NO: 489395 - DNA, 76 bp, Homo sapiens
aaaagaaaacagcaacacagttacatagtaaaaggaggcctaatgattaagactggagaaagtggcatgatagttt

SEQ ID NO: 489396 - DNA, 100 bp, Homo sapiens
gagggaggaggaggaggaggaggtggaggaggtggaggaggtggaggaggcgccggaccgggggggactcacaccacccggcaagaactgctcactacgg

SEQ ID NO: 489397 - DNA, 100 bp, Homo sapiens
tatgaattctgcatttcaactctagaggaaaaaattgaaagagaaaaggaattagcagaagacattatgtcagaatgaactctggaagcccagccaggga

SEQ ID NO: 489398 - DNA, 82 bp, Homo sapiens
gccccgcgagcacagagcctcgcctttgccgatccgccgcccgtccacacccgccgccagatgatcaagttccagatgatcc

SEQ ID NO: 489399 - DNA, 88 bp, Homo sapiens
tttgtctttgaggactttgtctctgatgagctgagaaacaaagccacccagccaatgaagaggaatgtcgggtcctcacaattcaaaa

SEQ ID NO: 489400 - DNA, 74 bp, Homo sapiens
gcggaacggtcgtggagaagaagagctgctgatgaggactgggacagatttctctatgaatcatcatcaagaac

SEQ ID NO: 489401 - DNA, 75 bp, Homo sapiens
gcgagcagcgctactgcgccgtgtgccgcgaggagctgcgccagatctggtgctctcatgaaaatctacatcagg

SEQ ID NO: 489402 - DNA, 85 bp, Homo sapiens
gaatgtaaatgtgaagaacataatcattgctttaattgatagggaattgcaacccagtgaagaagttacctggaagtaaagactg

SEQ ID NO: 489403 - DNA, 100 bp, Homo sapiens
gctgatgatgtaaccctggacgacctgatcatggctaaagatgacctctctggtgctgacatcaaggtctggagggtgagcgacctgcgagactcacaag

SEQ ID NO: 489404 - DNA, 97 bp, Homo sapiens
ctgtactcaccgtcctgtgtgagaagctgcaagccgccataaacagtgagacattggacgtgtttgctcatgaagatgcagtatatggcttgtctgt

SEQ ID NO: 489405 - DNA, 106 bp, Homo sapiens
aggacgacgtgtacctggacatcaccgagttcctgagttggaggtagaagaagaaacccaagttcaagagatgactttagatgagtggaaaaatcttcaagaacag

SEQ ID NO: 489406 - DNA, 98 bp, Homo sapiens
gaagtggccgtcctgagcgccatggctcactccccggtgcagtcgggcctgcccggcatgcagccagatctgccagtgagcctcaggctttaggaact

SEQ ID NO: 489407 - DNA, 100 bp, Homo sapiens
gcttaatgctgtcttaactagtgtaggaaaacggctcaacccaccgctgccgaaatgaagtataagctcatttagaggcgagttttgaggaggtagagaa

SEQ ID NO: 489408 - DNA, 75 bp, Homo sapiens
gcattgcaggcacagggcccgatgagccagagaagcttggcatcagcaatgcagaagcacggcagccagggaagg

SEQ ID NO: 489409 - DNA, 100 bp, Homo sapiens
gggaactgactgctgtagttcagaagaggtttggctttccagagggcagtgtagagaaaaagcttgtggtgaaggggggcaaaaaaaagaagcaagttct

SEQ ID NO: 489410 - DNA, 80 bp, Homo sapiens
cctgctctacaacgtgcctgcagtggccgaggagattcaggatgaagttgactacacttgctgctttgaaggatgaagtt

SEQ ID NO: 489411 - DNA, 100 bp, Homo sapiens
gaaaagggaagggagagaaaaaggagagcctctgagctcaacggaggattgtgcctgagaagaacccacagaggtgtaccatagatgaccgggtaacccg

SEQ ID NO: 489412 - DNA, 83 bp, Homo sapiens
ctcagggctttaccagcaactaccccagtgccggggagggttctgctgcttcgaaagctgttaatatgatcctctgttgaagc

SEQ ID NO: 489413 - DNA, 80 bp, Homo sapiens
atcgagaaggcgtctgcgagaccatggagaacggccatcactggtgcaagctatatttaacggagatcctgatgaagttc

SEQ ID NO: 489414 - DNA, 83 bp, Homo sapiens
ccacgtatagctgaactcatggacaagccctctccagggtcaccctagaatcagatctgctccccagcatcttctgtttcctg

SEQ ID NO: 489415 - DNA, 83 bp, Homo sapiens
agagtacagacttattgtggagaatttgtcaagtcggtgcagctggcaagacctaaaggtgaaatgacaatggatgctctgtt

SEQ ID NO: 489416 - DNA, 100 bp, Homo sapiens
cgaccaagtacaccagcctggccagctctgccaacagctccaggtggagcctgcgcgcggcagggaggctggttatcttgacgaatcagattacaaccca

SEQ ID NO: 489417 - DNA, 100 bp, Homo sapiens
aacggggcgcacttcgacccggaagtttacctagacaagcacactgggatgagaaattccaccacaagatggtggacaaccgtggcttcatggtgactcg

SEQ ID NO: 489418 - DNA, 56 bp, Homo sapiens
aaccctggggacacatatggaggacaaggagaaagttctgccactaatgaacccag

SEQ ID NO: 489419 - DNA, 100 bp, Homo sapiens
gcacgtctgctcggagatcatttgggagatccaagagattcagtatcactcgctcccttgatgatcttgagtattaaaggtggaagaaggtccatatctt

SEQ ID NO: 489420 - DNA, 75 bp, Homo sapiens
gcctgcaatgtgtccaaggaattactggaagctaatagtgctggagaatctggtaaaagcaccattgtgaagcag

SEQ ID NO: 489421 - DNA, 74 bp, Homo sapiens
ggatgcttctctgtctcatcagtccttagtagcactatcagaggatgccatggcttttaataagtttaatgttc

SEQ ID NO: 489422 - DNA, 100 bp, Homo sapiens
ccgacctcgacgtcttgcctgtgtcccacttgttcgcggcctatagcaccacacactggaagcagacgctgttcatgatggacgacccagtccctgtcca

SEQ ID NO: 489423 - DNA, 102 bp, Homo sapiens
atgaagagctgccagatcccacagcccttgaagataaggatggtcaaacaaaataatatcatacctggagaaactcagatcttgctaagatttactggttgg

SEQ ID NO: 489424 - DNA, 74 bp, Homo sapiens
ccgaggactccgctcctgcccagtccaagccttatgcatttgatcgggtgttccagtcaagcacatctcaagag

SEQ ID NO: 489425 - DNA, 80 bp, Homo sapiens
tgaagagcccaaaacctattacgaactcaaaagtcaaccgctgaagagcaggtccctggatggccggttgcaggtgtccc

SEQ ID NO: 489426 - DNA, 82 bp, Homo sapiens
agcacaccctgtcctatgtggacgttggcactgggaaggtggacgacccaccggagcccgtgtacgcgaacatagagaggca

SEQ ID NO: 489427 - DNA, 50 bp, Homo sapiens
agaagaggaggaagccatgcgtaggctcctcagtgggtagtgcacttcca

SEQ ID NO: 489428 - DNA, 50 bp, Homo sapiens
cgccgaggactccagcacaccgaggatgatatcatcaagttgaatcgaaa

SEQ ID NO: 489429 - DNA, 82 bp, Homo sapiens
cagctccccacccaggcctgagcgaagcccacaaccccgccgggcacatgtgaaaggctttatcctgtggataaacgcagag

SEQ ID NO: 489430 - DNA, 82 bp, Homo sapiens
ccaagttgaaaatggacgagtaatcgcctgctttgattcattgaaatttttcagttatgggacaaaaatattatatcaaaac

SEQ ID NO: 489431 - DNA, 83 bp, Homo sapiens
cttagttgatgatttagttgattctctgaagtggaagatagatgataagcctgtaaaaattgacaagtgggatggatcagctg

SEQ ID NO: 489432 - DNA, 90 bp, Homo sapiens
gagaacgtctctgaaatcaagtccggatgaaggtgctaaccggatagtattagaagactccaatatcttgcagcctgtgggacttactgt

SEQ ID NO: 489433 - DNA, 50 bp, Homo sapiens
aggattccaagtaactcttatttgctttactaatatgctgaagaacaaac

SEQ ID NO: 489434 - DNA, 100 bp, Homo sapiens
ctggtggaggagatgctgaagatgcacccagcctactaccaggcaccacactgtaactcgaggcatcaccaaaggcgtgaaggaggactttcgcctggcc

SEQ ID NO: 489435 - DNA, 100 bp, Homo sapiens
gcttcagctgcccctgaagaagcatatattttgtgaagagtgcatgaccttatggtttaacagagagaaaacatgtccactctgcagaactgtgatttca

SEQ ID NO: 489436 - DNA, 74 bp, Homo sapiens
gcagaaggatctcagcctctctgccgcagcaatggcgctgagttcctctgctggagttcatcctgctagctggg

SEQ ID NO: 489437 - DNA, 98 bp, Homo sapiens
gaccatgttcaccagcaccggctccagtgggctctacctgagaagatggctaagctcccagtgattttaggcaatctagacattacaattgataatgt

SEQ ID NO: 489438 - DNA, 100 bp, Homo sapiens
gatgatgatgaagatattgatgacgcatgtccagatcagcaatgagtcggcaattgacttctacaggaagtttggctttgagattattgagacaaagaag

SEQ ID NO: 489439 - DNA, 82 bp, Homo sapiens
cctggaggggcccaggaagggcgaggaaagcggagtggagttctctacttaaaagacaatgactactgatgaaggtgccaag

SEQ ID NO: 489440 - DNA, 100 bp, Homo sapiens
cagacgctgcaggaagaagaggtgaagctcaaggcacaggtggcccgatcccagcaggacattgaaaggccctcgggaccaaggatcacgtcatgactcc

SEQ ID NO: 489441 - DNA, 75 bp, Homo sapiens
tataaacgcaataagatcttcatggagttccgcaaattgcaaaggttaccaacttggcaagcctgtccgagctct

SEQ ID NO: 489442 - DNA, 100 bp, Homo sapiens
cgggcagctacacatcttgaaagagaagctcttcctgtgaggtaaaaatgttgtacatcagctctcagtaaccctagaagacttatataatggtgcaaca

SEQ ID NO: 489443 - DNA, 76 bp, Homo sapiens
tttgtcatgtagccaagactggagaaacaatgcacttcaggtggcaagacagctccttcttcagcagcaacagcag

SEQ ID NO: 489444 - DNA, 71 bp, Homo sapiens
gaactaaagcgggcaaagttagaccttccagaacctgttccagatttcggaaggttcacgagtgttgccga

SEQ ID NO: 489445 - DNA, 90 bp, Homo sapiens
caaattttcaagtgccaaacggaggaatacctcgtatgcaacctcaggcttcagccagttaatgttgaagaaggaaaatgcggaagtcgt

SEQ ID NO: 489446 - DNA, 97 bp, Homo sapiens
cgggaccccgccgccgccgccgccgccgccgtctggccccagaaccttctgataacttaagagagattctccaaaatgtggccagattgcagggagt

SEQ ID NO: 489447 - DNA, 76 bp, Homo sapiens
ggccagctgccgcgactgggaggagcgccggaacgccgaggcccagattgccaaggacatggaacgctgggcccgc

SEQ ID NO: 489448 - DNA, 100 bp, Homo sapiens
caatgatccttttgctcctggtggaacagttgttgcagcaagcgattcaggtaagaaccttgatgctgtccatgatatcactgtggcgtatcctcacaac

SEQ ID NO: 489449 - DNA, 104 bp, Homo sapiens
gttcctggtcctgacgcccccctcccgcccggaaagctgcccagccaccagcaaccccccaggaatactcccccagttgcaagaggcgcaggaccgtggaagac

SEQ ID NO: 489450 - DNA, 100 bp, Homo sapiens
tcgctgagcctcctcacacggttcgtcgtctcgggttcgagcccagtgggcttagccactcgccatggactcccagaaaccctgccaaggtaaccctgct

SEQ ID NO: 489451 - DNA, 100 bp, Homo sapiens
caaaggtcagggccccgtccgcgtgacgctcctgcctgcgcgcggccaagccatgctcggccccagatgccttcaattaagttgcagagttctgatggag

SEQ ID NO: 489452 - DNA, 83 bp, Homo sapiens
atctaccttctggaagctactactacgtggtgcttggaaagagctccaggcccggattcgaacttacaatcagcattacaaca

SEQ ID NO: 489453 - DNA, 100 bp, Homo sapiens
cgtatttataatatgtggaggagagagagctcaccatgctcaggaataggaggccttcaagattttgtgctgaaatctgcaacactgtgtagcctgccat

SEQ ID NO: 489454 - DNA, 101 bp, Homo sapiens
caatttctagctttgtaggagcatggcttggagcacttcctattccactggattgggaaagaccatggcaggaaaggaaacagattcattgtctgtctgag

SEQ ID NO: 489455 - DNA, 89 bp, Homo sapiens
cagtattgatgctcctccatcctttaagccagctaagaagtattctgatgtttcaggtctgcttcattacttagagcctccagtgaagc

SEQ ID NO: 489456 - DNA, 90 bp, Homo sapiens
tgtggactacgtctgtgcggctgcgtggggctcggccgcgcggactgaaggagactgaagggaaatcctcattgacgattcaatttgttg

SEQ ID NO: 489457 - DNA, 50 bp, Homo sapiens
attttggaaagcagtttttaagacaaaaagttcgtcgctgcttcctgtgc

SEQ ID NO: 489458 - DNA, 100 bp, Homo sapiens
ctgagatcaactatggaataaggtttactcagaaacactttgtgctactctgtggggctttggaaaagcatgttaaatgtgatattagggaagatgcaag

SEQ ID NO: 489459 - DNA, 100 bp, Homo sapiens
ctggatcccaccaaaggaaactgttacatgcattatggggcaccaccacgaggcgatttgtgggccataccaaggatgtgctgagtgtggccttctcctc

SEQ ID NO: 489460 - DNA, 100 bp, Homo sapiens
agatcttgatctatatccatagattggaatattggtgggccagcaatcctcagacgcctcacttaggacaacaattctgtggtgttcttggtcacacatt

SEQ ID NO: 489461 - DNA, 81 bp, Homo sapiens
gtcaagtctcattctgcttcaggggagctggttctttcagatggagatcttataacaatttttgatagttctgacctttcc

SEQ ID NO: 489462 - DNA, 75 bp, Homo sapiens
tcgttaaacatctgaaagggtcaggtaaagaacaagcacctttggagatgagtatgcatccagcggcaagcgctc

SEQ ID NO: 489463 - DNA, 75 bp, Homo sapiens
gaagaaaccagccgaacttcagggtttccaccgttcgttcaagtgtcaacagcatctccaccctggagcctgtga

SEQ ID NO: 489464 - DNA, 50 bp, Homo sapiens
cagaagtggaattgcttggtcaaacggcactgaacttcccagccctgccg

SEQ ID NO: 489465 - DNA, 95 bp, Homo sapiens
aggaacgaatctctcaggctgcatcaggatgaatgatgacccaagtatggaagatgacacagcaagaaggccctcaccagatgctgagcagatgc

SEQ ID NO: 489466 - DNA, 83 bp, Homo sapiens
cgtgccccaccatgtcagacgcagccgtagacaccagctccgaaatcaccaccaagcgtgaatgcatctcagtccacgtgggg

SEQ ID NO: 489467 - DNA, 95 bp, Homo sapiens
cagagccagaacctgagccagaacctgagcctgttaaagaagaaaaactttcgcctgagcctattttggatgttttagaagaatgtatgtctctt

SEQ ID NO: 489468 - DNA, 74 bp, Homo sapiens
gctaataaacacagtcttcagccctacattagacgaagttatacggaagcgtctcctcattgatggagatggtg

SEQ ID NO: 489469 - DNA, 99 bp, Homo sapiens
ctgttgtctcagggagcacagaataaatggcatggggaaaatctgattgccacagacagaagaatgaaactggatgcctatttctcacaatacacaaaa

SEQ ID NO: 489470 - DNA, 82 bp, Homo sapiens
cctgcagcgggcctacatcaagtcaagtccatcatctccagaaccagctagtcttcctgcagaagatattagtgcaaactcc

SEQ ID NO: 489471 - DNA, 100 bp, Homo sapiens
cagcaacaacagcagccggcccttgttaactacaacagaccatctgggcaagcaagctccacatatgcggaacaaactggaaagctgaccgaatttgtgt

SEQ ID NO: 489472 - DNA, 83 bp, Homo sapiens
taacagacccaacacaccaaagacgttgttagagaatacagtaatgggggcctagcagacatcttcacggtctttgccaagac

SEQ ID NO: 489473 - DNA, 75 bp, Homo sapiens
gaaccatcttcctgcacacagccaaagtctgcaaagcagatataatttctacagtagaatttaatcattctggag

SEQ ID NO: 489474 - DNA, 133 bp, Homo sapiens
atgattctcctggcagttgtcatatgtactgtgtcagccatcatgtgtgtcagcatgagagtggccacaagtaatcatcctgagactgactacaagaacaaagactgggtcttcatcaattacacgtacaagc

SEQ ID NO: 489475 - DNA, 100 bp, Homo sapiens
cacagaaaccttgccatcaggaaagttggagtgactggtccccctgatccacaagtccgctgtccctctgtcattgagtttgggaagtatgaaattcaca

SEQ ID NO: 489476 - DNA, 75 bp, Homo sapiens
ccgtccttctccactttcgccagcccgtgccgcgagcgcggcctgcaggaggtcaggcagcagttgagtgaaatg

SEQ ID NO: 489477 - DNA, 100 bp, Homo sapiens
gacttctaccgctgcggctactgcaagaacgagtcgggcagccgctccaatgttaccttatcccatatcacacaactggtcctcagccataacaagctaa

SEQ ID NO: 489478 - DNA, 97 bp, Homo sapiens
cggccggagcgggcggctgagacaaaggcgacggaaccttttgaggatggctttgcaaatggggaagaaagtactccaaccagagatgctgtggtca

SEQ ID NO: 489479 - DNA, 90 bp, Homo sapiens
ggggaatttctcctggggctcagagtatgatgttgaatttgaagtatcatcggaccgacggactgggaaacccattgctgttaaactggt

SEQ ID NO: 489480 - DNA, 98 bp, Homo sapiens
tgactcagagaaaggagacctcattccaagttccaggattaattctgatcagtgtgcgtgtgaccaccatggatgcagagctggagtttgccatccag

SEQ ID NO: 489481 - DNA, 100 bp, Homo sapiens
ctcgctctaaagacggaaccgccacagcactcaagttcgagaacttgtcttggacaattgcaaatcaaatgatggaaaaattgagggcttaacagctgaa

SEQ ID NO: 489482 - DNA, 100 bp, Homo sapiens
ctggagaagggattgcccagtcagcaaaggttcagccctccaagaaagatggatactatgatgctgaatgtgcggaatctgtttgagcagcttgtgcgcc

SEQ ID NO: 489483 - DNA, 101 bp, Homo sapiens
aggttcctggagttaccgccattgagctagatgaagatactggaacattcagaatctacggagagttttttgctccactcaagcctgttagaatcaccatg

SEQ ID NO: 489484 - DNA, 96 bp, Homo sapiens
atgccaaggacaacatgtggctgactccactgcaccgggctgttgcttccagaagtgaagctcatcaacagagcagacgagcagaccgtttattag

SEQ ID NO: 489485 - DNA, 74 bp, Homo sapiens
ctcagaaagatggatttttgcatgagacgcttctggacaggtgacttaagagattaaaattaatttggttgctg

SEQ ID NO: 489486 - DNA, 100 bp, Homo sapiens
cgcctgcttcccgtctgcgcgagtccacgcagctccccagggacaaatcagctgcagagaagagaagacagttgatccaggagtccaaattcttgggtgg

SEQ ID NO: 489487 - DNA, 80 bp, Homo sapiens
agcgcaaggtcgccctcaaggccatgatcaaaacgtggccgtctgcccggcccagcaccatgcacacgcttgtgttcttg

SEQ ID NO: 489488 - DNA, 88 bp, Homo sapiens
gtttctcaaggactttggggatctcaagacagaggaacagtacataccgagcatcaaatattaaggcacccggagaacagacagtacc

SEQ ID NO: 489489 - DNA, 75 bp, Homo sapiens
atactactaactttgaaatggaataagagccttttagaagatccttacccgatggtccgttccacagggatcctt

SEQ ID NO: 489490 - DNA, 75 bp, Homo sapiens
tccgcggccggcccggcgcggcccagcgccctcagcaaccatgtccaagggacctgcagttggtattgatcttgg

SEQ ID NO: 489491 - DNA, 78 bp, Homo sapiens
tcgaatatatggattgggatctttaggacattgagatctgctggttggagatcttagtgcccaaggaagaatgcttgc

SEQ ID NO: 489492 - DNA, 101 bp, Homo sapiens
ggagccctgggtcactttcagtgagtcatcgctgacagctgaggaagtctgcatccacattgcacataaagttgctatcatggtgaacttacttcagattg

SEQ ID NO: 489493 - DNA, 100 bp, Homo sapiens
gtgatggtgaaacttaagtggggaatggagtacaagggctatctggtatctgtagatggctacatgaacatgcaggagcttgaagaaatccgcaaatgtg

SEQ ID NO: 489494 - DNA, 98 bp, Homo sapiens
cacgaagttcagcccagaggagaaactcgctcgccttcagaagacagctagagttgggaagacatcactgattatgtctctggtcagtgaagaatttc

SEQ ID NO: 489495 - DNA, 114 bp, Homo sapiens
atgtagaatacttgggtgacatctgcctgagagatctccaagaattacaggccaggagtggtggctcacacctgtaatcccagctctgggaggccaaggccagtggattgcttg

SEQ ID NO: 489496 - DNA, 100 bp, Homo sapiens
ggggggaaagagccccagcaccgcccctcctggaagaaggaagagcagccagactgccttccgggtcactgccatggaggagccgcagtcagatcctagc

SEQ ID NO: 489497 - DNA, 50 bp, Homo sapiens
aaggtgtcaagaagctcagaatgagagagactcccgtgagcacgaggagc

SEQ ID NO: 489498 - DNA, 75 bp, Homo sapiens
gggaccacggtcaccgtctcctcagggccgagaactactggtggcgtggccagaacacacggacgctgtgtgtgg

SEQ ID NO: 489499 - DNA, 100 bp, Homo sapiens
tttaatctctatatgttcaaaaacaacaaccccatcagcaactcccaggacatcaagtgcttcatgacagaagtctctattatctgggggaatgtatcag

SEQ ID NO: 489500 - DNA, 83 bp, Homo sapiens
ggagcccaaacccggggcaggcgggcagctgtgcccgggcggcacggccaggctcctgctccagcccagcccccagagagcag

SEQ ID NO: 489501 - DNA, 92 bp, Homo sapiens
ggaccatgtccgggaggcgcttccacctctccaccaccgaccgcgtcatcaaagaccttttcagaggcaattagatttaatgcagattatgg

SEQ ID NO: 489502 - DNA, 100 bp, Homo sapiens
ccaaagttgcatttcctcgtcgagcgcaacccaagagttgtctgctggttctcagcttgaagaagattctgcagtccttattgatcctttttcttggcgt

SEQ ID NO: 489503 - DNA, 100 bp, Homo sapiens
cgagtagttaaccaatttgccagacattatcagactggacagcttggtgatccagctatttttcctgccgtaattgtggaacatgttcctggtgctgata

SEQ ID NO: 489504 - DNA, 98 bp, Homo sapiens
gacagaatcatctagaaggacaaatgaacttcaatgcagattctagccaacataaaggttaaacccatccagagtaatggctgcggccttacccagga

SEQ ID NO: 489505 - DNA, 75 bp, Homo sapiens
ataactgaagatatgcttcgtgggatctttgagccttttggaagaatgttgatgcctaagaagaaccggattgcc

SEQ ID NO: 489506 - DNA, 74 bp, Homo sapiens
gtacgtcccacgtccggcggcaggagctggcggccatccaggacgtgattgactggggcgactttggggtagag

SEQ ID NO: 489507 - DNA, 100 bp, Homo sapiens
caagacttactgaatgtcctggcccggatgatgaggccagtgagtgatcaagtggagctgctaagacacatggttgcacagaaggtgaaaccaaatcttc

SEQ ID NO: 489508 - DNA, 74 bp, Homo sapiens
tccttctccagcatgggctcgcctgtcaacgcgcagatcagcacttgactgtttattttcaaatctcacgaacc

SEQ ID NO: 489509 - DNA, 98 bp, Homo sapiens
gaagatcctggaggtggatctgaagaacggcattttgaaagcgaagcagaagccgtagaatcagcggcgagcctgttgaaagaacccacaggtgcatt

SEQ ID NO: 489510 - DNA, 82 bp, Homo sapiens
tcgggccgcagccgccggcaatgccgcgaaggaaggtgagacacagtaacctggttgaactctgcatctggaaagctgaaga

SEQ ID NO: 489511 - DNA, 97 bp, Homo sapiens
ggaggccgtccagcagatggcggatgccctgcagtacctgcagaaggtctctggagacatcttcagcagaacaatccatttcacagatgaagaaaca

SEQ ID NO: 489512 - DNA, 96 bp, Homo sapiens
ccgcgcgcagggcctgcagcgggagctggacggcgagcgcgagcggcgcgagaaagccctgtttgtgctcttcgtcctggcctacatccacatcgt

SEQ ID NO: 489513 - DNA, 83 bp, Homo sapiens
aaatcttgtgtcagatctagctggacttggctgtcccctttcctccaacccaacggcttactttcaaggaagtatttgagaat

SEQ ID NO: 489514 - DNA, 113 bp, Homo sapiens
cagacttctctcaactgattgattgtccagagtttgtaccaggccaagccttttgctcacatacaggattaaagcaaggagagccaatcatgactggcaaaacacagaccagc

SEQ ID NO: 489515 - DNA, 75 bp, Homo sapiens
ctcagaagccatgcccctcaggctggaacttgccctgtctcctcgcagatgagagaatggatcttggagaatgtc

SEQ ID NO: 489516 - DNA, 98 bp, Homo sapiens
tcaagtgaagcaaaagccttccatgattacgttggtcaaagaaaaagtgatgtatgaaaaagaggcaaaacaacaagaagaaaagattgaaaaaatga

SEQ ID NO: 489517 - DNA, 83 bp, Homo sapiens
tgcgctggaccgtcgccttgctcctcgccgcggcggggactgcagacacgatgaggcgagtggtacgacagagcaagtttcgg

SEQ ID NO: 489518 - DNA, 85 bp, Homo sapiens
ccgtgggcacgctctttactccatgtgtgggacattcattgcggaataacatcggaggagaagggcagctgcaatgactctccgc

SEQ ID NO: 489519 - DNA, 74 bp, Homo sapiens
gagaagttagcttcagagttctttgtggatggacttgattctgatgagagggatgggcgtgttttgggcgtgct

SEQ ID NO: 489520 - DNA, 116 bp, Homo sapiens
cagctcaagaacggcagccttgactccccagggaagcagatcgttctgtacttgcgcatgtgccttgcgcacagtgcgggggtggtgcccacctctcagagtttggctgatatgca

SEQ ID NO: 489521 - DNA, 97 bp, Homo sapiens
atcgcctgctacagaaacaaggtcgtcggctggcggagcggcttctatgatagtagtggagcttccaaagatgaaattaaggagagatttgctcaga

SEQ ID NO: 489522 - DNA, 75 bp, Homo sapiens
gaaccatcagattagccagcagacccagctacgtggactagagcagataatcaccagaatgggagtgaatgactt

SEQ ID NO: 489523 - DNA, 80 bp, Homo sapiens
gagaatatgtgcggcattatccacgaggcaaacgtacttccagcggcaatgtaagcaacagaaaggatgagacaaatgct

SEQ ID NO: 489524 - DNA, 98 bp, Homo sapiens
agtgcccacacctggctttggcaatgtggaagagattcctgagaatgacaggctgtattcgtgcctggccaatggcagtgcggatgagtttcagcgag

SEQ ID NO: 489525 - DNA, 100 bp, Homo sapiens
ggacagattgctgaccaggggcttgagagctgggttctattttccctcctcaaactgactttgcagccacggagaggtgtctgacttccagcaactgctg

SEQ ID NO: 489526 - DNA, 75 bp, Homo sapiens
gctgagaggagtcttctggtgcagtcttattttgaaaagggttctgagcaaggttcaaccagtcaagaacaggcc

SEQ ID NO: 489527 - DNA, 100 bp, Homo sapiens
cggcagagtccccgtacgcctacagtaacggtggatccataaagaacccagccaacccgcagagggaggggaggggctgagctgtgaggagagcggggcc

SEQ ID NO: 489528 - DNA, 75 bp, Homo sapiens
cacgaagtttgtcggcccttgccttggcagagctgagttacagaatgtctgaaggggacagtgtgggagaatccg

SEQ ID NO: 489529 - DNA, 75 bp, Homo sapiens
ttcaagagcacagtcttatgtaagaacgagcctctgactccaggttatcatggattcccagcgcgggacagccag

SEQ ID NO: 489530 - DNA, 82 bp, Homo sapiens
cacaatttatcattgaataagtgttttaagaaagtggacaaagagaggagtcaggtggctgtgaaaaacaatatcgatgtct

SEQ ID NO: 489531 - DNA, 100 bp, Homo sapiens
ccgtgattgtggatggcagaaaatcacagtggaatgtggtgaaaacagtagtcgtaatgctacagctgccactgcagagccccgccatggaagacacgcc

SEQ ID NO: 489532 - DNA, 75 bp, Homo sapiens
tcggtcacgaaaactggacaaaaatattgaaggatgtttgttccaagatctctaaaaatcaagaggaatgctaat

SEQ ID NO: 489533 - DNA, 82 bp, Homo sapiens
cttggaacgaaagtctccccatacctgctggcagacttaattcagtgcacaaatgagatgaatgtgaacatcccacagttgg

SEQ ID NO: 489534 - DNA, 74 bp, Homo sapiens
cgctccggctgtaaggagccgcggcggggggaaaatggagcccttcaccaatgtgtcctgttggataaacgttt

SEQ ID NO: 489535 - DNA, 111 bp, Homo sapiens
cgtgccccaccatgtcagacgcagccgtagacaccagctccgaaatcaccaccaagatttcaaggccagagaatggcaggggaacagaaaccctcaagtaatctcctggag

SEQ ID NO: 489536 - DNA, 75 bp, Homo sapiens
agaagctgcaggctgccaatgcggaggacatcaaggtttctgcataaagaccaactcctcggaagggaaggtttt

SEQ ID NO: 489537 - DNA, 71 bp, Homo sapiens
gtaactttctcccttgatccgggagtctttccactggaccaagatcactccatggatgaaatgacagctgt

SEQ ID NO: 489538 - DNA, 104 bp, Homo sapiens
agcgcccctagggagtcggagcccggaagctggagccacctgcgggtgcagagcattgtagaccaaggagccatggataggagaagtatgggtgaaacagaaag

SEQ ID NO: 489539 - DNA, 80 bp, Homo sapiens
gcgggactctgaggaaaagctcgcaccaggtcacggcagttgcacaacagaatcaaggagaggtccctgaaccccaagat

SEQ ID NO: 489540 - DNA, 87 bp, Homo sapiens
ggaagataaggagctcttcagatactgcactctccccgaggcggccttctgatctgtttaccacgtgagcaagcagctcggttctgt

SEQ ID NO: 489541 - DNA, 98 bp, Homo sapiens
caaagtctatgattatgtaagaaagattcttaagctgcctcattcttccatcctcagaacttctcagaagcagagtttagagcttaccagtgatctca

SEQ ID NO: 489542 - DNA, 100 bp, Homo sapiens
cggcacggcagccaccatggcgctcctgctgtgcttcgtgctcctgtgcggagtagtgggaactcaccttcgaggcttggaaaccacagccacgtatgac

SEQ ID NO: 489543 - DNA, 100 bp, Homo sapiens
ctgaaggtaccgcggacctcgccccgggacagcgaggagctgagggaccctagcgcatcagcgaggaggtggggctgctgcagctccttggggacccccc

SEQ ID NO: 489544 - DNA, 82 bp, Homo sapiens
gggggatcgaccgggacagctaccggcgcatccttatggtctgtgcagacttttgcagacaaatcaaaacaagaagctctga

SEQ ID NO: 489545 - DNA, 101 bp, Homo sapiens
ctgcagaggcgctggagctgggtcagtccgccgctcaccccgcggccgcaccttcccgccttctcagccccaggatgctcccctgcgcctcctgcctaccc

SEQ ID NO: 489546 - DNA, 90 bp, Homo sapiens
atcggctgcgagctcctcaagaatctcgtgctcaccggtttctcccacatcgacctgggacgtccagatcggtgacatcgtcacagtggg

SEQ ID NO: 489547 - DNA, 98 bp, Homo sapiens
gaagccactcatggcggtcagcactgtggtcctccaggccttcgagggggaagacggtggggcctccccacctgccccgcagaagatgcagttctttg

SEQ ID NO: 489548 - DNA, 80 bp, Homo sapiens
ttaccatgaatagttctactccttctacagatctaaagcatgtattccttatttgaaaaagagcaaagttgctcatatcc

SEQ ID NO: 489549 - DNA, 90 bp, Homo sapiens
cagatgctaatttgggaaaaagctccaggattctgacagggatgttgcgaagggtcagtatagaccttctgatttgctgtgccctgagac

SEQ ID NO: 489550 - DNA, 100 bp, Homo sapiens
gtccccagaacgcagatcagaggtagtcggacctttcccgctggcgcgcagcctcagctaggactgatcctttgaaatactccagccatgactaaaagag

SEQ ID NO: 489551 - DNA, 75 bp, Homo sapiens
cagcccgagaaaccgcagcactacacgtctccaggaaacctagagaaaaaccgttatggggatgtaccctgcctg

SEQ ID NO: 489552 - DNA, 73 bp, Homo sapiens
tcaatgctgcgaaagctgccaaaagtgacatgcagacgtgaatgtggaccagccagatgagaagtcaatcatt

SEQ ID NO: 489553 - DNA, 83 bp, Homo sapiens
ctacagcttcagaagaccgaagcgttcgtatctggaaggttgagcttcagcgacagcgagagtgacaacagcgccgactcctc

SEQ ID NO: 489554 - DNA, 74 bp, Homo sapiens
caggcggatctcagaaggccagttcaaaggaagatgcccaggatatggatgcctataccctggccaaggcctac

SEQ ID NO: 489555 - DNA, 100 bp, Homo sapiens
ttgagaaaaggcctaagaattttggcattgggaagctgtgattaagcactcattggtgcataaagtattcttggacttttttacctatgcaccccccaaa

SEQ ID NO: 489556 - DNA, 98 bp, Homo sapiens
tgagcagtcagcccgcgcgccggccggctccgttatggcgacccgcagccctggcgtcgtgtgtttctaagacctcagagaaatttggaatctataga

SEQ ID NO: 489557 - DNA, 83 bp, Homo sapiens
caacaggctgccaataaaggagcaagatggctaggggttctgaatgatgactgacgcgggtttgggtgatacccctcacagcc

SEQ ID NO: 489558 - DNA, 83 bp, Homo sapiens
gccaagttcggggccaggacgtcgggaggacctgatctattccagaggggagcttcaccacttcattgacggctttaatgaag

SEQ ID NO: 489559 - DNA, 90 bp, Homo sapiens
cgcgctcaccaagcaggtgctgaaaggctcccggagctccgagatatatgtaatcgacagtgcagacagaaaaagatttgaagagacggg

SEQ ID NO: 489560 - DNA, 82 bp, Homo sapiens
cccgctttgttcagctgcagcatggagagatagataaacgggatgttgtcttggagcttgaatttgaaggtgtaaaggagaa

SEQ ID NO: 489561 - DNA, 90 bp, Homo sapiens
gtggtataaaatggcggatttcgaagagttgagggtgtccctggcaaccttgtgtgtctatttcttactggatgaaggaaacattttaac

SEQ ID NO: 489562 - DNA, 98 bp, Homo sapiens
gttcctgcctccagctgccaggggggacagccagccagcagcaggaggtctcaaaccatgaattatgtgggacagctggctgggcaggtgattgtcac

SEQ ID NO: 489563 - DNA, 75 bp, Homo sapiens
acctgcagaaggtctctggagacatcttcagcagattccttcgcctcagaaaccaatctagattttagaagtggg

SEQ ID NO: 489564 - DNA, 100 bp, Homo sapiens
ggaaaagtccaagcatagcaacagcaaggagcaaggaccaaccccagtggagaaaaagaagaaaggaaaaaggaaaagtgaaactacagtggagagttta

SEQ ID NO: 489565 - DNA, 100 bp, Homo sapiens
tatctaacagccaatagaaaagcagaaagccgcctcttggtttgcgtcctgcactgaaaggaaatgacggattttaatgtgacagtgatgataacatggg

SEQ ID NO: 489566 - DNA, 99 bp, Homo sapiens
aagcccctgtcaccgtgacctcccttcccgccggagtgcggatggttgtgccaacacagagtgcccagggaacggaagctggagaagcttcgagagaag

SEQ ID NO: 489567 - DNA, 90 bp, Homo sapiens
cggagcccgaggcgggagccatgccggagaagcgcgcgggcgcgcaggccgcggggagcacctggtccagttacaacacagggatcacaa

SEQ ID NO: 489568 - DNA, 100 bp, Homo sapiens
aatcaactgccatttcaaagaatatagatggttttgaaaagttcatgctgtcccttcattgaattttagctccttgtgaaggcaacacattcttctgcca

SEQ ID NO: 489569 - DNA, 75 bp, Homo sapiens
tgctggatgtcaacggcctctgtgtgatgaatgcagactctgctaccattttggctgtttggatcctcctttgaa

SEQ ID NO: 489570 - DNA, 75 bp, Homo sapiens
acgacgtccctcaaaccttgcttctaggagataaaaaggccgaggacgatgatcccgccgggggagtgcacgtac

SEQ ID NO: 489571 - DNA, 100 bp, Homo sapiens
attccaagtaactcttatttgggctattgagtggccagacttccccaacaaatgccaaattggagaaactggactctcagcaggtgttgcagctctgcct

SEQ ID NO: 489572 - DNA, 101 bp, Homo sapiens
tgaggaacactacataagcgaggctgtggaagatgctcccagctacagagggtaccgggatgcctgcaccattactgactggtgatgtacatcgagagaga

SEQ ID NO: 489573 - DNA, 82 bp, Homo sapiens
aggtattgggagatccacagctaagacgccaggacccactggaagcctagaaatgctccagtgatccacaagctcagaaata

SEQ ID NO: 489574 - DNA, 100 bp, Homo sapiens
atccacagccctaccccatctgtaacagaagaagatattgataatgaagatgatgcaatggaattgctggattttcagctgaactctcatctctcaacac

SEQ ID NO: 489575 - DNA, 74 bp, Homo sapiens
gcaaacttgacactcaccctgaccgcaatgtctcaggctgtgcagacaaacggaactcaaccattaagcaaaac

SEQ ID NO: 489576 - DNA, 123 bp, Homo sapiens
cggggcctgaggagcgggcacagggcaaggcggcggacggctgcgtcgcccgaggcgaggaggagcgctggcgacacgatgaggcgagtggtacgacagagcaagtttcggcatgtatttggg

SEQ ID NO: 489577 - DNA, 82 bp, Homo sapiens
cctgaagaaggtcagtgtgcttgcttggagatcaggacgcaaaggtcagcccaaggccaaccccactgtcactctgttcccg

SEQ ID NO: 489578 - DNA, 48 bp, Homo sapiens
gaacaaacacttctggatgcatccgagggtgcatctgcccggaagact

SEQ ID NO: 489579 - DNA, 90 bp, Homo sapiens
gaagaacaagcgagaagagaagaaggcccagaactctgaaatgagaatgaagagagctcagtcggtcctgaccgccagcctgtcgtacat

SEQ ID NO: 489580 - DNA, 100 bp, Homo sapiens
caggaggaagaagaagtcattgtcacagaggggtctcctatggacagaagtgcgggcaaggagctttgttcctccccgatgtcaccctcccacagcccac

SEQ ID NO: 489581 - DNA, 100 bp, Homo sapiens
gtaaagaagctaagtggaagagtgtttcctcctctggccgtaaagcaggtactctctgcagcaccagggtggagagttctgaggagcctgtatatgagag

SEQ ID NO: 489582 - DNA, 75 bp, Homo sapiens
gggagttgaaggctgcagtgagccctgtttttgccaccacactccagcttgggacagtcattttgtttactcatt

SEQ ID NO: 489583 - DNA, 100 bp, Homo sapiens
ctgaatcaatacagccagctgtgaggggagcacttcctggacccaggaagggagagtcttcttccaaggttcttctgtgtggcagttcagaatgatggat

SEQ ID NO: 489584 - DNA, 90 bp, Homo sapiens
cgccgagccacccgcccgcccaaggtctctcgcgggcgggagaacggaaaactcccaacttcctgtgaggatcaaggttcaaaagcctct

SEQ ID NO: 489585 - DNA, 82 bp, Homo sapiens
tcctgcctcggcctcccaagtagctggaactacagataactgataccgtgcttccagaagatttttctaacagtgtttgcaa

SEQ ID NO: 489586 - DNA, 100 bp, Homo sapiens
atcccagtggctcatgacactaagaagtaaaattacgaactcactgagctggaagtcattcaacgggaattgaatagggttatgtgcttcacatgatcac

SEQ ID NO: 489587 - DNA, 98 bp, Homo sapiens
aaatcaagaagctgaatttccaggccttcgccgagctgtgcagggtcctcactgagcagcgagtcgtcccccgtgtcctctccggccaccaaccacag

SEQ ID NO: 489588 - DNA, 85 bp, Homo sapiens
aacatgtacacctcatccctgtacgggtgcctggcctcgcttctgtcccatgccctgcaggagtcattaaatcaaaacttcatgc

SEQ ID NO: 489589 - DNA, 128 bp, Homo sapiens
cgatgctcttcttggaaaaccagatccagaaactggaggagtcccgctcgaagctagcatatttccttcacaaacagaaaatgaatgaaaataaagatactgattcaaagaaaagtgaagaatacgaa

SEQ ID NO: 489590 - DNA, 82 bp, Homo sapiens
gcactttggcatggcccatcccctaatttctgaccagaagccctccctctaccctaagtgttctaagaacggaagcatctgg

SEQ ID NO: 489591 - DNA, 75 bp, Homo sapiens
gatatctgtgataaagttggtcagtctcgcactgggataccgttaaccctggataaagagaatggaggttacctc

SEQ ID NO: 489592 - DNA, 100 bp, Homo sapiens
gagagatggtcaggtctggagctcgaccgggccagcaaccccaaggtccaggtggaggccatcgaagggggagccctgcagaagctgctggtcatcctgg

SEQ ID NO: 489593 - DNA, 100 bp, Homo sapiens
ttcttatagaaaatatggatctttacatgttgaatccttgcagcactaaaatttggttgcctgtggctggagaaaggaatgtgctcatcaccagtgccct

SEQ ID NO: 489594 - DNA, 101 bp, Homo sapiens
tcagcactatttgaaacttttatctcatctggcttggcgcctgaggttctcccattaggtgtacgaagccatcgacagcagagatggagcatcttgtgcag

SEQ ID NO: 489595 - DNA, 90 bp, Homo sapiens
cctagaactccaaggagaaaggcggcgggaatttgaagtactgccttgtaattcttaatcagcctttggacaactattttcgtcatcttt

SEQ ID NO: 489596 - DNA, 75 bp, Homo sapiens
tctgaaaatgcccctggggagacacatgcacaagacagattgccaaggatccaagatttgaacgattaccatgta

SEQ ID NO: 489597 - DNA, 100 bp, Homo sapiens
tcggcagagcaaggggcttacgcagaaggacctggccacgacctgcgaccgcatcaagcagtccgccagcggaaccaagcggcgcgtgttcatcatcgag

SEQ ID NO: 489598 - DNA, 98 bp, Homo sapiens
cttctaccggaggcgggacatctccagcaccctcatcgccctggccgacaagcacgcaaacaatgcagatcttcgtgaagactctgactggtaagacc

SEQ ID NO: 489599 - DNA, 90 bp, Homo sapiens
catgcggacatcggcttctgcctggtgctctgcgtcctcatcgggcttatgttcgaggctccctacacaccttttctcactgaattgatg

SEQ ID NO: 489600 - DNA, 90 bp, Homo sapiens
ggctgtgggattaatttcaacgagaaggcgatccataaggaggactgcgggaagcccctgtcgattgaggcagatgacaatggctgcttc

SEQ ID NO: 489601 - DNA, 110 bp, Homo sapiens
ccgccggcgccggcccagcagctgcagccgcagcctgtggctgtgcagggccccgagccggcccgggtcgagttgcctttccccatcttcctggttctgctccttcgtgg

SEQ ID NO: 489602 - DNA, 78 bp, Homo sapiens
gagctgtggcagtggttgtggatcccattcagagtgtaaaaggaaaggagtatgcatcaacaattgtgtcaggaactt

SEQ ID NO: 489603 - DNA, 75 bp, Homo sapiens
taagagctgggcaccaggaagcgaaggctggtggtgatgatgtccagcaactctgtgaagcaggagaagaggagt

SEQ ID NO: 489604 - DNA, 90 bp, Homo sapiens
caggacatagcaactctggctgatcaaagaagagcagcccatgttactccacaggatccgctgaacataggatgttgccacaaaatctac

SEQ ID NO: 489605 - DNA, 100 bp, Homo sapiens
atccagtgttcaccatcctggccccggaagggatgattctctgaacgactgtcggatcatcttcgtggacgaagtcttcaagattgagcggccgggtgaa

SEQ ID NO: 489606 - DNA, 101 bp, Homo sapiens
cggagccaggctggtttcggaaatgcccttacagcagcagatccattacaagattttggcttttctgttgaaaagtgttccaagcaattaaaatcaaatat

SEQ ID NO: 489607 - DNA, 98 bp, Homo sapiens
attggcaagctgctactacagcatgggggtgtcatggagaaactccagctgggcccagagattctgcagcgggaaaatccaaggcttatttatgccag

SEQ ID NO: 489608 - DNA, 82 bp, Homo sapiens
gggctcacgtgggagctcagtgccctcctgctacagatctgtctcttccttacaatggtgtggacactgccagcggctgcag

SEQ ID NO: 489609 - DNA, 82 bp, Homo sapiens
tgaagcagccgccctggagaaacagatcgggggcgacgatggccttctgaggggctgggacaccagggtacccggcaaattt

SEQ ID NO: 489610 - DNA, 100 bp, Homo sapiens
cgtgcgagaggaccaacggagcgctgaggcgggcgttttcttggatgaattgcttgctttggaggtcctggcattgatgtgcctgctccagacatgagca

SEQ ID NO: 489611 - DNA, 101 bp, Homo sapiens
tagccgtctggctcttggtcgggctcagcctcggtgtcccccagttcggcaaaggtcgttgaggacttccacatggagattggcacaggaccagactcaag

SEQ ID NO: 489612 - DNA, 98 bp, Homo sapiens
gtcggagagccagctcaagaaaatggtgtccaaggacctgaaggagaagaaggagaaggtggaggagaaggcaagccggaaagagcgaaagaaagaag

SEQ ID NO: 489613 - DNA, 100 bp, Homo sapiens
acgagcagtgatggctgaaaaggatgctttagaaaaacacgatcagctcttagacaggttataccttattggtgtggacgttgtctaaatttcggtagcc

SEQ ID NO: 489614 - DNA, 83 bp, Homo sapiens
cgagggccagctgacggagatggtgcagaagatggaggaggagccagcaccgctctttgaccttgccatgcttgccttagata

SEQ ID NO: 489615 - DNA, 100 bp, Homo sapiens
tcctgggaggcattcccaatgagaagtacgtcctgatgactgacaccagcttcaaggacttctctctcgtggagggagaacctcaatactcaagtcattc

SEQ ID NO: 489616 - DNA, 100 bp, Homo sapiens
gtcttaatgaagaacaaagaaaacagttacaggacatagcaactctggctgatcaaagaagagcagcccatgctctggatgagggggatattgccttgtt

SEQ ID NO: 489617 - DNA, 100 bp, Homo sapiens
aggggtggccactctcaccccctcctccacttgcccctctctggttgaagggcggtacggtgccactgacctgagggtagcagtggtgggcaacgtggat

SEQ ID NO: 489618 - DNA, 51 bp, Homo sapiens
ctgctgctgctgctgctgctgctcccagtggtccttcagcaccatcagcag

SEQ ID NO: 489619 - DNA, 101 bp, Homo sapiens
ctgtgtcaaaagagcttctctccagagtagaaagatcgtcagtatttaaacagatcacatcatgcgtgagtacaagctagtggtccttggttcaggaggcg

SEQ ID NO: 489620 - DNA, 100 bp, Homo sapiens
ccgtaacatccaggttgatgaagctaatttattgacttggcaagggcttattgttcctaaaaagcttgtggtgaaggggggcaaaaaaaagaagcaagtt

SEQ ID NO: 489621 - DNA, 100 bp, Homo sapiens
ccttgagctccaggagttcgtctcttacgtctgcggaagtgcagctgcctcagttcttagcgcagttaattggccttggtcctcacagctccaaaaagaa

SEQ ID NO: 489622 - DNA, 90 bp, Homo sapiens
catctcagcttctggtttctaagtccatgtgccaaaggctgccaggaaggagacaacaagggaggtgtcacagttttccatttagatcaa

SEQ ID NO: 489623 - DNA, 98 bp, Homo sapiens
tcgcgggaagctcagccgaattggagttggagcccccggattgcgctgaccctgaggcctcagctgttgaagaacgctctgcagagagcagtagagag

SEQ ID NO: 489624 - DNA, 96 bp, Homo sapiens
tttttctcagaagagaattccacaaggctgacttatccttgtataatgaattccgattgtggaaggatgagcccacaatggacaggacgtgtcctt

SEQ ID NO: 489625 - DNA, 100 bp, Homo sapiens
cgaagatttaatttttgagtctttaccagagaatgcatcacacaagttagaggttaaatgggccagggaaaactatcaccataacattggctcaccatat

SEQ ID NO: 489626 - DNA, 75 bp, Homo sapiens
gcccggaggacctgcctctcgtcaggtgtttgtggccagtcctcacaaaacacagcctattgtggagatcctgtt

SEQ ID NO: 489627 - DNA, 98 bp, Homo sapiens
caacaagaaaaagaagcgtatggactactatgactctgaacaaggcatttcatccttcatgaagccattcaggattttgaattgcatatgagtgcttg

SEQ ID NO: 489628 - DNA, 100 bp, Homo sapiens
cttcagttcttacaagttcaaccaccttgtaccaagatcaagaagctactctagaagtcggagcagaggatggtacagcagaggccgaaccagaagccgg

SEQ ID NO: 489629 - DNA, 88 bp, Homo sapiens
cagcctctagagtagccgagaccacagaatttatccagttggcgaaggactttgaggatttccgtaaaaagtggcagaggactgacca

SEQ ID NO: 489630 - DNA, 75 bp, Homo sapiens
caacaagggcccttcctatgggctctcggccgaagtcaagaacaaggttttaatataactgcaggagttgatgaa

SEQ ID NO: 489631 - DNA, 100 bp, Homo sapiens
gatgtgcacctagggggcggctaccccgtggggcccacctgccgtttgctgtcattggcagcacagaagaactgaagataggcaacaagatgatgagggc

SEQ ID NO: 489632 - DNA, 75 bp, Homo sapiens
ggtgtggacgccactacagttcatcaacatcaactacgtccctctgaagttaagggaagaaagtcggaggctggc

SEQ ID NO: 489633 - DNA, 98 bp, Homo sapiens
accatttacccaagccagagcacattggatccgagcagttaccaaggttcgactccagctgcaggagagaggaaaatatgatgttcccaagtggctct

SEQ ID NO: 489634 - DNA, 90 bp, Homo sapiens
tcctgagtcctcgagcgcgggaagaaagccacaggtggaattaagaaatctggcaaaaagtaagctgttccttgtgcctgaggagatggt

SEQ ID NO: 489635 - DNA, 100 bp, Homo sapiens
acacccgcaggaactcggcagaggagaaattcagacggctcccgaggaaactatgttccaacttcctgtcaacaatcttggcagtttaagaaaagcccgg

SEQ ID NO: 489636 - DNA, 50 bp, Homo sapiens
gtgacaccaacattctggacacgtgggcgctggaagatctggaagttact

SEQ ID NO: 489637 - DNA, 82 bp, Homo sapiens
gcagggcctgcagcgggagctggacggcgagcgcgagcggcgcgagaaagaattcctggtgactggaagggggagtgactca

SEQ ID NO: 489638 - DNA, 96 bp, Homo sapiens
cggaggaccatgatgggaacaagatcctcctacaggacatggatttgattgacatactttggaggcaagatatagatcttggagtaagtcgagaag

SEQ ID NO: 489639 - DNA, 98 bp, Homo sapiens
cagaattagaaaggagctgcttcccaataaggaaacagaaaaactggtctacttcctggattgttctttctagtcgaagaattgaattttacaaagaa

SEQ ID NO: 489640 - DNA, 50 bp, Homo sapiens
gctcctatgacagcttcgacacttccaggccagtgaaagacgtgttcacc

SEQ ID NO: 489641 - DNA, 51 bp, Homo sapiens
gactgtgggctggtgtgtggaactggctggtgcctctgccgagatcaccct

SEQ ID NO: 489642 - DNA, 100 bp, Homo sapiens
agcatgtcagcatgaccaagcgcctctactacctctggatgtccttcctgtgcatcggtggatctgcagggagacagctccttacaggtggagatttctg

SEQ ID NO: 489643 - DNA, 82 bp, Homo sapiens
gtggagtccatgctacctgattgcccccgggtctcagcaggaacgaatgcaggaatttgggaactgagctgtgcaagtgctg

SEQ ID NO: 489644 - DNA, 100 bp, Homo sapiens
tgtttgtaactacctggcattgccttttgttgagggaaaacaaagtgcatgatgaagtcttcagactgtgtcataaagcatgctggtgtatacagtactg

SEQ ID NO: 489645 - DNA, 100 bp, Homo sapiens
atttggaaaaacactagagacagacggctggcaggccatcatctctcagcaaggtgacatatttgtttttgacctggagacctcagctgtcgctcccttt

SEQ ID NO: 489646 - DNA, 100 bp, Homo sapiens
ttcggaagaagagccagggcagcaagaatcctcagaagtactcggacaaggagctgcagtgcactgccagaagatcgtccacagggacatcaagccatcc

SEQ ID NO: 489647 - DNA, 75 bp, Homo sapiens
gtgggggtgtttgtccagcgactccggggcctgatgaatgacatcgctcgctttgccctgtcatttttggtcatg

SEQ ID NO: 489648 - DNA, 98 bp, Homo sapiens
caccttctgatacacaccaaccaaccagtcaaccagccattgctgtttactggatacctggtttattcagtcaccatgaagctgctgctgctgcaccc

SEQ ID NO: 489649 - DNA, 75 bp, Homo sapiens
ttctgtctgcaggagatggctcaagagaaagtgtcttgggacaaggtgcgcattcctggtgtgctgcagcgattg

SEQ ID NO: 489650 - DNA, 82 bp, Homo sapiens
cgacaagccgctggcagccgcggatctcaccgccgctcagggagggtgtgaagacagagaatgaccacatcaacctgaaggt

SEQ ID NO: 489651 - DNA, 75 bp, Homo sapiens
ctctccttgcagctgcttagacgctggatttttttcgggtagtggaaaaccagaaagtttcctacactactgagg

SEQ ID NO: 489652 - DNA, 100 bp, Homo sapiens
cgccgcgtagcttccatccgccagctgccatgagcgagcgcctccgtcccagagttttgcggcctccaggtggtggatccaatttttcattaggttttga

SEQ ID NO: 489653 - DNA, 74 bp, Homo sapiens
ggactacagagccggtgatatgatctgtcctgaatgtggcttggttgtagatctcacattcttgaaggtggcat

SEQ ID NO: 489654 - DNA, 82 bp, Homo sapiens
ccttaccaaggaatctgcttttcaagtatgccaccaacagtgaagaggttggagagaaatccaggtactcactagactggta

SEQ ID NO: 489655 - DNA, 90 bp, Homo sapiens
cccggagaaggtctacagagcggcctgcgccagcgaatcatggaagggaagtggttgctgtgtatgttactggtgcttggaactgctatt

SEQ ID NO: 489656 - DNA, 137 bp, Homo sapiens
ctgtgcaattgctcagtggcttccccagacgggccttctcagaagctgacatggagcggcctctgcaggagctgggttccatgcaggtgatgaacaagacccggcgcatcatggagcagggcggggcgcacttcatc

SEQ ID NO: 489657 - DNA, 51 bp, Homo sapiens
tgagccgcgcacgctacagtacaaggagtggaggcagcacagacagtgagg

SEQ ID NO: 489658 - DNA, 80 bp, Homo sapiens
cgcgtgtctaggtgagtcgcggtgggtcctcgcttgcagttcagcgaccacgagaatctggacgaggctagagaacagaa

SEQ ID NO: 489659 - DNA, 80 bp, Homo sapiens
gtgcaggggccagaagacaaagtcaattccatctcaacttcctcgactgcttcactctcagggaactcacccaagactgg

SEQ ID NO: 489660 - DNA, 111 bp, Homo sapiens
ggaagaccgcgcgcagggcctgcagcgggagctggacggcgagcgcgagcggcgcgagaaaaaagtttcctacactactgaggtttaggggcactgtgaagcaaaagccac

SEQ ID NO: 489661 - DNA, 100 bp, Homo sapiens
ttgaaatttaaagccggccgtggatctaaaaggattttgtcagggagaaaaagtatcggacagaagctgagatgtttggatggagctttgtctttgagga

SEQ ID NO: 489662 - DNA, 90 bp, Homo sapiens
gtggatgacaccaacgtctacagagtgactattcacaagcataagcttaaatcgtctcagaaggacaaggtccgccagtttatggcgtgc

SEQ ID NO: 489663 - DNA, 100 bp, Homo sapiens
ccaggccggagctgaggagaacgactgggttcgcctgcccagcaaatgcgaagtaagcactatcctttgtactccctcaacgtggcctccatgtggttga

SEQ ID NO: 489664 - DNA, 74 bp, Homo sapiens
tgaaaaaagagaactggtattcaaagaggatggtcaggtttgaaatgcttactggtacactccctttccaagga

SEQ ID NO: 489665 - DNA, 100 bp, Homo sapiens
gttcgaaatatttgacatgaagaagtgggatcagttttatagtgaagttctaggtcatcccaaaaccaaagcttttatcactcatggtggaatgaatggg

SEQ ID NO: 489666 - DNA, 100 bp, Homo sapiens
tgcgacctcaggaaggagatgagaatgaagagcttcgaaacttgtctttgtctggccatgtgggatttgacagcctccctgaccagctggtcaacaagtc

SEQ ID NO: 489667 - DNA, 100 bp, Homo sapiens
ttccctcccagtccctaagtttaagtggccaagttgaatgatgctgcccggggctctgccagatcctgagacgcttcccctccctgccccacccgggtcc

SEQ ID NO: 489668 - DNA, 100 bp, Homo sapiens
aagcagctccacgaaaggcagccgcggatcgccgcgctcagcgacaaacaagaatggcggcgctagatagtaaggcatcagggaagatgggaatgcgagc

SEQ ID NO: 489669 - DNA, 100 bp, Homo sapiens
cgagaagcagcgggggggcaggcgatcgaagtactatactggcaattgctggagaagattttgcaattgttgcttctgatactcgattgagtgaagggtt

SEQ ID NO: 489670 - DNA, 75 bp, Homo sapiens
tttgagccagtccagaccctgctgctgtcttcaaagaagccgaacgaccctgtcaccaacatttgccaagcagcc

SEQ ID NO: 489671 - DNA, 100 bp, Homo sapiens
actcagacttggagccccgtaggagcaggaaatccacgaaaagcaggtgatattctcagtggagaccaggacaaggaacagaaagacccttactttgtgg

SEQ ID NO: 489672 - DNA, 101 bp, Homo sapiens
caggagaactggtcgccatcaagaaagtattgcaggacaagagatttaagaataactgaagtgaagtgatggactccgatttggagagtagtaagacgtga

SEQ ID NO: 489673 - DNA, 82 bp, Homo sapiens
cccgaaggatgaccttcgggacatgttttataaggtgagaagccctaccactgcaactgggacggctgcggctggaagtttg

SEQ ID NO: 489674 - DNA, 100 bp, Homo sapiens
gttggcccaaccagtcccagcgctgtcgtgctcctctactcggtgaaggaaatactcatgaccagccagatgtcttaaggaatgcttttgaaaagaacag

SEQ ID NO: 489675 - DNA, 100 bp, Homo sapiens
tccatctccttcttctcttctctgcttggaggggatgtggtttccgttaagctggacaacagacatatgtagagtgtgtcggtcagaaggaacacctgag

SEQ ID NO: 489676 - DNA, 74 bp, Homo sapiens
atcggtggtaacgacggcctcagcaggcggggaagatgaaagggttccgtaaatgaaaagttaccccaacgcga

SEQ ID NO: 489677 - DNA, 75 bp, Homo sapiens
cagaatcagaggtgcagccgcaagaaaggtctcttctgaaagttctgctgaagacagtgagcaggaagatgagag

SEQ ID NO: 489678 - DNA, 74 bp, Homo sapiens
ctcggcgcccggcggggactgcaggtttgttgataagccggggcccttcgtgggaccctgcggtcactggatca

SEQ ID NO: 489679 - DNA, 99 bp, Homo sapiens
tggagttggtgccttccagtattatcagttacacaagggttctccaaaaaatgtggaatcctttgcatctatgctgagacattctcctcttacacagat

SEQ ID NO: 489680 - DNA, 50 bp, Homo sapiens
aagaaacttcctcagtaaagcgttgttggaggaagagtcttccaagaggg

SEQ ID NO: 489681 - DNA, 98 bp, Homo sapiens
gagagcagtccatcccatgacagaagcagaacggtttcagcctccagtactggggatttgccaaaaggagctgccaaggccatgtctgttccatcatc

SEQ ID NO: 489682 - DNA, 50 bp, Homo sapiens
ttcccaagaagcgaccagccacatataacggagcgtgctttggacaccat

SEQ ID NO: 489683 - DNA, 82 bp, Homo sapiens
gtaccttattgactcgggtgctcaatacaaagaaacttgcccaggccaaagaagagaacgtgggcttacatcagacactgga

SEQ ID NO: 489684 - DNA, 100 bp, Homo sapiens
cctcatccatggaaacccggagggagagtcccgcctgaagaaacctggatctttgctagaaagagagaaaaggcgacggcggattgacagaagtatgatt

SEQ ID NO: 489685 - DNA, 95 bp, Homo sapiens
tgtcagtgttatatcctccaggaatactggccaggcctcagcaactgttgccattcccaaagaacaccatcgctttgttattggcaaaaatggag

SEQ ID NO: 489686 - DNA, 50 bp, Homo sapiens
cagagcagggcggcggcgactcggtgcttacactccagagcccctcagca

SEQ ID NO: 489687 - DNA, 75 bp, Homo sapiens
gaaggcattgctatttttgcacttcagttcacatactatttatggaatgccagaggattcaacatgagcatacct

SEQ ID NO: 489688 - DNA, 100 bp, Homo sapiens
gcagtcccccaggatacagggtcaaaggagagcacaaccatcgcagttggaagcccatggggcaggaatatattaaaggaatctgtgaacctgaactaga

SEQ ID NO: 489689 - DNA, 100 bp, Homo sapiens
tgggatgatacaccttttccacagggaattgagttggtttccactgtatccaaaaggaggggagaagttgcagtttgattatggtgtctatcttctgaac

SEQ ID NO: 489690 - DNA, 75 bp, Homo sapiens
catacctcccctgtccagaaaagctgccttatatgcccctggactttgtctcacaagatgaaatgttgacgcccc

SEQ ID NO: 489691 - DNA, 83 bp, Homo sapiens
agttggcaaaccagatatatgacttgtcactcagcctctgaagaagcttcgggttcagactcaggcagtcagtcggaaagtga

SEQ ID NO: 489692 - DNA, 75 bp, Homo sapiens
actgcccggctgccttccacctccagtgctggaacctctttcaggagctataaaagaaagggaggaatcatgtcc

SEQ ID NO: 489693 - DNA, 100 bp, Homo sapiens
cgcgaagatggcagctgctgaggaggagccgaagcccaaaaagctgaaggtggaggcgccgcaagcgctgagcaggatcctaaggcctttgtagtccttc

SEQ ID NO: 489694 - DNA, 59 bp, Homo sapiens
tggttttgcatatagatggccttgatgatacggaactctattttaagaacctctcaaaa

SEQ ID NO: 489695 - DNA, 74 bp, Homo sapiens
cggcccccgacggctctgcagttaacgggaccagctctgcggattggctgattgcaattctggcccaactcaac

SEQ ID NO: 489696 - DNA, 83 bp, Homo sapiens
ccggcgcgggcactgctttccactcggctcctgtcgtccgttctctcaggctcccgttcagtgaagatagtgatccggggaga

SEQ ID NO: 489697 - DNA, 98 bp, Homo sapiens
accttcaatatcaaaaatgactttactgaagaggaggaagcccagtgtactaatggtcacttgatgtgcgctggctgttttatccacctactagcaga

SEQ ID NO: 489698 - DNA, 101 bp, Homo sapiens
ggtgagttgaaacgctgcctggaaaggaagtaccaggacttgcacaggtctcagctgagtctgctctgatcacccaacaagacctagctccccagcagaga

SEQ ID NO: 489699 - DNA, 83 bp, Homo sapiens
gaaaaagtatcgtcgagaagcctatcatcggtagttgatgtcacttggcgatattcctgcaaacatgaagaggtgattgccag

SEQ ID NO: 489700 - DNA, 100 bp, Homo sapiens
aaagtgaatggtgtgcatcacattaagaattgccaagaagatgcttttagaagaaattaaagccaatctttcctctgatgaggatggatcttcagatgat

SEQ ID NO: 489701 - DNA, 101 bp, Homo sapiens
agaaggaaattgtcccgaatccctgcagatgcacaccggctgcaccatgtcagcagcctggcctggctggacgagcacacgctggtcacgacctcccatga

SEQ ID NO: 489702 - DNA, 80 bp, Homo sapiens
cgttagaactcgcgtttccacttcagagatctggttctccagcatttggctcaaggccccaagggcacatgtgacaagaa

SEQ ID NO: 489703 - DNA, 72 bp, Homo sapiens
ctctgacgctctgaccaggaaaaaaccggccaaggcggaaactatggtccaggaggcagtggaggaagtggg

SEQ ID NO: 489704 - DNA, 100 bp, Homo sapiens
gaaaatcctcactctgagtacggtctcacagacaacgttgaggtatttgtaggcaaaataccaagggatttatatgaggatgagttggtgcccctttttg

SEQ ID NO: 489705 - DNA, 83 bp, Homo sapiens
gactctgactctcggactgagaaacgcaaggagcatcagatccatgctgctgctgactcggagccccacagcttggcacaggc

SEQ ID NO: 489706 - DNA, 51 bp, Homo sapiens
gaaaatggaatcctcctctgcgaacggatgtttccagtcctaaagattagt

SEQ ID NO: 489707 - DNA, 80 bp, Homo sapiens
gcctgtctgcaagcttgtgcaggacaatgcagatcttcgtgaagactctgactggtaagaccatcaccctcgaggttgag

SEQ ID NO: 489708 - DNA, 74 bp, Homo sapiens
accaaagactacattatgaacccaccactgggcaaagaaagtatccctttgatgtcacatgtacttcagtttga

SEQ ID NO: 489709 - DNA, 100 bp, Homo sapiens
ttgtagacccgtctgcagccctggatctattaaagggagcattccgatcatctgaggaacagcagggtggaaggtgaaggggaatatactgatatccaag

SEQ ID NO: 489710 - DNA, 99 bp, Homo sapiens
ttgttagaaaggagacccgactgcaactgctggattgctgcaaggctgagggacgagaacgaggttctcctgaaaagaaagctgaacattcatctataa

SEQ ID NO: 489711 - DNA, 75 bp, Homo sapiens
gatctacggggctgacatcagcggctctttgtatgatgacgtggtctttgggaagaagcttcctgcctttgccac

SEQ ID NO: 489712 - DNA, 101 bp, Homo sapiens
gttccagcttggcgtgtcccatgtttttgagtatatccgttctgagacatacaaataaatctgatgttccagcagaaatccaggtgttaaaagaaccccta

SEQ ID NO: 489713 - DNA, 100 bp, Homo sapiens
gttaaaatatgccagaggcaaagaagcgtcccatgaagctgaggtcttgaagcagctggctgagaaacgagagcacgagaaagaagtgcttcagaaggca

SEQ ID NO: 489714 - DNA, 51 bp, Homo sapiens
ctcggagtgggagacgtggagtgcagatggtagtgaaaacctttatggata

SEQ ID NO: 489715 - DNA, 80 bp, Homo sapiens
ctgcaagcgaggcacttgctaactcttggggggatatgagactttctactcggaatatcctgagtgttgcgtggatgtaa

SEQ ID NO: 489716 - DNA, 100 bp, Homo sapiens
ttggtaacctgagaaaatgctccacctcatatcagccatgcagaagctggggacagaagtatttgaagaggtctataattacctcaagagagcaaggcat

SEQ ID NO: 489717 - DNA, 75 bp, Homo sapiens
ctgagaaggtggaaatcagagagaggaattacatgaacgacagccttcgcaccgacgtcttcgtgcggttccagc

SEQ ID NO: 489718 - DNA, 74 bp, Homo sapiens
tacaaatgctagaagctatcaaagcccttgaagtcagatcactaaggaggaagagcgagagaagaagttttcta

SEQ ID NO: 489719 - DNA, 83 bp, Homo sapiens
ggactctggagctgacagcgcgcacttcacccgcagttggttttaaaatcaaagatgggaaaatcggagaaaattgcccttcc

SEQ ID NO: 489720 - DNA, 74 bp, Homo sapiens
ctgtactggctattggaaggaggagattctgaagataaggagtatgaatctgatgaacaagaaaagagtgccta

SEQ ID NO: 489721 - DNA, 76 bp, Homo sapiens
cccttctgcttttggaccaaggagcctcacctcacgcagccgcaaagacatttctcttgggaagttgtgcatctga

SEQ ID NO: 489722 - DNA, 50 bp, Homo sapiens
caaccatcgagcaaatgaaagatgtattagaaaacgcacttaggaacttt

SEQ ID NO: 489723 - DNA, 76 bp, Homo sapiens
gtcattgagatacaagtttccgaacaggagcccccctccacaggcccacgaaatctgctactccgtattatgtctc

SEQ ID NO: 489724 - DNA, 83 bp, Homo sapiens
ctcctttcaactgcacatcacagaaagtgttgtgaagagcgaagacttttcgctcccagcttatatggatcggcgtgaccacc

SEQ ID NO: 489725 - DNA, 100 bp, Homo sapiens
ccctgccccttgccctgcttctgcagaagggaagctgcccgggagtgtcgcaggaagaagaaagaatatgtcaaatgtcttgaaaatcgtgtggctgtgc

SEQ ID NO: 489726 - DNA, 100 bp, Homo sapiens
agaagcatgtgtcttccccagctctgcagccacatactatccgtttgttcaggaaccaccagtgacagaaaactggttgctcaaatgaagcaggatccac

SEQ ID NO: 489727 - DNA, 100 bp, Homo sapiens
gggacccaggagtttcctgtgtccagcgctgccggagccgcctgagcaccacaccccactctggccggagcacgccaagcagctccccatcgctccggaa

SEQ ID NO: 489728 - DNA, 100 bp, Homo sapiens
atcctgctgctggctgcccttgtctcctttagctcttccccgcagctctgggagacgtggaggcctctgaagctgaagaccacttcttcaacccacgcct

SEQ ID NO: 489729 - DNA, 96 bp, Homo sapiens
tttaagtgccgtgttcacaccaaccctgaccggagatgcaccgaactggacatggctcgaggaatagcgggttttgcagcaattgttgcatatgga

SEQ ID NO: 489730 - DNA, 74 bp, Homo sapiens
gacagagaaggacgcaccatttctctggcatctctatcccctatgaggcaccacgtaagacctcctgcccttag

SEQ ID NO: 489731 - DNA, 82 bp, Homo sapiens
ctatgatctcgttgtttttcctgatcatctatatgggatccttcatgctgatgcttcttatgggcactgtgccccgactgcg

SEQ ID NO: 489732 - DNA, 82 bp, Homo sapiens
gaagaagaagagcatgatcggcatgtccaccaagcgtgagtgcatctccatccacgttggccaggctggtgtccagattggc

SEQ ID NO: 489733 - DNA, 82 bp, Homo sapiens
ctacgccaaggaggtcacccgcgtgctaatggtggaaacccacaacgaccgcgctgagcacgttcttccaagaaaccaacat

SEQ ID NO: 489734 - DNA, 57 bp, Homo sapiens
gagaactacagaaacctggtcttccttggtattgctgtctctaagccagacctgatc

SEQ ID NO: 489735 - DNA, 96 bp, Homo sapiens
tctggcccattaacaagcagctcttccggaagatcaactgcagactgtcctattgcatctcaagccgtaagaatgattgatgttggctgatattgg

SEQ ID NO: 489736 - DNA, 100 bp, Homo sapiens
gccgcggccagcggagccctgggctggggcaggagccggatttttttcccaggaagccatcccgtcagaggggttcaagtgatgaaagttggcaaactgc

SEQ ID NO: 489737 - DNA, 83 bp, Homo sapiens
cggcccgactctatcacaagaaggtacaatgccagggagtactacgaccacctgcccgagctgaagcaggccgtggaccagat

SEQ ID NO: 489738 - DNA, 75 bp, Homo sapiens
ttcctacatctggattgtagccataagtggacttatgtacctgtgtggtctaagctggaatctggtcaccttcca

SEQ ID NO: 489739 - DNA, 82 bp, Homo sapiens
ggggagccccgggagccgcacggtggtttgtgatgaaaatggttccaagggctatggatttgtacactttgagacgcaggaa

SEQ ID NO: 489740 - DNA, 100 bp, Homo sapiens
gggcaccaaataccaggctaccatggtctacaagactctcttcgctctttgcatcttaactgcagggcgccaatgcttcggcattagagaaagagattgg

SEQ ID NO: 489741 - DNA, 100 bp, Homo sapiens
ttctgctgggctccgtggtccatgaggagaaataactttatttggactgagagctggagaatgagaataggacctgagagtatattgggctaaggaggag

SEQ ID NO: 489742 - DNA, 74 bp, Homo sapiens
gcgaaatgtggaaaatttcctagaagcttgcagaaaaattggtgtacctcagtgtcaacctaagaaaaagtcta

SEQ ID NO: 489743 - DNA, 75 bp, Homo sapiens
agctatgtggctctcagataatcagaaggagctcaaaaagtgggatgagtttgaagatattttagaagagaggag

SEQ ID NO: 489744 - DNA, 76 bp, Homo sapiens
cctgactaaagcttgaaatgctacatttccaagggaaacaaaggacccatcgcaaatgttttccatgctgatctcc

SEQ ID NO: 489745 - DNA, 50 bp, Homo sapiens
cggaagtgagcagctactcttacagaagctcttcgtgggcggtcttgact

SEQ ID NO: 489746 - DNA, 75 bp, Homo sapiens
gaaactttacgaacgttgcaggaaaagctagacttctggctgaaggagtacaaccttccgggaggatttccatta

SEQ ID NO: 489747 - DNA, 100 bp, Homo sapiens
cccgggccatggccgccgccgatgccgagcagtggtctcggaaagagggtcgtggtcccgcacggatgcgcttgttgggagaaaccttggagattcacgg

SEQ ID NO: 489748 - DNA, 49 bp, Homo sapiens
ccaggaggccaggggtgtcgccatggttttagctaaagaagatactgag

SEQ ID NO: 489749 - DNA, 100 bp, Homo sapiens
gagaggaggaggaggatgatgacaccacaccccactctggccggagcacgccaagcagctccccatcgctccggaaacggctgcagctcctgcccccaag

SEQ ID NO: 489750 - DNA, 112 bp, Homo sapiens
gcagcccctcgctggaccagatgttcgacgccgagataaggagggttcctgcccccaggtgaacattaactttccccagctcggcctctgtcgggaccagtgccaggtggac

SEQ ID NO: 489751 - DNA, 83 bp, Homo sapiens
cagagagaaaattgagacggagctaagagatatctgcaatgatgtactggtcctcagaatggttggaatgaccctccagcttt

SEQ ID NO: 489752 - DNA, 83 bp, Homo sapiens
cgcgctgctgggcacccacggagcctccggggctgaaagtttcctacactactgaggtttaggggcactgtgaagcaaaagcc

SEQ ID NO: 489753 - DNA, 73 bp, Homo sapiens
gaaagtaggagacaagtgtatggcagtctggagtgaagatggacagaaaaatgatgtgatgaacctccttgaa

SEQ ID NO: 489754 - DNA, 100 bp, Homo sapiens
gtgcagctccccctataagcctcggcctccacagttaatgacagttcggactatcacaggaaatatctactatgcaaggtcaggaactaagattattggg

SEQ ID NO: 489755 - DNA, 100 bp, Homo sapiens
gttggaaattctggcattctgttagacagtgaatgtggaaaggagattgacagtcacaattttgtaataaggtatcactggacaggccatggctccacgg

SEQ ID NO: 489756 - DNA, 100 bp, Homo sapiens
gggcactcttcatagttcctagacaaagagatgacctgatcagagccatcaagaaactaaaggcacttggcactggcttcggcatcatccctgtgggcgg

SEQ ID NO: 489757 - DNA, 89 bp, Homo sapiens
gtgggcagaaagttgaggaagaaagaactcaagtacaacccaatgaggaccagagtgaactccgagcaggaacacttcctcattgtccc

SEQ ID NO: 489758 - DNA, 50 bp, Homo sapiens
aagagaataagatttttggaagaaaagccagtcagaagtccagaaagaag

SEQ ID NO: 489759 - DNA, 87 bp, Homo sapiens
gatagtgcctttcagccctaccaggcagaagtcaattcatctggaaagactatctctgagtcagacttaaaccactctttttcacta

SEQ ID NO: 489760 - DNA, 100 bp, Homo sapiens
gctgtgtgtacatcacccccatggaggccctggcagagcaggggtatagaacaggctatgcttacaggcatcctctcattcgagagaagcctaggcacaa

SEQ ID NO: 489761 - DNA, 100 bp, Homo sapiens
ctgtcagaggggcaggagcttctgggagccaccgtctgaaggattatatctgtccaagatgcgagtctggttttatcgaggagcttccggaagagaccag

SEQ ID NO: 489762 - DNA, 90 bp, Homo sapiens
cgcgcgcgggcctcgcacagatcgcctgctttgggccttccatgtcgtcagttaacaagcacaagccctggctggagcccacctaccacg

SEQ ID NO: 489763 - DNA, 83 bp, Homo sapiens
aagcgggcctgggatgtggccaggcttcagtcactggacacaagctttctggacaatgcagatcttcgtgaagactctgactg

SEQ ID NO: 489764 - DNA, 96 bp, Homo sapiens
tgtgattggcggtgaccggatattcagttgcacatccccacatcaatgcactgccaatgtggtgcttcatgccccacctccaaccaagatcaaacg

SEQ ID NO: 489765 - DNA, 100 bp, Homo sapiens
aagaatttgagcctctgctgaattggatgaaagataaagcccttaaggacaagcctatcacatggaaagaatttgcaaacatccacccctttgtgcctct

SEQ ID NO: 489766 - DNA, 82 bp, Homo sapiens
gtgaaaaccacaagcaggtccaaagagagagaagttggagctgccacctgtgtctggacctgttgaaagagaaagcttccat

SEQ ID NO: 489767 - DNA, 83 bp, Homo sapiens
gtggatggacttgattctgatgagagggctgctgtgaggtttcagtgagataacggcaagagactcgcccaggaaaccgatca

SEQ ID NO: 489768 - DNA, 102 bp, Homo sapiens
tccgccatgacaaaagggtttacttggggtgaatatgaccatctcccagaacaggccttctatatggtgggacccattgaagaagctgtggcaaaagctgat

SEQ ID NO: 489769 - DNA, 83 bp, Homo sapiens
cacgtctctaccgagcacaaactccacgaagccaacgcccaggctgaaggtgatgtggccgccctcaaccgacgcatccagct

SEQ ID NO: 489770 - DNA, 100 bp, Homo sapiens
ctagagccctgcactaagacaaccatgcaacttcgaaagaatcacagcagtgcccagtttcttgactacaacacaaatgaatccactcaaatgttggcaa

SEQ ID NO: 489771 - DNA, 98 bp, Homo sapiens
agcaagcacatgcagaagaatcccccagggcccagagggccaccactgcccagttcgggaaatgagcagcactcatcagcctccatcttcgagcacgt

SEQ ID NO: 489772 - DNA, 89 bp, Homo sapiens
aatgatgatggaaatgaagtataataccaagaaagccccacttgtgagaaagatcagtctaaagaaaaggagaagaaagtgaaaaaaac

SEQ ID NO: 489773 - DNA, 83 bp, Homo sapiens
tcgctacggaccttaaaatacccgcaacagccccttcgtcccaaacaagagatgggaatgaggtgggaggtggaagaagggag

SEQ ID NO: 489774 - DNA, 100 bp, Homo sapiens
ctctggaggcacctgttgcaagtgacaggagcagatgtctcaagtattagatgccatgtttgaaaaattggtcaaagatggggagcatgtaattgatcaa

SEQ ID NO: 489775 - DNA, 50 bp, Homo sapiens
tccatcccttccgaggcccgacttcggagagggctgaacccccctcatcg

SEQ ID NO: 489776 - DNA, 100 bp, Homo sapiens
actttggaaatgagaaattaacctttgggactggaacaagactcaccatcatacccaaaactggcgatggaatatgagaggagccctctggaaagaaaag

SEQ ID NO: 489777 - DNA, 82 bp, Homo sapiens
attatgaattggatatcaagccagagaagtgcccgaggagagttaacagggggatatgagactttctactcggaatatcctg

SEQ ID NO: 489778 - DNA, 133 bp, Homo sapiens
cgcagtcatcctgcgacctccagaatccaccggggtgcagcgaggctgtggaaagtcccacccagaacgtgagccttgccctcccaagacactgttcttcaagagaaagaccagaagagaaggcaaaaatgaa

SEQ ID NO: 489779 - DNA, 83 bp, Homo sapiens
cttctgcaagtggggcattcacacagttctgggaggtgatcagtgatgaacatggcatcgaccccaccggcacctaccacggg

SEQ ID NO: 489780 - DNA, 75 bp, Homo sapiens
agcgccatggcggagcagacctactcgtgccactgaggcggctcccagctgcgttggcgacatggccgacacccc

SEQ ID NO: 489781 - DNA, 100 bp, Homo sapiens
ggccgggcagccgatgccctcattgccatctctaactaccggctgcatatcaaattcaaggactctgtcatcaacgctgccatgatggcggaggagctga

SEQ ID NO: 489782 - DNA, 75 bp, Homo sapiens
tcaaatcaagagctggagctatgccacaagagcctccttttcacctgaccagaagaggctggggtgagtttcccg

SEQ ID NO: 489783 - DNA, 100 bp, Homo sapiens
cgcggccccgctgagcctcggtgcggcggcgagcgcggtcgagatcgccatgcctacccgagttattagaacggccttacataacatggacagagaagcc

SEQ ID NO: 489784 - DNA, 90 bp, Homo sapiens
attggcgtggagcagctgctgccttgccttggtgtctgcaaggctctgtaatcttcccagacccgtcagattttgaccgctgctgcaaac

SEQ ID NO: 489785 - DNA, 100 bp, Homo sapiens
gagcatccatcccttgcctactgtctaggaaaggatgcccacctggatctgttttgctgggagctggcctcccattagactcatgtgcactcagtgggct

SEQ ID NO: 489786 - DNA, 100 bp, Homo sapiens
gaagaagggaaggcgcgagtgaggaaaggaggtactgtaggatgcagcaccgaggcttcctcctcctcaccctcctcgccctgctggcgctcacctccgc

SEQ ID NO: 489787 - DNA, 100 bp, Homo sapiens
gccgcgccgacctgcagcgcccggctgcctcgcactccgcctcccccggctcagcccccggccgcggcgggacccgagggtcttactctgtcgcccaggc

SEQ ID NO: 489788 - DNA, 50 bp, Homo sapiens
gaactatagcaatctggttttcttgggaagtgtttggattgtgagctatt

SEQ ID NO: 489789 - DNA, 78 bp, Homo sapiens
ctgtacctcttgagccaggccgaccccgacccggactcggacaaggtgctggagaatctggtaaaagcaccattgtga

SEQ ID NO: 489790 - DNA, 75 bp, Homo sapiens
gactgggtcctggcagaaatcagcacgctggccaagatgtgtattggaacaacacaaactaacaaaagaacagtg

SEQ ID NO: 489791 - DNA, 97 bp, Homo sapiens
aggaattggaggacctggaggtggacggtcagaaagttgaagttccacagccactgagttgggcggcgactggcggcgcgatggacctgaccgggct

SEQ ID NO: 489792 - DNA, 50 bp, Homo sapiens
gggactgggagtcgttagtgagcatgttggcagataaattgaacatgact

SEQ ID NO: 489793 - DNA, 83 bp, Homo sapiens
agaaatcacaaagtacagctcagaatttgacttcaggaaaaggggaagatagtgatgtactcagtataaatgcagatgcttat

SEQ ID NO: 489794 - DNA, 83 bp, Homo sapiens
agaaaggaacctttgattctaaatatggagagtatgaatgggtccataagagtacagttgtgaatttggctccgcgaagtatt

SEQ ID NO: 489795 - DNA, 85 bp, Homo sapiens
gatccagtgcaaagtctttgactccttgctgaatctgagcaggtggccattcagggcaactggggccttcgtcagttgccccttc

SEQ ID NO: 489796 - DNA, 100 bp, Homo sapiens
ccgaccattcttccctgggctggtgaagtacatgaactcagggccggttgtggccatggaacaagatcactcaaggtgaaggataatctactaataccag

SEQ ID NO: 489797 - DNA, 75 bp, Homo sapiens
gaagaattcagaagaaacaaaagtgccaccgaagagaatgtggtccaacccatgaaggagctatatggaattaac

SEQ ID NO: 489798 - DNA, 83 bp, Homo sapiens
ctggtgtggctttgtccattgctgttggcttgctggaggccaagtcctgtatctgccatgtctgtggcgtccacctcaacagg

SEQ ID NO: 489799 - DNA, 102 bp, Homo sapiens
gtggcaatcaggttctcttttggaagctcttcgtgtggtgaagatcttacagaaccttgatccgccatttagcattgatgggaagatggtagctgtaaacct

SEQ ID NO: 489800 - DNA, 100 bp, Homo sapiens
caagtccggctagtacgcgaattggagaaaaagttcagtgggaagcatgtcgtctttatcgctcagagaagagagtgagagtgtgctgacgctgaaaggc

SEQ ID NO: 489801 - DNA, 100 bp, Homo sapiens
cgtgacatggcattgtctgatgttacagaagaatctgaaatcatttcggctggaggacgtgtgccagtgttagacacactcatagaacttgttacacgag

SEQ ID NO: 489802 - DNA, 83 bp, Homo sapiens
ggggatgtgagcgctgagcccttggcaggtcctcgaggccacacgggttaatcgaagaaagagcgcactggctttgcgctggg

SEQ ID NO: 489803 - DNA, 90 bp, Homo sapiens
ggggagtggtgcctcatggaaagcgaccccggggtcttcaccgagctcattaaaggattcgatccaaaggggctattctgaacatttcat

SEQ ID NO: 489804 - DNA, 98 bp, Homo sapiens
gaaatactacttctaccatggcctttcctggccccaggcggaacacaccaggagccccagcgcaaccctcccctccaatgtgccttcatgccggtccc

SEQ ID NO: 489805 - DNA, 96 bp, Homo sapiens
ctttggagtcctcttcctgctgctctgggttggcatctacgtgtgagcacccaaggggaggagtgagatgtggatgttgcttttgcacctacgggg

SEQ ID NO: 489806 - DNA, 50 bp, Homo sapiens
caggaagtggatgcctccatttttaaggtcagcccaaggctgccccctcg

SEQ ID NO: 489807 - DNA, 75 bp, Homo sapiens
aggattatacattgtaagaggtgacaacgttcccacagaacaacgagaagcttcaggagagcccgtgcatcttcg

SEQ ID NO: 489808 - DNA, 100 bp, Homo sapiens
caggactaaccggaagcttctgcaacaggaggacattgaaaataagatggaacccatccacataaggtgaaaggtgtagcagtcactcggcctacaccca

SEQ ID NO: 489809 - DNA, 83 bp, Homo sapiens
atgcatacttccccttgtgacaagtggggatgaggtgaatcagtggctaacctggttagaaactgctgaagaagaagaatcag

SEQ ID NO: 489810 - DNA, 75 bp, Homo sapiens
acgggtttctcacaggattcttctttgcagcaaggggctagagagctgaaggagagccagtttccccaaaattgg

SEQ ID NO: 489811 - DNA, 100 bp, Homo sapiens
tgttctggtatttgctggagctctcctggaattagctgaagaacttctgaggattggcctgtcagtttcagaggtgtctttgcattgctgcaagcttatg

SEQ ID NO: 489812 - DNA, 96 bp, Homo sapiens
agccacttcagtttgaaacgtaaaaagccttcaagagtgcactgatgagttcctactggtgctcagggaaaggggatgtgatcgatgactggtgca

SEQ ID NO: 489813 - DNA, 100 bp, Homo sapiens
gccagcctgaccgacctggccaacctgagcgaaggcgtctccctggcagagaggggcagttttggagccatgtctattgtgcaagtggagacattaggag

SEQ ID NO: 489814 - DNA, 50 bp, Homo sapiens
cctcgggatcacacttatgattgggctcaaaatttgggcggggaactgga

SEQ ID NO: 489815 - DNA, 74 bp, Homo sapiens
tttgagccaaaggcatatgatctatgaagagaacggagaccaacctgggctgaagaaagaagattaaatgctga

SEQ ID NO: 489816 - DNA, 73 bp, Homo sapiens
gttggttcaagatatttgctgaagggactaagctcatagtaacttcacctgggatggaagcttcctggcgcca

SEQ ID NO: 489817 - DNA, 50 bp, Homo sapiens
tcaaagcacacttttctggccttgttatgaagtgaaggctcctgttcctt

SEQ ID NO: 489818 - DNA, 76 bp, Homo sapiens
gccgtgccaaagccgccccgaagaccaagccagccacaccgagcataatggcatcagctgctaaggaatttaaaat

SEQ ID NO: 489819 - DNA, 75 bp, Homo sapiens
ttgatcccgcggtcccttcctgtaccttgtcctcagctgatgttctaatcatgtcagataaagatgatattgaga

SEQ ID NO: 489820 - DNA, 98 bp, Homo sapiens
ctttttgcaccatccgtactaccagggtcaaggtggaaggtccaaggactgagaaagaccctcgaaggcatccactttagtcctccattccattccta

SEQ ID NO: 489821 - DNA, 90 bp, Homo sapiens
aagagttggtgggagacgggtgaggtacaggctcagtctgcggccaagactccgtcctgcaaggtcgctattaaagcatgaagactttct

SEQ ID NO: 489822 - DNA, 75 bp, Homo sapiens
aaacaaaattctgaactcaggacttggcaaatggcctgatatgaaggagtcacgcctcccgcctcccggagctgc

SEQ ID NO: 489823 - DNA, 100 bp, Homo sapiens
gaaattcctgaggcgctgggagccgcaccacctaacgctggccgacaacagcctggcgtccgccacgaacccactcaggattctttctggaaacaacctg

SEQ ID NO: 489824 - DNA, 75 bp, Homo sapiens
gccttggaccccgcggcgcccctcggcctcggagcaacgagcgcagcgccggctgaccaactgactgaagagcag

SEQ ID NO: 489825 - DNA, 96 bp, Homo sapiens
cgtgccgccttcccaggaccctcagggagagcgggcagccttccaggtggacaggctatcaagtactagctccaactgcctattatgatcagactg

SEQ ID NO: 489826 - DNA, 87 bp, Homo sapiens
tccacgccctgctgggtcctacctgtcagagccccaagcaggcgccatgtggacggcagtgtttgatgagccagcgaactcaacgcc

SEQ ID NO: 489827 - DNA, 103 bp, Homo sapiens
aagaaacaaaagacaactctgcttttccagaaactgtgccaggatcacgacaaatggtggcccggagtttgctcgataccttgagggaagtctgcgatgatga

SEQ ID NO: 489828 - DNA, 75 bp, Homo sapiens
cgtggggaaactaaaaacgcatctatctaacgtttaccctagcaaaccagttttttgccctgacatctcttcgtc

SEQ ID NO: 489829 - DNA, 96 bp, Homo sapiens
ccgggagcgcgatgtggagcgcttctttaagggctacgggaagatcctggaggtggatctgaagaacggaccaagatcactccatggatgaaatga

SEQ ID NO: 489830 - DNA, 98 bp, Homo sapiens
tctcgacactctgcaagattctctcctgaagtcccagccttagattgtaagcaaaagaaatcaaggtcaagatctggaagcaagaagaaaatgctaac

SEQ ID NO: 489831 - DNA, 100 bp, Homo sapiens
atctgcctgagagatctccaagaattacagggaaacactactatgaagtatcctgtcatgaccaagggttatgcagggtcgggtggtctaccatgcaggc

SEQ ID NO: 489832 - DNA, 95 bp, Homo sapiens
agacgccacggccacccctccctcctccccatctatgagcagcgccctggccatcgtgggctcgtttgatcccttccaactgataccttgtaatt

SEQ ID NO: 489833 - DNA, 90 bp, Homo sapiens
cgtgcttcgggatggaaacctatggttatctgcagagggagtcatgctttcaaggacctcattggatccggattggtgccaatgtctcca

SEQ ID NO: 489834 - DNA, 75 bp, Homo sapiens
caacattcgatatttggacttgaagcaaaactgaatacagattctgttcatcttgctctgaaattaaataattct

SEQ ID NO: 489835 - DNA, 49 bp, Homo sapiens
ggggtatatccaccctcaagtgtgattacatgaagcagatgacatttga

SEQ ID NO: 489836 - DNA, 87 bp, Homo sapiens
taaagctgctggacaacaccatggaaatatttgacattgaggctgacaaacgggctcatcataatgcactggaacgaaaacgtaggg

SEQ ID NO: 489837 - DNA, 97 bp, Homo sapiens
ggctgaggtcttggtcaccggggaacagctacggcttctgcttcagtttacccaacctcagcaaacatcgtttgctttggagaggaacttaaggact

SEQ ID NO: 489838 - DNA, 99 bp, Homo sapiens
atctgaactgtttcctgctgttgtgaagaatgtggccagtaaaaatattgagtggttggatttcatcccttactggtctcaaccaaaatattcctgttg

SEQ ID NO: 489839 - DNA, 138 bp, Homo sapiens
tgccttaaaagctgcaaacccagatatcctccagactccgttcgacttcttggcagagttgtcttcaaacttattatggtaggagaaggaattctctactgttgcctctccaaaagaagaaatggggtcggactagag

SEQ ID NO: 489840 - DNA, 100 bp, Homo sapiens
ttggaactgctaccgatacatcaatggtaggaactcctctgatgtcctggtttatgttaccagcaatgacactacgcctgaaaacagcctcctgtcatcc

SEQ ID NO: 489841 - DNA, 97 bp, Homo sapiens
gccggtgacccggcgagaggcggcgccgctcccaagatgtcgcagacggccatgtccgaaacctacggaacggaaaacagttcttccttcaaagcat

SEQ ID NO: 489842 - DNA, 73 bp, Homo sapiens
agtgatgaatgcaagaggcgtttctataagaattggcaacaccctgggagaagaaggctgtgaacagcttcag

SEQ ID NO: 489843 - DNA, 95 bp, Homo sapiens
gggaagttgaatgataaagccagaagaaagcatgctttctgatcattgttcgagaacttgtcttggacaattgcaaatcaaatgatggaaaaatt

SEQ ID NO: 489844 - DNA, 100 bp, Homo sapiens
actttgtcgcttatggactgaaagtttattgcattccaacagctcattttatgttggttgactatagtcaatggggccaatggagccaagtgtatggaaa

SEQ ID NO: 489845 - DNA, 75 bp, Homo sapiens
ggggaacaaaagcatctccatgagtgtggctgggtcacgacaaggccgctgcctgctccccaggcccaagtccct

SEQ ID NO: 489846 - DNA, 100 bp, Homo sapiens
gtccaatgccccaccttcctttggtactctgaggaagaaccagagcagtgaagatatcttgcgggatgctcagtcacggaacagcaaatttctgagaagt

SEQ ID NO: 489847 - DNA, 83 bp, Homo sapiens
cagtgtggcaaccagatcggtgccaagcaatggctgccatccggaagaaactggtgattgttggtgatggagcctgtggaaag

SEQ ID NO: 489848 - DNA, 100 bp, Homo sapiens
agagaacagcctgttctcagatgatgttccctaacccagagccccctccagagcacatcccgctctgggctttaaacgtgacccctcgcctcgactcgcc

SEQ ID NO: 489849 - DNA, 75 bp, Homo sapiens
acaaccttggagcccagagccacgtcaaaaagcacgaggtcccagcaaagtctgatgtttactgtgaggtgtgtg

SEQ ID NO: 489850 - DNA, 100 bp, Homo sapiens
tccgtatctgcctaggcattttgctgtctcctcctaatacggaccttaaaggctttgatccaggagagaaatactttcataacacatcatggggtgatgt

SEQ ID NO: 489851 - DNA, 100 bp, Homo sapiens
cctaagagaactatggcaacatcaggtgactgtcccagaagtgaatcgcaggattactacagcatcccatttcccacacccactactccgctgactggga

SEQ ID NO: 489852 - DNA, 75 bp, Homo sapiens
ggcaatccgggcttgcagacgagccatcgactacagtgacagcgccatgctccaagctcagcagctgctcctggg

SEQ ID NO: 489853 - DNA, 100 bp, Homo sapiens
ggtgaaaagcaaagctggaaggattcggagagggttggggccgtcttcctcatccttccttttctcggggctcccgtggcctgagaacataatgcttttg

SEQ ID NO: 489854 - DNA, 50 bp, Homo sapiens
gaatgctctttacttcctttgtggagcttgaaatggatgcagtcagaact

SEQ ID NO: 489855 - DNA, 100 bp, Homo sapiens
gtggaaggagggagggagccgcaggcgcagacccacccgccatgaagccccccgcagagtaaagctaaaacattttgagaaatttcaggatacagcagaa

SEQ ID NO: 489856 - DNA, 98 bp, Homo sapiens
cgggatctaaaggcgggactgccacgtccaagcaaaccgggaaaggagaggatcccggagccgcctgagcctccaacaacaaacaaatggcagctgga

SEQ ID NO: 489857 - DNA, 80 bp, Homo sapiens
gagatgaggacactgaaattcagagaggggaagtgatttgcctcagcttgtactgttgcccgaagctcagcagagagtcg

SEQ ID NO: 489858 - DNA, 87 bp, Homo sapiens
ggcatcaacgtgactcccatcgccgccctgctctacacacctgtgctcatcaggcattcagctcagtgagtacttaccggaggtgaa

SEQ ID NO: 489859 - DNA, 124 bp, Homo sapiens
aaagagatacagggcagaggaaaatgcaagaagactgatggagcaggcttgcaatattaaagatggggatagtgtgatggtccttccaaccatccctgaagaagaagccaaaaaacttttcccg

SEQ ID NO: 489860 - DNA, 82 bp, Homo sapiens
gaaccaaattatgctgcaaatgaaaaccagcattggaatcagctgattcaggatgctcagaagcgtggtgccattattaaga

SEQ ID NO: 489861 - DNA, 74 bp, Homo sapiens
aggcccagatgataggaatcccatctcatttaggttatcctgaatacatgtctaacaattttccttgcaacgtt

SEQ ID NO: 489862 - DNA, 74 bp, Homo sapiens
gcggagactgcgggcccgtagctgggctctgcgagtcaagctgtattagtcgacaggaccatttacatttcagg

SEQ ID NO: 489863 - DNA, 100 bp, Homo sapiens
aaaggaaggaatatatcctgactgattagacattccataagtggaccaatctcaacatccaaacccctgacagccctgtcagataagagaccaaactatg

SEQ ID NO: 489864 - DNA, 97 bp, Homo sapiens
tggaccgtggttttgcaggaaatgtgaatctcaggagagagcagccagagtgggtatttgaagtataccatacaactgttttgaaaatccagcgtgg

SEQ ID NO: 489865 - DNA, 75 bp, Homo sapiens
gcagcgacaacatggaggccgtgaagaccttcaatagcgagaatgaactctggaagcccagccagggacaatgca

SEQ ID NO: 489866 - DNA, 100 bp, Homo sapiens
aatgatagatacatcagtgtgggaagccaagcagatacaagttttgctgttactgctcagtgtagtcacaccttgaataagaaatggaaaaccttgggat

SEQ ID NO: 489867 - DNA, 82 bp, Homo sapiens
gacagtacaaagaagactcttgtcacactaattgccaacaacaatgtttgtagtctatcatctggaaaatttgggacattac

SEQ ID NO: 489868 - DNA, 95 bp, Homo sapiens
ggtactcagccttttaaaaactggagtggctagtattcagaagcttcctgcagcctctgttctaacagacatcaactttccaatgaaaggacgga

SEQ ID NO: 489869 - DNA, 74 bp, Homo sapiens
ccaaagccaacgcattattacatcaagattgcacggaactgtggctgcaccatctgtcttcatcttcccgccat

SEQ ID NO: 489870 - DNA, 89 bp, Homo sapiens
ccggggcggtccctggctgcgtgcacagcgccttgttccagcagggcctgatccagaagtcaatgaaaggattctattttgcaaagctg

SEQ ID NO: 489871 - DNA, 75 bp, Homo sapiens
tggctggagtgccctgtgctgtggatgcccaggagtacgaggtctccagcaggtgcgtgccctggaggaggccaa

SEQ ID NO: 489872 - DNA, 75 bp, Homo sapiens
accaggagtgagtcggagctgccgcgctgcccaggccatggactgtgaggtcaccatggctgttattggctccct

SEQ ID NO: 489873 - DNA, 100 bp, Homo sapiens
acctgccctggccctgctcagcgccagcggcactggctccgccgcccaaggtccttccatagtgacgccccccaaggacatctggaatgtcactggtgcc

SEQ ID NO: 489874 - DNA, 100 bp, Homo sapiens
ccattgtacccacggcagagttccaagacaggatatcgaaagggagtttgggcttgaaatcccacaaaaggagatttctaagaaagcttcatttcaaaag

SEQ ID NO: 489875 - DNA, 90 bp, Homo sapiens
caaaggtcatctaatctttaaaaggctaatgatgccaaaggaggaaaaacaaatggacttgaacactggtcgaatgcgtcggaaagccat

SEQ ID NO: 489876 - DNA, 74 bp, Homo sapiens
tgatgttggagaactacagaaacctggtctccctagctgtcaataccagcaaatatgcagaaagctatcggatc

SEQ ID NO: 489877 - DNA, 100 bp, Homo sapiens
agcgtgggcgtcaacgccgtatccagcgactacgcggccgcggagacctacctgcggcgtcggcagctgctgctccgagtttatgtgaagaaccagctca

SEQ ID NO: 489878 - DNA, 75 bp, Homo sapiens
ctggaaccgggatggcgacgtctacactgagtcggaggcgaagccgcagcacggtccttggcaaacaaggatgag

SEQ ID NO: 489879 - DNA, 75 bp, Homo sapiens
tgaagaaacttgcaaaagtatctcatatgaccagtgagaaagagatgacttgatgtctgcactagtttccgtaag

SEQ ID NO: 489880 - DNA, 82 bp, Homo sapiens
ctggacatcgagcctgagggaggggaaaggcgcagggattttttatcaagcagaaatgcatcgaacaacgagaatcaagatc

SEQ ID NO: 489881 - DNA, 76 bp, Homo sapiens
ctccttgcagccctggctgtggctacagggccagcttggatttacactgggcaacgtggttggaatgtatctggct

SEQ ID NO: 489882 - DNA, 100 bp, Homo sapiens
aggtagtcggacctttcccgctggcgcgcagcctcagctaggtgatagaaattgaagatgcttcacccaccaagtgtccaataacaaccaagttggtttt

SEQ ID NO: 489883 - DNA, 101 bp, Homo sapiens
cccaccagaaggtggacttaggcatctcttgggcagtgaacagcagtcttctgtccagctctgggtctcctttggccggaagcccatgagagcagcccagt

SEQ ID NO: 489884 - DNA, 98 bp, Homo sapiens
cgcctgggctgcccaggagcttcaggccaagttggcagagatcggagctccgatccaggctacgagagtacaaggtagtgggtcgctgcctgcccacc

SEQ ID NO: 489885 - DNA, 88 bp, Homo sapiens
tgagtgtcaactatctgggggggacattcccagcttcaaaagcagtggactgtcttttggattcaaagtgggcaaaggccaagaaagg

SEQ ID NO: 489886 - DNA, 134 bp, Homo sapiens
ggagagctgcttcactcaagtcctgtcaagtcaaggcagccgggatttgtccacatcgttctcggggtataaggcaggggtctgcaagcaagcagaggaggtggtggtcaccctcaaagtcctcattggcgccg

SEQ ID NO: 489887 - DNA, 119 bp, Homo sapiens
ccctgcgctctccgcaccgcggcttaaatgatgtattttgtgatcgcagcgatgaaaggtgacttaagagattaaaattaatttggttgctgttggttctgaacaaataatgagttctt

SEQ ID NO: 489888 - DNA, 100 bp, Homo sapiens
gaagaacagcctgaagaagggctccctcgtgaagaacctgaaggacacactaggccaaagcctcactgtttcaattgtggttctgaagaacaccaaatga

SEQ ID NO: 489889 - DNA, 75 bp, Homo sapiens
gcagccctagtcttcgccctggtgatcgcgctcgttcccgtcggccggggtacttgcaactgggctcagtggtct

SEQ ID NO: 489890 - DNA, 88 bp, Homo sapiens
cctcatggtatatttgcagccagtactctatatgaacaatccgtctggatcacggatgtaggaagtgaaatggtggagtcaatgaaga

SEQ ID NO: 489891 - DNA, 83 bp, Homo sapiens
gcggcggcggctgcggcccaatatagatcatggaagggaagtggttgctgtgtatgttactggtgcttggaactgctattgtt

SEQ ID NO: 489892 - DNA, 75 bp, Homo sapiens
gaacatgcggatgattgatgggaagccggaatacaagaacgggctggaccagttacagaagtggatccgcggtaa

SEQ ID NO: 489893 - DNA, 97 bp, Homo sapiens
ctgcaacgtcaccaatgccctaggagctcgccaggcagaactgaccgtccaggtcaaagaatatggctcaagcctggaagatgacgtggtgggggac

SEQ ID NO: 489894 - DNA, 83 bp, Homo sapiens
catagcctctgttcgttttcactgcaggaccaggcacgaaaagatcgagccagcgcagagatgtgcctcgaaccacacaaagc

SEQ ID NO: 489895 - DNA, 71 bp, Homo sapiens
tggtgaacacgtcggacctcaatgaagagctgggacaggtggaggttcaagacggccccaatgaagatggg

SEQ ID NO: 489896 - DNA, 75 bp, Homo sapiens
gagagacagatcacagccagagaaggggccagtcggaaagagtggctatgaatctgcatgtaaagactttgtccc

SEQ ID NO: 489897 - DNA, 100 bp, Homo sapiens
cccacccctcctgtaacccagcctgtttcacttcttgtgcgtcagcatttatcccgtttgccaaccattgatccgaataccaggaccctgcttttgtgtg

SEQ ID NO: 489898 - DNA, 75 bp, Homo sapiens
atatgtgatcaaagcatcagaagcgagtaaccagctcataaatcacatcgaacagtttttggatactaatgaaac

SEQ ID NO: 489899 - DNA, 50 bp, Homo sapiens
tgaagcccatccggactacttccaaggaccgtttggagggagccattcac

SEQ ID NO: 489900 - DNA, 95 bp, Homo sapiens
aacaagaaataccgtgccctgaggttggacgtggggaatttctcctggggctcagagttggatatcaaagtattgcagagtgccttagcagccat

SEQ ID NO: 489901 - DNA, 83 bp, Homo sapiens
ccaaaacgcagccaccgccgtcaccaatctctacaaagggcggcgactggcggcgcgatggacctgaccgggctcctgctgga

SEQ ID NO: 489902 - DNA, 100 bp, Homo sapiens
ctgtgtctaagaaacccattccattggagaacccaaaggaaaagcgaccagctatcatggtgaacttacttcagattgtgcgggaccactgggttcatgt

SEQ ID NO: 489903 - DNA, 134 bp, Homo sapiens
ctgaagatggagagggaccacctcaggaaggaggtggaggggctgcggagacagagccctccggccagcggggaggcacagtctcactctcttacccaatctggagtgcagtggtgtgatctcggctcactgca

SEQ ID NO: 489904 - DNA, 74 bp, Homo sapiens
ccggcagcagcgctgccgccgcgtcctcagccaccgctccctcttcccacgggagactcatgcatctgtatgcc

SEQ ID NO: 489905 - DNA, 97 bp, Homo sapiens
aggacattgtggcaatcatcctgaatgaatttagagccaaactgtccaaggctttggcacaccagcaggcagctggctccggttttggggtatctgg

SEQ ID NO: 489906 - DNA, 75 bp, Homo sapiens
tatcaagccaagaacagcccaatctcctttctgggcaaacgttccaagattctacaagggggttgctcctctctg

SEQ ID NO: 489907 - DNA, 75 bp, Homo sapiens
tggagaactatagcaatctggttttcttggagaacctgcagttttggaggatttgacttgacgaatcgctctctg

SEQ ID NO: 489908 - DNA, 75 bp, Homo sapiens
cctcctcgccagcagccgtccggagccagccaacgagcggtacttccgaagatcccagtttacagcgatcagttt

SEQ ID NO: 489909 - DNA, 140 bp, Homo sapiens
ccaagctccactatcccaacggaagaggccggatggagtccgtgagatgggttttagctgccgccggagtcgaggtgatagaaattgaagatgcttcacccaccaagtgtccaataacaaccaagttggttttagatgaa

SEQ ID NO: 489910 - DNA, 83 bp, Homo sapiens
tcttctgtgtcagggaatgctcctggctggtgcggacacaacccaatagctgaaacattaacaaacgtgctggatttcaaaag

SEQ ID NO: 489911 - DNA, 80 bp, Homo sapiens
caacaacctgctgggcaccttcatctggaataaggtgactcgctgggttccagaccatatggcatcacactgctataact

SEQ ID NO: 489912 - DNA, 100 bp, Homo sapiens
atgggcctgtgaccatagagctggaatcgccagctcccggcactgctacctctgacccaaagcaggccaagatcaaggctcgagatcttcgcgggaagaa

SEQ ID NO: 489913 - DNA, 90 bp, Homo sapiens
gtttgatctgtggatgaaatgaatcatgattttcaagctcttgcattagaatctcggggaatgggagagtattcttgccatgagaaaaag

SEQ ID NO: 489914 - DNA, 101 bp, Homo sapiens
aagactgcgttccagccccagttccccggcagcgggacccggcgaagacgcgaccgcggcgcgagtcaccatggtgagcgagtgctgtgctttcatgggcc

SEQ ID NO: 489915 - DNA, 75 bp, Homo sapiens
gtgtgcctgcaacctgtccggggatcccagggaggtttggtgcacctcgatttggaggaagtagggcagggccct

SEQ ID NO: 489916 - DNA, 80 bp, Homo sapiens
ccaacgatggcgagggcgccttccatggagacgcagggagtgcatccgccccaacccttttccccctcgtctcctgtgag

SEQ ID NO: 489917 - DNA, 75 bp, Homo sapiens
ggctccctcagaagcatcgtgaaaagcctccttctggttccaaatgatgactcctcctctgagagtggcagcggc

SEQ ID NO: 489918 - DNA, 75 bp, Homo sapiens
atcaagtaatggtgcaaagcctgaacataatgctccaattcctcaaggagggcgtggtgcaatccagtttgtgac

SEQ ID NO: 489919 - DNA, 98 bp, Homo sapiens
aacgttcaaccatgctcggtcatctgtggcagtatatcaagatagaagcagatttgggatatcctggaggtaaagcaagaattattcataaggaatct

SEQ ID NO: 489920 - DNA, 83 bp, Homo sapiens
ttcagccagcacactcctcgcgagcaaggtacaatgactcttcttgcttttcacctaagttgaataagcaccctgtgcacttt

SEQ ID NO: 489921 - DNA, 75 bp, Homo sapiens
aaaataacaagaatgggaggagaaggatcacctctgcagcctgcacagccgggcctttggactcctggatgctag

SEQ ID NO: 489922 - DNA, 86 bp, Homo sapiens
tcctactatccatttcaactacagatactttgaagtagaagaagctgatggtgaggaaaatagcagctgaatactatgacaacctc

SEQ ID NO: 489923 - DNA, 100 bp, Homo sapiens
caagaaacctgtggttattcgtgccagcaagcagtggtttataaacatcacggatattaagactgcagccaagcgttgggaattcaagcatcctcagcct

SEQ ID NO: 489924 - DNA, 75 bp, Homo sapiens
gtgggaggccgctgccgtcgcgcgccttggttttaaaatcaaagatgggaaaatcggagaaaattgcccttcccc

SEQ ID NO: 489925 - DNA, 75 bp, Homo sapiens
ccagaaaggagcaaatcatactctttccatcagtctcaacatagaaaatgatatgacaactgtacgactacaatg

SEQ ID NO: 489926 - DNA, 83 bp, Homo sapiens
caagcgaaaacaccgctttatcctgctgcgatccccagggaacaaggttggaagtactccatgacacacactcggagaaagtc

SEQ ID NO: 489927 - DNA, 82 bp, Homo sapiens
caccgcgcctgctgccgggttgcgctccgtgcacctcttgcgggtgtcgtgaaaactacccctaaaagccaaaatgggaaag

SEQ ID NO: 489928 - DNA, 82 bp, Homo sapiens
gatcatcaactcgcgggtcctcgtggatcagactacagagcccaaatcttgtgacaaaactcacacatgcccaccgtgccca

SEQ ID NO: 489929 - DNA, 100 bp, Homo sapiens
caggaaccccgctggcagatgaccaggaccagtctctggtgcctgacaaggagggagtgaaggagctcgtggataggttggtgctttgggcccttctagt

SEQ ID NO: 489930 - DNA, 100 bp, Homo sapiens
acctttccattcagatctaccagcagctcattaaaattgccgagggcgtgttacagccgatgatagaattactggaagaatttagtccagttgttgagag

SEQ ID NO: 489931 - DNA, 50 bp, Homo sapiens
gctgaggactgcctgtttgcaggtggactggctaactgtgggccctttgt

SEQ ID NO: 489932 - DNA, 100 bp, Homo sapiens
tccttgaaggaaatgacattgagcttgtttcaaattcaggtgcttgccttcccaagctctggcttcactgacttggcagagattgtgtcccggattgagc

SEQ ID NO: 489933 - DNA, 74 bp, Homo sapiens
gttggccttcgtacccgtcttgattgaggtgatctgtgaaaatggttcgctattcacttgacccggagaacccc

SEQ ID NO: 489934 - DNA, 75 bp, Homo sapiens
tcggggcctccgcagcgacaacatggaggccgtgaagaccttcaatagcgaggtcaaaggcaacagaactggacc

SEQ ID NO: 489935 - DNA, 75 bp, Homo sapiens
ggcaggggcggaggcggaggcagaggtggaggcgctttgaaagacctgcctagagctggaacgttacctccagag

SEQ ID NO: 489936 - DNA, 80 bp, Homo sapiens
gcccagatagactgctttggggagtatgtggaaccgcaggactgcagggtctctccaggatcgaatcatcaatttagttg

SEQ ID NO: 489937 - DNA, 100 bp, Homo sapiens
ccgggcagcgccgccaccatgttcctgggcaccggggagccggccttggacacgtgggctaccttgagaatggagcgaggagccaaggagaagaaccacc

SEQ ID NO: 489938 - DNA, 115 bp, Homo sapiens
atgaaccgaagttttcacaagtctcagaccttgcgattctacgattgcagcgcagtggaagtcaagagcaagaaatggtggagtcaatgaagaaagtagcagggatggatgtgga

SEQ ID NO: 489939 - DNA, 75 bp, Homo sapiens
cggcccctccttgggcctgcggctctctacgtccctgcggagcagccgtttgtgaagtgtggatatgcaggctct

SEQ ID NO: 489940 - DNA, 74 bp, Homo sapiens
aaccccaggggaccagaggaactcagccctgattgcgatgcttgcacataccacccaggtgttccggtctttca

SEQ ID NO: 489941 - DNA, 101 bp, Homo sapiens
gggtggctctatggtgttgtgagccatcaggactccatcactcgtcttatggaggtgtctgtaactgagactctgtttgctggctacacggacaacctggt

SEQ ID NO: 489942 - DNA, 74 bp, Homo sapiens
gaaaacacgtaccccgggcagtttttgtggatctggagcctacggtcattggtcaaaatgcagatcttcgtgaa

SEQ ID NO: 489943 - DNA, 98 bp, Homo sapiens
tgcgctcacaccctttctggagaagtccacatggcaggagaggctcgggctgtgctgaagtgggcagatggcaaaatgatcaagaatgaagtggacat

SEQ ID NO: 489944 - DNA, 100 bp, Homo sapiens
tttgcatctagaggaattgaaattgagatggaggatgatgacttcacggcctccctgtccaagcagagctgcattactgaacaaacccagtatttcttcg

SEQ ID NO: 489945 - DNA, 87 bp, Homo sapiens
ctctgctcgcggccgcgcctttgagcatggagcttttggagagtgtctttattctgagtgaaagaaaaggaagaggatgaaaaagca

SEQ ID NO: 489946 - DNA, 100 bp, Homo sapiens
tcctggtgcttgatggtcgaggccatctcctgggccgcctggcggccatcgtggctaaacaggtactgctgggagtgtgggctgctgctctcctctgagg

SEQ ID NO: 489947 - DNA, 82 bp, Homo sapiens
ccgggtccacaagaccttcaagtttgtcgtcgtcggggtcctgctgcagtttttcagaagaagtgaagtcaagatgaagaac

SEQ ID NO: 489948 - DNA, 108 bp, Homo sapiens
tcggaaaagccatcgtgaaggagctcctggagctgggcagctgttgtgctgtgtatggacgtgggctttaccatgagtaactccattcctggtatagaatccccattt

SEQ ID NO: 489949 - DNA, 74 bp, Homo sapiens
tcaccacgctcgtgctcatctcctactgtcccacggccaccgaagagatccagtccttctgtggaacttctgaa

SEQ ID NO: 489950 - DNA, 75 bp, Homo sapiens
cccactggctctgctgaccttgtgccttggaagaaatgttggctatttggcgatgagaggtggtgaacagtgacc

SEQ ID NO: 489951 - DNA, 100 bp, Homo sapiens
tgaaggagcttcaaacccaaagaggaatgtatcctgtcaggtataatgtcagtgaatggcaagaaagttcttcatatggatcgaaacccttactacggag

SEQ ID NO: 489952 - DNA, 76 bp, Homo sapiens
gcggcctcggctcttccagccaccccctctccagtctgctcagggctgatcccttatccaacatggttctaacctt

SEQ ID NO: 489953 - DNA, 94 bp, Homo sapiens
aaggagaaaatgaaagctggctcacgaacaggcaaaccacaggagcagtatagcatcaagttctagaggaattgggagccattgcaaatctgag

SEQ ID NO: 489954 - DNA, 114 bp, Homo sapiens
ttccaacatggcggagctgacggtggaggttcgcggctctaacggggctttctacaagggtcgtcatgtcaaaacgggccagcttgcagccatcaaggttatggatgtcacagg

SEQ ID NO: 489955 - DNA, 75 bp, Homo sapiens
tgggcagtaacacatagcgtcaaagagaaaacgggcaatgctgtgagagccattggaagactgtcctctatggca

SEQ ID NO: 489956 - DNA, 82 bp, Homo sapiens
agctccacattggtctgttagagttcgaaaagctgagaatcctcagtgtttgctagtttgtgatggacgcctctgaccccac

SEQ ID NO: 489957 - DNA, 82 bp, Homo sapiens
gtcatctgctccgacaagacgggcacgctcaccaccaatcagatgtctgtctgccggaacaatagtttagaacgggctgtgg

SEQ ID NO: 489958 - DNA, 80 bp, Homo sapiens
cgcggacggcgggcgtcgtcaccatggcagcatccgctggaggcccaggagtcttttagtcctgctatacagctgcacct

SEQ ID NO: 489959 - DNA, 101 bp, Homo sapiens
tgcctccaaggctatgtttgaatctcagagtgaagatgagttgacaccttttgacatgagcatccaggatttacttacaagacataaattgctcagtgcag

SEQ ID NO: 489960 - DNA, 74 bp, Homo sapiens
ggccctgaggacgacctggctggcatgttcctccaggctggagccccttggatgtattactgcactcactgctg

SEQ ID NO: 489961 - DNA, 100 bp, Homo sapiens
gttgctgccttcgtctgcacttaccttggaagccaatatatcttcacagaaatggcctcggtcaaaatgcagatcttcgtgaaaacccttaccggcaaga

SEQ ID NO: 489962 - DNA, 100 bp, Homo sapiens
ttcctcgcccagagcgtcttggcgaacctaaaggcagacccagaagagctttttacaaaactagagaaaattgggaagggctcctttggagaggtgttca

SEQ ID NO: 489963 - DNA, 129 bp, Homo sapiens
accccaatttttggactgtgctctcaaactttactttgcctcatttgaggagtgggaacaggcttcggcgaacacaaagctttgactctcccggatcttgcagagcagtttgcccctcctgacattgcc

SEQ ID NO: 489964 - DNA, 100 bp, Homo sapiens
cacagctacagagcctggaagcagtgagctaggtgttcccgagcagcctgacctccaggggctttgttatgcacctaaagccatattggaagctccagaa

SEQ ID NO: 489965 - DNA, 75 bp, Homo sapiens
aagctgcagcccacccgggcagccctcaccctggcggctgagccagaggccaactgcagaggaactggaacagag

SEQ ID NO: 489966 - DNA, 100 bp, Homo sapiens
agcccggcggctactcggggccggacggacattgtccttctggtcacctcatctttcatgtccccttccgagagccgcagtggctcaaaccccaaccgcg

SEQ ID NO: 489967 - DNA, 83 bp, Homo sapiens
atcattaatgccttccgctactacggtatgaccctcaatttggcgatgccttctggaacagcagcaaatacgggatggtgacg

SEQ ID NO: 489968 - DNA, 75 bp, Homo sapiens
tgtttccaagagcaacaggaaatgaacacattgcagggctatcaggaaggataacgtatactccagaaaaccttt

SEQ ID NO: 489969 - DNA, 100 bp, Homo sapiens
agtgtgtaagggtccagctgatcaagaatggcatgcgaggtgcctttggaaagccccagggcactgtggccagggttcacattggccaagttatcatgtc

SEQ ID NO: 489970 - DNA, 100 bp, Homo sapiens
tgccattggagtctgcactggcctgatgcctgaggaagtgcaccatggagaggaggaggtggagacttttgcctttcaggcagaaattgcccaactcatg

SEQ ID NO: 489971 - DNA, 100 bp, Homo sapiens
aaccgcgagaaggcccagcgcttcctgcagaaggccgagaagctctacccactgccctcggcccgcggtccagtggcattgcagagcacggatggttgca

SEQ ID NO: 489972 - DNA, 100 bp, Homo sapiens
cgtcgagatcccgggcgggggcaccgagggctaccacgttctgcggtgaatggtagtgtctagaaagggtatgtcccttcaagagagaggtgccaatgtc

SEQ ID NO: 489973 - DNA, 75 bp, Homo sapiens
gaaagcgggcgagcagcagttgagcgagcccgaggacatggagatggaagggtgttaaataccacattatttgaa

SEQ ID NO: 489974 - DNA, 50 bp, Homo sapiens
cggctcaccgcaacctccgcctcccaggagaatggcgtgaatccgggagg

SEQ ID NO: 489975 - DNA, 99 bp, Homo sapiens
gacgtcttgcctgtgtcccacttgttcgcggcctatagggcaacaggtttgtctatgctggctctaactcgggcgtggtccaggccccgctggccttct

SEQ ID NO: 489976 - DNA, 97 bp, Homo sapiens
cccccccagacaagatggacaccgcggaggaaggtattcacttacaagcagagcacaattacccaccagaaggtgactgctatgcaccccacgaacg

SEQ ID NO: 489977 - DNA, 90 bp, Homo sapiens
actcaggcgcctcttcttagttgatgatttagttgattctctgaaggttgactacagacaaaaagctgctgcagcaggtagaattcccac

SEQ ID NO: 489978 - DNA, 75 bp, Homo sapiens
gaggaggagctggacaatgaagactattactcgttgctgaacgtgcgcagggagtaccaaatatgccccaacagc

SEQ ID NO: 489979 - DNA, 82 bp, Homo sapiens
tgtaacttttgatgatcatgatacagttgataaaattgttgaaatttaagatccgcattgaagacccaccccgcagaaagca

SEQ ID NO: 489980 - DNA, 100 bp, Homo sapiens
gttcgctggatgcagctgggggccttttaccccttctcaagaaaccacaacaccattgggaccagggattcaagttcgaaatatggcaactttgaaagat

SEQ ID NO: 489981 - DNA, 82 bp, Homo sapiens
ctgcccaggctcgcctcgactccaaatggttgaaaacagatatacagatttcgggcagacaacttgaacaagctgaagaacc

SEQ ID NO: 489982 - DNA, 98 bp, Homo sapiens
tacctgctcctaccctgatctagccgggtaacagatcttgtaaaccaacaacaaaccctggaggagaagatgcgggaagaccgggatagcctggtgga

SEQ ID NO: 489983 - DNA, 88 bp, Homo sapiens
catactatccgtttgttcaggaaccaccagtgacagaaatgatatggaacctagcaaagctgttccactgaatgcatctaagcaagat

SEQ ID NO: 489984 - DNA, 74 bp, Homo sapiens
tatggtgacgctatcaactgcagagattgatgggatggaggtggataccacaccaacagttgctggacagtttg

SEQ ID NO: 489985 - DNA, 82 bp, Homo sapiens
ccagaccccagagctgtgaaccaggacaagaagaacatgctgttttctgtggggcatgaggacactggccactccttgcatg

SEQ ID NO: 489986 - DNA, 74 bp, Homo sapiens
ttgccctggtcttgctcggccgatgaagtgcagaggtttttttctggtttctgcataaagaccaactcctcgga

SEQ ID NO: 489987 - DNA, 82 bp, Homo sapiens
aagaacagcgagcaggcgcgcagccacctggagaaggcggttgtcggggccaaagtggtaacgaacgcccgcagcccggggg

SEQ ID NO: 489988 - DNA, 100 bp, Homo sapiens
aggaggaggtggtgatcatggagacagatttggctgaaatgcctgagaaaggagtttgccattttcagcagaagattccgcacacatacaggaccattac

SEQ ID NO: 489989 - DNA, 98 bp, Homo sapiens
gcccctggatgcacagccccggcgctgggatgatacgttttcagacactctgagccaaaaagccgacagtgaggccagcagtgggccagtcacggaag

SEQ ID NO: 489990 - DNA, 82 bp, Homo sapiens
gcggcggtcggagaagtggcctaaaacttcggcgttggggagtgcatccgccccaacccttttccccctcgtctcctgtgag

SEQ ID NO: 489991 - DNA, 88 bp, Homo sapiens
gacatttaattttagggtcctttatatagaagggagagaggaagacaatgtgtggcaccctggactacctgcccccagagatgattga

SEQ ID NO: 489992 - DNA, 100 bp, Homo sapiens
accatgaaaatgagtctgtatataaggcttcattaagcttaactgagaagtatttctctgtagagaattgctttagatttccaaagagggaatgatgttg

SEQ ID NO: 489993 - DNA, 83 bp, Homo sapiens
atttactgaagcctgcaagcattagtgtgtcgctcccattcaccgactttccgaggtaaaacttccttttcctgtagatcaaa

SEQ ID NO: 489994 - DNA, 75 bp, Homo sapiens
acgagaccgggctggccatgatctatgctgttaaacgtttaatgaaagaagcggcagaattgaaagatccaacag

SEQ ID NO: 489995 - DNA, 87 bp, Homo sapiens
gacatcaagaagatcttcgagttcaaagagaccctcggaacgattttttatcaagcagaaatgcatcgaacaacgagaatcaagatc

SEQ ID NO: 489996 - DNA, 75 bp, Homo sapiens
gaagatgctagcaatgcgatgccggtcatctgtgggaagtgctccgagttcaaggccgagaacagccggcagagc

SEQ ID NO: 489997 - DNA, 50 bp, Homo sapiens
ggaataaacatgcaatgaacccaaaaggatggaaattccttcttccagca

SEQ ID NO: 489998 - DNA, 100 bp, Homo sapiens
atagctcaaggaaacctttccaacacagatgtccaagctgccaaggacagaaaatgaagcagtgttttatcatgtgtatttcagcaggtcttcttgaaat

SEQ ID NO: 489999 - DNA, 100 bp, Homo sapiens
acaaccacagcaagagcacctggctgatcctgcaccacaaggtgtacgatttgaccaaatttctggaagaggattggttgccgtggtctttactgctttt

SEQ ID NO: 490000 - DNA, 83 bp, Homo sapiens
gggagctggacggcgagcgcgagcggcgcgagaaagctccagggagttccacgctgtccagttctctctgccgtgataaacct

SEQ ID NO: 490001 - DNA, 98 bp, Homo sapiens
cgaaagcagtgacggaggagcttgtaccaccggtgaccttgaggaaccctgggagctcaggaaggaaggagcgcccagaagcagggacagggagctgg

SEQ ID NO: 490002 - DNA, 75 bp, Homo sapiens
cctcagttggaagcagccgatccagcctgcggagcctgtggggcagattgcagagggaatggcatacatcgagcg

SEQ ID NO: 490003 - DNA, 90 bp, Homo sapiens
gaagacgcacggtgccaggaccaagtatctgagtacaggggctcaggtccaggtggcaggggatatgctacccaactcaactgagcgggc

SEQ ID NO: 490004 - DNA, 90 bp, Homo sapiens
gggccttcctagccgccatggaggacggcgtctatggagctcttgtccctggcaaagcgaaagcgcagtgactctgaggagaaggagccg

SEQ ID NO: 490005 - DNA, 100 bp, Homo sapiens
gtttgagaaaggtgaaccaactcaaactaagaatttatccagttggcgaaggactttgaggatttccgtaaaaagtggcagaggactgaccatgagctgg

SEQ ID NO: 490006 - DNA, 95 bp, Homo sapiens
ttacaagtatccccgttcgccaccaattatgggagggctggccaacttctgctacagacgactcagttaaaattgcagagttttctcgtactcca

SEQ ID NO: 490007 - DNA, 100 bp, Homo sapiens
ggcccggccacctctgagaagggagacgacgctgctgggtccgctgagcggggcgacccgaggtacaccaggggttggaaaaaccacactaggcaaagaa

SEQ ID NO: 490008 - DNA, 97 bp, Homo sapiens
cgtgttcctgctcttctgcggcgcctacctctacaaacagggctttgccatccccggctccagcttcctgaaggcggtcaccttctccttactatag

SEQ ID NO: 490009 - DNA, 98 bp, Homo sapiens
tcagtgatgggactgagtactggattgtccggaattcatggggtgaaccatgggtggtttgtgatgaaaatggttccaagggctatggatttgtacac

SEQ ID NO: 490010 - DNA, 97 bp, Homo sapiens
gccttgttgccatgggatacctgttcatgtgttttggaggcaccgtctctccctgggaccagcccaacagcatggtggtggaacaccccgagttcct

SEQ ID NO: 490011 - DNA, 100 bp, Homo sapiens
ttttaccagtttacttttaattttgcaaagaatccaggacaaaaaggattagggagtaaggcatgtcgaggctttggctatgtcactttttcaatgctgg

SEQ ID NO: 490012 - DNA, 101 bp, Homo sapiens
cttggcactgaggccgttctcgcgatgctgtcttacggttatgatgtgattgctcaagcccaatctgggactgggaaaacggccacatttgccatatcgat

SEQ ID NO: 490013 - DNA, 98 bp, Homo sapiens
cgcgacgcgccccgcctcccccgtccggtccctctctccacgctttgaagtttaaatccaatggagaagactcaagaaacagtccaaagaattcttct

SEQ ID NO: 490014 - DNA, 75 bp, Homo sapiens
cattagacagaaagctggaagttgaaatggttgctacgatttctgcaaacggagacaaagaaattggcaatatca

SEQ ID NO: 490015 - DNA, 75 bp, Homo sapiens
gctgcagacggcgagacctcctgcacaggtgctgcagggtgcacagctgatcgccgtggcctcctcggaccccgc

SEQ ID NO: 490016 - DNA, 100 bp, Homo sapiens
cccacctcaccctcccgagtagctgggactgcaggagattgcatcctacctgatcacctttgagaagcatgatgagtggctgtcttgtgccccaaagaca

SEQ ID NO: 490017 - DNA, 98 bp, Homo sapiens
atccaccggggtgcagcgaggctgtggaaagtcccacccagaacgtgaggacctgcaagcgcaggaccgagcccaccgcatcgggcagcagaacgagg

SEQ ID NO: 490018 - DNA, 83 bp, Homo sapiens
gagtctgatggaaagagataggcgcatctctggagttgatcgttactatgtgtcaaagggcagccccgagaaccacaggtgta

SEQ ID NO: 490019 - DNA, 83 bp, Homo sapiens
gtcactgtcagcgacagacccctcggggtgtccatcacaaaagccgaggtgatggaactgtactggaacaatgggagaagctg

SEQ ID NO: 490020 - DNA, 83 bp, Homo sapiens
agcctcgcgcggcgctggagagagacaagatgtccgccagagctgcggccgccaaggtcagccaccatccgcctatctctgcg

SEQ ID NO: 490021 - DNA, 80 bp, Homo sapiens
ggatgacagctggagaatggagtcaggatctgtacccagctctgaaaggtgtaaacacagttttccactgtgcgtcaccc

SEQ ID NO: 490022 - DNA, 101 bp, Homo sapiens
ggggaggcagcgcgggatcccagcctcaggcgtgcgcggacggtgtgcggatcttccctggcaactgggacaaccactcccacaagaagaacttgtttgag

SEQ ID NO: 490023 - DNA, 75 bp, Homo sapiens
ggataagcacctggtgaagtcagcggagcccggggagcagcagttcattatgctgacatatcttttcatgttggc

SEQ ID NO: 490024 - DNA, 98 bp, Homo sapiens
acggagtgaccaagagcaggtttgagattcctctaaaaccaagtcttcaagaatgggagtccaaagaaacctggaccatcgtgaagcgactgcccccg

SEQ ID NO: 490025 - DNA, 83 bp, Homo sapiens
gaaattttgagaagagcagcaagagctttacctatctataccacatcagcttcaaaaagtgactattatatggttaaaaagat

SEQ ID NO: 490026 - DNA, 96 bp, Homo sapiens
attacatttatgaagatgcttatgacaaactttctccagaaaatgccgccctggagggagggccagcgtggacaccaaggaggctgagggcgcccc

SEQ ID NO: 490027 - DNA, 50 bp, Homo sapiens
gctcctgtcccacgtcaggcatgcgaggatgtacagttacccagcacgtg

SEQ ID NO: 490028 - DNA, 75 bp, Homo sapiens
tctacttccccatcccaggaatggagggggaaggtggtttctttggattttacagaggtctgatgcctactattt

SEQ ID NO: 490029 - DNA, 127 bp, Homo sapiens
ggcagctcagatgcatctggttcttctaaaggagcaattctccaatacttacagtaatctcatattaacagcctcaacaaagtgcttctggaaacaatgagagctctcaagttgagtcaacaaagga

SEQ ID NO: 490030 - DNA, 75 bp, Homo sapiens
gagatgcctttgttcaccgccaaccccttcgagcaagacgtggatgattctttgggattgggacttaaaacaatg

SEQ ID NO: 490031 - DNA, 88 bp, Homo sapiens
ggtgcaaaccctgggagaaggtgcctatggagacacccacatgcaggatctccaggaggtgacccaggaccttcattatgaaaacttc

SEQ ID NO: 490032 - DNA, 74 bp, Homo sapiens
ggttccaagaccaattccccgtcctgtccctgctatcagtggggcactgaagaaagcaggactgagtcttaagg

SEQ ID NO: 490033 - DNA, 80 bp, Homo sapiens
cagcagtatggaagtgaaacagaaggagtattcgtgattactttcaagatatcagaaaaccaggactctgcagatgttga

SEQ ID NO: 490034 - DNA, 74 bp, Homo sapiens
aactttcggaaagctacttgtagagaaccaggcgaggaggggccaactgcaggtgaggggtttgataaagtcag

SEQ ID NO: 490035 - DNA, 98 bp, Homo sapiens
caacgatggtctttcctctgcattgctgatcttgtacttggattcagcaaggaaccttccgggaagaagatttcttagttgtctcttcaactggaata

SEQ ID NO: 490036 - DNA, 100 bp, Homo sapiens
ggcatgttcctctctggcatggtggctcaaattgatgctaactggaacttcctgttgctctatatgcaatcagtgctgtctactttgctggagtgatggt

SEQ ID NO: 490037 - DNA, 100 bp, Homo sapiens
caaagagtcaaggtggggagccaacatacaatgtggctgtcggcagagctggtagaggtgaccaagaatatggcccaggtgaccaaagccctggacaagg

SEQ ID NO: 490038 - DNA, 50 bp, Homo sapiens
ttccagtgcatctgcatgcccgagacctacagagttgaaacagtgaaacc

SEQ ID NO: 490039 - DNA, 75 bp, Homo sapiens
cggaggcagccccgcgccgcgccggacccgaggtataatacttctccacgtctgcttcaggaagaaagtgcctgc

SEQ ID NO: 490040 - DNA, 100 bp, Homo sapiens
tgagggcgccacgcagtctctggcggagcagatgaggaagatcgccttggagtccgaggggcgccctgagaatgagctgaaagccagtggtggcgaaatc

SEQ ID NO: 490041 - DNA, 82 bp, Homo sapiens
cggagcttatactcctcccagtgacgggtctggagtgcgtgggggaccggctgttggcgggggaacgcccttttgcttgtga

SEQ ID NO: 490042 - DNA, 75 bp, Homo sapiens
ctctatcaagaagaatatctaatccgtaccttgaacatacgccttcccaggtcttaggggaaaagccagagcttc

SEQ ID NO: 490043 - DNA, 74 bp, Homo sapiens
tgccttggaaaatgccaacgccgtgtctgaaggaatttgctgacacaatatcttccgcctggtgctgggcatat

SEQ ID NO: 490044 - DNA, 100 bp, Homo sapiens
cgttggatgcacttagtaaagaaaaagcctggcagaccttcatcattgacttattattgcactgtccaagcaagaataggaaaattgtccacggctgatg

SEQ ID NO: 490045 - DNA, 98 bp, Homo sapiens
ttctgcttttcaagagttccgatttcatcactcgtgacttcactcagccatccccataggcactgagatagaagggatgaacattttaggattggtcc

SEQ ID NO: 490046 - DNA, 100 bp, Homo sapiens
ggagccgaccgggccctgggctggaggtaaaaccccacgacaatgcagatcttcgtgaagactctgactggtaagaccatcaccctcgaggttgagccca

SEQ ID NO: 490047 - DNA, 100 bp, Homo sapiens
agatgtccggctgcagcagcaagtcccatcggaggacctccctgccctgtataccgagggaacagactgtggatattcataaggagaaagtggcacgaag

SEQ ID NO: 490048 - DNA, 97 bp, Homo sapiens
actggacaaatactctgaggctctcaaagatgcccaggagaagctggagctggcagagaaaaaggccaccgatcccaggtcagcgcacggatgaaga

SEQ ID NO: 490049 - DNA, 82 bp, Homo sapiens
accagctggaaggcagattcaagcagctgcaaggtgtgggcagaagaaaaagctagtgatcaacagtggcaatggagctgtg

SEQ ID NO: 490050 - DNA, 100 bp, Homo sapiens
ctcaatggccatggtggactaccagcgggtggtgagggacaccatcaagcacatcggctacgatgactcagccaaggtgatcatgtccgacgaggccgtg

SEQ ID NO: 490051 - DNA, 100 bp, Homo sapiens
cccactcgcctcacctgagcctgggtgtgagttcttgatacgaatgaaaggccaagagtttgttgatgagattcaaggtagatatcctcatcttcttgaa

SEQ ID NO: 490052 - DNA, 82 bp, Homo sapiens
agatggatcgtttacagccaggtgaggaagtggagatagctgagctcactacaggttatggaggttttgatgactatggtgg

SEQ ID NO: 490053 - DNA, 75 bp, Homo sapiens
gcgccatgagtctgacttccagttccagcgtacgagcatttcagaagggtgtaccttgaagctagttttggctat

SEQ ID NO: 490054 - DNA, 75 bp, Homo sapiens
caagcagctggaagatggacgtactttgtctgactacaatattcaaaaggaagccaaattggcagagaatgcttg

SEQ ID NO: 490055 - DNA, 100 bp, Homo sapiens
gaaaagatctgctgcaaggaactgatagcttatggttctccattgtgatgaaagcacatggtacaggtggattctccacagttttcctcgtgcgtactca

SEQ ID NO: 490056 - DNA, 106 bp, Homo sapiens
cagcgggaggcagagggaggaacctggacgccggaagccgggaaatggtgagaagccctaccactgcaactgggacggctgcggctggaagtttgcgcgctcagac

SEQ ID NO: 490057 - DNA, 75 bp, Homo sapiens
gagagacacttgtgaacattcaagtgaagcaaaagcctttcatgattattgatgagccctcctcttcagctagga

SEQ ID NO: 490058 - DNA, 90 bp, Homo sapiens
gagctccaggtgcccacccctggcagagccggcctactgaacacctctgggtcaaggccaacctgtcagaggtgcttgtgtccagtgtcc

SEQ ID NO: 490059 - DNA, 98 bp, Homo sapiens
tggactcggattcgttgcctgaggaaatgctgtctatgatttcttcattggccgtgaattaaaccctcgaattggtacttttgatctcaaatactttt

SEQ ID NO: 490060 - DNA, 88 bp, Homo sapiens
gcgcctcccctccggccctcagctgctctctgctacaaggaggtgtggaagatttccttacaagggccgtgttacatgacactgttaa

SEQ ID NO: 490061 - DNA, 78 bp, Homo sapiens
ggcggagcggccaacatggcggaacgcaggagacacaagaagcggatccaggtgtcgtgaaaactacccctaaaagcc

SEQ ID NO: 490062 - DNA, 100 bp, Homo sapiens
ggagctaagagatatctgcaatgatgtactggttggtgaaaattgcccctcaatattatgacatgagcaatttcccacagtgtgaagcaaagagacagtt

SEQ ID NO: 490063 - DNA, 90 bp, Homo sapiens
gcagtttgtcctcctcaatctggttccgggcgtgggtttggatgccatcaatgatgctaacctcctggaagcatgtatctaccgcctgct

SEQ ID NO: 490064 - DNA, 98 bp, Homo sapiens
cggaacattcttcacaagaaagaaatggtggagtcaatgaagaaagtagcagggatggatgtggagctgacagttgaagaaagaaacctcctatctgt

SEQ ID NO: 490065 - DNA, 98 bp, Homo sapiens
aacccaggaggagactctccctggaaaacttcccttccctttcggattgaatatgatgcatatcgcactgatttggaagaactgaatcttggaccacg

SEQ ID NO: 490066 - DNA, 100 bp, Homo sapiens
gaagcgctttgatttacagcagctgcaggagccttcacgtaaatgggtccagtcatgcctcccagtaagaagccagaaagctcaggaattagtgtctcca

SEQ ID NO: 490067 - DNA, 75 bp, Homo sapiens
tggtaagggaggcgtcgctgattccagagagctaaagccgatgatcttcagtttagatcttggaggcatatcaac

SEQ ID NO: 490068 - DNA, 75 bp, Homo sapiens
ctgtgaagagacatgagatgattgccaaatccccagtgtcatcagtggtgttggggaactggatctagacaaagg

SEQ ID NO: 490069 - DNA, 104 bp, Homo sapiens
ctttctcaagcactgtgatcttcaaatgttgaaaggattgttgacaaaaggaaaaataaaaaagggaagacagagtatttggttcggtggaaaggctatgacag

SEQ ID NO: 490070 - DNA, 129 bp, Homo sapiens
aggatgggatccggctcctccagctaccggcccaaggccatctacctggacatcgatggacgcattcagaagggggggccctcagcctcttggccttgaacgggctgttcatcttgattcacaaacaca

SEQ ID NO: 490071 - DNA, 100 bp, Homo sapiens
tgtcctccggcccgagatgaatcctgcggcagaagccgagttcaacatcctcctggccaccgactcctacaagattggactccttcttgtcctgagccag

SEQ ID NO: 490072 - DNA, 101 bp, Homo sapiens
ggggccccagcggcggcggcgaagagcccgccctgtcccagtaccagctttctgaaaaggatatgagcatgctcgaggagaggattaagcggtcagcaaag

SEQ ID NO: 490073 - DNA, 100 bp, Homo sapiens
ccgaggccggggaccaggacagtcgcgaggttcgagtgttgcagagcctgcggggcaagatctagctccaaacgagaatggaagccgctggaggaccgta

SEQ ID NO: 490074 - DNA, 96 bp, Homo sapiens
aggcgcgggctcggggcgcctgcgggacgggctggtggacgaagccattgataccaaatctctgttggatgcttcagaagaagcaattaaaaaaga

SEQ ID NO: 490075 - DNA, 75 bp, Homo sapiens
tgccctggtccatcaacagggacgattacgagctgcaggaggtgatcggaaaagatggtaaagcacgcaataaag

SEQ ID NO: 490076 - DNA, 73 bp, Homo sapiens
tcatacaaagacagcacgctaataatgcaattactgagagacaacttgacaggcaagtgtccagagaatggct

SEQ ID NO: 490077 - DNA, 82 bp, Homo sapiens
caaactccacgaagccaacgcccagtgccctctggtggtcagaagatgctgtgctgtctcgttaggatgaatggattaaaat

SEQ ID NO: 490078 - DNA, 101 bp, Homo sapiens
ctccgggtcgctggcggcgtggacacctgagtcccggggtaggggtctcccgcgagaattaaacaaccaccatgtcgagcaaaaaggcaaagaccaagacc

SEQ ID NO: 490079 - DNA, 99 bp, Homo sapiens
tgtacaagatatgtgcctggatgcagctcacctccgccaaacatcatgtcaatggcaacagaacagtcgaacctttcccagagggaacacagatggctg

SEQ ID NO: 490080 - DNA, 75 bp, Homo sapiens
acccccagacctcctcagctccagggggatatgagactttctactcggaatatcctgagtgttgcgtggatgtaa

SEQ ID NO: 490081 - DNA, 100 bp, Homo sapiens
agttcgctacacagcaatgcatcgaggatcaagacttcaaatcccaaaagaacttcatcattaacatgacttgcagattttgctggcagcttcctgaaac

SEQ ID NO: 490082 - DNA, 82 bp, Homo sapiens
catggcgtacgcctatctcttcaagtacatcataatcggcgacacagcataagcagtactataatggatgtagacagcacaa

SEQ ID NO: 490083 - DNA, 50 bp, Homo sapiens
cccgcgggatacgcctcagcgcgaacccttaggagaaatcttgagagtgg

SEQ ID NO: 490084 - DNA, 82 bp, Homo sapiens
cggtgcagcagccggccgacccagagtttcagagaagccgaactgggattaccatgcagaaatacaagcttttggacatcgg

SEQ ID NO: 490085 - DNA, 100 bp, Homo sapiens
cctcaactgccgcctcgcctactcactctggagccgactttaggttcaagatggtgactgcagccatgctgctacagtgctgcccagtgcttgcccgggg

SEQ ID NO: 490086 - DNA, 82 bp, Homo sapiens
gaagatgatcaggaagtcattcgcttccagaagaatcatggcacatgaaacaaagagtcctcttcgtggaaaagaaaaaaat

SEQ ID NO: 490087 - DNA, 100 bp, Homo sapiens
gagctctccagttcaagcggacgtgtacttcccacgactggccgaggagtcttgtaaatgtaatggctggaaaaaccctaacccctcacccactcccccc

SEQ ID NO: 490088 - DNA, 100 bp, Homo sapiens
tccttttccctctccctttccctaaggtttttgactaaaggccagaatgcattggtagagctacagacacaaagaccaatagctcttgagctatataaag

SEQ ID NO: 490089 - DNA, 82 bp, Homo sapiens
taaccaaaccagaactttttttttttttttctgttcagtgacatctgatgctaatactggagaccgtggacagaccaataat

SEQ ID NO: 490090 - DNA, 82 bp, Homo sapiens
cggtactcttcagggatgagtcatgtggcagtggaaaatgcgctcgggctggaccagcagcggagctggagtttgttcagat

SEQ ID NO: 490091 - DNA, 85 bp, Homo sapiens
ctctggagtgcgggcgggggcgacagggccgattccggagtgggtgacctccaaattcgagctctatacctgcctcagccctctg

SEQ ID NO: 490092 - DNA, 75 bp, Homo sapiens
gctttctactggattctgaaagctggtcatatggcaatggtggcttgctatccgggaaatggaacaggttatgtt

SEQ ID NO: 490093 - DNA, 74 bp, Homo sapiens
ctccatcttcgcggtagctgggaccgccgttcaggtggtgttcccactgatgaagagcaggcgactgggttgga

SEQ ID NO: 490094 - DNA, 139 bp, Homo sapiens
gccggcgcgaggacagcgcgtgcccgcgaggagccgccgcgcgcccgcgccctccgcgcgacgccaggttgaaggtcgaggagctggaaggcgagcggagtcggctggaggaggaaaagaggatgctggaggcacagct

SEQ ID NO: 490095 - DNA, 75 bp, Homo sapiens
agtcattgacagcggagatggagtcacccatgttatcccagtgaatgtctccttcagcctgtcccccggcaaggt

SEQ ID NO: 490096 - DNA, 98 bp, Homo sapiens
cgagaagcctctgaggcgctatggggcggtggaggagacggcttggaaaacggagagactggggagaatcactcagcctctgaagaagcttcgggttc

SEQ ID NO: 490097 - DNA, 75 bp, Homo sapiens
gactacaaggacagcagcgactttggggcccgtcaccctcaggatctaagcattgaagaacagtcagagtgtgct

SEQ ID NO: 490098 - DNA, 101 bp, Homo sapiens
gtctgaactaggatgtcccgacatgaaggcgatatgagtctcatccagtctgtgctgatctgcaggccaaaattcttcagtgttaccgtgagaacacccac

SEQ ID NO: 490099 - DNA, 117 bp, Homo sapiens
ccacacctacagggcaaccatgaccgaggagagctctgacgttcccagggagttgataggtgatgtgtccaatctagatcccaacttctcatttgaaggcaccaaactggatgtggg

SEQ ID NO: 490100 - DNA, 96 bp, Homo sapiens
gctctagcagaggaaaataagaacacagtggatgtcgagaacggtgcttctatggcaggatatggtgtggatgaggtcaccattgtcaacattttg

SEQ ID NO: 490101 - DNA, 75 bp, Homo sapiens
ccaaggtgccggccgacaccggttggatggcaagcatgtggtgtttggcaaagtgaaagaaggcatgaatattgt

SEQ ID NO: 490102 - DNA, 75 bp, Homo sapiens
gttaaggattccaagtaactcttatttgttgccctcggaccagaaagaagaaaatctgactcaggagttatgttg

SEQ ID NO: 490103 - DNA, 100 bp, Homo sapiens
ccggcctcctagggggtcgtcgtggtccagacagtttagcagaacagcctccgcggctccggggagaaggatcataaaaggattcctctgtactagcaca

SEQ ID NO: 490104 - DNA, 75 bp, Homo sapiens
ggccggaaggaacagacccctgtagcgggtatatccgcaccatgtacctggggattcagagccagcggcggaagg

SEQ ID NO: 490105 - DNA, 75 bp, Homo sapiens
cttcctgttaaagtcatggaagccctaacattggctgaaggtctgggaggggctgaacgtggtgaagacaggccg

SEQ ID NO: 490106 - DNA, 98 bp, Homo sapiens
cgaaccgcagtatcatgctggccaagaagatcatcattaaggacggaggcacgtctgcgggccaggcatcgacatccgcaacgactatcagcagctga

SEQ ID NO: 490107 - DNA, 99 bp, Homo sapiens
aacagcatctgtggaaatcgatgatgcattgtatagtcaagagaatccatcccattaaatgacctgaagtcagaagtatcaccacggatttcagcagag

SEQ ID NO: 490108 - DNA, 100 bp, Homo sapiens
ctggtgtgggtttcccaagcaaggttccttggaagaagatgtctgcagagaccctgtattcagtggatcagctggcaccacccaaatagataaattggcc

SEQ ID NO: 490109 - DNA, 98 bp, Homo sapiens
aatgtaaaatgagaataactgcagaagaaatgagtgcactaatagaagaacgggatgctgccttgtctaagggttacattttgccatctgcctttcca

SEQ ID NO: 490110 - DNA, 99 bp, Homo sapiens
gcgcctcgctggggcggggaccttgccttgcccgggaatatactgatgataatgctctgattcctaagaattcttctgtaattgttagaagaattccta

SEQ ID NO: 490111 - DNA, 50 bp, Homo sapiens
tctacaagatgatgcagggaggaggccgagacgcatccagagctttcgtg

SEQ ID NO: 490112 - DNA, 100 bp, Homo sapiens
agggctttggggaggagtccagggagcccagcacaggaagctctatgcagaactgtgccaaggcatcgtggacatagccatttccagtgtcttcccaccc

SEQ ID NO: 490113 - DNA, 75 bp, Homo sapiens
cagcccccgaaggccctatcaggacatggagtatgaaagacggatggaactgcaggatccaaagatgaatggagc

SEQ ID NO: 490114 - DNA, 80 bp, Homo sapiens
cgcgtctcggaaaccggtagcgcttgcagcatgagagctgcttttgcacattttcctgaactctatgattttgccctctc

SEQ ID NO: 490115 - DNA, 89 bp, Homo sapiens
tcaccacccctatccagacggctgcccttcaagtaccagtttcctatcctgggagcaggagagtgtgcctatttgaatgacaaaggtgc

SEQ ID NO: 490116 - DNA, 103 bp, Homo sapiens
ctggctgtgcgcgctggcgctgagcctgcagccggccctgccgggggatatgagactttctactcggaatatcctgagtgttgcgtggatgtaaaacccattt

SEQ ID NO: 490117 - DNA, 82 bp, Homo sapiens
cgcaccgcggcttaaatgatgtattttgtgatcgcagcgatgaaagatcaggatcctcatgaccagccaaagagaagaagaa

SEQ ID NO: 490118 - DNA, 133 bp, Homo sapiens
cggacagccgcgcgctgagggtctcggggcgggcgccgcgggacctctccgggccatggtaagactttgaccccgacgcaggcttcagtgattgccgcggatcagaagcctgagcactttggctcgagacaat

SEQ ID NO: 490119 - DNA, 100 bp, Homo sapiens
ggaatatgagtgatgacaaaccctttctatgtactgcgcctggatgtggccagaaccactcacgaattcttgtttggtgcccttgctgaactggttgata

SEQ ID NO: 490120 - DNA, 128 bp, Homo sapiens
tgccatgggcacgcctaccgtctgcaaagcgccatcaagcaggagctgcacagccgggccttcctggccatcacgcgacctgagaccatgcgtatgtcccgaggcggctgctccggtctcttgcggtg

SEQ ID NO: 490121 - DNA, 90 bp, Homo sapiens
gggccccaaaggaaggcttcggtgactcagcctcttcgagcactactgctactcccggggcggcatgcgccacagctcctacacctgcat

SEQ ID NO: 490122 - DNA, 114 bp, Homo sapiens
tggacctaaatggcgcagcatgattttgttcctgcttggctaaatttctcaacaccacagtcagctaagattcgggaactggagcctctcctctgtcacagtgacaatccatct

SEQ ID NO: 490123 - DNA, 99 bp, Homo sapiens
gtttgcctgaatccatcattgcagctgcatgttcaagaagtggccggagagttctgcatgttgattctgcgacttcatgatagcatatcagaagagggc

SEQ ID NO: 490124 - DNA, 75 bp, Homo sapiens
cgtcgtcgctgcccactccccaggatacctcgttaagcgtggcatggaatattcacatgggagagccgcatgagg

SEQ ID NO: 490125 - DNA, 100 bp, Homo sapiens
gggagcagaagggaggctccaagacctcatcaacaattaagagctcacaatgtctctctgcaccaagctccatgactcaggatttgcctggagttcctgg

SEQ ID NO: 490126 - DNA, 83 bp, Homo sapiens
ccgggagctgccacgtccgagacctggagcagccaccgccgcaatcatgatctgccttctggagactgcgccgtcctcccggg

SEQ ID NO: 490127 - DNA, 75 bp, Homo sapiens
gcgctgcgctcgcgcccggatccctcagctctacgaactcgacggggaccccaagaggaaggaattcctggatga

SEQ ID NO: 490128 - DNA, 80 bp, Homo sapiens
cgtgtacaacccgacgaggaacgaatgggacaagatcccgtccatgaatcagcttcaaggttactgactttttatgatgt

SEQ ID NO: 490129 - DNA, 97 bp, Homo sapiens
gaggaagcgcaagcaccccccggtttattacagaggtcagctgggaagagctaccactttaagtgtaactcctgaaatggaaagagtgaagaagaat

SEQ ID NO: 490130 - DNA, 50 bp, Homo sapiens
ctggcacctacgtctgcactactaggtctagatgttgatggaatatatcg

SEQ ID NO: 490131 - DNA, 102 bp, Homo sapiens
cgagccgcagtgaggccaacgccgtgttcgacatcctggccgtgctgcaggtgaaatgacaatggatgctctgttggctcgattgaaacttctgaatccaga

SEQ ID NO: 490132 - DNA, 101 bp, Homo sapiens
gattcgcagtggtcgcttcttctccttgagtacaggggctcaggtccaggtggcaggggatatgctacccaactcaactgagcgggccatcactattgctg

SEQ ID NO: 490133 - DNA, 96 bp, Homo sapiens
ggagacttttggggggaaactaggtcgatggtcggcggcgcccggatgggcagctgagccatccttacccgacctgggatggagatcaccaaagat

SEQ ID NO: 490134 - DNA, 83 bp, Homo sapiens
tgaccgagctggagagcgtggacaagagcgcggggcaagtggctcggaacacaggacttctgcacggacctggccgtctccag

SEQ ID NO: 490135 - DNA, 82 bp, Homo sapiens
ctggatccaggataacggaggctggttcaaatctgaacatcaatgatgtactagggaactactcattgactcttgttgatgc

SEQ ID NO: 490136 - DNA, 101 bp, Homo sapiens
ctcgcccggttcctctccacttcgtttagttgcgctccatggacagatcaacgaacctggacattgaggagctcaagggcatcacatttgatgaattcagg

SEQ ID NO: 490137 - DNA, 82 bp, Homo sapiens
ctaggccgggagagggagaacacagttggagaaaatcggcagctgagacggccttggccgataattttcatggaggacattt

SEQ ID NO: 490138 - DNA, 51 bp, Homo sapiens
tggctttccttctggaacaccagcagtaacacaagtggcaagacagccggg

SEQ ID NO: 490139 - DNA, 80 bp, Homo sapiens
actttgccttggttacgccctgattctaaaactcaagttttagctaaagaagatactgaggcagctattcaatcaatatt

SEQ ID NO: 490140 - DNA, 100 bp, Homo sapiens
tggggtgaggaagattttgaagacaatcgtcacttatacaggtgtagaatgagccaaggagactcaaacccagcagctattccgcatgcagcagaagata

SEQ ID NO: 490141 - DNA, 100 bp, Homo sapiens
gttccctttcgagttgcagcttacaacaagaaaaagaagcgtatggactactatgactctgaacagggctatctgatgggttagagtgcctttgagaaga

SEQ ID NO: 490142 - DNA, 100 bp, Homo sapiens
caggcgtgcgcggacggtgtgcgggatgctggaggtcagcagattggcttcttgctaggaagctgtggtattgccttagctcttaccagtgaagtttgtc

SEQ ID NO: 490143 - DNA, 100 bp, Homo sapiens
ccgctttggagaacaacaaggagcagatggcctgatatgaaggagtcacgcctcccgcctcccggagctgcccagtggctgccttgtccttcaagtgcag

SEQ ID NO: 490144 - DNA, 75 bp, Homo sapiens
gccaggggaggtgcagcggcacctgcagacccacgggatagcggagtttaagagagctgtgaaagtagcaacagg

SEQ ID NO: 490145 - DNA, 90 bp, Homo sapiens
ttttgcccaattggataataggcagctcaatgacagtcaagtggaaacaactgtctggtttatggttggctgtgggagatgtgatgactg

SEQ ID NO: 490146 - DNA, 50 bp, Homo sapiens
ggaagcatgtcgtctttatcgctcagggccatgatccaaaggaaccagag

SEQ ID NO: 490147 - DNA, 75 bp, Homo sapiens
actaccgctgctccggggcttacgacctccgcatcctggacagcgcgcccaccgaaaacggtccggatgtacccc

SEQ ID NO: 490148 - DNA, 52 bp, Homo sapiens
ctctgatgtgtctctcacagcttgaaaagcctgagagtagctccctcctttt

SEQ ID NO: 490149 - DNA, 82 bp, Homo sapiens
ccagcctcaggcgtgcgcggacggtgtgcggtttcgtgccttagcaccaatgtactatcgagggtcggctgcagctataatc

SEQ ID NO: 490150 - DNA, 100 bp, Homo sapiens
actcacccagcacacaaaatggatctcttacgctgaactcgtttgagcagctgtgcatcaattacaccaatgagaagctgcagcagctcttcaaccacac

SEQ ID NO: 490151 - DNA, 75 bp, Homo sapiens
atggggcatacctatggctttattgacctcgactcccatgcggtccacctgggcttgcgaaggcacagattcccc

SEQ ID NO: 490152 - DNA, 96 bp, Homo sapiens
tttcatacagaagtacctgcttcagagacatgagaagattcatactggaaaaccagtagattcccagacatcgcgaagtgaatctgaaattgtgcc

SEQ ID NO: 490153 - DNA, 76 bp, Homo sapiens
ggctatcggggtgaacgcatcaatcagctcatccgtcagctgaactagacccagcatctactacaagccttagtgg

SEQ ID NO: 490154 - DNA, 74 bp, Homo sapiens
acctcagccgcctcctagcggcgcggcgctcgctcctacgacaatgcagatcttcgtgaagactctgactggta

SEQ ID NO: 490155 - DNA, 100 bp, Homo sapiens
gaggagaacggggaggtgaagccgctgccccgaggtaccaggatcatctatgaccggaaattcctgatggagtgtcggaactcacctgtgaccaaaacac

SEQ ID NO: 490156 - DNA, 100 bp, Homo sapiens
ttgaaggtcatggcaggacctgggatcaaaagatggagttcgctcttgttgcccaggctggaatgcaatggcatgaccttggctcactgcaacctctgcc

SEQ ID NO: 490157 - DNA, 89 bp, Homo sapiens
atgttacattgtcgctcactctgcccatcacgtgccacatttgcttggggaaggctggagtgcagtggcgagatctcgactcactgcag

SEQ ID NO: 490158 - DNA, 98 bp, Homo sapiens
tgcctcttgatctccgccaccgtcttcaggccagatgaaactgttaaagatggagtcaccttatacctgctacagtcggtcaatcagttactactgac

SEQ ID NO: 490159 - DNA, 109 bp, Homo sapiens
acccacggccgcctccggagcccgacgcggtcatggaaaatggaagatttgcaaaatacaaatattttacccatgtcatgatcaataagacagatatgctaatgataac

SEQ ID NO: 490160 - DNA, 100 bp, Homo sapiens
gaacagcctgaagaagggctccctcgtgaagaacctgaaggacacactagatggactttctggccgagaccagccagtggagctgctgaatcctgcccgc

SEQ ID NO: 490161 - DNA, 80 bp, Homo sapiens
ttcgattattagctttagtgaaatgggctaataatgctggcaaagtggaaaaatgtgcgcttaaagcttttcaagccagg

SEQ ID NO: 490162 - DNA, 50 bp, Homo sapiens
cgacgatgaggtgacagtcacgatttgcctctgcaacttgactctcctct

SEQ ID NO: 490163 - DNA, 98 bp, Homo sapiens
cagcatcagcccctcccacagccagcttttagtttggatgctgaacagcctgattatgatttggattctgaagatgaagtatttgtgaataaactgaa

SEQ ID NO: 490164 - DNA, 100 bp, Homo sapiens
gaacagctgcggtgctctgccatattgtgtcttccccggccggtccctcgcctcccggccgagctgacgcttcagacagcaaagtcctgacatgtgcagc

SEQ ID NO: 490165 - DNA, 100 bp, Homo sapiens
ccatgaacaactcgggcgccgacgagatcgggtatcatgatattagctggtttgacatcaagtcatttgtgagtcatcagatcttctcctgaaaatggga

SEQ ID NO: 490166 - DNA, 75 bp, Homo sapiens
cctcataagtgtatagtaccaaatatccagcattttcggccaaaaagcaaatggatttccacctgacaaatcttc

SEQ ID NO: 490167 - DNA, 90 bp, Homo sapiens
gccgagctggagctgccgcggcgcagccagaaatggtggagtcaatgaagaaagtagcagggatggatgtggagctgacagttgaagaaa

SEQ ID NO: 490168 - DNA, 100 bp, Homo sapiens
ttctggtgatacccaagaaacatatatcccagatttctgtggcagaagatgatgatgaaagtcaacaaggctttttgcatttgggggaacatgatggcag

SEQ ID NO: 490169 - DNA, 74 bp, Homo sapiens
ttggaactgtgtttgggagcctcatcattggttatgccagatgtacctttaagagaagggactaacaaattccc

SEQ ID NO: 490170 - DNA, 82 bp, Homo sapiens
cccctggatgggggaccacaagatcctcatcgacagcccaaacgtgcagaatgccccacaagattggatttgtagtcgtcag

SEQ ID NO: 490171 - DNA, 89 bp, Homo sapiens
agaggaagagggagatcttcttcttttcttaactggtcaagagtacctggtgtgtaagaggaagctggagagtaagaaggaagccctgc

SEQ ID NO: 490172 - DNA, 75 bp, Homo sapiens
gagacgtagcaggagacatttctgggaatatggtagatggatatagagatgttttgaacgaagaatgtgatcaga

SEQ ID NO: 490173 - DNA, 82 bp, Homo sapiens
cgcggcggcagcagcagtgagaggaatggtcctcgtccgaagtgagaatgggcagttgttaatgattcctcagcaggccttg

SEQ ID NO: 490174 - DNA, 75 bp, Homo sapiens
tggactcaactgtcccagatgaaatccaagaggaaactctgatgaggaagaaagtgcttcagaatctgaactttg

SEQ ID NO: 490175 - DNA, 90 bp, Homo sapiens
ttcagacccatttccagtcatgaatcaggatcctcatgaccagccaaagagaagaagaattaggaagcataaatcaaagaaaaaatttaa

SEQ ID NO: 490176 - DNA, 74 bp, Homo sapiens
gattatgacggaattaagaaattactgcagcagggcactccacagaaggatgttattatcaagtcagatgcacc

SEQ ID NO: 490177 - DNA, 75 bp, Homo sapiens
attaacaccactgacatcttccaaactgtggacctctgggaaggaagaaatgcagagtaacgtggaagtggtcca

SEQ ID NO: 490178 - DNA, 74 bp, Homo sapiens
tcatgctcagatattgcggaggaagtctggaaagtagatggtaacatgatgtggcaccaggataaccaagacaa

SEQ ID NO: 490179 - DNA, 82 bp, Homo sapiens
gccgagggcggaggcgacactctcagattgtggtggtgccatgcagcaagaatcagagagatgcagagttagagccagaagg

SEQ ID NO: 490180 - DNA, 80 bp, Homo sapiens
ttaaaacctctagacaaagtaaccaaatctccagccagttggacacgagttgccgctggttgtccaaatcaacaaccagg

SEQ ID NO: 490181 - DNA, 98 bp, Homo sapiens
ggaattgtgggagttgtgtctgccactcggctgccggaggccgaaggctggacgtaaagaaagaagtgatgcactcaattctgcaatagataaaatga

SEQ ID NO: 490182 - DNA, 75 bp, Homo sapiens
ggaaaattcttcaagatgaatcctaatacaggcatgggcagcagtgacgagtggtctgatgttcaagacattatt

SEQ ID NO: 490183 - DNA, 75 bp, Homo sapiens
aaagactgttccaaaaacagtggataattttgtggccttagctacaggagaggaccctccccccggtaccgcctg

SEQ ID NO: 490184 - DNA, 95 bp, Homo sapiens
ttcactcatgtacttgtacctgtctggattattcattattacatgaagtatcatgtttctgattactacagcatcccatttcccacacccactac

SEQ ID NO: 490185 - DNA, 83 bp, Homo sapiens
atcacagaaacgtgaggatcaagaagccggactacaaggtcgcctacgtgcagctgcttgaaaactatttttctagtctgaaa

SEQ ID NO: 490186 - DNA, 90 bp, Homo sapiens
gggtatgcctggagtctcagctggtggcaatacagtcctgttggttagcaatttaaatgaagagaaaaggtgtgagcggtactgggccca

SEQ ID NO: 490187 - DNA, 83 bp, Homo sapiens
cttcctgcccctcgttgatgagagcattcgaagtgacctcagcagggcatccaggactcagaattcatgattgaagaaatgca

SEQ ID NO: 490188 - DNA, 75 bp, Homo sapiens
gaggactttccttacctgtttttccagctcacccactgccagcagaggttggcgctgtacgtttatgagtacctg

SEQ ID NO: 490189 - DNA, 119 bp, Homo sapiens
gacccagtggcctcggcgattatggacccggccgaggcggtgctgcaagagaaggcactcaagtttatgacaagttggatggcttgaggactggtactaaaaggaaacgtgactgggag

SEQ ID NO: 490190 - DNA, 104 bp, Homo sapiens
aagtgttacaacaagacgaagatccccaaggaggacggcgagagcacggacagactcatggggaagggccaggtccagttccccctgcagtggtttggagtccc

SEQ ID NO: 490191 - DNA, 51 bp, Homo sapiens
cctggctcggagcagcagcctctgaggttgtgaccgagattcccgacgaga

SEQ ID NO: 490192 - DNA, 100 bp, Homo sapiens
agcccaggaacgaatctctcaggctgcatcaggatgaatgatgacccaagtatggaattgcttttgaaatcagaaagtcagtgcagggttgtagtgttga

SEQ ID NO: 490193 - DNA, 95 bp, Homo sapiens
tgagatgctcacgtcaggcctgaagggaaggggcttctctgtgctccacacttaccaggaccacttgtgcccttcaacaggcacatttattgaaa

SEQ ID NO: 490194 - DNA, 100 bp, Homo sapiens
aagaacaaatacttggcaaaaggaggctcggatattttttcagaggccaaaaaggcattgggatcttctgtcttacactggggctacttacccagcaaag

SEQ ID NO: 490195 - DNA, 75 bp, Homo sapiens
cccaaatcaatgcggagttcgtgacccaggaaatattctgctgtacgtagagatggctctttccattatgtccac

SEQ ID NO: 490196 - DNA, 83 bp, Homo sapiens
ccgcgcgcctttgtgcgcgcgccgagggtgaaaatcctatttataagagtgccgtaacaactgtggtcaatccgaagtatgag

SEQ ID NO: 490197 - DNA, 98 bp, Homo sapiens
acgtagataagacactgcaacacaggttttgaggaaaaccttctagaagagtcccagtatggggaagtggcagaggagacccctgcctccaacaacca

SEQ ID NO: 490198 - DNA, 100 bp, Homo sapiens
gctggatgccgaagtcctggaggtgttccacccgacgcatgagtggcaggcccttcagccagatattaataaggcagcggaaagaagaaatatgaatacg

SEQ ID NO: 490199 - DNA, 100 bp, Homo sapiens
gttgaaagcgacaagtggaggcgccgctctagcggccgggactctgaactatggcggttctgatctacaatggccaactggacatcatcgtggcagctgc

SEQ ID NO: 490200 - DNA, 100 bp, Homo sapiens
gcactgtattctttacctgcttcccaatcccactgatgaggatcagcccatggttcgattgagtgaaacagacttcaaagttatggcaagagatgagtta

SEQ ID NO: 490201 - DNA, 87 bp, Homo sapiens
acggggtgtacttgggaacgaggggtgaagcggcccaggtgaggagggagacgctgttgcggcagctggagacgaaccagctggaca

SEQ ID NO: 490202 - DNA, 75 bp, Homo sapiens
cggaaatgtccggcaagatcgagaaagcagattggcccccgccgcatccacacagtccgtgtgcggggaggtaac

SEQ ID NO: 490203 - DNA, 80 bp, Homo sapiens
ccatgctgtctctagactttttggacgatgtgcggcggatgaacaagcggcagcccttgccagcatccagccatggggga

SEQ ID NO: 490204 - DNA, 100 bp, Homo sapiens
ggccgaggtgttgcggacgctggccggtggcaagtgcaggcagctgtcccggttatgccggaatcgttgcaggtgagtccatcagaaacaggagctgaca

SEQ ID NO: 490205 - DNA, 83 bp, Homo sapiens
cttagctgtgctcgcgctactctctctttctggcctggaggctatccagcgatcccatgacagattctgttgtcacgtctcct

SEQ ID NO: 490206 - DNA, 51 bp, Homo sapiens
accaatgtgtgaagtgacaggcgaggaggtggccaagttggagaagcactt

SEQ ID NO: 490207 - DNA, 83 bp, Homo sapiens
agcttggtttcgggatctcggtgctgcagacggcgagacctcctgcacaggagggccctcctggacccgggagcggaccctgg

SEQ ID NO: 490208 - DNA, 100 bp, Homo sapiens
taaggcaaagggaagttcttcggaacctttcttcccctggatgggaaaacatctcaaggtcctacccactccggggcagccacagcctcgatgacctcct

SEQ ID NO: 490209 - DNA, 100 bp, Homo sapiens
tttcttcaaacgctaaatcaagcttggaatgatcatcaaacagctatggtgatgattagagacatactaatgtacatgctggtcagtgagaaggtcggag

SEQ ID NO: 490210 - DNA, 147 bp, Homo sapiens
cggggacatggagcccgaggccggcgccggcgccggcgccgcggcctcttcggctgcggaccctgccattccggaggagaagaagctcattcacacagaagacccatttaatgatgaacatcaggagaggcaagaggtggaaatgtt

SEQ ID NO: 490211 - DNA, 100 bp, Homo sapiens
attctgacagtgaggttgacaaaaagtggtgatcatgtgtgcgagcagtgacaccatccggagcatcatgctggtggcgcacaggcatggcatgaccagt

SEQ ID NO: 490212 - DNA, 100 bp, Homo sapiens
gtctccaggttacaaacccagatctcacacaagtggtcagtttggttgtggaaaggcatttatgtttgaatcatctttaagtctggcggtcacaaagtgg

SEQ ID NO: 490213 - DNA, 100 bp, Homo sapiens
tacatcttggaggtgaggacgtgcctcgtggtctaaagcttcggcacaagggcccaactggaattccacttacggctgataggaagatgtcttcaggaaa

SEQ ID NO: 490214 - DNA, 80 bp, Homo sapiens
ccgaggccttcaagtgcatgatgtgcgatgtgcggaagggcacctccacccggaactgtggctgcaccatctgtcttcat

SEQ ID NO: 490215 - DNA, 100 bp, Homo sapiens
gcaccatccactgcaacacaccaagcctcctgcagttgcgaacctagaagtcggaatccggaagaagatcgaacatgacgtggtgatgaaagccagcagc

SEQ ID NO: 490216 - DNA, 73 bp, Homo sapiens
cgtgcgctggataaacgcttgttaactggccactgaggcggctcccagctgcgttggcgacatggccgacacc

SEQ ID NO: 490217 - DNA, 50 bp, Homo sapiens
cgcaactctcagttcgagagtaaagctggctgcgtcctggtgttgagcag

SEQ ID NO: 490218 - DNA, 100 bp, Homo sapiens
acttatgatggacagacatctggaccagttattaatgtgtgccatttatgtgatggcaaagttgtggtcagaaatgagaagacatgaaatgttgagggag

SEQ ID NO: 490219 - DNA, 75 bp, Homo sapiens
gttgtgagccgtgagcagtttagagcccataaaacggtcctcatggcctgcagctagaaaattatggcatgccgt

SEQ ID NO: 490220 - DNA, 83 bp, Homo sapiens
agggctgtgaagacgcacggtgccaggaccaagtatctgggagtgcatccgccccaacccttttccccctcgtctcctgtgag

SEQ ID NO: 490221 - DNA, 100 bp, Homo sapiens
aaaattttccttgacctttaggtgcttttatattcatctcaaaaacaaaattctgaactcaggacttggcaaaatttctagaaggaggagttggccatgt

SEQ ID NO: 490222 - DNA, 100 bp, Homo sapiens
cgacgggcgcccccgagccgccgccgctgtccggagccccacagggacagagggtctcacggatggccccgctgccaggagcagaactggttcggaggcc

SEQ ID NO: 490223 - DNA, 100 bp, Homo sapiens
cagacaaggcaaagcgaaattggtcattctcgctaacaactgcccagctttgagcgctagtcctgctgatgggcaaagaaggtgtccacggtggtttgat

SEQ ID NO: 490224 - DNA, 74 bp, Homo sapiens
cggggaagagctgggtcgactcaaggtgcaaacagctgcacagcaagtggcagaggataaatttgtttttgact

SEQ ID NO: 490225 - DNA, 96 bp, Homo sapiens
ggtgcccagccgggaactccccatcgcgttttgccagcgataatacgcctcaggtgtgtcaaggatgccacaatgccatcgacccagaagtgcagc

SEQ ID NO: 490226 - DNA, 100 bp, Homo sapiens
cgcagccccaaagcgagcgaagctagggtcgccgccactgccgcaggaggcgtgaggggtgagcccctccagactccgaataggagatcaagagtttgat

SEQ ID NO: 490227 - DNA, 74 bp, Homo sapiens
cggattatgataggagaccgttgggttttggctcctggtagatgacattaatgctgataagaatatctcttctg

SEQ ID NO: 490228 - DNA, 82 bp, Homo sapiens
cagtgtcccacttgcatcaagctgggcatccagggctcgtacttctgctcgcaggtactccaaagattcaggtttactcacg

SEQ ID NO: 490229 - DNA, 106 bp, Homo sapiens
ctgaggtgtcggccggatccctccttctcccggcgcctcaagcggaagctacaagagactgtgaaaaggaagttggaaggagctcgatcaccacttaatggagacc

SEQ ID NO: 490230 - DNA, 83 bp, Homo sapiens
catagacatttacgcggatgtcggcgaagagttcaaccagggagcatcgagtacagctgtccggcctccaacgagtgtgagat

SEQ ID NO: 490231 - DNA, 93 bp, Homo sapiens
ctgggtgcccgtggaccacaggccctcgttgcccagatggtggcccagttgaaatccttcccttcctctaccttggaagtgcctaccatgcat

SEQ ID NO: 490232 - DNA, 50 bp, Homo sapiens
ttctcctgtgaaattaaagaggcagtaaaaatgttgtacatcagctctca

SEQ ID NO: 490233 - DNA, 100 bp, Homo sapiens
ctgcctcacctgaaaatgaattcaacataccattaggatcttaccggctaagtgctatttatggaggtacctatatgctgaataaacccattgaagaaat

SEQ ID NO: 490234 - DNA, 89 bp, Homo sapiens
cttggatgatgatgatcctaagttcattaatgttggagaaaaggcatattcatgtgctttgaaggtgaccatgctttgggattttcata

SEQ ID NO: 490235 - DNA, 100 bp, Homo sapiens
cagcactttgggaggccgaggcgggcagatcacaagtgcccaccagaagtatgtccgacaagcctggcagaaggcagacatcaatacaaaatgggcagcc

SEQ ID NO: 490236 - DNA, 90 bp, Homo sapiens
ttattttgggtcttcttcttaatcccatatctggacatctggaacatccatgaagctccaccatgaggcgaggtggatggaggaagcgag

SEQ ID NO: 490237 - DNA, 82 bp, Homo sapiens
gtttggagtctagctgtaggaaatgaactaaatatcactcctggtgttatgaagcggagattgaggagatagatgaagaaaa

SEQ ID NO: 490238 - DNA, 82 bp, Homo sapiens
ggacattattgcgcgtggaacggctgcttttggaaggtgccagaaccctgtggagcatcatgaactgggaagagtagctgag

SEQ ID NO: 490239 - DNA, 100 bp, Homo sapiens
gtggcagttgtggtcagtttcgctttgattgctaccctggtatatgcacttttcaggtttgatatacgtttgatgaaagaaggtcgtatgaaaggacaag

SEQ ID NO: 490240 - DNA, 75 bp, Homo sapiens
acccaaattggcgtttgtcatcagaatcagagggaaaatatttgcaatacctgccacgtccaaggttcagctgag

SEQ ID NO: 490241 - DNA, 90 bp, Homo sapiens
caattatttcgagagtcaaaatgtggatttccgaggcaagaagttttaacaacctgggcatccagtgtgtgaggaagaaggagattgagg

SEQ ID NO: 490242 - DNA, 50 bp, Homo sapiens
agctcaagctgctgctgctcgatgcttgcacataccacccaggtgttccg

SEQ ID NO: 490243 - DNA, 50 bp, Homo sapiens
ccgtgcgagaggtggcagagcaggtttttcttcccccagtccctcagctg

SEQ ID NO: 490244 - DNA, 83 bp, Homo sapiens
gagccccggacttcacctgagctacctcaggtgtgagttcttgatacgaatgaaaggccaagagtttgttgatgagattcaag

SEQ ID NO: 490245 - DNA, 75 bp, Homo sapiens
aatttcttgggtgaaaaatatatccgcagggttcggatgagaccagctaaaaagctgtcccgtcttacatattca

SEQ ID NO: 490246 - DNA, 83 bp, Homo sapiens
cttggaacagaacaagaggacaggaggtgtcgttccaggtgcaatggatgagcttcatagtctggatccaagaaggcaagagt

SEQ ID NO: 490247 - DNA, 104 bp, Homo sapiens
cctctcgcctcgggtctcgggggccgctctgggatcccggccaccagcaattgtccgagtccctgtgaagcaggaagagtgagggcaggttcactgcagctcag

SEQ ID NO: 490248 - DNA, 75 bp, Homo sapiens
gaacagccctccatcttgcagcccagaaggaattgacagaagaaggactgccttttctcatactctttcacatga

SEQ ID NO: 490249 - DNA, 82 bp, Homo sapiens
ctacccgcttctcgtagtcctgggagcacagcagaagtaaattcatgccgaagtccaacttaagaattatgggaaatttctt

SEQ ID NO: 490250 - DNA, 82 bp, Homo sapiens
gcggcgagccggagcgcggagcccggctcccgcaccatggaggaggacgacagctacgtgtcaacagcatctccaccctgga

SEQ ID NO: 490251 - DNA, 51 bp, Homo sapiens
ggcggtgatgcggctgtgaagccctagtcgctttgcccgaagtttttacat

SEQ ID NO: 490252 - DNA, 101 bp, Homo sapiens
agagtagcgacccggggggagcgcggggcgacgctggctgcagggacccggtgacagcgtgagagactggtcgaattgacaaatcttaccctacagtatgt

SEQ ID NO: 490253 - DNA, 100 bp, Homo sapiens
gccaccgcgtggtgcttgccgcagccagcaactatttcaggtttatcaccagatcttcaatctatggagcagattcggcgaattatgcgaccaactgatg

SEQ ID NO: 490254 - DNA, 100 bp, Homo sapiens
ccggcaagagctcggtgctggagaacttcgtgggccggagagtcgcggttgctgatcgtggtgcttgagtagagccgtggttggtgacagcatgacgagc

SEQ ID NO: 490255 - DNA, 83 bp, Homo sapiens
cgctgagcttggcgcacgggccgaccaggtcatcatcagatttgaaatatttaaagtggatacaaaactatttcagcaatgca

SEQ ID NO: 490256 - DNA, 75 bp, Homo sapiens
atttagatgttgaacaacttggaattccaggttgttatctggaatctgatgatgttttgcgtctacaaatgagca

SEQ ID NO: 490257 - DNA, 142 bp, Homo sapiens
cagggccctgcagatgtcgccaggaaagtggtgatccaggcaggaccaggctgcactgaagggacagagaggcccacctcacagagctgctggaggagatatgtgaccggatgaaggagtatggggaacagattgatccttc

SEQ ID NO: 490258 - DNA, 101 bp, Homo sapiens
aaggactgtgaggaggacctggcaaaggctgagccagcactcacagcagcgcaggcagctctcaacaccctgaacaagcctaactctggtgaactggatcc

SEQ ID NO: 490259 - DNA, 100 bp, Homo sapiens
cgcggcagcgccgagggcccctcccccaggcctctgggctctgaggaatagcgggttttgcagcaattgttgcatatggattatataaactgaagagcag

SEQ ID NO: 490260 - DNA, 116 bp, Homo sapiens
gacagagacaagctgagcttgccgcacaaaaagctagagaggttgactatagtcaatggggccaatggagccaagtgtatggaaacccacaacagtatggacagtatatggcaaat

SEQ ID NO: 490261 - DNA, 75 bp, Homo sapiens
caagtacattctcaggtggagacctgtgaaaattagttctgctgtgcttaaagctgcggcccatcactatggagc

SEQ ID NO: 490262 - DNA, 87 bp, Homo sapiens
ggatgaggccgagggcggcgacaagaaccgcatttgaagacatgctggagaacccactgaacagcacccagtggatgaatgatccag

SEQ ID NO: 490263 - DNA, 100 bp, Homo sapiens
gagtgcaaagtcaggcccaatgggattatgtttgagaccttcaacaccccggccatgtacgtggccatccaggccgtgctgtccctctacgcctctgggc

SEQ ID NO: 490264 - DNA, 100 bp, Homo sapiens
tctttctcagcaccttggcgaagccttgggtttctttcttaaaggactgatttttagaactccacatttgagttgtattccctgaatgactataaaccac

SEQ ID NO: 490265 - DNA, 50 bp, Homo sapiens
cactttggcagtgctacttgggcagcggaaaaactcggatgaatgcgagg

SEQ ID NO: 490266 - DNA, 121 bp, Homo sapiens
cgtggaggagctgtgcagccgcgaggaggcgcgggaggtgttcgagaacgaccccgagacgctcaccatggatgatgatatcgccgcgctcgtcgtcgacaacggctccggcatgtgcaag

SEQ ID NO: 490267 - DNA, 75 bp, Homo sapiens
agtgcctctgaccagcatcgtctgtaaagaggcggggtttcaccatgttgcccagactggtcttgaactcctgag

SEQ ID NO: 490268 - DNA, 75 bp, Homo sapiens
ggtgtctggcggatgcggtcgtgaagataggtgggcaaacgcagaggcgggaacaaactagccctcaagacggga

SEQ ID NO: 490269 - DNA, 75 bp, Homo sapiens
cacctcctccaagaccgtgctggtctttctcaacctcatcttctgggagaactatcctatccctgaaccaggccc

SEQ ID NO: 490270 - DNA, 97 bp, Homo sapiens
gctctgcgcgtccgttactacagtgacaccaggacttggatgttgtgggtgatggtatgcagtgtcctccttcacctttgctttttgatccttcact

SEQ ID NO: 490271 - DNA, 100 bp, Homo sapiens
tccttgcagcccgagctgaccctaggcctccaccctggcaggaatcccaatttgcctccacttagtgagcggaagaatgtatctggagtccatctttcac

SEQ ID NO: 490272 - DNA, 96 bp, Homo sapiens
catgggcagcaccatcgagccagaagcagtatttgtcctggtcaaaatgcagatcttcgtgaaaacccttaccggcaagaccatcacccttgaggt

SEQ ID NO: 490273 - DNA, 50 bp, Homo sapiens
cctccgactactttctccttcaagtaccgctgggtggagcagcacctggg

SEQ ID NO: 490274 - DNA, 100 bp, Homo sapiens
ctcgcgccacgctcagcagcatcagacacatgatccgcaagaacaagtaccgccccgacctgcgcatggaagcggggagaggtggtgagagatgacccct

SEQ ID NO: 490275 - DNA, 99 bp, Homo sapiens
ttgtggatgcctctcatcgggagaatgctcttcaggatagtatcttggccagggaactcaaacagcagatgcaggtccgggcccaccagctggtcttgc

SEQ ID NO: 490276 - DNA, 98 bp, Homo sapiens
aaaacgttgctctttgtcaggctccaaagacaacaggccctccctctgccctcccgtctgtgagctccctgcccagcaccacctcctgcactgcactt

SEQ ID NO: 490277 - DNA, 100 bp, Homo sapiens
catctatcattatgaattggatatcaagccagagaagtgcccgaggagagttaacagaatggctattcaagtggacaagttcaactttgagagtttcccg

SEQ ID NO: 490278 - DNA, 101 bp, Homo sapiens
tctcacttacacctgacccagagcctacccatgaagttggcactacgagatgcacttttgaaaaagagaaaaagaatgaagtaacttcctggcaagttttc

SEQ ID NO: 490279 - DNA, 51 bp, Homo sapiens
cagtgcatcttttgcacagctgttaaatgggccagggaaaactatcaccat

SEQ ID NO: 490280 - DNA, 50 bp, Homo sapiens
agcttcggaaaggagccaatgaggggcagatgattctggaccagatgaag

SEQ ID NO: 490281 - DNA, 49 bp, Homo sapiens
gctgcgtctgccagcaagcgagatgttccatttaagcagacctcttcca

SEQ ID NO: 490282 - DNA, 50 bp, Homo sapiens
gatgcaccttcccctgccttggaaagtgtttatccaacatatgattttgc

SEQ ID NO: 490283 - DNA, 74 bp, Homo sapiens
gagctgtaatcaattgtgctgacaacacaggtaagcggaagggtacagccaatgcccgaatgccagagaaggtc

SEQ ID NO: 490284 - DNA, 87 bp, Homo sapiens
ctccgcgagcggaattccggcggctgccgtgactccagtgcaagattttttatcaagcagaaatgcatcgaacaacgagaatcaaga

SEQ ID NO: 490285 - DNA, 83 bp, Homo sapiens
aataaaaagtgttcttcagcatcaagcctacaggaacatagaaaggttaacattcaagatggtacatgctgaagccttttctc

SEQ ID NO: 490286 - DNA, 100 bp, Homo sapiens
cgatactgagcttcttcctatttgccatggatacgtttgaaatggtttctgaagatgaagatgggaaattgggatttaaagtaaattaccactacatgtc

SEQ ID NO: 490287 - DNA, 100 bp, Homo sapiens
ccggaagggtgatgtggctgcggcatcgccggcctcgctatggtgcttttcagtgggaagaattggaagaagatatcaggaagaagttgaaagattctgg

SEQ ID NO: 490288 - DNA, 101 bp, Homo sapiens
tgccagcaaagagaagggaagaagatctgtatttgcaactatggatttgtagggaacgggaggactcagtgtgttgcatagacggacatctgaaacctcca

SEQ ID NO: 490289 - DNA, 90 bp, Homo sapiens
ctggaaacttcgctatcatggagatcgtgggcatatgtggtcgcactggcagtgggaaatcatcgttatctctggctttcttcagaatgg

SEQ ID NO: 490290 - DNA, 100 bp, Homo sapiens
atccgaagcctgaagatggttccaagtattccctatctagacattccacttcttccatctattacatctctgagtctaaatgaaaatgaagagaagaccg

SEQ ID NO: 490291 - DNA, 83 bp, Homo sapiens
gaagattctggacaagtgtaatgaaattatcaactggcttgataagaatcaggctgctccagttacagcaccacccggccgct

SEQ ID NO: 490292 - DNA, 51 bp, Homo sapiens
gctgtgttgacatcaaggatctaccaggtgttgacttcaaaatcaaaactg

SEQ ID NO: 490293 - DNA, 74 bp, Homo sapiens
ttttgcctttgttgattaactggacaaattcaggtaagaatgattgatgttggctgatattggagtgctcattc

SEQ ID NO: 490294 - DNA, 124 bp, Homo sapiens
aagcatcctaagactccacttcctccagaattagctgatgttcaggcataaggttgtttacagcggatgtcaatttggatatatcaaagcctttgaaagcaaacctgagtttcaccaaactgga

SEQ ID NO: 490295 - DNA, 82 bp, Homo sapiens
cagcaccatggcgaccaccgtcagcactcagcgcgggccggtgagaagccctaccactgcaactgggacggctgcggctgga

SEQ ID NO: 490296 - DNA, 100 bp, Homo sapiens
gtgtgtgcccactgggcagcaccaagtccggatgcagcttttccagaagcctgttaaaagcaaggtctccccacaagcaacttctctgccacatcgccac

SEQ ID NO: 490297 - DNA, 100 bp, Homo sapiens
cggggggctggtgctgcgggacctcaagctgcggaaattcatctttaaggacgaagagaggctgaactgtctgcttgcttggaaggcccagctggctcag

SEQ ID NO: 490298 - DNA, 100 bp, Homo sapiens
aggaagacggggcggaagaccaagatcatcgagatggacccagatgatgtggtaccagttggccaaagaagagcctggtgttggtgcatgtgctttggac

SEQ ID NO: 490299 - DNA, 74 bp, Homo sapiens
acgtccctcaaaccttgcttctaggagataaaaagattcccctcttcccgcggcctcgccatggcgacccacgg

SEQ ID NO: 490300 - DNA, 98 bp, Homo sapiens
aacaaatcagcctggtcaccagcttttcggaacagcagagacacagagggcagtcatgaggaggcactggctacaattaggcttctcgacgtcctgtg

SEQ ID NO: 490301 - DNA, 82 bp, Homo sapiens
ccatgcccacggctgtgctggaaaagtactgcgaggcctctggacagttcatccatcaggacctatatccagactttgcctg

SEQ ID NO: 490302 - DNA, 90 bp, Homo sapiens
cctcgcttgtcttctcgggcttctcgccccggccgcggccgggtcctcagtgccatacaaattatattcctgtctgtggatcaaatgggg

SEQ ID NO: 490303 - DNA, 100 bp, Homo sapiens
cacaactcttgtcctaccacctcaagtctctacaaggaagataacggactgtaaaattctataaagcaaagctacacatcacttgacaccatacaccatc

SEQ ID NO: 490304 - DNA, 100 bp, Homo sapiens
gccaccagctcgaccacagcaagctcctgggatcagacactcctctaatttacaaagcagtgcccagctggtttgtgcgagtggagaacatggtggacca

SEQ ID NO: 490305 - DNA, 100 bp, Homo sapiens
cagattcgcagtggtcgcttcttctccttgattgcttgcacacatttagatgtggatttagtctgcataactgtaacagagaaactaccattttacttca

SEQ ID NO: 490306 - DNA, 83 bp, Homo sapiens
atcgaatggaacagcctgagggatgcccccctaaggtttatgaacttatgagagcattggaatggatatgaaagcatacctga

SEQ ID NO: 490307 - DNA, 101 bp, Homo sapiens
ctcattggcgtgttcaagcatggaagatcccagtgtctgagtgaactaacagtcctgctttcagccaccatttgcacaagacacccagcactgaaagtccc

SEQ ID NO: 490308 - DNA, 80 bp, Homo sapiens
gcgtggagttcctgaagaagaacctgcgagccgacaacgccttcatgctgctcacgcagctctggattaatcgaattaca

SEQ ID NO: 490309 - DNA, 75 bp, Homo sapiens
gcaacacctccccgacctctacgctgctgccgggtgctgttccctcgtcacaccaatgccagtgctcgagacaac

SEQ ID NO: 490310 - DNA, 101 bp, Homo sapiens
gaagccttccgctattcagcagagagctattattccctgtattaaagattactttctatgaagacaaaaattttcaaggccgtcgctatgactgtgattgc

SEQ ID NO: 490311 - DNA, 75 bp, Homo sapiens
taatattcctgccatcacaaaagctggacaagcgaagctgcccgaaaccatgttaatagaatgtgcctggcagct

SEQ ID NO: 490312 - DNA, 100 bp, Homo sapiens
aaatatgggagacgacagaccgtttgtgtgcaatgccccgggctgtggacaggctacctgacagtcaacattgagcctctcccccctgtggtggctggag

SEQ ID NO: 490313 - DNA, 51 bp, Homo sapiens
ctcacattggccggcaacttgttccaggtgggcgcatgatgaactgcccaa

SEQ ID NO: 490314 - DNA, 100 bp, Homo sapiens
ctctcatctcgctcggctgcgggaaatcgggctgaagcgactgagtccgcgatggaggcggcttacagggagaacacagttggcctccaccgtttctgcc

SEQ ID NO: 490315 - DNA, 75 bp, Homo sapiens
aaataaccgtccccgccagtcagaagttgagtacaaatggtgatgatcatcaggtcaaggatagtctggagcaat

SEQ ID NO: 490316 - DNA, 80 bp, Homo sapiens
cggggtgtaataatgttaactgagcagggagaaggttttaaggtgaaaacgaagaaagaaatccggcatgtggaaaagaa

SEQ ID NO: 490317 - DNA, 100 bp, Homo sapiens
gagaagagcccagagtatagagcggaagcaagagagggacaggctggcctgacatggaaggtgaaacaaggcagcagcccctgcctccaggagaactctg

SEQ ID NO: 490318 - DNA, 100 bp, Homo sapiens
ataggctcagccctcagtggatttggttcatcaggaatgtccagaaagagaagtgtatgacccgtctccagtatctccattcatctgctactatgatgac

SEQ ID NO: 490319 - DNA, 75 bp, Homo sapiens
gcggggccgaggccgcctccgagcgccagaggcggggtttcaccatgttgcccagactggtcttgaactcctgag

SEQ ID NO: 490320 - DNA, 73 bp, Homo sapiens
ttgaaggaacggagaatgctggccacagatggtgctgcccaacagatttcacccataattcttaatactgtgt

SEQ ID NO: 490321 - DNA, 101 bp, Homo sapiens
ctttcaacgtgaggccggaggtggtgcagacctactgaacgtgaacgaacagaaaggctaattaaaaccaaattaagggagatcatgatgcagaaggattt

SEQ ID NO: 490322 - DNA, 95 bp, Homo sapiens
cacaaccatcgcagttggaagcccatggggcaggaacacagcagctacactttgacagtagaagcaagagatggcaatggagaagttacagacaa

SEQ ID NO: 490323 - DNA, 87 bp, Homo sapiens
ggttcctaaactcagcttgataggaaaatatgttgtgttcttcttttaccctcttgacttcacctttgtgtgccccacggagatcat

SEQ ID NO: 490324 - DNA, 74 bp, Homo sapiens
tgcagctgctatgttaagaaaacataccaatattgttgcacagactaatatctcttccaaatgcttgatgaaaa

SEQ ID NO: 490325 - DNA, 50 bp, Homo sapiens
tcgctgtccctgcggcttctgggggtatatgagtagaccagtgatgagtg

SEQ ID NO: 490326 - DNA, 100 bp, Homo sapiens
gcctgggcggcagagccccacggcctcgctatggaatgggtaccacagaccatgtcatcgtcctggcgtccacgaaccgagctgacattttggacggtgc

SEQ ID NO: 490327 - DNA, 100 bp, Homo sapiens
aatgcagttgttaatgacttctgggcagaaatttccgagtccgtagacaaaatgtgaaaacttttggcccgtttggaagcggcagccaggacaacctgac

SEQ ID NO: 490328 - DNA, 50 bp, Homo sapiens
ccctccctcagcttccgccccaaaaggaattgaatgatctggcacgggac

SEQ ID NO: 490329 - DNA, 90 bp, Homo sapiens
cagaagtgatgtggcatttgtttgcccaagacatgaaatatgcattggaggaagccgaaccggaagttgacaaccttctggtttcagatg

SEQ ID NO: 490330 - DNA, 78 bp, Homo sapiens
cagattcgcagtggtcgcttcttctccttgattcatgatgttgctatcaaaagttgagaaattgtcagaagaaatcat

SEQ ID NO: 490331 - DNA, 90 bp, Homo sapiens
tccgaatttgcaaagaggaggaaggagggacttcttggcttctcccagcatagccccagttttctggatatgccgcagaaggatccgtgc

SEQ ID NO: 490332 - DNA, 75 bp, Homo sapiens
actggacttcgctcagcttcagaccctgggctgcagctgcctaatgagacatgcaagaaagcacttcagccaagc

SEQ ID NO: 490333 - DNA, 74 bp, Homo sapiens
aaggcggcggcagagaacttgccggtgccagctgaggtggtcctggctctgccatatgacacccccgtgcccgg

SEQ ID NO: 490334 - DNA, 98 bp, Homo sapiens
ggcccaggaggacgactgggaccgggacctgctgctggacccggcctgggagaagcagcagcgcaaggattctgtttcactgaggccatctatccgat

SEQ ID NO: 490335 - DNA, 75 bp, Homo sapiens
tttatctgattgataattagacttctagcaacctccgtcatgtataaccagcctcccgcgacgatgcccctcaac

SEQ ID NO: 490336 - DNA, 95 bp, Homo sapiens
aagattctttgtagcagacactgcaaatgaagctctcgaggctgctaagagactaagagctggtggctggaccccacttgtgtcaaataaatacc

SEQ ID NO: 490337 - DNA, 49 bp, Homo sapiens
ccacccctgaagaaattgcacaggcagactgccagattcacttacagcc

SEQ ID NO: 490338 - DNA, 83 bp, Homo sapiens
cgtggccggagcggcccgcgcctgggctgccggcacttcgcggcaggctcaggtggccttccttcagggagagaggaaagggc

SEQ ID NO: 490339 - DNA, 103 bp, Homo sapiens
tagtgctttttatttttccccaattcagcagagaatattttcaagggggggtttgccttcccggattgggcctacaagccagagtcgtcccctggctcaaggc

SEQ ID NO: 490340 - DNA, 100 bp, Homo sapiens
agacactccccagggcagaaatagcgaccatggcgaggggtcttgctcctcagaacaaaccagaattgcagaaggtgatggaaaaaagaaaacgagacca

SEQ ID NO: 490341 - DNA, 100 bp, Homo sapiens
aacatcgtggtgaagaccgtggagatgcgggatggagagaccagattacagaggggtattgatttgccttgcccccgcccccaccatcacagtgtgtccc

SEQ ID NO: 490342 - DNA, 95 bp, Homo sapiens
gttaaggattccaagtaactcttatttggtggccttgggggacttgcaggtctgagtagcttgggtttgaatactaccaacttctctgaactaca

SEQ ID NO: 490343 - DNA, 83 bp, Homo sapiens
gggagagtgagcgagccttcacctacagcatcgtgggcgccggctcccagtttggatcagtcgcatcgaatacattcattcaa

SEQ ID NO: 490344 - DNA, 100 bp, Homo sapiens
gaccgcaatctctgccagcaccttgggaagagaaagaaaatgccgaaggcactcagacagaaagtgactgagaccgaagatgatagtgatagtgacagcg

SEQ ID NO: 490345 - DNA, 96 bp, Homo sapiens
aggcatcatccgctatgcaattggggactacaaatccctccaggatatcattgccatcctgggtatggatgaactttctgaggaagacaagttgac

SEQ ID NO: 490346 - DNA, 97 bp, Homo sapiens
caacatttcccacaggacacgaagtttgtcggcccttgccttggcagagctgagagagaagaagaaggaggttcctgctgtgccagaaacccttaag

SEQ ID NO: 490347 - DNA, 83 bp, Homo sapiens
accatccacacatcataaagctttaccaggggccaaaccagtgctcctgccacctctctggctgccccctagagcctgcccat

SEQ ID NO: 490348 - DNA, 87 bp, Homo sapiens
gatgcagttttttgatgctgaggagctcctggtcgatgaagaggatgatgtttttggtgaagtataaccccgttttcacacgaatgg

SEQ ID NO: 490349 - DNA, 74 bp, Homo sapiens
atggcgcgggccgggccggcgtggctgctgctggcaatctggatctttcttactgtaacagctgacctgaactg

SEQ ID NO: 490350 - DNA, 86 bp, Homo sapiens
ctcgaacccgcctgcgatggggcgagaaaggtcccactgcagccctccaagcagatgtgaagttcatttccaatccgccctccatg

SEQ ID NO: 490351 - DNA, 90 bp, Homo sapiens
gcgggatgggagcaggccaacgtcctgcggcctggttgagctcgcactgacaatcgcagagccaggactgtctccagtttggtcctcctg

SEQ ID NO: 490352 - DNA, 98 bp, Homo sapiens
attatgtggtgtgccgagactgtgaagtcaccaatgatggacataccattcaggttatcctgaagtcaaaatcagacatgtgcattgccattgcgatt

SEQ ID NO: 490353 - DNA, 100 bp, Homo sapiens
gctgcgagccggcggcccggagtggggcggcggttatagctgaggtggtaccagtttaagaagtgagaacttcttcactgactgaaatttgcatatcaat

SEQ ID NO: 490354 - DNA, 90 bp, Homo sapiens
gccgggagaggccggcagccccgggacacccccgcaagcgagcaggtccggcctctttggcctacccccgttggctccgctgccccaggt

SEQ ID NO: 490355 - DNA, 100 bp, Homo sapiens
catgaagacagcagccacatcattgctttatgtgctttggaaacatgatgagcaaggagaagcgagaggctgtcagtaaagaggacctggccagagcgac

SEQ ID NO: 490356 - DNA, 75 bp, Homo sapiens
gacacctggaagccgagaaatggtaccgggtgtctggtccgagccgtggagatggccgcccagcgccaggccgac

SEQ ID NO: 490357 - DNA, 98 bp, Homo sapiens
aggctaagaatattaatggccagatctagctatactgacttctgttgaaaccattcaaagctaaagacatggaccttcagcagtgtaagaagatattg

SEQ ID NO: 490358 - DNA, 100 bp, Homo sapiens
gaggagcattgcttctcatacagtaaggtgaccaagaatatggcccaggtgaccaaagccctggacaaggccctgagcaccatggacctgcagaaggtct

SEQ ID NO: 490359 - DNA, 100 bp, Homo sapiens
ccccacgcgccgcgcccgcgtcaaggagtacttcgtgttccgggcataacctgggtcctggtttacaggacagacaagtacaagagactgaaggcagaag

SEQ ID NO: 490360 - DNA, 90 bp, Homo sapiens
aacaagatgacgctgaccaggacatgatgatggcagggatggtacatcgaggaggccattgagaaactaagcaagcggcaccagtaccac

SEQ ID NO: 490361 - DNA, 60 bp, Homo sapiens
cctgtgtccagcgctgccggagccgcctgaggtttttcgttggaatatacgttgcacatt

SEQ ID NO: 490362 - DNA, 75 bp, Homo sapiens
ggagagcccgtcagtgccgaagatctggaccaagacccctggacctggggcccagtcggccctcagagcccttgc

SEQ ID NO: 490363 - DNA, 100 bp, Homo sapiens
gaccaactgcatctaccttcaggactcggaggtcaccgtgcggggcttccggatctatggctccccatgtttctggcccccaaagacaaaccaagtggag

SEQ ID NO: 490364 - DNA, 100 bp, Homo sapiens
cttgaaatgctacatttccaagtgaaaaagacttgggaggacatagaagacatctcctgccgtgacttcatagaggagtatgtcactgcctaccccaacc

SEQ ID NO: 490365 - DNA, 76 bp, Homo sapiens
ggggacgtggcttttgtgaagcacagcacggtactggagaacacggatgatggtggatgcttccaaaagcatcgaa

SEQ ID NO: 490366 - DNA, 83 bp, Homo sapiens
cacagggcgtcggacctgcacgagctgtctgcagcccctgtcaaagggaacaggaagcagtccacggagggtgacgccctaga

SEQ ID NO: 490367 - DNA, 75 bp, Homo sapiens
ggatgactctgactctcatttagaaatccaaaagattcccgacagttaagcaatggggagacatttggctttgct

SEQ ID NO: 490368 - DNA, 75 bp, Homo sapiens
caacctctcttacaacaaaatggttttccactccattgttgttagaagccagctcttcagtaggttacctgcaac

SEQ ID NO: 490369 - DNA, 96 bp, Homo sapiens
ccagctagaacaagaagtgagaaaccaagatagattcatctcgacactgaaattacagatgctggcccgcgagagacattgatgcattttgctgtg

SEQ ID NO: 490370 - DNA, 90 bp, Homo sapiens
tcaaccagctgccgccgtccatcctgctcaagaaaaggcgacggcggattgacagaagtatgattggagagcccacaaactttgtgcata

SEQ ID NO: 490371 - DNA, 90 bp, Homo sapiens
cagcggctgaggaggggccccagcagcccccgaaggccctatcaggacatggagtatgaaagacgatggagtttcactcttgtctcccag

SEQ ID NO: 490372 - DNA, 75 bp, Homo sapiens
ggaggattgtaaatgcaccaatcagcatgctgtgtctagctcaagttgttgcgaagctctttggtgaataataga

SEQ ID NO: 490373 - DNA, 73 bp, Homo sapiens
gagaatcaaagggccgggagcgatgagtgcctggaagagctgggatgtctggttgagtcctatggcatgaatg

SEQ ID NO: 490374 - DNA, 74 bp, Homo sapiens
attggccgccgcgatgtcagctcagtgctgtgcgggccagatgcgacctaaagtcatgtggcacctccttcgaa

SEQ ID NO: 490375 - DNA, 101 bp, Homo sapiens
ctttaattgtaatgtatgggacacgctaaaaggagatcgtgcagctcttgcaagcttaggatatgaaaagagctgtgtgttgttcaattgtgcagccttag

SEQ ID NO: 490376 - DNA, 98 bp, Homo sapiens
cgaatcctaaagcgtttcctcgcttgcattcagctcctctgtgtttgccgcctgggttgaaatcacaaagattagacacctttttagataggtgttct

SEQ ID NO: 490377 - DNA, 100 bp, Homo sapiens
aagactcactagtaatatggtctgcaaacactgtgaacaccagacacgatgaggcgagtggtacgacagagcaagtttcggcatgtatttgggcaagcgg

SEQ ID NO: 490378 - DNA, 99 bp, Homo sapiens
cctccggaagtgctgggattacagaagcccacccgggcagtaaacaagatccacgcctttgggaagagaggcaatgcgctcaggagggatcccaacctt

SEQ ID NO: 490379 - DNA, 83 bp, Homo sapiens
cctggggctcctcatggcccggctccttagcacctctccagttccagatttcggaaggttcacgagtgttgccgacacgccct

SEQ ID NO: 490380 - DNA, 82 bp, Homo sapiens
ttctgggttaagtctccttgaaagattgtatatgactgatgggatgttacttcgtgaagctatgaatgatcccctcctggag

SEQ ID NO: 490381 - DNA, 73 bp, Homo sapiens
gccgtccaggatcgtctttaatgagatgcctgtgaggagccaccaacatttgaagctatggagctcattggta

SEQ ID NO: 490382 - DNA, 73 bp, Homo sapiens
tgggaccggtgtctggcggatgcggtcgtgaagataggttctgcggcatgaggaatttgaagaaggctgcaaa

SEQ ID NO: 490383 - DNA, 90 bp, Homo sapiens
ctttgatggaccaattaccataaattttccagcaaataacattgtgaagttcctggtaggctttaccaacaagggtacagaagattttat

SEQ ID NO: 490384 - DNA, 73 bp, Homo sapiens
ctgccgctgccgccatgcaaggggaggacgccagatacctcaaaagtatcttaagggaaatactacaaaatgt

SEQ ID NO: 490385 - DNA, 82 bp, Homo sapiens
cagccgcttggggcccgcacggaccctctacttcaagggcctgaaggtgcaggagaacgaggacaaccttgctctcatccac

SEQ ID NO: 490386 - DNA, 76 bp, Homo sapiens
gagagacagctctatagcagtctggtgaagttccatgcccatccagagaggcacagaccccacaggctcctcggac

SEQ ID NO: 490387 - DNA, 90 bp, Homo sapiens
atacttctggaatccagacagaatgcctcagagagttgtgatcacatgccctcaggacttccctcattgctccattccactacgggttgg

SEQ ID NO: 490388 - DNA, 100 bp, Homo sapiens
tggagaagtccccttatgaccaggaaaggcagcaacaggtggaagctgttgagttggaggctaaagaagttctcaaaaaattatttccaaaggtgtctgt

SEQ ID NO: 490389 - DNA, 99 bp, Homo sapiens
caggctggggcgagaccatgtcggacctgggctcggaggagttggaggaggagggagagaatgatattgggtactatactggcaattgctggagaagat

SEQ ID NO: 490390 - DNA, 51 bp, Homo sapiens
gtcgggacaccccggaagctgggaaatggtctgctattgatcttgaagaga

SEQ ID NO: 490391 - DNA, 75 bp, Homo sapiens
ttcgaccttcaatccagttccaaggactccacgggtgagaaagatcagtctaaagaaaaggagaagaaagtgaaa

SEQ ID NO: 490392 - DNA, 100 bp, Homo sapiens
aaatacacacacctgttgccattatagagctggaattaggcaaatatggacaggatgatgtgggcagcagggaccgtggctgccatgtccagcatcacgt

SEQ ID NO: 490393 - DNA, 100 bp, Homo sapiens
attttcctacgtgaaacacttggtaaaactggttctgggaaatctttctggggtacgttgaagatggagaacaactgatgtcaagacacattttggttgt

SEQ ID NO: 490394 - DNA, 100 bp, Homo sapiens
ctcaatttgctggatttaagcactgctgcactttatgagcaggtggtccattatggctgacatgcaaaatctggtagaaagattggagagggcagtgggc

SEQ ID NO: 490395 - DNA, 132 bp, Homo sapiens
aaccgggaaggatgctgtttggaaccaggattggggtggtcgcagtcacagctactcggactgcttgtagaaacccagcgtttgctggcagaaccagttcctggcatcaaagccgaaccagatgagagcaac

SEQ ID NO: 490396 - DNA, 100 bp, Homo sapiens
ggcaaaggtgtcgtggtggtcattaagcggagatccggccttctagccctcccatggggttactgcagcaggaattcttacctgtgcttcagcccagcat

SEQ ID NO: 490397 - DNA, 106 bp, Homo sapiens
aaggggtgaaagagaagattgcaactttgagtcagacctgtaggcctgatagactgattaaaccacaggatcttaagattgaaagtgatgttcaagaaccaactga

SEQ ID NO: 490398 - DNA, 75 bp, Homo sapiens
ccgcgggctggcgacgtagaggaggacgcctcacagctcatctttcctaaagggatttgtcttggctgttactat

SEQ ID NO: 490399 - DNA, 100 bp, Homo sapiens
tgaaagcccaaatcacctgtacttggtcatgcagctctcatgtgctcctcggtgcagaaggccttgtttgaggaggaggaccacgtcaagaaactgcagc

SEQ ID NO: 490400 - DNA, 102 bp, Homo sapiens
ccatccagtggaatgcaccacagccatctcacatttccaagtacattctcaggtggagacctgttattttagtgtccgccaacaaattgactcgttatatag

SEQ ID NO: 490401 - DNA, 100 bp, Homo sapiens
attcaagagtggcaacagagagatcactgcaacgcaaaatgatttcatggttatctgcaatgttgcaaaaatcctagagctagttgtaccactgatggag

SEQ ID NO: 490402 - DNA, 82 bp, Homo sapiens
tagcactagcacctgtgggatgcacagttccggtgtcagcagggggtctcctcatttaccacatcccccaggttgaaccacg

SEQ ID NO: 490403 - DNA, 100 bp, Homo sapiens
attttgagccatttcgaatcacttaaaggagtggacattgctagcaatgagctcccaaagccatccaggtccttatgtcgtcagaagatcgagaagctca

SEQ ID NO: 490404 - DNA, 82 bp, Homo sapiens
attgctgaacggagaggtagccatgatgccccacttggtgaatggagatgcagctcagcagcctttctgagaaaagtctaca

SEQ ID NO: 490405 - DNA, 107 bp, Homo sapiens
aggagactccggcgctcgccatggccgacgaaaagcccaaggtctctaattaacagaagatggcaaagcccagccacagcagctatgtccttcagcagctaaacaac

SEQ ID NO: 490406 - DNA, 75 bp, Homo sapiens
tgaattctctggatctttgtcagttgcagagcttgaagtgaaaaccagagaaaaattagaagctgctaagaaaaa

SEQ ID NO: 490407 - DNA, 75 bp, Homo sapiens
tttaaacagatcacatcatgcgagttttgagagcaaaatgacaacacccagaaattcagtaaatgggactttccc

SEQ ID NO: 490408 - DNA, 85 bp, Homo sapiens
ccgtcgttgctgccgggattttggaggccggggccgcgctgagggcgcccagctggtgggcaccatgtccttgaagcttcaggca

SEQ ID NO: 490409 - DNA, 87 bp, Homo sapiens
gtggctataccagggactctgttctgattagatacattccaccgttgatctgggggaaaagtggacacatccagacagccttgtatg

SEQ ID NO: 490410 - DNA, 98 bp, Homo sapiens
ttcgaagagttggatactcagcgtcgctggcagccgctgtacttggtttggtgcacctcgatttggaggaagtagggcagggcccttatctggaaaga

SEQ ID NO: 490411 - DNA, 51 bp, Homo sapiens
ttgtaacatcagtcacagcatacggcaccgaaagcgaaggaagctcctgct

SEQ ID NO: 490412 - DNA, 88 bp, Homo sapiens
ctccgtctgccacacgctgatggtgcagcaccgcatgatggtacccaaagtcagactatgtcttcagcagtggtgcagttatatgcag

SEQ ID NO: 490413 - DNA, 90 bp, Homo sapiens
atcggcatctagtctttccgcttcttgaatttctctctgtaaaggagggctcattgtcatccccaagccaggccagttctccaggtggaa

SEQ ID NO: 490414 - DNA, 100 bp, Homo sapiens
accgtttggcaatatgtacgacgcggatgagggggaaagtggagatgacattggaaatcctcaacgagaaggaggccgacgagaggccagccgggaaggg

SEQ ID NO: 490415 - DNA, 132 bp, Homo sapiens
tggactgcagctcagaaaggaacatactctcaaaatatttacttatatcaattcctggacacagagcctaaatgcgatggccaggtattactgacacaagtgtggaagcgtttaaacctggtagaatgtgac

SEQ ID NO: 490416 - DNA, 51 bp, Homo sapiens
atcccaggaatacagctttgcattaggaatactctgaagatagtaactccg

SEQ ID NO: 490417 - DNA, 75 bp, Homo sapiens
ttactgcgggccgctccgacggcggtccatcctgaaccttcaacaactagtactgcttcaaattatccagatgtg

SEQ ID NO: 490418 - DNA, 51 bp, Homo sapiens
gcggaagaggaggctgcggcgggagtgtcttccatgaagaaatgatgaaga

SEQ ID NO: 490419 - DNA, 75 bp, Homo sapiens
cacttcctataaatctcgcccaaacaggaaaggctggaggcgaacacgcagcgcgaagtggctgccctgcgcctg

SEQ ID NO: 490420 - DNA, 82 bp, Homo sapiens
ggaggtctggaaccagctgctaagccagaagcgcgtgtcttgaggaccggcccagctcaggctcctggggcagcggcgacca

SEQ ID NO: 490421 - DNA, 50 bp, Homo sapiens
ctgcaacactcctctacagtttgaggccaagatgctgaattatcagggac

SEQ ID NO: 490422 - DNA, 50 bp, Homo sapiens
ctgaattatggcagcccagtcaaggttttcaaatggaacattttgatgca

SEQ ID NO: 490423 - DNA, 48 bp, Homo sapiens
ccagctggggaggccaaagcgatgccctctctccagcccctacgacca

SEQ ID NO: 490424 - DNA, 80 bp, Homo sapiens
cgaaggaggatgccctggagacacacaggcagacccatactgagctgccaaatgctgttaaatcaactgagagaaatcac

SEQ ID NO: 490425 - DNA, 98 bp, Homo sapiens
agaaaagcaagatcttatataaaacacagaaagtttgatgaagtggaccccagccaggccacggggacaacaggcagcagcgtcagctgcacagagga

SEQ ID NO: 490426 - DNA, 98 bp, Homo sapiens
acaatgggatggcttcagctgtgactgtagtatgacttccttcagtggaccactctgcaatgaccggattaaagcctgtggtttccacagaagcacca

SEQ ID NO: 490427 - DNA, 100 bp, Homo sapiens
gccggggcctgaggaccaggaagtagagcagcaggtgcagaaagagctggaacaggaccagtttgacatggtgagtgatgctgaccttcaagtcctagat

SEQ ID NO: 490428 - DNA, 100 bp, Homo sapiens
agcgcgtcacattcccgtccgacgaggatatcgtgtctggagcagtggagcccaaagacccctggagacatggagtatgcgaccagtggttggaacctga

SEQ ID NO: 490429 - DNA, 100 bp, Homo sapiens
gccggatggtgctggccacttgcttgggatcctttatcctggtcatcttctatttccaaagtcccgcagcccccggaagccaatagactccctcagggac

SEQ ID NO: 490430 - DNA, 100 bp, Homo sapiens
caatcgctggtagaagcaccacaccaacatctagtcccttccggtgggcccatctggggcagggaagagcacaattttgcgcctgctgtttcgcttctac

SEQ ID NO: 490431 - DNA, 73 bp, Homo sapiens
gcggagaccctcgaagtgcgcaaacttgacactcaccctgaccggacaatgaaggccaaacagctctacatta

SEQ ID NO: 490432 - DNA, 95 bp, Homo sapiens
gccaaagaaacaagccgtggaataggtgtatcaagtaatggtgcaaagcctgaaaagagtaagcctcccaacccaccagcctttatcttcatgat

SEQ ID NO: 490433 - DNA, 75 bp, Homo sapiens
atttcttctgacttgagcctgcagtgtgctgtgagagatctaccactagggtgtcgaagtgcagacagactacgt

SEQ ID NO: 490434 - DNA, 90 bp, Homo sapiens
ctaatcggcgcacagaaattatagaagatttggccttctactctagtacagtagtatctctattggctttctgtgaagaattggaatcaa

SEQ ID NO: 490435 - DNA, 51 bp, Homo sapiens
aatgccggtcacagcccaggagtggacatggctgcactcttccaagaagca

SEQ ID NO: 490436 - DNA, 100 bp, Homo sapiens
ttgaaagtgcgattgtggaagctgctcgggtggtctgtttttctggggggccaccaacacctcccgtgaatctaccatgtacccaaaagcagtgcaggac

SEQ ID NO: 490437 - DNA, 75 bp, Homo sapiens
gcccaacagagggaactacaaccagccgtggtccttcagcatatctctgtgctgcagacaacacaccttcctgat

SEQ ID NO: 490438 - DNA, 82 bp, Homo sapiens
aagaagactcttgtcacactaattgccaacaacaatgatcggggctgctagtcgcatacccggagtaacacctgccgccatc

SEQ ID NO: 490439 - DNA, 100 bp, Homo sapiens
ctggtctttgcagaagagaaatataataaatcaggtcaattggataagggaggacatgtatgcccaggactctatagagctactaacaacatctggtatc

SEQ ID NO: 490440 - DNA, 96 bp, Homo sapiens
ctgtaatactaaatgtgttaccataccaagccatgaagatggacctacagctaaaaaattaaagactgagcaagggggagcccacttcagcgtctc

SEQ ID NO: 490441 - DNA, 83 bp, Homo sapiens
atcaagttcaaggagtctcttgttaatgatgaccagtgtcccagtgaaggaacgagtgaaggtgtctcagaactggagactgg

SEQ ID NO: 490442 - DNA, 75 bp, Homo sapiens
cttgcattttcccgcgtgcgtgttgtactaatggtcacttgatgtgcgctggctgttttatccacctactagcag

SEQ ID NO: 490443 - DNA, 139 bp, Homo sapiens
ctcacatcattgctacaaaaacaccatcttctgatgtgttggtttttgactatacaaaacaccctgctaaaccaggagacgcaggtcagaatggaaatgggctgcagaccgggcagctattgtcagccgctggaactgg

SEQ ID NO: 490444 - DNA, 50 bp, Homo sapiens
ctcagctctcggcgcacggcccagaactcccccactggaaaggattctga

SEQ ID NO: 490445 - DNA, 123 bp, Homo sapiens
accgagaagaagctgaaggatgtgctgctgcaggtggatgacgagcggaggaacgccgagcagtacaaggaccaggcagaaaacgaggatggggcccaggagaacaccttctccatggacccc

SEQ ID NO: 490446 - DNA, 73 bp, Homo sapiens
aagtcgagtatctggtgaagtggaaaggatggcccccaaaatgggatggggtgacctcggggtgtatggagag

SEQ ID NO: 490447 - DNA, 74 bp, Homo sapiens
aatttgacacttgtggatttgccaggaatgaccaagctgtttgaattgggtcctgatggaggagatcatgaaac

SEQ ID NO: 490448 - DNA, 100 bp, Homo sapiens
agcgggagcagccggaacgatgccggccgtgagcctcccgcccaaggagaatgcgctcttcaagcggatcttgcttctcggacaaactatttagtggaaa

SEQ ID NO: 490449 - DNA, 100 bp, Homo sapiens
cggcccccgagcacgccggccccgcgcgcgcctcgaggccgagtcaaggcaacagatgccctttatgaggtgtttttgggaaacaggcttcgagcagcta

SEQ ID NO: 490450 - DNA, 138 bp, Homo sapiens
ctggggacctgtcccacctggcggccatcgtcatcctgctgctgaagatctggaagacgcgctcctgcgccgggaagacatgtaaggaatttgcataagacagttatgcaaaatggagctggaggagctttatttgtg

SEQ ID NO: 490451 - DNA, 90 bp, Homo sapiens
gttcgggccggctgtcctggcgcgcaatggcaccagcatgatatcattgatcattcctcccaaagaccagatttcacgagtggcaaaaat

SEQ ID NO: 490452 - DNA, 90 bp, Homo sapiens
ctgcgaacacagtagtggaagatgtaaagcaatatttcgagcagtttggcaagggggagcagtaccatcaggcttggaggagaacctgtg

SEQ ID NO: 490453 - DNA, 75 bp, Homo sapiens
agagttgccatttcgctgggatttttgggtggtgcaaagattccccgccactgtatgtctgaagatagcaaatat

SEQ ID NO: 490454 - DNA, 75 bp, Homo sapiens
tatggtgcttcagccaagtgaaaggcactatcgagattggaaccacagaaggtgtcatagagacgtcagatcgac

SEQ ID NO: 490455 - DNA, 74 bp, Homo sapiens
ttggagttgtcttcagaagcaagcagcatgggggcgggtttttaatgaccacaacaagcaagcatgcagcttac

SEQ ID NO: 490456 - DNA, 95 bp, Homo sapiens
gcctcccgagtagctgcgactacaggtacccagactcatggtatcgtgatatcacatccaacaagaagttcttttcccttgctgcaacctacaga

SEQ ID NO: 490457 - DNA, 100 bp, Homo sapiens
caacatgccgagcagcaaggacacccgcaagcggccccgcgatgactcggactccacactcaagaagatgaagctggagacaaggtctcactatgttgcc

SEQ ID NO: 490458 - DNA, 97 bp, Homo sapiens
tccaaaggaagctccaaagtccttcagcttcgactattcctactggtctcatacctcagtatcagacttggtgataattctgaattatgaccgtgct

SEQ ID NO: 490459 - DNA, 75 bp, Homo sapiens
gtctttttcatagatcgagacatgtaagcagcatcatggaggtgatggtgtttcttagagagaagatcactgaag

SEQ ID NO: 490460 - DNA, 100 bp, Homo sapiens
gcaagacgtgtcccaggcccaacgccagatcaagcggggggcgccgccccgcagctcaaagttatgaagtttcaggatgaattggaatctgggaaaagac

SEQ ID NO: 490461 - DNA, 51 bp, Homo sapiens
cgattatcttcatattttgaaacagacggagttttgctcttgttgcccagg

SEQ ID NO: 490462 - DNA, 100 bp, Homo sapiens
gaggtgcggggcgctgagattgagtacgccatggcctacagcgacaccacaggcaagctgggctttgaggaattcaagtacttgtggaacaacatcaaaa

SEQ ID NO: 490463 - DNA, 98 bp, Homo sapiens
acctcaatgactgtttcattccttgtacgcctaagggatgcttggaactcatcaaagagacagttggactaaatgctcttccttcagaggattatccg

SEQ ID NO: 490464 - DNA, 148 bp, Homo sapiens
gtaaccgggcttgtgagagggctctgcagtataaactaggagacaagatccatggattcaccgtaaaccaggcccattacgcagtccaggcaagaagatcccggagcatcactaggaaaagaaagcgggaagactctgctcccccgtc

SEQ ID NO: 490465 - DNA, 50 bp, Homo sapiens
atctgtcttagcaaggctgtcatcacactggagagatttaccagcatgag

SEQ ID NO: 490466 - DNA, 97 bp, Homo sapiens
tctgggagaatatttaatggaaaatcgcttggttaaaacctgacacttttaacagaggagaggagacgccgtgagcgggacgaccagatgtaccgag

SEQ ID NO: 490467 - DNA, 76 bp, Homo sapiens
cgccttcttcagctccccattctctgagaacagcacttccctgcagacagcacccaagaaaacctcatttggctcg

SEQ ID NO: 490468 - DNA, 50 bp, Homo sapiens
cggggaaccatggctgccccgagaggaaagtccatcagcttgataatgga

SEQ ID NO: 490469 - DNA, 97 bp, Homo sapiens
attcaaatgctagcagacacggtggctactctgcctcggggacgaaagcagatctatatgatcatgacagaatgctggaacaataatgtaaatcaac

SEQ ID NO: 490470 - DNA, 100 bp, Homo sapiens
cctgaaggaagccgcccgccccccaccgccgccccctccggcgtgttcatgcccccggggtgctggagaatctggtaaaagcaccattgtgaagcagatg

SEQ ID NO: 490471 - DNA, 99 bp, Homo sapiens
agttgttcaagtttatgcagacacacaagagattaatttgaagaagaacccagcaagtccctataaccttgcatataagtataattttgaatattccgt

SEQ ID NO: 490472 - DNA, 75 bp, Homo sapiens
cacactggctatcattgatccaggtgttcattgtactcatggcttcaatcgcactggtttcctcatatgtgcctt

SEQ ID NO: 490473 - DNA, 75 bp, Homo sapiens
gattatatcaactgggtccaacagcaggcctatggaatgatttcagaagaaagtggtagcttcctttccaagaac

SEQ ID NO: 490474 - DNA, 98 bp, Homo sapiens
caaagggaggcattgtccgaactgggactcatggactgcttgtgaagcaggaagacagagcctgcaagtgctggtctcggagttgatcccatgggccg

SEQ ID NO: 490475 - DNA, 51 bp, Homo sapiens
tcctgtgtctgtgggagcactgtgagtgttcgtattaatgagaggtgtcag

SEQ ID NO: 490476 - DNA, 101 bp, Homo sapiens
cagtgcagggaagcaactgcagaggcagaggaatattttcagtggagcaaattaccctgtggaattacttccagaaatagaattccactccacataatcag

SEQ ID NO: 490477 - DNA, 100 bp, Homo sapiens
ttgtggccagtaggcaatcacctgaaggatctgacttccagaaggttcttcagatagatcctgaagttacagatgaagaaataaaaaagaggtttcggca

SEQ ID NO: 490478 - DNA, 100 bp, Homo sapiens
agggcctgggagatgtagagaagatatgggtttagagtgtccagtatgcaaagaagattacacagttgaagaggaagtccggcagttaccttgcaatcac

SEQ ID NO: 490479 - DNA, 97 bp, Homo sapiens
aggattccaagtaactcttatttgattctcgggattcgaagatggctgcacagtcagcgccgaaagttgtgctaaaaagcaccaccaagatgtctct

SEQ ID NO: 490480 - DNA, 75 bp, Homo sapiens
gccggatggaaatcctaatgacagtctccaaattcgcctccatctgtaccatggcatttgatgaagcaattgctg

SEQ ID NO: 490481 - DNA, 88 bp, Homo sapiens
cgccatcttggatccgcgggacaagaaaattcatgcgagcaggacctgatcggccaggacctgaactctcgctacctgaatgcccagg

SEQ ID NO: 490482 - DNA, 88 bp, Homo sapiens
gcaagcaggcaacctgaatacaggttaccagccagtcttgtctggtcaacagggattccaaggcctaataggagtgcagcagccacct

SEQ ID NO: 490483 - DNA, 82 bp, Homo sapiens
agggccttggaccccgcggcgcccctcggcctcggagcaacgagcgcagcgccgtgtcttgggacaaggtgcgcattcctgg

SEQ ID NO: 490484 - DNA, 102 bp, Homo sapiens
ggttgcagaaactctggatctgcatggaattctgtggggctggttctctccaggacatctaccaagggtcccagtcctatgaggatatgagaggaatcctgt

SEQ ID NO: 490485 - DNA, 100 bp, Homo sapiens
ttccgaagcctgcatttttttgtggagtggtttgaatatcgtaagcgcacgtttaaacatctcaaggttttgacacaagggcgcatatcttcaaagcacc

SEQ ID NO: 490486 - DNA, 95 bp, Homo sapiens
acaggcatgaagggtatcatcaccgctgtggagcccagcacgcccacggtcctgagacaatgcagatcttcgtgaagactctgactggtaagacc

SEQ ID NO: 490487 - DNA, 100 bp, Homo sapiens
gctattcagcagagagctattattccctgtattaaagatggcgttcaggaagtggcttatattcactcaaaccagaatgtaattggatcgagcaaagctg

SEQ ID NO: 490488 - DNA, 80 bp, Homo sapiens
cccaggacatggacacctgtgaggcttgggcactgtttaaaggaaagttccgagaaggcatcgacaagccggaccctccc

SEQ ID NO: 490489 - DNA, 51 bp, Homo sapiens
cctcatctccactcagcgggcccagtaggtgacctcacagtgactcaagct

SEQ ID NO: 490490 - DNA, 100 bp, Homo sapiens
ttgtttggagagacggggcataccatcatgaatcttcttgcatttttccagaggcctcaaatacagcctcctagagctaccatcccgaacagcagtcctt

SEQ ID NO: 490491 - DNA, 100 bp, Homo sapiens
tccaagtatgaggaagacaggaggtcacttcatcctggcccaggtactgcagctccaaatcgtggggattctgtaagagcttgctacctgttgactgagg

SEQ ID NO: 490492 - DNA, 83 bp, Homo sapiens
cgggttcagttcgtcatggggctgtttggaaagacccaggagaagccgcccaaagaactggtttgcctgcaatgagatttcat

SEQ ID NO: 490493 - DNA, 145 bp, Homo sapiens
tgctgccgccgccagggtctgcagggcctgggccgccgctgctacctgcagcgccgtgtggcacgacacaaaaatcagggctgtgggacagatgatgtctaccatgttctacccactggtcacctttgtcctcctcctcatctgc

SEQ ID NO: 490494 - DNA, 100 bp, Homo sapiens
gagcaacgatgacgctgtgcgggtgctgagggacattgtgcacaagcctggagacgagttgtactgctgtcacaggaaatggacgctggattacaagcat

SEQ ID NO: 490495 - DNA, 100 bp, Homo sapiens
ggagacagcgtggtcactggacgaggccgaatcaatggaagattggtttatgtcttcagtcagctcccctttgaattggagatttactacattcagcatg

SEQ ID NO: 490496 - DNA, 100 bp, Homo sapiens
agggacccggtgacagcgtgagaggcagtagatcatctaatgcaaaattgccctcagttccaacagttgattcagtttcacaagatccggtttcaaatat

SEQ ID NO: 490497 - DNA, 100 bp, Homo sapiens
acttcttcagaaagcctccggaatctaaaaagccctcagtaccagagacagaagcagatggattcgtccttttagatattaataaggcagcggaaagaag

SEQ ID NO: 490498 - DNA, 51 bp, Homo sapiens
ctcagaagagacctgacaattgcaatagaagctgtacattggaatgcgttt

SEQ ID NO: 490499 - DNA, 138 bp, Homo sapiens
catccagtggggggcgagcctctcagccggccgggatggctaccacggccgagctcttcgaggggctttgttatgcacctaaagccatattggaagctccagaagaaagagcaccccccggaagtcagcagggaaacg

SEQ ID NO: 490500 - DNA, 82 bp, Homo sapiens
ctggagcgaccccttgttctttggtggcgctggatgatgatgctgaagctatccttgctgcagacttcgaaattggtcactt

SEQ ID NO: 490501 - DNA, 80 bp, Homo sapiens
gacccggacccaaagtgccatgtctttaatgccaaacttccagatctgcaaccatttccttctccagatggtgatacagt

SEQ ID NO: 490502 - DNA, 97 bp, Homo sapiens
ggttaatctgttggattctaatgcagttcatcacatcattcatgattttcagtactatactggcaattgctggagaagattttgcaattgttgcttc

SEQ ID NO: 490503 - DNA, 100 bp, Homo sapiens
cactgctgtggttcccctggatttagtgaaatgccgtatgcagataacagcgagaatcttggaggcccatcagaatgtagctcagatgagtctaattgaa

SEQ ID NO: 490504 - DNA, 75 bp, Homo sapiens
tgctcaagtcctgtcctcttctgaccaaagatgacctacggcatgatgagctccaatgtgtactactacacccgg

SEQ ID NO: 490505 - DNA, 75 bp, Homo sapiens
atctacctcatctagaaggagagcaattagtgagacagtgtctgcgagattaatctctcatggccgctgcacaag

SEQ ID NO: 490506 - DNA, 75 bp, Homo sapiens
caggcgaggaccaactccacctccatgtggtgctggaaaaagccatgcacaagtgcatcttgaagcccctcaagg

SEQ ID NO: 490507 - DNA, 74 bp, Homo sapiens
ccgccgcccttctgctccacgaggagcacagccgggccgctgcgaagatattctctaagccgctttcatcatgg

SEQ ID NO: 490508 - DNA, 51 bp, Homo sapiens
ggaaggatgcagagagaaaggagagattgtgttcaattagaccttcaggac

SEQ ID NO: 490509 - DNA, 100 bp, Homo sapiens
ggattcataacctgctccatgcttgaaaacatggggattggaattcgggtgcagttctgaagccagagttgaaaagggaccctgtcagtacaagagtcaa

SEQ ID NO: 490510 - DNA, 90 bp, Homo sapiens
cttcagaagcatccacgtcattcaagatgctgtgaggaaggaggtgaggaaaccgaggctcagagaggggaagtgactggcccaagggca

SEQ ID NO: 490511 - DNA, 90 bp, Homo sapiens
tcaacaaattgaaggttaacaccttaagagttgtagttactgaccagcagtctctggtcccagcccaccccatggcccctcccagtccca

SEQ ID NO: 490512 - DNA, 100 bp, Homo sapiens
ggccaaatgctcctttaatttttgaacgagcaattctggacatgtacacactgatgagtaacaagcaatactatgatgccctctgcagtggagaaatctg

SEQ ID NO: 490513 - DNA, 100 bp, Homo sapiens
aaaggccacaataaacccaacatgaaaacagggtccacaggaggagtgctcctgcctagatgggccaaatccttgtagctgtcttcttgccccggtcagt

SEQ ID NO: 490514 - DNA, 85 bp, Homo sapiens
agaggagacactgagggaacaaacacttctggatgcatcccaaggacacccaggcccattattttcctccagcctccatggacca

SEQ ID NO: 490515 - DNA, 83 bp, Homo sapiens
ctcagaccgtgtctcagcatgattgcttcccattttgtgcctcatgtgttttcgcattataacaaggacctgttgacagagca

SEQ ID NO: 490516 - DNA, 100 bp, Homo sapiens
ctggtgcagctcaacgagctgctggaggacgagggccagctgacggagatggtgcagaagatggaggagaagtttcaggcacctgcaagagagacctgcg

SEQ ID NO: 490517 - DNA, 90 bp, Homo sapiens
ccggcgccggcaaggggacccagtgcgcccgcatcgtcgagaaccttcaacaagttttacagactcattggatgaagagtgcctgagaca

SEQ ID NO: 490518 - DNA, 75 bp, Homo sapiens
atcaaagtgattccccggaatcgtgtgctgggctggtcccccttgatacaaactggactctcaggacaaaacgac

SEQ ID NO: 490519 - DNA, 49 bp, Homo sapiens
atggagaaggaagaggagtcgtttttggctttcacccccaaccagtgac

SEQ ID NO: 490520 - DNA, 101 bp, Homo sapiens
ctggagttcgctgaggagcagctgcgagccgaccatgtcttcatttgcttccacaagaaccgcgaggacagagggacgcatggaatacctcgtgaaatgga

SEQ ID NO: 490521 - DNA, 83 bp, Homo sapiens
tagctgaccagtttgacttcaagatgtatattgcctttgtattcaaggagaagcagtcttatagctggatcagctaccaagag

SEQ ID NO: 490522 - DNA, 101 bp, Homo sapiens
tgcgggtcgcgtcctggccgccgaggaatgggtaccacagaccatgtcatcgtcctggcgtccacgaaccgagctgacattttggacggtgctctgatgag

SEQ ID NO: 490523 - DNA, 88 bp, Homo sapiens
aaagagaagctctatctcccctccaggagcccagctatgaactccttctccacaactcaccatggatgatgatatcgccgcgctcgtc

SEQ ID NO: 490524 - DNA, 75 bp, Homo sapiens
gctggtgacaaagtggtctgtttagtgctggatgtgtccagcaagatggcagagatgttgatgcctaagaagaac

SEQ ID NO: 490525 - DNA, 75 bp, Homo sapiens
gcttttgcgctccaaagaagaggtgggatagttggaggtgactcccacacgggtcatgctgttgtctcctgatcc

SEQ ID NO: 490526 - DNA, 82 bp, Homo sapiens
tccagcatgggctcgcctgtcaacgcgcaggctttatcctgtggataaacgcagagtgaacgagtttggggagtcctacgag

SEQ ID NO: 490527 - DNA, 83 bp, Homo sapiens
cggggctctccgaggagccgcacgccggcggcaccatggtccacctcaggggatatgagactttctactcggaatatcctgag

SEQ ID NO: 490528 - DNA, 101 bp, Homo sapiens
aaaaatagtgatagctttgataatggccacagatgtctttaattccaaaaacctggccgttcaggcacaaaagaagatcttgggtaaaatggtgtccaaat

SEQ ID NO: 490529 - DNA, 98 bp, Homo sapiens
gcttatccaaattcttccctctttatgtttttcaagggacggatacaacgactagagatgagcacctctgaggagttggatgaaatgccagtgccgga

SEQ ID NO: 490530 - DNA, 83 bp, Homo sapiens
gagagagcttggttaacttgggagaaagtttcatctgtggatggagtattggagacgttgatccagcagcacgtgtcatttca

SEQ ID NO: 490531 - DNA, 82 bp, Homo sapiens
gtgcaacatctgcaaggtccgcttcaccaggtttttagaacttcagccataaaaatgggcagaattttccttgatcatatcg

SEQ ID NO: 490532 - DNA, 74 bp, Homo sapiens
tgacagtctgcatgtgcagttttcaggtctacttccccagcaggacagcatcattctcctatatcttctagaca

SEQ ID NO: 490533 - DNA, 80 bp, Homo sapiens
aggaggcgcgggaggtgttcgagaacgaccccgagacggtcgcctgcgaggccgctggccaggcctgagcctctgccacc

SEQ ID NO: 490534 - DNA, 106 bp, Homo sapiens
gagcgaggccgagagcctcaagggcaagctggaggaggagcgagccaagctgcacgatgtggagcgtactccaaagattcaggtttactcacgtcatccagcagag

SEQ ID NO: 490535 - DNA, 76 bp, Homo sapiens
gaaaaactctttggatgattctgccaaaaagaatcccacgtggcgaagtctcgattttggaattatgccagaccgt

SEQ ID NO: 490536 - DNA, 90 bp, Homo sapiens
gccagctccaagatcaaggtcaacaatcaccttttccacagagaagcgtctgcaccgtttgaacctgctgcagtctcatccccaggaagt

SEQ ID NO: 490537 - DNA, 100 bp, Homo sapiens
gcatgacgccatcctgccgcagctggcgcagcccacgctcatgatcgacttcctcacccgcgcctgcgacctcggatctcgaggacctggaagaagcaga

SEQ ID NO: 490538 - DNA, 100 bp, Homo sapiens
ggatcccagcagtgcaaacagacttcggagtacctgcgctatgaagacacgcttcttctggaagaccagccaacaggtgaacctatgggtcgtggaacaa

SEQ ID NO: 490539 - DNA, 76 bp, Homo sapiens
catgccagcgaatgtgcccctgtggatggattcaatgaagaagtggaaggaatgattccatgcaagcatgtttttt

SEQ ID NO: 490540 - DNA, 82 bp, Homo sapiens
cctgcagatcctgacctctctgatgagatggatcgccgcggcgagtcctttgcacatgttggcaacacacgcatccgcatcg

SEQ ID NO: 490541 - DNA, 100 bp, Homo sapiens
cgcgtcgactgcccagagtccgcggccggggcgcgggagctgcccgaaaccatgttaatagaatgtgcctggcagctgatgttcctcttattgaaagtgg

SEQ ID NO: 490542 - DNA, 73 bp, Homo sapiens
gacaacaggatcgtctcgtccaagggtatcgtgcagcagtttttggtgttactgacgaccagctctgacgaga

SEQ ID NO: 490543 - DNA, 90 bp, Homo sapiens
gaagctagtgtgtcagtcattcctcgaagcgtgctcttgggctgtattttggagctagcgtccctcctgtggagatggggtttcaccatg

SEQ ID NO: 490544 - DNA, 100 bp, Homo sapiens
ggtggaggaatcctgatactgagcgggaccatgggctgtggctgcagctcacacccggaagatgactggatggaaaacatcgatgtgtgtgagaactgcc

SEQ ID NO: 490545 - DNA, 100 bp, Homo sapiens
gtgcttgattttgtgcaggatccgtgctttgcccaaggagatggtctcattaagtcctggaagatactgctctttggtgtaataaacttgatatgtactg

SEQ ID NO: 490546 - DNA, 107 bp, Homo sapiens
aacaaagatgaagaggatcaagaagaagagagggaacttgaggaagggaacaacctatcttcagcactcgagctcatgtcttccaaattgacccaaacacaaagaag

SEQ ID NO: 490547 - DNA, 75 bp, Homo sapiens
gggagccgccacttcgaggactgggtgttggggatgtcctttgcactgaccctgaactgccagattgacaaaacc

SEQ ID NO: 490548 - DNA, 75 bp, Homo sapiens
tcttcgcagaatgcaatgatgaaagcttctggttcagatgtttccaatacttatctacaggaatcgccatgaccc

SEQ ID NO: 490549 - DNA, 74 bp, Homo sapiens
gcaggtgctagcggccccttcgccctgcagctattgacctgaaaagtggttctggaaaagtgtaccaaggccct

SEQ ID NO: 490550 - DNA, 97 bp, Homo sapiens
tacggcccgagacacaccaggccggcaggctgagaaaagcgagaccgcgtgcgaggaccgggcgccctgcgtccggcagaggaggcgagcatcccgc

SEQ ID NO: 490551 - DNA, 89 bp, Homo sapiens
ggcagacctcccaagtcgactggaaggaccattttctgtactgtgccaagtctacttccccagcaggacagcatcattctcctatatct

SEQ ID NO: 490552 - DNA, 101 bp, Homo sapiens
ggagtgtgacagggatgatgaagaagacctgctggatgaactgataaatttcaaacggaagagagtggcagcatttagaaagaatctaattgaaatgtctg

SEQ ID NO: 490553 - DNA, 82 bp, Homo sapiens
gaccccaaccagaccatccggataacgaaggaggcccaacttcattcaataaggagcctgacggatttatcccagacggtag

SEQ ID NO: 490554 - DNA, 82 bp, Homo sapiens
tccactttcgccagcccgtgccgcgagcgcggcctgcaggaggaggccactgtctgcagctcccgtgaagatgtccactcca

SEQ ID NO: 490555 - DNA, 73 bp, Homo sapiens
gggccggcgtggctgctgctggcaatctggatcaatgagctgagcaatgttcctgttcctgtcatgctaatgc

SEQ ID NO: 490556 - DNA, 98 bp, Homo sapiens
catgctctatctgtactgccggcacctcaaccagatgaggaagtacaactttgagaatcagcatgattcttcagaggctcttcaggttctcctctgtc

SEQ ID NO: 490557 - DNA, 86 bp, Homo sapiens
ataccaccgtcggccgcatccgtttccacgactttctgggagactctgtaaacaggaacatcgataagtagtgtaaaaacttgcac

SEQ ID NO: 490558 - DNA, 82 bp, Homo sapiens
aaagacgctaaacgtgccctactctgccccgggggagagaattaaatgtgagggagtctgacgtaagagtttgtgatgagtc

SEQ ID NO: 490559 - DNA, 75 bp, Homo sapiens
cgcagatgtggacttgaaagaagctgcagcggaggaaggcgaggccttggacaagattcgctatgagagcctgac

SEQ ID NO: 490560 - DNA, 90 bp, Homo sapiens
gcttaaagaaatcagtccttcctttccgacttagtcctcgggaagaagtttcagactacaagatcgaacggttggaagtaagcagccttg

SEQ ID NO: 490561 - DNA, 83 bp, Homo sapiens
agaatttaaaatggtccacagcagtcgaattttgtaaaagatgacgtagctttgccaaagacttagaagctaagcagaaaatg

SEQ ID NO: 490562 - DNA, 76 bp, Homo sapiens
tcagctccacattgagagcaaaatctacaagatgatgcagggaggagggatcttttatttagtcagatgtatgata

SEQ ID NO: 490563 - DNA, 80 bp, Homo sapiens
ggagagaggtacctctccttttccctctccctttccctaagggtgataaaagaaaatgtggctgaagttacccgaagttc

SEQ ID NO: 490564 - DNA, 80 bp, Homo sapiens
ggaagatggcggctgtggtggagaatgtagtgaagctgcgttgcttgagtccatggttgatgctgctgagaatctttgtc

SEQ ID NO: 490565 - DNA, 82 bp, Homo sapiens
tagaaggttggaaaatcaattcctctttggtcctagagataagactgcagcgaggcaagaaacaacagattgaaaatggtag

SEQ ID NO: 490566 - DNA, 82 bp, Homo sapiens
caggactcttccagacacgggatttgtcggtgaacaacgcagagctgatgcagacataaatgagccgtcagactgctacagc

SEQ ID NO: 490567 - DNA, 43 bp, Homo sapiens
tattcgtctgagagaatggctgttgttgacctcctgtactgga

SEQ ID NO: 490568 - DNA, 100 bp, Homo sapiens
attgcattgattgtcttatatttcaagttaaggtccaaaaaaactccagctgtgaaagcaacataaatggtaaaatatacccaggaccataaacagatga

SEQ ID NO: 490569 - DNA, 115 bp, Homo sapiens
gggagcaccaggatctcgggctcggaacgagactgcacgattccttttgcaataaaaacaacaccaggtgcctctcaaattcttgccaaaacaattctacatgcaaagatttttc

SEQ ID NO: 490570 - DNA, 50 bp, Homo sapiens
ttgtaaatcaggtttttctaagagagaatggtgttgaacgcgtgtgtcct

SEQ ID NO: 490571 - DNA, 100 bp, Homo sapiens
ccctgatcgccatcctcgcctgcatcgtcattctcctggcgatctgaaggtgaagagaagacattaacaggggacgtgaaaaccagtcctccacgaactg

SEQ ID NO: 490572 - DNA, 98 bp, Homo sapiens
tgagctggtcagcacagcctgcggtttccggctgcaccgcggcatgaatgtgcccttcaagcgcctgtctgggtgtctgatgccatcaagtgttgcag

SEQ ID NO: 490573 - DNA, 75 bp, Homo sapiens
acgagctggctttaatcctgaaagccatgcagcggggtgttcagacttacatctcttggatatgttgaccccaac

SEQ ID NO: 490574 - DNA, 90 bp, Homo sapiens
ccaagagggtgttcgactgctagagccgagcgaagcgccaccagcttgggctccccacggagggcagcaagtgggacttggggaacccgg

SEQ ID NO: 490575 - DNA, 98 bp, Homo sapiens
ctcaggagacctggtttctagccccagctgtacctctaattgtaaccttggcttgagtctactgaaagcatcctgcaggaagctacatcatccatgtc

SEQ ID NO: 490576 - DNA, 97 bp, Homo sapiens
gactgtggcggcttcggcggctcaggttgtggtagaggcggaggctcaggcagcttgaggcctgggccgaggccactggtgcatatgttcccgggag

SEQ ID NO: 490577 - DNA, 82 bp, Homo sapiens
agggtctgaggtcatcggggatgtggacgaaggggccgacctcctaggctcttgtcaggatggtgaagctgttcatcggaaa

SEQ ID NO: 490578 - DNA, 74 bp, Homo sapiens
caatggcacggaggcctgcgtccatccgggtgacctgcataggttcctgcggggtctccaacaaggctaatgac

SEQ ID NO: 490579 - DNA, 97 bp, Homo sapiens
gcagtggtcgcttcttctccttgattgtgaaaactgctgagagagacttgcaatccagtcacataagtataataaagaaatattggtcctcatggaa

SEQ ID NO: 490580 - DNA, 100 bp, Homo sapiens
aaagtttcattgtgtatgtagaagaccagaagtggatggagagtatctgcccaaactggaacttatgctgtagacatttctttgtggtttatctaaaaac

SEQ ID NO: 490581 - DNA, 132 bp, Homo sapiens
caacttccggttggagtcactcggccaggcgccggcgacctgaggggagagggaacgcagctgaaagcgtgaactgtcagtctctggtcccagcccaccccatggcccctcccagtcccagcaccaccagca

SEQ ID NO: 490582 - DNA, 80 bp, Homo sapiens
ggctggtgcggagcttcctccctgggaaccaagaggacccacacagggccgcctgggcagaatgtcacgatggacgaggg

SEQ ID NO: 490583 - DNA, 139 bp, Homo sapiens
agataaatacctttgatctaagggttcagcctttcaatgtgacacaaggaaagtattctacaggtgtcatggagaaactccagctgggcccagagattctgcagcgggaaaatccaaggcttatttatgccaggctgag

SEQ ID NO: 490584 - DNA, 75 bp, Homo sapiens
gaccccagaacaaagccgcgggcctctcagaacaaccccgtgccgcgcagccgacgcgaggttcccccccagctg

SEQ ID NO: 490585 - DNA, 75 bp, Homo sapiens
gggaatctatagttaatcttggcgacattgacaatgatggctttgaagattgctagtgcaactactgctccatcg

SEQ ID NO: 490586 - DNA, 90 bp, Homo sapiens
ctgctgccaatggtgtggacaccgcagtgtgcttgaggagacttcagaaacgagaactggttcagattgaaggcagtgtggtgtacagca

SEQ ID NO: 490587 - DNA, 82 bp, Homo sapiens
gaggatttggcgctgcagaaccagatccgggagcacgtcatctccatcgaggaattaaatgtgagggagtctgacgtaagag

SEQ ID NO: 490588 - DNA, 76 bp, Homo sapiens
gtgacatgttgataaaaaatgatggaaggaaaatcacctcggcagtgtttgaaggaaggatactgcaactctttga

SEQ ID NO: 490589 - DNA, 83 bp, Homo sapiens
ctggacatttcaagagttggctggccatggtgttcctctgccggatactttctcttatggattttttatcaagcagaaatgca

SEQ ID NO: 490590 - DNA, 75 bp, Homo sapiens
gaaggcgcgggcaggagcctggcgaggatgcaccttcccctgccttggaaaggggaaatggtgtcctgctggagg

SEQ ID NO: 490591 - DNA, 82 bp, Homo sapiens
ggctactcacagttgaagcctgattgcagaggagctctacggtgactttgaagacttggaaacaggggacgtgcacaaggga

SEQ ID NO: 490592 - DNA, 100 bp, Homo sapiens
tccctgacagcgcggaatctgggtgcagttcctgcagtaccccactctacgatcaggtggcatttacaccctacgccccggagcccgggagcacatgccg

SEQ ID NO: 490593 - DNA, 75 bp, Homo sapiens
gccaaagagaggtgttctgaacaagttcaagaaatgcactcggtgatggaaagagagccactattctgaagaaca

SEQ ID NO: 490594 - DNA, 75 bp, Homo sapiens
ggggagcggcgttggaggccaccgtttccagctccctagatctttagcttctactcccactgctcctaccactcc

SEQ ID NO: 490595 - DNA, 82 bp, Homo sapiens
gaggattgtgtctgcttggtgtggagccatgaagggcgtgatggtgggcatgggtcagaaggattcctatgtgggcgacgag

SEQ ID NO: 490596 - DNA, 122 bp, Homo sapiens
aaaccacaaatatacaacaaggccattttctcaaacgagagtcagcctttaacggtgcccacctggactggatttaagtcagaagagaaggaagatgtgagtattcattaaacgtctctgcg

SEQ ID NO: 490597 - DNA, 95 bp, Homo sapiens
tcaagaaggtgccggtggtgcgagtcttcggagcgaccccggcaggtattgcgcagcgatgcacggccatcaagtaccacttttctcagcccatc

SEQ ID NO: 490598 - DNA, 100 bp, Homo sapiens
gtgggcgggggccatggcaagacttcccgcaacatccactccttggaccacctcaaaaagcgtggatacccatcaacgaagttttgatattggaattcag

SEQ ID NO: 490599 - DNA, 98 bp, Homo sapiens
gtttgtgtgctcggatggctcgggccaggccaccggacagtttaattggttggggtcagataagaagaggagtgacaatcaagccaacagtagatgat

SEQ ID NO: 490600 - DNA, 97 bp, Homo sapiens
aatgaaatcgccaatgccaactcccctgtcggaaaaggtaacagaagatggaactcgaaatcccaatgaaaaacctacccagcaaagaagcatagct

SEQ ID NO: 490601 - DNA, 90 bp, Homo sapiens
tgttcctgggcaccggggagccggccttggacacggagctcttgtccctggcaaagcgaaagcgcagtgactctgaggagaaggagccgc

SEQ ID NO: 490602 - DNA, 48 bp, Homo sapiens
gctttcatgggacgagcagataagagtaattccctcctggtcccagac

SEQ ID NO: 490603 - DNA, 75 bp, Homo sapiens
aggctcttacagtgcactcggcaggcagtacccctcttctctgaggatttgacagctaaggatattgaagaaatt

SEQ ID NO: 490604 - DNA, 100 bp, Homo sapiens
ctcccgagtagctgtgattacagggggttttgtgctgctggatggggagacgttcgaggtgaaggggacatgggagagacctgggggtgctgcaccgttg

SEQ ID NO: 490605 - DNA, 83 bp, Homo sapiens
cctctccttttcgtttccggaaacatggagcttactccacgggaacagcctctagataatctgagttgttgaaaatacgaagc

SEQ ID NO: 490606 - DNA, 80 bp, Homo sapiens
cgggagccgggcgcggggagctgcgcgaagccggggcggagcacgcgagctatgggatcgcttacacctgagacgaacta

SEQ ID NO: 490607 - DNA, 100 bp, Homo sapiens
ggcccaacgatggcgagggcgccttccatggagacgcagatggtcctagaacaattggagattcatacgcacacaaagaacctcaacccttacctcacac

SEQ ID NO: 490608 - DNA, 83 bp, Homo sapiens
tgtggatctcaagtactaccggccaactgaagtgaaacttcgtgaatactttcattcaatttaagaagcccattattgtagca

SEQ ID NO: 490609 - DNA, 98 bp, Homo sapiens
gcgcaggagctcatgtggcctgcggctcctgtcgcctgtagacagagcgggatgccaccagcttgtccaaagggaagttccaggagctcctggtgggc

SEQ ID NO: 490610 - DNA, 50 bp, Homo sapiens
tacaagccagcctctgggaccgaggcctccaaagacttcatatgctccag

SEQ ID NO: 490611 - DNA, 82 bp, Homo sapiens
ttggactgagtcctgcaggacacaggcaacaagattgacctggctgaaaggagagaggtttcccagcagcgagctgaagaat

SEQ ID NO: 490612 - DNA, 100 bp, Homo sapiens
ccttgaaccccctatggctgctgcttttgtttaccgttctgggtcagaggtggtatctggctaacttttctcatgcaacatcgtttaacttcacaacgag

SEQ ID NO: 490613 - DNA, 50 bp, Homo sapiens
ggcgccggggtcctctcgacgccaggtttctgaaggattgtcattcttgc

SEQ ID NO: 490614 - DNA, 98 bp, Homo sapiens
cgagcccgccgccacatcctctgagtgatgcttttgacatacaatatggagtagtggttattcgcctaaaagaaggtctggatatatctcatcttcaa

SEQ ID NO: 490615 - DNA, 83 bp, Homo sapiens
taaaaacaagtgtgtgcatctggctgttagaagaattcatgctcatccggatcaggagaacctcagtctgacgacattgaagc

SEQ ID NO: 490616 - DNA, 50 bp, Homo sapiens
taaaaatggacgcctggcaaccaactcctgggctataacgaaaagccaat

SEQ ID NO: 490617 - DNA, 100 bp, Homo sapiens
cagcacctcaccgaaaagagcctgtacaaccagcgcctgcgcctacagaacgagcaccgagttctgtcaggccaagcagaaggcagccttgctggagctg

SEQ ID NO: 490618 - DNA, 100 bp, Homo sapiens
cgtgcagatgctgcaggacgccatcagcaagatggaccccaccatgtggcaaaatctggcaaaggcagagaccaaacttcatacctcaaactctgggggg

SEQ ID NO: 490619 - DNA, 83 bp, Homo sapiens
ccggtttgctgatcgccccagggatcaggaggtgccagatgcaattaaaaagtgtcagagggctggaattactgtgcggatgg

SEQ ID NO: 490620 - DNA, 100 bp, Homo sapiens
ttaagcagctgagtggagatcagcctaccattcgaccctatatctacggacctacgtctcagggggaaaggatgcaaattctccagaatttcaagcacaa

SEQ ID NO: 490621 - DNA, 100 bp, Homo sapiens
tgaagatcccccacgtggtgcggctcaagaccgttccccagcacaccccaccccactcagccgctcagcctccctcagttacccagaccgcacagacgtc

SEQ ID NO: 490622 - DNA, 74 bp, Homo sapiens
actgttctcaactgctcccatgacttcctgtcaggcagagtcacggtggcagcattgagagttggacacccggg

SEQ ID NO: 490623 - DNA, 82 bp, Homo sapiens
gaagtccttcttcgccaaatacgtgagccccaggtgtatcccagagggatccgggtgacttctctgcagactgtttgccatg

SEQ ID NO: 490624 - DNA, 50 bp, Homo sapiens
ctatgttcgggccgtcctgcatctcctgcccgagtgactaagggatgtac

SEQ ID NO: 490625 - DNA, 83 bp, Homo sapiens
gcttgagaaagtccacagtcttttccggcgacagttggcgatcccactctatgaaacgggctgtaaaggcagaaaaccacgtc

SEQ ID NO: 490626 - DNA, 100 bp, Homo sapiens
cagggggtgccattctcagctttatcctcaacgtgctaagagagatgctgatgaaaccaaagaatggattgaagagaagaatcaagctctaaacacagac

SEQ ID NO: 490627 - DNA, 75 bp, Homo sapiens
aagattcccaggatgtgagcaacacgggaccgaatatggctcaagcctggaagatgacgtggtgggggacacttc

SEQ ID NO: 490628 - DNA, 83 bp, Homo sapiens
cctggttccagctgcagcacgtggacgctgactcggaagtgcaggacgtggtgggtcctctggtgcgaaattccggatttcct

SEQ ID NO: 490629 - DNA, 82 bp, Homo sapiens
cggcgggaaggaaaaccgcgcagagagtttggtgccctggttgtcagatgttggaaagcagtaggacggaacatactcttcg

SEQ ID NO: 490630 - DNA, 80 bp, Homo sapiens
cgcgtctgcccggccaagaggcaaaggggaggttacgcagcaaaccatccagaagcaattctgtggtgttcttggtcaca

SEQ ID NO: 490631 - DNA, 87 bp, Homo sapiens
gcagtcccggggaggacggtttcgtcccgtcggcgctggggacccgcgagcattctcctgtgcctcctgttggctctctttgcatct

SEQ ID NO: 490632 - DNA, 75 bp, Homo sapiens
gtggactgcagtgctgcagtgccagcttgcctacatgtagcctgtgttgtacagcagaaagatgccaggcaatgg

SEQ ID NO: 490633 - DNA, 100 bp, Homo sapiens
tactgccctcctgaggcttctgtgctcctggcttcttacgccgtccaggccaagtcctcctgcatatgcccaagaggattgggagtggaatggacaccag

SEQ ID NO: 490634 - DNA, 107 bp, Homo sapiens
gagggcccgcgccgcatggaggccggctgaggagcgccgctgcctcgcctcggagcatcagatccatgctgctgctgactcggagccccacagcttggcacaggctc

SEQ ID NO: 490635 - DNA, 82 bp, Homo sapiens
caacagtgtaccagcagggcgttggctatgtgcccatcacagcaaattgtggctactaatttgccccctgaagatcaagatg

SEQ ID NO: 490636 - DNA, 100 bp, Homo sapiens
caaatagttccgtgagaaagatggccgggaactcgatcctgctggctgctgtctctattctctcggcctgtcagcaaagatggccgagcctcgatttaac

SEQ ID NO: 490637 - DNA, 75 bp, Homo sapiens
ttattttttctcatggatgttcttcttcgagtatttgtagaaggaaagtgaaattcgttattctacatggaagaa

SEQ ID NO: 490638 - DNA, 83 bp, Homo sapiens
cccgcaactccgccgcccaccatggcttccgaggagctgtacgagaagtaaattttcgcagaaggacttagaaatgctattcc

SEQ ID NO: 490639 - DNA, 100 bp, Homo sapiens
gtctttgtgtcctgagatcaaatggcacttcattggccacctacagaaacaaaatgtcaacaaattgatggcatacggcggcatcaagaaaggagagcaa

SEQ ID NO: 490640 - DNA, 51 bp, Homo sapiens
tggtctgcgatagagtgtctgaagatggaattcttttagttggacccccag

SEQ ID NO: 490641 - DNA, 90 bp, Homo sapiens
gtttccagatggctctaacctcagtgatcccatgttagatctggatattcaagaattagccagtcttaccactggaggaggagatgtgga

SEQ ID NO: 490642 - DNA, 100 bp, Homo sapiens
gggacccggttccccggcccacagtgggggtgtgcaaacccgagagaactggagtccgatgggtggtccttttattcctgctgctcctgtcaaaactgcc

SEQ ID NO: 490643 - DNA, 96 bp, Homo sapiens
ccaacatgcacctcaggttgtttgagctggccaaggactacatgaatggaacagggaagaatttcgcacgatgtgggtgattgggttagtgtttaa

SEQ ID NO: 490644 - DNA, 82 bp, Homo sapiens
gcccgacgcaaaccaaggatctggggatcttcgcactatcccaagcagaaaaatatggctcaggagactaaccagaccccgg

SEQ ID NO: 490645 - DNA, 83 bp, Homo sapiens
tgtccttctttgtggagagcaaggtgcggcggcagcacatggagcgttgtaccagcttcctggtggatgagctgggcgtggtg

SEQ ID NO: 490646 - DNA, 85 bp, Homo sapiens
tcggacatagaggccaaccaacctttggaggctttgggggaccagatactatttgtaaatcgtcccgataagaagaaaatacttt

SEQ ID NO: 490647 - DNA, 90 bp, Homo sapiens
cctgccgcctccggagcgcctgtgtggggtggtgatcatgaactcgatcctggagcgcatgtgtgccgacgtgctgcagcagacagccac

SEQ ID NO: 490648 - DNA, 99 bp, Homo sapiens
tcatcattggcaagaaagggcagaacctggccaaaatcactcagcagatgccaaaggtgcgcttctccgagaaggtcactgtccatttcctggctgtct

SEQ ID NO: 490649 - DNA, 90 bp, Homo sapiens
taatgagcgcagttgattcgagggcagtaaacaagagctctgaaaggggaaggaagccaggagaaagccagctccattagtcacgcagca

SEQ ID NO: 490650 - DNA, 98 bp, Homo sapiens
aggaggcaaccacactagtttagcctgatgtgtgagaagcggatattggcggcagtgaccagtgcgggacaccccttcctggtgaacctcttcggctg

SEQ ID NO: 490651 - DNA, 75 bp, Homo sapiens
ccagccttagactatttttcaaacagtgacttaagagattaaaattaatttggttgctgttggttctgaacaaat

SEQ ID NO: 490652 - DNA, 99 bp, Homo sapiens
ccaagcagccttagccctagtgtagaggaagaaatgcagagtaacgtggaagtggtccacacctaccgccagcacattgtgaatgacatgaaccccggc

SEQ ID NO: 490653 - DNA, 90 bp, Homo sapiens
gccgcgatggagctgggggagccgggcgggggggccctcagcctcttggccttgaacgggctgttcatcttgattcacaaacacaacctg

SEQ ID NO: 490654 - DNA, 98 bp, Homo sapiens
gaccggccattactggtgccgggttgggcttctccagatgccggggctgggtccttcccaaggttgagttttccaagagataacttcaccaagatgtc

SEQ ID NO: 490655 - DNA, 75 bp, Homo sapiens
cagcggcaaggtctccaagtcccagctcaagcatggaggagcaggacttggagcgaaggttcgagctgctgagcc

SEQ ID NO: 490656 - DNA, 101 bp, Homo sapiens
ggctcaccttccaggcgggggacccctactacatcagcaagcgcaagcgggacgagtggctggcacgctggaaaagggagatggagtcttgctctgtcgcc

SEQ ID NO: 490657 - DNA, 77 bp, Homo sapiens
tttggctcttaatatgcattatgtaggaccttaaaggctttgatccaggagagaaatactttcataacacatcatgg

SEQ ID NO: 490658 - DNA, 98 bp, Homo sapiens
cgagcgcgctcgctccggcgccggcctcgcctcctcgcagcagcgccatggttcgtgctggccgtgggcagcgccgtctttgatgccatgttcaacgg

SEQ ID NO: 490659 - DNA, 50 bp, Homo sapiens
gggggcaggagctctagccatctgtcattcctctgaatattgatttgctg

SEQ ID NO: 490660 - DNA, 74 bp, Homo sapiens
tccgtgttcggtgaccgcagcactggggaaacgatccgctcccaaaacggctttcgccaaggtcttcaacacaa

SEQ ID NO: 490661 - DNA, 50 bp, Homo sapiens
catcatccgctatgcaattgggattggccgcgtaatccaggttgctgctg

SEQ ID NO: 490662 - DNA, 100 bp, Homo sapiens
cttgagctccaggagttcgtctcttacgtctgcggaagtgcagctgcctcagttcttagcgcaggccttggatggtatactgtaaattcagcatatggag

SEQ ID NO: 490663 - DNA, 100 bp, Homo sapiens
gctgggatcagcaaggaccgaattcttataaagctgtcatcaacctgggaaggaattcaggctggaaatgatgtcttggcattgcccattttcaagcagg

SEQ ID NO: 490664 - DNA, 100 bp, Homo sapiens
atgtgcgctgcagtcagaggccacctctttctttgtgggccggatgggtccttgagtatggcctcacctactgctattccatcgacctctcagagcgagt

SEQ ID NO: 490665 - DNA, 74 bp, Homo sapiens
actacagaaacctcgtctccctggggatacccacccaccatcccagggtctacaacatccacagccggaccgtc

SEQ ID NO: 490666 - DNA, 100 bp, Homo sapiens
cttattcttgaggaagaaagggagatggaggagatgttaaagtaacccatcttgcaggacgacattgaagattggtcttctgttgatctaagatgattat

SEQ ID NO: 490667 - DNA, 88 bp, Homo sapiens
cccttcgggaaatccgaatgctcaaggtaggcgaaaaccaagagtacatcggcctcgttctcctatattggaagaaaaagacatcccg

SEQ ID NO: 490668 - DNA, 100 bp, Homo sapiens
cgcgtggctggaagacatggccactccagtcggtgttgagcacggcgagcagtctcaggcctttagtgatgatgggtcaacatatttcactggcacctat

SEQ ID NO: 490669 - DNA, 75 bp, Homo sapiens
gttttttcctgtatgaagcggttggcaccactgaagtgaccgaatgaggtttctggcatttgaagtcaaagagta

SEQ ID NO: 490670 - DNA, 75 bp, Homo sapiens
gggctccaacccagccagggccctgcagcaaatgagatacagaattcgttgttgggaaggactggggaaacagct

SEQ ID NO: 490671 - DNA, 83 bp, Homo sapiens
cgctaatgagtatagcgaccgctgcacgccattaactgctgaagtactgatcgagttctgcatttcttcaatgaggaactaca

SEQ ID NO: 490672 - DNA, 51 bp, Homo sapiens
tgctggctgttatgtacgcaggagagccagagcccagaggtggagcagtta

SEQ ID NO: 490673 - DNA, 98 bp, Homo sapiens
cagttaatcctcaatttaagcctgatctaacccctagaaacaggaaagctggttgagcagaggaagcacattgatgcggccatggttttggaagagtg

SEQ ID NO: 490674 - DNA, 75 bp, Homo sapiens
gattgctcagcgattacggacaaagaatcctcactatggatgggctcattgaggacattaagcatcggcggtatt

SEQ ID NO: 490675 - DNA, 90 bp, Homo sapiens
ctggacccggaccggttttggggctgggttacgacccctacaaccctgagctgcccaagccccccgcgcagagggagaatggcaccctgg

SEQ ID NO: 490676 - DNA, 75 bp, Homo sapiens
accgatgggaagtccttattattggccctccagatacactttagctattcaagatctctggcagtggaggaagtc

SEQ ID NO: 490677 - DNA, 90 bp, Homo sapiens
ctccaggattagggaaagtcaatggttcaggaagatttgactgaagagaaaaaaagggaactggagcataatgctgaagagacctatggt

SEQ ID NO: 490678 - DNA, 101 bp, Homo sapiens
caaaaaggaagctggaagaggcagcccagcgtctggagtatctatatgagaagctctgtgaggggacatgacctatggaatgacaagctccagtgcttatt

SEQ ID NO: 490679 - DNA, 100 bp, Homo sapiens
gtggccaaggctggcttggtggatgactttgagaagaaggtggtgatctttgtgaagtctgtgcagcggtgcattgccttggcccagctactagtggagc

SEQ ID NO: 490680 - DNA, 51 bp, Homo sapiens
aacgccccggtggagaagctgaggctactgcagcactggggtgtcagttgt

SEQ ID NO: 490681 - DNA, 83 bp, Homo sapiens
ctcccgaggagtgcaggcgcttcaccacagacgggaagtgggaatgtccttggcatcattgtgacgtgtgtggcaaaccttcg

SEQ ID NO: 490682 - DNA, 98 bp, Homo sapiens
gaagacctgacccgctacagagaaatgtcttataaggttacagtccaagtggtaagaagttcagaagcaagcctcagttggcaaggtacctgggaaat

SEQ ID NO: 490683 - DNA, 98 bp, Homo sapiens
ggatataaaacttcaaaaattaccattttatgatttactggatgaactgataaaacccaccagtctaggtgtcatcaatcttacagaagaagtgctgt

SEQ ID NO: 490684 - DNA, 100 bp, Homo sapiens
agacatgctgctctcctgccacttccggggggaggtctgcagcgctgaagacttcaaggtgcccacgacccttcctcagggcaccatcaacatgaaccag

SEQ ID NO: 490685 - DNA, 74 bp, Homo sapiens
gggagacttcgccctcaccatccacacccaggccaagtggaggtgactggtgatgaatacaatgtggaaagcat

SEQ ID NO: 490686 - DNA, 82 bp, Homo sapiens
aatatctgtcttcggtggactccttcggcagtccacccaccgccgccgcctcccagagcataatggcagcgtctgaggttgc

SEQ ID NO: 490687 - DNA, 100 bp, Homo sapiens
cctccgcgcccgcggctcgcgcgctcccgaggaagagtgagggcgcgacgcgcaccaacggtggaggaagcgcaacaggaaaggagagaagaatggcaag

SEQ ID NO: 490688 - DNA, 76 bp, Homo sapiens
gggtccctgaagagggaagacacgcggaaacagggactgttgacatttagggatgtggccatagaattctctctgg

SEQ ID NO: 490689 - DNA, 75 bp, Homo sapiens
tcaagaatctcgtgctcaccggtttctcccacatcgacctggagtccttcaataatgttaaacagtggctgcagg

SEQ ID NO: 490690 - DNA, 101 bp, Homo sapiens
ggcctttgccccaatcttgtgtgggcactgaagggggactacaggttcgagagttgaaggtcgaggagctggaaggcgagcggagtcggctggaggaggaa

SEQ ID NO: 490691 - DNA, 100 bp, Homo sapiens
gcgactggctctgccgcaactgccgcctcctctcccgccgcggcggccggcgatagcccggcgctcatgacaggtagcccagccatgacccataggaatc

SEQ ID NO: 490692 - DNA, 88 bp, Homo sapiens
gggtcatctcttctattgtacctgcaggcatctaataggattcaggaatcaaagaatcagtgtactcaggtggtacaggaaagagaga

SEQ ID NO: 490693 - DNA, 100 bp, Homo sapiens
tgcaacacgagcatggcatggccccgcaggtcttcacccaggccctggagtgcatgcgcagggagaaaatccccttcaacattcctgggatatatatcta

SEQ ID NO: 490694 - DNA, 75 bp, Homo sapiens
ttttcaagaatctatctttttgtgtgaggatctgcagacaggggcaagtgtccgagtggtgaatcagctacttac

SEQ ID NO: 490695 - DNA, 100 bp, Homo sapiens
atggtcaaaaatgctactgtgcacccaggcctggagttgccatgtattgttctctccaagccagaactgatcacctgtctggagcaaggaaaaaaacctc

SEQ ID NO: 490696 - DNA, 100 bp, Homo sapiens
taacttcctaatgggtattgggcgtcactgtaataagattggttgtgatcgtagccaaaaccttgtggacatttgtagagagaggcaatttcaggctttt

SEQ ID NO: 490697 - DNA, 100 bp, Homo sapiens
ggacagattgctgaccaggggcttgagagctgggttctattttccctcctcaaactgactttgcagccacggagaggaacgtcaaggtcgtgggaaataa

SEQ ID NO: 490698 - DNA, 80 bp, Homo sapiens
ggcagatggcgtatcagatctgccagtcaataaatttgtctcctttcctcttgggccgggcactttgggctgccagtcgg

SEQ ID NO: 490699 - DNA, 90 bp, Homo sapiens
agagccctgcgccactactacaaactaaacattatcaggaaggagccaggacaaaggcttttgttcaggaattgaatgatctggcacggg

SEQ ID NO: 490700 - DNA, 100 bp, Homo sapiens
atggcaacatcaggtgactgtcccagaagtgaatcgcagtgacttttttgaacgaaccattctgtgcaacagccttgtgtggagttgtgctgtgacgggt

SEQ ID NO: 490701 - DNA, 100 bp, Homo sapiens
tacaagttggcttatgagtggaacatggctagcaggaatgcttactgttgcgtggttcgttattaacagaactgataaatttcaaacggaagagagtggc

SEQ ID NO: 490702 - DNA, 75 bp, Homo sapiens
catctgcaaatatttcaataagtacccaaaaggttaggattaattgagtggcttgaaaatactgttaccttgaag

SEQ ID NO: 490703 - DNA, 97 bp, Homo sapiens
ctcccaaccgcacctgggactgcgtcctggtcaaccccaggaactcacagagtggattccgatccagacatttaatgtggatgcaccatgccagacc

SEQ ID NO: 490704 - DNA, 100 bp, Homo sapiens
ggcgctctccgggctcttctctagctctcagcggctgcgaagtctgtaaacctggtggccaagttctgatctacaatggccaactggacatcatcgtggc

SEQ ID NO: 490705 - DNA, 82 bp, Homo sapiens
cctgtgcgcgcgtgcgcggacatggcctcaaacggaagtcctgagttgaggcttgcgggatcctttccggagaaagcgcagg

SEQ ID NO: 490706 - DNA, 100 bp, Homo sapiens
agattgggcagcttactcgagcacgggccattttggaaaagtctcgtctgaagaacccaaagaaccctgggctgtggctccaggatgaaaccaacctgag

SEQ ID NO: 490707 - DNA, 101 bp, Homo sapiens
caaggctgggaaactgcagcctgacttgggctgccctgatcatcctgctgctccccggaaatctgactgcagccatgagcagcaatgagtgcttcaagtgt

SEQ ID NO: 490708 - DNA, 90 bp, Homo sapiens
ctcactgcccaccttcccctgggccaggaggtgaacttggcacagctagcacggcggtgtgcagacagtcattttgtttactcattcagc

SEQ ID NO: 490709 - DNA, 83 bp, Homo sapiens
ctcgaagaactcgagcgacagagacaagctgagcttgccgcacaaaaagctagagagcacctgtgagaatatgaacttctctt

SEQ ID NO: 490710 - DNA, 50 bp, Homo sapiens
ctcaccaaaactttctctcttgataaggatcttaccaacagtatcattac

SEQ ID NO: 490711 - DNA, 99 bp, Homo sapiens
ggtcaaaaaacatttgatttttggaaggatatagttgctgctatacaacacaattataaaatgtcagcttttaaggaacatctgctcaaattaatgacc

SEQ ID NO: 490712 - DNA, 74 bp, Homo sapiens
tcgctttgctgtacatcgtattacacctgaggaggccaagtgtgtactgtaagcacggtcacctgtgtcccatc

SEQ ID NO: 490713 - DNA, 110 bp, Homo sapiens
acagtggctatggtcaatattcctaggaatgggaacattactctggggccagggcaatgtattccaagatgcagtcttcaatcaaacagttacagttattgaaagagagg

SEQ ID NO: 490714 - DNA, 100 bp, Homo sapiens
tttttctaatatgggcagtaacacatagcgtcaaagaggatgagctttggaggatccaggagaagctggaatgttactttggctccttggttggctcgaa

SEQ ID NO: 490715 - DNA, 96 bp, Homo sapiens
gacaagggcatcgccgcctcagccgccgccgccgccgttttcgcctgcagctgctcaccgacagccgctcaggaagcaatcttgcatgcgtctgga

SEQ ID NO: 490716 - DNA, 100 bp, Homo sapiens
ggcagctctgggatgagctggctggtcacctgacttttgaatgccgcaattttctccgagtagaccctaaaagggacatagttttggatgtcagcagtac

SEQ ID NO: 490717 - DNA, 90 bp, Homo sapiens
gatcacttgagccagggagttgaaggctgcagtgagccctgtttttgccaccacactccagcttggtgttccattggcaagctacaataa

SEQ ID NO: 490718 - DNA, 75 bp, Homo sapiens
aatcaacaacagtttcctgcgcgaccacagctatgcgaccgaaggttgcacagacagcagatggtgtggatgctg

SEQ ID NO: 490719 - DNA, 82 bp, Homo sapiens
atttgcttggaaaaacgtgtgggtacgaccttgattgactaccactacatctcctcccagggcttccctatcgaaggctggg

SEQ ID NO: 490720 - DNA, 97 bp, Homo sapiens
cagtgaccccaagcccaagatcaatgaggactggctgtgcaataaggttctaccacagtgtccaggatttgtccggaggctccagacagcatgaggc

SEQ ID NO: 490721 - DNA, 100 bp, Homo sapiens
tagtgtccatcattgaggaagacaagaattcctacactccctgcctcaaccatcggaattgagatgggcgattggcaggaagtctgggatgagaacacgg

SEQ ID NO: 490722 - DNA, 50 bp, Homo sapiens
gagaggcacccgagacccacggagaccgcagacaaagcatggaggacaca

SEQ ID NO: 490723 - DNA, 90 bp, Homo sapiens
acctgagctgtcagatcaccattcccaaaggcaaagattacatgaggagtggttgctaagagagcagaaggcacaagaagaattcagaat

SEQ ID NO: 490724 - DNA, 75 bp, Homo sapiens
cactgattcacaggggagcaggcggaggcaagggctgacgtgatggcagacagggttccccgctgcccggtctgc

SEQ ID NO: 490725 - DNA, 51 bp, Homo sapiens
ggcagccaggctgaggcctaatgcagaagctcctcctggggtagagacaga

SEQ ID NO: 490726 - DNA, 99 bp, Homo sapiens
cctcgaggcctggtggctaccggctcttttcatcttcacggccacccacagaaatgaagcagagtggcctagcgcttctctgaagtagctttggaaagt

SEQ ID NO: 490727 - DNA, 100 bp, Homo sapiens
accgagagcgtgaccgagagcgcgaatatcgtcatcgttagaagacctcgaagtagggggaaaactgcagtggaagatgaggacagcatggatgggctgg

SEQ ID NO: 490728 - DNA, 75 bp, Homo sapiens
aaagggccaacttaccaacataggtgacttcatggtcatgacgattttcttcaatgtgagcaggcggtttggcta

SEQ ID NO: 490729 - DNA, 88 bp, Homo sapiens
atgtttgtaaattctccttttaccaagtctgcgctcctcagaccaccggcaggtgaacagcctgatgcagaccgaggagtgcccacct

SEQ ID NO: 490730 - DNA, 74 bp, Homo sapiens
tttgaaggtggaattctcatcaacagttgtggaatatgaaatggtggagtcaatgaagaaagtagcagggatgg

SEQ ID NO: 490731 - DNA, 82 bp, Homo sapiens
tacactgctggaccagagatacttctcagggctaggtccagccggccggtgagcgcctggggaccgcagaggtgagagtcgc

SEQ ID NO: 490732 - DNA, 75 bp, Homo sapiens
cgggctcaggcccagcagggccatcggccatacttcctgaaaaaatgtctccaccagctcctggccgggttcgag

SEQ ID NO: 490733 - DNA, 101 bp, Homo sapiens
ggtggaggtctgcgttgctcttgcttttcctcgctggggtgtacgtttgaacgccatgaccctgtggatgggagaattactgagaggcagtttggtggcat

SEQ ID NO: 490734 - DNA, 76 bp, Homo sapiens
cctgaaccccaaggccaaccgcgagaagatgacccaggctgagcggaaggaggagaaaaaggcggctgcccctgct

SEQ ID NO: 490735 - DNA, 100 bp, Homo sapiens
ggatctttccctggaggaaattcagaagaaattagaagctgcagaagaaagacgcaaggagcttctggaagaggtgaagaaggaattgcagaaagtgaaa

SEQ ID NO: 490736 - DNA, 75 bp, Homo sapiens
ggagcttcaaacccaaagaggtaagcattcagaaataaactatcaatcttgcccagactggagaaaggactgcag

SEQ ID NO: 490737 - DNA, 100 bp, Homo sapiens
cctgactgttttttctgtttctggccatggaggaagagaaagatgacagcccacagtatgacgccgtgcccatccagtccagcgtggtgttatgttcctg

SEQ ID NO: 490738 - DNA, 51 bp, Homo sapiens
accgcaactctcagttcgagagtaaagaacaagttgaaatcatcgcagaag

SEQ ID NO: 490739 - DNA, 98 bp, Homo sapiens
gctgcgcaggataaaaggcaaactcttcacctggtgaaaggtgtagcagtcactcggcctacacccacagcatcgaccttgtgaacccagcgacctga

SEQ ID NO: 490740 - DNA, 98 bp, Homo sapiens
agaggattggtcctgcttttaagcctagctgaaattcttttcaaggtgatcccattaagatactaatgccatcactgtctcctacaatggaagaagga

SEQ ID NO: 490741 - DNA, 82 bp, Homo sapiens
tcgcgggtcctcgtggatcagactacagtgtgtcccggcatggatatccggaacaacctcactaggttgcatgagctggaga

SEQ ID NO: 490742 - DNA, 82 bp, Homo sapiens
aggacccgaagcctaaattccaggaggaaaccaaggtgtatgttggtaacctgggaactggcgctggcaaaggagagttaga

SEQ ID NO: 490743 - DNA, 100 bp, Homo sapiens
cgggagagcgcgcctagccggctcgcgatcttgctctgttgcccaggctggagtgcagtggtgccatcatgccaacctcgacctcctggacttaagtgat

SEQ ID NO: 490744 - DNA, 101 bp, Homo sapiens
acaacactgaaaaaaattatatttatagatagcacctggaaccaaacaaacaaaatattcactgatgagcgacttcaagaaacccgggatggacgtggccg

SEQ ID NO: 490745 - DNA, 75 bp, Homo sapiens
cacgaaccccctcaaccggcagaaactggacagtaagaaacttctagcaaattgtggctactaatttgccccctg

SEQ ID NO: 490746 - DNA, 82 bp, Homo sapiens
gggaagatggcgccagcggtcaagagcgaggtcaagtttacccatgggggaactggttccagccaaaccgcaccaacctgtg

SEQ ID NO: 490747 - DNA, 75 bp, Homo sapiens
acttgtgaaccctaattttaaagggtgggccaggaggcagattctcatcagatttggaaggaagcaaccatttgg

SEQ ID NO: 490748 - DNA, 75 bp, Homo sapiens
cacgcagatgctggagaagtccccttatgaccaggatatggaggcacagcaagttaatgaagcagaatcagcaag

SEQ ID NO: 490749 - DNA, 51 bp, Homo sapiens
ttaaagttcacacagttcctaagccagatttatacctaaaactggaagatg

SEQ ID NO: 490750 - DNA, 75 bp, Homo sapiens
tgtagcaaggaagaaattgttcagttcttctcagttcttccccaacggctacgccttcaccaccggctctgacga

SEQ ID NO: 490751 - DNA, 89 bp, Homo sapiens
ccagacggctcacctgtgcgggatggaacaaaaggatggagagcaatacatcatcatctttggagaatttagcgacggcgcctgtgaac

SEQ ID NO: 490752 - DNA, 50 bp, Homo sapiens
cgtcgtctatgggggctactcgaaacagcagacggttgatgatgaagcgc

SEQ ID NO: 490753 - DNA, 90 bp, Homo sapiens
cttctgcagccactgcaccgacttcatctgctctctcttccgaatttgtaatgaaagatttactacacaaagggaagagtaatacaggag

SEQ ID NO: 490754 - DNA, 104 bp, Homo sapiens
aaatcaagatttaacattccaacacataaaaattatttatccaacagctcctcccagctacaagagactgtgaaaaggaagttggaaggagctcgatcaccact

SEQ ID NO: 490755 - DNA, 98 bp, Homo sapiens
tggggaaaatctccccggtgactttcaggtttcttgagtacaggcgatcaggctgcaaaggggaactatggactccttgatctcatacaagctttaag

SEQ ID NO: 490756 - DNA, 100 bp, Homo sapiens
tctcaggcttactgtggatctggattctaaggcaacacttccttgaagaaacaagcttacagatctaagctggaaccagaaccaaatacaaagacaagag

SEQ ID NO: 490757 - DNA, 100 bp, Homo sapiens
ctctttttcccccttgcctggctcctgtggtggcaggctgggcacgaggaccatgctgggccggagcctccgagaaggagactcatgcatctgtatgccg

SEQ ID NO: 490758 - DNA, 83 bp, Homo sapiens
aaactgttgtgcctcttcatattggcgatcctgttgtccccatggctgggggttatggagtgatgggtgacgatggttctatt

SEQ ID NO: 490759 - DNA, 112 bp, Homo sapiens
ccagcccgacacgccgcagccagcagcaccctccaatggcatcaccatgtacggggccacgcagtcacagagtgacatgatgaacgactttcgaagtaaaatgcaatcaata

SEQ ID NO: 490760 - DNA, 100 bp, Homo sapiens
ggggaaaataatccagagatttccacagaaggactgggatgatacaccttttccacagggaattgagttgacctgcctagagctggaacgttacctccag

SEQ ID NO: 490761 - DNA, 74 bp, Homo sapiens
aggagccgagcatctgggccgagaccattccgtatggagagccggcttcccttgccagacaattcctctgtcgg

SEQ ID NO: 490762 - DNA, 100 bp, Homo sapiens
gaggcgcctcgggtccccgcaccacctcctgctgccttcccgtcgccgctcccgaagcttttccagctggccagctcagcgtccctggaagggaagggac

SEQ ID NO: 490763 - DNA, 90 bp, Homo sapiens
cgaaagcggagagatgctgggcgtggcggccgggatgacccacagagaagatggcgaattagaagatggtgaaatagacgatgcaggatt

SEQ ID NO: 490764 - DNA, 100 bp, Homo sapiens
gtggcctgtgactccgtgagcggcgagtgtgggaagcggtgtcctgctggcttccagggagaggactgtggccaaggttgaaatgttccttcttgcctat

SEQ ID NO: 490765 - DNA, 99 bp, Homo sapiens
gccctatacacccatctccagcgatgatgacaagggcttcgtggacctggtcatcaaggaaggcgggtgatgcagccgcagatcctggaggtgaacttc

SEQ ID NO: 490766 - DNA, 90 bp, Homo sapiens
gagagtcggaggccaaacacaccgtatttcatctgtagcattcaagacttcaaactggaagccattaatttgctagaaccaatgacaaac

SEQ ID NO: 490767 - DNA, 100 bp, Homo sapiens
aagccgtttccaaggcaacggaccaggaagcgcgcaagacgtccgccgcagagctcttcagaaaccaggctgctttcaggaacattgctgtggattccca

SEQ ID NO: 490768 - DNA, 75 bp, Homo sapiens
tggactgtcaatcttagatagattcttcaatgataagtgtctaaggcagatgggaaaactcatgacagaatgctg

SEQ ID NO: 490769 - DNA, 104 bp, Homo sapiens
cgagatctagaatcaactgagagagatgcttaaaaatcaccagttactttaatgagttggaaaagagactgttcaaaccactgaggatcagattttgaagagag

SEQ ID NO: 490770 - DNA, 106 bp, Homo sapiens
aaatcagaagacatggattttgagaataaagatgattatgatagagacggaaactgccatagtcaaggtaatgaggagtacctgatcaatctgatagactctccag

SEQ ID NO: 490771 - DNA, 100 bp, Homo sapiens
aagactcatgggctctcctccagctcctcaagagttactgatctatgaaatggcagagaatggaaaaaattgtgaccagagacgtgtagcaatgaacaag

SEQ ID NO: 490772 - DNA, 90 bp, Homo sapiens
accagtcttccctggcaagattcttctgaattgtgctgccttggccaaaagagaaatgaagctgttgtcatttctggaaggaaactggcc

SEQ ID NO: 490773 - DNA, 100 bp, Homo sapiens
caaaaatgtctctctatccatctctcgaagacttgaaggtgctggagaatctggtaaaagcaccattgtgaagcagatgaggatcctgcatgttaatggg

SEQ ID NO: 490774 - DNA, 50 bp, Homo sapiens
cagtttctgaggaatttcatcagcttaagagttggacagtggaggacctt

SEQ ID NO: 490775 - DNA, 100 bp, Homo sapiens
agaagggacagtttgtgccagctctccagagagaaaagcttgcccagtttcgacaaagaaaagctcagtcggatgggcagagtccttccaagaagcagaa

SEQ ID NO: 490776 - DNA, 100 bp, Homo sapiens
gcaggggccatcgctgccgtctttcacacactgataggttctaaggcccagcagctactacaaggattgcaagccagtgatgaaagtcaacagcttcagg

SEQ ID NO: 490777 - DNA, 116 bp, Homo sapiens
agtcagtgtgacagtccatatgtaaccaaatattatggatcctatctgaagatgccttcaattaagttgcagagttctgatggagagatatttgaagttgatgtggaaattgccaa

SEQ ID NO: 490778 - DNA, 74 bp, Homo sapiens
gtggagctggagcagatcccccagccggctgagacagggtttagatgtagattctctggtcattgagcatatcc

SEQ ID NO: 490779 - DNA, 75 bp, Homo sapiens
ccagggaagttcctttttgaagtagttccagttgtcacaggtagtactgatggaattggaaaatcatatgcagaa

SEQ ID NO: 490780 - DNA, 100 bp, Homo sapiens
ggatcatggcggatggccccaggtgtaagcgcagaaagcaggcgaacccgcggcgcaataacggggaggacgaggaagaaacgaacgtgatagttctcag

SEQ ID NO: 490781 - DNA, 90 bp, Homo sapiens
acaataccaggcatacatttggcagaataaatgaaccaggggtgctgagttcttcacctccttttagactgagatctgccaagttttccg

SEQ ID NO: 490782 - DNA, 75 bp, Homo sapiens
tctttccgccctaatggaggtctccagtttcgacagcccacctgaggatattgaccataaggactcatatctcat

SEQ ID NO: 490783 - DNA, 75 bp, Homo sapiens
cgacgacgaggaagaggaggtttctgaggaggcaagtgaggcctatctggttggcctttttgaagacaccaacct

SEQ ID NO: 490784 - DNA, 91 bp, Homo sapiens
tgttctccaaataccagctcgacaaagatggggttgtcctctttaagaaggaaagaattgggatgtgaatgccgccctcagtgattttgaa

SEQ ID NO: 490785 - DNA, 121 bp, Homo sapiens
tttactaacctcgtgagaaaagctttacgtctcattcaagaaaccgaagtgatttccagaggatttacacttgagttattctccccacctcagaagtaccagcttttggtgtatcatgcag

SEQ ID NO: 490786 - DNA, 100 bp, Homo sapiens
aaaaatttccgtggccagtgttcagctacagcttccttaatggtccttcggcatttggtccactttggtgccatgaagacatcacacctaaaaatcaaaa

SEQ ID NO: 490787 - DNA, 100 bp, Homo sapiens
gcggcgggacagagcgcctgcgaccccagtcggtgctccggggaggtcacctgacgaggagagactcagagccttggggcactgagggatgccagttctg

SEQ ID NO: 490788 - DNA, 100 bp, Homo sapiens
ttacactggaggaaggaaaaggagaccttgaggaatatggtcaggtgaccaagaatatggcccaggtgaccaaagccctggacaaggccctgagcaccat

SEQ ID NO: 490789 - DNA, 76 bp, Homo sapiens
aggctctggatatgcttgacgcggaaaaatctgctatattaggtggtgttatcaaggagaagaaattcctgccttg

SEQ ID NO: 490790 - DNA, 75 bp, Homo sapiens
cacggaggtagtcatgatctatgacgccgagaagcagaggccccgaggtgctggagaatctggtaaaagcaccat

SEQ ID NO: 490791 - DNA, 74 bp, Homo sapiens
agggacagcacctcatcccctggatgggggaccacaagatcctcatcgacagttggaatcgaagcctcttaaaa

SEQ ID NO: 490792 - DNA, 100 bp, Homo sapiens
gaacaaggcaactgttcaaccaggagaaaagacagcaatggaccgaggtttgccatgcagaacttgaattggggacttgttttcaagcagtaaatagcag

SEQ ID NO: 490793 - DNA, 83 bp, Homo sapiens
aaaatttagtagctcacaaggacattgctaactggtggatgaaaatactaggaaaagtttatttaagttacgttctacatggg

SEQ ID NO: 490794 - DNA, 100 bp, Homo sapiens
ccgccctgcgccccgctctgctgtgggcgctgctggcgctctggctgtgctgcgcgacccccgcgcatgtgaatgtggtggaggcacttcaggaattctg

SEQ ID NO: 490795 - DNA, 100 bp, Homo sapiens
ggttcataaccagaaagtagaaattctgagaaaaatgttacagaaagaacaggaacggctacaggtgctgtggctgtagctgacctctttggaccgggat

SEQ ID NO: 490796 - DNA, 98 bp, Homo sapiens
tatgatgctgatggtgatggagattttgatgtggatgatgccaaagttttattagactattgcccagaagaaaagatgtttggttttcacaagccaaa

SEQ ID NO: 490797 - DNA, 83 bp, Homo sapiens
gggatggcgtgcagcgcaaccacgagacggccttccaagttggctggatctattattggcaaaggtggtcagcggattaaaca

SEQ ID NO: 490798 - DNA, 75 bp, Homo sapiens
gtgctcaacttggtttaggagagataatcctggtcctctcagggtgcgccatcattgtccgaggtcagcctcgtg

SEQ ID NO: 490799 - DNA, 50 bp, Homo sapiens
gcgatcgagaaagtgcgcaaatgtgtctccagaacgctatagctatggca

SEQ ID NO: 490800 - DNA, 100 bp, Homo sapiens
gtgctaagtggatcctctggccagctgactgcacttcttttttgagaaaggaaggaatatatcctgactgattgaagtttgtggtatatgaagtattgcg

SEQ ID NO: 490801 - DNA, 90 bp, Homo sapiens
gtgatggagtgtcacacgtttatgcaggagagaagaccaagaggtcggagaagaggtagaaaatgtggcagaggccataaaggagaaagg

SEQ ID NO: 490802 - DNA, 97 bp, Homo sapiens
cctgaagaacgttggggagagtgtggcagctgcccttagccctctgggagtacgaccccagcaaagcgacctttgtgaaggtggtgccaacccccaa

SEQ ID NO: 490803 - DNA, 101 bp, Homo sapiens
gggcgatgctgggggctttccggtcggggccgcagccgcttccggagccgcgggcgagaaaagacagctttgatttctggctgcaaaaaagatatgaggaa

SEQ ID NO: 490804 - DNA, 100 bp, Homo sapiens
aagaaagatgattccttcttggggaaactcggagggaccctggcccggaggaagaaagccaaggaggggaaattcaactactgaggaggttacggcacaa

SEQ ID NO: 490805 - DNA, 98 bp, Homo sapiens
ggcgctggccgagagccgcggctccgtgtttctggaaagtgacagcagggagattctccaactaaatggcggacggaagattttcgtatgttcaaaaa

SEQ ID NO: 490806 - DNA, 90 bp, Homo sapiens
cagaaatctgttctacaggaagatgctgagaaactgcggaaagaattgcatgaagggcaattgaaggaacagactaaaaatcgtgtcctg

SEQ ID NO: 490807 - DNA, 100 bp, Homo sapiens
gcctccaggatgcgctgagccctacaacacccccagcggccgccggctcccccacgagctctcgtggcattatccttcagtggggctattggactgactt

SEQ ID NO: 490808 - DNA, 100 bp, Homo sapiens
ctatgggccgctgtcagggctcgaggatgccagtttttagggccaggatgagctgacaactaccaagaggagttacgaggatcagttaagtatgatgagt

SEQ ID NO: 490809 - DNA, 75 bp, Homo sapiens
ttttcttccttctgtcacatcacacccaatggtaacctgtgtatggtgactggaggtgctaacctaggaagaatt

SEQ ID NO: 490810 - DNA, 75 bp, Homo sapiens
ctgatcaactctcctaaagatgcatcttcctccacattccctacactgaccagggctatcattaagaaggcttcc

SEQ ID NO: 490811 - DNA, 99 bp, Homo sapiens
agcctcctcctcaactttatgattgctgcatatgacaggctggattctagtgacatttataacgaattgaaagaaacatatcctaattatcttcctctg

SEQ ID NO: 490812 - DNA, 97 bp, Homo sapiens
tggagaaagtcgtcttccacttgcacgaaagctttcctaggccaaaaagagatacttggcatatcgaaattttatgattgacacgtatcgtctaaac

SEQ ID NO: 490813 - DNA, 100 bp, Homo sapiens
taaccggaatgaaggcccattggtatatattcaggaaattattcctggaggagactgttataaggtttgcccaaaggaccagccaaaacctcacctcaag

SEQ ID NO: 490814 - DNA, 100 bp, Homo sapiens
ctgcaaatcgactgtctggctgcctgggacagccgctcaggaagcaatcttgcatgcgtctggaaatggcacaaccaaggactactgcatgctttataac

SEQ ID NO: 490815 - DNA, 100 bp, Homo sapiens
cgcggggaccgctgtgctctcggttccgtcagccctggcgcccaggcgcatctgactcggcaccccctgcaggcaccatggcccagagccgggtgctgct

SEQ ID NO: 490816 - DNA, 75 bp, Homo sapiens
caagcgacagctgtcagaggggcaggagcttctgggagccaccgtctgaaggttcgagaacttgtcttggacaat

SEQ ID NO: 490817 - DNA, 92 bp, Homo sapiens
cactccgcccggccccagccctagcgctggccgcgaccccggcgggacaagaatccttcaagaaacaggaaaaaactcctaaaacaccaaaa

SEQ ID NO: 490818 - DNA, 75 bp, Homo sapiens
atttctggatatgtgcatggatctgaaagttcatcctgaacaggaaaaggctcgattccttttgtccaaagtgaa

SEQ ID NO: 490819 - DNA, 99 bp, Homo sapiens
gcgaacctcacctttccagggcgcaaggaaggcagcaacaactcatctccagtggattttgtaaataacaagaggacagacttatcttcagaacatttc

SEQ ID NO: 490820 - DNA, 98 bp, Homo sapiens
tcctggcctgttgcagccatggtgcattgcagttgcgtgttgttcagaaagaatgtgaaagatgttgcagaagtgttccagaagtggctgaagataga

SEQ ID NO: 490821 - DNA, 97 bp, Homo sapiens
aacctgggtgctgcaggtgttcaagtgcagggagttcccgttacaatcactagtgttgcagaggatgaaagtcctggacagacttatcacagagaga

SEQ ID NO: 490822 - DNA, 96 bp, Homo sapiens
gagctctgccaggcagaaggcctctctcctgatacagcaggcgctcaccatgttccctggaggaatcagagatcattgatttcttcctgggggcct

SEQ ID NO: 490823 - DNA, 98 bp, Homo sapiens
caagaagagcagttcccaggatctgcataaaggtcctggcattgatgtgcctgctccagacatgagcacaggtgagcgggagatgtcctggatcgctg

SEQ ID NO: 490824 - DNA, 82 bp, Homo sapiens
agcggccgggactctgaactatggcgggggtgcactatagccatctggagctgagccctggggagccagtgcaggaggggga

SEQ ID NO: 490825 - DNA, 90 bp, Homo sapiens
atgtgccacgccgcccaggagacccctctgctgcaccacttcatggtccgcaggggtggagcagctcatgtacatcaaggaggacttgat

SEQ ID NO: 490826 - DNA, 100 bp, Homo sapiens
actgaggcacagagtgaaggggaggtgccagcccgcgaatccggccggaggcgaagatgaagagatggctgacccaatggaagatgtgatcatcaggaat

SEQ ID NO: 490827 - DNA, 83 bp, Homo sapiens
atcgggcactacctgatttcaaaggatttcttacaatctccagctacaacctgcttagcttgctactcagtacgtgaattagg

SEQ ID NO: 490828 - DNA, 111 bp, Homo sapiens
cagctatctgcccggaggcaccacaggactgcagctccccagcacggtactgggcctaatcgctacgtgcctctttggctatgatgcctatgtcaccttccccgttcggca

SEQ ID NO: 490829 - DNA, 101 bp, Homo sapiens
gcagttcctggtttgcctggtggtagccatttgtctcctctctggtgtgactacaacccagccccatgcaggtgccagtgacggggtggcccgtgagctga

SEQ ID NO: 490830 - DNA, 96 bp, Homo sapiens
cagaggaggcgggggcagccgctgagacggtttttcacaaggtacctggaatggaaacacaaaagtagccataaagactcttaaaccaggcacaat

SEQ ID NO: 490831 - DNA, 100 bp, Homo sapiens
cggcgaccggggggacagcggagaggaaggaggtggccaggtggaagtaaaatctgagaagcttgacttcaaggacagagtccagtcgaagattgggtcc

SEQ ID NO: 490832 - DNA, 128 bp, Homo sapiens
caaggacctggaggaaagtggatgatcccttcagaggctaaagagtccatggataagaacaagatgggcttgaaagtggcaccactgcaagtggaggtgagaacgagcgtgaggacctggagcaggag

SEQ ID NO: 490833 - DNA, 100 bp, Homo sapiens
cgaggaatggcggtatttgtgagaggagtcggcgtttgaagaggtggaactcctagggcttttttgagagtgaggagaaggcagagcccccccaggctat

SEQ ID NO: 490834 - DNA, 82 bp, Homo sapiens
tctcaatatctgtcttcggtggactccttcggcagtccacccaccgccgccgcctcccagctcttttgaaacagatggtcac

SEQ ID NO: 490835 - DNA, 90 bp, Homo sapiens
ctcagcgtctgcacatccctacaatggctaaaacagcaatggattctggaacttttcaaagcctgactctcttcttgaaacagtggagca

SEQ ID NO: 490836 - DNA, 96 bp, Homo sapiens
gatacacaggcactacgagaatggagtttagaagaaggtcagagccctgggcagtgttgggccaggctttagggatatgttgggcctgaccaagcc

SEQ ID NO: 490837 - DNA, 78 bp, Homo sapiens
atgaccctgaaggtccaggagtacccgaccctcaaggttatgaagacagtatggagtttccagaccatagtagacatt

SEQ ID NO: 490838 - DNA, 74 bp, Homo sapiens
ggaagagaaagcgaagccagtaccagcgtttcacctaccttcccgccaacggtcccatacccgcgctgctcatc

SEQ ID NO: 490839 - DNA, 51 bp, Homo sapiens
gctgcctcattcttccatcctcagaacgtatcgtcagatcctggaaaaagc

SEQ ID NO: 490840 - DNA, 82 bp, Homo sapiens
tccctgcagccttctggtataccatcgtcaccatgacaacactaggacctgcctagagctggaacgttacctccagagcgag

SEQ ID NO: 490841 - DNA, 75 bp, Homo sapiens
aaatttggagtgtgcgtgcgcgccgagcggtggtcattgggactcccacacttaaacaaagaaaggaaattctgc

SEQ ID NO: 490842 - DNA, 50 bp, Homo sapiens
ccgagctggacccggaccggttttgggggggcaacaacgccggccacacg

SEQ ID NO: 490843 - DNA, 58 bp, Homo sapiens
gcaggatcctgatgccaaagtagcttgtgatttgttcccgacaaggagttttctggtt

SEQ ID NO: 490844 - DNA, 100 bp, Homo sapiens
ttcgggcatgttggcagtacgactgccagcaggggtgagctcttcctcttctggaacctctataaaggaattgatgagtgccatcagaaagctgtatcat

SEQ ID NO: 490845 - DNA, 100 bp, Homo sapiens
gtgctgcccgagacctgtgaggagctcaagaggggccttggcgatgaggacggctccaaccccttcacgcaggacctcattgctgatttaaagtatgaat

SEQ ID NO: 490846 - DNA, 75 bp, Homo sapiens
cggtgctgcagacggcgagacctcctgcacaggaaactactttgcttcgcactttttcatgggaggagagaaatt

SEQ ID NO: 490847 - DNA, 82 bp, Homo sapiens
cgggatccagagcgccgcgcacttcgtcatgttcttcgcgccctggtactccaaagattcaggtttactcacgtcatccagc

SEQ ID NO: 490848 - DNA, 100 bp, Homo sapiens
gtacctcaatagcactggctaccggacaggccacctgaaccccatgtcgtacacccagcactgcatcaccaccatggctgctccctcctggaagtgcttg

SEQ ID NO: 490849 - DNA, 100 bp, Homo sapiens
gtgaccgagagcgtgaccgagagcgcgaatatcgtcatcgttagaaggtcgatggccaggtggtcttcataaactatactgccttgtgatgcctccctag

SEQ ID NO: 490850 - DNA, 100 bp, Homo sapiens
gccacgccgcccaggagacccctctgctgcaccacttcatggtggctgagcatcggagtggagttcgtggggaactgcgtggtgctctttgctgcactat

SEQ ID NO: 490851 - DNA, 90 bp, Homo sapiens
atggaaagcgaccccggggtcttcaccgagctcattaaaggattcggatggagagcaatacatcatcatctttggagaatttagcgacgg

SEQ ID NO: 490852 - DNA, 98 bp, Homo sapiens
gccgccgcccctgttgcgatggcgcagaaaccccgttgacaaggcactgctttttcatgacggggtaccagctgtggttgtgaccatcatcctgacta

SEQ ID NO: 490853 - DNA, 74 bp, Homo sapiens
cccagtcgctccagccataaccactgaggccacagcacagtgcataccaggtcctcgaggccacacgggttaat

SEQ ID NO: 490854 - DNA, 92 bp, Homo sapiens
gtccgcatcgcaaccaccgccctggccatctaccatgtggtcatcgacatcctgagggggaaggccacccggcctgcttccacctcccagcc

SEQ ID NO: 490855 - DNA, 75 bp, Homo sapiens
cttggtggagcagctgcctgggagaatgttgactctactgcagttctgggaggtgatctctgatgaacatgccat

SEQ ID NO: 490856 - DNA, 90 bp, Homo sapiens
catcaagcccatgcgggaccagatcatccgcgtgaagcggcatttccggagagttcttttgaagtcacttcagaaggatctacatgagga

SEQ ID NO: 490857 - DNA, 100 bp, Homo sapiens
gttgcttctcctcaacgccatccacttccaggatcctatgcctgtgactcagaaggaacaggaaaacaaatccaatgcatttccctctacatcatgtgaa

SEQ ID NO: 490858 - DNA, 100 bp, Homo sapiens
ggtgctgacaggccagtgggaaggtgagactgctgctcctcgggccattttgaccggccatgactatgaggtcacatgtgctgcggtgtgtgcggagcta

SEQ ID NO: 490859 - DNA, 100 bp, Homo sapiens
ctggaacccattatggtcctttctggtctggaactggccacaacttttgagcacttctatcaataccccagaatcttccatgctccgtcacactgcagcc

SEQ ID NO: 490860 - DNA, 75 bp, Homo sapiens
agacttctgtacagaagagagttgtccagtgatgtcagctggcccaaaatgcacaagtctggcgttctgaggaag

SEQ ID NO: 490861 - DNA, 100 bp, Homo sapiens
tccgagggatcactatgaaatccagtgccatttccctacattatgcaacagaaatggtggagtcaatgaagaaagtagcagggatggatgtggagctgac

SEQ ID NO: 490862 - DNA, 75 bp, Homo sapiens
gacattctcccctgcctggatggatacctgaagacttcagccttgtcagatgacaggatctatgcaactaaccca

SEQ ID NO: 490863 - DNA, 74 bp, Homo sapiens
tgaagaggacagcatggtgggcaccctctatgacaaggtgaaagtcaatataataggagaagtggttgaccagg

SEQ ID NO: 490864 - DNA, 75 bp, Homo sapiens
caggggggcgcctacggacggagccatgggaccacaccaccaccaccacaaccaataggccaggaaccaccagag

SEQ ID NO: 490865 - DNA, 90 bp, Homo sapiens
ttagcagtagactgttggaagtaagaatgcatctactcatgcctcgaaatctcctgacagtgttaatggaagtgaaccaagcattcctca

SEQ ID NO: 490866 - DNA, 82 bp, Homo sapiens
ctgcaaccgcaacatcgaccagaccatgctctccatcctgctcttcttccacagctggagcagatccgcagggacatccgag

SEQ ID NO: 490867 - DNA, 101 bp, Homo sapiens
tgcacgcaagatgaaatttgctctgctaaaaggctccttcagtgagcaaggcatcaacgagtttctcaggctaaagaattacctccaaagccattgtcaag

SEQ ID NO: 490868 - DNA, 100 bp, Homo sapiens
gaaatcctaaaggccgcggagtcggcggtgttgtaggtagcggtaccttgagtggcaacaggtggccctcatgacactgacgctcttcccggtccggctc

SEQ ID NO: 490869 - DNA, 100 bp, Homo sapiens
gcggacacgccagaggaggaggccggggaatggccgcggtgtggcagcaagtcttagcagtggacgcgagcttgaaatggcgattgaaaacctccaaaaa

SEQ ID NO: 490870 - DNA, 89 bp, Homo sapiens
ccagaaggagtgcttctaccagcccatgcccctgaaggcctcgctggagatcgagtaccaagagtacgagacccaatctagtgcagaag

SEQ ID NO: 490871 - DNA, 50 bp, Homo sapiens
ttcagagctgcaaaattatcagcaatctgcacatcgtgctgccacacgag

SEQ ID NO: 490872 - DNA, 100 bp, Homo sapiens
ctggagtacctgtccctaacgttcttgatctctgtgaagattcaagtaccaaatatgccccaacagcggcaagaccagcatcatcagagtgccatgatgc

SEQ ID NO: 490873 - DNA, 98 bp, Homo sapiens
acgcccagaataaagccaagctcatctctgagacccggaggaggttcgaagctgagtatgtgacagaataagaaagccttgagttttgtgaaaaaccg

SEQ ID NO: 490874 - DNA, 98 bp, Homo sapiens
ggatgacaccggagtttgacgaagaggtggtttttgagatgtattgtagaaactgaaaatttagaagaaagagtagctgtggtgagtcgaattattga

SEQ ID NO: 490875 - DNA, 88 bp, Homo sapiens
agaactacctgagctacctgacagccccggattattctgcctttgaagctatgtccaaactgggtcttcggcaggttacaggagttac

SEQ ID NO: 490876 - DNA, 50 bp, Homo sapiens
ggatgaaatacatcgtgagaagagagacaattcctcctcgcttcaagaag

SEQ ID NO: 490877 - DNA, 101 bp, Homo sapiens
gcaactactcacgctcctacgggacgaggagagggaggtgaatccgtggcagagacaattgtggcaattaataaagacccagaagctccaattttccaagt

SEQ ID NO: 490878 - DNA, 82 bp, Homo sapiens
cgaggaggaagacgaatcgttaaacatctgaaagggtcagggggatatgagactttctactcggaatatcctgagtgttgcg

SEQ ID NO: 490879 - DNA, 95 bp, Homo sapiens
cccgggctagcagagcggaggcgctgccacgaaactcgtacctgcggctaagagcagacataacccacagttatcttgaacaagaaactacgggg

SEQ ID NO: 490880 - DNA, 82 bp, Homo sapiens
aggaggccgagccgggatctcaggtcctcgggggcggcggccacgccaaggacggtccatgatggcagtgaagaagaagacg

SEQ ID NO: 490881 - DNA, 100 bp, Homo sapiens
ataaacttgtggatggacttgctacctcttgggtgaactctagcaattacaaggttaaacccatccagagtaatggctgcggccttacccaggaccctgg

SEQ ID NO: 490882 - DNA, 75 bp, Homo sapiens
aagagcgctcccaggagaaacaatctcggccacctgtgaccacctccaatgccatccctcctgctgtggtagcaa

SEQ ID NO: 490883 - DNA, 100 bp, Homo sapiens
cccagatgttcagaatgaatgtcggccctgccatgagaactgcacccaggggagacgaaaccagacagagggtcaagtttacagatgaccgtgtctgcaa

SEQ ID NO: 490884 - DNA, 74 bp, Homo sapiens
atttcccaagagcagcggaaaatgatccagtcacagagtttattaaccacttaacctctcagaactgaacaaag

SEQ ID NO: 490885 - DNA, 100 bp, Homo sapiens
gatggttcttctaaatgaagcagcaacttcgaaaggcgatgttggaaaaagacggaggccaatgcaggaaaccatctatgacttctggaggatggtgtgg

SEQ ID NO: 490886 - DNA, 88 bp, Homo sapiens
ggacagttcgctacacagcaatgcatcgagaaacctcattgccttctctgaagacggctctgacccctatgtccgcatgtatttatta

SEQ ID NO: 490887 - DNA, 50 bp, Homo sapiens
acaagatggtgcagaagaagaacgcggtgctgctggtgagtagcagccgg

SEQ ID NO: 490888 - DNA, 75 bp, Homo sapiens
tggaaaaggactttgctgctgagctatcagaggactcctgaaacctggagagctacctgctgtataaaggctggc

SEQ ID NO: 490889 - DNA, 100 bp, Homo sapiens
ccggaaccactgcacgacggggctggacgtcatcatcagatttgaaatatttaaagtggatacaaaactatttcagcaatgcagacaattaagtgtgttg

SEQ ID NO: 490890 - DNA, 96 bp, Homo sapiens
catgaagcatctgaaaaagctgtggaaggctctggataaggaccagtacctgcccaggaaactggatggcttctggaaacttacaccagaactggg

SEQ ID NO: 490891 - DNA, 83 bp, Homo sapiens
aagaagttgcgaaggatccccaacggggaggccaacgtgaagaagtcttgaggaccggcccagctcaggctcctggggcagcg

SEQ ID NO: 490892 - DNA, 100 bp, Homo sapiens
cgagaccgtgaccgagagcgtgaccgagagcgcgaatatcgtcatcgttagaaggttaagaaagctggaccctgaggaggaagatgattcctttaataac

SEQ ID NO: 490893 - DNA, 75 bp, Homo sapiens
ttcccggggcagatccaggttcaggttggtgttcgaggaagagacattgttgttcttggtgtggagaagaagtca

SEQ ID NO: 490894 - DNA, 100 bp, Homo sapiens
cccgcaagagcgagccgcctgccccggtgcgcagacagagctattccagcaccagcagagactcgctctccgtctccagcaatgacgccagtccacccgc

SEQ ID NO: 490895 - DNA, 108 bp, Homo sapiens
tatactttggttacctatgtacctgttaccactttcaaaagtcctcttcctgatggatgggaacaagccatgactcaggatggagaaatttactatataaaccataag

SEQ ID NO: 490896 - DNA, 95 bp, Homo sapiens
ctgctacatgcccacctgagctcgggccagcccgacacccaggctttaaaaaattggattgaaggaaatcctaaactcagttttctaaaacctgg

SEQ ID NO: 490897 - DNA, 82 bp, Homo sapiens
ggagactacgcgatgtcaatcatgaaaaagcacgccacaggtcatcatctggatcatcccattctggttcccgttcaagttc

SEQ ID NO: 490898 - DNA, 100 bp, Homo sapiens
gactccttgggggtcgagcacataacggggttcgggtgtctcgtgtgtgaacatcacaggactcacaccacccggcaagaactgctcactacggctccct

SEQ ID NO: 490899 - DNA, 75 bp, Homo sapiens
cggatctgcatgccgctcaccgtagacgagatccaaaaagttggcagctcttgcagaagccttaaaggaagtctc

SEQ ID NO: 490900 - DNA, 75 bp, Homo sapiens
tacgcgccgtgtaactgtgaatctttcaaaggaccctgatgcttggtgtgacctgagtaaatttgacctccctga

SEQ ID NO: 490901 - DNA, 75 bp, Homo sapiens
ggcgagcagaactacggcgagcggtcgcaatgtatctgctgagcaaaaagatgaaaacaaagaagcaaagcctcg

SEQ ID NO: 490902 - DNA, 100 bp, Homo sapiens
gcgctgcagcgtctccttcccgttctccagcccctatgtcaccacagtgggaggcacatccttccaggaacctttcctcatcacaaatgaaattgttgac

SEQ ID NO: 490903 - DNA, 98 bp, Homo sapiens
aaaatgtttctgtccaggcaagggtgtgtgctgaatgactcaaggattttttggtgacttttttgaacgaaccattctgtgcaacagccttgtgtgga

SEQ ID NO: 490904 - DNA, 90 bp, Homo sapiens
gcgtggaggagctgtgcagccgcgaggaggcgcgggaggtgttcgagaacgaccccgagacgggaaatcctcattgacgattcaatttgt

SEQ ID NO: 490905 - DNA, 83 bp, Homo sapiens
caaggtcaacctgggagtgggagatcctgataacttaagtgactctctcttttccggtgatgaagaaaatgctgggactgagg

SEQ ID NO: 490906 - DNA, 71 bp, Homo sapiens
cattacatcaaagacacactgaggtctgtccctgatgctgcgcgcagagcagaatgacttcattcccctgc

SEQ ID NO: 490907 - DNA, 100 bp, Homo sapiens
cgtgactctagggttagcagaaccatccaccaacataagtttcccattggtcactgtacacttggaaaagaacggaaaacagttcttccttcaaagcatg

SEQ ID NO: 490908 - DNA, 105 bp, Homo sapiens
cagaaccagtggtaattaccatcaatactatggaatgcattttgaaacttaaggatgggatacagaataactgaagtgaagtgatggactccgatttggagagta

SEQ ID NO: 490909 - DNA, 100 bp, Homo sapiens
gccctagtgacttaactgccgaaggaaaatgtcactgtcccattggccatattttaggtctgggataaaagtgaaagtggtgattggcattgtactgcta

SEQ ID NO: 490910 - DNA, 75 bp, Homo sapiens
gtactacacaaccgtctccagccttggtctgagtggactgtcctgcagtctctggatggtcgtcagatccgtgtg

SEQ ID NO: 490911 - DNA, 141 bp, Homo sapiens
ttactttcccctcttttatatgtgatggaaaatgaagtggatgccttttggtgctttgcctcttacatggaccaaatggagtctcaggagcaggggctgcggcagaggctgctggacgagcagttcgcagtgttgcggggc

SEQ ID NO: 490912 - DNA, 100 bp, Homo sapiens
atggcagctaggcaacagcagcagattgaaaatcagcagcagatgttggttgccaagggaggcgccacatccaccacctggggaaccagctgcagctgaa

SEQ ID NO: 490913 - DNA, 75 bp, Homo sapiens
gcgcacagtgatggaggagatggagtggtgtctcaagtcaaaatttcaggtgcatacattcagagggccacactg

SEQ ID NO: 490914 - DNA, 96 bp, Homo sapiens
cccgacagcgccatggcccagattctgccaattcgttttcaggagcatctccagttggtgttggtattaggagatctgcacatcccacaccggtgc

SEQ ID NO: 490915 - DNA, 82 bp, Homo sapiens
ctgagctggttgccggggcaggggcggaggcggaggcagaggtggaggcgctttgaaaggtggccctcatgacactgacgct

SEQ ID NO: 490916 - DNA, 50 bp, Homo sapiens
ttcaacctcagcgctctgaaacgagatgatgcctattggccagaaggaaa

SEQ ID NO: 490917 - DNA, 101 bp, Homo sapiens
gttctggctccttggcagcaatggctgtatttgaagataagtttaggccagacatggagaaacaagacactggccaggttcttctggatatggtgcacaac

SEQ ID NO: 490918 - DNA, 83 bp, Homo sapiens
agtggatcggggacggagagaacacgagcccatcagtggtcccaggctgcacccatggcagaaggaggagggcagaatcatca

SEQ ID NO: 490919 - DNA, 75 bp, Homo sapiens
tcccaatgcagcctggtctgaaactgctttaagaagcctctgaccctcttcaggatacacttcttgtaccagtac

SEQ ID NO: 490920 - DNA, 87 bp, Homo sapiens
gcttcttcttggggaaggtgtgtttcctcgccacaggtgtccttcagcctcaagtccaaagcctggtgacatcctcccaggtacagc

SEQ ID NO: 490921 - DNA, 75 bp, Homo sapiens
ccggcgtccagttcactactaaagtcaggtttgatgatctgatggccaacattccactgcccgagtacacaaggc

SEQ ID NO: 490922 - DNA, 100 bp, Homo sapiens
tgacaacttctgcaaggcggtttctagtgcaaatcccctgctcagggtcttcatccagaaacgagatgaatgatttcggaatcaagaatatggaccaggt

SEQ ID NO: 490923 - DNA, 75 bp, Homo sapiens
cagagcaacttgcccgcactggtgtcacagatcaggttttgcactgattgcaaaaataaagtcctccgagcatac

SEQ ID NO: 490924 - DNA, 90 bp, Homo sapiens
gtccaaaagctcaagggctccaatttgtactctcagctggaacggcaggcctggtatgcattgcctcaggaacaaaggtggctctgttta

SEQ ID NO: 490925 - DNA, 100 bp, Homo sapiens
gggttcatgttaaccaggccaaacaatcctgggtttgagcagtttaaaatgtcagaaagattgcatgggaactggatcagactgtacttggaggaaaagc

SEQ ID NO: 490926 - DNA, 83 bp, Homo sapiens
agtgggggttatggtgggaggagccgatactgagcttcttcctatttgccatgggtgccagatgtgacatccagatgacccag

SEQ ID NO: 490927 - DNA, 90 bp, Homo sapiens
aattatgatgtggagctacttcatcacaaagatgcacatgtagatttcctgaaaagtggtatttaacgttaatgcacctctgcctccacg

SEQ ID NO: 490928 - DNA, 75 bp, Homo sapiens
gggcagtgtcggaggccagcggggccggaagcggcggcgcagtgtgtcaggaagctgtctgggaagccttcagga

SEQ ID NO: 490929 - DNA, 100 bp, Homo sapiens
gaaactctaggaggtgtctttaccaaacttattaataggaataccactattccaaccaagaagagccagggtgaagttgaacaaattgctatgatgaaac

SEQ ID NO: 490930 - DNA, 97 bp, Homo sapiens
gagaggtagccatgatgccccacttggtgaatggagatgcagctcagcaggcatattaatgaggataagagaaaaacagaagctcaaaagcaaattt

SEQ ID NO: 490931 - DNA, 100 bp, Homo sapiens
cagcaatgaccttccctcgggaattccacctctgcgtttttccctccagtctttaaaccagaggagttacgccaggccctcatgccaaccctagaagcac

SEQ ID NO: 490932 - DNA, 75 bp, Homo sapiens
tgggcctggaggactgtcggctccagaaagaacaccgagttcggggagcagatcaaacgggtgaaggactcggat

SEQ ID NO: 490933 - DNA, 83 bp, Homo sapiens
cgccttcgccctttccacctcgcggcagttcggatcactactcttggaatcaaagataaatccaaatactgcatatcagaaac

SEQ ID NO: 490934 - DNA, 97 bp, Homo sapiens
aaaagcatgattccagcagggggccgagcccctgggcccccctacagccctgttcctgcacagtgacctgcccctaaaggttcatgcgcatccctca

SEQ ID NO: 490935 - DNA, 100 bp, Homo sapiens
gtctcagctgacaaaaacgggatcgctttggaaacatctttaccctgttcattgggccagagagatgtcggcttatttataggaattgcttgaagccaga

SEQ ID NO: 490936 - DNA, 60 bp, Homo sapiens
ttccggagaatactgacctggtgactttggggtgcctgactgacagaagttcttgccccc

SEQ ID NO: 490937 - DNA, 87 bp, Homo sapiens
ctttactccatgtgtgggacattcattgcggaataacatcggaggagaagaacaagattgtggaccagtgtgagaggctgcagttac

SEQ ID NO: 490938 - DNA, 50 bp, Homo sapiens
tgatgaagggagcatcattgttaagaaatatgagattacggagcagcgca

SEQ ID NO: 490939 - DNA, 50 bp, Homo sapiens
ctcccagccacaccaagttcaggtgaacctgatgcagcacatgaagctca

SEQ ID NO: 490940 - DNA, 98 bp, Homo sapiens
tcgtctccgtgggtgtggcggagcgcgcggtgcatggggtcgggccccggctcagtggtcccaggcagctcgggtgtcggaacccccagacagttcac

SEQ ID NO: 490941 - DNA, 76 bp, Homo sapiens
tgaaagtatccgtaaatggagagaagaacaaatggaacgcttggaagcccttgatatgagaccttggtggggacaa

SEQ ID NO: 490942 - DNA, 75 bp, Homo sapiens
gagctgtttgacccctttgacctcttcgatgtgcgagactttggaaagaaacgcttcgttaagggactcaggcag

SEQ ID NO: 490943 - DNA, 100 bp, Homo sapiens
ggaaagtggaggtgagggccgcccgccctagaggtgcccgtccgagaggcaggactcagtggcctctgaggatgtggctgtgaacttcacacttgaggag

SEQ ID NO: 490944 - DNA, 82 bp, Homo sapiens
tgctattagatgggcttgctgctcccgcccatctaattggctttggtctagggaaatcctcattgacgattcaatttgttga

SEQ ID NO: 490945 - DNA, 88 bp, Homo sapiens
tagatgccctattcaccacaaaggacaaggagactggctttcacagaggtttgggttgggttcagttttcttcagaagaaggacttcg

SEQ ID NO: 490946 - DNA, 75 bp, Homo sapiens
ccataaacaaaagctattacaatgtgtgacagtggtgctgtttgcagctctgaggcggcagcgaaaaaaagagcc

SEQ ID NO: 490947 - DNA, 50 bp, Homo sapiens
cttgaacattgaaatgcacaagcaggctttcggacagtcctttctccagc

SEQ ID NO: 490948 - DNA, 82 bp, Homo sapiens
gcaggtggccagagtgcaatgccctttcccggcgcctcttactaaaaaagaactgtggctgcaccatctgtcttcatcttcc

SEQ ID NO: 490949 - DNA, 100 bp, Homo sapiens
acggcgagacgcgcagcgccggcgcccgggagacccaggaggagcccgcaggatgtacagttacccagcacgtgtacctcctcctcctcctattgctcgg

SEQ ID NO: 490950 - DNA, 100 bp, Homo sapiens
gaccattcagatgggatctttccggatcaatccagatggcagccagtcagtggtggagctcacagcgctccttcaccactattacccaattgagatcgac

SEQ ID NO: 490951 - DNA, 75 bp, Homo sapiens
ggctccaggagacccacaagggcaaagaacacagtggttccactgtaccttccattttgaacaggatgcagacaa

SEQ ID NO: 490952 - DNA, 100 bp, Homo sapiens
cttctgtatcttcatggtgcggctcatcttcgagagtaacggcacagccaacaagatgaacggagctttggatcactcagaccaaccagacccagatgcc

SEQ ID NO: 490953 - DNA, 97 bp, Homo sapiens
ggtccttcatcaaccgcccgaaccagagccggaggcgggaggacgggctgccgcaggaaattcgaaatgagtcccatgactatcctcatagagtggc

SEQ ID NO: 490954 - DNA, 95 bp, Homo sapiens
tctagatgaatacccagcagaagactttactgaagtttatcttattaaatttatgaacttacaaagtgcaaggtggcccttcagaaggtttttaa

SEQ ID NO: 490955 - DNA, 100 bp, Homo sapiens
tgtgtcttccccagctctgcagccacatactatccgtttgttcaggaaccaccagtgacagagcagagattgtcaagaggctgaatgctatctgtgcaca

SEQ ID NO: 490956 - DNA, 100 bp, Homo sapiens
acttttcagagggagcttgcaagcctggctatgcttcagccttgatgacggccatcttcccccgagtttgtggtggattgtcgaaaatttttggattcaa

SEQ ID NO: 490957 - DNA, 49 bp, Homo sapiens
tcacaagattgaccacattgatcacatacgaggatgtcgtccaggaaag

SEQ ID NO: 490958 - DNA, 100 bp, Homo sapiens
gaaagcacaccaacgcaggcatttgtcttctgtccatggtgctgaagtttattcactttcaaaccactttcagtaacagcctgccagttttctccattca

SEQ ID NO: 490959 - DNA, 74 bp, Homo sapiens
ttcctcaccctcggggagcaacatggacaatgcagatcttcgtgaagactctgactggtaagaccatcaccctc

SEQ ID NO: 490960 - DNA, 75 bp, Homo sapiens
aagagggaagacacgcggaaacagactggctcttcgtggttgtggtatgcctggctgccttcctcatcttcctcc

SEQ ID NO: 490961 - DNA, 90 bp, Homo sapiens
cgcaactctacatgattgacccatcaggtgtttcatacgaaaacggacgatgtattactaagctggaaaacatggggtttcgagtgggac

SEQ ID NO: 490962 - DNA, 89 bp, Homo sapiens
taccaaattccaagtgggttgacagcaatgttcctcaagttgctccttgagggcaggacagttcttatggctttatccgttgcgtaagc

SEQ ID NO: 490963 - DNA, 97 bp, Homo sapiens
gagctgctgagttaacctagaactatcctaactcaagatttctctttataagccttccttgaatccagaagctggcaaacagcatcagccatgcaga

SEQ ID NO: 490964 - DNA, 96 bp, Homo sapiens
cgctggagctgggtcagtccgccgctcaccccgcggccgcaccttcccgccttctcagggcgctagagcaaccagccctgccgaaagcaagtgtca

SEQ ID NO: 490965 - DNA, 100 bp, Homo sapiens
tttgaagattctggccaacgcagacaccatgaaggtgctgggagtgcagcggcctctcctacaggagccagcaccgctctttgaccttgccatgcttgcc

SEQ ID NO: 490966 - DNA, 100 bp, Homo sapiens
ctacctcctcgtgctcagcctggcgccggagctgaaacacgacgtgaagatttttcggacgccgcccgatactacattccctgagcccacctgcctgtca

SEQ ID NO: 490967 - DNA, 74 bp, Homo sapiens
acttgaaaatatcttttggccaggtcctactgctctgttggctcatgaaataggttttggaagtaaagttacaa

SEQ ID NO: 490968 - DNA, 98 bp, Homo sapiens
tgcccccgttgtcaccaacgtgactgtgaaggcacgagtgtggaacagcaccttcatcgagggccccgccggtctggatggtttggatgggaaggacg

SEQ ID NO: 490969 - DNA, 50 bp, Homo sapiens
ttttaaccaaggcagttggtggaaatgagtctctgcgatatgataccagc

SEQ ID NO: 490970 - DNA, 74 bp, Homo sapiens
gtggaacaagcgtcgcaatgaggactctctacaggacccgatatggcatcccttattctgataccctaaaaaag

SEQ ID NO: 490971 - DNA, 52 bp, Homo sapiens
gccaggaacccctggaagcctagaaatgggactgttgacatttagggatgtg

SEQ ID NO: 490972 - DNA, 100 bp, Homo sapiens
ggacaacttgctgaagaatgactacttctcggccgaagatgcggagattgtgtgtgcctgccccacccagcctgacaagctcctgttcgacacagtggag

SEQ ID NO: 490973 - DNA, 100 bp, Homo sapiens
ctcgccgtccccgccatgctgtctctagactttttggacgatgtgcggcggatgaacaagcggcagatgggctatctgaagaggaacggggacgggagcc

SEQ ID NO: 490974 - DNA, 80 bp, Homo sapiens
tgtccgtaccttctttgtactcagccaggtgatctttagacagtgactgagtatggatcatttgaacgaggcaactcagg

SEQ ID NO: 490975 - DNA, 75 bp, Homo sapiens
ctgcgagcagcgcgggcggcagcccgggggaagcgtgatgatgatgatgattttgatgatgaggaagctgaagaa

SEQ ID NO: 490976 - DNA, 100 bp, Homo sapiens
gtctttctcagcaccttggcgaagccttgggtttctttcttaaaggactgatttttagaactccacatttgaggtcaccatcagaaaagctaagtttgct

SEQ ID NO: 490977 - DNA, 101 bp, Homo sapiens
ccgcggccggccagccgaagatggtggcggctactcctcctgcaattctgtggtgttcttggtcacacatttatggagtttctgaagggcagtggagatta

SEQ ID NO: 490978 - DNA, 90 bp, Homo sapiens
gtccctgaagatctatgctcctctgtacttggtccgccgggatcttcacgtatcaaccggtgaatttacagacttaaagcagcagttgga

SEQ ID NO: 490979 - DNA, 90 bp, Homo sapiens
ctgaaggccatcgtgcaggggcagtgtggacgaatgtggaacctcgctctgtggctgtgttcccttggcactccttagtccccttcctgg

SEQ ID NO: 490980 - DNA, 98 bp, Homo sapiens
cgagaccctgtggtggcttattactgttcacctttccttgccagtgaagatggcgtgcttggcggagtgattgtcctccgttcatgcagatgttctgc

SEQ ID NO: 490981 - DNA, 100 bp, Homo sapiens
atttagttctggggagcgcctcgtcgacatgagtgatgtggaggaaaacaacttcgagggcagagtcacagtgtccatgtaactaactcctggttaagag

SEQ ID NO: 490982 - DNA, 100 bp, Homo sapiens
cctcgcccgccgtgagcgcccggagcggtccgcgagccaccgaggcccaggagcatctttccttgaagaagtacattattgacattgtggttgaaagtac

SEQ ID NO: 490983 - DNA, 98 bp, Homo sapiens
gaagagggagtcaccactggacctccaaggaagccacgtgcagacatctacaaccttcgatctcctgacgagacacagagtctgggatctaataattc

SEQ ID NO: 490984 - DNA, 100 bp, Homo sapiens
cgaaggccacctacaaatagcaggtcagccccagttgatgctgacagcaggacccagtgttgccgtccctccccaggcaccttttggttatggttatacc

SEQ ID NO: 490985 - DNA, 83 bp, Homo sapiens
aatggggcctgggggacggtaggagcctccgtgcggagaccactgttcaaggccacaggtgtccctggccagtgtccttccac

SEQ ID NO: 490986 - DNA, 75 bp, Homo sapiens
caacactgagctgtttcttcatgggcaaaacaggatgatatcatcaagttgaatcgaaaggaagggaagaagcag

SEQ ID NO: 490987 - DNA, 100 bp, Homo sapiens
ggaacgggaccggagcttcatgcctgcaaagaggcatgtactggcattgaaaacattgacgaagctattacattgcttgaacaaaataattgggacttag

SEQ ID NO: 490988 - DNA, 83 bp, Homo sapiens
gccctcagcgagagtgccaaccaggccttcctggttcgtgctggccgtgggcagcgccgtctttgatgccatgttcaacgggg

SEQ ID NO: 490989 - DNA, 90 bp, Homo sapiens
gtggaaagcgcatacaggaccctaaacaggggagatcttcgagctgaaggcagagctcaacagtgacaagaaggagaagaagaaggaggc

SEQ ID NO: 490990 - DNA, 100 bp, Homo sapiens
gagaaaccttggacagcagattttggtttaatatctgattgggacaacattcagacccatttccagtcatgaaaatgttgcagtctcttgcacagcgccc

SEQ ID NO: 490991 - DNA, 50 bp, Homo sapiens
gttaaagtaacagatgatttagttgatcagttccatgacaagacccctta

SEQ ID NO: 490992 - DNA, 80 bp, Homo sapiens
tggagcctcagttggaagcagccgatccagcctgcggagcctgtggggcagatccataaatggactaggacaaatcttag

SEQ ID NO: 490993 - DNA, 83 bp, Homo sapiens
cccttccccacgcaaccccagatccatttacactttacaagctcctggccagttacaatgatgaagacatttacctcttcaac

SEQ ID NO: 490994 - DNA, 50 bp, Homo sapiens
gggattttgtcagcttgtcgtcaagggccatgaagcccccaggaggagaa

SEQ ID NO: 490995 - DNA, 100 bp, Homo sapiens
gcaaattattagctaagaaagcagaggttaatacaatccctggctttgatggagtagtcaagaaatctccgagaagcaagggataatgctgtggctgaaa

SEQ ID NO: 490996 - DNA, 100 bp, Homo sapiens
cgaaagtcatgttacccaacaccgggttgcatcataaatacaaaggactgaagttataaaagagaaaagagaagtttgctgctaaaatgaatctgagcaa

SEQ ID NO: 490997 - DNA, 100 bp, Homo sapiens
cgacgagcgggccctggctcaggaacagggacagcacctcatcccctggatgggggaccacaagatcctcatcgacagatcaggatcctcatgaccagcc

SEQ ID NO: 490998 - DNA, 75 bp, Homo sapiens
gctccagcatcccgtcaggggttgcaggtgtgtgggaggatgatcttgaagaccttatagttaattgggatgaga

SEQ ID NO: 490999 - DNA, 75 bp, Homo sapiens
tccaatacagacctcagcttccccattatttcgaggaaggaattctaggcctgattcttcactacctgagacgtc

SEQ ID NO: 491000 - DNA, 100 bp, Homo sapiens
tggcacagtggagaaaccgcctcgaaaacggagaagcagctgcaagctttcttcctggtggcagatgacatcatggattcatcccttacccgccggggac

SEQ ID NO: 491001 - DNA, 83 bp, Homo sapiens
gccgccggccgccgctggcgcatggcggggtggtgatcgtggcagaggtggccctggtggcatgcggggaggaagaggtggcc

SEQ ID NO: 491002 - DNA, 100 bp, Homo sapiens
caagcaccagcagaagaagggcgagtacgtcaaccgctgtctgttcataaaatcttcacttctgggctcaggagagaatgctctcatcactcagtcaagg

SEQ ID NO: 491003 - DNA, 100 bp, Homo sapiens
ctcgggatgccgtccgaagtcggcgacagcggccggggcgcaggcgcccgtgcggaatggcagatgagtgaccgaggaggtggcgttcctttgaggaaaa

SEQ ID NO: 491004 - DNA, 100 bp, Homo sapiens
atgatctgtctgctgtgcgtccggaccgcgtcctctgtggacatagagggtctctggacaccagctcttccatcaccagccagcctgaggccttcttctc

SEQ ID NO: 491005 - DNA, 82 bp, Homo sapiens
tttctgaaacaacaaagccaaacttccattggtcagttggtgacaaagttcctgctgatataaggttaacttccatcaaatc

SEQ ID NO: 491006 - DNA, 82 bp, Homo sapiens
cgaagtggtgaaagagcatcagactctccagaaagagcaacagtaatggagtacatgagcactggaagtgacaataaagaag

SEQ ID NO: 491007 - DNA, 87 bp, Homo sapiens
ccgctcaccccgcggccgcaccttcccgccttctcagatatcagttttagagaatgtggcgtggagaaattctcaaggaaagagtaa

SEQ ID NO: 491008 - DNA, 96 bp, Homo sapiens
agagccagggcagcaagaatcctcagaagtactcggacaaggagctgcaggtcgcaatggaagaagagatcgccgcgctggtcattgacaatggct

SEQ ID NO: 491009 - DNA, 87 bp, Homo sapiens
aaaacaacatctttccagaaagaggggttagaattgcaggaaacatcctgtcatactgcagaagctcgcagagttgatgaagttttt

SEQ ID NO: 491010 - DNA, 73 bp, Homo sapiens
cgaaaacggaagcgcagggagaaggaagaggtgtttgaaaagtctcatataatggcagcaaaggctgtagcaa

SEQ ID NO: 491011 - DNA, 100 bp, Homo sapiens
tacttttctggtccaggaattaatcaagagcaagactcccaagcagcttgttcctaaacccaaaggaaagaaaaccaaagatatgaaaaaacctgtcaga

SEQ ID NO: 491012 - DNA, 90 bp, Homo sapiens
ctctcagtggaccgaggtttcggagcaggaagaagtcagtgtgttcagattttgcaaatctaaatgtcataaaaactttaaaaagaagcg

SEQ ID NO: 491013 - DNA, 82 bp, Homo sapiens
atggccacaaaccgaatagaaactttggatccagcacttatcagaccaggtgaccccaaaggagccatgataacccatcaaa

SEQ ID NO: 491014 - DNA, 83 bp, Homo sapiens
gtggatcgctgtgatcgtcacttggcaaatgaagaggattcttccagttctctagtgaaggatcacctttttcagcaagagac

SEQ ID NO: 491015 - DNA, 74 bp, Homo sapiens
agtacttctacaatttaatcttattgatttagatgatctttatgtacatattagtgatgatgaaccaggttatg

SEQ ID NO: 491016 - DNA, 101 bp, Homo sapiens
gagagctcagaattgccaagatttatgacagactcagatgccactgcatcatcagataacagcgagacggaggggacacccaagttgtctgacacaccggc

SEQ ID NO: 491017 - DNA, 75 bp, Homo sapiens
ccctaatcaagtgtgggatagtataatccagcaggcaaccaaagcagtgatggtttcagaaaattttgatataga

SEQ ID NO: 491018 - DNA, 50 bp, Homo sapiens
ctcaggaatcatgggctatcaaaggccctggccaacgtcaacattgggag

SEQ ID NO: 491019 - DNA, 100 bp, Homo sapiens
gacgatctgcacttcgcattttggcattgacatttaattttagggtcctttatatagaagggagagtaggactgcccaagaagttcgtggacatctttca

SEQ ID NO: 491020 - DNA, 100 bp, Homo sapiens
gtcctttatatagaagggagagtggagcagttctggaggttttatagccacatggtacgtcctggggacctgacaggccacagtgacttccatctcttca

SEQ ID NO: 491021 - DNA, 83 bp, Homo sapiens
ggaagaagaactcaagaatgttactaacaatctgaaatctctggaggctgcatctgaaaaggggacggtgctcattggttcag

SEQ ID NO: 491022 - DNA, 101 bp, Homo sapiens
gagatgggcagtaaaggggtgacggcgggaaagatcgccagcaacgtgcagaagaagctcacccgcgcgcaggagaaggttgttcctcaaagtcattcaag

SEQ ID NO: 491023 - DNA, 50 bp, Homo sapiens
agggacctcaaggaagcttatgacaggttctccatggtggtacaggatgg

SEQ ID NO: 491024 - DNA, 82 bp, Homo sapiens
atgacctgggctctgggcctctgaagggagtgcatccgccccaacccttttccccctcgtctcctgtgagaattccccgtcg

SEQ ID NO: 491025 - DNA, 82 bp, Homo sapiens
caacatgcctcaccctcatctatatcctttggcagctcacagggttctccaaaaaatgtggaatcctttgcatctatgctga

SEQ ID NO: 491026 - DNA, 50 bp, Homo sapiens
gaacctgcgcatgaagcttcccaagcgtcccacgacagtgatgtccgagg

SEQ ID NO: 491027 - DNA, 76 bp, Homo sapiens
tcgctgcgagctcatcaaggagagcgaagtcaaggccctgtgcgctaaggccagtgaatgatgaacccacaacagc

SEQ ID NO: 491028 - DNA, 74 bp, Homo sapiens
ccatggcagcctgcagctaggactttaatgtgaaggtacaagtaagaagctggcgaaacatagagctgcagagg

SEQ ID NO: 491029 - DNA, 114 bp, Homo sapiens
gatcagatcgatctaagatggcgactgtcgaaccggtactccaaagattcaggtttactcacgtcatccagcagagaatggaaagtcaaatttcctgaattgctatgtgtctgg

SEQ ID NO: 491030 - DNA, 74 bp, Homo sapiens
ttatccttgcatgtctcttcatggagatcctcacagccaccgtggacaatgccaacatcctgctacagattgac

SEQ ID NO: 491031 - DNA, 82 bp, Homo sapiens
tgtagatgagtggattgtatttcagtctccagcaagaattgcccatcttgttaaggcagttgtgaaaaacttcaggacaaaa

SEQ ID NO: 491032 - DNA, 75 bp, Homo sapiens
cagcatgcctcaccaagtcacatgacaagcagtgtggaccactacaacgaggtgaagagcgtcaccatctgcgat

SEQ ID NO: 491033 - DNA, 74 bp, Homo sapiens
accaatgtcatccttgcagacctcaacctctcaggtgaaactggtgcagcatacctattcctgcctgtttggaa

SEQ ID NO: 491034 - DNA, 82 bp, Homo sapiens
acacaaaaaacgggtcgcccgcgattctcagggattgatcgcctcttcagagctgagctcaatgtgcagcaatggatgacga

SEQ ID NO: 491035 - DNA, 82 bp, Homo sapiens
cccgattcatcaaccatagctgtgacccaaattgtgaaatgcagaaatggttcccagtctaagtgggtgactttccaagata

SEQ ID NO: 491036 - DNA, 50 bp, Homo sapiens
tcaccttcaaggccgtcagacaagacaacagtgattgactacgtgaagcc

SEQ ID NO: 491037 - DNA, 100 bp, Homo sapiens
ctgaagaaggctctgtgcaatcctcacattcaagctgataggctgcgctaccggaatgtcatccagcgagtgattagagtgatcagcagctggactgtgc

SEQ ID NO: 491038 - DNA, 82 bp, Homo sapiens
ctggtgtgcagccgcccaggaggggtgctgatattcgtggcttcagtgctcctaggacatttggccttacactgggacatgt

SEQ ID NO: 491039 - DNA, 107 bp, Homo sapiens
tattaagaatgaccctccttcaagagataatagagacttcacagagaatgcagttgtcttgacttcaggtctgtctgttctgttggcaagtaaatgcagtactgttc

SEQ ID NO: 491040 - DNA, 100 bp, Homo sapiens
ttccaggtcccggatagcgagggcggccgcgccggctccaggtgctggagaatctggtaaaagcaccattgtgaagcagatgaggatcctgcatgttaat

SEQ ID NO: 491041 - DNA, 100 bp, Homo sapiens
acatctcttcagataccttcccaaggccagccacagtcacaaccccagtcgccctttttcttccaaatggtctacagcaaatccatcaactgtggctgga

SEQ ID NO: 491042 - DNA, 76 bp, Homo sapiens
cagacgttagcgtgagtgatcactctcaatcccgggaaagaccacagcaagattctttcattcgtctcctcctagc

SEQ ID NO: 491043 - DNA, 97 bp, Homo sapiens
tcagcatcgacagcagtggcagaaacgtcaggccgtagccgaagcctcggaaggagcggcccacggcaaaggaatcggtgaccttcaaggatgtggc

SEQ ID NO: 491044 - DNA, 100 bp, Homo sapiens
ccggtttgctttgcttcgattggaggaaggacctccacacactaaaaactggaggaattacatgaatgacagtcttcgaaccaatgtgtttgttcgattt

SEQ ID NO: 491045 - DNA, 100 bp, Homo sapiens
gggacaggccacgctgtccgtccgcagtaccgacgcctgcagatgaggacggggacttggttgccttttccagtgacgaggaattgacaatggccatgtc

SEQ ID NO: 491046 - DNA, 100 bp, Homo sapiens
aaagtgcctcacaacacaagagctgaggtggagaggtagtgaaaatagctcagctggcatccatcacaggaccacagagccgcgtggctcagccagagac

SEQ ID NO: 491047 - DNA, 75 bp, Homo sapiens
ttacaacatggcagacattgacaaattttaccaaatgttgcaagaactctggagttcttatggtagtaaaatgcc

SEQ ID NO: 491048 - DNA, 98 bp, Homo sapiens
ctggaatataaaatatggctaaagcttgctctcagtactgcctatcagtattttgaatcaagtcttattgatgagtatgaaagttttcaagacgccta

SEQ ID NO: 491049 - DNA, 101 bp, Homo sapiens
cggcggcggcggtggtatcggcggcagctgtgagggggttccgggaagatggtgctgatcaaggaattacgcaggaggagggagacgcactgatgacatcg

SEQ ID NO: 491050 - DNA, 90 bp, Homo sapiens
aaacagtgatcgctaagaactttgccgataccttaggatacaacatagaacctattatgctctatcagaaagaatcttcaagagggagac

SEQ ID NO: 491051 - DNA, 74 bp, Homo sapiens
aggcgactaaagcagtcacaggaagaaatgtcctcttcaggacttacttctctggatccagaaacacacagaag

SEQ ID NO: 491052 - DNA, 100 bp, Homo sapiens
attgataacagctaaggtattcctggaagcagagtaaataaagctcatggcccaccagctagaaagctaaaccaggtggacaggtgaaatgtcagtatat

SEQ ID NO: 491053 - DNA, 75 bp, Homo sapiens
ttattatcggcgagtgaagagactgtacagcaattggcggagagcacgttttcaatatcataggagcatttgata

SEQ ID NO: 491054 - DNA, 97 bp, Homo sapiens
taaaaaacaggggccaaatttacataattggagtggtgactggagcttttgggtatgtgacgcattcccagactcttcagccaactgagcatcagct

SEQ ID NO: 491055 - DNA, 83 bp, Homo sapiens
gcggcggcggcggtggaggagccggagcataatgacaatgcagatcttcgtgaagactctgactggtaagaccatcaccctcg

SEQ ID NO: 491056 - DNA, 100 bp, Homo sapiens
ctcgggtgaagaagaatgccccacagatcagtgatggctcagaagtcgttgttgttaaggaggagctgattgatctggagccagaaggaagagtgtatgt

SEQ ID NO: 491057 - DNA, 101 bp, Homo sapiens
ttgaagcagaagaataaggagaaggataagtcgaaggggaaggcgcctgaagaggacgaagatcactgtgtccactactatgatcttcgtaacactaaaca

SEQ ID NO: 491058 - DNA, 51 bp, Homo sapiens
caggctttgacccttctttaaaagtcaggtcaattcagtgaagatatgata

SEQ ID NO: 491059 - DNA, 91 bp, Homo sapiens
ttaaggattccaagtaactcttatttgccacccaggctactttgggaaagttggtatgaagcattaccacttaaagaggaaccagagcttc

SEQ ID NO: 491060 - DNA, 96 bp, Homo sapiens
gcctgatgttgctaaatgtagacaatggttagagaagaattttccaaatgaatttgcaaaacttactgtaggctaccacatactgttgattgtgat

SEQ ID NO: 491061 - DNA, 90 bp, Homo sapiens
agcggagtagcgagtcggcaacccggaggtgacagagctgaatgaacctctctccaatgaagatcgaaatctcctctctgtggcctacaa

SEQ ID NO: 491062 - DNA, 100 bp, Homo sapiens
tagcaatcacagagactcggagagcatcactgcaggaagaaccggacccggcgaacctggaagtggaccatgatttcttccaggacaaggtgtggcccca

SEQ ID NO: 491063 - DNA, 96 bp, Homo sapiens
ctccttcagccaacatgatggtactgaaagtagaggaactgtattgcggaatgctgcagcactccttactctcttttgggtttggtcttcacggtt

SEQ ID NO: 491064 - DNA, 75 bp, Homo sapiens
gtttggtaccgagcggagaggagatgcacacggcactcgagtgtgaggagcgagaacccgagcagcgccatgagc

SEQ ID NO: 491065 - DNA, 73 bp, Homo sapiens
gggagctcgcggcgagcgccccagccaggcctgcgccggcatcctccgagaataacatagctgatccagaaga

SEQ ID NO: 491066 - DNA, 87 bp, Homo sapiens
gagaacaatgggaaccagtctttcaaaatgtttcatcagagcaagaaaaagaacaagagactttaataagccagaaaagcatccctg

SEQ ID NO: 491067 - DNA, 96 bp, Homo sapiens
cgcggaggagccgcctgcgcatgctccatcgcctgggtgtcatggagaaactccagctgggcccagagattctgcagcgggaaaatccaaggctta

SEQ ID NO: 491068 - DNA, 76 bp, Homo sapiens
gctgatgacctgctgctcgtgctgatctcaggctttggaactgcgacataactagcgatggctgctgcgatctcac

SEQ ID NO: 491069 - DNA, 98 bp, Homo sapiens
gtttgcctgttttggatagcaatgatcccaatttccagatgccttgttcaacagacatatctgaagagatggattaagaatgctttggattaaggatt

SEQ ID NO: 491070 - DNA, 74 bp, Homo sapiens
ggaaacaacgttctcccgcaaaaactttttaaaactgtggacttaaatgttctgcaaagtcttacacaaaagcc

SEQ ID NO: 491071 - DNA, 101 bp, Homo sapiens
gcttcctccagacctctcggcgcgggttttctaaatagctttgaggagttacaggctgaggaatgcggcatcctcaatggatgtgaaaatggtcgctgtgt

SEQ ID NO: 491072 - DNA, 90 bp, Homo sapiens
ccatgtcagccttcccagtagctgggaccacagaatggggaatgcatcagcaacccccacacccccctccagatcagccatggatgccac

SEQ ID NO: 491073 - DNA, 82 bp, Homo sapiens
gcgggctttgccagcaaaaccgaaacagagacaggatctccgtatgttgtccaggctggtctttaactcctgacctcaagtg

SEQ ID NO: 491074 - DNA, 75 bp, Homo sapiens
taaaacaaaaatattatggtctttgtgcacatttacatcaagtgttgtacagtgttttgggcatgcacgtgatac

SEQ ID NO: 491075 - DNA, 75 bp, Homo sapiens
gtgaaattgaggtcacaccttcagtccttcgagcaagttcaatacttcttcaagatcttggataattagtggtgt

SEQ ID NO: 491076 - DNA, 100 bp, Homo sapiens
ggcagtaccgcctccttcccagccgcgcggcttcctccagacctctcggcgcggcttcagctttagctgcagctgcctctgttcagccacttgcaacaca

SEQ ID NO: 491077 - DNA, 100 bp, Homo sapiens
ctcgtgcctacctggatcagacagttgtgcctatcttattacagggacttgctgtgcttgcaaaggaaaggcccggaggctgtttgatgtcctgcacgag

SEQ ID NO: 491078 - DNA, 82 bp, Homo sapiens
aaaatcgtcttatagttgagaatttatcctcaagagtcagctggcaggaaggtgggagtcaatcattttgacaagtctcctg

SEQ ID NO: 491079 - DNA, 75 bp, Homo sapiens
ctgcagctgctatgttaagaaaacataccaatattgttgcacagactaacagggtctcgctctgttgtccaggct

SEQ ID NO: 491080 - DNA, 100 bp, Homo sapiens
gtacctttcagctgcgccggccgcgaggccacggagagctcgccttggagagcccaggagcaggggagacatggttcgagaaatggctgctactacctta

SEQ ID NO: 491081 - DNA, 82 bp, Homo sapiens
ggacgcagtgatttgctccccctcgtgcagcaacccccacacccagcaccaggtcaaaatgcagatcttcgtgaaaaccctt

SEQ ID NO: 491082 - DNA, 74 bp, Homo sapiens
gccagaaaccggggaccttaacaatccacctaagaaattcagaggtaacacgtacacagacctctcggccggaa

SEQ ID NO: 491083 - DNA, 75 bp, Homo sapiens
ggaacaagcctgtcccctggctctcagagattgccagtagaaagccaacagacggtgcttcctcatcaaattgtg

SEQ ID NO: 491084 - DNA, 100 bp, Homo sapiens
gagctggaggacggggcctggccgccacagaggtttccagccaatggattctggtcaactggtggagattggctgacaccctggagaagccgaaaccaga

SEQ ID NO: 491085 - DNA, 83 bp, Homo sapiens
ggtcccccgctcccggggtccccggccggccaagcagctcaccatggatgatgatatcgccgcgctcgtcgtcgacaacggct

SEQ ID NO: 491086 - DNA, 51 bp, Homo sapiens
tttttgtcagattatcaggatgaggtctccttatatacatttgacaaagcc

SEQ ID NO: 491087 - DNA, 98 bp, Homo sapiens
gcccgcctcatttgcgccttgcagcactgctggaccaggagagaacattgaaagtattctctaagctatttgaagagagtgactaaatgcacctgggt

SEQ ID NO: 491088 - DNA, 95 bp, Homo sapiens
gggacctcaccggattctcctatgaagacctcattccctgcgtcttgagcctccataagaagtgcgtgagtgcatctccatccacgttggccagg

SEQ ID NO: 491089 - DNA, 88 bp, Homo sapiens
ttgaaggcagccctgcacgaccagctgaaccgcctcaagaggctgacccgcggctgattgagtccctctcccagatgctgtccatggg

SEQ ID NO: 491090 - DNA, 100 bp, Homo sapiens
gaagatggcggaacaggctaccaagtccgtgctgtttgtgtgtctggctccgacagttagttaatatgtgcatcaacccagatccagagaagcgaccaga

SEQ ID NO: 491091 - DNA, 75 bp, Homo sapiens
gacggcgacagtggcggcggcgccatggcagggcttgcagaaagttcaggagccctggaaaggagaaggaataag

SEQ ID NO: 491092 - DNA, 117 bp, Homo sapiens
cccgcgcctctcttcgcctcgcctcgggacccgcggtccccgctcttgctggtttggtgcacctcgatttggaggaagtagggcagggcccttatctggaaagaagtttggaaaccc

SEQ ID NO: 491093 - DNA, 100 bp, Homo sapiens
ctttgcccgcctgctgctggaagcttagcaggtcagatgggcagacctggaagagaagaaggatgcagataggaaaagggccataggttttgtggtcgga

SEQ ID NO: 491094 - DNA, 74 bp, Homo sapiens
agaaaatcttgtggacaaatccaggggaagggcaattgaaggaacagactaaaaatcgtgtcctggaaggaaac

SEQ ID NO: 491095 - DNA, 50 bp, Homo sapiens
tctacttagctcagcaattcttaccttctcctcaagagttactgatctat

SEQ ID NO: 491096 - DNA, 82 bp, Homo sapiens
gccttcagcccctgcctcggccagagcgtgagtgcatctccatccacgttggccaggctggtgtccagattggcaatgcctg

SEQ ID NO: 491097 - DNA, 82 bp, Homo sapiens
gacgggacctgaagtgcagacccctaaggtcaatgagtggtcattgaagataagaaaggaaatgagagttgttgacaggcaa

SEQ ID NO: 491098 - DNA, 102 bp, Homo sapiens
aatggcacaaagttctctcgatcagggcatacatctttcttcgacaaaggggggatatgagactttctactcggaatatcctgagtgttgcgtggatgtaaa

SEQ ID NO: 491099 - DNA, 100 bp, Homo sapiens
gactccgttatctgcaggtattgggagatgcacagctaagatgccaggaccacctggaagcctagaaatggcggtaaccagcgtgagctcgcccgccaga

SEQ ID NO: 491100 - DNA, 83 bp, Homo sapiens
ccgcgcgcagggcctgcagcgggagctggacggcgagcgcgagcggcgcgagaaattgatattcactgatggactccaaagaa

SEQ ID NO: 491101 - DNA, 98 bp, Homo sapiens
agaagtcatggaactgaaaaagcactgactgctctgcttaagctgaccggttccctgatgtgttacctgcttctgctactgatccaaactgcagaact

SEQ ID NO: 491102 - DNA, 80 bp, Homo sapiens
cttcttcaacagcgaggtggacgagaaagtgtctgcgctcctcagaccaccggcaggtgaacagcctgatgcagaccgag

SEQ ID NO: 491103 - DNA, 82 bp, Homo sapiens
agagatcagagaccagggctcctgtggctcctgctgggatgaaaactttcggaagagaaagttgcctgtggtaagttcagtt

SEQ ID NO: 491104 - DNA, 100 bp, Homo sapiens
caagtattcagctcttattgaggcatggacccatgctggcattctcttaaaacacaaatacagtttcctggtgggatgtgcctcaatctcagatgtcata

SEQ ID NO: 491105 - DNA, 75 bp, Homo sapiens
aacagaaattctggaacacctatatgacttaattcagtgcacaaatgagatgaatgtgaacatcccacagttggc

SEQ ID NO: 491106 - DNA, 75 bp, Homo sapiens
tccccaggcccttgttggggcacaaggtggcagggcccagtaaatcctttagggccacctgtaccccatgggccc

SEQ ID NO: 491107 - DNA, 75 bp, Homo sapiens
cagtagctgtttctgaactcttcacaactttgccaattgtacaggccatggagaagtgtaaagatgcaggattgg

SEQ ID NO: 491108 - DNA, 75 bp, Homo sapiens
tctggatagcaccttatggacaggtcattcctgtcccaatcagctgctctactactgatgacattaaagatgcct

SEQ ID NO: 491109 - DNA, 100 bp, Homo sapiens
tcaagcaaagaagagttgagcacaatcagtgacaacactgcagctgaaggaggagttgctggatggagaggattataatttccttcaaggagcgtctgat

SEQ ID NO: 491110 - DNA, 75 bp, Homo sapiens
ggcggctctgcgctggccgggggcgcgggcggcggcgccggcaggaagacgttggacctctcgaacaaccagctg

SEQ ID NO: 491111 - DNA, 73 bp, Homo sapiens
tatgatcaatgaagtggatgctgatgagtgagcgattacagtctgacctggtagtatgcattgtaattggtgt

SEQ ID NO: 491112 - DNA, 100 bp, Homo sapiens
gtagatacaaatttttggatgatgatggatccatttctcctattgaggagtcaacggccctcagagcacaccttcccctagatatcaacttcagaggatg

SEQ ID NO: 491113 - DNA, 75 bp, Homo sapiens
acacattgtgctattcactctgctttacaagcaaaagcggcgccaggaaattgaacaaaaacttgaagttcaggc

SEQ ID NO: 491114 - DNA, 133 bp, Homo sapiens
gaaagcgtgctccacaaatatttacagtcggaggagtactcggtgaaatcctgtcctgaagactgtaagatgggcagtgatgacaccaaatataagcataaaaagacgttttaaaactacagatcctgaaacc

SEQ ID NO: 491115 - DNA, 97 bp, Homo sapiens
acagtggacagctctgattcgtagcacgcttgcttgcatcctggaatattctcaaccagctaaaccaggtggacaggtgaaatgtcagtatatctct

SEQ ID NO: 491116 - DNA, 100 bp, Homo sapiens
gcgggccgtgcagagcagcacctccatcaggtacaacctcgaggagctctaccagctcaaagcttggattctgccgtgccactcacgaatggcgacacag

SEQ ID NO: 491117 - DNA, 110 bp, Homo sapiens
ctgccaccttatcttagagttattcaaggggatggagtagatattaataccttacaagaggctcttgcagccaatgccggaacaggatttgctgttgctgagcctcaaat

SEQ ID NO: 491118 - DNA, 83 bp, Homo sapiens
gggacatttctgaagcgagcgtcttcgatgacattgctgtcgaactgctccagaaggcagcccccagccctattcgccgactc

SEQ ID NO: 491119 - DNA, 90 bp, Homo sapiens
cgccgccgtctcccgcgtgctgtctggcgcttctcagaagccggtttctggtcctcataccgtgtggttgagtgaaatcaaaacttccac

SEQ ID NO: 491120 - DNA, 100 bp, Homo sapiens
atcgagccacaaacaacaacaagacattcattcccaacgatggcaccttttgtacagcactattcctgatcagagaactccagttgcttcaacacacagt

SEQ ID NO: 491121 - DNA, 50 bp, Homo sapiens
cgggagtttgaggaggttgtggtggaacgtgtgatcaccattatgcagaa

SEQ ID NO: 491122 - DNA, 80 bp, Homo sapiens
tgcggaatttgcggctttggcagaaatattattcatctgtgccagaggaaggaggggcaacccatgtctatcgttatcac

SEQ ID NO: 491123 - DNA, 100 bp, Homo sapiens
gtgtcctgtgctgaagatgtttccggaacaacagaaagagaaaacgttgtgtgacgtgatcctcatggtccaggaaagaaagatacctgctcatcgtgtt

SEQ ID NO: 491124 - DNA, 50 bp, Homo sapiens
aactccttagccatgatcttccgattccatagacttatttcttggaaact

SEQ ID NO: 491125 - DNA, 101 bp, Homo sapiens
ccagcgccggcctcctccgtgcggagaagaagctgcggccgcacctggccaaggcagcctggcatcctcgctacaacctcattgttgtgggccgataccca

SEQ ID NO: 491126 - DNA, 100 bp, Homo sapiens
tccattttctgttgatgtggagtggaatgcagtagccctctgggcctgggatattgtggttgataactgtgccatctgcaggaaccacattatggatctt

SEQ ID NO: 491127 - DNA, 89 bp, Homo sapiens
gacctccagatttccttactgatacgtcggtaacctttccagagatgtgacagaagctctaattctgcaactctttagccagattggac

SEQ ID NO: 491128 - DNA, 108 bp, Homo sapiens
aaattttgaacaacattaacactattatttgtgatcttcagcctcaacagattcaagatggaaaaggtgatgtaaccattacaaatgatggtgctaccattctgaaac

SEQ ID NO: 491129 - DNA, 49 bp, Homo sapiens
aaaaatttcaggattggtactacaaggttgtttccactttggaagaaac

SEQ ID NO: 491130 - DNA, 75 bp, Homo sapiens
gataaaattgccctgaaactggttggtgaagaaggatttgtaggaatcccagtcagaagttccagcctgccactg

SEQ ID NO: 491131 - DNA, 119 bp, Homo sapiens
tatttggggcctctgtgggctgctcctgtgtgccgcggatcccagcacaggctgaaaatgatgagaatggacaagcagaaaacttttccatggacccacaattggagaggcaagtggag

SEQ ID NO: 491132 - DNA, 99 bp, Homo sapiens
gtaatgaggatgaagattcaccaaataagctatatactttggttacctatgtacctgttaccactttcaaaagctgacagagtacttcttggtggtcct

SEQ ID NO: 491133 - DNA, 83 bp, Homo sapiens
tcgactttttcagagactgggacttggagcagcagtggaaataatgaagatgtttcattttcaagaccagcagatcttgacct

SEQ ID NO: 491134 - DNA, 98 bp, Homo sapiens
cgcgcccggccggacccgggcccgaggccgccatggcatcagatgaaggcaaactttttgttggagggctgagttttgacaccaatgagcagtcgctg

SEQ ID NO: 491135 - DNA, 75 bp, Homo sapiens
gagagaggtacctctccttttccctctccctttccctaagccatcccaggcctcaggacctgagttctccgacgc

SEQ ID NO: 491136 - DNA, 75 bp, Homo sapiens
tcgccaaacgtaagagctctatgcctcagaaatttcttgataaacttctgcactggaggggcctctcctcccctc

SEQ ID NO: 491137 - DNA, 75 bp, Homo sapiens
tgctgggcaccttcatctggaataagcaggttcaggagaagtggcacctggtggaggacctgtcgcgactgctgc

SEQ ID NO: 491138 - DNA, 100 bp, Homo sapiens
cgaaatgactttattggtcagtacaccctgccttggacctgcatgcaacaaggttaaagccgagccagccaaaatagaagctttccgagcttcactttcc

SEQ ID NO: 491139 - DNA, 83 bp, Homo sapiens
tccactccgtcccccgcgggtctgctctgtgtgccatggacgggacactcatgaggaccatgatacttccactgagaatacag

SEQ ID NO: 491140 - DNA, 98 bp, Homo sapiens
cgctgtgaccgccacaaagtgaatcctttcggtgcggacagtcgccttcaaagccaggccccggattcagtgattccagcagtctcagcagcactgat

SEQ ID NO: 491141 - DNA, 100 bp, Homo sapiens
gcagattctggaaactgtacattgaagcagaggatacagttgatatattagttggatggcatatagatcatactcagaaaccttcgctcacgcagcaggt

SEQ ID NO: 491142 - DNA, 74 bp, Homo sapiens
cagatattatcatagttgctgcaggtcgcctgctgaccggtgactgtcaaaagaacatccacctctggacacct

SEQ ID NO: 491143 - DNA, 100 bp, Homo sapiens
tctccaaggcggagatccgctacgagggcatcctctacaccatcgacaccgaaaactccaccgtagcccttgccaaagctaagtaatcatttgtttgaag

SEQ ID NO: 491144 - DNA, 100 bp, Homo sapiens
atggcaggcttgatccccaagagctgttaccttgggtagtacctaataatcagggcattgcacaagaggagtgtaaagaaagaatgaggcctgttaaagc

SEQ ID NO: 491145 - DNA, 90 bp, Homo sapiens
aagattttgaagacaatcgtcacttatacagagaacagctgatgttccctttccactttgttgaccggctgggaaagcacgacgtgacct

SEQ ID NO: 491146 - DNA, 75 bp, Homo sapiens
ccctggtgatccagcagcgcggggtgcgaatctacgatggcgaggagaaggaactcctgcgttgcgagctgtgcc

SEQ ID NO: 491147 - DNA, 75 bp, Homo sapiens
tcagtgcccttgtggcgaatggggctcacgtcgacatggcacattacacttctgtggatttaaagtccttgcccc

SEQ ID NO: 491148 - DNA, 100 bp, Homo sapiens
gcagacttcgtgctgatggacaccgtctccatgcccgagttcatggccaacctcaggctcagggccccgtggttatgaatgtgcttcagtttcataatgc

SEQ ID NO: 491149 - DNA, 75 bp, Homo sapiens
gcaaacttgacactcaccctgaccgaaaggcctaaagaatgtatttgacgaagcaatattggctgccctggagcc

SEQ ID NO: 491150 - DNA, 51 bp, Homo sapiens
tttgctaccaagaaagccaaaggcaatgagaagcacgaccttcatgttacc

SEQ ID NO: 491151 - DNA, 98 bp, Homo sapiens
aaccagcaactcagagaacaacagaaaactcaaaaaccatctggtgctgtggattgcaaccttgaatgaactaagcgtcttgtagaaggaactattaa

SEQ ID NO: 491152 - DNA, 100 bp, Homo sapiens
ggaattcagcgccttcttccaaggctcctgagtcctataagaatgtgacagatgtggtaaatacctgccatgatgctggaatcagcaagaaagccattaa

SEQ ID NO: 491153 - DNA, 119 bp, Homo sapiens
ggccagaagataccaacttttgtttccaacctgagcaagtggtcgatcctatccagactgatgagcattatcagtgcccaggacctgccacacttccctggacctttctccatcaatga

SEQ ID NO: 491154 - DNA, 98 bp, Homo sapiens
tcagggccctgtctgctctgtggactcaacagtttgtggcaagacaagctcagaactgagaagctgtcaccacaggcgagaacgtgaaggcattcttc

SEQ ID NO: 491155 - DNA, 101 bp, Homo sapiens
gcagaagaaccgggcagccgcccagcgaagccggcagaagcacacagacaaggcagacgccctgcaccagatgtatgtccctgggaagctgcatgatgtgg

SEQ ID NO: 491156 - DNA, 88 bp, Homo sapiens
aacaccttcctgtgcagtcctgttggaatttgtcagtgctgacagttgcttgtgaacaaactgaagttctgctttttgaccctatatc

SEQ ID NO: 491157 - DNA, 97 bp, Homo sapiens
ctggaacatcacatctgtacgttgcaatctgtggatcagctacgagatgccatggacaatattaccaggcagaaccaattctacgatacccaagtca

SEQ ID NO: 491158 - DNA, 119 bp, Homo sapiens
ctcaatatctgtcttcggtggactccttcggcagtccacccaccgccgccgcctcccagggtttccaggcctgaggtgcccgccctggccccaggagaatgaaccagccgcagaggatg

SEQ ID NO: 491159 - DNA, 97 bp, Homo sapiens
ggcaagagtcaccgggatccctacgcgacctccgtgggccacctcatagatggatcctgagcttgaaaaaaaactgaaagagaataaaatatcttta

SEQ ID NO: 491160 - DNA, 83 bp, Homo sapiens
cctggctttctgcgccatcctgcaccgccaccggcccgacctcatggcgaagctgtgctcaggcccgggctggacgcagagcc

SEQ ID NO: 491161 - DNA, 83 bp, Homo sapiens
caagctcgtagcctgccactccgtgcgtccgcgggagagctgtggggcttggtgagtgtttcgtggcctctcgggttggtcag

SEQ ID NO: 491162 - DNA, 90 bp, Homo sapiens
cctgggggcacacaggtgctggatggtacctcggggttctctcctgcccccaagctggcattggcatcaacaaaagtcagaattcccggg

SEQ ID NO: 491163 - DNA, 106 bp, Homo sapiens
cgagatcctggagagcctgcaggacggcgcggcagagtccccgtacgcctacagtaacggtgaaggacttaactaagtacttggatcccagtgggctcggcgtgat

SEQ ID NO: 491164 - DNA, 104 bp, Homo sapiens
ttccctcggcgtgctactgtgcgctcgatccagcaccatggggaagcgggacaatcgggtggtgtggccgacgacgatgccctcgctgaggagcgcatgcggag

SEQ ID NO: 491165 - DNA, 100 bp, Homo sapiens
tcgtccgcgccgcgcgcgggcctcgcacagatcgcctgctttgggccttccatgtcgtcaggactatcctattaagtgtaatctcactgcttaatgagcc

SEQ ID NO: 491166 - DNA, 51 bp, Homo sapiens
ccaaaggccagcagatgaggaagggcacaaccagtgtctctgaagaagatg

SEQ ID NO: 491167 - DNA, 75 bp, Homo sapiens
cagaggatccagtgttcaccatcctggccccggaagcccacagcccccatcccgtagcccttcctggatctggag

SEQ ID NO: 491168 - DNA, 101 bp, Homo sapiens
ccaggacagtcgcgaggttcgagtgttgcagagcctgcggggcaagatctctccctagatctttagcttctactcccactgctcctaccactccagcaacg

SEQ ID NO: 491169 - DNA, 95 bp, Homo sapiens
accatggaaaacttgcctgctctctacactattttccaaggagagatgagaagcatgaggctgagagaggaggagtcacccggacccagccacac

SEQ ID NO: 491170 - DNA, 100 bp, Homo sapiens
gcctcggtgcagggctccaccccgtcgcctcgacaggccaccagcccctcgggttccaagatgcagctactggagacagagttctcacacaccgtgggcg

SEQ ID NO: 491171 - DNA, 128 bp, Homo sapiens
caataaaggtgctaagaaagagaatgtaagacaggaaaataattaaatattcttaccgagaaagcgtggatacccatcaacgaagttttgatattggaattcagattggctatcagcgacgcaataag

SEQ ID NO: 491172 - DNA, 82 bp, Homo sapiens
agaggatggcgcctgtgggcacagacaaggagctcagtgacctcctggacttcagcatggttacgccaaggaggccctgaat

SEQ ID NO: 491173 - DNA, 100 bp, Homo sapiens
ctgcggagcagtgcgtcagagtttcagacacctggatttcattagcatcatgacctacgattttcatggagcctggcgtgggaccacaggccatcacagt

SEQ ID NO: 491174 - DNA, 90 bp, Homo sapiens
aaaacataccaattcttgaatgacatccgagcgaaagagaaagagagcccacaggcggttttgtgagctgcttccccaggagcagcggag

SEQ ID NO: 491175 - DNA, 80 bp, Homo sapiens
cttctacggggccttctacagtgacggggagatcagcatttgcatggaacacatgatgatatcatcaagttgaatcgaaa

SEQ ID NO: 491176 - DNA, 75 bp, Homo sapiens
ctccccgtcgtcctggtgctgcagcggttggaagtacaagcagatgtacagaaagaacggtacagtctaagtgga

SEQ ID NO: 491177 - DNA, 78 bp, Homo sapiens
ccaacgagatcttccgccactacgacaaacggggattcagcgtccgatcctttggaacagggactcacgtgaagcttc

SEQ ID NO: 491178 - DNA, 74 bp, Homo sapiens
gggcaccaccaaaaacttttgagaagtctatgatgaacttgcaaactaagaaatctcccaagcctaagaagaag

SEQ ID NO: 491179 - DNA, 82 bp, Homo sapiens
gggaaggcatttccagcccgcccacccagcagcctcccgcgacgatgcccctcaacgttagcttcaccaacaggaactatga

SEQ ID NO: 491180 - DNA, 50 bp, Homo sapiens
tggagccaggcctacaccccagtgaaattaaatggtggcagacatgtcca

SEQ ID NO: 491181 - DNA, 127 bp, Homo sapiens
aggttttggctctgcgtgagtgtggtctacgagctgtttctcatctttatactcttccaggattttttatcaagcagaaatgcatcgaacaacgagaatcaagatcactgagctaaatccccacctg

SEQ ID NO: 491182 - DNA, 83 bp, Homo sapiens
gcgagtgcccgggcccagcccggcctagttcaggtgtggaggcacagttggtgctattttcacttgtccactagaagtcatta

SEQ ID NO: 491183 - DNA, 90 bp, Homo sapiens
cggggacttggggccgcagggagcttctctgggtgctgctctgggccaccgtgttgggcttgctctgccagcgactggctgcacgtctgg

SEQ ID NO: 491184 - DNA, 82 bp, Homo sapiens
tcctccccagcatgtcagcatgaccaagcgcctctactacctctggatgtcatcaccctcattgttctgtcatctgaggtgg

SEQ ID NO: 491185 - DNA, 76 bp, Homo sapiens
gggggccaactctgaggagtccactgcagcaggacccccgcagcaaacacaagtttaagatccacacgtactccag

SEQ ID NO: 491186 - DNA, 83 bp, Homo sapiens
caaacagtccagagactcatccccgccctgtgggagaagcacagtccacagacaatgcagatcttcgtgaagactctgactgg

SEQ ID NO: 491187 - DNA, 82 bp, Homo sapiens
tttccgaggaagccggtgttgccgagccattcaaactcctccccacgacactctgaagcagcgacggcacagcgggaagaat

SEQ ID NO: 491188 - DNA, 100 bp, Homo sapiens
cagtgacatcctcctgtgctacaccacggtatcgtgcccctgaagttttactgagatcttcagtttatagttctcccattgatgtgtgggctgttggaag

SEQ ID NO: 491189 - DNA, 80 bp, Homo sapiens
ggaccgacccctctgctcgcggccgcgcctttgaggcttatgcatctggatgtgacattgtaatactgggaagcgatttt

SEQ ID NO: 491190 - DNA, 82 bp, Homo sapiens
ccagatccgcttcagcaacatttccgccgccaaaggtgtcgtgaaaactacccctaaaagccaaaatgggaaaggaaaagac

SEQ ID NO: 491191 - DNA, 75 bp, Homo sapiens
ctttcaagaaattggcattgaagttacatcctgataaaaacccggtttttggattcaaagcataaaaaccattac

SEQ ID NO: 491192 - DNA, 87 bp, Homo sapiens
ccaggacaagtcctgcgcttggggatcctctgtacgcccgttcactgtgtcttaaagacttttctacatgatcctcttgtggaatgg

SEQ ID NO: 491193 - DNA, 50 bp, Homo sapiens
ctcagtctcccaacacctctgaagaaaaagtcagcactttttgaagtgtc

SEQ ID NO: 491194 - DNA, 88 bp, Homo sapiens
tcctagtcttgagacaacaatttgatgatgcaaaatacaggcgatggaatataggtgaaaagctcttaccgaagcaacaaaattcagc

SEQ ID NO: 491195 - DNA, 83 bp, Homo sapiens
agccgcaccaagaaccaaccctgccagcacctggaccttggacattcagacttcagaatgctccagaacctgggtatcaaccc

SEQ ID NO: 491196 - DNA, 100 bp, Homo sapiens
ggaagtcaactcccaggtctacagccggctcacagcacgagaattcaaagaagctttttcactatttgacaaagatggtgatggaactataacaacaaag

SEQ ID NO: 491197 - DNA, 75 bp, Homo sapiens
ccggctgcagcgagcgctggacggagaggaaagcgaatgccgggacattctgcttcctgtcatcaccaaagagct

SEQ ID NO: 491198 - DNA, 100 bp, Homo sapiens
gttcgggctccgtctcaggggctgaagtttgtgaggttttaaaatcaaagatgggaaaatcggagaaaattgcccttccccatggccagcttgttcatgg

SEQ ID NO: 491199 - DNA, 100 bp, Homo sapiens
cctactattacccccagtatctgcaagccaagatttgtagccaaaccgtgcgccatagccctcaacattcaggccaatggaccacaaattgctccgccca

SEQ ID NO: 491200 - DNA, 83 bp, Homo sapiens
ggaaaatggagcccttcaccaatgagttgtttagaaagtgattttacatctggtggagtttgtcattcggatcccaagatgac

SEQ ID NO: 491201 - DNA, 75 bp, Homo sapiens
caacaaggttctggacaagatgaagtctttctgccagatgatgaggagtctgatgaggaagctgtgaagaaaacc

SEQ ID NO: 491202 - DNA, 83 bp, Homo sapiens
gccatacccaataaccaggtgcttggcaaaatcgagcgggccattgctggcccgagataacttcttccgctgtggtgtgctgt

SEQ ID NO: 491203 - DNA, 74 bp, Homo sapiens
acagattcgcagtggtcgcttcttctccttgagtgatggtgtgcaacaaacaacctacctcgcccagcagtact

SEQ ID NO: 491204 - DNA, 100 bp, Homo sapiens
catacatgcagctggtccaggtgcctagagatggctcgttcggaacaccacctggatacggctgcgctgcagaccgggcagaggagcagcgccggcacca

SEQ ID NO: 491205 - DNA, 97 bp, Homo sapiens
caagaagaacgctctcatccggaggcaggaccagctgcagctgctgacagagcgggatgccaccagcttgtccaaagggaagttccaggagctcctg

SEQ ID NO: 491206 - DNA, 75 bp, Homo sapiens
caccatcatcctccaggcatttggcaaataccacgacggggacttcaaagaacaggggccccattctgctcccct

SEQ ID NO: 491207 - DNA, 107 bp, Homo sapiens
ggccaagcagccaaccatgctcaacttcggtgcctctctccagcagactgcgacctgcctagagctggaacgttacctccagagcgagccctgctatgtttcagcct

SEQ ID NO: 491208 - DNA, 88 bp, Homo sapiens
caactattcaacatggaggcggaggtcgataagctggaactgatgatgttccatttaagcagacctcttccatagctgtagctggagc

SEQ ID NO: 491209 - DNA, 50 bp, Homo sapiens
acctgaagtatgccattagttcccagttgattccaggcgtgaattccaag

SEQ ID NO: 491210 - DNA, 83 bp, Homo sapiens
ccccacgcaaccccagatccatttacactttacactttgaaatatcagtgatgtataatgaatctgacctgcatacactcgtg

SEQ ID NO: 491211 - DNA, 100 bp, Homo sapiens
cctgctcctgctcatgatccacgtgttccgagaaaacgaagagcagctgttcaaagggagcttacttgctcaaccgcactctatgggatcggtgcgaggc

SEQ ID NO: 491212 - DNA, 98 bp, Homo sapiens
agcagctgacattctcatgacaacagccaggaacctccctttccttatcaagaaggatgcacaagatgaggaatttcacctattacagagtatcttgc

SEQ ID NO: 491213 - DNA, 90 bp, Homo sapiens
gaagaaaactgtatgtaccctaaatatgggagataagaagtatgaagacatggaagaaagtgttgtgaagagcgaagacttttcgctccc

SEQ ID NO: 491214 - DNA, 83 bp, Homo sapiens
cccgccgcgcggagcgccccttcgcgtcccctgcaccatgagctggggcaccgagctctggaacatccagtcatggataaaaa

SEQ ID NO: 491215 - DNA, 98 bp, Homo sapiens
gaactgcagaggttcctctacagcaagctgttggagtcctgtacatagaatggctggatgcctttggtgaaggaaaaggaaaaacagcctgggttgga

SEQ ID NO: 491216 - DNA, 83 bp, Homo sapiens
gtggcaaccagatcggtgccaagctttaggatccttttccactgtatttggagaagaatggaaagagaagactgatagagact

SEQ ID NO: 491217 - DNA, 110 bp, Homo sapiens
gttgaggctgaggactgactggggttctgagactccctgtcccggaccgcagacctgcctagagctggaacgttacctccagagcgagccctgctatgtttcagcctcag

SEQ ID NO: 491218 - DNA, 96 bp, Homo sapiens
ggagattctccggggacccttccgtatctgcctaggcattttgctgtctcctcctaatacggaccttgcctcatagtattcgatcagattcagaag

SEQ ID NO: 491219 - DNA, 96 bp, Homo sapiens
tttgccatttcttggggccaagttaaacttattcaggggttttggttgatagatcataatgactatgaggatatagcagatccattctttgcttat

SEQ ID NO: 491220 - DNA, 90 bp, Homo sapiens
gacagtgcggctactcttgatcctctccggctgcttggtctacggcacagacaccatccggaagatgaagaacgatttccggaagatgga

SEQ ID NO: 491221 - DNA, 82 bp, Homo sapiens
gcggcgagcggagcttcgcggggatcctgctggactgcacgaaaaatccctgaagaggaaggagaaggaatatgagcatgaa

SEQ ID NO: 491222 - DNA, 115 bp, Homo sapiens
caatggcaccacagcagggactactagacaaaataaaagatgaacctgacaatgctcaaggtgatgaattagaagacaatggaaagaatttctacgaatctgatgatgatcagaa

SEQ ID NO: 491223 - DNA, 100 bp, Homo sapiens
aagcagtcggacgcgtctccccaagaaaggcctccggtgtggctgtctctgatggtgtcatcaaggtgttcaacgacatgaaggtgcgtaagtcttcaac

SEQ ID NO: 491224 - DNA, 75 bp, Homo sapiens
agaaggtgccggtggtgcgagtcttcggagcgaccccggcaggcggtatatattgcacccctaaaagccctagta

SEQ ID NO: 491225 - DNA, 100 bp, Homo sapiens
cgaagccggagtcgcgcggccgggagcacgggcgccggcatagtacaatgaggcagccagcggatcttggaaaactttagaaactgttcctttggagagg

SEQ ID NO: 491226 - DNA, 83 bp, Homo sapiens
agtggtttttcggatcatgtctggtggctccgcggattataacaggtttccaatacttatctacaggaatcgccatgacccca

SEQ ID NO: 491227 - DNA, 76 bp, Homo sapiens
acgtgctggataaactcacagttggccagggatgaaacaagtgaagatgctaactgtcttgctttgagtggacatg

SEQ ID NO: 491228 - DNA, 97 bp, Homo sapiens
acggcgcaggactcccacaccaccaccacgacgaaggatccgggagacagtggaccctggagagaggacccagggctggtctagggatgcagcctca

SEQ ID NO: 491229 - DNA, 98 bp, Homo sapiens
ctccctgcctggacccctactattgcaacaaggttcagattttgcttaaactgtggagcaatggtttcagtttagatgatggagaattgagaccttac

SEQ ID NO: 491230 - DNA, 75 bp, Homo sapiens
caaatactgtgaatggtctgaggcgcaggtcaaaatgcagatcttcgtgaaaacccttaccggcaagaccatcac

SEQ ID NO: 491231 - DNA, 100 bp, Homo sapiens
ggggattctcgacctgctaacagaactggaccttttcgggcttcgtgggacacatatgcaacatgcctatgatttttacaagcctgatatgctatctgaa

SEQ ID NO: 491232 - DNA, 100 bp, Homo sapiens
ggacaagctcctgctagaggaggcgttgcaggacagcccccaggaaaatcctgccttgcttcgttgggcctatgcaagaacaataaatgtctatcctaat

SEQ ID NO: 491233 - DNA, 100 bp, Homo sapiens
ttcgagcggctctcataaagatctggctggcaacaggatgaagttaaaggaagtagatcgtacagccatgcaggcatggagccctgcccagaatcacccc

SEQ ID NO: 491234 - DNA, 100 bp, Homo sapiens
caaagaaactcctggttgagctcaaagttattttacattaacaactctgctcatggtgattacatgcaaaataacgagagcagcttaatagagcaagctc

SEQ ID NO: 491235 - DNA, 101 bp, Homo sapiens
ggggcaccctggggcttcacccttaaggggggtctggaacactgtgagccgctcacagtgtctaaggtggccaccgagtactaaattcacttgggaataaa

SEQ ID NO: 491236 - DNA, 100 bp, Homo sapiens
ttgagtcatttccttcgtacccacagtgcttcatgagagacaatgagttacaaggcactaatagttctggatccttgggtggtcttgatgttcgcagacg

SEQ ID NO: 491237 - DNA, 76 bp, Homo sapiens
agctgaggaagaagaagattgaggaggcgatggacggcatattcctctgcagacactattgaagttcatggtggat

SEQ ID NO: 491238 - DNA, 75 bp, Homo sapiens
ataaaggaaacacatttcatatactgcagctacacagtctcaccagtggtattcttggggcccacctaatatgca

SEQ ID NO: 491239 - DNA, 83 bp, Homo sapiens
catgcttccagcctggataatgattgagccacctgtccagacaatgcagatcttcgtgaagactctgactggtaagaccatca

SEQ ID NO: 491240 - DNA, 97 bp, Homo sapiens
atgggagttcccaattaacaatgaagcagtttccaacatggctagatccatcagaaactgaagccgtggagaacgctctcggggcctttgccacttc

SEQ ID NO: 491241 - DNA, 101 bp, Homo sapiens
atgttcaccctgaagacacccagcttgggaactgggaacagccaggtgccccaaagcaaatacgcggagctgctggccatcattgaagagctggggaagga

SEQ ID NO: 491242 - DNA, 100 bp, Homo sapiens
gacctccgcgcgacgtacccgccgccgccgttggctggagatcatggaagggaagtggttgctgtgtatgttactggtgcttggaactgctattgttgag

SEQ ID NO: 491243 - DNA, 96 bp, Homo sapiens
gctgctcatcgatgaggctgccatgccccgaggcatgcagagtacaggggctcaggtccaggtggcaggggatatgctacccaactcaactgagcg

SEQ ID NO: 491244 - DNA, 75 bp, Homo sapiens
cggcgagagatggtcaggtctggagctcgaccgggccaggtttctagagaggaaggatctccccagctgtcttca

SEQ ID NO: 491245 - DNA, 87 bp, Homo sapiens
ccttcagccaaagaaacaagccgtggaataggtgtatcaagtaatggtgcaaagcctgaatacctaggtgctgatatggaagaattt

SEQ ID NO: 491246 - DNA, 75 bp, Homo sapiens
actatccgtttgttcaggaaccaccagtgacagaagtattgggaaagggtcgttgtggtgcatagacccagagta

SEQ ID NO: 491247 - DNA, 100 bp, Homo sapiens
ctggtggtttgcagatcactgaggtatccgttacagcactgatgtgagtgtagatgaagtaaaagctttggcttctctgatgacatacaagtgtgcagtg

SEQ ID NO: 491248 - DNA, 100 bp, Homo sapiens
gtgtcagccaccttgttctctaaaggtgtcagttgtacccgaggcgttctcagcagcagcaagtacctgtggtggatttccaggctgaactgaggcaggc

SEQ ID NO: 491249 - DNA, 72 bp, Homo sapiens
caaacctctgacttccggcggcattttgaggcggtcctcctagcggcctggatgtacagttacccagcacgt

SEQ ID NO: 491250 - DNA, 98 bp, Homo sapiens
gaagccgcggcggagcccgaaccccgcagcctgagccacctccgtcatctgggcccggggcctcaccgcgcaggtgtgaaggaattacaagtccagaa

SEQ ID NO: 491251 - DNA, 73 bp, Homo sapiens
aggccgcagcagtcagggacatttctgaagcgagcgtcttcgatgaggggggatgatccagacggcagagcag

SEQ ID NO: 491252 - DNA, 90 bp, Homo sapiens
catgcaagggctggagcaccccttcctggtcaatctgtgattcatgttacatgtaaagctgtcctcatttgtgactatggacctatggag

SEQ ID NO: 491253 - DNA, 83 bp, Homo sapiens
ctgcaacacaagatcaagaactccatctggttcgatacaagaggctgttttcctagcgtggcttgctgcctttggtaagaaca

SEQ ID NO: 491254 - DNA, 100 bp, Homo sapiens
cgtttgttcaggaaccaccagtgacagagagttgatccctgaattttattatctccctgagatgtttgtcaacttcaataattataatcttggagtgatg

SEQ ID NO: 491255 - DNA, 77 bp, Homo sapiens
gggaaatcctgcgtttcccctgtgaaagataaggagggttcctgcccccaggtgaacattaactttccccagctcgg

SEQ ID NO: 491256 - DNA, 100 bp, Homo sapiens
gttatttagaacagaaaacagtctgtggagagaatctgcctcctttaacttatgaccagaagtctgggaagttgacgagcagatagatcactacaaggaa

SEQ ID NO: 491257 - DNA, 82 bp, Homo sapiens
tggtgctgacggacgaccaggatgtggagctgggcatcctgacatcgaggcccaggagagaggagtccggtgtctacttgag

SEQ ID NO: 491258 - DNA, 95 bp, Homo sapiens
acgctttctgctcaagtcctgtcctcttctgaccaaagaacaactgacatatatccacaagaagtgccatagtgaacctgatggacctgggattg

SEQ ID NO: 491259 - DNA, 100 bp, Homo sapiens
aagtgggaccggtgtctggcggatgcggtcgtgaagatagaaaaatggctacaaacttcctagcacatgagaagatctggttcgacaagttcaaatatga

SEQ ID NO: 491260 - DNA, 100 bp, Homo sapiens
aaggatgtgcaaccctccaagtggaagaattgtcttagaagaaagaaggcaagccaccattttacccacgtaaatatatgaatatatttctgacattgag

SEQ ID NO: 491261 - DNA, 90 bp, Homo sapiens
gaaatgcagaaaaaagatcacaagcaactctggatgggattgcaaaatggagtgtacctcacagccttctaggatctccagagtggacag

SEQ ID NO: 491262 - DNA, 100 bp, Homo sapiens
tgggactgcctcgactggcagcgcgggaaacgtcaaactcgagattgatatcagtaaatgccattatttagtggatttggacaccatgagagaaacaccc

SEQ ID NO: 491263 - DNA, 75 bp, Homo sapiens
ctggaatttaaacctgagccactatctgaagcacagatttgcgttccaattatcttcttaatactacaattgctg

SEQ ID NO: 491264 - DNA, 75 bp, Homo sapiens
cgctggctgcagggacccggtgacagcgtgagagacctgcctagagctggaacgttacctccagagcgagccctg

SEQ ID NO: 491265 - DNA, 100 bp, Homo sapiens
acggtgctggccgccggttgcaagcagatactggtgcctctggcaaacgcccttctggaaaaggaagtgataaactatgaggacattgaggctctcattg

SEQ ID NO: 491266 - DNA, 83 bp, Homo sapiens
atcaaacttccctcaagctcaggaaatagttcctcagatatttcagttgaaggaagaaatagctcttctcctaagatggaatc

SEQ ID NO: 491267 - DNA, 100 bp, Homo sapiens
gtcagggccagggccagagagccggagagaggagcccccgaccgagagcccaggaggtggaaggccatacagaatggagccgtgagtatggccagcctcc

SEQ ID NO: 491268 - DNA, 100 bp, Homo sapiens
acagtaccagaggtggggactgttgttggaggaacactttccagcacttttctgtagaaggtcagttggaattcagggcattgctatttattcctcgtcg

SEQ ID NO: 491269 - DNA, 100 bp, Homo sapiens
gccgctgccgcccgagcccgggtcgcgtacttgctgaggcaactgcaacgcgcagcgacagaggtcagatcaaggccaccccttcaggatgaccttcttt

SEQ ID NO: 491270 - DNA, 99 bp, Homo sapiens
gcagccgacgccgttcaaaggaacgagtaagactttgaccccgacgcaggcttcagtgattgccgcggatcagaagcctgagcactttggctcgagaca

SEQ ID NO: 491271 - DNA, 100 bp, Homo sapiens
ggttttatattcagccattctacaagctgcgatccattggagacagcgacacagcattgttggttttgccatgtactattttacctatgacccgtggatt

SEQ ID NO: 491272 - DNA, 98 bp, Homo sapiens
gcgcgcgcctgcccagctttgcagcccccgaacgcggcctcgcacagggaacagattctccgtgtgaaggctgaagaagataaaattccactgctcgt

SEQ ID NO: 491273 - DNA, 75 bp, Homo sapiens
gccgacggcctgtccggcactgctgaaggtccatggagggaagcccatccctgagacgcatgacagtgatgcggg

SEQ ID NO: 491274 - DNA, 90 bp, Homo sapiens
gacgcgcagtccatctctctcagagggaagtgtaacatctcccatttttctgacatatttgctgctagagagtttaaagcccgagtggat

SEQ ID NO: 491275 - DNA, 74 bp, Homo sapiens
ccgacccttcctgtcgctgacggcgactgcgggaggccagacaagttggatggcttgaggactggtactaaaag

SEQ ID NO: 491276 - DNA, 97 bp, Homo sapiens
tgaagcatctgaaaaagctgtggaaggctctggataaggaccagtacctgcccaggaaactggttctaggtcccaattctactgcaaatagtatcat

SEQ ID NO: 491277 - DNA, 75 bp, Homo sapiens
cctgacctcagcaactgcacctccccctgggtcaaccaggtggcccagaagatcatggaggagttggcagatgct

SEQ ID NO: 491278 - DNA, 100 bp, Homo sapiens
taagacattggtttttttctttctagaaagtgagagatggggtctcattctgtcacctaggctggagtgcagtgtgacttgatcatagctctctgcagca

SEQ ID NO: 491279 - DNA, 99 bp, Homo sapiens
tgtgtaaaattaggagactttggattatcccgatatatggaagatagtacttactacaaaggattcactccttctccagttgcacagccacacccttca

SEQ ID NO: 491280 - DNA, 75 bp, Homo sapiens
aaggattccaagtaactcttatttggttcggatctgaagctcctgccttgtaccagcaaggctatcatgccatac

SEQ ID NO: 491281 - DNA, 100 bp, Homo sapiens
ctgctcctgctggccgcctggacggctcgggcgctggagctgggctcaaaatgcagagaactcaaagatattcatttcggccagtgttacaagatctcag

SEQ ID NO: 491282 - DNA, 75 bp, Homo sapiens
cggcgagaggcgggctgaggcggcccagcggcggcaggaagctcttcgtgggcggtcttgactggagcacgaccc

SEQ ID NO: 491283 - DNA, 75 bp, Homo sapiens
tgggacccgtgagcaagcagcgacgccagcggcggagaaccgacgaaagggtgaagttgaacaaattgctatgat

SEQ ID NO: 491284 - DNA, 75 bp, Homo sapiens
catgggagaaagacactgtttcacttgtctcaggaagtgtttggattgtgagctatttcagaactgttctcagga

SEQ ID NO: 491285 - DNA, 100 bp, Homo sapiens
agacaaactttgcagtaagcgaacagatctttatttcccgcacatatgatgccaccactcattttgagacaacgtgtgatgacattaaaaacatctataa

SEQ ID NO: 491286 - DNA, 90 bp, Homo sapiens
aaggattccaagtaactcttatttgaagatggctgtgccacccacgtatgccgatcttggcaaatctgccagggatgtcttcaccaaggg

SEQ ID NO: 491287 - DNA, 82 bp, Homo sapiens
gacctatggccgtggctaccccggatttgctccaagctatggctatcagttcccaggtttggtgcacctcgatttggaggaa

SEQ ID NO: 491288 - DNA, 100 bp, Homo sapiens
agctgcgctgtcctaaatgtggcgacttgtgcacacatgtagagacctttgtatagacagggatctcgctatgtggcccaacctggtcccaaactcctgg

SEQ ID NO: 491289 - DNA, 101 bp, Homo sapiens
caggagttcgtctcttacgtctgcggaagtgcagctgcctcagttcttagcgcagcattccacgcctacgggaaggcaggcaagatgctggtggagaccag

SEQ ID NO: 491290 - DNA, 100 bp, Homo sapiens
gggacacccacacccctgtattctcctccgaaccccttcatgcccaaatcccggaaactccagcgtgtctccagccgtgcggggatctgatgagcttctt

SEQ ID NO: 491291 - DNA, 90 bp, Homo sapiens
atccgggccaagtacgagcgacaggagttcatctacccggagaagcaggagccctactcggcaggaggatgctggtggtggaggtggcga

SEQ ID NO: 491292 - DNA, 50 bp, Homo sapiens
gccatcttggctcctccacaatgctacacacgcagggccctgtcgatggc

SEQ ID NO: 491293 - DNA, 75 bp, Homo sapiens
tatgcatgaactgttactgcaatatgaagacttccggggcaggcgtcaggaggcacccaaggtggaggaaggcct

SEQ ID NO: 491294 - DNA, 112 bp, Homo sapiens
atctcctatgccaaaatcaagtgctgggaaatccatcatggactgtgggctgctcagtggatgtcagagcatttatgtttgaatcatctttaagtctggcggtcacaaagtg

SEQ ID NO: 491295 - DNA, 74 bp, Homo sapiens
cggaggctgagccggccgcgggcgcgaccggaggcaggactggacctcactgtgggaacaacaagatcaacaag

SEQ ID NO: 491296 - DNA, 97 bp, Homo sapiens
gccctcactccaaaggctgtccaggcgcaatgagagaagaccaagaggtcggagaagaggtagaaaatgtggcagaggccataaaggagaaaggcaa

SEQ ID NO: 491297 - DNA, 117 bp, Homo sapiens
atttgtatgtctgtgggagtggcgctttcagtcctgtctgtacttacttgaacagagggaggagatcagagggtgtcaaattgagaaccaggtagatccccaccacctacagtaaaa

SEQ ID NO: 491298 - DNA, 75 bp, Homo sapiens
cgcagcacctcctcgccagcagccgtccggagccagccaacgagcggggcctgaattaatgaataaatatgttgg

SEQ ID NO: 491299 - DNA, 75 bp, Homo sapiens
ctccttcccagccgcgcggcttcctccagacctctcggcgcggattctgaaagtcaagaagacatcatccggaat

SEQ ID NO: 491300 - DNA, 101 bp, Homo sapiens
cggcagggtggacggtgggctctaagactttgaccccgacgcaggcttcagtgattgccgcggatcagaagcctgagcactttggctcgagacaattaagg

SEQ ID NO: 491301 - DNA, 100 bp, Homo sapiens
ttcatcttcctccctgtgtactttccatttgccttcctgggggccaccttatcttagttccagaatttagtcttcctttggaatactacctaattccctt

SEQ ID NO: 491302 - DNA, 75 bp, Homo sapiens
tcgcagtggtcgcttcttctccttgacttggaacgccagttggaggagcagaagaagcaaggccaggatcacagg

SEQ ID NO: 491303 - DNA, 75 bp, Homo sapiens
ccccaacgccccggagccgccggccgctagcgtcagcgccagccaggtactccaaagattcaggtttactcacgt

SEQ ID NO: 491304 - DNA, 75 bp, Homo sapiens
ctgctctgtgtgccatggacgggcctgaggtcctttcgagactgctggggaacctggtggtgaagaacaagaagg

SEQ ID NO: 491305 - DNA, 90 bp, Homo sapiens
ggcggatggccccaggtgtaagcgcagaaagcaggcgaacccgcggcgcaataacgatacgatgaatggattaaagcagataaaatagta

SEQ ID NO: 491306 - DNA, 100 bp, Homo sapiens
atgaaatcattttatcagcatttgataactttaaagaggtgttggatcccagaacaagaatgattttattcaagatgttgactagaggaatcataacaga

SEQ ID NO: 491307 - DNA, 110 bp, Homo sapiens
tcctgagtggctgggactacaggcttgtcattcatgccttgacacctctcattcatctgagtctggcctgctggatatgcaaatgataggaggactgaaaatcataatcc

SEQ ID NO: 491308 - DNA, 100 bp, Homo sapiens
tgcctgaatacatgatttaaacaagagatttccacagaaggaccccccaaaccccccaccgagctggagcctgagccggagatagaggggctgctgacac

SEQ ID NO: 491309 - DNA, 100 bp, Homo sapiens
ctacggggccttctacagtgacggggagatcagcatttgcatggaacacatgtaggtgacctcacagtgactcaagctaccacttactgttgattgtgac

SEQ ID NO: 491310 - DNA, 100 bp, Homo sapiens
gtggcggcggtcgacatgttccaggtcccggatagcgagggcggccgcgccggctccaggatggatgacatccagctctgcaaggacatcatggacttga

SEQ ID NO: 491311 - DNA, 51 bp, Homo sapiens
ggaggagtctcagagctgtcagaaaggagttccatctggaatatgacaaat

SEQ ID NO: 491312 - DNA, 100 bp, Homo sapiens
ggtcaagtcctggttgtcaaaaaacaagggaccttccaaggcagcttctgatgatggcagcttaaagagttccaggctctcaccacacacttgttcatgg

SEQ ID NO: 491313 - DNA, 50 bp, Homo sapiens
cgttcccgttccaaatctgcagaaagaatttatccagttggcgaaggact

SEQ ID NO: 491314 - DNA, 101 bp, Homo sapiens
agacagcagtgaccctgacactggcagcgaggaggaaggtagcagccgtctgtctccgccccacagtccacgagaaactgttcaggttccattatcaaaac

SEQ ID NO: 491315 - DNA, 98 bp, Homo sapiens
tatgatgaccttacgtcagctacctatgataaggaaactttgaaaagcaccccaaagaactgatcagggggcccatatggcttcgaggttggaaaggg

SEQ ID NO: 491316 - DNA, 90 bp, Homo sapiens
ggaaggagagctgtcactttgggagcggttctgtgccaacatcataaaggttcgagaacttgtcttggacaattgcaaatcaaatgatgg

SEQ ID NO: 491317 - DNA, 100 bp, Homo sapiens
tgcaaggactgccaggtgatcgacggcaggaacgtgaccgtcactgacgtggacatcgtcttcagcaagatcaagccgtaagttcatcatcgccaacgct

SEQ ID NO: 491318 - DNA, 75 bp, Homo sapiens
tgggaggctgccactgaacttcacccatcagacacccccatggcgggaggagcagtaccatcccactgatatcac

SEQ ID NO: 491319 - DNA, 73 bp, Homo sapiens
aaagtggaagcgaagccgaaaaaggcagcagcgaaggaaatgtggctttagataatctacagataaaagaaaa

SEQ ID NO: 491320 - DNA, 83 bp, Homo sapiens
cagctccattaatgcaactaccattacactaagttcccagtgacctgacagcagaggagcgtcaagaactggagaacatccga

SEQ ID NO: 491321 - DNA, 99 bp, Homo sapiens
ttccagaacactgatcatgacaaccaacaatcagtggcagatgcctggagagccctcaagaatcccagcattggggaaagcagcattgaaggcctgact

SEQ ID NO: 491322 - DNA, 51 bp, Homo sapiens
caattatcggcgctgtgtcagcagcagcatctggaatcaagagacccatgg

SEQ ID NO: 491323 - DNA, 75 bp, Homo sapiens
gaccaaagaggatgagaaggacgacaagcccatccgagcttcctgcctgacacagctcacttcaagaagtgcaca

SEQ ID NO: 491324 - DNA, 100 bp, Homo sapiens
cccagggccaggcgccgctcagaacggcaacatgagtgagaatgaggaagaggaaatttctcagcaagaaggcagtggggactatgaagtcgaagagata

SEQ ID NO: 491325 - DNA, 100 bp, Homo sapiens
ctctgcaagttttcttcccagtcacgagatactttgtgcagctgcttatctccaggccttattaaaaagggatgaattgtaaaagcaacatcagcttgac

SEQ ID NO: 491326 - DNA, 101 bp, Homo sapiens
cgactatgttcttgtcgcctccgaccgggtggccgccagcaatattgtccagatgaaggacgcttctaccctcctcatctttggaagttgtcccagaagca

SEQ ID NO: 491327 - DNA, 90 bp, Homo sapiens
tacgaaagtcatgttacccaacaccgggcagaggcaaggctggcagcaaaacgggctgcccgggcagaagcaagagatatacgcatgaga

SEQ ID NO: 491328 - DNA, 82 bp, Homo sapiens
gaagagcgacaagccgctggcagccgcggatctcaccgccgctcaggtctgggttctgcccgcacacattcctcgccacctt

SEQ ID NO: 491329 - DNA, 75 bp, Homo sapiens
gtcgctcgtctacttcctcagcagcaccttcaagcaggacctgaaggagaagaaggagaaggtggaggagaaggc

SEQ ID NO: 491330 - DNA, 75 bp, Homo sapiens
atgacttgtattcttaaatgggcagaggttctccagcatttggctcaaggccccaagggcacatgtgacaagaag

SEQ ID NO: 491331 - DNA, 83 bp, Homo sapiens
agccgctcgtcagactccagcagccaagatggtgaagcagatcgagagcaaggatgggtttgtggagttcttccatgtagagg

SEQ ID NO: 491332 - DNA, 101 bp, Homo sapiens
gcgcaagatgttgacgttgcagacttggctagtgcaagccttgtttattttcctcaccactgaatctacaggtgagggtcccgatgtcctggtgtacagct

SEQ ID NO: 491333 - DNA, 75 bp, Homo sapiens
gaagcctcctcgccgccgtttctgagaagttggaaaatggatataccttatttgattatgatgttggactgaatg

SEQ ID NO: 491334 - DNA, 51 bp, Homo sapiens
ggcctcaacatgaatggctactttcacgaagaggagttgtacgcatgtcag

SEQ ID NO: 491335 - DNA, 76 bp, Homo sapiens
cgctcctcggaccaagcctcgggagctaagaagacttgcactatctgccagatgctgcttcctaaccagtgcagtt

SEQ ID NO: 491336 - DNA, 100 bp, Homo sapiens
caaggacagaagtgggattgagacattctcacctcctcctccgcctccaaagtcgcggaagcggtgactttcaaggatgtgatagtggactttacccagg

SEQ ID NO: 491337 - DNA, 100 bp, Homo sapiens
cagttatatttaagcatggagatgatttacgtcaagatcaacttattcttcaaatcatttcactcatggacaaggccagcgagaccgaggagaatggctc

SEQ ID NO: 491338 - DNA, 76 bp, Homo sapiens
gggtgatggactgcagagtgctggtcatcatatggatgtgaaaacagttcctcctgaggatttcagagaagagctg

SEQ ID NO: 491339 - DNA, 75 bp, Homo sapiens
tgttttttcctgtatgaagcggttggcaccactgaagtgaccgaatgaggacgactgggtttggattcagaagag

SEQ ID NO: 491340 - DNA, 76 bp, Homo sapiens
ccgtggtccttctccatattcgaggtactccaaagattcaggtttactcacgtcatccagcagagaatggaaagtc

SEQ ID NO: 491341 - DNA, 98 bp, Homo sapiens
ctttgaaacagtggggcaatgagctcaaatgggaatgatgaacaaccccaatccttatggttcaccatatactcagaatcctggacagcagattggag

SEQ ID NO: 491342 - DNA, 100 bp, Homo sapiens
atttctccgccaattcaccttgactctgagctagaaagaccctctgttaaagctgacaggacttccacacccatgctcctctcggcacctttcacccagc

SEQ ID NO: 491343 - DNA, 75 bp, Homo sapiens
gggacagcgccacctgctgacggcgcaggacgagaacggagacacgaccagttgctcttctgtgatgactgcgat

SEQ ID NO: 491344 - DNA, 142 bp, Homo sapiens
gttggggagaagaggattggaggtgtcagtgttaaaggaacctctacaacgaaggtgaagccacggaagataaggcggaagcccggctcgctgcaaaacgggcggcccgcgcggaggctcgcgagatccgcatgaaggagct

SEQ ID NO: 491345 - DNA, 98 bp, Homo sapiens
ggagggcaagaagggcaagaaggaactcgaatcatttatgacagaaagtttctgttggatcgtcgcaattctcccatggctcagaccccaccctgcca

SEQ ID NO: 491346 - DNA, 50 bp, Homo sapiens
ggagatatggcgcaactgcggcgctctggctcttgctgattgaattcctt

SEQ ID NO: 491347 - DNA, 75 bp, Homo sapiens
atccaagaaaatgctttttctcagactcatttaaaagaactgaaggagctgactgccgatgcacgggagctgaaa

SEQ ID NO: 491348 - DNA, 75 bp, Homo sapiens
agtatatgttgaagtggcctatcccaggacaggtggcactctttcagacaccattcgcttttcacccaagatgat

SEQ ID NO: 491349 - DNA, 100 bp, Homo sapiens
ctccagctaccggcccaaggccatctacctggacatcgatggacgcattcagaagctggaggagctcacagaggctgaggatgctctttctgaagccaat

SEQ ID NO: 491350 - DNA, 98 bp, Homo sapiens
ttgcaaaagaaaagtgacgtggaggatcactcggtgcacctgcttttttctgcaaatcgctgggaacaagtgaaggttgtgcaggaccagcgttccct

SEQ ID NO: 491351 - DNA, 96 bp, Homo sapiens
tgtgggtcctaagaccctcatttcaaaaggggtcccatcacataccctggaggaaggaatgttgcacggaggacgctggctggaggcgtgatcctg

SEQ ID NO: 491352 - DNA, 75 bp, Homo sapiens
aaggatttcaacatgcctctgacaatctctagtttatgacccagagctaacagaaagcagtggctctgcatcaca

SEQ ID NO: 491353 - DNA, 99 bp, Homo sapiens
cttttggccggtgacggagactgcccaggtgtggtcaccatgttcctctccgcggtcttctgtgtggccgacgacgatgccctcgctgaggagcgcatg

SEQ ID NO: 491354 - DNA, 80 bp, Homo sapiens
tctgtgcaaagcctcctgcttattctggtacaggtcaaagaggtcctctccaagctgagcacgctcgtggaaaccacact

SEQ ID NO: 491355 - DNA, 74 bp, Homo sapiens
ttcacatatttgctcaacaaaatgatcaggaaagtgactattttaccccacagggagaattccgtgtagacaaa

SEQ ID NO: 491356 - DNA, 100 bp, Homo sapiens
tgatgatgggactcagggttgtatgggattgccatgtgtggtgatgtaacaagaatctcagtacaagtgaaggtgtcagtaaagaaatgcatcaccttca

SEQ ID NO: 491357 - DNA, 50 bp, Homo sapiens
ccatgatttaaatatcggcgttaagctggaaaggcagctcatcatgcaga

SEQ ID NO: 491358 - DNA, 100 bp, Homo sapiens
cggcgtgctccggcacttggcagctggacaggcagagtgctgatgtgaaaaataccacgacaaaaccaccctagtggagccatcgaagcccccacccaca

SEQ ID NO: 491359 - DNA, 130 bp, Homo sapiens
aaccttatcagcactatttgaaacttttatctcatctggcttggcgcctgaggttctcccattaggttctgactaataagaagacgaccttctttggtggcaattctatctctatgattgattacctcat

SEQ ID NO: 491360 - DNA, 90 bp, Homo sapiens
aattagcccaagaaacattatattcatgtgacttcaggtggaacattcattggcattggacggaaaacaccagattgccaagggaacacc

SEQ ID NO: 491361 - DNA, 112 bp, Homo sapiens
actactggggccagggaaccctggtcaccgtctcctcagggggatatgagactttctactcggaatatcctgagtgttgcgtggatgtaaaacccatttcacaagagaagat

SEQ ID NO: 491362 - DNA, 98 bp, Homo sapiens
ggccggagcggcccgcgcctgggctgccggcacttcgcggcaggtttggtgcacctcgatttggaggaagtagggcagggcccttatctggaaagaag

SEQ ID NO: 491363 - DNA, 75 bp, Homo sapiens
ccgatttaaagctgagctgcgaggaaaatggcggcgggagaggcctcgtggacagagagattcaagctattattg

SEQ ID NO: 491364 - DNA, 90 bp, Homo sapiens
actggatcctcaaaccagaagaaaacctgaatctctgagggcttcctgaggctgcggtggtcacgcttcgcccgtgtcctcctcacccgc

SEQ ID NO: 491365 - DNA, 82 bp, Homo sapiens
accagctcctcagaaggcggacaccgaccctgagaacttacctgagatttcgtcacagacccaggacccgcctgccacaatg

SEQ ID NO: 491366 - DNA, 100 bp, Homo sapiens
ctacctcacagcagggatgctggaccaacctggctttcccgactgctccatcgaggcagccatggtgaagggtggctttgagtataagcgcgctatcgtg

SEQ ID NO: 491367 - DNA, 82 bp, Homo sapiens
ccagtgacgcagccgctgcatctccgccagtccgcgcagaaaatggcggctgccaggcccagcctgggccgagtcctcccag

SEQ ID NO: 491368 - DNA, 50 bp, Homo sapiens
tgagaggtctcgcattaaggctctggcagacttaattcagtgcacaaatg

SEQ ID NO: 491369 - DNA, 99 bp, Homo sapiens
gaagatgcacaagaggaaaggacccccgggacccccgggcagaggcgccgcggccgcccgccaggcctgagccgggccgggctcccgttcgggctgatg

SEQ ID NO: 491370 - DNA, 100 bp, Homo sapiens
ctaaagagatgctcaccaagaagtccacgattattcaggacagaatattcaagcacatatcacgtaacagtttaatatggaacaaacatcctggaggatt

SEQ ID NO: 491371 - DNA, 78 bp, Homo sapiens
ctgggggatgatgtggagtacgcacccctgtgttcctccctttatgaagagcgttacgtgctgccctcccagaccctc

SEQ ID NO: 491372 - DNA, 90 bp, Homo sapiens
ctcccgactctgcttaaaaccacgtggttcgatggctgccgcggctacgctgaggctctccgctcagataacaacgaacttgatgcaagt

SEQ ID NO: 491373 - DNA, 74 bp, Homo sapiens
cgcggtggaggtgttcgggctcctggaggacgagcaacgcacctcttgctttttcctccaaagtatgttatgtt

SEQ ID NO: 491374 - DNA, 75 bp, Homo sapiens
cttccagctgtttgaccgaacagaatcctattccattgcgggcagtgaggggagtatatcggcttctgctgcctc

SEQ ID NO: 491375 - DNA, 74 bp, Homo sapiens
ttgattgaaactggaagaattgacagtctgggtctggttgttgtagacgagcctttaacttcctttaggcaaag

SEQ ID NO: 491376 - DNA, 75 bp, Homo sapiens
tgagaaatgggcatacaacaattcagatgcctgggaaccactcacctccttctgtgccatgaggccacctcagcc

SEQ ID NO: 491377 - DNA, 51 bp, Homo sapiens
acctcggagacccagacaatcacagccgcttacaaacacgcagatggcaag

SEQ ID NO: 491378 - DNA, 100 bp, Homo sapiens
aattagaagaccaacttcaaggcggtcaattagaagaggtgattcttcagactatgtcttcagcagtggtgcagttatatgcagcagatcggaactgtat

SEQ ID NO: 491379 - DNA, 109 bp, Homo sapiens
ggcgaccttccttgctttcagaatttcacccaggttctgacaggtaatggattaggaattagaattgtgggtggtaaagaaatcccgggacatagtggagaaattggag

SEQ ID NO: 491380 - DNA, 147 bp, Homo sapiens
ggaaaaatggctcggactgtggcggcttcggcggctcaggttgtggtagaggcggaggctcaggcagcttgagatcttggcatatacagaagggctgcatggaaaatggctgttcacagagatacgatcaatcttttctcgtcgtta

SEQ ID NO: 491381 - DNA, 100 bp, Homo sapiens
gggagtacaatgaagtggagcccatcatcctctccggaactgtggctgcaccatctgtcttcatcttcccgccatctgatgagcagttgaaatctggaac

SEQ ID NO: 491382 - DNA, 95 bp, Homo sapiens
gactatgtccacctgtttgtggccacattgcactttccacatgcttcaaacatcaccttgtacaaggatgctgaaaacgccattcaacagatggg

SEQ ID NO: 491383 - DNA, 75 bp, Homo sapiens
cgcttggttaaaacctgacacttttaacagaaggacagaataacgggctcccagattcacaagccccaccaagag

SEQ ID NO: 491384 - DNA, 83 bp, Homo sapiens
ctgctccccaagaagactgagagtcaccacaaggccaaggtttgaataggttggtgatgctgtgtatgcagtagattcttggc

SEQ ID NO: 491385 - DNA, 80 bp, Homo sapiens
cgcgtgtcctcggagcgcggtccctgtattggtctcctgctcctagagtttcactgttacatgccttgaagtgatgagga

SEQ ID NO: 491386 - DNA, 75 bp, Homo sapiens
gtcggggctgcttgctaactccaggaacaggtacctgcctggcggggtgcctgagatctggttggagttggaggg

SEQ ID NO: 491387 - DNA, 90 bp, Homo sapiens
ctcgcaacgctcaacactcatgggaaggacaaggagccccgaggaatcatccccctggagaatctgagcatccgagaggtggacgacccc

SEQ ID NO: 491388 - DNA, 83 bp, Homo sapiens
cgactctcggcgtgcggtgatagccaagccatgggagacaagaagagccccaccagaaagacgagaatccaggacttgaatcg

SEQ ID NO: 491389 - DNA, 125 bp, Homo sapiens
aaaatataactgtgacaaaggattttaggagagtggaaaatgcttatcacatggaagcagaggatcgaggaaataacaatgtaatgagcaattatgaggcctacaagccttccacaggagctatg

SEQ ID NO: 491390 - DNA, 75 bp, Homo sapiens
gaagagacaggaggcagtagccaaacacccaggaatgaatctgaagtctgctgcagtaaaacacagaaggcttta

SEQ ID NO: 491391 - DNA, 75 bp, Homo sapiens
cttcctccagacctctcggcgcgggaagagtctgccgaaggtgaaggccatggacttcatcacctccacagccat

SEQ ID NO: 491392 - DNA, 51 bp, Homo sapiens
ccatgcctgtacctgttgaacgaagctaatagatcagttaaagcccggagg

SEQ ID NO: 491393 - DNA, 83 bp, Homo sapiens
gtcgaggtggagcgcgacaacctggccgaggacatcatgcgcctccgggagaagtgtggacactgccagcggctgcagccgac

SEQ ID NO: 491394 - DNA, 95 bp, Homo sapiens
gattctcgtgccccagcctctggactagctgagattacagctatttgtcgtagatgtccagacaagccagatcaccaagatccccattctgaaag

SEQ ID NO: 491395 - DNA, 100 bp, Homo sapiens
gcgctgctggcctttgtgagcctcagcctgcagttctgtgaagcaaaaaatttattgccatatcttggaccccacaaaatgagagattgtttctgtacca

SEQ ID NO: 491396 - DNA, 105 bp, Homo sapiens
gctctactgtgacttcagagacactgccaagcagccttagccctagtgtagaggggaagctggtggcagactccgccaagcacctgggtctgaagcacgtggtgt

SEQ ID NO: 491397 - DNA, 101 bp, Homo sapiens
ggcccaaggctgaagagacctccagcaagcagagaggagaggcaggaggcgacggtcctgacatctcacacattgcccgactcgctggtgtatggagccga

SEQ ID NO: 491398 - DNA, 100 bp, Homo sapiens
ggttgcacaataaaccgacgtttagccagattactttctatgaagacaaaaattttcaaggccgtcgctatgactgtgattgcgactgtgcagatttcca

SEQ ID NO: 491399 - DNA, 75 bp, Homo sapiens
gccgccgccgcctctttcatctcttctggggcaggggccagggccaggtacatcagctatccccgaacagaaaca

SEQ ID NO: 491400 - DNA, 82 bp, Homo sapiens
cctcccgagtagctggggctacagctacggagccgagatggctctgagtacctgatccagcacgactcggaggccatcatca

SEQ ID NO: 491401 - DNA, 75 bp, Homo sapiens
tccaacaatggaggccagtggctggtctcagatcttatgccttcattcatccggcatggtccaacaattccaaga

SEQ ID NO: 491402 - DNA, 89 bp, Homo sapiens
gatgtctgacatggaggatgatttcatgtgcgatgatgaggaggactacgacctggcactttggaaagacatgagacaggagaaagagc

SEQ ID NO: 491403 - DNA, 100 bp, Homo sapiens
catcttggctcctccattctgcttttaaactgacgacaacagtggagacttggacccaggagtcttgctgacagctcaaactatcacatctgagacccca

SEQ ID NO: 491404 - DNA, 74 bp, Homo sapiens
ttcaaaggataaatccagcaaaaagaatgtatttgagggtgataaaagaaaatgtggctgaagttacccgaagt

SEQ ID NO: 491405 - DNA, 100 bp, Homo sapiens
aaactctggataagtgtttcgaaaatgtgtgtgaattggatttgatcttccatatggataagcctcgtcacgtgttcaatatgctaaagaagtatgtccg

SEQ ID NO: 491406 - DNA, 100 bp, Homo sapiens
cgaaattccggatttccttgggtcttccggtaggagctgtaatcaattgtgctgacaacacagggtaccgtgagggttttctctggaagcgtggccggga

SEQ ID NO: 491407 - DNA, 98 bp, Homo sapiens
ctacatccagcacgagtgggctcggttcgagatggagcgggcgcactgggaggtggaacgggccgaactgcaggtcaaaatgcagatcttcgtgaaaa

SEQ ID NO: 491408 - DNA, 137 bp, Homo sapiens
gttgattcaggaaagactgtaaaactcaactctccactggaaaagataaactccttttcgccacagaaaaacttcagcgagagggaagcatcgagactctgagtaacagctcaggctccaccagcggcagcatacca

SEQ ID NO: 491409 - DNA, 99 bp, Homo sapiens
attgcagttatctgtccagaaaccagagcaagttatcaaagaggtgactggtatagtggtcccgcaactgaacttgatactgaacctgatgatgaatgg

SEQ ID NO: 491410 - DNA, 96 bp, Homo sapiens
atatacctcaaaatataagtgaagtttcaactagtcttcagaaaatacagtattgcctaagtgtaatcttgaacatgggcggtgctgtgagtgctg

SEQ ID NO: 491411 - DNA, 98 bp, Homo sapiens
gggaggctttcagccggagaagcgagtttcagctgggtaccagattgcctaccgcctggccagcagcagcccccacaccttcaccaccgtggaggtcg

SEQ ID NO: 491412 - DNA, 83 bp, Homo sapiens
taaaagacagtcctcgtcagcactgactttcagctatggaatcgccgccaccggcacggccaggccagcatggtggaccactt

SEQ ID NO: 491413 - DNA, 89 bp, Homo sapiens
gcggaacaacgtcggcgagcgggaacccttaggagaaatcttgagagtggacagcaattgtgaagatcgccagagagttctgtgtttca

SEQ ID NO: 491414 - DNA, 97 bp, Homo sapiens
gtaaagtcgagtatctggtgaagtggaaaggatggcccccaaatgatcagggccaaagcggtcagtgagaaggaagtggactctggaaacgacattt

SEQ ID NO: 491415 - DNA, 75 bp, Homo sapiens
ttcatatttggcttcaatgtcatattttggcctgtgacctcatgacccaggggattttggccttggtcacgtcca

SEQ ID NO: 491416 - DNA, 75 bp, Homo sapiens
tgaagcaaaaagaatgccctgtgcagaagactataacacagttctctggctttttggaaaactgatgcatccgat

SEQ ID NO: 491417 - DNA, 90 bp, Homo sapiens
ctaagatggcgactgtcgaaccggtggattctccacagttttcctcgtgcgtactcacggtggaatccgatgtgcattgaagcgaatgta

SEQ ID NO: 491418 - DNA, 75 bp, Homo sapiens
ccaacccgggccacgcgcaaacggcgccactgggcatggccgcctttgccaccgcccacctcctctacgtctggg

SEQ ID NO: 491419 - DNA, 129 bp, Homo sapiens
cagaccttgaaagacaaaactggcactgattcaaattcaacagaatcctctgaaacttccacagattcacatatgctgagtttaccacatcttaggagcagacagcttctttatgatgagttggatgaa

SEQ ID NO: 491420 - DNA, 100 bp, Homo sapiens
tgcacctcccgcgccgcacggtggacgaggctaagtcctatcagccatggaaacaccattgctctcttcttccggtcactgttgccaaactataccatgg

SEQ ID NO: 491421 - DNA, 75 bp, Homo sapiens
atcgtggtgaagaccgtggagatgcgggatggagaggaattgaatgatctggcacgggaccctccagcacagtgt

SEQ ID NO: 491422 - DNA, 100 bp, Homo sapiens
gatagtcgccgtgaaagcccccaacaccacgacaatccagtttcctgctaatttgcagcttcctccagatatggctcgtggacagcagaaaattcagtct

SEQ ID NO: 491423 - DNA, 115 bp, Homo sapiens
aggatacctacccaggccccacacctcccagcatcctgcccagccgacgtggggctccgccgcatgcaagagatgattgcaaggatgcaggcgcagatgcagatgcagatgcagg

SEQ ID NO: 491424 - DNA, 75 bp, Homo sapiens
cccatccgtctcaagactgtgaaaccaggtacattggggcactgggggcacgagtgatctgtgacaatatccctg

SEQ ID NO: 491425 - DNA, 89 bp, Homo sapiens
ccagactgtgagccaaggaattttgtgtttcttgccatcttacaagttgcatccaagaattgatgcccggagagctgatgaaaaccttg

SEQ ID NO: 491426 - DNA, 100 bp, Homo sapiens
cgactcgctacgcgggtcttgcgagatatctggccgcctctgccgcagctggagagactcaccgcactgtgttaaaccagatcctacggcagtccacgac

SEQ ID NO: 491427 - DNA, 82 bp, Homo sapiens
tcctaagcctgcacagccgcggcggcagcagcagtgagagatgtggacgagtgctcactagcagaaaaaacctgtgtgagga

SEQ ID NO: 491428 - DNA, 100 bp, Homo sapiens
ggcgcggctggtcggtcccaggtcccggcctccgtaatgagagcccggaaccactctttgtgccgcagcttcgcagattatctcctgctgcatactacgc

SEQ ID NO: 491429 - DNA, 87 bp, Homo sapiens
cgccgcggacctccctgcgaccgtcgcggaccatgggcgacaaagggacccggggtgagcccctccagactccgaataggagatcaa

SEQ ID NO: 491430 - DNA, 101 bp, Homo sapiens
gtctcagccttggatcaggagattattgaagtagatcctgacactaaggaaatgctgaagcttttgatccgagtgaagcctgacaggaccggtgtggtcac

SEQ ID NO: 491431 - DNA, 100 bp, Homo sapiens
ttttgacagtcgtagatacaaatttttggatgatgatggatccatttctcctattgaggagtcaacgtttccaatacttatctacaggaatcgccatgac

SEQ ID NO: 491432 - DNA, 75 bp, Homo sapiens
ctggggtcccttttgcctcagatactattttgaaggtaatattgtgccatataccagagaccagatcaaaggcct

SEQ ID NO: 491433 - DNA, 100 bp, Homo sapiens
ggaggagactctgtccttcatccgagacagcctggagaagagcgaccagctcactaagaacatggggagcatcatgacagagcctcagattacacaagta

SEQ ID NO: 491434 - DNA, 78 bp, Homo sapiens
caagatggcggccagcaggaggctgatgaaggttgatgataattagaagcatgctttccactgaacttcccgacaaca

SEQ ID NO: 491435 - DNA, 82 bp, Homo sapiens
ttatggcggcgctggagagggggcgctgagctgttggggctccctggggaagggaatgcagggttgctggggctgggcccag

SEQ ID NO: 491436 - DNA, 100 bp, Homo sapiens
cggcgagtgggggtccgggcggcggcggcgggcccggcggcgggccgaggagccgggcgcaatggagcggaagaggctttgaacttggcctactccagca

SEQ ID NO: 491437 - DNA, 90 bp, Homo sapiens
ttcgtggtgaaggtccggggcttgccctggtcttgctcggccgatgaagtgcagaggtttttttctggtatttctcaaagagactacaca

SEQ ID NO: 491438 - DNA, 75 bp, Homo sapiens
ggcctgaagacatttcctctcctcccctctggatttctcagagggtaaaggacatgttcagttttgaaattccag

SEQ ID NO: 491439 - DNA, 100 bp, Homo sapiens
ttgagaggtccaagatgcagcaggtcggaggaaacagccagaccgagagcagcctgccggggcggagccctgggcgctgcctatggcacagccaagagcg

SEQ ID NO: 491440 - DNA, 83 bp, Homo sapiens
cacctaaagttaggcggcactccagccccagctcggaatccagacgctctgcagtgtcccatcgtcttatgcggatggcgggg

SEQ ID NO: 491441 - DNA, 100 bp, Homo sapiens
tggtgaacgccttagctaagcaggtcatgaacctcctagtgccatccctgcccaatctagtgaaaaaccagctgagtcccaggagagaggcggcaacgga

SEQ ID NO: 491442 - DNA, 50 bp, Homo sapiens
tttaaacaggttcattttggaaaagttgtattccctgaatgactataaac

SEQ ID NO: 491443 - DNA, 100 bp, Homo sapiens
gacctgaaacagaaattctggaacacctatatgaaaagagtagttgaacagctacggaagaacctgatagtaaagcaagaacaaccggacaagttccaaa

SEQ ID NO: 491444 - DNA, 75 bp, Homo sapiens
aggtggagagagggattacagaaaggagaacaccttatttcagagacgagttgtactgctgtcacaggaaatgga

SEQ ID NO: 491445 - DNA, 75 bp, Homo sapiens
caaatgttgccactgctgttttagaacatataaaggtatgatctcgtgaaatcttgagagaaactgaatgacgaa

SEQ ID NO: 491446 - DNA, 95 bp, Homo sapiens
aaataaggacaaaagccaagaggaggacagttcgctacacagcaatgcatcgaggtcatcatcagatttgaaatatttaaagtggatacaaaact

SEQ ID NO: 491447 - DNA, 82 bp, Homo sapiens
ctgctgttgctcttctccgccgcggcactgatccccacaggagcggaaagaatgtcggagcgggccgcggatgacgtcaggg

SEQ ID NO: 491448 - DNA, 75 bp, Homo sapiens
caggatctgcagaagacgcagggctcaagccccatcttcccgggaagccagccgcccaccagaggagcccagcgc

SEQ ID NO: 491449 - DNA, 80 bp, Homo sapiens
gctgagattgggccccagcacctggactcaagtctctggcgaacatagacgaagtcgtgaacaaaattaggctgaaaata

SEQ ID NO: 491450 - DNA, 100 bp, Homo sapiens
cttgtctttggacaaaattgagaagaactcataaacttggcttcctcgcttctgctcctcagggaccgcagatgttcatggactgcagcccacaggccct

SEQ ID NO: 491451 - DNA, 75 bp, Homo sapiens
ctgggattacaggcgtgaaccactgcacccggcgaggatagaacacctgggactcaatgtggtgctgcagctgct

SEQ ID NO: 491452 - DNA, 97 bp, Homo sapiens
gagggagcggtcgccgcgggatttggagctgcctagcctcgcggtcggtgaaaggtgtagcagtcactcggcctacacccacagcatcgaccttgtg

SEQ ID NO: 491453 - DNA, 82 bp, Homo sapiens
agtccacccaccgccgccgcctcccaggtggtcctgccatcatggctgtcctctgcaaaggtctcctcgctcattgagagaa

SEQ ID NO: 491454 - DNA, 82 bp, Homo sapiens
tctaagcactgaagtcggtgtttggagaaaaggactcaggcaggcagtggttaaaggttcccttccacatccttttgccttg

SEQ ID NO: 491455 - DNA, 88 bp, Homo sapiens
aggattccaagtaactcttatttggtagttgtcctgggaacccctgcagaagaagatggtggtggcaaaattgatttaattgaagcag

SEQ ID NO: 491456 - DNA, 91 bp, Homo sapiens
ctcaggccagtcgcctccaggccaagagggatccttcacccgtgtctgtgtggacgaatgtggaacctcgctctgtggctgtgttcccttg

SEQ ID NO: 491457 - DNA, 100 bp, Homo sapiens
agcagctggcgcacctggtgcgggccctctggaccctggagtacaccccgcagcacagccgcgacttcaagtggtgaagcagcgcttgcagatgtacaac

SEQ ID NO: 491458 - DNA, 100 bp, Homo sapiens
ctgcccaaggacatggacggggtggagatggatgagactgaccgagaggtggagtactttaagaggtcggagctcttaggcctgctgaaaacctacaact

SEQ ID NO: 491459 - DNA, 100 bp, Homo sapiens
ctgttggcatctccccatgctcacatcagtgaacaagctgtctgggctctaggaaacattgcagatgccatgaagtacaccattgtggtgtcggctacgg

SEQ ID NO: 491460 - DNA, 100 bp, Homo sapiens
tggtggtggatgcggccaactccaatgggcctttccagcccgtggtccttctccatattcgaggtatctctgcattagccagattggacatatgtaaagg

SEQ ID NO: 491461 - DNA, 100 bp, Homo sapiens
gtacatccagcagacgaagcccctcaccctggagcgcaccatcaaccttgtgtcccggcatggatatccggaacaacctcactaggttgcatgagctgga

SEQ ID NO: 491462 - DNA, 51 bp, Homo sapiens
ttcagaccaatgccagaggagcaacaggaaatgtggctttagataatctac

SEQ ID NO: 491463 - DNA, 82 bp, Homo sapiens
agcagttctgacattttgccttctgattctaactgcaaaggagtgtgaggaagaggctgtctgtgtcattatgtgtgcgtcg

SEQ ID NO: 491464 - DNA, 100 bp, Homo sapiens
atcaacatagacattcattatggggttaaatccaatagcttcctgcctgacacagctcacttcaagaagtgcacaatgtcagaacgtggaattaagtggg

SEQ ID NO: 491465 - DNA, 73 bp, Homo sapiens
gagaatgacaccatttctaagcaacttacattagaacagacgctgactgtgatttttctcactaatgacaaaa

SEQ ID NO: 491466 - DNA, 100 bp, Homo sapiens
gagccaggctgcccggttttatagccctgcttgacctgtgtgatccgagatgctgcctggaaacattggccagaaagtaacactgaggcccatgtagaaa

SEQ ID NO: 491467 - DNA, 83 bp, Homo sapiens
gggagcggcgccgagaggccgtgcgggacgcgggcgccaggaccggccgaacgcagagtgtctttggtgcaacactaacaagg

SEQ ID NO: 491468 - DNA, 100 bp, Homo sapiens
agaagataaagctcaaagattactcaaagcaaagaaacttaccagtgatgagaggttctgtccggaagcagattctaaaaccatgttgcagtgcttgaag

SEQ ID NO: 491469 - DNA, 100 bp, Homo sapiens
ggaacgtgtccacgcgccaggttgcaggggctctcattgctgacttcttgtctggcctggtacactggggtgctgacacatggggctctgtggagctgcc

SEQ ID NO: 491470 - DNA, 96 bp, Homo sapiens
gttcactccaccgccgccgccgccgccgccgctgccgctgccgctgccgcacctccgtagctgactcgatgaagatctccttcaacgacaaaagcc

SEQ ID NO: 491471 - DNA, 90 bp, Homo sapiens
gaacaaaccctgcaggttctaagaagactcttcccggttgatcgtggattatttgagtgttcaagaaggaagtgtatcttcatacatcac

SEQ ID NO: 491472 - DNA, 90 bp, Homo sapiens
cctgggcctagattccccagctgctgttctctggaggggtgaagcggaggctggacctggaaactgaccatcagtacctggccgagagca

SEQ ID NO: 491473 - DNA, 98 bp, Homo sapiens
cttcaaggcagaataattgcagaaaatcttcaaaggtatctttcagatgaaggcattgaagcttgcacaagctctccagacaaagtcaatgtaaatga

SEQ ID NO: 491474 - DNA, 75 bp, Homo sapiens
cgtgagcctcccgcccaaggagaatgcgctcttcaagcggatcttggcgcctgtgtctggcagagctggtgtgag

SEQ ID NO: 491475 - DNA, 100 bp, Homo sapiens
gcccctgggcatcaccaacatagccatcgacttcggggagcagaattaaacaaccaccatgtcgagcaaaaaggcaaagaccaagaccaccaagaagcgc

SEQ ID NO: 491476 - DNA, 100 bp, Homo sapiens
cctccagtaagggagggcaagaagatatgaacctgagccttcagtcaagaccctccagcttgcctctctgcttatgataatgtcaacaaagttcgagtag

SEQ ID NO: 491477 - DNA, 82 bp, Homo sapiens
gccgtgtccgccgcctccatcccggccgtgcacatcaaccagagcagcccgacggccatggaggctgaagagacgatggaat

SEQ ID NO: 491478 - DNA, 100 bp, Homo sapiens
caagggacgtcttctccacgccgctccgactccaggggagccgtggcctcctctccgccctagcgctgagttctcctgtgcctcctgttggctctctttg

SEQ ID NO: 491479 - DNA, 98 bp, Homo sapiens
ttacctgcaggtattgggagatccacagctaagacgccaggacccactggaagcctagaaatgaatgtgaaagatgttgcagaagtgttccagaagtg

SEQ ID NO: 491480 - DNA, 82 bp, Homo sapiens
caagtacatatgatttcagctgcaatggcaggacctgatcccaaccttgaagaaagtcctaaaagaaaaaatattacatatg

SEQ ID NO: 491481 - DNA, 74 bp, Homo sapiens
agtgcagctgcctcagttcttagcgcagctcccctcccacccggtcactccgtccagcaagcacgcagacagca

SEQ ID NO: 491482 - DNA, 100 bp, Homo sapiens
ctcaccttggacacctcgcttgggtcctgtccctgggcgccgacgtgctgcctgagtacaagctgcaggcaccgcgcatccaccgctggaccatcctgca

SEQ ID NO: 491483 - DNA, 97 bp, Homo sapiens
ggaccttccggagcttctcagaagacagagggttttcttttgaggaacctggcttctgtatttaccatgtacctggagcattggtttggcagctgaa

SEQ ID NO: 491484 - DNA, 95 bp, Homo sapiens
ggtctattaattgttgtgatgatggtgaaggatctcaacaagcatcagaagagctaacaattgctggaatgacctttacaacttttgatcttggt

SEQ ID NO: 491485 - DNA, 75 bp, Homo sapiens
tggaggaagaattcccaagccagagctttccagtactaaggctcgtacgtctgcatcgattatcttacgtggggc

SEQ ID NO: 491486 - DNA, 83 bp, Homo sapiens
gatggcaaagacgacatccggtgcgccgaggctgctcacaaaaacaatgcagatcttcgtgaagactctgactggtaagacca

SEQ ID NO: 491487 - DNA, 80 bp, Homo sapiens
aggcttaaggtcttcagcggggcgctccaggaggcactcacaggtggacgccctgcttcatctggcccgccagaatcggg

SEQ ID NO: 491488 - DNA, 88 bp, Homo sapiens
actggctgttgaccctgttcaggcctcggtgaaggtatggcctcacaagtcttggtctacccaccatatgtttatcaaactcagtcaa

SEQ ID NO: 491489 - DNA, 101 bp, Homo sapiens
cccctgttgcgatggcgcagaaaccccgttgacaaggcactgctttttcatgacggtctggctctgggagaggagtggacagcagctggttgagatacatc

SEQ ID NO: 491490 - DNA, 87 bp, Homo sapiens
cgcccagagactgctgagcccgtccgtccgccgccaccacccactccggacacaggataaaagaatcagagtgtctcaacccttgac

SEQ ID NO: 491491 - DNA, 83 bp, Homo sapiens
ggagtgggccttggagtcggcgcgcaggcggctcgcgattctgattcccagcatagccacgaagtgatgcctctcctctatcc

SEQ ID NO: 491492 - DNA, 50 bp, Homo sapiens
caagaagagaaccttgaagcaagtgatggggccactgaggtgcaaagagt

SEQ ID NO: 491493 - DNA, 75 bp, Homo sapiens
ccgggacgacgagtacgactacctattcaaagacccaacatgagtgaagtttcctgcaagaaacgggacgactat

SEQ ID NO: 491494 - DNA, 106 bp, Homo sapiens
cttgtcagtaccattcaacaagatgctgactgggacagcgttctgtcatctcagcaaagaatggatttctctgcctcttccaaacttttcctccctgaacctgagg

SEQ ID NO: 491495 - DNA, 101 bp, Homo sapiens
tgctatttgatcttcttgcatcaagttcagctcttccttggaacatcacagtacattttaaggagctactgctttctggcatgccagaaattgatgtgagt

SEQ ID NO: 491496 - DNA, 100 bp, Homo sapiens
gtccttcacagctgtcatgacaactgcaatttccaaggtatgtcttactgaaagaaagaaacatgcttctaaccctagagcaggaggccaagcggcagag

SEQ ID NO: 491497 - DNA, 100 bp, Homo sapiens
aactgccaaggactgcagctatggggctgttactagtccaacctctacccttgaaagcagagatagtggcatcattggtatgatctcgtgaaaccttgag

SEQ ID NO: 491498 - DNA, 90 bp, Homo sapiens
ccgaggcagaggaaccggctcccaggctacagatgcacatgttgaatggagctcttctggcattgctgtttcctgtggtaaacactcggc

SEQ ID NO: 491499 - DNA, 75 bp, Homo sapiens
tttggctgtgataggagtatttttaaagagtgcctggtgaagaatgtgatgggatcactagcatgtctgcggaga

SEQ ID NO: 491500 - DNA, 80 bp, Homo sapiens
gataaatatgaaaagaagaaatactacgataaaaatgccatagctattacaaatgaactgtggctgcaccatctgtcttc

SEQ ID NO: 491501 - DNA, 75 bp, Homo sapiens
gcacctgagttaacggacgctaagcggggtaggggaagtgtttttagaagaagcatctcaacaggaaaaactggc

SEQ ID NO: 491502 - DNA, 82 bp, Homo sapiens
tgcggcgagtgtgaagtgggctgggtgctggacgagggcgcctgtgtggggaaagcaggcaggatgggagagtcgccgatag

SEQ ID NO: 491503 - DNA, 90 bp, Homo sapiens
ctagtagcgcttagtgaatatgatcaagttctcgtggagtcagacaatgagggaatagcatttcaaggttcagtggaggagaaccccaag

SEQ ID NO: 491504 - DNA, 100 bp, Homo sapiens
gacaaaggcccatattatacacaccttggggcaggaccaagtgttgctgctgtcagggaaatcatggagaatagctgtcccctttcctccaacccaacgg

SEQ ID NO: 491505 - DNA, 83 bp, Homo sapiens
aaaggaaggcgtccgttggccttcgtacccgtcttgattgaggtctcctctgagcctccggcctccataagacccaaaacaga

SEQ ID NO: 491506 - DNA, 96 bp, Homo sapiens
cacttccctcggtctgggcttctctgaggcggcgagagatggtcaggtctggagctcgaccgggccaggcacacaagccatgccccctcttttctc

SEQ ID NO: 491507 - DNA, 51 bp, Homo sapiens
gaggcggacgcgcggctgcgtcagctggatgaaaaagaaagtcggcgtctg

SEQ ID NO: 491508 - DNA, 97 bp, Homo sapiens
tgaagtatggcctcgtcccggtcatctgggcgtgcgggtcccgggttttgatcgcgcgtttgtgtaggttgaaaggattgttgacaaaaggaaaaat

SEQ ID NO: 491509 - DNA, 100 bp, Homo sapiens
acgagcggatcctgcgagagatcgagagcactgacacggcctgcatcgggcccacgctcagaacaaaacagtaagttggtggacttgaagctgaagaagc

SEQ ID NO: 491510 - DNA, 95 bp, Homo sapiens
caagcgccagatcacccagaacacaggttggttttcagaagatcctgacactgacatatgtagacaaattgatagatgacgtgcatcggctgttt

SEQ ID NO: 491511 - DNA, 75 bp, Homo sapiens
cagaactgcagggaaacagccatcatgagttaagtgggcagaccaacatccacctcagcaaaaacttcttcctga

SEQ ID NO: 491512 - DNA, 90 bp, Homo sapiens
caggactgaccgctgccgcccagcacgtccaggtggagccgccaccaaaatgcagattttcgtgaaaacccttacggggaagaccatcac

SEQ ID NO: 491513 - DNA, 98 bp, Homo sapiens
aaagggtatcatggaaggcaactgtgtttcacttaccagaatactacgttcagctaaattaaggcagaggtggaggagacactgaagcgactgcagag

SEQ ID NO: 491514 - DNA, 100 bp, Homo sapiens
cagaggtggaggcgctttgaaaggccaagaagcttgagagaagaaaaatttcagaaaaattgtctcaatttgactagaatatcaatgaaccaggaaaact

SEQ ID NO: 491515 - DNA, 82 bp, Homo sapiens
tattctcttcagagattctgcaaatgcgacaagcctcccaggctgacttcaaaatttctgaggagtgcatcgcacagtggaa

SEQ ID NO: 491516 - DNA, 100 bp, Homo sapiens
tgatagaaggcaaagttgaccagatccgagccagagtggagcgtaacgcagtggcctcatgcattgtgcgtcagcagcaatgtttatggtgaaaaatggc

SEQ ID NO: 491517 - DNA, 93 bp, Homo sapiens
gcggagcctggcgggcgtgggaacccaggccccgccgaggcggccagagtttatgtggccgaggcagacaagtggaattaggccttgctgcag

SEQ ID NO: 491518 - DNA, 75 bp, Homo sapiens
aaccgagcaaattgaagagacgttaaaatacttccgtggaaagccagatgacatcaccgtccttctttcaatagt

SEQ ID NO: 491519 - DNA, 101 bp, Homo sapiens
ggggagaaattgttgaagagttcaactttcccagaagttgttctaacgctgcctttgctttaaaacagtattacttgcggatgtgatggagctgcttgaag

SEQ ID NO: 491520 - DNA, 75 bp, Homo sapiens
ttccaccaatattcctgaaaatgattgtcagcagcctgctgcctccgtaccgccacagtgctcacaactagccgg

SEQ ID NO: 491521 - DNA, 100 bp, Homo sapiens
ccgaagttggaagtgtctcttagcagcgcgcggagaagaacggggagccaggactttccttatcccagttgattgtgcagaatacactgcctgtcgcttg

SEQ ID NO: 491522 - DNA, 55 bp, Homo sapiens
ccggcccagcttctgaagggagatgtcatgcttgcaagtagaagtctcaggcaac

SEQ ID NO: 491523 - DNA, 90 bp, Homo sapiens
gtttcattccttgtacgcctaagggatgcttggaactcatcaaagagacaggggctgatgctgcagaagatgaggaagtggatgtcacca

SEQ ID NO: 491524 - DNA, 75 bp, Homo sapiens
tgtatgcagttttatccttttctgtacaacatcacttcttctgtttgcagtggaggagagacttcagcatgcaaa

SEQ ID NO: 491525 - DNA, 101 bp, Homo sapiens
aaaagtgtggagaggttccttcaggaggatcaggtatctttcagatgaaggcattgaagcttgcacaagctctccagacaaagtcaatgtaaatgacatca

SEQ ID NO: 491526 - DNA, 129 bp, Homo sapiens
ggcaagcagtctacagagacagcagctaatgtgaaagagctcgtgcagaatttactggcctttaagaagtggcaccaacgcctggcagccaggagcccaaggagaggagctgccagtagcccaagaccc

SEQ ID NO: 491527 - DNA, 98 bp, Homo sapiens
cgggagaggcgagctcgcgatgagtggtctcggcaggctcttcgggaaggcaaccttggccatggaccagccggctggcctgcaggtggactacgtct

SEQ ID NO: 491528 - DNA, 98 bp, Homo sapiens
agcaacacaatcagaagtggaatttctcctaacctgaatgtgttacatcatgctgatgacagcttcctggtcctcaccacagatggaattaacttcat

SEQ ID NO: 491529 - DNA, 75 bp, Homo sapiens
acagtatgcattggaccagggcgtgaacgtcacccagatctcagtcctggctttctctgtctgcttcatcttcac

SEQ ID NO: 491530 - DNA, 75 bp, Homo sapiens
tccaggccttccagtacacagacgagcatggggaaggaaaagcctttacctcctctcaaagacctcgacctacca

SEQ ID NO: 491531 - DNA, 75 bp, Homo sapiens
cggcggcctcggctgaagaaagaaggtgggagcggagagcgcaggcgtggccatgacgctgatggagtacctcat

SEQ ID NO: 491532 - DNA, 100 bp, Homo sapiens
acttccatccctgtaatttcacagccccaggagatacaactcgtcaacgaatcaaattcagtgatgacagagtatgcaagagtcaccttctcaactgttg

SEQ ID NO: 491533 - DNA, 100 bp, Homo sapiens
tttttggacctgaaacagaaattctggaacacctatatgaatcatgtccctaaggaggaagctggagctccacgaggggaggggccggccatcccaggag

SEQ ID NO: 491534 - DNA, 108 bp, Homo sapiens
aggcaccatggacagcgtgcggtctgggccttttgggcagcttttccggcctgacaacttcatctttggagcaggggagagaagacagaagaggttggagaggtcagg

SEQ ID NO: 491535 - DNA, 87 bp, Homo sapiens
gatttaaagctgagctgcgaggaaaatggcggcgggagccctccaagccacaaaactgtggtgaatggaaaagaatgtataaacttc

SEQ ID NO: 491536 - DNA, 100 bp, Homo sapiens
taaaaattatttatccaacagctcctcccaggagttgatccctgaattttattatctccctgagatgtttgtcaacttcaataattataatcttggagtg

SEQ ID NO: 491537 - DNA, 51 bp, Homo sapiens
aggattccaagtaactcttatttggtctaccctgaactgcagatcaccaat

SEQ ID NO: 491538 - DNA, 97 bp, Homo sapiens
caccccggaagctgggaaatggcttattgtgtaacagaacctggagcaggctctgatgtagctggtataaagaccaaagcagaaaagaaaggagatg

SEQ ID NO: 491539 - DNA, 75 bp, Homo sapiens
tgtaaatgtgagtggaagccatgaggccaaaggcagttgtattgatgaccctaattttcagtgcaaattcaaagg

SEQ ID NO: 491540 - DNA, 99 bp, Homo sapiens
cggaacctcaagaaggaggtcagccgggtgctgtgcaagcggtgcgaactttgtcagcgagcaagaacaatgccaggaggtctggagaaaacgtgtcat

SEQ ID NO: 491541 - DNA, 50 bp, Homo sapiens
agctattgcagtgatggatgattctggtgaatatgagaagggcgtagacc

SEQ ID NO: 491542 - DNA, 101 bp, Homo sapiens
gttgcagtgttggagctaaagacccagatgatgtggtaccagttggccaaagaagagcctggtgttggtgcatgtgctttggactagcatttatgcttgca

SEQ ID NO: 491543 - DNA, 51 bp, Homo sapiens
gccccgcgtttcagccctagggaaggtattatagctgcaaatgtccttgta

SEQ ID NO: 491544 - DNA, 100 bp, Homo sapiens
accagcatggctacttcatattttggaaagcagtttttaagacaattgtggtcagaaatgagaagacatgaaatgttgagggaggagctgcgacagagaa

SEQ ID NO: 491545 - DNA, 83 bp, Homo sapiens
gtctcctccagtagacggtacagcgaaggcagagagttcagctgagcgggctttggacaccatgaactttgatgtgattaagg

SEQ ID NO: 491546 - DNA, 100 bp, Homo sapiens
gagggcatggacgagatggagttcaccgaggctgtgatgcgccgctggctgcctgccggagacgccttgttgcagatgatcaccatccacctgccctccc

SEQ ID NO: 491547 - DNA, 95 bp, Homo sapiens
tctatggctgtcagaggtgggcggctttgaccgagaggctgctggagctcgtgtttggacgccttaagagttggacagtggaggaccttcagaag

SEQ ID NO: 491548 - DNA, 78 bp, Homo sapiens
gcgccgccaccgtctgaactaggatgtcccgacatgaagactagacgcttgaagcaaagctgccatcccagaagacga

SEQ ID NO: 491549 - DNA, 96 bp, Homo sapiens
cgccttcttcctgcccgagctggtactgtaccccacgctatagtgagtttgaagagctcgagcggaaatactggaaaaatcttacattcaatcctc

SEQ ID NO: 491550 - DNA, 75 bp, Homo sapiens
gccaacgagtgggaggagtggcggcgcaggaaggagaagctgctcaaggaaaccactgttgctgcgattgccccg

SEQ ID NO: 491551 - DNA, 82 bp, Homo sapiens
ttttagacttcagtacgatgattgcagatgacatgtctaattatgatgaagaaggaacgtcaaggtcgtgggaaataaaagg

SEQ ID NO: 491552 - DNA, 75 bp, Homo sapiens
ttttacacctgcaaggtctctggaggaattcaatgatgttgggtgcctgatagacatcctaggactatacagaag

SEQ ID NO: 491553 - DNA, 51 bp, Homo sapiens
tggtggagtaggaggcaggtctccgcgggttatgtaccgaaggactctacc

SEQ ID NO: 491554 - DNA, 100 bp, Homo sapiens
ccaatgtgcacctggtgattgtgggtcctgaagaattttggagagtaaaaggctgaaccttgttaaagagaaaaccattaatcagaccatcggcaacgtc

SEQ ID NO: 491555 - DNA, 100 bp, Homo sapiens
ataacgttgaacagtcctgtatcaaaactgaagatggtttgaaacagcttcacaagggccgcgatgggcctcttggaacattggtgtgttcatctgcatt

SEQ ID NO: 491556 - DNA, 83 bp, Homo sapiens
gggcccgccatggctgcgtcggagctctacacaaaggtgagcgagtgctgtgctttcatgggcctcttctttatgaagcaaag

SEQ ID NO: 491557 - DNA, 82 bp, Homo sapiens
cttcagggtttccaccgttcgttcaaggctccccacaggtgcaggaagccgccgcccagccatggacggggaggagcagcag

SEQ ID NO: 491558 - DNA, 83 bp, Homo sapiens
taagtagtgatatttctcttttgtctgcccctattgtaagtgcagatggaacacaacagacacctagctgttgggcagaagag

SEQ ID NO: 491559 - DNA, 51 bp, Homo sapiens
gatggtgccttctatggacctaaggtaaatattgcagattttcaagagaat

SEQ ID NO: 491560 - DNA, 80 bp, Homo sapiens
aagtctcagaccttgcgattctacgattgcagcgcagtggaagtcaagagcaagcatccagcacgtgtatggtgcccagc

SEQ ID NO: 491561 - DNA, 99 bp, Homo sapiens
ccacgcgccttcctgagccgcgaggaggcacagcacttcatcaaagcgctgtaagactggaaagtacttaccagaatcgaacacgctatatggtagtgg

SEQ ID NO: 491562 - DNA, 117 bp, Homo sapiens
ttgttattggagaaacatgcagattatatcgcatcctatggctcaaagaaagatgattatgagagattcacccaggatacacaacctcactatatctattcaccccgtgaaatgact

SEQ ID NO: 491563 - DNA, 100 bp, Homo sapiens
gcctatactgccctcctcactcacttccggtggcaggttatacattggctcttcaaagacgttcacctcatcagagaaatccctgactcctttgcagtgg

SEQ ID NO: 491564 - DNA, 100 bp, Homo sapiens
tattggaagaggtgcttttggtgaagtgcagttgtgggacacagcaggccaggaaagatttcgaacaatcacctccagttattacagaggagcccatggc

SEQ ID NO: 491565 - DNA, 87 bp, Homo sapiens
gaactgcagcgagatcccgaaggtggacctgcgagtgtggcaagactgctgtgcaggaagctcttcgtgggcggtcttgactggagc

SEQ ID NO: 491566 - DNA, 98 bp, Homo sapiens
ctgcacgcgctggctccgggtgacagccgcgcgcctcggccaggcatgctgcagacagacctttccgtccttcatgaacacacgtgtggtagacagat

SEQ ID NO: 491567 - DNA, 90 bp, Homo sapiens
tggaagactaccaggctgcggaggaggaattgaaagatgttggccatcgtgatcagatggctgcagctagaggaatcctgcagaagaacg

SEQ ID NO: 491568 - DNA, 50 bp, Homo sapiens
ggaggttcttcagtgtatgcctgagctgctgcccaaagggagcaaggagg

SEQ ID NO: 491569 - DNA, 75 bp, Homo sapiens
caagacctcatcaacaattaaggttaaacactttaagatgagaaaaattgatctctgtctgagctctgaagggtc

SEQ ID NO: 491570 - DNA, 75 bp, Homo sapiens
cgagaattcccggccgctgcaaggggcaggatgacgcaaaacacggtgattgtgaatggagttgctatggcctct

SEQ ID NO: 491571 - DNA, 98 bp, Homo sapiens
cgtcgtcttcatcgtcgcggttctgctgccgggtaaaaagattgtaggtaggaagaaagcatgcggagaacccactgccctgcctaaggacacaacca

SEQ ID NO: 491572 - DNA, 100 bp, Homo sapiens
gtgacaattgtggcattacagtccatgaaggattttgtgaaaatggaaaattatgaggcattggtaggctttgatctctgtaatacaccgctctccagtg

SEQ ID NO: 491573 - DNA, 100 bp, Homo sapiens
agtctggcgccagctgccggcaacggatagaggggctgtgtcatagacgtccgacgtgtctggtgtggcagctctcagaaaagaagcaaataaacgtgtg

SEQ ID NO: 491574 - DNA, 99 bp, Homo sapiens
tgtggggctgggtctcggagtgggagacgtggagtgcagggaagtcacccggtctctgaaagatttttcttctagcaagagaatgaatactggagagaa

SEQ ID NO: 491575 - DNA, 100 bp, Homo sapiens
ctggtactactgcttgctgtggcatttggacatgctttagagagaggaccagcaacggagcgaggagctggctcgaatcatgggggagtttgagatcacg

SEQ ID NO: 491576 - DNA, 97 bp, Homo sapiens
ttctgcaacaggaggacattgaaaataagatggaacccatccacataaggtgcgagcccctatggttaatccaacattaggtgttcatgaagctgac

SEQ ID NO: 491577 - DNA, 101 bp, Homo sapiens
gctccacctctgattccaccaccggactgggactcttcaattaatctgacatttcacaaatccaaaattgccgtggatgaactctttacttcacttcggga

SEQ ID NO: 491578 - DNA, 98 bp, Homo sapiens
gtcgagcctcctgcggcgccgcgggctccagtgaacagcgtcacgctggccgtgaacctggtgggctgtctcgcgtggctgatcggaggcgggggagc

SEQ ID NO: 491579 - DNA, 75 bp, Homo sapiens
ttcccatcagtgagcattacaggtgtttcaggcctcacctgaagatcatgaaaaatacggtggggatccacagaa

SEQ ID NO: 491580 - DNA, 74 bp, Homo sapiens
atagagacatatggaccacatgttcctgagcttgagatgctaggaagacttggcactggccccctcaccttttc

SEQ ID NO: 491581 - DNA, 100 bp, Homo sapiens
gtcctcggagcgcggtccctgtattggtctcctgctcctagagggaaacagtgcttcttagtcctacgtcagcagcagtttaatgtccaggctcttgtgg

SEQ ID NO: 491582 - DNA, 100 bp, Homo sapiens
tgcgaggaactgttatgcaggctcctgctgttcggcaggtcaatccccaaaataccacatctgtgtgtcacggcccaccctgtcgccagcttcatcatgc

SEQ ID NO: 491583 - DNA, 90 bp, Homo sapiens
cccaaatctgtcgtccctgcccccaggtcatctggggacctggagaatgatgagcaggcagccagtgccatctctgagctggtcagcaca

SEQ ID NO: 491584 - DNA, 101 bp, Homo sapiens
cggccggcggcggctgcgggctgagcggcgagtttccgatttaaagctgagctgcgaggaaaatggcggcgggaggtcctggatgcctcatcccttagttt

SEQ ID NO: 491585 - DNA, 83 bp, Homo sapiens
ccccgcgctgcggcctggcggcttccaggcgcactaccgcggttttggctacgggcctccacctccaccgccagatcagtttg

SEQ ID NO: 491586 - DNA, 75 bp, Homo sapiens
cgcaggaggatgaagctgctgctgggcatcgccttgctggcctacgtcgcctcgagtaaccagctcataaatcac

SEQ ID NO: 491587 - DNA, 100 bp, Homo sapiens
ctcctcggtatcagaagctctgtaaggctgcctgagcagattcacccatgcaaaccgccactgtccgaagcacccctacgccaggctgaagagagaggag

SEQ ID NO: 491588 - DNA, 100 bp, Homo sapiens
cagaaacctcacagaacacagcaaaggtggctcgaacatggcacaagttgataaaaacacggcaggaacaaggtgcagaaaatgaagagcttcatcaact

SEQ ID NO: 491589 - DNA, 137 bp, Homo sapiens
tctctgaaagagaacaaagtaattttctgaagggaagctgcagaatatggaaaacatatattggagctacatggatggtgctgctttaataagaatgctggctaattttatgggccattcagttttccagaggggtt

SEQ ID NO: 491590 - DNA, 100 bp, Homo sapiens
cttgccttcaagaataactgcgaactacttacaaatcttcctattttcaagctgaaagaatctactgttagaagaagatacagtgactttgaatggctgc

SEQ ID NO: 491591 - DNA, 83 bp, Homo sapiens
atggcggctgacagtcgggaggagaaagatagcatcaggtcctgattttgcttgccctgtgtgggagatggaatttggcaaga

SEQ ID NO: 491592 - DNA, 142 bp, Homo sapiens
caccaccctcccaccctccttcctccgtgtggacgatagagccacatccagcaccacggacagctcccgggcgcaagaaggtggctgtgtacaagctaggaagagggccctcagcagaaccatcctggctgaccatgtaggc

SEQ ID NO: 491593 - DNA, 101 bp, Homo sapiens
ccatcaccgaccagagcctggacgaggcacaggccaggcatagaatgtcaagctaaccaggcgtccgctacttcagaagagtgtactgtcgcatggggagt

SEQ ID NO: 491594 - DNA, 90 bp, Homo sapiens
ttgagcactacagacctcacagtgccaaatggagctggaagcagtccagtgggctttgatttgttggagaaactgttaccagaaaaacag

SEQ ID NO: 491595 - DNA, 99 bp, Homo sapiens
gcacagctttaacgtgcccatgcagctgcggatctacgagatcgaggacaggacgcggagatgcagaggatgctatttatggaagaaatggttatgatt

SEQ ID NO: 491596 - DNA, 76 bp, Homo sapiens
atgttgatggcattccagaatatctcagatgagcaggtctatgttaacaatgaatgggcaaccagtgttggggaag

SEQ ID NO: 491597 - DNA, 97 bp, Homo sapiens
gacatccagattgtagagaggaagaagtccgctgacgtgctaggcgatatgaaaggtgaggtctatccatttggcatcgttgggatggccaacaaag

SEQ ID NO: 491598 - DNA, 50 bp, Homo sapiens
atattccggaggtagaaggcgtagaacagagacagggtcttgctatgttg

SEQ ID NO: 491599 - DNA, 80 bp, Homo sapiens
gctacactgaagatgaagcaaggcccaatgacccaggcgcttcttaatgaagaggataactcagaatcatcggctataga

SEQ ID NO: 491600 - DNA, 75 bp, Homo sapiens
cgtctccgtgtggcaccgcgagctccgcaaaggacatggtccggcgaggagagatcatcgacaatgacaccgagg

SEQ ID NO: 491601 - DNA, 75 bp, Homo sapiens
ttttgaagtcatttcacatcgaagccatgatttaaatatcggcgttaaggtgtggccgacgacgatgccctcgct

SEQ ID NO: 491602 - DNA, 75 bp, Homo sapiens
atggtgccgtcgctcatcaagcagcaggtccttaaggtcattcccaaaagcaagttcgtcttggtgaagttcgac

SEQ ID NO: 491603 - DNA, 75 bp, Homo sapiens
gcggggaccgcgctcaagaggctgatggccgagtacaaacggtgatctgcagcctgtcctggtgacgttgaagga

SEQ ID NO: 491604 - DNA, 76 bp, Homo sapiens
gatgttagagaactacagaaacctggtcttcttggaaatcttctctacatataccctcagagtcttaattttgcca

SEQ ID NO: 491605 - DNA, 97 bp, Homo sapiens
atttaattttagggtcctttatatagaagggagagtaggtttacatgaggatccacaaagtccacctcctctccctgctgaaaaacctattggaaac

SEQ ID NO: 491606 - DNA, 83 bp, Homo sapiens
gacagattcgcagtggtcgcttcttctccttgcgtggtgatggtggatgaggcacacgaaaggaccctacacacagacattct

SEQ ID NO: 491607 - DNA, 100 bp, Homo sapiens
ggaacatggccaaggggtccttctactcctaagagggggctgtatgtggaattgcaaggccaaagacatctcgggtcaactcttctcaggaccagatcca

SEQ ID NO: 491608 - DNA, 100 bp, Homo sapiens
ggcgggaggctcggcggcgggcggcagcatgtcggtggcggggctgaagaagcagttctacaaggcgagccagcagaaaggacccaggagcgataacagt

SEQ ID NO: 491609 - DNA, 100 bp, Homo sapiens
agaacctggcttttagctgaactaaggagaaagtcctacaacagtttggcgtgcaacatggggcttgagaaagggtggaaaggagactatggaaccagga

SEQ ID NO: 491610 - DNA, 100 bp, Homo sapiens
tgatcggcatgtccaccaaggcaggactcgggcagccgcaagtagctcctccagcgccagcagccagcccagcagcaagcagcaggccccagccgcagaa

SEQ ID NO: 491611 - DNA, 83 bp, Homo sapiens
aagtggcttgcttgagttgacacagggagctccaggactcaccctcaggagctagagttaatgccaaagacagcaaatggttg

SEQ ID NO: 491612 - DNA, 82 bp, Homo sapiens
gaggagcggcctccacggaagccaagctggccgagcagtcaatggcagtaatcctgaaggtgaagatcctgagagggaacct

SEQ ID NO: 491613 - DNA, 100 bp, Homo sapiens
ggagcccggccccggggaactagggagcgtctccggctgcacagcgctcaggaagaggcagaaatccaggcagaacttgaacgtttggaaagagtcagaa

SEQ ID NO: 491614 - DNA, 51 bp, Homo sapiens
gcatcctagtggaggacgcccctgtggatcaagtcttccataccagggacc

SEQ ID NO: 491615 - DNA, 82 bp, Homo sapiens
acgagaaggacttacgacgggagatcagctatgccattaagaacatccatggagtcaggtgtccctggccagtgtccttcca

SEQ ID NO: 491616 - DNA, 74 bp, Homo sapiens
agagcgtgaccgagagcgcgaatatcgtcatcgttagaaggtgactgaaaactcctgaggcatttcctggacta

SEQ ID NO: 491617 - DNA, 100 bp, Homo sapiens
gtaaaagttcctggtgaatatcgaagaaaggagaacggtcacaacattctgaaattttttggttattgtaatgatgttgatcgggagttgagaaaatgcc

SEQ ID NO: 491618 - DNA, 100 bp, Homo sapiens
cgctcctggggcagccccggcccggccctgcccggcggccctatgccgggggtgccgctcagttgatgatggagaggttccgctgagggagaaagagaag

SEQ ID NO: 491619 - DNA, 100 bp, Homo sapiens
ggaccagttcccagaggtgtatgtgcccacagtgtttgagaactatgtggcagatatcgaggtggatggaaagcaggcggcttcaatgatccatcctaaa

SEQ ID NO: 491620 - DNA, 119 bp, Homo sapiens
gggcaccagagttgggacggcagccctcagtgcctgccatggactgggttacacatcattttggaatgactgtatatcatctggattacgtggctgtatgttaattgaattagcattga

SEQ ID NO: 491621 - DNA, 75 bp, Homo sapiens
cccaagagcagcggaaaatgatccagtcacagagatgcccgagtggtaaaagacatggcaacaggaaagtctaag

SEQ ID NO: 491622 - DNA, 87 bp, Homo sapiens
agtatgtcattaacaaggaacggaaaggagattacttggggaaaactgtccaagctttcaccaacaatcaccagtggtttacacaac

SEQ ID NO: 491623 - DNA, 73 bp, Homo sapiens
aaacagtggataattttgtggccttagctacaggagagggtttcttgaattcctctgagctttctggacttcc

SEQ ID NO: 491624 - DNA, 72 bp, Homo sapiens
tcaccgccctggcgcccagcaccatgaagatcaagatctgcaagagccagagccccacatgccagatgtgtg

SEQ ID NO: 491625 - DNA, 75 bp, Homo sapiens
agattgtgaagcaatagcctaagatactgcttcaagaactgggtcctggagatggtatcgtcatggcgttcgata

SEQ ID NO: 491626 - DNA, 75 bp, Homo sapiens
aaaccacgagttggaaaagctgctaaggacactttcttcatgagcaacaaaccccaaagatacaaagacaagcta

SEQ ID NO: 491627 - DNA, 100 bp, Homo sapiens
cttttaaaaaaacattctacccaagtctacctgggaccgttgaaggcattcaaggtggccctcttggatgtgttccgggaagctcatgcgcagtcaatcg

SEQ ID NO: 491628 - DNA, 100 bp, Homo sapiens
cggcggcggcggaggctgccatggacgacgaggaggagacgtaccggctctggaaaatccgcaagaccatcatgcagatgggcaccaacaaatgcgccag

SEQ ID NO: 491629 - DNA, 75 bp, Homo sapiens
attccaaagaactcggagatgcctggaatacagtaagcattccttcctagtagcttctgtatgtacactacgttg

SEQ ID NO: 491630 - DNA, 90 bp, Homo sapiens
ctggaggtaccggctgagctggctgggctcttgcaagcagtggcagtgtggcaaaggagcagagaactttgacaagttcttcacacgagg

SEQ ID NO: 491631 - DNA, 100 bp, Homo sapiens
gctgcggcgcctgggactgcaccgcaccgagggcgagctccagcccgtggaacacagagcattcctaatgacagtcctgcccggggtgagggcacccatt

SEQ ID NO: 491632 - DNA, 98 bp, Homo sapiens
aagaactcaagcctctctgcaaggagcccaatgcccaggagatacttcagaggctgggtgttcatgaaaaaaatgcacaaaatcctgcctggccggaa

SEQ ID NO: 491633 - DNA, 78 bp, Homo sapiens
ttctgctgctggtggggctcacggcgcctgccttggcgctggccggctacatcgagacggccgaagccctgcagccca

SEQ ID NO: 491634 - DNA, 82 bp, Homo sapiens
cccggccggtccctcgcctcccggccgagctgacgcactgccagtgaaagatgtagaagataaacctgaacaacaaaccaga

SEQ ID NO: 491635 - DNA, 83 bp, Homo sapiens
ggagctgccaacattgccaacgccaccgccacgctacacacaggttttaaatgcacagagagcaggatacaaggcagccatag

SEQ ID NO: 491636 - DNA, 101 bp, Homo sapiens
gacggcggagaggcgccccccgcagcaggacggggaggtttactgcatcgacgcgcggttctacgggaacgtcagccggttcatcaaccaccactgcgagc

SEQ ID NO: 491637 - DNA, 50 bp, Homo sapiens
ttacgcatttccacttctaatggatctgtgccagttcagaagcaggcgag

SEQ ID NO: 491638 - DNA, 100 bp, Homo sapiens
gcggaggcgcgcggaacagtcgccgaggcgattcccgcccaggggccaccaaggacatggggaagatgctggggggtgacgaggagaaggacccagacgc

SEQ ID NO: 491639 - DNA, 82 bp, Homo sapiens
ctactacaacacggctgtcaagctggcgcgccagagcggcatcgagatgggcccaaaagcacaagaactggaggtttcagaa

SEQ ID NO: 491640 - DNA, 98 bp, Homo sapiens
cggcgtaactatcgcctgacaggatgtccagctcgccgctgtccaagaaacgtcgcgtgtccgggcctgatccaaagccgggttctaactgctcccct

SEQ ID NO: 491641 - DNA, 101 bp, Homo sapiens
atggaggtctacatcccgtcctttcgctatgaagagagcgacctggagcggggatacacggcactggagatattattgctgtcatgataacagaattgagg

SEQ ID NO: 491642 - DNA, 75 bp, Homo sapiens
gcgtgtcctgaaggagttccaccaggccgggaagcccatcggccaacacaagccatcagccccatgctcagctcc

SEQ ID NO: 491643 - DNA, 100 bp, Homo sapiens
attctgcttcaagttcccggctcccaggtttattctcccatagcatgtgccttgaaaagatcttttgaggtcgaggaggtcgagacacccaactccaccc

SEQ ID NO: 491644 - DNA, 90 bp, Homo sapiens
gctaccggcgggagctgggtcaccggcttgaggggctgcgtgaggcgcggaggcagcactgctcagcacgcaggcatgtgaggaagctgg

SEQ ID NO: 491645 - DNA, 98 bp, Homo sapiens
ggcttgccaccttcagcccccccgcgaacgcccaaggatgctgatatgctaactggtgatgagcaagtatggaaggaagttcaagaatccctgaaaaa

SEQ ID NO: 491646 - DNA, 75 bp, Homo sapiens
gccgttcgttcgtttccagcctcaggaatttatggtcgcctttttgaatgagggggatatgagactttctactcg

SEQ ID NO: 491647 - DNA, 100 bp, Homo sapiens
gtcaacactgtcgctaatgaagtatacaagtataattttcctcacacacagttacttgccaagacgattgaatttgctgacctctctgaggctgccaacc

SEQ ID NO: 491648 - DNA, 75 bp, Homo sapiens
ggcgagaatcggggtccagcacagatgatggcgacagcggagaagggaaggcccgccacgatgactatcatggtg

SEQ ID NO: 491649 - DNA, 82 bp, Homo sapiens
gcccctgccgtgtggacccgtaaaataaaatgggtggcagggtaaagacttggaagagacgctggttcattctgactgacaa

SEQ ID NO: 491650 - DNA, 100 bp, Homo sapiens
cgacattgtggccaagtgccatgaggagcagctggatcattctgtccagtcatatattaagatgaaaggttgtatcaaagttcttaaggaccaacctcct

SEQ ID NO: 491651 - DNA, 80 bp, Homo sapiens
cagcgtgctgctggaaagcaatccttacaggagacccctaattgaccagtgctgtccccggcataggtccatctctgcag

SEQ ID NO: 491652 - DNA, 100 bp, Homo sapiens
tgaagaactgatccaggggacaaaagaggggaaactgagagttcccaattaataatgaagcagccaggtctctagacaaactttataactttgctgattg

SEQ ID NO: 491653 - DNA, 100 bp, Homo sapiens
tcgtgctcatctcctactgtcccacggccaccgaagaggtatgatctcgtgaaatcttgagagaaactgaatgacgaatgaaactattgttcctgtttca

SEQ ID NO: 491654 - DNA, 74 bp, Homo sapiens
tggtggtggagatggattttttcctagtgtgcctgtgtgtggggcctgcggcctcaccatggacccagaatgcg

SEQ ID NO: 491655 - DNA, 75 bp, Homo sapiens
ctatggttatctgcagagggagtcatgctttcaaggacctcatattgaatttagtggaagcttttgtagaagatg

SEQ ID NO: 491656 - DNA, 75 bp, Homo sapiens
caagaatccaaagaaaacaaaatggtggtatcatggcatcaagcatgatggaaccatgtgtgatacctgccgcca

SEQ ID NO: 491657 - DNA, 101 bp, Homo sapiens
ataaaagagaaagatagatgccctctctcttcatcttcacttgaaataccggatgattttggaggattgacatgtacgtggaggggacactggatctgctg

SEQ ID NO: 491658 - DNA, 75 bp, Homo sapiens
aagaaggttcaaacaaatttgcaaatgatatacaacttctaaggaaggacacgtctgccacatcccagtcagtta

SEQ ID NO: 491659 - DNA, 115 bp, Homo sapiens
ggaacctctatgccgacatcgacgccgcctggcaggccctgcgcaccaggacccctcgtccagtcattgtggaacccatggagcagtttgatgatgaagatggcttgccagagaa

SEQ ID NO: 491660 - DNA, 87 bp, Homo sapiens
cgctctggctgtgctgcgcgacccccgcgcatggacctcagcagccatgtcgaagccccatagtgaagccgggactgccttcattca

SEQ ID NO: 491661 - DNA, 88 bp, Homo sapiens
gttgcagtatgtggccagttatttgcctcagtaaaagagtatgtgcaggtgaaatttgtctgcattcggacccaatcaaacaggaaga

SEQ ID NO: 491662 - DNA, 98 bp, Homo sapiens
ctttttcaaagcccaatattgaaggtgccccaggggctcctattggaaataccttccagaggggtgtttgatgcttccctcaaaatggctggcttcta

SEQ ID NO: 491663 - DNA, 100 bp, Homo sapiens
gcacggacgagcgggagggacccttctccggcctgatgcgacccggcacaaaacagcgttctcacggctcaccagccccaagcaccagctccacgtgtcg

SEQ ID NO: 491664 - DNA, 100 bp, Homo sapiens
cggtgcgattgcatgaggatgctgaggctgtcctgtcctcgtccgtctcatcaaagggtggactccgacgaccagtggggagagtactcctgcgtcttcc

SEQ ID NO: 491665 - DNA, 100 bp, Homo sapiens
acagcgggcttgatgtgcttaaaagctgctgttggagaaatcagcatgttaaaacaactgttgatgatagctgttggagtaaagttgcagtggaagctat

SEQ ID NO: 491666 - DNA, 75 bp, Homo sapiens
aggcggccgccgcagcccaggcgcgggggcgacgacagatacactctgtgcagttttagagagagacacactcag

SEQ ID NO: 491667 - DNA, 82 bp, Homo sapiens
gaagcctgtaggaaagcggaagcggcctggcaggggaaggatcgaggtggggcaggagaccctgtaggaggaccccgggccg

SEQ ID NO: 491668 - DNA, 100 bp, Homo sapiens
ccctcaaaagaagatgacagcccgcagagagttaacttctgtttacatggaactcagacatctgcaaatcatggttctaaggcccagcagctactacaag

SEQ ID NO: 491669 - DNA, 90 bp, Homo sapiens
agctgacggtggaggttcgcggctctaacggggctttctacaaggtgtgtgccctcttcctgattctggagaaaaatgccggtccggaag

SEQ ID NO: 491670 - DNA, 82 bp, Homo sapiens
ggaagaagaagaagagcatgatcggcatgtccaccaagaacccagcgggtgccgcttctccacccgaggcttccacctccaa

SEQ ID NO: 491671 - DNA, 75 bp, Homo sapiens
gcaaaattttggatggattttccttggcttctaaacctttatcttctaagaaaagtttcactcttgttgcccagg

SEQ ID NO: 491672 - DNA, 83 bp, Homo sapiens
cccaatcttgatgctttaatacagaaccagcatgactccaagccccctgatccttgatcagaactacattaacaccaaaaatc

SEQ ID NO: 491673 - DNA, 98 bp, Homo sapiens
gaaccactctttgtgccgcagcttcgcaggtgctgttggcagcagcggtctgcacaaaagcaggaaaggctattgtttctcgacagtttgtggaaatg

SEQ ID NO: 491674 - DNA, 100 bp, Homo sapiens
gttcctgatgttacaaatgaacaaggatctcccagagtaagcaggaaattcacaggaggtctgctcggctcagaaacactaaatacaaatctgctccggc

SEQ ID NO: 491675 - DNA, 100 bp, Homo sapiens
gcggtggagactctgtccccggactgggagtttgaccgcgttgacgacggctcgcagagtgaatcatccatgataatggaaatagaactccagagccagg

SEQ ID NO: 491676 - DNA, 75 bp, Homo sapiens
caaagaattatcatgcctggcagcatcgacaatgggttattcaggagttacttaaagatccactctacattggac

SEQ ID NO: 491677 - DNA, 100 bp, Homo sapiens
acccactttgactccgatgagccatggacgctaggaaatgccaaccatgacggtgcccggcggcggcggcgagtggagcaccacgctgctgtccccacgc

SEQ ID NO: 491678 - DNA, 83 bp, Homo sapiens
agacaattgctctgatagtgattcatcattgaatcaggaagaattcagggaacttcgagaacagccaagtgaccctcaagctg

SEQ ID NO: 491679 - DNA, 120 bp, Homo sapiens
ccctttctcctcaaccagtgtggatcccttctctattacctcaccttggcatcgacaggtttatcaggtagaagatgtgtgtgaagaagaaatgccagaagagtcagatgaatgtgtccg

SEQ ID NO: 491680 - DNA, 103 bp, Homo sapiens
ccttcagcgaggaagctacacttttcaccaaggaactggtgctgcagcgagagataacgaaggaggcccaacttcattcaataaggagcctgacggatttatc

SEQ ID NO: 491681 - DNA, 82 bp, Homo sapiens
tggaggttcttgtctcccctggtttgtgaagtgcggaaaaccagagggggatatgagactttctactcggaatatcctgagt

SEQ ID NO: 491682 - DNA, 75 bp, Homo sapiens
tatgaagcggttggcaccactgaagtgaccgaatgagaagttatagaccttactcatgataacaaagatgatctt

SEQ ID NO: 491683 - DNA, 82 bp, Homo sapiens
ggaaaatcgcaaggaagccgggtgacttaagagattaaaattaatttggttgctgttggttctgaacaaataatgagttctt

SEQ ID NO: 491684 - DNA, 90 bp, Homo sapiens
ggcgacagggccgattccggagtggactattgcccagaagaaaagatgtttggttttcacaagccaaagatgtaccgaagtatagagggc

SEQ ID NO: 491685 - DNA, 96 bp, Homo sapiens
cggcgactggccacagtgatcactcatgtcggaggaacatatgcagcagaaaaaagaggaggaagaagttcttaaagaagtaactgcacatttcca

SEQ ID NO: 491686 - DNA, 100 bp, Homo sapiens
atgaactaaataatctcctgtctaaaggattttttaacctggccctgctaatcgaggaaggtacgataatcccacaccatatcttggatttcttggaaat

SEQ ID NO: 491687 - DNA, 98 bp, Homo sapiens
acatggagaaccacagttgctttgagcacatgcaccacatacctgcgaatcaggaaacccaggcccaacggcaggtggatgcaagaagaaatgttccc

SEQ ID NO: 491688 - DNA, 93 bp, Homo sapiens
caaagttttgcagatcttcaacaagaggacccaggagaaattcgccctcaaaccgcttacaaacacgcagatggcaagaagattgatggcagg

SEQ ID NO: 491689 - DNA, 76 bp, Homo sapiens
gtccagcaactccagcctgtccggctcgtcggtgtcctccgtccctgagattctgcagctcagcgatgccctgcgg

SEQ ID NO: 491690 - DNA, 50 bp, Homo sapiens
gaagtggagaccagcagaactccaccaggcatccgtgtacaagatttgca

SEQ ID NO: 491691 - DNA, 75 bp, Homo sapiens
cgaggccggacgcacctctgtttgggggtcctcagataaagtcagacctaaagccaaaaggaaagaagaaccaag

SEQ ID NO: 491692 - DNA, 87 bp, Homo sapiens
aatccaactatcaaggcctcccagtacgttgtgtgaagagtatcattcgacagatggagcctcgctctgtcgccaagactggagttc

SEQ ID NO: 491693 - DNA, 101 bp, Homo sapiens
ggcctacgtgaacaacctgaacgtcaccgaggagaagtaccaggaggcgttggccaaggattgaagaattagggtctgaaggaaaagtagaagaagcccag

SEQ ID NO: 491694 - DNA, 90 bp, Homo sapiens
caaggagaaggatcgccaggtgctggaggacttcccaacggcacgtgtggttctcaaatataggcattctgatgggaacttgtgtgttaa

SEQ ID NO: 491695 - DNA, 50 bp, Homo sapiens
aggaagaggacgtgggaggaaagaaacagtgtatgggtttcgacagacca

SEQ ID NO: 491696 - DNA, 75 bp, Homo sapiens
cagaaggcacagtgcctctgaccagcatcgtctgtaaagctagagatgatcgctatggaaaatcctgcagacttg

SEQ ID NO: 491697 - DNA, 75 bp, Homo sapiens
cgcgcctggcacgatcgcccgtcggggacctggagccccggacagagaggcatttgacattgtgcagcaaagaaa

SEQ ID NO: 491698 - DNA, 111 bp, Homo sapiens
ccaatgctcaccgtaagcctttggtcataatcgctgaagatgttgatggagaagctctaagtacactcgtcttgaatagagaccttgtacacagacagacggctagtgcag

SEQ ID NO: 491699 - DNA, 75 bp, Homo sapiens
atggagaagggacagacatcaacttttggatccaagctggagtgcctgctccatcaagtatgatggtgaaggatg

SEQ ID NO: 491700 - DNA, 100 bp, Homo sapiens
cttattcctgtccggagacagcctaagggttgatgggacagaagtaacatgccaggtggctgcatctcagaagtctgttgcctgcgatgtaggctaccct

SEQ ID NO: 491701 - DNA, 100 bp, Homo sapiens
gtagagaggaccccggtacatctgaaagccgggaaatgcctgttcgacatgggcggtgagtattactgcttcgcttccgacatcacctgctcctttcccg

SEQ ID NO: 491702 - DNA, 51 bp, Homo sapiens
ctcctgagtagctgggactgcagttcgaagcattcagcaaacaatggcaag

SEQ ID NO: 491703 - DNA, 100 bp, Homo sapiens
tcctgctgctcagcccacagggagcccactccttcatcaacgaggaattgagtgatctacagcgcgatccacctgctcactgttcagctggacctgtggg

SEQ ID NO: 491704 - DNA, 109 bp, Homo sapiens
caagctcttcctgaacgaagtggccaagaaggagaagcagctgcggaaaatgctagaagggggatatgagactttctactcggaatatcctgagtgttgcgtggatgta

SEQ ID NO: 491705 - DNA, 83 bp, Homo sapiens
ggggacccgggacgacgagtacgactacctattcaaagtgcagggctcgcggcctggcaagaatgtacagctgacagagaacg

SEQ ID NO: 491706 - DNA, 98 bp, Homo sapiens
cagctatggaggtggtgaaattcgtgaactttttgttggtaaatggcttccaaactgcagcttacagttcaagctgaatgcccaatgcacttggagga

SEQ ID NO: 491707 - DNA, 75 bp, Homo sapiens
gatccagcctgcggagcctgtggggcagcaccagatactgctacaccatctcatcggcatggacctatatgtggc

SEQ ID NO: 491708 - DNA, 74 bp, Homo sapiens
tgatggcccctacctggtgatcgtggaacagcctaagcagatttcgctccctccattgtctgctctatccagat

SEQ ID NO: 491709 - DNA, 82 bp, Homo sapiens
cggagacagcggcatctccgacgccatggaaggtttggtgcacctcgatttggaggaagtagggcagggcccttatctggaa

SEQ ID NO: 491710 - DNA, 98 bp, Homo sapiens
cttttcacgtcacctggagagatgcacagctctggcaggctgccctgagcacgctcaaccccaaccccacggacagctgtcccctctacctgaactac

SEQ ID NO: 491711 - DNA, 99 bp, Homo sapiens
cttgaaaaaaaaaggagagaagctgaagcattgcttcaaagcatggggctaactccagaatcccccattgatcggtttgggcttggccagccaggaaga

SEQ ID NO: 491712 - DNA, 75 bp, Homo sapiens
aagcgctttgatttacagcagctgcaggattgtcagtggcttcgccccgaggagagctgactgccctgggctgct

SEQ ID NO: 491713 - DNA, 100 bp, Homo sapiens
cacatagccaacatcgggcgcctggtagaggttgaaggggcccggccaggactcggggaagggtggcctgagagcagcgatgacctctggggtcactgtc

SEQ ID NO: 491714 - DNA, 100 bp, Homo sapiens
ctggcatccaaatatccagattttaagcagcatgttcagataaatctgaatggaagagtgaggtgcagtggaggcttgcctcttgcatcagctgagacgc

SEQ ID NO: 491715 - DNA, 82 bp, Homo sapiens
gttaattcaacagttcaccaccattaccgacctcctgccccccgaggtctgcagtctcctgaacccagcagccatctacgcc

SEQ ID NO: 491716 - DNA, 75 bp, Homo sapiens
gggaagtcgcctctgtgctcgccatcaagccctgtcgtcctatgaccaacaatgctggcagacttttccactacc

SEQ ID NO: 491717 - DNA, 100 bp, Homo sapiens
gaggcctcctccaagccggccaattccccccgcaccaaattgcatcgtttcccagggcaatgacatcattgcagcagccaagcgcatggctctgctgatg

SEQ ID NO: 491718 - DNA, 74 bp, Homo sapiens
ccggtgtctgctcctgtcgccttcgcctcctaatccctagccactatggatgactcactggttgtgtggaagga

SEQ ID NO: 491719 - DNA, 75 bp, Homo sapiens
gcgcggagcagaaagcagaacccgcagatcatgagcgtcttgttgttcatcgagcactcagtagaggtggcccat

SEQ ID NO: 491720 - DNA, 82 bp, Homo sapiens
cgcaaccattgacgccatgtcgggttattcgagtgaccgagaccgcggccgggaccgaggaggcctgtgggagcaaatctgt

SEQ ID NO: 491721 - DNA, 100 bp, Homo sapiens
acacaaacttggtataccttgctacaatagcagattctaatcaaaatatgcagtctcttttaccagcatgcacaaccacatgtggacatgggtatcagat

SEQ ID NO: 491722 - DNA, 75 bp, Homo sapiens
ggcaacagcaacacctacataacatgccaccatctgccctcagtcagttggggcaagaagttccacatgagggcg

SEQ ID NO: 491723 - DNA, 100 bp, Homo sapiens
caagaggaccctgcggactactgcaaaggtacaccaggggttggaaaaaccacactaggcaaagaacttgcgtcaaaatcaggactgaaatacattaatg

SEQ ID NO: 491724 - DNA, 96 bp, Homo sapiens
caggcctacagggaaggggacgaagataatcaacctctagccgggcttgttccaggtgttggggcgatgtttcctgactgtggtgcaagtccattt

SEQ ID NO: 491725 - DNA, 82 bp, Homo sapiens
aagcaggactgcgccgcgtcttcctcaaggagcatattaatgaaaagtgccataaactgaaaaaccaaacatgagggtagca

SEQ ID NO: 491726 - DNA, 99 bp, Homo sapiens
agttcgtctcttacgtctgcggaagtgcagctgcctcagttcttagcgcaggtctcgtctacagaggactggtctttcaatagcaagttttcacttcat

SEQ ID NO: 491727 - DNA, 98 bp, Homo sapiens
tcagattgatgattcctcacttcatgcagtaattacattcaagacaagagcagaagctgaagcaatatattcgactttatgggagaaaatttagcaaa

SEQ ID NO: 491728 - DNA, 100 bp, Homo sapiens
agcccaggagcctgccccgccctggggacgaagagctgcagctcctcctgtgcgggtgaaaaatgtcgcagcttcattgacctggccccggcatcggaga

SEQ ID NO: 491729 - DNA, 82 bp, Homo sapiens
cagcagcatggccgcgatctatgggggtgtagaggggttccatcataatgaatggatccaatatggcaaatacatcaccgag

SEQ ID NO: 491730 - DNA, 100 bp, Homo sapiens
tatgagtggaacatggctagcaggaatgcttactgttgcgtggttcgttattaacagtgccggtggtggtgtgcacattgagccccggtatagacagttc

SEQ ID NO: 491731 - DNA, 74 bp, Homo sapiens
caaacacgcttctacactgataacaagaagttgaaaggattgttgacaaaaggaaaaataaaaaagggaagaca

SEQ ID NO: 491732 - DNA, 100 bp, Homo sapiens
cagaaactcagccactggttgccttggtaggcaataaaaaaatttcaagaaattgctgaaaaaaacatggaaaaattgaaccatattgagaagtcacatg

SEQ ID NO: 491733 - DNA, 100 bp, Homo sapiens
ctcgatggggacaataaatacgacgctggggaacatggcttacaggaagcagtggccggagcagcggtgctgggtaccctgggcacacctggactggtgt

SEQ ID NO: 491734 - DNA, 82 bp, Homo sapiens
cagagcaaattgagacgtcccgcctggagatgcccaaagatgagctgcccaaccataactgcattaagcacctgcgctcagt

SEQ ID NO: 491735 - DNA, 100 bp, Homo sapiens
ggagcgcatgcaacagaagtatgaggccagccgggaggacatctacaagcggcttctcaataggtttggcatggacaagatctatgaaggccaagtggag

SEQ ID NO: 491736 - DNA, 82 bp, Homo sapiens
tccgcgctgcttccacccaacttcctgttaggttttgctgttactgctcagtgtagtcacaccttgaataagaaatggaaaa

SEQ ID NO: 491737 - DNA, 100 bp, Homo sapiens
accaggagagactgtctttgtaccaggtcattgacgagactctggatgttaaggaaatgattttcaatgccgagagagttggaggcctcgaggaagagcg

SEQ ID NO: 491738 - DNA, 95 bp, Homo sapiens
ttggcaccagcctcccccatcaccgttaccattacgggaatcctctccaaagaaggaggagactgtagcaagaaaatatatgcagatgatgaaca

SEQ ID NO: 491739 - DNA, 100 bp, Homo sapiens
gcggagacgatgcctgagatcagagtcacgcccttggagtcatgtgctgttcctggggcttggatgatgtaggggaagcaaggtgaaagtggtatcccgt

SEQ ID NO: 491740 - DNA, 100 bp, Homo sapiens
gtcttgtgccttttcttgttcctactgtaaaggagatgggttagatgttgcagctgcagttgcactttcctccctgattcatgctttggatgacttagac

SEQ ID NO: 491741 - DNA, 74 bp, Homo sapiens
acgaggacggagggccatgtgttgggtcagcaccatcaggataagccagagacatgggaaaaccaatggaagtg

SEQ ID NO: 491742 - DNA, 75 bp, Homo sapiens
gaggaggagacgtaccggctctggaaaatccgcaagaccatcatgcaggatctcttatacagacgcaccaaagcc

SEQ ID NO: 491743 - DNA, 73 bp, Homo sapiens
gtcacgcctggaggaggagtaccagcagcagtgttgtactgctacttctataaacggacagccgtaagactag

SEQ ID NO: 491744 - DNA, 75 bp, Homo sapiens
cgagatcttccgcaacctggagaacgccaagcgcttcgccatcgacatagtggagcggtgcatgggtgccatgca

SEQ ID NO: 491745 - DNA, 96 bp, Homo sapiens
ccgggagttcaacaaataccttgcatacatggagtctaaaggagcccatcgtgcgggtcttgcaaaggttgcccctctacctggcctccctcttca

SEQ ID NO: 491746 - DNA, 100 bp, Homo sapiens
gattcatttagagctgcggaacaggacgccctctgatacctcctgccccccgaggtctgcagtctcctgaacccagcagccatctacgccaacaacgaga

SEQ ID NO: 491747 - DNA, 78 bp, Homo sapiens
aacttcgttgcttgcttgcctgtgcgcgcgtgcgcggacatggcctcaaacgcatttaaatcaaacggtattgagatg

SEQ ID NO: 491748 - DNA, 82 bp, Homo sapiens
tttcggttctacctgggagaatccaccgccatccgccaccatgctccttccgcttccagccgttcgagtcctatgactccag

SEQ ID NO: 491749 - DNA, 90 bp, Homo sapiens
ggggacctcgcgagcagacgcgcgccagcgacagcagccccgccccggcctctggggagccccaggaggaggatgatgtggacctggaag

SEQ ID NO: 491750 - DNA, 90 bp, Homo sapiens
atgcacctatggattccattgaatgggctgaagtggtgatcaatgtgaacaatattctcaaggatcgtagggcatcagaaaaacaaaaag

SEQ ID NO: 491751 - DNA, 110 bp, Homo sapiens
ccggagcccggcgctttccccgcaagatggacggtttcgccggcagtctcggctggctacagcaaacatcattcaagatgtccagcaaagggagcagcacagatggcaga

SEQ ID NO: 491752 - DNA, 73 bp, Homo sapiens
ccccatgctgtgtggagcaaagaggtttcctgagcaggcacatcccccggtttggcagtgaaggaactgaaat

SEQ ID NO: 491753 - DNA, 101 bp, Homo sapiens
atgaaaagaaaaggtccaaactcctatctccttacagcccgcagacacaagatgggaaaactgacaaccatgcctgcaggtctgatatatgcatctgtaag

SEQ ID NO: 491754 - DNA, 98 bp, Homo sapiens
ggaacttggagttaatggtctaatttatgatagaatgaactgacagatacacgtgcaaaattccacgtactttttcttttctttgtgtctgcaatgtt

SEQ ID NO: 491755 - DNA, 74 bp, Homo sapiens
ctgcgatgcgcgggaagacgttccgctttgaaatgcagcgggatttgaaaaagcggatggtggttcctgctgcc

SEQ ID NO: 491756 - DNA, 80 bp, Homo sapiens
ggatttctccgcctcagcccaacggggagcatatatagcagtgacgaggatgatgaggactttgagatgtgtgaccatga

SEQ ID NO: 491757 - DNA, 134 bp, Homo sapiens
cacagctggctgtagctggccaaggagttctcgattaaagaggaaggggcagtgctcacatttctgggcagagcccccctccatgcgcctgaaggcccgacccagcagccctggcttttccgtgcttacctgca

SEQ ID NO: 491758 - DNA, 75 bp, Homo sapiens
caaaaatgtgcatactcacagagttagagagagggatggtgaccatcaggtttaaatcctacttgctgagcatgg

SEQ ID NO: 491759 - DNA, 100 bp, Homo sapiens
gctgtgtcttggggccctttgggacgagtgctgtgactgtgttgatccaggatgagaagactgataaaagaagaagctagctgaacagctgtaaaatgcc

SEQ ID NO: 491760 - DNA, 90 bp, Homo sapiens
cagcactcaagcagcaggagcagcccgcggcgaccaagatcaggaacctgccctgaaactggtacggtgcaaggcctgtgctgatgctgg

SEQ ID NO: 491761 - DNA, 100 bp, Homo sapiens
aagatgacaccacctttgatgaggtttttcccatcaggccttgtggtcctgagtgggggaatggatgcccagctgaagatatggtcagctgaagatgcta

SEQ ID NO: 491762 - DNA, 74 bp, Homo sapiens
tggagttcttgaagagagataaagacacgatgaggcgagtggtacgacagagcaagtttcggcatgtatttggg

SEQ ID NO: 491763 - DNA, 73 bp, Homo sapiens
aacaaagaggctgatgaagatttctttgacatccttgtaaaatgtcaaagttgctacgatggaagttaaaggg

SEQ ID NO: 491764 - DNA, 75 bp, Homo sapiens
gtgaagagttgtcccagctcggcccgcgggggagccccgggagccgcacgcacatggattaattgatgtatgttg

SEQ ID NO: 491765 - DNA, 101 bp, Homo sapiens
ctggagcgttacaaggccttctacattaccggtttggtgcacctcgatttggaggaagtagggcagggcccttatctggaaagaagtttggaaaccctggg

SEQ ID NO: 491766 - DNA, 100 bp, Homo sapiens
tgacggtctggacatcagccccgagaggctcgagatgctgctgtgcagaagattgagactattatcaaagaacagtttgctcttgaaatgaagaataagg

SEQ ID NO: 491767 - DNA, 100 bp, Homo sapiens
tgcatcatggctgagctgctccagggcaaggccctcttcccgggaagcgactctgtgtgagccgctcccatccctggcagagtctagagccttggcccag

SEQ ID NO: 491768 - DNA, 82 bp, Homo sapiens
gcggcggcagcagcagtgagagccgagagggtgacctctctgggcaaggactggcatcggccctgcctgaagtgcgagaaat

SEQ ID NO: 491769 - DNA, 87 bp, Homo sapiens
ggtgcttggctgcggtgctcacactcatgaggagccggaaggtcagggaagtcaaagatgcatccctgagttcttcctagcaggcaa

SEQ ID NO: 491770 - DNA, 100 bp, Homo sapiens
gagaggtttgctgagctggttggccctgtgatccctcaagactggtccacggagtgtatgaccacaaacagccatcaagatgccatcccgcccactttct

SEQ ID NO: 491771 - DNA, 100 bp, Homo sapiens
tgaatttcttcggagtaagaaatcctcagaggaaattacccagtatattcaaagctacaagggatttgttgacataacgatctccagcaccctgccggtg

SEQ ID NO: 491772 - DNA, 74 bp, Homo sapiens
cacaactcatgttcaactatgtgtgttgtcagaatgctcttaatgaggcccgatgagagaaagggaaagttaag

SEQ ID NO: 491773 - DNA, 75 bp, Homo sapiens
acaccagctccgaaatcaccaccaagggtgtcttttatgaataatcaaaagcagcaaaagccaacgctatcaggc

SEQ ID NO: 491774 - DNA, 98 bp, Homo sapiens
ctggactggaaccatcaaacaaggctgcagaggaacctagaaagattgtacaatgaatggtgattctcgtgctgcggtggtgacctcaccacccccga

SEQ ID NO: 491775 - DNA, 95 bp, Homo sapiens
gaaatacctgaaacacaggctcattgtggtctctaataggggaaggtgtggctcattgactttaatccatttggtgaagtcacagattcactgct

SEQ ID NO: 491776 - DNA, 74 bp, Homo sapiens
gaaggaagaggacatggccatgaatgcccaacaagataatttggactaaatgctcttccttcagaggattatcc

SEQ ID NO: 491777 - DNA, 89 bp, Homo sapiens
gatccgctttgacgtgatggtgaacggcaagacttcccagactcccggccagccatcgaggacctcaagtactgcctggagaggacgga

SEQ ID NO: 491778 - DNA, 98 bp, Homo sapiens
gcttcgtgcaactctccgggcggccgcacctgccaggacgctgtgcagagctgcaagtccgtatcactgaggctgtggccacagccactgagcagaga

SEQ ID NO: 491779 - DNA, 75 bp, Homo sapiens
gcagatgataccccggaggtcctcaatagggccctttccaacttgtcttcaagtttaagaaaacccctcctaaga

SEQ ID NO: 491780 - DNA, 75 bp, Homo sapiens
actacctctttccagattgcagggtgatttcaggacaccaagagctcccgtggaagtcgctgaccagcatcattg

SEQ ID NO: 491781 - DNA, 90 bp, Homo sapiens
gaagttcgtggaaggctgtatgagcttctaactcattgtattcctcctgagataataatgaaggtaaatcaacagactgggaagatgatg

SEQ ID NO: 491782 - DNA, 75 bp, Homo sapiens
ctttcagcgtagcaattctgccggcgaagaagggacatgagagatggctttagaagaaaaagtttctactcttcc

SEQ ID NO: 491783 - DNA, 98 bp, Homo sapiens
aggaatggagacacggcttcccccaaggaatatacaggatggccaggccatgttatgggatctcaacgaaggcaaacacctttacacgctagatggtg

SEQ ID NO: 491784 - DNA, 75 bp, Homo sapiens
gagggcccagcgccttcatccccgtggaggagggaactccaaattcagctaatacccaaggaaattcaacaccaa

SEQ ID NO: 491785 - DNA, 75 bp, Homo sapiens
gttttatgccttttatcatgcaccaattgtaaaattctggtttaacacgattgatcgtactaaaaaaccagcagt

SEQ ID NO: 491786 - DNA, 100 bp, Homo sapiens
aagaagaagttgcgaaggatccccaacggggaggccaacgtgaagaaaaagttcaggagccctggaaaggagaaggaataagacggcaggaggaagagag

SEQ ID NO: 491787 - DNA, 83 bp, Homo sapiens
cttggactgagtcctgcaggacacagagcaatatactttgctgcttattcaaactgcaaggaaaagttgaatgatgtatttga

SEQ ID NO: 491788 - DNA, 82 bp, Homo sapiens
atgatttactggatgaactgataaaacccaccagtctaggtgcggtggctactaaagttcgaaggcacgatatgcgtgtcca

SEQ ID NO: 491789 - DNA, 82 bp, Homo sapiens
ccgggaggaaggaacgaggcaaggagctaaagcagcgtgcgttcagccctgggtgatgtggagccaactgcaccgatggagg

SEQ ID NO: 491790 - DNA, 100 bp, Homo sapiens
ggcctcccgaagtgctgggattacagatatggtccagacctgtacatgaataactttggttagtcagagtgaaatattcaataatgagtggtgcagcttt

SEQ ID NO: 491791 - DNA, 83 bp, Homo sapiens
gagggagttaaggacattccaggcagaggcaaggcacttggactagtaccctgcatgaaagttcatttcaaggcaaacagaac

SEQ ID NO: 491792 - DNA, 97 bp, Homo sapiens
gacgaggacgaggaaacctttgagctgcggaccccgagtccagcgggcggcgggaggatggcagtggcagcaccatgatgcaaaccaagaccttctc

SEQ ID NO: 491793 - DNA, 100 bp, Homo sapiens
gccaggctccgcgggatgcaccgtggtagccgagggcggaggcgacactctcaggttatcaatactctggctgaccatcatcatcgtgggactgactttg

SEQ ID NO: 491794 - DNA, 75 bp, Homo sapiens
cgacgcccggcgccagcacatcgcagggaagaagagcccagacctaggggagtatgatccacttacccaggctga

SEQ ID NO: 491795 - DNA, 100 bp, Homo sapiens
tttcttcgccgtgctggccgcggcccgcctcagcatctggtacagccgaatgaaggatttgggggcagagcacttggcaggtcatgaaggggtccaactt

SEQ ID NO: 491796 - DNA, 51 bp, Homo sapiens
cgactggagcaggcagcagcccaggtgtggagccggagccttttgaagttg

SEQ ID NO: 491797 - DNA, 89 bp, Homo sapiens
gggaggagcggggggaggaggacccagaagggccaaagaatgtggtgcttcgcctagctgtaaaattttttccacctgatcctggtcag

SEQ ID NO: 491798 - DNA, 74 bp, Homo sapiens
cgggcggccacgttcccgctgcaggttatcaatagtctggctgtctatcgtcatcgtgagactgactttggtgt

SEQ ID NO: 491799 - DNA, 87 bp, Homo sapiens
tggcagccccgctctctgcaaacattgatgatggcacctcagatcgcccctacagccatgctctggtggctggaattgaccgctacc

SEQ ID NO: 491800 - DNA, 98 bp, Homo sapiens
gtggggagcagctgcgggtgttccgggagcaccggggctccgtcatctgtctggagggactggtgattgcagctggaagtgcccatgaccgagctggc

SEQ ID NO: 491801 - DNA, 100 bp, Homo sapiens
gattagcaatttaaagatcctctccaagaataacatagctgatccagaagaactgttcacaaaattagagcgcattgggaaaggctcatttggggaagtt

SEQ ID NO: 491802 - DNA, 90 bp, Homo sapiens
attggcccatccgtgctcaatgctgccagagatgatattagcaagaagagacgctcaaaccgccaagttaagcgaaaaaaatatacagag

SEQ ID NO: 491803 - DNA, 83 bp, Homo sapiens
agctctggacaagctggaatgcatccaagagaatccctcaacatgctgctcaaactggaggattataaggatcgcctgaaaag

SEQ ID NO: 491804 - DNA, 98 bp, Homo sapiens
ctgcattaaggtcctacagaccctgagggaaatgatgaccaaagatagaggctatggagaaaaggtggggagcattaagcgggaaatgaccttcacat

SEQ ID NO: 491805 - DNA, 80 bp, Homo sapiens
gcgccaagagggtcagctgggacttcaagacggccgagagccactgcgtaagaatgattgatgttggctgatattggagt

SEQ ID NO: 491806 - DNA, 100 bp, Homo sapiens
ccttggaagactatgtagtattgatgaaaagagggactgccataacattcccaaaggatcatggggttgacagcagcattttccagaatcctaaaaagct

SEQ ID NO: 491807 - DNA, 129 bp, Homo sapiens
ctttggaccatggagattctgcagttgttgctctaggagctgaaaccagtgggtagatgtcgttctgaaacgcagttcccagtgggaaaagctacagaaagatgacacagatccggggcaactgaaagg

SEQ ID NO: 491808 - DNA, 75 bp, Homo sapiens
ggggaggcagcgcgggatcccagcctcaggcgtgcgcggacggtgtgcggcttcgagagctgtgcccaggagtga

SEQ ID NO: 491809 - DNA, 96 bp, Homo sapiens
cttggacctctgaaggaatagaacggtcaaggagattatgtctacgtttacagattcaacctagaatgacactgagcaaattgcctcttcaagcaa

SEQ ID NO: 491810 - DNA, 100 bp, Homo sapiens
gccgcggagacctacctgcggcgtcggcagctgctgctccgaggttatcaatactctggctgaccatcatcatcgtgggactgactttggtggaagtcct

SEQ ID NO: 491811 - DNA, 82 bp, Homo sapiens
tgggaggtcatcgaaggctaccgggcccagcacagccagcaccgcacgccctgcaagggagacttcccaagtaagaagcgga

SEQ ID NO: 491812 - DNA, 83 bp, Homo sapiens
cgcgagcacagagcctcgcctttgccgatccgccgcccgtccacacccgccgccaggttagctttatacgtctacgaatattt

SEQ ID NO: 491813 - DNA, 114 bp, Homo sapiens
agcagcgccagcggccgagcgggcggcttcctggcctgggcgctccggtggcggcggagggccgagaactactggtggcgtggccagaacacacggacgctgtgtgtggggccc

SEQ ID NO: 491814 - DNA, 82 bp, Homo sapiens
gcgcgtgcgcggacatggcctcaaacggttgggcccgaaggcatcctgcagaacggggctgtggacgacagtgtagccaaga

SEQ ID NO: 491815 - DNA, 100 bp, Homo sapiens
aatgtgatacaccttttcagaattactcagtcactaatgaagaaatgttttagcaagtgcatcagctgacaacactgtaattctgtgggatatgtccttg

SEQ ID NO: 491816 - DNA, 75 bp, Homo sapiens
aagaacttccagatcatccatggcaatgaccgtgaagtgagcaaagatgcagtcattgtaaagcaggagaaaaat

SEQ ID NO: 491817 - DNA, 98 bp, Homo sapiens
gagaccataacccccgacagcgccatggcccagattctgccaattcgttttcaggagcatctccagggaaagcaggcaggatgggagagtcgccgata

SEQ ID NO: 491818 - DNA, 75 bp, Homo sapiens
cggggcgccataaacgcccccaatttcccagctgctaaaggaagaggaagccactgaggcggctcccagctgcgt

SEQ ID NO: 491819 - DNA, 101 bp, Homo sapiens
tcagccccgtcctcttgtcctcctcagcctcggtagatcgttggccggagacaggatatgtgaagaaacttcagagaagggacaatacgttctattactac

SEQ ID NO: 491820 - DNA, 75 bp, Homo sapiens
ggagatgcaggaacactatgatgagttttttgaggaggaaacagcagactttagaagcggaagaggccaagaggc

SEQ ID NO: 491821 - DNA, 98 bp, Homo sapiens
gggattggaccgacgcagccatggaacatggaggagacatatttccacctatttctctccataagtataaaagaccataaaagaccatctagggactt

SEQ ID NO: 491822 - DNA, 100 bp, Homo sapiens
gtgctgtgctgtgtatgaagaggcagtgaagactctgccaacaggttgctccttgagggcaggacagttcttatggctttatccgttgcgtaagcacaga

SEQ ID NO: 491823 - DNA, 100 bp, Homo sapiens
gttcctgtggaatcagacctccaggagataatcaaagaaatctctataatgcagcaatgtgacagtgagttctctggtgatgttgatagcctggaactgg

SEQ ID NO: 491824 - DNA, 74 bp, Homo sapiens
aggagttcggcctcatcgacaccaaggagctggagccactggtgatattgaagcagctttcaataaccttcagc

SEQ ID NO: 491825 - DNA, 76 bp, Homo sapiens
agaggacatggagaatgggctgaagcgatgcttccagagaatggggtactaagagaaaagcacgaagctgtggatc

SEQ ID NO: 491826 - DNA, 82 bp, Homo sapiens
ctcacagctgttgctgttattacagtccaatctattccagaggggagcttcaccacttcattgacggctttaatgaagagaa

SEQ ID NO: 491827 - DNA, 100 bp, Homo sapiens
agtggacagactgggcgtcatgacccttggctggggagcagaataccaccgccaggatgttactagcaccccctgctggattgagatacatctgcacggc

SEQ ID NO: 491828 - DNA, 98 bp, Homo sapiens
gaaagatgctgccgctgtgggtaatcatgttgccaaattgctgcagtccattggccaggataaaggctcactgatggctcagttgggagcagttgtgg

SEQ ID NO: 491829 - DNA, 73 bp, Homo sapiens
ggggctgtttggaaagacccaggagaagccgcccaaagaactgaacctctcgagtacgtgccacaccaaggag

SEQ ID NO: 491830 - DNA, 75 bp, Homo sapiens
taacgacggcctcagcaggcggggaagatgaaagggtttctctggaaacccccctggtaagtgtggaggaggcgg

SEQ ID NO: 491831 - DNA, 83 bp, Homo sapiens
ggcgatgttggtccaagggaactgggtggtgaagagggggatatgagactttctactcggaatatcctgagtgttgcgtggat

SEQ ID NO: 491832 - DNA, 100 bp, Homo sapiens
tgagttcccaatgattttaattggtaataaagcagatctggatcatcaaagacagggttcaattaaggaccaattaaaagcatatggcgctcttactgag

SEQ ID NO: 491833 - DNA, 100 bp, Homo sapiens
cagcggcggaaaccgaaggggagccatggcggctgacagtcgggaggagaaaggatgaccatgaaagctgtggttctaattctaccaaccgtagtactgc

SEQ ID NO: 491834 - DNA, 83 bp, Homo sapiens
ccgtgacatcctgggatattctttgttgagaggttattctcgttcaagttaatccaggtgagactttcacaataagagcagag

SEQ ID NO: 491835 - DNA, 82 bp, Homo sapiens
ctgagggcccgccggagatgttttccttgtcgagcacggtgcaaccccagggagccccagactctggtaaatgctctgcttc

SEQ ID NO: 491836 - DNA, 100 bp, Homo sapiens
atttgaagcacatttgggaagccacattttgcagaaacaagtgttgaaaatgttaaaggctgtgctgaagaagagccgagagggaggaaagggaggcaag

SEQ ID NO: 491837 - DNA, 83 bp, Homo sapiens
aagccgctcagcaagctccacatccccgtgacctcctgccccccgaggtctgcagtctcctgaacccagcagccatctacgcc

SEQ ID NO: 491838 - DNA, 132 bp, Homo sapiens
tcatttgaaatgaaatgatggccacgcgtcggactggtctgtctgagggagatggtgacaagctcaaggcctgcgagcttcttgaggttgaagactgtgttttgtccttgaatggccagctctgaacaatgc

SEQ ID NO: 491839 - DNA, 83 bp, Homo sapiens
aaaaaaggaggccaaagacttttttaaaagattggaagacccgtttgagctacttcttacaaaattcctctactcctgggaag

SEQ ID NO: 491840 - DNA, 75 bp, Homo sapiens
ccatggcataaggaactctatcccaggaatacagctttgcattaggtcatgatgatgggcagcgcccgagtggcg

SEQ ID NO: 491841 - DNA, 82 bp, Homo sapiens
aggaaggaacgaggcaaggagctaaagcagcgtgcgttcagccctggggtgtctcgtgcctctgctggaccctgactctggg

SEQ ID NO: 491842 - DNA, 75 bp, Homo sapiens
aggccacagtaccctattcacgctctgtgcttgtgccaagatggcttgctggggatgttcctgaaacgcctctcg

SEQ ID NO: 491843 - DNA, 74 bp, Homo sapiens
cctttcctacgcccaccccagttctgacacatgttgtttttcaccattcagaacattgcctgaagcaggtccac

SEQ ID NO: 491844 - DNA, 98 bp, Homo sapiens
aaagaggacgctttactctaccagagcaaggtatacctgaggtgcaccggaggtgaagtcggtgccacttctgccctggcccccaagatcggccccct

SEQ ID NO: 491845 - DNA, 75 bp, Homo sapiens
gccaaatggccggggcaggtggcacagatgaatgccgggcagaggagcctgcagctgagatgagtgaactgagtg

SEQ ID NO: 491846 - DNA, 50 bp, Homo sapiens
ccttgacagcccgggccgagaagcaagaggtggaaacatacagaagaagc

SEQ ID NO: 491847 - DNA, 100 bp, Homo sapiens
caaagggccaatacctggatatggttctgagtcacctctactttcctgctaccgctgcctgtgagctgaaggggctgaaccatacactcctttttctaca

SEQ ID NO: 491848 - DNA, 49 bp, Homo sapiens
gtcgtctcgcctcccgcgcgccggtaggctgctcccggcagatcggctt

SEQ ID NO: 491849 - DNA, 101 bp, Homo sapiens
aggaatgttccctgacaatttcgttaagtcaaaccggcacgatgtccaggcaccagaaccagaacaccatccaggagctgctgcagaactgctccgactgc

SEQ ID NO: 491850 - DNA, 141 bp, Homo sapiens
ctttgatgtggtcctcgtcaactggggcaaggtggccgacctggccatctgcaatgaccagttggaggacaaggaagctgtgtttgaagtgtcagacactatgagtgccgtgctccaggtggccactggcgtcatctctac

SEQ ID NO: 491851 - DNA, 90 bp, Homo sapiens
aaaagaaactggagccaccatcaagctgtctaagtccaaagatttttacccagccagagactgctgctactttgaaacgtacgatagagg

SEQ ID NO: 491852 - DNA, 101 bp, Homo sapiens
gcggaccatgggcgacaaagggacccgggcacacgtgtttcacgttgacaggtttgcttgggacgctagtaaccatgggcttgctgacttagccaaagaag

SEQ ID NO: 491853 - DNA, 100 bp, Homo sapiens
aaacaaaatgtggatgggctagtgttggacacactggcagtaatacggactcttgtagataagtttactcctggcttgggggcattaggaagcactggag

SEQ ID NO: 491854 - DNA, 98 bp, Homo sapiens
gccatcgtcaccgagagcgcagggggcggctccttcctcgtcatccccctggagcagggccttggtgtaccttgttgtagtgtttgaaaacatctgag

SEQ ID NO: 491855 - DNA, 82 bp, Homo sapiens
ggaggtggtgcctctggcagtgacgaggacgaagtgtccgagccagatgaattatactttgaggaaggtgatattatctaca

SEQ ID NO: 491856 - DNA, 75 bp, Homo sapiens
gacgcatctgtctgaggagcggtcagtgacgcgatggagcgggcaaggaagcgagcagctgcaaagcatctaata

SEQ ID NO: 491857 - DNA, 120 bp, Homo sapiens
aaaaggcctcccttaaaggaattttttgtggatgactctgaagaaattgtggaaggtatcgaaggatgatcgcagtgatgtggagagcagctcagaggaagaagatgtgaccacctgcac

SEQ ID NO: 491858 - DNA, 89 bp, Homo sapiens
ctgacatgatcaaaacagtgctagtgaaagaatgttattctgtcttcacaaaccggagggaggagatgttaaagtaacccatcttgcag

SEQ ID NO: 491859 - DNA, 85 bp, Homo sapiens
ggtcaccgccagcacgcgcctgcttcccgtctgcgcgagtccacgcagctccccagggatatgtggtgcctgtcataagctccag

SEQ ID NO: 491860 - DNA, 75 bp, Homo sapiens
gagaagctgcacgacgtggacttctacaaggcccgcatggagggtgtgggccgaagatatgctcatgtggtgttg

SEQ ID NO: 491861 - DNA, 78 bp, Homo sapiens
aagtccacaatcaagttccaaatgaagaaggtgtttgactttacgatgcaaattatactttgacaacttactatctca

SEQ ID NO: 491862 - DNA, 100 bp, Homo sapiens
ggagcacgggcagggtccaccacggaagaggaagcgggcctcggagcctggggacaaagggtgagtcagatgattccattctccgattggccaaggccga

SEQ ID NO: 491863 - DNA, 101 bp, Homo sapiens
ctagaattacctggaacttcatcatcatctacttcacaggaattgccatttgagaaaacccaattcctattttctttaatcaaggaatgggagattctact

SEQ ID NO: 491864 - DNA, 82 bp, Homo sapiens
cgctgcagaaccagatccgggagcacgtcatctccatcgagggtttacccaaggtccagcctagcccctaggcaccatgtcg

SEQ ID NO: 491865 - DNA, 100 bp, Homo sapiens
cgtcccggcctgcgcagcctgagatcggacagctggcttttaaaggaatgaagagactcaatagaatccagtcaatagtgtttgagactgcctacaacac

SEQ ID NO: 491866 - DNA, 88 bp, Homo sapiens
agcccgctccgccgagcgccgggcgacggcagagtggagagatctacagaccaagtaatcaagccagtcaatgtaggagctctatcaa

SEQ ID NO: 491867 - DNA, 100 bp, Homo sapiens
cactatatcagataagcttgacattacagccaagatggtgctgtcccagagacaacgagatgaactatcccagcatggtgagtgcctacatgtacccagc

SEQ ID NO: 491868 - DNA, 100 bp, Homo sapiens
ttcctatggaagatcagatccgtttgaggcctggctctgaattacatctgacccccaaagctcagcagtatccggagtgtgatgcagaagtaccttgcag

SEQ ID NO: 491869 - DNA, 82 bp, Homo sapiens
agaccctggagcctcagttggaagcagccgatccagcctgcggagcctgtggggcaggatgaggaagtacagacaattggtc

SEQ ID NO: 491870 - DNA, 72 bp, Homo sapiens
aaggaaatgctgcttagattaaatgcgttgttggttgatgataattagaagcatgctttccactgaacttcc

SEQ ID NO: 491871 - DNA, 82 bp, Homo sapiens
ttgttggcgtgtccctgcagcgaaggatcctggttgcctcatcagcagctgtgggctcaggcccccctcccgaggcggagca

SEQ ID NO: 491872 - DNA, 90 bp, Homo sapiens
acattcagagtggtgggcaggaagattcaggaccatcaggtgttcaagcagccctggccagggatcatgcgcacagtctatgggaaccac

SEQ ID NO: 491873 - DNA, 104 bp, Homo sapiens
cgactacgtgaaggccctgcggcagcgcatcgcggagaccaggttgcacagtgaattaaaagatgctgttgaaaaaaaattggaggcctttcccctgggcacag

SEQ ID NO: 491874 - DNA, 98 bp, Homo sapiens
ccatctcccatgttcctgggattacagtctctgcaggccaagcagcgagccctgctaaagcagctggacagcctggaccaggaacgtgaggagctgcg

SEQ ID NO: 491875 - DNA, 100 bp, Homo sapiens
ttacagactgtggtgcctacccccatcactgcttccctcagccataacaggctgcctctaagaatcaaacttcactcttgggagaaccaccaaaagaaat

SEQ ID NO: 491876 - DNA, 83 bp, Homo sapiens
tgaaggcgtcggccggaggacaccccatcgtgcagaaagaagatgctgatatgctacaacacggatgaacctggaggacgtgg

SEQ ID NO: 491877 - DNA, 96 bp, Homo sapiens
aaagggggaaatagcaaggtgctggatcaaatactgtttgactctcatgcagaatgcccaactctccatgcaggttatcctacgcggagagccagg

SEQ ID NO: 491878 - DNA, 74 bp, Homo sapiens
ttcccattgcagcccaggtggataaggaacatctcttcccagcggctcagtatacgctcaacggcaagaaagtg

SEQ ID NO: 491879 - DNA, 98 bp, Homo sapiens
gctaacagcggtggcattgagcccgaacacgctgatggatgtgctgactagtgagagtgcttgggccctcccccagcacctagggaaaggcttcccct

SEQ ID NO: 491880 - DNA, 100 bp, Homo sapiens
cttaaagagctccacattcaggggaaccgcctcaccgttctgcccccagaactagtgttttagagcactttgctgcaagggaccaccacctgcacgacca

SEQ ID NO: 491881 - DNA, 50 bp, Homo sapiens
gccggagaacagcatgcgagccgttcaggatggctaaaggtgaccccaag

SEQ ID NO: 491882 - DNA, 90 bp, Homo sapiens
gcaccctgcttggagacggacttgcttccggttattcagcttctcaaggctggaaaagcgaaggaagtttcctacaatgcactagcctca

SEQ ID NO: 491883 - DNA, 100 bp, Homo sapiens
caagaatctcgtgctcaccggtttctcccacatcgacctggtgctactcgtgagcagtagtcgccatccagacagatggattgtccctggaggaggcatg

SEQ ID NO: 491884 - DNA, 100 bp, Homo sapiens
ctgggatcatgcagttcacaaatgaggagaaacggaccctgctggccaggcttgtgcggtccaccaggagacggtggctcagggagtaaaggaaggccag

SEQ ID NO: 491885 - DNA, 51 bp, Homo sapiens
agatccatttacactttacagtaagaagagttcctgggtcaagtggtcacc

SEQ ID NO: 491886 - DNA, 83 bp, Homo sapiens
accagacctgcaagctctttgacacacagcagttcttgtcagaataccctctaccatctgctttggtcagggtgccgctcgag

SEQ ID NO: 491887 - DNA, 90 bp, Homo sapiens
ctgaattaaaaggtgtcaagaagctcagaatgctttctgaaaaggatatgagcatgctcgaggagaggattaagcggtcagcaaagagac

SEQ ID NO: 491888 - DNA, 100 bp, Homo sapiens
acagtggacagatggttatgcttttcagaatcttatcaaatttctctatgaatcatcatcaagaactctgggagaacttttgaattcataaccaagccaa

SEQ ID NO: 491889 - DNA, 75 bp, Homo sapiens
aaaagaccgtttgtgttttgtgatggaatatgttaatgggggcgaggttgttcttgcagaacatgccagcagaag

SEQ ID NO: 491890 - DNA, 99 bp, Homo sapiens
ctgtggaaagaagttgcaaaacactgggcttgtctgagacgacaggaatatagaagagacccaaatgagaagaaacgcgatcagttttgggggcaagag

SEQ ID NO: 491891 - DNA, 82 bp, Homo sapiens
cacaggtggcccgatcccagcaggacattgaaagaatccaggagtcctccagctgagaacgaggtgtccacccccatgcagg

SEQ ID NO: 491892 - DNA, 74 bp, Homo sapiens
ccgatcgccgcggggcagttcgggccggctgtcctggcgcgaattttgtagccaccttggctaatgggatgagc

SEQ ID NO: 491893 - DNA, 87 bp, Homo sapiens
ggaggcatgcaagagtcttcaatcatattacaaatgttttgtttcctaagtcgggaggttcgatacaagaggctgttttcctagcgt

SEQ ID NO: 491894 - DNA, 76 bp, Homo sapiens
gaaaatcgtcttatagttgagaatttatcctcaagagtcagctggcagtctgaagatgatgagaaactgaaaaaga

SEQ ID NO: 491895 - DNA, 96 bp, Homo sapiens
gtagaaggaagtaagaaggtcacaattcgctccccagtgcaggtactggtagctcttgcttgtgacctggagctggacactctgccttgctgtgcc

SEQ ID NO: 491896 - DNA, 101 bp, Homo sapiens
ccgccttccagctgttacatcttgtgggagttggtaaaatattaaagaagatcaacaaggccatcgtctccaagaagaataaagacattgtgacagtggct

SEQ ID NO: 491897 - DNA, 101 bp, Homo sapiens
tacaaaaccagttggtggtgacaagaacggcggtacccgggtggttaaacttcgcaaaatgatggtctgtcttctgctgatcccaactctgattggaatgc

SEQ ID NO: 491898 - DNA, 100 bp, Homo sapiens
cgtgagtgtggtctacgagctgtttctcatctttatactcttccaggccaaggacagcgatgatgatgatgatgtcgctgtcaccgtggaccgagaccgc

SEQ ID NO: 491899 - DNA, 96 bp, Homo sapiens
gcttccgggagggcggctcgcagttgcactggaagggtactacaaggacaagctctttgaccagcgggagctccgctttgagattggcgaggggga

SEQ ID NO: 491900 - DNA, 88 bp, Homo sapiens
gcgcgcccagggaaggcatttccagcccgcccacccaggcctccggtgtggctgtctctgatggtgtcatcaaggtgttcaacgacat

SEQ ID NO: 491901 - DNA, 82 bp, Homo sapiens
gcgaaggccgggacccggttccccggcccacagtgggggtgtgcaaacccgagagaactggatatgtgcagcgggggctaca

SEQ ID NO: 491902 - DNA, 82 bp, Homo sapiens
gcgccgcgcacttcgtcatgttcttcgcgccctggaccatggccaacctggagcgcaccttcatcgccatcaagccggacgg

SEQ ID NO: 491903 - DNA, 100 bp, Homo sapiens
gctggctgcttccagtgttcgccgagaggtaccgggggtgacagctccgggaccggccgaaaggcgaggaaccgtgaagaactgaatgtcatcatgtctg

SEQ ID NO: 491904 - DNA, 96 bp, Homo sapiens
ctcagcaccttggcgaagccttgggtttctttcttaaaggactgatttttagaactccacatttgaggtaagaatgattgatgttggctgatattg

SEQ ID NO: 491905 - DNA, 101 bp, Homo sapiens
gggagccgtggccctttcgggggaccttcgagacaaggctgtcagcccctaggcctgtttaaagaagaaaacccgtatgctagatttgaaaacaactaaag

SEQ ID NO: 491906 - DNA, 75 bp, Homo sapiens
gtggagatatggcgcaactgcggcgcgtcgttcagattctaggagataagtttccatgcactttggtggcacaga

SEQ ID NO: 491907 - DNA, 89 bp, Homo sapiens
acccgcttccatgcggttcgggtccaagatgatgccgttaataacgacatgatagtcactgacaacaacggtgcagtcaagtttccaca

SEQ ID NO: 491908 - DNA, 83 bp, Homo sapiens
cagaagatggtgcagaagaaaccagccgaacttcagggtttccaccgttcgttcaaggcggacctggtgaatgacctggggaa

SEQ ID NO: 491909 - DNA, 83 bp, Homo sapiens
gtgacagcggagagaaccaggcagcccagaaaccccagacaatgagttacaaggcactaatagttctggatccttgggtggtc

SEQ ID NO: 491910 - DNA, 51 bp, Homo sapiens
ggccgcggcgatgactcggacccaggactcagtggcctctgaggatgtggc

SEQ ID NO: 491911 - DNA, 82 bp, Homo sapiens
tgttggtccaagggaactgggtggtgaagagacaatgcagatcttcgtgaagactctgactggtaagaccatcaccctcgag

SEQ ID NO: 491912 - DNA, 82 bp, Homo sapiens
aggtccggggcttgccctggtcttgctcggccgatgaagtgcagaggtttttttctggtgctgatacctgtgttcgcgctgg

SEQ ID NO: 491913 - DNA, 98 bp, Homo sapiens
cggagcagcaaacgcagagacaaaagaaacgggccccgactggctggactctgtgaagctgagcaggagcagatgcggaagatcctctaccagaaaga

SEQ ID NO: 491914 - DNA, 101 bp, Homo sapiens
gtactcttcagggatgagtcatgtggcagtggaaaatgcgctcgggctggaccagcagctttggctagatcagagtctaagagagatggaggttttaaaaa

SEQ ID NO: 491915 - DNA, 83 bp, Homo sapiens
cgaggttctcctctccgccagctcttctgagaatgagcctacgaggacaagcagaaactcaagcggaccgagatcatcagccg

SEQ ID NO: 491916 - DNA, 98 bp, Homo sapiens
cacagcattcctgaaatacatccaggaaagacatggagattctcttaaaaaggtggccagcatcgaaatgttcagccttttagtgatgaagatgcatc

SEQ ID NO: 491917 - DNA, 82 bp, Homo sapiens
cgcccacactgaccccgggggagcggcagcaggtcaaaatgcagatcttcgtgaaaacccttaccggcaagaccatcaccct

SEQ ID NO: 491918 - DNA, 100 bp, Homo sapiens
gagaaatcatccatgaaacgtaaacttccttttactattagcccatcaagaaatgaagaacgagattcagacacagcagcccttgccttttctcttgcag

SEQ ID NO: 491919 - DNA, 75 bp, Homo sapiens
ttttgatgtggatgatgccaaagttttattaggaggaatgcaggctcaggttggaatgccaggaagtggaccagt

SEQ ID NO: 491920 - DNA, 82 bp, Homo sapiens
ctggcttaggcatgtcctctgaacctatctacaagacctcttgtgctttgactattcatgctattggacgatacagccctga

SEQ ID NO: 491921 - DNA, 75 bp, Homo sapiens
aaacaaactacccattttcttttttggaactcatgagacgttggtcaaagaaaaagtgatgtatgaaaaagaggc

SEQ ID NO: 491922 - DNA, 75 bp, Homo sapiens
atttaattttagggtcctttatatagaagggagagtaggttcttctgtgtggcagttcagaatgatggatcaagc

SEQ ID NO: 491923 - DNA, 83 bp, Homo sapiens
ctgcgatgcatgtgatcaagcgagatcttactgtgccgagatcgctcacaatgtttcctccaagaaccgcaaagccatcgtgg

SEQ ID NO: 491924 - DNA, 98 bp, Homo sapiens
gaaaaacaagacaaaatctacttcatggctgggtccagcagaaaagagcccatttcaatggaaaatccttataaagaacctcttaagaaatgtatctt

SEQ ID NO: 491925 - DNA, 100 bp, Homo sapiens
aggccggcgcggagaatctgctgtcgcctgcagctgctcgcctgtctccgtcggaagggagcccaagctttgcagagcccttgaaggtagtggacccaga

SEQ ID NO: 491926 - DNA, 75 bp, Homo sapiens
cagaggaatagtctacaaaggaagacttgtaacctggagaagagtgacaaatggcctacagctgtgagagcaaat

SEQ ID NO: 491927 - DNA, 102 bp, Homo sapiens
agcagaggggccactgctgggccctgaggctgcaccaagtggcgaaggagccggctccaaggccctgccctgggagaagccctgccacacgtcgtgcccacg

SEQ ID NO: 491928 - DNA, 82 bp, Homo sapiens
ccacgccagacacgacgtctggcaggaacctcggcctcagagacaatgcagatcttcgtgaagactctgactggtaagacca

SEQ ID NO: 491929 - DNA, 121 bp, Homo sapiens
cggtgcctgagcccgtgcctgtcttcagatcttcacagcacagttcctgggaaggtggagccaccagcctctccttggtttatcttgcagattatggactttcctacagatattgtcccaa

SEQ ID NO: 491930 - DNA, 95 bp, Homo sapiens
ctttctcccatcgaaccttctagttgcttattgcagatctttgatgaagagtacaatgtctggttcctagactggggtggtgccctcgtggccat

SEQ ID NO: 491931 - DNA, 100 bp, Homo sapiens
gcatcagcctcccgaagtgctgggattatagtgatgtcttggcattgcccattttcaagcaggaagattccagccttccattggatggtgaaacagagca

SEQ ID NO: 491932 - DNA, 85 bp, Homo sapiens
aaaaaatactttctcttcaggatctgatctgaatgctgtgaaatcactaggaactccagagttaattcatctgcctacactattt

SEQ ID NO: 491933 - DNA, 100 bp, Homo sapiens
catcgtttgactggacagtaaagctttggacaactaaggagtctcacaactcaagaaagaaacgggaaattactgaaaaacagatagatgataacagaaa

SEQ ID NO: 491934 - DNA, 100 bp, Homo sapiens
gcttcatgatgaaccctacactgactttgatggccaagctataacatcagaaatggtgaatgaatacaagaaaattcttttgctgaaaggatttgagctc

SEQ ID NO: 491935 - DNA, 88 bp, Homo sapiens
gtggcctcgagaccctgcctgcctgaggaggcctcggttggatgcgaaggagctgcagcatccaggtgatgctgaacacagagcggct

SEQ ID NO: 491936 - DNA, 88 bp, Homo sapiens
cgatttccatacctatgtcagaagaatgggggcgctgacaagctctctactgatgatctgaactccctcattgctcatgcacatcgtc

SEQ ID NO: 491937 - DNA, 100 bp, Homo sapiens
gcccgggaagagctgatgagaatgctggcggaggacgagctccgggatgctgtactccttgtctttgcaaacaaacagggaacccttccaaaacacagag

SEQ ID NO: 491938 - DNA, 100 bp, Homo sapiens
tggacacagagaagccccaccacaattgcatctgtgtaaaatcgagagaaagatcgtgaaaacagccatggcagggtctcgctctgtcgcccaggctgga

SEQ ID NO: 491939 - DNA, 100 bp, Homo sapiens
aagacttgaacctagaaaatttcactgcaaagcacctcttctgtgtggtgagtggaccgcttaccccactaggtgaagatgtcagcccaggagagctgcc

SEQ ID NO: 491940 - DNA, 74 bp, Homo sapiens
cggtctggcttgttcgggctcagcggccgcgaggccgcagctcccgggaccccagggcggggcagttcccctgc

SEQ ID NO: 491941 - DNA, 88 bp, Homo sapiens
gactactttaatccagctactctacctctaacacagtacctgttaacaactttttgaatcagagccgacaggcacttgaattgaaaat

SEQ ID NO: 491942 - DNA, 100 bp, Homo sapiens
gcagcgcaggccggacgaggtgaaccaggtcatttaaccgccttcaggtataggaagaatgcgtatcttttcatctattacttaatccagttctgtggcc

SEQ ID NO: 491943 - DNA, 100 bp, Homo sapiens
ctgctgcttctgggccctacgcgcggcttgcgcgtactccaaagattcaggtttactcacgtcatccagcagagaatggaaagtcaaatttcctgaattg

SEQ ID NO: 491944 - DNA, 75 bp, Homo sapiens
tttctgagcttcatgacaatcaggacggtcttgtgatttctcacattggcaaactgagagattttcttctggaac

SEQ ID NO: 491945 - DNA, 100 bp, Homo sapiens
cggtgggcctctgagatatgccgtttacggatcagccaaatggccgatgacacagtggcagaactggacaggcatctggcagtgaagaccaaagaactcc

SEQ ID NO: 491946 - DNA, 100 bp, Homo sapiens
ctgcttcgggcggtcaacatggagcccgaccagtaccagatggggagcaccaaggtctttgtcaagaacccagagtcgaatcaggaaacccaggcccaac

SEQ ID NO: 491947 - DNA, 74 bp, Homo sapiens
gggccgtggctgaactcagtaaccgctggttcaacgggcaggctgtgcacggtctcctctgagcctccggcctc

SEQ ID NO: 491948 - DNA, 74 bp, Homo sapiens
aagaaaaagtagctgatgaagatgatgtgagcaatgaggagctgcggggaagtactccagaggcagcagcccag

SEQ ID NO: 491949 - DNA, 78 bp, Homo sapiens
gaagctggccaaagcctgcccagacggctcacctgtgcgggatggaacaaaagcaaatcgcagtcttctccaggctga

SEQ ID NO: 491950 - DNA, 100 bp, Homo sapiens
cggacttcaatgcccagtccccagctcgccagcctgttccaaagacctaatgcgcttgctgtccagcagttgacagctgctcagcagcagcagtatgcac

SEQ ID NO: 491951 - DNA, 100 bp, Homo sapiens
ccaggaagcggagggcgcgcgagggagctgctgctcttcctccagaacctgcccacagcccactgggatgatgaggacatcagcctgttgctggccgagg

SEQ ID NO: 491952 - DNA, 98 bp, Homo sapiens
ggcctccccagccatgtggaactacctgagaaattagatgttgaaacagttatgagtattgatcatctgaaacagaaaatccctccagcactgtttta

SEQ ID NO: 491953 - DNA, 50 bp, Homo sapiens
gtcccgccgggtctgaagcctgaacagccacccgtgggacacggtcatcc

SEQ ID NO: 491954 - DNA, 75 bp, Homo sapiens
ccagcattcattgtgaagaccggagggacacaccctgctgtgttgcattgatgaatcatagctgttgccccaatg

SEQ ID NO: 491955 - DNA, 75 bp, Homo sapiens
tgagctgatccccagccacagcacacaggaccaggctgcgagaacagttgttctaccatctccagagggaacgct

SEQ ID NO: 491956 - DNA, 98 bp, Homo sapiens
ccgggacccgcccgcccgcgggagagtttctgctatggtgctggaaaatcagttcatgtgctgagacatataggcggtcctgagagcgaacctcccca

SEQ ID NO: 491957 - DNA, 83 bp, Homo sapiens
aaggggacaaatccgcgatcccagtcatgcataaatgagccgtcagactgctacagcattacctaccggtacctcgaagtgtc

SEQ ID NO: 491958 - DNA, 100 bp, Homo sapiens
ggttgccttggaaaatgccaacgccgtgtctgaagcggaagatccatccaaaagctatgtgaaattacgagactttgtgcttgtgaagctttgtcaagat

SEQ ID NO: 491959 - DNA, 100 bp, Homo sapiens
agaagtggagacagagcttaaaatgtatttggagcaagaggtggtggtggccttcccccgaagaaatttggtaatcctggggagcgtttgcgtaaaaaaa

SEQ ID NO: 491960 - DNA, 50 bp, Homo sapiens
ctcagcctcccgcatagctggaattacagacggagtctcactctgtcgcc

SEQ ID NO: 491961 - DNA, 50 bp, Homo sapiens
ctatttccaggaggaggactaccatttatttgctacttgatattatgtat

SEQ ID NO: 491962 - DNA, 119 bp, Homo sapiens
gccgctctccgagctcgatccgctgctcgcacgggagccagctgggtgactctcagcgttctcatctctcttccttcaccatgaagctgatggacaaattccactcacccaaaatcaag

SEQ ID NO: 491963 - DNA, 87 bp, Homo sapiens
cagaaggaaccaattccggacacataacaagcagcagtgaggacaccaaaggtctgaactgcacagatccacttacatgtggatttt

SEQ ID NO: 491964 - DNA, 98 bp, Homo sapiens
aagaacctggtgaaagtcccatattctgcttcctacaggaaaataaacactcacatcctaaaggttccagaaacagatgaggtagagctcacctgcca

SEQ ID NO: 491965 - DNA, 75 bp, Homo sapiens
cggaccccgcatcttcgccgtctggaaagtattggaccaggtacagacatttctcccacagatggcacgggcaaa

SEQ ID NO: 491966 - DNA, 51 bp, Homo sapiens
ccgctcaccatctacggcatccggtgttaacacagaaatctgcctcctggg

SEQ ID NO: 491967 - DNA, 100 bp, Homo sapiens
ccctctcgcctcgggtctcgggggccgctctgggatcccggccaccagcaattgtccggtggctgtacttttgatgatggtccaggggcctgtgattacc

SEQ ID NO: 491968 - DNA, 95 bp, Homo sapiens
ttggatgatgatggatccatttctcctattgaggagtcaactggtatgtgctgctggtgctgaacctcttccgagaaatggagatcaatggcatg

SEQ ID NO: 491969 - DNA, 75 bp, Homo sapiens
ctacatccaaggcatcaacctcgtccaggcaaagggaaacagttggaagagaaaatggtacagcagttacaagag

SEQ ID NO: 491970 - DNA, 74 bp, Homo sapiens
tccaagatgtataattcctagtgtgataaaaagagctgggatgcctaagacaaaacttacctggggtccctact

SEQ ID NO: 491971 - DNA, 75 bp, Homo sapiens
atctgggtgtatatcaaacggcaagatgtccagtaatgtcccggcggatatgaacatacatatgatagttgagaa

SEQ ID NO: 491972 - DNA, 88 bp, Homo sapiens
accccggacatgctcagggctgcggccgcccgaagaggagagagcgcgggcctctaggaagtcctattttgtaacggattatgatcca

SEQ ID NO: 491973 - DNA, 100 bp, Homo sapiens
gcacgacctgcggatccccttgcacaacgaggacgccttccagcacggcatctgctttgaggccaaggagtggagtcaacatatcaatggagcaagtcac

SEQ ID NO: 491974 - DNA, 101 bp, Homo sapiens
gggaaattgggtcacaagctgtttggtcactctcatcttgcaaaccagatgtgttcagagcaacattgttttgttgacacaagcatttagaagaaagtttg

SEQ ID NO: 491975 - DNA, 82 bp, Homo sapiens
tggccctggtggggattgacagccacgggaaggtgtccctacctgcaccggacgacgggggacacagaacgcaagtaccacc

SEQ ID NO: 491976 - DNA, 49 bp, Homo sapiens
cctcctcctccttacgaaccgcactgcctggcagctgcgattcagccac

SEQ ID NO: 491977 - DNA, 82 bp, Homo sapiens
gcaaatcagatgcagctgttttaactatccctgcctgtgactttcaagactgaaactgttgaggagcccatggaggaagaag

SEQ ID NO: 491978 - DNA, 74 bp, Homo sapiens
tgctgctatacctcatcggggcggtgattgccggattcccactaaaaatatcgaaggtcagatgacaccatact

SEQ ID NO: 491979 - DNA, 51 bp, Homo sapiens
ttgtaactgtgcaagatggacagcaagaggggcccatacggcgttgttctg

SEQ ID NO: 491980 - DNA, 88 bp, Homo sapiens
tcctttgatgaaatggacagtacactagctgttcaacaggaatctgatgcttccaccagatgtctggatgaaaataactatgacaggg

SEQ ID NO: 491981 - DNA, 75 bp, Homo sapiens
gccggagctgggcgcggattcgccgaggcaccgaggcactcagaggaggcccagttcaatctgctgagcagcacc

SEQ ID NO: 491982 - DNA, 90 bp, Homo sapiens
aaaaaaaggagagaagctgaagcattgcttcaaagcatggggctaactccagaatcccccattgtttctctgcaggtggatattgttccc

SEQ ID NO: 491983 - DNA, 82 bp, Homo sapiens
ctctggatgaaacgtcaggaatttactacacaggtattgcagttggacacatatattttttcttggaagatgtatttcccaa

SEQ ID NO: 491984 - DNA, 100 bp, Homo sapiens
cgacgaccggatcctgaggaggcagctgcggtggcagctgctgagttctcggtgaaggcttgggcactgtttaaaggaaagttccgagaaggcatcgaca

SEQ ID NO: 491985 - DNA, 49 bp, Homo sapiens
tttgagttcatggatgatgccaaaccctcgcttgcaacatatcaccata

SEQ ID NO: 491986 - DNA, 100 bp, Homo sapiens
tgaaggtcaaccgcctttttgaggcccaaggcatgagccatgagcccaagtccccttcgctagggatgctttccaccgcgaccaggaccaccgccaccgt

SEQ ID NO: 491987 - DNA, 75 bp, Homo sapiens
gatgggaacggagatctgaaagttcctattatccttgccgtaaataaatgtgacaaagctgaggctgatcctgag

SEQ ID NO: 491988 - DNA, 100 bp, Homo sapiens
gttaaccacgtctcgtccacgacctccctaggtgcaggagaacccggggaggaggcccaggctctgctggagggcttcgagggtgagatggacatgaggc

SEQ ID NO: 491989 - DNA, 83 bp, Homo sapiens
ttccccagctgcccggtgcccgaggaggcagccaagctcatggcctgccactgcgtgctggtatgtgtgcaacagagagaaat

SEQ ID NO: 491990 - DNA, 50 bp, Homo sapiens
tggaagcgctgctcacagtcagtgtcggtgatggaatatgagaataggat

SEQ ID NO: 491991 - DNA, 98 bp, Homo sapiens
aaattgtcctgataggatcaaagacaaatggaaagttcctgaaaacagttcctcctgaggatttcagagaagagctggacttcctggctgactctcac

SEQ ID NO: 491992 - DNA, 100 bp, Homo sapiens
gatgaaacagagtatggctgcagaggatccatctgtcttagcaaggctgtcatcacaaagaaaaagtcagcactttttgaagtgtctgaggttataccag

SEQ ID NO: 491993 - DNA, 82 bp, Homo sapiens
gcagcagcccccggggcaagagcaggagcccggcaccccccgccgacaaggaggactggactattcagggattgctcttcta

SEQ ID NO: 491994 - DNA, 82 bp, Homo sapiens
tttggagccccggagtggggtgtcggcgcctcattcgggtggagctgagccggagacagggcgtgatggtgggcatgggtca

SEQ ID NO: 491995 - DNA, 108 bp, Homo sapiens
tgcaggaagaccgtgatgggagctgcagcacagtcgggggtgtaggttatgggggtggccagcatcgaaatgttcagccttttagtgatgaagatgcatcaattgaaa

SEQ ID NO: 491996 - DNA, 74 bp, Homo sapiens
cgcctgactggccggaccctgcccctggcggagattttgtacagcagcaatttcttactctctctgcaagtttt

SEQ ID NO: 491997 - DNA, 100 bp, Homo sapiens
caaggctatgttgcctctgtgttaggccaatgaaaagctttcaaaggatattgattaccttattggtaaggaaagccaggtgaagagtcaaatatctgaa

SEQ ID NO: 491998 - DNA, 83 bp, Homo sapiens
aggacgccgacatcgtgtgccgctgccagatgtgcactcccagcaacacccctgccacgccgcccaacttccccgatgcgctg

SEQ ID NO: 491999 - DNA, 100 bp, Homo sapiens
tgcgagaccgaggtcaacatcaccttctgcgagggctcctgccccggagcgtccaaacagccctcagcgcctttttccaggagaccaacatcccctacag

SEQ ID NO: 492000 - DNA, 98 bp, Homo sapiens
ttctctgaaaggctctccttgcagctgcttagacgctggatttttttcgggtagtggaaaaccagacaggggcaagtgtccgagtggtgaatcagcta

SEQ ID NO: 492001 - DNA, 100 bp, Homo sapiens
agcagaaatggaaattgacagaattctctttgaaattacagcaggggcctttggctactttgaggtcacacatgacattaccaaatactccaaggcaaag

SEQ ID NO: 492002 - DNA, 101 bp, Homo sapiens
gtgtcggaggtctcatctttgaactactgccggagcttctgccaggtagagtacagagagatggatgaaagcttggccaacctctcagaagatgagtatta

SEQ ID NO: 492003 - DNA, 50 bp, Homo sapiens
gaagacagagggttttcttttgaggacttcctgatccatttgctaaggtg

SEQ ID NO: 492004 - DNA, 80 bp, Homo sapiens
ctcaaggacaacctcggcctgagacaccggaggaccggtacctggagtagaacagaaaaattattatgtctgtgttccct

SEQ ID NO: 492005 - DNA, 100 bp, Homo sapiens
cccgactgcaactgctggattgctgcaaggctgagggacgagaacgaggcagccatgttgttcagttctggagtcttttggatgggcttgttattcatcc

SEQ ID NO: 492006 - DNA, 98 bp, Homo sapiens
ggatcagacacaaaggttagaggatcgtaacagttttactttgaaactggaagatactgaaaattggttgtatgaggatggagaagaccagccaaagc

SEQ ID NO: 492007 - DNA, 82 bp, Homo sapiens
agagcgtcggggaggcaagatgatccaccagcggttccatcctacacttgggtccaagggcagccattaatggtgcaggtca

SEQ ID NO: 492008 - DNA, 90 bp, Homo sapiens
accagctcgggggccaactctgaggagtccactgcagcaggcaccactggatcataccagtgacaagtcacttctcgacgctaattttga

SEQ ID NO: 492009 - DNA, 75 bp, Homo sapiens
tacagctggagcgcccagaggcgagccctggtggaggaagagatacaaactggactctcaggacaaaacgacacc

SEQ ID NO: 492010 - DNA, 75 bp, Homo sapiens
gttgatactactttgaccttccgagtgcagtgccccatggctgggggttatggagtgatgggtgacgatggttct

SEQ ID NO: 492011 - DNA, 75 bp, Homo sapiens
aggggagtatgatgcgctgctgccgtggcccttccggaacaaggtgtcacgtcttgaaattttaaatgtcctcag

SEQ ID NO: 492012 - DNA, 113 bp, Homo sapiens
agaaaatctatcgtgaggttcagctgatgaagcttctgaaccatccacacatcataaagctttaccagaatcatttgctgtttcaaatagagaactgtgcgatgatgagaaag

SEQ ID NO: 492013 - DNA, 83 bp, Homo sapiens
tgctgtgtgaaaaccgagctgctgggagaaggtgaaaggtgtagcagtcactcggcctacacccacagcatcgaccttgtgaa

SEQ ID NO: 492014 - DNA, 119 bp, Homo sapiens
gaggggctccgggtcttccagagcgtgaagatcaagatcggtaagtaaggaggtctctgtaccatggctcgtacaaagcagactgcccgcaaatcgaccggtggtaaagcacccaggaa

SEQ ID NO: 492015 - DNA, 78 bp, Homo sapiens
agcctccgctgcagcgcgatctgcgcgaccagaccggcccccccgaggttggtttgttggaccttgaactcaatcggc

SEQ ID NO: 492016 - DNA, 98 bp, Homo sapiens
ggaagatgttcagcgtagagtcgctggagcgggcggagctgtgcgagagcctcctcacttggacctgcctagagctggaacgttacctccagagcgag

SEQ ID NO: 492017 - DNA, 96 bp, Homo sapiens
gaagaccaggaacagctacaagaagagattaagagacttaatagacaattagcccagtatgccaagtacatggaaaaccatagcattgaaggagtg

SEQ ID NO: 492018 - DNA, 90 bp, Homo sapiens
aaacaatcgtggctacaaaaatcaatctcagggctacaaccagtggcagcagggttttcagaagaggagccccgccgaggcatgagggcc

SEQ ID NO: 492019 - DNA, 100 bp, Homo sapiens
cagctgccccaaaaagagcgtcagagccaggctgaggcgcactacaaaggtaatcgccacgcccgacgagtcaaaggcattgaggctgccaagaccagag

SEQ ID NO: 492020 - DNA, 117 bp, Homo sapiens
actttgcattgactggaaacaatggcatttacagaaagagtcaacagcagtggcaacaggctgacaaacgggctcatcataatgcactggaacgaaaacgtagggaccacatcaaag

SEQ ID NO: 492021 - DNA, 100 bp, Homo sapiens
cgcgtggctggaagacatggccactccagtcggtgttgagcacggcgagcagtctcaggcctttagtgatgatggaagaggatcacctagcccgggtaga

SEQ ID NO: 492022 - DNA, 98 bp, Homo sapiens
gaagaggcggtagggggtacgggggctggtcccagaagatggcggaggcgggggtgtcccgcgatgggggcgctgcctcccctgccactgagggccgg

SEQ ID NO: 492023 - DNA, 83 bp, Homo sapiens
tgaagcgggagcgggacgagtacaagcggagcattttgaaagcgaagcagaagccgtagaatcagcggcgagcctgttgaaag

SEQ ID NO: 492024 - DNA, 98 bp, Homo sapiens
gaatatgtccaaccagtacaacttagataacttctttgtggatgattatgctagatttactatcttggattcccaaggcaagactgctgctgtagcca

SEQ ID NO: 492025 - DNA, 51 bp, Homo sapiens
tccgggaagccatagctctgcatgatgcctgaggaagtgcaccatggagag

SEQ ID NO: 492026 - DNA, 83 bp, Homo sapiens
cgatgaagtgcagaggtttttttctgggcccactgatgatggtgaagaagagatggaagaagacacagtcacaaacgggtcct

SEQ ID NO: 492027 - DNA, 100 bp, Homo sapiens
ttattcatctgtccagcatgactcatccccgggagtgttgagatgaccatgaaagctgtggttctaattctaccaaccgtagtactgctgagagcacaaa

SEQ ID NO: 492028 - DNA, 74 bp, Homo sapiens
ccgacatcgacgccgcctggcaggccctgcgcaccaggaaaaatatattcagggggaagagatgtaatagattt

SEQ ID NO: 492029 - DNA, 82 bp, Homo sapiens
cgagccgcagtgaggccaacgccgtgttcgacatcctggccgtgctgcagtgacaaccatgagtggaaaaaactaattatgg

SEQ ID NO: 492030 - DNA, 113 bp, Homo sapiens
cgaaccgcagtatcatgctggccaagaagatcatcattaaggacggaggcacggttcctagaaggtgagcgcggacggtatgcaaagttgtgaatccagtggtgacagtgcgg

SEQ ID NO: 492031 - DNA, 89 bp, Homo sapiens
ctgcactccgcccggacccccggccccgccgtgggctcttaaagactctgaccaagtagcacagagtgatggggaggagagccctgctg

SEQ ID NO: 492032 - DNA, 83 bp, Homo sapiens
actatctccacagaatgggcatcgtccacagagacctcaaggtatcagtccctcaatctaacccatgttcctgaacacagtgc

SEQ ID NO: 492033 - DNA, 74 bp, Homo sapiens
acgggtggactggaagagacccaagccaaggccacctttgatgccatttctaagacctacagctacctgacccc

SEQ ID NO: 492034 - DNA, 75 bp, Homo sapiens
ctggaaggtgcgtgtggggctgggtctcggagtgggagacgtggagtgcagagacacttgtcgcccgaggagttc

SEQ ID NO: 492035 - DNA, 100 bp, Homo sapiens
gccgccctggccacggggactctcttctggatggtgcacattcaggttcccgagcacaaacatcaagataacgttcactgccctgtccagcgagaagaga

SEQ ID NO: 492036 - DNA, 100 bp, Homo sapiens
tgctgttgctcttctccgccgcggcactgatccccacagccatgaaccagagaatcagtcagagtgctccagtgaaacagccaccacccctggctcccca

SEQ ID NO: 492037 - DNA, 82 bp, Homo sapiens
tgaggctcacagccgaacaggcacgcttcttcctgacctgcctagagctggaacgttacctccagagcgagccctgctatgt

SEQ ID NO: 492038 - DNA, 88 bp, Homo sapiens
cgagacggaggcgctgcagcgcttcttcgaagacgcaaacatgcagatctttgtgaagaccctcactggcaaaaccatcacccttgag

SEQ ID NO: 492039 - DNA, 75 bp, Homo sapiens
tcacgaaggcaccgacgtcatcatgctgaccaccaatcagatccgtaagattcctggtcgggtggcttccagtgg

SEQ ID NO: 492040 - DNA, 90 bp, Homo sapiens
tgaggcgccagcctgcgaaggtggcggcgctgctgctcgggctgctcttggagctgcatcttcctcccgtgaggctggccgagctccacg

SEQ ID NO: 492041 - DNA, 83 bp, Homo sapiens
attcatctggaactcagagaagaaggagtttctgggcaggaccggtggcagttggttagacccaaatgatttgtacattgtag

SEQ ID NO: 492042 - DNA, 89 bp, Homo sapiens
ctctgctgcggcgcggggaccgctgtgctctcgagtccaccctgcacctggtgttgcgcctgcgaggtggcattattgagccttctctc

SEQ ID NO: 492043 - DNA, 102 bp, Homo sapiens
cgatggtgaaaagggtcctcctgctcacagtgtgaataacaggaactgtggctgcaccatctgtcttcatcttcccgccatctgatgagcagttgaaatctg

SEQ ID NO: 492044 - DNA, 82 bp, Homo sapiens
gcggacaaaacgccaggcggatctcagaaggccagttcaaagatattgaaatggattccaggcgtgtgcctcgagacaagct

SEQ ID NO: 492045 - DNA, 100 bp, Homo sapiens
gtggattcttcagaaagtgaacttggcattttagatctaattcaagaacttgtaatagctggcatcgttgagaatgaatggaaaagaacgtgctccagac

SEQ ID NO: 492046 - DNA, 82 bp, Homo sapiens
actccaacgcagtggccgaggaagctgcctgcccggtgtctgcccctgaggaggtcaatcagacatttacaagaagcatcag

SEQ ID NO: 492047 - DNA, 99 bp, Homo sapiens
ctcctccagcaacctgggtgcgttcagcggcattcaacaaatggcagacctgcctagagctggaacgttacctccagagcgagccctgctatgtttcag

SEQ ID NO: 492048 - DNA, 100 bp, Homo sapiens
ctggacacagaagtatttgtgacagagagaaaaggaacagttccgtaagctctttattggtggcttaagctttgaaaccacagaagaaagtttgaggaac

SEQ ID NO: 492049 - DNA, 97 bp, Homo sapiens
tggatggcgtggagatatggcgcaactgcggcgccacaaattgaagtgatcccttgcaaaatctgtggggacaagtcgtctgggatccactacgggg

SEQ ID NO: 492050 - DNA, 75 bp, Homo sapiens
gagaatcaaggcgttgagcctcaagaatgtgaaagatgttgcagaagtgttccagaagtggctgaagatagaagg

SEQ ID NO: 492051 - DNA, 100 bp, Homo sapiens
gtttccttcaagagttttcatggattctaatggaatcaggcagttttgtgtccatgtgaacaactagcagttcagagccccagttgcagacgacttgtcc

SEQ ID NO: 492052 - DNA, 100 bp, Homo sapiens
ggatcgtgaccgagaccgtgaccgagagcgtgaccgagagcgcgaatatcgtcatcgttagaagggaactctaatgatccaggacaaagaagttaccctg

SEQ ID NO: 492053 - DNA, 83 bp, Homo sapiens
ggagttggcaacgcgacacagagccagagctcgtccgcatggtgctgaatggctgaggaccttcccagtctccccagagtccg

SEQ ID NO: 492054 - DNA, 100 bp, Homo sapiens
taaaaaagtcaagaagaaaggaagaaaagatgatgatagtgatgatgaatctcaatcatcccacactgcaaaagctggcaggctgacagaggcggcctca

SEQ ID NO: 492055 - DNA, 100 bp, Homo sapiens
cagcagtatcctgcatcgggagaaaacaagtccaaggatgaatcccagtccctgttacgggcagaatacttctatgaattcctgtccttgcgctccctgg

SEQ ID NO: 492056 - DNA, 50 bp, Homo sapiens
gggaagggaagctgctgtgttgaagatgaagagcatgagtgtgggggacc

SEQ ID NO: 492057 - DNA, 75 bp, Homo sapiens
tgcatcaaatacttcatatttggcttcaatgtcatattttgggttgttgatcattatgaaaatcctagaaacgtg

SEQ ID NO: 492058 - DNA, 50 bp, Homo sapiens
gcaagagcagccgcggcgccactctcaccatggatgatgatatcgccgcg

SEQ ID NO: 492059 - DNA, 50 bp, Homo sapiens
aatacccctttgaattaattatggctgtgccgccatgccgccattgccaa

SEQ ID NO: 492060 - DNA, 100 bp, Homo sapiens
cgtgggcaccttgcgcttcttgcagtcggctgaaggtgatgtggccgccctcaaccgacgcatccagctcgttgaggaggagttggacagggctcaggaa

SEQ ID NO: 492061 - DNA, 78 bp, Homo sapiens
tggaaatgaccttggggtcacagttcaagtgaccattgacccaggcctatgaaaggaggttccctacatgtcctttga

SEQ ID NO: 492062 - DNA, 75 bp, Homo sapiens
agaatctgatgagccttttaggcctgttcaggttacattggcgaatttgaaatcattgatgaccacagagctggg

SEQ ID NO: 492063 - DNA, 90 bp, Homo sapiens
acatgattgatcagaacagagatggcttcatcgacaaggaagatttgcatgatatgcttgcttctctagaggctgacccgcggctgattg

SEQ ID NO: 492064 - DNA, 98 bp, Homo sapiens
cgcctgaggaggcgagctagccgggagttacaccgccaccgccagcaaagaacagtctgaacttgatcaagatttggatgatgttgaagaagtagaag

SEQ ID NO: 492065 - DNA, 100 bp, Homo sapiens
gacgcccaccctggaggcactgaactacaggatctcatgcacatctcacgggcccggaagccagcgttcatcctgggctccatgagggacgagaagcgga

SEQ ID NO: 492066 - DNA, 100 bp, Homo sapiens
tatacaagaattccggtttcaacccccacctctttattcagagattcatgatgttgctatcaaaagttgagaaattgtcagaagaaatcatggagataat

SEQ ID NO: 492067 - DNA, 75 bp, Homo sapiens
ctggccctggactacctctgcagggtctgcctgctgggagtcctggccctggtcatcagctggggcgcgctgggc

SEQ ID NO: 492068 - DNA, 82 bp, Homo sapiens
tgagtgccctcaggggttccccaggaatatcgatacaacaccaacagtgtggcaaaggagcagagaactttgacaagttctt

SEQ ID NO: 492069 - DNA, 90 bp, Homo sapiens
gaatcccaaacaaggaaagctccgcaccaaggtggagaacggccatcatctgtgcgatctctgcggtggacgaggtggactacaagacgg

SEQ ID NO: 492070 - DNA, 50 bp, Homo sapiens
ccagagctgaggactgcctgtttgcagtattaaaggtggaagaaggtcca

SEQ ID NO: 492071 - DNA, 82 bp, Homo sapiens
gtcgacatgagtgatgtggaggaaaacaacttcgagggcagagatctcatggtccggaatgacaccccctgtggaaccacca

SEQ ID NO: 492072 - DNA, 83 bp, Homo sapiens
cggcggaaaaccgaagttggaagtgtctcttagcagcgcgcggagaagaacggggagccagatagcctgggctggaagctctt

SEQ ID NO: 492073 - DNA, 97 bp, Homo sapiens
aaaagatctaaagtcacccggcggccaaaggccagtgactaccaacgtttggaccagaaggagaaactggctcttcgacagcagttgaatgaagcga

SEQ ID NO: 492074 - DNA, 90 bp, Homo sapiens
cccctgaccattgaagaggtggcccccgccccgtcgggcctcacgagagaggtgatcgagaagaaaccagaggtgttcaaggtcgcctgc

SEQ ID NO: 492075 - DNA, 73 bp, Homo sapiens
ttgaattagattacagcgatggggacacagaaggtgattgtagagaaggctccaaaagccagggtgcctgatc

SEQ ID NO: 492076 - DNA, 80 bp, Homo sapiens
gtactcggggggcggctctgcgctggccgggggcgcgggcggcggcgccggcaggaagtgcctccggagccagcgtggtg

SEQ ID NO: 492077 - DNA, 75 bp, Homo sapiens
agaaagagtcaacagcagtggcaacaggtgaaagaacttgtcctggacaacagtcggtcgaatgaaggcaaactc

SEQ ID NO: 492078 - DNA, 51 bp, Homo sapiens
tggctataatggatttggtaatgatgggcctgccttaagtgtgaaagtaat

SEQ ID NO: 492079 - DNA, 88 bp, Homo sapiens
ggaccatgtgatgcacctgctccaggaggctgaggatggcattattgcttatgatgactgtggggtgaaactgactattgcttttcaa

SEQ ID NO: 492080 - DNA, 49 bp, Homo sapiens
ggcgtcggcagctgctgctccgagcggcttttttccaggactgcatttc

SEQ ID NO: 492081 - DNA, 74 bp, Homo sapiens
agatagttgtgcttttacacggttttccaacatccagctacgactggtacaagtgggctcgggatgagtttgaa

SEQ ID NO: 492082 - DNA, 100 bp, Homo sapiens
cgtggatcccccaattacagtatgcctttcaggacaaaaatcacctttatctgaaaaagcagagagatcttgctaagatgagaaaatgtctcagaccaga

SEQ ID NO: 492083 - DNA, 49 bp, Homo sapiens
cccaactccaactccatgtacatcgataagaccatcatcatgtggaaac

SEQ ID NO: 492084 - DNA, 98 bp, Homo sapiens
agaggggtccatacggcgttgttctggacatatctgaagagatggattaagaatgctttggattaaggattgtggagcacatttcaatcattttagga

SEQ ID NO: 492085 - DNA, 83 bp, Homo sapiens
ccggtggctccgaagcggggaagtgggacaagatggtttacatctcgaacggttacccatgcagttgttactgtaccagccta

SEQ ID NO: 492086 - DNA, 152 bp, Homo sapiens
ctgggtattgaaactctaggaggtgtctttaccaaacttattaataggaataccactattccaaccaagaagagccaggatgaagaggaagccggcttattggagctcttaaaatcccagatttgtgataatgccgcactctatgcacaaaa

SEQ ID NO: 492087 - DNA, 100 bp, Homo sapiens
aaattttccttgacctttaggtgcttttatattcatctcaaaaacaaaattctgaactcaggacttggcaagtgtggacactgcaagagacttgcacctg

SEQ ID NO: 492088 - DNA, 100 bp, Homo sapiens
gaatatcctggaaccttcttttgtttgtcagcagccaaggtgtttccaggaagttcagagagaacagatccagacatttaatgtggatgcaccatgccag

SEQ ID NO: 492089 - DNA, 100 bp, Homo sapiens
ccagcacgcgcctgcttcccgtctgcgcgagtccacgcagctccccagtttcgccatgttccacaaggtcagagttcctcgccagagccttctgaaccgg

SEQ ID NO: 492090 - DNA, 98 bp, Homo sapiens
cccaagctactggtgccagaacacagagacagcagcccagtgcaatgaagatgagaatgtgcctactgctcctgatcctccaagtcaacatttacgtg

SEQ ID NO: 492091 - DNA, 82 bp, Homo sapiens
gaaggggagtttccacagtgattgatgctgcctcagttttaacacaggctaagcggtatgctttttttatgccaactctgcc

SEQ ID NO: 492092 - DNA, 71 bp, Homo sapiens
ttcgggcccatagagggctgcgtcacttctgggggcagggcctggtcactgaccaagtctcactgcacgtg

SEQ ID NO: 492093 - DNA, 110 bp, Homo sapiens
ggaacgagccaggaagagggactggaaccatctcagaagccatgcccctcaggctggaacttgccctgtctcctcgcagatgagctggacaatccagatgagcaagcagc

SEQ ID NO: 492094 - DNA, 112 bp, Homo sapiens
ctctttgcaaagttgataacatttcaaaccctgaaggacagtgacttattatgtggtgtcccagcgaatcagtaccgtggatctctcgtgttacagcctcgaggaggttcct

SEQ ID NO: 492095 - DNA, 100 bp, Homo sapiens
cagcccccaggaagcctttaccaacgccatcaccgacctcatcagtgagctgtccctgctggaggagcgcttccggccacaagtatatggttatgatgac

SEQ ID NO: 492096 - DNA, 90 bp, Homo sapiens
ccaaaccaggagattgcgagggagcgatgcggtgcagcgcgggcgaactttctgaccaagtatacaactacccagagggcctaggagaag

SEQ ID NO: 492097 - DNA, 50 bp, Homo sapiens
attcagacgccgattcgcccaggatcacctgctgttaccagctaccaccc

SEQ ID NO: 492098 - DNA, 101 bp, Homo sapiens
cgaagagtccccccaagtctcctgaagaggaaggagcggtgtcctcttaagaaaatggactggaaggatcaccagcacatatgcggccagtcagcagctgt

SEQ ID NO: 492099 - DNA, 51 bp, Homo sapiens
taaagggaagcgggtcgttatgaggcagtcatggatcaggtaatgcagttt

SEQ ID NO: 492100 - DNA, 75 bp, Homo sapiens
tcctggctcttgccctcatcctggttctggaatcctcagttcaaggggctgccagaagctgccggtttcgtggga

SEQ ID NO: 492101 - DNA, 80 bp, Homo sapiens
cgtccaccaacctgaccatgacctttaacaaccagctgaccactgtccacaaccagatggcccactgcgtgaccttggtt

SEQ ID NO: 492102 - DNA, 83 bp, Homo sapiens
gcaaggagctaaagcagcgtgcgttcagccctgggctagacttcgggctccttgaggatattcagttttgtatgtttgaatat

SEQ ID NO: 492103 - DNA, 75 bp, Homo sapiens
catgcagttctattcaataagtctggtatctcagatgaagacatcatcaacattactcttcctactggagtcccc

SEQ ID NO: 492104 - DNA, 74 bp, Homo sapiens
ccctggtctctgttggtgtagaagccaaaatcaggaatatattattcgagtgcaaagaggaatttctgtggaaa

SEQ ID NO: 492105 - DNA, 82 bp, Homo sapiens
ccgtcacctacatcttccaccagcttctgggtgagaagccctaccactgcaactgggacggctgcggctggaagtttgcgcg

SEQ ID NO: 492106 - DNA, 100 bp, Homo sapiens
tggacacctggcgaccaagcagcgcccggtcgccagatcgaaaatcaaggatgaccagtgtcccagtgaaggaacgagtgaaggtgtctcagaactggag

SEQ ID NO: 492107 - DNA, 75 bp, Homo sapiens
ccaccagttgcaccagtgcagggacagcagcaatttcagaggctgaagacccgtttgatggagctgcaccgccag

SEQ ID NO: 492108 - DNA, 82 bp, Homo sapiens
atgacaagaagacgtccaatctgagcgtgctgcggacggcgctgcggtacatccagtgagagggtccaagcctggtaagaat

SEQ ID NO: 492109 - DNA, 90 bp, Homo sapiens
ccaggagcagcgaggcactcatcctgcacgccggcgagtgccagcgcaaagtgaaaaggagagcttgttgaaggaaagagatcacatttt

SEQ ID NO: 492110 - DNA, 75 bp, Homo sapiens
caagaagaaaaagagaagaggccagatctatatgcattggctatggggtttattttcttgaaaaggctccaggct

SEQ ID NO: 492111 - DNA, 80 bp, Homo sapiens
cgaacgggttgcttcccccgctgcgagagctgccatcagtcatgctcttaaacggggactgcccagagagcctgaagaag

SEQ ID NO: 492112 - DNA, 97 bp, Homo sapiens
gcagcagtgtcctgtgctgatggtgttggcagagtgtgaacatggctacgcctcttcattcccgtccatgccgagcccccgactgcagcattcaaag

SEQ ID NO: 492113 - DNA, 74 bp, Homo sapiens
tcctgtacacaatcttcatgaaagttggctggggaacagaccagggaattggtggatttggagaagagccggga

SEQ ID NO: 492114 - DNA, 100 bp, Homo sapiens
cctatagaaagaaatgagcagctttggataatgacgacagcaacccgaagacagggaaatttagagtaccaagttcgatccatagcaagtcatgttcgtc

SEQ ID NO: 492115 - DNA, 100 bp, Homo sapiens
atgagtttgttcgtaaaggacttcgtaatgatgtcaagagtcatgtctccaaaagttttggaaggtctccatcaagaaaacaaaattattcatcaaaaaa

SEQ ID NO: 492116 - DNA, 82 bp, Homo sapiens
tgcccctgccctggctttgaatcaaggcaattaattgctcatttgcaagttttctctaaattttcaaatccacgggccttat

SEQ ID NO: 492117 - DNA, 100 bp, Homo sapiens
ttgttaaggattccaagtaactcttatttgaaactgctctttgagcgcgggaaggaggccctggagtccgaatttcgcagcctgatgacgcggcacagta

SEQ ID NO: 492118 - DNA, 100 bp, Homo sapiens
gagtgtctgacatttcttttgtgcaagatgagcctcaagtgcttctgcattacaaccagcatctcagacatgtcgaaaaagatgttttgatccctaaaat

SEQ ID NO: 492119 - DNA, 100 bp, Homo sapiens
acacgcaaagatattcaaactctaaaccatctgaattggctcaatgatgaggatgaatctggttatagatggacaagagacgatcattctgcaagcaggc

SEQ ID NO: 492120 - DNA, 102 bp, Homo sapiens
ggcttttcacccaaatatactgcctgctgtccagagggcacacttagggtgtcccgacccaggctaagcttgagcatggctgagcaggagcccacagccgag

SEQ ID NO: 492121 - DNA, 82 bp, Homo sapiens
aaacacctaggaagggagaactggctacgtgcaggcctgccgcgccctgatgattgctgcctcggtcctgggtctgccggcc

SEQ ID NO: 492122 - DNA, 82 bp, Homo sapiens
gacaaagatggcggcagggaccagcagttactgggaaggtggataatattaatgcagctgtgatggatttgaaaaaaaagaa

SEQ ID NO: 492123 - DNA, 99 bp, Homo sapiens
tcaccagagtttcatgaacatttcaataaattgatggccagacctgcagttgctctacactttcagttctgcaggctggaaatccaagatgaagtcacc

SEQ ID NO: 492124 - DNA, 100 bp, Homo sapiens
cttgtttgtaagctacaccctctcggttttctctgctctgccaacactagtggaatatgatcacatcccagagagctcagaaatatgctcagcaagtctt

SEQ ID NO: 492125 - DNA, 100 bp, Homo sapiens
attctacgccgcccggtcgccagggagagtgaatacagctagggacgtgaaaggcagaacatttccccagaggagctcaaaatggagttgccggagagac

SEQ ID NO: 492126 - DNA, 90 bp, Homo sapiens
cgggagcctcgtggctgcgtcaccgccgcccccccagacaagatggacaccgcggaggaagcattgcagtgtcgagatggctatgaaccc

SEQ ID NO: 492127 - DNA, 106 bp, Homo sapiens
ttttgggggaatcatagccccatttctgctctttcggctagcagccgtgtggctagaactacctctgatcatctttgctgataccccaatgtccttctttgacttt

SEQ ID NO: 492128 - DNA, 97 bp, Homo sapiens
gaatcgaatctcttctccctccccttcttggttttataggatcacattgacaaaagtaccatggagttttatgagtcagcatattttattgttctta

SEQ ID NO: 492129 - DNA, 50 bp, Homo sapiens
gtctcgtccacgacctccctagttgaggctgtgaagctgggcagggtttc

SEQ ID NO: 492130 - DNA, 76 bp, Homo sapiens
ggccaagtttctttcccaagaccaaattaatgggctgaactgtatcgggcctcagggaagtttgagctgcttgatc

SEQ ID NO: 492131 - DNA, 82 bp, Homo sapiens
cgacaagccgctggcagccgcggatctcaccgccgctcaggaaaaccgtgaggacatactgaatgccggtgacaaattaaca

SEQ ID NO: 492132 - DNA, 75 bp, Homo sapiens
gaggaagtagccaaagagcaactaactgatgctgacaccaaaggaagatgatccctatgatcttgaagatgtttc

SEQ ID NO: 492133 - DNA, 100 bp, Homo sapiens
tccaagatggtttgcgggggcttcgcgtgttccaagaactgcctgtgcgccctcaacctgctttacaccatccctaaagaagtggctgacatctttaacg

SEQ ID NO: 492134 - DNA, 75 bp, Homo sapiens
ctcggctggagagcagaagaccgaaagcaaattgtggctactaatttgccccctgaagatcaagatggctctggg

SEQ ID NO: 492135 - DNA, 100 bp, Homo sapiens
ggaagacccccgagaagtacttaaaaaaacattggaattctgcttatctagctgaaggaagaggatcaccttccaagacaaaacagtcttcatgggggaa

SEQ ID NO: 492136 - DNA, 90 bp, Homo sapiens
gctcagcggctcccaggtgcgggagagaggtaactataactacccaatattgcagccatggagtccatgcttaataaattgaagagtact

SEQ ID NO: 492137 - DNA, 50 bp, Homo sapiens
caacaccgttcccccagccgggctgtaattcgccaaaatgacgaacacaa

SEQ ID NO: 492138 - DNA, 87 bp, Homo sapiens
ccggatatttaagtacaatggtgggcttaattttaggttggccttggggaggcactattagaggctgaaactattgaagaacaagaa

SEQ ID NO: 492139 - DNA, 82 bp, Homo sapiens
ctcctcctcagggctccagtcaggccgatccgctccgctcacgggaaagaacatcagggggtccagaggcagccgacttctc

SEQ ID NO: 492140 - DNA, 50 bp, Homo sapiens
ctggaatgtcattatcagacacaatggtgctgatgtatggacagccgtat

SEQ ID NO: 492141 - DNA, 74 bp, Homo sapiens
cctgcacgcggggcgcgggccccgaaggctctccatcgaaggcaacattggctggagtgcagtggcgcgatctc

SEQ ID NO: 492142 - DNA, 100 bp, Homo sapiens
cgctccctgtctgggaccttctccctgcctggacccctactattgcaacaagacggtactgcagggacaccagcaatatcaacgacgacaactgtggaaa

SEQ ID NO: 492143 - DNA, 90 bp, Homo sapiens
aaacggcaattcggcagctggagaaactgattattgatgagaagaagtattacttatttgggagaaaccctgatttgtgtgactttacca

SEQ ID NO: 492144 - DNA, 100 bp, Homo sapiens
acgctgggactcgtacgagaacctcagtgcagatggagaagatggttcacaggcaccagccagaccccctaaaccacgaccgcgcaggactgcaccagaa

SEQ ID NO: 492145 - DNA, 75 bp, Homo sapiens
caatgcccggggcccaggcagaatgggccggatcgtggcacccagaggctgccaggactttggctgggacccctg

SEQ ID NO: 492146 - DNA, 100 bp, Homo sapiens
tgcaagacatgggccttgtcgatctgttcagccctgaaaagtccaaactcccaggtaagttcggggagacttcaggccagggcagtctcctgtcttctct

SEQ ID NO: 492147 - DNA, 75 bp, Homo sapiens
cctcctcgccagcagccgtccggagccagccaacgagcggtggccaaggtggaatacgtcaggaagaagccaaaa

SEQ ID NO: 492148 - DNA, 75 bp, Homo sapiens
gtgctgatgtgaaaaataccacgacaaaaccaccctaatgaggctgtggacccaggctagacagatgggatggta

SEQ ID NO: 492149 - DNA, 75 bp, Homo sapiens
gcgggagctggacggcgagcgcgagcggcgcgagaaagagtgtggccatctggggccgtgtggtatttgccactc

SEQ ID NO: 492150 - DNA, 101 bp, Homo sapiens
aagtttgccataaaagttgatggagattacctttgggtgcagattcactttataggaacagcttcagcttcagtgatgaaaaactgaattctccaacagac

SEQ ID NO: 492151 - DNA, 74 bp, Homo sapiens
agccctgggtcgcttggaagaagccaagcccctatgtcaccacagtgggaggcacatccttccaggaacctttc

SEQ ID NO: 492152 - DNA, 82 bp, Homo sapiens
gaaaaacagtgctcggaaagcatctattgtgaaaaacctaaaggataccttaggtatccaaaccttgaaacctttgctctag

SEQ ID NO: 492153 - DNA, 82 bp, Homo sapiens
cagaagatggtgcagaagaaaccagccgaacttcagggtttccaccgttcgttcaagctttaatgcgcccaaatgtgggcgg

SEQ ID NO: 492154 - DNA, 82 bp, Homo sapiens
tttgcagcccgtgcggggccgtctcggagaccccgcgccgacggctgctcaaacatcaggtacctggagtagaacagaaaaa

SEQ ID NO: 492155 - DNA, 90 bp, Homo sapiens
ctgcctgcctgcctggcatctctctctcccgatgagacaaggggccttcctggtgaacacagcccggggtggcctggtggatgagaaggc

SEQ ID NO: 492156 - DNA, 74 bp, Homo sapiens
tgcagatgcagccagcaggaaaggagatcatgagagactatatccagaagcacccagagctgaacatcagtgag

SEQ ID NO: 492157 - DNA, 50 bp, Homo sapiens
gaagacctccgaaggaccataggtatggcgactacccgaagctccctgac

SEQ ID NO: 492158 - DNA, 100 bp, Homo sapiens
aacttgttggaaatggaacatacgggcaagtttataagcttcatattctccaattcagcctcattctctaataaaacatcagcagattcctcttcattca

SEQ ID NO: 492159 - DNA, 100 bp, Homo sapiens
tggatcctgctcctctgggttgaaacccgggcgccgccaagatgccgcaggcggaggagccgtcacctcccagaatgactagtgccgcccctgctaagaa

SEQ ID NO: 492160 - DNA, 73 bp, Homo sapiens
gcggatctcatatcttcacttggcaaactcaacaaggaatactcccccagttgcaagaggcgcaggaccgtgg

SEQ ID NO: 492161 - DNA, 74 bp, Homo sapiens
cagaagatcatgatcccaccattgggtgaaggttgccgaactgtccccctggctggacatgtggggtttgacag

SEQ ID NO: 492162 - DNA, 82 bp, Homo sapiens
acatttcttttgtgcaagatgagcctcaagtgcttctgcattacagtgttactgcggaaatgcaaaacttagtccatcggcg

SEQ ID NO: 492163 - DNA, 89 bp, Homo sapiens
gaggaggcagctgcggtggcagctgctgagttctcggtgaagcctcctgacaaggtgatccgggcgggccccgcaggaattttatcccc

SEQ ID NO: 492164 - DNA, 50 bp, Homo sapiens
gagttctcggtcaccatgtggtcctcagacaatgcagatcttcgtgaaga

SEQ ID NO: 492165 - DNA, 75 bp, Homo sapiens
aataataccaaaatatcttcgtgcttccatgactaacttggtcaaggattttgacacttcatgacatgtcattat

SEQ ID NO: 492166 - DNA, 80 bp, Homo sapiens
gggtactgtcgcggaggcttgtcattctgacccggggattcctcacagcgtctggcagctttgcccgaagtttttacata

SEQ ID NO: 492167 - DNA, 102 bp, Homo sapiens
gaggctggcagcgaagaagatcgaaaattaaacctcagatgcgtctgttactagagtggagagtctaccttcgtctcacatgtgccacaaaggatggcatgg

SEQ ID NO: 492168 - DNA, 82 bp, Homo sapiens
cgaggtggaggaggagtccccaggaaagcgcctggacgcagcaattctgtggtgttcttggtcacacatttatggagtttct

SEQ ID NO: 492169 - DNA, 139 bp, Homo sapiens
cggcagtgaagctcaagttgctactcgggacgctgcacctcccgcgccgcacggtggacgaggtggtagctgagcacccagatgcttcaggtgaggagattgaagagctgctcaggtcacagtggagtctgctgagtga

SEQ ID NO: 492170 - DNA, 100 bp, Homo sapiens
ccgtaacctgcgcgctgccctagggcccggccgacccgcggcccggtgctggagaatctggtaaaagcaccattgtgaagcagatgaggatcctgcatgt

SEQ ID NO: 492171 - DNA, 100 bp, Homo sapiens
atcattgaataagtgttttaagaaagtggacaaagagaggagtcaggagtttgctataaaatgggagttctggttgtactcactgttctgtggctgttct

SEQ ID NO: 492172 - DNA, 83 bp, Homo sapiens
cagattcgcagtggtcgcttcttctccttgggccatcgatgcacccctcggagctaatagcggagatgagaaacagtgggttt

SEQ ID NO: 492173 - DNA, 98 bp, Homo sapiens
gattgcgtacccactgcagagtgctgaagacggggtagccacgaggcaggccagaaagcagacccagggaggatagcacatgtcttcggctacactgg

SEQ ID NO: 492174 - DNA, 75 bp, Homo sapiens
ctggggagcccttctgcgccacagtatgccgagattttgctgtcctggaggaccacaccctggctcacagcctgc

SEQ ID NO: 492175 - DNA, 121 bp, Homo sapiens
aaggtgggaagacggacttccaatcgagtgactgcctggcacggggttacacatcattttggaatgactgtatatcatctggattacgtggctgtatgttaattgaattagcattgagagg

SEQ ID NO: 492176 - DNA, 83 bp, Homo sapiens
gcccagacagcccggaactcaacaaagtgatcatcgccaaccaccacatgcaatctatctcatttgcatccggcggggatccg

SEQ ID NO: 492177 - DNA, 100 bp, Homo sapiens
cggcatgggcggcgctggccgagggctttgttcgcgggggtcacagctctcatggctgcagctagcgtgaccccccctggctccctggagttgctacagc

SEQ ID NO: 492178 - DNA, 99 bp, Homo sapiens
ctatgccagtgagaggcccaagtccctagtgaactttgaggcgctgatcatcaccatgtcggtagtcgggggaaccctcctcctgggcattgccatctg

SEQ ID NO: 492179 - DNA, 99 bp, Homo sapiens
tggcactcctggacaggatggattgccagggcttcctggcccgaaaggagagcctgcgttcgtggcattcagggatgtggctgtgtacttcacccagga

SEQ ID NO: 492180 - DNA, 145 bp, Homo sapiens
ctgggctcagcacggagggagcgacggggccttcggccgacacctccgggtcggagctggacgggaggaatgtatcctgtcaggtataatgtcagtgaatggcaagaaagttcttcatatggatcgaaacccttactacggagga

SEQ ID NO: 492181 - DNA, 98 bp, Homo sapiens
acgaggccacccagtcccacttcaaacattcgtctcggaaaccccgcctcttacagtcacgaggacaagatgaagctcatcatcctggagcactattc

SEQ ID NO: 492182 - DNA, 100 bp, Homo sapiens
caacatattgtatattgttcaaatgatcttctaggagatttgtttggcgtgccaagcttctctgtgaaagagcacagggattaatgaaaatcaagttcca

SEQ ID NO: 492183 - DNA, 78 bp, Homo sapiens
tttaagcaaggaaattgaactaagaaatggagagcatgagtctgctttgccctgggatgaccatagaccacaagttac

SEQ ID NO: 492184 - DNA, 100 bp, Homo sapiens
cgcggagcagtagccgccgtgggagggagccatgaagcattacgagtgtgtcccggcatggatatccggaacaacctcactaggttgcatgagctggaga

SEQ ID NO: 492185 - DNA, 100 bp, Homo sapiens
ctcccaaggtgctgggattacagatggaacaagaggctgagaggcgcaggcagccacaaataaagcaagagccagaatcagaagaggaggaagaagaaaa

SEQ ID NO: 492186 - DNA, 80 bp, Homo sapiens
tgattaggccacaatcttcaatgagtaaacatattcctgtatcattgcccagtgcctaagatcttttatgttcagctcac

SEQ ID NO: 492187 - DNA, 83 bp, Homo sapiens
cggcgtctccttctatgtgctgtgtccggacaacggctgcggcgacaattttaggttttatacacctgaaagaagagaatgtc

SEQ ID NO: 492188 - DNA, 74 bp, Homo sapiens
cggggaccttgccttgcccggggtaaatgagctggatggtatcccgttgatcctggacaactgcaacatcagtg

SEQ ID NO: 492189 - DNA, 88 bp, Homo sapiens
cgacatgcctttgtgcctttcccagatgctaatactggagaccgtggacagaccaataatgctgcttctgcatcagcttccaactcca

SEQ ID NO: 492190 - DNA, 75 bp, Homo sapiens
cggatggggcaggatggctgcgttgacacgtcttatttaatccacatcataggttaagagcaggcttatgtgatc

SEQ ID NO: 492191 - DNA, 100 bp, Homo sapiens
tgcggatcgatgtcgccagcatagacatggtctccgaagtgaatatggcagctgttgtgctgtgtatggacgtgggctttaccatgagtaactccattcc

SEQ ID NO: 492192 - DNA, 75 bp, Homo sapiens
gagttcaagaagaacactccagagatatcattgaaatggattccaagcgtgtgcctcgagacaagctggcctgca

SEQ ID NO: 492193 - DNA, 100 bp, Homo sapiens
cacgcaaccccagatccatttacactttacagcctgtcccctcagttcccaggtgccatgaggaagcctcgtcggaagtcccggcagaatgccgagggcc

SEQ ID NO: 492194 - DNA, 99 bp, Homo sapiens
ggacatcccctaccaggagatcgcagaaacccttgaaactctcatcaaacaagcagaaaattacaccagtatacttttttgcagtacctacaggaacat

SEQ ID NO: 492195 - DNA, 90 bp, Homo sapiens
cggtgagatcgtcagcgctgactccatgcagggtccacatatagcctcagttacattagctgcttatgaatgcaattcagttaattttcc

SEQ ID NO: 492196 - DNA, 75 bp, Homo sapiens
cctggaaggaaagaatgaagaggccctgcaaggcatcaaacagtgcctcctacatccaggacgcctttcagctac

SEQ ID NO: 492197 - DNA, 75 bp, Homo sapiens
gctgcagctgcgatctctgtggtaggcccaggagcatcagatccatgctgctgctgactcggagccccacagctt

SEQ ID NO: 492198 - DNA, 116 bp, Homo sapiens
ctcgggcgccggcgagatgcctttgttcaccgccaaccccttcgagcaagacgtggacaatgcagatcttcgtgaagactctgactggtaagaccatcaccctcgaggttgagccc

SEQ ID NO: 492199 - DNA, 100 bp, Homo sapiens
ttgactacgaggaatggcggcggctgccgcaggacctgcagcatcccagagctgacggcccagagggtgggtgccaattccaccagcagctgcaactgaa

SEQ ID NO: 492200 - DNA, 51 bp, Homo sapiens
gcagaggctcagagcttggagacagacgatacaaggcagatccaaccatcc

SEQ ID NO: 492201 - DNA, 80 bp, Homo sapiens
cttgctcagctcagtatcaacacttatggtactccaaagattcaggtttactcacgtcatccagcagagaatggaaagtc

SEQ ID NO: 492202 - DNA, 100 bp, Homo sapiens
gccgcccggcgcgagactgcggccgaagcgtggggcgcgcgtgcggaggaccaggcgcggcgcggctgcggctgaggctgcgtcatcaccatctcgggac

SEQ ID NO: 492203 - DNA, 82 bp, Homo sapiens
cgccatcggaggaatcaggacaagcccccaacgcttactaaattctgtgaaagcataggtttgtgaagaaaattcaacctca

SEQ ID NO: 492204 - DNA, 100 bp, Homo sapiens
gagaaaaaaagacttattgatctccatacaaatgttgccactgctgttttagaacatataaagcctgaagagttgagagaaatcattgagaagacaagag

SEQ ID NO: 492205 - DNA, 100 bp, Homo sapiens
ccgccatcccgtcaagctccatccctttgggcagacagcccatggcacagcccctgcagatcaagtcagtagtggcaccagagcatgtgaagggctacat

SEQ ID NO: 492206 - DNA, 100 bp, Homo sapiens
ggcgaccgagacggtggagctccataagctaaagaatttgaaagacatattggctgacctgatacctaaggagcaggccagaattaagactttcaggcag

SEQ ID NO: 492207 - DNA, 83 bp, Homo sapiens
caaggagctaaagcagcgtgcgttcagccctgggatctctgttgaggagctggcgcggaatctggtcatcaaggtcaacaggg

SEQ ID NO: 492208 - DNA, 74 bp, Homo sapiens
ctcagcttcggagaatggagtcttccatcaatcatatctcacagtaattcgccaaaatgacgaacacaaaggga

SEQ ID NO: 492209 - DNA, 90 bp, Homo sapiens
gacagagtcaacaattcaattgcttcaagaatccagaggctttaggaagaagataaaacgccttgaggagtcaaacaagaagttggctct

SEQ ID NO: 492210 - DNA, 83 bp, Homo sapiens
tcaccgtgtaccgcatgcagcagtacgacctgcagggccagccctacgcgtctgcttctgcgctttgcctgggagaggccctg

SEQ ID NO: 492211 - DNA, 110 bp, Homo sapiens
cgaagttgccaaagcagccaaggtgaagcagaaaggcacattgcaagcaacccgtgccttgatggtggttggcatcctcctgggagtgatagcaatctttgtggccaccg

SEQ ID NO: 492212 - DNA, 76 bp, Homo sapiens
cagactgctggagatcaccctgttctagtgtgtggaggcttccaccaggagttctgaatgacatcatctccaccat

SEQ ID NO: 492213 - DNA, 100 bp, Homo sapiens
ctcggaaggaggcaagacgtgaacgttttttggacggcgatcaggatggtgatgaggatgaaggatttgggggcagagcacttggcaggtcatgaagggg

SEQ ID NO: 492214 - DNA, 98 bp, Homo sapiens
gccgccgccgccgccgccgccgccaccaccaccgccgctgccccggctgcctcctccctgaggccagcactccttgcccgaggacagagatggcgagc

SEQ ID NO: 492215 - DNA, 90 bp, Homo sapiens
ctgggctgagcttgtggcagaagggaggtgggaggccaccccatggaccgcgtgctcctcctcgtgtggggggggcatccagagccgggc

SEQ ID NO: 492216 - DNA, 100 bp, Homo sapiens
gaacagttttttctaatggctattcaaggtgtgtggaggtcattgcaaaggaaggacaaaacctgaaagagctatatttggtgtcctgtaaaatcacaga

SEQ ID NO: 492217 - DNA, 82 bp, Homo sapiens
accggacccgttaacgcgttgattcgttccgtgctgctgcaggacccacgaggaggaaccaggctactttccccagtactga

SEQ ID NO: 492218 - DNA, 76 bp, Homo sapiens
atgtataccgaaataaagatgccttaagccattttgtaattgcaggagaccaattttaacactgttttaacaagag

SEQ ID NO: 492219 - DNA, 75 bp, Homo sapiens
ccgccatgggctgctgcagctccgcctcctccgccgcgcagtgacgggtcagtcttacgagaatatggtaactga

SEQ ID NO: 492220 - DNA, 100 bp, Homo sapiens
ccggaacctgtttttcttcctgtgcctgaacctctctttcgcttttgtggaactactctacggcatctggagcaactgattggtggtacctttgccaaac

SEQ ID NO: 492221 - DNA, 75 bp, Homo sapiens
agaaactgtccgagaagcccaaagtcaaaatgcagatcttcgtgaaaacccttaccggcaagaccatcacccttg

SEQ ID NO: 492222 - DNA, 50 bp, Homo sapiens
gcacgacgatgaggtgacagtcacggtggacgacatccttggagaaggca

SEQ ID NO: 492223 - DNA, 97 bp, Homo sapiens
attcctggtctacatcctgcgggtgcctttgaaaatcaacgacaacttgagcacagaactccatccggcacaacctgtcactgcatagtcgattcat

SEQ ID NO: 492224 - DNA, 89 bp, Homo sapiens
cactgtgcggcacatcgcagacctgtcaccaggagacaaggtatatttgaaggctcccatgattctgaatggagtctgtgttatctgga

SEQ ID NO: 492225 - DNA, 75 bp, Homo sapiens
gtgagcttggccttggagcgaggctatcacaagctgcaccagcttctaaccgatacaaaacgtttaattgtggat

SEQ ID NO: 492226 - DNA, 106 bp, Homo sapiens
cccttggacacaggcataccctttcccccggtcttctctacatcctcagcaagctccaggcccggattcgaacttacaatcagcattacaacaacctgctacgggg

SEQ ID NO: 492227 - DNA, 101 bp, Homo sapiens
gtcagtgttaaaggaacctctacaacgaaggtgaagccacggaagataaggacctcagcagccatgtcgaagccccatagtgaagccgggactgccttcat

SEQ ID NO: 492228 - DNA, 76 bp, Homo sapiens
aaatacatccaggaaagacatggagattctcttaaaaagaaattcatgccgaagtccaacttaagaattatgggaa

SEQ ID NO: 492229 - DNA, 83 bp, Homo sapiens
ctatctcctccctcttctcccgactatttggcaagaagcagatgcgcattttgatggttaccggtattgtaagaacaagccgt

SEQ ID NO: 492230 - DNA, 98 bp, Homo sapiens
aggctcggcgccggtaggaagagtcagaggggtgaccagagagcccaacgcctggtgctcaagactttctccgagctctgcttatgataatgtcaaca

SEQ ID NO: 492231 - DNA, 90 bp, Homo sapiens
gggggatgtgaggagactctcctctctcatccgcacgcacaatatcgggcagaaagataatcacgatacatgataatcagttgacatccc

SEQ ID NO: 492232 - DNA, 83 bp, Homo sapiens
tacgggagttgggaggacccgggacaccgcacagccgggaaatggtacttcaactcccgcccccacctgtgtcccgctggctc

SEQ ID NO: 492233 - DNA, 87 bp, Homo sapiens
cgccatcgttgctgccttcttcgtcaaggggtcccttcagtgttgtacgacgatgtatcaacagagaaactgggcaacaatttgctg

SEQ ID NO: 492234 - DNA, 90 bp, Homo sapiens
cgggccctcccctcaggaacgtgtcccggggccgacccggcccgtagtgtggaagcagcttcagactgactggcacagtggagaaaccgc

SEQ ID NO: 492235 - DNA, 98 bp, Homo sapiens
ttctcccaagccattcacagctattacagtgaccacggatcaagatgtgttgaaaatgagcccatgagcacaagtcagaaaaaggaaaatgtactttc

SEQ ID NO: 492236 - DNA, 90 bp, Homo sapiens
attcgggtgggagtgacctgattttccagatttcaccacccaatcctcagtcctttggaaagcagtttccagctggaagttgacgtcctg

SEQ ID NO: 492237 - DNA, 87 bp, Homo sapiens
ctgggggtcctcagcgtggtctgcctgctgcactgctttggtatggcctcacaagtcttggtctacccaccatatgtttatcaaact

SEQ ID NO: 492238 - DNA, 83 bp, Homo sapiens
ttgtacaggcggatgctccccatggagttgcgtgaactgcgccaggccactgtggccatgatgaacaggaaggatgagctgga

SEQ ID NO: 492239 - DNA, 101 bp, Homo sapiens
tggcggtggcatgagggtcggaccccagtaccaggcggtggtgcccgacttcgaccccgacaggggcaagtgtccgagtggtgaatcagctacttacagag

SEQ ID NO: 492240 - DNA, 71 bp, Homo sapiens
aagaacaagagaagacctcagatgtgaagtccattaaagttttcggctttgtgagaaaccttaccatcaaa

SEQ ID NO: 492241 - DNA, 100 bp, Homo sapiens
gtacttcgcacccccatacgagccccttcccgacggagtgcgtttcttctatgaaggaacccaagacagaccaggatgaggagcattgccggaaagtcaa

SEQ ID NO: 492242 - DNA, 101 bp, Homo sapiens
gcagaggaaaatgcaagaagactgatggagcaggcttgcaatattaaatgcatacatagagacgtgaagccagaaaatatcctcatcacgaaacattccgt

SEQ ID NO: 492243 - DNA, 96 bp, Homo sapiens
ctgacatgaatgaccagaatctagaagagccatccagatatggtgtccgcaatgttgccagtgtctgtctgcagattggctacccaactgttgcat

SEQ ID NO: 492244 - DNA, 100 bp, Homo sapiens
cggcgctcgagggcgtgctcagcaaatacaccaacctcctccagggctggcagaacagaaaggcctaaagaatgtatttgacgaagcaatattggctgcc

SEQ ID NO: 492245 - DNA, 50 bp, Homo sapiens
gatagaattgctgcttaaaaaacttgaagagttctccggggtgctgcacc

SEQ ID NO: 492246 - DNA, 90 bp, Homo sapiens
caaagtgggaaagggaagcttagcccgccgctgccgcctccgagcagcccgccaggtaccagttcaacccagccttctttcagaccacgg

SEQ ID NO: 492247 - DNA, 85 bp, Homo sapiens
ccgtgggcgtaggaccctccgagccaggctggagcattggatttgctaaaggagcttaagaatattcctatgaccctggaattac

SEQ ID NO: 492248 - DNA, 50 bp, Homo sapiens
aatgttcagtggcggaacttgcaaatcctgtgaagcagctccagctatgt

SEQ ID NO: 492249 - DNA, 100 bp, Homo sapiens
gggtgaacgtacgttaacggggatagtcattgacagcggagatggagtcacccatgttatcccagtggtgataaaagaagccatggttgaaagcattgaa

SEQ ID NO: 492250 - DNA, 50 bp, Homo sapiens
gtccaccgtggccgcggtggtgctagtgtggacgaatgtggaacctcgct

SEQ ID NO: 492251 - DNA, 73 bp, Homo sapiens
ctcttggaatcaaagataaatccaaatactgcatatcagaaacaacagagacttccagtgtcctactattgaa

SEQ ID NO: 492252 - DNA, 75 bp, Homo sapiens
gatcagcaccgcgaaagccccaggggccattggaccctacagggcaacgggcatgaggaggtagttgcatgcgcc

SEQ ID NO: 492253 - DNA, 96 bp, Homo sapiens
cgttgcactgtggaagaccacctgagtcaccagttaactatggtagcccacccagcattggttatgcattagacccttcattagataatcatcaag

SEQ ID NO: 492254 - DNA, 100 bp, Homo sapiens
caaagttggatcacctggcccacctggccctcaagcagagaagcttcgagagctgtgcccaggagtgaacaaccagccctacctctgtgagagtggtcac

SEQ ID NO: 492255 - DNA, 102 bp, Homo sapiens
cacagaaaccgtccctgctacagagcaggagttgccgcagccccaggctgagacagtgccatggtctccatgaactgatttttttgtgcagtgggcaggaag

SEQ ID NO: 492256 - DNA, 98 bp, Homo sapiens
ttgcctttgggctcagtgaagagtctggagtttatctggagtgaggtggccggttcttggtgggatctgagcaggttcgatacaagaggctgttttcc

SEQ ID NO: 492257 - DNA, 75 bp, Homo sapiens
cttatcaaggctaccatagctgggggtgacatatctgaagagatggattaagaatgctttggattaaggattgtg

SEQ ID NO: 492258 - DNA, 106 bp, Homo sapiens
cagaccctggagcctcagttggaagcagccgatccagcctgcggagcctgtggggcagaaagggctattgcaagacacgaagtccgagaaattgagcagcgacata

SEQ ID NO: 492259 - DNA, 97 bp, Homo sapiens
cagtcattcagggagcccttaatgcctcagaaaccacacccaaaggtcgcctgctccgcccgctcccgctcccgatctctgattgctcctaactgac

SEQ ID NO: 492260 - DNA, 76 bp, Homo sapiens
gacgtgggcccattcattgcaggtgtggatgtggaagcagccaagcgggcagaagaggaattgctccttcatgaca

SEQ ID NO: 492261 - DNA, 90 bp, Homo sapiens
gttctgttacgccatggaaaccgctctggtcacaccaatactgttgcagattgccactgaggcggctcccagctgcgttggcgacatggc

SEQ ID NO: 492262 - DNA, 98 bp, Homo sapiens
cggcagcgacagcagcagcagcagccagtattcgggaaaggcagacagttggaagcctccttagctgcagccaaaaaacagttagcagatgaaacttt

SEQ ID NO: 492263 - DNA, 51 bp, Homo sapiens
cgtcacatcactttccgatcacttcaaagtaaaaccaattgttcctcagaa

SEQ ID NO: 492264 - DNA, 100 bp, Homo sapiens
acagctctgcgcggctttttgagcggtcccgcatcaaggctctggcagttcattcggctcctaaagaagtagcagtgtccaaggaacaagaagagaaatc

SEQ ID NO: 492265 - DNA, 82 bp, Homo sapiens
tattcccttcaattcaagtaacagaaatcatgagtggaggatctcaagtccacattttttggggtgctccaattgctccact

SEQ ID NO: 492266 - DNA, 50 bp, Homo sapiens
agaagaactcgcaaaagctcagagggaagccagttgagggaagttctcca

SEQ ID NO: 492267 - DNA, 49 bp, Homo sapiens
gcagcaacagcaagctcccgggcagcaaagtgaaaaggagagcttgttg

SEQ ID NO: 492268 - DNA, 75 bp, Homo sapiens
gttttgtgtacagtgaagctgtagccagcggatttcggcctggcccgggcctatggtgtcccagtaaagccaatg

SEQ ID NO: 492269 - DNA, 75 bp, Homo sapiens
ggggagcgcctcgtcgacatgagtgatgtggaggaaaacaacttcgagggcagaatgttcctcctgctgatcaag

SEQ ID NO: 492270 - DNA, 100 bp, Homo sapiens
cactggaaaaaattcaagtcccaaactttgtggctatgggatattttgcaccatttccctctgtacttatgccgccagtatctcgtatgatttgaaccgg

SEQ ID NO: 492271 - DNA, 100 bp, Homo sapiens
tttcagagctgcaaaattatcaggccaaatttgagtttcatcatggtgactatgaaaaacagtttctgcatgtactgagccgcaaggacaagactggaat

SEQ ID NO: 492272 - DNA, 98 bp, Homo sapiens
gaaaatctccctgctccgcagcgacatcaccaagctggaggtggacgccatcgtcaacgccgaaggagcttaattccgtcgcttctgagctgtctgca

SEQ ID NO: 492273 - DNA, 100 bp, Homo sapiens
cagagactgaaaaacctgaggctgatgacccaaaggctcgtggtcccaagaagcatctgaagcgggtggcagctccaaagcattggatgctggataaatt

SEQ ID NO: 492274 - DNA, 75 bp, Homo sapiens
gtgatggtggatgacaggctagtcacaatgcagctgaagaaatcaggggagaaacccctgcttggtggaagcctg

SEQ ID NO: 492275 - DNA, 106 bp, Homo sapiens
tccaatgctgggattggctgcttttcaccctgcacttgatggaccagctggcaccacccagatcaataaactggcttatttgaatttgcggccccccacccaggaa

SEQ ID NO: 492276 - DNA, 97 bp, Homo sapiens
gtttccttcaagagttttcatggattctaatggaatcaggcagttttgtgtccatgtgaacaactacctcctgccccccgaggtctgcagtctcctg

SEQ ID NO: 492277 - DNA, 98 bp, Homo sapiens
agcatttgttcactgtaaacttcataatgggataaacagagacagcagcatgactggaccccagccaggccacggggacaacaggcagcagcgtcagc

SEQ ID NO: 492278 - DNA, 100 bp, Homo sapiens
gcggagccagcctgggtctcagccccgcgtacggcctttcacgagtcttcaagccttcaggctttgtggatttgaccctccatgatcaggtccaccttct

SEQ ID NO: 492279 - DNA, 129 bp, Homo sapiens
ctcaaggcctcccaccccattccggaggacaaaggaaagtgtgctaataagcataatgcagtgaagatgggtgaagagagatgtgtttcatctgaaatttgaagggctttacaactcttctcctttaac

SEQ ID NO: 492280 - DNA, 100 bp, Homo sapiens
aaaaaagtaatcctcttggaaagctggaaacatagtccgatcaaagacacagctctccccttctatcaagcgcaagagagaagtcagccctcctggggcc

SEQ ID NO: 492281 - DNA, 98 bp, Homo sapiens
tagcttggagtcctggcctggaaagcttgaatatgaaaagtcagccctgcctctttcttgtcgcagtcagtttcatcatcagatagaaacagtgttac

SEQ ID NO: 492282 - DNA, 100 bp, Homo sapiens
cttcggccaagaaattagacaagaaacattggaaaagaaatcctgataagaactgctttcggggatctgatgagcttctttcttctggcatcattaacgg

SEQ ID NO: 492283 - DNA, 100 bp, Homo sapiens
cagtcagctgcgtgattcccgtgattgcgttacaagctttgtctccttcgacttggagtctttgtccaggacggcttgaagtagaaaatgccatgatgag

SEQ ID NO: 492284 - DNA, 90 bp, Homo sapiens
acggaaatgtgtcatcgaaagccaggttattattgcagcagaactcctaaaaaatgcagatgaattagtcaaacagaaaattcatcccac

SEQ ID NO: 492285 - DNA, 82 bp, Homo sapiens
gatgctgctcatgaaatcatcgagaccatccgaagatgctcatgaagcagcaggaccggctggaggagcgagagcaggacat

SEQ ID NO: 492286 - DNA, 99 bp, Homo sapiens
gaattggacctgggaaattcgagtttgggaaggataagcactgacatggccgtcttctgtctgctgtgtgggaagcgcttccaggcgcagagcgcactg

SEQ ID NO: 492287 - DNA, 76 bp, Homo sapiens
tgtggatgatgccaaagttttattagctcttcaccaccaggagtgttccttgagaaggactatgagatttaccggg

SEQ ID NO: 492288 - DNA, 98 bp, Homo sapiens
aataaggttgccttgctagagtttggagcagggcctcagttcatttgatgaatacagttcagaacttaaatctggaaggttggaatggagtcctgtgc

SEQ ID NO: 492289 - DNA, 75 bp, Homo sapiens
gcacaagccattgaagctggaatgtcctgttgctgggtgcttggagaccatccctcaacatcgcaactgtgttga

SEQ ID NO: 492290 - DNA, 100 bp, Homo sapiens
agaccgagaggttcagggagctgttgctgtatggccgtaagaagatgcagaggccaggatgtgggcccagccctgtgccaggaggctggctggaataaag

SEQ ID NO: 492291 - DNA, 100 bp, Homo sapiens
ctttcagccggagaagcgagtttcagctgcacttattttagaggagattgcaattgattgtcataataaggaaactgaacagaggctgcttcaagaagct

SEQ ID NO: 492292 - DNA, 90 bp, Homo sapiens
aaacctcaccttgtggctgctttaaaggaagctgcccaaacccgaggaacagatgttgttattgtaaagaatggaagaagaatatgtgga

SEQ ID NO: 492293 - DNA, 97 bp, Homo sapiens
ctcacattcaagctgataggctgcgctaccggaatgtcatccagcgagtgattagtctccaaaaaaagttggtgatgacattgccaaggcaacgggt

SEQ ID NO: 492294 - DNA, 88 bp, Homo sapiens
cattgtggcccacttccctgcccatgagaagccagtgtgctgcatggcttttaatacaagtgctgaagaagtcacagatctaaagagg

SEQ ID NO: 492295 - DNA, 100 bp, Homo sapiens
agtggctgacatggccaccaacacacgtggccatggcgagtgtcactgcggggaatgcaagtgccatgcaggttacatcggggacaactgtaactgctcg

SEQ ID NO: 492296 - DNA, 80 bp, Homo sapiens
tgcgggccctgctggaccagctcatgggcacggctcgggacggggccctaaccacccaggatgaaaatggccagaccaag

SEQ ID NO: 492297 - DNA, 75 bp, Homo sapiens
caacagtgtatgctcgaaatcctggatactgcagggacagttcactattatgaagatggcaatgttcagttggtt

SEQ ID NO: 492298 - DNA, 50 bp, Homo sapiens
ctcctacacttcctatttatgagaaccagccccagtcctgaaactaccta

SEQ ID NO: 492299 - DNA, 51 bp, Homo sapiens
agaggatccgatgatggggatggagtgataaaaagttgattgcagaaggac

SEQ ID NO: 492300 - DNA, 95 bp, Homo sapiens
ggtgggtgcaagatgccgctgccggttcaggtgtttaacttgcaggtgtatgtgctcaagaggccttatgtggatgagttcctgagacgcatggg

SEQ ID NO: 492301 - DNA, 101 bp, Homo sapiens
ctgatgcacagccacatgcatttctcctcagtggaccagcttcaccagtggaagcatcagttcacagcagtaatgcacactgtacagataagacaattgaa

SEQ ID NO: 492302 - DNA, 83 bp, Homo sapiens
gaccggcgtccccggcgcgaagaggctggactcggattcgttgcctgagaatgcggattgtggatgatgatgtgagctggaca

SEQ ID NO: 492303 - DNA, 100 bp, Homo sapiens
gaatgccctgaaagatcgagcagaggcctatttgatagaggaaatgtatgatgaaggaagcctgtctagcagtccagaggagatgtctggagctgaagag

SEQ ID NO: 492304 - DNA, 95 bp, Homo sapiens
agatcaagctggaacaggagttccgatcgacccggtaccaagaaggggagtgcccgcggcaggtttgttaagaagttggagcactcttggaaagc

SEQ ID NO: 492305 - DNA, 50 bp, Homo sapiens
ggcggcgggatggaggcggcggccggtgctggagaatctggtaaaagcac

SEQ ID NO: 492306 - DNA, 96 bp, Homo sapiens
agctggtcctgtactcgctggtctttgtcctcttctgtgatgaagtgagacagtgcacttggaggctcctcagctcttcatatcccagcttttcca

SEQ ID NO: 492307 - DNA, 100 bp, Homo sapiens
tgtatagagaacaaaaaacaccacagtactatcgtctatcattggatgaagtggctccggagatgctctatcaaagaaagcaagagatggaaaattgttg

SEQ ID NO: 492308 - DNA, 100 bp, Homo sapiens
agccccgatcacgaggacgtccatcccgtcgagaaccagtccgggatgtgggaagaaaatgtggacacagacttgccaggcagcctggggcagagtgaag

SEQ ID NO: 492309 - DNA, 82 bp, Homo sapiens
ccgaagaagctcatcgcaccgccgggccgggcgggtctcggcgagcccacaccttaaccgtgctcttcatcctcacctgtac

SEQ ID NO: 492310 - DNA, 50 bp, Homo sapiens
ctcaattcccgatcatcgctcaaagtggcaaagaggccatgctgcgacag

SEQ ID NO: 492311 - DNA, 100 bp, Homo sapiens
ggcagcctgctggaccctgccaagaagtcgcccatcgcagcagctcgagtaatcaagtcagaggattatatgacttttatctgcctagagaagaactatg

SEQ ID NO: 492312 - DNA, 83 bp, Homo sapiens
gctccctcgggcacctccggtaccgctgcagccaccgcggcccccgcgggagtgaagcgtctccctgagtaccctcaggttga

SEQ ID NO: 492313 - DNA, 80 bp, Homo sapiens
acgatcccgatgtcatcaagttgcaagagattccaaccttccagccccttttgaaagtgcaactgcagatagaagacctg

SEQ ID NO: 492314 - DNA, 100 bp, Homo sapiens
cctatggggcctcgtgcacgacttcgtcgtgggtcagcaagagggccccgctgaccaggtggctgcaggtaagaatgattgatgttggctgatattggag

SEQ ID NO: 492315 - DNA, 101 bp, Homo sapiens
cctccctttgcatcttatattctgcagaggatatgggaggttcgttccaccagtcataaaccagatgaaatctatggcatgattgaaagactatctcctgg

SEQ ID NO: 492316 - DNA, 100 bp, Homo sapiens
ctggtctttgcattggcagcaccagttatgtccatggtgacatacttaggactgagtaagacaaactgatggaagagaccgaagaactctgccttcagag

SEQ ID NO: 492317 - DNA, 83 bp, Homo sapiens
cccggagttccttagttgaaaggtgcgccctgctgtgacagaactcccccactggaaaggattctgaaagaaatgaagtcagc

SEQ ID NO: 492318 - DNA, 75 bp, Homo sapiens
cccgcggacgccacagcgctgtgtttccccccgggccggcctgccgtgacgatcacagccctgccgtctcaggtc

SEQ ID NO: 492319 - DNA, 75 bp, Homo sapiens
aagaacccagggcagaaaggtttaggttcgatacaagaggctgttttcctagcgtggcttgctgcctttggtaag

SEQ ID NO: 492320 - DNA, 100 bp, Homo sapiens
ccagaggaggaggccggggaatggccgcggtgtggcagcaagtcttagcagtggacgcgagcttcaagtccgttgagaagaaaatgacagacatgctaaa

SEQ ID NO: 492321 - DNA, 51 bp, Homo sapiens
gaaccgtctttttcgctggtgaggcctagttccccgagagcgttcagacag

SEQ ID NO: 492322 - DNA, 50 bp, Homo sapiens
acatggattttgccttccatgaaaaaaaatatgtcgtaactgcaagtgtg

SEQ ID NO: 492323 - DNA, 74 bp, Homo sapiens
atttaagcatcttgcaactggaaactatttagctgcagagctaatggcagcattagccgctgttgggcctccta

SEQ ID NO: 492324 - DNA, 75 bp, Homo sapiens
gcaagaaggccctggacacagcaatatctctgggctttcacaggcgcagacggggaagcggagccaacatgccag

SEQ ID NO: 492325 - DNA, 100 bp, Homo sapiens
cagataaatgcagcctcactggaaaaggtcaaacagtacaaccagaagctcaggattctttctactaatccagatacttgttgaagtgctgactagtttc

SEQ ID NO: 492326 - DNA, 50 bp, Homo sapiens
cagatcgctgtcaaaaccctagctgaactgtcccaagcaataaacagtgg

SEQ ID NO: 492327 - DNA, 135 bp, Homo sapiens
ttgcatatgtcaaggatcgatattttgtcgaagaaactgtggaagtcattaggaacaatggtgcaagggaccactgacatttatggatgtggccatagagttctctttggaggagtggcagtgcctggacactgc

SEQ ID NO: 492328 - DNA, 75 bp, Homo sapiens
tgagcccggactcgaggtggccggtacaggtgaacaaaggcagagtaaactgtcaccccagatgcaggtacatca

SEQ ID NO: 492329 - DNA, 100 bp, Homo sapiens
gcctcctcagtgcgaagaagctgcagccgcacctggccaaggggaaagagaagaaggcgccgcccttgctggagggggcccccttgcgactgaagccccg

SEQ ID NO: 492330 - DNA, 100 bp, Homo sapiens
tgggaccgggacctgctcctggacccggcctgggagaagcagcagagaaaggtctcggcgcggaagatggccggcggcgtggacggccccatcgggatcc

SEQ ID NO: 492331 - DNA, 75 bp, Homo sapiens
attgtggaagaagcatccattaaggttgaagcactggacaatgccacatactttgtggatggtgtgggtcttggg

SEQ ID NO: 492332 - DNA, 74 bp, Homo sapiens
tgagattgttaagcagattacttccatcagtattgagccaggagttgaggtggtggaagctacaatgattttgg

SEQ ID NO: 492333 - DNA, 50 bp, Homo sapiens
cgtgattcagcaagtttcatctcaagaaactgttcaggttccattatcaa

SEQ ID NO: 492334 - DNA, 51 bp, Homo sapiens
ttcaacctcgagtactcgcccgacgggttaccttgaggatagttttgtaaa

SEQ ID NO: 492335 - DNA, 98 bp, Homo sapiens
aacaatggcgctgtcttcagtggcacagtggagcagctctgaagatgcaaagacacgatgaggcgagtggtacgacagagcaagtttcggcatgtatt

SEQ ID NO: 492336 - DNA, 74 bp, Homo sapiens
ccaaagtgggaaacattgaaatcaaggcaacacttccccagatcaaaaggagccaacacctttcatcatcgagt

SEQ ID NO: 492337 - DNA, 98 bp, Homo sapiens
ggagatccacagctaagacgccaggacccactggaagcctagaaatgtttttggctttcacccccaaccagtgaccaaagacttgaccactcaaagtc

SEQ ID NO: 492338 - DNA, 124 bp, Homo sapiens
caagtggagaaaacaaaagaaaacgaaaacgcgtactaaaatctaaaacttacctggatggggaaggctgcatagacttaattcagtgcacaaatgagatgaatgtgaacatcccacagttggc

SEQ ID NO: 492339 - DNA, 90 bp, Homo sapiens
tgaggttttcctaagccatcccctggcggaaccgcccccaggtacagagaactacaacttagtacagaaagcaaagtaacagaatttctc

SEQ ID NO: 492340 - DNA, 75 bp, Homo sapiens
gagattttgatgtggatgatgccaaagttttattagctagtgagacctgcaacgacttccacccgatgttcttca

SEQ ID NO: 492341 - DNA, 80 bp, Homo sapiens
cttacctatgaggccagcaagcggaggtgctgggagcgagttggctggaattcctggtgactggaagggggagtgactca

SEQ ID NO: 492342 - DNA, 75 bp, Homo sapiens
ctttttaagaggcttcgcgcagttccaaccaacaagaagtctggaaagtagatggtaacatgatgtggcaccagg

SEQ ID NO: 492343 - DNA, 76 bp, Homo sapiens
ctctgtgccactttgcatcccacgccggaggaggcattaacgagaccgggtaaggcaaagccaaagctaattgagc

SEQ ID NO: 492344 - DNA, 75 bp, Homo sapiens
atctcgacccaagaaaaagaagaattcagatgatgctccatggagtcctaaagtagagatggggtttcgccatgt

SEQ ID NO: 492345 - DNA, 83 bp, Homo sapiens
gtgaaagtccaaacagacatctctacgattttgttggaaacataaggcttgatggacatgggcaatccactgtatgacagcct

SEQ ID NO: 492346 - DNA, 96 bp, Homo sapiens
gagactcagacctgctacaccagcgtgaaggtaggagcaacggtgggaatgccctctgaggaatgcagtgatgtccatcagtcacctctcacccag

SEQ ID NO: 492347 - DNA, 83 bp, Homo sapiens
tatagttaatcttggcgacattgacaatgatggctttgaaggaactgtggctgcaccatctgtcttcatcttcccgccatctg

SEQ ID NO: 492348 - DNA, 74 bp, Homo sapiens
cctcgaggctttttttctccagccgagaggacgcggctgtgatatacgaagccaagcaaccgacataatggaaa

SEQ ID NO: 492349 - DNA, 75 bp, Homo sapiens
gaagatttagaggccgctacagaagtccttatttgtcagaggaatggctgtgaatggatgcctggaaggaccatc

SEQ ID NO: 492350 - DNA, 96 bp, Homo sapiens
aagctgctaacccgacccggattggcgctgaggtggcccgtggggcagctttgaaaagtccagccgcatttcatgagcagagaaggagcttggagc

SEQ ID NO: 492351 - DNA, 101 bp, Homo sapiens
aggtgatcatcatggacacagttttgacagtaattcttttgggccggcaccccagcctgcggtccatgtgcaggggcaggagccactgactgcctccatgc

SEQ ID NO: 492352 - DNA, 100 bp, Homo sapiens
acacctactctccgtacatccatgtaccagaagtgtaccactgtggatgaagcagatgtagatgagtgtgcccaagggctagatgactgccatgccgacg

SEQ ID NO: 492353 - DNA, 100 bp, Homo sapiens
caaggtcaacaaggacaacaatgagatcgtggacaagatcatgggcaaaggacagatccaggttcaaaccttgtactactcagctgatcacaagctgctt

SEQ ID NO: 492354 - DNA, 90 bp, Homo sapiens
tttgaattgtatcaattctttgtcaggcaaccggacgattcagtggaaagtaactctgggtggattttaactacaactcttgtcctctcg

SEQ ID NO: 492355 - DNA, 73 bp, Homo sapiens
ccgtgaaattcagcccgaatggagagtggctggcaagttcatatacacaatcatcatcttactagttctctgt

SEQ ID NO: 492356 - DNA, 101 bp, Homo sapiens
cccaggctacagtgaacagaaaggtacaataacttgcctgaaattctatggcaacaggcatttaatcagtggagcggaagatggactcatctgtatctggg

SEQ ID NO: 492357 - DNA, 71 bp, Homo sapiens
agaactagcagattttgtaagggaacggattttttatcaagcagaaatgcatcgaacaacgagaatcaaga

SEQ ID NO: 492358 - DNA, 75 bp, Homo sapiens
ctacaccaggcagcccccaaatcccggcccaggatccaaggattctgtagctacaatgttgtcaagactttttcg

SEQ ID NO: 492359 - DNA, 83 bp, Homo sapiens
gcatcaccgacctggctcttacctcgatctagggcagccctgcagaggtacctgttctactgtaatcgctatatgaaccacat

SEQ ID NO: 492360 - DNA, 90 bp, Homo sapiens
ggaagtggtggtgatcacccacaaagggggccagaggagcgacggaaacgttacccatagatggttgtattggaagaaggttttttcaaa

SEQ ID NO: 492361 - DNA, 97 bp, Homo sapiens
aagggggccagttcctgccgtctgctcttctgcctcttgatctccgccaccgtcttcaggccagcctggtccgacccccagtggcactaacgtggga

SEQ ID NO: 492362 - DNA, 75 bp, Homo sapiens
acgcgccgcacggatcatggccgcagccgctctggggcagcacatacccccggcctcatgagtacctgtccccag

SEQ ID NO: 492363 - DNA, 100 bp, Homo sapiens
gcagggcgttggctatgtgcccatcacagatcaggatcctcatgaccagccaaagagaagaagaattaggaagcataaatcaaagaaaaaatttaaaaat

SEQ ID NO: 492364 - DNA, 90 bp, Homo sapiens
ggaaagctaagaagaatcacacctcattgcaggaagagttttatggaagaaaattggttgttgctgatagagaagaagtggaacaagaag

SEQ ID NO: 492365 - DNA, 100 bp, Homo sapiens
gggatgcggggcctggcggtcttcatctcggatatccgcaactagctgagctcaatgtgcagcaatggatgacgacagcctggatgagcttgtggcccgg

SEQ ID NO: 492366 - DNA, 100 bp, Homo sapiens
caaagacgctaaacgtgccctactctgccccgggggagaggcgccatgtcagaaccggctggggatgtccgtcagaacccatgcggcagcaaggcctgcc

SEQ ID NO: 492367 - DNA, 82 bp, Homo sapiens
gactccttcggcagtccacccaccgccgccgcctcccaggggcggcgaagaggacccgcaggctgcaaggagcaacagcgat

SEQ ID NO: 492368 - DNA, 109 bp, Homo sapiens
cccctcctcgtcgggaagaatcgtttggtctcctgccgtgcccgatcatcaatgctgtggtactgttgattttattgagtgccctggctgatccggatcagtataactt

SEQ ID NO: 492369 - DNA, 74 bp, Homo sapiens
gggagcttgccttgaaggacaagaacagcgccgtcaccagcagatatcggaaactggcactgaagtggcatcca

SEQ ID NO: 492370 - DNA, 74 bp, Homo sapiens
gctgcgggtccgggattcccagccatggcagattcctccgggcagcagggagcagctgcattggcatggaagaa

SEQ ID NO: 492371 - DNA, 88 bp, Homo sapiens
tcggcccgcagtgatggaggaggaggcggagaccgaggagcagcagcgattctcttaccaacagttaagtgggcagaccaacatccac

SEQ ID NO: 492372 - DNA, 100 bp, Homo sapiens
ttatacatctaaagagatttcggcagactcgagccttacgcagacccttattatgactatgaaattgagcggttttggcgtggcggacagtatgagaatt

SEQ ID NO: 492373 - DNA, 74 bp, Homo sapiens
gagctcagttggctgcaggagcagctagcacaggtatgcagaatctgtgggagcaaaacattatcatacttcag

SEQ ID NO: 492374 - DNA, 73 bp, Homo sapiens
tttaacaaagccacgaataacctataatgaatccagcaagctaaagtgcaaattcttcccgaatgtgtgttgc

SEQ ID NO: 492375 - DNA, 100 bp, Homo sapiens
cggggacccagaccctggagcctcagttggaagcagccgatccagcctgcggagcctgtggggcaggttctcccatgggcaggtggtctctctggatgag

SEQ ID NO: 492376 - DNA, 51 bp, Homo sapiens
tgaagatggctactctggagttgaggttattctcgttcaagttaatccagg

SEQ ID NO: 492377 - DNA, 74 bp, Homo sapiens
aaagtgctggaggacttcgtggatggagaccacgtcatcctgcgtatccagtatgccaagaccgactcagatat

SEQ ID NO: 492378 - DNA, 75 bp, Homo sapiens
cgagttactgccgataatgaaacctcatggggcagatttattgaaattaactagagatgatgtgatccaaatctg

SEQ ID NO: 492379 - DNA, 98 bp, Homo sapiens
tgaatatccacaatttagcatcaggcaaaggaagcaccgcacatttttcaggactctgaggaggaagaaaatgagctggaagctattaacaggaagct

SEQ ID NO: 492380 - DNA, 75 bp, Homo sapiens
tctatttgatagactaacaaatgattagctttatttgctcaccgtgaagatggacctggaatcccagcggatatt

SEQ ID NO: 492381 - DNA, 75 bp, Homo sapiens
cttgttccctccaagacaactgaatggttggttaaatctagacttaagaggctctgctcctcagaagttggactt

SEQ ID NO: 492382 - DNA, 98 bp, Homo sapiens
gttcaacaagctagtgagcacaatgaaggcaagtgggactttgccttctcagcccaaagtcagcgtgacagagctgaatgaacctctctccaatgaag

SEQ ID NO: 492383 - DNA, 88 bp, Homo sapiens
cgcaggagaacgagtccctcttcactttcctcggcaagaaatgtgtgccatcagaagacctggtgccctatgacacggatctatacca

SEQ ID NO: 492384 - DNA, 50 bp, Homo sapiens
cctttccatagccagagcagtacaagaatggagtttcgctcttgtcaccc

SEQ ID NO: 492385 - DNA, 50 bp, Homo sapiens
ctcttggagcagctggtcatcatggctgaccccgcactacatctacccac

SEQ ID NO: 492386 - DNA, 100 bp, Homo sapiens
aaacggccaagaggcagacctaggaaatggaattgtattcccattggagagcagcttcagtcggtgttgggcaattctggatacaagcatatgattggac

SEQ ID NO: 492387 - DNA, 100 bp, Homo sapiens
aacgctcctttgggaacccattcgagggcagccggcgggaggaacgctcactgtcagcgcctggaaacttgctcacttatatcaacatgccccctttcct

SEQ ID NO: 492388 - DNA, 50 bp, Homo sapiens
tctgcagtccctcgtccagccacccccagcttgtctttaaccgaactgtc

SEQ ID NO: 492389 - DNA, 75 bp, Homo sapiens
catgttgttaccctcggacgtagcccggcttgtattggtttatgggaaaaacagatggagactattacaccctgg

SEQ ID NO: 492390 - DNA, 83 bp, Homo sapiens
cctcaggcctgcacggacggtgttggttgggcagcctcccgcgacgatgcccctcaacgttagcttcaccaacaggaactatg

SEQ ID NO: 492391 - DNA, 98 bp, Homo sapiens
tcaaactcccacggtcaagcgatctgctggcctcggcctctcaaggaatttaaactttgggataatgagctgcagtatgtggaccaacttctgaaaga

SEQ ID NO: 492392 - DNA, 83 bp, Homo sapiens
agagttgtcccagctcggcccgcgggggagccccgggagccgcacgacagattacatcaatgccagtttcatggatggctaca

SEQ ID NO: 492393 - DNA, 74 bp, Homo sapiens
ggaggggctccggctggtctgtggtgagcaatttccagtttatgtactaccaaaagtagagtatcaagcttgtt

SEQ ID NO: 492394 - DNA, 95 bp, Homo sapiens
gaaagtacaaggaggccctgctgggccgcgtggccgtttccgcaggatctcgaggacctggaagaagcagaggagccagacatggaggaagacga

SEQ ID NO: 492395 - DNA, 51 bp, Homo sapiens
ggctttggaaacgacgtcatgtgttaggatgacgcggcatggcaagaactg

SEQ ID NO: 492396 - DNA, 100 bp, Homo sapiens
ttgaagcatatgcactgcataagcagatgaggacagtgataccaccaagaagaagaagaagaagaagaaagcaaaagaggtagaattggtttctgagtag

SEQ ID NO: 492397 - DNA, 100 bp, Homo sapiens
cttatatttttccctgtcttcattttatctccctctggttgcatacttcatcactgaacacttaagggtcttttaacatccgaggaccacattctttgtg

SEQ ID NO: 492398 - DNA, 100 bp, Homo sapiens
gaaagtattgtcggccagagagccaggagcatcctgaagctgacccaggtaggatgtcagagacgcccatgctcccatcctccctcatgctgctgaacac

SEQ ID NO: 492399 - DNA, 100 bp, Homo sapiens
cttgttgccgtcccttcgcctccttcaccgccgcagaccccttcaagttctagtcatggatcaagtcttccataccagggaccaggccaaaaccagactg

SEQ ID NO: 492400 - DNA, 80 bp, Homo sapiens
ccccttgcacacctaccctaagagaaagcttcttgctatctacctccaccatgatgaaagtgtgttaaccaacgtgttct

SEQ ID NO: 492401 - DNA, 82 bp, Homo sapiens
ccagaacccaggcccacggaggaagagccgggcagtccctggagcgggccagcaggtcaatggccagcaaggaggggggtcc

SEQ ID NO: 492402 - DNA, 123 bp, Homo sapiens
ctcccactgtgggtctggcttgccaacaatatagtttggtgtttcggaagccaaggaatccatgtggtgtatgatctttcccgaaaacctggagacagagtagtcaaattagatgttctttgc

SEQ ID NO: 492403 - DNA, 80 bp, Homo sapiens
cgcggcatcctcagcatggccaactccgggcccaacagcaacaggtctcaattacaatgcagatcttcgtgaagactctg

SEQ ID NO: 492404 - DNA, 83 bp, Homo sapiens
cagagaagctgctgcagtttcaggtcacgagaagagaatgccttctagatgcaaaatcacctccaaaccagaccacttttctt

SEQ ID NO: 492405 - DNA, 96 bp, Homo sapiens
ctgaaactttagagaagacgttcatatcattgtcttccacagatgtgtcaccaaaccaggatgggactgaggaagacccacaggcagaactggcca

SEQ ID NO: 492406 - DNA, 101 bp, Homo sapiens
tccaaagccattcccaaattatagagctaattacaactttcggggcatgtacaatcagaggcagtactacgagatgctttacaacacagctgacgagctcc

SEQ ID NO: 492407 - DNA, 83 bp, Homo sapiens
aaagggctggatgtttgcaattggactgatggggatgagatgcaggattacaagggccagaagctagctgaacagatgtttca

SEQ ID NO: 492408 - DNA, 82 bp, Homo sapiens
ccgcgtgacgctcctgcctgcgcgcggccaagccatgctcggccccagggcagctgcaatgactctccgcacggtattattg

SEQ ID NO: 492409 - DNA, 87 bp, Homo sapiens
ctagcaccccgagaaccgtcagtttgagccagatgtgtgtcccggcatggatatccggaacaacctcactaggttgcatgagctgga

SEQ ID NO: 492410 - DNA, 75 bp, Homo sapiens
tcggcgtgctgcgcctccgcggctgccctgcgccaggatgcctaaatcaaaggaacttgtttcttcaagctcttc

SEQ ID NO: 492411 - DNA, 51 bp, Homo sapiens
tccgtggggtaggaccctctgagccagaaaggcttttacatcaaatattga

SEQ ID NO: 492412 - DNA, 100 bp, Homo sapiens
ctcggtgtccacgctgtccccgcagcccggcagcggccctgagacgggagttaaaggagaaagaatattctgtcctgaatgctgtcgaccaggcccgagt

SEQ ID NO: 492413 - DNA, 83 bp, Homo sapiens
ttcacattctcaggaactctccttctttgggattcagtggcctttgaggatgtggctgtgaacttcaccctggaggagtgggc

SEQ ID NO: 492414 - DNA, 50 bp, Homo sapiens
gtgaaatcagaggagatgtaactatcgacagaatgttgctgcgggatgta

SEQ ID NO: 492415 - DNA, 100 bp, Homo sapiens
cctcagggcgctctcccagcaaagcagtggccgcccgggcggcgggatccactgtccggcagagtgcctggctctctggctatgaaaatcctgtggtgtc

SEQ ID NO: 492416 - DNA, 75 bp, Homo sapiens
gctcccttgcaggattcagaagtgtatttagcatctctaggctactgcagcactggggtgtcagttgttggtccg

SEQ ID NO: 492417 - DNA, 110 bp, Homo sapiens
tgcagtcacttcgccagttagcccttagggtaggagtcgcgccggcagcagccatgagcggcggcgtgtacgggggagatctagatactgatgacgatttaaatagcgac

SEQ ID NO: 492418 - DNA, 87 bp, Homo sapiens
tctgaattcaggaggatagaatctccactgaaacatcagagaccatttgtttgtgactatgaagggtgtggcaaggccttcatcagg

SEQ ID NO: 492419 - DNA, 75 bp, Homo sapiens
agaacgccgccatccagccaccattccaaggtatcctgaccaaaccagatctaatggacaggggcactgagaaaa

SEQ ID NO: 492420 - DNA, 100 bp, Homo sapiens
ggaggcgaggttcccgcaccggataggtgaaaggtgtagcagtcactcggcctacacccacagcatcgaccttgtgaacccagcgacctgactgccttgg

SEQ ID NO: 492421 - DNA, 75 bp, Homo sapiens
aacctttccaacacagatgtccaagctgccaagattcctgagctgaaatgcagatgaccacattcaaggaagaac

SEQ ID NO: 492422 - DNA, 75 bp, Homo sapiens
caaggagtcacggatcggattcctcagctacgaggaggcgctgaggagagaactggcctatgatctggatgtgga

SEQ ID NO: 492423 - DNA, 83 bp, Homo sapiens
cgtcagcctcccgccggccgtctccttaacaccgaacaccgatcttttgccagaaatgagggcatactggcctgacgtaattc

SEQ ID NO: 492424 - DNA, 90 bp, Homo sapiens
gtggagaagaggcggtggccgtgatagaaaatatacagcgagaacttgaggaacgcagacagcagtgacaaccatgagtggaaaaaacta

SEQ ID NO: 492425 - DNA, 75 bp, Homo sapiens
caaggagatcgtctctctcatcgaggcccaaaccgccaagccgagaggccccagcaacatgcagctacaattcca

SEQ ID NO: 492426 - DNA, 73 bp, Homo sapiens
cctgcagagctcattgaaagattggagcagtgctgaagctgctgaaagatggcagaagaagtggtggtagtag

SEQ ID NO: 492427 - DNA, 83 bp, Homo sapiens
gtcgtacctgatggtaggaggcagtagttccccgcttcccttccgcgggagggagagttaggccaagtacctggcccagatca

SEQ ID NO: 492428 - DNA, 100 bp, Homo sapiens
ctgtgacgtcctgcaggaacccgaacagttccccctggtgcagggagtggccatatgtcacatttgaagacgagcactgaggatgaggaaccaactgaag

SEQ ID NO: 492429 - DNA, 101 bp, Homo sapiens
tctgggcgactgtgctggcgctgggggcgctggcgggcgttggcgtaggagggacttgaaatgcggtaaccatacatgttcgcaagtgtgccaccctcagc

SEQ ID NO: 492430 - DNA, 83 bp, Homo sapiens
tggacgaagatggggagaaggaagcgagactcatacgcaacctcaatgccccatcttcccgggaagccagccgcccaccagag

SEQ ID NO: 492431 - DNA, 80 bp, Homo sapiens
tgggtctgggaccttaacagggagccatggaaacgtaaatattttcaccacgatcgattagactgggatgaacacagttc

SEQ ID NO: 492432 - DNA, 76 bp, Homo sapiens
caaggagcctgggggaggttcgtttcggctctggagccgcgccagctgggatccaggcccctcctcagtcggcagc

SEQ ID NO: 492433 - DNA, 82 bp, Homo sapiens
ctggatcttcgaacttttgacacggctttggaaacgacgtcatgtgttagtgttatagttttgccgctggactcttccctcc

SEQ ID NO: 492434 - DNA, 100 bp, Homo sapiens
atcagattgtgatgaattgtgctgatattgatattattacagcttcatatgcaccagaaggagatgaaggtgctgcttacgctcatgcagaagagagtat

SEQ ID NO: 492435 - DNA, 112 bp, Homo sapiens
cgcagagctaaatgggggcctctccagggagtgctctgttcacggctccatcgctgttaaaacgatggaaagaactttctaaggaagacttatctcctgcctttgatcattc

SEQ ID NO: 492436 - DNA, 75 bp, Homo sapiens
gagcctcaggcggcagcgcttctagatgacagtcatgtccctttccagggacctcaaggacgactttcacagtga

SEQ ID NO: 492437 - DNA, 100 bp, Homo sapiens
taccttgctgaactggtgacccccatgttaaaagaaggtggaatctccatgagagaacttaccatgatccacctgatggctggccgagtaccccagggag

SEQ ID NO: 492438 - DNA, 75 bp, Homo sapiens
tcttgctatcagactggggcatcgcttgtgacacacttctaccccctgatggccacagcatgttccgaagagatg

SEQ ID NO: 492439 - DNA, 101 bp, Homo sapiens
cacagccgccggccgggagaggcgcgcgccatggcttctggagccgagtggcccacatgaagagcaaagacaatcggatcaagctgatgaacgaaattctc

SEQ ID NO: 492440 - DNA, 83 bp, Homo sapiens
ggagctgaaggcggcggcagagaacttgccggtgccagctgagcaattctgtggtgttcttggtcacacatttatggagtttc

SEQ ID NO: 492441 - DNA, 100 bp, Homo sapiens
atggcggatggccccaggtgtaagcgcagaaagcaggcgaacccgcggcgcaataacgctccagaacctgggtatcaacccagcaaacattggcttcagt

SEQ ID NO: 492442 - DNA, 89 bp, Homo sapiens
ggagacaggaacatgtggctgctcccagctctactccttctctgcctctcaggtacaggtgaacaaaggcagagtaaactgtcacccca

SEQ ID NO: 492443 - DNA, 93 bp, Homo sapiens
tctcatctcgctcggctgcgggaaatcgggctgaagcgactgagtccgcgatggaggctgctgagcttcgtgcttatctgaaatctaaaggag

SEQ ID NO: 492444 - DNA, 75 bp, Homo sapiens
actggtggaatagtctttggccagagcagcccgacggccatggaggctgaagagacgatggaatgccttcaggag

SEQ ID NO: 492445 - DNA, 90 bp, Homo sapiens
ccattgccggcacatgttccacaaggagtgcctgcccatgcccagcatggtcctccaaaagctggggaaagctgatgagacaaaagacga

SEQ ID NO: 492446 - DNA, 98 bp, Homo sapiens
gacagcagcgcagtaccaccttccagagatgcgtgaattacccttcactaagtcggctcatctcaccaatccttggaatgaacataaaccagtaaaga

SEQ ID NO: 492447 - DNA, 101 bp, Homo sapiens
ggccgacggagcgcggcaggacttggctggacggcgcggccacggagaagggcgcggactggttgccataaaggaagcccacgacatagagaccaggctta

SEQ ID NO: 492448 - DNA, 100 bp, Homo sapiens
gtcctactgaggaaaggatatgatcgtgtgtctgtgatgcgtccacagccaggagacacggagtgcctggaacaacgaccccaagagatctctcttacat

SEQ ID NO: 492449 - DNA, 83 bp, Homo sapiens
ccggggtcacttagactaccccaggaacccgcgccgcgagggctccttccctcaggtagttgatgtcacttggcgatattcct

SEQ ID NO: 492450 - DNA, 82 bp, Homo sapiens
ttctctggcaactggaaaatcatccgatcggaaaacttcgaggaattgctcaaagtgctggcatgcttcatgatgatccaag

SEQ ID NO: 492451 - DNA, 100 bp, Homo sapiens
tatactttggttacctatgtacctgttaccactttcaaaagaagaagtctttgcagaggaaattgaatgctgtctgatgctacaattcatatggatcctt

SEQ ID NO: 492452 - DNA, 101 bp, Homo sapiens
cttgctgaagttgcgtgtggtgatgatcgaaaaccttgcctacatgtagcctgtgttgtacagcagaaagatgccaggcaatggtttgctgagctttctgt

SEQ ID NO: 492453 - DNA, 83 bp, Homo sapiens
ggaggagaccggcacccagacaggtggcgaaggcagaggaatatgatgcttcctggtgtgtttagtggttggtgccattccaa

SEQ ID NO: 492454 - DNA, 80 bp, Homo sapiens
aaacaacgccttaccaagtggctgctgaaattagcatctctggaagttgatggtagaagaatccgatttactgggtcagc

SEQ ID NO: 492455 - DNA, 82 bp, Homo sapiens
atcccccccgacgccgtcgcggtggactgcaaggtcccagcatttgagggtgatgatggattctgtgtgtttgagagcaacg

SEQ ID NO: 492456 - DNA, 82 bp, Homo sapiens
gctctcatgtccagctcctttctggagaatctagagggagacaacaaccggatcccagtcatcgggcccctgaagatccggg

SEQ ID NO: 492457 - DNA, 102 bp, Homo sapiens
cggagccggactgcggttggggcgggaagagccggggccgtggctgacatggagcaggttttgggatttgagattgacgcggtgaactctgtccagttttca

SEQ ID NO: 492458 - DNA, 82 bp, Homo sapiens
gaaaagccgcccactggcgctgattcacactgaagtccccagtggacaggaaagctaaggcctcagcgatgccggactcccc

SEQ ID NO: 492459 - DNA, 80 bp, Homo sapiens
ttggttacctatgtacctgttaccactttcaaaacccaagaagatgaaaggattgttcttgttgacaacaaatgtaagtg

SEQ ID NO: 492460 - DNA, 90 bp, Homo sapiens
gtctcttctaagctgaataaagctgttttggaactgtcaggtacctcaaagcgtttgcctgcaatgagatttcattctctacatttaaag

SEQ ID NO: 492461 - DNA, 100 bp, Homo sapiens
accggcttccctttgtaaattgagctctgcacgctggggagtttgttgggggtccctgatgggcctgggtgacattatctcacagcagctggtggagagg

SEQ ID NO: 492462 - DNA, 51 bp, Homo sapiens
ttcgagatctcgtgggtcgaaatcaaggggagctgaatatgtatctgcaag

SEQ ID NO: 492463 - DNA, 100 bp, Homo sapiens
tgcccaactactgctacaacggctctaccaaccgtcccatgagcgtgtaagcaagcgtctacatcagagattccaggcctgggtagataaatggaccaag

SEQ ID NO: 492464 - DNA, 75 bp, Homo sapiens
caggtcttgtagcagcgcctcctcggctcgagtgcagtagcgagatctcagctcacctcagcctctgtctcctgg

SEQ ID NO: 492465 - DNA, 83 bp, Homo sapiens
agggaatttcataacatgggaccaccaccaccttggcaaggaatgtactgccaaatctgtcgaaagggagataatgaagaact

SEQ ID NO: 492466 - DNA, 50 bp, Homo sapiens
attcgaagggagttggtaaacgctggtgctggagaatctggtaaaagcac

SEQ ID NO: 492467 - DNA, 100 bp, Homo sapiens
gcacattcagaatgatgggcctgtgaccatagagctggaatcgccagctcccggcactgctacctctgacccaaagcagaatgcctaccgcaggaatggg

SEQ ID NO: 492468 - DNA, 87 bp, Homo sapiens
ggatcatgaactagtgacctggaaagacttccttgccgtccaggaagggatttcgacaccagaccaccaagtttttgtatcgcttgg

SEQ ID NO: 492469 - DNA, 90 bp, Homo sapiens
atcacgaggccacccagtcccacttcaaacattcgtctcggaaaccccgcctcttacagtcacgagggtctgggggtggtggcatctccc

SEQ ID NO: 492470 - DNA, 90 bp, Homo sapiens
gcatttcatggctatcatctacacgtggagcccgagaagttgaagacactaacagaaggtttggaagcctacagccgtgtccggaaaagg

SEQ ID NO: 492471 - DNA, 74 bp, Homo sapiens
agcagatcctggtcctcgatccgcccacagacctcaaattcaaagatattgatgatgttaagaagttcaaaccg

SEQ ID NO: 492472 - DNA, 75 bp, Homo sapiens
catcgtcaccatgacaacactagggtacaccagaggatcgcttcctggcagaatttgggagctgtttattgcagc

SEQ ID NO: 492473 - DNA, 96 bp, Homo sapiens
tcacgggtagagattggcttcgggctgagctagcagtgagcaccttttggcccaatgaatatcaggtccatctgaactgtttactgtttgttcatc

SEQ ID NO: 492474 - DNA, 100 bp, Homo sapiens
ttctccagggaaaggatgacatatttttggacctgaaacagaaattctggaacacctatatgagcccgtgttctggtactacgtgaaggaggtcctcaac

SEQ ID NO: 492475 - DNA, 78 bp, Homo sapiens
tgcgaagtccacccagcgttccggaggttagggtgctagagctagaaaatgaattgcagaaggagcgtcaaaaactgg

SEQ ID NO: 492476 - DNA, 75 bp, Homo sapiens
gggagctggacggcgagcgcgagcggcgcgagaaagagtctgctacaccatttttgatttgggcttccgctttga

SEQ ID NO: 492477 - DNA, 100 bp, Homo sapiens
gccagcgcccggagcaagcggagctcccccaagagccggaaagtctgagggaaaaggccataccaatgctggagatgcaatatatgaggtggtgagtcta

SEQ ID NO: 492478 - DNA, 90 bp, Homo sapiens
gtaccattggtgatcccgaggatttttgtcaagattggataaaccatgtatcacattgattgtagagctccatttatcttaaagaaattg

SEQ ID NO: 492479 - DNA, 100 bp, Homo sapiens
ggcagcaggagctgagctgggaggaggctgcccggcgcctggaggtggccatgtaccccttcaagaagggaaagagaagaaggcgccgcccttgctggag

SEQ ID NO: 492480 - DNA, 87 bp, Homo sapiens
cgtggttaagaaccaactggttgaggttcaatgcagacaagacggatgtgatgctgatcacaagatttctgttgtgaaggatgtggc

SEQ ID NO: 492481 - DNA, 88 bp, Homo sapiens
atgtggggggattctcgacctgctaacagaactggaccttttcgtcactcaagactgcttgcaactgattgcagacagtgaaacacca

SEQ ID NO: 492482 - DNA, 75 bp, Homo sapiens
tggccagtggagagaggaattcctcaagacaccattccagctttgaaaagtccagccgcatttcatgagcagaga

SEQ ID NO: 492483 - DNA, 146 bp, Homo sapiens
cgacgacaagggcgactccaaggaaacgcggctgaccctgatggaggaagtgctcctgctgggcctcaaggaccgcgagatgggtgagtcaagtgaagacatagaccaaatgttcagcactttgctgggagagatggatcttctga

SEQ ID NO: 492484 - DNA, 100 bp, Homo sapiens
tggcagcgaagaagatcgaaaattaaacctcaggtgccatgcctctgcaactcctcctgttgctgatcctactgggccctggcaacagcttgcagctgtg

SEQ ID NO: 492485 - DNA, 97 bp, Homo sapiens
acctcgctcctcggcgccatgaccacaaccaccaccttcaagggagtcgaccccaacagcaggaatagctcccggttctttgtgaacttcccctcgg

SEQ ID NO: 492486 - DNA, 75 bp, Homo sapiens
ggaagcacaaaaagggacagtcgtgtcagcaaagaagccttaaacagtaaaaatcctcaactccataaagaagat

SEQ ID NO: 492487 - DNA, 76 bp, Homo sapiens
cggccggagaccgtggggcccccggttgccgccccctcgggcacacaagaattgtgggcagatgagtgagattgag

SEQ ID NO: 492488 - DNA, 75 bp, Homo sapiens
cctggagctctacgcctcctacgtttacctgtccatggaccagttgctcttctgtgatgactgcgatcgtggcta

SEQ ID NO: 492489 - DNA, 75 bp, Homo sapiens
ggatagtagaacttatctactggatttccgtagtattgatgttctggagagtcttggcttctgggaggaagtcag

SEQ ID NO: 492490 - DNA, 98 bp, Homo sapiens
aacagcagcgccgtcccgtccgacagccaggcccgggagaagtgtcagcttcctctggtgcaaccagcaagtcttccagtatgaatcccacagaaacc

SEQ ID NO: 492491 - DNA, 101 bp, Homo sapiens
gcagcgcccagcaacaagacagagctggcctggagtccgcggctggccgcgtgagtaggaagttaaatgaagttcgaaagagattgaatgagctaagagaa

SEQ ID NO: 492492 - DNA, 75 bp, Homo sapiens
cgagtgggacaaggattgatagaaaggagccagatgaccaggatgccccagatgagcatgagccctctccatcag

SEQ ID NO: 492493 - DNA, 82 bp, Homo sapiens
cagaccttcattgctctgtgtgccaccggtagcagtagctgatgtgcagtttggccccatgagatttcatcaagatcaactt

SEQ ID NO: 492494 - DNA, 75 bp, Homo sapiens
atcatccctccattcctggcctatggcgagaaaggctatgaggagcccaaggtgggcatcaagaccatcaaggtg

SEQ ID NO: 492495 - DNA, 75 bp, Homo sapiens
catccaggcctcattggacagcattcgagaggctgggaggcggcagaatgcagccagaggagggcacaggctggc

SEQ ID NO: 492496 - DNA, 98 bp, Homo sapiens
tagagtgaagctaacaaagcgaagtggccatactcaggtgatcgtgcagtccggccgccaccccacagtgctgcagaagctctgccagttgcccttcc

SEQ ID NO: 492497 - DNA, 90 bp, Homo sapiens
atgaagaaccaggttgcaagatttaatgacctcaggtttgtcggtcgaagtggaagaggtctctaattaacagaagatggcaaagcccag

SEQ ID NO: 492498 - DNA, 100 bp, Homo sapiens
ggagattggctggttcctcttggaaggtgcatctgcagtacaggatatgaagaaattgagggttcttgccatggaggagatgttaaagtaacccatcttg

SEQ ID NO: 492499 - DNA, 75 bp, Homo sapiens
gttaatcctcaatttaagcctgatctaacccctagaaacagatatttggagttcttacaacatggcagacattga

SEQ ID NO: 492500 - DNA, 100 bp, Homo sapiens
ctcctgtggggatgaaggccgagggcttcgtggatgccctgcaccgggtccggcagagagtattatgagggaggccgaggacttcatgctccggacagag

SEQ ID NO: 492501 - DNA, 89 bp, Homo sapiens
gatgaacgtctccggaaagagttttctccatttggtacaatcactagtgcaaaggtcatatgcaaacacagagctctccttttgctcgg

SEQ ID NO: 492502 - DNA, 49 bp, Homo sapiens
caggcaaggaggtggtgctggagggtaaaagcagcgtttaatgaagaaa

SEQ ID NO: 492503 - DNA, 100 bp, Homo sapiens
aaagtcggcagagcactgtgattgcttgcagtgtttctttataatacattccatgggaggaggactaatggctgaaggataaatcaacatggcaactatg

SEQ ID NO: 492504 - DNA, 83 bp, Homo sapiens
cctagtagagatgaaacgggacctggacagcatcttccgccgtatcagagtccagcctctgatgaagcaggagagaaagaagc

SEQ ID NO: 492505 - DNA, 101 bp, Homo sapiens
aaaaaacaaattgatcacatgtaccactgactgctttgatggagctgctctcagctgttctgatggtgaggaagaggatggagatgaagatgaggaagctg

SEQ ID NO: 492506 - DNA, 73 bp, Homo sapiens
gatagtgaaagccaatgaccgtgaatataatgaaaagttccagtatgcgaaacctctgcgccatgagagccaa

SEQ ID NO: 492507 - DNA, 50 bp, Homo sapiens
ccggaagcgatttcatagccacgggttccgagtctgaggaagacataacc

SEQ ID NO: 492508 - DNA, 76 bp, Homo sapiens
tgttgaacatccacaaggcacctgcaaggggccagtgtcattcaaagatgtggctgtggatttcacccaggaggag

SEQ ID NO: 492509 - DNA, 101 bp, Homo sapiens
cctacattgtgaagctcctgggagcctactatcacgacgggaagctgtggaacacttcagttatggaagatcaaaatgaagatgagtccccaaagaaaaat

SEQ ID NO: 492510 - DNA, 100 bp, Homo sapiens
tccaaactgtgttgtttcagctgtattagggcacttaagtattcatcgaagagtcaccccagtagcggtgatcacagacatgaaaagatgcgagacgccg

SEQ ID NO: 492511 - DNA, 75 bp, Homo sapiens
gagcagcgcatcagacagaacgtgcaggtgaccaagaatatggcccaggtgaccaaagccctggacaaggccctg

SEQ ID NO: 492512 - DNA, 100 bp, Homo sapiens
ccctgaacgagctcgggataaaggagctctacgcgtgggacaacagaagaggccatgaccacaatgtttcttcagtagccatcatgcccaatggagatca

SEQ ID NO: 492513 - DNA, 83 bp, Homo sapiens
tctttctcagatactagagctggccacactgcaggacattgggaagaaatttaaaagcctgttgattcaagaactttctaaag

SEQ ID NO: 492514 - DNA, 89 bp, Homo sapiens
tgccaagttgaaaatggacgagtaatcgcctgctttgattcattgaaatgtttcctgaggttataggcgggtgtttgaggagtacatgc

SEQ ID NO: 492515 - DNA, 90 bp, Homo sapiens
cggtgctgccgcgcgagctctacccagtcgaggtagagatggattcctggaaatacctcctcaaggccagtgtagagccctcaatcaccc

SEQ ID NO: 492516 - DNA, 90 bp, Homo sapiens
gaccatgttactcatagagtccgactataccacatacaggctgtccctacctggctcgcaagctgacccttgccatccccatcatcgctg

SEQ ID NO: 492517 - DNA, 74 bp, Homo sapiens
gcaccgacgtcatcatgctgaccaccaatcagatccgtaaggcatttaaggaaatctgtttctcttttggatca

SEQ ID NO: 492518 - DNA, 74 bp, Homo sapiens
ttcaggcagttggtggaggccttttatgcaactcatgcagcaattccagaaccccgacttcccacccgaagtag

SEQ ID NO: 492519 - DNA, 83 bp, Homo sapiens
agccccgccgccctcgcaacctggcagccgccgccgtggaagattttgctggaggagcttgccaacagcgatcccaagttagc

SEQ ID NO: 492520 - DNA, 100 bp, Homo sapiens
ctgtgtttccgcagcgagagcgaggaggagaaatcatttctaccagttcggagagatccggacgatcactgttgtgcagagacagcagtgtgctttcatc

SEQ ID NO: 492521 - DNA, 98 bp, Homo sapiens
agctgcagcacagtcgggggtgtaggttatggggccttctttgaatcctggggggagccagtcatctgatgtggtgcttttgaaccactggaaagtga

SEQ ID NO: 492522 - DNA, 100 bp, Homo sapiens
ccgatcctctccgtgggagccagcgagcctctctccctgatcttacgtgctcaaggctggaaaacattttcagacactgtgctttatcctgaaaggattt

SEQ ID NO: 492523 - DNA, 75 bp, Homo sapiens
agaggaatgccattttcaattagcatgcgacatgcctttgtgcctttcccagatgtgaacgattggaagaacagc

SEQ ID NO: 492524 - DNA, 100 bp, Homo sapiens
aggtttctgcagacaatcaaatatcacacttcagtggcttattcagcattcaaaatctagaagaagctgaagcatctcctgaagtcttccagtccttctt

SEQ ID NO: 492525 - DNA, 50 bp, Homo sapiens
cagacttcacttgctcttgtacatgagtggcgagtaagaaaagaagctat

SEQ ID NO: 492526 - DNA, 90 bp, Homo sapiens
aagtttgtgacttgaagtggatacatactctacattaatcatactcctccaccactgtccaagagtaaggagagagaaatggacaagaaa

SEQ ID NO: 492527 - DNA, 100 bp, Homo sapiens
catcgttaaagtctctcttcaccctgccgtcatgtctaagtcagagtattttaataagcggaaaacctactttgctcacgatgcccttcagcagtgcaca

SEQ ID NO: 492528 - DNA, 83 bp, Homo sapiens
ttgaaggagagaattacctccctcaaccaatatatagtccacaggtcctggctaccctgggaagagacaagaagtaaatgaag

SEQ ID NO: 492529 - DNA, 82 bp, Homo sapiens
gacagagttcatcaactacatcaaggtgagaagccctaccactgcaactgggacggctgcggctggaagtttgcgcgctcag

SEQ ID NO: 492530 - DNA, 75 bp, Homo sapiens
actacagacaacagagaaaacttgttgaagagattggctggtcctatacaggtggccagcatcgaaatgttcagc

SEQ ID NO: 492531 - DNA, 100 bp, Homo sapiens
tggctttctttgcagcaagcgatggcatagtaaatgaaaacttgttattgccttgtctgtcaagatccgcagttatgaagaacacttggagaaacatcga

SEQ ID NO: 492532 - DNA, 100 bp, Homo sapiens
ttcatagcattcgcctactccgtgaaggcggaggaagcgctggcggaccatcaagctgctgctgcgccggggcgcggaccccaacctgtgctgcgtgccc

SEQ ID NO: 492533 - DNA, 75 bp, Homo sapiens
gaaacatggcggcggcgggtgttgtgagcgggaaggggccacctacagatgctcctgcagtggacacagcagaac

SEQ ID NO: 492534 - DNA, 100 bp, Homo sapiens
ctccagcgtgctcaggtcggcggaggagaagaaactgctggagcgaacccgtgccaggcgagagaatcttcagagaaaaatggctgagaggcccacagca

SEQ ID NO: 492535 - DNA, 83 bp, Homo sapiens
gtgtggagaggttggagctgttccctgtggagctggagaaggtgtcaacagcatctccaccctggagcctgtgagccggtgcc

SEQ ID NO: 492536 - DNA, 100 bp, Homo sapiens
actattacaatcgcttgtacaaaggagagtttaaacagccaaaacagttcattcatattcagcgtgaaagtgacgtcctgcatttcacctccaccaccac

SEQ ID NO: 492537 - DNA, 100 bp, Homo sapiens
gggaggaccgagcctaagagggcagccgcctgaaggaacgcgacggcggcgcccgcaggtattggcatactccacacatctgtaccattcttgagtgatc

SEQ ID NO: 492538 - DNA, 100 bp, Homo sapiens
gagcgggccctgcgcgcctgatgggtcgaggcggacgcgcggctgcgtcaggtgaacatgattaaagatgatgggacagttattcatttcaacaatccca

SEQ ID NO: 492539 - DNA, 101 bp, Homo sapiens
atcttgggtatcctgcaggaggaggaggaagaagagaagctggacgctctgcaggggatcctctctgctttcctgagctggaagtcgagtgtgctactcaa

SEQ ID NO: 492540 - DNA, 82 bp, Homo sapiens
aagtaatggcccaggtaatcgggctggatcatcaagtagccgaagtctcctacggtagtgtgcagcttatgcaaacgagagg

SEQ ID NO: 492541 - DNA, 90 bp, Homo sapiens
gtgctggatggtacctcggggttctctcctgcccccaagctgggccgcctgatcttcgacaacctaaagaagtccattgcctacaccctg

SEQ ID NO: 492542 - DNA, 75 bp, Homo sapiens
cagaagaaaaagagagccacccctaatgggacccctagagtgctgctgtagaattcagaaggagctggcggacat

SEQ ID NO: 492543 - DNA, 96 bp, Homo sapiens
gcaaaagtagtatgcttttatagacgacgtgatatttccaacacacttataatgctcgcagataagcatgctagcctctactacgtggacagtgaa

SEQ ID NO: 492544 - DNA, 100 bp, Homo sapiens
cctgtgtatgaagcagtgtctgagaccatgcagtcagctacgggaattcagtactctgtaacacccagctaccaggtatccgccgccaaactgcccattg

SEQ ID NO: 492545 - DNA, 75 bp, Homo sapiens
ttacttcaggacaacctcttgggcagggcgaggattaaatccaccacacagggtgaaatctatctccatgacaac

SEQ ID NO: 492546 - DNA, 111 bp, Homo sapiens
cacatttctggtccagctggagaactaccctcccaacacggaggtcaacctcactctgatctgccccaactggaccctaggcaaaagtgagtggcactcctctgccaggac

SEQ ID NO: 492547 - DNA, 82 bp, Homo sapiens
acaaagagcttgctccctacgatgagaactggttctacacgcgagctgcaataatgacgatgaggacctgacaccagagcag

SEQ ID NO: 492548 - DNA, 97 bp, Homo sapiens
acggctccatcatcacccaggcgcggagggaagacgccctggtgctcaccaagcaagggacttaagtcacaacagattatctttcatcaaggcaagt

SEQ ID NO: 492549 - DNA, 90 bp, Homo sapiens
ataccagtccccagtgagggtgtacaaatacccctttgaattaattatggctaatagcctaacatggcagaccagagacagcgctcactg

SEQ ID NO: 492550 - DNA, 98 bp, Homo sapiens
gacgcagcagccaagctcttcgctggctcccgggggctctcccgggttcctctcattgcaggctgaaggagtacgtcactaacaagaccaagaagaca

SEQ ID NO: 492551 - DNA, 101 bp, Homo sapiens
aatgtggatcaagcaggttttaaatcaagatttaacattccaacacataaaaattatttatccaacagctcctcccaggctgtgggtcatcttattgctgc

SEQ ID NO: 492552 - DNA, 100 bp, Homo sapiens
ctggagtctgcgaaggccgggacccggttccccggcccacagtgggggtgtgcaaacccgagagaactgggtgaccctggcaaagatgagagtgcacatt

SEQ ID NO: 492553 - DNA, 114 bp, Homo sapiens
cctcctgttccgcttctcagaggacgccttcaacaccaccttcatctccaccatcgagaaaatattctctttggaatgggaaatcctctgcttgacatctctgctgtagtggac

SEQ ID NO: 492554 - DNA, 100 bp, Homo sapiens
gcctgaggaaggcgtgcacttgggacaagcattattagaaaatggaatcattcaccatggaaatggagttgttttttccttcaagtggaggttgtgggcc

SEQ ID NO: 492555 - DNA, 100 bp, Homo sapiens
gataccaacggcaaaaatctcaagaaagaggtgggcaagatcctgtgcactgactgcgatattgatgatgttaagaagttcaaaccgggttacctggaag

SEQ ID NO: 492556 - DNA, 96 bp, Homo sapiens
gaacaacccgttcttgcctcaggccagtcgcctccaggccaagagggatccttcacccgtgtctgagtgaagccaccactcgctctcgaatcgcgc

SEQ ID NO: 492557 - DNA, 73 bp, Homo sapiens
caggcccgcggggagcgcagcccggcggagtgtgtcctgggactctgaatggcctgagtgtgaccggcgatgc

SEQ ID NO: 492558 - DNA, 89 bp, Homo sapiens
cgaacagccccgcgggaatgtcgacgaggagctgaggtactctttgagcacatcaaattcttccattgccgctcttctctgtgcccttt

SEQ ID NO: 492559 - DNA, 98 bp, Homo sapiens
gacagtggtggttccaacacccctgagcaagacgatctctctgagggaggagagagaccgagcatcggggtataggaagagaggtccgaaacccaagc

SEQ ID NO: 492560 - DNA, 89 bp, Homo sapiens
tcaggcggcaccctgtccccgaggaggggaccatgacacaatctctggaaacatggctacagaacatgttaatggaaatggtactgaag

SEQ ID NO: 492561 - DNA, 100 bp, Homo sapiens
ggagctgagtctccccagaagaggaagtttgatgtaatccctgttcattactacttaatacctccaccaacaaagactaagaatggcagcaaagataagg

SEQ ID NO: 492562 - DNA, 75 bp, Homo sapiens
agcaggaggcggaggtggtggaaggctgtttccctgcgggacactccggacgcaggcccggccaggagagttcgt

SEQ ID NO: 492563 - DNA, 99 bp, Homo sapiens
acccccggagcccccctcaacacggaccgcgcccgccgggcacacaagaatggtcactggtctgcaagtggatgatgagattgtggagttcggctctgt

SEQ ID NO: 492564 - DNA, 100 bp, Homo sapiens
gcggctcacgctgagagggacacgcagtgacgagcggccgaagcagctttgcgaaagcgtggatacccatcaacgaagttttgatattggaattcagatt

SEQ ID NO: 492565 - DNA, 75 bp, Homo sapiens
tatgaagagacatgcgatggtagatcaacccccagagtctggtaataagagtactgcaggtattatgaatgccga

SEQ ID NO: 492566 - DNA, 75 bp, Homo sapiens
atgacaatgtagaggatgacttctctaatcagttacggtaaatggttgcagttttgtgatgagaacaggaaagcc

SEQ ID NO: 492567 - DNA, 101 bp, Homo sapiens
caggcctccgtgaagaacttccagatcatccatggcaatgaccaatttaagaagtgcaacatggccaggggctgcctctgctgcttgaagtacatgatgtt

SEQ ID NO: 492568 - DNA, 82 bp, Homo sapiens
agcatatttgtttctctctgcctgatttctcctgaatttggaaactatttggaaaaagacctcgatgaagttctgcagaccc

SEQ ID NO: 492569 - DNA, 82 bp, Homo sapiens
caaagttctctcgatcagggcatacatctttcttcgacaaaggtatggtttgaagtggtgaacatggatttttctcggcttc

SEQ ID NO: 492570 - DNA, 90 bp, Homo sapiens
ccccgcctcttacagtcacgaggatatgaaagatggcaagtccagatagaagtaaacggaagatattaaaagccaaaaagacaatgcccc

SEQ ID NO: 492571 - DNA, 100 bp, Homo sapiens
taccaagcatgtggctcctggtcagtgtaattctaatctcacggatatcctctgttgggggagaaggaagctgccacttttgctagagagcaaggctttg

SEQ ID NO: 492572 - DNA, 100 bp, Homo sapiens
gggagtcgaagcgagggtctgaagttcacgactactagaaggggaggggagtggaaaggctctcagtgaaaaaggttcagcagactgtacaggatctttt

SEQ ID NO: 492573 - DNA, 98 bp, Homo sapiens
ggaacaagtcgccacctaaggaagtcctcggcaattacgagattctcaacagctgcaggcctatgtggcctgggtgaatgcacagctgaagaagaggc

SEQ ID NO: 492574 - DNA, 83 bp, Homo sapiens
tcttcctgtcatggttccccttctactacatgctgaaggtgtttggaatggaactcgttggctgcttattttctagaaactgg

SEQ ID NO: 492575 - DNA, 100 bp, Homo sapiens
accgccctggccatctaccatgtgcctcccctggtgaagacacaaactgtcaccatctcagataatgccaatgctgtgaaaagtgaaatcccaaccaaag

SEQ ID NO: 492576 - DNA, 82 bp, Homo sapiens
gatgattccccaaagtacaattaccatttggactccagtggtagctatgagctcagccggtctatcagtgtcgatttagcag

SEQ ID NO: 492577 - DNA, 82 bp, Homo sapiens
aaggaataaacatgcaatgaacccaaaagggaaaggaaacagattcattgtctgtctgaggatgagttaagttcttctacaa

SEQ ID NO: 492578 - DNA, 50 bp, Homo sapiens
tgaagagggaagacacgcggaaacagcagtggccggtgtccagctgccta

SEQ ID NO: 492579 - DNA, 82 bp, Homo sapiens
caggcacccgccaccacgcccaggtgtcttcagtgccctgggtttgcctgtgacccaatgcccactgggactgaatgccaaa

SEQ ID NO: 492580 - DNA, 82 bp, Homo sapiens
gcctgcagagctgtggcttaccagaacccagcttagactagaaagtctagaagacacacacataatgaagggggaagatgat

SEQ ID NO: 492581 - DNA, 100 bp, Homo sapiens
tgagtcagtgagttgcgtgtctgcaagagagcatcctatctggagtttagatgaaattcatccaacaagaaggtcacgttctccaaccagacaccatgat

SEQ ID NO: 492582 - DNA, 73 bp, Homo sapiens
accaccgccctcattcatgctgcagagaagattcgccatgaagtcagcgtaaataatgtaacacataaactgt

SEQ ID NO: 492583 - DNA, 74 bp, Homo sapiens
ggatgagtacgataccgaagcgggctgtgtgccccttctccacccagagagaagcttgattctttgctctcaga

SEQ ID NO: 492584 - DNA, 96 bp, Homo sapiens
atttatcaccttctgtggaaaggaagctgcacaggaagccgtgaaactggctatgtttgactggctagataacactgtgattaaactctgcaccat

SEQ ID NO: 492585 - DNA, 90 bp, Homo sapiens
aaatattagaagattgggaagattctgttaatattggcaaacctctactctggagccccttcttgcagaggcctctgcataaaaggaaag

SEQ ID NO: 492586 - DNA, 82 bp, Homo sapiens
aaagagcaaagataagaagagaaaaagagaagatgaagaaacccagcttgatatgttgtgggaaagaagcctaaggaataaa

SEQ ID NO: 492587 - DNA, 100 bp, Homo sapiens
tctggcagcagacatcagccacgcatctgaccttgttgactcagagacggctgaggatgacatcagcgatgtgcagggaacccagcgcctggagcttcgg

SEQ ID NO: 492588 - DNA, 82 bp, Homo sapiens
tgacagctcatctcagctgaacaccagtctaccattccttcaaataagactttgaccccgacgcaggcttcagtgattgccg

SEQ ID NO: 492589 - DNA, 49 bp, Homo sapiens
gaagatttgatacaaaaatcccttgagagctcaaaggatggctactgac

SEQ ID NO: 492590 - DNA, 101 bp, Homo sapiens
ggggaacagctgatccgtctgttggcatccacccgttttgtcaagtgtgaaaagtgtcatcatttttttgttgtgctatctgaagcagactcaaagaaaag

SEQ ID NO: 492591 - DNA, 100 bp, Homo sapiens
ccacgccggtgatcatagccatccagaccttctgctaccagaaaaccttctccaccagaatccagctcacgctggtaagaactcagggccctatcctcac

SEQ ID NO: 492592 - DNA, 82 bp, Homo sapiens
tcgatctctcagggtcgtcgggtgaagtcagcaaactgaaacttcaggccaaattcaaggagttgctgtgacatcttcagca

SEQ ID NO: 492593 - DNA, 82 bp, Homo sapiens
aggcacagaaactgttattcgggcattctacggagggagatattcttgaggtgaaggtgataaagtaaagtgctttcactgt

SEQ ID NO: 492594 - DNA, 100 bp, Homo sapiens
agccaccctcgctccctctgctcttcctcccttcgctcgcaccatgatagttttgaggcagctgtgccatcaaatagccacattgtttcggaacctggaa

SEQ ID NO: 492595 - DNA, 100 bp, Homo sapiens
catcctgctgccggatgacattgaggacgagtccacgggcctgaagaaggtggaagaaaaggccaaatttgatgggatttttgaaagcctcttgcccatc

SEQ ID NO: 492596 - DNA, 98 bp, Homo sapiens
ctcttggaccccagtatttagcatggcatggcagagagaaatgctaattttgaagcccttcctgaggattggagagcaaggctgaagagaaggaaaat

SEQ ID NO: 492597 - DNA, 107 bp, Homo sapiens
aacactggtattttccaataccaacaggctctagccaacatgcagttacaacagcatacagcatttctcccaccagatggagtctcgctctgtctcccaggctggag

SEQ ID NO: 492598 - DNA, 83 bp, Homo sapiens
ctcatgagagcgcggccggaggacagggcggcgactggcggcgcgatggacctgaccgggctcctgctggacgaagaaggcac

SEQ ID NO: 492599 - DNA, 74 bp, Homo sapiens
tggcagccatggccaaagactcagaatctcggaggatgctcagaggatggcagaggcggaattgcacaaggaaa

SEQ ID NO: 492600 - DNA, 75 bp, Homo sapiens
cgtctccgccggctactgccgcttcagttctcccggtgtggccacgagtcggatcttagcaaagcaatgtctcaa

SEQ ID NO: 492601 - DNA, 80 bp, Homo sapiens
cgatccagcctgcggagcctgtggggcaggctctgattgtactttctccacaagcttcagcatggcagtatctctcacca

SEQ ID NO: 492602 - DNA, 98 bp, Homo sapiens
gtggagggcgcggggggcgcggaggctaattcacctaaataagattgatcctcatgctccaaatgaaatgctctatgggcgaataggctacatctatg

SEQ ID NO: 492603 - DNA, 50 bp, Homo sapiens
cccggcgcggcccagcgccctcagcttggattagaagaacaagaaagact

SEQ ID NO: 492604 - DNA, 99 bp, Homo sapiens
acagctatatcagagaatgagttaatctcctcagaaatcactaaatactactctgaggggcttagaaattaacaggtgacaaccatgagtggaaaaaac

SEQ ID NO: 492605 - DNA, 100 bp, Homo sapiens
tttatatcccatgttctggctttctttgcagcaagcgatggcatagtaaatgaaaacttgggtcgagctgtgcagttttagcgggtacaagatctacccc

SEQ ID NO: 492606 - DNA, 90 bp, Homo sapiens
tggttgaatctggatgtggaacccgctgacgtggatggctgactgtattggaagcagtttaagtgcacggtgtgtgactacacagcggcc

SEQ ID NO: 492607 - DNA, 100 bp, Homo sapiens
ccaaatccggaagaagatgatggaaatcatgacccgagaggtgcccgagaatatcatgtccagttttttagcaaccagccagagagggcgtgggttcatg

SEQ ID NO: 492608 - DNA, 83 bp, Homo sapiens
gacttcctggccatcgttttcttcgcctccataggagcatcagatccatgctgctgctgactcggagccccacagcttggcac

SEQ ID NO: 492609 - DNA, 100 bp, Homo sapiens
ggtgactggaagggcctgaggattacagtgaaactgaccattcagaacagacaggcccaggtgatctgtgaaaatggttcgctattcacttgacccggag

SEQ ID NO: 492610 - DNA, 75 bp, Homo sapiens
ttgcactgctaccagacactgacaggccttcccttcttcttggtggtgttcttgagtaagataatctggactggc

SEQ ID NO: 492611 - DNA, 82 bp, Homo sapiens
atcaccttgatttttaatcccacgaccagtgtgcttttcttggagaaagaagaaaagaagaaagaaggaagaagaagaagaa

SEQ ID NO: 492612 - DNA, 75 bp, Homo sapiens
ttgacaagtgatgagaagctgtcggagcttcccaagagatcctgcatattttgatgaaaattggctaaacagaat

SEQ ID NO: 492613 - DNA, 98 bp, Homo sapiens
gcgatggcggatttagataaactcaacatcgacagcattatccaacggctgctggaaggtactggaggcgcaaagaaggcatcagaaggagaaatctg

SEQ ID NO: 492614 - DNA, 101 bp, Homo sapiens
tggcccaacggtttccccagcagtagcctctgcgaccaggtatcgagaaccttccctgcgaacttcagaggaacttccagctgatgcgagagctggaccag

SEQ ID NO: 492615 - DNA, 95 bp, Homo sapiens
cggggagggtggttaccgctgaggagctgcagtctctgtcaaggttccaagaccaaagattaaattaagagaaggtaaagctggacaaaatctgc

SEQ ID NO: 492616 - DNA, 101 bp, Homo sapiens
agcagagctcaaaggactgaagcagaaggagaagacagcctgaagaagatgcagctgatggagcttgcgattctgaatggcacctacagagatgccaacat

SEQ ID NO: 492617 - DNA, 100 bp, Homo sapiens
aaaatgtctttcgggccgctttccaggaagcagcaggatgcgccgctccactgtcggtagcaacaaggattcagctgtggaaatggctatgtcaaaacaa

SEQ ID NO: 492618 - DNA, 100 bp, Homo sapiens
gccacagcatcactgggggctgcacttgtgctccgggcttcatgaatcccacgtggcgaagtctcgattttggaattatgccagaccgtcttgatacatc

SEQ ID NO: 492619 - DNA, 100 bp, Homo sapiens
cgggctttgtcaccgggacccgcaggagccagaaccactcggcgccgcctggtgcatgggaggggagccgggccaggaggtgtggggctggcctcgctcg

SEQ ID NO: 492620 - DNA, 82 bp, Homo sapiens
ggaggaggaggaggggctccggctggtctgtggtgaggaggatttgatgaagatgttaaagcgaaagtggagaaccttctcg

SEQ ID NO: 492621 - DNA, 100 bp, Homo sapiens
ctgccgtcgtcgccgtcgccgtcgccgtcgccctcccagaatggttagagccacagctgaaacaactacaaacaaaatatgatgaacttaaagagagaaa

SEQ ID NO: 492622 - DNA, 100 bp, Homo sapiens
tatcctggacacggcatgatgttcgtccgcaacgattgcaagcactattcctgatcagagaactccagttgcttcaacacacagtatcagtagtgcagcc

SEQ ID NO: 492623 - DNA, 100 bp, Homo sapiens
tgttaatactcgcctagaaaaaacagcaaaggagctagaagaggagatccccgtcgaggtcaagatcaagatccaggtctatttcacgaccaagaagcag

SEQ ID NO: 492624 - DNA, 118 bp, Homo sapiens
gcgcaagcaggtagcgccgctgctgaagagtttccaaggagagcaggtattaatctctggagaagacacatccacagttagcactttcttcagatgctgacgctcggtgaacagttgc

SEQ ID NO: 492625 - DNA, 100 bp, Homo sapiens
caggatgggcacgagcgggagtacatcaactgcaaccgttacttccgccagatcttcctgaaaaaggccgactaagctgcgggcttctgagggtaccctg

SEQ ID NO: 492626 - DNA, 100 bp, Homo sapiens
aaaagagccctgcaatttgaagatacatgagacagcagccaaacccccaggaaatgggtcctgatgaatatgaagagatggaagaagaggaggaggagga

SEQ ID NO: 492627 - DNA, 100 bp, Homo sapiens
ggaagtgggggttatggtgggaggagccgatactgagcttcttcctatttgccatggcaagcgagacattgagttgctgctgaaactcattgcaaacctc

SEQ ID NO: 492628 - DNA, 100 bp, Homo sapiens
gagctgtgatgttttggggattccactctccagtgtaatgattattgacaacagttttaacaacctgggcatccagtgtgtgaggaagaaggagattgag

SEQ ID NO: 492629 - DNA, 100 bp, Homo sapiens
aatcagatcagtcttggctccctcagaagcatcgtgaaaagcctccttctggttccaaatgatgactttgaagaagccaaggaaattttgacaaagatga

SEQ ID NO: 492630 - DNA, 50 bp, Homo sapiens
tggcaccactgaagtgaccgaatgagggcttgctctcaattttgcgcaag

SEQ ID NO: 492631 - DNA, 100 bp, Homo sapiens
gatgccgttccagccaatggccagactccaatccagagaaccatcaagccagatgtcagaagctacaccatcacaggttaccatggcctctactgtgagg

SEQ ID NO: 492632 - DNA, 104 bp, Homo sapiens
aggcaccgacgtcatcatgctgaccaccaatcagatccgtaaggtgcccgtggttgacacgagctgtgtccccagctgttcccgtctacaatggcatcatcttc

SEQ ID NO: 492633 - DNA, 100 bp, Homo sapiens
gtatcttcatggtgcggctcatcttcgagagttttccaagagataacttcaccaagatgtccagtgataggcaaaggtccgatgatgagagccccagcac

SEQ ID NO: 492634 - DNA, 80 bp, Homo sapiens
cggcgtgcggcctagcgtctcaggcaagttcctgggaaatgcagcctgaatgaagagctcaagagaagagccacactgtt

SEQ ID NO: 492635 - DNA, 96 bp, Homo sapiens
ggagtgagaagcaagaaggccctggacacagcaatatctctgggctttcacagccattgatctgatgtacggaggcatctactgttttctgtgcca

SEQ ID NO: 492636 - DNA, 99 bp, Homo sapiens
gacactctgcaagattctctcctgaagtcccagcctcacgattttgatgaatgtcgatttgatattagtgtaaatgatagtgtttggtatcttcgtgct

SEQ ID NO: 492637 - DNA, 75 bp, Homo sapiens
gccggctgaggagcgccgctgcctcgcctcgggactggtgattgcagctggaagtgcccatgaccgagctggcgt

SEQ ID NO: 492638 - DNA, 82 bp, Homo sapiens
accccggtacatctgaaagccgggaaatggaggccactgtctgcagctcccgtgaagatgtccactccagacccacccctgg

SEQ ID NO: 492639 - DNA, 90 bp, Homo sapiens
gagatctgaaagacccccaagaggagcttgtttgggagtgggggcagacggcgttttgcgcccaactggcacagaccccacaggctcctc

SEQ ID NO: 492640 - DNA, 75 bp, Homo sapiens
gcctcagttggaagcagccgatccagcctgcggagcctgtggggcagaactcaagctccatgaggagatgtttca

SEQ ID NO: 492641 - DNA, 75 bp, Homo sapiens
ggaactggaacagaagtgcaaatgttgatatatcactacttgtgtcttttaacaaaatgaaaaaattgactactg

SEQ ID NO: 492642 - DNA, 50 bp, Homo sapiens
ccgcgggccaggagagcgctcggcgggttaccagccagtcttgtctggtc

SEQ ID NO: 492643 - DNA, 100 bp, Homo sapiens
agtggatggcgtggagatatggcgcaactgcggcgcgtattgttgcagcatctggcagtgagactgaggatgaggacagcatggacattcccttggacct

SEQ ID NO: 492644 - DNA, 100 bp, Homo sapiens
gctggagtgcttggatctggagaagagcagctgctgcatgggcctgagccggttaagtgggcagaccaacatccacctcagcaaaaacttcttcctgacg

SEQ ID NO: 492645 - DNA, 100 bp, Homo sapiens
aggctctttgaatatgactctgcaaaggtagtagtcatcttataagtacatcttcttggcgagatggacaaaaattagtaaagaagattctgggacctgc

SEQ ID NO: 492646 - DNA, 75 bp, Homo sapiens
tggccagccaactggacagcggagcacgatgattgatagggttttggccaaattgggcgagggcacaaaataacc

SEQ ID NO: 492647 - DNA, 75 bp, Homo sapiens
aaaacaagaattacagcagccaacctatgttgccctgagttacataaatagtgcacttacatttcaatcgaccaa

SEQ ID NO: 492648 - DNA, 90 bp, Homo sapiens
gtgaccgagaccgcggccgggaccgaggctcattgctatggacagtgctatcaccctgtggcagttccttcttcagctcctgcagaagcc

SEQ ID NO: 492649 - DNA, 75 bp, Homo sapiens
agagagctctggggtcgacacggggccagagttactcagcaaatacattggagcaagtgaacaagctgttcggga

SEQ ID NO: 492650 - DNA, 50 bp, Homo sapiens
gccagacatggcattctgcaggtggcaggaaccaggtgcagatgggtctc

SEQ ID NO: 492651 - DNA, 75 bp, Homo sapiens
ttcgacctgccagggcaggaggaacgggagcgcctgactcttccagctggagttggaggctgacgccctagtgaa

SEQ ID NO: 492652 - DNA, 85 bp, Homo sapiens
tatagcaatctggttttcttggggcaaacttgaagataaatcttttgactccagctctttagaggatctaaagtgaccttgatgg

SEQ ID NO: 492653 - DNA, 83 bp, Homo sapiens
ggatgggagacaggaattgagagtcacagaggaaggacagtggagtctggcatcttattggaaagaccacagcaagattcttt

SEQ ID NO: 492654 - DNA, 100 bp, Homo sapiens
ggacgctcgcctgccggctgaggtgtcctgatggcaaatttcaagggccacgcgcttccagggagtttcttcctgatcattgggctgtgttggtcagtga

SEQ ID NO: 492655 - DNA, 100 bp, Homo sapiens
cggtcacttaagttttccgtgtgcgggttgcaaggagcgtgcgtgcgtctggtgcatacattcagagggccacactggtgtgaatactgtgccaacttta

SEQ ID NO: 492656 - DNA, 86 bp, Homo sapiens
ttgcagagttctctctctctgggaaagaccacagcaagattctttcattcgtctcctcctagcctgggggaccaggctcgaactga

SEQ ID NO: 492657 - DNA, 74 bp, Homo sapiens
catcacagacaccgcctacaggagtatgatgcaagccgctgcctactacctgccccgacacctggcccccaacc

SEQ ID NO: 492658 - DNA, 75 bp, Homo sapiens
gcgcggggaccgctgtgctctcgagagtgcctacttgaacttgagctctgagcagaacctcatccaggaggtgac

SEQ ID NO: 492659 - DNA, 50 bp, Homo sapiens
aaagcgaggcaaggcaggcgggatgaaacgaggaggaagagatagtgacc

SEQ ID NO: 492660 - DNA, 75 bp, Homo sapiens
aggctgaagaaggccaaggctgcagaagccaaagccacggtgccagaaccctgtggagcatcatgaactgggaag

SEQ ID NO: 492661 - DNA, 90 bp, Homo sapiens
ggcgaagacgcgaccgcggcgcgagtcaccatggcctgccttgctctgccaggaaccatgagtgaggcccgcagggacagcacgagcagc

SEQ ID NO: 492662 - DNA, 100 bp, Homo sapiens
ccttcactgggatgatgcgctgcagccagctggcccccagggccctgcaggtgtgggcccatcgctggatggatctgtcagaacacggctttgggctggc

SEQ ID NO: 492663 - DNA, 96 bp, Homo sapiens
ttaaaagtcgtggaagaatgcttacaccccgaacctaatgctcaacaagaagtgggaacctgctttcttcacttttgttgcctatgattgctccat

SEQ ID NO: 492664 - DNA, 100 bp, Homo sapiens
ctccatccctcctgtctccagccctccggagcagaaagtggggcccaacagacttgtgaagaatgtagcacattgtttggagaatattattgcgatatat

SEQ ID NO: 492665 - DNA, 100 bp, Homo sapiens
tcattcgtgggaacagcgcagtacgtttctccagagctgctcacggagaagtccgcctgtaagaggggccctaaccacccaggatgaaaatggccagacc

SEQ ID NO: 492666 - DNA, 83 bp, Homo sapiens
ctcctactaccactgcatctgtgtcagcaacagcagctccaagttgcaagaatgtagtaactctgatcagctacaaggaaagg

SEQ ID NO: 492667 - DNA, 100 bp, Homo sapiens
tggtccaggaggcagtggaggaagtgggggttatggtgggaggagccgatactgagcttcttcctatttgccatgggttgtggccaagccagtccatttt

SEQ ID NO: 492668 - DNA, 149 bp, Homo sapiens
cctgcacagcccggagtggagcgaggagcgcttccgcgtggacaggaagaaacttgaggccatgttacaagttgaatggatcgcagcagttaccattgctgctgggacagctgcaattggttatctagcttacaaaagattttatgtta

SEQ ID NO: 492669 - DNA, 75 bp, Homo sapiens
gatgacctgtgcttatgaggagcccacctgtgaggttggactcattgttggttggtggttctgtcagatgaaagc

SEQ ID NO: 492670 - DNA, 90 bp, Homo sapiens
ggaccggtagctcccagcaaagcggcccagcgggagagactctgtggactccaagtcttctgcctcctcctctccaaaaagaccatcggt

SEQ ID NO: 492671 - DNA, 98 bp, Homo sapiens
ttgagaagaagcggaaaaaagaaaactctagaagtctggatgtcggtgggcctctgagatatgccgtttacggctctagaggacaaaatcccagtcct

SEQ ID NO: 492672 - DNA, 75 bp, Homo sapiens
ccgcagatgttgtcaaggtggcctaccaggaggccaggggtgtcgccatgtggaatgcagtagccctctgggcct

SEQ ID NO: 492673 - DNA, 74 bp, Homo sapiens
ccacccaccgccgccgcctcccaggtcagtgacttcctgtcgggccgttcgccactgacactggccttgcgtgt

SEQ ID NO: 492674 - DNA, 100 bp, Homo sapiens
acttggattctatccctcctggtcagtacatggattcttcacttgttaaggtgaccaagaatatggcccaggtgaccaaagccctggacaaggccctgag

SEQ ID NO: 492675 - DNA, 100 bp, Homo sapiens
caattacacctttgatttcaaaacatcgctattgcggttccgaggcagtgggaagagatgcggcccctggacatcgtcgagctggcggaaccggaggaag

SEQ ID NO: 492676 - DNA, 82 bp, Homo sapiens
ctccgcgttcccagcccgggtccccgcgttcacagccccagcgcaggaactgcaagcacatgttgaccagataactgaaatg

SEQ ID NO: 492677 - DNA, 100 bp, Homo sapiens
ccgaaaaaacaaaacaaatatgaactatgataagctgagcagagccctgcgatactattatgacaaggtactccaaagattcaggtttactcacgtcatc

SEQ ID NO: 492678 - DNA, 100 bp, Homo sapiens
tcggtcgtgcagcggcggcgagcgctcgcgagcggctgcgggacgcgaggtttccgggagacgttctcttccagatggctgaagtccacaggcagatcca

SEQ ID NO: 492679 - DNA, 98 bp, Homo sapiens
gtccgtcagtccctaggtatccgcactgctcaggggtcctctcagggtgcgccatcattgtccgaggtcagcctcgtggtgggcctcctcctgagcgg

SEQ ID NO: 492680 - DNA, 83 bp, Homo sapiens
cgagaatcaaagggccgggagcgatggcaactttgtccctaacaaaatgtggaagggattagtcaagaggaatgcatctgtgg

SEQ ID NO: 492681 - DNA, 75 bp, Homo sapiens
catattttctcacatatacaacacgattcttctaatggatgggaacatggggttaaacccatccagagtaatggc

SEQ ID NO: 492682 - DNA, 80 bp, Homo sapiens
ggaccaagctggagatcaaaccttaccctgaaagaagcagatcccagttcaaaagtagccataagaaggaaggattcacc

SEQ ID NO: 492683 - DNA, 90 bp, Homo sapiens
cttgggaggagtgtggctaccacttggccccctctgatctgcgccgggtcgccacatactggatgagctcaggtttctacaaaaatgtgg

SEQ ID NO: 492684 - DNA, 82 bp, Homo sapiens
aggattcaccacctccaggaaaaggattacctgagctggaattggaagcaattgataaccaatttggacaaccaggaacagg

SEQ ID NO: 492685 - DNA, 80 bp, Homo sapiens
ccagcacctacgtcccgctgccgtcgccgccgccaccatgcccaagagaaaggtctgtgcagacttttgcagacaaatca

SEQ ID NO: 492686 - DNA, 82 bp, Homo sapiens
cttcgtcatgttcttcgcgccctgacgcatcttctctccagactgccgatcccagaaagccaggtgatcaccattaaccccg

SEQ ID NO: 492687 - DNA, 75 bp, Homo sapiens
atgcaaagccagcgttacagtaatgttccaggagtctgccgtgcacccgagggagattttcaagcagaaggagag

SEQ ID NO: 492688 - DNA, 90 bp, Homo sapiens
gacctattttactgataagaaaacacatctttacacactaacatcttcatgatacagttaagaggaatcttgacagcgccacttcccctc

SEQ ID NO: 492689 - DNA, 95 bp, Homo sapiens
atgagatcaaaggtcacctggaaattgccttattggaaaaacatttcttacggcagctggtggaatttttgaagaaaatggaatctcgaggcccc

SEQ ID NO: 492690 - DNA, 75 bp, Homo sapiens
gatcgattgagcaagcagggggaggtcccagatcccacaaagtattttgtcactcggtggagcacagacccatgg

SEQ ID NO: 492691 - DNA, 100 bp, Homo sapiens
ctcctcctgaagtgtctttggtccaacgttgttccaggaaagaccacagcaagattctttcattcgtctcctcctagcctgggggaccaggctcgaactg

SEQ ID NO: 492692 - DNA, 82 bp, Homo sapiens
aatgactacaatgagtcaccggatgatggagaggtcaatgagatgacttcaaacctgcttctattgacacttcttctgaagg

SEQ ID NO: 492693 - DNA, 75 bp, Homo sapiens
cggcttggagaggccgagggtttgatgaaggtggaggcagcgcggctctcaggtgccattgagaaacagaaattg

SEQ ID NO: 492694 - DNA, 82 bp, Homo sapiens
ttcagaaatgcgcagagcaaacatctttcaaagaacccagcttagactagaaagtctagaagacacacacataatgaagggg

SEQ ID NO: 492695 - DNA, 122 bp, Homo sapiens
tctccagcgaagaagtagacatggcgagcgactccccggctcgaagcctggatgaaatagatctctcggctctgagggttatgagaagacagatgatgtttcagagaagacctcactggctg

SEQ ID NO: 492696 - DNA, 74 bp, Homo sapiens
cgccatggcttctggagccgagaaaaggggaagatagtgatgtactcagtataaatgcagatgcttatgacagc

SEQ ID NO: 492697 - DNA, 75 bp, Homo sapiens
cagctcccgtagggagccgtgggcgctcggtgcccgggccgggcagggctgtgcctgcgcccagaagcagctaca

SEQ ID NO: 492698 - DNA, 100 bp, Homo sapiens
tcttttgcctctttctctcaggctttcctacaactcatgcccagcagcagcaagcagcaggtattgctctcactaagccagacctgatcacctgtctgga

SEQ ID NO: 492699 - DNA, 82 bp, Homo sapiens
ccgggccacagcctggaggccgagcgcgagcagttcgacaagacccagcagcctcccgcgacgatgcccctcaacgttagct

SEQ ID NO: 492700 - DNA, 74 bp, Homo sapiens
gccccgcagccccccaacatcctgctcctgctcatggacgacgctccccatcaacccgggcagccgggatttaa

SEQ ID NO: 492701 - DNA, 83 bp, Homo sapiens
ctggatcatggctgccgcgccgccgctacgggaccgcctgagctttctacaccggagtccggcagcgtcttctcttgagggag

SEQ ID NO: 492702 - DNA, 75 bp, Homo sapiens
ggctgtttcagtagcaatgtccaagggattaaagcctgtggtttccacagaagcaccacctatcatatttgccac

SEQ ID NO: 492703 - DNA, 75 bp, Homo sapiens
cccgggtatcggtcgccgaccactccctgcacctaagcaaagcgaagatgacaaatggcctacagctgtgagagc

SEQ ID NO: 492704 - DNA, 82 bp, Homo sapiens
ggcgcgaagaggctggactcggattcgttgcctgagacaggtgatttggcttctgcacagttaggaggagcaccaaaccgat

SEQ ID NO: 492705 - DNA, 75 bp, Homo sapiens
tccatcatcatgtcgtcgcagaaggcgctggtgtcaggcaagccagcagagagtgaattttgaagattgcaccgg

SEQ ID NO: 492706 - DNA, 127 bp, Homo sapiens
ctatatccagaggtgccacccgaggagttccgcccctttctggcaaagatgagggggattcttaagaggacagtgctgctgtgagtttgacgaagtggacatcacctgcagtcagtccagagctgcc

SEQ ID NO: 492707 - DNA, 90 bp, Homo sapiens
acagtaccctattcacgctctgtgcttgtgccaagggatagctgggagtatggccaccctgctccacgatgcggtaatgaatccagcaga

SEQ ID NO: 492708 - DNA, 100 bp, Homo sapiens
caaacatgaaatccaatcctgctatccaggctgccattgacctcacagcgggggctgcaggtacaggtttgcagattccgccagcagcacagcaagctct

SEQ ID NO: 492709 - DNA, 74 bp, Homo sapiens
gtgcctctggcagtgacgaggacgaagtgtccgaggaccaaaagcacagctgatgttgcggtatccagatggaa

SEQ ID NO: 492710 - DNA, 80 bp, Homo sapiens
agttccggtacaagctcctgcgggccggcggggttcgtgctggccgtgggcagcgccgtctttgatgccatgttcaacgg

SEQ ID NO: 492711 - DNA, 75 bp, Homo sapiens
aaccagaaagagattgggtacttaatgtccagaagcactggaaatccatggatcattcacatggcttggacaaac

SEQ ID NO: 492712 - DNA, 90 bp, Homo sapiens
ggaagaatccactgatagaaatcatttccatcaataccggctccatcaagtatgatggtgaaggatgaatatgtgcatgactttgaggga

SEQ ID NO: 492713 - DNA, 135 bp, Homo sapiens
aagatgttcagcgtagagtcgctggagcgggcggagctgtgcgagagcctcctcacttggggttgtctcctcacagactatgagctccttgaaagagggaatcgtgtcttactcatctttgtatccccagtgtct

SEQ ID NO: 492714 - DNA, 75 bp, Homo sapiens
cctcagggcgcctcggaaaccaggagatcatgagaaactgttttggctgggcctacttcacctataccttctctg

SEQ ID NO: 492715 - DNA, 75 bp, Homo sapiens
gcctcccaaaatgttgggattacaggcttcccaggtggcttcccctcttcccctgggggctgatttccactgagc

SEQ ID NO: 492716 - DNA, 100 bp, Homo sapiens
acacacagctgaagaataagcttataacactgatggccctgggcccctggccttgaaaattgctgggcgaattgcagaattcttccctgatgcagtactt

SEQ ID NO: 492717 - DNA, 100 bp, Homo sapiens
atcgatgggcggcggaaaatagcctttgccatcactgccattaagcggtcacagagatctcagcatcatcaaggaccaactgaacgtgtccaacattgac

SEQ ID NO: 492718 - DNA, 100 bp, Homo sapiens
aaagcagtagctataatcaagtctgttggagaactatcagtaccagaaaaatacaaatctattcatcaaatcagaatgaccactgagcagtttacaggag

SEQ ID NO: 492719 - DNA, 99 bp, Homo sapiens
ataaaattgacttttgaagcaacaggtgtcatggagaaactccagctgggcccagagattctgcagcgggaaaatccaaggcttatttatgccaggctg

SEQ ID NO: 492720 - DNA, 101 bp, Homo sapiens
tgacgaccgaaacaagatgtcagtagttgagtccacgctccatgagaatgctgaacaccatccaaagcagcaaattgagattccttgatttggggaagagg

SEQ ID NO: 492721 - DNA, 75 bp, Homo sapiens
ggatcgctgtgatcgtcacttggtatcctggtcagatataggaggactggaaagtatcaaactgaagttggaaca

SEQ ID NO: 492722 - DNA, 100 bp, Homo sapiens
aaggactggtccgcgctgtccagttaactgcctgtatccatggatcagctgctcttctatacccaatgtattggcaacacatatacatcccagtgcttcc

SEQ ID NO: 492723 - DNA, 75 bp, Homo sapiens
tccgtctggatttccaaggaagaatttcctctgaagcaccgcagaaagatgaaggtcttagaatcattgattgga

SEQ ID NO: 492724 - DNA, 74 bp, Homo sapiens
gggaatcaccgacatgctcacagatgactccaatgatatgtgggaggaccaggaggaggaagaggaggaggagg

SEQ ID NO: 492725 - DNA, 88 bp, Homo sapiens
ttggaatattggtgggccagcaatcctcagacgcctcacttaggacaaaattcactcgtgaagtaacagacacacagatgccacttgt

SEQ ID NO: 492726 - DNA, 100 bp, Homo sapiens
ggggaggaggggtgctctctcctttgatcttctcttctggaagagatggaccaaaagcctctccagcaataatccctgaagaaatcaggggagaaacccc

SEQ ID NO: 492727 - DNA, 101 bp, Homo sapiens
gctgaaggttactttgctgcttgcacaacagatacaactatgaatagttctttgaacaacaccgatggacttcaggaacttgcctgtgggggcttaattta

SEQ ID NO: 492728 - DNA, 128 bp, Homo sapiens
gacctcttcattcccatgcagtttgggatcatccagaagcatctgaagaccatggatcacaaccggaaccgcaggcctccattgtgttccctcctccaggggcttctgaggagaatggcctgcctcac

SEQ ID NO: 492729 - DNA, 98 bp, Homo sapiens
gtcccatcggaggacctccctgccctgtataccgagggaacagtatctggagtccatctttcaccatcttctcctgagattgtactggaccgtgacca

SEQ ID NO: 492730 - DNA, 100 bp, Homo sapiens
ggatttgttaaggattccaagtaactcttatttggtggaggaactgcaatgtctggtggagaacagaaaccagagaggtactatgtgggtgtggacgttg

SEQ ID NO: 492731 - DNA, 100 bp, Homo sapiens
tggcgggagatgtcgaaccccgggacacgcaggaacggctccagcatcaagatccgtctgacagctgaacagatgggtaaggatggcaggggttatgtcc

SEQ ID NO: 492732 - DNA, 74 bp, Homo sapiens
attaccactaccaagaagggatctatcacctctgtacaggctgcagaagatgtcaatgttactttcgaagatca

SEQ ID NO: 492733 - DNA, 98 bp, Homo sapiens
tccgcgctggggcactgctgctcagcccccaacacctgagctcccaggaattacatgaacgacagccttcgcaccgacgtcttcgtgcggttccagcc

SEQ ID NO: 492734 - DNA, 100 bp, Homo sapiens
gccggagctgggcgcggattcgccgaggcaccgaggcactcagaggaggagaagaaggaagttgtggaagaggcagaaaatggaagagacgcccctgcta

SEQ ID NO: 492735 - DNA, 75 bp, Homo sapiens
gtcttccagagcgtgaagatcaagatcgaaagaagcttccggttctgaggtcctggaggtgccatttccctctct

SEQ ID NO: 492736 - DNA, 90 bp, Homo sapiens
cctattcgacagaactgatattttatattgaaatggatcctccaggccttccggagcagtactacagcctcacctggttcctgagcccca

SEQ ID NO: 492737 - DNA, 90 bp, Homo sapiens
tgggggagccagggatgaacgatatcgatcaggaagtgctcctgtcctctcagctgtggccaccgtcggcatcacgattggagtgctggc

SEQ ID NO: 492738 - DNA, 75 bp, Homo sapiens
caggaacctgctttctctcgatgaggataacatccctccagaagatgctatcatggtgaacttacttcagattgt

SEQ ID NO: 492739 - DNA, 75 bp, Homo sapiens
ctgagcgcgtccaggcctgacagctctgcggctcgggccctgaggtaaaatgtcggttccaggaccttaccaggc

SEQ ID NO: 492740 - DNA, 75 bp, Homo sapiens
tttgaactactgccggagcttctgccagatcaccggggaacccttgatccgtcgatcagatgataatgaaaaggc

SEQ ID NO: 492741 - DNA, 76 bp, Homo sapiens
acaatgtcggggatggacctccagatttccttactggatgtccccgagcagcggagcatggagtaccctaagctgt

SEQ ID NO: 492742 - DNA, 100 bp, Homo sapiens
atgccaaggaaaaactggagagcttcatcaaaaatagtgatagctttgataagaaatgcttccagactgcacacttttacttagaggacagtacatcccc

SEQ ID NO: 492743 - DNA, 100 bp, Homo sapiens
gaaggttcaagatgtaaagaagactattcagaaaaagatgattgacgctgctggacgtaaagaaagaagtgatgcactcaattctgcaatagataaaatg

SEQ ID NO: 492744 - DNA, 96 bp, Homo sapiens
tgcattgtgggttactggaggaacccgacatggattccacaggagatcatgaatcagacagataaaaatcaacaagaaatcccatcataccttaat

SEQ ID NO: 492745 - DNA, 75 bp, Homo sapiens
cagtgtcaagtgccagccctcccgcgtccaccaccgcagcgtcaaggtctccaccagctcctggccgggttcgag

SEQ ID NO: 492746 - DNA, 100 bp, Homo sapiens
gtctcgctccgtggccttagctgtgctcgcgctactctctctttctggcctggaggctatccagcgtctgccatcatggatgttctcgcagaagcaaatg

SEQ ID NO: 492747 - DNA, 100 bp, Homo sapiens
agcagcaagtcagggagcttaagatcggaagttgcacccatcaaatgggtcagattgccatcgtctcgtttcaaaattccactcccaaagtcattgagtg

SEQ ID NO: 492748 - DNA, 96 bp, Homo sapiens
ctgtttaccagattgctttctaaattagccagctggggttactttaaaaaacagacctccagcaggtgatggtgtcaggacccaacctcaatgaaa

SEQ ID NO: 492749 - DNA, 51 bp, Homo sapiens
atctgcatgccgctcaccgtagacgaggtcagtaacagatccaagagatgg

SEQ ID NO: 492750 - DNA, 98 bp, Homo sapiens
agaaattggcaaatttggggaaaaagtttgctaatccagactttacacaacctatctcagaagttgtagatgaagtaattcagaattgtcctattgat

SEQ ID NO: 492751 - DNA, 95 bp, Homo sapiens
aaaagatcccatagaaatgtttcattctggacagctggtaaaagtctgtgccccaatggttcgatattcaaagccgcaaaagataagtaccgtga

SEQ ID NO: 492752 - DNA, 75 bp, Homo sapiens
gaaaatccacctcgcagcttgtaaatctacaggagaaccaggtgcatcagcgcattgcggagctgaggaaagcag

SEQ ID NO: 492753 - DNA, 100 bp, Homo sapiens
tggtggttgaaagttttccttcttacagagatgtgactctgtttgaggttactcaaatgagtcgtccagacttgattctctttctgatgaaatacctgat

SEQ ID NO: 492754 - DNA, 90 bp, Homo sapiens
cgcggcgccgccacaagttgcgctgctcgcgacgaggggtttgttaaagttgttaagaataaggcctactttaagagataccaagtgaaa

SEQ ID NO: 492755 - DNA, 100 bp, Homo sapiens
cccacatcgtggtggaggcggcctctctggcagcagacatcagccacgcatctgaccttgttgtgtaaggcaaacattggtgggcaccgatcttcctgtt

SEQ ID NO: 492756 - DNA, 90 bp, Homo sapiens
agaaggagtgcttctaccagcccatgcccctgaaggcctcgctggagatcgagtaccaaatcgtcagtatttaaacagatcacatcatgc

SEQ ID NO: 492757 - DNA, 100 bp, Homo sapiens
atgccttggctgctctcagcccccaagctggttcccgctgtagcaaacgtccgcggcctctcaggtacccgaggattaataaagaatctttacttcctgt

SEQ ID NO: 492758 - DNA, 52 bp, Homo sapiens
accaccaagatgtctctaaatgagcgcagcagcagcagcagcagcagcagca

SEQ ID NO: 492759 - DNA, 75 bp, Homo sapiens
gcggcccggcgggcgactggacggccggacagaattcagcggggtgccaagtcgttttctgtgtgggttgagaga

SEQ ID NO: 492760 - DNA, 100 bp, Homo sapiens
acggctacaagaagcgggccgcatgcctgtgtttccgcagcgagagcgaggaggaggcctttgaactggccacaggtgactatttgtttgaacctcattc

SEQ ID NO: 492761 - DNA, 82 bp, Homo sapiens
tcagagattgagaatgtccatggatttgtttctcattctcatatttcaccaataaagatgatttgtcattaattcggaagaa

SEQ ID NO: 492762 - DNA, 75 bp, Homo sapiens
aaatggagcaaaaacattccaccattcaacaaaaggactacaggaatatgtggaagctgtctcttttcaacactt

SEQ ID NO: 492763 - DNA, 83 bp, Homo sapiens
gtgcgctcgatccagcaccatggggaagcgggacaatcgggtggatgcctttgtggaactgtacggccccagcatgcggcctc

SEQ ID NO: 492764 - DNA, 82 bp, Homo sapiens
tgccggcagctccaaccatgggaggccgcgtctttctcgcatcgatttcttccctgtgaaaacaagagcaaggccgtggagc

SEQ ID NO: 492765 - DNA, 100 bp, Homo sapiens
gtgccaccagaaggaagtgaggccaatgaagaactgcggcagaaatttgaggctcttgggaaagctggtgctgctgctgcctgattcccgccgacagacc

SEQ ID NO: 492766 - DNA, 74 bp, Homo sapiens
ccactatgggtgtggttgctgggatcttagtacaaaacgtgttaaagcctctgcacgatgctgttgagaacgat

SEQ ID NO: 492767 - DNA, 50 bp, Homo sapiens
cctacatttagcgcatcatgtgatccggaattaaacaaccaccatgtcga

SEQ ID NO: 492768 - DNA, 88 bp, Homo sapiens
agcctccagagtagacaagccctcaaggatgcccggtccccatcaccggcacacattgtcaggcgacaggaagaagggtattacagcc

SEQ ID NO: 492769 - DNA, 82 bp, Homo sapiens
cccgaagtgagcttctgcctttccttacagtttttcagaagaagtgaagtcaagatgaagaaccatttgcttttctggggag

SEQ ID NO: 492770 - DNA, 92 bp, Homo sapiens
gcagaaaccccgttgacaaggcactgctttttcatgacggtttttagaacttcagccataaaaatgggcagaattttccttgatcatatcgg

SEQ ID NO: 492771 - DNA, 82 bp, Homo sapiens
gcatgctcaaggaatgggctattaagggtgatcagcccatgacctaaacctccagacaaaataaaacggaaaatttgctaga

SEQ ID NO: 492772 - DNA, 101 bp, Homo sapiens
aatgacgtctgctgatgatttcttccaaggaaccaaggcggccctggctgggggaaccactatgatcaacatagggcctgattacattccaacagaggaag

SEQ ID NO: 492773 - DNA, 100 bp, Homo sapiens
tacacaaaccccaatctcagtggacaaggttggcagtggaatccctctgaccggccctcctttgctgaaatccaccaagcctttgaaacaatgttccagg

SEQ ID NO: 492774 - DNA, 100 bp, Homo sapiens
gacaagagctagaagataattccaatcatcttacaaaactggaaactgaggcatctaatatgaagacaactgcagtgacctgaactcagaactgcagagg

SEQ ID NO: 492775 - DNA, 100 bp, Homo sapiens
agagaagccaaacaaagacttggagagctgcagtgatgacgacaaccaggggtccaagtccccaaagatgtattgtccgaattgtaaagaacatcagcaa

SEQ ID NO: 492776 - DNA, 75 bp, Homo sapiens
aggtgccttacaactacaaccagctggaaggcagattcaagcagctgcaaggcagaagctcctcctggggtagag

SEQ ID NO: 492777 - DNA, 100 bp, Homo sapiens
ctgggagcctaggatccccgacagcccgttttacggagaagacttttactgtgaaattcctcggagctttcgtcacctgtccttctacattttcgataga

SEQ ID NO: 492778 - DNA, 100 bp, Homo sapiens
atgaacaggaagttgtggctgaggttcaggagagaagaccaagaggtcggagaagaggtagaaaatgtggcagaggccataaaggagaaaggcaaagagg

SEQ ID NO: 492779 - DNA, 50 bp, Homo sapiens
ctgctttcggagtacatgggcaatggcaccatgccggtggaaaggatgcg

SEQ ID NO: 492780 - DNA, 100 bp, Homo sapiens
caggaggctgtgcgggccccgctccgcttcgaatgggccctccctatcctgaagacattagctgagagtctggcaccttttaaaggtctgatcatcaatt

SEQ ID NO: 492781 - DNA, 82 bp, Homo sapiens
cggctgcggtggcggcgtttggatgattgtctctcggcggcggagtcggctcttgtcaggatggtgaagctgttcatcggaa

SEQ ID NO: 492782 - DNA, 50 bp, Homo sapiens
tgaccactgggatgcagtcaacctgcttcataaacaagcagatatgcaag

SEQ ID NO: 492783 - DNA, 101 bp, Homo sapiens
tgatctcggctgtcggagtgggtgtcctcaagaaagacaccattcgcttttcacccaagatgatttgatgtcttataaaactctgatgaaccatgatggct

SEQ ID NO: 492784 - DNA, 100 bp, Homo sapiens
agaaagaggaggggaggaggaggaggattcagggaataggagctggggagcccttctgcgccacagggccaattcctgtccccccagcagcatggcatcg

SEQ ID NO: 492785 - DNA, 100 bp, Homo sapiens
taaaatgcctgggaagatggtcgtgatccttggagcctcaaatatactttggataatgtttgcagcttatacactaaattatctgatcctgccaattggc

SEQ ID NO: 492786 - DNA, 100 bp, Homo sapiens
ggcctccccagccatgtggaactatgcagctgtcttctcctcagtgctggcgctctgactacccttcccaaagaaccacggccctctccctttactgttc

SEQ ID NO: 492787 - DNA, 87 bp, Homo sapiens
atgttctcggcagaccccaggcatatcctcctcttcatcctggagcacatcatggtgtggctgacaagattttgaaaaagaaagaat

SEQ ID NO: 492788 - DNA, 75 bp, Homo sapiens
agtagcattattatttggaggagttgatgagaaaggaccccagctgactcagaattcatgattgaagaaatgcag

SEQ ID NO: 492789 - DNA, 83 bp, Homo sapiens
caccaggcatctacatgggcagaccaactcagcccggaaacaaaactcatgctgtgccatcatgtgatgcagcctgccagagg

SEQ ID NO: 492790 - DNA, 75 bp, Homo sapiens
tcgggtggagtgtaggtcatatcgccgcgactgtgccctgtccacggtgcctcctgcatgtcctgctgccctgag

SEQ ID NO: 492791 - DNA, 85 bp, Homo sapiens
taaagtcgagtatctggtgaagtggaaaggatggcccccaaagtgccagaaccctgtggagcatcatgaactgggaagagtagct

SEQ ID NO: 492792 - DNA, 100 bp, Homo sapiens
ttctgctgctgaagtaatgcaatggtctcaatctctggaaaaacttcttgccaaccaaattgcttggaaaagatgctaattaatgaagaggagcaactac

SEQ ID NO: 492793 - DNA, 90 bp, Homo sapiens
gattggactgtgtcagaactattgaagaattagcaagagtcctcagaaaacattcagactgtggcacgtttcaggcaggattcctccttc

SEQ ID NO: 492794 - DNA, 75 bp, Homo sapiens
ggcaaatggattctgcagagtcagatgccgtgggggaaaagaccccctctccagccctgggggccctggatctcg

SEQ ID NO: 492795 - DNA, 100 bp, Homo sapiens
cggatggctgtcatgcttcctgaaggggaagatctcaatgaatgggttgcagttaacaggtggagagattcaaccagttagcgtgaaagttggagataaa

SEQ ID NO: 492796 - DNA, 83 bp, Homo sapiens
gatggcgcctgtgggcacagacaaggagctcagtgacctcctggacttcagcatgatgagtaacccgaagcccctagaggagt

SEQ ID NO: 492797 - DNA, 74 bp, Homo sapiens
cgatgatttactgaaatttgatgacctagatggaacacatgctctgatggtggttatcactaggctaaaactgg

SEQ ID NO: 492798 - DNA, 49 bp, Homo sapiens
gatactccaccagctgttgtgtcagattagcctgaggcctgctcagtcg

SEQ ID NO: 492799 - DNA, 101 bp, Homo sapiens
ccgctccagccgcccgcgggccagcgcaccggtcccccagcggcagccgagcccgcccgcgcgccgatatcatggaaatcaggacagtggcagttggaatt

SEQ ID NO: 492800 - DNA, 87 bp, Homo sapiens
aggtggcggcggcggcggagcgggagcgggtaccgggcgcgggcagagcgcggcggcgcgggtaagaatgattgatgttggctgata

SEQ ID NO: 492801 - DNA, 100 bp, Homo sapiens
ggcggcgcggaggcggctgaggtgcgagccgtctgcgggccaggcatcgacatccgcaacgactatcagcagctgaagcgcctggagaactgcacggtga

SEQ ID NO: 492802 - DNA, 100 bp, Homo sapiens
agaagagctgcttgactgtgagaccctcattgaccagtatttaaggatgctttcattggatttggaggaaatgtgatcaggcaacaagtcaaggataacg

SEQ ID NO: 492803 - DNA, 75 bp, Homo sapiens
aagcagaatgtgatttgcttgaagatatgagatctggcgcgagctcttctctcctctgcatgcacttaactttgg

SEQ ID NO: 492804 - DNA, 51 bp, Homo sapiens
ccagcatcaagatgatttatggtaataagctcagatcgtctgatagaagag

SEQ ID NO: 492805 - DNA, 100 bp, Homo sapiens
tgttttgcctgaatacatgatttaaacaagagatttccacagaagctgtctgcttttctgtggagactgcgggttgcagacaccagcagccccctattgc

SEQ ID NO: 492806 - DNA, 75 bp, Homo sapiens
agttcgagcactaatatttaagaaagaagatgttaactttcagttgctctaggtcgtaaccagcctttgaaaaag

SEQ ID NO: 492807 - DNA, 82 bp, Homo sapiens
acgctttacccgactctttgggccgttatctcacatgtacggagcgcaagaggacggcagcgtcggcgaaggtgacctgtcc

SEQ ID NO: 492808 - DNA, 83 bp, Homo sapiens
cccaccgggatggagaaggaggaggaatcggtatgggctacgtgagttcgtggtgattgcccctgctgcacacagtgacgctg

SEQ ID NO: 492809 - DNA, 98 bp, Homo sapiens
aagctccaaacttctttcaaaagtacaatgctgccgggccaccactctcggaggacgacaagctgcagggtgcagcctcccacgtgcccgagggcttt

SEQ ID NO: 492810 - DNA, 97 bp, Homo sapiens
gagatttgaaactggacaatgtattactggactctgaaggccacattaaactcactgactacggcatgtgtaaggagacgttgacatttagggatgt

SEQ ID NO: 492811 - DNA, 100 bp, Homo sapiens
gccgactgctgcctggtctgcaaagaagtcctttcaagtctctaggactggactcttcctaagcaagtccgctgctgtgacttactcgaagcctcgattg

SEQ ID NO: 492812 - DNA, 100 bp, Homo sapiens
cgaggcagtggaagaggccccccggaggaagaacgtgcaaaacgtgaggagctagagcgaatactggaagagaataaccgaaaaattgcagaagcacaag

SEQ ID NO: 492813 - DNA, 71 bp, Homo sapiens
attgcctacagcattttatgggacttgaagtttttgatgaggattttgcctaccattttacagtatttgtc

SEQ ID NO: 492814 - DNA, 88 bp, Homo sapiens
ggattccaagtaactcttatttggcggaggtttgacctacagaacccatctcgaatggatcgtaatgtggaaatgtttatgaacattg

SEQ ID NO: 492815 - DNA, 50 bp, Homo sapiens
aacctgacaattctgtcgtgtcccgagaaagatgctggtttcgagttttg

SEQ ID NO: 492816 - DNA, 75 bp, Homo sapiens
agtgaagaggtacaactggacctatgtatcagccgtgcacacagaagaacaagcccctgagctggaaaacctcac

SEQ ID NO: 492817 - DNA, 100 bp, Homo sapiens
gacgtggtgggaagagcaagaggaaaaagatgctatggacgtatggtgcaatggtaaaaaattggagacagcggtaagttgactatttgatgactctaag

SEQ ID NO: 492818 - DNA, 100 bp, Homo sapiens
aaaagcaggcaaatggagtcgttgggaatgtttccttaatgacaacaaaaaagggagtaatcctacccactgtaagagtcatgactcttgattgcagctg

SEQ ID NO: 492819 - DNA, 75 bp, Homo sapiens
ggcagcggcacctacggggacgtctataagatttgggtctcgctgtgctagaatattccgtctagttttgcagaa

SEQ ID NO: 492820 - DNA, 90 bp, Homo sapiens
cacactgggaaacatcattaaatcccaaaatgaagtttaatccctttgtgacttccgaccgaagcaagaatcgcaaaaggcatttcaatg

SEQ ID NO: 492821 - DNA, 100 bp, Homo sapiens
ctcggaacagcgcatcaaccggatcatgggctttcacaggcccgggagcggcgcgggaattgaatgatctggcacgggaccctccagcacagtgttcagc

SEQ ID NO: 492822 - DNA, 83 bp, Homo sapiens
caagttgcaagagattccaaccttccagccccttttgaaaggttttaaaatcaaagatgggaaaatcggagaaaattgccctt

SEQ ID NO: 492823 - DNA, 75 bp, Homo sapiens
aatacggaaaagaatggcagcggaaacgcagacactgaactttgggcctgaatgaaacctctgtagaggagcagg

SEQ ID NO: 492824 - DNA, 95 bp, Homo sapiens
ctgagggagatggaagttgagcaagagcagcggcgcagaaaggtggaggccgggaggacgaagaaataggaaggttgttgattactcacagtttc

SEQ ID NO: 492825 - DNA, 51 bp, Homo sapiens
caccaccggatcaacttcgacaaatacttcctggacaagatcgacgtgatc

SEQ ID NO: 492826 - DNA, 100 bp, Homo sapiens
ggagttgagtgatattgaccatgatggaatgcttgacagagatgagtttgcagttccattcgatgaggactatctaaaccatctcgagcctcccgtgaag

SEQ ID NO: 492827 - DNA, 97 bp, Homo sapiens
ctgacccggcgaagggagccgaccgggccctgggctggaggtaaaaccccacggtatgtgtaatcctcgaaattatagtgacacacctccaacttca

SEQ ID NO: 492828 - DNA, 50 bp, Homo sapiens
tgcagatgactccttttcccacccagacagcccacctgaggatattgacc

SEQ ID NO: 492829 - DNA, 87 bp, Homo sapiens
gcagctgagacggccttggccgggtgcagccaaagtcctgatctttcccgtggtacagcagttcacagaggcctttgttcaggccct

SEQ ID NO: 492830 - DNA, 99 bp, Homo sapiens
gtctggagaccatggagaccctcacggagctgggcgacgagctgaccctgggagacatcgacgggccacagccatctctgggagttagttttggaacgc

SEQ ID NO: 492831 - DNA, 74 bp, Homo sapiens
acttgatgaatataatccattctcggattctagaacaccatatcagcgggaacaagattggctgggagaagacg

SEQ ID NO: 492832 - DNA, 82 bp, Homo sapiens
cccagcccccaaggattctgggggaggcctcagtgtctcaatttaaaatggtgaattactcctatgatgaagatctggaaga

SEQ ID NO: 492833 - DNA, 100 bp, Homo sapiens
cggttccccggcccacagtgggggtgtgcaaacccgagagaactggggcaggaagatcccaacagtttgcgccataaatataactttatcgcggacgtgg

SEQ ID NO: 492834 - DNA, 100 bp, Homo sapiens
ctgaatacccgcgcgaccgtctggatccccgcccaggaagcccctctgaagcctcctcgccgccgtttctgagaagagcagcccgacggccatggaggct

SEQ ID NO: 492835 - DNA, 123 bp, Homo sapiens
cggggaggcagcgcgggatcccagcctcaggcgtgcgcggacggtgtgcggggccaattcctgtccccccagcagcatggcatcgtgtgctgaaccctctgagccctctgccccactgcccgc

SEQ ID NO: 492836 - DNA, 100 bp, Homo sapiens
gcaaaggtttcagcgtagtggcagacacgcccgagctccagagaatcaagaagacccaggaccagatcagtaacatctgggcggaccccggcaaatacgc

SEQ ID NO: 492837 - DNA, 100 bp, Homo sapiens
cttggtgctgacggcgtctacttggatgacctcacagacatggatcctgaagtggcggccctgtattttcccaaaaagcttgcttccggcgtcatggctc

SEQ ID NO: 492838 - DNA, 75 bp, Homo sapiens
tggagccgtctgcaaagtgtccccggcaagaaggcccagctgagagccagcctggaggttacccagcagcaggcc

SEQ ID NO: 492839 - DNA, 75 bp, Homo sapiens
caaggatttcagcaacaatgcctctgttcaaactcccagttggttgaatctggcgatgtggaacccatggatatg

SEQ ID NO: 492840 - DNA, 75 bp, Homo sapiens
cagtaccaaacacgattgttgtttcttggactgcagaaattggaagagctctccgtgtgaaatggtcccatctca

SEQ ID NO: 492841 - DNA, 96 bp, Homo sapiens
gagggagaaatgttttgtttgactccagtgttaagagaagaaatgaggacatatcagtatcgtctgacggttccatcctggccatcgccctgctga

SEQ ID NO: 492842 - DNA, 83 bp, Homo sapiens
cgacgaccgccccgcgtcatgcggctcctcggctggtgctgtccctttccccccaacacatcgcttgacatctgaagaagtat

SEQ ID NO: 492843 - DNA, 98 bp, Homo sapiens
cctccccctgaagattctgccgctgattgctatcacttctgcagaatccagtgggtgctggagaatctggtaaaagcaccattgtgaagcagatgagg

SEQ ID NO: 492844 - DNA, 82 bp, Homo sapiens
aaacaaactacccattttcttttttggaactcatgagacgaagaaggtagataatgactataatgcccttcgagaaagactc

SEQ ID NO: 492845 - DNA, 83 bp, Homo sapiens
caggcgagggtgcagagcctggagagcatgccccggccccctgagcaggaactgtggctgcaccatctgtcttcatcttcccg

SEQ ID NO: 492846 - DNA, 90 bp, Homo sapiens
cagagaggaaaacacaaaaaacaggataaaatcttatgattatgaggcatgggcaaaacttgatgtgatatctcttccaaatgcatgatg

SEQ ID NO: 492847 - DNA, 75 bp, Homo sapiens
ctaaccttctatgaggcagagatcaatcttcaggtacttataagacatttccaaagtcaagttaatgagctgcag

SEQ ID NO: 492848 - DNA, 82 bp, Homo sapiens
ctttaaatcttgagaaaagaagattgtctatcatgaaggaggctctgttcgaatctatgattttgctagcaaaactcctttg

SEQ ID NO: 492849 - DNA, 90 bp, Homo sapiens
agattcgcagtggtcgcttcttctccttggccggctgcctaccctccagactgtccgctatggctccaaggctgttacccgccaccgtcg

SEQ ID NO: 492850 - DNA, 75 bp, Homo sapiens
gaggagattctggggcagtatcaacggagtctccgggagtagcacagaagagggaggatgctgtttccaaagaag

SEQ ID NO: 492851 - DNA, 75 bp, Homo sapiens
actcggggagcagcaatgatctgttcacaaccgagatgagatatgccatccctccattcattatgaacactttgg

SEQ ID NO: 492852 - DNA, 83 bp, Homo sapiens
ggggacaagtacctttatgaaccagtgtatcccaaaatgtgacagtgatgataacatgggtgccaaaaatacttcaataggag

SEQ ID NO: 492853 - DNA, 83 bp, Homo sapiens
cttcgagtgacccgggtgccgaggagcgggaagagttgctgggacatgcaagaaagcacttcagccaagcagaagggagccag

SEQ ID NO: 492854 - DNA, 90 bp, Homo sapiens
gccctttccaattacagacttcacatcaagttcaaggagtctcttgttaatgtgatctttgacgagactctacagaagtgcctggactcc

SEQ ID NO: 492855 - DNA, 100 bp, Homo sapiens
agctttaaactctctccctgaagaaagttcgttttctagccaaggaaaatgtaacccaggacgctgaggacaacacagtctctttcctgcagcccaatgg

SEQ ID NO: 492856 - DNA, 98 bp, Homo sapiens
caaaagttgcacaaatacctaataaccagaacagaaagaaatgttgcagtatatgtgaagctgtggtctaccaatctagacaactcagtggcaagcat

SEQ ID NO: 492857 - DNA, 75 bp, Homo sapiens
cgggcatggtggtctggggcaacgcggaagtaatctatgccagcaattatgacaatgttagcagaccatgcagct

SEQ ID NO: 492858 - DNA, 75 bp, Homo sapiens
gacaaatccgcgatcccagtcatgcatatgaagactggcccatttgcagagcactccaaccagctgtggaacatc

SEQ ID NO: 492859 - DNA, 90 bp, Homo sapiens
gcgctggtcaccggggtctgcctggaattcagaagatcccgcggttgttggtgggtgccgccgacgggtacctgtacatgtacaacctgg

SEQ ID NO: 492860 - DNA, 96 bp, Homo sapiens
cccgtattctcagagtaaaagttgtttctggaattgatctcgccaaaaaggacatctttggagccagaaataagcgggttttgaaaacaaaaaaaa

SEQ ID NO: 492861 - DNA, 83 bp, Homo sapiens
accaagggcctccgtctggatttccaaggaagaatttcctctgaagcaccggtggccatggtggaggtgcagctggagagtga

SEQ ID NO: 492862 - DNA, 96 bp, Homo sapiens
tgatcaaggagctggggctgcggctgctctatgctgcatctgtccgatctttcctgtttcccccactccattcccttcctatccatcccacagcca

SEQ ID NO: 492863 - DNA, 98 bp, Homo sapiens
cgcctcaggcacctcggcccggccaccccacgtcatgctgcagcgccgcagagatcatggctgtcctctttttccacaccatgcgctacaagtcccag

SEQ ID NO: 492864 - DNA, 75 bp, Homo sapiens
acgcctggtccccgcgtggagtctttactcaaaacagtggaagatagatgataagcctgtaaaaattgacaagtg

SEQ ID NO: 492865 - DNA, 75 bp, Homo sapiens
tacagccccgacgaacatttctgggtgacactcaacaggattcccgaagttcatctggacccctaccgaacatgg

SEQ ID NO: 492866 - DNA, 99 bp, Homo sapiens
ccagcactatgttgaataagagtggtgagagcagatatcctgccttgttcccggtcttagggggccccccaggttcgcctaatagtcttggctacttcc

SEQ ID NO: 492867 - DNA, 83 bp, Homo sapiens
ttgggcgggggatgtgagcgctgagcccttggcagccacacccactcgcccgggtctatggccacggtcggagagtggtcctg

SEQ ID NO: 492868 - DNA, 90 bp, Homo sapiens
tttaaacagaaggtgaacctctgagtgtctttggtgcaacactaacaaggcttgtctggactacccagttacaagcgtcttgccaccggc

SEQ ID NO: 492869 - DNA, 98 bp, Homo sapiens
ctttcttcctccgcacggatgctgagagtgttacagaacatcctggacactgaaaaagaatatgctaaagaacttcagtctcttcttgttacttactt

SEQ ID NO: 492870 - DNA, 75 bp, Homo sapiens
atggcatgcatgatccattagggaggaccgtctgcacaaagtggaagagaaagccaatacccacctcctcttggg

SEQ ID NO: 492871 - DNA, 51 bp, Homo sapiens
tgctccgccccagacctgtcggcgaaaggagatggggttttgccgtgttgc

SEQ ID NO: 492872 - DNA, 75 bp, Homo sapiens
gataagtcgaaggggaaggcgcctgaagaggacgaagtctgcagatctccaggggagcccaccagcctagtcaac

SEQ ID NO: 492873 - DNA, 50 bp, Homo sapiens
cagaggtggaggcgctttgaaaggtaactaggatttctacctcaaccgcg

SEQ ID NO: 492874 - DNA, 100 bp, Homo sapiens
ctattagagattgtgaagaagaatttcgatctccgccctggggtcattgtcaggatcaagccagccccgtaccccatgggaagcagccatgcttccgcca

SEQ ID NO: 492875 - DNA, 99 bp, Homo sapiens
acctgactgtggagatggcggctcagaagataaacgaggggctggaacacctcgccaaagcagagaaatactggcccccaagaggaccctttccaagtc

SEQ ID NO: 492876 - DNA, 90 bp, Homo sapiens
tgagggagcgcgggggccgcctcggtgctgctgccccgcgggtgctgaaaactgtcaagggaatgggtactgttcaaaaaggaatgcccc

SEQ ID NO: 492877 - DNA, 100 bp, Homo sapiens
cactcatggcggtcagcactgtggtcctccaggccttcggcaagtaccgggatggggactttgaggtgccttcaccagggatggaagaggcaggctgcag

SEQ ID NO: 492878 - DNA, 75 bp, Homo sapiens
ttctcatgcaaaaggaatcgtgctggaaaaagtgaactgtggctgcaccatctgtcttcatcttcccgccatctg

SEQ ID NO: 492879 - DNA, 100 bp, Homo sapiens
cataccgggagatggagcatttgagacagactgcttttcaggaagccttggacgctgcaggtgataaacttgtagtagttgacttctcagccacgtggtg

SEQ ID NO: 492880 - DNA, 82 bp, Homo sapiens
ggggagccaggcagtcagccgcagcaccgaggtgaaggtggtctcaccaggtgaagctgtgtgactttggctttgctcgcat

SEQ ID NO: 492881 - DNA, 50 bp, Homo sapiens
caagatctttgatgaaattttggagaaaagaaaccttgtttattccctgt

SEQ ID NO: 492882 - DNA, 134 bp, Homo sapiens
ggtacgaaatggaagatgggaaagttattgaacggctgggccagagcgtggttgctgaccagttgaaaggtttagcttcttctcccgagataagaagcgcctggccaacacacagagaaacgtgcacatccagg

SEQ ID NO: 492883 - DNA, 100 bp, Homo sapiens
aagcaaggtacctgcaggacccatttgtgtccattgatctcttggagcagctggggatcatgtttcaaccctgtggcaccaacaattatgatgaaatttc

SEQ ID NO: 492884 - DNA, 75 bp, Homo sapiens
tgtggattctgctcctgctgtcgctctaccctgggctgtctatttgaccgcaggctctgctctcacctggaagtc

SEQ ID NO: 492885 - DNA, 97 bp, Homo sapiens
gttgacctggtcaagggcgggcactggtggaaggcgctgattcccagttctcaggatgtacagttacccagcacgtgtacctcctcctcctcctatt

SEQ ID NO: 492886 - DNA, 82 bp, Homo sapiens
aaggctctccttgcagctgcttagacgctggatttttttcgggtagtggaaaaccagtcgtccctcatggaccttgctgacg

SEQ ID NO: 492887 - DNA, 90 bp, Homo sapiens
agcagtgatgcaggctgctgcgaactcagcacaaagcagcctctccccaccggtcactgttagcctcgagtttgaccctcaacatcccca

SEQ ID NO: 492888 - DNA, 98 bp, Homo sapiens
gcatggccagccgaaccagctctgagatgagttgggtagatctgaacatccctgataccccagaagccccaccatggctgcaatccgaaagaagctgg

SEQ ID NO: 492889 - DNA, 96 bp, Homo sapiens
tgatggatgaggtggtgctgacaatcgagcaaggaaacctgggctgtacaagaagcatgatgccagcatctgcttctggtgacaacctcaagaagt

SEQ ID NO: 492890 - DNA, 50 bp, Homo sapiens
ttggttaaaacctgacacttttaacagacggaatcagtccccaatgcctg

SEQ ID NO: 492891 - DNA, 83 bp, Homo sapiens
ctgacctcgctgtacgccgagcacccaggcgactgcctcatcttcaaggtgtaccttccggtttcccagcacggccatcaaga

SEQ ID NO: 492892 - DNA, 83 bp, Homo sapiens
agaagatgaacccacagatttgtgagatggaagattttcgaggtatagcagaagaatcatttccaagctttctcaccaattca

SEQ ID NO: 492893 - DNA, 75 bp, Homo sapiens
ttcacaccccattctcaaaaacaaagagtatcatcaacgggaagtgagagagcgtcctcttcactacaaggaaaa

SEQ ID NO: 492894 - DNA, 96 bp, Homo sapiens
gatgtggtgaagaccacgccctgtgcacgcttggaatgctggatcgatttggagcaagaggtggtggtggccttcccccgaagaaatttggtaatc

SEQ ID NO: 492895 - DNA, 100 bp, Homo sapiens
ttaacagcccccttctcagttttcctggatctttccaattaaagatgtacccctggagactgatgaccttaccacttggctctatcagcggtttgttgaa

SEQ ID NO: 492896 - DNA, 82 bp, Homo sapiens
cccaggctcaagcagtcctaccatgtcagccttcccagtagctgggaccacagggaagcatgctagagtgaaagaaagagag

SEQ ID NO: 492897 - DNA, 88 bp, Homo sapiens
tgactacgtctttgactggaacatgctgaaattcgctagcttgtcactttctgcaaaggtttccctcagggagcctcctgctgccagg

SEQ ID NO: 492898 - DNA, 82 bp, Homo sapiens
tacctctggccccgagatcagaatgccggctatttgctttctagaagagaaggccaagcagggtctcctgaaaagcctctct

SEQ ID NO: 492899 - DNA, 74 bp, Homo sapiens
cgggctccgggaaaactacactggccaggtggggcaggagaccctgtaggaggaccccgggccgcaggcccctg

SEQ ID NO: 492900 - DNA, 100 bp, Homo sapiens
ggcagagacaacgtgtgtaccccaagtgcacatggctgaccacccctaaaagcacctggccccgctacagcaaaccagggtcctctgaaggagttcaaag

SEQ ID NO: 492901 - DNA, 73 bp, Homo sapiens
cagtggtcgcttcttctccttggtattaaaactgccttcaccagaaaatgtggggagacagctttcattgcac

SEQ ID NO: 492902 - DNA, 98 bp, Homo sapiens
gtggggccgcgcaggcaaggacaaggccacagagtcggggtcttcacgccgcttacaaacacgcagatggcaagaagattgatggcaggagggtcctt

SEQ ID NO: 492903 - DNA, 82 bp, Homo sapiens
agaaaaagaaggtgacaggcgttgagaccaccgaagggaacccatggctaggtgaagttctccatctacctggagtacctac

SEQ ID NO: 492904 - DNA, 82 bp, Homo sapiens
gcgcctatggtcggcctccgacagcgctccggagggaccgggggagctcccaggcgcccggacaatgcagatcttcgtgaag

SEQ ID NO: 492905 - DNA, 100 bp, Homo sapiens
cttctgtatcttcatggtgcggctcatcttcgagagcagtctctggtcccagcccaccccatggcccctcccagtcccagcaccaccagcagtaataaca

SEQ ID NO: 492906 - DNA, 75 bp, Homo sapiens
cgttggatatccacaccatccttctcgctgcaggatgatgtctaccgtagaaaagcctcagaaagacagtatcag

SEQ ID NO: 492907 - DNA, 83 bp, Homo sapiens
ctcggatgcccagaacctgtaggccgcaccgtggacttgttcttaatcgaggggctgtgtaaatgagtatggaagattatgat

SEQ ID NO: 492908 - DNA, 85 bp, Homo sapiens
atgtaacaaatgtgatgacaagaaggagagatctctgctgcctgcattgaggggaaactgactggacattctttccacatgggct

SEQ ID NO: 492909 - DNA, 83 bp, Homo sapiens
agaccctcgacctccagtgcagttcccaagtggattttgcaaatcgggaaagtcagctggctttttatcactgcatggagaaa

SEQ ID NO: 492910 - DNA, 90 bp, Homo sapiens
cacaacagccaaccaacgattcagctcaccagcgccatcgtcaggaaattcagttcatgaagataagaagtttcttgacaaatacatgcc

SEQ ID NO: 492911 - DNA, 88 bp, Homo sapiens
atcattgatgtggtgcgatcggcatttattgaaatggcaaccacagaggatgctcaggccgcagtggattattacacaaccacaccag

SEQ ID NO: 492912 - DNA, 89 bp, Homo sapiens
gaccaggtgaatccagagctccatgacttcatgcagaggttgctaggaagaggctcaatgtttgtgttttcaccagatcagtttcagag

SEQ ID NO: 492913 - DNA, 96 bp, Homo sapiens
ggcagctcttccagacgctgagtcttcgggaattctctattatcaagtcctaaattttggaatgattgtctcatcggcactaatgatctggaaggg

SEQ ID NO: 492914 - DNA, 100 bp, Homo sapiens
ctgagcgagaagaaaatcaagaagctgaatttccaggccttcgccgagctgtgcaggttgcacttcccccagctggccctgaggcggaggctggggcagc

SEQ ID NO: 492915 - DNA, 75 bp, Homo sapiens
ttccacttcaaggagacaacggccacacactgtgggggtaagaaggtggatggctctgtaaatgcctatgccata

SEQ ID NO: 492916 - DNA, 82 bp, Homo sapiens
ccgagatgccgggggagcggggccttccacaccccctccgtgggtgtgtgtgtggacgaatgtggaacctcgctctgtggct

SEQ ID NO: 492917 - DNA, 100 bp, Homo sapiens
agtctggaaagctttaggagttcacagtgaaagaccacagcaagattctttcattcgtctcctcctagcctgggggaccaggctcgaactgaccctggac

SEQ ID NO: 492918 - DNA, 97 bp, Homo sapiens
agccacagatgtgaagtccacactggcagaaattgaggactggcttgataaattaatgcagctgactgaagaggtttcggaatgagccaaaaggtgg

SEQ ID NO: 492919 - DNA, 100 bp, Homo sapiens
tctggagcaaggaaaagagccctggaatatgaagagacacgagatggcagccaaacccccagcatggcggacaccgacctgttcatggaatgtgaggagg

SEQ ID NO: 492920 - DNA, 51 bp, Homo sapiens
ggcggaagccttcgtctcccagattgcaggcagaaatactcagtgtcctca

SEQ ID NO: 492921 - DNA, 75 bp, Homo sapiens
gagaagaaatagttacctatgatcgttcggacaagtggacctccctagaaagaaaactgtttaacaaagcactag

SEQ ID NO: 492922 - DNA, 100 bp, Homo sapiens
cccaagaagaataagcacaagagaaagaaggttaagctggctgtcctgaaatattataaggtggtttgtgatgaaaatggttccaagggctatggatttg

SEQ ID NO: 492923 - DNA, 102 bp, Homo sapiens
tccaggggaacaatgaggcctacgcagagctcatcgtccttgactaccagtccctgcagatcggaggcctcgtcatcgccgggatcctcttcatcctgggca

SEQ ID NO: 492924 - DNA, 100 bp, Homo sapiens
ggaccgcccaaccccaaaagagccaaactcagctcgcccggtttctcggcgaatgacagcacagaccttcacggcatggtgcaactcccacctgcggaag

SEQ ID NO: 492925 - DNA, 100 bp, Homo sapiens
cttagcggcacccacacacagcctactttccaagcggagccatgtctggtaacggcaatgcggctgcaacggcggacttatcaaactggtttcaaagcac

SEQ ID NO: 492926 - DNA, 83 bp, Homo sapiens
ctcaggtcctcgggggcggcggccacgccaaggacggggttacgactcactgattaaaaagagggactttttcaaatactttg

SEQ ID NO: 492927 - DNA, 100 bp, Homo sapiens
gagaaaatgggaagatgatcttaaaaaaaatagctcagttaatgaaggatcaacgtatcataaaagacttcacagagaatgcagttgtcttgacttcagg

SEQ ID NO: 492928 - DNA, 83 bp, Homo sapiens
cgattgtgtaatggctgaaattgagaaattggggcagaagtatcgagtggctctaagatccagctccaggtcccacaggggct

SEQ ID NO: 492929 - DNA, 100 bp, Homo sapiens
ccgtcagcactcagcgcgggccgaagtccccacgagaagaagaagaagaggcggtcccggtcgcggaccaagtccaaggccaggtctcagtcggtgtcac

SEQ ID NO: 492930 - DNA, 75 bp, Homo sapiens
ttcccctggcgcggactctggcaccaacaaaactatctctttgagatgcgacctaaagtcatgtggcacctcctt

SEQ ID NO: 492931 - DNA, 83 bp, Homo sapiens
ctcaattacacttcgactctcaaagcaataccaggatagctgttgtttcagagaaagcaatggctgccatccggaagaaactg

SEQ ID NO: 492932 - DNA, 50 bp, Homo sapiens
ccgcgggatacgcctcagcgcggattgacttctaaggactcttggtacat

SEQ ID NO: 492933 - DNA, 100 bp, Homo sapiens
cttctgccaactcttcaccctcaccaaggggggcaggttttacatcactggaatcttccaaattcttgctgacttcttccagagcctgcaatttcttcaa

SEQ ID NO: 492934 - DNA, 100 bp, Homo sapiens
agagagttaacttctgtttacatggaactcagacatctgcaaatcatggtatggcacagtcacaagggtgggtgaaaagatacatcaaggccttttgtaa

SEQ ID NO: 492935 - DNA, 100 bp, Homo sapiens
cgaggaggagcacccatcggtgacgctcttccgccagtacctgcgtatccgcactgtccagcccaagcctgactatgcccgtcaccacttccccagcctc

SEQ ID NO: 492936 - DNA, 93 bp, Homo sapiens
agggaaattgtcattaatgagtcaagaaactgctcatttatggtgctggagaatctggtaaaagcaccattgtgaagcagatgaggatcctgc

SEQ ID NO: 492937 - DNA, 100 bp, Homo sapiens
cttttaagcctatactttctaccagaagcttgaagggtttggttaagcgccatcatgaccgggtcctataacaacttcttcaggatgtttgatagagaca

SEQ ID NO: 492938 - DNA, 100 bp, Homo sapiens
taaagtgttacatgacagatgtatgagattttctggcatccttaaatcttgtgtcaaggattggttataatataaccagaaaccatgacggcggctgaga

SEQ ID NO: 492939 - DNA, 76 bp, Homo sapiens
cgcacctccactccatcctgaaggctaccaactacaatggaagcgtcagcccccgtagcacctctgttaccacgac

SEQ ID NO: 492940 - DNA, 100 bp, Homo sapiens
caagaccgaattcagaaggatatcgacgtcgtgatccagaagtccagagctgaggactgcctgtttgcaggttctccagcatttggctcaaggccccaag

SEQ ID NO: 492941 - DNA, 99 bp, Homo sapiens
cggagccgcgccccaccccgccagctccagagccacgtacgtactatactggcaattgctggagaagattttgcaattgttgcttctgatactcgattg

SEQ ID NO: 492942 - DNA, 80 bp, Homo sapiens
gctgaagaagaagaggaagtagccaaagagcaactaactgatgctgacaccaaagacctgagcatgcagaattccgaggg

SEQ ID NO: 492943 - DNA, 75 bp, Homo sapiens
atttatattttgcttgccgagatgatcgggagcgtttttgtgaaaatgaacttagtgatttggcccgtgaccctc

SEQ ID NO: 492944 - DNA, 74 bp, Homo sapiens
gaggaatcagaaacctgaagttagaaaggctcaacgagaacaagctatcaggagttttgagagcaaaatgacaa

SEQ ID NO: 492945 - DNA, 98 bp, Homo sapiens
ggatgacgtggtggccgggggcggaggtgccagcgatcccgaggacaggtctgggcaataggagtgaaacatccacatctgataacacagaaacttac

SEQ ID NO: 492946 - DNA, 98 bp, Homo sapiens
tggacgccatcgtcaacgccgaacccttaggagaaatcttgagagtggacagcaattgtgaagatcgccagagagttctgtgtttcatcaccgccgaa

SEQ ID NO: 492947 - DNA, 129 bp, Homo sapiens
gtctactctgtcgctcttgtgccctagcaccccgagaaccgtcagtttgagccagatgaaaaagcttgtggtgaaggggggcaaaaaaaagaagcaagttctgaagttcactcttgattgcacccaccc

SEQ ID NO: 492948 - DNA, 83 bp, Homo sapiens
gacaagaaccgactggaccccacgtggcaggagatgctgaaccatgctacctgcaaggttttgggatttgagattgacgcggt

SEQ ID NO: 492949 - DNA, 100 bp, Homo sapiens
atagaatgtggtggtgcctatgtgaaactgctttctaaaacaccagaactcaacctgctttacatgacttcaagggaaataaggctgagacaaaagatga

SEQ ID NO: 492950 - DNA, 86 bp, Homo sapiens
aaaaagacgaaagaagaagaagagcaaagggccttctgcaggtgtcatggagaaactccagctgggcccagagattctgcagcggg

SEQ ID NO: 492951 - DNA, 100 bp, Homo sapiens
cctccccagccatgtggaactcatgacgacagagatgatggtgtggattattgggccaaaagaggaagaggtcgtggtacttttcaacgtggcagagggc

SEQ ID NO: 492952 - DNA, 102 bp, Homo sapiens
agcccatggtcatcgctggccagacagaaccacaccttcatcaagcggtccgaggtggaagaagtggattttgccggctggttgtgtaaaaccctgcggctg

SEQ ID NO: 492953 - DNA, 98 bp, Homo sapiens
agcggacggctgcatttacggggtctcccggagggccagagtcgggagtttgcctggcgtgatcctgagttgcctgaggtcattcacatgcttcagca

SEQ ID NO: 492954 - DNA, 100 bp, Homo sapiens
tcacggcaagtggtgaaccagttcccatttctgaagaatctgaagagctggatcagaagacattcagcattccccgtccagagtctaagcctgaatctca

SEQ ID NO: 492955 - DNA, 76 bp, Homo sapiens
ccgcggcggagccggaggaagctgatggtcatcttttccaactgtggcggggccttcgtgggcccgcgatgccagg

SEQ ID NO: 492956 - DNA, 80 bp, Homo sapiens
atcctcattgctactgccctctgcgctcctgcatctgcctccccattgttctaagaacggaagcatctgggctggatgga

SEQ ID NO: 492957 - DNA, 75 bp, Homo sapiens
aattttctttctcagaaagcagaggctcagagcttggagacagacgattaatactgaggaacacgtggatgcagc

SEQ ID NO: 492958 - DNA, 100 bp, Homo sapiens
ttcaagaatacaatcttgtactgtgatgcagatccatccgccctagcaaaatatgttctggctttggtaaagaaagacaaaagtgaaaaagagttaaagg

SEQ ID NO: 492959 - DNA, 74 bp, Homo sapiens
ggcattttagatctaattcaattttccaagagataacttcaccaagatgtccagtgataggcaaaggtccgatg

SEQ ID NO: 492960 - DNA, 82 bp, Homo sapiens
tatactcctcccagtgacgggtctggagtgcgtgggggaccggctgttggcggccccagtggacaggaaagctaaggcctca

SEQ ID NO: 492961 - DNA, 101 bp, Homo sapiens
gttcgctgcccagaagaagggaaggcgcgagtgaggaaaggaggtactgtaggcaaatacgccatgcgagacctagtccacaggcttccaggagggaacaa

SEQ ID NO: 492962 - DNA, 82 bp, Homo sapiens
cagaaacaaggtcgtcggctggcggagcggcttcttcttggacacttaatgattgttggcaagaaatgtgctgctgatctgg

SEQ ID NO: 492963 - DNA, 100 bp, Homo sapiens
gacagccgctcattaccttgcagtatttttctctggaaatccttgtaatcttgaaggaatggacctcaaagttactggagttggctataatcaatttggg

SEQ ID NO: 492964 - DNA, 117 bp, Homo sapiens
ttgctgtcctcctggagtgcctcgagagccccggctccagccccacgaatcgttgcagtgtgccagtagatcaggcctctgagtcactgctgaaaagcaaagcctgctttggagctg

SEQ ID NO: 492965 - DNA, 122 bp, Homo sapiens
tgctgctccaccacgtggtcactctcatcctcatcgtctcctcctacgccttccggacagtttattctgcgttgtagcagcatttggctgtttctactactgaatgaatctttgaaaagctg

SEQ ID NO: 492966 - DNA, 98 bp, Homo sapiens
ttcttttcatgtaccaagtcttgaagagcttgctggaggttccccacattggcagacaaaattagaagcggcacagaatgttctcttatgtaaagaaa

SEQ ID NO: 492967 - DNA, 50 bp, Homo sapiens
acttcaggaacctgctgtcagtggacagaccatggattcttacagtgcac

SEQ ID NO: 492968 - DNA, 73 bp, Homo sapiens
aaacatgcagattatatcgcatcctatggctcaaagaaagatgattatccacaagtatatggttatgatgact

SEQ ID NO: 492969 - DNA, 100 bp, Homo sapiens
cgggaaatcgggctgaagcgactgagtccgcgatggaggtatcagacttggtgataattctgaattatgaccgtgctgtagaagcttttgcaaaaggcgg

SEQ ID NO: 492970 - DNA, 100 bp, Homo sapiens
tgctgtgtgcggtgctgctgagcttggcctcggcgtcctcggtgtaaacaggaacatcgataagtagtgtaaaaacttgcacaatgaaatccgaagccaa

SEQ ID NO: 492971 - DNA, 50 bp, Homo sapiens
ctcagtggctcaacaggctgaagggagggtgcagagcctccagctccacc

SEQ ID NO: 492972 - DNA, 110 bp, Homo sapiens
agaggatctggtgtaccaggcgaagctggccgagcaggctgagcgatacgacgaccatggtgaatccgggcagcagctcgcagccgcccccggtgacggccggctccctc

SEQ ID NO: 492973 - DNA, 100 bp, Homo sapiens
tgtatgtaccaaatgttccagaaggttctgtgagtatgtccgtggttcagaccctgtattaaagcttttggacgacaatgggaacattgctgaagaactg

SEQ ID NO: 492974 - DNA, 75 bp, Homo sapiens
cgttgacctgccccttgtcctggccccgcgtcgagggcgaggcccccagcagtgagactggcacatccctggaca

SEQ ID NO: 492975 - DNA, 100 bp, Homo sapiens
cataatctcaaaacaaaatcaagcaaatttggagcaaagaaagttgctgaaaatgtcaaggcatgaaatccaagctggtgaatgagcaacaagaaagcag

SEQ ID NO: 492976 - DNA, 100 bp, Homo sapiens
agaaatactttatactcttggactacatctttctcgggctcagtgagaaagatcagtctaaagaaaaggagaagaaagtgaaaaaaacaattccttcctg

SEQ ID NO: 492977 - DNA, 152 bp, Homo sapiens
tttttggaagtcctaggactgatctccaggaccagcactcttctcccagcccttagggtcctgctcggccaagtttcagagactcctccactctctgggaatgacacggactccctctcctgcgacagtggcagttcggcaactagcactcc

SEQ ID NO: 492978 - DNA, 82 bp, Homo sapiens
aagcctacgccctggggctggacaccgtgtttcccattaaacactaccaggacaaaatcaggccttacatccagctgccatc

SEQ ID NO: 492979 - DNA, 105 bp, Homo sapiens
ggggataaagatcccccgccgccggcccatgaggatattgccgtgaaaggcttcccagctggcgtgtatgttgtaaagagagttcttcagcttcagcgtcatcat

SEQ ID NO: 492980 - DNA, 75 bp, Homo sapiens
ggtggtggagtgtagagatatagttggcaacctcactgagttagaatcagagggagaaaactggttgtcctggat

SEQ ID NO: 492981 - DNA, 97 bp, Homo sapiens
aactggtgctgatggctcccttggcgaaggagtctgtttttcaacccaggaaggtcatgtaatgtttgcagaaataaaaatggagaatggaaagtca

SEQ ID NO: 492982 - DNA, 74 bp, Homo sapiens
gggaagtgtaccgctcctaccgccagctgcggacccagggctttggagccaaagtggaacaggtgaagttcgat

SEQ ID NO: 492983 - DNA, 96 bp, Homo sapiens
ttattattgctggaaatgatcaacaaaagaagaagtatttggggagaatgactgaggagccattgatgtgtaaggtggtcttctgccctgttaaag

SEQ ID NO: 492984 - DNA, 88 bp, Homo sapiens
ggccggcggcggcggcggcggcggcggcggcgcaggtctcggcgcggaagatggccggcggcgtggacggccccatcgggatcccgtt

SEQ ID NO: 492985 - DNA, 86 bp, Homo sapiens
ccggcacgcgactccccccgggcccaaaacaatgcagatcttcgtgaagactctgactggtaagaccatcaccctcgaggttgagc

SEQ ID NO: 492986 - DNA, 100 bp, Homo sapiens
gcccttgtggcgaatggggctcacgtcgatacgccctgcatgtatacaatgaagtgatgagtgttggccagaaatacggaatccggaatgctgggtatta

SEQ ID NO: 492987 - DNA, 80 bp, Homo sapiens
gtcggtgttgagcacggcgagcagtctcaggcctttagtgatgatgaccaaactagagtcagaacgaatactagcatcag

SEQ ID NO: 492988 - DNA, 97 bp, Homo sapiens
ggaccatcgccggagcctgaggacacttctctgtcgtcacagttagttggtgcttcccgtgctgctgttgatgctggctttgttcccaatgacatgc

SEQ ID NO: 492989 - DNA, 82 bp, Homo sapiens
tccaagctccgcaagctggaggcctcgggcaaggggccagggactggtgattgcagctggaagtgcccatgaccgagctggc

SEQ ID NO: 492990 - DNA, 82 bp, Homo sapiens
tcacatctatgccatcacagacaccgcctacaggagtatgatgcaaggcctcagagaaccatggctactgccaagggaatcg

SEQ ID NO: 492991 - DNA, 89 bp, Homo sapiens
ctctgccaccgaggaattggccttctctagaagactcttatttgcttgtaaatgcatcacgaagaggcagcccagaatgaagaaagcaa

SEQ ID NO: 492992 - DNA, 75 bp, Homo sapiens
actcctcgccatggctcagctccaaacacgcttctacactgataacaagaataggtgagtcaacacaagatggca

SEQ ID NO: 492993 - DNA, 83 bp, Homo sapiens
ttttgaaggctatatctgaagctcaagaatccgtaacaaaaacaactaactactctacagcatccggtgaaagacagagatca

SEQ ID NO: 492994 - DNA, 75 bp, Homo sapiens
cgcgcggcgccgggcgctgactgaggagatcatgaatcagacagataaaaatcaacaagaaatcccatcatacct

SEQ ID NO: 492995 - DNA, 74 bp, Homo sapiens
cctgacctcttacttcctgtgggccctgtgccctggtggcagcccccagcaccaggacctcgctgggcagctgg

SEQ ID NO: 492996 - DNA, 100 bp, Homo sapiens
ggcgcggggcggtcggctgcggtggcggcgtttggatgattgtctctcggcggcggagtcgtatctggagtccatctttcaccatcttctcctgagattg

SEQ ID NO: 492997 - DNA, 100 bp, Homo sapiens
agctgaggacacacccaggaaaagactcaggacggacaagcacagtcttcggaaggatctgcccaataacatgattcatcaggtgccaattaaatccctc

SEQ ID NO: 492998 - DNA, 82 bp, Homo sapiens
cagcaagcggggccggtggcgcccgtgtcggagaccccgcgccggaccctgaggcagcgagggctgcttgctctcggtgact

SEQ ID NO: 492999 - DNA, 121 bp, Homo sapiens
gggaagttaatgtttacggcgaagtctactcaacgtttccaagaaactgccaagttttggaccttatctggaacagcgcaagaaaatcatagcagaaaacaagattagactgaaagaacaa

SEQ ID NO: 493000 - DNA, 100 bp, Homo sapiens
gttttggtacaccattgtcaccatgaccacactggggatctgcctacaaactggtttgctactttaccaactggtcccaggaccggcaggaaccaggaaa

SEQ ID NO: 493001 - DNA, 90 bp, Homo sapiens
ctcgggatggtgccacaggaggctgtgcgggccccgctccgcttcgaatggaaggcctttgagccctacttagagattttggaagtatac

SEQ ID NO: 493002 - DNA, 100 bp, Homo sapiens
caggcaatgctggatagataccgaattcttatcacaaagatcgtcagtatttaaacagatcacatcatgcgtgagtacaagctagtggtccttggttcag

SEQ ID NO: 493003 - DNA, 90 bp, Homo sapiens
ttctccctgggctgcatgcttttcaaacttctgagaggaaggtagaagatagcaccatgccgattcgtcgaactgtgaattctacccggg

SEQ ID NO: 493004 - DNA, 100 bp, Homo sapiens
tctgctataacctacaagcagttggacagggagttgaccacatttggccatttcccagaagggccccaccccaagggtgagtggccaatggggagctgtt

SEQ ID NO: 493005 - DNA, 75 bp, Homo sapiens
cgacagcaacccgaagacagggaaatttagcgtccgtctccaagagagtatgaagagagtgcgtctgtagggcag

SEQ ID NO: 493006 - DNA, 90 bp, Homo sapiens
cctggctacaacgaccccatgtcaggaggcatttcatccttcatgaagccattcaggattttgaattgcatatgagtgcttggctcttcc

SEQ ID NO: 493007 - DNA, 100 bp, Homo sapiens
aagaagggaaccgacggcacagcagcctaatcgacatagacagcgtagacctgtcggccatggagcctaatgatagtaccagtaccgctgtggaggagcc

SEQ ID NO: 493008 - DNA, 100 bp, Homo sapiens
ctggacttccggaagagtgtgttcgaggagatggagaagatgaagaacttaattccatttgatcagatgaccattgaggacttgaatgaagctttcccag

SEQ ID NO: 493009 - DNA, 51 bp, Homo sapiens
ccggcagcgcgaggaaatgcccaaagctcactgaaaactgaagctaatttg

SEQ ID NO: 493010 - DNA, 100 bp, Homo sapiens
atggccagttgctgcggctggttcaagcggtggcgggagcctgtcaggtagctacagcaagctgggtagcaggcagatccaaaggatatcatgaagtttc

SEQ ID NO: 493011 - DNA, 97 bp, Homo sapiens
ggaagttcactggagtaaaatggaggcctcagtaatattacccattctgaagaaaaaactagccttcctttcaggaacaacaaggccatgacagatc

SEQ ID NO: 493012 - DNA, 50 bp, Homo sapiens
actggcctgctgctggcccgcaggaacaatgtctcccttttgcagagctg

SEQ ID NO: 493013 - DNA, 100 bp, Homo sapiens
accaacgggaagggccggcccgcctccctggccggggcgcagttcggaggttcagggcactttccctcatggtattgatattttgaccacagctgactat

SEQ ID NO: 493014 - DNA, 100 bp, Homo sapiens
tgtggagcagcggagaggcagccccatggagcctgtccactatgtcctggtgccttttcatgacccagagacggagtttcaccgtgttagccaggatggt

SEQ ID NO: 493015 - DNA, 100 bp, Homo sapiens
caagaaacaggagaacgggaagcctcctgccgagataaagccaccacgtctgagctgttgcgcagccattggtacctgtattggggaaacatagcataca

SEQ ID NO: 493016 - DNA, 143 bp, Homo sapiens
ctggaccctgatgagaagataacatacggggatgtgatgttggagaactacagccatctagtttccttgggtttgaagtgttgacattccttttgttgtgttacaatgctgccttaacttacatgcccagtgtttctcttcag

SEQ ID NO: 493017 - DNA, 97 bp, Homo sapiens
gccaggaactgcgcagcctcttcgagcgccgcggacgcgtcatcgagtgtgacgtggtgaaaggtggtcaagcgggtgctgacccagaccagcagcg

SEQ ID NO: 493018 - DNA, 90 bp, Homo sapiens
aagtgagagaaatctatgataagcataaaagcaacgtgggtgtcaggtgacacacagtcttttgcacagaagctccagctccgggtgccc

SEQ ID NO: 493019 - DNA, 100 bp, Homo sapiens
agaaggtgttgttgccggagctgagaccgggcggccacagtccgcagggatgaacctcgagttgctgggtagtcaatgctattattgaatcgggtaagac

SEQ ID NO: 493020 - DNA, 74 bp, Homo sapiens
cagagatgataacatgtttcaggtaatctgtaagtcagatgctccaacaggggatgttcttcttgatgaagctc

SEQ ID NO: 493021 - DNA, 100 bp, Homo sapiens
ggagctgggtcagtccgccgctcaccccgcggccgcaccttcccgccttctcaggatcatggggttgacagcagcattttccagaatcctaaaaagcttc

SEQ ID NO: 493022 - DNA, 100 bp, Homo sapiens
ttgctggtggcttcccactggcgaagagaagctacaaaatatgctcgatggatagcattcactggaaagagaagaagaaggaggttcctgctgtgccaga

SEQ ID NO: 493023 - DNA, 75 bp, Homo sapiens
atcacagaggaaactctgcattctcgcttcctggagatgatgaggagtctgatgaggaagctgtgaagaaaacca

SEQ ID NO: 493024 - DNA, 100 bp, Homo sapiens
cacaatttccatcaaaaagtgattaagcagagaatggagaagaaggttgattccagaaaagaggcacagttagatgaagaaggacagtttcttgtcagaa

SEQ ID NO: 493025 - DNA, 75 bp, Homo sapiens
agatggaagagtttgtgtacaaggttatcaatactctggctgaccatcatcatcgtgggactgactttggtggaa

SEQ ID NO: 493026 - DNA, 75 bp, Homo sapiens
gaggaagctgagtcagctacgggcaagcgggcagctgaagatgatgaggatgccctaaatgagaccagggaatca

SEQ ID NO: 493027 - DNA, 82 bp, Homo sapiens
gatcctggacctatgaatatccagtttgagccatcggatctaagatccaaaagcttccagaggcccttattagtccttgttg

SEQ ID NO: 493028 - DNA, 50 bp, Homo sapiens
cgcagtggtcgcttcttctccttgttgctctatatgcaatcagtgctgtc

SEQ ID NO: 493029 - DNA, 75 bp, Homo sapiens
ggcctggcaacagctggtcctccagaacttccttcacaagtgggacccccgcagccacctgcagccccttgctgg

SEQ ID NO: 493030 - DNA, 100 bp, Homo sapiens
gcccctaggaatctgcctgataatcgattgcattggcaatgagacagactttggacaaagtttaccaaatgaaaagcaaacctcggggatactgtctgat

SEQ ID NO: 493031 - DNA, 101 bp, Homo sapiens
gagacccgctacaacctgaagagtccgggtgctggagaatctggtaaaagcaccattgtgaagcagatgaggatcctgcatgttaatgggtttaatggaga

SEQ ID NO: 493032 - DNA, 98 bp, Homo sapiens
cagtgtgtgttgatcttggcttgattcagtctgccttgtaacagatcctggctctgcagagagaacagcccagaaaagaaagttccccagccctccac

SEQ ID NO: 493033 - DNA, 86 bp, Homo sapiens
caccgtcagggactgtgagaataggagttgctaagcctttacccgtaaacgcaaagcactgaagttgaattttgcaaatccacctt

SEQ ID NO: 493034 - DNA, 83 bp, Homo sapiens
atcagttactctgaagggcatcatgcatcttactgaaggaactgtggctgcaccatctgtcttcatcttcccgccatctgatg

SEQ ID NO: 493035 - DNA, 74 bp, Homo sapiens
gttcttcttcgagtatttgtagaagggtgctgggtaggccaggtttcagcatcgcagacaagaagcgcaggaca

SEQ ID NO: 493036 - DNA, 96 bp, Homo sapiens
gcggctgaccctgatggaggaagtgctcctgctgggcctcaaggaccgcgaggtgaatgaaaactttgccattgatttgatagcagagcagcccgt

SEQ ID NO: 493037 - DNA, 75 bp, Homo sapiens
atcacttccttccttactttgtcttggtatactacatggcaaaatgggaaaggtgtcagttgtacccgaggcgtt

SEQ ID NO: 493038 - DNA, 90 bp, Homo sapiens
ctttgtgggattaggaccaagggatcctgcgggcatttatcaggcacaggtctcagacttgatccgcagtggaaaacccatcaagcctgt

SEQ ID NO: 493039 - DNA, 99 bp, Homo sapiens
ttggatggatgtccctggggacaaactcttagagcctgtggtttgcatggacagtcattttgtttactcattcagccctgttgcaggtcccaataaact

SEQ ID NO: 493040 - DNA, 82 bp, Homo sapiens
cgacgaaatcctccaggaggagatcaaggagtacaagttggaatcgaagcctcttaaaatggcagatgacttggacttcgag

SEQ ID NO: 493041 - DNA, 75 bp, Homo sapiens
gttggctgtcgcgcagcgtaacttcattcttcagcgacttgtttaagtatcactgcaatgctgacactgggaaat

SEQ ID NO: 493042 - DNA, 83 bp, Homo sapiens
caactcaagcagatcaaagttgttttgaggatggatagaatgacagaagatgctcttcgcttgaatctgttgaagcggagctt

SEQ ID NO: 493043 - DNA, 73 bp, Homo sapiens
atctctttagtaaattaacttcaaaactcacaaggagagaatagtgacagtggtacaggaaagaaagaaaaag

SEQ ID NO: 493044 - DNA, 75 bp, Homo sapiens
ccagcaaccatgagtggttccatgatgggaagtgacatgaaacatgccaaaggccaggatttgtttgatcagatt

SEQ ID NO: 493045 - DNA, 100 bp, Homo sapiens
tcggaacctgcgacaagtggaccagatgcttggacgataccgagaatacagtaatggacaggcgggtgcgatagaacatagtctcgctcttccgcccagg

SEQ ID NO: 493046 - DNA, 75 bp, Homo sapiens
cgcgacgacgagtacgactacctctttaaagtttgcctgagaatacagatcaacccacagaacaaagcggatttc

SEQ ID NO: 493047 - DNA, 75 bp, Homo sapiens
tgaaaccaggcgggtaaacatggtggacagaaagtcagcctcttgtgctggattgccttttgcaattcttacttc

SEQ ID NO: 493048 - DNA, 96 bp, Homo sapiens
cttttaaaggaacctgttgataaatgcaaaacagtggctgttgcaggagcatttcctccctctgctatttatacacggaaagacttactacagcga

SEQ ID NO: 493049 - DNA, 89 bp, Homo sapiens
cgcgggggctgtggctccgggactgcgctgacaacagcgatgggtccagttctgaagacaacagggaagaccaagatgtgaaaaccaag

SEQ ID NO: 493050 - DNA, 78 bp, Homo sapiens
tcagatgcaattggaccaagagaacaatgggaaccagtctttcaaaatacatatctgaagagatggattaagaatgct

SEQ ID NO: 493051 - DNA, 100 bp, Homo sapiens
agctcgactgggccagcatcaacggcttctgcgagcagctcaacgaggactttgaggggtgtccctgttacctgagaatgacagatggaatgaaactaga

SEQ ID NO: 493052 - DNA, 51 bp, Homo sapiens
tgacacgcttccctggattggaaccgtggaacctctggagtattacaggag

SEQ ID NO: 493053 - DNA, 75 bp, Homo sapiens
cagttttctctggatgacgtgtgcggaaacatggctcgcgaaggactgcggaccctcgtggttgcaaagaaggcg

SEQ ID NO: 493054 - DNA, 84 bp, Homo sapiens
cctgaggaggcagctgcggtggcagctgctgagttctcggtgaaggaagctcttcgtgggcggtcttgactggagcacgaccca

SEQ ID NO: 493055 - DNA, 98 bp, Homo sapiens
gggcctaccccctggactccctggagaagcagatggaaaaggtcagccgtcagatccaggagcatgagcaggactctgcgctgcgggagcagctgagc

SEQ ID NO: 493056 - DNA, 100 bp, Homo sapiens
ggggcagtgtgattgagactgacattgaggaaagaagcagctatgaagaccagggggttcagctttccaagacaaaggttatctgagttcattggagtgg

SEQ ID NO: 493057 - DNA, 90 bp, Homo sapiens
gccgccatggagcccgactcggtgattgaggacaagaccatcgagctcatgatcatgattgagttctgtccagggggagccgtggacgcc

SEQ ID NO: 493058 - DNA, 50 bp, Homo sapiens
cgagccggagaccgagcccgaacagcagattctgtgctgaacgcctccgg

SEQ ID NO: 493059 - DNA, 112 bp, Homo sapiens
gacgtgaatcacgctacactggcggagaacgggctcgcaacagggagctgccaccaccgtgtactgtgctgctgtcccagaactggagggtctgggagggatgtacttcaac

SEQ ID NO: 493060 - DNA, 75 bp, Homo sapiens
ccctgggctggaacgaccctgacatcatggttgacacaccagacgagcagtctatcatgacttacgtggcacagt

SEQ ID NO: 493061 - DNA, 83 bp, Homo sapiens
ccaggcgactgcctcatcttcaagcttgctcacttccgacagagaaaaacaaaaggtgacagttcgcattcggagaaaaagac

SEQ ID NO: 493062 - DNA, 99 bp, Homo sapiens
gaaaaggacaaggggaaatggaaggggcctccagggtctgcagacaaggcagggtcagaagaggccaagtgatggaaatagtggattaatggcaaaaaa

SEQ ID NO: 493063 - DNA, 82 bp, Homo sapiens
ccgccgccgctgccgctgccgctgccgcacctccgtagctgactcggtgatggcatcagctgagaagggaaggaagcccatg

SEQ ID NO: 493064 - DNA, 100 bp, Homo sapiens
tggaatgtgaagagacatgagacagtagtcaaatactcaggatacagttgatatattagttggatggcatatagatcatactcagaaaccttcgctcacg

SEQ ID NO: 493065 - DNA, 100 bp, Homo sapiens
cccaagtgcattgcctttggaaacgagactatgcaatttgaagatgatgatcatggcccaccagctcctcctaacccatttagtcatctcacagaaggag

SEQ ID NO: 493066 - DNA, 100 bp, Homo sapiens
gggatggttgcataataaaatcagaagatacacggaccagaggagcctggaccgctcattcggactcgtcgggcaggcttgagtttgaagaaacagaaga

SEQ ID NO: 493067 - DNA, 99 bp, Homo sapiens
gagatggcaaagacatcttctggtcagagatacttcttaaaagtgcctggtgaagaatgtgatgggatcactagcatgtctgcggagagcggccctggg

SEQ ID NO: 493068 - DNA, 100 bp, Homo sapiens
gcctgggccgccgctgctacctgcagcgccgtgtggcacgacacaaaaatcagggtgattctgggggtccacttgtctgtaatggtgtgcttcaaggtat

SEQ ID NO: 493069 - DNA, 100 bp, Homo sapiens
ccatcaccatgccccacgcgggtgagcctgaatttaaatacattgggaatatgcatgggaatgaggctgttggacgagaactgctcattttcttggccca

SEQ ID NO: 493070 - DNA, 75 bp, Homo sapiens
gcggaccccgcatcttcgccgtctggaaaggggttctccaggacaaggacctcttctctgtcttcgctgatccca

SEQ ID NO: 493071 - DNA, 100 bp, Homo sapiens
ggcccgcccatcggggtccccaaccccatccggaccccgccgcccgagcgcgcggccccggaagcacccgggccatgaagcccccaggaggagaatcgag

SEQ ID NO: 493072 - DNA, 100 bp, Homo sapiens
ttcaccgagaagcgggtgtatctcaacagggtttgggatgctctgacagacaattacatcccttcactctcagaagactggagggatccaaacatcgagg

SEQ ID NO: 493073 - DNA, 82 bp, Homo sapiens
cgggtggcttacagacgctgccagcatcgccgccgccaggtaaaatgtcggttccaggaccttaccaggcggccactgggcc

SEQ ID NO: 493074 - DNA, 80 bp, Homo sapiens
tttaaaatggtccacagcagtcgaattttgtaaaagtgcttttgaagatgatgatatcacgcacgttgaaggaagtgtag

SEQ ID NO: 493075 - DNA, 75 bp, Homo sapiens
ggtgatttctgcatttccatctgagcactcctgcccgggtcccgcctcggggtcgccaggccctgaaccccaacg

SEQ ID NO: 493076 - DNA, 75 bp, Homo sapiens
ccttaaacctcctctggattcaagttaaagcttccttcaaaatgtctactgttcacgaaatcctgtgcaagctca

SEQ ID NO: 493077 - DNA, 90 bp, Homo sapiens
aagatttgatatagctattatctattacaccagagccattgaatatagggcgaaatgaccctgaatgtgacctgtgtggtggagacccag

SEQ ID NO: 493078 - DNA, 75 bp, Homo sapiens
gaagcatcctgccagcatgctgacgtcgccagggccatgctttctggttatcaatactctggctgaccatcatca

SEQ ID NO: 493079 - DNA, 75 bp, Homo sapiens
aaggatcatgtctgcgagccaggattcccgccccactgcaggccccaccatggcgccgttcctgcgcatcgcctt

SEQ ID NO: 493080 - DNA, 75 bp, Homo sapiens
cggtgggcagtcctagtccgaggtgccaccgtggaaggacagaatgattagtgacaagagctggggttaggatcc

SEQ ID NO: 493081 - DNA, 74 bp, Homo sapiens
aactgggtgcggggacaggcatcgtggggatcttggcagcgctgcagggcagagacccgtgctgagtttgctga

SEQ ID NO: 493082 - DNA, 51 bp, Homo sapiens
ctcacagttgaagcctgattgcaggtgacaatctccaatagacttgtgtct

SEQ ID NO: 493083 - DNA, 75 bp, Homo sapiens
ggaagatggcggctgggttcaagaagcaatgcctgtgtgcccaggccatgcagcctgctgtgcctgcccaaggcc

SEQ ID NO: 493084 - DNA, 75 bp, Homo sapiens
gtcgcgatgtcggtggccgggctgaagaagcagttccacaaagccagccaggactcacaccacccggcaagaact

SEQ ID NO: 493085 - DNA, 51 bp, Homo sapiens
cagcagcatccgctctctggagacagcacccaagaaaacctcatttggctc

SEQ ID NO: 493086 - DNA, 88 bp, Homo sapiens
gggatctgctgtggaagaacgtccgggagaggcggctggcaggttatgatgtgattgctcaagcccaatctgggactgggaaaacggc

SEQ ID NO: 493087 - DNA, 75 bp, Homo sapiens
ttttatattcatctcaaaaacaaaattctgaactcaggacttggcaactaatggcagcattagccgctgttgggc

SEQ ID NO: 493088 - DNA, 90 bp, Homo sapiens
gaaaactatgggaagattttggtagagaagaatgaacattgtattgagaacaatatagatttgcagacctgtcatttactccatccttta

SEQ ID NO: 493089 - DNA, 90 bp, Homo sapiens
ctcatccataatgaacttctctggaccaacttgaccgtctactggaaatctgaatgctgttatcacgtttccactgtatccaaaaggagg

SEQ ID NO: 493090 - DNA, 74 bp, Homo sapiens
ggctggttccccaacatgcctcaccctcatctatatcctttggcagctcacagatacgatgaatggattaaagc

SEQ ID NO: 493091 - DNA, 75 bp, Homo sapiens
gtttgatgtccagaggaagtacttcaaggaagctcttgatagcatgagcagagtaatgcagtaccatgggtgtcg

SEQ ID NO: 493092 - DNA, 100 bp, Homo sapiens
tttctacctccttaggattcgaagaccagttcattcttagtgtcttctgaaataaaattaggctcttgggaaagctggtgctgctgctgcctgattcccg

SEQ ID NO: 493093 - DNA, 82 bp, Homo sapiens
catgaaacagcatctcagacttctttcccagatgtttataatgagggcacacagtattagtacatggaaaagtgaaaggcct

SEQ ID NO: 493094 - DNA, 50 bp, Homo sapiens
ggcggcccacgcgcagcgacagggagagtacggcaagaagaagctgaaat

SEQ ID NO: 493095 - DNA, 100 bp, Homo sapiens
ccctggagtgacatcgagtgtgtccacaaagaatcagtgcttcttcgggcggaggaggaagtaggggtgcacctcagcactatcccaagactgctggcaa

SEQ ID NO: 493096 - DNA, 83 bp, Homo sapiens
gacaaagattccaccgtccaagtctttgaggccacgataagtcctattttgtaacggattatgatccaaccattgaagattct

SEQ ID NO: 493097 - DNA, 75 bp, Homo sapiens
gcggctacaggagcgcacgagcggtccagggaccttgacccagcccctctcagcagacgcttcatgataggaagg

SEQ ID NO: 493098 - DNA, 90 bp, Homo sapiens
ctggccccgaacggccggcgccacacggtgaaggtgacgccgagcaccgtgctgcttcaggttatttggaaatagcggtgcttgcagcgc

SEQ ID NO: 493099 - DNA, 114 bp, Homo sapiens
cccacacccacacgtgttcaatacacctcccacctgtcctcaggcatatcaaaggattttcagtcaatgcatcatcggagcgactcaacatgggtgaaatcgagacgttggatg

SEQ ID NO: 493100 - DNA, 72 bp, Homo sapiens
tcgaggcgacagcggccccgccgcaccagagcaggtcctcagaatggttggaatgaccctccagctttgaac

SEQ ID NO: 493101 - DNA, 75 bp, Homo sapiens
aaatggtggcagaaataccagaagagcaccataaccttagatgggggtgtcctggtacatgtgcagaaatgggat

SEQ ID NO: 493102 - DNA, 102 bp, Homo sapiens
ggaccccgcgagcaccagagtcggcgtaactatcgcctgacagggagggagccatggatttgctgcgggagctgaaggccatgcctatcacgctgcacctgc

SEQ ID NO: 493103 - DNA, 137 bp, Homo sapiens
aaaggattacttcttcaaagctgccctctgccacttcatagtagacgagttgaatgccaaggtcgaagctgtacacggtggacctggagtcagggctacactacctcctgcgggtggagctggcagcccacaagtcc

SEQ ID NO: 493104 - DNA, 100 bp, Homo sapiens
cagttcccaaggaggcttcaagacaaagggccccttacacaccagacaggtgatgatgaacagtctacacagatggctgcaagttgggaagatgataaag

SEQ ID NO: 493105 - DNA, 75 bp, Homo sapiens
ctggaggagaggaacctttgcttctatggaagtgggctcgggatgagtttgaaggcctcttcaagcagccagcag

SEQ ID NO: 493106 - DNA, 100 bp, Homo sapiens
ctgctgaactggtgtatgcagattgccaagctcctagagtggcctcagctaggtaaccaacgggagtcgacttatctatgccaggcctgcagtttcacat

SEQ ID NO: 493107 - DNA, 89 bp, Homo sapiens
taagaagtgccttttgcctcccaccgtgattctgaggcctccccaaccatgtgcaattggggatatgagactttctactcggaatatcc

SEQ ID NO: 493108 - DNA, 75 bp, Homo sapiens
atattattggattttgttacgattatcttcatattttgaaacaggaactagcttctaaaaaatccctgcctatga

SEQ ID NO: 493109 - DNA, 90 bp, Homo sapiens
ctgcgccgcccgaggccgtcggccgccgtcagcgagggcgccgagcaacttcggtgccacatctgccccattcctcatcttcatcttccc

SEQ ID NO: 493110 - DNA, 50 bp, Homo sapiens
gaagaatgtggctaccagcgaagtttctccttggaccaagatgactgatg

SEQ ID NO: 493111 - DNA, 90 bp, Homo sapiens
gactgagtacctgaaccggcacctgcacacctggatccaggataacggaggctggcttattgcaggagtgaccaggacactacctcctag

SEQ ID NO: 493112 - DNA, 100 bp, Homo sapiens
ctcccagaagaagtactttggcagaagcctggaactctacagggagctggacctcaacaggacatggtctgctatacagctcagactctcgtccgaatcc

SEQ ID NO: 493113 - DNA, 83 bp, Homo sapiens
gttaaggattccaagtaactcttatttggggctatcaacagcaggacgcccatgaattcatgcgctaccttttggaccaccta

SEQ ID NO: 493114 - DNA, 75 bp, Homo sapiens
cccatttatgttttccttacatctcaatgaagcaagggactatgaagaacacagatatgtagaactcttcttgaa

SEQ ID NO: 493115 - DNA, 48 bp, Homo sapiens
cgagagccccggctccagccccacggtcgcaatggaagaagagatcgc

SEQ ID NO: 493116 - DNA, 100 bp, Homo sapiens
agaaatacggagccaaccgggaggagtgtgcccgcctcaacgcctccctctcctgcctcaggaatgtccacatgtcagctagtatgttcaacacaccagg

SEQ ID NO: 493117 - DNA, 51 bp, Homo sapiens
gggcacgccggggtctgcagcgcctggccataggaaaaggatacagagtag

SEQ ID NO: 493118 - DNA, 100 bp, Homo sapiens
ttgaggcctgtgagttctggctgacgctggccgagcagcccatctgcaaggaagtcctggcctcccatctggtccagtgttgaaagacagagaagcgaag

SEQ ID NO: 493119 - DNA, 100 bp, Homo sapiens
ctgtccttattatcggaccccgaggatcaggaaaaactatgttgaaacattgtagtcggtatatacatgacttatttccttcactcatcaagaatttgga

SEQ ID NO: 493120 - DNA, 100 bp, Homo sapiens
agttcaaaagcctacaaaatctgagactgtcattgcttttataaggtgccctacgagacgctgaacaaacgctttcgcgccgctcagaagaacattgacc

SEQ ID NO: 493121 - DNA, 83 bp, Homo sapiens
ctgaactggatcttcacagccatcacagacaccatcgcgtggaacgtgctcccccggggatttttagactctgaggagcagtt

SEQ ID NO: 493122 - DNA, 100 bp, Homo sapiens
tggtgttcgggtatgaggctgggactaagccaagggattcaggtgtggtgccggtgggaactgaggaagcgcccaaggaatctgcaggagtctgaagagg

SEQ ID NO: 493123 - DNA, 75 bp, Homo sapiens
caattcccagaccttcagcccgtggcccggatgcaggacagacccctcagagtgcctggaagagctgggatgtct

SEQ ID NO: 493124 - DNA, 100 bp, Homo sapiens
ctagattacatcacgcagagcctccagcagcagggcgtgcagattcccagaaaatctaagctggcagttcataggaatatcagagacgacgaaggcttca

SEQ ID NO: 493125 - DNA, 75 bp, Homo sapiens
caacacactgttcaaaatcatgcgagtggggacagcttcttcctaggactccctggaggaaaagcggaagcggca

SEQ ID NO: 493126 - DNA, 51 bp, Homo sapiens
cgcggctctaacggggctttctacaagcagggcactgtggcatttgaagat

SEQ ID NO: 493127 - DNA, 100 bp, Homo sapiens
acgaagtcagaatttcctgtgttccctttgccgctcctggagttcactggaatgggtaccacagaccatgtcatcgtcctggcgtccacgaaccgagctg

SEQ ID NO: 493128 - DNA, 75 bp, Homo sapiens
cagtgattgttgcttttacgggcgcctgcattactcaatcaatcaccttctgctgcttggatgggtggatttggt

SEQ ID NO: 493129 - DNA, 112 bp, Homo sapiens
atgggatctttgtcctttgggatttctgaacttcagaaagccagtgttgatggctggtacgaggaacagcaaattcaggaaaaagtggcgacctttcgactcatgttgctgg

SEQ ID NO: 493130 - DNA, 75 bp, Homo sapiens
cttctatgtttccacatcggtcagaaaaagattctgaagatgatgagaaactgaaaaagaggaaggagcgatttg

SEQ ID NO: 493131 - DNA, 82 bp, Homo sapiens
ggggatgagtatgcggaggacagctctgatgaggagttggaatcgaagcctcttaaaatggcagatgacttggacttcgaga

SEQ ID NO: 493132 - DNA, 100 bp, Homo sapiens
tctggtgtcctgaacctggaagttgtgctttttaagttggaatcaactggactcggccttagtagtagtagactaagaacaactctaaacagaatacaag

SEQ ID NO: 493133 - DNA, 100 bp, Homo sapiens
atgaccttccctcgggaattccacctctgcgtttttccctccaggatgctttcattggatttggaggaaatgtgatcaggcaacaagtcaaggataacgc

SEQ ID NO: 493134 - DNA, 98 bp, Homo sapiens
agaaaagactaccgcactgaaaggtgaaagccagcttacgaacattaatacccaaagaacagaagtacattgaagaggaaaacagactctctaaacag

SEQ ID NO: 493135 - DNA, 100 bp, Homo sapiens
caacaactgcgaggaaaatgagcagtctctgcccccgccggccggcctcaacacagatataatttctacagtagaatttaatcattctggagaattacta

SEQ ID NO: 493136 - DNA, 101 bp, Homo sapiens
tgtggacatctgctgccggaaggggtcccgaagccccctgcaggaactctacaacccaatccaggaatcagtaacatgatagccaagcttgccaaaacctg

SEQ ID NO: 493137 - DNA, 75 bp, Homo sapiens
caagaaccggcacggcctcgtgcccttcgccttcgtgcgcttcgaggacccccgatttggtcgtattgggcgcct

SEQ ID NO: 493138 - DNA, 93 bp, Homo sapiens
cgacaggattcgttggctgccgtccccgctgctgtgcattggatattcgcatggagcagtgttacttgaagtgggatgaagatgaatgcatcc

SEQ ID NO: 493139 - DNA, 83 bp, Homo sapiens
cggccaccggaggagcgggagccaagcagcgccgtgccgtccctgcagtgacaccgaggtgctcctagccgtctgcaccagcg

SEQ ID NO: 493140 - DNA, 96 bp, Homo sapiens
ctgagtacgaggtgtccctcatctcccgcagaggtgacatgtcaagcaacccagccaaagagaccttcacaacagtattcaagtcaaacaacgttg

SEQ ID NO: 493141 - DNA, 50 bp, Homo sapiens
gtgaaatgtcatgcctctgaaaatgaaggctctgattgtactttctccac

SEQ ID NO: 493142 - DNA, 96 bp, Homo sapiens
cgccaggaggagtttgagcataaggtatttgggattcaattgaaggaaattgataagaatgaccacttgtacattcttctcagcaccttagagccc

SEQ ID NO: 493143 - DNA, 101 bp, Homo sapiens
gggcgacgctggctgcagggacccggtgacagcgtgagaggtcaaaatgcagatcttcgtgaaaacccttaccggcaagaccatcacccttgaggtggagc

SEQ ID NO: 493144 - DNA, 100 bp, Homo sapiens
cagcaaagggagctggagcgcatggctgaggtcttggtcaccggggaacagctacgaggctgtggccaggccagctgggctcggggagcgccagcctgag

SEQ ID NO: 493145 - DNA, 50 bp, Homo sapiens
gaggcgccgtctgtgagaaggtctctggcatctctatcccctatgaggca

SEQ ID NO: 493146 - DNA, 75 bp, Homo sapiens
gacaattcgaccccacacaaggaggatctaagcagcaaggtttaatgcattcaaaaggactaataccatactgca

SEQ ID NO: 493147 - DNA, 130 bp, Homo sapiens
ctatagtgctccctcctgtggtaataagttggtggacgctggggaagagtgtgactgtggtactccaaagtaccccaaggagataactctggaggcatttgcagttattgtcacccagatgctggcactc

SEQ ID NO: 493148 - DNA, 82 bp, Homo sapiens
gaagcctcccgggtggcttacagacgctgccagcatcgccgccgccagcgggagatacagatgacccaccaagaattactca

SEQ ID NO: 493149 - DNA, 135 bp, Homo sapiens
gcatagagacgctactggaggcggcccgcttcctggaatggcaagcgcagcaacaacagagagcacgtggaggatgctggtggtggaggtggcgaacggccgctccctggtgtggggagccgaggcggtgcaggc

SEQ ID NO: 493150 - DNA, 73 bp, Homo sapiens
gtcaacaaggttctggacaagatgaagtctttctgccagaacttggtcctgatgtctgaccatggagatgtga

SEQ ID NO: 493151 - DNA, 100 bp, Homo sapiens
gcgagccaaagaggagccggccgcgcgggccgggaggggacggccgccggagccgcgaggccaagaagtcctgacggccacgctggatctggaggacgtc

SEQ ID NO: 493152 - DNA, 100 bp, Homo sapiens
aacctgggtgctgcaggtgttcaagtgcagggagttcccgttacaatcactagtgttgcagaagaagttggattccatgggttccaagagaagaagagct

SEQ ID NO: 493153 - DNA, 99 bp, Homo sapiens
gtggagtccgagctgagatccatctgcaccacggtgctgagtggtggacatgacaacagagtcaactgcatacagtggcatcaagacagtggctgttta

SEQ ID NO: 493154 - DNA, 50 bp, Homo sapiens
aagagtaaagagtagatctacaggagtagagacggggtttcgccgtgtta

SEQ ID NO: 493155 - DNA, 50 bp, Homo sapiens
aagaaattactgtctcaagtgatacgggccggtgcataaacttctcccga

SEQ ID NO: 493156 - DNA, 100 bp, Homo sapiens
gagcccatggcagctccagcctctgcctcccagaaactcagatactctgacccatggatcccctgggtgcagccaagccacaatggccatggcgccgctg

SEQ ID NO: 493157 - DNA, 76 bp, Homo sapiens
gcgaaaacatgaccgctgagcccatgaggatgtacagttacccagcacgtgtacctcctcctcctcctattgctcg

SEQ ID NO: 493158 - DNA, 98 bp, Homo sapiens
gtccttaaatattgccgatacttgacctacgcaagagacaatgtcatgtgattcagcctaatatctcattttagaaagagcgttttcgctacgtaaag

SEQ ID NO: 493159 - DNA, 101 bp, Homo sapiens
cgggccgggcagctagcagggcgcttcgggatctcatagatcagaacatactggagcctgtaacccgtgcacagagggtgtggattacaccaacgcttcca

SEQ ID NO: 493160 - DNA, 100 bp, Homo sapiens
gtcaccgccgccgtgggaagcctcccagcccaacgccctggagtgggtccaatatgattcttggtgccaccattgagaactccaggattgtcctgcagat

SEQ ID NO: 493161 - DNA, 50 bp, Homo sapiens
agctgcagtctgacgagaggggaatctatggggttggcaaagccgccctg

SEQ ID NO: 493162 - DNA, 75 bp, Homo sapiens
tctcttactcgtgttccctgccactgtcttgttccgaggcggccccagagacagtcagtcggatgcggagactgc

SEQ ID NO: 493163 - DNA, 100 bp, Homo sapiens
cagcgcgtcccaggaggagcaggacgaggagctggaaaattaggggcctgtcgagcgatgttggaagaagaaacagatcaaacctatgagaatgtcctgg

SEQ ID NO: 493164 - DNA, 114 bp, Homo sapiens
gcatcgaggatttggcgctgcagaaccagatccgggagcacgtcatctccatcgaggttgcagagtgggcaggatcttaagacccgataggtgcagaacccatctggacacgga

SEQ ID NO: 493165 - DNA, 51 bp, Homo sapiens
catctattttgaagttgtcaatcaggagatggaataaactgagactgcagg

SEQ ID NO: 493166 - DNA, 100 bp, Homo sapiens
cactcccaaaaatggaccaggaccaacaaaaactaaaactgcaggtccagacaatggcgatgaccactcagaaggaggcctggtggagaaccacgtggac

SEQ ID NO: 493167 - DNA, 89 bp, Homo sapiens
gtaattataggcaacaatggacaaatccattatgaccatcaaaagtatgccaccatatacaccatgttcccagtgttctccttagtgct

SEQ ID NO: 493168 - DNA, 98 bp, Homo sapiens
atctacctccatcaggaccccagatgtctgacagccctgtgtgacaccaagataagtaaccaggatacagacgtccctcaccagtgccagcttggggt

SEQ ID NO: 493169 - DNA, 74 bp, Homo sapiens
acatctgcaataaccctttccaaataaggtcacattctgaggaactagagcatatattttgtgaagagtgcatg

SEQ ID NO: 493170 - DNA, 74 bp, Homo sapiens
acaccgacgcgctcatctgctggagcccggtgtgggcaagagcagtttactgttgcgttttgcagacaacactt

SEQ ID NO: 493171 - DNA, 75 bp, Homo sapiens
cgcctgccccggtgcgcagacagagctattccagcaccagcagagctcttcagtaggttacctgcaacatccagg

SEQ ID NO: 493172 - DNA, 82 bp, Homo sapiens
ttcgccggcacgcgaagtggccgcatccgcaagctggtaggtgagtgctgtcctcggctcactttcctcaagctctccggct

SEQ ID NO: 493173 - DNA, 51 bp, Homo sapiens
ctcaactgccaaaaggcaatggactccccagacaggccctggaaccccccc

SEQ ID NO: 493174 - DNA, 73 bp, Homo sapiens
tgacaggcggctttgcatcggaaatcagctctacagttcagggagcagctgcagatgacggccgattaaaacg

SEQ ID NO: 493175 - DNA, 100 bp, Homo sapiens
cacaacttattcttcaactctacattcttctggagcatggacaagcgaatttcagtcagtatgacattaaagtatcagtaaatgattttatcatcaaggc

SEQ ID NO: 493176 - DNA, 98 bp, Homo sapiens
aaagacaggagtggagtgatatcagacaccgagcttcagcaagctctctccaacgatcactggggtgatcctgctggctgttggagtctggggcaaac

SEQ ID NO: 493177 - DNA, 83 bp, Homo sapiens
ctttcagctacttgaagatagccatcagccgctacgtgactcttttctccagacaatgcagatcttcgtgaagactctgactg

SEQ ID NO: 493178 - DNA, 88 bp, Homo sapiens
aagaaagcatttaaaagaagagacacaattacgattgtgaggactcttgtgaagatatgagttgtggagaggagagtctcagcagctc

SEQ ID NO: 493179 - DNA, 95 bp, Homo sapiens
aatcctcatgctcctactatccatttcaactacagatactttgaagtagaagaagctgatggcacagttggcgggcagctcccaggtctccatga

SEQ ID NO: 493180 - DNA, 50 bp, Homo sapiens
tttttggcctaccctccaaagaaaagatcctgcagctcctgaaaggcaag

SEQ ID NO: 493181 - DNA, 132 bp, Homo sapiens
tcttcataaggttgtagtagcaggagccctctatcttttgttctctggcatggaaggggtcctcagagttactggggaaataaagtctttgcttttgctttttggaggtcagtttgccagcagtcaagaaac

SEQ ID NO: 493182 - DNA, 75 bp, Homo sapiens
gaaacacaaagctgttcttttcaaaatggatacagtttatgtaacttgatggaagaaaatggaattactccaaaa

SEQ ID NO: 493183 - DNA, 74 bp, Homo sapiens
tggaagttcatgaattgagtagacacttaacaaggcattcaactcagaaacagacagtttcaagctggcctatg

SEQ ID NO: 493184 - DNA, 75 bp, Homo sapiens
aatccagttccaaggactccacggggtatgaaaatgaaagtcttcagaatggaaggaagtcaactgaatttccaa

SEQ ID NO: 493185 - DNA, 100 bp, Homo sapiens
tatttgccgttggtgattcaagggtgtcatggagaaactccagctgggcccagagattctgcagcgggaaaatccaaggcttatttatgccaggctgagt

SEQ ID NO: 493186 - DNA, 101 bp, Homo sapiens
aagaaccacgtgatcaagtaccttgagacactcctttactcacagcagcaggtgaccaagaatatggcccaggtgaccaaagccctggacaaggccctgag

SEQ ID NO: 493187 - DNA, 97 bp, Homo sapiens
ggcaagaaaatcacagcctttgtacccaatgacggttgcttgaactttattgagatgctattaactgagtacttggatatgaaaaatactcgtacgg

SEQ ID NO: 493188 - DNA, 100 bp, Homo sapiens
tgagactcctgctcagtgtagcattaagaaaacctcggatcaattctcagctggtggcacaacaagtggcacaacagtatgccaccccaccaccccctaa

SEQ ID NO: 493189 - DNA, 75 bp, Homo sapiens
acagacacgagagctacagaatcatctagacgtctttttacaagggaaacggttccacgaagccttggaaagcat

SEQ ID NO: 493190 - DNA, 100 bp, Homo sapiens
ggcatcctgtaccgagttggtgatggtgtgtacctgccccctgaggccttcacgttcaagcagagctgcaaccctcttgtcctctttgaagcagaaattg

SEQ ID NO: 493191 - DNA, 98 bp, Homo sapiens
cagaagcagattgccaacattgaccgtattacaaaatacctcttctggctcagaagatgaaggctcagtgcagggggactcccagggcacccccacct

SEQ ID NO: 493192 - DNA, 82 bp, Homo sapiens
cccacttaggataatggcgacagctgaggggggatatgagactttctactcggaatatcctgagtgttgcgtggatgtaaaa

SEQ ID NO: 493193 - DNA, 100 bp, Homo sapiens
gacagaggagaccagaatcaagttcatgacggatggtgtgctgcttaaagaaatccagaaggagaacgtatttaccgggcagtcaaagatctattcctac

SEQ ID NO: 493194 - DNA, 99 bp, Homo sapiens
gaacgtgccagacacagagcaagtgaaatgccccaagcttttctatttgatgtgatttatgaagcatatcagcagtttgcagagtggtgtctagattac

SEQ ID NO: 493195 - DNA, 108 bp, Homo sapiens
ctaaccatgaagacttgaacttaatacagcaagaaagaccatcaagtttaccaattacgctcgatttgaggccaaaatccatgacctacgagagcagatgatgaacca

SEQ ID NO: 493196 - DNA, 98 bp, Homo sapiens
ctgctgagtttcttcatctacaacccgcgcttctggccgcgggaaggagagagagcctgttacctatccataaacccccaaaaggatgagacgctaga

SEQ ID NO: 493197 - DNA, 100 bp, Homo sapiens
gccgagatgtctcgctccgtggccttagctgtgctcgcgctactctctctttctggcctggaggctatccagcgtatcagaagcatgtgcacacgtatcg

SEQ ID NO: 493198 - DNA, 100 bp, Homo sapiens
tacaaggacagcagcgactttggggcccgtcaccctcagcattttgaaagcgaagcagaagccgtagaatcagcggcgagcctgttgaaagaacccacag

SEQ ID NO: 493199 - DNA, 90 bp, Homo sapiens
cgaaaacatgtactacagccagtcttctatgtttccacatcggtcagaaaaagatgtggaggtttagccgttggaacagttcttctaatt

SEQ ID NO: 493200 - DNA, 75 bp, Homo sapiens
gtcgcagcgagctggagccgccggaggtctcagccaatttcttctccagtcatcctccagtttggtcatgcagag

SEQ ID NO: 493201 - DNA, 100 bp, Homo sapiens
tcaagatctcagagaaggaggaggtgaccacgcgcgaggttaacaatgagaatgttgtcaaagtcggccacaggcaggtggtgaacatgatccggcaggg

SEQ ID NO: 493202 - DNA, 75 bp, Homo sapiens
ctatgacttgctaaacaatctgttgagaggaagaagctattcagttggatggattaaatgcatcacaaataagag

SEQ ID NO: 493203 - DNA, 74 bp, Homo sapiens
atccttcagctcatgcacagttgcaaagagggctacgtgaaagatctgaaagaaatcatgaggtccaatggatt

SEQ ID NO: 493204 - DNA, 74 bp, Homo sapiens
ctcacacagtggcttctgctcaccaacagatgaagacagatgcaccaacgagaaaacccatatagacagctgcc

SEQ ID NO: 493205 - DNA, 101 bp, Homo sapiens
cgatgctcccaagctcagatcacagcgagctaaagggaacctgggaggtgggtctcctaagcctcaggcacaggtctttaaggaggagaagtacttgaaag

SEQ ID NO: 493206 - DNA, 82 bp, Homo sapiens
cagcacactcctcgcgagcaaggttccgtggggaccccactgcctggagtacaggtgcgcattgtctcagaaaacccacaga

SEQ ID NO: 493207 - DNA, 75 bp, Homo sapiens
cgcgcgggcgggaagatggcggctgggttcaagagtttcaattactgaaaattacttggaaatagaaggaatggc

SEQ ID NO: 493208 - DNA, 90 bp, Homo sapiens
tgacatctcccccgggactgtggactggaaccacatctactttgaaagtgagaagtgtaaggctagaggatttaccgtgattgtggatgg

SEQ ID NO: 493209 - DNA, 83 bp, Homo sapiens
cacccgtgcccaggagcttgacgccttagataacagccatcctattgaaaattatatccagatcgagagacagaagattctga

SEQ ID NO: 493210 - DNA, 100 bp, Homo sapiens
ctacaagtcctcgcacctaaagtcgcacctgcggacgcacacaggatgatcggctgaatgtaacagaggaactaacgtccaacgacaagacgaggattct

SEQ ID NO: 493211 - DNA, 50 bp, Homo sapiens
tcctgcaggatctcagtgatgttcaaatctgaacatcaatgatgtactag

SEQ ID NO: 493212 - DNA, 73 bp, Homo sapiens
ggcaggacccgggcaccgaactcctgcactgcgagaatgaagactattctcagcaatcagactgtcgacattc

SEQ ID NO: 493213 - DNA, 98 bp, Homo sapiens
gctgaaccaagtgattttctggctcagtttcctgaagtcccttgtcccagttgaagaacccataggacttcctcgttctgcccatcttcctaacaagg

SEQ ID NO: 493214 - DNA, 83 bp, Homo sapiens
gaaagaactttcacctgatccaggccaacaaggtgctcttacagcctgttccaagtgtggcttaatccgtctccaccaccaga

SEQ ID NO: 493215 - DNA, 80 bp, Homo sapiens
cgccagatcaacctggagctctacgcctcctacgtttacctgtccatggataaaattgtccatggaccacgtgtgccttg

SEQ ID NO: 493216 - DNA, 82 bp, Homo sapiens
caccgctgccctcagctccgagtccagggcgagggtttgccttcccggattgggcctacaagccagagtcgtcccctggctc

SEQ ID NO: 493217 - DNA, 96 bp, Homo sapiens
cgcggaggcgacgccggggacgcccgcgcgacgagcaggtggcggcggctgcaggaccctgatgcttggtgtgacctgagtaaatttgacctccct

SEQ ID NO: 493218 - DNA, 98 bp, Homo sapiens
agacatttctggctctgaaggcgaacgcttcgctggccatttaggagctctgctcaaagccagacggtggacagtgtagtggctgctgagtatgagct

SEQ ID NO: 493219 - DNA, 101 bp, Homo sapiens
cgcccgtggccgccgtgcaggcggccgtcagcaacctcgtccgggtggagtggctgaaacttctcagcaggcgcatctacactagtgacctgaggagagaa

SEQ ID NO: 493220 - DNA, 78 bp, Homo sapiens
tgcttgtcccagaagcaatttaaggagcagctgttcatcaaagaaaaagggttcttttggtcacccaccactggcccc

SEQ ID NO: 493221 - DNA, 90 bp, Homo sapiens
gtccagccagggtcctgggccgcgacctggttctcccggagtctacaggaacccgagcgtcatgttagggtgaagcagaggacctcagtg

SEQ ID NO: 493222 - DNA, 100 bp, Homo sapiens
ccgacttcgatgatcgtgtgtcggatgaggagaagaaaccgaaccctcaccaaacagatctgcttgcacatccacttgcacgtagacctcagataagtga

SEQ ID NO: 493223 - DNA, 80 bp, Homo sapiens
ggggacggggaccagcagctgtcgccgccgctctcaggtgattgaaaactcagcctcaaaacaaaaaattcactagttat

SEQ ID NO: 493224 - DNA, 100 bp, Homo sapiens
ctgttgacttcggcacagctggtgggcgtctgtctttatatctttgtacgtccataccatgtcccgttcatcagcatggccgaaacagaagccctgtcga

SEQ ID NO: 493225 - DNA, 83 bp, Homo sapiens
ttccgcgacaccatcttcgacaacatcctcaaggagcgggacggtatgcgggccatcctggggtcctacgacagcgagctgac

SEQ ID NO: 493226 - DNA, 101 bp, Homo sapiens
gtcagtgtgggaacacggcacacaagaaggaagagcctttgagcttttttggttgcagttttaagcacagagtaatctatgccagcaattatgacaatgtt

SEQ ID NO: 493227 - DNA, 100 bp, Homo sapiens
tatcctggtcatcttctatttccaaagtactgaacgacacctgggtctccttcccttcctggtctgaggactccacgttcgtcagctccaagaagacacc

SEQ ID NO: 493228 - DNA, 75 bp, Homo sapiens
cacaccggaatttccaggaagaaatagagtttcttaatgcaattttcccaaattgttgatccatttcagatactt

SEQ ID NO: 493229 - DNA, 97 bp, Homo sapiens
cctcagaagcatgtgtcttccccagctctgcagccacatactatccgtttgttcaggaaccaccagtgacagagttgtccttctattcaggccactc

SEQ ID NO: 493230 - DNA, 75 bp, Homo sapiens
gtgcagttcacttcacaaggaaagctgtccagttctcccccaggaccctaccatcaggagccctacgtctgcaaa

SEQ ID NO: 493231 - DNA, 75 bp, Homo sapiens
gcgagggttatgctgactgcgccacctacctggcaggtgacacccctgcgctttgggaaggacgtcgatgggaaa

SEQ ID NO: 493232 - DNA, 96 bp, Homo sapiens
tacggtcacgtctacaaggcgaggcggaaagatggttacagaatgtctgaaggggacagtgtgggagaatccgtccatgggaaaccttcggtggtg

SEQ ID NO: 493233 - DNA, 83 bp, Homo sapiens
gtcggacgcgtcttctttcaggctgaggagatgccctgtatccaagcccaatatgggacaccagcaccgagtccgggaccccg

SEQ ID NO: 493234 - DNA, 100 bp, Homo sapiens
ttagattatcatgatggagcagctacattcctcttaataaatcacacaaagaatgaacttgttcaatacaatcaaagaccccatatcatgtgaacctcct

SEQ ID NO: 493235 - DNA, 100 bp, Homo sapiens
gcagagtgaccccagcgtcctcaccgactcctcggccacctcctccgcggacgccggggagaacccagggaccccagagctaagcacagctgagcggaag

SEQ ID NO: 493236 - DNA, 110 bp, Homo sapiens
agaagagactccagatgctgccttgacatgcctgaaggagagaagagagcaacttcctccccaggaggattctaagttcacaagattcctttgcagttcacccttggagg

SEQ ID NO: 493237 - DNA, 111 bp, Homo sapiens
agttatgctggcagattcgccaagagaagaatctaacaaacggcaaagaacttactgattcttgagtagaacttcatggaggaacacggagtgacccaaaccgaacatatg

SEQ ID NO: 493238 - DNA, 82 bp, Homo sapiens
ccacctgcccggtgcccgaggaggcagccaagctcgtggcctgcctctgcgtgcgccagcatccttcagaaaaagcatcccc

SEQ ID NO: 493239 - DNA, 100 bp, Homo sapiens
agaaataaaaggtcatcccttttttgaaggtgtcgactgggagcacataagggacagcatcgtggccgagctggaccgagagatgagcaggagcgtggac

SEQ ID NO: 493240 - DNA, 98 bp, Homo sapiens
atcaacatgcatcccttcttctttgccttggggaagatcctctctgtggagccaggcggcactccagggtccggcccaaggtgactgtcctgaactat

SEQ ID NO: 493241 - DNA, 75 bp, Homo sapiens
cgcttcccagggatcttgagagtgaagatctcgaaggatttcatagagatgctgcctatggaagttgcaatttct

SEQ ID NO: 493242 - DNA, 129 bp, Homo sapiens
caaagctgaactgaatgagtttcttactcgggagctggctgaagatggctactctggagttgagaaaaagcttgtggtgaaggggggcaaaaaaaagaagcaagttctgaagttcactcttgattgcac

SEQ ID NO: 493243 - DNA, 75 bp, Homo sapiens
gcgctgcgcggactgcggcgccccggcctgacatttaccccggtaactgctgggcatttaaaggctcccaggggt

SEQ ID NO: 493244 - DNA, 101 bp, Homo sapiens
accagccagaggacgcgggctctgaggatgagctggaggaggggaaacagactgaatttgatctgattaatgtgaaggactggccagtctgggaaaccgcc

SEQ ID NO: 493245 - DNA, 83 bp, Homo sapiens
gggagattgagatcatgtcatcactcaaccaccctcacatcattgccatccatgaagatgcttcaggactgccccaaggcccg

SEQ ID NO: 493246 - DNA, 96 bp, Homo sapiens
ttataggagaactgggcgacggagcctttgggaaagtgtacaagaaactaattctgaagcaagcccttatagttgtgctgcagtggtgtttcaatc

SEQ ID NO: 493247 - DNA, 102 bp, Homo sapiens
acagcacggaagcgcggacggcgcacgacgagtactggcatgcgcacgtggacaagggtggctacggaccacaacatggataacacgtcaactgtgctgcgg

SEQ ID NO: 493248 - DNA, 100 bp, Homo sapiens
cacagagcgtgtcggagtgcatcacggaggacggcaggactgtggccgtgggggacatcgtctggggaatcttgtcgattggcctggctgctgcctacta

SEQ ID NO: 493249 - DNA, 75 bp, Homo sapiens
tttagggtcctttatatagaagggagagtaggggctgataggatgtcttcatttggtgattttgttgcattgtcc

SEQ ID NO: 493250 - DNA, 51 bp, Homo sapiens
cgcggactggcacgcagactgcttcagatgaagatgacgccaacagactcg

SEQ ID NO: 493251 - DNA, 90 bp, Homo sapiens
ctttcaatgacaaaaagtttgtcattaaacccatcgacaagaaggcacctgaactggagaagatgatgactatgttgatgattttaatag

SEQ ID NO: 493252 - DNA, 131 bp, Homo sapiens
gaaaactaggaatctatgatgctgatggtgatggagattttgatgtggatgatgccaaagttttattagtaaaggcatgacttcctggcaccacagggaaaatcgggtgcaagcccagaaactatttcccc

SEQ ID NO: 493253 - DNA, 71 bp, Homo sapiens
atctgcaccttcaggaccagttcgcagtagcagtggaatgggaggaagagtcgttccccatcaggaagtcc

SEQ ID NO: 493254 - DNA, 75 bp, Homo sapiens
ctcgagtgtaccgagtacagaggtgctgactgggttacttttttaaacactaggaatggtaatttctactcttct

SEQ ID NO: 493255 - DNA, 100 bp, Homo sapiens
tcggcgccccgcgcctgccgctgccctacggcttctccgccatgcaaggctggcgcgtctccatggagggatggtgaccactatgatgccctgagggact

SEQ ID NO: 493256 - DNA, 82 bp, Homo sapiens
tggggactacgacgtccctcaaaccttgcttctaggagataaaaagaagtccattggaatattaagcccaggagttgctttg

SEQ ID NO: 493257 - DNA, 50 bp, Homo sapiens
tccctatattcagcaattaaaaatggcaccttgaaaattatcgaccggaa

SEQ ID NO: 493258 - DNA, 100 bp, Homo sapiens
gtgcgtccgcggaccagcagcgcgggagagcggactcccctcgccaccgcccgagcccaggaagacagtgacccgcccattcatgaaagtctcagcatag

SEQ ID NO: 493259 - DNA, 101 bp, Homo sapiens
gggaagaagaagaaacgggccgcgaaccgcagtatcatgctggccaagaagatcatcattaaggacggaggcacggccccttcacagatgtagtcactaca

SEQ ID NO: 493260 - DNA, 100 bp, Homo sapiens
ccactgagtggtaatggatgatgcagttcaaataactaaggaaattcagttcatgaagataagaagtttcttgacaaatacatgccccagttcatgaaac

SEQ ID NO: 493261 - DNA, 90 bp, Homo sapiens
gcccactacctcctcgtgctcagcctggcgccggagctgaaacacgacgtgaagatatgtgtcacaaagatgtctacacggaactgccag

SEQ ID NO: 493262 - DNA, 50 bp, Homo sapiens
aagatctatgggtcagacagaatttgtgaacaaaacacattgcttaattc

SEQ ID NO: 493263 - DNA, 97 bp, Homo sapiens
gctcttcataacgcctctgaagaagccacagaacaaaacatacgagctggtacccaggcagttttgcagacaaaacttacctggggtccctacttat

SEQ ID NO: 493264 - DNA, 50 bp, Homo sapiens
cagaatcaatctacctcgaaatatagtttgtggcccagggaagccaaaag

SEQ ID NO: 493265 - DNA, 100 bp, Homo sapiens
acagaggtgatataccagacctttcacagggtttgtctgatccaggtaattatcatgaattttgtcgatttttggctcgtttaaagacaaattatcagct

SEQ ID NO: 493266 - DNA, 75 bp, Homo sapiens
gataaaagatacccagaatgcagagatttgagcaggcctgaattattggaacaactttggaaagccagagctgaa

SEQ ID NO: 493267 - DNA, 100 bp, Homo sapiens
caaatgctgtggatcaagcctccccaaccccaccatcccaccaaagggggctgctgaccgagagagctcactcagccagtgccgcaaggtgtgtggcctg

SEQ ID NO: 493268 - DNA, 100 bp, Homo sapiens
attccagtcttagcgatcagcatcagcaaaggctccgaggtgccagaggcatagtgatggcatcagctgagaagggaaggaagcccatgtgaggacactg

SEQ ID NO: 493269 - DNA, 82 bp, Homo sapiens
ggaaggatcttctcatgcacagaggcaacaaatggcaactttctgacagcctcccgcgacgatgcccctcaacgttagcttc

SEQ ID NO: 493270 - DNA, 74 bp, Homo sapiens
aaaattgagacggagctaagagatatctgcaatgatgtactggaattgtcttagaagaaagaaggcaagccacc

SEQ ID NO: 493271 - DNA, 82 bp, Homo sapiens
ccaaacaatcatgggaatttccaaggggattcaaacttcaacagaatgtggcaaccagatattgagctcctggcagcttgca

SEQ ID NO: 493272 - DNA, 97 bp, Homo sapiens
ccacggtgtacaaggcctacgccaaggcctccaacattgacgacgtccttggccaccacacaggcttcctggacacctgcctgaaggactgcatgct

SEQ ID NO: 493273 - DNA, 100 bp, Homo sapiens
gagctggagtgtgcagtactcggcaggaaattggaaggtgggagtcaatcattttgacaagtctcctgaaaggaacagctagcaggaactgaaacctttt

SEQ ID NO: 493274 - DNA, 75 bp, Homo sapiens
cactttcagtcctgatgagcatttctgggtgacactcaataggattccaggaatacttctgagaggagaagcttc

SEQ ID NO: 493275 - DNA, 90 bp, Homo sapiens
gcctccgggagaggagccgcacccggccggcccggccccagccccatggacctccgagcaggccaccagcccctcgggttccaagatgca

SEQ ID NO: 493276 - DNA, 98 bp, Homo sapiens
ccccggccgcctgtccgtcgatgcaccgaaaaggtttcagcacagccagtcccacaggagcccagcagaaaagattacgagacctaccagccatttca

SEQ ID NO: 493277 - DNA, 75 bp, Homo sapiens
gcagtactttggtggacgagttggagtcatctttcgaggagtccaaaactacttacctggaagaccttccaccac

SEQ ID NO: 493278 - DNA, 96 bp, Homo sapiens
gcgcagttccgggcgcgtctgagcggttctcgaggcgttctcgcctcggtctctggcgagtgcacgggttgaaatcacaaagattagacacctttt

SEQ ID NO: 493279 - DNA, 76 bp, Homo sapiens
cttctgaatgacagaggatcaggcgcagttgtgtagcagttgagtaatgctggttagctgttaaggtggcgtgttg

SEQ ID NO: 493280 - DNA, 98 bp, Homo sapiens
cgattccgcgccagttgcctggctcacattcggaggctggtgtccagggtctcagcgcgggggacgactcaggttcttacatccccgcgtccccaggt

SEQ ID NO: 493281 - DNA, 90 bp, Homo sapiens
gtctgactctgactctcggactgagaaacgcaaggtgatgtgtccaatctagatcccaacttctcatttgaaggcaccaaactggatgtg

SEQ ID NO: 493282 - DNA, 100 bp, Homo sapiens
tctatatccatagattggaatattggtgggccagcaatcctcagacgcctcacttaggacaagatattatcaactcactggtaacaacagtattcatgct

SEQ ID NO: 493283 - DNA, 96 bp, Homo sapiens
aagaaaaaaagacgaaagaagaagaagagcaaagggccttctgcaggatcttacacatttgttccatggcttctcagctttaaaaggggaagtgcc

SEQ ID NO: 493284 - DNA, 75 bp, Homo sapiens
tttggctttgcctttctggacacagaagtatttgtgacagtacaagaagttacttactgaagaaggacaaaaaat

SEQ ID NO: 493285 - DNA, 75 bp, Homo sapiens
agtcatttacctccctggtctcaggtgtctctcacagacacttcgtgtatgatcatgtgttcgctgagaagatca

SEQ ID NO: 493286 - DNA, 74 bp, Homo sapiens
actgctgggtggtagtgcggctggacggccggaatttccatcgtgacaaatggcctacagctgtgagagcaaat

SEQ ID NO: 493287 - DNA, 75 bp, Homo sapiens
tattaaaccagacaagtgtcctaggagagtgaacaggtactaggttttgacaagcttgcatcatgcgtgagtata

SEQ ID NO: 493288 - DNA, 75 bp, Homo sapiens
cgaggaggcgctcatcatcccccccgacgccgtcgcggtggactgcaagttacctagaaaagtacgagaaagttc

SEQ ID NO: 493289 - DNA, 99 bp, Homo sapiens
ccgggagcggctggtggccacgggaagaaggagaaagggccaacccctgaagaagcaatacagaaactgaaggagacagagaagatactgatcaagaaa

SEQ ID NO: 493290 - DNA, 127 bp, Homo sapiens
tggccttggagagagggctgcagggcccacggacattgctgactcttcagaacgtgctgacatggagccaggtgtcctgatggcaaatttcaagggccacgcgcttccagggagtttcttcctgatc

SEQ ID NO: 493291 - DNA, 100 bp, Homo sapiens
aggatgcagtggaggccatcaggggccttgataacacagagtttcaaggtgttggtaaatcatgcttattgctacagtttacagacaagaggtttcagcc

SEQ ID NO: 493292 - DNA, 113 bp, Homo sapiens
gttcgtctgctgagactcggctccaaggtcacagctcgtaacactggaggcaagtgaggcctatctggttggcctttttgaagacaccaacctgtgtgctatccatgccaaac

SEQ ID NO: 493293 - DNA, 75 bp, Homo sapiens
cctggagaacatggcccggcctcccgggggctctggtcccctcctcggtaatcaaatgcaaagcagctgtgctat

SEQ ID NO: 493294 - DNA, 100 bp, Homo sapiens
agcagtcccctggacagcccccgaaacttctcccccaacacccccgcccacttctcgtttgcctcctcccgaagggtgtgagatggcagacaggtttgca

SEQ ID NO: 493295 - DNA, 75 bp, Homo sapiens
ccttcgacctgctcttcatctccctgctctggatcatcgaactgaatgctccccacaggtgcaggaagccgccgc

SEQ ID NO: 493296 - DNA, 82 bp, Homo sapiens
attccattactgcccaaactcttcaagttttagaaaagcataaagctgatgttgtaaagtgacctagagtcccgcagggatg

SEQ ID NO: 493297 - DNA, 80 bp, Homo sapiens
ctgcctctacaaatttgactattctaggtacttcatgtgcaagtgaaagtgtaggaaaacatatgcttgaagcgtgcaac

SEQ ID NO: 493298 - DNA, 100 bp, Homo sapiens
ccgaggctgaaggaagatggcggacggcgtggaccacatagacatttacgcggatgtcggcgaagagttcaaccagatctggcagtgtggtggggttctg

SEQ ID NO: 493299 - DNA, 75 bp, Homo sapiens
tcagggatcaaagagcaaacagattcagtggcctgcattgggcaagttaaagtcttcagagccctgtatacgttt

SEQ ID NO: 493300 - DNA, 100 bp, Homo sapiens
tctacaatggaatctggtccaaacaatcatgggaatttccaaggggattcaaacttcaacagaatgtggcaaccagttgcatccaagaattgatgcccgg

SEQ ID NO: 493301 - DNA, 100 bp, Homo sapiens
tctggatataataaagcagagctctgtagaactctgtggtgtaaagattgtggtagtagatgaaggcatccgtttccgaggctttagtatccctgaatgc

SEQ ID NO: 493302 - DNA, 129 bp, Homo sapiens
ttcaaagtatctacttggtgctactgaaaatggcattctttgctgttggaatctgctgagctgtgcatgtggcaagaagactttctttaataaaacatccagagtgctccaccatgagtggtgggaaag

SEQ ID NO: 493303 - DNA, 100 bp, Homo sapiens
gtgacagggctggtagcagcgcagaggaaaggcggcttttagccagtacagtgctgtggataccaatccactttctctgtatgtcatgcatccattctgg

SEQ ID NO: 493304 - DNA, 82 bp, Homo sapiens
ctacacagtaccagaggtggggactgttgttggaggaacactttccagggttgcagataagctcccccggcccaacctcctg

SEQ ID NO: 493305 - DNA, 74 bp, Homo sapiens
cagacccttactgtaaatgtagagggcactaaaacattgccagatgatcagcactggtgaggtggattgatgat

SEQ ID NO: 493306 - DNA, 50 bp, Homo sapiens
tccttcatcctcaacgccctcacctgggttatgggacccacctgatgaac

SEQ ID NO: 493307 - DNA, 97 bp, Homo sapiens
ttcatccacgacctggacaggacggagcgcaggcaggtggttgtggcaacgaacattgctgagacatcactcaccattgagggcatcatttatgtgc

SEQ ID NO: 493308 - DNA, 90 bp, Homo sapiens
gatggcatggttcagctctctctggccgagaggctgacccgcggctgattgagtccctctcccagatgctgtccatgggcttctctgatg

SEQ ID NO: 493309 - DNA, 74 bp, Homo sapiens
ggctaagtcccggcagcgggaacacagagagcgaagccaggatccacctcagaaaaagatggaatgcaccatac

SEQ ID NO: 493310 - DNA, 100 bp, Homo sapiens
tgccaagctgctgataaagctgcctgcctgttgccaaagctagaaagagacatgtccaatgtcagcctgggcccgacccccatccccgagctcacgcaca

SEQ ID NO: 493311 - DNA, 74 bp, Homo sapiens
cggcgtacgccctcatggggaaaatctccccggtgactttcaggtactgggcctaatcgctacgtgcctctttg

SEQ ID NO: 493312 - DNA, 80 bp, Homo sapiens
cctcgagaagctccagatggcgtcttccgtgggcaacgtggccgacagcacagactacacttgctgctttgaaggatgaa

SEQ ID NO: 493313 - DNA, 50 bp, Homo sapiens
tggagcgaatcctaccttccaaacagaagctatgtggaagcagtgacctg

SEQ ID NO: 493314 - DNA, 125 bp, Homo sapiens
gtatctggaagcctacacctcagtcctaactgtagggaaggaagccttgtctctggaatctgttctgcgccacccggcagataatcgcacccagattcgagagcttggccagactctgattgatg

SEQ ID NO: 493315 - DNA, 90 bp, Homo sapiens
agcagagctcagacatgttctcaccacccttggatgttcaccatgacaagagccatggaagaggctctttttcagcacttcatgcaccag

SEQ ID NO: 493316 - DNA, 99 bp, Homo sapiens
caacagcatcccaccaacatttgatggtgaggaggaaccctcgcaagggcagaaggttgaagaacaggaggtaatcaatattatcaatgctgcccagga

SEQ ID NO: 493317 - DNA, 83 bp, Homo sapiens
aaccactcattcacttctagacgacaaaatgcaaaaaaggaggccaaagactttgaaaccatcaacacaggcccttttgtgat

SEQ ID NO: 493318 - DNA, 99 bp, Homo sapiens
ggatggctactatttcaccaatctgggtgagcagggcagcatttccttctcccactgctgctgagatggcagaaattagtcgaattcagtacgaaatgg

SEQ ID NO: 493319 - DNA, 75 bp, Homo sapiens
cagcagtccaggaatgcagtcagtctgttgatgaaactatttttcggctttgtgagaaaccttaccatcaaacac

SEQ ID NO: 493320 - DNA, 100 bp, Homo sapiens
ctccctctcagcacctgggcggacgaaaatgcatccgatgcagatttatggctcctgaacagttgcactgtaaaaaacccagctgaagaccactttagaa

SEQ ID NO: 493321 - DNA, 100 bp, Homo sapiens
atccagccaatgccaagacagtggagtgggactggaaactgctcacctatgtcatggaggaagagaatcagcatgattcttcagaggctcttcaggttct

SEQ ID NO: 493322 - DNA, 95 bp, Homo sapiens
aacccattcatagagcttattgccagatcaaggtcttctgtgacaaagttggttttcagaagatcctgacactgacatatgtagacaaattgata

SEQ ID NO: 493323 - DNA, 82 bp, Homo sapiens
cctatttagtgctaatgactggcaatgtaaaacggctgccctctcatccacagcatgagttggtgaagcgtcagtgtacagg

SEQ ID NO: 493324 - DNA, 100 bp, Homo sapiens
cgcggcggcggcccacgcgcagcgacagggagagcacaggaagtcctggagaacctgaaggaccgctggtaccaggcggacagcccccctgcagacctgc

SEQ ID NO: 493325 - DNA, 100 bp, Homo sapiens
gccttcgggtcgggcgtctccgccggctactgccgcttcagttctcccggtgtggccacgagtcggtgcctggatcaaagtggaacagctgaagccatat

SEQ ID NO: 493326 - DNA, 101 bp, Homo sapiens
ccgcgagggacgcggcctcgggggaggtggtcggcaagttctacctggacctgtacccgcgtggtgaagcagcgcttgcagatgtacaactcgcagcaccg

SEQ ID NO: 493327 - DNA, 74 bp, Homo sapiens
aacttttgacacggctttggaaacgacgtcatgtgttaggttatacattggctcttcaaagacgttcacctcat

SEQ ID NO: 493328 - DNA, 82 bp, Homo sapiens
gctgatccgagaccctcgctcccccatcaacgtggagagcttgctggaagccattaatttgctagaaccaatgacaaacgac

SEQ ID NO: 493329 - DNA, 75 bp, Homo sapiens
tgcagatcctgacctctctgatgagatggatcggtatttgacctgtccaaagacgacttgatacctctataatgt

SEQ ID NO: 493330 - DNA, 90 bp, Homo sapiens
ggttccagttgaccagcattcataggatcatgcaacagatgagtgaccaccgctacgacaaactcactgtgcctgatgacatagcagcaa

SEQ ID NO: 493331 - DNA, 135 bp, Homo sapiens
ttggaagttattccgtagcataagagctgaaacttcagagcaagttttcattgggcaaaatggggttggtcaaagaaaaagtgatgtatgaaaaagaggcaaaacaacaagaagaaaagattgaaaaaatgagag

SEQ ID NO: 493332 - DNA, 100 bp, Homo sapiens
aacagagaaagaagtgataggagggctctgtaggcaacatgagtgagaatgaggaagaggaaatttctcagcaagaaggcagtggggactatgaagtcga

SEQ ID NO: 493333 - DNA, 50 bp, Homo sapiens
cagtatggtagccacacccccaggtcaccatgtacttgacaagatttcat

SEQ ID NO: 493334 - DNA, 100 bp, Homo sapiens
atcggcacgtcctgttacaccaaaagtggcatgatcctttgcagaaatgactacattagccacttccggctcctgcgtcgctccggaagcctgcgagttc

SEQ ID NO: 493335 - DNA, 50 bp, Homo sapiens
caccccctgagtatggggtaacgaggattgactcagtcagcattgacacc

SEQ ID NO: 493336 - DNA, 82 bp, Homo sapiens
tggcttctcccatgcctgcaggtcaccctgcggtccccaccaagcctgtgggcatcagggatttggggtactctcagtaata

SEQ ID NO: 493337 - DNA, 75 bp, Homo sapiens
cccggagcccccagcgcagcggccgcggtaaagggagaagatgaggaagagaacaatttggaagtacgtgaaacc

SEQ ID NO: 493338 - DNA, 100 bp, Homo sapiens
gaagaatgaacattgtattgagaacaatatagatttgcagtttgtcgctgatggcatcttcaaagctgaactgaatgagtttcttactcgggagctggct

SEQ ID NO: 493339 - DNA, 87 bp, Homo sapiens
ccaggtagacatggaggccgtcggggagacgctgtggtgtgactggggcaggaccatcaggtaccgctattaccagaatgtgtgcac

SEQ ID NO: 493340 - DNA, 100 bp, Homo sapiens
tttggaaacatagctcctaccacagatgtggagaagatgttttcggtggctatgatgatggttggctacctagaggatcaagacataatgggagcatttt

SEQ ID NO: 493341 - DNA, 100 bp, Homo sapiens
ggagggtcctctcagtgattaagcccccttacccaggaatggaacaacctccacaccatccttactatcagcaccatgctccacctcctcaagctcatcc

SEQ ID NO: 493342 - DNA, 74 bp, Homo sapiens
agcattctggggaaaagaaactacagtcatcacaatggtctggatgtcagcaaactgaaacttcaggccaaatt

SEQ ID NO: 493343 - DNA, 75 bp, Homo sapiens
cccagatgagttcttccagtcccctgaggtgatggcaggagtgtttttgggcctaggcctgagtggaatcattcc

SEQ ID NO: 493344 - DNA, 100 bp, Homo sapiens
ctatgttgcttttgtgaagtatgggaaggacgattctgcctggctcttctttgacagcatggccgatcgggatgattgttcagagattttcaatgatggg

SEQ ID NO: 493345 - DNA, 90 bp, Homo sapiens
gtggttcctgctgtggttttgatcatgttgttaccctcggacgtagcccggcttgtattgggattcactccttctccagttgcacagcca

SEQ ID NO: 493346 - DNA, 100 bp, Homo sapiens
caaaaactgatgaccaagagaatgtgtcagccgatgcaccgagtccagcccaggaaaatggagaggcataaacttggaggaggcagtggagagagcatcc

SEQ ID NO: 493347 - DNA, 50 bp, Homo sapiens
tccggggctgccagagcagcagggcttaaatcaagtgatgcttacaaaaa

SEQ ID NO: 493348 - DNA, 98 bp, Homo sapiens
ttggaaactctttgggaaagccactcgaaaagggtttggacagaggagccaaaggccaaatttccactttcagcagttttatttcagctgttagcccg

SEQ ID NO: 493349 - DNA, 100 bp, Homo sapiens
atgactacaaagcagccagtatgcattgtcaggagctgatggccacagggcccagcacaacctgccaagaggactcatgttccaatcaaggtgtgtgctt

SEQ ID NO: 493350 - DNA, 101 bp, Homo sapiens
cccagctctcccaccccccggacatgcccaacaacatggccgccctcgagaaacccctcagccaccccatgcaggaaacttcacattaactttgctctaga

SEQ ID NO: 493351 - DNA, 127 bp, Homo sapiens
cttgccatggccgccctccaggagaaggagtcgatgcgcaacagcctggctgagtagaggtgtgcatcaccttcgaccaggccaacctgaccgtcaagctgccagatggatacgaattcaagttccc

SEQ ID NO: 493352 - DNA, 100 bp, Homo sapiens
aaatggagccagttgtatcgacatcagtggagaacctcagaggaggaacccgttttcactagacaagacagcaatcgcagtgaaaaggaagccacaccag

SEQ ID NO: 493353 - DNA, 107 bp, Homo sapiens
cggtatccaattggcatccagggtcggactcccggggccatggccggaatgcagtaccctcagcagcagatgccttcaattaagttgcagagttctgatggagagat

SEQ ID NO: 493354 - DNA, 75 bp, Homo sapiens
agaagggtgaatgccatgtcaactttgttcggaagattctttcttgtggagaagttattcatgtgaagatccttg

SEQ ID NO: 493355 - DNA, 75 bp, Homo sapiens
aacgtgtcaactctgcttaattaagcactttgatgatttaagaaatcttgaaagaaatgaccgcccggatgtgcc

SEQ ID NO: 493356 - DNA, 90 bp, Homo sapiens
ctcccaaatcaagtatacagaaaatcggtgaagagaggttttgaattcacgcttatggtagtggccaacaaatggaattttcttgagcat

SEQ ID NO: 493357 - DNA, 83 bp, Homo sapiens
cctggagaacgcagtgctcttcgaagtggcctgggaggtggctaacaaggggggatatgagactttctactcggaatatcctg

SEQ ID NO: 493358 - DNA, 88 bp, Homo sapiens
gccttcaggaaaagcatcccggaggaggaagaagaagtgttatatgtcctaaagtaaggtttcagacttacaataacagcactaggag

SEQ ID NO: 493359 - DNA, 75 bp, Homo sapiens
ccggccttcacgccgcagagccgctgcaggccaacgcagacccgtcagtgataaactgtctgcataacctgtccc

SEQ ID NO: 493360 - DNA, 100 bp, Homo sapiens
agctgccctcagctgcactgtggcaaggcttttgcttccaaatacaagctgtataggtaagaatcaggccttattggagacattcaagcaaaggttggac

SEQ ID NO: 493361 - DNA, 87 bp, Homo sapiens
tcttcaatgataagagctgtcagttttctgtggatgaaggggcaagctctgtgtgattgattggaagacatcagagaaaccaaagcc

SEQ ID NO: 493362 - DNA, 90 bp, Homo sapiens
acctacaaggaatctgagggtgccctcaatgagcacatgaccagcttagcttctgtcctaaaggtgatgctgtggagtcttcaaaaagcc

SEQ ID NO: 493363 - DNA, 82 bp, Homo sapiens
caggagcacgagcgaagtacagcttatggatggaattgatagatgtcacatgtaccctgctgcttctaaacccagactttac

SEQ ID NO: 493364 - DNA, 74 bp, Homo sapiens
gcttgacctccaccttcgcctaaaggaggagaaggcccctggcccagatctcattgccccggatcatctgcgac

SEQ ID NO: 493365 - DNA, 82 bp, Homo sapiens
agaagttgttctaacgctgcctttgctttaaaacagtattacttgcgactatgtcttcagcagtggtgcagttatatgcagc

SEQ ID NO: 493366 - DNA, 100 bp, Homo sapiens
ggcctgggccctctacctttcccttggtgtgctctgggtggcccagatgctactgggccagaacacaaagcgtgaatccggaagaaaagttcaatctgga

SEQ ID NO: 493367 - DNA, 75 bp, Homo sapiens
tgcgatggggcgagaaaggtcccactgcagccctccaagcaggtgacagagttagtccttgataattgcctgtgt

SEQ ID NO: 493368 - DNA, 95 bp, Homo sapiens
cccgaggctccgcaccagccgcgcttctgtccgcctgcaggttaagcaaccttttccacgggatggataagaatactcctgtaagatacacagtg

SEQ ID NO: 493369 - DNA, 100 bp, Homo sapiens
aaactcaagctggacatcgacaagagcgcgggcgctaatattgacacctgctcagaagaccagaggaccccgttgatggaagcagccgaaaacaaccatc

SEQ ID NO: 493370 - DNA, 76 bp, Homo sapiens
ccctgtaacccaaaggaggaaacagctggctaagctcatcattgttactgcggcgtcttcgacatcttcggaacat

SEQ ID NO: 493371 - DNA, 75 bp, Homo sapiens
gttggcgcccggcagcacgtgttcctggtttcagtaagactttgaccccgacgcaggcttcagtgattgccgcgg

SEQ ID NO: 493372 - DNA, 95 bp, Homo sapiens
aagtgcaatgtttcaaatacattttcgagtctggcactaaagatccaagagtttcaagctacagctaaagaagcttgtgcggataggtcaattag

SEQ ID NO: 493373 - DNA, 100 bp, Homo sapiens
gtgacatgtctgatcccttgctcccatccctgcagcatgaacaaggacggcatcagaattaatgtaactacactgaaagatgatggggacatatctaaac

SEQ ID NO: 493374 - DNA, 82 bp, Homo sapiens
gccccctggagggggcagtcccgggagaacctgcggcggccggagcggttgattcttcaccacactgaaaccattaggaaaa

SEQ ID NO: 493375 - DNA, 100 bp, Homo sapiens
agaccctgcccgtggccttcaagatggtccccatccctgctggagtatttacaatgggcacagatgatcctcagataaagcaggatggggaagcacctgc

SEQ ID NO: 493376 - DNA, 75 bp, Homo sapiens
caatccgcatcttggtgaaacggatgtgggctctcttgatgagaagatgaagagcttggatgtgaatcaggactc

SEQ ID NO: 493377 - DNA, 100 bp, Homo sapiens
gtgggtttcctgtgctaatggacaagagccgctcccgaggccccggcgcggcgcgagggcgcggggcgcggcgtccacaggcgccgaggctgcccccgcc

SEQ ID NO: 493378 - DNA, 100 bp, Homo sapiens
cgagccgcgaaccgagcgggcggcgggcgcgcgcaccatgggggagaaacccgggaccaggactgggccggggtctgcagggctcagctgagcccatgag

SEQ ID NO: 493379 - DNA, 88 bp, Homo sapiens
catgaatagttctactccttctacaggtgtgtatgattccagtgtagttagtgacgttgtacttcaagacttactggcatatgtgtcc

SEQ ID NO: 493380 - DNA, 100 bp, Homo sapiens
acctgggcatgtcctgtgatggccccttcaagccggatcactaccgctactgagagccagtacaaaattggacagctgtacatgatcagcaaacacagcc

SEQ ID NO: 493381 - DNA, 83 bp, Homo sapiens
cctcaggcgtgcgcggacggtgtgcgggggtgagcccctccagactccgaataggagatcaagagtttgattcattgcctgct

SEQ ID NO: 493382 - DNA, 83 bp, Homo sapiens
gcaattacacagttttatccagatgatgaagttacagcaataatcgcttccttcagtttattaaccttgcaagaactcttcag

SEQ ID NO: 493383 - DNA, 100 bp, Homo sapiens
cagagccaggagaaaacagcatctctgaagaggagtacagcaagaactggttcacagtgtccaaatttagtcacacagaaaatggcagaggaagacggat

SEQ ID NO: 493384 - DNA, 96 bp, Homo sapiens
tgggacagttgtggctcttgaggtggaccacttcagcaatgtggggaacacccaggatctctctcagagtgacccagtggcctttgaggatgtggc

SEQ ID NO: 493385 - DNA, 75 bp, Homo sapiens
gtgcaaacccgagagaactggatagtcaaagaggttggtcaactggcagaaacccaacgcttcgaatgcaccacg

SEQ ID NO: 493386 - DNA, 100 bp, Homo sapiens
ctgcagaatatggtactaatgcaaaggtgcggcggcagcacatggagcgttgtaccagcttcctggtggatgagctgggcgtggtggatcgatcccaggc

SEQ ID NO: 493387 - DNA, 50 bp, Homo sapiens
ctagctgcagccggagcctgggagacggactgcgagaactacatcactct

SEQ ID NO: 493388 - DNA, 90 bp, Homo sapiens
ggaagacccacctccctatctcatgatggatgaacttcttggaaggcagagaaaagagccccccaagatgaacccagtggtggagccact

SEQ ID NO: 493389 - DNA, 50 bp, Homo sapiens
cagttgcagtgttggagctaaagtttgaaagattagaagtcctggctgta

SEQ ID NO: 493390 - DNA, 100 bp, Homo sapiens
attcgcagtggtcgcttcttctccttggtgccacatcatctcacagttcaaccaaggcttctacgactgtgtcatagcaactgatgctgaagtcctgggg

SEQ ID NO: 493391 - DNA, 83 bp, Homo sapiens
cttcccctggatgggaaaacatctcaagtgggtaattccagaattgattggccataccattgtcactgtattactgctcatgt

SEQ ID NO: 493392 - DNA, 75 bp, Homo sapiens
caggcggacagatggactgtaagggtcttgctctgttgcctaggctggagtgcagtggtacaagcacggctcact

SEQ ID NO: 493393 - DNA, 100 bp, Homo sapiens
ccagtactctatatgaacaatccgtctggatcacggatgtaggaagtggtggcagaactggtgaagccattgtagatgctgcgctgagtgctctgcgcca

SEQ ID NO: 493394 - DNA, 100 bp, Homo sapiens
tgtctgggccctgagtgctgaggaggaagctgccatgcacttttccctggcatttttcctgcatggtgtggtgtcagcacagcggcaggtcaccgttcag

SEQ ID NO: 493395 - DNA, 80 bp, Homo sapiens
ctggatgctgcagacactgaacgaggagccagtgataaagcttcaccaagaaggttgcccaggaaacgggcacagaagag

SEQ ID NO: 493396 - DNA, 83 bp, Homo sapiens
tccgccctaatggaggtctccagtttagatggagtcccctgtttccacaccagcagtgctgccaatacaccttttggtgccag

SEQ ID NO: 493397 - DNA, 75 bp, Homo sapiens
tgataagggatgaagatgtaataatattgacttaccccaaatcaggttaccagcacaactttgacacctatgatg

SEQ ID NO: 493398 - DNA, 80 bp, Homo sapiens
cgccctggccatctaccatgtgccttatgccagcctggaccatcttggaggcagtgtaggatcatggaagaactttgaat

SEQ ID NO: 493399 - DNA, 100 bp, Homo sapiens
acatgccttccccagctccctgatacaggccaatgtgaccgtggggacttgctcgggcttttgttcccagaaagcaattttatatgatgacaaaggagca

SEQ ID NO: 493400 - DNA, 83 bp, Homo sapiens
cggcagccgaggccgcgaactgcatcatggagatgagcgggatcgtgtgcagaagaaaaccttcaccaagtgggtcaacaagc

SEQ ID NO: 493401 - DNA, 98 bp, Homo sapiens
aggccctgcagcgctacagtgaggaccgcatcgggctggcagactacgccctggagtcaggagctccggtgccctaccagaactattacgatcgggag

SEQ ID NO: 493402 - DNA, 50 bp, Homo sapiens
aaatgaggacatatcagtatcggtgggagacctccacagaacccttccag

SEQ ID NO: 493403 - DNA, 74 bp, Homo sapiens
acggaaatgcgcgagatggacctgcaggtgcagagtcagaacaaaatctgcttcatcccaggcatggtaggacc

SEQ ID NO: 493404 - DNA, 74 bp, Homo sapiens
cacgtgtttgttctgggcgaatggcagcccatcgagtttgctgatggtcgccaaagttggagttagtatgttca

SEQ ID NO: 493405 - DNA, 100 bp, Homo sapiens
ctgaatctattgccaacatccagattggtgaaggagtacctcctggcaactatgggaactatggctatgctaatagtgggtatagtgcctgtgaagaaga

SEQ ID NO: 493406 - DNA, 98 bp, Homo sapiens
ggacgacgtgtacctggacatcaccgcgatggcaagccggcaggtggatattgcaactcagggctggttcattggtctgatgtgtgctgttgctctcc

SEQ ID NO: 493407 - DNA, 90 bp, Homo sapiens
agaggccagatgcagatctgaagacctattttactgataagaaaacacatctttacacactaaatcctgcagctccaccaaagaaaccgc

SEQ ID NO: 493408 - DNA, 76 bp, Homo sapiens
ctatggctttattgacctcgactcccatgcggagcgcagctcagctgggctggaactgccctcctggaactccccc

SEQ ID NO: 493409 - DNA, 89 bp, Homo sapiens
catggccgggatcattaagaagcagatcctgaaacacctgtcccgcttgttctcagaacacaaacaaaacctgtgaagagtgcctgaag

SEQ ID NO: 493410 - DNA, 51 bp, Homo sapiens
gtgaaatcagaggagatgtaactatcgaatcttgctctgtcgcccaggctg

SEQ ID NO: 493411 - DNA, 75 bp, Homo sapiens
aagaaggaacgatctcgtaagaaggattcacggctatgtgactacgtttgtgacctcctcttagaagagtcaaat

SEQ ID NO: 493412 - DNA, 83 bp, Homo sapiens
agtgggggaggcgaacagtctcgttgctgcctctgtgtacgctgaggggggagattgtcactgctgttccaagggcacacgca

SEQ ID NO: 493413 - DNA, 100 bp, Homo sapiens
ggtgccccacaggccactgtgcaggatctccactcggccctgacacaggtatctcaggagattacatttcagcttgaaaaagggtcggtggaatttaaaa

SEQ ID NO: 493414 - DNA, 96 bp, Homo sapiens
tttagttctggggagcgcctcgtcgacatgagtgatgtggaggaaaacaacttcgagggcagaacattctaagtgagactgtccacatcatctagg

SEQ ID NO: 493415 - DNA, 94 bp, Homo sapiens
cggagcgggagtgttcgttgtgccagcgactaaaaagagcaattctgtggtgttcttggtcacacatttatggagtttctgaagggcagtggag

SEQ ID NO: 493416 - DNA, 90 bp, Homo sapiens
gctaaatcaagcttggaatgatcatcaaacagctatggtgatgattagagacatactaatgtacatgtgctcccaagaagatattgctga

SEQ ID NO: 493417 - DNA, 74 bp, Homo sapiens
cgaattcttataaagctgtcatcaacctgggaaggaattcaggctggaaagatgtaggctatccggaattcctc

SEQ ID NO: 493418 - DNA, 99 bp, Homo sapiens
cacagaagcagagttacaggacatgattaatgaagtagatgctgatggccggaaggtggtggtcgtacgctgtgaaggcatcaacatttctggcaattt

SEQ ID NO: 493419 - DNA, 101 bp, Homo sapiens
gcgtcgacccgggccgctcctggaggaggaggtgggaggcaggccagaaagcagacccagggaggatagcacatgtcttcggctacactggtgaaggcatc

SEQ ID NO: 493420 - DNA, 82 bp, Homo sapiens
acaactccagtgctaactcaacagtacctggagtagaacagaaaaattattatgtctgtgttcccttgggactcattggaaa

SEQ ID NO: 493421 - DNA, 100 bp, Homo sapiens
aggagaccggcacccagacaggtggcgaaggcagaggagttccacaaatcaacaagacttttcttcagggaaaagtgaagatttgggaacagttcaggag

SEQ ID NO: 493422 - DNA, 90 bp, Homo sapiens
agcgtgctcccctctgagactggagtgagagggtcttctggaagggaaaaggccgaggcatcagcgtgtgaagaccgcaaagacgatccc

SEQ ID NO: 493423 - DNA, 100 bp, Homo sapiens
tgctgctacttctggcaggtgtggcctgcctccgaggacggtgcagcctggtgagaccatccaatcccaaataaaatgcaccccaataaaaactggaccc

SEQ ID NO: 493424 - DNA, 75 bp, Homo sapiens
gccagctcctactcctccctcaactccctcatcgctgagtcagtgctgattctctcaaatagagcttgaaggata

SEQ ID NO: 493425 - DNA, 50 bp, Homo sapiens
tggagccaccagcctctccttgcccgttttacggagaagacttttactgt

SEQ ID NO: 493426 - DNA, 100 bp, Homo sapiens
caaaacaagccctccaggaactcacgattatctgggagcttgcattgtcctcactgcatctatagcatccattagtgggtcttcgaattctggattggta

SEQ ID NO: 493427 - DNA, 74 bp, Homo sapiens
atctgcaaggtccgcttcaccagaacccttaggagaaatcttgagagtggacagcaattgtgaagatcgccaga

SEQ ID NO: 493428 - DNA, 82 bp, Homo sapiens
ctgttgactggaagaacattgtttcctggtacagaccatatgactttgacactcagtatgctttcgttggtgattattctgg

SEQ ID NO: 493429 - DNA, 75 bp, Homo sapiens
ccgcctccgcgccacctttgctggcctctactcactggatgtgggtggtgacttcacacgccataatggcactgg

SEQ ID NO: 493430 - DNA, 98 bp, Homo sapiens
ggcggcaccatgcaggtcaccctgaagaccctccagcagcagaccttcaagatagacattgaccccgaggagacggcaaagcgaaggctggagctagg

SEQ ID NO: 493431 - DNA, 98 bp, Homo sapiens
tcgagagctcgccccgaacgggggtcttcctcctccgccgttgacagcatcctgaggttagcattacacttctcccagtggagcccatgacttctgat

SEQ ID NO: 493432 - DNA, 90 bp, Homo sapiens
gttaaagatgagcgggtggcagcgacagagccaaaatcagagctggaacctgaggagagaggcctgatcacttgaacggacatatcaagc

SEQ ID NO: 493433 - DNA, 95 bp, Homo sapiens
agcctctcaatcccagtctcatgcttccagcctggataatgattgagccacctgtccagggatcttagcaacatcaattgtgaagagcttggtcc

SEQ ID NO: 493434 - DNA, 75 bp, Homo sapiens
taaatcgctgtctccaagtcctttttccaccagctcagatagcacagactttagacctcttaagtcatgaaaatg

SEQ ID NO: 493435 - DNA, 98 bp, Homo sapiens
agctgctacccattccagggaccctgccgctgcccctctgaggggtctgcacctcctgggagcagtggcgtgggtctggcacgagcacattttgagaa

SEQ ID NO: 493436 - DNA, 111 bp, Homo sapiens
cgccgccgccgcctcggccgaccagggacctgcccgcctgcggctgctccgggtggatctcgagccagaggggaaagtatttgtggtaataacccttaccgggagtttcac

SEQ ID NO: 493437 - DNA, 100 bp, Homo sapiens
aatacagaactggcatgaagaacatagaggaatgttaagggaggtggggaagacagggctccagctaccacaggacgggctctgggtatagccgttccag

SEQ ID NO: 493438 - DNA, 82 bp, Homo sapiens
ttgtgaacttcaccagactacagcagatcacaaatattcaagctgaaatctaccagttactaaaagatgtaactgaactgca

SEQ ID NO: 493439 - DNA, 110 bp, Homo sapiens
atgaacgtcacctcaccgctccaagcctccagccggcagaaaaccactttcagaccatgctgaagtctaaattgaatgtcttaacactgaaaaaggaacctctcccagcg

SEQ ID NO: 493440 - DNA, 99 bp, Homo sapiens
caccagtggagcctattttcgccgggaaggattaggtagcaactacctaggtggtcgtagccccactgagacgaatctagaacatgatgtctatgaaag

SEQ ID NO: 493441 - DNA, 100 bp, Homo sapiens
gggtaattaatctggccaatgagatgtttggttacaatggctgggcacactccatcacgcagcagaatgtggggatctctcaatgctatttgccttcatt

SEQ ID NO: 493442 - DNA, 75 bp, Homo sapiens
actaatggaattagcctgcaacatgaagtgccggtggtggtgtgcacattgagccccggtatagacagttccccc

SEQ ID NO: 493443 - DNA, 76 bp, Homo sapiens
cggggacctggtgttcgccaagatgaagggctacccacactggccggcccggggctcttccgtgggcggcggcttc

SEQ ID NO: 493444 - DNA, 117 bp, Homo sapiens
ccgaccttgaggctgccgccgcgagtctgccatcgtccaaggaggtggcaggtgctggagaatctggtaaaagcaccattgtgaagcagatgaggatcctgcatgttaatgggttta

SEQ ID NO: 493445 - DNA, 101 bp, Homo sapiens
gctctgcctccggggacaagaaactagagcaaataaccgttttgaaattataactgttcccaggaaaaaaaggaggaaatcctggaaaatgaaaagcccag

SEQ ID NO: 493446 - DNA, 100 bp, Homo sapiens
agtgatgagcagtttgttcctgatttccattcagaaaaccgtgatcatggagctcagcttggtctccatggggctggtggtgatggaatacatgatgaca

SEQ ID NO: 493447 - DNA, 95 bp, Homo sapiens
ctggaggtggatctgaagaacgggttacagaatcagagtgtgcaccaatcccaaccacgggtattggaggtagagactactccaggatccttgag

SEQ ID NO: 493448 - DNA, 74 bp, Homo sapiens
aggagctctggcacaaggcaaagcccctcgcccagaaatcagccagctaactagaaaatcggcaagagaccgaa

SEQ ID NO: 493449 - DNA, 88 bp, Homo sapiens
cccaaagcctgaacaggcagggccagacccagaggctgaggggatctggcggtggagcgctaggatcagacgcccccgcgatgaccag

SEQ ID NO: 493450 - DNA, 90 bp, Homo sapiens
gcagccggggagctgcaggaaccagactgggggcgagctgagcacctgtagtcaatcacacgcagctccagtcagcccggtcaagcatga

SEQ ID NO: 493451 - DNA, 104 bp, Homo sapiens
gagatcaaatggcacttcattggccacctacagaaacaaaatgtcaacaaattgatgggtgttggagcgggccggagagaagtagagtgggctgcgaggagaag

SEQ ID NO: 493452 - DNA, 50 bp, Homo sapiens
aaaccagaagaaaacctgaatctctgagtgggctcgggatgagtttgaag

SEQ ID NO: 493453 - DNA, 90 bp, Homo sapiens
cgggccgcccccacagcaccccgggctggcgtgagaatcgtcggggtagtgactccgagaaacgaagcttggatagtcggggagagacaa

SEQ ID NO: 493454 - DNA, 75 bp, Homo sapiens
gacatggctgagatcaccaatatccgacctagctttgaacttgatcttttccctgaattaattggaactgaagaa

SEQ ID NO: 493455 - DNA, 100 bp, Homo sapiens
ggaaagttgagtctctcctgcgccgagccttcggggcgatgtgtagtgccttccatagggctgagtctgggaccgaggaatgatgagaagacagcagctg

SEQ ID NO: 493456 - DNA, 100 bp, Homo sapiens
cggtcaacgagcggggcaaccactgcgagtactgcttcaccagcccctcatatggaaaatttgaaatgcagaggggaaacagtagcaaaggagatcagtg

SEQ ID NO: 493457 - DNA, 98 bp, Homo sapiens
cggcgtccggagcatggcggacccccagagctgagccccccaagatgaacccagtggtggagccactgtcctggatgctgggcacctggctgtcggac

SEQ ID NO: 493458 - DNA, 100 bp, Homo sapiens
gcaggaaggagagcccttcagcgaggaagctacacttttcaccaaggaactggtgctgcagcgagaggtgaatgaaaactttgccattgatttgatagca

SEQ ID NO: 493459 - DNA, 50 bp, Homo sapiens
ccgggaggtcaacgaggtcatccagtgcacttggaggctcctcagctctt

SEQ ID NO: 493460 - DNA, 100 bp, Homo sapiens
tgcctttgacaggagaggctgcttcttgtagaggcccgatgagagaaagggaaagttaaggatgctggagcagaacaatggatttctctttctctttcat

SEQ ID NO: 493461 - DNA, 99 bp, Homo sapiens
ttaaaaagacggacagcccatcgtgtgaactatagagtttgtggacagatttatattggtatccgttacagcactgatgtgagtgtagatgaagtaaaa

SEQ ID NO: 493462 - DNA, 100 bp, Homo sapiens
aatgaagaatggaagaagcttcgtgtccaacctgttcagtcaatgaagcctgtgagtggacacccttttctcaaaaagggccatgatccaaaggaaccag

SEQ ID NO: 493463 - DNA, 90 bp, Homo sapiens
gtgtttgccaatgttggagccgtctgcaaagtgtccccggcaagaaggagcaggacatcgagactttacatggctctgttcacgtcacgc

SEQ ID NO: 493464 - DNA, 100 bp, Homo sapiens
ttgaagtccttaacacccttggtgtgactgttctcagtgagaacgagaatctacctgttactcgtattttggacaatcttatggagatgaagtcaaaccc

SEQ ID NO: 493465 - DNA, 75 bp, Homo sapiens
cgcagtgccacttcgacatcgagatcaaccgggagccggctcaatgtacttctccagttcctacccttcctcaag

SEQ ID NO: 493466 - DNA, 100 bp, Homo sapiens
gcgcagagctggaaagcatggctgtttctgcagatctccaggggagcccaccagcctagtcaacatggcctcggaagacattgccaagctggcagagaca

SEQ ID NO: 493467 - DNA, 83 bp, Homo sapiens
gacgcggagcccggagctggggcgacgaggcgattgcgggggcctgggctagttcatagccctgatgaagcaagttactctgc

SEQ ID NO: 493468 - DNA, 80 bp, Homo sapiens
ctagaggttgaggacgctcagtttacccaaggtccagcctagcccctaggcaccatgtcggacagtgatctaggtgagga

SEQ ID NO: 493469 - DNA, 95 bp, Homo sapiens
cataatcaagttcggggcaaagtgttcccaccggcagcaaatatggaatatatggcatccgtgtacaagatttgcagagaaatgtatgacgatgg

SEQ ID NO: 493470 - DNA, 125 bp, Homo sapiens
gttattaaatggcctagcccagcaaatgatcagccttgcaaataatcacagattagctgttggactccatgaaagaattgcacaaaacaaatcgacagcagcatgagaaacatctgcaaagccga

SEQ ID NO: 493471 - DNA, 75 bp, Homo sapiens
gggagggagcggtcgccgcgggatttggagctgcctagcctcgcggtcgggaggacatgtatgcccaggactcta

SEQ ID NO: 493472 - DNA, 98 bp, Homo sapiens
tcttccccgaggaaagggtatccgcctcaccattgctgaagagagagacaaaagactggcggccaaacagagcactccttccaactcctcagaacctc

SEQ ID NO: 493473 - DNA, 75 bp, Homo sapiens
ccgctcagccgtgccctccgcccctcagatggaggagatgtataagaaagctcatgctgctatacgagagaatcc

SEQ ID NO: 493474 - DNA, 98 bp, Homo sapiens
gtctaatgaacgaaagctaaaacaaaccttggaagcagaaatggcacctgttcttcccggagcctatcagcaaagccattcccaaggctatggctaca

SEQ ID NO: 493475 - DNA, 111 bp, Homo sapiens
ttccaccatgattgtgaggcctccccagccatgtggaactatgatgaagatgatgaagaggaagatgaagaggaagaaatcgacgtggtcactgtggagaagcggcgttcc

SEQ ID NO: 493476 - DNA, 99 bp, Homo sapiens
gacacagctatctctgggccactccactatgccccttaccacaggagctctgcacagtgggatggagtaggacctcttccagactgtgctgaaccacca

SEQ ID NO: 493477 - DNA, 83 bp, Homo sapiens
gtccgattagccttttctctgccttgcttgcttgagcttcagcggaattcgaaatgttactccacaggatccgctgaacatag

SEQ ID NO: 493478 - DNA, 74 bp, Homo sapiens
gctgggcctgacagagaaggctcactcaaggatcagttggctttagcaattgtcaggatctggtgattttgaag

SEQ ID NO: 493479 - DNA, 50 bp, Homo sapiens
gtcgctacgggagcagccagaaagatgatgtgtcaaatgtacaaataatg

SEQ ID NO: 493480 - DNA, 80 bp, Homo sapiens
ggcctccccagccacgtggaactctgtcctgccagtgaggcactgttgacccatcgtgcctgggcctaactgtcatgtag

SEQ ID NO: 493481 - DNA, 100 bp, Homo sapiens
aggacgcaaagttctccggcgagatgtcatctgggtgattctcagtgtggaggtgggtggacttttaggagtaacgcagcagctgtcatcttttgaaacg

SEQ ID NO: 493482 - DNA, 90 bp, Homo sapiens
agggggctttgctggtctttcttggactattccagagagctgttttcactcattagctcctgaggtaaacaaattgaaaaaatgagcgaa

SEQ ID NO: 493483 - DNA, 89 bp, Homo sapiens
ctctcgccacagcggcctcggcctccccttggattcagacgccgattcgcccagaacttgggaatcagtgaaacgtacaaccaggaaag

SEQ ID NO: 493484 - DNA, 75 bp, Homo sapiens
gtacccgtccatcatagtcaactgcgtggaagagaaggttttcaaaattcacttctacagatcgtaattccagag

SEQ ID NO: 493485 - DNA, 90 bp, Homo sapiens
ggatgatgcaatcaaagctcgacttctcaatcccaagtggccaaagttggcttcctgaggctcaggtagtccaaagagccctgaattctg

SEQ ID NO: 493486 - DNA, 83 bp, Homo sapiens
ccgatccgccgcccgtccacacccgccgccagatcatccgggaagcccacgggaccctcaggcgggcaggatgaacgactggc

SEQ ID NO: 493487 - DNA, 98 bp, Homo sapiens
cgagaccgtgaccgagagcgtgaccgagagcgcgaatatcgtcatcgttagaagatggagtctcccaggcgggaatgcaatggtgcgatctcgacttc

SEQ ID NO: 493488 - DNA, 88 bp, Homo sapiens
cgggcttcggcccccaccagagactcgatcaccggcgtaatcaacccagcgttggacaaatactttccgtcagactctggagtgagaa

SEQ ID NO: 493489 - DNA, 82 bp, Homo sapiens
gaagaagaaaggattcgttacagccagagattgggagaccaaattttgaggaaggtggaccaacatcagtagggagaaagca

SEQ ID NO: 493490 - DNA, 98 bp, Homo sapiens
gggagcgtgctttccacgacggtgacacgcttccctggattgggcgttggagaccagggccagccctggccacaccccaggctgtgtcaccttcgtcc

SEQ ID NO: 493491 - DNA, 82 bp, Homo sapiens
ctcagttggaagcagccgatccagcctgcggagcctgtggggcagttcaaatctgaacatcaatgatgtactagggaactac

SEQ ID NO: 493492 - DNA, 82 bp, Homo sapiens
agcctcgctggaggcagtttctgcccgagcgggaagaagttccgcagcaagccgcagctggcgcgctacctgggcggctcca

SEQ ID NO: 493493 - DNA, 74 bp, Homo sapiens
gaggattatcttagaattttaagatacttcagttgcaaccagtgtggcagagagtctaagcttttgtcaaaatt

SEQ ID NO: 493494 - DNA, 50 bp, Homo sapiens
ccgtggacgccgaccgtccgggacgaggtcgccactgggacactgtgaac

SEQ ID NO: 493495 - DNA, 82 bp, Homo sapiens
ggaaagtacaggtcctgacagctggtctctaattaacagaagatggcaaagcccagccacagcagctatgtccttcagcagc

SEQ ID NO: 493496 - DNA, 100 bp, Homo sapiens
ccctcatcagacacacctgaaacagggcgaggaggcttccgaggaggcagaggaggaggaggtgaccacaagccacaaggaaagaagacgaagtttgaat

SEQ ID NO: 493497 - DNA, 83 bp, Homo sapiens
ccgcaccaagaaccaaccctgccagcacctggaccttggacattcagacttcagaatgtcaagtgcttctgctcctgatgtgg

SEQ ID NO: 493498 - DNA, 100 bp, Homo sapiens
tggggcagcagaagctccagagcccagacttgcaggtgtccctggccagtgtccttccacctgtccacaagcatggggaacatcttcgccaacctcttca

SEQ ID NO: 493499 - DNA, 82 bp, Homo sapiens
gggtggcggctcgggacggaggacgcgctagtgaggaggaaggtgaggacggcgatccatcgtcagggcccccagggccgtg

SEQ ID NO: 493500 - DNA, 82 bp, Homo sapiens
gcaagatggcggacagtgcggaactaaagtgttctaagaacggaagcatctgggctggatggaatttagcatcaagcagagt

SEQ ID NO: 493501 - DNA, 75 bp, Homo sapiens
aatcgctgagcgatatcacagaacacaagattaatcaatgtcaactgacaggaagaagtaagtctaacttgggct

SEQ ID NO: 493502 - DNA, 100 bp, Homo sapiens
gcagatccttcagcaaaagctgtccttacagagtgctgcagcagctcccagtccagtgctaggaaacattcccccaggagatggcatgccagtaggtcct

SEQ ID NO: 493503 - DNA, 111 bp, Homo sapiens
accggatcctggagaacatctcgctgtcggtgaagaaggtgtattacctgactgcttaaccgatggctctgatgtggtcagtgaccttgaacacgaagagatgaaaatcct

SEQ ID NO: 493504 - DNA, 93 bp, Homo sapiens
tggagcgttggctgtgaggagacagagcatcccaggcagaatacttctatgaattcctgtccttgcgctccctggataaaggcatcatggcag

SEQ ID NO: 493505 - DNA, 90 bp, Homo sapiens
ccctccctcagcttccgccccaaaagacggtctggaaaatcccgaagcagaagcccgtattcatctaggcattcaagatctcgtagcagg

SEQ ID NO: 493506 - DNA, 100 bp, Homo sapiens
ggggtggaagcagaagaatggggtaaatttcttcacaccaaaaataagctcgtttgatcccttccaactgataccttgtaatttttttagtgaagaaaag

SEQ ID NO: 493507 - DNA, 90 bp, Homo sapiens
tggggcatttgcgctcgcacctgaggcagtccctgctgtgcacctgggggtacagcgggagatacagatgacccaccaagaattactcag

SEQ ID NO: 493508 - DNA, 90 bp, Homo sapiens
ctgcatgtatttgtgttgttactgatgcagagatacagcaaaagagtctacatagggttctgatgactgtcttgtgaaaatatgggcaac

SEQ ID NO: 493509 - DNA, 100 bp, Homo sapiens
acttgtgattgagcagtttgaagacttgctagttaggattttattactggcagcatgtatatcttttctgttgaaggaggatgttcccatcttggtcagt

SEQ ID NO: 493510 - DNA, 75 bp, Homo sapiens
aacgcatcatgccagggagccaagcgtcctgcccggccgtttcaagtgccccatttgctccaagtctgtggcttc

SEQ ID NO: 493511 - DNA, 98 bp, Homo sapiens
gcggaggtgcggctgcaggccgttgttggtcgagctggcgggtcccgcgggccaggccgtggagcaaatccagtttgctgatgacatgcaggagttca

SEQ ID NO: 493512 - DNA, 90 bp, Homo sapiens
tcctgaagaactggaacacgtagaaagtgcaagcaaaggtggagccgccaccaaaatgcagattttcgtgaaaacccttacggggaagac

SEQ ID NO: 493513 - DNA, 88 bp, Homo sapiens
ctgatggtgtcggtgagcgcgtttcccgcctgagcgcaactagcggcgggtcgtgggcacctccaggaaaatgtttataggaggcctt

SEQ ID NO: 493514 - DNA, 148 bp, Homo sapiens
cggcaggatgaaagtgagcagtccagaaagcggcttatcgaacagagccgggagttcaagaagaacactccagagaaatggcaggatattattaaggaagtcaagtttctacaaagaataaaacatcccaacagtatagaatacaaag

SEQ ID NO: 493515 - DNA, 82 bp, Homo sapiens
gtctgactctgactctcggactgagaaacgcaagaaataccgctaccaagatgaagacacgccccctctggagcacagcccg

SEQ ID NO: 493516 - DNA, 104 bp, Homo sapiens
tggagctactggcgtggtagttaaaggcccagatgataggaatcccatctcatttagtgttctaagaacggaagcatctgggctggatggaatttagcatcaag

SEQ ID NO: 493517 - DNA, 100 bp, Homo sapiens
gagccttcctgatccgggagagtgagagctccccaggggagttctctgtgtctgtgaacaaacggggattcagcgtccgatcctttggaacagggactca

SEQ ID NO: 493518 - DNA, 80 bp, Homo sapiens
gttcggcagctacgcagatgcgctgtggtggggggtgctctggattaatcgaattacagctgctagccaggaacatggac

SEQ ID NO: 493519 - DNA, 100 bp, Homo sapiens
gcaaatttgctcatccccccaaaagttgtcaggttgaaaatggaagagtaattgcctgctttgattccctaaagttgctgccaaacaaggtgaatccgac

SEQ ID NO: 493520 - DNA, 100 bp, Homo sapiens
ggccgggcgggccgcgggagccgcacgcggcgatatggaagaggagggcaagaagggcaagaagatgtgtcttgctgaatcagggctctcttatccctgc

SEQ ID NO: 493521 - DNA, 73 bp, Homo sapiens
agaatatctcatggagtgtattattcaggtatttcagagagatgggaatgatttgcacatgacatataaaata

SEQ ID NO: 493522 - DNA, 83 bp, Homo sapiens
aagcctggaagaaaaagatacaacgaactagcacaacgaggtatgccaccacgggctgttccctgaccctgcaccatacggag

SEQ ID NO: 493523 - DNA, 82 bp, Homo sapiens
caaacatccatatcataagtggaattttggagatattcaaaggtactaatttggtcgaagcagataaccaagcggagtggac

SEQ ID NO: 493524 - DNA, 113 bp, Homo sapiens
aaggatttgagactaagtttattcctccaaagcaaaccaactgagaatgcaggtgaaagaactcttttcttctttgggagtcgaatgtaatgtcttggaacttgatcaagttg

SEQ ID NO: 493525 - DNA, 89 bp, Homo sapiens
caagtatgttggggtttcctcagacagtgttggaggattcagatacagatcctgatggtgaacatgccaggagagcaatgcaaaaggtg

SEQ ID NO: 493526 - DNA, 75 bp, Homo sapiens
atcttggctcctccattctgcttttaagttttttgcatgtctgacacccatgactccacctggaccttatggctc

SEQ ID NO: 493527 - DNA, 111 bp, Homo sapiens
cgcctgagcccgcccttgatcttcgctgtggcatggcggacgaggggaagtcgtacagcgacaatgcagatcttcgtgaagactctgactggtaagaccatcaccctcgag

SEQ ID NO: 493528 - DNA, 51 bp, Homo sapiens
ggagaggacatgatgcatccactcaacaacagctgcgaatgcggatcaagc

SEQ ID NO: 493529 - DNA, 96 bp, Homo sapiens
tgacatctcccctgagattggggagaaggtgcggactcttgttcttgcactggtgatctgcaggagcatgtacagctgcagcattcctgaaagaat

SEQ ID NO: 493530 - DNA, 101 bp, Homo sapiens
gtgaagcaaaagccttccatgattacttgttgacctcctgtactggagagacattaagaagactggagtggtgtttggtgccagcctattcctgctgcttt

SEQ ID NO: 493531 - DNA, 100 bp, Homo sapiens
catctttaaggcaggagctgatgaagagagagcagagacagctcgtctggccaaggcagaggcttcctcaggagaccatcccactgacacagagatgaag

SEQ ID NO: 493532 - DNA, 100 bp, Homo sapiens
aacgacatgatgcaatcttcaggaaagtaagagggaaactacaagatccccggatcatgaccactctcagcgtcctccttggggtcgatctgggcagtat

SEQ ID NO: 493533 - DNA, 75 bp, Homo sapiens
cagagctgagaaaacagaagtccttagtgaagatctattacagactttaagaagcttcatgaagctcattttaag

SEQ ID NO: 493534 - DNA, 50 bp, Homo sapiens
aactgtcatcgataggaatacaagatctcaaagatttcatgagacaagct

SEQ ID NO: 493535 - DNA, 100 bp, Homo sapiens
gccccacggatctaatccggatcgggacccggtcccaggggaggcccccacctccccttctattgttctgtggcccagaaaaatggctacaaacttccta

SEQ ID NO: 493536 - DNA, 100 bp, Homo sapiens
ttcaaatataaacaccatctgaaagaacacctgcgaattcacagtggtggaacacctacataatttcattttgtttcggttttcaatgggcttcattgat

SEQ ID NO: 493537 - DNA, 82 bp, Homo sapiens
acgcctccgcgggcagttaccagctttggctgctcgcgcctccccaactcggccccagtggacaggaaagctaaggcctcag

SEQ ID NO: 493538 - DNA, 100 bp, Homo sapiens
ggagaatgactccgattcgtgaccctcagcgccggtgcatgtcgatcaggtggtccattatggctgacatgcaaaatctggtagaaagattggagagggc

SEQ ID NO: 493539 - DNA, 50 bp, Homo sapiens
gaaatttgtgctcaaaacccccaagtttaacttacatgtgtagagctgga

SEQ ID NO: 493540 - DNA, 90 bp, Homo sapiens
gttccagagcatggagatcagacagattgattcactttggagctgtaagtactgatgtattagggtgcagcgctcattgttccttgacgc

SEQ ID NO: 493541 - DNA, 85 bp, Homo sapiens
gcggcgagcagaactacggcgagcgggttcatctctaacaagtatttagtgaaacgacagagcagagactatgatgtggaatggg

SEQ ID NO: 493542 - DNA, 82 bp, Homo sapiens
gggcaacagaagaagatggggttccttccaaagtgcagcgctgtgcagtggctagcttgtcactttctgcaaaggtttccct

SEQ ID NO: 493543 - DNA, 50 bp, Homo sapiens
cctcctgattagctgggattacaggagagcctaccatgtgatccccattt

SEQ ID NO: 493544 - DNA, 76 bp, Homo sapiens
gggagactggagtcgaaggccgtgaggtatttttctaaggccaccctgaggcacaaactaactgtcatgtacagtc

SEQ ID NO: 493545 - DNA, 82 bp, Homo sapiens
ctctgtgtctcttgaagaacttaggtatgggaggacatggctatggtggagctggtgatgcaagttcaggttttcatggtgg

SEQ ID NO: 493546 - DNA, 50 bp, Homo sapiens
cggcaacggggcactgacctgggtgtgccagggcaggggcccttggagtg

SEQ ID NO: 493547 - DNA, 97 bp, Homo sapiens
agaaaggtcaccgcaagtacagagagtacagccccccatatgcgccggttattaatgctgcactggctttagcagcaaaaccacagagtaaactggc

SEQ ID NO: 493548 - DNA, 96 bp, Homo sapiens
cacagacgtggggcgatgcttgtgaccctgcagctcctcaaagccgccatggcatcagatgaaggcaaactttttgttggagggctgagttttgac

SEQ ID NO: 493549 - DNA, 83 bp, Homo sapiens
cgcagttcaacaagggcccctcgtacgggctgtcggccgaggtcaagaaccggagaatctcgatgctggcctggagcagaaac

SEQ ID NO: 493550 - DNA, 98 bp, Homo sapiens
aaaaggaagccaacgtagacactgttgacatcctaggatgcacagctttacacagaggggatggcccaatggaatcagctacagcagcttgacacacg

SEQ ID NO: 493551 - DNA, 83 bp, Homo sapiens
caacagtcaattgtgtactagcattccaaggcgagtttataccgaggtggctacagccgatttgccccctactgaagtgacgt

SEQ ID NO: 493552 - DNA, 96 bp, Homo sapiens
cggccacgtccacctgagtgccaagatcaccattgctgcctacctgcccctcaaggttgctccttgagggcaggacagttcttatggctttatccg

SEQ ID NO: 493553 - DNA, 96 bp, Homo sapiens
cccgcgagcacagagcctcgcctttgccgatccgccgcccgtccacacccgccgccaggagcttactccacgggaacagcctctagataatctgag

SEQ ID NO: 493554 - DNA, 73 bp, Homo sapiens
aataatggcaaataacttttccttggagagtcataacatatcactgactgataatacatatgtgtcaagttca

SEQ ID NO: 493555 - DNA, 80 bp, Homo sapiens
aaagttgaaggagttctcgggagaccccggagaagactattcttgttcagtcctggtatccaatcacagtggccacaaat

SEQ ID NO: 493556 - DNA, 100 bp, Homo sapiens
ttcaatgtccattccgctgtgttgattgaggacgttcccttcacggagaaagattttgatatgctcaggcttcagaagaggctcgcctctagtgtcctcc

SEQ ID NO: 493557 - DNA, 75 bp, Homo sapiens
ccttatttccactttgtaattccagcgagtcgacttcccatcctgagttggacacattcagctaacgtattttag

SEQ ID NO: 493558 - DNA, 100 bp, Homo sapiens
gaaactagcaccagccccaaatttcgattacgggacagctaccacagtagaagagatcaaattgcccttaaaaatctccagtctgatgtcacagaggcaa

SEQ ID NO: 493559 - DNA, 75 bp, Homo sapiens
cgcaccgtggccaccctgtgggcctggcgctggaggcagcggtgcacgtgcagggctttgttcgcgggggtcaca

SEQ ID NO: 493560 - DNA, 83 bp, Homo sapiens
gcgggcggccccggccgcctccgcgagggcaccatggaggtgaatgcaggaacccaagacagaccaggatgaggagcattgcc

SEQ ID NO: 493561 - DNA, 82 bp, Homo sapiens
gccacccggccgtcagcagcatgcaggaaactgggagtgatttttccatgtttgaagctttgcgagatactatttattctga

SEQ ID NO: 493562 - DNA, 50 bp, Homo sapiens
cgattctccctctcctagaggcggtggcccagtatataaagttcgagatg

SEQ ID NO: 493563 - DNA, 100 bp, Homo sapiens
ctgcaagctctcccagatgggctacctcaggatcggaagcaagatttccagatgtagcaaatgggtttattgaggaaataattcattttaagaattatta

SEQ ID NO: 493564 - DNA, 114 bp, Homo sapiens
gttacagtagctgaacagaagccgggagaaattgctgaagaactcgcaagctcctacgaaagaaagctcatcgaggtcctggatgcctcatcccttagtttcaacaccagattg

SEQ ID NO: 493565 - DNA, 75 bp, Homo sapiens
gctgaataacccttttaacgagtattccaaatttgatggcaaggaaaatcctgccttgcttcgttgggcctatgc

SEQ ID NO: 493566 - DNA, 100 bp, Homo sapiens
gaacttcccagcactcgaaagggaccgaaatggagagcaaaggtgtgatgctggttatactggacaacactgtgaaaaaaaggactacagtgttctatac

SEQ ID NO: 493567 - DNA, 88 bp, Homo sapiens
caagcgcggccgcacggccctcggcagcgatggcactgaaggactacgcgctagagaagggtggaccaggtgctctgaggctggcgta

SEQ ID NO: 493568 - DNA, 100 bp, Homo sapiens
cccaaatatcactttctttgtttatgtcagtaatttcacctggcccatcaaaattcaggcggagtttaagaaggacaggggagagggcctggcccgagtg

SEQ ID NO: 493569 - DNA, 82 bp, Homo sapiens
gtgctcctgggactccaggataccagattaaaaggagcccaagccccatctcatcctagcacaccctcctccactgtcctgg

SEQ ID NO: 493570 - DNA, 111 bp, Homo sapiens
tgacgtccagaagaccaagtacctgcagatcctgacctctctgatgagatggatcgccttatgccagcctggaccatcttggaggcagtgtaggatcatggaagaactttg

SEQ ID NO: 493571 - DNA, 100 bp, Homo sapiens
ccagcacgagtgggctcggttcgagatggagcgggcgcactgggaggtggaacgggccgaactgcagcatggacaaggacagcccggaggtccaccagga

SEQ ID NO: 493572 - DNA, 83 bp, Homo sapiens
ctgcggtgtttgaccgagacataaactgcagaagagcagcctctaaatgtgagagcttcttgccgccagagttccgctctttt

SEQ ID NO: 493573 - DNA, 101 bp, Homo sapiens
ctgtagctgtcgtttggtttgatcttgttgactatgaggaagttctaggttcctccggtttaggctcagctagcagcatccaggcagctgttcggcagctg

SEQ ID NO: 493574 - DNA, 75 bp, Homo sapiens
tccactttcgccagcccgtgccgcgagcgcggcctgcaggaggaactctgcgaccttcaagtcgtttgaggaccg

SEQ ID NO: 493575 - DNA, 90 bp, Homo sapiens
ctgtggatgagactttgagactagttcaggccttccagttcactgacaaacatggggaagacttttcccaggtccctcgtatcaaaacat

SEQ ID NO: 493576 - DNA, 76 bp, Homo sapiens
ctacatcctaactcgatttgctggacattggaggcaatgaaacagtgacactgcgccagtcgtttgtgcctgtgcg

SEQ ID NO: 493577 - DNA, 100 bp, Homo sapiens
gacaaccatgagtggaaaaaactaattatggttcagcactggcctgagacagtatgcgaggacaggacatccagcccaaaagagacctcacccgctttgt

SEQ ID NO: 493578 - DNA, 98 bp, Homo sapiens
gccgctgaataagcttccaaaatgatggctccactttgaggctctgatgaacattccagtgctggtgttggatgtcaatgatgatttttctgaggaag

SEQ ID NO: 493579 - DNA, 100 bp, Homo sapiens
ggcgaggaatcgccgtggcgtcttggtgttctccacgctggttcgcagccactgccaaaaaatatggtgtctcgtctttgtgaatctaaaaaggtttgtg

SEQ ID NO: 493580 - DNA, 90 bp, Homo sapiens
ggagtatgaagagacatgagatcatggtggccaaacccacagatcaggaagcaccatacctcctgcgaaacctcagtgatcacacagtgg

SEQ ID NO: 493581 - DNA, 100 bp, Homo sapiens
gaagccttgggtttctttcttaaaggactgatttttagaactccacatttgagctccggagaaggggtctggtcgaaccacggctgtgcgctcacgagag

SEQ ID NO: 493582 - DNA, 100 bp, Homo sapiens
gaccccctcagagagggcagtggcaaggatatgcctaagacgcctgcaggtattgacgtctgtcagatctcgtcacattggctggtgccgcagctgttgg

SEQ ID NO: 493583 - DNA, 83 bp, Homo sapiens
cgttcccgggccgttgatcttcggccccacacgatagcctgggctggaagctcttctacgtcacaggctgcctgtttgtggct

SEQ ID NO: 493584 - DNA, 90 bp, Homo sapiens
agtctttccgcttcttgaatttctctctgtaaaggaggcagggcaagaatcctttcgttccatcacaaggtcgtattacagaggtgcagc

SEQ ID NO: 493585 - DNA, 100 bp, Homo sapiens
tgccaagaatatctggaaacgggcattgcctgcgaggctggccgagaaatcccgtgtctgagtacagtggctcccccgattcaccaaggacctgcggtgc

SEQ ID NO: 493586 - DNA, 97 bp, Homo sapiens
ggaatatataaatgtgttgtttgtggaactccattgtttaacctgcctagggtagttaaaagacgagtgaatgctctcaaaaacctgcaagttaaat

SEQ ID NO: 493587 - DNA, 100 bp, Homo sapiens
gctggacctgctggtgttcgcccacgaccatggcgctgtcatacgcagagcacctgccgagccatgtgacgtgctgctctctgccagccctgatcgcctt

SEQ ID NO: 493588 - DNA, 83 bp, Homo sapiens
gcagcagcaactgtgggactttttgactacaattctcaacaacaggtctctaattaacagaagatggcaaagcccagccacag

SEQ ID NO: 493589 - DNA, 96 bp, Homo sapiens
gtcggggccccatcgagaaatggccgcgtcggcagacaatgcagatcttcgtgaagactctgactggtaagaccatcaccctcgaggttgagccca

SEQ ID NO: 493590 - DNA, 83 bp, Homo sapiens
ggagcttaaaaagctgcacgcaagtgttaaacttctgggtttgccttcccggattgggcctacaagccagagtcgtcccctgg

SEQ ID NO: 493591 - DNA, 75 bp, Homo sapiens
tccacactgctgaaaaatctgacaggtgatttggcttctgcacagttaggaggagcaccaaaccgatgggaggtt

SEQ ID NO: 493592 - DNA, 100 bp, Homo sapiens
ctagcaccccgagaaccgtcagtttgagccagatggaagtggacgttgtggtagcaccatgccaaggcctccggcccacagtggatgttctgggtgactt

SEQ ID NO: 493593 - DNA, 100 bp, Homo sapiens
aactcctcaggtccctgcctgcacaggctcctgttcgacacagtggagaccatgggaaaagactatttgtcatcagaccttctagattctatgacaggcg

SEQ ID NO: 493594 - DNA, 82 bp, Homo sapiens
tcaagtgacttggtttagagaagggcacaagattattccaagcaacagaataattatgttagagttgtggaggtttggtggg

SEQ ID NO: 493595 - DNA, 105 bp, Homo sapiens
gtgggagtctccgcgtcccgctcgctgggagagaggtacctctccttttccctctccctttccctaaggagtctcagcagtccaattttggcactggagaacaaa

SEQ ID NO: 493596 - DNA, 92 bp, Homo sapiens
agtcacaggagctgtagagaggaccccggtacatctgaaagccgggaaatgatgaaggatttgggggcagagcacttggcaggtcatgaagg

SEQ ID NO: 493597 - DNA, 117 bp, Homo sapiens
tcatggataatctgtcatcagaagaaattcaacagagagctcaccagattactgatgaggtactccaaagattcaggtttactcacgtcatccagcagagaatggaaagtcaaattt

SEQ ID NO: 493598 - DNA, 101 bp, Homo sapiens
aattagacccgtttcctatagatgagaaaccatacaagctgtgatcccaagcagtattgaagatatatttaatgatgatcgctgcataaatatcaccaaac

SEQ ID NO: 493599 - DNA, 90 bp, Homo sapiens
tctcccagtttggcactgtgacacggttcaggctgtccagaagtaaaagggcaacatttcatttgttgcatttccagtttccaataccaa

SEQ ID NO: 493600 - DNA, 49 bp, Homo sapiens
caccggcagcagcagcaccaccggacggagctcgtgggcgacgtgttga

SEQ ID NO: 493601 - DNA, 90 bp, Homo sapiens
ggcgctgcccagccccttgtcagccagggctgaacccccgcagctcttttgtgacagggacggcttgttgcgggcacttctcacccctga

SEQ ID NO: 493602 - DNA, 100 bp, Homo sapiens
gcgggcgcgggcgcgggcgctcccggcgagccacggctcttgcagccaatgccggaacaggatttgctgttgctgagcctcaaatcgcaatgttttgtgg

SEQ ID NO: 493603 - DNA, 100 bp, Homo sapiens
cgcagctgccccatgtgccagaaggagttcgcccccaggttgttcctggtcattgagtacgtcaacggcggggacctgatgttccacatgcagaggcaga

SEQ ID NO: 493604 - DNA, 100 bp, Homo sapiens
agaacgtgacgctcaaacgccggagcccgggctgtgggacagatgatgtctaccatgttctacccactggtcacctttgtcctcctcctcatctgcattg

SEQ ID NO: 493605 - DNA, 75 bp, Homo sapiens
ataaggagaaggataagtcgaaggggaaggcgcctgaagaggacgaaggacggttcactgggaaacatcgatgac

SEQ ID NO: 493606 - DNA, 101 bp, Homo sapiens
cgccccgggacccgcgccgctgccctccggctccgcgggcggcccacggcgagatagagaacgtcacttttcaccatgaagggttcttctggaggtgttgg

SEQ ID NO: 493607 - DNA, 50 bp, Homo sapiens
gaggcctgtgcccctgatactgaggacaagaattttgggcagatttgaat

SEQ ID NO: 493608 - DNA, 97 bp, Homo sapiens
ctctcaggaatctctatactcccaacgtgaagaaatcaatgtggactgaacataaatcacctgatggaaggacttactactacaacactgaaaccaa

SEQ ID NO: 493609 - DNA, 50 bp, Homo sapiens
gccggcctgggaccatgggcgtggctgcttcaacccccaactccactgct

SEQ ID NO: 493610 - DNA, 90 bp, Homo sapiens
taaagaaaatcatttgtgatgggtcagctagtatgcaggctaggcaaactggagaagagaagtttacctttattgagaaatgtaacaacc

SEQ ID NO: 493611 - DNA, 73 bp, Homo sapiens
cagcttcaagcttaggaccacccaccatgcctatccagggactattggcattcagggatgtggctctagaatt

SEQ ID NO: 493612 - DNA, 100 bp, Homo sapiens
atcgctgtagtgggcggccagagcgccggcaagagctcggtgctggagaacttcgtgggccggttcctcatgagagtgctggactcctacggggatgact

SEQ ID NO: 493613 - DNA, 75 bp, Homo sapiens
cctggccagcctgctcatcgcctactgcactggagcagatccgcagggacatccgagacttccggtctagcgcgg

SEQ ID NO: 493614 - DNA, 74 bp, Homo sapiens
tttccgtcagtacgcgaaggatatcggtttcattaagccaatggagatcttcgtggatgatgagacgaagttga

SEQ ID NO: 493615 - DNA, 100 bp, Homo sapiens
gaatatccaaagccattcactacctgcacaacgttcaaccatgctcggtcatctgtggcagtatatcaaggttccctctcccagcctgtgctgactcagc

SEQ ID NO: 493616 - DNA, 90 bp, Homo sapiens
ctgcgttgacacgtcttatttaatccacatcatagtcatgatgggctctctcctggctgccaccactgaggcccctggtgaatacttctt

SEQ ID NO: 493617 - DNA, 50 bp, Homo sapiens
gcctgcagagcgcgcagtacctccggaatgtttacccttgcggaagttgc

SEQ ID NO: 493618 - DNA, 117 bp, Homo sapiens
cgcccggccgcgggagcctcgtggctgcgtcaccgccgcccccccagacaagatggacaccgcggaggaagatctttaatctcatgaagtacgacagctacagccgcttcttaaagt

SEQ ID NO: 493619 - DNA, 100 bp, Homo sapiens
catatgcaaagacgttgtcaccgcagctggtgatatgctgaaggacaatgccactgaggaggacttgctgcgtttaaagaaacaaatgagagtattttgt

SEQ ID NO: 493620 - DNA, 100 bp, Homo sapiens
ggcacagggcgtcggacctgcacgagctgtctggatgaaacaggcgcctatttaatcgacagagaccccacctactttgggcctgtgctgaactacctga

SEQ ID NO: 493621 - DNA, 100 bp, Homo sapiens
atgcgtggtgggggatgaggaggtgtggacgtcggacgtgcagtaccaagtgtcgggggaaccaggggatcctggtcggccggggcctgtgggagagcag

SEQ ID NO: 493622 - DNA, 51 bp, Homo sapiens
agacatttcttcggcattctgcaacaggtatttcagtgaaaattacactag

SEQ ID NO: 493623 - DNA, 75 bp, Homo sapiens
ccagcacactcctcgcgagcaaggttttgaaaacattgaattgactcctcttgctgcaatatgtgtgaaaatata

SEQ ID NO: 493624 - DNA, 100 bp, Homo sapiens
gccccgggaacaggacctgcacgggcacgtccaagcggtaccagctctgcagagtgcaggtgtcccctgaagaccttgcaaaagtgtgagatcgccctgg

SEQ ID NO: 493625 - DNA, 98 bp, Homo sapiens
ttcgagcgctgttctcgctccggagccgctgcacatttcggaggttccagccttggcaagaggagtgtggcccttcctggaatccctctggacacacc

SEQ ID NO: 493626 - DNA, 50 bp, Homo sapiens
caaactccccatccagctccaggacataagcagctctatgaccaatagca

SEQ ID NO: 493627 - DNA, 100 bp, Homo sapiens
ggaggcgccgctctagcggccgggactctgaactatggcgtagtttatgccaacgtgacttcattcatacagatgaaccaaggatcgggatagcagtata

SEQ ID NO: 493628 - DNA, 75 bp, Homo sapiens
gtttggacgccggcggagacgcgggcgaggagccaagccgccatggcctaccacagcttcctggtggagcccatc

SEQ ID NO: 493629 - DNA, 100 bp, Homo sapiens
tcccctgtttgagaaaaggcctaagaattttggcattgaactgataaatttcaaacggaagagagtggcagcatttagaaagaatctaattgaaatgtct

SEQ ID NO: 493630 - DNA, 90 bp, Homo sapiens
gacagggagagaaggctgaagtccctggaggaggagctggagaggaaggcgagcctgcacctgtaggctctcgggggagaggaacgcctg

SEQ ID NO: 493631 - DNA, 100 bp, Homo sapiens
acggacttaaaatctccgcaccgcaccctccacctcagtgcacccccaaggtggactttccccaggaccagctgacagcactcactgggcggatccagga

SEQ ID NO: 493632 - DNA, 75 bp, Homo sapiens
attcgttacagccagagattggctgaccggttccctgatgtgttacctgcttctgctactgatccaaactgcaga

SEQ ID NO: 493633 - DNA, 99 bp, Homo sapiens
gctggaagaggaagatgcctagcacagaccttctgatgttgctgtgagtaccagagtgcccactggttccaacagttcttctcagaccacagagtgtct

SEQ ID NO: 493634 - DNA, 82 bp, Homo sapiens
cactgcgcagggcggctgggcagctatgtcatcaacgggcgcaccaaggtgaaaggtgtagcagtcactcggcctacaccca

SEQ ID NO: 493635 - DNA, 75 bp, Homo sapiens
ccccgagacgatggcggagggagataatcgcagcaccaacctgctgactctccagaaagagcaacagtaatggag

SEQ ID NO: 493636 - DNA, 100 bp, Homo sapiens
aggccgtccagcagatggcggatgccctgcagtacctgcagaaggtctctggagacatcttcagcaggtgaagctcgtgtgtggagtgccacggtacaat

SEQ ID NO: 493637 - DNA, 82 bp, Homo sapiens
aaaatgcagtcccctcatgccaagcgtccgtctccaagagagtatgaagagagtgcgtctgtagggcagggaagatggcgga

SEQ ID NO: 493638 - DNA, 96 bp, Homo sapiens
gcagtggagtcttggaggagccagtacagctggagtcttttgtgcaattgtttctcaccctgctgattctgtggtatctgtgttgaataaagaaaa

SEQ ID NO: 493639 - DNA, 83 bp, Homo sapiens
gctgaagaagcagttctacaaggcgagccaggcctccggtgtggctgtctctgatggtgtcatcaaggtgttcaacgacatga

SEQ ID NO: 493640 - DNA, 83 bp, Homo sapiens
ctgaacccggcccccgacggctctgcagttaacgggaccagctctgcggagtagttacttttggtgacgctgtccagttccca

SEQ ID NO: 493641 - DNA, 98 bp, Homo sapiens
gggggaggaaccagttggtggcctgggcagcctgctggaccctgccaagaagtcgcccatcgcagcagctcggcatgctggaagatggactgccctcc

SEQ ID NO: 493642 - DNA, 97 bp, Homo sapiens
ctcagctggagaacgcggctaaagttctgatgaatactctggagcagtgcaatgtgtgttccaagcccatcatggagcggattctccgagccaccgg

SEQ ID NO: 493643 - DNA, 100 bp, Homo sapiens
cggatctggacacccagcggtctgacatcgcgacgctgctcaaaacctcgctccggaaaggggacacctggtttggtgcacctcgatttggaggaagtag

SEQ ID NO: 493644 - DNA, 100 bp, Homo sapiens
gcggcggctggagagcgaggaggagcgggtggccccgcgctgcgcccgccctcgcctcacctggcgcaggatgtcagctgcaacgagatcacagcgttgc

SEQ ID NO: 493645 - DNA, 82 bp, Homo sapiens
ctccctcggtttgcctactgaagagcttatcagagctctacttgggaaacaactacactgcgctgcatcggactcgacgccc

SEQ ID NO: 493646 - DNA, 75 bp, Homo sapiens
tcccttgctcccatccctgcagcatgaacaagagtgcagacatcctcagcaccatcggctatgacaacattatcc

SEQ ID NO: 493647 - DNA, 75 bp, Homo sapiens
cagttggcaaaccagatatatgacttggatttgcctcaaagggcactgcaaaaattgaacagaggaatcccaagg

SEQ ID NO: 493648 - DNA, 74 bp, Homo sapiens
ccacctcattttagagtatcaagcagatttagtggttgaaggactgcgatgtgtagttttgccagaagatcttt

SEQ ID NO: 493649 - DNA, 75 bp, Homo sapiens
gctggactctctgccacatcgttcggttcccacaacagcctgttgcagagtgggcaggatcttaagacccgatag

SEQ ID NO: 493650 - DNA, 50 bp, Homo sapiens
tcgaaagcatcttgagaggaacagaaagatttgtattgaacgatgtcttg

SEQ ID NO: 493651 - DNA, 75 bp, Homo sapiens
gtttatcaaaatcacgttataatcagattttgaccaagcattttgtaaggaccctaaagtaaattggttgaagaa

SEQ ID NO: 493652 - DNA, 95 bp, Homo sapiens
ccgagactctccttgcttggaattctgcccactctgcggagttagcagtcacgacctccagcacaggattcaggagcagttccagaaaaatcccg

SEQ ID NO: 493653 - DNA, 90 bp, Homo sapiens
caaaaccagtcatgaccactagacccacagctgttaaagcaacagctcagcgacatgtcctcacctacatggaggatgcagtgtgccagc

SEQ ID NO: 493654 - DNA, 75 bp, Homo sapiens
ctcccgagtggctgggactacagaaatatatgcaagaggcacgaagtttaggaaaaaacctgaggcaacccaaac

SEQ ID NO: 493655 - DNA, 98 bp, Homo sapiens
ttgacttggaagcaatgtttgaacaaactcgaagaacagctgtggaaagaagttgcaaaacactggatgcagattttcttttacaatccagatgactt

SEQ ID NO: 493656 - DNA, 87 bp, Homo sapiens
tgccctggtcttgctcggccgatgaagtgcagaggtttttttctgatggagacctcacagacacggtcagtggtccccgctccacag

SEQ ID NO: 493657 - DNA, 73 bp, Homo sapiens
tgcatcgaaatgtacattggtgattctgaagcttatattggaccggccagccttgcagctgtatgatccagga

SEQ ID NO: 493658 - DNA, 82 bp, Homo sapiens
cgggagactagcttggccacaggagacaacgttgaggtacagacagaacaagttgaaatcatcgcagaaggataaagttcgt

SEQ ID NO: 493659 - DNA, 100 bp, Homo sapiens
gaagtggtttgcaacatccttcttctggataacactgtacaagctttcaaagtcaatgtgagtgtggtccaagattcagtaaacatatcaggacatacta

SEQ ID NO: 493660 - DNA, 74 bp, Homo sapiens
ctggagatgccctcttcgtggaagccatccacacagacaccgacattgctgaacctgtttgcatgagttgctcc

SEQ ID NO: 493661 - DNA, 74 bp, Homo sapiens
tccacttccgtgaccgttagggacaagacagtgtaaacaggaacatcgataagtagtgtaaaaacttgcacaat

SEQ ID NO: 493662 - DNA, 100 bp, Homo sapiens
gaggctaacgctccgggccccgtacccggagagcggcaactcgcgcactcaaaggtcttccgaccccgaactccaccggaggcaattgcactgtgtagcc

SEQ ID NO: 493663 - DNA, 89 bp, Homo sapiens
ccatttgaagggggaagtctcttgcaaattccagtcaaggccctaaaatatagtgtcccagaagcttttgttgacaattccagtttccg

SEQ ID NO: 493664 - DNA, 82 bp, Homo sapiens
ccggttgcaagcagatactggtgcctacaatgcagatcttcgtgaagactctgactggtaagaccatcaccctcgaggttga

SEQ ID NO: 493665 - DNA, 75 bp, Homo sapiens
acagtgaagttgggagagaagctggagagataccacacggccatacggagcaggaggaggcagcggaagaggatg

SEQ ID NO: 493666 - DNA, 90 bp, Homo sapiens
gcccgctcgtgggatgagagcagatgccgcgaggccgggaagttaaacttgtagccaccacctccgctcttcccgtcaccctcgccccca

SEQ ID NO: 493667 - DNA, 50 bp, Homo sapiens
aagaaattagatcccaaagattcttgacaccattcgcttttcacccaaga

SEQ ID NO: 493668 - DNA, 75 bp, Homo sapiens
cgcggcccgttttcgggaggaggcggagggcgcaaagcgagccggagtctaccatggctcaagaatctcccaaaa

SEQ ID NO: 493669 - DNA, 88 bp, Homo sapiens
agaaggttaagctggctgtcctgaaatattataaggtggatgaaactcagtttaagaagatcctcggctacatcaacacggggaagca

SEQ ID NO: 493670 - DNA, 83 bp, Homo sapiens
gggccgcactgtggtattcgccggcacgcgaagtggccgcatccgcaagaggctgggaggcggcagaatgcagccagaggagg

SEQ ID NO: 493671 - DNA, 75 bp, Homo sapiens
ttggcagttctccagttctctatagccagtcagctatagctacaggttttacgactactagatgtcattggtttg

SEQ ID NO: 493672 - DNA, 80 bp, Homo sapiens
atggaggaggaggcggagaccgaggagcagcagcgattctcttaccaacagacaatgcagatcttcgtgaagactctgac

SEQ ID NO: 493673 - DNA, 90 bp, Homo sapiens
tgagatgatgtggaggatttgccctgccctggctgtggggcctcctttctggggcctggtgaatgcagcgtggagtctgtgtgctgtggg

SEQ ID NO: 493674 - DNA, 98 bp, Homo sapiens
gctggagctgggtcagtccgccgctcaccccgcggccgcaccttcccgccttctcaggtttattgggcacttcctagcaccaggcactgcaataagaa

SEQ ID NO: 493675 - DNA, 100 bp, Homo sapiens
tcctgcatggtttcaagggacgtaccaggaggatggtgcccaggaagaccaacactgtcatctgaagttggaatcatcatctgtgatattgctaatccag

SEQ ID NO: 493676 - DNA, 82 bp, Homo sapiens
caagttcatcaaggagctcattaaggacggctctctgctcattggggcgttgaggaaaacattgcttctcagactgtagcca

SEQ ID NO: 493677 - DNA, 82 bp, Homo sapiens
cttccatcaacgcaacgggatcagtgttgtgataaggcagctgcaaaaagcggcagagggcagctgtgtacaggatgaatcg

SEQ ID NO: 493678 - DNA, 98 bp, Homo sapiens
ttaactcaggtgtcacctttgactgggactacccagggaagcaggctcagctgtcgcaggccctggaggagctgggaggccagaaacaaagagcagac

SEQ ID NO: 493679 - DNA, 83 bp, Homo sapiens
gctatttctagcgcaccagcatttggttgacatcatggacatatgtgagtccatcctggagaggaagcggcatgacagcgaaa

SEQ ID NO: 493680 - DNA, 84 bp, Homo sapiens
ctctgggatcccggccaccagcaattgtccggttgatgataattagaagcatgctttccactgaacttcccgacaacatttgtt

SEQ ID NO: 493681 - DNA, 81 bp, Homo sapiens
agcctcagttggaagcagccgatccagcctgcggagcctgtggggcagattttaccaaatgttgcaagaactctggagttc

SEQ ID NO: 493682 - DNA, 83 bp, Homo sapiens
aagccttcagtaaaactgatgaatggatagatataagtgtctctgggaagtgggggtgaagatgaggatgacccagatgaagg

SEQ ID NO: 493683 - DNA, 75 bp, Homo sapiens
actgggttgaagccctgaaccaagccagcaagatcaccgcagcctggcatcctcgctacaacctcattgttgtgg

SEQ ID NO: 493684 - DNA, 100 bp, Homo sapiens
aagaagatccgcagctccacgcagcaagacccgcgccgccgggacccccaggacgacgtgtacctggacatcaccgagtcacaatggcttcagcctttcg

SEQ ID NO: 493685 - DNA, 100 bp, Homo sapiens
cacctggtggcaaagccagaccatgctggccggggtgcagtaccccagctccatcaacctcacgctgcacctggtatgccgagattttgctgtcctggag

SEQ ID NO: 493686 - DNA, 73 bp, Homo sapiens
ctggatagcaccttatggacagccttaaagatggagatgacagaaatgactggtgtgtcgctgaaacgtgggg

SEQ ID NO: 493687 - DNA, 100 bp, Homo sapiens
acccaggatggcatccaggagagcccatggcaggaccggcacggcgaaaccttcaccttcagagctccttaataagcatttatagtcagtttttggcagc

SEQ ID NO: 493688 - DNA, 100 bp, Homo sapiens
gtgcgttctgagccgtctgtcctgcgccaaggttgggaatccacgtgttgaacttaccctctcagagctccaagatatggcagctaggcaacagcagcag

SEQ ID NO: 493689 - DNA, 100 bp, Homo sapiens
gctgcggcccagacgcccgggcttgaccgccgcgaaggccaaccccgggaaggggagtgtgaacatggctacgcctcttcattcccgtccatgccgagcc

SEQ ID NO: 493690 - DNA, 75 bp, Homo sapiens
ctagagttttcgtgacttctgctatccatgttgcaatatgttaaggatacctgtaagaaaggccttagtaggcct

SEQ ID NO: 493691 - DNA, 136 bp, Homo sapiens
ccaagatggcggaagcggaggagtctccaggagacccggggacagcatcgcccaggcccctgctctgggtgaaccaggaggatgaggtggaggaggggcccagcgatgtgcagaacggacacctggaccccaattc

SEQ ID NO: 493692 - DNA, 74 bp, Homo sapiens
aatgtactggatgcaaaacgaggcatgttatttgaaagcaattgagacgcaaccgaactttgcagtagcttgga

SEQ ID NO: 493693 - DNA, 74 bp, Homo sapiens
tcatgtctgcgagccaggattcccggatgccggctccaggagcagcagtggaggtcgggaacgcctcattgtgg

SEQ ID NO: 493694 - DNA, 100 bp, Homo sapiens
tatatacagatggtccaggagaagctttgaaggctgtgaaggagccagatgaccaggatgccccagatgagcatgagccctctccatcagaagatgcccc

SEQ ID NO: 493695 - DNA, 121 bp, Homo sapiens
taatgacattgtggacagtgacagcgatgctgaggatcgaggaacgttgtctgatgccatggacaatattaccaggcagaaccaattctacgatacccaagtcatcaaacaagaaaacgag

SEQ ID NO: 493696 - DNA, 130 bp, Homo sapiens
ctccccctagcgccgctgaggagccgcctctgcggctccaggagggcgcaggagcgggactgagagcgcctggaggctcgagcggagggagtatgctgctgctgttccgctttgcgtcctcgctacaaac

SEQ ID NO: 493697 - DNA, 88 bp, Homo sapiens
aacaacttaaataagtcaaatatacttggagctttaaaaattaaaaggagagagattcgagtctggcttcagccttgtcatgaaccac

SEQ ID NO: 493698 - DNA, 98 bp, Homo sapiens
ccggattatagtctctcgccacagcggcctcggcctccccttggattcagacgccgattcgcccaggaatggcggcgctagatagtaaggcatcaggg

SEQ ID NO: 493699 - DNA, 83 bp, Homo sapiens
cgagaacctcctgctggatggcaacatggacatcaagctggcaggtgaccagcgccatgtccagccaggtggtgggcattgag

SEQ ID NO: 493700 - DNA, 100 bp, Homo sapiens
cggccagacgacttcgtcttctacgtcggggggtaccccagtaccttcacggaaacccactgagatcgagtggagatttactgaagcaggagagcgggta

SEQ ID NO: 493701 - DNA, 100 bp, Homo sapiens
aacgccgccgccgccaagaagggcagcgagcaggagagcgatgccatggacaatattaccaggcagaaccaattctacgatacccaagtcatcaaacaag

SEQ ID NO: 493702 - DNA, 75 bp, Homo sapiens
gcctgcagagcgcgcagtacctccggaacttgaacatcagagaggagcccttatgaatgaaatccaagctgcgaa

SEQ ID NO: 493703 - DNA, 75 bp, Homo sapiens
ttttggcggcctttctgctcctcgcggcccaggcctcaggcccaggcccaaggccaagtgagagagcccaggcca

SEQ ID NO: 493704 - DNA, 82 bp, Homo sapiens
ccaggaggcggcggcgccgccggctttgatgaaggatttgggggcagagcacttggcaggtcatgaaggggtccaacttctc

SEQ ID NO: 493705 - DNA, 82 bp, Homo sapiens
tgatatagatggtgattatagagtggtggtgttcccactgatgaagagcaggcgactgggttggagagggagatcatgctgg

SEQ ID NO: 493706 - DNA, 90 bp, Homo sapiens
gatccttatcccatgggcaaacctcctttgcctagaggctatcacacgcatgatcgggagggtttactgagcatggcaaatgcaggccgc

SEQ ID NO: 493707 - DNA, 91 bp, Homo sapiens
gtcagacgcagccgtagacaccagctccgaaatcaccaccaagtgcctccggagccagcgtggtggccatagacaacaagatcgaacaggc

SEQ ID NO: 493708 - DNA, 76 bp, Homo sapiens
ccttatgatagtaaaagtttgcggacattgaatttagtggaagcttttgtagaagatgcagaattgaggcagactt

SEQ ID NO: 493709 - DNA, 100 bp, Homo sapiens
attctcctatactgttagaatagcagctcaagacttgttgctggtttgctggttggctcccgagcagacagcaggaaagaagaagcccttcgtgtacacc

SEQ ID NO: 493710 - DNA, 75 bp, Homo sapiens
actcatgtctcactgccccactcagaaaacaatggactgctcttcctggagacctcagccctggactctaccaat

SEQ ID NO: 493711 - DNA, 100 bp, Homo sapiens
cgtcaagctggccaagcacaaagagcttgctccctacgatgagaactggttctacacgcgagctgggaaatcctcattgacgattcaatttgttgaaggc

SEQ ID NO: 493712 - DNA, 88 bp, Homo sapiens
aagttcttaatattatttcccttctgtggaaactctctaaacaacaggatgaaacccataaattgatcttacagactctttcagcacc

SEQ ID NO: 493713 - DNA, 98 bp, Homo sapiens
ggaagaatgaaaaaaccaaaattatcgccaagattcagcaagttcttgggtgtctctggggagtccctgggccagaccttcctccagactccagccca

SEQ ID NO: 493714 - DNA, 75 bp, Homo sapiens
gacagaggaccatgtgatgcacctgctccaggtcaccagtgaaaagttgtgcagagcccaacatgagcttcattt

SEQ ID NO: 493715 - DNA, 87 bp, Homo sapiens
cggacttcgacacctacgacgatcgggcctacagcagcttcggcggcggcagaggtgtctcctttcctcttgggccgggcactttgg

SEQ ID NO: 493716 - DNA, 73 bp, Homo sapiens
gggccgaagataacgcggataccttggcgctagtatttgaagcaccaaagtctcgaatccacctcacgggaac

SEQ ID NO: 493717 - DNA, 98 bp, Homo sapiens
tgagaggcccctcttctcctccaacccagaactggacaatctggtgttcaagcagccctggccagggatcatgcgcacagtctatgggaaccacgaac

SEQ ID NO: 493718 - DNA, 100 bp, Homo sapiens
tcccgggggcgcagggaaggagggcgtccgagtcaacaaccgcttcgagctgggcagttgggtgagaagcagcttccatcttcaacctcggatgatcggg

SEQ ID NO: 493719 - DNA, 90 bp, Homo sapiens
tcaaaactgttccagggccagtatcggagtttgctcaaagcttggattctgccgtgccactcacgaatggcgacacagaagacgatgctg

SEQ ID NO: 493720 - DNA, 100 bp, Homo sapiens
cagaattcgtcagggtcagatcatatgaatcccaaatggttatccgtccccacaagtcatttgatgaggtgagacgtggtcttgtaacacagtggttaag

SEQ ID NO: 493721 - DNA, 100 bp, Homo sapiens
agagctgatggagctggtgtggggcaccaagagcagccccggtctctcggacaccattttctgccgctggacgcaagggaccagttactctccacaagaa

SEQ ID NO: 493722 - DNA, 80 bp, Homo sapiens
ggggccagggaaccctggtcaccgtctcctcaggtggtgtgtgccaggtgctccgactaccgggccgaactgaaatacga

SEQ ID NO: 493723 - DNA, 116 bp, Homo sapiens
ctttcaccggcggcctggacccccccatgggagacgctgagtacttggcggccttcagcaaattgtggctactaatttgccccctgaagatcaagatggctctggggatgactctg

SEQ ID NO: 493724 - DNA, 99 bp, Homo sapiens
ctacaacttggagaatggaaaagaaccattgaagcttgagagaaaagcccccaaaagcagctattcagtgtgcaacttgctttggtgtttgctgtttta

SEQ ID NO: 493725 - DNA, 50 bp, Homo sapiens
cctggagcgaatcctaccttccaaacagagtcttcctaatattctcaccg

SEQ ID NO: 493726 - DNA, 100 bp, Homo sapiens
gaccgagagcgtgaccgagagcgcgaatatcgtcatcgttagaagagtccagcaagctaaaagtacagaaggtggagccctggaacagcgtgcgtgtgac

SEQ ID NO: 493727 - DNA, 50 bp, Homo sapiens
tgaccatgtctgggatggaaacaggtagatgaaactcaagagaaaaggtg

SEQ ID NO: 493728 - DNA, 100 bp, Homo sapiens
ttggccatgaatattgagaagaaacttaatcagaatagcaggtcagaggaaagccaagatgatgctggatgacattgtgtctcggggtcgtgggggcccc

SEQ ID NO: 493729 - DNA, 75 bp, Homo sapiens
caagtagagagcaagaggaagtcagggggaaatgagcccacccggagagagctgccctgctgttcgtgtccagtg

SEQ ID NO: 493730 - DNA, 98 bp, Homo sapiens
attcaattgaatccctaagattatttaaaaatgatcctttgttcttcaaacctggactgcttcaccagtttttctactggctccttctttgaactgga

SEQ ID NO: 493731 - DNA, 74 bp, Homo sapiens
atggccatggcataaggaactctatcccaggaatacagctttgcattagatgcagacagtggaggagatagtca

SEQ ID NO: 493732 - DNA, 106 bp, Homo sapiens
gcgaggggctaacttcagcggtggcaccgggatcggttgccttgagcctggtgtctcgtgcctctgctggaccctgactctgggctcctggtcctggcaggaaagg

SEQ ID NO: 493733 - DNA, 75 bp, Homo sapiens
aggccttacggtggccaatgaagcagactcactaacttatgatgagaacacaaagttatacctcaatttacttga

SEQ ID NO: 493734 - DNA, 100 bp, Homo sapiens
ctgcagccacaatgtgcctttgcaggggagcctgagagccacaggttctaagctggtctatgtccatcaccttcttggagaaggagcctttgcccaggtg

SEQ ID NO: 493735 - DNA, 100 bp, Homo sapiens
ggatgatgcggaaattaaccccaaggtcaacatggctgaacaggagcctcgttctctgtcagaatcgccctacttgccctacctcatggctggcccttcc

SEQ ID NO: 493736 - DNA, 100 bp, Homo sapiens
catgaaggaccgaacccaggagctccgcacggctgaccccgcactacatctacccaccagccatcgtgcagcccagcgtggtgatcccagccgcccctgt

SEQ ID NO: 493737 - DNA, 99 bp, Homo sapiens
aagctctttgggaagtggagcaccgatgatgtgcagatcaatgacatttccctgcaggctgacttcgcgctggaggccctggccaaggccacctacgag

SEQ ID NO: 493738 - DNA, 82 bp, Homo sapiens
caacagtcaattgtgtactagcattccaagacatatctgaagagatggattaagaatgctttggattaaggattgtggagca

SEQ ID NO: 493739 - DNA, 90 bp, Homo sapiens
gccggagcgccagctcagcgtgcccatcccggggggcagcaacggcgacatccagcaaggtagatttcgggcagacaacttgaacaagct

SEQ ID NO: 493740 - DNA, 124 bp, Homo sapiens
cgcagggcctgcagcgggagctggacggcgagcgcgagcggcgcgagaaagattgtcagtggcttcgccccgaggagagctgactgccctgggctgctgcctccggcagagctgagccaaaatg

SEQ ID NO: 493741 - DNA, 100 bp, Homo sapiens
tgcaatagatacatggagcccatcagaatggcagatggcttatgaaccacaggagaccctcctgttcttaactgtgggcgatgagaaaggtggtggactc

SEQ ID NO: 493742 - DNA, 100 bp, Homo sapiens
tgacgagccagaagagccaccagcccacaggcccgagagggagttcaggaaccgcctccctgaggccaagtataaggagcgagggacggtcttggctgag

SEQ ID NO: 493743 - DNA, 100 bp, Homo sapiens
tgttttcaagctccagttcaaatcccacgtctacttcttccgggctgagagcaagtacacatttgaaaggccgccatggcatcagatgaaggcaaacttt

SEQ ID NO: 493744 - DNA, 100 bp, Homo sapiens
ggcctcatactctgttatagataaacaaggtgtttggatttatagcaagttttatgttcctacttgactttatcactatgctgtatgaaaaacgacagga

SEQ ID NO: 493745 - DNA, 48 bp, Homo sapiens
aacttttattccacatttggagttccatgccattgcagtgtcaactag

SEQ ID NO: 493746 - DNA, 75 bp, Homo sapiens
ctcccacacaatcgcagtttggagagatgggaggcaagtttatgaaaagccagcatggaaataaccagcctgcaa

SEQ ID NO: 493747 - DNA, 75 bp, Homo sapiens
ccaatggtggtcatggagtagaagggagcgatactacaggagataaatggcatcaccgcggcactggctgaagag

SEQ ID NO: 493748 - DNA, 88 bp, Homo sapiens
ttatgccttatgttgatatactttttggaaatgagacactcctcagagaaattttgaaattgccttcaagatgtttgatttgaatgga

SEQ ID NO: 493749 - DNA, 100 bp, Homo sapiens
gactgctgaagatggtgaaggagctggagaagcacggagttcgggggatggcacagaatggggttctgactcagaagatcttttggaagaattgctgtgc

SEQ ID NO: 493750 - DNA, 100 bp, Homo sapiens
tcagtagtccgaactctaatatgagcagcatggtagttacagatgttgaaacatttgtagcagatatactgaaaggagaaaatttatccaagaaagcaaa

SEQ ID NO: 493751 - DNA, 82 bp, Homo sapiens
atcgattacacagttctggatgatgtgggccatggtgtcaagatcaatgtccgagttaccaccatggatgcagagctggagt

SEQ ID NO: 493752 - DNA, 82 bp, Homo sapiens
agccgcgccccaccccgccagctccagagccacgtacgaatggtgagagtatcatggttgaactcgcagctggaccttttgg

SEQ ID NO: 493753 - DNA, 80 bp, Homo sapiens
tcacagccctgttaaaggatggctttggctttgcagacagcacagtcttacaggtgaaaattgatttgcaagtgaccatg

SEQ ID NO: 493754 - DNA, 98 bp, Homo sapiens
cttggcaggaggagcagatctagaaaacaaggtgattacgggtgagagtatggacaatttcaactggggagtgcgcagacgttctctggacagcctgg

SEQ ID NO: 493755 - DNA, 100 bp, Homo sapiens
ggagacacagtatagcttctgacagtggagacactggcattggaacttcctgttctgatagcgtggaagcaattctgtggtgttcttggtcacacattta

SEQ ID NO: 493756 - DNA, 100 bp, Homo sapiens
aaaaggcctaagaattttggcattggaagaggatcacctagcccgggtagaagaggcaatcacccgtatgcttgtgtgtgccctgaaaactgcagagaat

SEQ ID NO: 493757 - DNA, 97 bp, Homo sapiens
acaatgcatgccctcgttatcttgaaaagcaattattccatggtactccagttacaattgagaatttcttaaattggaaagccaagtttgatgcaga

SEQ ID NO: 493758 - DNA, 50 bp, Homo sapiens
ggagtggcagaagcagacttcagagagttcctatcagactgagattgggc

SEQ ID NO: 493759 - DNA, 95 bp, Homo sapiens
ggactttcttccagcttctgctgtccttctttgtggagagcaaggcggtgctgatgcagtcacgggaacaggtttcagaagagctggtgaggtta

SEQ ID NO: 493760 - DNA, 51 bp, Homo sapiens
gtcctttatatagaagggagaaaaatctgcagctgtgcctaggggagtttc

SEQ ID NO: 493761 - DNA, 75 bp, Homo sapiens
tgcacgaggtctatgagaacaagacggacgtcatcctgatcttggaactttcatagccctgatgaagcaagttac

SEQ ID NO: 493762 - DNA, 107 bp, Homo sapiens
ctggagcctcagttggaagcagccgatccagcctgcggagcctgtggggcagactatatcatcatgtacatagaaaaatccaaaggattctgcaaaaaagctactag

SEQ ID NO: 493763 - DNA, 100 bp, Homo sapiens
gctaaggccgcgttggggtgagaccctcacttcatccgttttttggaccatatacaaacaacactctttttgaaactgatgaacgctaccgacatttagg

SEQ ID NO: 493764 - DNA, 100 bp, Homo sapiens
tggggatgcaaggtccaaatctcagcaacccctgtgcttctccccaggtccagccaatgcattcagaagccaaaatggtgggcaccatgtccttgaagct

SEQ ID NO: 493765 - DNA, 100 bp, Homo sapiens
tggagatagtcagtgcagtaaattcagtgtcagtatacagactagaccatacctttgaggatgcagaaaatgcgattgtgcatatgggcggtcagtggtt

SEQ ID NO: 493766 - DNA, 83 bp, Homo sapiens
ggaacagcacccccttctttaagcctcttgttgctgtaccacatagaattcactcaacaagtagaaacgtgagagaagaaaaa

SEQ ID NO: 493767 - DNA, 50 bp, Homo sapiens
gattgtatctcggaatttttgaagcgcctttttaaaaaggaatcctggaa

SEQ ID NO: 493768 - DNA, 100 bp, Homo sapiens
ccgagatacagttttaaatgtgctgtgcggtctctgagcagcgactcacctgtgcaggggtggcactgaatcaacaagacaagcaactcaattgattaat

SEQ ID NO: 493769 - DNA, 108 bp, Homo sapiens
gagaggcatgaagggattggtctatgaaacatcagttcttgatcctgatgagagtgtgaaccggttggcaatggagacaagaaaagtaatgaaaggaaatcattccag

SEQ ID NO: 493770 - DNA, 74 bp, Homo sapiens
ggatgtggtggtctactctgatgtcaatcttgagggctagacccaacatgagtgaagtttcctgcaagaaacgg

SEQ ID NO: 493771 - DNA, 80 bp, Homo sapiens
actctttccgccctaatggaggtctccagtttcggcatccttctttaaaagagaaatccacgttagctctccttgaggtc

SEQ ID NO: 493772 - DNA, 100 bp, Homo sapiens
ttcgccgttacaaagcgaacaaggacgtaatggagaaggctgtaaaagccagcacggaggccaccgagctgctgcagaatatccgccaggcaaaggagcg

SEQ ID NO: 493773 - DNA, 87 bp, Homo sapiens
atgtcccgctacctgcgtccccccaacacgtctctgttcgtcaggaacgtggccgacgacaccagctgctctgttaaaagcgaaaat

SEQ ID NO: 493774 - DNA, 75 bp, Homo sapiens
gccacctctgtccgaaagtgatgctacccgtggccggaaggtggtggtcgtacgctgtgaaggcatcaacatttc

SEQ ID NO: 493775 - DNA, 75 bp, Homo sapiens
ctgatgcacgaacgccctgcctatctgtattcattggagttctgggaggtgatcagtgatgaacatggcatcgac

SEQ ID NO: 493776 - DNA, 98 bp, Homo sapiens
aacttttgacacggctttggaaacgacgtcatgtgttaggcattatccaattggtttgctatttgatcttcttgcatcaagttcagctcttccttgga

SEQ ID NO: 493777 - DNA, 75 bp, Homo sapiens
ggattccaagtaactcttatttgaacttcctgaataatttccagacagccaaagagtctctgagtgctgccactg

SEQ ID NO: 493778 - DNA, 100 bp, Homo sapiens
gtggccgggctgaagaagcagttccacaaagccagccaggctattttcaaaatgatcactcccgaggacgtgaagctccttccagacgatgaaaacacgc

SEQ ID NO: 493779 - DNA, 100 bp, Homo sapiens
agtttgggatcggctacagcgacacagcctggatctcctccatcctgctggccatgctctacgggacagggaaatcctcattgacgattcaatttgttga

SEQ ID NO: 493780 - DNA, 97 bp, Homo sapiens
acgggagttgggaggacccgggacaccgcacagccgggaaatggtttggtgcacctcgatttggaggaagtagggcagggcccttatctggaaagaa

SEQ ID NO: 493781 - DNA, 75 bp, Homo sapiens
gaacctgtccaggagctggcatgacgtgcaggtctctagcgcgtgctacctttttacccacacttaagtgacgca

SEQ ID NO: 493782 - DNA, 83 bp, Homo sapiens
gatttctccgcctcagcccaacggggaggtttttagaacttcagccataaaaatgggcagaattttccttgatcatatcggtg

SEQ ID NO: 493783 - DNA, 100 bp, Homo sapiens
ggagggcctcgccatgtcctgctgcccggtcctcctcgactggattaatgacgtgctggtggaggagaggatcattgtgaagcagctggaggaagacctg

SEQ ID NO: 493784 - DNA, 102 bp, Homo sapiens
ctgcatatgattggctctttagctgaaatacttctgaagcatcctggtggggaagaagttttaagggaacaagctggaggtgacgctactgagaactttgag

SEQ ID NO: 493785 - DNA, 80 bp, Homo sapiens
cattgaagctatcactgtcagtgctgatggcatgatcaacattgacatgactggagagaagaggtcgttggatctcccat

SEQ ID NO: 493786 - DNA, 80 bp, Homo sapiens
gctccccatcgcagaggccatgctgacctacaagcagaagaggactacagtattgacgaggaggccgccttccaggctgc

SEQ ID NO: 493787 - DNA, 51 bp, Homo sapiens
ggagtggcaccatggacctgcccttccagactacagtggtagtggaggccg

SEQ ID NO: 493788 - DNA, 74 bp, Homo sapiens
atcgtctcctgtgtggcgatggtcttcctgctggggctcatgtttgagaaggacagaataacgggctcccagat

SEQ ID NO: 493789 - DNA, 110 bp, Homo sapiens
cggagacatgggagacccggggtcggaagtttctagagaggaaggatctccccagctgtcttcagcaaggccgtctcctgcccagagaaatagtcagcctagcagttcta

SEQ ID NO: 493790 - DNA, 50 bp, Homo sapiens
accagccagctaaccctacagaagatggaggtgacacgagcagtgatgag

SEQ ID NO: 493791 - DNA, 75 bp, Homo sapiens
ctggaatttagcgctcgcccagctagccgcaggcaaggcaggctgaggtaaagcggctcttccgccccattgagg

SEQ ID NO: 493792 - DNA, 100 bp, Homo sapiens
gagaggcaccgggatcgtgaccgagaccgtgaccgagagcgtgaccgagagcgcgaatatcgtcatcgttagaagatggcagagcagctcatgaccttgg

SEQ ID NO: 493793 - DNA, 135 bp, Homo sapiens
gaaaacgcagaattgagcaggatatgttagaaaagaggaaaatacagcgtgaattagcaaaaagggctgaacaggcctcattgctacgatttcagagtaccctggtaatagctgagcatgcaaatgattccctag

SEQ ID NO: 493794 - DNA, 96 bp, Homo sapiens
ctgggcctggtggtgtatctccgacactcagagaatccagaacttggaccagagctgccaagggacgtatatatgccaggcccatggaccttgggg

SEQ ID NO: 493795 - DNA, 100 bp, Homo sapiens
gccctgtaaactcttgtcaaggcaagtgcgagatgaggacagaagcacgacgaaaaaatcttctcattttgatttcgcattatttaacacaagaagggta

SEQ ID NO: 493796 - DNA, 100 bp, Homo sapiens
accgagaccgtgaccgagagcgtgaccgagagcgcgaatatcgtcatcgttagaagctcctctggtgcaagtgtggtagctattgacaacaaaatcgagc

SEQ ID NO: 493797 - DNA, 83 bp, Homo sapiens
ggacagcgccttcctcaacgacgcggacatggtcatgagctttgtgaacctggaagccccatgtgccactcccctgatctgca

SEQ ID NO: 493798 - DNA, 100 bp, Homo sapiens
cccggagaagcaggagccctactcggcagatgagcaaggtgtggaacgacctgaggcccaagctcagctgcctctttgcgggaccacacagcaccctgac

SEQ ID NO: 493799 - DNA, 75 bp, Homo sapiens
ccgcgggtctacttcctcaaaggtgtcccgacccaggctaagcttgagcatggctgagcaggagcccacagccga

SEQ ID NO: 493800 - DNA, 100 bp, Homo sapiens
ccctggtctcaggcgccagtggaaatgtgtccagcgacgttgcctacgggaactgcttcacaagattaaaggagaaacagaaaatgtatctagcgctgtg

SEQ ID NO: 493801 - DNA, 83 bp, Homo sapiens
ggactgtccctgctcatccattctcctgccacccccagacctcctcagctccagaaatgggaacagatcgagggcaactccaa

SEQ ID NO: 493802 - DNA, 96 bp, Homo sapiens
aaaatattctagaaggggaaaagctacttcaagttacagatgtagagctaaaacgactgaaggatgctttcaagaggacctgtggactctcatatt

SEQ ID NO: 493803 - DNA, 74 bp, Homo sapiens
cccaaaagaccatcctgctctcaactacaacatcgtttcaggctaatcttccagtaccaacaattgcagcaata

SEQ ID NO: 493804 - DNA, 75 bp, Homo sapiens
ccgtcccgctcctaaggcaggaagatggtggccgcaaagaagacgtaacttcaaatgagcatttttcaactgcag

SEQ ID NO: 493805 - DNA, 75 bp, Homo sapiens
cccagccacttttcccctggtcttcaatgccagaatggtgtttgaaaagctcaccgggattattcaagccatggt

SEQ ID NO: 493806 - DNA, 90 bp, Homo sapiens
agaggctggactcggattcgttgcctgagtagaacttcatggaggaacacggagtgacccaaaccgaacatatggctaccatagaagcac

SEQ ID NO: 493807 - DNA, 80 bp, Homo sapiens
cctgcaaaccagggtatcagaggacttttcttggtagagatggaaatccaaataaacggaatgtgcacaatgaaacatct

SEQ ID NO: 493808 - DNA, 90 bp, Homo sapiens
gataagggcgacagcaacagctctgccggctggaagattgtaaaccatggctgtgtggatacaagctcagcagctccaaggagaagccct

SEQ ID NO: 493809 - DNA, 100 bp, Homo sapiens
gtggggccgcgctacaccaacctctcgtacatcggcgagggcgcctacggcatggtgtgaatggagatgtatgcatttcgattcttcatccgcctgtaga

SEQ ID NO: 493810 - DNA, 100 bp, Homo sapiens
tcatttgaggagtgggaacaggcttcggcgaacacaaaggctttggacgtggaccggatggttctttacaaaatgaagaaatccgtgaaagcaatcaaca

SEQ ID NO: 493811 - DNA, 82 bp, Homo sapiens
tttgggcacctgcagcgacctacccactacaatacctcttgggactgggctcgatttgagcttgagatcttcttagcccaga

SEQ ID NO: 493812 - DNA, 82 bp, Homo sapiens
acatttactgtgaaaactgcaaaaccactctgggctggaaatacgtgacttaagagattaaaattaatttggttgctgttgg

SEQ ID NO: 493813 - DNA, 100 bp, Homo sapiens
ggtcatccaaagcagccgtcccctctgcagcctctctgacaagtggcaattaagttggaatatgcaaggttggttaagttggcccaagaagacaccccac

SEQ ID NO: 493814 - DNA, 100 bp, Homo sapiens
acaatggcatttacagaaagagtcaacagcagtggcaacaggttgcagatgaatacatgttttccctagaagagaataagaagtccaagggacgccgtca

SEQ ID NO: 493815 - DNA, 90 bp, Homo sapiens
cacaggaggagctgcaggactgggtgaaaaagatccgtgaagtggcccagacagcagacgccagggctgaccggttccctgatgtgttac

SEQ ID NO: 493816 - DNA, 75 bp, Homo sapiens
ttatcggaccccgaggatcaggaaaaactatgacttgggaagatccccatgaaaaagataagagcacgaactgct

SEQ ID NO: 493817 - DNA, 100 bp, Homo sapiens
tacaagtccttcatcaaggactacccagtggctgatgctgccatggcccaagcccagggcctgtttggtacagacgagacagtgcccgaacacattcaac

SEQ ID NO: 493818 - DNA, 137 bp, Homo sapiens
gttttcatgtattacttcgataacccgggtggccaaattccgtcctggctcattaactgggccgccaaggcggtgtctcagggcagcagcgactctcagatcctggatctctcaaatcgcttttacaccctgatccc

SEQ ID NO: 493819 - DNA, 99 bp, Homo sapiens
gaatcagccaagtgttatagatgtccagctggcctgattacatcaaccccagagccgtgcagctgggctcccttctcgtccgcggcctcaccactctgg

SEQ ID NO: 493820 - DNA, 87 bp, Homo sapiens
acctggatcccagaaggtcgcgaaggcagtaccgtttcctcagcggcggaagtggagcttcccctgaagaaggatgggttcacctca

SEQ ID NO: 493821 - DNA, 75 bp, Homo sapiens
taattaaaggagtcgagagacttatctccggacaacaagtcaatcaccttctgctgcttggatgggtggatttgg

SEQ ID NO: 493822 - DNA, 90 bp, Homo sapiens
cggggacttggggccgcagggagaacccttaggagaaatcttgagagtggacagcaattgtgaagatcgccagagagttctgtgtttcat

SEQ ID NO: 493823 - DNA, 101 bp, Homo sapiens
gctggctgaggctgcggagagtgtgcggctccaggagcttgaagaaatccgcaaatgtgggatgaaaaacttccgtaacatccaggttgatgaagctaatt

SEQ ID NO: 493824 - DNA, 75 bp, Homo sapiens
gtggcccttccaaataagcggcataaagcaattgagaattcagcttcttacaccagtaatttggcctacagcttc

SEQ ID NO: 493825 - DNA, 50 bp, Homo sapiens
gaggaccatgtgatgcacctgctccaggcatacgaggagcggcagcggca

SEQ ID NO: 493826 - DNA, 101 bp, Homo sapiens
gaacctgttgataaatgcaaaacagtggctgttgcagcagcagccgctcttctaaaacattcaaaccaaagaagaatatccctgaaggatctcatcagtat

SEQ ID NO: 493827 - DNA, 130 bp, Homo sapiens
tcacaagataatagccagctccccagaaatgaacctgcccacggtgtccgcgctcaggggccaagaccagcttcaagtctccatggtaccagaaaacaacaacctcacagcacctgaacctcaagaagag

SEQ ID NO: 493828 - DNA, 100 bp, Homo sapiens
aaaccgtcctgctgcttgctgaccaaatggctgagaatcaggctgaaagccgggcagcagtggaggggacagtggaggctggagctacagttgaaagcac

SEQ ID NO: 493829 - DNA, 83 bp, Homo sapiens
ctgctgcgttgcggctactacaacacggctgtcaagctggcgcgccagagcggcatcgagtttaagctatgaagaaggacatc

SEQ ID NO: 493830 - DNA, 100 bp, Homo sapiens
ccttgggaaccgcctgggaactccgccatgtcatccacttcgcccaacctccaggataaaggctcactgatggctcagttgggagcagttgtggctgtgg

SEQ ID NO: 493831 - DNA, 82 bp, Homo sapiens
cgaggagctcgacgggctcttccggcgctatggggagtgcgccggtctcggggaaatgcccggttccttcgtgcccacggtc

SEQ ID NO: 493832 - DNA, 97 bp, Homo sapiens
cctgacttctacccaccctcggacccagggcagccgtgcccatttccccagggcatggagtggaatcccccaaagaaggtaaagggagcaagccttc

SEQ ID NO: 493833 - DNA, 75 bp, Homo sapiens
tgctggtggctctacccagaattcaattaaagtggctcagaaccgcatgcacgagtctctcatgctcttcgactc

SEQ ID NO: 493834 - DNA, 82 bp, Homo sapiens
cggcagccgcacaccatcctgcgcgtcgtgtcttgggcctccggtgtggctgtctctgatggtgtcatcaaggtgttcaacg

SEQ ID NO: 493835 - DNA, 100 bp, Homo sapiens
gatatccttcaggagtctgtcaaagagaaagtaacaagaatcattcttgcagcatttcgtgtataatttgggcgactacaatggagagatcatgtctgag

SEQ ID NO: 493836 - DNA, 82 bp, Homo sapiens
cgagcggttccttgtgggctaggtatcatgatattagctggtttgacatcaagtcatttgtgagtcatcagatcttctcctg

SEQ ID NO: 493837 - DNA, 74 bp, Homo sapiens
agccgatgcaccgagtccagcccaggaaaatggagagctctctgatgtaaaggatggagtaaatcaagcagcac

SEQ ID NO: 493838 - DNA, 90 bp, Homo sapiens
ggcgcccgcggtctggacaagcgaggaagtttctttaaggtgaaaggaaagcaagccaggatggatatttacgacactcaaaccttgggg

SEQ ID NO: 493839 - DNA, 108 bp, Homo sapiens
agttgtggcgaggcagatcctgccccgtggccgcggccgtctcacggttgatgatgaagcgccggccgtgtaaatgaagatcgggtgaggagcaggacgatgcccaag

SEQ ID NO: 493840 - DNA, 100 bp, Homo sapiens
gaaatctctagactcagatgagagtgaggatgaagaagatgactaccaggtacagcagggaagaactggaaactcagagaaagaaactgcccttccatct

SEQ ID NO: 493841 - DNA, 100 bp, Homo sapiens
ggcagaaccaccccagtgcacctccctggcctggtctgctgatggccagcagatgccgacctggccgaggggccccctccctggacacctgcgctcccct

SEQ ID NO: 493842 - DNA, 100 bp, Homo sapiens
acctttaccgatgatggatgtgggatgacacctcataaactacaccgaatgctcagttcctaatgtggatctaccacccctgtgttcatcgagattccgg

SEQ ID NO: 493843 - DNA, 75 bp, Homo sapiens
cagtttgtcgaacgatgttggactcatagtcactgccagaaagagttgtctgctggttctcagcttgaagaagat

SEQ ID NO: 493844 - DNA, 83 bp, Homo sapiens
aaaacagtggataattttgtggccttagctacaggagagcaagacactaagggcgactaccagaaagcgctgctgtacctgtg

SEQ ID NO: 493845 - DNA, 75 bp, Homo sapiens
gcggctcaatgaccatggcaagaactggcgtcacgtttacaagaagcagcgctatgcaaacaagcactgaagagg

SEQ ID NO: 493846 - DNA, 89 bp, Homo sapiens
caggagagcgtggggagctatgtgcaggtttggacctcctgcgtacagacggtttagtagtggtggtgcctatcccaacatccccctct

SEQ ID NO: 493847 - DNA, 100 bp, Homo sapiens
tcggctgagccaccgggtgagctcaccgcccagcccaaaccaggagattgcgagggagcgatgcggtgcagcgcggctgaccggttccctgatgtgttac

SEQ ID NO: 493848 - DNA, 82 bp, Homo sapiens
ccggacgccgctcaccaaccgcgtgtgggaggacaggccctcgtccgcaggtgggcaccagacaatgcagatcttcgtgaag

SEQ ID NO: 493849 - DNA, 90 bp, Homo sapiens
tgatgttgaattattactcagaacatctgttatacaaggtattcacacagaccacaatacactgaggttttggccaaattgggcgagggc

SEQ ID NO: 493850 - DNA, 83 bp, Homo sapiens
ggggagcagaaggactcggacacagcaaaagctggcaggctgacagaggcggcctcaggacggaccttctggctactgaccgt

SEQ ID NO: 493851 - DNA, 90 bp, Homo sapiens
cggagccgaataccaagctcggatccctgaatttgatccagattatgactgtacccaatgacccttacacttttctctcttgtggtgaag

SEQ ID NO: 493852 - DNA, 100 bp, Homo sapiens
atgtaccgtccaactacgtggagcggaagaacagcctgaagaagggctccctcgtgaagaacctgaaggacacactaggcaagcttcttccatctggtga

SEQ ID NO: 493853 - DNA, 85 bp, Homo sapiens
ctgcaagagatcagtaacttgttcttgattctgctcatgatgggaaggatctgagtctctccctgcggagacagccctgaagaac

SEQ ID NO: 493854 - DNA, 100 bp, Homo sapiens
ggaagcagtgcccggcgacactgcacccatcccggctgcttttgctgcgccctctcagcttcccaagaaagatgctccaagtcatagaaatgggaaaagc

SEQ ID NO: 493855 - DNA, 100 bp, Homo sapiens
gggaaagtgattttgaaacgattaaattgattagcaatggagcctatgggttccttcaatggtgccttagctgctgttcctgtccaggacctgggctcca

SEQ ID NO: 493856 - DNA, 100 bp, Homo sapiens
atcatactacaacatgaatcggatccgactacagtggtctcgaatatggcatgtgattggagatcacttcaataagtgtctttttccttggagccatcct

SEQ ID NO: 493857 - DNA, 98 bp, Homo sapiens
gcgaactgggtggcgaacggggcgagcctggaggattgtcactccaacctcttttcgctggcctatgaaaggaggttccctacatgtcctttgattcc

SEQ ID NO: 493858 - DNA, 83 bp, Homo sapiens
gctgtggggaaacgttgtctggagtttactcctggcttgggggcattaggaagcactggaggctcttcgggaactaatggatc

SEQ ID NO: 493859 - DNA, 96 bp, Homo sapiens
agacgcagccgtagacaccagctccgaaatcaccaccaaggtttacccaaggtccagcctagcccctaggcaccatgtcggacagtgatctaggtg

SEQ ID NO: 493860 - DNA, 100 bp, Homo sapiens
ggcggcgctggggcccccagaagtgatcgctcagctggagaacgcggctaaagttctgatgctgtgtaaatgagtatggaagattatgatttcctgttca

SEQ ID NO: 493861 - DNA, 100 bp, Homo sapiens
ctgtgaaaaaagccatttccgaagaccaaaggagaagtcccatctaacatccttctgtacatcattactggaaatgaagagctgacagtcatagactgat

SEQ ID NO: 493862 - DNA, 82 bp, Homo sapiens
aggcgctcttcctggtgtcccgcccagtagctgcagatctgggacacggccggccaggagcggttccgcaccatcacccaga

SEQ ID NO: 493863 - DNA, 83 bp, Homo sapiens
gccaagggacaatggtcaccgtctcttcaggcggctatgagaggttttcctccgagtacccagaattctgttctaaaaccaag

SEQ ID NO: 493864 - DNA, 101 bp, Homo sapiens
cctccccgccccaggaaacctgccatggcctcctggtgagctgtcctcatccactgctcgctgcctctccaggttttactcaagtgaacatgaatacagtg

SEQ ID NO: 493865 - DNA, 100 bp, Homo sapiens
gggagggacagatcaacggcaggagaggtttgttccctgacaactttgtaagagttttcaattcaaaaacagctgaactacttagtcatcatcaagtaga

SEQ ID NO: 493866 - DNA, 82 bp, Homo sapiens
aaacttcagatgcagactacagctctggagtttaggcaacggattatcttacgccggctcagttcggggaagctgcaggagt

SEQ ID NO: 493867 - DNA, 90 bp, Homo sapiens
tgcagccagggatattgagaaacttctgagcaacagatctaaagccctggtggtcatcatggtcacaggagaccatccaatcacagctaa

SEQ ID NO: 493868 - DNA, 101 bp, Homo sapiens
cggaggtggcagccatctccttctcggctcttgtcaggatggtgaagctgttcatcggaaacctgccccgggaggctacagagcaggagattcgctcactc

SEQ ID NO: 493869 - DNA, 74 bp, Homo sapiens
ttttctgagcgagccttgaaagagataaaagcggaagtttgccacacggacatggtccggcgaggagagatcat

SEQ ID NO: 493870 - DNA, 88 bp, Homo sapiens
gggggtcgaggtcgtggtggaccacgtggtggcaaatcctccatcagttctgggctgctaaggaagcaaaaaaggctaagcaagcatc

SEQ ID NO: 493871 - DNA, 98 bp, Homo sapiens
aagaatcaagactgtctatgataaaagtgttgaagagccaaagagtgtggccagatgcaaaataagtggctgatgataaacattcaaaatgttcaaga

SEQ ID NO: 493872 - DNA, 82 bp, Homo sapiens
cttcacctgcagaagcgtgtcgttctgcaccagcgccttgatcgagtacttgaggatgataatgaagataattcaaatgatg

SEQ ID NO: 493873 - DNA, 90 bp, Homo sapiens
ctgatcccctggccgttggaggagcagttgaattgaatgatctggcacgggaccctccagcacagtgttcagcaggtcctgttggagatg

SEQ ID NO: 493874 - DNA, 100 bp, Homo sapiens
ctggcagaagaagcaacacgcaaacgagagctgaggctaatgaaaaacaggccacgtggtgcttgcgcagtgccgagtgctgatggccagtgtgggggcc

SEQ ID NO: 493875 - DNA, 110 bp, Homo sapiens
aacctccacagtcaagaggacgacgcaaacatgcagatctttgtgaagaccctcactggcaaaaccatcacccttgaggtcgagcccagtgacaccattgagaatgtcaa

SEQ ID NO: 493876 - DNA, 75 bp, Homo sapiens
tcaagcactgtgctaaagtgtttggtggcacctgtggaaatgaaacggagaaataagatccagccttgtttatca

SEQ ID NO: 493877 - DNA, 101 bp, Homo sapiens
ggaagctgggaaacccacaggaggcaaccacactagtttaggaggttgtgcccagacatttccttcttccagagggccactgactacccttgcctcctcat

SEQ ID NO: 493878 - DNA, 82 bp, Homo sapiens
cgggcggcttcctggcctgggcgctccggtggcggcggagagctgaagaagcaggtggagagtgccgagctgaagaaccagc

SEQ ID NO: 493879 - DNA, 96 bp, Homo sapiens
gccctgttctaggtgctcagatggagttataaaactgaaacccagcgtttgctggcagaaccagttcctggcatcaaagccgaaccagatgagagc

SEQ ID NO: 493880 - DNA, 98 bp, Homo sapiens
ctgcctttgacatccttcagtactcagagcctcagtcaaggttctggggccgagataaggttgggtatctacagccattggttgctgttcaggtcagc

SEQ ID NO: 493881 - DNA, 110 bp, Homo sapiens
ccgctcccgcgctggccccggccgcccggctgctgctggccgggctgctgtgcggcggcggggtctgggccgcgcgagcaggtggtccattatggctgacatgcaaaatc

SEQ ID NO: 493882 - DNA, 100 bp, Homo sapiens
caggcgtgcgcggacggtgtgcggcatgttgacatagcggctttattgataaaatacaacacgtgtgtaaatgcaacagataagtgggcgtttactcccc

SEQ ID NO: 493883 - DNA, 82 bp, Homo sapiens
agcagatggcggatgccctgcagtacctgcagaaggtctctggagacatcttcagcaggtccagggagtcggtagtaaggga

SEQ ID NO: 493884 - DNA, 50 bp, Homo sapiens
tgtcttctcggaaaaaaccatccttggagtgtcttctcagaaaaaaccag

SEQ ID NO: 493885 - DNA, 74 bp, Homo sapiens
acataactttggagagcaaagacatcaggtttgaagatgccgcatttggattggatgaattccaaattctgctt

SEQ ID NO: 493886 - DNA, 96 bp, Homo sapiens
agagccaagagaaggtccttttctacaaatatcagagccatggctcagattttccacagaatgagcctcagatcaagaatcagtttaataagaagc

SEQ ID NO: 493887 - DNA, 95 bp, Homo sapiens
aggtgaaccttcgaccttggacttctcagcctccagaatgaaaacaaccctttttgctgcacatgtaagtggagctgtgcttacctttggtatgg

SEQ ID NO: 493888 - DNA, 75 bp, Homo sapiens
tgtcggtgggcctctgagatatgccgtttacggaccaagatcactccatggatgaaatgacagctgtggtgaaaa

SEQ ID NO: 493889 - DNA, 75 bp, Homo sapiens
ctcgcctgcaccccctctctggcaatacaaggacctgtggaatatgagtgatgacaaaccctttctatgtactgc

SEQ ID NO: 493890 - DNA, 96 bp, Homo sapiens
aaaaacttataattcaggactttatcttagaagctacacaggttacaggaaatacaggaggcagaggaacaaataaaagacaccacgagaaacaga

SEQ ID NO: 493891 - DNA, 75 bp, Homo sapiens
cccttccgtatctgcctaggcattttgctgtctcctcctaatacgataaacatcagagtcagagcctgaagagcc

SEQ ID NO: 493892 - DNA, 90 bp, Homo sapiens
gtctggtcggatggggcaggatggctgcgttgacacgtcttatttaatccacatcatagctgagatctgtatctgtggacctgaatgttg

SEQ ID NO: 493893 - DNA, 82 bp, Homo sapiens
cgcgaagaggctggactcggattcgttgcctgaggtgcccgtggttgacacgagctgtgtccccagctgttcccgtctacaa

SEQ ID NO: 493894 - DNA, 100 bp, Homo sapiens
cgggcccggccacagcctgcagcggagcccacgagaggcagcgccatggcggagcagacctactcgtggttgcatcataaatacaaaggactgaagttat

SEQ ID NO: 493895 - DNA, 75 bp, Homo sapiens
ggaggaatccgagaagagcagagcggagggagccccagacacggagaccatctagctggctgcccccgacagtga

SEQ ID NO: 493896 - DNA, 82 bp, Homo sapiens
ttttacaaagcatgggagtgcagctgcctgacaacaccgatcacagaccaacaaccagtgttttagaaggagtatgtggaag

SEQ ID NO: 493897 - DNA, 96 bp, Homo sapiens
agacgccgcagccaggatggttgagtaatgattctcagtgtggagtcatttgattattaagacccattgacatgagattacatcctctgcctataa

SEQ ID NO: 493898 - DNA, 75 bp, Homo sapiens
tctgtcttcggtggactccttcggcagtccacccaccgccgccgcctcccagaaagcgtggatacccatcaacga

SEQ ID NO: 493899 - DNA, 100 bp, Homo sapiens
cagagccctccggccagcggggagatggcagttgaattcctgcatgaactgaatgttccatttttcaaagttggatctggagacactaataattttcctt

SEQ ID NO: 493900 - DNA, 73 bp, Homo sapiens
attacagcttcatatgcaccagaaggagatgaaggaaccttcagcctgtggtgtcatcccaagtttgaggacc

SEQ ID NO: 493901 - DNA, 82 bp, Homo sapiens
gccgctcatcgccatcacccgcaacccggtgttcccgcgctttatcaagattatcgagagtgcctggtgaagaatgtgatgg

SEQ ID NO: 493902 - DNA, 80 bp, Homo sapiens
agagatgcttaaaaatcaccagttactttaatgaggttatgagagaatttacaatgaaattccggacattaatctggatg

SEQ ID NO: 493903 - DNA, 97 bp, Homo sapiens
cgcattttggcattgacatttaattttagggtcctttatatagaagggagagtagaaacctgtttccctccaatcttgtggttgcagctttccgtac

SEQ ID NO: 493904 - DNA, 75 bp, Homo sapiens
ggaagatttaacgaatggggttgtgatggcccaggttcttcaaaagatgcataagatgcacatttttctgctctg

SEQ ID NO: 493905 - DNA, 97 bp, Homo sapiens
tggacaccaaccctgccatccgggagcagacggtcaaggctggagtgcaaaggcgcagtcttggctcagtgcaacctctgcctcccaggttcaagca

SEQ ID NO: 493906 - DNA, 75 bp, Homo sapiens
acatcgacgccgcgtggcaggcgctgcgcacccgggggacttgatctcatcttcatgccaggccttgggtttgac

SEQ ID NO: 493907 - DNA, 82 bp, Homo sapiens
cacacctaccaagaagccagtcaagcggccagagccaaatttctgtgctgcagaaccgcattgagcagctggagcagctttt

SEQ ID NO: 493908 - DNA, 142 bp, Homo sapiens
ctgaagattttgtggtttatacttacaacaaggaagggactttaatcactgaccatcccaatatacaggccatcatctctcagcaaggtgacatatttgtttttgacctggagacctcagctgtcgctccctttgtttggtt

SEQ ID NO: 493909 - DNA, 75 bp, Homo sapiens
aggccgggacttggccgagcggatcctaataaggggaaaatgaacccttaggagaaatcttgagagtggacagca

SEQ ID NO: 493910 - DNA, 82 bp, Homo sapiens
cttcccgcccgccttccgccgtctcttcgagttcttcgtgctgctcaaggtcagcccaaggccaaccccactgtcactctgt

SEQ ID NO: 493911 - DNA, 75 bp, Homo sapiens
tggaagccaggtgcaaggagaaaggattttgaggagggggacctggctgcaggtgctggagaccatcggtgtgct

SEQ ID NO: 493912 - DNA, 100 bp, Homo sapiens
gaaattgagcaacgacttgccctgtggctatggccactcggacgcagatgttctgcaccagtcattacttgaagccaacattgctactgaggtttgcctg

SEQ ID NO: 493913 - DNA, 98 bp, Homo sapiens
gaaacatctatattctgagaaggaccaagttcctgagcgacaggtggatgctgcagaagggctttctgaaggaggaggacctcacggagaagaagccc

SEQ ID NO: 493914 - DNA, 74 bp, Homo sapiens
cagagagagagtatggaggacacgaacaactatcttacaaagcacaggaaagagcccctgcagcagcagcaggt

SEQ ID NO: 493915 - DNA, 113 bp, Homo sapiens
tgtatgatgaagcaatacggcatttttcaacaatgcttcagaaggagctcaaaaagtgggatgagtttgaagatattttagaagagaggaggcatgtcagtgacttgaaattt

SEQ ID NO: 493916 - DNA, 100 bp, Homo sapiens
gatgatgaagaagacctgctggatgggtctccaactgaattccttgaagagaaaatggcctaccaggaatacccaaatagccagaactggccagaagata

SEQ ID NO: 493917 - DNA, 75 bp, Homo sapiens
ggaaagtcgctgtggacttgccacggaacttgcatcagcactgaagtcagccttatctggccacctggagacggt

SEQ ID NO: 493918 - DNA, 100 bp, Homo sapiens
gcttcgagctctcctctgatggcaggacctgccaagcacaggaagtcctggagaacctgaaggaccgctggtaccaggcggacagcccccctgcagacct

SEQ ID NO: 493919 - DNA, 100 bp, Homo sapiens
gagtggaaaaaagagaggatttgcttttgtaacttttgatgatcatgatacagttgataaaattgttggttgggataagcattcatatggttaccatggg

SEQ ID NO: 493920 - DNA, 75 bp, Homo sapiens
ctgggggtgcgcgcctgcgacctgcccgcctggtgtctgcgagattaatctctcatggccgctgcacaagaacct

SEQ ID NO: 493921 - DNA, 100 bp, Homo sapiens
ggccaacataccctcagctgtatgtgaaaggggagctggtgggaggattggatattgtgaagttggctggggaacagaccagggaattggtggatttgga

SEQ ID NO: 493922 - DNA, 75 bp, Homo sapiens
aaaacaggatcagtaaagaaggaaaaagcagtaaagccagaggaagagtggtgaaggaggagatctcggatgaca

SEQ ID NO: 493923 - DNA, 99 bp, Homo sapiens
cagaatatgaagttgccgatgatgaggaccgaagtgattgtggactgtcaatcttagatagattcttcaatgataagtagagacggggtttcgccatgt

SEQ ID NO: 493924 - DNA, 76 bp, Homo sapiens
aacaatcgtgaaacttcagaatacttcaagaatagcagaggagcagtttcagtctgatggaagcaaacaagaagat

SEQ ID NO: 493925 - DNA, 100 bp, Homo sapiens
ctgcgattgaggaagagcgagccagcgcccggagcaagcggagctcccccaagagccggaaagcacgtcagctaactgttcagatgatgcaaaatcctca

SEQ ID NO: 493926 - DNA, 100 bp, Homo sapiens
gttgaggattcagcaaatgaagattcagtggatgctaagccagaccggtcctcgtttgtaccgtccctcttcaggccttgcaattgccagtgccctaata

SEQ ID NO: 493927 - DNA, 98 bp, Homo sapiens
tggaggcggcggagcgcgagagcttcgagcggactcaggattgaaagaaggtggcaagaggaagaagcagaagcagagagaggagtcgaagaagaaga

SEQ ID NO: 493928 - DNA, 100 bp, Homo sapiens
gaaatgggaaacagcatgaaatccacccctgcgcctgccgagaggcccctgcccaacccggagggcagacagtccagaagacatgcacagctggattaag

SEQ ID NO: 493929 - DNA, 82 bp, Homo sapiens
cgggtctggagtgcgtgggggaccggctgttggcggtcaccacgttctgcgcttttccgagtcggacatatgagcagcgtgg

SEQ ID NO: 493930 - DNA, 96 bp, Homo sapiens
aagctctccagcttactctgcaagttctccccggacggcaagtacctggtcttcagggagcaggggatcgacggggagaccctgccactgctgacg

SEQ ID NO: 493931 - DNA, 100 bp, Homo sapiens
ccgtgaccgagagcgtgaccgagagcgcgaatatcgtcatcgttagaaggatacttctagaattactggctcccataaaacagaacagcggaatgctgat

SEQ ID NO: 493932 - DNA, 82 bp, Homo sapiens
tcacaggctggatgaagattgggtccagaacacatattacataatggagccgggagacagactagggctggcttgatccggc

SEQ ID NO: 493933 - DNA, 97 bp, Homo sapiens
ggagagagatgttatcatgagggaattccggtcagggtcaagtcgtgttctgatcactactgacttgttggctgcattgcgtcagattactgataaa

SEQ ID NO: 493934 - DNA, 101 bp, Homo sapiens
ggaaaactcaggaccatgatggctcagtttcccacagctatgaatggtttttgactaaaggccagaatgcattggtagagctacagacacaaagaccaata

SEQ ID NO: 493935 - DNA, 49 bp, Homo sapiens
gcggaggtcgataagctggaactgatgcctgggccgagccagtggcccc

SEQ ID NO: 493936 - DNA, 75 bp, Homo sapiens
gaacagcagatacttcaactgtgttgtgacatagttccatgtttgcaggtaaagggagaagatgaggaagagaac

SEQ ID NO: 493937 - DNA, 83 bp, Homo sapiens
gtccttggcccgcggaggggtctgcgcagtgcaggcagataccgtttgacaccaccaaacttcttggtatacatgaacaagca

SEQ ID NO: 493938 - DNA, 100 bp, Homo sapiens
gttgtgtcatccgccccccgctcaatggcgactccctcaccgagtacgaagcgggcgtttgcgaagacatgccttgaattggaacgctacctacagacgg

SEQ ID NO: 493939 - DNA, 75 bp, Homo sapiens
gtggccataccgttgaccgctcctccaactaaccaattcgccttttacaagtccacctctcagagaagaaataat

SEQ ID NO: 493940 - DNA, 100 bp, Homo sapiens
ctgctacactgaagatgaagcaaggcccaatgacccaggcggtagttcctgaaatgactgagatattgaagaaaaaatgaatcaggatcatgccttaaaa

SEQ ID NO: 493941 - DNA, 75 bp, Homo sapiens
gccctggacacagcaatatctctgggctttcacagaactacacgaaggccatgcggctgtttgtgggagaaccgg

SEQ ID NO: 493942 - DNA, 75 bp, Homo sapiens
tgatagcatttgcttcattatgtcaagttcaacaaatgttaatggaatttctcagtgacaacaacgaagcagcag

SEQ ID NO: 493943 - DNA, 100 bp, Homo sapiens
ggaggatcgcggagtcccaatgaaacgggcagccatggccctccacagcccgcaggtataccgctgggccgaccactcaagcacggtgctgcagcggctg

SEQ ID NO: 493944 - DNA, 96 bp, Homo sapiens
cactgaaaagagaattaaatagaggagtcatcaaacaggttcatcctaagttccactataaacaggctcatgactcgggcacagacacttcttgcg

SEQ ID NO: 493945 - DNA, 100 bp, Homo sapiens
cccaaccccatccacctcactgtggacacaagtctccagaacggccgcatgagcatcaaagcctacgtcaggcatctatatcataaatctcaagaggacc

SEQ ID NO: 493946 - DNA, 98 bp, Homo sapiens
ggctgggttctctgaagatgattacacggcattaatctcccaaaatattctagaaggggaaaagctacttcaaggctgaagctcagggccctgtctgc

SEQ ID NO: 493947 - DNA, 75 bp, Homo sapiens
atcagcgactctgtgttgtttctgcaggtcagtggtcactgcaagaacattcccactctggagtatggattcctc

SEQ ID NO: 493948 - DNA, 90 bp, Homo sapiens
gtgaaaatggccatactgcccaaggagattaagtgagagagagagaattggagaattgggagctcctgaagtatggggactttctccaaa

SEQ ID NO: 493949 - DNA, 90 bp, Homo sapiens
gttgccgcagccccaggctgagacagtgatcgaactgtgagaatttggaaggctcgcaatttgcaagatggtcagatctctgacacagga

SEQ ID NO: 493950 - DNA, 98 bp, Homo sapiens
ttacctaggaatgagagggacaggagtatctgaggatggagaactcagcacctttctgagaaaagtctacagcattctttctctgcaggttctcttaa

SEQ ID NO: 493951 - DNA, 130 bp, Homo sapiens
ctggcagcggggaaccttggggagaacacgggacaccgcggaagccgggaaatgacaatgcagatcttcgtgaagactctgactggtaagaccatcaccctcgaggttgagcccagtgacaccatcgaga

SEQ ID NO: 493952 - DNA, 100 bp, Homo sapiens
cttccattgaacttcccagcactcgaaagggaccgaaatggagagcaaaggatagagggaggaatcagcagcttggaaattcaagcacgtgatctggcgg

SEQ ID NO: 493953 - DNA, 98 bp, Homo sapiens
aggagctgagcgagcgcggaaggtgccctcaccaccaatggcatcaaccctgacaccagtactgagatcggacgtgctaagaactgccttagccctga

SEQ ID NO: 493954 - DNA, 75 bp, Homo sapiens
atctgagctagatcactccaaacccttgctgtcattcaggttaatccctatatcctgaagaagaacatgatcctc

SEQ ID NO: 493955 - DNA, 76 bp, Homo sapiens
ggtgtttgtccagcgactccggggcctgatgaatgacatcgttaagtgggcagaccaacatccacctcagcaaaaa

SEQ ID NO: 493956 - DNA, 80 bp, Homo sapiens
ctgtgataggagccccgttctcacaagggcagaatacagttatggccacccaggtaatggggcagtcttctggaggagga

SEQ ID NO: 493957 - DNA, 98 bp, Homo sapiens
caaggccaagttcatctcctccgtcaccagccacatctaccagcgtccttcgacctgaagcagcagctgctgctcaacaagctcatggggaaagatga

SEQ ID NO: 493958 - DNA, 75 bp, Homo sapiens
gaaaaagtgcctgaagtgacacaacacatgttttcttctggtatctggctaaatagagacggggtttcgccgtgt

SEQ ID NO: 493959 - DNA, 82 bp, Homo sapiens
ggcagcgcgggatcccagcctcaggcgtgcgcggacggtgtgcggcgatgaaatctacattgctccttcaggagtgcaaaag

SEQ ID NO: 493960 - DNA, 83 bp, Homo sapiens
ctggcagcaattccttgacagtttaaaagccttggcagtcaagtgcaagaagaaacacacgctgctgtgccccgactttgccc

SEQ ID NO: 493961 - DNA, 75 bp, Homo sapiens
gaagaccttaagaagtttctaaaacgggaggagttgtgtggggtaatgacaatctcggactctccaagagaacag

SEQ ID NO: 493962 - DNA, 100 bp, Homo sapiens
ggaatctggcccctgcaggcgtggggttccacgtgggaggtccagcccagaatcaaatgcaggttccatctggatatggattgcatcatcaaaactatat

SEQ ID NO: 493963 - DNA, 90 bp, Homo sapiens
cgagcccggaggcaggagcagccgccatggccgagagcatcgtccaggtgcaggtacagcagtctccgcaacaggtctcggctcagctct

SEQ ID NO: 493964 - DNA, 97 bp, Homo sapiens
ccaatgattttaattggtaataaagcagatctggatcatcaaagacaggtggtggtcaccaatacaattccacatgaagtccagaagctccagtgcc

SEQ ID NO: 493965 - DNA, 100 bp, Homo sapiens
ggggcgtcttgcagccctatgagcatctcatctgcggcaagaacgccaatggcatggaagaggagatggttcgtgttacgcagtggccgtttaactggag

SEQ ID NO: 493966 - DNA, 98 bp, Homo sapiens
gccaaggagtggactagggtcgccggggaagcggaaaacgggcaatgctgtgagagccattggaagactgtcctctatggcaatgatctcagggctca

SEQ ID NO: 493967 - DNA, 100 bp, Homo sapiens
gcgaggcgcgggagcacctgggggaccgcttgcagcggggacgcgaggacccgggctgggctttcctcacccggtgaagagtgaatctaccaagaacgtt

SEQ ID NO: 493968 - DNA, 87 bp, Homo sapiens
agtcgccgcgtcgccagaccgccggctgcgccggagctgggggccttaggtccaggtgcaggtacagcagtctccgcaacaggtctc

SEQ ID NO: 493969 - DNA, 100 bp, Homo sapiens
tggttgatcgttggaacgagaaaagggccatgttcggagtgtatgacaacatcgggatcctggatgacaacatcaggaggtggaggtttctgtgactgtg

SEQ ID NO: 493970 - DNA, 100 bp, Homo sapiens
atcaaacaattgtagatcccttcagttcaaaacataatgtgattggtgaccaagaatatggcccaggtgaccaaagccctggacaaggccctgagcacca

SEQ ID NO: 493971 - DNA, 101 bp, Homo sapiens
gggccaccaggccgccgggggcctgctgcgcccgggtcttatatccagatggccaggctcagatgattcaccccaagcctgcagacttccggaatcctggc

SEQ ID NO: 493972 - DNA, 51 bp, Homo sapiens
cggctggcggagcagaacggattgcaggggtgcccccgtgggtggccacat

SEQ ID NO: 493973 - DNA, 100 bp, Homo sapiens
tggcagcagaaatcctactccacccataggaagacccacgtccacacctactcctcctcagggtgtccgcaatgttgccagtgtctgtctgcagattggc

SEQ ID NO: 493974 - DNA, 82 bp, Homo sapiens
acgacaaggagggcatgatcaacctcgtcatgtcctacgcgagtccttagccaggatggaggctgttgtgaacttgtaccaa

SEQ ID NO: 493975 - DNA, 100 bp, Homo sapiens
agcagtactgtgtagccaggatgctgcagtaccatcccactgatatcacgggcccgctcaacctctcagatccctcggtcagcaccgtggtgtgaggccc

SEQ ID NO: 493976 - DNA, 97 bp, Homo sapiens
cggggacctgcatgtgtgtgcgcgcgaaggagcggaagaatggcagtgctcaaactcaccgaccagatcagtacaatggaacatgaattttcaataa

SEQ ID NO: 493977 - DNA, 89 bp, Homo sapiens
caggtcctgcagctgggagacggcacaggacactaaaccagcttcctgcagatttcacaaaactgcatcttactgacagtctccaccca

SEQ ID NO: 493978 - DNA, 101 bp, Homo sapiens
ggcgcagaaaccccgttgacaaggcactgctttttcatgacggtgtggacactgccagcggctgcagccgacttggaatgacctgggagacaaatacaaca

SEQ ID NO: 493979 - DNA, 100 bp, Homo sapiens
ggtctctgactcacttctgactttaggtaaaataccatgaagattttgaaaaaacaaaggggagaggctttactcccgtcgtggacgatcctgtgacaga

SEQ ID NO: 493980 - DNA, 75 bp, Homo sapiens
cggctttggaagccgtgcggagcgagttacgagaattcccggccgctgcaagggatgcctgaagggaacagcact

SEQ ID NO: 493981 - DNA, 75 bp, Homo sapiens
accttctgccatgattgtgaggcctccccagccacgtgaaactggttacacatcattttggaatgactgtatatc

SEQ ID NO: 493982 - DNA, 100 bp, Homo sapiens
cggggccgcagtctggccacccgcttccatgcggttcgggtccaagatgatgccgtactatactggcaattgctggagaagattttgcaattgttgcttc

SEQ ID NO: 493983 - DNA, 101 bp, Homo sapiens
tcagtcccagcctgtggaggtcatctatgatgctgttacagagttgtttatggataataaaaatgaacttgaccagtgtaaatctgacctgcaaaataaaa

SEQ ID NO: 493984 - DNA, 73 bp, Homo sapiens
gggcaccgttgagctgttgcaactgttctgctgctgacatcatctctaccgttgagttcaaccacacgggaga

SEQ ID NO: 493985 - DNA, 51 bp, Homo sapiens
ggtcccgcagacgccgagatggagatcatgtttgagaccttcaacacccca

SEQ ID NO: 493986 - DNA, 83 bp, Homo sapiens
aatgaaaagggaggaaactcagaaaagcgtaagcttgctcaggtagtgggcagcagtcagtgacaggtgtaacctctgtggat

SEQ ID NO: 493987 - DNA, 100 bp, Homo sapiens
aaaacctgtatgtggaaccacctgccgccttgaattaaaagaagataatattgagtgcctgttatctacagcttgccttcttcagctttcacaggttgta

SEQ ID NO: 493988 - DNA, 75 bp, Homo sapiens
tgtgggtgctgggacttcccgtccgcggcgtggaggggtctgggggtggtggcatctcccctaaaggaagtggtc

SEQ ID NO: 493989 - DNA, 101 bp, Homo sapiens
accgtgaccgagagcgtgaccgagagcgcgaatatcgtcatcgttagaagctgaccctctggtgggcagcatcgccacacagtacatgaccaacagagcag

SEQ ID NO: 493990 - DNA, 74 bp, Homo sapiens
caacgggtttgccgccagaacacaggtgtctgcattattgggccgaatcccttctgctgtgggctatcagccta

SEQ ID NO: 493991 - DNA, 96 bp, Homo sapiens
tgattttaagctggcaaagtgggaaaaataaagtgttgagtaaacagaccaagttggggccacccagtgctcctgcagaagatcgttcaggaacac

SEQ ID NO: 493992 - DNA, 83 bp, Homo sapiens
tgccgacatggggcttaagatgtcctgcctgaaagctggtcagtgagaaggtcggaggggccgaggggaccaagctggatgat

SEQ ID NO: 493993 - DNA, 74 bp, Homo sapiens
gtggcagcctcccctgcaccggcaggtgagaggcggatctacagacataggtacgtgcagcactacggcctggg

SEQ ID NO: 493994 - DNA, 107 bp, Homo sapiens
gtgaagattgggaagtggttcctgaacctgttgccagatggtgcaatgttcaaagtactcaagatgaatttgaggcacttctgtctcctgctgccatgtgaagaaga

SEQ ID NO: 493995 - DNA, 84 bp, Homo sapiens
gatgttttacttcaagcaggggctgatttacagaaaaagtcctacctggagcgaagcgttaaggaagctgaggacaacatccgg

SEQ ID NO: 493996 - DNA, 89 bp, Homo sapiens
gggaaagatggcgacggctccgcgacgttgaggccgcgttgggcggttcagactcagggtggaattgaatgatctggcacgggaccctc

SEQ ID NO: 493997 - DNA, 98 bp, Homo sapiens
gctgattcctgggagcacatccatttcattggcaaggggattacagtgacgcaattgagacgctgctcacagccattgcggttatcaaacagtcccgg

SEQ ID NO: 493998 - DNA, 87 bp, Homo sapiens
cgggaagtcgacggcgccggcggctcctgggagtgcatccgccccaacccttttccccctcgtctcctgtgagaattccccgtcgga

SEQ ID NO: 493999 - DNA, 83 bp, Homo sapiens
gggcgcccgggccgtgagggccttggaaccggaggaccgcgctgagcacgttcttccaagaaaccaacattcccaacagccac

SEQ ID NO: 494000 - DNA, 100 bp, Homo sapiens
ggccaatatgatatacaagacaaggtgaagcctcggaagccaggcatggtggtgtgttcctgtagtcccagctactcgggaggctgagcaggagaatcgc

SEQ ID NO: 494001 - DNA, 90 bp, Homo sapiens
cccgctgcctctaggttctgggaagatggcgaaggtctcagagctttacgatgtcacttgggaaggcggatggcaggatgaaacctggcc

SEQ ID NO: 494002 - DNA, 85 bp, Homo sapiens
acattccccagctggaagacgtttctcagttcctgcagaagagtcccacgaactggctgggtatacagaaatgtccagaggccgg

SEQ ID NO: 494003 - DNA, 95 bp, Homo sapiens
aagctgagcttgccgcacaaaaagctagagagatgactgccaggggcatgaaggggatgtgcttccagggcatttgctggcagggcgtctcgtga

SEQ ID NO: 494004 - DNA, 100 bp, Homo sapiens
tgcattgaggcagaatttacatgaaatagttatggcagagaacgatgtggacaatgagctcttggactatgaagatgatgaggtggagacagcagctggg

SEQ ID NO: 494005 - DNA, 87 bp, Homo sapiens
cgcgcctttgtgcgcgcgccgagcttagaccatgctcagcctccaagcagccttgtcatcgacaaagaatctgaagtttacaagatg

SEQ ID NO: 494006 - DNA, 102 bp, Homo sapiens
aggacacagagcaagcggtttcagctgtactctgctaatgtaacagggaatgaaaatgtttataggaggccttagctgggacactacaaagaaagatctgaa

SEQ ID NO: 494007 - DNA, 80 bp, Homo sapiens
agacaggaagagaggccgtgcccctcagttcttctcaccactaaatccaatacgagttcatattgatattggagctgatg

SEQ ID NO: 494008 - DNA, 98 bp, Homo sapiens
gagagagcaggagattcggatgggtcagatggctatgggagtgaatggcattactgaggaagctgatcccaccatttactctggcaaagtaattcgcc

SEQ ID NO: 494009 - DNA, 83 bp, Homo sapiens
tttcctcagtgaaggattgtcaaactggaaagatgcacattttgcctctggttggtggaaagtcaacgcaaaatcatgctgcc

SEQ ID NO: 494010 - DNA, 75 bp, Homo sapiens
aaaagaagaaaatgttaaaaagaacagatacaaggacatactgccattggccataaaatgcagtaaaaacaaatc

SEQ ID NO: 494011 - DNA, 100 bp, Homo sapiens
cattatttatgtcatcaagaagaatgacgatgggcgacataccttctgttgaataccttttacaaaatggaagtgatccaaatgttaaagaccatgctgg

SEQ ID NO: 494012 - DNA, 100 bp, Homo sapiens
cgggagcatatcctgttccatgcggcatgctcatctgagccgagaggtggaatccagggtacagataggagttggagtcattcgttgcccagtttgcagc

SEQ ID NO: 494013 - DNA, 97 bp, Homo sapiens
gagtaggaaaccggtaccaggcagacatcaccgacttgttaaaagaaggttcagcagctggacatggagaaccaacgctcatcacctctgtcgttcc

SEQ ID NO: 494014 - DNA, 97 bp, Homo sapiens
aaggctcaagatggcgtgcttgttggagaccccaatccgcatgagcgtcctttcgccgtgctggtatagaggactctaagaagtggggcatgctgtt

SEQ ID NO: 494015 - DNA, 88 bp, Homo sapiens
gctccaagcctccagccggcagaaaacgctgcctgctgtttcccggggagatcatgaaacgaggtcgccttcccagcagcagtgagga

SEQ ID NO: 494016 - DNA, 125 bp, Homo sapiens
cagtatggtggactgaattctggacgtcctgtcactccacctcgaacagctaatccgccgaagaaaaggtggagccgccaccaaaatgcagattttcgtgaaaacccttacggggaagaccatca

SEQ ID NO: 494017 - DNA, 83 bp, Homo sapiens
ggcggtggccgcactgggaccccggaatcccgcgcgctgcccacgattcgcttctgagtgtgtcccggcatggatatccggaa

SEQ ID NO: 494018 - DNA, 89 bp, Homo sapiens
cctggctggtgccacagcccaaaccatcatttaccctatggaggtggctgacgggtccctgatcaaccagctggcgctgctgctcctgg

SEQ ID NO: 494019 - DNA, 96 bp, Homo sapiens
cccactggggatggcaaagacgacatccggtgcgccgaggctgctcacaaaaattacgatgaggacctggtgcaggaagcttcatctgaagatgtc

SEQ ID NO: 494020 - DNA, 80 bp, Homo sapiens
ctggaaggtgcgtgtggggctgggtctcggagtgggagacgtggagtgcaggccggacatggtggctcacacctggaatc

SEQ ID NO: 494021 - DNA, 100 bp, Homo sapiens
cttcagacagcatatttgagtcatttccttcgtacccacagtgcttcatgagagacctgatggccaaaagaaaggaagaaaatttttcctctcctaaaaa

SEQ ID NO: 494022 - DNA, 96 bp, Homo sapiens
ggagccgctgtttttcactgagctgccataccccgaaagggttggctgttccagctccaaagagaaggaggaaccttttccttctgcagcccctcc

SEQ ID NO: 494023 - DNA, 100 bp, Homo sapiens
ctggagccatccaacatttagctgggatgaaagacagcaagagcaaattggtcaggagatgttggaaaaccttagtcatgacagagaaaagatacagcga

SEQ ID NO: 494024 - DNA, 100 bp, Homo sapiens
agcagcagccgcggtggcagtgcaaaaggctggcagtacagatgggcggaagccatttccaattaaccatggtgaaactagtgatgaaactttattagag

SEQ ID NO: 494025 - DNA, 135 bp, Homo sapiens
ggcggcggaagatggtgccgggggtcgctggctctgctgctgccgccggcgaaggaggaggcgttgccggggtcatcgagcagctcggtgggaagcagctggtcatgaaccacatgcatcatgaagaccagcagg

SEQ ID NO: 494026 - DNA, 101 bp, Homo sapiens
cttagctgtgctcgcgctactctctctttctggcctggaggctatccagcgttttgggatttgagattgacgcggtgaactctgtccagttttcaaaccac

SEQ ID NO: 494027 - DNA, 83 bp, Homo sapiens
atctgtcttcggtggactccttcggcagtccacccaccgccgccgcctcccaggcatgaaagaattactgatgtccttgatca

SEQ ID NO: 494028 - DNA, 100 bp, Homo sapiens
ggcggacgcgcgcagcccgcccgcccggcgaccagcaagatttggcagctgatcggaagctctttcgtcttgtctccaatgactccttcatctctattca

SEQ ID NO: 494029 - DNA, 73 bp, Homo sapiens
catcgctgggagtactggttgccctttcctcagtatgatgctgtccgaataaaccaactctatgagcaagcca

SEQ ID NO: 494030 - DNA, 82 bp, Homo sapiens
tcttccagtgccgctgggatgactccgtcacctacatcttccaccagcttctggggacccagacatggagctgcgggaagaa

SEQ ID NO: 494031 - DNA, 90 bp, Homo sapiens
acgtgggcacggaccaattcgggaacaaatactactacatcccgcagtacaagaactggagagggtgaagagggaacagaaatctttgcc

SEQ ID NO: 494032 - DNA, 82 bp, Homo sapiens
gtcgcggtgggtcctcgcttgcagttcagcgaccacgctccaattaaggaacagctatatcctgcttccttctgtaagcagc

SEQ ID NO: 494033 - DNA, 95 bp, Homo sapiens
agaatatgctgccaaaattatcaacaccaaaaagctttctgctagggaaattgcatctgatggtctcaagggtcgtgtgtttgaagtgagtcttg

SEQ ID NO: 494034 - DNA, 100 bp, Homo sapiens
ctcactcccagtagtttctgcatttagtgagataagatggtgtcacaagaaggatctgaagtggagcttctagtatccccaggagcgcgaagtgaacacg

SEQ ID NO: 494035 - DNA, 73 bp, Homo sapiens
aaggagaggatcccggagccgcacttttctgtagaaggtcagttggaattcagggcattgctatttattcctc

SEQ ID NO: 494036 - DNA, 100 bp, Homo sapiens
tgcaatatgtgttgtgtgctgccacgtccccagccgtgaagctgcatgaagagacgctgacctacctcaaccaagctcttcagtgggtcatctgtgtgtc

SEQ ID NO: 494037 - DNA, 100 bp, Homo sapiens
caggagtaagagcccatagcagtctgccagacaatagagcatatggcctccagtctgtggactttgaagctgtggcaatcacagtgaaagagctagttcg

SEQ ID NO: 494038 - DNA, 90 bp, Homo sapiens
gcaggaccaggactccccgcacagtctgaccgacttgcgaatcaccaggaaagccttgagccgggccatgcttctcacatcttacctgcc

SEQ ID NO: 494039 - DNA, 95 bp, Homo sapiens
aggagctgaaggccatcgtatggggggccagaagcaaactccagccctccccgtgtctactgctcgctgaggaagccgcaggtgcacactggatc

SEQ ID NO: 494040 - DNA, 100 bp, Homo sapiens
cacctggctgatcctgcaccacaaggtgtacgatttgaccaaatttctggaagagacttgtgcaccatggacaattttgctgagggagatttcactgtgg

SEQ ID NO: 494041 - DNA, 100 bp, Homo sapiens
gcttagtcctgggagccgcctccgtcgccgccgtcagagccgccctatcagacttaattcagtgcacaaatgagatgaatgtgaacatcccacagttggc

SEQ ID NO: 494042 - DNA, 100 bp, Homo sapiens
gattaagaccattggcagcacatacatggcagcaacaggtctgagcgctgtgcccagccaggagcactcccaggacctcttctcagctctcatcaagggc

SEQ ID NO: 494043 - DNA, 100 bp, Homo sapiens
ccagcttctacctataagacttcaactcaagatgcaggaagatgagaatgtgcctactgctcctgatcctccaagtcaacatttacgtgggcatgggaca

SEQ ID NO: 494044 - DNA, 90 bp, Homo sapiens
ctccccagccacgtggaactgtctgctgctaccagctagtccaagccaccaccagctctgccatggagccttttaattggactccctgct

SEQ ID NO: 494045 - DNA, 82 bp, Homo sapiens
gaggataattgggatgatgacaatgtagaggatgacttctctaatcagttacgggcagcttttggcaaggagtctgaagttc

SEQ ID NO: 494046 - DNA, 100 bp, Homo sapiens
cttgaagatgatggaactttcagaagaggtgctgacacctgatggaagaccgattcaggatgtgatggtggcaggtgggatggagagcatgtccaatgtt

SEQ ID NO: 494047 - DNA, 98 bp, Homo sapiens
tgaaatgaatggcaaagctctcctgctgctgaccaaagaggactttcgctatcgatctcctcattcagctaggggtggccgtgtcacagtctggccaa

SEQ ID NO: 494048 - DNA, 100 bp, Homo sapiens
ctatttgcctaaattcttcattgttggactattgtggttggcttctgttacgctaggaatatggcaaaccatgggcctcctacatgaccaactccccgac

SEQ ID NO: 494049 - DNA, 97 bp, Homo sapiens
cccagccccacagaccagcccagcattcagagccgctcccgaggccccggcgcggcgcgagggcgcggggcgcggcgtccacaggcgccgaggctgc

SEQ ID NO: 494050 - DNA, 75 bp, Homo sapiens
ctcaacaaacaccagcgctttggaactgccattggatgtccagaatcccctgtagttgataatgttgggaataag

SEQ ID NO: 494051 - DNA, 83 bp, Homo sapiens
ctatccgatttcaaggaagccaaggggggacggcaaaacagaacagaaaggcggagataaaaagaggggtgttaaaagaccac

SEQ ID NO: 494052 - DNA, 100 bp, Homo sapiens
cccggatggcccgtggccctgacacggagaacatgggtaaaggatttagaggataaacttcactctgtgcagctaaccaggaagaaggaagaggaaacat

SEQ ID NO: 494053 - DNA, 101 bp, Homo sapiens
tgctgtcttcctgattttatacaaagaattatactacaggcacatatatgccaaagtcagtgcctcacatagacggtcagccattggatcataggaactgc

SEQ ID NO: 494054 - DNA, 82 bp, Homo sapiens
gagcccccgccgctccacagtccctggggccgagcacgagatgtcagtgggcccctgagggagctgcgccctcggctctgcc

SEQ ID NO: 494055 - DNA, 80 bp, Homo sapiens
cggggacggcgaggccctcatgtaccacacgaacctgctgggactacagaacatccccaggccgttcttcctgcaggtgt

SEQ ID NO: 494056 - DNA, 75 bp, Homo sapiens
cgataccatcggacaggatttctccgcctcagcccaacggggaggtcagtcatatgaaattcggatgctggataa

SEQ ID NO: 494057 - DNA, 75 bp, Homo sapiens
cggcagcgggcggacggccggcgggggcggcgtgcggcctagcgtctcagatccggaacatggtggcggtgctgg

SEQ ID NO: 494058 - DNA, 80 bp, Homo sapiens
cctgcccttgccagaatttcctgcgctgttccacctcattcaacttcagcccgagcgggaagaagttccgcagcaagccg

SEQ ID NO: 494059 - DNA, 97 bp, Homo sapiens
cccggcgcttcggcccgggccgctcaggtgcaggcgaaagggcgtgtggttgcgcctgaggaagatacttttctgtgttttggggttgtacattgcc

SEQ ID NO: 494060 - DNA, 75 bp, Homo sapiens
tccagcggaagtgaccgtggtggcttcaataaatttggtggtccatattactgtggtgtgggagcagacagagcc

SEQ ID NO: 494061 - DNA, 89 bp, Homo sapiens
gcagtactgtgactgggccacgtgtggaggaggccatgtacagaccatgctcgacagctgaccaaggccatgatgcgaaaggccacggc

SEQ ID NO: 494062 - DNA, 50 bp, Homo sapiens
cgactgctagagccgagcgaagcgctgaccccgcactacatctacccacc

SEQ ID NO: 494063 - DNA, 100 bp, Homo sapiens
tggtttgcaacatccttcttctggataacactgtacaagctttcaaagtcaataacattaaccaggtggtatttgttggaaatttcttgagaattaatac

SEQ ID NO: 494064 - DNA, 100 bp, Homo sapiens
aaaggcggaaagacgagttctcaaagagttgggtttctgcgtccatgtgaagcatcctcataagatccagcacacggaagacatggagaacgagatcgac

SEQ ID NO: 494065 - DNA, 88 bp, Homo sapiens
gatcagctgacaccagaagagagcaaggaaaggcttgggtatccgctgatcattgacccctctggacaggccacagaattcattatga

SEQ ID NO: 494066 - DNA, 75 bp, Homo sapiens
acggctacgaggtgctggatgcggccggcttcctggacaagatcgacgtgatcaagcaggctgactatgtgccga

SEQ ID NO: 494067 - DNA, 100 bp, Homo sapiens
ctgccagtataaatgcagtgacgatagggccagatttgagtgtgtgaatttttgagtgaaacctggaacccaaatgagaagaaatctgcaaggaataact

SEQ ID NO: 494068 - DNA, 50 bp, Homo sapiens
cagcctcctgagaagctgggattacagatcattaaaatccgtgcccagac

SEQ ID NO: 494069 - DNA, 101 bp, Homo sapiens
agccagtttggattttcactggacttccacaaggacagccatgggagacatgtcatgctgcccaaggacatagccaagctggtccctaaaacccatctgat

SEQ ID NO: 494070 - DNA, 83 bp, Homo sapiens
gaagttcttctcaataatgaaattgattggcttaaaagaattaggcccctagaattcctcctgaaaagagaatttttacaacc

SEQ ID NO: 494071 - DNA, 100 bp, Homo sapiens
agccgacacagatacagcagaccaagtcatggcttccttcaagatcctggctggggacaaggaggagatgaccgccgggttctgctatggcacatggaac

SEQ ID NO: 494072 - DNA, 74 bp, Homo sapiens
cctgctgctgagaaacacatcagcccgagagaagaagaaggaggttcctgctgtgccagaaacccttaagaaaa

SEQ ID NO: 494073 - DNA, 51 bp, Homo sapiens
ccgaagccttcctttatcgctttcaggatcccattgaagataccacgctgc

SEQ ID NO: 494074 - DNA, 83 bp, Homo sapiens
ccaacttcagggttggcaagaagataggatgtgggaacttcggagagctcagattaggtcatcatgcaccccttgaaaccccg

SEQ ID NO: 494075 - DNA, 100 bp, Homo sapiens
ctgaactctgaccattctttatggatacattaagtcaaatataagagtctgactacttgacacactggctcgacatgaagccattattatatcaggaacc

SEQ ID NO: 494076 - DNA, 50 bp, Homo sapiens
agccaagcctgatgccagcatggcatttttagatgaattcactaactggt

SEQ ID NO: 494077 - DNA, 73 bp, Homo sapiens
agattttgatgtggatgatgccaaagttttattagtgaaactggaacgccaagctgaagaagaacgaatacgg

SEQ ID NO: 494078 - DNA, 75 bp, Homo sapiens
tttttctcctatttcagcagttggccacaacttcattgctgggaaaagtggatgattcaacagccacacaaagca

SEQ ID NO: 494079 - DNA, 50 bp, Homo sapiens
gacaagatggacgatcctgactactggctgtggatgagatgaacggaaag

SEQ ID NO: 494080 - DNA, 90 bp, Homo sapiens
cacccgcgcaccgggcaggcgcggagaccggcgtgggacagccacctggagcgcagctgccagtcaagctacaacttcaagcagaagaga

SEQ ID NO: 494081 - DNA, 75 bp, Homo sapiens
tggacatatgcagcaaatgttggggaacatgatctgttaaaggttggccacattcgtgcggagcgtgacattcta

SEQ ID NO: 494082 - DNA, 49 bp, Homo sapiens
tcacaagctgcaccagcttctaaccgaatgctaatactggagaccgtgg

SEQ ID NO: 494083 - DNA, 82 bp, Homo sapiens
aagggatggcacgctgtgcttgagaccaacctgacgggtaccttctacatgtgcaaagcagtgagagtctgagaaaactgtg

SEQ ID NO: 494084 - DNA, 75 bp, Homo sapiens
gctgcctacggaggtggcagccatctccttctcgtgttctaagaacggaagcatctgggctggatggaatttagc

SEQ ID NO: 494085 - DNA, 74 bp, Homo sapiens
cgcaggactgcagggtctctccagattatctttctcaaggaatagatctttctggaatagaagtgatagaaaat

SEQ ID NO: 494086 - DNA, 90 bp, Homo sapiens
tgcgcagtcatgagtcgcttcaagtttatcgttgattgatattacaggcaagaaccaggatgaatgtgtgattgctttgcatgactgcaa

SEQ ID NO: 494087 - DNA, 101 bp, Homo sapiens
tgagcactgcactggaggccagcctcttcgctgtggtgcccaagtacttctttcagaattcataatgcactgaaaggaattccagatgaccgagatgggct

SEQ ID NO: 494088 - DNA, 82 bp, Homo sapiens
cgggagttcgaagagttggatactcagcgtcgctggcagccgctgtacttgggcgtgatggtgggcatgggtcagaaggatt

SEQ ID NO: 494089 - DNA, 100 bp, Homo sapiens
ttctgagtattgtctttatatcctgacactatgaatgctacttggatgcctcttaaggaatgtatcctgtcaggtataatgtcagtgaatggcaagaaag

SEQ ID NO: 494090 - DNA, 98 bp, Homo sapiens
atacagtcatggtggacaaggtcctccagaaggcatgaaccagcaatattaccctgatggtgaccaagaatatggcccaggtgaccaaagccctggac

SEQ ID NO: 494091 - DNA, 96 bp, Homo sapiens
gatgttaattgtcttggtcctcaaaggcatgttggtgtttgcagtcacatggaatacccctgccgcttccagaatgcttctgccaccacccaggag

SEQ ID NO: 494092 - DNA, 100 bp, Homo sapiens
ccgtgctgctgaccgaggcccccctgaaccccaaggccaaccgcgagaagatgacccagttccgggctgtcttgggcgaagtgaaactgtgtgagaagat

SEQ ID NO: 494093 - DNA, 90 bp, Homo sapiens
ggtggctccgcggattataacaggttatcactgtgaatataagatgcggacaggaaggaaacctgatggctgtgctatttgcttcaaaca

SEQ ID NO: 494094 - DNA, 100 bp, Homo sapiens
gcgtccgcggccgggatccggcccctcccctcgcctcctctcctaggtgccggccgggagggcggccgcagcaggtcacagggattatggacccagaaca

SEQ ID NO: 494095 - DNA, 134 bp, Homo sapiens
ggaagcggaggaatactgcacggattagaactgggccacaccctgaaccagttcgatgttgtgataaggtgtgccacggaccacaatgtggacaacaccacagagatgctgcaggagtggctggcggctgtggg

SEQ ID NO: 494096 - DNA, 155 bp, Homo sapiens
tgcattttcaggaggaagcgatggcttcagacagcatatttgagtcatttccttcgtacccacagtgcttcatgagagcaagtgatagaggttgtcaagtctgcatgtggccctttcccaaatcctctggaagaaggaatctcatttgatattta

SEQ ID NO: 494097 - DNA, 83 bp, Homo sapiens
atggcggatcggctcacgcagcttcaggacgctgtgaattcgacaatgcagatcttcgtgaagactctgactggtaagaccat

SEQ ID NO: 494098 - DNA, 73 bp, Homo sapiens
ctggtcttacattgctgcatcaagaaacccaagctgctgaggaggctactcacagtcgaactacaactccccg

SEQ ID NO: 494099 - DNA, 50 bp, Homo sapiens
acaggagaaaagccgtttgtgtggacccaagtggagagattgtggaactg

SEQ ID NO: 494100 - DNA, 90 bp, Homo sapiens
cttttaccttccaccatgattgtgagatctccccagccacgtggagctgtaaagagaaatgtgtatgaccttacaagtatccccgttcgc

SEQ ID NO: 494101 - DNA, 99 bp, Homo sapiens
tgggttcgcggcgcgccctcctgctgcctccccggagctcccgggccagtagatgaggagactgtccttcctgtttcgcagatgaggaaactgaggctt

SEQ ID NO: 494102 - DNA, 75 bp, Homo sapiens
aagaaattgagggttcttgccatgcactttcatttggacccgtggatacccattgaacagatgcttgaaacctgc

SEQ ID NO: 494103 - DNA, 98 bp, Homo sapiens
tatggcaaattcacaaaaacttattccgacattcagagttgtttcctccatttgctaaaggaatagtgtttggccaaaatcaacagccgatttggata

SEQ ID NO: 494104 - DNA, 106 bp, Homo sapiens
ccaatgggcctttccagcccgtggtccttctccatattcgagtgaacagagtatctgccaagcccgggcttccgtgatggtctacgatgacaccagtaagaaatgg

SEQ ID NO: 494105 - DNA, 75 bp, Homo sapiens
caaaaattgtcatctttttgtaaaccttcaatcaaaaggcttaaaagggggaggcaggagcgggccaggagctgc

SEQ ID NO: 494106 - DNA, 90 bp, Homo sapiens
gctgtccgtgcgcgttgctgcggccgtggtccgcgcccttcctcggcgggccggactggaaaatcctgccttgcttcgttgggcctatgc

SEQ ID NO: 494107 - DNA, 82 bp, Homo sapiens
cagaacgcagatcagaggtagtcggacctttcccgctggcgcgcagcctcagctagttgcagagtgggcaggatcttaagac

SEQ ID NO: 494108 - DNA, 75 bp, Homo sapiens
gacagatcgctgtcaaaaccctaggccaaatttgagtttcatcatggtgactatgaaaaacagtttctgcatgta

SEQ ID NO: 494109 - DNA, 83 bp, Homo sapiens
gaattattttgcaccactggatgttgtttactggtgctatacttggtagatcagaaactcaggagtgtcttttctttaatgct

SEQ ID NO: 494110 - DNA, 50 bp, Homo sapiens
cagagagccacatctaccgcgagttaaagaagtcctggctgtccccaact

SEQ ID NO: 494111 - DNA, 98 bp, Homo sapiens
tcagccccgtcctcttgtcctcctcagcctcgagggatcttggatctcaatttacgcaacagtctcattgacaagcagaactaccatgatgaactttc

SEQ ID NO: 494112 - DNA, 75 bp, Homo sapiens
gaaagatggcggcggcgtctgtctctgcggcttctggttctcacttgtcggagtacaagcgcaagctagccagag

SEQ ID NO: 494113 - DNA, 75 bp, Homo sapiens
gttgtggtgcgctgtcttcccgcttgcgtcagggacctgcccgactcagtggagttcatgatcaagtgttgccca

SEQ ID NO: 494114 - DNA, 97 bp, Homo sapiens
ttttgacatggaggatttgggagataaagctgtgtactgccgttgttggaggtccaaaaaggtaaaacttccttttcctgtagatcaaatcacagat

SEQ ID NO: 494115 - DNA, 100 bp, Homo sapiens
tcctcaccgtggaggaccattattatgaagctgacacttcctccatggcccatctatcgccggcatcctctcaagtggttacctgttcaagaatcaagca

SEQ ID NO: 494116 - DNA, 49 bp, Homo sapiens
cagatatcttgaaaagctgccagaaaggactcatgaatcaagcaagcaa

SEQ ID NO: 494117 - DNA, 75 bp, Homo sapiens
cgaagaccagccagaccatggagctcgcccccaacttccaggacagagtctagctctttcacccaggctggagtg

SEQ ID NO: 494118 - DNA, 51 bp, Homo sapiens
ccgagcccgccgccacatcctctgagaaagtttcctacactactgaggttt

SEQ ID NO: 494119 - DNA, 82 bp, Homo sapiens
cgggaggtgttcgagaacgaccccgagacggtgggatgctatggaatatgatgagaagctggcccgtttccggcaggcccac

SEQ ID NO: 494120 - DNA, 100 bp, Homo sapiens
agaccttagaaaggatcaggactggcgggtatgtgggcaaagactattctgctgctcaggaattaatggaagatgagatgaaggaatattacagtaagaa

SEQ ID NO: 494121 - DNA, 100 bp, Homo sapiens
tccggaaccatttgaaggaacagcatcctgacatcgaaaacccggacctcgcttacctgcatgctgattttgtggaagtataatactttgtcattatgag

SEQ ID NO: 494122 - DNA, 98 bp, Homo sapiens
agaaaaggatttttgcatgtttagaaatcaaggttcagcatccctctctacctgccaacatcctgtattagagaacttgtggccggaggtgtggctgt

SEQ ID NO: 494123 - DNA, 90 bp, Homo sapiens
cagtatttgaaacagtagagacggagcaaagaacccctgggcagaggaaacagcaggatgtagccaatcaaatgtgcaccaagaccaagg

SEQ ID NO: 494124 - DNA, 100 bp, Homo sapiens
ttgaaccccctatggctgctgcttttggccaagcagatagaacttcagttcactattggcgaagccattaccagtgctgcaataggaactagttctgtgg

SEQ ID NO: 494125 - DNA, 101 bp, Homo sapiens
caggcacagcccgagaaaccgcagcactacacgccatggaggaattgcaagaccaagagggctgggaatatgcttctctaattggctggaaatttcactgg

SEQ ID NO: 494126 - DNA, 80 bp, Homo sapiens
gactcagaggcgagagtggccccagccgggccagaagcaggaaaaatatattcagggggaagagatgtaatagatttcac

SEQ ID NO: 494127 - DNA, 51 bp, Homo sapiens
gggctttgcctgcaggagccacaggaaccagacggggtttcgccatgttgg

SEQ ID NO: 494128 - DNA, 82 bp, Homo sapiens
agagaggcccagaggggacttagacctgaggttgacggatatattcagacgttacgacacggatcaggacggctggattcag

SEQ ID NO: 494129 - DNA, 100 bp, Homo sapiens
gaggacagtgaaaaagttccgagcttgttaactgattatattctgaaagatgtaaagaacctatatccatcatcatctccttatacaagaaattgggata

SEQ ID NO: 494130 - DNA, 116 bp, Homo sapiens
tgcagaacattctgaaaatgtgcatatttcaggagtgtcaactggttactataacaacagtaccaaggtggctgtgaaaaccctgaagccaggaactatgtctgtgcaagccttcc

SEQ ID NO: 494131 - DNA, 101 bp, Homo sapiens
ctgttcttttatattacacctttcattctcagtcactttattacagtgggacaattgatgactgtgagttggtggaagggctggttctcacccaaaaagtg

SEQ ID NO: 494132 - DNA, 75 bp, Homo sapiens
gctagaagctatcaaagcccttgaagtcaggaggaaatcagtggtgcttcaggatattgtgaatttggtcttctg

SEQ ID NO: 494133 - DNA, 80 bp, Homo sapiens
tgtccacatgagtgcctctcccagcagatccaggcaggtgacagcagggacatgtctcgggagatgcaggatgtagacct

SEQ ID NO: 494134 - DNA, 83 bp, Homo sapiens
cgaggagacgcgggccttcgagcagctcatgaccgacctcaccctgtcgcgggtgatgtgtccaatctagatcccaacttctc

SEQ ID NO: 494135 - DNA, 130 bp, Homo sapiens
agaaatgcccggcgaagccacagaaaccgtccctgctacagagcaggagttgccgcagccccaggctgagacagagaatagtgacagtggtacaggaaagaaagaaaaagaaaagaaaaacagaaagggc

SEQ ID NO: 494136 - DNA, 75 bp, Homo sapiens
ggggattccactctccagtgtaatgattattgacaacaggccctgtgacctccctcctgtcttgcagctcctcct

SEQ ID NO: 494137 - DNA, 100 bp, Homo sapiens
atcgccggggaggcagcgcgggatcccagcctcaggcgtgcgcggacggtgtgcggatcctgaaggacacagccctgcagaaagtgaagcgtggccagag

SEQ ID NO: 494138 - DNA, 100 bp, Homo sapiens
ttcgtagacattgtctcccaagacaacttcctcaccagcaccttacagatgtcacagcaccaggtacatgcagttcagcaactcgccaaggttatgggct

SEQ ID NO: 494139 - DNA, 100 bp, Homo sapiens
ggacatcctgcgcaaggccgtgcagaagggaacccgagcgtcatgttagggtgaagcagaggacctcagtgctgaacatgctaaggaggttggacaaaat

SEQ ID NO: 494140 - DNA, 112 bp, Homo sapiens
tatgacagcccctggttcagaggcctttagcaaagtcgccaaaagctggatgaacttgaaaagtggccacgtggcgctatggcggtcactaccgggaattaaccacggccac

SEQ ID NO: 494141 - DNA, 74 bp, Homo sapiens
agagccggacgggcactgggcgactctgtgcctcgctgagggttcttcccaggagactctgccggccttttccc

SEQ ID NO: 494142 - DNA, 100 bp, Homo sapiens
tgaagtcacagggctactgttttccaatcctcaggaccgcctggcccggtgcaccatgcattgcaacgacaaagccaaagattcaatagatgctgggagt

SEQ ID NO: 494143 - DNA, 100 bp, Homo sapiens
gagcggagccggccgtacgcggtgctgcgagggcagaacctggttctggatgcgggtacccttggtggcaccagaggacctgagagatgatataattgag

SEQ ID NO: 494144 - DNA, 75 bp, Homo sapiens
cacaaattacattacccaatggtggaatattgtatacctgtggctttaaccaagagagcagatccagctgagctt

SEQ ID NO: 494145 - DNA, 100 bp, Homo sapiens
gagcagtgagaaagcaaaggctgctctgaagcgcacgacctccgactactttctccttcaagaaaatattttcagaacctggaagcttatccatggccac

SEQ ID NO: 494146 - DNA, 100 bp, Homo sapiens
cctgtctggagcaaataaaagagccctgcaatttgaagatacatgagacagcagccaaacccccagcggaatggccaaagactatgacgggtcttcctag

SEQ ID NO: 494147 - DNA, 101 bp, Homo sapiens
agatgcacactgggcctgtgcttgatgtctgctggagtgaccttgctgatgaccgtatggcactggtgtcaggcatcagcttagatccagaagcagcgatt

SEQ ID NO: 494148 - DNA, 82 bp, Homo sapiens
gggaagcggcgatcctgccaccgggaggtgtggaagagccgggtaggcttgggcactgtttaaaggaaagttccgagaaggc

SEQ ID NO: 494149 - DNA, 98 bp, Homo sapiens
ctacgcggccgcggagacctacctgcggcgtcggcagctgctgctccgagcacagtgtcaccggctctgccgtatccaagacagtatgcaaggccacg

SEQ ID NO: 494150 - DNA, 75 bp, Homo sapiens
cggagcttctcagaagacagagggttttcttttgaggagggtgcatctgcccggaagactcagactcctgcagcc

SEQ ID NO: 494151 - DNA, 98 bp, Homo sapiens
actgggaaatagaggataatcaggctatggccatcatcaatggctccctttatgtctttggaggtacaaccggctatatttacagcacagacctgcac

SEQ ID NO: 494152 - DNA, 75 bp, Homo sapiens
gacaaccaggcaatgctggatagataccgaattcttatcacaaagggcacacgtgtttcacgttgacaggtttgc

SEQ ID NO: 494153 - DNA, 90 bp, Homo sapiens
gtggatgaaatgaatcatgattttcaagctcttgcattagaatctcggggaatgggagagattgagaggatccagaatccagatctctgg

SEQ ID NO: 494154 - DNA, 90 bp, Homo sapiens
cagatcccatcagaggcaccccagacacagtccagggtggcgcgtggctgctgagcccccgcctgtgcgacgccctcatggccatggacg

SEQ ID NO: 494155 - DNA, 81 bp, Homo sapiens
gccactgaggagttcatcaagcgggctgaggtgatctgtgaaaatggttcgctattcacttgacccggagaaccccacgaa

SEQ ID NO: 494156 - DNA, 82 bp, Homo sapiens
ggaaattacctgaggacatcatgaaggtcccagaggtgaggaagaagttcactcctaacccctccgccatctttcaggcctc

SEQ ID NO: 494157 - DNA, 73 bp, Homo sapiens
agcatctgcttcacgctgggctcctttgccaagatctatgccgacacctttgctttgtgtccctggtgatgtt

SEQ ID NO: 494158 - DNA, 75 bp, Homo sapiens
gtagctattaaaaaaccatctggtgatgatagatacaatcagtttcacataagcttttaccctacgaaaggaaaa

SEQ ID NO: 494159 - DNA, 73 bp, Homo sapiens
gctgcggctggtgcgtcgtcgctctagtaaaataaaacagggtctgttacctagcttggaagatttgctgttc

SEQ ID NO: 494160 - DNA, 90 bp, Homo sapiens
gtcctacaacagtttggcgtgcaacatggggcttgagaaaggtcgtgatgagaggagatggattgaaaagcagaacagagcaacaagagc

SEQ ID NO: 494161 - DNA, 100 bp, Homo sapiens
cgggagagcattctcatcagcaacggctcaaggctggatctccagaactgttctctggaggaccctggtccaaactttcatcaggcacataccactgtca

SEQ ID NO: 494162 - DNA, 75 bp, Homo sapiens
ccgtgaagcacctgcacatccacactccgctgctcgacaggtctcttgcagctgaatggggtaaatatggaatgc

SEQ ID NO: 494163 - DNA, 50 bp, Homo sapiens
ggaacaatagagctcgaccttatctctacaggggcaagtgtccgagtggt

SEQ ID NO: 494164 - DNA, 100 bp, Homo sapiens
attcttccacctgatgtaggtgcaggcaaaggtccttttggaataaatcatgggattgagcttcattcagatgtggtggaatatgccaaggaaaaactgg

SEQ ID NO: 494165 - DNA, 90 bp, Homo sapiens
gttgaaccatacaataagatagttgcccggactgcacaactagcaagacttcaggtttgcctgcaatgagatttcattctctacatttaa

SEQ ID NO: 494166 - DNA, 90 bp, Homo sapiens
tgggaaaccggcatgcggtgtactggaacagctccaaccagcagtcaaaatgcagatcttcgtgaaaacccttaccggcaagaccatcac

SEQ ID NO: 494167 - DNA, 100 bp, Homo sapiens
tgggaatgaagcgatgtagccttttaagtacaaactgttttgaagccagttcatcataaggaaggacaagaactaactgctttgctgaatactccacata

SEQ ID NO: 494168 - DNA, 96 bp, Homo sapiens
gaggagctgtggccatgagctcagccatctttacggctctggggatcgtgatgggacaggtggtcggactcaggcatggaggagtgacggcaggaa

SEQ ID NO: 494169 - DNA, 101 bp, Homo sapiens
gctggcctatgctctggcgcggggcttcacggccgcagcttagaccatgctcagcctccaagcagccttgtcatcgacaaagaatctgaagtttacaagat

SEQ ID NO: 494170 - DNA, 98 bp, Homo sapiens
gaaaagctatatggagataaatggaattcttttaccatcttattaattcactctggtacaaacaggtacttcaggcaagtggcatctgaatttggatt

SEQ ID NO: 494171 - DNA, 98 bp, Homo sapiens
aaacaggctggctcccgtctccaggccccaaggagccacacctggaccagaccccaggaaagtttcaggccctagacactggtggccaccacgtggaa

SEQ ID NO: 494172 - DNA, 74 bp, Homo sapiens
ggtcagtccgccgctcaccccgcggccgcaccttcccgccttctcaggagcgggacggtatgcgggccatcctg

SEQ ID NO: 494173 - DNA, 90 bp, Homo sapiens
gtttgcggttcagccctttgatgaccgcagcagcttcctggagatgatggaggctcgcagccgtggccatgcgtccccactggcggccaa

SEQ ID NO: 494174 - DNA, 97 bp, Homo sapiens
gtgtcatcagtggctgcatcacgggaggagctattggtttcagaggtgctggagaatctggtaaaagcaccattgtgaagcagatgaggatcctgca

SEQ ID NO: 494175 - DNA, 73 bp, Homo sapiens
gggactgcaccgcaccgagggcgagctccagtaagactttgaccccgacgcaggcttcagtgattgccgcgga

SEQ ID NO: 494176 - DNA, 82 bp, Homo sapiens
gcagtgtgacggctgggcgacttgcgaggatgagagcgacgaagccaactgtccagacactggctctgagaccccgactgcc

SEQ ID NO: 494177 - DNA, 75 bp, Homo sapiens
gcagccttggtgctcaggtgccagatgcaaaggatcttttgccagaaatgagggcatactggcctgacgtaattc

SEQ ID NO: 494178 - DNA, 100 bp, Homo sapiens
ttcaacagagagctcaccagattactgatgagcctgtttgcaaggtttcaccagagacaacacttccagcagcttctccgaggatgcaggaatatctctg

SEQ ID NO: 494179 - DNA, 75 bp, Homo sapiens
tcaatacacctcccacctgtcctcaggcatatcaaagtttgcagaaaaaacttcagcatgtgccaggaacacaac

SEQ ID NO: 494180 - DNA, 101 bp, Homo sapiens
ggagtcctccacttgccactggggtcatcacactgaaacggtgttcaaccgggttttgccagggcctattgcaccagagagcagcaagaagcgggcccgta

SEQ ID NO: 494181 - DNA, 101 bp, Homo sapiens
gacatgcgggagagagaatgagccagagggacacgctggtgcatctgtttgccggagggccacagttgtaagggatcttgtggctgtcaggatggcagagg

SEQ ID NO: 494182 - DNA, 100 bp, Homo sapiens
ctcgggaaggacgctctctttggtgtttacataagaagaggacttccaccatctcatgcccaggtagcatccaatgccaaggtggctgcatccaggaaac

SEQ ID NO: 494183 - DNA, 82 bp, Homo sapiens
cgcagaaaccccgttgacaaggcactgctttttcatgacggaagatgttaccgagtacttcagtgaattccttagtgcaggg

SEQ ID NO: 494184 - DNA, 96 bp, Homo sapiens
caggagagcgccccagggcaagccccgctccggccaacaatttaaacccattttcctgaacacaattgacccatctcaccccatggcaaagctgag

SEQ ID NO: 494185 - DNA, 100 bp, Homo sapiens
caccaacgcctttcccggagagtacatccccaccgtacggccgaagccctgcagcccacgctacagccggagatgcagctcgagcacggggccatccaga

SEQ ID NO: 494186 - DNA, 85 bp, Homo sapiens
aacctgtttagaaaataaaccaggtaagaattgtgacaaaggccagtcttttttcattgacgccccagattccccagccacgtta

SEQ ID NO: 494187 - DNA, 75 bp, Homo sapiens
tgcatgagggacaaagctacacagctgattgctgtgtttgaagaacaagaaccactccacaagattgagagcccc

SEQ ID NO: 494188 - DNA, 50 bp, Homo sapiens
ggcgccgccgaggcccagatgcgccagcggatccacttagatattcgagt

SEQ ID NO: 494189 - DNA, 113 bp, Homo sapiens
attgctaggcggagacagtgcagggaagagagaccttagaaaggatcaggactggcggacagaaccaagttgtattgttagacacactggaacaagagatttcaaaatttaaa

SEQ ID NO: 494190 - DNA, 75 bp, Homo sapiens
ggaattgctactgctgcctctgtcactcctggtgaccagcattcaagatcatgagcgtcttgttgttcatcgagc

SEQ ID NO: 494191 - DNA, 49 bp, Homo sapiens
ctttttagcatctctggcaagatatgggcagctgagtatgtcccagaga

SEQ ID NO: 494192 - DNA, 90 bp, Homo sapiens
cgaaatcacccatctacagcaacaattacagttcacaggaaacgggccgtgcgagatgcacagcgtgcagaagaacgagcacgacaagac

SEQ ID NO: 494193 - DNA, 51 bp, Homo sapiens
gctgtccttctttgtggagagcaaggtcttgggcgtctttggtactggctt

SEQ ID NO: 494194 - DNA, 100 bp, Homo sapiens
gagaatgacccgttctggaatcagcttctctcattttctttccctgcaccaactagcaggaatggtcctcgtccgaagtgagaatgggcagttgttaatg

SEQ ID NO: 494195 - DNA, 101 bp, Homo sapiens
tgaaagcgacaagtggaggcgccgctctagcggccgggactctgaactatggcgatgagaacagcttagttcctcctgcccctgtggacagcgacggggag

SEQ ID NO: 494196 - DNA, 75 bp, Homo sapiens
cgccatcgtggtgtgttcttgactccgctgctcgccatgcccccaccttctggccctttcacctcctccttggga

SEQ ID NO: 494197 - DNA, 100 bp, Homo sapiens
taatccagtgactgtcaggtcgatcatatatatggctcgtggacagcagaaaattcagtctcagcagaaaaatgccaaaaagcaagctggacaaaagaag

SEQ ID NO: 494198 - DNA, 83 bp, Homo sapiens
aagatcctcaactgccaaaaggcaatggattactctcgtggctttggtggccggtacggggtggagaaggataaatgggacaa

SEQ ID NO: 494199 - DNA, 100 bp, Homo sapiens
cccacagccactgttgctgagcagggagaggatattacctccaaaaaagacaggggagtattaaaggtccacagagcagtcagagaagagcaacacatgc

SEQ ID NO: 494200 - DNA, 100 bp, Homo sapiens
ggaacaaagtcagtcgccagtcagtgttgtgtggaagccagaacatcgttctcaatggcaagggaagaaaagtcgtcatcaaaaagaggattccctttct

SEQ ID NO: 494201 - DNA, 100 bp, Homo sapiens
attgacattacacagtgttaacaatgcatccacagagcataagctgtggccatgactactgaagtaggctctgtgtctgaagtgaagaaggactctagcc

SEQ ID NO: 494202 - DNA, 82 bp, Homo sapiens
cggaagatcgtcgccacctggatgctggagcccggaagttatgagatccgacactatggaccagccaagtgggtcagcacgt

SEQ ID NO: 494203 - DNA, 72 bp, Homo sapiens
aatgcaaagagtgcaaatgcacctcctgcaagaaaaaatttcgctaaggagtttgtgatcagtgatcggaag

SEQ ID NO: 494204 - DNA, 75 bp, Homo sapiens
ggatcgctgtgatcgtcacttgaaaattgtacaagctggagataaggaccttgatgggcagctagactttgaaga

SEQ ID NO: 494205 - DNA, 74 bp, Homo sapiens
tgctactgctgcctctgtcactcctggtgaccagcattcaaggtataattgaaatcctcaaaggaatgcaagaa

SEQ ID NO: 494206 - DNA, 75 bp, Homo sapiens
cggacgagtcctttgagccttacccagaaaggaaccttcctctccggttctgggtgaacatcctgaagaaccccc

SEQ ID NO: 494207 - DNA, 99 bp, Homo sapiens
cgaagggagagtggttgagatttccagactccaagagatattcacggaaaaggttttgcaacaggaaacactgcgctaacttatgcatgtgctggagga

SEQ ID NO: 494208 - DNA, 98 bp, Homo sapiens
tccgctccgcgggccaagaaactggagaaactcggagtgtactccgcctgcaagattaatactgaggaacacgtggatgcagctgatcaggaggttat

SEQ ID NO: 494209 - DNA, 100 bp, Homo sapiens
tgcagacatggctgttggagatgaaccttgttcatgcaccccagattagcctgaggcctgctcagtcgttcctaatgaataaaaatcaagtgccaaagct

SEQ ID NO: 494210 - DNA, 89 bp, Homo sapiens
ccccggtgcaagaggcgcaaacaagccaatcccaggaggaaaaacgagagaagaagaaggaggttcctgctgtgccagaaacccttaag

SEQ ID NO: 494211 - DNA, 97 bp, Homo sapiens
caccaagatctgtgctgaccacaggaattggatctactagtgcagtttcagaagaggagccccgccgaggcatgagggccgtgctccccccagagga

SEQ ID NO: 494212 - DNA, 90 bp, Homo sapiens
catttcataagtttgtggctcctgaagaagtcctgccattcacagaaggtggttctgctgggcatggacatcctgtccgccctggtgacc

SEQ ID NO: 494213 - DNA, 88 bp, Homo sapiens
gggaagctgacagagatacctacagacggagtgctgtgccacggtggtcaagacgttaaaaagaaagttcacctaagtgaaaaaattc

SEQ ID NO: 494214 - DNA, 100 bp, Homo sapiens
aggggcccggaggagcagcctccagggagagtcctgtttacacttgaggatctcaaaccgcttagcgaggaaaggtctggtccgagagcaggaggctggg

SEQ ID NO: 494215 - DNA, 99 bp, Homo sapiens
ccgccgagctggacccggaccggttttggaacaatgtgagcttcgtggatgacagcttccctcccgggcccgagtctgtcggcttccccgcgggtgaca

SEQ ID NO: 494216 - DNA, 74 bp, Homo sapiens
tatcctgacggccatcgccgccgacctgtgcaagattgcaacacctgctcggtataccgtgactttgggaggaa

SEQ ID NO: 494217 - DNA, 74 bp, Homo sapiens
catgaaacaaccccaaataaaggaagtggaaccacttcagattcgaactcgagccatctctgctaaaggcatga

SEQ ID NO: 494218 - DNA, 82 bp, Homo sapiens
gggattttgtcagcttgtcgtcaaggccagaagcggactcctagaagaggggagcagcaaggatggaatgacagccgtgggc

SEQ ID NO: 494219 - DNA, 97 bp, Homo sapiens
ctttccggatcaatccagatggcagccagtcagtggtggagggttgtgagtcccggcccagcccctccacccccctgcccccccgatgcgaccatgg

SEQ ID NO: 494220 - DNA, 95 bp, Homo sapiens
aggacaccatgggaccctcccagcatgtctatgcctactctcaagaaatggataccccagaatcttccatgctccgtcacactgcagccaggccc

SEQ ID NO: 494221 - DNA, 83 bp, Homo sapiens
gaaaataaagaggggccgctcaaatctcctttgggacacaggggtctttcgaggccagggggtctgccacatgtagaaagata

SEQ ID NO: 494222 - DNA, 75 bp, Homo sapiens
aatacctcgtatgcaacctcaggcttcagccagtgaagcaaaaaatttattgccatatcttggaccccacaaaat

SEQ ID NO: 494223 - DNA, 75 bp, Homo sapiens
tggttaattcagtggctgctcttaaaatacaagtatgatctcgtgaaatcttgagagaaactgaatgacgaatga

SEQ ID NO: 494224 - DNA, 75 bp, Homo sapiens
tgctttttctaactatttcaagatgatatttattcaccaaacaaggtcatggagtcctctattttgaacaagatg

SEQ ID NO: 494225 - DNA, 82 bp, Homo sapiens
gcgaaattaagggaaaatggatgtagaaaatgagcagatactgaatgtaaaccctgcaggacctacagtcagtttcttctgg

SEQ ID NO: 494226 - DNA, 90 bp, Homo sapiens
gctaaagctgtttctgaatgagacccaaacgcagggctactgcagcactggggtgtcagttgttggtccgacccagaacgcttcagttct

SEQ ID NO: 494227 - DNA, 50 bp, Homo sapiens
cttttcctaggcaaaatcaagaaggctgatatccccaataggtttgaaat

SEQ ID NO: 494228 - DNA, 83 bp, Homo sapiens
ctgagcccccgctgagcagcccagccagtcagcacaaaggaggacgtggaagcggggagaggtggtgagagatgacccctgtt

SEQ ID NO: 494229 - DNA, 100 bp, Homo sapiens
aattctgcatggggtggagaaggcagtggccctgaagctgcactatgttggaggtttccttgactaagagaaccacatgcggcattcagctcagtagggg

SEQ ID NO: 494230 - DNA, 95 bp, Homo sapiens
gcatgagctcggagctgctggaggagttgatgtcctcagaagctcctgtacgaagagtgggcacgctatggagttttctataagtaccagcccat

SEQ ID NO: 494231 - DNA, 95 bp, Homo sapiens
aagcagtcgtaagaagaggtcccaatcccccactctttccgccctaatggaggtctccagtttcggacttcctccgtcaggcagctggcaggacc

SEQ ID NO: 494232 - DNA, 83 bp, Homo sapiens
ccatcaacccggaccacctcacctactttcgctttataggcagattcatcgccatgggcatggatttcattggtcgcgacgcc

SEQ ID NO: 494233 - DNA, 99 bp, Homo sapiens
agaccgcggccgggaccgagggcatgggcaagaaggacgaccccaagctgatgcaggagtggttcaagctagtgcaggagaagaacgccatggtgcgct

SEQ ID NO: 494234 - DNA, 83 bp, Homo sapiens
ccgagggcgagacacgcctgggcccaggtgtggcgtctctgtccccatctggttttagtgtcaacagcatctccaccctggag

SEQ ID NO: 494235 - DNA, 88 bp, Homo sapiens
gagcccccagcccgctggcgccgctgcccgccaggccccgggggcggcggccaagatgtccgtgcctctgtttgcagacaaggtccca

SEQ ID NO: 494236 - DNA, 76 bp, Homo sapiens
gcgcagcgccatggcccccattggcctcaaagctgttgtcggagagaactgcagctgaatatgtaaaatctcgact

SEQ ID NO: 494237 - DNA, 100 bp, Homo sapiens
aattaaccagttgattgaaaagaaaatgatgagaaatgagcccattgaaggcaaactctcactgtataggcaacagggaaagttctatctggtcatcgag

SEQ ID NO: 494238 - DNA, 100 bp, Homo sapiens
cacagcaacaaagagagaaacagcagcaacatttttgaaaaaggcaaaacccatttatggcggttggctgctcctggctccagatgggaccgactttgac

SEQ ID NO: 494239 - DNA, 96 bp, Homo sapiens
agatacatcgtggaacacgtagatctgggtgcatactattatagaaaatttttctaccagaagggttgaaaggattgttgacaaaaggaaaaataa

SEQ ID NO: 494240 - DNA, 96 bp, Homo sapiens
cgcagctgaagctcatcatgaccttccagaattacgggcaagcgctgttcaaacccatgaacggagctggagtttgttcagatcatcatcatcgtg

SEQ ID NO: 494241 - DNA, 50 bp, Homo sapiens
gattgagagcatttaaagatgtttgcaatggtctggagcagccaaggaag

SEQ ID NO: 494242 - DNA, 89 bp, Homo sapiens
tgtcttcatctttacagaggaatagtctacaaaggaagacttgtaacctggagaagagatgagtgaccgaggaggtggcgttcctttga

SEQ ID NO: 494243 - DNA, 100 bp, Homo sapiens
ttggtgcggcctccattgttcgtgttttaaggcgccatgagctgagatctgtatctgtggacctgaatgttgatccctcgcttcagattgacatacctga

SEQ ID NO: 494244 - DNA, 75 bp, Homo sapiens
agggggaccttgaagacgacttcgaccctgcccagcacgaccagctcatgcaggagagaaaggccttgggaaaac

SEQ ID NO: 494245 - DNA, 89 bp, Homo sapiens
cccgatggaagattcgatggacatggacatgagccccctgaggccccagaactatcttttcgggctccaaggtcctggccaagaaagag

SEQ ID NO: 494246 - DNA, 82 bp, Homo sapiens
ttttgctgctttggaaaagacctattatgagaggcttccatatcgaggaggaggtggaggaggaggaggatggagagctgcc

SEQ ID NO: 494247 - DNA, 76 bp, Homo sapiens
cacagtttcatttcaatggaaccaaagggtttggacagaggagccaaaggccaaatttccactttcagcagtttta

SEQ ID NO: 494248 - DNA, 100 bp, Homo sapiens
ccacctgctgcacccacgaatctgcccacccctcctgtaacccagcctgtttcacttcttgctattgacctgaaaagtggttctggaaaagtgtaccaag

SEQ ID NO: 494249 - DNA, 75 bp, Homo sapiens
ggaggcagcacggcatcccagcctcagggctgcccggacggtgttggttggggccgtaagttcatcatcgccaac

SEQ ID NO: 494250 - DNA, 99 bp, Homo sapiens
ctggacatacttgaccggggtcatcctagggaaaacactatcctctgagatcccagatcatgaggcataaaggcaacacaagtggtcaggctcagctac

SEQ ID NO: 494251 - DNA, 108 bp, Homo sapiens
gggaacagccatgcaaaggcaggggaggaagccacctcgagagttcacatgagactctgaatatagtggaggagaagaagcgggcagaggttgggaaagacgaaagag

SEQ ID NO: 494252 - DNA, 82 bp, Homo sapiens
aagaacggattcacacaggatggcttgcagaagacgctatttgtttaagaattgtttaagctgcatcaatggagcacataca

SEQ ID NO: 494253 - DNA, 86 bp, Homo sapiens
cacggatgcccagctgaagagcctgctgatgtcagtgggacccattcagcaattctgtggtgttcttggtcacacatttatggagt

SEQ ID NO: 494254 - DNA, 100 bp, Homo sapiens
atcacaaaatgccttgatgttcctgacccttttgtgcctgaccctactgggagagaagatgactgaggaggaggtggagaccgttctggcaggacacgag

SEQ ID NO: 494255 - DNA, 75 bp, Homo sapiens
ggggtgaaactgaccacagtgctcaccacccaccaccactgggcagctgcaatgactctccgcacggtattattg

SEQ ID NO: 494256 - DNA, 50 bp, Homo sapiens
agtgctggaggtaaaggaaatgagacgaagcttcacaaaagatgtctaag

SEQ ID NO: 494257 - DNA, 100 bp, Homo sapiens
acacaagcaatggaagtgaaagcattatttattgctaaacatgggtgcatttttggataaacccaaaactgaaaaacataatgctcatggtgctgggaat

SEQ ID NO: 494258 - DNA, 88 bp, Homo sapiens
caagatatccgtagcgtctggagggcgatcttgtcctgtggttacgatcttcactttgagaggacagtcattttgtttactcattcag

SEQ ID NO: 494259 - DNA, 100 bp, Homo sapiens
gactatgtggtggacttggacacgtcccagctctctctgggcatctggaaagaaaatgcatccgatgcagatttatggctcctgaacagttgcactgtaa

SEQ ID NO: 494260 - DNA, 51 bp, Homo sapiens
gttaaggattccaagtaactcttatttgggaagacatgtaaggaatttgca

SEQ ID NO: 494261 - DNA, 98 bp, Homo sapiens
tccgagtcagagacatcctttctcgtactaaagagggagtgggctcccctaaactggggcctggaaaagggtgagccagccatgagagggtatcttgt

SEQ ID NO: 494262 - DNA, 82 bp, Homo sapiens
tcatgctgaccaccaatcagatccgtaagcttccccgggcgctgcctggacaggcctgcctgcgtgctgggacatgtctggc

SEQ ID NO: 494263 - DNA, 101 bp, Homo sapiens
cagggttttgtttatataactcaagttgtttggctaaattcttcagggtcctgatgaagaagctgttgtggatcttggcaaaactagctcaactgtgaaca

SEQ ID NO: 494264 - DNA, 83 bp, Homo sapiens
cgcaaacttgacactcaccctgaccggtgacttaagagattaaaattaatttggttgctgttggttctgaacaaataatgagt

SEQ ID NO: 494265 - DNA, 100 bp, Homo sapiens
gtggtggcataggttatgaagctaatcctggcgttccaccagcaaccatgagtggttccatgatgggaagtgacatggaccctaatcgactgcattatga

SEQ ID NO: 494266 - DNA, 100 bp, Homo sapiens
ggaaagggataggagaaggatgtggactgcagtgctgcagtgccaggatgacgtagctttgccaaagacttagaagctaagcagaaaatgagcttaacat

SEQ ID NO: 494267 - DNA, 83 bp, Homo sapiens
ttgctttcagaatttcacccaggttctgacagtgtctttggtgcaacactaacaaggcttgtctggactacccagttacaagc

SEQ ID NO: 494268 - DNA, 100 bp, Homo sapiens
ctgacaatgaaaccgggaggaaagaagacaagagagaacgcaaacagtttgaagctgaggattttctgaaccaataacgtttccatctggaggaggcaag

SEQ ID NO: 494269 - DNA, 100 bp, Homo sapiens
gggatgatgcatcctcgggctcggtaaaggaagcacaggacctgcctgctgctgtgggctcagggaaatgttttcacctcctgtgagcagtgggaaaaat

SEQ ID NO: 494270 - DNA, 106 bp, Homo sapiens
cagggcatcgtggatgcctacggcgtgggccgctaccaggaggtcaaccccgattttgctggaggagcttgccaacagcgatcccaagttagccctcactggagtt

SEQ ID NO: 494271 - DNA, 85 bp, Homo sapiens
gggcagagccgtgcatggggctgctccccaggacctgagcaggaacctggagttttcagtgaagtacatgcgagaagccacgccc

SEQ ID NO: 494272 - DNA, 90 bp, Homo sapiens
cttcgtggaccacaacagccgcaccactacgtggaacgacccgcgcgtgccctctgagggccccaagggcttccgagtggacctgccaat

SEQ ID NO: 494273 - DNA, 50 bp, Homo sapiens
gcagatagaagtcaagttgaaccagcagctcttcagaggtgttcctgccc

SEQ ID NO: 494274 - DNA, 90 bp, Homo sapiens
cacggtctgtggctacggatcccaggaccctcttcgcgggcgattcgcgtagcctcagaatagcctaacatggcagaccagagacagcgc

SEQ ID NO: 494275 - DNA, 83 bp, Homo sapiens
cgctggcagccgcggatctcaccgccgctcaggaatgttgctgcgggatgtaaaagctcttaccctccactatgaccgctata

SEQ ID NO: 494276 - DNA, 100 bp, Homo sapiens
ggatgatatatgaagattacatttctatactatcaccaaaagagtcacctggaacctctatgactccaagtagtgggtcctttcctagtgcatatgatca

SEQ ID NO: 494277 - DNA, 98 bp, Homo sapiens
tggattttctttcccttattccagttgatccccaggtcagtatgggaatcctttaaataaatatatcagacattatgaaggattatcttacaatgtgg

SEQ ID NO: 494278 - DNA, 100 bp, Homo sapiens
gccagggattgggaaaatctcttcaggcccgacggccatggaggctgaagagacgatggaatgccttcaggagttccctgaacatcataaaatgatcctc

SEQ ID NO: 494279 - DNA, 75 bp, Homo sapiens
gagcaagctgacattgcgaggatgctatataaagacacatgtcatgagtctctggaatctgttctgcgccacccg

SEQ ID NO: 494280 - DNA, 75 bp, Homo sapiens
ctggctgcagggacccggtgacagcgtgagaggtgttggtaaatcatgcttattgctacagtttacagacaagag

SEQ ID NO: 494281 - DNA, 100 bp, Homo sapiens
aagcaggaaaatgagatgttatccagatgggacaccaggtccaataccacctccaagccgagtcacttggtggatgcgcacactgccgaagtcaactgcc

SEQ ID NO: 494282 - DNA, 100 bp, Homo sapiens
atcttgcaagactaaaattggccattaagtaccgtcaaaaagagcgtgtctaaacaacattcagttgttccaagtcaaatatttgagctggaggatggta

SEQ ID NO: 494283 - DNA, 100 bp, Homo sapiens
tcggttgaagtgatgcacaccaccaacattcttggcattacgcaggccagcaactcccagctcaatgcaatgtttaaggaagaaatctctaaacgtttta

SEQ ID NO: 494284 - DNA, 141 bp, Homo sapiens
gccgaagttatgaaaggaggagatcaagaagtcggtcttttgattacaactatagaagatcgtatagtcctagaaatcaccaggagactaaagtccatcaaaaacatccagaaaattaccaagtctatgaaaatggtagcg

SEQ ID NO: 494285 - DNA, 50 bp, Homo sapiens
cttggattcagacgccgattcgcccagaccttagctggatctccaaaata

SEQ ID NO: 494286 - DNA, 118 bp, Homo sapiens
gcagcgacacaattgtctgtgacagtaacagtacttgggatcccccagttccaaagtgtcttaaagcgggctacattgagagacctcagctgattcgagcaaaagtgccaattgtgaa

SEQ ID NO: 494287 - DNA, 98 bp, Homo sapiens
tgctgtgtgacccagaggcgccgctcaccctctctgagctggtggacatcatagtgccatctgggattgacagctcagcctgaactctatcttctgaa

SEQ ID NO: 494288 - DNA, 74 bp, Homo sapiens
cagatcaaagtccaggtcccgatctgaatctagatcttttcctaattcagcagcgatttaaccaagagcctgga

SEQ ID NO: 494289 - DNA, 100 bp, Homo sapiens
atgtgctgctctcctgagcaacatctctgactgtgatgaaacattcaactactgggagccaccggatgcgcagtgatggttttgatgaagaaagtcaaag

SEQ ID NO: 494290 - DNA, 95 bp, Homo sapiens
cagcctctgaagtagctgggactacaggttatttcaaagttaaagacagaactctcaagcatcattaggattcctcaagattgctaagaaactcc

SEQ ID NO: 494291 - DNA, 100 bp, Homo sapiens
tgaagaggaagcccagaaagggaaaaactaccagaacggagatgtgtttggcgacaagttggatggcttgaggactggtactaaaaggaaacgtgactgg

SEQ ID NO: 494292 - DNA, 100 bp, Homo sapiens
ctcagcgccagcggcactggctccgccgcccaagtctgtggcaagcgctacaagaaccgaccggggctcagctaccactatgctcacactcacctggcca

SEQ ID NO: 494293 - DNA, 82 bp, Homo sapiens
aaacgagccaaacttcgtgaaattgagatctgactgcagccatgagcagcaatgagtgcttcaagtgtggacgatctggcca

SEQ ID NO: 494294 - DNA, 98 bp, Homo sapiens
ttgcagaaggatgaaaaggctttattgccaaactgtactccaaagattcaggtttactcacgtcatccagcagagaatggaaagtcaaatttcctgaa

SEQ ID NO: 494295 - DNA, 100 bp, Homo sapiens
ctttaaattggccagggagagctgggagttgctctattccctagaattccttgacaaaggtatagactatgtgatacctaaaacagggttttactgtaag

SEQ ID NO: 494296 - DNA, 100 bp, Homo sapiens
aaactgttgttcatcagcttgaacaagaaaagcaaagacttagcaaaaaagttgaaagttttgcagttacagaaaatatttacaccagcagctccagttc

SEQ ID NO: 494297 - DNA, 51 bp, Homo sapiens
cggctgtatccgacgccgcgagttcgcgttgaaaacgaggcccactgcgac

SEQ ID NO: 494298 - DNA, 82 bp, Homo sapiens
caggctctgcgggaggtggagcacctgaagagatgccagcaggaaggtgctcgggtcttcggggcactgggtcccatcggtc

SEQ ID NO: 494299 - DNA, 75 bp, Homo sapiens
atcgttttcttcgcctccatagctttaccgatttgttacaactcaagcaagggccagcagaaattctcttttgac

SEQ ID NO: 494300 - DNA, 75 bp, Homo sapiens
tgctccagtttgagaaacctggatctgcgatctgtttgtggattcagctgtggaaatggctatgtcaaaacaact

SEQ ID NO: 494301 - DNA, 107 bp, Homo sapiens
cagaccctggagcctcagttggaagcagccgatccagcctgcggagcctgtggggcaggtattcaaaacctttgaccacatggcccgtcaggatgatgagaagagaa

SEQ ID NO: 494302 - DNA, 100 bp, Homo sapiens
accgactactgtcagcagctgtgccagggaacagaaagaacagcttcaaaagatgaaagacttcgggtctgagccacagatggctgaccatctaccacct

SEQ ID NO: 494303 - DNA, 100 bp, Homo sapiens
gcttgtgaaaggctccatggtcttgcctccttgcagaggcaaatttctggagatgtgcaatgatctcttagctagagtggagccaccacttcgtagtgtt

SEQ ID NO: 494304 - DNA, 98 bp, Homo sapiens
tgaagcccgcggcgcgcgcctctcccggaccctgcaggctagttgctacattgcctgatgatgttcagcctgggcctgatttttatggactgccatgg

SEQ ID NO: 494305 - DNA, 100 bp, Homo sapiens
ccagtgggcagatatttttcaggcctctggtgccaaatacattgtcttaacttccaaacatcatgaagtgcgacttcatgatagcatatcagaagagggc

SEQ ID NO: 494306 - DNA, 102 bp, Homo sapiens
gcttacccagatgccacaatgcacagacaactcctggctccggtggaaggaaggatggcagagacattgaatcaggtgacctcacattcgtgccccttagca

SEQ ID NO: 494307 - DNA, 96 bp, Homo sapiens
tataagacaacaggactgaacagggagccaactgtttctttgaacagtaaatcaggctccccactgcacaaacagtcatctggaccctcctcctcc

SEQ ID NO: 494308 - DNA, 97 bp, Homo sapiens
gaggtcgtatctatccagtcttgggaacgtactgggacaactgtaaccgttggtcttgggcgtctttggtactggcttttttaggggtctgcctggg

SEQ ID NO: 494309 - DNA, 97 bp, Homo sapiens
ccttgtttaatgactttggtgccctcaacatctctcagagacgaaaggatcagttcttaagagcagccccggtaactggaggaatgggagccgtttt

SEQ ID NO: 494310 - DNA, 100 bp, Homo sapiens
gagggtcccgcgctgctcttccctgagagtgaactttccatccggataggtagagctgggcttctttcaggtgaggtttatacatggggcgacaatgatg

SEQ ID NO: 494311 - DNA, 101 bp, Homo sapiens
gtctccgccggctactgccgcttcagttctcccggtgtggccacgagtcgggaatctccgccagcagtcctctgcagacatcccttgttcggcctgctggc

SEQ ID NO: 494312 - DNA, 75 bp, Homo sapiens
cggttcgctgcccggtccgcccgcggtgagagctcggtgctgattatcacaactgtttggtgacctacttcactg

SEQ ID NO: 494313 - DNA, 75 bp, Homo sapiens
ctctgttctaagtgccttaagagaggatcgcccaatccacatgcttttccagatggagtcttactctgtcgccca

SEQ ID NO: 494314 - DNA, 75 bp, Homo sapiens
cccaccgctgccctcagctccgagtccagggcgaggtggagtattgctcctggaaaatccaaaaggtgacaatag

SEQ ID NO: 494315 - DNA, 80 bp, Homo sapiens
ccgcgagccccgcactctctcgatgagtcggagaagtccccggagctggagtttgttcagatcatcatcatcgtggtggt

SEQ ID NO: 494316 - DNA, 78 bp, Homo sapiens
ctgcgctccgtggccggggagcaagcgccaggtgatctgtgaaaatggttcgctattcacttgacccggagaacccca

SEQ ID NO: 494317 - DNA, 74 bp, Homo sapiens
cggcagtccacccaccgccgccgcctcccaggcttcaccatcatcatcgagccctttgacgacagaaccccgac

SEQ ID NO: 494318 - DNA, 82 bp, Homo sapiens
cgggtagtcgggaggaggagagcttcacctgtcggcttggagagatccaggctggtccagggaccctcatcatggccacagg

SEQ ID NO: 494319 - DNA, 95 bp, Homo sapiens
ttgtgtgaagagtatcattcgacaggggtgataatgagaagcaatggactagaggattcaagtggaagagtcttcatcacccgtgagttctcctg

SEQ ID NO: 494320 - DNA, 89 bp, Homo sapiens
tgtcaccccagatgtcctcatcatcccgtcagagctgaggtacttcgtgaagggtctttcacagagcagagatttttaagtttaatgaa

SEQ ID NO: 494321 - DNA, 100 bp, Homo sapiens
cacaaacaaaagtgagaaagaaggtcatgggtgttctggacatttatggctttgagattttcgagcatgtcaatccaaagaagcaaacaataggtaattc

SEQ ID NO: 494322 - DNA, 75 bp, Homo sapiens
ctttgatgaaaaagtaccttcagtttgtggcagctctcacagatgtgaatacactgaacctccttggcctgggcg

SEQ ID NO: 494323 - DNA, 75 bp, Homo sapiens
gaaggaggaggaataatatttatggagcatatattatggaacacagtttcagagattagactgtatatatctaaa

SEQ ID NO: 494324 - DNA, 100 bp, Homo sapiens
ccctcttggactggacgatttgggaattcaaaacttgggacaaactgtcagccttgtaactgtagtactgaatggaagtggcttgtagacagagcacgag

SEQ ID NO: 494325 - DNA, 82 bp, Homo sapiens
aaccgtgcagtgctcgctgccatggatgccaccaagctgaggtggggctggtgtccgagcacttctcgcaggccccgcagag

SEQ ID NO: 494326 - DNA, 83 bp, Homo sapiens
ctccgtggccttagctgtgctcgcgctactctctctttctggcctggaggctatccagcggtatttgtggtgcagcagattcc

SEQ ID NO: 494327 - DNA, 95 bp, Homo sapiens
gccaggtcttagaggctcccggagtgtatgtctttggagaacttctggagctggccaacgtgcaggagagatggacagagacgtatgtgcgttgg

SEQ ID NO: 494328 - DNA, 74 bp, Homo sapiens
agttcagggaccgcagatgctctgggcctgagccgggccatcctgtgcaatgtggaatgcagtagccctctggg

SEQ ID NO: 494329 - DNA, 50 bp, Homo sapiens
caggggtcctttgtagtgatgccaggatctggaaatagtatattcctatt

SEQ ID NO: 494330 - DNA, 83 bp, Homo sapiens
agccggcacctgacggcgtgaccgacccgagccgaacccagtgacttgattgtaaaaatttacagagcggaatcatatgctgg

SEQ ID NO: 494331 - DNA, 74 bp, Homo sapiens
gactttcttccagcttctgctgtccttctttgtggagagcaaggggccctctctgaggaagggctgctggtgta

SEQ ID NO: 494332 - DNA, 75 bp, Homo sapiens
gtgggagcaaaaccaacgcctggctcggagcagcagcctctgaggaagtgtggaactggtctcaatcggttgacc

SEQ ID NO: 494333 - DNA, 80 bp, Homo sapiens
gcattgcgtgctccagggcctgcagaccccctcctgcaagatccagaagctgagtgcatacattcccttgaataattact

SEQ ID NO: 494334 - DNA, 75 bp, Homo sapiens
cggtaacaaacgagggttcccgggattggaccgacgcagccatgatgtacctgtgtggtctaagctggaatctgg

SEQ ID NO: 494335 - DNA, 74 bp, Homo sapiens
gaagaggctggggagtctgtgtccttccagctgcagatacggaggaacatggagctgatccaggacacctcccg

SEQ ID NO: 494336 - DNA, 73 bp, Homo sapiens
acctgtacaagtccttcatcaaggactacccagatgatgtctaccgtagaaaagcctcagaaagacagtatca

SEQ ID NO: 494337 - DNA, 100 bp, Homo sapiens
cctgggcgtggccaccgtcaaggccaacatcacgcccttcggcgccgaccagttcctctgtgacgagggtgcaggtatctctggggactacatcgatcgc

SEQ ID NO: 494338 - DNA, 101 bp, Homo sapiens
agagacacgctgggccgaccccagagcggcgctggacagaatttcgctaaggagtttgtgatcagtgatcggaaggagctggaggaagatttcatcaagag

SEQ ID NO: 494339 - DNA, 50 bp, Homo sapiens
ggatttcttacaagaagtcacaagcagttccggcgaggggggagcctcag

SEQ ID NO: 494340 - DNA, 82 bp, Homo sapiens
gaaaagacaatcattgcttcaagaatgctgacccttgtagaagtgatttcaaaaggtgtaatcattcttcatgggcaacaga

SEQ ID NO: 494341 - DNA, 95 bp, Homo sapiens
atggccgtgatcgtgcccaaagaggagggcgtcatcagcgtctccgaggacaggtacagagaactacaacttagtacagaaagcaaagtaacaga

SEQ ID NO: 494342 - DNA, 117 bp, Homo sapiens
ttaacacctcaaggttgaagcagaagaataaggagaaggataagtcgaaggggaaggcgcctgaagaggacgaaggtctataagaaggagaaagctcgagtcatcactgaggaagag

SEQ ID NO: 494343 - DNA, 100 bp, Homo sapiens
cgggattatgtttatgttcggcggtatagtgtggatcaggaaaacaacatgatggtgttggtgtcgcgagagatggctgcccaaagattgtcaatctggg

SEQ ID NO: 494344 - DNA, 74 bp, Homo sapiens
taacactcaagcaaagaagagttgagcacaatcaggtctgttgtgtcgggtctggactcccctgccaagactag

SEQ ID NO: 494345 - DNA, 90 bp, Homo sapiens
cctgttatttgtctcaacaaaagattgatcgaatctacagatgcagaacccatggatacagagggccagcagtacactttgagaagtgta

SEQ ID NO: 494346 - DNA, 100 bp, Homo sapiens
tgcgcgacgcctttcccgaggaccggtccgaactggcgcaggggccgctgcggcaaggtaagagcttctgttcgtgtgcagggaaagcagctcacagacg

SEQ ID NO: 494347 - DNA, 98 bp, Homo sapiens
gtctctcgcgggcgggagaacggaaaactcccaacttcctgacaaagaaacagccttggtataatagcacgttagcatcaagacgaaaacgacttact

SEQ ID NO: 494348 - DNA, 96 bp, Homo sapiens
tggtattttagacttgccagaacagaacactattcacaaagattgcctgcagtttattgatgctcccataatactctcagatagtgaagaagaaga

SEQ ID NO: 494349 - DNA, 102 bp, Homo sapiens
gaaaaaagtaaaacttgctgctgatgaagatgatgacgatgatgatgaagaggatgatgatgaagaatttctctatgaatcatcatcaagaactctgggaga

SEQ ID NO: 494350 - DNA, 100 bp, Homo sapiens
gtgggctaaagtgaaacattcagcatccctgtctggtatgccttctcggcatgtggagaccccaaggcaaaaccatcctatcttatcgacaaaaacctgg

SEQ ID NO: 494351 - DNA, 101 bp, Homo sapiens
gtggtaatcctgacgaaattgaaattacctccgagggaaacaagaaaacatcaaagaggtctagcaaagaaattgaggccaagtatgataagaagatgaag

SEQ ID NO: 494352 - DNA, 103 bp, Homo sapiens
gttactgccgcgccaccgagtccggaccggagactttggggcctaactagacaatgcagatcttcgtgaagactctgactggtaagaccatcaccctcgaggt

SEQ ID NO: 494353 - DNA, 100 bp, Homo sapiens
cagaaagtccaagctcgtggtgggtggaaaagtgttcgccgagagtctcactgtcgcccaggctgcagtgcagtggtgccatcacgcgtcactgcaacct

SEQ ID NO: 494354 - DNA, 50 bp, Homo sapiens
ctccaggcttgcaagcgattaccaggtgctggagaatctggtaaaagcac

SEQ ID NO: 494355 - DNA, 100 bp, Homo sapiens
gctgcttttctggagcgcttaccaggggtcgctgtgatgaaattcaagaaccccccagtgaacagcctgagcctggagtttctgacggagctggtcatca

SEQ ID NO: 494356 - DNA, 90 bp, Homo sapiens
gaccattccccggttttattataggatgagtaacgaaagaggctttgaaaatgtagaactgggagtcataggaaaaaagaagaaagtccc

SEQ ID NO: 494357 - DNA, 82 bp, Homo sapiens
gggagcggcgcccccgccgctgccgccgcgacccttggcgcctgcccctgcaacgggagggaaccttctgaccagcctcatg

SEQ ID NO: 494358 - DNA, 75 bp, Homo sapiens
ctacaagagagaagctccccacgtggttccgtgaacgtcaaggtcgtgggaaataaaaggcagttctacacagac

SEQ ID NO: 494359 - DNA, 100 bp, Homo sapiens
gaccagtccaggcccagcctctcgaatgggcacacctgtgtaggtctgagcgggaaagttccgaagaataggagtggctgagttagctacggagttcatt

SEQ ID NO: 494360 - DNA, 102 bp, Homo sapiens
tatggctttgtctcctttttcaacaaatggaattatatccagatcgagagacagaagattctgaaagggttcaatgaaatgagagtcatcttggacaatgag

SEQ ID NO: 494361 - DNA, 100 bp, Homo sapiens
tctgtgtgagggaaagaaaacaatttctcctgctctgcagcttctgttcagaatttaacacgtgaactggagaatggggaaaaacagcaactgcagatgt

SEQ ID NO: 494362 - DNA, 74 bp, Homo sapiens
tgttgccacttggaatatatatcggtatgagactgagagaggaatacgtctaacagtggaagctgatctccaag

SEQ ID NO: 494363 - DNA, 82 bp, Homo sapiens
ttttggcaaggacttaatttatacactttattattggaaatcttcaagttcaggaaagcttctgcagaaagccgtcattaca

SEQ ID NO: 494364 - DNA, 80 bp, Homo sapiens
tgaatccttccttgatgatgaagagactggagcgctgctcagcgctttcgttcagctgtgccacatttccacgacgctgg

SEQ ID NO: 494365 - DNA, 98 bp, Homo sapiens
gagtgattctgacctctttcactcacccagtgatgacatggacagcatcatcttcccaaagatctgcaactatgtgggaccagcaaaggttattgttc

SEQ ID NO: 494366 - DNA, 83 bp, Homo sapiens
agaccctactgcggtctcggatattgccgggtcgggaaagaggttaaagaagacacgcaagtatgatatcatcaccactccag

SEQ ID NO: 494367 - DNA, 100 bp, Homo sapiens
cagatgtccgaggcagatggaccacccgctgagcgtcagaaatgggttttaaccatgctgaccaacgaaactggctttgaaatcagttcttctgatgcta

SEQ ID NO: 494368 - DNA, 100 bp, Homo sapiens
ggtgtcggaggtctcatctttgaactactgccggagcttctgccagggtggtgttgatgatgaggtctccttgactgcgtatgtcacagctgcattgctg

SEQ ID NO: 494369 - DNA, 100 bp, Homo sapiens
tccttaatagtgatctacgacgctccccaagtaagcctacacttgcctatccagaaagcaacagcagaggctcatcatatgcccgaagctcagtggttac

SEQ ID NO: 494370 - DNA, 100 bp, Homo sapiens
cacaatgtcggggatggacctccagatttccttactgattcatgatgttgctatcaaaagttgagaaattgtcagaagaaatcatggagataatgcaaaa

SEQ ID NO: 494371 - DNA, 100 bp, Homo sapiens
aggctgtgagggaatttgcaaaagagatcgatgtctcctacgtcaagattgaagaggtgattggtgcaggtacggacattgctgcaggagaagaggttgc

SEQ ID NO: 494372 - DNA, 100 bp, Homo sapiens
atgagtctctccaccatcctggctgccattgtcaaccacctgcagaacagcatccaggaagatctgactgcagccatgagcagcaatgagtgcttcaagt

SEQ ID NO: 494373 - DNA, 50 bp, Homo sapiens
cacagtggactcccaaggggcagatggactcaccctgtcacccaggttgg

SEQ ID NO: 494374 - DNA, 90 bp, Homo sapiens
ccctgagtgtgcccctgacatgacaaggagccgtcgtcgttaggtctttagacaaactcaaccaattgtcaaccagaaaatgttggaagt

SEQ ID NO: 494375 - DNA, 100 bp, Homo sapiens
gactgagagcgcctggaggctcgagcggaggctccagggtttgagccacaatgtgatcttcaccttggattctttgttaaaaggagacctaaagggagtc

SEQ ID NO: 494376 - DNA, 75 bp, Homo sapiens
tgggctgcagtgaccccgctttcctcacgcccagggcttcccacggcacgacatggagacctgtggttgcgaggc

SEQ ID NO: 494377 - DNA, 100 bp, Homo sapiens
tttgccgcagctgctgggagcagcactgctcagttctcgtcaaggacggcgtgggcgtgggaaggatctgagtctctccctgcggagacagccctgaaga

SEQ ID NO: 494378 - DNA, 80 bp, Homo sapiens
actgattgtcatgctcagggaccctgtggagagacgctctgcacaaaagccaccatgcagacggtccgggccgccgacac

SEQ ID NO: 494379 - DNA, 74 bp, Homo sapiens
tttagggtcctttatatagaagggagagtaggtatgtgacgcattcccagactcttcagccaactgagcatcag

SEQ ID NO: 494380 - DNA, 85 bp, Homo sapiens
taaccaatacttcggctactcgggagccttcaaaggtgctgatactcaaagaaggtttaagttgtctgatctctctataaattcc

SEQ ID NO: 494381 - DNA, 98 bp, Homo sapiens
ccaaatttcctgaacacaccattatgcagagagagatcatcattgcctgaatttagctttgtgactgcaagagcaagaccagttcctgtctggagacg

SEQ ID NO: 494382 - DNA, 98 bp, Homo sapiens
ggcggctcagttgtccatgaccctgaaggtccaggagtacccgaccctcaaggctccccttccctgcgggcatatccgctcctctcggtgatcacccg

SEQ ID NO: 494383 - DNA, 51 bp, Homo sapiens
ggactccaaaatggcgtcagttggcattgaatgccccagaggagcccgaaa

SEQ ID NO: 494384 - DNA, 100 bp, Homo sapiens
gggttcgtggtgagaagccgtcaagggggacttgatctcatcttcatgccaggccttgggtttgacaaacatggcaaccgactggggaggggcaagggct

SEQ ID NO: 494385 - DNA, 75 bp, Homo sapiens
gttccctgcaacccgtgcttatgcagatagttactattatgaagatggagtggatctccagcttgtagctgcatc

SEQ ID NO: 494386 - DNA, 98 bp, Homo sapiens
acagccctgcccttcccatgaggcaggctcttcaaaaagagtagttgaacagctacggaagaacctgatagtaaagcaagaacaaccggacaagttcc

SEQ ID NO: 494387 - DNA, 83 bp, Homo sapiens
ggactagtggaccagctggtgaaggcagacagcgagtggcgacgatgcccattggaactacttcagtttgatcacgggcagtc

SEQ ID NO: 494388 - DNA, 100 bp, Homo sapiens
acaagtcgcgtacatcctaagtctgggcgtcgtgaaagagttcaggaagcacggcatagggaataaaggctcagggaccggcagttctactctagagccc

SEQ ID NO: 494389 - DNA, 100 bp, Homo sapiens
atattgtggctggagacatgagcaagaaaagcctctgggagcagaagggaggctccaagacctcatcaacaattaagagtgatggtgtgcaacaaacaac

SEQ ID NO: 494390 - DNA, 51 bp, Homo sapiens
gttttgattaccactgacctgctgtttgacaagtatgcgcccaagctggac

SEQ ID NO: 494391 - DNA, 100 bp, Homo sapiens
ggacctgagccgcgaggacacgggctgcaacctgcagcacatcagcgaccgggagaacatagacggctttgaagacaagattcccaaaaggagattctct

SEQ ID NO: 494392 - DNA, 100 bp, Homo sapiens
ggaggcgcagcgctcagcccaggagaggaaggagcggctgcggcgcgcgctggaagacgaatctagaacatgatgtctatgaaagacttactaacctgca

SEQ ID NO: 494393 - DNA, 75 bp, Homo sapiens
cccagaggggcccactcgctgtcccgaacacctcatcaaaatgcagaagcagaaactgcagatgcccccgcagcc

SEQ ID NO: 494394 - DNA, 50 bp, Homo sapiens
tgtctactggaacagcagcaaccccagtacctggagtagaacagaaaaat

SEQ ID NO: 494395 - DNA, 83 bp, Homo sapiens
agtacctgaaccggcacctgcacacctggatccaggataacggaggctgggtgaccaggcattgatgcacccccaggaaggcc

SEQ ID NO: 494396 - DNA, 75 bp, Homo sapiens
gctgtttgaacgaagcgcttcttcacatgaagtacctccaggttcacccagaaagttcaggagccctggaaagga

SEQ ID NO: 494397 - DNA, 75 bp, Homo sapiens
gctctctagaaactcgctctaaagacggaaccgccacagcactcaagagggtgaggacaaaatcttcttaatcaa

SEQ ID NO: 494398 - DNA, 75 bp, Homo sapiens
gccgggctgagaggagcgtggctgtctcctctctccgccatggcgtgtgcgtgcagacggagacagtgctgcggc

SEQ ID NO: 494399 - DNA, 98 bp, Homo sapiens
ttgactactcgcatcgcgcactttttggatcggcatctagtctttccgcttcttgaatttctctctgtaaaggagctttctgaggaagagaaaattca

SEQ ID NO: 494400 - DNA, 101 bp, Homo sapiens
gcgcgtcgcgaggcgagcgtcctccttttgtgcgagcgccggcggctcggcttctcgaaggaaagcggcgttatgacaggaagcagagtggctatggtggg

SEQ ID NO: 494401 - DNA, 90 bp, Homo sapiens
aaattttgggggcaggttctcttgctagagatagagctgcctgctttgctattcagaaaggattacaggcatcccgtagtgacattaagt

SEQ ID NO: 494402 - DNA, 101 bp, Homo sapiens
gcggcgaggccgtggaccggagcctgttgcggagcctcctgggcatgctgtctgacctgcagactcagattgatggacaacttttcttaattaagcacctt

SEQ ID NO: 494403 - DNA, 93 bp, Homo sapiens
gtagcattgatttcccggatctggtaacatggcaaaagatgtgtacctccttatactgagtgtgaccacgctcagcctcttgctcgccccggt

SEQ ID NO: 494404 - DNA, 95 bp, Homo sapiens
aataagtattttcaatgtggagttctatgcaggtaacaccatgttgttgagagtgttacctgctgtgtatgaaaagcagcctcagccaattaata

SEQ ID NO: 494405 - DNA, 125 bp, Homo sapiens
tccagcatattttgcgagtactcaacaccaacatcgatgggcggcggaaaatagcctttgccatcactgccattaagcaggggaaatgctgtctgtagctgagcacttcctggagcagcagatgc

SEQ ID NO: 494406 - DNA, 100 bp, Homo sapiens
caccgtatgactctcctgaccaggacttgggtgccagccgggccgccgatgacgccgagcgggagcgcagggaccgagaggagcggctgagacactcgcg

SEQ ID NO: 494407 - DNA, 100 bp, Homo sapiens
aagaagcatttgcagacgttgtctcatgggtaccgcttgccaactttggagccaaaactggacaagccaaggcatctgtagccaaagtaaacaaatctac

SEQ ID NO: 494408 - DNA, 82 bp, Homo sapiens
gggaccgcggcccccagcagagcccgcctgcccggctgtacatgtgaagattttttggcagcttagcgtggaaaccattgat

SEQ ID NO: 494409 - DNA, 83 bp, Homo sapiens
tggcatttacagaaagagtcaacagcagtggcaacaggtttttcccactcggctttcacgtttgggattgagagccacatcag

SEQ ID NO: 494410 - DNA, 95 bp, Homo sapiens
aaactgaccccggtactgtcttcgtgatgaataaaaacatttcaactccctacagttgtgccatgcaaatgcactcggtgatggaaagagagcca

SEQ ID NO: 494411 - DNA, 80 bp, Homo sapiens
atcatgatggacttggagctgccgccgccgggactcccgtcccagcaggcagaaatactcagtgtcctcagtcacagaaa

SEQ ID NO: 494412 - DNA, 90 bp, Homo sapiens
cgctccgctccgcgggccaagaaactggagaaactcggagtgtactccgcctgcaaggatctaaaatgtccactgaggcacaaagagttg

SEQ ID NO: 494413 - DNA, 100 bp, Homo sapiens
gtggaatatgccaaggaaaaactggagagcttcatcaaaaatagtgatagctttgataaacgtttggaacagaacacaatcaaagtcatccctcctggag

SEQ ID NO: 494414 - DNA, 75 bp, Homo sapiens
cctgagcctgacgcgggccgcgcggttcagaatgaccgaagaagcatgccgaacacggagtcagaaacgagcgct

SEQ ID NO: 494415 - DNA, 101 bp, Homo sapiens
cctgagtacaacacggtggcaagcaagtttaatcagacctgctcacacttcagaatagagaagccctagggtggtcccaaccatgtgatgtctggagcata

SEQ ID NO: 494416 - DNA, 100 bp, Homo sapiens
cgagaagtgtggctcagaggtgaccactccggagaacagttcctccccagggatgatggacatgcatgcttccacagcgcggcacctgtacctccggggt

SEQ ID NO: 494417 - DNA, 82 bp, Homo sapiens
tgggtgagtgcaccgcgttctcgcacgcgtcatgcacatgattaagtaccggtacatcccgttcacacatgggaagagaagg

SEQ ID NO: 494418 - DNA, 98 bp, Homo sapiens
ttaattttagggtcctttatatagaagggagagtagttcagctctggactgttggaaactatcactggtatctcaagcaaagtttatccttcagcacc

SEQ ID NO: 494419 - DNA, 51 bp, Homo sapiens
tcaagggcagccaattactgagggaaaacagaaatggtttatgaaacagaa

SEQ ID NO: 494420 - DNA, 82 bp, Homo sapiens
gctacatgtcgcaggtgctggagaaggaaatgaaggcacaggagcagagggctttatcctgtggataaacgcagagtgaacg

SEQ ID NO: 494421 - DNA, 100 bp, Homo sapiens
agtgacgacaaagtgcagctggccatgcagacctacgagatggttttagagtctttgccagaagatgtagggtttaacattgaaataaaatggatctgcc

SEQ ID NO: 494422 - DNA, 90 bp, Homo sapiens
ggggccgccgctcgaggagggctcagcctcctgtcccagggagaatccgaggaatcttctgcacagatgttctgccttactcaatacggg

SEQ ID NO: 494423 - DNA, 76 bp, Homo sapiens
tgtctgatctgctgggatcctagagctggaacagatccccaagtaagcccttggcacggaaattaatggattggga

SEQ ID NO: 494424 - DNA, 82 bp, Homo sapiens
cagttgaaacaggagagaattagtcgatatcaggcatgccagatttcctggagaagctgcacatggccactctgaaagccaa

SEQ ID NO: 494425 - DNA, 91 bp, Homo sapiens
atcgctttgggaatcctcctactctacgaggaccaatttgtgaatagcacaatggaagaagctggactttgtgggttaagagagaaagcag

SEQ ID NO: 494426 - DNA, 83 bp, Homo sapiens
gaacggctgaaggccctacgggagaaaaccgggcgcaaggtcaaaatgcagatcttcgtgaaaacccttaccggcaagaccat

SEQ ID NO: 494427 - DNA, 90 bp, Homo sapiens
ctcgcgccgggcccgtggccgggagtgatttgggccccgatgttggctatgaagctattggtcttgtggacagtagtttgcccacagttg

SEQ ID NO: 494428 - DNA, 88 bp, Homo sapiens
catttctgggaatatggtagatggatatagagatgttcttgttaaacctttgggagaccgaggatacctttttcttctctccccttat

SEQ ID NO: 494429 - DNA, 97 bp, Homo sapiens
cggaccgcggagtcgagacctacccgaacgacgcgggcgagcggggctttggacgccggtggagacgcaggcgagatcatgtttgagaccttcaaca

SEQ ID NO: 494430 - DNA, 100 bp, Homo sapiens
agcactctggacggacttgagaactgtccttacgtgacctaaagctggagtattttgagattggagaattaagggtgcttcaaggatgaccgcatcgtct

SEQ ID NO: 494431 - DNA, 99 bp, Homo sapiens
gacaggaatcttctaattcttggaaaaattctgggtgaagatattgaccagtggaataaggtaattgaacaactaggaacaccatgtccagaattcatg

SEQ ID NO: 494432 - DNA, 100 bp, Homo sapiens
cggccccgctccctcccagcagagctacctatctatggagaaaatcattcaagtggccaagacctctgctgcacagatcatatctgaagatattagtgag

SEQ ID NO: 494433 - DNA, 97 bp, Homo sapiens
agccatagtacctacagcagcactccaggatctcactggcatcgaatctatggatcagtgtcgccataccttggaacagcataactggaacatagag

SEQ ID NO: 494434 - DNA, 90 bp, Homo sapiens
cccaaagtcaaactagtgctccgcgctggcagtctggaaaaggcagatgtatgttacctacctgggcaaagtctccaccactggcatgca

SEQ ID NO: 494435 - DNA, 75 bp, Homo sapiens
cagaacctcacctcagagcccaccctcctgcagcacagggtggagatgttcagcgatgcaggtagcggggacgat

SEQ ID NO: 494436 - DNA, 100 bp, Homo sapiens
gaaactaggtcgatggtcggcggcgcccggatgggcagctgaggtctgtggctgtcctctctattggaaagcccccatgttcagggctgcagggggagag

SEQ ID NO: 494437 - DNA, 80 bp, Homo sapiens
tttcacgaagctaagcacaggacagaaggaacaggaaatatagtggtcattatgattagctatccaaaaggaagagaaat

SEQ ID NO: 494438 - DNA, 100 bp, Homo sapiens
aaaagccatcgtgaaggagctcctggagctgggcaaacagttctgctattattgatcacatatttgccagtaaagcagtggtgaatgccgcaattccagc

SEQ ID NO: 494439 - DNA, 100 bp, Homo sapiens
caccctctgcagcagccatcttcaaaatctacctctcttgtttggaagaactgatgaaggaccaagaatcgccttcagccctgtctggtgcatccttggc

SEQ ID NO: 494440 - DNA, 95 bp, Homo sapiens
gaaggtccggggcttgccctggtcttgctcggccgatgaagtgcagaggtttttttctgggacttcatctgcagcatcctcaccattaaaaaaag

SEQ ID NO: 494441 - DNA, 100 bp, Homo sapiens
acagcccgcagagagttaacttctgtttacatggaactcagacatctgcaaatcatggtctacttccccagcaggacagcatcattctcctatatcttct

SEQ ID NO: 494442 - DNA, 101 bp, Homo sapiens
tgctgccctggggggcacagctagtacaggtttgcagattccgccagcagcacagcaagctctacagatgagtggctctttggcatttggtgctgtggcag

SEQ ID NO: 494443 - DNA, 115 bp, Homo sapiens
ttggatgacaataaccatcttattcagtgtataatggactctcagaataaaggaaagacctcagagtgttctcatatttgattttcatcaagcagctgatggtatccaggaacaa

SEQ ID NO: 494444 - DNA, 83 bp, Homo sapiens
gccgaggaaacagtgaccctgagcgaagccaagccgggcggcaggtggtgtttcataagatgtcacccaacgagaccctcttt

SEQ ID NO: 494445 - DNA, 75 bp, Homo sapiens
acaggtcggagaggtcagcaacagggacatcgtggagacggtgctcaacctggacccagatgatgtggtaccagt

SEQ ID NO: 494446 - DNA, 98 bp, Homo sapiens
tcatttctgtggaatctgaagaagcccacgcagattttaattcccactctagattctgagaagaggcaaggaccccacagaacacatacctgaaataa

SEQ ID NO: 494447 - DNA, 102 bp, Homo sapiens
aggtactggcctatctcctccgcagagctgaaaccaccaatgggtgaggtcgtcacccctacggccccccaggagcctcctgagtctgtgaggccatccgct

SEQ ID NO: 494448 - DNA, 77 bp, Homo sapiens
attacatctacaagaggggacaagtacctttatgaaccagtgtatcccaaaaatggtgtcaacctccaacaacaaag

SEQ ID NO: 494449 - DNA, 100 bp, Homo sapiens
acgcctttccccactgttacatcgtgcgccgtggaccaggagaaccaagatccaaggcaatggctgccatccggaagaaactggtgattgttggtgatgg

SEQ ID NO: 494450 - DNA, 100 bp, Homo sapiens
ggggaggcagaggccccgagccccgtggatccgctggagcggagccggccgtacgcggtgctgcgagggcagaacctggctccccagaggcccatctcaa

SEQ ID NO: 494451 - DNA, 100 bp, Homo sapiens
ggactctattgccaagacaagagatgctggctgtaggccatacatggcaataagatgctcccaagtcccttgcagctctcttcagaagaaaaatcactag

SEQ ID NO: 494452 - DNA, 100 bp, Homo sapiens
gggagtcctcatcatcatcgcctcctgcgtcatcaacttaggcggttgtgggactggaaaatatcttaaagtgaacagccaggtacataccgtgggctgt

SEQ ID NO: 494453 - DNA, 80 bp, Homo sapiens
ctacctcttgggtgaactctagcaattacaaggttgcacagagcattgaggatcaccatcaggaagtgattggtttctgc

SEQ ID NO: 494454 - DNA, 100 bp, Homo sapiens
aaagatctccagagtgaagaagagattgatcatccactgatgattctaaaagcaatcttattagaggaatttgaagcctacattaatgcttctggagaac

SEQ ID NO: 494455 - DNA, 97 bp, Homo sapiens
gcatggactacagccaggagatgcacctgaaaatgagcaagaaaatcgcccagctcaccaagtaatctatgccagcaattatgacaatgttagcaga

SEQ ID NO: 494456 - DNA, 99 bp, Homo sapiens
tgtgatgaaagcacatggtacagctctctgcgcccttgttgccaccatctggttccctgtgtgcgcccaccgtgagaccaccatcgtgagctttggcta

SEQ ID NO: 494457 - DNA, 101 bp, Homo sapiens
agaggaagaaagctatctagggacgagatctagaatcaactgagagagatgcttaaaaatcaccagttactttaatgatgctctggaactgaacccgcagt

SEQ ID NO: 494458 - DNA, 49 bp, Homo sapiens
ggaaggagacgctgcagcgcgcggaaagcagatgagcgtcccactttca

SEQ ID NO: 494459 - DNA, 75 bp, Homo sapiens
gccagggaaccctggtcaccgtctcctcagtttatgtgaagaaccagctcagtgggactctacagattaaaccag

SEQ ID NO: 494460 - DNA, 100 bp, Homo sapiens
cgagaacgtgcgggaagagaagatcatcgagcatttcaaacgtgaactttgaggcgctgatcatcaccatgtcggtagtcgggggaaccctcctcctggg

SEQ ID NO: 494461 - DNA, 100 bp, Homo sapiens
tttacaacctatgcaaatggctcctgcaatggacttattttgagtcacttgccaaatggcccaactgctcattttaaaatgagcagtgttcgtcttcgta

SEQ ID NO: 494462 - DNA, 75 bp, Homo sapiens
gacttgacatatgatatacagtcatttactgatacaggaattcctcctgatcagcagagactgatctttgctggc

SEQ ID NO: 494463 - DNA, 100 bp, Homo sapiens
tttcacagtttgcgggactcagtcccatcactccaaggagagaaggtcactcctggaagcaaggcggctctagctaatttatgtattggagatgtaatca

SEQ ID NO: 494464 - DNA, 80 bp, Homo sapiens
cggatctgctggacgaggtcttcttcaacagcgaggtggacgagaaagtgattggtttatcttggaagctaaagggcatt

SEQ ID NO: 494465 - DNA, 75 bp, Homo sapiens
ggagtcgtgagcgcgcgcccgccccgctctgggaggaccgcgaggaacaagcacatcatgattgacttggggact

SEQ ID NO: 494466 - DNA, 82 bp, Homo sapiens
ggaggaaggaacgaggcaaggagctaaagcagcgtgcgttcagccctgggtccagaatgacagggtccagaaactggcgagc

SEQ ID NO: 494467 - DNA, 100 bp, Homo sapiens
agcctttctatacgaagaactaacagctcggagcaggagaggacgggactgccaagagacatgttagaaggacaaatcatggaagggaagtggttgctgt

SEQ ID NO: 494468 - DNA, 50 bp, Homo sapiens
ctgccaattaaaactgtaggtgtgcagtgtttcctgaggttataggcggg

SEQ ID NO: 494469 - DNA, 116 bp, Homo sapiens
taatcatgggacaagctgatgtctccagaccggtaaatccagatgcagttgctacatgaatgtgtaagatcttggaggaagacagcagagagagagagagagatcagagatcccag

SEQ ID NO: 494470 - DNA, 100 bp, Homo sapiens
tacaaggaagggcaggatgtacccctgaaaccggatgctgagtaccctgaatgaagactggagcgctcagcctgccacggaagactggtctgcagctccc

SEQ ID NO: 494471 - DNA, 96 bp, Homo sapiens
ccgggacagcgaggagctgagggaccctgagcttactccacgggaacagcctctagataatctgagttgttgaaaatacgaagcctgttactcgtg

SEQ ID NO: 494472 - DNA, 90 bp, Homo sapiens
gcgaatcaagcgggagttcaaggaggtgctgaagagcgaggaggtggaagatgcaatgctgatgtttgataaaactaccaacaggcacag

SEQ ID NO: 494473 - DNA, 100 bp, Homo sapiens
cagcttcagggcccggagtactagtctcaacgagagacccaagagatggaagtgctactgaaatgggaacaaccaaaaaggctgtaaagccaaagaagaa

SEQ ID NO: 494474 - DNA, 75 bp, Homo sapiens
tttgcatcttgtaatgtgtttaacaaagccacgaataacctataatgctatgttagatactaaagaaggcttccc

SEQ ID NO: 494475 - DNA, 100 bp, Homo sapiens
agcggcctgaaagtggtggcgctggccagactgacacccataccttttgggcttcagaatgcagtgttttcgatatgctgtgatagcatttggatgtgcc

SEQ ID NO: 494476 - DNA, 98 bp, Homo sapiens
aagaaaccatgtgctgaaatgtttgacgacactgatggtttgactgtccttcatctacttggattcagttccaagacagttgttacatttttctccaa

SEQ ID NO: 494477 - DNA, 100 bp, Homo sapiens
tttgaggatgcagcactggaagaaaatggtttggctgtgataggagtatttttaaagcgaaaccttgaaagccatttgatgtcccctgctgagattccag

SEQ ID NO: 494478 - DNA, 102 bp, Homo sapiens
aaagaatgtacaacagacagtgagtgctaaaggcccccctgaaaaacggatgagacttcagttaaagctgaagctcaacaaagatatagtgatctctgtggg

SEQ ID NO: 494479 - DNA, 100 bp, Homo sapiens
agatgaggatgaggagccagccccagctatggcccaggccatgtcatggtaaacggtccaaccaccccgattcccgtcaaggccagccccagccccacgg

SEQ ID NO: 494480 - DNA, 75 bp, Homo sapiens
aatgacgctacgcaagaaccagttaactgtacaaactacacagctcatgacggggtctcactctgtcgcccaggc

SEQ ID NO: 494481 - DNA, 75 bp, Homo sapiens
ccacagttcagtgtattcgttctgtgcctgaactcaaagatgcccttaaaagggtcttgcctcacccaagctaga

SEQ ID NO: 494482 - DNA, 74 bp, Homo sapiens
ggacctcttcctccacatctggctctcaaagcagggattaacatctgctcgtgcagctgagatcctggcgcgag

SEQ ID NO: 494483 - DNA, 75 bp, Homo sapiens
agctaccctggaggaattttttcttggtcaaaatgcagatcttcgtgaaaacccttaccggcaagaccatcaccc

SEQ ID NO: 494484 - DNA, 100 bp, Homo sapiens
acgcctttcaccattaagaggaaagcgatggaggagctgagcgctgatgaggaattgaatgatctggcacgggaccctccagcacagtgttcagcaggtc

SEQ ID NO: 494485 - DNA, 100 bp, Homo sapiens
gactttatcaaaaacatgattacagggacatctcaggctgttcagtggaagaaaagactttagagatggatgaggacgttgaggcagagggaggttgaat

SEQ ID NO: 494486 - DNA, 75 bp, Homo sapiens
agaaatccactggagcaccttgataggatttttcaagccacattcaattgataggatgaaaaaatttaagagaag

SEQ ID NO: 494487 - DNA, 83 bp, Homo sapiens
cgccaagtaggggattgcgttccctccagtcgcaggaaaaggggaagatagtgatgtactcagtataaatgcagatgcttatg

SEQ ID NO: 494488 - DNA, 97 bp, Homo sapiens
cggacggctgcgtcgcccgaggcgaggaggagcgctggcggttgcagatgaatacatgttttccctagaagagaataagaagtccaagggacgccgt

SEQ ID NO: 494489 - DNA, 75 bp, Homo sapiens
gagcccagttggaagcccgggaccgtttaaaaaactgatgaattccctctgctgacaaccaaacgtgtgttctgg

SEQ ID NO: 494490 - DNA, 100 bp, Homo sapiens
ccggcttcaggatttacacagacgtggggcgatgcttgtgaccctgcagctcctcaaactttctgaaaaggatatgagcatgctcgaggagaggattaag

SEQ ID NO: 494491 - DNA, 95 bp, Homo sapiens
gtccgtttcggtggtgctgaatgttacttgtcctgaacaatggagcaagctgtatcccattgccaatggaaataaccagtcccctgttgatatta

SEQ ID NO: 494492 - DNA, 100 bp, Homo sapiens
atggatgggtgaccacaggccccagatcctgggcctgaccttcgccatgaccatgtactgccaagtggtcaaggcagacacctactgcgcgtaggccgcc

SEQ ID NO: 494493 - DNA, 98 bp, Homo sapiens
ggcgcggtcgcagccctcagcccacttaggataatggcgacagctgagggaagaattccaaagtccctttgcaagtcaaagtcgaggatattttttat

SEQ ID NO: 494494 - DNA, 98 bp, Homo sapiens
cctattcaccgtgggcagcagagggatggctgctcagctgctgactgatgaggcactgatgctgtcttcgcagtgccatgcctacaatggcaagcgtg

SEQ ID NO: 494495 - DNA, 90 bp, Homo sapiens
gctcgagttcctggaccgtgagagcatcaagctcgtgtccatcgtttccctgaaacctgggctcttgaagacgcatcactggagcagatg

SEQ ID NO: 494496 - DNA, 50 bp, Homo sapiens
cccacatcaatgcactgccaatggcccgccatgttcatagaggataaagc

SEQ ID NO: 494497 - DNA, 96 bp, Homo sapiens
tccggccagttgaggagattgtaacctttctaaagacaaaccagtccagctacgggggcccagccagccagcagctgagtgggggttacggaggcg

SEQ ID NO: 494498 - DNA, 102 bp, Homo sapiens
aaagaagatgggacacttggattcagtgtaactttaagtgggcagaccaacatccacctcagcaaaaacttcttcctgacgaatcgcgccagggagcgctca

SEQ ID NO: 494499 - DNA, 75 bp, Homo sapiens
cctgcaggtctctgtcgagcagcggacgccggtctctgttccgcaggatgattggaaccattgttgacaatccag

SEQ ID NO: 494500 - DNA, 80 bp, Homo sapiens
cccccgcgccgcctccccgcgccgctcgcgcagccatgtccgaggagaagcccaagggtttccaggcctgaggtgcccgc

SEQ ID NO: 494501 - DNA, 75 bp, Homo sapiens
cgacatcaagtaccgtacctctatatcttacagactctttcagcacctacgaaaaatttagaacagcaggtgaat

SEQ ID NO: 494502 - DNA, 75 bp, Homo sapiens
agatgtataagaagtcttaacgggtggattatgatcgcatcagggatgttggccctgacagggcggcatccgagt

SEQ ID NO: 494503 - DNA, 100 bp, Homo sapiens
gacgctcctgctcggctgggtcttcgcccaggtggccggcgcttcaggtgctggagaatctggtaaaagcaccattgtgaagcagatgaggatcctgcat

SEQ ID NO: 494504 - DNA, 50 bp, Homo sapiens
cggagactttggggcctaactagctgcagaaccttggcctgaaaatgcta

SEQ ID NO: 494505 - DNA, 75 bp, Homo sapiens
cgagttgctgcagcagcaggaggaggaccgcagcaagatcatcagaaaagcccttactgaggaaaaacgtgtctc

SEQ ID NO: 494506 - DNA, 101 bp, Homo sapiens
agacagattcgcagtggtcgcttcttctccttggaaacacttcaagttgaagaagatgatcgacctgagttaccatggtggaaatgcaagaagtgggcctt

SEQ ID NO: 494507 - DNA, 87 bp, Homo sapiens
ggggctcggccgggccgtcccggcctgcgcagcctgagttgtgattccaaagaatccctatcctgcctccgatgtgaatactgagaa

SEQ ID NO: 494508 - DNA, 100 bp, Homo sapiens
ctgttatgaaaattaaccaggagcgagcagaggatttatacatggctttacaagcattttcatttaagacaaaggacattgaagatgccatgaccaatac

SEQ ID NO: 494509 - DNA, 50 bp, Homo sapiens
ccggacatcccgcctcccaccccagtgattacagtggcgagatcttgaac

SEQ ID NO: 494510 - DNA, 122 bp, Homo sapiens
gtccaggtggccgtgaagcacctgcacatccacactccgctgctcgacaggagcggcctattgccaattcatggacatgctcttccctggctgcattagtttgaagaaagtaaaatttcaag

SEQ ID NO: 494511 - DNA, 74 bp, Homo sapiens
ctcttgctttgagtggtggttcccaggaattataggagcaggtctgatggttcagccgtctgtatatctcccca

SEQ ID NO: 494512 - DNA, 100 bp, Homo sapiens
gctgtaaggagccgcggcggggggaaaatggagcccttcaccaatggtgtgttgaggctcctggaacacggggaggagtacgtattcaccctgcctagtg

SEQ ID NO: 494513 - DNA, 102 bp, Homo sapiens
tggacgacattcgaaggatggaagaagagacgaagagacagctggatgaagggtgagcccctccagactccgaataggagatcaagagtttgattcattgcc

SEQ ID NO: 494514 - DNA, 98 bp, Homo sapiens
actgtcctttcgtggctcactccctttcctctgctgccgctcggtcacgcttgatggtggagccagggcaagatttactgcttgctgctttgagtgag

SEQ ID NO: 494515 - DNA, 74 bp, Homo sapiens
ctagaattacctggaacttcatcatcatctacttcacaggaattgccatttgtgacctgagcatctctgcagac

SEQ ID NO: 494516 - DNA, 100 bp, Homo sapiens
accccatcgcggtgctcatagacgaactccgcaatgaggacgttcagtggacatcctcatcatggatgatgacgacgtccccagctggcctcccaccaag

SEQ ID NO: 494517 - DNA, 115 bp, Homo sapiens
cgacactctgaagcagcgacggcacagcgggaagaatggtttacttttggacatcaagcccatcactgccagccagtgaagaaggattccagcctatgccctcaatcacaataag

SEQ ID NO: 494518 - DNA, 90 bp, Homo sapiens
aaagggataggagaaggatgtggactgcagtgctgcagtgccagagcttcctgcggctgagggagggatgaaacaagtacccatgtgacc

SEQ ID NO: 494519 - DNA, 74 bp, Homo sapiens
tcagtctgtgagcaccagggagcaggaaagccaactcatcatgtcactacagtgaacagtacaaattgtaagaa

SEQ ID NO: 494520 - DNA, 100 bp, Homo sapiens
caagatgctctctctggaccgatcccactgctgaccggttccctgatgtgttacctgcttctgctactgatccaaactgcagaacttctcattcatcccc

SEQ ID NO: 494521 - DNA, 100 bp, Homo sapiens
ttgcttgcttgcctgtgcgcgcgtgcgcggacatggcctcaaacggtggggcaggggtttcgggctggtggagcatgtgctgggacaggacagcatcctc

SEQ ID NO: 494522 - DNA, 75 bp, Homo sapiens
gtgaccctctcaggatcggggacgcagggacgtgcgctggaacaagggcaccatcctcaaggcctctgtggatta

SEQ ID NO: 494523 - DNA, 74 bp, Homo sapiens
ttgaccatcatccagactacacaggtttctgcatatgaagtgtgtaaaatagattgcttgatccaaaacagaaa

SEQ ID NO: 494524 - DNA, 75 bp, Homo sapiens
gcctcgcgccggctgctctttccgggttcccagtagctgcagcagtgaaagacagtgattggctccagtgctccc

SEQ ID NO: 494525 - DNA, 96 bp, Homo sapiens
ggacgctaagcggggtaggggaagttgtcactcagcccagtccatcagtttctcagcccagtacttctcagagtgaagaaaaagctcctgaattgc

SEQ ID NO: 494526 - DNA, 101 bp, Homo sapiens
gaactggatgcctcccaggagaaagtttcagctttgaccacccagctgacagcaaatgaattagtgaatctcatcaaatgggaattttccgaatacttgct

SEQ ID NO: 494527 - DNA, 127 bp, Homo sapiens
tggttcttcatcgtgctattcctggtctacatcctgcgggtgcctttgaaaatcaacgacaacttgagcacagggcagcccaatggatccaatggtgatgaagagacctcagttgtatggcatgggc

SEQ ID NO: 494528 - DNA, 100 bp, Homo sapiens
tgacctacgagcaccagaggaacatggacagcaagctggccctggaatactcccccagttgcaagaggcgcaggaccgtggaagacttcaacaaattctg

SEQ ID NO: 494529 - DNA, 99 bp, Homo sapiens
gaacccttcgctggcgggagcgcggttcggggccgcagaggtcccatctgatgccgaggctgaaggagtctcgctcccacgagtccctgctcagcccca

SEQ ID NO: 494530 - DNA, 97 bp, Homo sapiens
cacagctattctagtgataggattcacagcttgagctcaaataagtttcagctcctggcatcagctctattcaaatctggttcagattttacagctc

SEQ ID NO: 494531 - DNA, 75 bp, Homo sapiens
tgggactttcttcgttgccatgaggaaagaattctccgagaggcacagttgaatgctgttgatgctttgattgac

SEQ ID NO: 494532 - DNA, 90 bp, Homo sapiens
cgacttaaggattcagagaaagagaactctttgttaaagaagagaataagatttttggaagaaaaggagagaaaggccttgggaaaacaa

SEQ ID NO: 494533 - DNA, 75 bp, Homo sapiens
cttcctgctggggctcatgtttgaggcccttgatgagcctccctatttgacagtgggcactgatgtgagtgctaa

SEQ ID NO: 494534 - DNA, 90 bp, Homo sapiens
tcaagaaactgaagcaaaagatcagcgaggagcagcagcagctccagcaggcgctggctcctgctcaggaggacccagacagcgtgcccc

SEQ ID NO: 494535 - DNA, 82 bp, Homo sapiens
ttttgtgatacaatttgtcctctttttataatagttggtgatttttcactgacatctggagctctcaaacactgctgtcctg

SEQ ID NO: 494536 - DNA, 75 bp, Homo sapiens
aaaacaagaaaagcagcacgggagaagcatcgtcactccttgccaagcaaccagccactcccacgagagcttctg

SEQ ID NO: 494537 - DNA, 74 bp, Homo sapiens
tctcttgaccatgtgacatctgatgctgtggaacttgcaaatcgaagggtcttgctccgtcgcccagtctggag

SEQ ID NO: 494538 - DNA, 100 bp, Homo sapiens
cggcaggcggtactcaagggcatgggcagcggccagttgcggacaggagagagtggcaagagtacgtttatcaagcagatgagaatcatccatgggtcag

SEQ ID NO: 494539 - DNA, 87 bp, Homo sapiens
gcaataataccaaaatatcttcgtgcttccatgactaacttggtcaaggccagctttgctccaatggaggacaaactcaaccaggca

SEQ ID NO: 494540 - DNA, 83 bp, Homo sapiens
caggagtgaagtcccagggatattctgtgctgttccggtgtctcgcccggtcctcaccctcagggctcccgggacccatgctg

SEQ ID NO: 494541 - DNA, 100 bp, Homo sapiens
tcttgcggcgcctcggctcctcccaggtggcctcccgcgtgctggccatgaagggtcggcactcttcaccctcccgagccctgcccgtctcggccccatg

SEQ ID NO: 494542 - DNA, 76 bp, Homo sapiens
gatcccctcagttctgcgctgctcccgttccccctccccagagcaagaaatcttcttgacagagacacattttcta

SEQ ID NO: 494543 - DNA, 100 bp, Homo sapiens
aaagcagaagccactggagaaaaacggccaagaggcagacctaggaaatgggttttgaacgaagaatgtgatcagaactggtacaaggcagagcttaatg

SEQ ID NO: 494544 - DNA, 118 bp, Homo sapiens
ggataagcatgccctgaaaaagtatcgtcgagaagcctatcatcgatacgtaggtaacctttccagagatgtgacagaagtccttatacttcagttgttcagtcagattggaccctgt

SEQ ID NO: 494545 - DNA, 103 bp, Homo sapiens
agcctgcatctgcccctcggccttccgacgtgggcggtgggccccagccccacagaccagcccagcattcaggctggagtgcagtggcgcgatctcggctcac

SEQ ID NO: 494546 - DNA, 109 bp, Homo sapiens
gcaccatgccgctcctaagcctgcacagccgcggcggcagcagcagtgagaggagggccctcctggacccgggagcggaccctggtggcggtgaagcccgatggcgtgc

SEQ ID NO: 494547 - DNA, 96 bp, Homo sapiens
gggaggggccgcgccgccaccgtctgaactaggatgtcccgacatgaaggtcttaaaattttggtagcagaaagcaaatgtgcaaagagcaatgga

SEQ ID NO: 494548 - DNA, 100 bp, Homo sapiens
aagaaaatgtcaggactgtggtgaggacagtaactctctccaccaaacaaggaagccaaattggcagagaatgcttgtaccctggctgacctgacagagg

SEQ ID NO: 494549 - DNA, 100 bp, Homo sapiens
aagcaccagcatttccaggaacctgaggtcggctgctgcgggaaatacttcctgtttggcttcaacattgtcttctgggaacccaagacagaccaggatg

SEQ ID NO: 494550 - DNA, 100 bp, Homo sapiens
ccctgtgatggtggagctggagggggagacagatcctctgctcattgccatgaaggaactcaaatcacagattctgctggccatattctctactccaaag

SEQ ID NO: 494551 - DNA, 92 bp, Homo sapiens
gcgctgacaggggggcctggccgcgcagccgttccagggtctccctccactgctgtagtaacccgggtccggggcctcggtggtgctcctga

SEQ ID NO: 494552 - DNA, 82 bp, Homo sapiens
gactcctgtaggtaatgctgctgtatcctcagttgactcattcactcagctctggaggctgccatcgagaacctcaatgaag

SEQ ID NO: 494553 - DNA, 82 bp, Homo sapiens
ggaaagcagcatagagaatgagatagccgtcctgagaaagacttctgcacggacctggccgtctccagtgccaacttcattc

SEQ ID NO: 494554 - DNA, 90 bp, Homo sapiens
cagacggctgcccttcaagtaccaagatttaccgcattgtttctcagaagcaaatgtcagacagacgcgaaaatgacatgtctccaagca

SEQ ID NO: 494555 - DNA, 99 bp, Homo sapiens
gagtttgacgacggccaatgcgcccccaggtacttcgtactggatttcgaggctggcatcctgcagtattttgtgaatgagcaaagcaaacaccagaag

SEQ ID NO: 494556 - DNA, 99 bp, Homo sapiens
tgagttacaagcccaggaaggattgtctaatgatggagaaacaatggtaaatgtgccacatattcatgcaagtgaatattacttcagtgtagaaaattt

SEQ ID NO: 494557 - DNA, 100 bp, Homo sapiens
gcttgccaaaatatgagatcactcatcagggcaaccgccacacactgcagctgtacagcttgaccattggacacttctccagggttcgtggacagacgat

SEQ ID NO: 494558 - DNA, 100 bp, Homo sapiens
ctgaatcagaaaataaggagcagctcgaggccaggaggcttgtttggatcgaaacccccacaaaccccacccagaaggtgattgacattgaaggctgtgc

SEQ ID NO: 494559 - DNA, 90 bp, Homo sapiens
gctgccaccttccagtccatcaacaagcgcctggcgtcgccagtggctcctggggccttgactggctgttgataatcaggtgtatgtggc

SEQ ID NO: 494560 - DNA, 75 bp, Homo sapiens
ctccatgcaaattgggtgcttcacagagacttggtgaacgacgtgaatgagtacgcgcccgtgttcaaggagaag

SEQ ID NO: 494561 - DNA, 98 bp, Homo sapiens
gagaactatagcaatctggttttcttgggaaaacagttcctcctgaggatttcagagaagagctggacttcctggctgactctcacattctcttcttc

SEQ ID NO: 494562 - DNA, 100 bp, Homo sapiens
taaatttatacgaagtggcacaaaggaagccgggaagtttcgcgaatgtcagcattgacatgtgtgcgatcatagacagagacgcattctcactatgttg

SEQ ID NO: 494563 - DNA, 75 bp, Homo sapiens
ggacactgagctttgtggaagcatttggcggcataccaccctgcactgtgagacacttccctctgtgaccatgaa

SEQ ID NO: 494564 - DNA, 98 bp, Homo sapiens
ttcatcccatcagcctggattggtgaaactgaatcacaggagatatttccagttgttttgtaggatacaggaaagttctcaggtactttataaattgg

SEQ ID NO: 494565 - DNA, 75 bp, Homo sapiens
acccagctgaagaccactttagaaactcaattaagactattggaaatgcacttcatgcaatgaaatgaatccccc

SEQ ID NO: 494566 - DNA, 71 bp, Homo sapiens
tctgtacagcctgcagaactatcaccagaagctggagagagaggctcggatctgccgccttctgaagcatt

SEQ ID NO: 494567 - DNA, 75 bp, Homo sapiens
acggaggaaggcattgcccagatataccaactgattgagtatctacacaaaactgactttggtttctgtgcccag

SEQ ID NO: 494568 - DNA, 100 bp, Homo sapiens
gcccacaaccaagccatggtgcactggtcgggacacaacagcagcataacttgttcaaacccaaagaacggtgcatttcagagaaggagatgcatatgcg

SEQ ID NO: 494569 - DNA, 90 bp, Homo sapiens
cggtcaggagcgggccctcccttaggtgcgccccccgccagaacccagcgggtgccgcttctccacccgaggcttccacctccaacgagc

SEQ ID NO: 494570 - DNA, 80 bp, Homo sapiens
cacagccgcggcggcagcagcagtgagagagtgcctggtgaagaatgtgatgggatcactagcatgtctgcggagagcgg

SEQ ID NO: 494571 - DNA, 74 bp, Homo sapiens
tgaagcagtcggacgcgtctccccaagaaagccctgcagagcccagggagatggaagacttcgcccgaggggcg

SEQ ID NO: 494572 - DNA, 83 bp, Homo sapiens
gcaagaaatattgttcgccaaaaagcaactgttttctggatatgccgcagaaggatccgtgccagaagcaagcctgtgagata

SEQ ID NO: 494573 - DNA, 90 bp, Homo sapiens
gcgacacagttctcctaccctatgtttttacccagtcttgctaggtcagcattagaaaaaaatctggcagatgctacaatagaaataaat

SEQ ID NO: 494574 - DNA, 100 bp, Homo sapiens
ctcacgttcatcatggtgcctggctgccaggcagacacagaccagaccctgaagaaggaggggctgatctctcaggatggcagtagtttagaggctctgt

SEQ ID NO: 494575 - DNA, 114 bp, Homo sapiens
cgagagggccgcgggcggcggaggcagcggggccgggatggaggacgttaactctaacgtgaacgcggaccaggaggtgtgcaactgaggaacatggctcaagaaactaatcac

SEQ ID NO: 494576 - DNA, 100 bp, Homo sapiens
agatggtcaggtctggagctcgaccgggccaggtatcactacagttctgactatgacaaccctgagtacaattgccaggaagtctttacctaaggtttct

SEQ ID NO: 494577 - DNA, 80 bp, Homo sapiens
ctgaggttcttcactcgcgactgacggagctgcggtggcgtctccacacgctgaagaaacacttaaattctggaaatagc

SEQ ID NO: 494578 - DNA, 100 bp, Homo sapiens
ccttaaggatctctttggcaagtttggaacaggcctttgagagcagccagaagtacaaagaggggaagtacatcattgaactcaaccacatgatcaaaga

SEQ ID NO: 494579 - DNA, 73 bp, Homo sapiens
cgcgaggaggcgcgggaggtgttcgagaacgaccccgagacgatgaagactggcccatttgcagagcactcca

SEQ ID NO: 494580 - DNA, 100 bp, Homo sapiens
agaaaggaatgatagctggggttcttttgacctgagggctgctattgtatatcacactaaagagcttttgaggagaaacgaaaagaacaggaagaaaaag

SEQ ID NO: 494581 - DNA, 90 bp, Homo sapiens
aggcggtggctgagagtgaggaaggcctccagaggaagaagtccaagttccgcttgtccaagatctggtcaccaaaaagcaaaagcagcc

SEQ ID NO: 494582 - DNA, 71 bp, Homo sapiens
gacgacaccttctgcgaggcctgcaagtccaccgtggttgcagaaagagaacagtccccggagaggtggca

SEQ ID NO: 494583 - DNA, 75 bp, Homo sapiens
tgttctccctgcagcagtcagcccaaaggaaggacacattcagctaacgtattttagcaggtggagtgaggttga

SEQ ID NO: 494584 - DNA, 100 bp, Homo sapiens
gagctggctacttctcgctctgcttcatcccactattattttggcacaacaggaaggagctgtcataaccctggggaaggcacagaagttccgattcaac

SEQ ID NO: 494585 - DNA, 75 bp, Homo sapiens
gtgggggtgatctgcagaagattggagagatcaagcagtgcacacgggtcacgatggaccagctctccacagtgc

SEQ ID NO: 494586 - DNA, 78 bp, Homo sapiens
ccaaccaaataactaaagttcgaaaataccaagcccagatttgaatataacctgccgctttgcaggtgtattccacgt

SEQ ID NO: 494587 - DNA, 82 bp, Homo sapiens
tgtggctgtaacttacgtgtactttaccaacgagctgaagcagggtggagccagccatcctgagacgtccgtacagcccgta

SEQ ID NO: 494588 - DNA, 100 bp, Homo sapiens
ctttccgccactgcccaaactgctgaagcagctcccgcgaggaccacccgccaatgttttcagttgcaccaagcttagccaccaatgcatcagcagccgc

SEQ ID NO: 494589 - DNA, 89 bp, Homo sapiens
gccagagttgttcatccagggagacagcgttttttggctttcacccccaaccagtgaccaaagacttgaccactcaaagtccagctccc

SEQ ID NO: 494590 - DNA, 100 bp, Homo sapiens
tcagctggcaattgtaaataggtttccaggatcaaaactaacctttcaggatgagttccacccgttcatcgaggccctgctgcctcacgtccgcgccttc

SEQ ID NO: 494591 - DNA, 83 bp, Homo sapiens
gaagtggattcatgagcaacctgactgcttttcaggaagccttggacgctgcaggtgataaacttgtagtagttgacttctca

SEQ ID NO: 494592 - DNA, 91 bp, Homo sapiens
ggtacctgcggccaattcggtggaacgaggacgcggactgcgaaggcagcaattctgtggtgttcttggtcacacatttatggagtttctg

SEQ ID NO: 494593 - DNA, 80 bp, Homo sapiens
cgtcatccgcggctacgtgggcaaccgggcggccacgttcccgctgcagatagcctgggctggaagctcttctacgtcac

SEQ ID NO: 494594 - DNA, 109 bp, Homo sapiens
gatggctgggactgcagtttccccagggatgcctcaagactggagcccagcataaatgtggagcccctcagttgatccaactaatggaagaaataatggctgaaaagga

SEQ ID NO: 494595 - DNA, 83 bp, Homo sapiens
gaaacaaaccataaaagtggaaggccctctttaacactgatttgatggagttggacatggccatggaaccagacagaaaagcg

SEQ ID NO: 494596 - DNA, 88 bp, Homo sapiens
cctagtgtcagcagattcagcggtactggtgtataataggctgtgtggttccggtgctggtgccgtggaagtggcaatggcagaagcc

SEQ ID NO: 494597 - DNA, 50 bp, Homo sapiens
cgcccgtgctgaacaaaaatgcgcagaaacgcttcgttaagggactcagg

SEQ ID NO: 494598 - DNA, 100 bp, Homo sapiens
ctccgtttcaagagaggagatcatgattgagtgaagccaccccgtccgcagccaggtacccactgatggtaatgctggcctgctggctgaaccccagatt

SEQ ID NO: 494599 - DNA, 75 bp, Homo sapiens
gaagattgctgtaaaaaatttcaggattggtactacaagaatctgatattgatgctgctgctgcaatgatgcttt

SEQ ID NO: 494600 - DNA, 82 bp, Homo sapiens
ccgccgcccgtccacacccgccgccagagggagacgctgttgcggcagctggagacgaaccagctggacatggacgccacgc

SEQ ID NO: 494601 - DNA, 74 bp, Homo sapiens
catggccatcgtgcctctttgggcttccatgggcaactacatcaccaggcccttagccgacagcgagaaactgc

SEQ ID NO: 494602 - DNA, 100 bp, Homo sapiens
cgagagaggcaccgggatcgtgaccgagaccgtgaccgagagcgtgaccgagagcgcgaatatcgtcatcgttagaagagttttgccgaattgacaagcc

SEQ ID NO: 494603 - DNA, 75 bp, Homo sapiens
gaaaatcaacctatcctccttcaggaccaacgtgtcttctctttagggatggtgaggttggaaaaaggctcctgt

SEQ ID NO: 494604 - DNA, 92 bp, Homo sapiens
ggagacaacgccttaacccaaggaagtgactcaaactgtgagaacttcaggtagtaagcattaataatgtctttcatctttgagtggatcta

SEQ ID NO: 494605 - DNA, 75 bp, Homo sapiens
cagtggtggccagtagaggaggaggtgaacaaggaggagaaaaatggctacaaacttcctagcacatgagaagat

SEQ ID NO: 494606 - DNA, 100 bp, Homo sapiens
agccgcctgccccggtgcgcagacagagctattccagcaccagcagaggcaaatgtttgcagactacggctgaccgtacctcctgagagtccagttcctg

SEQ ID NO: 494607 - DNA, 100 bp, Homo sapiens
cgagaatggaccctgatggacttggacatggagctgtccttggtgtttggccacgggaaggtgaatggtgaacccacatgggcactcctcctgacggcac

SEQ ID NO: 494608 - DNA, 75 bp, Homo sapiens
caggtgtaagcgcagaaagcaggcgaacccgcggcgcaataacgttgctgattgttggaggttcttttggtcttc

SEQ ID NO: 494609 - DNA, 82 bp, Homo sapiens
tagctacacacacgccctcacgcccggcgagcccgcgaggtgtggaaacaggaagagaactagaactggaagtaaagcattg

SEQ ID NO: 494610 - DNA, 50 bp, Homo sapiens
tataagcagttaggatctggaggtaccttgtggtctataatcctttagaa

SEQ ID NO: 494611 - DNA, 100 bp, Homo sapiens
ggcctcggtctagcacaaagtctaagggcagaaaaatatggctcaggagactaaccagaccccggggcccatgctgtgtagcacaggatgtggcttttat

SEQ ID NO: 494612 - DNA, 101 bp, Homo sapiens
gtttggagcatcgacacagctatgttagaagaaatgctgttttggccatctataccatctataggcagcctgcttctgcaaagtggtacgatcgaagggac

SEQ ID NO: 494613 - DNA, 82 bp, Homo sapiens
tggggtagcggcggcgggagtcctggcgctctgcagggggatatgagactttctactcggaatatcctgagtgttgcgtgga

SEQ ID NO: 494614 - DNA, 101 bp, Homo sapiens
attatactcagtggctgcaaaaacggagctcccacctccatatacagccattgccagtccagacgccagtggtattccagtaataaactgccgtgtgtgcc

SEQ ID NO: 494615 - DNA, 100 bp, Homo sapiens
ggcgagcagggagcggagtaccagcacttcatccagcagtgcacagcttcctccatacagtggaacagttctgtgtggcacacaggctgtggataaacta

SEQ ID NO: 494616 - DNA, 97 bp, Homo sapiens
cggcagctgctcaactgcctgcacgtcgtcaccctgtacaatcgtttcagtgttgactggtgggctcttggagtgctcatgtttgagatgatggcag

SEQ ID NO: 494617 - DNA, 95 bp, Homo sapiens
aggagatacattaaatgcaatagcccttcagtactgttgtacggataaagataaagtttctctaaccaagaccccaaaactggagcgtggcgatg

SEQ ID NO: 494618 - DNA, 97 bp, Homo sapiens
ggacccagtggatgtaaaccccttccagctcctggatctcccaggtatcattgaaggtgccaaggatgggaaaggtagaggtcgtcaagtcattgca

SEQ ID NO: 494619 - DNA, 75 bp, Homo sapiens
tcaggttacttgcatggagttggtgcttaaatgcagacatctggtccctgggcataacagctattgaacttgcaa

SEQ ID NO: 494620 - DNA, 96 bp, Homo sapiens
ccccggtgtctgggaccccaactgggacaggtggaacacctgcagcaggagactgctgctctgaaaaagcaaatgcaaaaaataaaggaacagttt

SEQ ID NO: 494621 - DNA, 100 bp, Homo sapiens
gcggccagcgcgggcgcggccggagaccgtggggcccccggttgccgccccctcgggtggtccattatggctgacatgcaaaatctggtagaaagattgg

SEQ ID NO: 494622 - DNA, 51 bp, Homo sapiens
taagcaccgttggtatcctcatggacggtgttttcgccatcagggtgtatt

SEQ ID NO: 494623 - DNA, 100 bp, Homo sapiens
gtgcagaaaggaatcaaaagaatatttagaatgcaggatggagaggtcgtaatctgaaggagtggctgagggagcaattttgtgatcatccgctggagca

SEQ ID NO: 494624 - DNA, 98 bp, Homo sapiens
tgttgaagcctgccacaaggtccacctgttgttgtgggtttttgggtgaccagatcacttaggaaaatggctgttggtatgatcctagcatgcctggc

SEQ ID NO: 494625 - DNA, 98 bp, Homo sapiens
cgtttccgaggtgaaggcgccgcgccaggccggggggcgcccactccatgctgggaatagacaactctcctctgaggctgaggctaaccagattatgc

SEQ ID NO: 494626 - DNA, 90 bp, Homo sapiens
tctggtcctactacgcgtacgtggtggagctctgcgtgtctcggtcaaggagtgtgatgactggcgagcagatggctgccttccatccat

SEQ ID NO: 494627 - DNA, 100 bp, Homo sapiens
ggatgaatttgcttttctggaaggagtggagtcggttcttatacaactatgggctgaaaccatgaggcgtgctgagccgcacctgatcctgcaaccttcg

SEQ ID NO: 494628 - DNA, 74 bp, Homo sapiens
cggctccgtctgcgatgcagggcggcggcctgtaatcccagcgaccgccaggatggagatacacgtgaattaga

SEQ ID NO: 494629 - DNA, 75 bp, Homo sapiens
agccttctaccccatgagaaagaccaggatcacagtcaccttctatatagcaccatccccaggatgcaggagccg

SEQ ID NO: 494630 - DNA, 80 bp, Homo sapiens
gcgggtctgtcatcatgtcgcgttacgggcggtacggaggaggaagctcttcgtgggcggtcttgactggagcacgaccc

SEQ ID NO: 494631 - DNA, 75 bp, Homo sapiens
cccctttcttgctccccatcctcttcttggcttctcatgtgggaatcagagatcattgatttcttcctgggggcc

SEQ ID NO: 494632 - DNA, 83 bp, Homo sapiens
cacagagttagagagagggatggtggtagttaaaccagagagcaatgacaaagaaacagaagctgcgtatgaatcagatatcc

SEQ ID NO: 494633 - DNA, 101 bp, Homo sapiens
ccagcttcagtggcctgtcgttggaagagtacaagctgatcctgtccacagataaccagttcaggatgtccatcctggaacgactggagcagatggagagg

SEQ ID NO: 494634 - DNA, 100 bp, Homo sapiens
aagtcccccaaagatgagatttacctgtgagatgtttcatcccaacaggtcatggaggacgctggcggcggcgaggagaccccggccccggaggccccgc

SEQ ID NO: 494635 - DNA, 100 bp, Homo sapiens
gtgagggaagcgtctccgttgggtccggccgctctgcgggactctgaggaaaagctcgcaccaggaaaatggcaaatgcacgacagcggcctcctgaaca

SEQ ID NO: 494636 - DNA, 76 bp, Homo sapiens
ctggccaaagcctgcccagacggctcacctgtgcgggatggaacaaaaggaaactgggaagaactggtgaagtact

SEQ ID NO: 494637 - DNA, 75 bp, Homo sapiens
tatgatcggccctccttggcaccaaagctaccattccaggcaggaagatgtccaagccccgcgcggtggaggcgg

SEQ ID NO: 494638 - DNA, 90 bp, Homo sapiens
tcaccgtgggtggtgtggcagctggaattgggggcctcgaggttgatgaagatgaacccctgttcctcagcttaatcaatgacctgttcc

SEQ ID NO: 494639 - DNA, 100 bp, Homo sapiens
cacggtcctgtcactggcccgctccctggcggtgcagagaccagcatccttggagaaggtgacagagctgaatgaacctctctccaatgaagatcgaaat

SEQ ID NO: 494640 - DNA, 75 bp, Homo sapiens
ccgagggcagcagctcccagtttcttcttttcgaggcatgaaagaattactgatgtccttgatcaaaaaaattat

SEQ ID NO: 494641 - DNA, 100 bp, Homo sapiens
ttttcctccgaccctgatgctcttcaattcggtgctccgccagccccagcttggcgtcctgagaaatggtggcacaagaatggctcaactctccaaatag

SEQ ID NO: 494642 - DNA, 83 bp, Homo sapiens
ccgaggaaaaggaatcgtatcgtatgtccgctatccagaacctccactctttcgtaagactttgaccccgacgcaggcttcag

SEQ ID NO: 494643 - DNA, 75 bp, Homo sapiens
cagctgtgagctggcaccgagaggtgcctggagaagttccctgtgatccagcacttcaagttcgggagcctgctg

SEQ ID NO: 494644 - DNA, 74 bp, Homo sapiens
cccagggccagcgcatcggccacttcgagttccatggtctcctctgagcctccggcctccataagacccaaaac

SEQ ID NO: 494645 - DNA, 100 bp, Homo sapiens
ccatgtaccagatctacccaaggtctttcaaggacagtaacaaggatgggaacggagatctgaaagatttattgctaaacatgggtgcatttttggataa

SEQ ID NO: 494646 - DNA, 121 bp, Homo sapiens
tggagaagaaaatcgagcaggagctgacggccgccaagaagcacggcaccaaaaacaagcgcggtaaagccaacaagaacgtgcagtgggacgaggactccgtggagtacatgccagccaa

SEQ ID NO: 494647 - DNA, 97 bp, Homo sapiens
gcaggtcccagcggctcctgtgatccgcccaattatcgcgaccaacacataccagcagaccctcttctggctgtgcccaagtgctgtctcaccctgg

SEQ ID NO: 494648 - DNA, 75 bp, Homo sapiens
ggcctggactgtgggctggtgtgtggaactgaagacacgggcatatcataggctgaaggatgatgtcccggaaga

SEQ ID NO: 494649 - DNA, 100 bp, Homo sapiens
gtacctggatctcatcaaaaaggacaccagcaagctgttcaatgaggaggattacggggcgctgaaagacatcgtgatcaacgcaaacccggcctcccct

SEQ ID NO: 494650 - DNA, 100 bp, Homo sapiens
ctatgattatgttacggacactgcacaaagatattgctagatataatcagatggactctacggaggattctggagccgagaaggagaacacctctgtcct

SEQ ID NO: 494651 - DNA, 100 bp, Homo sapiens
cggccgcagctgccacaaaccaggtgacctcaaagcagaagctctgaattcacctctcatctgacgactgacagctgctgccaccgccagcctctgtccc

SEQ ID NO: 494652 - DNA, 126 bp, Homo sapiens
tggaggagctgtgcagccgcgaggaggcgcgggaggtgttcgagaacgaccccgagacgaaccgcatgcacgagtctctcatgctcttcgactccatctgtaacaacaagttcttcatcgatacct

SEQ ID NO: 494653 - DNA, 50 bp, Homo sapiens
tgcaatggtctgatggaggaagatacaggattcaagatgaccaacgaaga

SEQ ID NO: 494654 - DNA, 96 bp, Homo sapiens
tggtcagatagcgagtttgaatggcaggtatgggcactaggaaaagacttcttccatcaagcttaattgttttgttattcatttaatgactttccc

SEQ ID NO: 494655 - DNA, 60 bp, Homo sapiens
caaagtgtctacctcggggcagatccggaccaaggtatattcgaattgttgggactcaca

SEQ ID NO: 494656 - DNA, 80 bp, Homo sapiens
cagaaaccgtccctgctacagagcaggagttgccgcagccccaggctgagacagataacgaaggaggcccaacttcattc

SEQ ID NO: 494657 - DNA, 98 bp, Homo sapiens
tggtcaccacagtcaccttcactgggatgatgcgctgcagccagctggcccccagggccctgcagtggattttggggtgagtgctcagctggaccgca

SEQ ID NO: 494658 - DNA, 99 bp, Homo sapiens
ttattgagcataagattgtcatagctgatgtcaagttggttgctgatttccaaaggtctcctaaaaacccagaacagaagatcattaagagagtgattg

SEQ ID NO: 494659 - DNA, 75 bp, Homo sapiens
caaaaaagcaaggccttctgagactggatctgatgatgaaagctggcagttaaggaaaggagtaagtgaaattgg

SEQ ID NO: 494660 - DNA, 83 bp, Homo sapiens
cttcagggatgagtcatgtggcagtggaaaatgcgctcgggctggaccagcagatgatatcatcaagttgaatcgaaaggaag

SEQ ID NO: 494661 - DNA, 75 bp, Homo sapiens
cagcaagcccactggcctgagcacatgaagtcctgcacccagtcagggacaggcattagagcccaaacaggatgc

SEQ ID NO: 494662 - DNA, 90 bp, Homo sapiens
gcagcacccggcggacaagcggcgggacgccaggacgcggcgagcaagaattaaacaaccaccatgtcgagcaaaaaggcaaagaccaag

SEQ ID NO: 494663 - DNA, 51 bp, Homo sapiens
gaatgcaagaggcgtttctataagaattgcttccccgggcgctgcctggac

SEQ ID NO: 494664 - DNA, 97 bp, Homo sapiens
tgggcatatttagtcattcatttttgatcaggagaaagaagacagccatcatttgaaaggtacttggaaaaatggacaaggattgtgaaatgaaacg

SEQ ID NO: 494665 - DNA, 100 bp, Homo sapiens
cattatccaacggctgctggaagtttccacgggctcccttgctcagcagtatgcgcaccctaacgctaccctgcacccacatactccacaccctcagcct

SEQ ID NO: 494666 - DNA, 75 bp, Homo sapiens
ccagatctgctggagatggataaaaatcttcaggggagacttcaacgaaacggaatattccaatgctctttgtcc

SEQ ID NO: 494667 - DNA, 100 bp, Homo sapiens
ctcccacgaggttcgcccgtgaccacgcgggagcccacgccgcgcctgcaggaggttaagtgggcagaccaacatccacctcagcaaaaacttcttcctg

SEQ ID NO: 494668 - DNA, 75 bp, Homo sapiens
cgtccctgctacagagcaggagttgccgcagccccaggctgagacaggtgagagcacagtaaggactattgctat

SEQ ID NO: 494669 - DNA, 75 bp, Homo sapiens
gcgctaccggaatgtcatccagcgagtgattaggtataagcagtttagccaaattttgaagaacattggagaaaa

SEQ ID NO: 494670 - DNA, 82 bp, Homo sapiens
ggaaaaatcagaggagctggtggatcacttcctgcccatgacggaggaagagctcggagatttgtgccacaccccggctgtt

SEQ ID NO: 494671 - DNA, 98 bp, Homo sapiens
cgcccccctgcctgctcagggccgcctccaagaccaaggacaaccctggcagcatcgggaagaatgcgtcaacctttgaggatgtcacccaggtgtcc

SEQ ID NO: 494672 - DNA, 75 bp, Homo sapiens
ctattaactgcctttcttctgtgggctgtgattttcagaggggaatgctaagagtccatgtggattgagagaacc

SEQ ID NO: 494673 - DNA, 83 bp, Homo sapiens
ccctactctgccccgggggagaggttgggacagcgtcttcgctgctgctggatagtcgtgttttcggggatcgaggatactca

SEQ ID NO: 494674 - DNA, 83 bp, Homo sapiens
ccgaaaacaccctgcaatctttcagacagatgtggacgagtgcagctccgggcagcatcagtgtgacagctccaccgtctgct

SEQ ID NO: 494675 - DNA, 90 bp, Homo sapiens
gggatctctttcgccatggctgccgggccgatctccgagcggaatcagggcttcaccgctgacctgaggtccaacacgggcggccaggcg

SEQ ID NO: 494676 - DNA, 75 bp, Homo sapiens
tcaccccgcggccgcaccttcccgccttctcaggttcagcagctggacatggagaaccaacgctcatcacctctg

SEQ ID NO: 494677 - DNA, 100 bp, Homo sapiens
gggcgctgatggccaacttcctcacacaaggccagctcagatcatcctgcacttgaaaaatgaagttttaccaccatcaaaactatcattatttaacaac

SEQ ID NO: 494678 - DNA, 83 bp, Homo sapiens
gagccacgtcatccgcggctacgtgggcaaccgggcggccacgttcccgctgcagcaaattgtggctactaatttgccccctg

SEQ ID NO: 494679 - DNA, 75 bp, Homo sapiens
gatgagagtgacatgtactgttgtggacatgcacaaaagtgagatgcagaatgtcatgtatgacttaatcacaga

SEQ ID NO: 494680 - DNA, 50 bp, Homo sapiens
cctgtacagcctgcagaactgtattagaaaactactcggatgctccaatg

SEQ ID NO: 494681 - DNA, 100 bp, Homo sapiens
gttctaacgctgcctttgctttaaaacagtattacttgcgatgttggagtccggggtgacctggtctcagtgaagaaatctttaggccggaatcgactcc

SEQ ID NO: 494682 - DNA, 101 bp, Homo sapiens
ctgctgccatcttctccgcgctatggctgcgttcggccgtcagggcttcctgttgcagctgttccaggagctctgagtcctttggccattccaaatgctgc

SEQ ID NO: 494683 - DNA, 95 bp, Homo sapiens
ttcgtacagcaaggcactggggattcttggtagatctgatgatctttaaagagtcttgcagaagagactacacagcaggcccgagaccatcctga

SEQ ID NO: 494684 - DNA, 96 bp, Homo sapiens
aagaaggttaagctggctgtcctgaaatattataaggtggaaccgtcccaaaatgtcccttgctcagaagaaggatcgggtagctcaaaagaaggc

SEQ ID NO: 494685 - DNA, 100 bp, Homo sapiens
atctacctccatcaggaccccagatgtctgacagccctgtgtgacaccaagataagtaacatgctgaagtgcattgagctggatgagcggctgaaagcca

SEQ ID NO: 494686 - DNA, 100 bp, Homo sapiens
cgggagagccagaaagaggacatggctgctgggcagcgggaagcgaggccccagatgtgaatttcttcggagtaagaaatcctcagaggaaattacccag

SEQ ID NO: 494687 - DNA, 100 bp, Homo sapiens
cccagcgggaaaggctacagattccggggctgaccttggatccagtgagttgcaagcctaatgctcacctgcagagacagaattcctgagtgaacgaaca

SEQ ID NO: 494688 - DNA, 48 bp, Homo sapiens
tgtggggcggtcccggccccgcaggccgccatggcatcagatgaaggc

SEQ ID NO: 494689 - DNA, 51 bp, Homo sapiens
gcttgaagagcttttcatggcagttaagggtgttcctgaaaagccccatag

SEQ ID NO: 494690 - DNA, 73 bp, Homo sapiens
gcttttcaggcatcctcatataattaaactactctaaaatagagctcaagcttgagaagagagaaccactaaa

SEQ ID NO: 494691 - DNA, 100 bp, Homo sapiens
agggcttcctggtttacctggcactcctggacaggatggattgccagggcttcctggcccgaaaggagagcctatatgtcagatcaacctggaaggaaag

SEQ ID NO: 494692 - DNA, 75 bp, Homo sapiens
gtggattcttggtctcactgacttcaagaatgaagccacggaccctcgcgagtggagactgctgcacggactctg

SEQ ID NO: 494693 - DNA, 95 bp, Homo sapiens
ctgtggacagtgaagagaggcctctcccaaagcacctgcgcaggaagatgatccctatgatcttgaagatgtttctgcacagaaatgagggaaat

SEQ ID NO: 494694 - DNA, 88 bp, Homo sapiens
tggtcacgtggcccagatttatgaaatgggcaagttcatgaaacctgggaaggtggtgcttgtcctggctggacgctactccggacgc

SEQ ID NO: 494695 - DNA, 97 bp, Homo sapiens
cagcagcagtatggcttccagtacccccttgccatggcagcaaagtgagaagccctaccactgcaactgggacggctgcggctggaagtttgcgcgc

SEQ ID NO: 494696 - DNA, 74 bp, Homo sapiens
cagaaagagtcaacagcagtggcaacaggttgcactgctgtgatccatcctcatctcctaaagatgcatcctga

SEQ ID NO: 494697 - DNA, 100 bp, Homo sapiens
accagtgggaccagcatgtttggcagtgcaactacagacaatcacaatcccatgaaggatgtctccccgttcaatgttgtggcctggcacgggaattata

SEQ ID NO: 494698 - DNA, 100 bp, Homo sapiens
cggaaagccccccaggctgagtgcggcatgatctccatcaccgaatggcagagatgccaaagaagagtgaatggcccacaaagagcctggtagcacatac

SEQ ID NO: 494699 - DNA, 74 bp, Homo sapiens
gtcctcgtcagcactgactttcagctatggaatcggcctgggcagtttttaaagggaagtttaaagaaggggac

SEQ ID NO: 494700 - DNA, 75 bp, Homo sapiens
gttcgtaatgcgagaggtgcgggcgcggctggcggccacgcagatcttcccagacccgtcagattttgaccgctg

SEQ ID NO: 494701 - DNA, 100 bp, Homo sapiens
gtctctagactttttggacgatgtgcggcggatgaacaagcggcaggtagcagtagctgatgtgcagtttggccccatgagatttcatcaagatcaactt

SEQ ID NO: 494702 - DNA, 75 bp, Homo sapiens
gcaagacggtgccgagaagcagctgcgaggtatatgaatgacctaaaggtacaaataaagacggagagagaacag

SEQ ID NO: 494703 - DNA, 83 bp, Homo sapiens
aataagaacgcctccgatccaggaagcagttcaggtacttttgaagcattctgcagatgttaatgctcgagacaaaaattggc

SEQ ID NO: 494704 - DNA, 74 bp, Homo sapiens
tccacccaccgccgccgcctcccaggtgaacttcacggtagaccagatccgcgccatcatggacaagaaggcca

SEQ ID NO: 494705 - DNA, 100 bp, Homo sapiens
gccatgaaaggcaggtggtgaggctgaggatcttgggccacaatgagccgaggagctgagattgggctaatggatactacagacaacagagaaaacttgt

SEQ ID NO: 494706 - DNA, 50 bp, Homo sapiens
tcccgagcagctgggattccagtcagattgttcgatatggtgagattcca

SEQ ID NO: 494707 - DNA, 90 bp, Homo sapiens
catcaatggagccgggcagctggagggggaaagcgtcttggatgatgtttgggtacccagaccccacctacctgacccgggtgcaagagg

SEQ ID NO: 494708 - DNA, 82 bp, Homo sapiens
cttgatcagcctttacagtaaaaatgacccatctatggctgcttaattgaacacttgtcctgctccttcacctttttcttgc

SEQ ID NO: 494709 - DNA, 100 bp, Homo sapiens
aaataccatcttgtacgagcaatattggagtcaatagctttcagacaaagggtggaggatatgaaagtgaaagtgcttacccaaatgcagaacttgtgtt

SEQ ID NO: 494710 - DNA, 75 bp, Homo sapiens
gttcgcggctctaacggggctttctacaaggaggtgatttcctcacctttctgagaaggaagaaggatgaactaa

SEQ ID NO: 494711 - DNA, 75 bp, Homo sapiens
ccgggccccgcgctccgccccggcctagggccttgccccgggagcccgcgaggagactgcacagttccagcaaga

SEQ ID NO: 494712 - DNA, 75 bp, Homo sapiens
gatctggggaggggagcagtatgaaatctccttcaaggcgcagatcaggcctctataaccgccaggaatcacatt

SEQ ID NO: 494713 - DNA, 90 bp, Homo sapiens
gaagataaacctttatcatctgagtccttgtcagaatcagagtatattgaggaggttggacacgagttgccgctggttgtccaaatcaac

SEQ ID NO: 494714 - DNA, 50 bp, Homo sapiens
ctgtcccgttgtcagagtggaagatactcctgggcatggaagtggatggg

SEQ ID NO: 494715 - DNA, 74 bp, Homo sapiens
tggtcttacattgctgcatcaagaaacccaagctgctgaggttctcagaggcactgtgactgacttccctggat

SEQ ID NO: 494716 - DNA, 100 bp, Homo sapiens
ggtgggtgctcgccctggtcttcgggctgtcgctcgtctacttcctcagcagcaccttcaagcagctacaggccaaatttgagcaccttaagagacttca

SEQ ID NO: 494717 - DNA, 50 bp, Homo sapiens
aggcaaacttgcacgacgcctgccagctactacccacagatggcatgatc

SEQ ID NO: 494718 - DNA, 83 bp, Homo sapiens
ctttggccctctgcggctgttcaaagtaagactttgaccccgacgcaggcttcagtgattgccgcggatcagaagcctgagca

SEQ ID NO: 494719 - DNA, 82 bp, Homo sapiens
gaaaaaggaagagagcactgcagccagtgaaaccactgaggtctctaattaacagaagatggcaaagcccagccacagcagc

SEQ ID NO: 494720 - DNA, 50 bp, Homo sapiens
gaagcagttcggttatacctgggtacatgtcccagagcaagcacacggag

SEQ ID NO: 494721 - DNA, 101 bp, Homo sapiens
cgactcactgacggagaagcagtggctcaagcgatctagggcagccctgcagaggtacctgttctactgtaatcgctatatgaaccacatgcagagcctgc

SEQ ID NO: 494722 - DNA, 95 bp, Homo sapiens
agcggctcatcgagactgagctggctaagcaggtgctgcagacggagctggagcgaccgagagagacgctgaccggaaaggagattgagattgac

SEQ ID NO: 494723 - DNA, 99 bp, Homo sapiens
cccggatccgcctctgcctcgacagagctgcagatttcctctcggagcctgagggaggcccagtggctgaacacctgatagcacagcacagcgccatca

SEQ ID NO: 494724 - DNA, 50 bp, Homo sapiens
cagccaccaggcacctccaacaaccaggtagacactatggacagcgtgaa

SEQ ID NO: 494725 - DNA, 76 bp, Homo sapiens
atgggggagaccgtaatgagcgtcaaaattatccgaaaccgcctcactggtggtaagcatccgtggcattcaagac

SEQ ID NO: 494726 - DNA, 88 bp, Homo sapiens
gttgatgacattgacgacaggcgggagtttcaggaaactctgtgcctgtatggagtggaatgaatgttgctggtgtctctctgaagac

SEQ ID NO: 494727 - DNA, 116 bp, Homo sapiens
acatccttgtctgtgaagctaaactcaatgctgctgtgtgggaagaagatttgtaaagaaaactcttaggcatacttctccgccttcccaccacccggattcatagtgtgaattcc

SEQ ID NO: 494728 - DNA, 80 bp, Homo sapiens
tcggcgcctctcctgcagccccgggagaagcatgacactggccaacactgcgtccagcatttgggtggccctcaggattt

SEQ ID NO: 494729 - DNA, 75 bp, Homo sapiens
aaggattccaacaacaattccgatggcaaagccgttgccaaggtcagcccaaggccaaccccactgtcactctgt

SEQ ID NO: 494730 - DNA, 50 bp, Homo sapiens
ctgtttgctccataggcttacattagttgtcgagatgtccacagaaggag

SEQ ID NO: 494731 - DNA, 83 bp, Homo sapiens
cctcggtcgcccacccgcctgcccgccatgtgcagagtcacggtggcagcattgagagttggacacccgggtccttgaagtga

SEQ ID NO: 494732 - DNA, 100 bp, Homo sapiens
cggcgagaggatgcgcaaggtggagagccgcggggaagggggcagagagctaatggcagcattagccgctgttgggcctcctaatcctcgggcagatcca

SEQ ID NO: 494733 - DNA, 90 bp, Homo sapiens
caagctgactatggccttgaacacttggcaatttgaatcaacccatagaagtgacagcgctgtattcatttgaaggacagcagcctgggg

SEQ ID NO: 494734 - DNA, 90 bp, Homo sapiens
ttgatcctcctcctaattgcagatgtacattgaagatgtcagtttctacatgtgggaagtagacattgaaggctttatggtttacagaca

SEQ ID NO: 494735 - DNA, 88 bp, Homo sapiens
atccgccagtcaataggaagtacgagtctggaggagcaccggaattcacagaagcagatgaagctcctacagaaaaagcagagccagc

SEQ ID NO: 494736 - DNA, 82 bp, Homo sapiens
gtcttcgtgctgctcgacgtgctgtgcttactggtcggttgtggcagcactgcctgaaggtatgagaccagattctaatctt

SEQ ID NO: 494737 - DNA, 99 bp, Homo sapiens
tcttttcccgttgaaggtgctaccgctgacgacacccctggtggatggcgaggatgagaggcgaggaaacgagacctctttcgttccttctagaaggtc

SEQ ID NO: 494738 - DNA, 51 bp, Homo sapiens
gggtttgagtccagcagtgctttaggtatatgccctcattttgcttaagac

SEQ ID NO: 494739 - DNA, 98 bp, Homo sapiens
ggctgcagcagagcgagtacttcgttccaacatggacatcctgaagccaatcctgcccaacagcatggtggtggaacaccccgagttcctcaaggcag

SEQ ID NO: 494740 - DNA, 50 bp, Homo sapiens
gtctgctcgggggtctacttcgagggaggattctggagccgagaaggaga

SEQ ID NO: 494741 - DNA, 50 bp, Homo sapiens
ctgtactggtatagcaatcaaatgtactatactggcaattgctggagaag

SEQ ID NO: 494742 - DNA, 83 bp, Homo sapiens
cctcagcctctgcccaaagaaagaaggagcatgtagagcgcatgaagtacaggacaataaagcttcctacacatatcaccagg

SEQ ID NO: 494743 - DNA, 145 bp, Homo sapiens
tggagacagagctgagggagcaagaggtgtcggaggtctcatctttgaactactgccggagcttctgccaggtatgtcgagagtaccaacgtggcaattgcaaccgaggagaaaatgattgtcggtttgctcatcctgctgacag

SEQ ID NO: 494744 - DNA, 100 bp, Homo sapiens
agcggtgtcctcttaagaaaatgctggaaacaacgtggaggtagatgagtctttgttccaagaaatggatgacttggagctggaggatgatgaagatgat

SEQ ID NO: 494745 - DNA, 82 bp, Homo sapiens
agacatcctacaggaaccacccctccagttaagaaaaggcgacggcggattgacagaagtatgattggagagcccacaaact

SEQ ID NO: 494746 - DNA, 100 bp, Homo sapiens
atcatataaaaaccaagaattgcggattaagtttccagacaatccagagaaaaatgcactcggtgatggaaagagagccactattctgaagaacacttgg

SEQ ID NO: 494747 - DNA, 82 bp, Homo sapiens
ggaaaggctctcagtgaaaaaggaacacatgattctgtgcagatttgcagaccagacagctgtccagctcccaccccaacga

SEQ ID NO: 494748 - DNA, 83 bp, Homo sapiens
gacgcagcaaaggcaaacttggaaagagcaagatcggcagccctaaactcacaggaggcaaagagtccgaaggtggagctgca

SEQ ID NO: 494749 - DNA, 100 bp, Homo sapiens
gcagctgcaccccaccttgatccagcggacttacgggagggtgaggacaaaatcttcttaatcaacaagcttcactccatctacgagaggaaggagaggg

SEQ ID NO: 494750 - DNA, 85 bp, Homo sapiens
gagatcctgatgaagttcgagcactaatatttaagaaagaagatgttaactttcagacaatgcagatcttcgtgaagactctgac

SEQ ID NO: 494751 - DNA, 51 bp, Homo sapiens
ctttagttcgtctttcctagagaggaagcgagtcacgtcccagcgctgctc

SEQ ID NO: 494752 - DNA, 90 bp, Homo sapiens
gcagcagcagcaccaccggacgatctcactctgttgcccaggctggagtgcagtggcacaatcacagctgaccgcaaccttgacctccca

SEQ ID NO: 494753 - DNA, 141 bp, Homo sapiens
ctttaacgtgtctgtgcagggtattatcatctaccgagccgcctacttcggtatctatgacactgcaaagggtactgggcctaatcgctacgtgcctctttggctatgatgcctatgtcaccttccccgttcggcagccaa

SEQ ID NO: 494754 - DNA, 120 bp, Homo sapiens
gcagcaccgcagccttgggcctcgcgccggctatggccgtgccctggggctgagccctcagacttcccaagtaagaagcggaagaggagccgctggaaccaagacacaatggaacagaag

SEQ ID NO: 494755 - DNA, 76 bp, Homo sapiens
tacaggcagaaaacgagaggctcaccgcagtcgtgcaggatctgaaggagctgcagcttatcttctggtgtccctt

SEQ ID NO: 494756 - DNA, 78 bp, Homo sapiens
aatctgtctcccagcagtcacgcaaacaacttatcagtagtgacttacagtaagatgttgatgcctaagaagaaccgg

SEQ ID NO: 494757 - DNA, 100 bp, Homo sapiens
caactacagcctccggcagcgcatggacatcctggatgacagagcgggatgccaccagcttgtccaaagggaagttccaggagctcctggtgggcatcgt

SEQ ID NO: 494758 - DNA, 58 bp, Homo sapiens
aagcttctaggagcttctgaattgccaattgtgaccatctcagaaagttcttcctgtc

SEQ ID NO: 494759 - DNA, 98 bp, Homo sapiens
ccagaatacaccttgcttctgtagaccagctccaacaggattccatggtagctgggatgttagggctcaggcctatggcatgtctgcgttacctttaa

SEQ ID NO: 494760 - DNA, 82 bp, Homo sapiens
ctgccactgtgacgggcgtgggggcctcaagctgtcccaggacatggacacctgtgaggtgagaagccctaccactgcaact

SEQ ID NO: 494761 - DNA, 100 bp, Homo sapiens
aggcaagacctgcctcctgttccgcttctcagaggacgccttcaacaccaccttcatctccaccatcgggtcttttaacatccgaggaccacattctttg

SEQ ID NO: 494762 - DNA, 129 bp, Homo sapiens
gtcagttccttgtggagccggagctgggcgcggattcgccgaggcaccgaggcactcagaggaggtcgcaatggaagaagagatcgccgcgctggtcattgacaatggctccggcatgtgcaaagctgg

SEQ ID NO: 494763 - DNA, 83 bp, Homo sapiens
caatgaacttctgaacatggtgtggaatagtgtctcgcccaagaacttcaaggtgaaaatgatcatgaagacatcagttctgc

SEQ ID NO: 494764 - DNA, 90 bp, Homo sapiens
ggacctggtcttcactgacgcctctccccaggggagcatttcctgaagacgtagtcatgcagcacgtcagcagctcccagagcagccagc

SEQ ID NO: 494765 - DNA, 49 bp, Homo sapiens
ctgagagatctccaagaattacagaaccaaaaacttttgctagaaaatc

SEQ ID NO: 494766 - DNA, 90 bp, Homo sapiens
aggatgggaggaaggtcctcctacaggctccctgactggcagtcctcacctttccgagctgtctgtgaactcgcaggggggagtggcccc

SEQ ID NO: 494767 - DNA, 100 bp, Homo sapiens
tccatccattctgattcagaaagtcaggaggagatgttaaagtaacccatcttgcaggacgacattgaagattggtcttctgttgatctaagatgattat

SEQ ID NO: 494768 - DNA, 101 bp, Homo sapiens
cagggttttcattcagatgaagatgtggcccccagttccctgcgctctgcgctccgatcccagcgagggaccctgtatctggcaccggacagcacctggct

SEQ ID NO: 494769 - DNA, 83 bp, Homo sapiens
gaattggtgggtctcactgacttcaagaatgaagccgcggaccctcctgctttcttggactccgtactgttggtgtaaccaag

SEQ ID NO: 494770 - DNA, 88 bp, Homo sapiens
caaaattcgatttgcaaatcattcagtgaatcccaactgttatgccaaagatgcttgctctgtcaaggcacagcctattgtctccttt

SEQ ID NO: 494771 - DNA, 100 bp, Homo sapiens
gactgctgctctgaaaaagcaaatgcaaaaaataaaggaacagtttctccaacaaaaggggacatcacccagaagggctatgaaaagaaaaggtccaaac

SEQ ID NO: 494772 - DNA, 100 bp, Homo sapiens
gacatattcgatgccatcgtgatggcggatgagagcaagcaagagaaatggtactagagattatccgagaaaaagaccaagctgactttcggggtgtacg

SEQ ID NO: 494773 - DNA, 101 bp, Homo sapiens
ctgccaggctgggctgtggcttcaagatttccatggtgtcagtgattcatattcctgataggacttataaactatcctgcagaatattgtatcaatattta

SEQ ID NO: 494774 - DNA, 90 bp, Homo sapiens
agttaagcgcctccttgatcaccaggataatattctctcattgattaatgtcaatggaggactcagagagagtaatgataattaccggac

SEQ ID NO: 494775 - DNA, 98 bp, Homo sapiens
gacaatggcagcatctacaaccctgaagtgcttgatatcacagaggaaactctgcattctcgcttcctggagggaacccagatgatcttcaatgcagc

SEQ ID NO: 494776 - DNA, 95 bp, Homo sapiens
ggacctaaaatatgaccctgatccaggactacaggaatatgtggaagctgtctcttttcaacacttcatcaaaacacgatcattaattagtatgg

SEQ ID NO: 494777 - DNA, 99 bp, Homo sapiens
acaaggagaccttgaggaaaatcagcgaatttcagagttctatagaaaatttggtcttccacgtggcctacgtcctcatcaagtttgccaactcacccc

SEQ ID NO: 494778 - DNA, 90 bp, Homo sapiens
ggcttcggggagcgccgggatgtggacggagatccgggagctgcagtcccagatctcggacacatctgtggtgctgtccatggacaacag

SEQ ID NO: 494779 - DNA, 100 bp, Homo sapiens
gggctgcctcgccgcgtctcgccacggtgacagatcagtcagtgaaagcatttgctgaacactgtcctgagcttcaatatgtaggcttcatgggttgttc

SEQ ID NO: 494780 - DNA, 80 bp, Homo sapiens
ccggcgggggcggcgtgcggcctagcgtctcagaaaccacaataaaggctctcgcccacattcttccctcaccctctgcc

SEQ ID NO: 494781 - DNA, 100 bp, Homo sapiens
caaccttgcgctgcatccgctcgacctcgtgaagatccgcttcgccgctgtctgcttttctgtggagactgcgggttgcagacaccagcagccccctatt

SEQ ID NO: 494782 - DNA, 75 bp, Homo sapiens
taaaatagctggctgtaattttccagtgctactatatcggggccacagatgatgcagccaccaaaatcatcaatg

SEQ ID NO: 494783 - DNA, 50 bp, Homo sapiens
cgcaggggctcctcgggctcagtggatgacgtccggttgtttgccttcgt

SEQ ID NO: 494784 - DNA, 82 bp, Homo sapiens
cctcccagaagacactccccagggcagaaatagcgaccatggcgaggtggttggaggcaaagtaaagaagcccggtaaacgt

SEQ ID NO: 494785 - DNA, 75 bp, Homo sapiens
ctgtacaaaaatttaaagaaatggtctatagtctctttaagatgtggcaaaatctggcaaaggcagagaccaaac

SEQ ID NO: 494786 - DNA, 75 bp, Homo sapiens
ttccaaaaccacaaacttgcctacgtcagtaacagccaccaagagctggaagtcgagtgtgctactcaactcagg

SEQ ID NO: 494787 - DNA, 100 bp, Homo sapiens
cgggaagtcgcgaccagagccattggagggcgcggggactgcaaccctaatcagtgattctgccccacattggcagtgccacccacagaacccgcaacac

SEQ ID NO: 494788 - DNA, 83 bp, Homo sapiens
cccagccacagcctcccgcgcctcgctcagctccaacatggaactgtggctgcaccatctgtcttcatcttcccgccatctga

SEQ ID NO: 494789 - DNA, 100 bp, Homo sapiens
acagcattgccaggatgctcgactggctgcaggtaatgatcaataatggctttacaccagataaaaatgattatgaattttgtgccaaagtggaaaatat

SEQ ID NO: 494790 - DNA, 76 bp, Homo sapiens
cctaccagcagcccaagtgcagtgggaggacagccatctgcaaggagattaaccggatggactatgtggagatcaa

SEQ ID NO: 494791 - DNA, 83 bp, Homo sapiens
tgatgatgctcagtttgatgcgtcacactacgacagtgagaaaggagcaggtggtccattatggctgacatgcaaaatctggt

SEQ ID NO: 494792 - DNA, 82 bp, Homo sapiens
gttcagaagagccaaggaataaacatgcaatgaacccaaaaggatcgtaaaaaggaccttgtaaaactacaggcaggggaat

SEQ ID NO: 494793 - DNA, 97 bp, Homo sapiens
ctctgcctggcgttgctttgcctgggcggtgcggacaagcgcctgcggtgagccctattcccagaggcaggtggtgctgaccctgtaacccaaagga

SEQ ID NO: 494794 - DNA, 51 bp, Homo sapiens
aggattccaagtaactcttatttgggcgtgatggtgggcatgggtcagaag

SEQ ID NO: 494795 - DNA, 83 bp, Homo sapiens
agcaggactgcgccgcgtcttcctcaagatgatatcatcaagttgaatcgaaaggaagggaagaagcagaattttccaagact

SEQ ID NO: 494796 - DNA, 75 bp, Homo sapiens
gccactgtgtacaagatatgtgcctggatgcagctcacctccggagagattaaacagattctagaaaatgaactt

SEQ ID NO: 494797 - DNA, 82 bp, Homo sapiens
ctgatactacatattccagatgccctgaaaaccactcgcttgcagagcgctggatcagcaatgcctactagttcttcattca

SEQ ID NO: 494798 - DNA, 83 bp, Homo sapiens
atcagatgaatggaggacctttttatagccagaatccaggttcaaggtgtttgcagactatgaagcctacatgcagtgccagg

SEQ ID NO: 494799 - DNA, 75 bp, Homo sapiens
cggcgccggcctcttggagtcggagcttcgcgacggcagcggcaagaagataggaaccaaggctttagccttctc

SEQ ID NO: 494800 - DNA, 82 bp, Homo sapiens
gctgggccagttcctccaagaggtccgagccatgcggctgtcctttgtgggggagctgggctgggagctgcacattccaaag

SEQ ID NO: 494801 - DNA, 101 bp, Homo sapiens
ttggtattgctggctggtatctttgtggtccacatcgctactgttattatgctatttgttagcaccattgccaattgtcagagatggctttggattccccg

SEQ ID NO: 494802 - DNA, 97 bp, Homo sapiens
tccgctagtgatcctttgcaccctgcttggagacggacttgcttccggttgctgcttttgctcagaggacatccatgaccctaatggtctttttgtt

SEQ ID NO: 494803 - DNA, 100 bp, Homo sapiens
tggaagttgaccccttgaatgtggaccacttctcctgtactcctctgaccggacatggacctactccttctccggagccttcctgttctccatgggcttc

SEQ ID NO: 494804 - DNA, 83 bp, Homo sapiens
aaaacaggaggcaatttcccatacctgtgcagaagtgcagaggtcaatctttatgtacaggccctggccaacgtcaacattgg

SEQ ID NO: 494805 - DNA, 75 bp, Homo sapiens
ctgagctgcgaggaggggaccccactcagtatcaccagtgattccaaatgatatttcaagtaatgctgcaatttt

SEQ ID NO: 494806 - DNA, 100 bp, Homo sapiens
ctacaacggcacttttgaagatggcaagaagtttgattcaagttacatggacacagaacagtatgaagaagcagtacgagactatgaaaaagtataccag

SEQ ID NO: 494807 - DNA, 94 bp, Homo sapiens
ggacctgggaacctactgtggggccgcggccggaccgagcgcctcgacctcggtctgaggtgtcgtgaaaactacccctaaaagccaaaatggg

SEQ ID NO: 494808 - DNA, 75 bp, Homo sapiens
ggtggaactcctagggcttttttgagagtggaccccgcagggatctttgaattggtggaacttgttggaaatgga

SEQ ID NO: 494809 - DNA, 75 bp, Homo sapiens
gtaccaggcgaagctggccgagcaggctgagcgatacgacgtaccaaatatgccccaacagcggcaagaccagca

SEQ ID NO: 494810 - DNA, 91 bp, Homo sapiens
aaatctacagtgatacacagttcccatccctgcagtcaactgccaagcatgtagaaagccggaagaacgtcaaggtcgtgggaaataaaag

SEQ ID NO: 494811 - DNA, 75 bp, Homo sapiens
gcctgagggaggggaaaggcgcagggagctggccctcagcgcactcctgaagttcgtgcagctggaaggagcgca

SEQ ID NO: 494812 - DNA, 100 bp, Homo sapiens
agagtataatgaaggtctagtcaaacgcctccacaaggatgaccggaaagaagggatgaccgcgtttgtggaaaagagaaaggccaacttcaaagaccag

SEQ ID NO: 494813 - DNA, 98 bp, Homo sapiens
ccttcgcggtggcgatgctcttcttggaaaaccagatccagaaactggaggagtcccgctcgaagctagattctgtttctggcgtctgcatacgcaag

SEQ ID NO: 494814 - DNA, 60 bp, Homo sapiens
ggctgatactacatattccagatgacaacgtgcagtccgacctccttcacaaatatcaga

SEQ ID NO: 494815 - DNA, 96 bp, Homo sapiens
agggggactctgtgtgagggaaagaaaacaatttctcctgctctgcagcttctgttcagagccagctctcccaggcgctgaacggactgtcagaca

SEQ ID NO: 494816 - DNA, 100 bp, Homo sapiens
gaatgctgagttcatgaggaactttcagaagggccaggtgacccgagacggcttcaaggtatacacgtctgggaaaggcagcagcgcagctggactgaca

SEQ ID NO: 494817 - DNA, 98 bp, Homo sapiens
ccggcctgtttttcctgctttcttggagtgccttcctgtctgccgaggctgccggcctaacaggaagaggatcacctagcccgggtagaagaggcaat

SEQ ID NO: 494818 - DNA, 125 bp, Homo sapiens
gcggcgtgggaggaggaagatggcggccggcaagagcggcggtagcgcaggggagattacttttctggaagatctctggaaacatggctacagaacatgttaatggaaatggtactgaagagccc

SEQ ID NO: 494819 - DNA, 100 bp, Homo sapiens
ccaagatccacggcccccaggggctgcacggacagaacttcctgcagggactgctcaccaaagacccacggcagcgactgtcctggccagacctcttata

SEQ ID NO: 494820 - DNA, 100 bp, Homo sapiens
atcaaggccaagtatccgccagtcaataggaagtacgagtatgtcctggcgtccgcaataccgtagctccaagttccggaatgtctacgggaaggtggcc

SEQ ID NO: 494821 - DNA, 96 bp, Homo sapiens
caagtgcgcgccctggcgggtccggaccaagatgtcaccgggtgcgcatcaatgtacctccacacagagggcttctctgggccctctccaggtgac

SEQ ID NO: 494822 - DNA, 75 bp, Homo sapiens
ttattggtggtttttgggagactatctttggcaacagccctggactttgtctcacaagatgaaatgttgacgccc

SEQ ID NO: 494823 - DNA, 98 bp, Homo sapiens
ggctgaaggccctacgggagaaaaccgggcgcaaggcctggtgggtaggagatgagttttttgcagatgtctggagaatatgtaccaacaacacgaat

SEQ ID NO: 494824 - DNA, 82 bp, Homo sapiens
cctcggcactaggcagcggaggagcccgaccgacccggccgagacgcatccagagctttcgtgaccggggactgttctgaag

SEQ ID NO: 494825 - DNA, 83 bp, Homo sapiens
gggtgtctcgtgtgtgaacatcacaggctgtctgtccccagaccccagagcacgtccggcaccaccatgactgggctgttgaa

SEQ ID NO: 494826 - DNA, 100 bp, Homo sapiens
tgggactgcgaagctatacaggctgtgtgttctactccctcttctgggaatgaagcctccccagcaaagcctatacctgcttgttgattctgttgatgaa

SEQ ID NO: 494827 - DNA, 100 bp, Homo sapiens
ctgcagagcctggggaagaacttcgccttgcgggtcctgcttgtccaggtggatgtgcaggaaccgaatattgtatctgacgcatcctgtaatactgaag

SEQ ID NO: 494828 - DNA, 100 bp, Homo sapiens
aactcatctcctgtgccgactgtggcaacagtgctgcagtgagaagaggagtttgttactttaaacagaggctgaagaaactatagaattagcagagaaa

SEQ ID NO: 494829 - DNA, 100 bp, Homo sapiens
gttccagcaacagcagcaactgccgcacccttgaaaggaggcccctgccgtgtggacccgtaaaataaaatggaaatgagccgtcagactgctacagcat

SEQ ID NO: 494830 - DNA, 100 bp, Homo sapiens
caaagacactcgctacagcagcagcttctgcacacatgaccgaaggaggccccaaccctgagcacaacagcaacctggccaatatcttagaggtgtgtcg

SEQ ID NO: 494831 - DNA, 100 bp, Homo sapiens
ggtccaggccttccagtacacagacgagcatggggaaggtggaattgagactggatctatcacagaaatgtttggagaattccgaactgggaagacccag

SEQ ID NO: 494832 - DNA, 83 bp, Homo sapiens
cggcccggggccccgggatctcggctgtccttcctcccggtttctatgcttgagtctgctcaacagcaggcagccagtgtccc

SEQ ID NO: 494833 - DNA, 100 bp, Homo sapiens
tggcgcccgagctgtgaccgccgccactggggcagccagcacaatcgggcggaggtggcgctgccccttcagatggagcagttgaggaatgagctacttc

SEQ ID NO: 494834 - DNA, 74 bp, Homo sapiens
cgagtttcaagatcctggaccgtgtcaccatccaggaactcacagctggcagagaggctgatgacatcgtgaac

SEQ ID NO: 494835 - DNA, 100 bp, Homo sapiens
cagagagggatgggttacatgcccaagaggggacttgatgttaacaaatgtgagattgccaggtcgtggattcacagataaagtagatcgactaaaactg

SEQ ID NO: 494836 - DNA, 98 bp, Homo sapiens
gacactttgcgttcgggctgggagcgtgctttccacgacggtgacacgcttccctggattggaccaaagagaaccctgtacagtaagaaatatggtgt

SEQ ID NO: 494837 - DNA, 52 bp, Homo sapiens
cccaggattgctacaaagaaagatggcagaggagcaggagttcacccagctc

SEQ ID NO: 494838 - DNA, 87 bp, Homo sapiens
gtttggagtctactcattggttagaacatatcaaggtttttgctgcagagggtttaaagcttacttccagtgttcaagctttttcaa

SEQ ID NO: 494839 - DNA, 96 bp, Homo sapiens
gatgacggagctgcagtcggcactgctactgcgaagacagctggcaggtcagtaacagatccaagagatggaaagagagtagcgctcaaaaagatg

SEQ ID NO: 494840 - DNA, 100 bp, Homo sapiens
agtgttcagccacaaacccagcaagaacagcagatccaggttcagcagccgcagcaggttcagattcgtattttacatggagaagtgaacaaagtgaaac

SEQ ID NO: 494841 - DNA, 110 bp, Homo sapiens
ggcagcccgggcccggcgaggcagaccactgccgccgcatactggtgcgagtttgcccagtatgcggagatcgtccacttcaccctcccagatgggactcagaggagcgg

SEQ ID NO: 494842 - DNA, 74 bp, Homo sapiens
agcacatcacctacactaccacggccacactcaccactccatggccacacagcccccaaatacatcaagatgtt

SEQ ID NO: 494843 - DNA, 50 bp, Homo sapiens
gcctcggacaccttcgagggttggcttggtaaaatgcggctgacaattcc

SEQ ID NO: 494844 - DNA, 90 bp, Homo sapiens
ccgagtgcgccctgatgctggcgcagggcacggtgggcgcctacctgaacagagagtacctgattgagaagctgcttacaagaacaccag

SEQ ID NO: 494845 - DNA, 98 bp, Homo sapiens
gaaaaacagaatcagctgttccctgcgaaaggtatcagtcctacatcgctatcttgtgcagatgaagccttctgatttgttaaagaaaatggtcttga

SEQ ID NO: 494846 - DNA, 75 bp, Homo sapiens
tcagacaccgagcttcagcaagctctctccaacgagcattggggagtcagcaatgtccgttgtgttaaatcagct

SEQ ID NO: 494847 - DNA, 75 bp, Homo sapiens
aaacagccagaccgagagcagcctgccggggcggaggctacagcaactggacgaggagaacagtgaactccggtc

SEQ ID NO: 494848 - DNA, 74 bp, Homo sapiens
attattgcgcgtggaacggctgcttttggaaggtggttggaggcaaagtaaagaagcccggtaaacgtggtcgg

SEQ ID NO: 494849 - DNA, 82 bp, Homo sapiens
cgctggggcggggaccttgccttgcccgggtccacaggtcctggctaccctgggaagagacaagaagtaaatgaagaaagag

SEQ ID NO: 494850 - DNA, 75 bp, Homo sapiens
gccgggagcgagcccaggcggcagatggaggtgacacgagcagtgatgaggataaagaagaacatgaaactcctg

SEQ ID NO: 494851 - DNA, 83 bp, Homo sapiens
cgcggcttgaactcgcctaaagagctgcgccctctcaacaatgcagatcttcgtgaagactctgactggtaagaccatcaccc

SEQ ID NO: 494852 - DNA, 74 bp, Homo sapiens
ccgagtggaggaagcaatacatccagtatgaggaattgaagccattttttatgaaggaagttggcagtcacttt

SEQ ID NO: 494853 - DNA, 96 bp, Homo sapiens
tggtgctggccacttgcttgggatcctttatcctggtcatcttctatttccaaaggtccacatatagcctcagttacattagctgcttatgaatgc

SEQ ID NO: 494854 - DNA, 120 bp, Homo sapiens
tctctctcatctcgctcggctgcgggaaatcgggctgaagcgactgagtccgcgatggagttgatattcactgatggactccaaagaatcattaactcctggtagagaagaaaaccccag

SEQ ID NO: 494855 - DNA, 90 bp, Homo sapiens
ccgcggatcccagcttcctgcagccaggctgacttatccttgtataatgaattccgattgtggaaggatgagcccacaatggacaggacg

SEQ ID NO: 494856 - DNA, 98 bp, Homo sapiens
aaagcagcaggttggggcttcttgtggccaacttcagagcctgtcaccaggaaagatggcccctgagttctgcagcctcgaggaaggcctgccctatc

SEQ ID NO: 494857 - DNA, 50 bp, Homo sapiens
aacatcagacctctcttcatcaacaagaatgagtccctggaacgccagat

SEQ ID NO: 494858 - DNA, 75 bp, Homo sapiens
gtgggggaccggctgttggcgggcacttccgttccggcgcccctccggtcatcaacccgctgggcaccagcttcc

SEQ ID NO: 494859 - DNA, 143 bp, Homo sapiens
tgggagagggcatgccttgctcattttgcgcccagaagaattgggttttcttcgctacttgaaacaatccaaggctgaagggtatgtgattggcagctgtattaaacacattccaatcgcaggacgagatataacatatttta

SEQ ID NO: 494860 - DNA, 100 bp, Homo sapiens
ccctcgaactttaaagtccgcttctttgtgttaaccaaagccagcctggcatactttgaagatcgtcatggggccaagattgacagacacctaatattca

SEQ ID NO: 494861 - DNA, 83 bp, Homo sapiens
catggacatgagccccctgaggccccagaactatcttttcggtgtcgtgaaaactacccctaaaagccaaaatgggaaaggaa

SEQ ID NO: 494862 - DNA, 73 bp, Homo sapiens
ggaccagagtatctactgacaaaagacaggcagtcgatgatgtgaagaaaggttacatcaaagcagaagaaaa

SEQ ID NO: 494863 - DNA, 100 bp, Homo sapiens
ggagcattacagcagttcaacttggacgtcagagaatgtgaacttgatgaggaatctggattaaaggattcagaaccagagcgaaaacgcaagaagactg

SEQ ID NO: 494864 - DNA, 53 bp, Homo sapiens
tgaaaaatttagccttgttcaaaaagaggattaagcatgaaaatattgttgcc

SEQ ID NO: 494865 - DNA, 87 bp, Homo sapiens
accagcgtgcaagagacagaccggatcctggtggagaagaaactggcgatggaatatgagaggagccctctggaaagaaaaggacag

SEQ ID NO: 494866 - DNA, 100 bp, Homo sapiens
ggagacctagcacccagaagatgagaccgcaattcgagaatcaaagggccgggagcgatgatcgcaagcaggactggtcagaccatgctatttggtggga

SEQ ID NO: 494867 - DNA, 126 bp, Homo sapiens
ccgggaaggagcgccctggcggagaagactcgaacggctcccacagccgggcgttgggggaaagctatcatggtgaacttacttcagattgtgcgggaccactgggttcatgttcttgtccctatg

SEQ ID NO: 494868 - DNA, 75 bp, Homo sapiens
ggcccaaggaatttccccaggagaagatgtgtctgcggctcttcaggtaccaggtcatcagtacaccatctgata

SEQ ID NO: 494869 - DNA, 98 bp, Homo sapiens
attgtctgtgacagtaacagtacttgggatcccccagttccaaagtgtcttaaagaagttgaagaatctgccattgagaagcactttctggactgtgg

SEQ ID NO: 494870 - DNA, 100 bp, Homo sapiens
caaaaacttattccgacattcagagttgtttcctccatttgctaaaggaatagtgtttgagacggtaaagaacaggtccaagaaaagctcaaagaaagca

SEQ ID NO: 494871 - DNA, 90 bp, Homo sapiens
atcgattacacagttctggatgatgtgggccatggtgtcaagactttatattcagagcaccaatcaaattaagcaagcctggggaacttc

SEQ ID NO: 494872 - DNA, 100 bp, Homo sapiens
atatgccaagcagaggacagaatgaagacagggacagtggcattgctcgatcagtgacaatttcaacaagcaccttttttgacggcttgctggtgacagg

SEQ ID NO: 494873 - DNA, 87 bp, Homo sapiens
cgcctttggcggctgcgcccgggggcccggcggtccctctcagaccattaaaaatctcaagtgacgactttgggaaactctggttat

SEQ ID NO: 494874 - DNA, 88 bp, Homo sapiens
gaaaataccacaggatggagactacgagtttcctacaacacagcagtcccctcaggatgagcaggaaaagctcttggatgaagccata

SEQ ID NO: 494875 - DNA, 83 bp, Homo sapiens
cagaggatggcgcctgtgggcacagacaaggagctcagtgacctcctggacttcagcatggtttacccaaggtccagcctagc

SEQ ID NO: 494876 - DNA, 110 bp, Homo sapiens
cgcaaggccaaacccccaacccgcaaacctcatcatccacccacttctagatgagccgaactgtggctgcaccatctgtcttcatcttcccgccatctgatgagcagttg

SEQ ID NO: 494877 - DNA, 75 bp, Homo sapiens
ttttttcactgtctttggggttttcttcccagcggctacagcttctgaaagtacagagaagcttaacaactccac

SEQ ID NO: 494878 - DNA, 87 bp, Homo sapiens
ccgtctcaggggctgaagtttgtgaggtttgtgaaatggctgctgacatttctgaatccagcggggctgactgcaaaggagacccaa

SEQ ID NO: 494879 - DNA, 100 bp, Homo sapiens
ttttcagaattactcagtcactaatgaaggtggacccccaaaagtacaagggcatatttaacggattctcagttacacttaaagaggatggtgttcgtgg

SEQ ID NO: 494880 - DNA, 90 bp, Homo sapiens
cagggactgaaggtcacaccacagcgcgctgttttggagtcagcggaagatcaccaaggccagggagtggttccaccgcactgtgaagat

SEQ ID NO: 494881 - DNA, 98 bp, Homo sapiens
tgagctcggaaccaggatatcaagaccaaatgggtctgagaaacatcttacctattacaacagcaaaggtgccaattgtgaagttcttccatttgaga

SEQ ID NO: 494882 - DNA, 51 bp, Homo sapiens
gagttctctgtgtctgtgaagaatgggtggtgtggacagctgccaggcgtt

SEQ ID NO: 494883 - DNA, 75 bp, Homo sapiens
gcgccctcaacaaggccggcgacagcagcaggttccccagcgctctattaccaggttttaaacttcgccatgatc

SEQ ID NO: 494884 - DNA, 102 bp, Homo sapiens
caagatgatcgtgagtcagctgtcctataacgccggtgctctgacctggctgtcctgcgggagcctgtgcctgctggggaaagatggaggctcttgggagtg

SEQ ID NO: 494885 - DNA, 83 bp, Homo sapiens
ggcggacggcgtggaccacatagacatttacgcggatgtcggcgaagagttcaaccagggcagcgaggtcacaggccccacct

SEQ ID NO: 494886 - DNA, 95 bp, Homo sapiens
aagccattcccaaattatagagctaattacaactttcggggcatgtacaatcagagaacatccatgatagcagtcttctgtaaatcgaacttttc

SEQ ID NO: 494887 - DNA, 82 bp, Homo sapiens
cggagacgagtggtgggagaaccagccgactggagcaggcagcagcccagcagaaaaatatggctcaggagactaaccagac

SEQ ID NO: 494888 - DNA, 50 bp, Homo sapiens
cgacctctcggacacggtgcaggcagcatttcctgtgttacatctgcaag

SEQ ID NO: 494889 - DNA, 75 bp, Homo sapiens
gctggacctgctggtgttcgcccacgaccatgtggactcccgaaaaattgaccaggaagggaaaatcccagatga

SEQ ID NO: 494890 - DNA, 133 bp, Homo sapiens
gagccggagcccagaaatccgggggtggataagacaccgcgtcccctccaattcccgccatctgctttatctgaagattttcagctgatgaagaactaggaggctcaaacactatcttacctgagtccaggac

SEQ ID NO: 494891 - DNA, 100 bp, Homo sapiens
taggaatctatgatgctgatggtgatggagattttgatgtggatgatgccaaagttttattaggtttctaagcatgaattgaggaacagaagaagcagag

SEQ ID NO: 494892 - DNA, 90 bp, Homo sapiens
ttctgcagctgtgctgtttcacaaaataagaggagatatttcatcaaatactccagactatgcctggaatagctacattctcatctaggc

SEQ ID NO: 494893 - DNA, 101 bp, Homo sapiens
agatatccaggcattcttcatgagcatagacagtctgtgtaagaagtactccagggaaacctcccagactgtgccctgtccacggtgcctcctgcatgtcc

SEQ ID NO: 494894 - DNA, 74 bp, Homo sapiens
acccgagagcgtggagcgggctgggccagtgatgagaatggaaaggaggaattattctcactgaaggatctcag

SEQ ID NO: 494895 - DNA, 101 bp, Homo sapiens
tactctcgcaggaaatgggaattctacttgtgtgggctgttgaagctcaaatccgaagttttggacagactccttctcaactactcatagagccccatcct

SEQ ID NO: 494896 - DNA, 98 bp, Homo sapiens
ggttgagtaccaaacagtccagagactcatccccgccctgtgggagaagcacagtccacagagagtgattgactgcctggaggatgagaaggcaaccc

SEQ ID NO: 494897 - DNA, 75 bp, Homo sapiens
cgtagcccgagtcggtcagcgccggagacgccacagccatggccatgatggtgtttccgcgggaggagaagctga

SEQ ID NO: 494898 - DNA, 126 bp, Homo sapiens
gatgctagactctggggccgattatctgcacctggacgtaatggacggatgtttactgaactgcaacagatgaggcaacagttaccagacatggaatttggccgacgaatggctgtagaacgtgag

SEQ ID NO: 494899 - DNA, 75 bp, Homo sapiens
gggacggagagaacacgagcccatcagggtggttctcttcccaaagtggaagccaaattcatcaattatgtgaag

SEQ ID NO: 494900 - DNA, 100 bp, Homo sapiens
acaatgagaacagctctgcgcggctttttgagcggtcccgcatcaaggctctggcagatcttatgccttcattcatccggcatggtccaacaattccaag

SEQ ID NO: 494901 - DNA, 83 bp, Homo sapiens
cgcgcagccccggcctctcggcctctgccggagaaacaggtgtgggcagaagaaaaagctagtgatcaacagtggcaatggag

SEQ ID NO: 494902 - DNA, 100 bp, Homo sapiens
ttcagcaccactgaagactacgaccatgaaatcacagggctgcgggtgtctgtaggtcttctcctggtgaaaagcaaaagtactttgactcaggagacta

SEQ ID NO: 494903 - DNA, 105 bp, Homo sapiens
cgaaggggacctcatgtccctgtgggacacaatgcccccaagaatgatctttgctgagtgttcccccaacacttgcccatgtggcgagcaatgctgtaaccagag

SEQ ID NO: 494904 - DNA, 75 bp, Homo sapiens
tttagctggactaacagatttgacctggctatgcaaataaatatggggatgtatgaatacaacgggaagagtggc

SEQ ID NO: 494905 - DNA, 118 bp, Homo sapiens
gatggctcccttggcgaaggagtctgtttttcaacccaggaagtggccttcaagtcacaggacgcagcgattccctgccctcttcggtgttattacacaggcaggacttcagtgtcag

SEQ ID NO: 494906 - DNA, 100 bp, Homo sapiens
ccagtgccctcaatggtacagaaatcacccaggataacccctccagcggcaaagccaggctctccccagagaatggatcttggagaatgtctgaaagtcc

SEQ ID NO: 494907 - DNA, 100 bp, Homo sapiens
cgaaatccccctgaaggtaccgcggacctcgccccgggacagcgaggagctgagggaccctcaaccaccccatgtgtctctagaaccccagtgtagcgag

SEQ ID NO: 494908 - DNA, 75 bp, Homo sapiens
ggtgatttctgcatttccatctgaggtcttccgaccccgaactccaccggaggcaattgcactgtgtagccgtct

SEQ ID NO: 494909 - DNA, 75 bp, Homo sapiens
ttgcttgaaaggaggtcaacaagaacaaggaaatgtataagctacaggtaagaatgattgatgttggctgatatt

SEQ ID NO: 494910 - DNA, 100 bp, Homo sapiens
gcccaagggtctcccttctcggtgaacgttcagctgctgcaggaccacggggaaattgccaagacccgaagcagtcgtattcctcgaccaagtgtgagtc

SEQ ID NO: 494911 - DNA, 90 bp, Homo sapiens
ggaaaaaccacaattttgtacagattacaagtgggagaagttgttactactatacctaccttttccgaaacagagcagacaaagttggcg

SEQ ID NO: 494912 - DNA, 82 bp, Homo sapiens
actataagcagcttcggaaaggagccaatgagggtacatgtcccttgctgtgtgtgaacttgaccagcccggccttggcccc

SEQ ID NO: 494913 - DNA, 50 bp, Homo sapiens
ggaatccatttaagtttaatggagattgtagaaggcatgaaacaaaaaat

SEQ ID NO: 494914 - DNA, 102 bp, Homo sapiens
cccgtcttctccacctttgtgctcacgggtgcagctggtgataagattttcgacaatgaagccaaagacgtggagagagaagtttgctttattgatattgcc

SEQ ID NO: 494915 - DNA, 73 bp, Homo sapiens
aaaaatgctattaatatcgaagagctctttcaaggaatcaatggggtttcaccgtgttagccaggatggtctc

SEQ ID NO: 494916 - DNA, 51 bp, Homo sapiens
attttgctcaacttattgtgagaggtggacgtgggcgtggtgcacttcact

SEQ ID NO: 494917 - DNA, 80 bp, Homo sapiens
tcttgaaacacaaatggtttttgcattgttgcaaaacataaggagttggaggggaccagccaggcttcagctgaatacca

SEQ ID NO: 494918 - DNA, 97 bp, Homo sapiens
atcatttctgtcttctgctgctggggatattacattaggaagtgttcatggtattttcaaatcaaagaagtttgaacacttaaaaacaagtcaaatt

SEQ ID NO: 494919 - DNA, 100 bp, Homo sapiens
agaccatctacctcatctagaaggagagcaattagtgagacaggtaaagaggagtatttttgcttcacctgagagtgtgactggtaaagttggagtagga

SEQ ID NO: 494920 - DNA, 74 bp, Homo sapiens
tgcctggacccctactattgcaacaagggaggacatgtatgcccaggactctatagagctactaacaacatctg

SEQ ID NO: 494921 - DNA, 90 bp, Homo sapiens
tttccagccttccaagctctactgtgacttcagagacactgccaagcagccttagccctagtgtagagaagaagctcattcacacagaag

SEQ ID NO: 494922 - DNA, 74 bp, Homo sapiens
ctaaagagtcttgttatttcttctttgagaaaaacctgaaagatgtctcagatggagctatgacattgaagaga

SEQ ID NO: 494923 - DNA, 75 bp, Homo sapiens
gtcctagcgcctggcctgcgcgccgctgcccgcgccacaggtggtatcacggaaaacttgacagaacgatagcag

SEQ ID NO: 494924 - DNA, 97 bp, Homo sapiens
attcttcaaggtggggttggcatcccccacatacgaggcaaatttctggagatgtgcaatgatctcttagctagagtggagccaccacttcgtagtg

SEQ ID NO: 494925 - DNA, 98 bp, Homo sapiens
gtgcaaacccgagagaactggattgctcgctgtaagcagctcatctgtgaccccagctacgtaaaagatcgggtagaaaaagtgggccaggtgatcag

SEQ ID NO: 494926 - DNA, 100 bp, Homo sapiens
ggtcctgctgcaggtggcaagctctggacagtcattttgtttactcattcagccctgttgcaggtcccaataaactcttcataaggttgacagaagcacc

SEQ ID NO: 494927 - DNA, 50 bp, Homo sapiens
attccaagtaactcttatttggtaagcggaagggtacagccaatgcccga

SEQ ID NO: 494928 - DNA, 74 bp, Homo sapiens
tgatgtcagtgttatatcctccaggaatactggccaggaatctttgtctgaagtggaagaaaaatacaagaaag

SEQ ID NO: 494929 - DNA, 95 bp, Homo sapiens
ggtgactccgtccttccctcagcagccgcggcgcgcagggcacttggtcggtcctgaccgccagcctgtcgtacatggtggggatgatcgccagc

SEQ ID NO: 494930 - DNA, 100 bp, Homo sapiens
tgaattcagatatttccagagaatgaccacaacctcttcagtagaagcaactttcatcctttgaaacgtgtgctgaaaaagaagaatcagcaaatactac

SEQ ID NO: 494931 - DNA, 100 bp, Homo sapiens
cccaccgaagatgaacagggttcctggggcatcgacgatctccatatttcattgcaaggttggatggcaagcatgtggtgtttggcaaagtgaaagaagg

SEQ ID NO: 494932 - DNA, 125 bp, Homo sapiens
cgcagacatggccagccagcaggattcgggcttctttgagatcagtatcaaatatttactgaaatcctggagtaatagggaaatcagccttatggtcccacctgttacattatcaggacaaccgg

SEQ ID NO: 494933 - DNA, 100 bp, Homo sapiens
ccttagctgaaaggcagcagctcatcccagaattggtgcgaaatggagatgaggagaatcccctcaaacccagcctcagcagaagccccaggggacagtg

SEQ ID NO: 494934 - DNA, 82 bp, Homo sapiens
ggagcagcatggcatttcagtcactggtttgcagagtccagctatcatggtgaacttacttcagattgtgcgggaccactgg

SEQ ID NO: 494935 - DNA, 75 bp, Homo sapiens
cgcagaggacgccggaacaccctggaagccgagaaatgtgctatatgggtcatggtttgaccacattcatggctg

SEQ ID NO: 494936 - DNA, 90 bp, Homo sapiens
aaatggcgactgtcattcacaaccccctgaaagccaaagagcccagccaacagcgagtaaaaagatggggcttctctttcgatgagatat

SEQ ID NO: 494937 - DNA, 85 bp, Homo sapiens
aagccatcggacgtcggcggtgagaaatcatgaggtccaatggattttgtttagcaaataccgaaacaatagttattgaccacag

SEQ ID NO: 494938 - DNA, 87 bp, Homo sapiens
tgacttcccggacgctgggaaatggtgaactactgagttcttcattatgtctgatggagattatgattacctcatcaagtttttagc

SEQ ID NO: 494939 - DNA, 96 bp, Homo sapiens
tcgcgggggcgcggagaagaggatccaggaaaggcatgaacaaccgggaggtgctggagcaggtggagcgaggctacaggatgccctgcccgcagg

SEQ ID NO: 494940 - DNA, 100 bp, Homo sapiens
gcatccccctggaccagggctctgagcttcatgtggtggtcaaagaccatgagacgatggggaggaacaggtaatattaacggctgctatttgaactatt

SEQ ID NO: 494941 - DNA, 83 bp, Homo sapiens
cgcaaacttgacactcaccctgaccgatccatgttcactagcggccttacagaaagtactcaaaaagaagttcgaatagttgg

SEQ ID NO: 494942 - DNA, 100 bp, Homo sapiens
caactatgcagaaaacctcctgcggcacaaagagaatgacagagttgccctttacattgcaagtcaaaatgcagatcttcgtgaaaacccttaccggcaa

SEQ ID NO: 494943 - DNA, 75 bp, Homo sapiens
cgatgctggtccgatggttgtgcactgcagttccagtctcatcagattttccatgtcctggtggtggcagcagcc

SEQ ID NO: 494944 - DNA, 100 bp, Homo sapiens
cgtccctcccagcggcgcgtgagcggcactgatttgtccctggggcggcagcgcggacccgcccggagatgaggctctgtgtgctccgggatggagcagg

SEQ ID NO: 494945 - DNA, 73 bp, Homo sapiens
gcactatggcgcccgctccatcaaacatgaggtggtagctgagcacccagatgcttcaggtgaggagattgaa

SEQ ID NO: 494946 - DNA, 82 bp, Homo sapiens
cgggaccggcggcgcgcggcggccgaggccagagacaagaggagcagcagcggcaccgcccctcaccctggagggtcctgta

SEQ ID NO: 494947 - DNA, 83 bp, Homo sapiens
agagtcacagaggaaggacagtggagtctggcatcttattggttatcaatactctggctgaccatcatcatcgtgggactgac

SEQ ID NO: 494948 - DNA, 98 bp, Homo sapiens
tggagctacagtgcctacctgctgtttggcaccgactaccccttcttccatgacccaccatctgtcttctacgcaaatcagccggcaccaggagcagt

SEQ ID NO: 494949 - DNA, 51 bp, Homo sapiens
gcagaatgctcttctggagcagcaaggatttcaaatatgcgtgcattagag

SEQ ID NO: 494950 - DNA, 82 bp, Homo sapiens
gcctgcggagcctgtggggcaggtccacaaggcgattacaatttccagtcccctaaccacagacctgactgcagagctgtct

SEQ ID NO: 494951 - DNA, 71 bp, Homo sapiens
caaatgcatgccaacattccagttttttaagaagggacaaaaggtggtgatattcgtgaagagtcttccta

SEQ ID NO: 494952 - DNA, 83 bp, Homo sapiens
ggtcctgtctctcgagttggaggcatcttgacttagttgctgggagcctggaactgtggctgcaccatctgtcttcatcttcc

SEQ ID NO: 494953 - DNA, 100 bp, Homo sapiens
gggccttagcattgttgcagcaaagctcctacgactttcctgctcttcagtcaaaagagtgccatcaaccgcatggtgattgatgaacaacagagccccg

SEQ ID NO: 494954 - DNA, 100 bp, Homo sapiens
ggttggcaccatgttacgttgttcaacagatgggagaatgcaaagcaactgctcattaggtactaggttttgacaagcttgcatcatgcgtgagtataag

SEQ ID NO: 494955 - DNA, 82 bp, Homo sapiens
taaatgcactctttcgaaagaaagcttattcagctgattctgaatcatcttacactaccagacctgtgtagattagcacaga

SEQ ID NO: 494956 - DNA, 98 bp, Homo sapiens
ccagttacccgctggccctggtccggacccgcatgcaggcacaagagatgaccaagcgagacgtgcctggcttcgccatcgggggcctgagcgggggt

SEQ ID NO: 494957 - DNA, 75 bp, Homo sapiens
aaattcagcctcaaaaccgtcctgctgcttgctgaccaaatggaatccctttgcccacgtccagctgaagccgac

SEQ ID NO: 494958 - DNA, 75 bp, Homo sapiens
taatgctggcaaagtggaaaaatgtgcggcatggaggagtgacggcaggaactttctgtgctctgacaaccctta

SEQ ID NO: 494959 - DNA, 82 bp, Homo sapiens
cggagatcgcccgccatggctttacttactgcggccgcccggctcttgggaaccaaggtgaatgactggcaggaggactggg

SEQ ID NO: 494960 - DNA, 100 bp, Homo sapiens
cctcacaaagggcggagcggggctgtcacctggagatcacggagggaaggagcttggtgttggtggcacgagtcagtggaaaatctgtggcctagatcct

SEQ ID NO: 494961 - DNA, 75 bp, Homo sapiens
agggtgtggcggtcccaatgctggctgcttgagcggccagtgctgctgccgcctgtgtccattgacactgccagc

SEQ ID NO: 494962 - DNA, 117 bp, Homo sapiens
gtccagtggtacccggagggcgtcaagcagcatgtgaaggagaccaaggttttgaacgaagaatgtgatcagaactggtacaaggcagagcttaatggaaaagacggcttcattccc

SEQ ID NO: 494963 - DNA, 75 bp, Homo sapiens
ccccaacatgcctcaccctcatctatatcctttggcagctcacaggtcagcccaaggccaaccccactgtcactc

SEQ ID NO: 494964 - DNA, 100 bp, Homo sapiens
ctgccgctgccgctgccgcacctccgtagctgactcgtgccggtggtggtgtgcacattgagccccggtatagacagttcccccagctgaccagatccca

SEQ ID NO: 494965 - DNA, 75 bp, Homo sapiens
ggagcgcggggcgacgctggctgcagggacccggtgacagcgtgagagattcaagatggaaaaggtgatgtaacc

SEQ ID NO: 494966 - DNA, 101 bp, Homo sapiens
agacctcccggctcgacaggcggcgcgggcggcgatattaataaggcagcggaaagaagaaatatgaatacggctccatcaagacccagccccacacgaag

SEQ ID NO: 494967 - DNA, 100 bp, Homo sapiens
tgagccatcggatctaagatccaaaagtggacacgtcgatctgacaatgctaggagcgatgcaggtttccaaatatggtgacctggctaactggatgata

SEQ ID NO: 494968 - DNA, 100 bp, Homo sapiens
tgttgagtctaccaaaaagaatgaaccgcttgcttcttatttagatgtttgagacggaggcagatgagaagagggagatggccttggaggaagggaaggg

SEQ ID NO: 494969 - DNA, 75 bp, Homo sapiens
gcgccgctcatgactatacgctaagagaacttaaactttcaaaggttggacaactgcgttcctttgcctgcaaca

SEQ ID NO: 494970 - DNA, 75 bp, Homo sapiens
gccctgtgcacgcttggaatgctggatcgggaagagagctgtggtaggctatgaagatgggaccatcaggatttg

SEQ ID NO: 494971 - DNA, 74 bp, Homo sapiens
acgtcgggtggttttactggagtattggaactcagatgtgaagttcatttccaatccgccctccatggtggcag

SEQ ID NO: 494972 - DNA, 75 bp, Homo sapiens
cttgcggggattgctagtctcacagaccgaggatttgacagctaaggatattgaagaaattattgatgagctcaa

SEQ ID NO: 494973 - DNA, 101 bp, Homo sapiens
cccgccgacccgcgccctgctccctctcagcacctgggcggacgatgtcatcaatgcttcttggtgggtcatgagcaacaagactcgggatgaactggaaa

SEQ ID NO: 494974 - DNA, 100 bp, Homo sapiens
cttgatcgtctgggcctgtgtttcagctgggatagggctcgtgaagaagaaatgactgcaaaagtaagggacctgcagactcaacttgaggagctgcaga

SEQ ID NO: 494975 - DNA, 100 bp, Homo sapiens
cattcatgtgcctccaggttatatctcacaggcctatatgaacccaatagcaatggcgagatcaaggggtccaatccagtcttcagggccaacaatacag

SEQ ID NO: 494976 - DNA, 100 bp, Homo sapiens
ctcgttcggtggtttcttgtgaggacgcggcagcccgtggagtcggctgagggaaaagcgaggcaaggcaggcggcccatggcgaattgtggatgattgc

SEQ ID NO: 494977 - DNA, 100 bp, Homo sapiens
cctctgtgtctcagaatgttgttattgctatgtctggtatttccaaggttttcgtcggggaggtggtagaagaagggcttttttccagacttcaagctcc

SEQ ID NO: 494978 - DNA, 100 bp, Homo sapiens
gatatcggtggtaacgacggcctcagcaggcggggaagatgaaagggtcacagtaatgaaaggcagtaatagaaataaggatcattcagcagaaggagaa

SEQ ID NO: 494979 - DNA, 82 bp, Homo sapiens
cgcgcccgggaggaaggaacgaggcaaggagctaaagcagcgtgcgttcagccctggggggataaaaacattcagatggcag

SEQ ID NO: 494980 - DNA, 100 bp, Homo sapiens
tgcccaggtggaccccaagaagaccattcagatgggatctttccggatcaatccagatggcagccagtcagtggtggagccagaagtcattggatctgtg

SEQ ID NO: 494981 - DNA, 83 bp, Homo sapiens
gcagaatgggacatggttaatacagtttcatttaaaaggaaaccacataccaatggagaatagcctaacatggcagaccagag

SEQ ID NO: 494982 - DNA, 74 bp, Homo sapiens
aagaaacaagccgtggaataggtgtatcaagtaatggtgcaaagcctgaaggcagcaggatgggtgtggaagca

SEQ ID NO: 494983 - DNA, 96 bp, Homo sapiens
agactcatagcttacaggccctccaaggcaaatacgccatgcgagacctagtccacaggcttccaggagggaacaacagcaacaacactgcaagca

SEQ ID NO: 494984 - DNA, 50 bp, Homo sapiens
ccgcattttactatcttcaaagtagcagagtcttactctgtcacccaggc

SEQ ID NO: 494985 - DNA, 98 bp, Homo sapiens
gtaatccaagagaggctaaaggaagaacaacagatggatcccttcaggccatgtcatggtaaacggtccaaccaccccgattcccgtcaaggccagcc

SEQ ID NO: 494986 - DNA, 75 bp, Homo sapiens
gcaagagtttgttatatagcagaatcctgaagtgggtaaaactgattgacaactttgaaggggaatatgactacg

SEQ ID NO: 494987 - DNA, 90 bp, Homo sapiens
agctctacgctactgccatgataataacataattcacagggatgtgaagaggaaatatcattctgcaaaagaagcttatgaacaactttt

SEQ ID NO: 494988 - DNA, 100 bp, Homo sapiens
cctgtacagcctgcagaactggaaacagtgcttcttagtcctacgtcagcagcagtttaatgtccaggctcttgtggcggtgggagaccatgcaagcaag

SEQ ID NO: 494989 - DNA, 100 bp, Homo sapiens
cggatctgctccagtgtctccagtaccagttctaccaggccccttcatggctgtgctctttgccaaactcgagaacatgctgcagaactccgtctatgtc

SEQ ID NO: 494990 - DNA, 97 bp, Homo sapiens
cgggagtcgcgggaggatgggccgccgctaggctcgcactccggacgcgcctcgcagtgcgcagggttgccgaggagcccaagtagaagaaatatgg

SEQ ID NO: 494991 - DNA, 115 bp, Homo sapiens
cttgatgaaagaggctgcacacccctgcactatgcagctacatcagacacagatggcaatatgccgagattttgctgtcctggaggaccacaccctggctcacagcctgcaggaa

SEQ ID NO: 494992 - DNA, 75 bp, Homo sapiens
gatgtcactcagttaactcccccatcccacgatttaaatagggcgcctgtgtctggcagagctggtgtgagacga

SEQ ID NO: 494993 - DNA, 82 bp, Homo sapiens
gaatcgtgatcttcacccaagggagagatgacactataatggctacaggtcttgatttcccagttaaagatgttcttcaccc

SEQ ID NO: 494994 - DNA, 100 bp, Homo sapiens
ggtcgggttcataagtgccatcccagcaaacattcggatttatgacaggaccgagtctcctgccattccgagcaggcctggtatgggtaatggtgtgaag

SEQ ID NO: 494995 - DNA, 75 bp, Homo sapiens
agacatcggcctctgcaggcttgccgaagaagggagacagaagcattaaaatgcgtggctcaggctagcaagaac

SEQ ID NO: 494996 - DNA, 75 bp, Homo sapiens
ggaggagggctgtccggggctttggtgatgtcttggcattgcccattttcaagcaggaagattccagccttccat

SEQ ID NO: 494997 - DNA, 101 bp, Homo sapiens
gtaaatacttggaagataacagcgacctcttttctgaacagggctatctgaagcagtgccggaagagaagggacatgttcagtgacgagcaactgaaggta

SEQ ID NO: 494998 - DNA, 75 bp, Homo sapiens
aacagttaatcctcaatttaagcctgatctaacccctagaaacaggccctggatccaatggaactgaagggtgaa

SEQ ID NO: 494999 - DNA, 73 bp, Homo sapiens
agcacgagcgaagtacagcttatggatggttactaaaagatgtaactgaactgcagatccttggtgaaatatc

SEQ ID NO: 495000 - DNA, 98 bp, Homo sapiens
agagctgtgggtctggttccaagacactgtcactgagctgttcggctcttgaatcccagcgatgaaaccaggaactcactttcccgggatgccgagtc

SEQ ID NO: 495001 - DNA, 100 bp, Homo sapiens
cttaagagaaggacggagccacatactgctgacggcccagaactggcagagagaaggcccagtgacctggggaagaacgcaggggacacgctgcctcagg

SEQ ID NO: 495002 - DNA, 50 bp, Homo sapiens
ctactgtaaataccattttagtaagctgaaggggtagaagagccatccaa

SEQ ID NO: 495003 - DNA, 74 bp, Homo sapiens
caggaccgcggggagctgaagctgctgcttttggaatatgcttttaaggctattaaccagggtggccttacatc

SEQ ID NO: 495004 - DNA, 100 bp, Homo sapiens
gccgctttgccattggctcccaggtgtctgagcacagcatcatcaaggacttcaccaagcagaggcagaggaggtggacacggtggacgtctccggcgtg

SEQ ID NO: 495005 - DNA, 100 bp, Homo sapiens
gctttgcagaagtattgctgagaactggaaaattggcagaggctaaaaataaaggagaagtatttccaacaactgaaggactcgggtcaagctggaaagc

SEQ ID NO: 495006 - DNA, 75 bp, Homo sapiens
tttacagaggaatagtctacaaaggaagacttgtaacctggagaagaggactcgggtcaagctggaaagcctgga

SEQ ID NO: 495007 - DNA, 74 bp, Homo sapiens
cagtttcctgcttactgcttcattatggattatacaggtgttggagcgggccggagagaagtagagtgggctgc

SEQ ID NO: 495008 - DNA, 88 bp, Homo sapiens
aaccatgctcaacttcggtgcctctctccagcagactgcgctgccgcagcgggaaccgcaagagcttggtggtaggaacgccctcccc

SEQ ID NO: 495009 - DNA, 83 bp, Homo sapiens
gctttccgggagactggagtcgaaggccgtgaggtatttttctaagatcttcttcagcagtatcgttctgctgtgtgcaaact

SEQ ID NO: 495010 - DNA, 80 bp, Homo sapiens
acgctggatttttttcgggtagtggaaaaccaggttgacatcatggacatatgtgagtccatcctggagaggaagcggca

SEQ ID NO: 495011 - DNA, 75 bp, Homo sapiens
gagacttctcggtgtgcaggaactgataatgctcggaatatttttcaatgtccattccgctgtgttgattgagga

SEQ ID NO: 495012 - DNA, 98 bp, Homo sapiens
ctggcatctgtaaggtgcggccgccgccgggccaggcagagaagagtgcattcactgtgcgaaaaacttccacttccacgactggaagtgtgtgccag

SEQ ID NO: 495013 - DNA, 83 bp, Homo sapiens
gctggatgaggccctcaagtacctgtcccggaaccacatgcacggtttggtgcacctcgatttggaggaagtagggcagggcc

SEQ ID NO: 495014 - DNA, 82 bp, Homo sapiens
cttcaaatctcttgacaaagatggcactggacaaatccaggtgaacatccaggagttgatattcactgatggactccaaaga

SEQ ID NO: 495015 - DNA, 100 bp, Homo sapiens
tgtctgagcaggtgcaggaggagctgctcagctcccaggtcacccaggaactgaggtgggatgcagatcttcgtgaagaccctgactggtaagaccatca

SEQ ID NO: 495016 - DNA, 115 bp, Homo sapiens
ttctggaagctctttgcggtggcgttggtgctgtttgcggatgctgatgcaggacttcactgaggatgtcaactgtgcttttgagttcctgctgaagctcacccccttgttggac

SEQ ID NO: 495017 - DNA, 100 bp, Homo sapiens
ccccccgtgtttgtgtctgtgtacttaaacagaagttggcttggtctggtcttctctcgtctgagccctgagtactacgacctggcaagagcccacctgc

SEQ ID NO: 495018 - DNA, 82 bp, Homo sapiens
gatatcgacgtcgtgatccagaagtccagagctgaggactgcctgtttgcagggtcaggataaacatgaagaatattttgct

SEQ ID NO: 495019 - DNA, 50 bp, Homo sapiens
gacaagaccaagtactaccttcaagagaccccgcagatgtgtcttcagag

SEQ ID NO: 495020 - DNA, 95 bp, Homo sapiens
caggaagactgaggaggaagggatggctgtggatctgctgtctgctcagaagctggataagaaatcatctccatccacaggaagcctagattctg

SEQ ID NO: 495021 - DNA, 83 bp, Homo sapiens
gtttaagaaagcaaagagcaggttcttcatcttcaaaaatgaacagtttgatgggcactctggttttttaaaaatgataaaag

SEQ ID NO: 495022 - DNA, 71 bp, Homo sapiens
tacctgccacccattgtgtcttctcaagaagttgaaaatgacccacatttcatcatttatctaccaaaaag

SEQ ID NO: 495023 - DNA, 100 bp, Homo sapiens
caccgccgcccccccagacaagatggacaccgcggaggaaggccgagacgcatccagagctttcgtgaccggggactgttctgaagcaggcctcgtggat

SEQ ID NO: 495024 - DNA, 74 bp, Homo sapiens
agctacagagaaatgctggtttggtgttgatgctatgaaactgggagtaaaggaaatgaagaaggcatacaagc

SEQ ID NO: 495025 - DNA, 83 bp, Homo sapiens
ggagatcccaggcggtgacagagtggagccatggctagagggctttgttcgcgggggtcacagctctcatggctgcagctagc

SEQ ID NO: 495026 - DNA, 87 bp, Homo sapiens
cagaaggctcagacatctgattgctgacctacaacagcagttctgtagagagtttaaatatgaaggaatggcaggacgggctaaggg

SEQ ID NO: 495027 - DNA, 90 bp, Homo sapiens
tcattgtgaataattctctctgaattctcgggtttctgttacggacgagtttatgctgccgacccctaccaccacgcacttgctccagcc

SEQ ID NO: 495028 - DNA, 50 bp, Homo sapiens
aaagtttcatctgtggatggagtattggaacaagatcactcaaggtgaag

SEQ ID NO: 495029 - DNA, 82 bp, Homo sapiens
tggagcctcagttggaagcagccgatccagcctgcggagcctgtggggcagagaaacagcacccaggactatcttccaaaga

SEQ ID NO: 495030 - DNA, 75 bp, Homo sapiens
gggcctgcaggtctctgtcgagcagcggacgccggtctctgttccgcaggatgggctctggtatcagttcctctt

SEQ ID NO: 495031 - DNA, 90 bp, Homo sapiens
ctggtgttgtcctatcgacccagctggatcgtgtaaccagtctatgggaagtgagatggagtctcattctgtcgctcaagctgaagggca

SEQ ID NO: 495032 - DNA, 50 bp, Homo sapiens
ctgaagagggaagacacgcggaaacagcaattctgtggtgttcttggtca

SEQ ID NO: 495033 - DNA, 83 bp, Homo sapiens
gccccaccgacacgaattggccttattaatgatatgagacgagttgtactgctgtcacaggaaatggacgctggattacaagc

SEQ ID NO: 495034 - DNA, 51 bp, Homo sapiens
gtccctctctccacggtaaggggccgactgcagcagtggcccagggcaaag

SEQ ID NO: 495035 - DNA, 100 bp, Homo sapiens
ggtccttccttccagcctgatgctaccaaaggtggaaagtcctgaagaaatccagtgggtgagtgctccagttgtaacatctaccactcaggaaaagccg

SEQ ID NO: 495036 - DNA, 80 bp, Homo sapiens
tcactgcccaaagcggaagactgattgaaaagaggtatggtctgaatatgcgttgcttggcagctcgggtcaactataag

SEQ ID NO: 495037 - DNA, 50 bp, Homo sapiens
ttagataacagccatcctattgaagaagtgacctcacaatgactcaagct

SEQ ID NO: 495038 - DNA, 82 bp, Homo sapiens
aagattctcatgcacagattgaaaccctctgagatatcaaccccctagagaccgtccaggctggacttgaactccttcctcg

SEQ ID NO: 495039 - DNA, 74 bp, Homo sapiens
cactgtgacatgtctgatcccttgctcccatccctgcagcatgaacaaggtgatggtgtttgtacatgctcgaa

SEQ ID NO: 495040 - DNA, 100 bp, Homo sapiens
tttggttcaaacaagatgataagttttttttgccgaaggcttgtctcaactttgaatttttcagaaactgtgtactgttcagagtgtcaactgcagagac

SEQ ID NO: 495041 - DNA, 48 bp, Homo sapiens
acacctcagctttggattcatgcagaccacagtccatgccatcactgc

SEQ ID NO: 495042 - DNA, 74 bp, Homo sapiens
gcatgatccgccacgggaaggagctgggcggcgagtccaactttggaatcagagatcattgatttcttcctggg

SEQ ID NO: 495043 - DNA, 100 bp, Homo sapiens
cagaaaccccgttgacaaggcactgctttttcatgacgtcagcagataagcagagagccctagaagaaaccaaagcctacaccacccaatccttagcaag

SEQ ID NO: 495044 - DNA, 100 bp, Homo sapiens
ggggacggctgcgcgggacggctctgtaggaaggaacttggttccccctccctcagcttccgccccaaaaggttcaaaccttgtactactcagctgatca

SEQ ID NO: 495045 - DNA, 102 bp, Homo sapiens
gccatgaataacctgggcatggttcccgtagggttgcctggacagcagctcgtgtctgctcctctggtgcaagtgtggtagctattgacaacaaaatcgagc

SEQ ID NO: 495046 - DNA, 100 bp, Homo sapiens
ctccctagaccagcccgaccacggagactctgactttggcctgcagtgctcagcccgccctgcttcagaggatgattccgaagaagacggagaccataac

SEQ ID NO: 495047 - DNA, 100 bp, Homo sapiens
attggagaaacatgcagattatatcgcatcctatggctcaaagaaagatgattatcatataggttgctgtagatgaatgttcttagctgtcatgtttaaa

SEQ ID NO: 495048 - DNA, 101 bp, Homo sapiens
ctcaacttcacgctggcgcgagccccgtcctccttcgccgccgcgcacaaccgcacgtgcaggtgatctgcaactctttcaccatctgtaatgcggagatg

SEQ ID NO: 495049 - DNA, 75 bp, Homo sapiens
gaagtctacgttcattcagggcctgctgtggaagaccagccccaaagcctcaaggaataggttctcctagtgtct

SEQ ID NO: 495050 - DNA, 85 bp, Homo sapiens
ccgcggatctcaccgccgctcagggtggctttctagaagatgaccatagaggaccttccagattttccattagaaggaaatcctt

SEQ ID NO: 495051 - DNA, 75 bp, Homo sapiens
acgaggcgattgcgggggcctgggctagatgatcacggaagccttggcccaaggtgggatgcacataagagcccg

SEQ ID NO: 495052 - DNA, 112 bp, Homo sapiens
atcttgggagtgatttgcgccatcatcctcatcatcatcatagtttctcccactactaagggcagcaaatctccagcgaaggtgagtgatgggggcagcagcagtacagact

SEQ ID NO: 495053 - DNA, 95 bp, Homo sapiens
gaaaaacttttgagagcagttgctgatggagatctagaaatgggtaggagtcaatgaagacatcttagtcttaacaagttacagataatctctga

SEQ ID NO: 495054 - DNA, 73 bp, Homo sapiens
gatcatttcttgcagctctaaaaaccatggctcgggttgggggccgtcccgctcctaaggcaggaagatggtg

SEQ ID NO: 495055 - DNA, 50 bp, Homo sapiens
cgcaaagcttgcgaggtggcgttagaatgttgtaccatctttgggtaggc

SEQ ID NO: 495056 - DNA, 90 bp, Homo sapiens
gccttcaaaagcagtgcaactggctcagtattcacagggaaagctgtgaggggacaggccttcagtatttggcatcacctttacatggag

SEQ ID NO: 495057 - DNA, 102 bp, Homo sapiens
cggtctgggcttctctgaggcggcgagagatggtcaggtctggagctcgaccgggccagggctcagctggcaaagtaactacagactatggagaaactgaaa

SEQ ID NO: 495058 - DNA, 50 bp, Homo sapiens
tgaagactgtgtaaataatatcaggagatttcctctggaagacatcccgc

SEQ ID NO: 495059 - DNA, 90 bp, Homo sapiens
ttttcatggattctaatggaatcaggcagttttgtgtccatgtgaacaactcaaagaatggccgagtggattctgaggaccggaggagcc

SEQ ID NO: 495060 - DNA, 75 bp, Homo sapiens
gtggataattttgtggccttagctacaggagaggaatatgaaaacgggggccactgccttggctcaacagccctg

SEQ ID NO: 495061 - DNA, 98 bp, Homo sapiens
ggaggtctcctacctattaaaaggaccatacgagtcctagatgtcaataaccagtccttcagagaacaagaggctcatgcacaattagttcgagaagt

SEQ ID NO: 495062 - DNA, 100 bp, Homo sapiens
gcagatggctgcagcagctgccagacctattaatgccagcatgaaaccagcaacttgtagagacagtttcatgtggaggaaatcttttgatgaatattgg

SEQ ID NO: 495063 - DNA, 100 bp, Homo sapiens
cccacgtgtccaagcattgtctgggatagccttgtattggaaaacctggcccattctgtaaataaaggctccactaggcacagttggtggatctgaaatc

SEQ ID NO: 495064 - DNA, 82 bp, Homo sapiens
ccctgctggaccagctcatgggcacggctcgggacggaatgtctgcagaggttcgctgacagcctacaggaggtggtgaact

SEQ ID NO: 495065 - DNA, 83 bp, Homo sapiens
gaaaaggagaacatcgtatgagacagagatttgggattagaatctaccttaatatcgtcaaaacctcagtctcattcactgag

SEQ ID NO: 495066 - DNA, 100 bp, Homo sapiens
gcggcgactacgacggcgttgatatcggtggtaacgacggcctcagcaggcggggaagatgaaaggtccacctggaaggccgctgtggtggaaggatgtt

SEQ ID NO: 495067 - DNA, 75 bp, Homo sapiens
ttcaggatttacacagacgtggggcgatgcttgtgaccctgcagctcctcaaaaacacttcagttatggaagatc

SEQ ID NO: 495068 - DNA, 75 bp, Homo sapiens
aggacgaggggctccgggtcttccagagcgtgaagatcaagatcgggactggtgattgcagctggaagtgcccat

SEQ ID NO: 495069 - DNA, 82 bp, Homo sapiens
tctcgctcggctgcgggaaatcgggctgaagcgactgagtccgcgatggaggtgagaatgagatggtgatcatgagacctgg

SEQ ID NO: 495070 - DNA, 82 bp, Homo sapiens
ctcggctgcgctcgctcgggtggcgacttcctccccgcgccccctccccctcgccatgaagtgagtgtgtccgcttgaaacc

SEQ ID NO: 495071 - DNA, 99 bp, Homo sapiens
tgctttgaatcagcagatcctgaaagccgtgcggatgaggaccggagcggaaaaccttctgaaatgccggtggccgtgggtccctacggacagtcccag

SEQ ID NO: 495072 - DNA, 100 bp, Homo sapiens
aaaagtccactgcacatgacagctgtccatggaaggttcacacggtcacagaccctcattcagaatggttgaaaggattgttgacaaaaggaaaaataaa

SEQ ID NO: 495073 - DNA, 90 bp, Homo sapiens
ggggccgccaggtcattggccccttccggaggttcacctgcatcatcggccccaacggctctgaaagctctgggtgtgcggcagtaccat

SEQ ID NO: 495074 - DNA, 51 bp, Homo sapiens
tacaccgtggtgacattgtatcattggtggaatcggatctcttcctgctcg

SEQ ID NO: 495075 - DNA, 76 bp, Homo sapiens
gaagagggaagacacgcggaaacagataatgatgaacctctcctgagtggatctggtgatgtatccaaagaatgtg

SEQ ID NO: 495076 - DNA, 90 bp, Homo sapiens
cgatcgaagagtccccccaagtctcctgaagaggaaggagcggtgtcctcttaagaaaatgactcagaaccgtgctgcatactatcctcc

SEQ ID NO: 495077 - DNA, 100 bp, Homo sapiens
tttccgttcatttacaagttattttctcttcttctgaaaaagagatcttgaattaccgaattgatgggatatgagccagaagaacttttaggccgctcaa

SEQ ID NO: 495078 - DNA, 75 bp, Homo sapiens
ccgcgcggcgccgggcgctgactgagatgtgaatcccgatggagcggcccgaggaaggcaagcagtcgccgccgc

SEQ ID NO: 495079 - DNA, 74 bp, Homo sapiens
tagtgaagttgggaaatactacagtaatctgtggagttaaagcagacatggtctgctatacagctcagactctc

SEQ ID NO: 495080 - DNA, 50 bp, Homo sapiens
cttggattcagacgccgattcgcccaggcatcaacttctaactcatctcg

SEQ ID NO: 495081 - DNA, 58 bp, Homo sapiens
tcaagcgcaagcacaccctaccgaattacaagatcagttttcatatgagtccaacaag

SEQ ID NO: 495082 - DNA, 99 bp, Homo sapiens
gttggctgtgacatctattccatctgtgagtgactctttgacatggagagaatttcactatattcagcaagatgatgaagtgacgactgttcaggttaa

SEQ ID NO: 495083 - DNA, 100 bp, Homo sapiens
agcctccagactactagtacgaggacgtagaatgatatggaacctagcaaagctgttccactgaatgcatctaagcaagatggacctatgccaaaaccac

SEQ ID NO: 495084 - DNA, 75 bp, Homo sapiens
gctgcatgttcaagaagtggccggagagttctgcatgttgattcgtgtgatgaatgcagactctgctaccatttt

SEQ ID NO: 495085 - DNA, 88 bp, Homo sapiens
gtgctttagtttcgtgggaggcctggcatccccgagagggaggggaaaggtccacatcttgatacagaaaccccgacagagcaatctc

SEQ ID NO: 495086 - DNA, 94 bp, Homo sapiens
tcgacttcggttcgggtgcgctgctcaaggacacggtctacaccgacttcgacgatgtgaagttcatttccaatccgccctccatggtggcagc

SEQ ID NO: 495087 - DNA, 100 bp, Homo sapiens
gcaacttgtctgctttcgtcaagctggcaatgcaagagttactagattatattttaattcacaaggcaacaagctgggaacttctccacttcatctagca

SEQ ID NO: 495088 - DNA, 74 bp, Homo sapiens
tggacaaggagaccaaagagaacaacctctctgaagaaggcacagatagatcattatctaggacttgcaaataa

SEQ ID NO: 495089 - DNA, 106 bp, Homo sapiens
taggaatcatggcggctgcgctgttcgtgctgctgggattcgcgctgctgggcacccacggagcctccggggctgatgccatggacaatattaccaggcagaacca

SEQ ID NO: 495090 - DNA, 43 bp, Homo sapiens
agcgcggcggggagcgacgagtcaaaatgcagatcttcgtgaa

SEQ ID NO: 495091 - DNA, 100 bp, Homo sapiens
agaggagatgctttccttaacaaaaataggagtgtggccatctggggccgtgtggtatttgccactcaggagacatgtccctatgacatagcagtggtga

SEQ ID NO: 495092 - DNA, 83 bp, Homo sapiens
aaggggttgtcaccggcttccgcatccaagatgaagagatgtacagttacccagcacgtgtacctcctcctcctcctattgct

SEQ ID NO: 495093 - DNA, 75 bp, Homo sapiens
ctgcacttcttttttgagaaaggaaggaatatatcctgactgattatggaacagattaaaagggccaataaactg

SEQ ID NO: 495094 - DNA, 90 bp, Homo sapiens
gagggagacaaagcagcgcccgtctgcttcgggcctctggaatttagcgctcgcccagctagccgcagatttgggaatggatgatgaagg

SEQ ID NO: 495095 - DNA, 74 bp, Homo sapiens
gagaaaccgcagcactacacgaatactcccccagttgcaagaggcgcaggaccgtggaagacttcaacaaattc

SEQ ID NO: 495096 - DNA, 98 bp, Homo sapiens
cttagcgcactggaggagcggcgggcttcagacaggtgacttaagagattaaaattaatttggttgctgttggttctgaacaaataatgagttctttt

SEQ ID NO: 495097 - DNA, 74 bp, Homo sapiens
tgtaaaaagaactcttaacggccgatgcagctcttccaaagctaaggaaacccagcgtttgctggcagaaccag

SEQ ID NO: 495098 - DNA, 85 bp, Homo sapiens
tcagccatctacaagcgagttctaaaattgcagcaagttatgcagatgagccttcccagcgtccccgtcttcctagaggtttctg

SEQ ID NO: 495099 - DNA, 74 bp, Homo sapiens
ggctgaacaggaggagcggcagggcatgaaggtccaggcgctggccagtgaaagctggtggaatgcgaattgtg

SEQ ID NO: 495100 - DNA, 143 bp, Homo sapiens
cctgttccaccttcagagcgtcacggcgtacgccctcatggggaaaatctccccggtgactttcaggtctcctctgagcctccggcctccataagacccaaaacagatgacacctcttcccagtcccccgcgccttccgaaaa

SEQ ID NO: 495101 - DNA, 75 bp, Homo sapiens
cagcttccgccaggcggtgatgaagaatccccccgaaaggaccccccagttgtaggacagtcccatctggacagc

SEQ ID NO: 495102 - DNA, 110 bp, Homo sapiens
aagggaaagagccctggaagattttgagggatgagacaagaggaccttgcccagctggagctccgttactctcatggggactttgagaatggtatctgggtgttatggat

SEQ ID NO: 495103 - DNA, 100 bp, Homo sapiens
tgatgaagttgtgaatgatgcagatatcattctggtggagttttatgccccatggctagcgttcttgcggtgggagttccccaacttcaacagccgaagc

SEQ ID NO: 495104 - DNA, 50 bp, Homo sapiens
gaagcctgcctacagttttcacaaatctatattgatcagttgaagctcat

SEQ ID NO: 495105 - DNA, 75 bp, Homo sapiens
tcagagacagcgagtacgagactgcagaaaccaccctgtccaggctatgggcatcaagacagcattgccggcggc

SEQ ID NO: 495106 - DNA, 80 bp, Homo sapiens
aacccgcgcttctggccgcgggaaggagaggctctgtgatcctctaccttatgatataatagtcgatccaatgtgtggaa

SEQ ID NO: 495107 - DNA, 82 bp, Homo sapiens
ccgaaccccgcgcccgcaggacgccccagccagccatgaagatggacctacagctaaaaaattaaagactgagcaaggggga

SEQ ID NO: 495108 - DNA, 73 bp, Homo sapiens
agcaaccctgtaaaaccagccttagactatttttcaaacaatgtcatctgggtgattctcagtgtggaggtgg

SEQ ID NO: 495109 - DNA, 100 bp, Homo sapiens
tcgaaaggagcaagagcaagatcaccgtgacatccgaggtgcctttctccaaaagatgcagccgctctctgctccctgccccaatgaacatctgcactag

SEQ ID NO: 495110 - DNA, 92 bp, Homo sapiens
tgctgttttctgccggctgtaaagtcatcacctcctgggatcagatgtgcattgagacaatgcagatcttcgtgaagactctgactggtaag

SEQ ID NO: 495111 - DNA, 75 bp, Homo sapiens
gcatgatcggcatgtccaccaaggcaggtgtcgtgaaaactacccctaaaagccaaaatgggaaaggaaaagact

SEQ ID NO: 495112 - DNA, 73 bp, Homo sapiens
gggactgcacgtagcccggcgctcggcatggctctcctggtgctcggtcaaaatgcagatcttcgtgaaaacc

SEQ ID NO: 495113 - DNA, 100 bp, Homo sapiens
gcgcctctctgatcttcctgcatggctcagctttttggagaccacggcatatttcttcatgaaaccaaaacttggagagaaggaggtgtccccaaatgct

SEQ ID NO: 495114 - DNA, 75 bp, Homo sapiens
cagctctgtaaaagccccgcctctgccttcggatagtttcaccagtgatcattaaagaatgggcagcttacaaag

SEQ ID NO: 495115 - DNA, 83 bp, Homo sapiens
gagggaagacgccctggtgctcaccaagcaagctgctgatgcaaggaatcccctgggctcccgtccactccactgctgaccag

SEQ ID NO: 495116 - DNA, 119 bp, Homo sapiens
tccggcgctgctggagttcctggtgtgcccgctctccaagaagccgctcagggaagaaacccttttttcttggagccagcaataattatcacaattactgatgggagcaagttgactac

SEQ ID NO: 495117 - DNA, 103 bp, Homo sapiens
tatctgtcttcggtggactccttcggcagtccacccaccgccgccgcctcccagccgtgttgccgcccgctgtgctatgagcagtcagagcgccgtctccaca

SEQ ID NO: 495118 - DNA, 74 bp, Homo sapiens
ccgtgcagatcatcaagctgctgctcgtcttctatgtcaagaaggaccctgatgctcccataagacagaaaatg

SEQ ID NO: 495119 - DNA, 90 bp, Homo sapiens
tctcagtggtcctacctggggatattatcaaatctactactgttcatggcagggcaagttaaagtcttcagagccctgtatacgtttgaa

SEQ ID NO: 495120 - DNA, 96 bp, Homo sapiens
acggcctccagcttcaccacccgcacggcgcagtgccggaacactgtggcggccatcgaggaggcctgatcacttgaacggacatatcaagcaggt

SEQ ID NO: 495121 - DNA, 83 bp, Homo sapiens
caggactctttctgttcaggccagaccctctgggagcttctcagccattttccacagatcagctggaaaacctcatgctggac

SEQ ID NO: 495122 - DNA, 100 bp, Homo sapiens
tataatgcctcattcagaacttcattggcagaagttgactgagatcagaggccctgtgatgatcgtgtcagagccggtgccatctgtgggggctttgggc

SEQ ID NO: 495123 - DNA, 90 bp, Homo sapiens
agatccagaaactggaggagtcccgctcgaagctagataatccaggcacatggcggcactgttgaccccaccttcacgagtcgatgcacg

SEQ ID NO: 495124 - DNA, 76 bp, Homo sapiens
gggacagtgtctttccacctttggatccgcagaaatcgagtgttctaatcttaggcgcttcaggcggagttggtac

SEQ ID NO: 495125 - DNA, 50 bp, Homo sapiens
aactcgggcgccgacgagatcgggtggccatggtggaggtgcagctggag

SEQ ID NO: 495126 - DNA, 75 bp, Homo sapiens
ctcaacaaacaccagcgctttggcaactagaagccatttgtgtcaaggtaacgtctggagaaacaaaaggtcagg

SEQ ID NO: 495127 - DNA, 100 bp, Homo sapiens
ccgccaggaaggccaaggtgctgctggtggtcgacgagccgcacgccgactgctactctgacctacgacactctccggtttgctgagtttgaagattttc

SEQ ID NO: 495128 - DNA, 100 bp, Homo sapiens
tgcaccgctttagagcttccaggaggccaagcattatggcaggtgcacattcaggttcccgagcacaaacatcaagataacgttcactgccctgtccagc

SEQ ID NO: 495129 - DNA, 101 bp, Homo sapiens
ccaggttcaagcaattcttatgcctcagcctccagagtagctaggattacagttcccagaggtccacttgggccagtggtactttatcgcaggggcagctc

SEQ ID NO: 495130 - DNA, 75 bp, Homo sapiens
ctggggcgactgtgtctggctgccttatctttacacgctgcaggactgcctccgggcctgccaggagcagatcga

SEQ ID NO: 495131 - DNA, 100 bp, Homo sapiens
cacgcagtgacgagcggccgaagcagctttgcgagagaagaagaaggaggttcctgctgtgccagaaacccttaagaaaaagcgaaggaatttcgcagag

SEQ ID NO: 495132 - DNA, 89 bp, Homo sapiens
cgcctctgcggcagctggtggcgcaggtggcttgcgtggacgcgggtagaggcggagggccgctgacgtggaaccatcattacccgaac

SEQ ID NO: 495133 - DNA, 90 bp, Homo sapiens
cgctcccctgtgaggctgcggaccgggagcagcggccgcaggaatctaagtcctttgctgtgggaatgttcaaaggccagctcaccacag

SEQ ID NO: 495134 - DNA, 97 bp, Homo sapiens
ggcagccgcacaccatcctgcgcgtcgtgtcttgggaaacatctttacacagcagccaagttactacagtgacctggatgaaaccctgcctaccatc

SEQ ID NO: 495135 - DNA, 110 bp, Homo sapiens
catccgcacccacacgggcgagaagccctacgagtgcaacatctgcaaggtccgcttcaccagtaacaacctgcagtgtttcactgtgcggtgcagtgcggcggcagctc

SEQ ID NO: 495136 - DNA, 99 bp, Homo sapiens
agaacagttggccaatactggtgcccaagcctggattaaaaagtgcttatcagattgttgtggaagaactgcacccacaccgaaccaagagagaagccg

SEQ ID NO: 495137 - DNA, 82 bp, Homo sapiens
ggggggcctggccgcgcagccgaaaacctcggatcaattctcagctggtggcacaacaagtggcacaacagtatgccacccc

SEQ ID NO: 495138 - DNA, 75 bp, Homo sapiens
tacaactacaaccagctggaaggcagattcaagcagctgcaaggtgatgccatgctgctatgaatgggcagaaaa

SEQ ID NO: 495139 - DNA, 75 bp, Homo sapiens
tcaaggagatttaacaatttgtttggtaaaacagagacattacaaagtgcacttgaggctgcccccaacctctga

SEQ ID NO: 495140 - DNA, 88 bp, Homo sapiens
aaaattggatgtgaaaatgaagccagaccgagccgttatggaacacctgaagagctacaagaactggtagacacagctcattccatgg

SEQ ID NO: 495141 - DNA, 75 bp, Homo sapiens
tcgagtgaccgagaccgcggccgggaccgaggcagcgtccgtctccaagagagtatgaagagagtgcgtctgtag

SEQ ID NO: 495142 - DNA, 82 bp, Homo sapiens
aatggctccgagcagggaccgcctgctgcactttgggttcaaggcgacaagagcgcctgctcgctgtgcccccgggttatga

SEQ ID NO: 495143 - DNA, 101 bp, Homo sapiens
ctttgatccagaacttgcagcaacaatagcagtcctgcgttaactgcggccgggaggctatgagcgagtgcaccggctgccacaaggtcaactactgctcc

SEQ ID NO: 495144 - DNA, 82 bp, Homo sapiens
ggggacctgccggcacgcgactccccccgggcccaaagccgccatggcatcagatgaaggcaaactttttgttggagggctg

SEQ ID NO: 495145 - DNA, 100 bp, Homo sapiens
cagatgaagcggtgaaaaaagattcagagttggataagcacttggaatcacgggttgaagatgatgatgtgcctgcagatatggttgcagaagaatcagg

SEQ ID NO: 495146 - DNA, 74 bp, Homo sapiens
gaggaagaagccattagatggtggagaaaggcgaggattaaatccaccacacagggtgaaatctatctccatga

SEQ ID NO: 495147 - DNA, 100 bp, Homo sapiens
ctttgttttagtagacaccctactgggaatagcattacaaagagtccacctctcatggctaagagaactaaacagccttctccacagcccagccacagtg

SEQ ID NO: 495148 - DNA, 100 bp, Homo sapiens
gaacaagaattacatgatgtatcagaaaaactctctcagcggctttctgaactagattgggccattttaaatggaatagacagcataaacaaagtgctag

SEQ ID NO: 495149 - DNA, 50 bp, Homo sapiens
gctctcgtctggggcaactcagaagaacatcaactcacaatgaaatggag

SEQ ID NO: 495150 - DNA, 124 bp, Homo sapiens
cacacagccgcgcagctgggcgagaagctgctccggcctagcctggcggagctccacgacgagctggaaaagtgtatgtggtagaagaccaaagaagagatgagctaggaccatccacctgcct

SEQ ID NO: 495151 - DNA, 100 bp, Homo sapiens
tcgtgaaggagtatgctgcgtttgtgctgggcgctgccttttccaggctggacgtaaagaaagaagtgatgcactcaattctgcaatagataaaatgacc

SEQ ID NO: 495152 - DNA, 100 bp, Homo sapiens
gtttgaacggaatgctggagtcagtggaagacggagctggtcggcccgaaggtgtgagatgcacaatgcgaaacctaggccccagcttttacaccatgat

SEQ ID NO: 495153 - DNA, 127 bp, Homo sapiens
ccgggctcacgtgatggcctcccaccattccaagcggagaggccgggcgtcttctgagagtcaggaattaagtagactggctggacagattcgaaggttgtatggttcaaacaaaaaagctgacagg

SEQ ID NO: 495154 - DNA, 100 bp, Homo sapiens
aatgggtgatagaaagagacagcctgctggatactcatccagctctggttgaagaagtgtattttgcgcagaaggaacgtgatgaagctgttatgtctag

SEQ ID NO: 495155 - DNA, 74 bp, Homo sapiens
acaatttaccaattcctgtggtgacgtcagaccaaatggcttcctttgggtggaagaggaaaattggtgagaag

SEQ ID NO: 495156 - DNA, 88 bp, Homo sapiens
agcagccaggagtcatgagcgacagcggcgagcagaactacggcgagcggccatgaagatggacctacagctaaaaaattaaagactg

SEQ ID NO: 495157 - DNA, 75 bp, Homo sapiens
atgacggttataagaccatttatttctttggagacaaaactatgccagtgaatgaaaactttgccattgatttga

SEQ ID NO: 495158 - DNA, 75 bp, Homo sapiens
cgaataccaagctcggatccctgaatttgatccagttcatctccgcaatacctacccgatccctgaagttcctga

SEQ ID NO: 495159 - DNA, 98 bp, Homo sapiens
cgttgcctgctcccggagggagacgcgctgccgaggagaacccagcggatacctttgtctggatatggaggaacaagcaatcttattttggaaggcgt

SEQ ID NO: 495160 - DNA, 98 bp, Homo sapiens
aaagctgctacttatggaagatacaaagggtggtatggtcaggaaaaagactacaatgtactagtcatggatcttctgggacctagcctcgaagacct

SEQ ID NO: 495161 - DNA, 100 bp, Homo sapiens
gtagagaggaagagagaagacttggcgatagttccctttctagaaagggaagtgttcgccagttactacatgaaaagataagagatgcttatactcaccc

SEQ ID NO: 495162 - DNA, 100 bp, Homo sapiens
cacggctggatctacctggcacgcagacaatgaaaagcgaaccccattgcacgccgcagcttaccttggagatgcagaaatcattgaacttcttatttta

SEQ ID NO: 495163 - DNA, 137 bp, Homo sapiens
tgaagaccccgaaggaaaaggaggaattcgccgtgcccgagaatagctccgtccagcagcttcttccagaccagctggtcttgcttctggagcatctcttggagcagaagactctgagcccccgaactctgcaaagc

SEQ ID NO: 495164 - DNA, 90 bp, Homo sapiens
tctgcttttgcaggtcaagtctcttaaggaagatttacagaagggtcatcaacattccataattttgtcaaaatagcactaaccaaaaac

SEQ ID NO: 495165 - DNA, 99 bp, Homo sapiens
attcccatggaagcgccgcgatgttcgccccccggctgctggatttccagaagacgaaatacgcgagggttttggccaaattgggcgagggcacaaaat

SEQ ID NO: 495166 - DNA, 100 bp, Homo sapiens
gatgatgatatcattatgctgacctctgacgagctgcaatttggttatgaggcacttaagtattcatcgaagagtcaccccagtagcggtgatcacagac

SEQ ID NO: 495167 - DNA, 100 bp, Homo sapiens
gtgctgcagctccaggactgcagcatcttcatcaagatcattgacagaatttgaaatggatgcagtcagaactgaatgttgaagaagtggtaaatgacag

SEQ ID NO: 495168 - DNA, 75 bp, Homo sapiens
ctacttattcatcagtttgttgtgcttgtcaagatcaggaagatgagaagtttttgtctgaagtttttgcacaat

SEQ ID NO: 495169 - DNA, 96 bp, Homo sapiens
aacatgtcccaacattacatcccacaatttcatcacgaaaacctggtcaatctgattgaagtttttagacagaaaaagaaaattcatttggtattt

SEQ ID NO: 495170 - DNA, 100 bp, Homo sapiens
tgcggcgcggcggccgtccggctcatcacctcctcactcgcctccgcgcagagaggtgcatgtgagggaaccctggcttgttcaacctgtcacctcatct

SEQ ID NO: 495171 - DNA, 75 bp, Homo sapiens
atcctcctggccaccgactcctacaagatcaacctctccacttctcctacacctgcacagttaataagccgttcc

SEQ ID NO: 495172 - DNA, 90 bp, Homo sapiens
agcgggtggaggtggtgtccccactgagctcttggaagagagcaaggagcaaggaccaaccccagtggagaaaaagaagaaaggaaaaag

SEQ ID NO: 495173 - DNA, 100 bp, Homo sapiens
gggaccgggccggcgccatggaccgaggccaggatggaatctcgctatgtcaccaggctggagtgcagtggcgcaacctcggctcagcgcaacatccgcc

SEQ ID NO: 495174 - DNA, 100 bp, Homo sapiens
gtagcgctgctgcggaggttcaaagtgtccgacgaggccttcctggatgctctgcagaaccaggctgaggccagcagcaagatcatcggccagtttggag

SEQ ID NO: 495175 - DNA, 100 bp, Homo sapiens
ggaaagagaagactgatagagacttcgttaaggtatcattgcccagtgcctaagatcttttatgttcagctcactgtaggaaataatgaattttttgggg

SEQ ID NO: 495176 - DNA, 83 bp, Homo sapiens
ctggcctccatcttcggcaccgagaaagacaagtcaaaatgcagatcttcgtgaaaacccttaccggcaagaccatcaccctt

SEQ ID NO: 495177 - DNA, 100 bp, Homo sapiens
gcataagatggaagaacttaaagaaggcctgcggcaaagagatgagcttattgagattgggtggatcacaagaactaatctttcatgatttggaaaccgg

SEQ ID NO: 495178 - DNA, 51 bp, Homo sapiens
ggatggatgtgatgcctgctagccaaaaggtgaagctgtggtctaccaatc

SEQ ID NO: 495179 - DNA, 100 bp, Homo sapiens
tactggcccctgatccggttcttggtgcccctgggcatcaccaacatagccatcgacttcggggagcaggtgctagactggatcgagaaccacggagaag

SEQ ID NO: 495180 - DNA, 75 bp, Homo sapiens
ggcagcactactcagacatcttcaccaccacagagcccatcaagcccgagcagatgccttcaattaagttgcaga

SEQ ID NO: 495181 - DNA, 97 bp, Homo sapiens
ctgcggacgctcggtcccgcgctgcgcatccccgcggacgccacagcgctgtcgccactgggacactgtgaaccaggagtgagtcggagctgccgcg

SEQ ID NO: 495182 - DNA, 100 bp, Homo sapiens
ttgtttaccttggaagaactccgtgcccagatgctcataaggattgtcctctttctacaaaagcaatcagaaacggagactgttcatctgtttatcccag

SEQ ID NO: 495183 - DNA, 50 bp, Homo sapiens
tagcctgtataccagcacggccaggcaagaattgtcagacagtattggct

SEQ ID NO: 495184 - DNA, 83 bp, Homo sapiens
ccaacagccaccaccaccaccagatggctactgcagcactggggtgtcagttgttggtccgacccagaacgcttcagttctgc

SEQ ID NO: 495185 - DNA, 74 bp, Homo sapiens
aagaagtccgagacacgcggtgaggcggcgacgggctccgggaaacctcgacctgtctcccagttggttgcaca

SEQ ID NO: 495186 - DNA, 74 bp, Homo sapiens
tgatgattcacgggatcacttttgtgaacttgatgatgtggaagatgtgaaatttgtcatcaattatgactacc

SEQ ID NO: 495187 - DNA, 135 bp, Homo sapiens
cagcaacttgtgattggcggtgaccggatattcagttgcacatccccacatcaatgcactgccaatgacagagtctagctctttcacccaggctggagtgaagtggtgcaatctcagctcagtgcaacctccgcc

SEQ ID NO: 495188 - DNA, 75 bp, Homo sapiens
ccacaaagaagaaaacatttcttttaatttttaaacttggtttgaaagatgacggtcgaaccaaacccattccaa

SEQ ID NO: 495189 - DNA, 98 bp, Homo sapiens
taccagcaactggtctattatatcatttaaaccacatggctatctaaagagttgactagataacgaaggacaatgcatatatacaaaattgctgtatt

SEQ ID NO: 495190 - DNA, 74 bp, Homo sapiens
aatacagtatttggagcagagaggaaaaaacggctatctataatagaactgctggaactgtggccgcaaagcca

SEQ ID NO: 495191 - DNA, 87 bp, Homo sapiens
cccaagcaattggatttctgctcggattcatgtctatacccatgactgttggcccacccattgcagagatggggtctcactatgttg

SEQ ID NO: 495192 - DNA, 96 bp, Homo sapiens
tggacgccgccgaagaagcatcgttaaagtctctcttcaccctgccgtcatgtctaagtcagagtttggtgccctggttgtcagatgttggaaagc

SEQ ID NO: 495193 - DNA, 50 bp, Homo sapiens
tcagtgcctgttacttgggcaccccgaggaacagcgccttttgatagtcc

SEQ ID NO: 495194 - DNA, 98 bp, Homo sapiens
gatccctcaagactggtccacggagtgtatgaccacaaacagccatcaaggtgtgatgttagctgttgatgctgtaattgctgaacttaaaaagcagt

SEQ ID NO: 495195 - DNA, 100 bp, Homo sapiens
ctcttctccaagtgaagacaactggttgaaggggaccaggaggttggacacagaccattgcaatggaaatggtgatgtgctctatgaactccttcagcat

SEQ ID NO: 495196 - DNA, 100 bp, Homo sapiens
gacacacaggagttcaacctcagcgcttactttgaaagggctgccgacttcattgaccaggctttggctcaaaagaatgcaaaagatacagatattgtgg

SEQ ID NO: 495197 - DNA, 100 bp, Homo sapiens
aagaagctactggacctcgttcagcagtcatgtaactataagcagcttcggaaaggagccaatgaggaaactatcagtgtggaccagactgtgactcaag

SEQ ID NO: 495198 - DNA, 75 bp, Homo sapiens
tcttcctcaataccagcgtaagggctatggcaggtttctcatcgatttcagaacgtcaaggtcgtgggaaataaa

SEQ ID NO: 495199 - DNA, 100 bp, Homo sapiens
ttttatattcccaaaatacaggatctgcctccagatgatccagtattcctggaagaagcagggaaagcagaaaaaattgtgatttccagatccacaagcc

SEQ ID NO: 495200 - DNA, 89 bp, Homo sapiens
cagagggaggcccacttcctgctggaagcactcaggaagacccaaggtgctgcggatcggcctgctgggctgcaatgccacccgcgaga

SEQ ID NO: 495201 - DNA, 85 bp, Homo sapiens
tttcccatcaggtttcctgatgtgagcagggatgttctgttcttgaaggactgtgtaggcccagaagtggagaaagcctgtgcca

SEQ ID NO: 495202 - DNA, 75 bp, Homo sapiens
aaatcatgtgatgacgaagatgattacagtttaaggaaaatttctaccttgaaccgtatctgaaagaggttattc

SEQ ID NO: 495203 - DNA, 95 bp, Homo sapiens
gattccaagtaactcttatttgctatgctaagaaggaatctgatcttaatggcgcccagatcaagcttcgagaatatgaagcagcactgaattcg

SEQ ID NO: 495204 - DNA, 98 bp, Homo sapiens
gcttggttaaaacctgacacttttaacaggggttgccctgctgtcagacgtctatcctgagaaaatcttgccggacttgttggctcaatatgacagca

SEQ ID NO: 495205 - DNA, 100 bp, Homo sapiens
cgtgcgggaagtcgacaggccgggatccaccgccttgctccgaaccttcagctttttgggctttgagattgtgagaccggggcatccccttgtccccaag

SEQ ID NO: 495206 - DNA, 74 bp, Homo sapiens
tcccctaggagtgctgagcccgcggaaccgcagccatgtgtaaagtcctgttttcatattatggatatttgtaa

SEQ ID NO: 495207 - DNA, 99 bp, Homo sapiens
attgacgccatgtcgggttattcgagtgaccgagaccgcggccgggaccgaggagtccggcagcgtcttctcttgagggagcaatttggagaagagctg

SEQ ID NO: 495208 - DNA, 98 bp, Homo sapiens
cctcggccttccgacgtgggcggtgggccccagccccacagaccagcccagcattcagcgtcacactgctcagctccgcgaagagttgctgaaacttc

SEQ ID NO: 495209 - DNA, 96 bp, Homo sapiens
ggaacccgaagaagaaaggattcgttacagccagagattgggccgccttcaacaacaacgtgagcgtggcctacgagtgcctgagcgccggcgggc

SEQ ID NO: 495210 - DNA, 98 bp, Homo sapiens
ggcggccctgggacccgcggaagccggcatgctggagaagctggagttcgaggacgaagcttggatttacactgggcaacgtggttggaatgtatctg

SEQ ID NO: 495211 - DNA, 100 bp, Homo sapiens
cccgtttgggttctccacgcattctagactcccgaagagtggaatgagaccgtggagctttttcgtgctaagatgccgttacggaaacatcgctgtcgtt

SEQ ID NO: 495212 - DNA, 90 bp, Homo sapiens
attaaaaatggctgaagatgaggcagaaaccataggcaatcttatagaagaatgtggagggtgctgacaaccagggtgcaggagaacaag

SEQ ID NO: 495213 - DNA, 96 bp, Homo sapiens
gtgagggatacagcagtttggtcaatattgtcttaacatgcttcaaataaatcagagtaccttcaagtttaaatctgagagtgatattcatttggc

SEQ ID NO: 495214 - DNA, 82 bp, Homo sapiens
tggagagagaccagacctgcaagctctttgacacacagcagttcttgtcagagcaccaagctatggatcatcatggagtacc

SEQ ID NO: 495215 - DNA, 75 bp, Homo sapiens
ggcatcttcggtagcagcgcttggccccgccccctgttgacatccggccctccaagccacaaaactgtggtgaat

SEQ ID NO: 495216 - DNA, 82 bp, Homo sapiens
aggctcagatcagtggccgaggccccagagacgccatcctgggcctggaggaagtgcggctgacgccatccatgaggaaccg

SEQ ID NO: 495217 - DNA, 80 bp, Homo sapiens
ctctgtttgtgaggcacagccccccacagcagaaccccagctctacccacggtcctaggcctacttacaagcctccagtc

SEQ ID NO: 495218 - DNA, 100 bp, Homo sapiens
gtctggagcagctggagggaagatggctgaatctccctgctcccctagtggccagcaggtttatggagccgtacatctttgggagccgcctggaccacga

SEQ ID NO: 495219 - DNA, 100 bp, Homo sapiens
gtacagatttttcacaagacttggacaggtttcggtctaagtaccacccagatgaggtggggaagcgtcggcaggaggcccggggggccctgcaaaaccg

SEQ ID NO: 495220 - DNA, 74 bp, Homo sapiens
ctgcaccttatcacccggaacctgcaggctatggtgaactaaacggtaatgctggagaaagagaaatatcttta

SEQ ID NO: 495221 - DNA, 90 bp, Homo sapiens
ggatccagtgctactgctacaaataagttttccaagagataacttcaccaagatgtccagtgataggcaaaggtccgatgatgagagccc

SEQ ID NO: 495222 - DNA, 100 bp, Homo sapiens
ccgagctccgggtccgcggcggagcgagcgagcggccggcaggttgggaggagcggccgaaggtgtcatggagaaactccagctgggcccagagattctg

SEQ ID NO: 495223 - DNA, 100 bp, Homo sapiens
tagaaagggaacagctggaatgggagagagagcgcagaatatcaagtgctgattctcttcctggacattctgttgccctctgtttagctgttgcctttaa

SEQ ID NO: 495224 - DNA, 83 bp, Homo sapiens
ctggaccgtcgccttgctcctcgccgcggcggggactgcagccaactgggtacatggaaaactcagtctcctacagcgcaatt

SEQ ID NO: 495225 - DNA, 82 bp, Homo sapiens
tggagagggggcgctgagctgttggggtgtccctggccagtgtccttccacctgtccacaagcatggggaacatcttcgcca

SEQ ID NO: 495226 - DNA, 101 bp, Homo sapiens
gagaaagagaggaaggaggcacagagcagttggagcttgctgcctggaagaatgacgtgccggtggtggtgtgcacattgagccccggtatagacagttcc

SEQ ID NO: 495227 - DNA, 100 bp, Homo sapiens
cttggacaacatgtcccaacattacatcccagtgactctgacatcattagaagcatgccagaacagactggtgaaaagtaaaccttttcacctacaaaat

SEQ ID NO: 495228 - DNA, 97 bp, Homo sapiens
agaaccattgttagtgaacgtggacaaagctgttgtctcagggagcacagaaataaatttgcgcctcattttggtaagcggaaaaacaaaagagttc

SEQ ID NO: 495229 - DNA, 50 bp, Homo sapiens
accccgagccgctggtgctacaggacagaatgacttggaagataacggag

SEQ ID NO: 495230 - DNA, 100 bp, Homo sapiens
tgagccggatagacctattggatatggagcctttggtgttgtctgtaaaattggttctccacccaagactcctgtaagtaatgtagcagctacctcagct

SEQ ID NO: 495231 - DNA, 97 bp, Homo sapiens
tcgtcttcctcttcagccatccagctgaagaagcatctgtagggaatccagaaggagcgttcatgaagatgttacaagcccggaagcagcacatgag

SEQ ID NO: 495232 - DNA, 82 bp, Homo sapiens
tttgattacatttgtggtgtaagcacagtggcatttattttcaactggcttggattttgtttatccttctgtatcaccaata

SEQ ID NO: 495233 - DNA, 48 bp, Homo sapiens
tgctgtggattcctgtctccaaaagataaaataccatgaggagtttga

SEQ ID NO: 495234 - DNA, 92 bp, Homo sapiens
acgataccgaagcgggctgtgtgccccttctccacccagaggaaacccagcgtttgctggcagaaccagttcctggcatcaaagccgaacca

SEQ ID NO: 495235 - DNA, 97 bp, Homo sapiens
tacgagggccctctgaggctgctgagggccaagtacgcctacagtgagaaagatcagtctaaagaaaaggagaagaaagtgaaaaaaacaattcctt

SEQ ID NO: 495236 - DNA, 102 bp, Homo sapiens
caaagaattcttctagaaccctataaatacttacttcagttaccagtttgtgtttaaggagaaactaacaatgaaaacggcctcgttgacggaggaaaagtt

SEQ ID NO: 495237 - DNA, 75 bp, Homo sapiens
cacagctgcttccattggccagtatgaagtggtgaaggagtgtgtgcagcgacacctggatttcattagcatcat

SEQ ID NO: 495238 - DNA, 75 bp, Homo sapiens
agcacaggggccactcagagtcgcccgagaagtatcagcagatgttgcacacaaacttggtataccttgctacaa

SEQ ID NO: 495239 - DNA, 75 bp, Homo sapiens
ctcagcacttgccgaggaattaggctttatgaaggcaaagaacagatggagtttgaagaatccatgagacggctc

SEQ ID NO: 495240 - DNA, 46 bp, Homo sapiens
ttgcatccggagagtggacaagaaatgtttggtgtataaaacagac

SEQ ID NO: 495241 - DNA, 83 bp, Homo sapiens
ctcatcaagaacccagcggagcgggcggacctgaagatgctcacagtctcggcgcggaagatggccggcggcgtggacggccc

SEQ ID NO: 495242 - DNA, 82 bp, Homo sapiens
cgcaggaataaggaagcgacctgcaaccgacgtttggtgccctggttgtcagatgttggaaagcagtaggacggaacatact

SEQ ID NO: 495243 - DNA, 82 bp, Homo sapiens
ctttagtgaaatgggctaataatgctggcaaagtggaaaaatgtgcgttttctggatatgccgcagaaggatccgtgccaga

SEQ ID NO: 495244 - DNA, 100 bp, Homo sapiens
gatgcgatgctctcagtgccgcgtcgccaaatactgtagtgctaagtgtcagattactcttgtctctgctgctcctgggaaagtgatttgtgaaatgaaa

SEQ ID NO: 495245 - DNA, 90 bp, Homo sapiens
ccattcaggcacttatggccatttcagccagtgtcagtgtgaagaaggggcatgagctggtgaacatctattgccccatcgtggtctcca

SEQ ID NO: 495246 - DNA, 78 bp, Homo sapiens
ccaagctcatctctgagacccggaggaggttcgaagctgagtatgtgacaggcagtagcagaatcccatggtagccag

SEQ ID NO: 495247 - DNA, 60 bp, Homo sapiens
aagctgccctgagacggtgtcccgccgaaaggttaacattcaagatggtacatgctgaag

SEQ ID NO: 495248 - DNA, 100 bp, Homo sapiens
cggcggcccctgcgggcgccagtcagatactctggatgaatattttgaatatgatgcagaggagttcttggtctctttggccttgctgataacagaagga

SEQ ID NO: 495249 - DNA, 100 bp, Homo sapiens
gctatgctgtgggccccgctcagtcttccgtgtgtgctaagatcgtgcagctcctggggcagaatgaggtggactatcgccagaagcaggtggtcatcct

SEQ ID NO: 495250 - DNA, 82 bp, Homo sapiens
gccgccgctgccgctgccgctgccgcacctccgtagctgactcgttttctttttaaaagcggaaggagagttttacatggaa

SEQ ID NO: 495251 - DNA, 98 bp, Homo sapiens
tcaagacctggtccttggagaccattagtcaagccaggtggttgtgtcaaaccgattggtgacatctccatgctgtattgtcacaagcacatatggct

SEQ ID NO: 495252 - DNA, 75 bp, Homo sapiens
catcaacctgagtgcggccgactaccccatcagaccccttatccctctggacagaatgcaggtccaaccacgctg

SEQ ID NO: 495253 - DNA, 100 bp, Homo sapiens
cagaagcaaacattcatatcccaacattcctgtgtcaattcgacggagctggatgaactcattcaggaaaatatgagagccacacccgtgttcacacagg

SEQ ID NO: 495254 - DNA, 80 bp, Homo sapiens
ggagaccatggctgactacctgctgtacaccctcaacaaacaccagcgctttggaacccttaggagaaatcttgagagtg

SEQ ID NO: 495255 - DNA, 82 bp, Homo sapiens
gatcatgtctgcgagccaggattcccggagggtgtgaagacagagaatgaccacatcaacctgaaggtggccgggcaggacg

SEQ ID NO: 495256 - DNA, 50 bp, Homo sapiens
cggcagccaccccgtctgggaactctagccggcccggtccttggactgaa

SEQ ID NO: 495257 - DNA, 100 bp, Homo sapiens
agagatacagggcagaggaaaatgcaagaagactgatggagcaggcttgcaatattaaaccaatgttttcagttgcaccaagcttagccaccaatgcatc

SEQ ID NO: 495258 - DNA, 82 bp, Homo sapiens
cagtggtaattaccatcaatactatggaatgcattttgaaacttaaggatgggatacaggaatactcccccagttgcaagag

SEQ ID NO: 495259 - DNA, 100 bp, Homo sapiens
tggttgttccgttgcgagctgcagctgcgatctctgtggtaggcccaggttcttgggtgtctctggggagtccctgggccagaccttcctccagactcca

SEQ ID NO: 495260 - DNA, 100 bp, Homo sapiens
gaggtaaactagggccccggaaaaacgaagaggaaacagaaattatgagtaagcagcggaagttggagacaaggacggcagcaaggtgacaacagtggtg

SEQ ID NO: 495261 - DNA, 98 bp, Homo sapiens
ctcacgcgctccaggctgcgcccagagctcagctgctgggttggagaaaaagagggtgtagaatgagccaaggagactcaaacccagcagctattccg

SEQ ID NO: 495262 - DNA, 144 bp, Homo sapiens
tctggccagcctgcaagatagccatttcctcaccgacgccgacatggtcatgagcttcgtcaacctcgagacacctatggctgccgatgaaggctcagcagagaaacaggcaggagaggcccacatggctgcggacggtgagac

SEQ ID NO: 495263 - DNA, 98 bp, Homo sapiens
ctcgccgaggcacaggctgctcgcggaccaccctgctccgaaaactaagagtaacagttacccctcaatgagcgacccctacctgtccagctattacc

SEQ ID NO: 495264 - DNA, 82 bp, Homo sapiens
gccattaagaacatccatggagtcagagatgccctgtatccaagcccaatatgggacaccagcaccgagtccgggaccccgt

SEQ ID NO: 495265 - DNA, 88 bp, Homo sapiens
atggatgagactgaccgagaggtggagtactttaagagttaagtgggcagaccaacatccacctcagcaaaaacttcttcctgacgaa

SEQ ID NO: 495266 - DNA, 96 bp, Homo sapiens
tgcaaacctactttgagatggcaagaactgctggagacacactggatgtttttaccatgccttagattttagtgatgatgaaaaagagaaggaagc

SEQ ID NO: 495267 - DNA, 90 bp, Homo sapiens
cacgcggtgaggcggcgacgggctccggttcgatcctttggtacagaagacagaccgacagatcgtccaataccacctcgagatgaagtc

SEQ ID NO: 495268 - DNA, 100 bp, Homo sapiens
ctcactgacgtcaagaatgaagctgcggaccctcgtgatatttggtttccaggcaggactgacgtctttggattgcagtggatcttactgcttacctgta

SEQ ID NO: 495269 - DNA, 100 bp, Homo sapiens
cagatggccgcgctgcgtcgaatgctccacttgccgagcctgatgatggggacgtgccgcccctttgcggcccaggatccctgggacaggaagcagcagc

SEQ ID NO: 495270 - DNA, 74 bp, Homo sapiens
aagagaaggggaataagactgcatctgttcatatgagataacaacgaacttgatgcaagtgataggtttgccaa

SEQ ID NO: 495271 - DNA, 82 bp, Homo sapiens
agtgtgcaactgaagcctgaggtctccccaacgcaggacatcagatattgttaatcctgccagtctttctcttcaagccagg

SEQ ID NO: 495272 - DNA, 100 bp, Homo sapiens
ctgcagcatctccaatgacaagtaatttcatctgtgccaaagcctccagaggacaagccagaagatgtacatacaagtcatccattaaaacaaagaagaa

SEQ ID NO: 495273 - DNA, 100 bp, Homo sapiens
tccagatcggatcacggtgagggaaagatgagcgaggagacggcgacttctgacaacgaacctagaggatcaagacataatgggagcatttttagacaag

SEQ ID NO: 495274 - DNA, 80 bp, Homo sapiens
gttcctaccttatgagctcggttttcttatgcttataagagtggaacagtgatgagccctcctcttcagctaggaaaatg

SEQ ID NO: 495275 - DNA, 103 bp, Homo sapiens
ctgggccccacgaccaaatcatgtccagtgccttccaggccagcttagagatgaccactctagagtccacctgacaccggttgaaggggttccagattctgat

SEQ ID NO: 495276 - DNA, 100 bp, Homo sapiens
atggccagcaggcctccgggggacctcgccgaggctggaggccgagctctgcagcagcagcagcagcagcagcagcagcagcagcagcagcagcagcagc

SEQ ID NO: 495277 - DNA, 75 bp, Homo sapiens
aaaatatgtcaataacctgaacactgaccagctctcagttgcacttctcaaagtttgcagttaacatgtttcgaa

SEQ ID NO: 495278 - DNA, 83 bp, Homo sapiens
catgatgttgacacgggctgggcgcccccagaagcccgggaacaaactaatagttatgcacgagtgcgagctgtggtgatgac

SEQ ID NO: 495279 - DNA, 98 bp, Homo sapiens
catgaccacctccagagctaatcaggaaatgggtcctgatgaatatgaagagatggaagaagaggaggaggaggaagaggaggaagacgaggatgatg

SEQ ID NO: 495280 - DNA, 83 bp, Homo sapiens
tgctgtaaaaaatttcaggattggtactacaagaatgcagtaatagtggccttgtcttcaaaatcatgggatgtagagactgc

SEQ ID NO: 495281 - DNA, 100 bp, Homo sapiens
ccgagagcgtggagcgggctgggccagaaacttgaagggtcaaagtgcaaagggcagcttttgatttttggggcaaccaactgggacttgattggtcgaa

SEQ ID NO: 495282 - DNA, 100 bp, Homo sapiens
ggagcctggagcgcgagtacagctgcaccgtgcggctgctggacgacagcgagtacacctgcaccatccaggccgattctttgatgaaaatgaatcccct

SEQ ID NO: 495283 - DNA, 82 bp, Homo sapiens
agtgttgtgccagcctacaggaggaaaggccagactcacagaagaggctgtgacaacactgaaaacagtattggatcagcag

SEQ ID NO: 495284 - DNA, 51 bp, Homo sapiens
cccagtcttctccttcagtaagggctaccagagaccaagtcattacattgc

SEQ ID NO: 495285 - DNA, 96 bp, Homo sapiens
aggcaaactgtcagaaaagagtagcctgggctgtctggaaatctgagggtcaactttcagtggatccaaatggacattcattttgttcttcctcag

SEQ ID NO: 495286 - DNA, 97 bp, Homo sapiens
acatagatgaaattgtatttacatcaacaggagacatctccatttactatgatgagaaaggttatggaggttttgatgactatggtggctataataa

SEQ ID NO: 495287 - DNA, 75 bp, Homo sapiens
gaagagcctttgcctgactcagggcagctcagagtgtggggtgaggcggaccctgttcatcacaggactccccag

SEQ ID NO: 495288 - DNA, 73 bp, Homo sapiens
aaaaggcagtgagacagattcagcccaggatcagcctgtgaaggtttatgaaggcgagcgtgccatgacaaag

SEQ ID NO: 495289 - DNA, 75 bp, Homo sapiens
gaattttacaaagaatccaagcaacaggctctgtccaatatgagtgaagtcaccctgctgagaaatgaagtggca

SEQ ID NO: 495290 - DNA, 80 bp, Homo sapiens
agactgaggacttaaatgaagccactgattagcaatttaaagatcctctccaaggtcagcccaaggccaaccccactgtc

SEQ ID NO: 495291 - DNA, 88 bp, Homo sapiens
gaaggacccccagcggtgcacgctgctggtcagccagttccgctcctgtcagccacggagaccgcccagcagttgaagcggagcgccg

SEQ ID NO: 495292 - DNA, 80 bp, Homo sapiens
gcaaggtggtggacctgctggccacggacgccgacatcatcagccgctgccaggagaacaaggggtctgtggaaatcatg

SEQ ID NO: 495293 - DNA, 100 bp, Homo sapiens
cctccttgcccgtgaccgtcgctagaactcagttgtgcgttgcggccagtcgccactgctgttaacaggattccatctgccacctccagtgacaagtacc

SEQ ID NO: 495294 - DNA, 100 bp, Homo sapiens
ctcgtggacaagtttgcagatcgggagcgcaaggtcgccctcaaggccatgatcaaaacggacccagacatggagctgcgggaagaagcctggtctccgg

SEQ ID NO: 495295 - DNA, 90 bp, Homo sapiens
atgacattgaacttactcatcacgtctctatagtgtcttctgcctggactcagagctcaagtctgaactctacctccagacagaatgaag

SEQ ID NO: 495296 - DNA, 74 bp, Homo sapiens
agaacggctgctggcagtggctgagaggagacccggtgagcctccattgataaaaggttggcttccttatcttg

SEQ ID NO: 495297 - DNA, 100 bp, Homo sapiens
ctggttagtgtgctctgagggagggtccgagccagccgctgttttgccggaggagcccctcaggccgatgccacttcctccagtgcagcccagccggagg

SEQ ID NO: 495298 - DNA, 81 bp, Homo sapiens
gagagtgacggagtcggcgagcccccgcggcgacaggttttaaaatcaaagatgggaaaatcggagaaaattgcccttccc

SEQ ID NO: 495299 - DNA, 88 bp, Homo sapiens
ggcttggacgaagatggggagaaggaagcgagactcatacgcaacctcaatgggatgcggaaagaaagcggaaagtaaagcagctttt

SEQ ID NO: 495300 - DNA, 80 bp, Homo sapiens
atgagcctgtgcgggcagagcaggcgttgcctggtgtcattaaagccattgataaaattaaagataaaaatgtggattat

SEQ ID NO: 495301 - DNA, 80 bp, Homo sapiens
tgacctaccccctggacctggtcagagcgcggatggccgtaaccccgaaggaaatgaggcagtggagaaggtgacacagc

SEQ ID NO: 495302 - DNA, 87 bp, Homo sapiens
aaatttcagtgaagaagaaagtaaagttggaagttaagggagacaaagttgaaaacaaagtgctgtttcggagcaacatcccctgtc

SEQ ID NO: 495303 - DNA, 75 bp, Homo sapiens
gaaaccaagaggggcacttgctgacagaggttctggaggacacgtgccggcggcaggacttcaacccctgtgaat

SEQ ID NO: 495304 - DNA, 75 bp, Homo sapiens
cagggactgggcatccacccggccaggttcccaggaaggtagagtacagagagatggatgaaagcttggccaacc

SEQ ID NO: 495305 - DNA, 120 bp, Homo sapiens
ccggcgtgccccaccatgtcagacgcagccgtagacaccagctccgaaatcaccaccaagcagcccctgtcaaagggaacaggaagcagtccacggagggtgacgccctagacccacctg

SEQ ID NO: 495306 - DNA, 75 bp, Homo sapiens
ggaggatgaatttgatagagaggcctgggcagtttttaaagggaagtttaaagaaggggacaaagctgaaccagc

SEQ ID NO: 495307 - DNA, 74 bp, Homo sapiens
cgcgtctgcggctggtgttggcgcatctctagaaaatatttacaccagcagctccagttcataccaataaagaa

SEQ ID NO: 495308 - DNA, 74 bp, Homo sapiens
tgaacagacaaaccccacaagcactgcatacggggcaagattcttgccaagagaattaatgtgcgtattgagca

SEQ ID NO: 495309 - DNA, 51 bp, Homo sapiens
aaggactcatcaaactgtgtgcaaacaagatccttccgctgaggaattgag

SEQ ID NO: 495310 - DNA, 90 bp, Homo sapiens
gggaggcgcgcggaggctggagctggaggcgcggcgccggtgagctgaggttcaattcccatgaaagtgcagcacatgcaattgtttctg

SEQ ID NO: 495311 - DNA, 90 bp, Homo sapiens
cggcggcggagcgggcggtgctgataaaataccatgaggagtttgagaagagccgcatgggccctagcgggggcgagggcatggagccag

SEQ ID NO: 495312 - DNA, 101 bp, Homo sapiens
aatatattgttagtgcctggtacaatatgccgattccacgactcttctttgcgggagaacatacgatccgtaactacccagccacagtgcatggtgctctg

SEQ ID NO: 495313 - DNA, 96 bp, Homo sapiens
gtaaacggggctgctggtgggccgcgtcgaagacatggaccagggctacggagattgctctggaagcagccaaagcactggatgacaagaactgct

SEQ ID NO: 495314 - DNA, 75 bp, Homo sapiens
cgatgatgatgaagaggatgatgatgaagacacaaccagtgtctctgaagaagatgtctcaagtagatattctcg

SEQ ID NO: 495315 - DNA, 83 bp, Homo sapiens
actttgacttcctgccaaaatcctgttaccctagcaacaggtgtccctggccagtgtccttccacctgtccacaagcatgggg

SEQ ID NO: 495316 - DNA, 76 bp, Homo sapiens
ggctgtgccactacctacaacaagcacattaacatcagcttccacagaacaagttgaaatcatcgcagaaggataa

SEQ ID NO: 495317 - DNA, 75 bp, Homo sapiens
gcctaggcattttgctgtctcctcctaatacggtatgaatctccagaaatagctctaaattgtggaataatgtta

SEQ ID NO: 495318 - DNA, 76 bp, Homo sapiens
attcacaaccccctgaaagcagttcagatcattcaggatcaacaactccatcatctggtcaagaaaccttgtcttt

SEQ ID NO: 495319 - DNA, 100 bp, Homo sapiens
aaatgattgaaaagttacagaaggtatgcccaagaggacagagaacgaatgcacagaaatattgtcagccttgcacagaatctcctgaactttatgattg

SEQ ID NO: 495320 - DNA, 58 bp, Homo sapiens
cccctgcagactttgccccagaatgccaagacaatgcaaactccagtgaacattcccg

SEQ ID NO: 495321 - DNA, 100 bp, Homo sapiens
cttttttggtggttcgagaatgtcaagccagattttgttcagcccagggatgttcaggagctgaaagacgtgtgctcatgggagcttagaagatcccaaa

SEQ ID NO: 495322 - DNA, 83 bp, Homo sapiens
gccgtgtgtaccttccagtagctacgggctggtggaagcgctgctcacagtcagtgtcgcagtgactcttcgagaagacagtg

SEQ ID NO: 495323 - DNA, 127 bp, Homo sapiens
gctgcctgcagtggaccacagtcatcgagaggaccttccacgtggattctccagacgagagatttggagtcaaaatatggacctgagaaaatatctccagaaaatgatatttttgaaataaatttac

SEQ ID NO: 495324 - DNA, 83 bp, Homo sapiens
tcgactgctagagccgagcgaagcgcgccatgtcagaaccggctggggatgtccgtcagaacccatgcggcagcaaggcctgc

SEQ ID NO: 495325 - DNA, 50 bp, Homo sapiens
aagcgaaatgggcacaccacaggcatccgtgtcattctggaccttactcc

SEQ ID NO: 495326 - DNA, 83 bp, Homo sapiens
ccacctgctgcacccacgaatctgcccacccctcctgtaacccagcctgtttcacttcttggatttaagtgccctgtatgctc

SEQ ID NO: 495327 - DNA, 75 bp, Homo sapiens
tactatgtgaagatacaagacacaaatgtaacttctgaggacaaaaagctctcaaaggtctatggccctgtgttc

SEQ ID NO: 495328 - DNA, 90 bp, Homo sapiens
agaaattgaacagaactatgcgaaacaattgaggtgtcttctctttagggatggtgaggttggaaaaaggctcctgtaaccctcctccag

SEQ ID NO: 495329 - DNA, 76 bp, Homo sapiens
cagtttttgtttcaaaagaaacatgttggaagatcaaaggcacagtgagcagcggttccatcgcagtgaacgccga

SEQ ID NO: 495330 - DNA, 75 bp, Homo sapiens
acctggagttaaggaacagatccccggaggaggtttttcgttggaatatacgttgcacatttatggcgattctga

SEQ ID NO: 495331 - DNA, 83 bp, Homo sapiens
ctctaagaatcaagaaaatggaccagtttgttcgttacgaggtgccaagtcctgccctgccaacttcttggcagctgccgacg

SEQ ID NO: 495332 - DNA, 89 bp, Homo sapiens
ccccgttccgcggacgatatggaatgatttatcagcggggatctgatgagcttctttcttctggcatcattaacggaccttttaccatg

SEQ ID NO: 495333 - DNA, 100 bp, Homo sapiens
acagctagtgttttcttatttagccggagtgagaagcaagaaggccctggacacagcaatatctctgggctttcacaggggacggtattcagaattcgag

SEQ ID NO: 495334 - DNA, 74 bp, Homo sapiens
ggattgccagagaattggcagaagatcctcccaagaaggtgaccacagtgattcaaaaccccatgccgattcga

SEQ ID NO: 495335 - DNA, 100 bp, Homo sapiens
ctgtgtactagtagggtaggagtttttgttcagggaccagcggaacgaggctttctgtcgttaataggcctatccctcggccagatcctgtgcataataa

SEQ ID NO: 495336 - DNA, 101 bp, Homo sapiens
gcctcaaccccatgtccgacaagctgaccttctctgtgatctggacactgactccagagggcaagatcccttcccactggaggcatgtgatgagaggaaat

SEQ ID NO: 495337 - DNA, 100 bp, Homo sapiens
gaagattgctcctggagcagttgtatgtgtagaaagtgaaatcagaggagatgtaactatcgaaccctcggcctcaggaaagtcggacagtattcagtgg

SEQ ID NO: 495338 - DNA, 50 bp, Homo sapiens
ctcctactgcttcgcgtccagacaggtagctacagcaagctgggtagcag

SEQ ID NO: 495339 - DNA, 50 bp, Homo sapiens
cttgtatctctaattggaagcattattaccatgcattcatgttctattaa

SEQ ID NO: 495340 - DNA, 76 bp, Homo sapiens
gcattgaccccttgtccagttactctaacaagtctggaggtaccaaccaagaagctgaagaaatatgagaaagaat

SEQ ID NO: 495341 - DNA, 89 bp, Homo sapiens
atacaatattaaaagccacagaagtccagttccctgtaaaaccggttgtaagcagtgaagccaagctgctggagccagttctgcttctc

SEQ ID NO: 495342 - DNA, 101 bp, Homo sapiens
gttttccttcagcaaggacaaagacctagaggatcaagacataatgggagcatttttagacaagccaaagatggaaaagcataatgcccaggggcagggta

SEQ ID NO: 495343 - DNA, 100 bp, Homo sapiens
agttctattcagacccccatgctgtagcaggtgaaattaaagagccccttgaaatctctatatcacaagatgtacatgattcaaaaaatactttaacaac

SEQ ID NO: 495344 - DNA, 75 bp, Homo sapiens
tgaggatgttacagatgctggtcttaccacttatcatctccagtcttgtcacagttgctgatagtccaactccac

SEQ ID NO: 495345 - DNA, 101 bp, Homo sapiens
agaactgacttttcatcttctagaatttcctgaaggaaaaggagtggctgtcaagagacatcatttcagctttccatccatttttatttatggacatactg

SEQ ID NO: 495346 - DNA, 89 bp, Homo sapiens
catgaaatcctccccacttatgtttgtaaatgtgagtggaagccatgaggccaaaggcagttgtattgaggagaggagacgccgtgagc

SEQ ID NO: 495347 - DNA, 100 bp, Homo sapiens
cctctgaagctagcttatttgaagaggcactggaaaaatatggcaaagacttcaatgacatacggcaagattttatcctgccccaggaggaggactatgg

SEQ ID NO: 495348 - DNA, 75 bp, Homo sapiens
catagtcaactgcgtggaagagaagttcaccacaggcacgtgcagcgactcggtggttcacagctgtgacctgtg

SEQ ID NO: 495349 - DNA, 100 bp, Homo sapiens
tttgtatccttcattgatcaacgtagatggaaatgcaatttgtgctatagagtaaacgatggttttgcgtgtgaagctgtgtggaaatgtgaaatactac

SEQ ID NO: 495350 - DNA, 75 bp, Homo sapiens
atcttctcatgaaggaaggaaccgaaggcacttaagtattcatcgaagagtcaccccagtagcggtgatcacaga

SEQ ID NO: 495351 - DNA, 51 bp, Homo sapiens
accatgtgatgcacctgctccaggctaatctagacgaaatccagatgagtt

SEQ ID NO: 495352 - DNA, 75 bp, Homo sapiens
aaaacttcattataaagaatttcgaagggattatcagcatagaaagaaagccttgtaaccatcaggtagatacag

SEQ ID NO: 495353 - DNA, 82 bp, Homo sapiens
ccccaacttccgcgtcggcaagaagatcggctgcggcaacttcggggagctccgcctagttgagaagctgatgtctcctcga

SEQ ID NO: 495354 - DNA, 75 bp, Homo sapiens
cttggcatatgaagaaagctttcaaagtcatgaacgaattaagaaggtatcaaattgtagtggaaataatccagg

SEQ ID NO: 495355 - DNA, 50 bp, Homo sapiens
aacactgttattgtaaacaaagagagaagaagaaggaggttcctgctgtg

SEQ ID NO: 495356 - DNA, 100 bp, Homo sapiens
ggagagggaacatgctgagaaactgatgaagctgcagaaccaacgaggtggccgaatcttccttcaggatatcaaggagctcgaggccatgagcagatat

SEQ ID NO: 495357 - DNA, 90 bp, Homo sapiens
caaggctgtgcaacgcggagcgtgagaggaagactaatagggatgccaaaggaaaaatatgatcctccagatcctcgcagaatttatacc

SEQ ID NO: 495358 - DNA, 102 bp, Homo sapiens
aacccctagaccggtttttagtccattgactatgcagcctaatgacttaattcagtgcacaaatgagatgaatgtgaacatcccacagttggcagacagttt

SEQ ID NO: 495359 - DNA, 83 bp, Homo sapiens
atctacaaccctgaagtgcttgatatcacagaggaaactctgcattctcgcttcctggagattcatgatgttgctatcaaaag

SEQ ID NO: 495360 - DNA, 59 bp, Homo sapiens
caggaccaaccttccagttctgtctgtgaacgagattgtcctgggtcacataatgccag

SEQ ID NO: 495361 - DNA, 116 bp, Homo sapiens
attcccctcttcccgcggcctcgccatggcgacccacggacagacttgcgcgcgtcgcccctcgcattggcacaagctgtatcccattgcccagggagatcgccaatcacccatca

SEQ ID NO: 495362 - DNA, 63 bp, Homo sapiens
gagcgcgaatatcgtcatcgttagaaggtggatccataaagaacccagccaacccgcagaggg

SEQ ID NO: 495363 - DNA, 109 bp, Homo sapiens
gtcgtggaagcaggactgcgccgcgtcttcctcaaggtatgaacgctgccgtccgtgccgtggtgcgcatgggtatctacgtgggggccaaggtgtacttcatctacga

SEQ ID NO: 495364 - DNA, 124 bp, Homo sapiens
tgccggccgtgagcctcccgcccaaggagaatgcgctcttcaagcggatcttggagcagatgttcaatgagctgctcacgtataatgcgcctcatcttatgcaagacttggacacatatttagg

SEQ ID NO: 495365 - DNA, 75 bp, Homo sapiens
agagaccccgcggctgggcgttcatctaccacgctttcgtgaacggaaaacagttcttccttcaaagcatgcagt

SEQ ID NO: 495366 - DNA, 100 bp, Homo sapiens
ccgccgtgagcgcccggagcggtccgcgagccaccgaggcccagtacccggcagtgtcacctgctcctggatgtcttcaactccaccgagcatgagctga

SEQ ID NO: 495367 - DNA, 100 bp, Homo sapiens
cggagacttcaccaggggagatggcacaggaggaatatgagagcctggagcaagaaaacaccatgctgcggagagagatcgggaagctgacagaggagct

SEQ ID NO: 495368 - DNA, 101 bp, Homo sapiens
tagggtggagatcaagctggaacaggagttccgatcgacccggtaccaagaaggggagtgcccgcggcaggtcgaatgagtgatttgagtgtaattggtca

SEQ ID NO: 495369 - DNA, 71 bp, Homo sapiens
cgttagctgtcaagctgggcaccatcacccctgatggagctggggcacgttccgctttgaaagacctgatg

SEQ ID NO: 495370 - DNA, 75 bp, Homo sapiens
gggaaatagcaattgatgtcccaaatgttctcagaggcactgtgactgacttccctggatttgatgagcgggctg

SEQ ID NO: 495371 - DNA, 100 bp, Homo sapiens
caacatcgctcggttggaacttaattactgcgtccccatgggagtacagacaggcgacaggaaactactaaagttcctggggaagcaaagtagaatttca

SEQ ID NO: 495372 - DNA, 50 bp, Homo sapiens
gcagaaaagctgagggcggcagagaggcaatccagcatccagcagatgag

SEQ ID NO: 495373 - DNA, 97 bp, Homo sapiens
cgcgctcctggccccgcgcgggcggacggcggaggcgcctcccagaactgataaatttcaaacggaagagagtggcagcatttagaaagaatctaat

SEQ ID NO: 495374 - DNA, 87 bp, Homo sapiens
cgctcggctgcgggaaatcgggctgaagcgactgagtccgcgatggaggaacttgctactaccagcaccatgccctaccaatatcca

SEQ ID NO: 495375 - DNA, 76 bp, Homo sapiens
catggacatatgcagcaaatgttggggaacatgatctgttaaaggccactcgaccggatatgatcaggatcttgtc

SEQ ID NO: 495376 - DNA, 50 bp, Homo sapiens
ccgggcacctccaaagcagatggtctgccaaggccacctttgatgccatt

SEQ ID NO: 495377 - DNA, 51 bp, Homo sapiens
aactgtgtgccttagaaaccaggttgggggccgtcccgctcctaaggcagg

SEQ ID NO: 495378 - DNA, 75 bp, Homo sapiens
ggactgctttatggacttgcatcaggagtagcaagagttattcctgatgaagctaaagctttgtctctgttggca

SEQ ID NO: 495379 - DNA, 90 bp, Homo sapiens
acggaggtcagaggggaggaggactctggagctgacagcgcgcacttcacccgcagttgggtttccaggcctgaggtgcccgccctggcc

SEQ ID NO: 495380 - DNA, 74 bp, Homo sapiens
tgctccgggacaacatgctgcggggcacagctagaatgggtactaggaaaaaagttcatgcatttgtccgtgtc

SEQ ID NO: 495381 - DNA, 87 bp, Homo sapiens
aggcagcccagtctggtgtttggaatgacgacagtatgggtaagcttgatgattaccaggaacgaatgaacaaaggggaaaggctta

SEQ ID NO: 495382 - DNA, 100 bp, Homo sapiens
atcctgctgctgaagatctggaagacgcgctcctgcgccgattttatttggagagaagcaagcatctttgcctctttggagtaggaaattcagacttgaa

SEQ ID NO: 495383 - DNA, 90 bp, Homo sapiens
ccgagcagtgctactacatcttcggtgacctctgcggcagtggtggagttgcccgtgacagagcgccagattgagcgcgaacacctcatt

SEQ ID NO: 495384 - DNA, 83 bp, Homo sapiens
gggtgctgcagaggacacgaggcggcgggctggagacatggaccgcggcgagcaaggaaaggccgagggggacggcaagatgc

SEQ ID NO: 495385 - DNA, 82 bp, Homo sapiens
ggaggaagacgaatcgttaaacatctgaaagggtcaggtccgcgggagagctgtggggcttggtgagtgtttcgtggcctct

SEQ ID NO: 495386 - DNA, 51 bp, Homo sapiens
gccgtggcgccgcagacctccatcctgttgacatcatggacatatgtgagt

SEQ ID NO: 495387 - DNA, 82 bp, Homo sapiens
tcagtgccattgtgatgatgaagaaccgcagatccaggggatatgagactttctactcggaatatcctgagtgttgcgtgga

SEQ ID NO: 495388 - DNA, 100 bp, Homo sapiens
tttcttgaagaacctgtgagccagaagcaaaatttcaggacagggggcacacactgaacttgaaggctgatcccttatccaacatggttctaaccttcag

SEQ ID NO: 495389 - DNA, 90 bp, Homo sapiens
aatatgaacgtggctatgccttcatgggtcatcgagcagctcggtgggaagcagctggtcatgaaccacatgcatcatgaagaccagcag

SEQ ID NO: 495390 - DNA, 99 bp, Homo sapiens
aggaggatataaaaaagaaggagccatattgtagggactatctgctgccaaactcttgactgaatatggcgttagtgttttggttttagaagctcggga

SEQ ID NO: 495391 - DNA, 100 bp, Homo sapiens
ctaactagtgaaggaaaggtgaaactggttccaaatactaaaatccagatgtcatattcagaagaagctgtttgttttgattctgagctagatgaacata

SEQ ID NO: 495392 - DNA, 99 bp, Homo sapiens
ccggagcttctcagaagacagagggttttcttttgagaactcaagacatggctgcccagtgtgtcacaaaggtggcgctgaatgtttcctgtgccaatc

SEQ ID NO: 495393 - DNA, 51 bp, Homo sapiens
tgcgtttgagatctactgtgagatgaatctggttatagatggacaagagac

SEQ ID NO: 495394 - DNA, 75 bp, Homo sapiens
cgggcgccgcgggacctctccgggccatggatttaagtaagtcttccccaacaccgaatgggattccatcttcag

SEQ ID NO: 495395 - DNA, 83 bp, Homo sapiens
caaggctgaggacgggaggctgattgagaggcgaaggcactgtttagtacagctgttgaaatgaagataaaacaatcagcaga

SEQ ID NO: 495396 - DNA, 90 bp, Homo sapiens
agattctccggggacccttccgtatctgcctaggcattttgctgtctcctcctaatacggtattatacctgaagaaccttagccctcggg

SEQ ID NO: 495397 - DNA, 139 bp, Homo sapiens
ctggactcagcggtagcaacctcgccccttgcaacaaaggcagactgagcgccagagaggacgtttccaactcaaaacacagccgccagcccaaacagcagcggcatgggcagcgccagcccgggtctgagcagcgtat

SEQ ID NO: 495398 - DNA, 75 bp, Homo sapiens
atttaaacaagagatttccacagaaggtggactataatgcgagtgcctggctgaccaagaatatggacccgctga

SEQ ID NO: 495399 - DNA, 98 bp, Homo sapiens
tacgacatccctgaagccgggaaatgacccaacatgagtgaagtttcctgcaagaaacgggacgactatttggaatggccagagtattttatggctgt

SEQ ID NO: 495400 - DNA, 100 bp, Homo sapiens
ctgcggctctccgccgtccccagccctgcctctccctgggctctgagcatgctcaccgcctggacatctttgcccacaacctggcccaggctcagaggct

SEQ ID NO: 495401 - DNA, 100 bp, Homo sapiens
gaagatcggcagcggctccttcggagacatctatctcgagacaagaggagcagcagcggcaccgcccctcaccctggagggtcctgtacaatctcatcat

SEQ ID NO: 495402 - DNA, 50 bp, Homo sapiens
tgacctcctggacttcagcatggtcttgagtcaccacgtccgaatataat

SEQ ID NO: 495403 - DNA, 75 bp, Homo sapiens
acccttggggcatctgatcctaattcccttgctgatgatattgggatcgcttacacctgagacgaactacagaac

SEQ ID NO: 495404 - DNA, 100 bp, Homo sapiens
acccattcctttaaatccggagggggaaaaaatcccaaggtctgcaaagagaggaggttcagatgagcccctgctgacttgagagagacagagagaccac

SEQ ID NO: 495405 - DNA, 83 bp, Homo sapiens
ggagccatcctctacaggacccgctttctaccattaagagtcaatgacagcgatgacttaatcatgacagaaaacgaagtagg

SEQ ID NO: 495406 - DNA, 80 bp, Homo sapiens
gtttgagcgtcttggatatttctccgtggatccagacagccatcagggaaagcttgcttggctcaggaacaacagaagag

SEQ ID NO: 495407 - DNA, 74 bp, Homo sapiens
cggggactgccttacaccatggacgcgttcatgcttggcatggggatgctgggaagatgacgattcagagactg

SEQ ID NO: 495408 - DNA, 98 bp, Homo sapiens
gggtgcgcacaacaaccttatttcgtgctgtgaatccagagctcttcattaaaccttctttcccagggaactccgatgaagtgttccaacaaaatgag

SEQ ID NO: 495409 - DNA, 98 bp, Homo sapiens
acagaggtcaaaggaaaaagaaaaaggggtcgtcctggccggcctccagttgcctgcctgattcgagttccatctgaagtggttaagcagagggcaca

SEQ ID NO: 495410 - DNA, 100 bp, Homo sapiens
gtgcttggtagaaggctgcacagagaagttcaagaccagcagagaccggaaggatcacatgctactggggataaaggaaggagaaataagtcaactaaaa

SEQ ID NO: 495411 - DNA, 100 bp, Homo sapiens
ttctgagacggcggcagcagcggcattcaggctcccagccaacctctgataaaccctcccagcggccatcagagagcacaaattgtagccctacccggaa

SEQ ID NO: 495412 - DNA, 100 bp, Homo sapiens
aaactcttcactgccattggttatagtgagagtacccacaacctaactttacctaagcagggaagcagctcgagagtgtcgtagaaagaagaaagaatat

SEQ ID NO: 495413 - DNA, 51 bp, Homo sapiens
gagacacatggaaatctcatgggcaaaacatcagaggctcttgcaaagtta

SEQ ID NO: 495414 - DNA, 74 bp, Homo sapiens
tttgatgctgaacttcaccgttaagccaagtgggaaagggccccggttgccagaggtgtactgtgtcatcagcc

SEQ ID NO: 495415 - DNA, 82 bp, Homo sapiens
gaggatgtcgggacaccccggaagctgggaaatgtgatgattcctgcgtattccaagaaccgggcctatgccatcttcttca

SEQ ID NO: 495416 - DNA, 76 bp, Homo sapiens
gttgaagatggtttgaaggaccattatgatattaaggccaaggacttgccaacattcaaagacaatgacttcctca

SEQ ID NO: 495417 - DNA, 100 bp, Homo sapiens
gaaatgcaacaatccaaatggccatgggcacaattataaagccttctccactcgtctgtttgctgtcctgagatttgaaagtgttatccatgagtttgat

SEQ ID NO: 495418 - DNA, 100 bp, Homo sapiens
ggacaaagcagatcatctgcaggtttgctgggatgggaaacctgctcaaagtccttaccagggaaattgaaaactatccacactttttcctggattttga

SEQ ID NO: 495419 - DNA, 134 bp, Homo sapiens
cagctcaagcgccgctttgccattggctcccaggtgtctgagcacagcatcatcaaggacttcaccaagcagtaccaaaagaattggtggagctccatttgaagctgatgaggaaaattggcaaatctgttact

SEQ ID NO: 495420 - DNA, 98 bp, Homo sapiens
cagccaagaaaacaggaagagggttggaggcaaagttccgaatagggatgaggcatacgtgctgtgtggtgcagccctgttggcagtgggcatctggg

SEQ ID NO: 495421 - DNA, 75 bp, Homo sapiens
ctgaagcgcaggctgcggggcgcggagtcgggagaatgctgtggaggaggccatgggcatgtaccaggagctaca

SEQ ID NO: 495422 - DNA, 100 bp, Homo sapiens
aaacacaggtggaagagtttctttcattggtcgctgatggccctcatactatttctggtgcgcacgaagaagcaggagctctcggaggcagagcaggcta

SEQ ID NO: 495423 - DNA, 95 bp, Homo sapiens
ccaggcagtgttctctgacggagctgtctctttgcacacgaggagcctgaaatatggaaaaccatccagtccaatggatcagatgggcaagatga

SEQ ID NO: 495424 - DNA, 95 bp, Homo sapiens
tttgcagcttggccatttctcactcggctgtggactcgagcaaagtctttcagtgtattcaagaaaaacatcaacggcaggaaattctaagaaac

SEQ ID NO: 495425 - DNA, 75 bp, Homo sapiens
tcctcctcagcctgctgctgttcggcttcaccctagtctcaggtaccagcagatcctgcaccggaacctggtata

SEQ ID NO: 495426 - DNA, 75 bp, Homo sapiens
tctttggatataacaccaccttcaaaaatttcttgccgaaaacatttgaagagtcggagattagtcagtgcaaaa

SEQ ID NO: 495427 - DNA, 98 bp, Homo sapiens
cagctgttactgatggtggctcgcaggacccagtcggaaaccccacggttaattggccttggtcctcacagctccaaaaagaaacaggatctcgataa

SEQ ID NO: 495428 - DNA, 94 bp, Homo sapiens
ccgggaggaaggaacgaggcaaggagctaaagcagcgtgcgttcagccctgggatgtccagctcgccgctgtccaagaaacgtcgcgtgtccgg

SEQ ID NO: 495429 - DNA, 90 bp, Homo sapiens
ccgtcgccgccgccaccatgcccaagagaaagacggtggagcatggcttcccgcaccagcccagcgccctcggctacagcccgtccctgc

SEQ ID NO: 495430 - DNA, 100 bp, Homo sapiens
gtgggatttattattttgaagtaaaaattgtcagtaagggaagagatggaacccttaggagaaatcttgagagtggacagcaattgtgaagatcgccaga

SEQ ID NO: 495431 - DNA, 75 bp, Homo sapiens
cctcaagaagaagaagttgcgaaggatccccaacggggaggccaacgtgaagaaaatgaaaaaggcaggcattga

SEQ ID NO: 495432 - DNA, 98 bp, Homo sapiens
gctgccaacgtcgagcggcgacggctgatactgtggatggtagggaagaaaagtctgcttctgattcttctggaaaacagtctactcaggttatggca

SEQ ID NO: 495433 - DNA, 90 bp, Homo sapiens
aaagaggacgccgggacaccaagaagcagggaaatgtttgctatgaagattatggaatcagagagagctcttggagatggtacagctcta

SEQ ID NO: 495434 - DNA, 90 bp, Homo sapiens
caaaaatctggtgaaattgccggcaagagggagttaaggacattccaggcagaggcaaggtaatgaaagtactaaattcttccaatgagc

SEQ ID NO: 495435 - DNA, 100 bp, Homo sapiens
ggaccggcccccacctttcctcaggagtcatttctgttccgcacaggcctgctgaactgggtgctttatataggatgagaaccacagtgctacagcagag

SEQ ID NO: 495436 - DNA, 100 bp, Homo sapiens
gcctcaggcgtgcgcggacggtgtgcgggctggattacagtgggccttctagagagtttttcttcctggtatccagagaactctttaacccatattatgg

SEQ ID NO: 495437 - DNA, 100 bp, Homo sapiens
cgcatctgtctgaggagcggtcagtgacgcgatggagcgggcaagatatgaggccccaggattcctggcgaggtcctcctccccttttccagcagcaaag

SEQ ID NO: 495438 - DNA, 100 bp, Homo sapiens
cttctttagggtctctgccttggggccattttacagacttaattcagtgcacaaatgagatgaatgtgaacatcccacagttggcagacagtttatttga

SEQ ID NO: 495439 - DNA, 75 bp, Homo sapiens
ctccgtcgattaaagagccatctgtggtgccaattgaagatcgggcccgggacacccagacagatgagattgtcg

SEQ ID NO: 495440 - DNA, 100 bp, Homo sapiens
tgaagatcagtacaaaaattcttcaagaaatctaagagctgaggcttcgaagacctcagaggacttctctcagcactcacagaaacctcctacaccctcg

SEQ ID NO: 495441 - DNA, 96 bp, Homo sapiens
taacgtgatcttcctagagctcctggcccggtgaatctggattgggaaagtcgacattaatcaactcattattcctcacagatttgtattctccag

SEQ ID NO: 495442 - DNA, 100 bp, Homo sapiens
cccagagaaaagtgaaacaattcaggacactggccgagatggacgaaaaaatgtggttccttgtgttctctctgtaaatggggacctagaccgaggcatg

SEQ ID NO: 495443 - DNA, 98 bp, Homo sapiens
tcgaggccgagcatgggactggggacaagcccgcggcgccgcgggaacgcaccacgcggctggttctttatagctccaagctctacagattcttcaaa

SEQ ID NO: 495444 - DNA, 90 bp, Homo sapiens
gctctggctagcagtcttttggataggtttttagctaccgtaaagggcaaacactgtatccttgatgtgtctggaaatgccataaagaga

SEQ ID NO: 495445 - DNA, 83 bp, Homo sapiens
cggggagcagtatgccggaagctggttttcaggccacaaatgctttcacaggctgtattcatcaccaaagaaaaaacttacac

SEQ ID NO: 495446 - DNA, 75 bp, Homo sapiens
cagctctgaaatagaagatcttgcaagggaacatcatttacagcgagcaatttcagcacagcaagtgtttagaga

SEQ ID NO: 495447 - DNA, 100 bp, Homo sapiens
gaggggacaaatgacattcttcggctgtttgtggctctgcagggctgtatggtggggaacgccaagcacaacgtgcatgtcatgaacatctccacaggca

SEQ ID NO: 495448 - DNA, 127 bp, Homo sapiens
ttcaaccagagcctttcatcctcaaactggattgcctcttctttcaagccctgacttatcaaactggtttcaaagcacagagctcaagtaatttacaccagaaataccaagggtggagatgctccag

SEQ ID NO: 495449 - DNA, 90 bp, Homo sapiens
acccagacccggacgacccccattgctgagccagcggagctgcttgtcgcagatatggccagtacactatgaaccaggaaagcaccacca

SEQ ID NO: 495450 - DNA, 75 bp, Homo sapiens
ggctgctgctgctgctgacgctgctgctgcccggcctcggggagccttcacgtaaatgggtccagtcatgcctcc

SEQ ID NO: 495451 - DNA, 100 bp, Homo sapiens
caacgttgcctcctttgcccctcccacccttattacctggagatgatgacatggataggataccatgacaatcatattgtaattcggtggttctgggctg

SEQ ID NO: 495452 - DNA, 99 bp, Homo sapiens
tgaacgcagtcgccctacagccgctgattccccccgcatcgcctcccgtggaagcccaggcccgcttcgcagagccgtgggtactgccacctgctcacc

SEQ ID NO: 495453 - DNA, 75 bp, Homo sapiens
tgaagagggacgggtcccgcggcgagcgagctcctgagcatatgtaagtggaactcagaaggcaacattccctga

SEQ ID NO: 495454 - DNA, 96 bp, Homo sapiens
gcccgcggcggcgcgctcacccgccccgttcaggtgttcaagcagccctggccagggatcatgcgcacagtctatgggaaccacgaacgctttgag

SEQ ID NO: 495455 - DNA, 100 bp, Homo sapiens
cacgtcgctagcaaacctcatcccgcccgtgaaggccacgccattaaagcgcttcagtcaaaccctgcagtgaaactggaacgccaagctgaagaagaac

SEQ ID NO: 495456 - DNA, 51 bp, Homo sapiens
aaaattctgaactcaggacttggcaacgatgaagaacgatacagatacagg

SEQ ID NO: 495457 - DNA, 113 bp, Homo sapiens
gacagccgcgcgctgagggtctcggggcgggcgccgcgggacctctccgggccatggatgtgaagttcatttccaatccgccctccatggtggcagcggggagcgtggtggcc

SEQ ID NO: 495458 - DNA, 100 bp, Homo sapiens
ttttcagacaagaacgtcaacagcaacctcatcacctggaaccgggtggtgctgctccacgatactgaagtactctttcccagtgggactaagaaccagc

SEQ ID NO: 495459 - DNA, 100 bp, Homo sapiens
gcgaaggtggagcaggtcctgagcctcgagccgcagcacgagctcaaattccgagggtcctctgaaggagttcaaagctgctggccaagctcagtgggga

SEQ ID NO: 495460 - DNA, 100 bp, Homo sapiens
ttcgccagcagcccaagagcctcaaaggtgattctgggggtccacttgtctgtaatggtgtgcttcaaggtatcacatcatggggccctgagccatgtgc

SEQ ID NO: 495461 - DNA, 98 bp, Homo sapiens
aggaccttccacgtctgacgtgtgatctcgagagacctgcgtacattcggggtgccagaaggaaagcatagacatgggaaagcggaaccaccaaaagg

SEQ ID NO: 495462 - DNA, 75 bp, Homo sapiens
gaggccggctgaggagcgccgctgcctcgcctcgcaatggctgccatccggaagaaactggtgattgttggtgat

SEQ ID NO: 495463 - DNA, 100 bp, Homo sapiens
caacctgacataaactagcaagccaacaggtgaagtttcgacacacctcctttaataaaggtacaacagaatagctcgggaatggactcagaagtatgcg

SEQ ID NO: 495464 - DNA, 100 bp, Homo sapiens
aaataatgggaaaggaaaacttggaagctctgcaaagacctacgctccttcatctaatccatggaaaggtaaaataccatgaagattttgaaaaaacaaa

SEQ ID NO: 495465 - DNA, 100 bp, Homo sapiens
cttgcacgtggactgaagctgaccttcgattcatccttctcacctaacactgggaaacaaagcttagcaggagaggagagccagagaagtgacagggaag

SEQ ID NO: 495466 - DNA, 100 bp, Homo sapiens
ccgggatggaggacgttaactctaacgtgaacgcggaccaggagatgcagacaacatatgttttacagagtcttcatttgaggattccagaaatttcaaa

SEQ ID NO: 495467 - DNA, 83 bp, Homo sapiens
cagattgttcctaaaccagaagaggaggttgcccagaagaaaaaggttcagggagcaagtttccgaggttggaaagaagtgac

SEQ ID NO: 495468 - DNA, 100 bp, Homo sapiens
ccacggtggagcagatcctggaggatgtgcggggtgcgccggcagaggatccagtgttcaccatcctggccccggaaggagtacgagagggcctccaaag

SEQ ID NO: 495469 - DNA, 74 bp, Homo sapiens
gcgactactacgaggcgcaccagatgtaccggaccctgttcttcagggtgactatgaccagagcaggaccaaag

SEQ ID NO: 495470 - DNA, 75 bp, Homo sapiens
caaaactgttcggacttccccgttagaactcgcgtttccacttcagagatctggctactgcagcactggggtgtc

SEQ ID NO: 495471 - DNA, 82 bp, Homo sapiens
ctgctgcttgctgaccaaatggtgtcccgacccaggctaagcttgagcatggctgagcaggagcccacagccgagcagctgg

SEQ ID NO: 495472 - DNA, 100 bp, Homo sapiens
ctatctacagaaccgccgtgattcattgtcaggaaaaggatccccatcacaaggaggggagggctaccatcccagctgcaaactctcattcaaggtttat

SEQ ID NO: 495473 - DNA, 95 bp, Homo sapiens
ggcaggctatactgggcagcgctgtgaaaatcgtatcatgaactgatcactaaatatgggaagttggagcctttggcagaagtggacctaagacc

SEQ ID NO: 495474 - DNA, 50 bp, Homo sapiens
cagcgattggacagaatttgtgaaggtactccaaagattcaggtttactc

SEQ ID NO: 495475 - DNA, 75 bp, Homo sapiens
tgggggtgaagctggagatatttcgggtgctggagaatctggtaaaagcaccattgtgaagcagatgaggatcct

SEQ ID NO: 495476 - DNA, 74 bp, Homo sapiens
cactggtggtcccccgctcccggggtccccggccggccaagcaggtctcagctgagtctgctctgatcacccaa

SEQ ID NO: 495477 - DNA, 82 bp, Homo sapiens
ccgttacggccatcacggcggccgcagtggcgtcctggagccctcctcaggctctgacgcccgctctgcggcttcggtgttt

SEQ ID NO: 495478 - DNA, 80 bp, Homo sapiens
agaagtccggaaccatcccttcttccagatgataacaccctatgcccattgtcctgatctgaaaattcttggaaattgtt

SEQ ID NO: 495479 - DNA, 98 bp, Homo sapiens
tgaggcttccccagacacttggaacttgctcttattaaacaagtgaacaaatcaatagatggaacagcagatgatgaagatgagggtgttccaactga

SEQ ID NO: 495480 - DNA, 88 bp, Homo sapiens
ccaggagttcgtctcttacgtctgcggaagtgcagctgcctcagttcttagcgcagagggagacgtggtgggcggtccttcctgtgac

SEQ ID NO: 495481 - DNA, 100 bp, Homo sapiens
gtggttccctggccgcggcgaccggtggtcccacgtccagccgggctcagtgaggtacatccagacactgaaggaccacaggccccggatggtgtgggac

SEQ ID NO: 495482 - DNA, 90 bp, Homo sapiens
gtggagggctctgactacatcaatgccagcttcctggatggttataggctagatggcatcttcctggagctgggcagtgaggagcagaag

SEQ ID NO: 495483 - DNA, 75 bp, Homo sapiens
aagaaagagccctggactgtgaagagtgaggagaccatagctgcacagccaggaagcccagagctgcggttcgca

SEQ ID NO: 495484 - DNA, 50 bp, Homo sapiens
gacaagaacctgaccgagagggagctgctgtaagtaaagatgattccatt

SEQ ID NO: 495485 - DNA, 75 bp, Homo sapiens
tggcaactgcgagtggctcatcgaggatgccctgctctctgacctggagactaccacctcgcacatgccaaggtc

SEQ ID NO: 495486 - DNA, 104 bp, Homo sapiens
tctccggagtgcgccggcggtggcgcctgcggacctaactagctccaggttaggccgagctttgcgggaaagcagcggtgctggagaatctggtaaaagcacca

SEQ ID NO: 495487 - DNA, 50 bp, Homo sapiens
accgtgatcctgttagatatcgaaggtcctcagaatggttggaatgaccc

SEQ ID NO: 495488 - DNA, 90 bp, Homo sapiens
aggagttcgacttcgagttcctcttcgagtttaaccagcgcgacgagggcgccgccgcggccgccccagagcggttccgccaccccagcc

SEQ ID NO: 495489 - DNA, 75 bp, Homo sapiens
agccaaaatcagagctggaacctgaggagagagaacccagcttagactagaaagtctagaagacacacacataat

SEQ ID NO: 495490 - DNA, 75 bp, Homo sapiens
ctcaggctgctcttggctctcaacttattcccttcaattcaagtaacagcatcaacgacaactttctttgccact

SEQ ID NO: 495491 - DNA, 75 bp, Homo sapiens
gcccaacaaacagaggacagtgtgtggaaaagccactggcagtgattcaagtggtgtcattgatctcacaatgga

SEQ ID NO: 495492 - DNA, 83 bp, Homo sapiens
ccatgtcgggttattcgagtgaccgagaccgcggccgggaccgaggtttggtgccctggttgtcagatgttggaaagcagtag

SEQ ID NO: 495493 - DNA, 74 bp, Homo sapiens
cgattgggctgagcagaggacgacatgttgcttttcgtggaggatgaatctggttatagatggacaagagacga

SEQ ID NO: 495494 - DNA, 100 bp, Homo sapiens
tctggcatcattaacggaccttttaccatgaatagttctactccttctacaggtgtgtatgagttgtggaaagtaaaaatgtagccctaccaaaaggaac

SEQ ID NO: 495495 - DNA, 49 bp, Homo sapiens
cttttccacagggaattgagttggcaccactggatcataccagtgacaa

SEQ ID NO: 495496 - DNA, 90 bp, Homo sapiens
acaccgtcacactgagatctgccaagagcgaggagtctctgtcatcgcaggccagcggggctggtcccaggtgtgacaccttcagcaggt

SEQ ID NO: 495497 - DNA, 100 bp, Homo sapiens
caggatggctgcgttgacacgtcttatttaatccacatcataggttctttggcatggacacaagttcagtgggaggattagaattgactgatcagactcc

SEQ ID NO: 495498 - DNA, 83 bp, Homo sapiens
gtcttgcctgtgtcccacttgttcgcggcctatagccggagaattttcatccttgggccttctcatcatgtgcccctctctcg

SEQ ID NO: 495499 - DNA, 80 bp, Homo sapiens
gcagaaggtctctggagacatcttcagcagatggcccactgcgtgaccttggttcagctgtccatttcctgtgaccatct

SEQ ID NO: 495500 - DNA, 100 bp, Homo sapiens
ctgtctgctcctggcatgccctgccacagccactggttatcaagactctgattctgccccggctgcagcaggaaggggagcggatccgcagtgtgctgga

SEQ ID NO: 495501 - DNA, 100 bp, Homo sapiens
caaatattccacactacctacagtgaaatagcatggatttcatccattatgctggctgttatgtacgcaggagcataagcagtactataatggatgtaga

SEQ ID NO: 495502 - DNA, 75 bp, Homo sapiens
catggagtcctacgatgtgatcgccaaccagcctgtcgtgatcgacaacgtttgtttgaagagactgtaccagag

SEQ ID NO: 495503 - DNA, 96 bp, Homo sapiens
gcggagacccgggagcaggagctgggcctaggtctgcgccctggttcaccctgagctttggccacaggcagaactccactggcatcccgtacagcc

SEQ ID NO: 495504 - DNA, 98 bp, Homo sapiens
agagctactggatctcagccttgtcaaagatgccagatgtgggagacacgccaaagctcccaaggtgctggaccagggactgagcgtcccccggagag

SEQ ID NO: 495505 - DNA, 75 bp, Homo sapiens
cagcattgagtgttcaagtttcagagcacctccttttgtggctcgggagacgctaagggcctggcaagagaagaa

SEQ ID NO: 495506 - DNA, 100 bp, Homo sapiens
aaagctggtaatagatgtctgacaaactaaagaaagacttgtgttacgaatgtctgaatctgaacaggctcttaaaggtacttctcagattaaattactc

SEQ ID NO: 495507 - DNA, 50 bp, Homo sapiens
ctgggagggaggcgtctgtcaccacgtaagaacatgagctgcctgtggac

SEQ ID NO: 495508 - DNA, 83 bp, Homo sapiens
cagttgctagtggccatttacaggaatcagccacttcagttcaggcttataccagccagtttgtatcccttgtgatgtttgcc

SEQ ID NO: 495509 - DNA, 75 bp, Homo sapiens
tcccgcgccgcacggtggacgagaagccccatgtgccactcccctgatctgcagcttcggtaggccggtggacct

SEQ ID NO: 495510 - DNA, 83 bp, Homo sapiens
gccgagatggagccctggtgggcacggcgtgcaagggccgagaactactggtggcgtggccagaacacacggacgctgtgtgt

SEQ ID NO: 495511 - DNA, 98 bp, Homo sapiens
tcgaaggcccgcggcgccccgtgctgcaggatttgcagatttacagaatggctgcacattaatggaaagagaagcataaacctatcttctttcattat

SEQ ID NO: 495512 - DNA, 92 bp, Homo sapiens
cggaaggctccctcggtcgcgagtatctccgtttcctggatgtgaacgaatgtatcctgtcaggtataatgtcagtgaatggcaagaaagtt

SEQ ID NO: 495513 - DNA, 105 bp, Homo sapiens
gcgtcacggcgtacgccctcatggggaaaatctccccggtgactttcagcattatcctgtagcgtgggtaaatacgatggtttttgactttaaaggacaattgag

SEQ ID NO: 495514 - DNA, 73 bp, Homo sapiens
aacctcgcggaaagaaatgcttctttgtgaaattttttggaacagaagatcaaatgagagggagaaacttcaa

SEQ ID NO: 495515 - DNA, 82 bp, Homo sapiens
gagaagcagcgcctgttcccggggcagatccaggttcaggctgaaggtgatgtggccgccctcaaccgacgcatccagctcg

SEQ ID NO: 495516 - DNA, 100 bp, Homo sapiens
ctcatgtacgagtccgagaaggttggggtcgcctcttccgaggaccaagaatcgccttcagccctgtctggtgcatccttggcagaaagtgaggaggaaa

SEQ ID NO: 495517 - DNA, 117 bp, Homo sapiens
ccttatacttcagttgttcagtcagattggaccctgtaaaagctgtaaaatgataacagagatctttaatctcatgaagtacgacagctacagccgcttcttaaagtctgacttgtt

SEQ ID NO: 495518 - DNA, 82 bp, Homo sapiens
ctgccaggcagaaggcctctctcctgatacagcaggcgctcaccatgttccctggagtaaaggcatgacttcctggcaccac

SEQ ID NO: 495519 - DNA, 83 bp, Homo sapiens
cctgctgctgcttcaatgtccgcatcgcaaccaccgccctggccatctaccatgtggtacatgtcccagagcaagcacacgga

SEQ ID NO: 495520 - DNA, 99 bp, Homo sapiens
catcaaccgggaccgtggcttcggcttcatccgcttgcatttgacattgtgcagcaaagaaatggttatggagaagcccagtccgctgcttgtagggcg

SEQ ID NO: 495521 - DNA, 109 bp, Homo sapiens
aatgatgacgactcggagggagataatgaatcagaggaatttctctatggcgttcagggccaagaccagcttcaagtctccatggtaccagaaaacaacaacctcacag

SEQ ID NO: 495522 - DNA, 100 bp, Homo sapiens
gaaaaaagaatggatcaaccaagaacgtcaaaaaacactccaacgattgagatcatttaaagatctttaggttggtctcagccttgtgatgtttggagca

SEQ ID NO: 495523 - DNA, 128 bp, Homo sapiens
gaaaagctggaccacctgagccgccgtcttgcctgggtccatgccactgtctactcccagacctcctgccccccgaggtctgcagtctcctgaacccagcagccatctacgccaacaacgagatcagc

SEQ ID NO: 495524 - DNA, 101 bp, Homo sapiens
cggcgcccagctgctgccggcggagactcccaggagctccggagaggaaccctccgaaggtgacttcagaactggaggccagattacagaggggtattgat

SEQ ID NO: 495525 - DNA, 95 bp, Homo sapiens
ctgcgagaagagagagcccgggaagagatgcagcgctatgcggaggatgttggggccgtcaacccaaagagtcgattgatccaattaaagaaaga

SEQ ID NO: 495526 - DNA, 88 bp, Homo sapiens
gacggcgacagtggcggcggcgccatggcagggcttgcaggttttaaaatcaaagatgggaaaatcggagaaaattgcccttccccat

SEQ ID NO: 495527 - DNA, 82 bp, Homo sapiens
gagcgcaccgacatctgcctgctcaaagcggagcgtgctttggacaccatgaattttgatgttataaagggcaagccagtac

SEQ ID NO: 495528 - DNA, 90 bp, Homo sapiens
attgtcatgattgtttatcctaatcccaatgctgaagtaagattgtcttggaaatactaagttggtaacaacatgctgtaccccaaggaa

SEQ ID NO: 495529 - DNA, 101 bp, Homo sapiens
attcaaggaagaaattagaccagatgagaagtcaattctctgtggacattgactcggagctggtggaggagctgccggccgaaatcgagctgtggctggtg

SEQ ID NO: 495530 - DNA, 100 bp, Homo sapiens
aagatttctggcgaatgatttgggatcataacgcacagatcattgtcatgctgccagacaaccagagcttgaaatttgcctgtaatggtactgtgattga

SEQ ID NO: 495531 - DNA, 83 bp, Homo sapiens
ctggaattaggcaaatatggacagagatagaatctcactatgttgaccaggctggtcttgaactcttggcacccaagcgatcc

SEQ ID NO: 495532 - DNA, 82 bp, Homo sapiens
tgacttcaagaatgaagccgcggaccctcgcgactatgttaggtcttaatggtgggaggacgcccgagtgctcggcccgttt

SEQ ID NO: 495533 - DNA, 80 bp, Homo sapiens
aaatgaggcaagttatcctttggaaatgtgctcacactaaactgccaagttttggaccttatctggaacagcgcaagaaa

SEQ ID NO: 495534 - DNA, 82 bp, Homo sapiens
ctgcttttgatgtctgacaacgtggatcgttgttttgaaacaccattaaaaatctcaagtgacgactttgggaaactctggt

SEQ ID NO: 495535 - DNA, 100 bp, Homo sapiens
cggccggtcaggctcgccgccgagctgtaatctatgccagcaattatgacaatgttagcagaccatgcagctcgtcagctgcttgatttcagccaaaaac

SEQ ID NO: 495536 - DNA, 100 bp, Homo sapiens
ttgttgagttgggctccatctttcagcagttggcacacatggttaaggaacaggaggaaaccattcagaggacctctgccctacccccactggactggcc

SEQ ID NO: 495537 - DNA, 75 bp, Homo sapiens
agaaaaacggcaacgtgtaatcagaaggcacagattagaggaaggaagagctgactggaaataccggcatgcagg

SEQ ID NO: 495538 - DNA, 100 bp, Homo sapiens
tgccctggcccagctcaacacctgatttcggcaatgtggctgaaggtggggggcctacttcgggggaccggtggacagctgggccagactgttggttggc

SEQ ID NO: 495539 - DNA, 89 bp, Homo sapiens
ttggggcgcccagctgccaacaccaagatgtcagtattgaatatggtggtgaggcgtgaccctggcaacactgaacctgtgaaagccaa

SEQ ID NO: 495540 - DNA, 97 bp, Homo sapiens
atgaattacgacaagctcagccgggccttgcggtactactatgacaagggcaaaatacttcaaagggaaaaagatccatggagaaattgacattaaa

SEQ ID NO: 495541 - DNA, 98 bp, Homo sapiens
tgtgtgccccttctccacccagagggttatcaatgccgggaagagcacacacaatgaagaccaagccagctgtgaggtgctcactgtgaagaagaagg

SEQ ID NO: 495542 - DNA, 115 bp, Homo sapiens
aaacaacagttttgcattttggaaagtaaattatgcaagctccaggaagcactgaagtttttcagaagaagtgaagtcaagatgaagaaccatttgcttttctggggagtcctgg

SEQ ID NO: 495543 - DNA, 100 bp, Homo sapiens
accaggacctggacccggacccaaagtgccatgtctttaatgtgagctctgtgtgctccgggatggagcaggtgtgcagagggtgagaacccagctctgg

SEQ ID NO: 495544 - DNA, 75 bp, Homo sapiens
aggtggccacctatggcttttggggctcttcggcttcgtggcccggaagcagggcagcaccacggacaacgcctg

SEQ ID NO: 495545 - DNA, 75 bp, Homo sapiens
agcggttccatcctacacttggatggctctgagagattcctctgcgaatctgtttttagctatcaagtggcatcc

SEQ ID NO: 495546 - DNA, 51 bp, Homo sapiens
atgatttaaacaagagatttccacagaaggatatgggccctcacattttcc

SEQ ID NO: 495547 - DNA, 82 bp, Homo sapiens
caaaacctgaaagagctatatttggtgtcctgtaaaatcacagattatgaaacctgtggatttttgtatctaagtttactga

SEQ ID NO: 495548 - DNA, 100 bp, Homo sapiens
tcctggaggcggcgggatggaggcggcggccgacaccaatgggaatcccaatggggaagtcgatgctggtgcttctcaccttcttggccttcgcctcgtg

SEQ ID NO: 495549 - DNA, 100 bp, Homo sapiens
ggaactagtcggacaaagccctcgcgtcggacccttgccagaacttgagaagattgctcacgtctggcatcgtgattcaggtgtttccactgcatgacag

SEQ ID NO: 495550 - DNA, 50 bp, Homo sapiens
ctgcggcttctggttctcacttgtcgccacagctccggagcaagccccag

SEQ ID NO: 495551 - DNA, 75 bp, Homo sapiens
taactgaggaatggcgtgacctgcaaagtgctgagaaggaagagcatgttaatgcaaccctggacctgatcgaag

SEQ ID NO: 495552 - DNA, 101 bp, Homo sapiens
cggagagacgcaataaaccaagcactctagatgccctcaactatgctctccgctgtgtccacagcgttcaagttacagatgtagagctaaaacgactgaag

SEQ ID NO: 495553 - DNA, 101 bp, Homo sapiens
aggtcacagctcgtaacactgatgagatccgaaatggcccataccgacagctcttccacccagagcagctcatcactgggaaagaggatgctgccaacaac

SEQ ID NO: 495554 - DNA, 90 bp, Homo sapiens
ctttctgttcaggccagaccctctgggagcttctcagccattttccacagatcagccttcctctccggttctgggtgaacatcctgaaga

SEQ ID NO: 495555 - DNA, 80 bp, Homo sapiens
gctaaaaacaaagtagatgactgcaattatgctatcaagaggatccgtctccccaatagatccccgtcgaggtcaagatc

SEQ ID NO: 495556 - DNA, 100 bp, Homo sapiens
catcgtggagagtgttggagaaggggtgactacagtcaaaccagccctggtacctgacagtgtaaagaaggagctcctacaaagaataagaacattcctt

SEQ ID NO: 495557 - DNA, 125 bp, Homo sapiens
ccatttggtatctaagagagatgaaaatgtttgtaatttcctagaaggaggattggggtcctgatgacaacttaattgaaggtggaggaacaaaatttgtctgcaaacctggagccagaaacatt

SEQ ID NO: 495558 - DNA, 87 bp, Homo sapiens
ctgggagctgaggaaccagatatcttgaaaagctgccagaaaggatgacagagattgtgagccgtgtgtcgaagcgaaagctgggcc

SEQ ID NO: 495559 - DNA, 83 bp, Homo sapiens
ccggttccttggtgtcatccagccttagcaaaccagagggtgtggatgaatggaacatagctcgcctcaatacagtcttggat

SEQ ID NO: 495560 - DNA, 100 bp, Homo sapiens
gtccgggctagagctggagtcgtgagcgcgcgcccgccccgctctgggaggaccgcgaggattcagtggtctttgaggatgtagatgtgaacttcaccca

SEQ ID NO: 495561 - DNA, 100 bp, Homo sapiens
ctgagaagaagtctgtgtcgctgtgtggtgagctctccaggccaggtgccgcgcggcctccacctctgcggtgccgtgagcgatgtggagatgcaggaac

SEQ ID NO: 495562 - DNA, 71 bp, Homo sapiens
atgaaccgcgccgtgcaactgctcatcctggcctacgtcatcgggtttagtgtttcaaatgacttaaagta

SEQ ID NO: 495563 - DNA, 82 bp, Homo sapiens
cacacagcaagttcctgcttctgggacagctctactgacgtgatgcagccaacacgaacggttgtcatgtgtaacacaactt

SEQ ID NO: 495564 - DNA, 74 bp, Homo sapiens
ctccgacccaaaactttcagatctgtcagctggctacagcaaacatcattcaagatgtccagcaaagggagcag

SEQ ID NO: 495565 - DNA, 97 bp, Homo sapiens
atattcactgggtagaagatctgatcggtcaccaggattctgacaaaagtactctccgaagaggaattgacatagtcatgatgctatggactcctac

SEQ ID NO: 495566 - DNA, 100 bp, Homo sapiens
aagaaattcagcaatcagtacaaagccacaataggagctgactttctgaccaaggaggtgatggtgtttcttagagagaagatcactgaagaaacttctg

SEQ ID NO: 495567 - DNA, 75 bp, Homo sapiens
ctgatgacctgctgctcgtgctgatctcagagcttgtcaggaagatcggaggtgccaagtagcagagaaagcatc

SEQ ID NO: 495568 - DNA, 98 bp, Homo sapiens
tggagagaaccaaccagaacatcggatggcttgtgctccctttacgaggcagcattatgtctctttgaagagacaagcttaccattgttcagaagcaa

SEQ ID NO: 495569 - DNA, 83 bp, Homo sapiens
cgcacctcgtcaccaaggccaagattcttacaaccagtacagaaaatagacatgaatctcacagatcttctgggagaactcca

SEQ ID NO: 495570 - DNA, 74 bp, Homo sapiens
ggaagatgtgacaactaccggaggctgtgtggttccgggtgctggtgctgtggaagtggcaatggcagaagccc

SEQ ID NO: 495571 - DNA, 98 bp, Homo sapiens
gtccagagcctccagggccctgcgccttgctccttttgtctaccttcttctgatccagacaggttccgaggcctcatcctgctgctgaccttcctaat

SEQ ID NO: 495572 - DNA, 97 bp, Homo sapiens
gtggggtggattggagacccaggaagcgggtatgccttcaagacagtgtgttggctttctggaaacatgggatgcagggtaaaagcttcaagtcaga

SEQ ID NO: 495573 - DNA, 74 bp, Homo sapiens
cgactccgagaagtgctcctactctcagagttcacccagggcatgatcttacctacaatgaatggagagtcagt

SEQ ID NO: 495574 - DNA, 100 bp, Homo sapiens
tttccttttcttcagtgaatcggagctcagagcgttgcttcggtttccctccagacagaattggtggatccaaatatttttatccagcccatcacagaag

SEQ ID NO: 495575 - DNA, 75 bp, Homo sapiens
ggtgctgtggtgcagagctagttcctctccagctcagccgcgtagggacatgagagatggctttagaagaaaaag

SEQ ID NO: 495576 - DNA, 98 bp, Homo sapiens
cggctccaccatcgtccccggcgagcagggagcggagtaccagcacttcatccagcagtgcacaggttgaaatcacaaagattagacacctttttaga

SEQ ID NO: 495577 - DNA, 100 bp, Homo sapiens
tgaaaaaatggttgacctcacccaggatccgaaggtccattccatcttcccggcccgcggccccagagctgggggcacccgtctcaccctgaatggctcc

SEQ ID NO: 495578 - DNA, 89 bp, Homo sapiens
gtcctgtctgggtgtcgcgggccggccccgcggggagcgcccccggcgcgatgcccttcaggaaagttaccttatcccatatcacacaa

SEQ ID NO: 495579 - DNA, 74 bp, Homo sapiens
tcacctgaaaatgaattcaacataccattaggatcttaccgattttggaaataatcagggttattttaaaacta

SEQ ID NO: 495580 - DNA, 100 bp, Homo sapiens
caacgggagtgtcctggacccagctgagcgggcggtcattcgcatcgcaggtgagcacctgcggatctgtccccagggctacacctgctgcaccagcgag

SEQ ID NO: 495581 - DNA, 100 bp, Homo sapiens
cagcaaggccggaggacgccgtgcagcacgttccttggacacagcatgaatttgagttggcccaatgggccttccggaaatggaagtctcatcagtttac

SEQ ID NO: 495582 - DNA, 50 bp, Homo sapiens
tcctgtacagcctgcagaactggtgtgtgaagtggaattcgtcttctctg

SEQ ID NO: 495583 - DNA, 100 bp, Homo sapiens
taatcacatgaagaatttctctgaatctcctaaatttcgtagtctacactttctgaattttccaggtgtgagcgccactttgaagggcatccaacccgcg

SEQ ID NO: 495584 - DNA, 100 bp, Homo sapiens
tattggactaccgtgaggatggtgtgaccccatatatgattttctttaaggatggtttagaaatggaaaaatgtgagtctactcttcatcttgtgttgag

SEQ ID NO: 495585 - DNA, 100 bp, Homo sapiens
cggaggacggggccgggcgacctgggcaccagcaggacccgaggccaggagccaggggcccagaagagttacactgttagaccttatgatagccaagata

SEQ ID NO: 495586 - DNA, 87 bp, Homo sapiens
ggactcgtgacatcatcaatgtgtccaacaggtcctgacacacctgcgcatcacctcgcacattgggatcggcctcctcattggcct

SEQ ID NO: 495587 - DNA, 100 bp, Homo sapiens
ctaaactgtgtggggcgcggatgggatccagctgttagtcggacgcccagcggcagcaggatgagtgcggaggcaagcgcccggcctctgcgggtgggct

SEQ ID NO: 495588 - DNA, 98 bp, Homo sapiens
gttcttggtgcccctgggcatcaccaacatagccatcgacttcggggagcagctcatgatggagcagtccaagaagtcctccctcatggtggcccgca

SEQ ID NO: 495589 - DNA, 98 bp, Homo sapiens
cgcaccaggctcatcctgtccatcgtgtgcctgatgatcacgcagctggctggcttcagtggaccactcctggaatgaggccgcccatgggaggccat

SEQ ID NO: 495590 - DNA, 100 bp, Homo sapiens
gtggccccgtgtcctgcaggtattgggagatccacagctaagacaccgggacctcctggaagccaaaaatgaatgcagagtctggatgagccatggacgg

SEQ ID NO: 495591 - DNA, 75 bp, Homo sapiens
aagaagtgcaagagcagaggccttctctagaccttgccaagatggcacaggtggattctccacagttttcctcgt

SEQ ID NO: 495592 - DNA, 100 bp, Homo sapiens
gtatggcagttattggcaggctgccatgacaaccaggcaatgctggatagataccgaattcttatcacaaaggaaagaccacagcaagattctttcattc

SEQ ID NO: 495593 - DNA, 82 bp, Homo sapiens
atcctgaggaggcagctgcggtggcagctgctgagttctcggtgaagactgattcttgctattccaaatcctcttccacgtt

SEQ ID NO: 495594 - DNA, 100 bp, Homo sapiens
ccccctccacggcaccatcaccgttctgcttggagctcggcggcacaaccagcaccatctggtcgcgatggtggacacggaaagcccactctgccccctc

SEQ ID NO: 495595 - DNA, 50 bp, Homo sapiens
gggagagtgtctccagcatcctgcaagtgttgatattcactgatggactc

SEQ ID NO: 495596 - DNA, 98 bp, Homo sapiens
agagacatgtggtacaaccttggtatcatgaactgatcactaaatatgggaagttggagcctttggcagaagtggacctaagaccccagagcagtgca

SEQ ID NO: 495597 - DNA, 50 bp, Homo sapiens
gaccatgctggcaagtctgaaggtcaatcgagtaatcctgcctgtgtctg

SEQ ID NO: 495598 - DNA, 100 bp, Homo sapiens
tataaccaccgtactgaagttccctgatgatcagactcagaaaattttggaaagagaagatgctcggctgatggaatttgctcgccctgatacatcgaat

SEQ ID NO: 495599 - DNA, 100 bp, Homo sapiens
ccgccgccgcctctccttgctgcagccatggagtaagaaccttgatgctgtccatgatatcactgtggcgtatcctcacaacattcctcaatcagagaag

SEQ ID NO: 495600 - DNA, 101 bp, Homo sapiens
gcggggcggcggcggcggcggctgcggcccaatataggggaaagaatttcagctcctgaaagggaaatctactgtcattattgcaaccaaatgattccaga

SEQ ID NO: 495601 - DNA, 101 bp, Homo sapiens
aaaggcccttttcagggcccccaaactgtcacagaaagagctgttaacacttcctagataacggtaatctatgccagcaattatgacaatgttagcagacc

SEQ ID NO: 495602 - DNA, 90 bp, Homo sapiens
ccccagtcggtgctccggggaggtcacctgacgaggaggaccgtaagaggcaatatgagctgctgaaacttgaaagaaacttccagaaac

SEQ ID NO: 495603 - DNA, 100 bp, Homo sapiens
gcagctcaagcagcttcttgcctgtggtaataccaagtttgaggcattgacagttgtgattcagcacctgctgtctgagcctgactggctcatggagaaa

SEQ ID NO: 495604 - DNA, 96 bp, Homo sapiens
atggaagtgggcaaaaagttattggagtggtttaatgacccgagcctcagggataagacaagcaaagtggatcagcaaaggctgcagtcaccagca

SEQ ID NO: 495605 - DNA, 80 bp, Homo sapiens
gggcctcccgcgccccccgggacccccacgccgccgccagacctgcctagagctggaacgttacctccagagcgagccct

SEQ ID NO: 495606 - DNA, 75 bp, Homo sapiens
ctggaaaaccttgtatgaggtcaaatccgagaacctgggccaaggcgacaaggcatggagaatggtggaaagcaa

SEQ ID NO: 495607 - DNA, 76 bp, Homo sapiens
gcgggagcttccgggagggcggctcgcaggggtttcctggagtctttggggaaagaggccctcctggactggatgg

SEQ ID NO: 495608 - DNA, 118 bp, Homo sapiens
atataacttcctggaaagagatgaaaccaggattttatcatggacacgtttcttacttggattttgcaaagtgcaacaatcgaacacagtgtatagtagttactgggtcagatgtgtt

SEQ ID NO: 495609 - DNA, 100 bp, Homo sapiens
aaaacatttaaagttgatgatatgttatcaaaagtagagaaaatgaaaggagagcaagaatctcatagggatcagtgtccttcagggatgtggctatcga

SEQ ID NO: 495610 - DNA, 100 bp, Homo sapiens
ccccgagtcccccggagtccgactcgctacgcgggtcttgcgagatatctggccgcctctgccgcagctggaggctttcggacagtcctttctccagccc

SEQ ID NO: 495611 - DNA, 82 bp, Homo sapiens
ccgcatgcagcagtacgacctgcagggccagccctacggatgctccagaccttgtatgattacttctggtgggaacgtctgt

SEQ ID NO: 495612 - DNA, 100 bp, Homo sapiens
gtctctccaaatggctgctctctggcgttcctcacactccccctgaagttcatctaagatcttcattcttcaaaggatgctcacaactgtattcctgagc

SEQ ID NO: 495613 - DNA, 90 bp, Homo sapiens
gttgcttcctgggtgcactttgataatttgaaagtgtgctggatcgaaggggtattttgccactggaggaaagtggaagtcgacctccca

SEQ ID NO: 495614 - DNA, 75 bp, Homo sapiens
catttcagaggttcaccgccatcattggacccaatggctctgatgagagtccggagtgttgtcatgtgaagcctg

SEQ ID NO: 495615 - DNA, 101 bp, Homo sapiens
gaacatgcagaacacacaggccatggagctggctggggccgcacctgagaaggagcaggggaaagagcttttatcaaaatacaactcaaacctagctactc

SEQ ID NO: 495616 - DNA, 75 bp, Homo sapiens
gacctgacggacaccacccgggcggatgttcccgctgcctgtcaccaacgggaagggccggcccgcctccctggc

SEQ ID NO: 495617 - DNA, 82 bp, Homo sapiens
cgagagcgtggagcgggctgggccagtctgaagttgacaagcagcagcatagaccctggtctgagtatcaagcagttgggtg

SEQ ID NO: 495618 - DNA, 83 bp, Homo sapiens
gcaaggtgatccagcaaggtcggcagagcaaggggcttacgcagaaggacctggccacggtcatcatcagatttgaaatattt

SEQ ID NO: 495619 - DNA, 80 bp, Homo sapiens
cggagcagcgaggtgtgcgctgactgcagcgggccgggtctctaattaacagaagatggcaaagcccagccacagcagct

SEQ ID NO: 495620 - DNA, 100 bp, Homo sapiens
aacctgctgtacgcacccagcctgcgcttcatccacggagtcataccctgctgtgccccccatctggtcggtggagtctgatgaccctaacttggctgct

SEQ ID NO: 495621 - DNA, 74 bp, Homo sapiens
ttgagactcaagtcctggcagagctgttgatcctctcacaagattctgtcatatggagtttcactcttgtcgcc

SEQ ID NO: 495622 - DNA, 75 bp, Homo sapiens
cgccatcgttgctgccttcttcgtcaagagagaagaagaaggaggttcctgctgtgccagaaacccttaagaaaa

SEQ ID NO: 495623 - DNA, 88 bp, Homo sapiens
ctacttggagctggtgctttgcgtgctggtcagcatccggaacaacaggacaatcatatcctgattcagcccttcctccacaaaggca

SEQ ID NO: 495624 - DNA, 100 bp, Homo sapiens
ggaactgaggcctcccaccaaaaccaagcactgacatgccactcatggaggccatgtggaagtgttacatcaccttttgcttggaaagatttactaagaa

SEQ ID NO: 495625 - DNA, 75 bp, Homo sapiens
tcatccagcaggcggtgacccgctaccggaaggccatcgccaagtaatctatgccagcaattatgacaatgttag

SEQ ID NO: 495626 - DNA, 100 bp, Homo sapiens
gatacaagacaagtgtacaccaaatgtgaaggtgatgaggttgaagatctctatgagcttttgaaacttgttaaggtctgccatcatggatgttctcgca

SEQ ID NO: 495627 - DNA, 100 bp, Homo sapiens
agagttatggatattctggtggggagatgaacccaacctagtgggtgtaatacatcatgaactgcaggagcagcccgacggccatggaggctgaagagac

SEQ ID NO: 495628 - DNA, 74 bp, Homo sapiens
gccgtccggagccagccaacgagcggattctcaaagttggattggtggaaacaatgaaccattgacaggcttta

SEQ ID NO: 495629 - DNA, 90 bp, Homo sapiens
ctcaaggcacaggtctcttcctggtttgactgtccttaccccggggaggcagtgcagccagctgcaaggactgatcctttgaaatactcc

SEQ ID NO: 495630 - DNA, 100 bp, Homo sapiens
agcctgctgctgttcggcttcaccctagtctcagtcaagggttatacacggaaagccgctgcgctggaagcgatgaaggactacaccaaagccatggatg

SEQ ID NO: 495631 - DNA, 75 bp, Homo sapiens
ttccatcttaagcaaccagaggaatatcattatctcaatcaggtgttcagattttgcaaatctaaatgtcataaa

SEQ ID NO: 495632 - DNA, 75 bp, Homo sapiens
cgggaaggtaccaaggattggagcacagaggctcagaagcaagtccaggtccccgcggaagccgcggtgtcggcg

SEQ ID NO: 495633 - DNA, 76 bp, Homo sapiens
tggactcagccactttgctgcactgaccacccctggcaaccactaatctgctttctatctatggatttgcctattc

SEQ ID NO: 495634 - DNA, 112 bp, Homo sapiens
aggaagtactgagcctgttggaggaactggcccggaaacaggaggacatgaagatgtgtgtgtctttaagtgctcagtgtcccgagagacagagtgcagccgtgtgggcaag

SEQ ID NO: 495635 - DNA, 51 bp, Homo sapiens
tgacagtctgcatgtgcagttttcagtccaatatcagatggaaatgatgcg

SEQ ID NO: 495636 - DNA, 97 bp, Homo sapiens
tgatggaggggctgcagtttggaaatgagtgtctgaacaagatgcaccagcatgaagatggccctgaggatgacccacagttggtaggcatcactgc

SEQ ID NO: 495637 - DNA, 90 bp, Homo sapiens
ggaggatacaagatcagcttctcccacgatagaggcccaaggacactttgccaccatcaccttgaccttcatcgacaagaacggagagac

SEQ ID NO: 495638 - DNA, 75 bp, Homo sapiens
agtaatggagaagttgatgactctcgtgaacatagctttaataggttaccggtattgtaagaacaagccgtaccc

SEQ ID NO: 495639 - DNA, 80 bp, Homo sapiens
cggacgacagaagcgactttggtgagactctgactcagatgccactgcatcatcagataacagcgagacggaggggacac

SEQ ID NO: 495640 - DNA, 50 bp, Homo sapiens
atttactacagcatgtgatttcagggtcagatgacttgtctgcaaagctg

SEQ ID NO: 495641 - DNA, 98 bp, Homo sapiens
cagtgaggaggacggagaggatgtgttcgaggtggagaagatcctggacatgaagaccgaggggtaacaaatgtggcaattattttggatctatcacc

SEQ ID NO: 495642 - DNA, 98 bp, Homo sapiens
gcccgcctgcggctgctccgggttggtatcatacgtgatcgtttgattcagttcatctctaaattgcagtttgccgtgactgtgcttttgacatcatg

SEQ ID NO: 495643 - DNA, 89 bp, Homo sapiens
ggccaactatcggaacacgagcgagattcctctggttctggtgggaacccaggcattcacagctctgatggagggcaaaatcaataagc

SEQ ID NO: 495644 - DNA, 82 bp, Homo sapiens
ctggcaaagagtcacctaaagttaggcggcactccagccccagctcgcacaacaccatggagtctctgttagagcgaggtga

SEQ ID NO: 495645 - DNA, 100 bp, Homo sapiens
aaatatggacctcttaaaattgtggtgtgccggcatgtgaagaatggggacattctgctactgaaccgacagcccacactgcacagaccctccatccagg

SEQ ID NO: 495646 - DNA, 97 bp, Homo sapiens
gctgggtgcgtggggctgcctcgccgcgtctcgccacggtgtcatggagaaactccagctgggcccagagattctgcagcgggaaaatccaaggctt

SEQ ID NO: 495647 - DNA, 100 bp, Homo sapiens
ggagaaggagggcaaccgagtaggagggcctataacagcccaggacccttgaacatctgtgaagaaatgactattctgcatggaggcttcttgctggccg

SEQ ID NO: 495648 - DNA, 123 bp, Homo sapiens
cgcacctggcctccagcctgagccccagccaggacgagaggatgcggagcccgcagaacctccacagtcaagaggacggctgaccccgcactacatctacccaccagccatcgtgcagcccag

SEQ ID NO: 495649 - DNA, 99 bp, Homo sapiens
ggacatcctggaagctgggaaatgggccagtgtcgttattatccttgtggagtaatagaatcaatactgccaattccagaaaacatcaggaatttgctg

SEQ ID NO: 495650 - DNA, 90 bp, Homo sapiens
ctcaaggaaccacacatgtattaagatttgacaaatcttcctattttcaagctgaaagaatctactgttagaagaagatacagtgacttt

SEQ ID NO: 495651 - DNA, 100 bp, Homo sapiens
gagatcgagaagctgctgcatcacacagaacggctgtaccagaacgcagaaagcaacaaccaggagctccgcacgcaggccctggccaacgtcaacattg

SEQ ID NO: 495652 - DNA, 83 bp, Homo sapiens
gctgtgagacatgtctgagactcctgctcagtgtagcattaagttggaattaacgacctctggaaagatgccttttatgttac

SEQ ID NO: 495653 - DNA, 49 bp, Homo sapiens
aagcaatcatcaagcacctcctcgtgtactaatggtcacttgatgtgcg

SEQ ID NO: 495654 - DNA, 71 bp, Homo sapiens
gagcccgcgtcggctgagagcccacaggcccccacagaggcgtggagctatttcctatgacagttctgatc

SEQ ID NO: 495655 - DNA, 100 bp, Homo sapiens
cggacatctgctttatatttctctcagaccattcccatcagtgagcattacaggtggagtctttcattttggatcaggatgatttggaaaatccaatgct

SEQ ID NO: 495656 - DNA, 82 bp, Homo sapiens
accttaatcgtgtcatcaaactcctcgaagagactgataaattaatgaaggagttcccccttctgagtatgttcaatatcca

SEQ ID NO: 495657 - DNA, 100 bp, Homo sapiens
gatcgtgcgggtcgcaaagggaagccgagtgctcctgcggctcccagactgcaaccagtttccatcttgctgctgcaaaaggacacgtggaatgcctcag

SEQ ID NO: 495658 - DNA, 71 bp, Homo sapiens
ataacaaaagctgctcagagtctcaatgaacttgactcaatgatgaggcacggcggctcattgctgatttg

SEQ ID NO: 495659 - DNA, 75 bp, Homo sapiens
tggcggattacttcaagcagtggattaatctgaaaaaggaggcaagtgaggcctatctggttggcctttttgaag

SEQ ID NO: 495660 - DNA, 75 bp, Homo sapiens
cgcagtcagccggggacctcgtccgagcccacccgcctttggaggaaagtatgtgatggtgatgggagtggttca

SEQ ID NO: 495661 - DNA, 100 bp, Homo sapiens
ccgccgattcctcctccttggtcgccgcgtccttggctggcgtaaccagcatttcgatggcttcgtggtggaggtctggaaccagctgctaagccagaag

SEQ ID NO: 495662 - DNA, 100 bp, Homo sapiens
aagtcaatgttccgggaagttcttccaaagcaagtgtctgtgtttcactgatggcaagactgtggcccccatgcccccagcacaggaccataagcgatta

SEQ ID NO: 495663 - DNA, 82 bp, Homo sapiens
cggaggaccggccaacaggatcgctcaggatggacgtcttctactcaaggcgtctctggccgagcctctttttgtggaaaac

SEQ ID NO: 495664 - DNA, 100 bp, Homo sapiens
gtgcaaggggagtcgtggcgtcgtctgcgaccgctgccttctcgggcgaggattaaatccaccacacagggtgaaatctatctccatgacaacattcaca

SEQ ID NO: 495665 - DNA, 98 bp, Homo sapiens
cgaactgggtgcggggacaggcatcgtggggatcttggcagcgctgcaggtctatcaggtgtttgaaagtgtggctaagaagtatgatgtgatgaatg

SEQ ID NO: 495666 - DNA, 100 bp, Homo sapiens
cttgatcaggtggaacagattcagaaggagcaggattaccaaagggctaaagaattacctccaaagccattgtcaagaccacagcagtcatctgcaccag

SEQ ID NO: 495667 - DNA, 73 bp, Homo sapiens
agcagttgctgttcgaaagcatcttgagaggaacagaaaggccaaggatgcaggacagagaaccactatttac

SEQ ID NO: 495668 - DNA, 86 bp, Homo sapiens
ctaagcaggagagaagctactaaagatttaggcctattaaaggaaggcaggaagaactaaaggaagtaattgaacgttttaagaaa

SEQ ID NO: 495669 - DNA, 99 bp, Homo sapiens
ccgagcagcgccagcggccgagcgggcggcttcctggcctgggcgctccggtggcggcggagctgtgagccgtgagctttgaggcggtgggatgtgtca

SEQ ID NO: 495670 - DNA, 96 bp, Homo sapiens
tgataatccaccgcatcctggatcaactgtgactacacttgtcaacacaagcaacaaaggcccatctggtaaaaagaaagggaggtcaaagaaagc

SEQ ID NO: 495671 - DNA, 90 bp, Homo sapiens
taaagggaaggacaaggaattacataacatcaaacgtgggagagaacattgaaagtattctctaagctatttgaagagagtgactaaatg

SEQ ID NO: 495672 - DNA, 74 bp, Homo sapiens
aagaacgggaacaaaactctggtatgaaaatgaaagtcttcagaatggaaggaagtcaactgaatttccaagaa

SEQ ID NO: 495673 - DNA, 75 bp, Homo sapiens
agagctgaagagacctggagccgacagacgattgatatcagtaaatgccattatttagtggatttggacaccatg

SEQ ID NO: 495674 - DNA, 75 bp, Homo sapiens
atggaagatcaagctgcaagtgcttggaagccctcctatgacactgaaacagatcctagtgagggattgatgaat

SEQ ID NO: 495675 - DNA, 100 bp, Homo sapiens
aaatgatcaaataatagttcatgcatcaaatgcaataggaagtacttctggaggacatgatcttatgaattcaacacatgaagatttacaacttgataaa

SEQ ID NO: 495676 - DNA, 100 bp, Homo sapiens
aacagtgttaaatatcagcaaagaaaacatgaccctcacagaaaatggattcaactaatgaaactactgcccattccgatgctggcagcgagcttgaaga

SEQ ID NO: 495677 - DNA, 75 bp, Homo sapiens
ctgagaggggctgcggccggagcgggcggctgagacaaaggcgacgccttgctgcttctaaggaggctgaagctg

SEQ ID NO: 495678 - DNA, 51 bp, Homo sapiens
aaaattttcagaaaatatgtctaaattgaatagttctgtcccaagaagaac

SEQ ID NO: 495679 - DNA, 82 bp, Homo sapiens
agccgatccagcctgcggagcctgtggggcagcaacttgagttggtggaaccaagtggctggattcatgttcccttaactga

SEQ ID NO: 495680 - DNA, 97 bp, Homo sapiens
gagtgctagaatctactactgtctggccactggctgctgagcctggttcctgagtgggaagggcttggtgatctatccgaaaattggagacaagctg

SEQ ID NO: 495681 - DNA, 83 bp, Homo sapiens
aggcgctgcgccgcaacgccgagcgcaccgacatctgcctgctcaaaggagccttcacgtaaatgggtccagtcatgcctccc

SEQ ID NO: 495682 - DNA, 75 bp, Homo sapiens
ctgcgccccctccagctgctgagaaatctcccaagcctaagaagaagaagcacaggaaggagaaggaggagcgga

SEQ ID NO: 495683 - DNA, 83 bp, Homo sapiens
gcgttgcgtgccctacttcaaggataagggcgacagcaacagctctgccggctggaagggactggtgattgcagctggaagtg

SEQ ID NO: 495684 - DNA, 100 bp, Homo sapiens
actgcgctatcttccctggatttttcttcaccttttccttactcatgagccaggcactacctggcagcaccatctaaacctgtatcatctgctgtggtcc

SEQ ID NO: 495685 - DNA, 75 bp, Homo sapiens
aaagttaaattaaagtatcagcatttaataacaaatagctttgtagaggtgacctaccagttgaagattccgtgt

SEQ ID NO: 495686 - DNA, 97 bp, Homo sapiens
tggatcccacctacggtctggagagcagctgcattgcaggcacagggcccgatgagccagagaagcttgattttaacctttgagaccaagaacccgt

SEQ ID NO: 495687 - DNA, 76 bp, Homo sapiens
gaagatgcccacggactacatcaggaacggggtgctctacgtcacggagaacccagccctcgatgacggcctcgcc

SEQ ID NO: 495688 - DNA, 124 bp, Homo sapiens
gaatgtttcatcattactaacaggatattcctcatgacattgctgtctgggtaaagttcaccttgaattaaaactgaatgaactgataacggagaatggaactgtatgccagcagcttgttgta

SEQ ID NO: 495689 - DNA, 74 bp, Homo sapiens
aaaatgattaaacatgctcttgattttatacatcatttcaatgaaggagttgtagatcttatggctctgacagt

SEQ ID NO: 495690 - DNA, 87 bp, Homo sapiens
ggacagctgggaattgctgaattagaactgcagaggttcctctacagcaagataccccagaatcttccatgctccgtcacactgcag

SEQ ID NO: 495691 - DNA, 90 bp, Homo sapiens
tttatacgtttatatgctctgtctgcagttctggaccagaatacctcaaacgtctaccattacagtgggttttttatcagcaattggaca

SEQ ID NO: 495692 - DNA, 76 bp, Homo sapiens
gcttgctgtcagcaaatgtttgggacaaactctgcctgggcgagtccttttcctgcgttatgtcgttcagacccta

SEQ ID NO: 495693 - DNA, 88 bp, Homo sapiens
ccgtgtctctggattcaagtcccaggagtcctgaccagagagcagactgaacctccattgaatactccagaaaacagggaatatactg

SEQ ID NO: 495694 - DNA, 82 bp, Homo sapiens
ccaaatcttgcggcaacgcccccgggacatgcatcgtcccctggactctctcaaaggaagctcaccagtgtgggaaggggct

SEQ ID NO: 495695 - DNA, 100 bp, Homo sapiens
gcctccagagtagctgggattacagcatgatctccttctgtccagactgtggcaaaagtatccaagcggcattcaaattctgcccctactgtggaaattc

SEQ ID NO: 495696 - DNA, 83 bp, Homo sapiens
ctgggtttcccgggagatcccaggcggtgacagagtggagccatggctagagacttcccaagtaagaagcggaagaggagccg

SEQ ID NO: 495697 - DNA, 99 bp, Homo sapiens
gaagaagcttgggctcacttccacaaatgccagaggcattgatgtgcagcaggtttctttagtcatcaactatgaccttcccaccaacagggaaaacta

SEQ ID NO: 495698 - DNA, 100 bp, Homo sapiens
cgcgcgtctgggctcccacctggtgctcactgcccacactgaggctctcctgcagaagactcagatgccactgcatcatcagataacagcgagacggagg

SEQ ID NO: 495699 - DNA, 101 bp, Homo sapiens
ggctctgccgtgccacctgctgcacccacgaatctgcccacccctcctgtaacccagcctgtttcacttcttgatgatgctgtgtatctggacaatgagaa

SEQ ID NO: 495700 - DNA, 91 bp, Homo sapiens
ctacatcctgcgggtgcctttgaaaatcaacgacaacttgagcacaggggacggcaaaacagaacagaaaggcggagataaaaagaggggt

SEQ ID NO: 495701 - DNA, 100 bp, Homo sapiens
aagaccaatttttacgtctagatttccatgcccatggaaggaagtattgatgaagatgttgtggtgatagaagcttcctccactccccaggttactgcca

SEQ ID NO: 495702 - DNA, 50 bp, Homo sapiens
taaggattccaagtaactcttatttgatggacttcagcagaaatctttat

SEQ ID NO: 495703 - DNA, 100 bp, Homo sapiens
gccgccttcccaggaccctcagggagagcgggcagccttccaggtggacagctgaagaataagttcatgaaaaaattgccacgtgatgcagaagcttcca

SEQ ID NO: 495704 - DNA, 98 bp, Homo sapiens
tgttcttcctagcttccctgtatgtgatgatgaccgtcaccaactggttcaagctcgcgggattgatgtgcaacaagtgtctttggttataaattatg

SEQ ID NO: 495705 - DNA, 50 bp, Homo sapiens
ggcagaactgaacgccatcattgggcttcaaggttactgactttttatga

SEQ ID NO: 495706 - DNA, 73 bp, Homo sapiens
gccacacaggtagccctggacggcattcagtgttttgggtgaggacgcttgagcggaagttagaagcaaaaat

SEQ ID NO: 495707 - DNA, 82 bp, Homo sapiens
tgttaacagactgcttttacacctactactatactggcaattgctggagaagattttgcaattgttgcttctgatactcgat

SEQ ID NO: 495708 - DNA, 83 bp, Homo sapiens
cggatttcacgccaagtccctatgacactgactccctcaaaatcaagataacgaaggaggcccaacttcattcaataaggagc

SEQ ID NO: 495709 - DNA, 100 bp, Homo sapiens
gtggagctggctgtgaccatggagaacaaagcagaggtcctttctgaaagatctgctactgaagtagacaacaattttagcaaaccacctccgtttttcc

SEQ ID NO: 495710 - DNA, 100 bp, Homo sapiens
catgggggaacatggcctggagctggcttccatgatccccgccctgcgggagctgggcagatccaggtgattgagaatgatagagccagcagaggaggac

SEQ ID NO: 495711 - DNA, 83 bp, Homo sapiens
ggaagggtttcccctcgtcccccctacaatgcagatcttcgtgaagactctgactggtaagaccatcaccctcgaggttgagc

SEQ ID NO: 495712 - DNA, 101 bp, Homo sapiens
tgggaagaagatttgtaaagaaaactcttagtggaagatagatgataagcctgtaaaaattgacaagtgggatggatcagctgtgaaaaactctttggatg

SEQ ID NO: 495713 - DNA, 101 bp, Homo sapiens
ctcggcggggccagccggcgagtctaaacccaagagcggcggcactccccctatcgcacactggagccagtgcgtcctccagtggtaccaaatgattacgt

SEQ ID NO: 495714 - DNA, 101 bp, Homo sapiens
gtggccattaagagccagccaccaggcatctcaagccagcacttcacctaccaggaaatcccttctgagtgatgtcacatcttggcaggggtggaggagag

SEQ ID NO: 495715 - DNA, 73 bp, Homo sapiens
gagcctgacaactggatgaaggagacgggtggacttcccgctggatcgaatccaaacacaagtcagattttgg

SEQ ID NO: 495716 - DNA, 60 bp, Homo sapiens
gaggcctgggaagccaacgaccacacgcagttgaagaagcctcagcggaggcgatacggc

SEQ ID NO: 495717 - DNA, 90 bp, Homo sapiens
tcatcattactaacaggatattcctcatgacattgctgtctggatgaagatgagctggattcccacaccatggtgaagactagtgtggag

SEQ ID NO: 495718 - DNA, 65 bp, Homo sapiens
gagaccaacctggccaacatggtcatcctgtacagttctacagcatgaataggcctgcctctcgc

SEQ ID NO: 495719 - DNA, 51 bp, Homo sapiens
gcagatatccgtgaaggctctagggctgagccggatcttgaagactcgtgg

SEQ ID NO: 495720 - DNA, 83 bp, Homo sapiens
cgggacaccccggaagctgggaaatgtggccaacagtgttgcaaacaggaacccgaggttttcacttcactgttgatgggaac

SEQ ID NO: 495721 - DNA, 97 bp, Homo sapiens
ggctactcttgatcctctccggctgcttggtctacggcacagttgatttatgaagactctatggatctaatcgcaaagctaccttgtgttgcagcaa

SEQ ID NO: 495722 - DNA, 100 bp, Homo sapiens
gcctcccctggccagaagcggcccctgtggctgtgtaagatctgcagtgagcaaagagagccagatgaaaactcgctggatttttcctcctgtatgttac

SEQ ID NO: 495723 - DNA, 100 bp, Homo sapiens
cgcggccgcaccttcccgccttctcaggtgaccgggctggtccacaagtgggcatggaccaaagacgacgtgatcctccacgtgctcccgctgcaccacg

SEQ ID NO: 495724 - DNA, 75 bp, Homo sapiens
ggaatggtgcaggcaggcgctgagaaggacgcgcagtccatctctctcaggggactcattctcacagttccggtt

SEQ ID NO: 495725 - DNA, 83 bp, Homo sapiens
ctatgatcccacatctggaatctggaatgaaatcttccaagtccaaggatgtatattgatgatgttaagaagttcaaaccggg

SEQ ID NO: 495726 - DNA, 96 bp, Homo sapiens
tattacagtctgctgggtttttcagcattgaccaggtttatgtctcattggatcaacctgtgactgctttaaatcttttcaaacaaggcttagata

SEQ ID NO: 495727 - DNA, 50 bp, Homo sapiens
ccatgttcctctccgcggtcttctggcttatttcaaaacctttgtccctc

SEQ ID NO: 495728 - DNA, 100 bp, Homo sapiens
ccagagtatctgaaagtatttaaggtatggaacccttcagatcaaagcttaccaataaattcagtatgtagaacagattaacgtagttgaaatgaggaag

SEQ ID NO: 495729 - DNA, 51 bp, Homo sapiens
actgtgcagctgttacaccaaagaagctcattcacacagaagacccattta

SEQ ID NO: 495730 - DNA, 75 bp, Homo sapiens
caccgggatagagaacgggaccggcaccactgagaaaggtcctgtccctgctatcagtggggcactgaagaaagc

SEQ ID NO: 495731 - DNA, 74 bp, Homo sapiens
gcgagtttccgatttaaagctgagctgcgaggaaaatggcggcgggaggcctccggtgtggctgtctctgatgg

SEQ ID NO: 495732 - DNA, 75 bp, Homo sapiens
cttgaaccttgggaatattgagcggagctggagtttgttcagatcatcatcatcgtggtggtgatgatggtgatg

SEQ ID NO: 495733 - DNA, 98 bp, Homo sapiens
aatttgaaattatgattgacagacttgaaaaagccagttctaatcagatgctattaactgagtacttggatatgaaaaatactcgtacggcctctgaa

SEQ ID NO: 495734 - DNA, 75 bp, Homo sapiens
ccaactcgccctcatcagtcagctctgcggctccatcacccctgaggtagagcacgtggtgaacgccatcctctt

SEQ ID NO: 495735 - DNA, 74 bp, Homo sapiens
ccggggcctagcgctatgcctgcggcggagactgcatcaggctctcgagcccacaggcggttttgtgagctgct

SEQ ID NO: 495736 - DNA, 92 bp, Homo sapiens
agaagcagcgccacacccgggaacagcgctaggcggcggaggcgcatggcggcgagacaatgcagatcttcgtgaagactctgactggtaag

SEQ ID NO: 495737 - DNA, 75 bp, Homo sapiens
gcctcgccgcgtctcgccacggccaaagatgaagaggaagcctttctggattggagtgatgatgatgatgatgat

SEQ ID NO: 495738 - DNA, 119 bp, Homo sapiens
ggcgaccggcaactactttggattcacccacagcggggcggcggcggcggcggctgcggcccaatataggtgcagctgctagcaaggaaaattatcttttcatatttaaatctgctagt

SEQ ID NO: 495739 - DNA, 97 bp, Homo sapiens
ggacaccctggctgtcatccgccacttccgcgagcccatccgtctcaagactgtgaaaccagatcagtgtgcgtgtgaccaccatggatgcagagct

SEQ ID NO: 495740 - DNA, 88 bp, Homo sapiens
tgccccttctgtcagcaggacaatttccctgaactaagcgaggagtacgaccccagcaaagcgacctttgtgaaggtggtgccaaccc

SEQ ID NO: 495741 - DNA, 121 bp, Homo sapiens
aagatttgctgggtatgaataatgactttcctccaagagcacattgcctggtaagatgataatatcgtctactgcattatttttggctgcaaaagtggaagaacaggctcgaaaacttgaa

SEQ ID NO: 495742 - DNA, 80 bp, Homo sapiens
cctttatgaaccagtgtatcccaactaaattctgtccaacgtttaataaatcaatggaggaacagggtaaatgaactgaa

SEQ ID NO: 495743 - DNA, 75 bp, Homo sapiens
ggcggtccctgtgacctgtggagacacggccagatctgccctccaacttcagattttcctgtccttgatcccagc

SEQ ID NO: 495744 - DNA, 96 bp, Homo sapiens
ggaagatgaggaggtcgctgagagctgggaagaggcggcagacagcgggacaaagccacagacccaagcatgtcggaacaggattggtcagctatc

SEQ ID NO: 495745 - DNA, 100 bp, Homo sapiens
gtgtgttgagagcttctcagactatccacctttggcagcgatgacctctggggtcactgtcccaggagggacttcacctggaacaagagctggaggcagc

SEQ ID NO: 495746 - DNA, 50 bp, Homo sapiens
ctcccctcaacctcaactccatggagatcaaagacgctggccttcagacc

SEQ ID NO: 495747 - DNA, 83 bp, Homo sapiens
gaggcaaggagctaaagcagcgtgcgttcagccctgggtgttatagttttgccgctggactcttccctcccttcccccacccc

SEQ ID NO: 495748 - DNA, 95 bp, Homo sapiens
tgtgctttttcaagggagctgataaagaacttcttcccaaaatggacccctttgctgatgcaagtaagggtgatgacctgcttcctgctggcact

SEQ ID NO: 495749 - DNA, 75 bp, Homo sapiens
ggaaacacaaagccggctacgcgctgcgaggttttataggatcacattgacaaaagtaccatggagttttatgag

SEQ ID NO: 495750 - DNA, 75 bp, Homo sapiens
atcatttctgggagaatgccgaagactgcatttcaacttcaagaatggccaacagagattttgagaaacacattg

SEQ ID NO: 495751 - DNA, 82 bp, Homo sapiens
aggaagtgcggagccagcctgagttgggagaagagctccagagagttgcccccaagtttcctggcagtgtgtgatactgagg

SEQ ID NO: 495752 - DNA, 82 bp, Homo sapiens
acacgatggtgaacctgggccttcagaatgcctgcgatgaagccatctatcagtccgaggttatgcgtctcaatgatcccgc

SEQ ID NO: 495753 - DNA, 100 bp, Homo sapiens
cagaatgagaaagaaaaaccacaggctaatgttccttcagctctgccatcactccctgccgggtcaggtttcatgttagggtcttacagtgtgaatgacg

SEQ ID NO: 495754 - DNA, 96 bp, Homo sapiens
ttccttccagaaatgatggtggatcattgctctttgaattccagtcccgtgttgggggccgtcccgctcctaaggcaggaagatggtggccgcaaa

SEQ ID NO: 495755 - DNA, 90 bp, Homo sapiens
cagcagctgcattgaaaaatgctggccaggctgtcacaattgttgcacaatatcgacctgaagaaccaccgggaggaactgggccattct

SEQ ID NO: 495756 - DNA, 114 bp, Homo sapiens
tgcagaaggaggtcctgccgtccatgcggaagatcgtcgccacctggatgctggagacttcccaagtaagaagcggaagaggagccgctggaaccaagacacaatggaacagaa

SEQ ID NO: 495757 - DNA, 75 bp, Homo sapiens
cggccacctggagtggcagaagattgcagaggagctggggttctgtgccaatgacccggaggtgtttgttcaggc

SEQ ID NO: 495758 - DNA, 134 bp, Homo sapiens
cgcggccaggcgattcggtgaagcgattcctgcaggcgttggttcccctctttgacctgtctacatcagcatcagcatctgcgtcaccatttcaatctgcatggtatagtgaatctgagataactcagggagca

SEQ ID NO: 495759 - DNA, 100 bp, Homo sapiens
tccccccacagaccctggaagaaagcccctctcacacaggttggatggcaagcatgtggtgtttggcaaagtgaaagaaggcatgaatattgtggaggcc

SEQ ID NO: 495760 - DNA, 100 bp, Homo sapiens
cacctcccgtgaatctaccatgtacccaaaagcagtgcaggacctctgcggctggagaatccggagcctggcttgtggccccataggctccttcaatttc

SEQ ID NO: 495761 - DNA, 54 bp, Homo sapiens
tgaaagatgtggatgatgggctacagggtttcaatccacctgttcttgtttttg

SEQ ID NO: 495762 - DNA, 100 bp, Homo sapiens
gaggagctaacagagatagagcgtttggaagatctggatacctgtatggaaagtgacaatactggaggatcctgatcagaacattcacctgaaaaacttg

SEQ ID NO: 495763 - DNA, 73 bp, Homo sapiens
actgcagaactgggttctggactttgggcgtcccattgccatggatgtgtttcacatggtagttgaagtacca

SEQ ID NO: 495764 - DNA, 120 bp, Homo sapiens
ggtccactgaaaaattcttcagattggaaaataccacaggatggagactacgagtttcctcgtcacgtgttcaatatgctaaagaagtatgtccgcgcagaacagaaggacagacagcac

SEQ ID NO: 495765 - DNA, 128 bp, Homo sapiens
cagtccccagtgagggtgtacaaatacccctttgaattaattatggctcacttaaatatagatccggtggtatggatgagaaaacaattgctttacttgttgctggactagtgatcactgtcattgtc

SEQ ID NO: 495766 - DNA, 74 bp, Homo sapiens
acggacaacctcagaggacaacgaagtgttcggtggggtggaagacaacccgtgagtattacaccttcatgtgg

SEQ ID NO: 495767 - DNA, 75 bp, Homo sapiens
gacacactgagccagcctgaggccctctccaggatcttggtgccagatcaccggcgtaatcaacccagcgttgga

SEQ ID NO: 495768 - DNA, 98 bp, Homo sapiens
gggaatataatcctgaggtgtttgacaaaacataccaattcttgaatgacatccgagcgaaagagaaagagggactttcagttaccttgatgatgtcc

SEQ ID NO: 495769 - DNA, 100 bp, Homo sapiens
gaacaacatatcgtatcagatggcagacatacatcatttaaaggaagctgcacacatacatgtaagagaagcaaaaatgtcagatgatatcaggaaaagg

SEQ ID NO: 495770 - DNA, 75 bp, Homo sapiens
acattccaagggaaactgatatgaagctgctagcagaagaaagtcttcccacaaccccattttatttcatattgg

SEQ ID NO: 495771 - DNA, 101 bp, Homo sapiens
gcttcagagagcgatggaaagcaacaccttccaccatgaccacctcagcaagttcccacttaaataaaggcatcaagcaggtgtacatgtccctgcctcag

SEQ ID NO: 495772 - DNA, 100 bp, Homo sapiens
cagagctgagggagcaagaggtgtcggaggtctcatctttgaactactgccggagcttctgccaggtattgttgcagcatctggcagtgagactgaggat

SEQ ID NO: 495773 - DNA, 75 bp, Homo sapiens
cccaatgctgaccaaggaggagcctgttccagaactgctggaagctgaggttttgaacgaagaatgtgatcagaa

SEQ ID NO: 495774 - DNA, 75 bp, Homo sapiens
tccggggaaagccgtggccccgagggcggatccgaggtttctgaaggattgtcattcttgcatagcagtgtgaaa

SEQ ID NO: 495775 - DNA, 75 bp, Homo sapiens
caacacataaaaattatttatccaacagctcctcccagatataaagatgaagcgcagctgtataaagaagagcac

SEQ ID NO: 495776 - DNA, 98 bp, Homo sapiens
cgcccgggcatgcgaagccgtccctccccggccctatccgatgtacccggccacaacatccctggtgaacgtcgtgcccaaactcaatgccacaggga

SEQ ID NO: 495777 - DNA, 100 bp, Homo sapiens
gaagataaagaaagcacatttggttatgtgcatggggtctcaggacctggtgcagataaaactctagactccagtgcagaggatcatactttgagtgaac

SEQ ID NO: 495778 - DNA, 96 bp, Homo sapiens
ctacaacaagaagcagctcttattagaagtcgagaaaaaccgttggctctgattcagaatgaggacctaatttgcttcaaagatatcaaaccagca

SEQ ID NO: 495779 - DNA, 98 bp, Homo sapiens
catatcagatgcctcgcagagcaccaggcccaccgtgaaagatatggccgcgtggaaagtgtcaaaattcttcccaagaggggatctgaaggaggagt

SEQ ID NO: 495780 - DNA, 100 bp, Homo sapiens
ggactcagaggccgccatcaaccgccagatcaacctggagctctacgcctcctacgtttacctgtccatgagacccttccaggcctgcaagcgatttgac

SEQ ID NO: 495781 - DNA, 100 bp, Homo sapiens
aggagtggaatattgagaaggctgaggaactcagcaaccagctagctactcgagaggttgtactcagactatctctactttgcaagttcgaataaatccg

SEQ ID NO: 495782 - DNA, 112 bp, Homo sapiens
cccccattgcagaccagttccagcttggcgtgtcccatgtttttgagtatatccgttctgagacatacaaataacatccacgacagcgatggcagttccagcagcagccacc

SEQ ID NO: 495783 - DNA, 83 bp, Homo sapiens
caacagcagttctgtggagaatatgcctatgtaactgtttggcttcagctgttctggaggctgtggaaaacaatactctaagc

SEQ ID NO: 495784 - DNA, 100 bp, Homo sapiens
gccgggctcagcggctctgactctggaggaggagctgcaggaagcgatccggagggcgcagctgtttgagggcatgaaggcgttcaaaggcaaagaccag

SEQ ID NO: 495785 - DNA, 140 bp, Homo sapiens
tccatggtgaggataagctcatcagcgtggaggacctgtggaaggcatggaagtcatcagaagatggccgccaagaacgagtcatgtttgacaaaattacatctcgaatccagaagctttgttatggactcaatatggat

SEQ ID NO: 495786 - DNA, 90 bp, Homo sapiens
ggcggggagcgaccgggagcggcggcagcggcggcgcggaggcggctgaggtgcgagccgggaccatggctaaacctcctggatcattag

SEQ ID NO: 495787 - DNA, 75 bp, Homo sapiens
gttcaggatgtgtggtcttctcttcgactacccagtggggttgtgtccactgtggtccccgactctgcccacaag

SEQ ID NO: 495788 - DNA, 51 bp, Homo sapiens
ccatggtcgtctttgtctgccggtgaaagaagaacgtccagaaaaaatacc

SEQ ID NO: 495789 - DNA, 89 bp, Homo sapiens
agctgcgcccgctgccagcacacgactacttcgagttcttcgccgccgacctgagagcccccctccatgcgcctgaaggcccgacccag

SEQ ID NO: 495790 - DNA, 90 bp, Homo sapiens
tgtggtggaatatgccaaggaaaaactggagagcttcatcaaaaatagtgatagctttgataaaaacaaagggtcatcctttctagaaag

SEQ ID NO: 495791 - DNA, 82 bp, Homo sapiens
atctcgggctcggaacgagactgcacggttcccgtgtcagtggctatgatgacacctcaagttatcactccccagcaaatgc

SEQ ID NO: 495792 - DNA, 90 bp, Homo sapiens
atcgaagagtccccccaagtctcctgaagaggaaggagcggtgtcctcttaagaaaatggttctgcggggagtgtctccagccctgcctg

SEQ ID NO: 495793 - DNA, 50 bp, Homo sapiens
aaaactacaggcggggacggcttctcgaaaccaggaagcaaccactttcc

SEQ ID NO: 495794 - DNA, 75 bp, Homo sapiens
ttgcagacgcactgctacaaggtccatgaccggaaatgtttcaacgtgcgcaagcgttgcggcggcgggcagagg

SEQ ID NO: 495795 - DNA, 75 bp, Homo sapiens
acctcacaaccgagcaaattgaagagacgttaaaatacttccctgaataccactagaaacatacctgtaaccaga

SEQ ID NO: 495796 - DNA, 120 bp, Homo sapiens
ggcttctcgactcggtcctgtttcgacagcgaacatgtcgcggcctgtcaggtgagaagccctaccactgcaactgggacggctgcggctggaagtttgcgcgctcagacgagctcacgc

SEQ ID NO: 495797 - DNA, 73 bp, Homo sapiens
gaattcggtccagaggattacggcgaagaggtgagacgtggtcttgtaacacagtggttaagaatgtgacttt

SEQ ID NO: 495798 - DNA, 82 bp, Homo sapiens
aatttaagagcatctcccttcttattacagtatattcaagaagagattctgctagcctaccaagaatccaagacacattttg

SEQ ID NO: 495799 - DNA, 101 bp, Homo sapiens
cgctcctccgccccgtgtctgcacccgccaaggtacggaatggccacatcaaaagaatcactgataatgacatccagtccctggtgctagagattgaaggg

SEQ ID NO: 495800 - DNA, 82 bp, Homo sapiens
tgcccagaggtcttcccgctgctccaggaagccaggatgtaccacctttctggcaatgagatgaaattatgcagcaggaagt

SEQ ID NO: 495801 - DNA, 100 bp, Homo sapiens
ctggaggtcagcgtgggcagttctatcagtgttgcaggcctgagtgttccttccagcatgtcggagggggagtcccagacagtacttagcagtggctcag

SEQ ID NO: 495802 - DNA, 101 bp, Homo sapiens
gaagatgaagttgaaggactaaaacgcttaatgacagagatgaagctactgaatctttacatcaaacgtgcacaaacaggttctggaggagctgatcccac

SEQ ID NO: 495803 - DNA, 83 bp, Homo sapiens
cccgaacgacgcgggcgagcggggctttggacgccggtggagacgcaggcgaggtgagaagccctaccactgcaactgggacg

SEQ ID NO: 495804 - DNA, 100 bp, Homo sapiens
gatcaaatgatgaaaatgagcctgaaacgtgcatggtggagaaaatgaacttaactttccatcagtctctggtcccagcccaccccatggcccctcccag

SEQ ID NO: 495805 - DNA, 78 bp, Homo sapiens
ccatctggaccgcatcgctgaatgtgcccggacctgcgccttctgggcccaagtctgttttggtggtctgagaggaaa

SEQ ID NO: 495806 - DNA, 75 bp, Homo sapiens
catggggaagcgggacaatcgggtggagcccagcagccggggccgccctattacaccgacccaggaggaccgggg

SEQ ID NO: 495807 - DNA, 49 bp, Homo sapiens
acatttggatggcaccgagcaggtgattggagttgtgcttcaaaaattt

SEQ ID NO: 495808 - DNA, 100 bp, Homo sapiens
tgaagaggaaagacaagagccgccctgcccagaaacgtccacatgtgggtactgcattcctaccggtgtgacaggctgcaggggacagcgctggaccgta

SEQ ID NO: 495809 - DNA, 100 bp, Homo sapiens
caaacatctgaagatgacaatttattagatggtgacactgcagttgttggttgaatctggcgatgtggaacccatggatatggagggctgactatataca

SEQ ID NO: 495810 - DNA, 90 bp, Homo sapiens
tcagtcactggtttgcagagtccagatgaaaaacacagactcttgagccaagttgtacgacctcaagaatctcgttctcttagtccctcg

SEQ ID NO: 495811 - DNA, 95 bp, Homo sapiens
tggaatgtaagaccccgactcttcctggtgaagcatctgatgcacgttccatccggcgctcagctgggcttgagtaccctcttatatatggactg

SEQ ID NO: 495812 - DNA, 145 bp, Homo sapiens
gaagattcaggagtattgctatgacaacattcatttcatgaaagccttccagaaaatagtggtgcttttttataaagttttgcacagtaataagttgactcacacagacttaaagcctgaaaacatcttatttgtgcagtctgac

SEQ ID NO: 495813 - DNA, 98 bp, Homo sapiens
cccaatctctgccatcaaggccgattttctttgaaccttcagcaaaggaaaccagctctaccactccctgctgtgtattgtgcttcagttcctcatcc

SEQ ID NO: 495814 - DNA, 100 bp, Homo sapiens
cctgcagatggccaatgagaaagccctgaagcagaagggcatcaccgtgaagcagaagagacagtcttgcactgtttcctaggctggagtgcagtggcac

SEQ ID NO: 495815 - DNA, 75 bp, Homo sapiens
gttctttgtagtgatggagcactgcctcaaacatgggctgaaagtcaccaggagactaaagtccatcaaaaacat

SEQ ID NO: 495816 - DNA, 82 bp, Homo sapiens
tgaaggccgaggccaagatggcggtgctgtcaggtaactaggatttctacctcaaccgcgagacctatgcaaggacggtgtg

SEQ ID NO: 495817 - DNA, 50 bp, Homo sapiens
aacaaggcaaatatggttttggtgactattatatggttaaaaagattttg

SEQ ID NO: 495818 - DNA, 75 bp, Homo sapiens
gctggtcaaggcttcagtgtggagtaattgacactttcgagagaatgaagacctttcgaatccgtcaaaacctat

SEQ ID NO: 495819 - DNA, 82 bp, Homo sapiens
gcatgccttcgtctccgcattgcttaactggagcaactgagttggaactgataatgggagagaagcaattgaaagtggggct

SEQ ID NO: 495820 - DNA, 119 bp, Homo sapiens
ccttgccgctataatctgattgctgtttccaaccactatggagggatgggaggaggacactaaataggagaaccagtgttaggaaagcagcacaacgatacctgatggattacttgaat

SEQ ID NO: 495821 - DNA, 98 bp, Homo sapiens
ctggaagttgagaaagaagagaatgctgaaaatgatgaaggctccacaagttcttccctgtgtgaacactgggtgagccggctcccgggcagcaagcc

SEQ ID NO: 495822 - DNA, 123 bp, Homo sapiens
ttgtgttcaacattcagccagccccaggcatggtctacgattagtacgaaaaaggacacagcattgttggttttgccatgtactattttacctatgacccgtggattggcaagttattgtatc

SEQ ID NO: 495823 - DNA, 100 bp, Homo sapiens
ccaaatccaagatggcggccagcaggaggctgatgaagaccaagatcactccatggatgaaatgacagctgtggtgaaaattgaaaaaggagttggtggc

SEQ ID NO: 495824 - DNA, 82 bp, Homo sapiens
gctgcgggaaatcgggctgaagcgactgagtccgcgatggaggacaggacatccagcccaaaagagacctcacccgctttgt

SEQ ID NO: 495825 - DNA, 126 bp, Homo sapiens
cgacgctttcttgttgttgcggaataattccatccaaaaccggcagctgttagccgagcaagttggtgttcgaggaagagacattgttgttcttggtgtggagaagaagtcagtggccaaactgca

SEQ ID NO: 495826 - DNA, 118 bp, Homo sapiens
agcagttgctcgaagaactcgagcgacagagacaagctgagcttgccgcacaaaaagctagagagactcttcaggcagctgaattgattgactcagagtttcgagcaggaatgagcaa

SEQ ID NO: 495827 - DNA, 98 bp, Homo sapiens
gccgaggcggtcgcggctccgatgaggacggggacttggttgccttttccagtgacgaggaattgacaatggccatgtcctacgtgaaggatgacatc

SEQ ID NO: 495828 - DNA, 90 bp, Homo sapiens
gctgtacaaagaccaggcctgctatatctttcaccaccgttgccgccttctcgaggatttctctatgaatcatcatcaagaactctggga

SEQ ID NO: 495829 - DNA, 76 bp, Homo sapiens
aaccagatccagaaactggaggagtcccgctcgaagctaggatgagctttctgatgttagccaaggcggatctaaa

SEQ ID NO: 495830 - DNA, 90 bp, Homo sapiens
ccagtgggcagatatttttcaggcctctggtgccaaatacattgtcttaacttccaaacatcatgaagtattagaaaggaagatatccac

SEQ ID NO: 495831 - DNA, 82 bp, Homo sapiens
ctgtccaagggctctgacatcaacatccgagacaacctgtcgcctggttgggcccggaaatgggacgtcgcgctttctcagg

SEQ ID NO: 495832 - DNA, 100 bp, Homo sapiens
ttggtggatctgaagtacaaaatattttccagagaaatgttctttactaccatggaaagccaccttctgcgctgcaaagtgttagaaatcatattcctcc

SEQ ID NO: 495833 - DNA, 75 bp, Homo sapiens
aaatctccaaccagattttccacatggcagagcagctcatgaccttggcctatgataatggcatcaacctcttcg

SEQ ID NO: 495834 - DNA, 100 bp, Homo sapiens
tagtacgcgaattggagaaaaagttcagtgggaagcatgtcgtctttatcgctcagttttccttccagcagggtggatggggagcatcgctggctgacag

SEQ ID NO: 495835 - DNA, 101 bp, Homo sapiens
gacatatgcagaggacgctgtgcccactcttactccatgccgcttcactggcagtgagatccgccgtcactggggtggcaatgtcctgggtcctaagtctg

SEQ ID NO: 495836 - DNA, 100 bp, Homo sapiens
tgaaaacatcatcgttttgaagagttctgcgttttgccagtcacctctcaactgtgtgccaaagtgacaaaaatgctgagtttcttccgtagaacactag

SEQ ID NO: 495837 - DNA, 74 bp, Homo sapiens
aatacctgcaaatgggcaacaggccagcagccaaagagtgtttggctgccccacaactgtggccaacgtggaga

SEQ ID NO: 495838 - DNA, 100 bp, Homo sapiens
tggccctcagggcatccccgttttcggacttcctcgttctgcccatcttcctaacaaggctatggctgataacagcagtgatgagtgtgaagaggaaaat

SEQ ID NO: 495839 - DNA, 83 bp, Homo sapiens
ctggcattggaacttcctgttctgatagcgtggaagctggcatactgtgtagtgcagtttttagaaaaggacagcaccctcac

SEQ ID NO: 495840 - DNA, 74 bp, Homo sapiens
catgcctgccagcggctgcaccaggagggcaagaggattatgacagattacgaccgctgagttatccacaaaca

SEQ ID NO: 495841 - DNA, 106 bp, Homo sapiens
cgggcatgggaaagacagcagtgtttgtcttggccacactgcaacagctggagccagttactgggcaggtgtttgagaagtcccccctgcgggtgaagaacttcgg

SEQ ID NO: 495842 - DNA, 153 bp, Homo sapiens
gcaacttgacaagagaaatgataaaacatttagaacgatgtgaacatcgaatcatggaatcccttgcatggctctcatccctctgctatggctcttcctcagtagaaacaactggcaacaaaattcaagtttatgattcattcatcagcaaac

SEQ ID NO: 495843 - DNA, 75 bp, Homo sapiens
tctgcgagagggaacagcagctggagtcctgtgcatgtaatgctttggacatcagacagtgcaggagaagaatgt

SEQ ID NO: 495844 - DNA, 50 bp, Homo sapiens
cgaaatcatcttgttcacaaactgtttggaaagcagagtggagaacaaag

SEQ ID NO: 495845 - DNA, 82 bp, Homo sapiens
aagaaggccctggacacagcaatatctctgggctttcacaggtattgactgggctcccaagagcgaccgcattgtcacttgt

SEQ ID NO: 495846 - DNA, 82 bp, Homo sapiens
cgcggcggggctgaggcggccgcggggcccgagcgcaggtaatctgtaagtcagatgctccaacaggggatgttcttcttga

SEQ ID NO: 495847 - DNA, 100 bp, Homo sapiens
gttccacacgggtgccggcatcagcactgcctctggcatccccgacttcaggtatggacctgtctgccaatcaggacgaggagaccgaccaggagacctt

SEQ ID NO: 495848 - DNA, 88 bp, Homo sapiens
gccctgggctggaacgaccctggggttcatgtgtcacacaagtaggccttctggaaagcgtgtatgaaatgttcaggaaggatgaccc

SEQ ID NO: 495849 - DNA, 96 bp, Homo sapiens
catgctcgaagacgaccttcagctcagtgacagtgaggacagtgacagtgaacaactgttttcaagtcagcaaacatttactgaggatctactatg

SEQ ID NO: 495850 - DNA, 75 bp, Homo sapiens
ctccaggctctccagtttttcgtcgagagattcactatggaatcggctaccaagcagtttctcgaagagattaac

SEQ ID NO: 495851 - DNA, 100 bp, Homo sapiens
caagaggctctgcaccctggatggaaagcaggaggaaagcagaagtcatgcttggacatggattgttttcattgctagctgaaaggctcatgcttcagac

SEQ ID NO: 495852 - DNA, 71 bp, Homo sapiens
tcatggcttcagcaagaggccacaaggtactggttttggattaggaattgttttctcacttaccttcttta

SEQ ID NO: 495853 - DNA, 90 bp, Homo sapiens
ccgctcactggggccaccctgaggaaggaccagcgggacgcctgcatcaaggaggccattctcttgagcttggggcttccttggtcgcac

SEQ ID NO: 495854 - DNA, 97 bp, Homo sapiens
agaaatggtgcacagtgctttccaggcccagcgggctttccttctgatggcctctcagtaccaacaaccccacgagacattggtgaagactgaggaa

SEQ ID NO: 495855 - DNA, 98 bp, Homo sapiens
ggaacagcagtgtaaatgactcaggttcgcggaccttcccgagctgatcctaaccatcttgtagatgatctgctaacaccttgctctccaggtgaccc

SEQ ID NO: 495856 - DNA, 90 bp, Homo sapiens
gtggaggcattttggggcagaatacagagatatggaatcaggacaggctgacttcagatgcgcactcttggcttcagaggtgcctcagct

SEQ ID NO: 495857 - DNA, 82 bp, Homo sapiens
cctctcttacaacaaaatggttttccactccattgttgttagaagccaggtgggatgtgtgtgggctgaaattccgagctgc

SEQ ID NO: 495858 - DNA, 110 bp, Homo sapiens
caaccccagccgaccttgagctccaggagttcgtctcttacgtctgcggaagtgcagctgcctcagttcttagcgcaggttgggcccatgagatgtgtgctctgtatatt

SEQ ID NO: 495859 - DNA, 51 bp, Homo sapiens
gcatccggagagtggacaagaaaaggacaagaattttgggcagatttgaat

SEQ ID NO: 495860 - DNA, 101 bp, Homo sapiens
agatgtggtggaatatgccaaggaaaaactggagagcttcatcaaaaatagtgatagctttgataaatctaaatcggaaggtagcacacagacatatgcca

SEQ ID NO: 495861 - DNA, 50 bp, Homo sapiens
gagccggtgaaggggcagaacaggcagagatcccatttcattctgaaggc

SEQ ID NO: 495862 - DNA, 98 bp, Homo sapiens
ggctgctgtcgccgctgctgggagatgggcctactcgcccgccaccctgcgctgccgccgctctgaggagttaaagcatggcttctcgctgtttctgg

SEQ ID NO: 495863 - DNA, 88 bp, Homo sapiens
cagcgacaggactacatggatgccatggctgagaagaagaatggctacgtgactgtcagtgagatcaaagccagtcttaaatgggaga

SEQ ID NO: 495864 - DNA, 98 bp, Homo sapiens
gtctctgtcgagcagcggacgccggtctctgttccgcaggatggaaattcgtacaagtttcaagctggcaatagaatgaatgcaatgttatggtttaa

SEQ ID NO: 495865 - DNA, 100 bp, Homo sapiens
ccgtggacagcaacatttcccacaggacacgaagtttgtcggcccttgccttggcagagctgaggtctgccatcatggatgttctcgcagaagcaaatgg

SEQ ID NO: 495866 - DNA, 100 bp, Homo sapiens
agtttatggtacagacaatttttgctccaccaaacacttcagatatggaagctgtggtacaggtgaacaaaggcagagtaaactgtcaccccagatgcag

SEQ ID NO: 495867 - DNA, 82 bp, Homo sapiens
gccgctctccagcccgcttgaacgattccctataaggagcccctgctggtgcaccagaactaccgggggccatctgcccaac

SEQ ID NO: 495868 - DNA, 100 bp, Homo sapiens
tccaagtctaatagacctaaagccacagtcttcaagagcccacggacaccacctcaacggaatcctttgtgcattgaagactttagattcctctctgcgg

SEQ ID NO: 495869 - DNA, 100 bp, Homo sapiens
ctgctacacttgggagccctgtatgggatcactttgattcctacctgcaagttctacacctggctttggggcagcccttctggacactgcatgatcacag

SEQ ID NO: 495870 - DNA, 75 bp, Homo sapiens
ggcagctctgcccggcagaaacctgtcttagacgagttgtactgctgtcacaggaaatggacgctggattacaag

SEQ ID NO: 495871 - DNA, 83 bp, Homo sapiens
gtcctgccgtccatgcggaagatcgtcgccacctggatgctggagcgtgagtgcatctccatccacgttggccaggctggtgt

SEQ ID NO: 495872 - DNA, 83 bp, Homo sapiens
gagtggagcttggtttcgggatctcggtgctgcagacggcgagacctcctgcacaggctgaaggtgatgtggccgccctcaac

SEQ ID NO: 495873 - DNA, 75 bp, Homo sapiens
caatcagtgatgaagatgaatcggtgactgctacattgagaaacttggttgattcatcattagtaagaagtaagt

SEQ ID NO: 495874 - DNA, 87 bp, Homo sapiens
aagctatcatcctgccaaactccaggctcagatgtcacagggtgtctgatgccatcaagtgttgcaggagaaacttcagtcttggct

SEQ ID NO: 495875 - DNA, 83 bp, Homo sapiens
aaagtctcagatcaaggattcggagaaaggtctctacaggtccctcctcgttagtatagtgaattcagaaggagctggcggac

SEQ ID NO: 495876 - DNA, 75 bp, Homo sapiens
ccaaacgtcagtcgaatcacaggcaggagtttttggctttcacccccaaccagtgaccaaagacttgaccactca

SEQ ID NO: 495877 - DNA, 111 bp, Homo sapiens
ggaaaattaagcagatgctccagtttgagaaacctggatctgcgatctgtttgtggtcagacatatttccaacatttgggtcaaaaccttgtccaacaagactttcttctg

SEQ ID NO: 495878 - DNA, 90 bp, Homo sapiens
aaggcagcaaaaacaagagtccctctaaagcagctcaaaaggtggaacaggaggattttgtaatggaagggcatggcaagactccacctc

SEQ ID NO: 495879 - DNA, 81 bp, Homo sapiens
ggagcatgtggtacccatgtaacaacccaagaccatgtgtcatctggtcaaaatgcagatcttcgtgaaaacccttaccgg

SEQ ID NO: 495880 - DNA, 132 bp, Homo sapiens
ggctaccggagcgctgcagggggctgcgcctgcctgctccgccccagacctgtcggcgaaaggcaaaacccttgaagatcgtttgaaaattgaagcaaaaaatgggacattgagtgtatccgacaccaccgt

SEQ ID NO: 495881 - DNA, 100 bp, Homo sapiens
gaacttcaaggaacatcatcagctgcagaggaatgtatcctgtcaggtataatgtcagtgaatggcaagaaagttcttcatatggatcgaaacccttact

SEQ ID NO: 495882 - DNA, 97 bp, Homo sapiens
tcaaaatcacagtggatgggccccgagaacctcgaagctcctgttctggatgtcagatatgcatctgcctcctgagaaactggtggctttgaacact

SEQ ID NO: 495883 - DNA, 105 bp, Homo sapiens
agcctggcggacatcccctaccaggagatcgcaggaaactttgccggctataattgtggagactgcaagtttggctggaccggtcccaactgcgagcggaagaaa

SEQ ID NO: 495884 - DNA, 75 bp, Homo sapiens
ggccgcgccgccaccgtctgaactaggatgtcccgacatgaaggtgagaagccctaccactgcaactgggacggc

SEQ ID NO: 495885 - DNA, 83 bp, Homo sapiens
cagaggcccagcacccacagggccctcatggcgtgcggccgcgtgagtgcatctccatccacgttggccaggctggtgtccag

SEQ ID NO: 495886 - DNA, 80 bp, Homo sapiens
tcatgtcgcgttacgggcggtacggaggagatcttcgtgaagactctgactggtaagaccatcaccctcgaggttgagcc

SEQ ID NO: 495887 - DNA, 90 bp, Homo sapiens
agagctctataagattgggatcacgttggcatgaggaggtcaccggacgtcagcccccggagactgtccgacatcagcccccagctccgg

SEQ ID NO: 495888 - DNA, 96 bp, Homo sapiens
ggacaaaatgtttacttgtctgacattgctacaagtggttggtgtggtctctgtggctgtggccgtgattccttggatcgcaatacccttggttcc

SEQ ID NO: 495889 - DNA, 100 bp, Homo sapiens
ctgcggttcctgcgcgcccgggatttcgatctggacctggcctggcggtactatactggcaattgctggagaagattttgcaattgttgcttctgatact

SEQ ID NO: 495890 - DNA, 83 bp, Homo sapiens
gtttttatcaacaaaggcaaaggattcggatttattaagcttgtggaagagatcatgcagctggtgaatgcctacttggccaa

SEQ ID NO: 495891 - DNA, 98 bp, Homo sapiens
gaagggcatgaaaccagcgactggaacagctactacgcagacacgcaggaggttctcccatgggcaggtggtctctctggatgagctgcgccccttcc

SEQ ID NO: 495892 - DNA, 75 bp, Homo sapiens
ctcaccccgcggccgcaccttcccgccttctcagttactccacaggatccgctgaacataggatgttgccacaaa

SEQ ID NO: 495893 - DNA, 75 bp, Homo sapiens
cttgactccgctgctcgccatgccatcactggtgcaagctatatttaacggagatcctgatgaagttcgagcact

SEQ ID NO: 495894 - DNA, 75 bp, Homo sapiens
agttcttccttgaagaaatacagcttggtgaagagttactagctcaaggatcttctaagggtgtgaggatacagg

SEQ ID NO: 495895 - DNA, 100 bp, Homo sapiens
accacagcattcctgaaatacatccaggaaagacatggagattctcttaaaaagacctgtggatgaagagccagagtcctctgaggtcgatgctgctggt

SEQ ID NO: 495896 - DNA, 90 bp, Homo sapiens
cactgtactgatctgccagaggatggcctattagaggtgccttcttcatcccctacctcgtcttcctctttacctgtggcattcctgtct

SEQ ID NO: 495897 - DNA, 90 bp, Homo sapiens
ggaagacctgcggaaactcgtgacgtatttggccagcgtgccaagtgttatccaagataaattctgtgggattataaacatttcagtaga

SEQ ID NO: 495898 - DNA, 100 bp, Homo sapiens
cagaggatccccagtatgcatctcaagatgtgatgtttgacacagtgaagcgattaagagaaaaatcttgtttaattgtagcaaccacatcaggatcgga

SEQ ID NO: 495899 - DNA, 98 bp, Homo sapiens
cggcagctccgcggcggcgtctgcccagggcagggctcctaaggaaggacccgcctttaggacatttgtgaagatatttctgatcatgttgagcaaat

SEQ ID NO: 495900 - DNA, 51 bp, Homo sapiens
taactcggaggctgcagcaggaacggagtatacactaccactggaactgat

SEQ ID NO: 495901 - DNA, 100 bp, Homo sapiens
cggccgttgaaaaatggcgactgtggcagagttgaaggctggaagccagttgagggaagttctccatgaatgtacgtcacaatgatgatgaccgaccaaa

SEQ ID NO: 495902 - DNA, 110 bp, Homo sapiens
gtcagtggaaaggagagctaccatcactaagcatgcagcagaactgattaaaacagtggcatctcgctatgatgaatatgttaatgtgaaggatttttctgacaaaatca

SEQ ID NO: 495903 - DNA, 75 bp, Homo sapiens
cgcaagtacccgtccatcatagtcaactgcgtggaagagaaggatgatcaggatggtgctttcacaaaatggaga

SEQ ID NO: 495904 - DNA, 90 bp, Homo sapiens
ggccgagttctccagcctgctgcgcaggataaaaggcaaactcttcacctggtgtcctgatggcaaatttcaagggccacgcgcttccag

SEQ ID NO: 495905 - DNA, 80 bp, Homo sapiens
cctccattggatttaaaagacagtcctcgtcagcactgactttcagctatggaatcgcggcgcgcgagcgggccgggcgg

SEQ ID NO: 495906 - DNA, 75 bp, Homo sapiens
gcctccccagcaaacatcttagaggacgataatgaagaggagatcgaaagtgatcatggaagggaagtggttgct

SEQ ID NO: 495907 - DNA, 75 bp, Homo sapiens
ctgcctcattcctggaaattgcactggaactgtctgattaaggaatatgatgaagaatgggctaagaaaattcag

SEQ ID NO: 495908 - DNA, 83 bp, Homo sapiens
gacagtccctggatcaccgacagcacagacagaatccctgctaccagtgggaagaagagcgctatcctgaaggcatcaagtgg

SEQ ID NO: 495909 - DNA, 100 bp, Homo sapiens
gctcagggaagacatacaccatgggggaggccagtgtggaaggtgcctaccagtaacacagagggaggctggtcctgctctctcgctgagtacatccgcc

SEQ ID NO: 495910 - DNA, 100 bp, Homo sapiens
atcgggggatctaggcgacatggagccattgaagggaacaacacccttgatgacgccttctggcaagaggggagagcctctggaacagtgtacagtgggg

SEQ ID NO: 495911 - DNA, 100 bp, Homo sapiens
gacgctccctgtctgggaccttctccctgcctggacccctactattgcaacaagtgtgaggatgatttggctgagaagaggagaagtaatgaggtgctac

SEQ ID NO: 495912 - DNA, 100 bp, Homo sapiens
cgcccgaaggccgacacgctggccctgaggcaacggctcatcagtcgctgcaaagtggtggggccagaagcggatcgactacgccctgtactgccctgac

SEQ ID NO: 495913 - DNA, 83 bp, Homo sapiens
ctccacaacctccccctttccaatctggcaatcccaggtatgcagtggaactgatgaagaccctgatgataaaaacgcaccct

SEQ ID NO: 495914 - DNA, 74 bp, Homo sapiens
tgtaatgagtcgtctttctagcacatcatcattagcagctggactctgtgaagctgagcaggagcagatgcgga

SEQ ID NO: 495915 - DNA, 80 bp, Homo sapiens
tctgttttcctaaaagactgaaatgggggcgaccattcttaggtgtgatgaatgcagactctgctaccattttggctgtt

SEQ ID NO: 495916 - DNA, 100 bp, Homo sapiens
gccgaaacctggaggcccggggggcccagctcccgtagggagccgtgggcgctcggtgcccgggccgggcaggcctagccgcccgtgactctcacactgt

SEQ ID NO: 495917 - DNA, 101 bp, Homo sapiens
ctccttgaagtatttggctgaggagttttcaatcccagaagatccgcaagctgctctcatcctcggaaaccaagcgtgctgcccgccggccctacaagccc

SEQ ID NO: 495918 - DNA, 75 bp, Homo sapiens
cccgtccatcatagtcaactgcgtggaagagaaggtttttgagtcatgatgcaagaatctgggactgagacaaaa

SEQ ID NO: 495919 - DNA, 75 bp, Homo sapiens
gcttaagaatattcctatgaccctggaattactgcaggaaaacagttcctcctgaggatttcagagaagagctgg

SEQ ID NO: 495920 - DNA, 100 bp, Homo sapiens
ataacagcgagtgtgttgcaaacatgaaagcaatgacccagagctgcgggtggaattctacactgggacaaatgaggactcagacatcgccttccatttc

SEQ ID NO: 495921 - DNA, 75 bp, Homo sapiens
ttcatggtttcttataaccctactccacgtctgggttattttggagctgttggagcactccttgagctgttgaag

SEQ ID NO: 495922 - DNA, 50 bp, Homo sapiens
cagagacagtagccatccagccagggcctgctttcttccccgggcgatgt

SEQ ID NO: 495923 - DNA, 100 bp, Homo sapiens
ctgggcggcgcgggcgcgcagtactccagcgaccggtgcagctggaaggggaggagggtgaggacaaaatcttcttaatcaacaagcttcactccatcta

SEQ ID NO: 495924 - DNA, 100 bp, Homo sapiens
aacaggtcataactcctggagaagggattgcccagtcagcaaaggttcagccctccaagcacaaccagtgtctctgaagaagatgtctcaagtagatatt

SEQ ID NO: 495925 - DNA, 98 bp, Homo sapiens
gccgtgttccgtgtctctggattcaagtcccaggagtcctgaccagagagcagggtgacattacttccattcctgaacttgctgactacattaaagtt

SEQ ID NO: 495926 - DNA, 82 bp, Homo sapiens
gtcggtgccggctcaggagccggggctactgcagcactggggtgtcagttgttggtccgacccagaacgcttcagttctgct

SEQ ID NO: 495927 - DNA, 87 bp, Homo sapiens
accgtcaacaccaaggatgcaggagagggcctcgggccagcggccaggagctgcctcccccagcccccgtcccgcggcccccagccg

SEQ ID NO: 495928 - DNA, 100 bp, Homo sapiens
tttttatttggcagatctgaagggaaagctccagatactattaaagccttccatctgaagtatgatgaagttcgtctggatccaaatgttcagaaatggg

SEQ ID NO: 495929 - DNA, 50 bp, Homo sapiens
gaaaatcatattatagatggagtaaaggaatttttcacagacaacctatg

SEQ ID NO: 495930 - DNA, 100 bp, Homo sapiens
ggcgattcggtgaagcgattcctgcaggcgttggttcccctctttgacctggtgcgaatcataaacatgtacaaggaaattgatcaaacaccctacaaac

SEQ ID NO: 495931 - DNA, 98 bp, Homo sapiens
agattgggtgcagaatataaaggttttcctttggaatatggataaatacaccatgatacggaaactagaaggacatcaccatgatgtggtagcttgtg

SEQ ID NO: 495932 - DNA, 97 bp, Homo sapiens
tccgaagcccgcagatacatccgacagctcatctctgccgtagagcacctgcaccgggccggggtggtccacagcgtccttgagactttgtgctgcg

SEQ ID NO: 495933 - DNA, 100 bp, Homo sapiens
ttgcctggctcctgtggtggcaggctgggcacgaggaccatgctgggccggagcctccgagaaaggtcctgctgtactagccaccaaagcagctgctggt

SEQ ID NO: 495934 - DNA, 83 bp, Homo sapiens
ccgattaaagactgtgttgcattatcagatccagtccttctgtggaacttctgaacatcttttattagtggaaatattttcta

SEQ ID NO: 495935 - DNA, 156 bp, Homo sapiens
tagtcgcccaaagttccgtgagttgatcatcgaattctccaaaatggcccgagacccccagcgctaccttgtcattcagcaaagagcaaatcgcctgtaaaatctacggagcggacagcaaagttgaccctaaactccaagcaccaccctgcaccc

SEQ ID NO: 495936 - DNA, 50 bp, Homo sapiens
cccgcagtcctaccccattgtgacaggagaagaaggaagttgtggaagag

SEQ ID NO: 495937 - DNA, 100 bp, Homo sapiens
aaagaactcaagaaaatcttcgaagacttttcaatcgagctgggagcattagtacccttgattctttagactttgcaagatattcagatgatggtaacag

SEQ ID NO: 495938 - DNA, 75 bp, Homo sapiens
gcaagattactgatttcatcaagttcgacactgtggtattcatgggtagtttgaaatatccagatgagaatggat

SEQ ID NO: 495939 - DNA, 100 bp, Homo sapiens
ccggcgggcgactggacggccggacagtttcaggcaggaagactcatcctgagctgagctgcttttcttgaagttgtgcaagaacgtcctgttggctggg

SEQ ID NO: 495940 - DNA, 98 bp, Homo sapiens
caggatggatttctacgccgaccccggcgtctccttctatgtgctgtgtccggacaacggctgcggcgacaattttttcctcagcactttgtttgccc

SEQ ID NO: 495941 - DNA, 100 bp, Homo sapiens
actctatatgaacaatccgtctggatcacggatgtaggaagtgtctgttcggcacttgaagtactccttgtttaagaaatcactactgggcagtgtttcg

SEQ ID NO: 495942 - DNA, 75 bp, Homo sapiens
cgagagcgtgaccgagagcgcgaatatcgtcatcgttagaagctgctggaacccaatgtgaatattggactggcg

SEQ ID NO: 495943 - DNA, 100 bp, Homo sapiens
tcactggagccaccagcccaaccgtgttgtatgtgagtggaggaaatacgcaggttgctgagtcattaggaatcacagaattcctacggaagaaagaaat

SEQ ID NO: 495944 - DNA, 82 bp, Homo sapiens
gtgcgaatctacgatggcgaggagaagacactgccctaaccatcatggaggtggccgaggtggaaagtcctctgaaccccag

SEQ ID NO: 495945 - DNA, 75 bp, Homo sapiens
cctcctcttcccagcaggccagccttttccccacgactctgaaagaggacagcgttcccaatgtcccagtttaag

SEQ ID NO: 495946 - DNA, 100 bp, Homo sapiens
aatcttccttcaggatatcaaggccaacatgcaaaagtcttctgtaccaagacctcggacaccgtgtgtgactcctgtgaggacagcacatacacccagc

SEQ ID NO: 495947 - DNA, 100 bp, Homo sapiens
ggaagcgcagggagaaggaagaggtgtttgaaaaggtaccacatggaatgcttggacccccctctccaggaggtgccggtggacgagtggttctgcccgg

SEQ ID NO: 495948 - DNA, 90 bp, Homo sapiens
agaaaagcgagaccgcgtgcgaggaccgatatgtgcagcgggggctacagcgagtggggctagatccccagctgccactgaatctggctg

SEQ ID NO: 495949 - DNA, 75 bp, Homo sapiens
aaattacatgatgacctaggagagtttccatatggaataaagatggctgctgaaccagtagaagacaattgcatc

SEQ ID NO: 495950 - DNA, 74 bp, Homo sapiens
ctcccgagtggctgggattacagttttgggctatgatgcattaggcttctgcgagtatttatatacagattttg

SEQ ID NO: 495951 - DNA, 97 bp, Homo sapiens
taaagttttacaagatttaacctgtcatcaagacctgggattttggtggaactgtggctgcaccatctgtcttcatcttcccgccatctgatgagca

SEQ ID NO: 495952 - DNA, 95 bp, Homo sapiens
tgttcctgaatgaaagaagtcagattacctctctagtgacccttcagctgttaaccctggttggccatgacgatcagcttgatggaccaaaatac

SEQ ID NO: 495953 - DNA, 74 bp, Homo sapiens
cttttgcagagtcactcaggacaagcttgaaggggctaaactgcacggtcaagaatagtaagtcatctttttct

SEQ ID NO: 495954 - DNA, 74 bp, Homo sapiens
gaagatccggcgcggggcacaggatccggagctggagcccccagggcgtgctggaggtactgtcagaggttgaa

SEQ ID NO: 495955 - DNA, 100 bp, Homo sapiens
cctggttctgggaaaacaacattgtctcgcactcctgtaggaggcctgctgatggcatttcagaagtactctggtgagactgttcaggaaagaaaacaga

SEQ ID NO: 495956 - DNA, 101 bp, Homo sapiens
ttggacgatatctaatattacagctggaaatagggcacagatccagcctggagatttgaaaaagagaattgaatctctgatagacagagactatatggaga

SEQ ID NO: 495957 - DNA, 75 bp, Homo sapiens
gattctaatcaaaatatgcagtctcttttaccagcagagcatctttccttgaagaagtacattattgacattgtg

SEQ ID NO: 495958 - DNA, 100 bp, Homo sapiens
caacatttctgttcagggggaagttccacgcactttatcaggagattttggatcagctggagtcactcaaattagaaaatcgtcatctttctgaaatggt

SEQ ID NO: 495959 - DNA, 75 bp, Homo sapiens
gccgggcctggctgcgcccccggacctcgcgggaccgcggcggcgcaggttggttttaagaacatgcagaatgtg

SEQ ID NO: 495960 - DNA, 100 bp, Homo sapiens
tccagtttgaagatggagagaaaattgtggtccagggagagcctggggacgacttttacatcatcacggagacaggccgacggtcgcaaggtcctacggt

SEQ ID NO: 495961 - DNA, 101 bp, Homo sapiens
agtggagtccgagctgagatccatctgcaccacggtgctgatgccttcaattaagttgcagagttctgatggagagatatttgaagttgatgtggaaattg

SEQ ID NO: 495962 - DNA, 97 bp, Homo sapiens
tgcgactgtcacagggagccgccccccgaaaccccagacatcaaccagctgccgccgtccatcctgctcaaggagatcatgaatcagacagataaaa

SEQ ID NO: 495963 - DNA, 85 bp, Homo sapiens
tgcaagaagtttctaggaaaggccggacaccagttttttcaagggggaacatggcaaaggtgttcagtttcatccttgttaccac

SEQ ID NO: 495964 - DNA, 98 bp, Homo sapiens
ccgcagccccccaacatcctgctcctgctcatggacgacgatgaaacaggcgcctatttaatcgacagagaccccacctactttgggcctgtgctgaa

SEQ ID NO: 495965 - DNA, 74 bp, Homo sapiens
tgtggtggtgcctatgtgaaactgctttctaaaacaccagaactcaacctgcttaacagagcgttccaaaaaga

SEQ ID NO: 495966 - DNA, 125 bp, Homo sapiens
agaaacccggaaggggaagaggaaagcaaaggcgtcaggaatggttcttcctcaggtctctgagcggcccctgatgttcctgttggacactcctggcgtgctggctcctcggattgaaagtgtgg

SEQ ID NO: 495967 - DNA, 75 bp, Homo sapiens
tatacaaagacaaaaggagattctgatgaagaagttattcaagatggcctttggacaagcacacacaaaccacaa

SEQ ID NO: 495968 - DNA, 75 bp, Homo sapiens
gaagaaaatacttttcttcaatgataagagctgtcagttttctgtggatgaagcataagcagtactataatggat

SEQ ID NO: 495969 - DNA, 96 bp, Homo sapiens
gccgacggccgggcggacggacggacggacgccgagcgcagtgccccgcggtgtggtggctggaggtggccgaattgacaaacccatcttgaaggc

SEQ ID NO: 495970 - DNA, 100 bp, Homo sapiens
agcactatagtgcaggtgttggaagtgaaagatgtatcctccactcctcgctggccaccatcctgctgcccaacagaagaagctcttctgtctccgattt

SEQ ID NO: 495971 - DNA, 90 bp, Homo sapiens
caacaacaactgcgaggaaaatgagcagtctctgcccccgccggccggcctcaacatatcttacagacagcaagttgaacattgtgggat

SEQ ID NO: 495972 - DNA, 90 bp, Homo sapiens
ctgacttcctggtcaagacctacccgcgcctggtgcgccagggctcaaaagccaaaagtctctgagaacgactttgaagatctgttgtcc

SEQ ID NO: 495973 - DNA, 83 bp, Homo sapiens
gctctgccggctccttcggcctcgccgcagccctgggcgctgcctatggcacagccaagagcggtaccggcattgcggccatg

SEQ ID NO: 495974 - DNA, 100 bp, Homo sapiens
cctgctcagatacctgttcccggccctcctgcttcacgagaatttggatggagagacccggaactgccggaagtgattcagatgttgcagcaccagtttc

SEQ ID NO: 495975 - DNA, 73 bp, Homo sapiens
gcggccgggctgtcgcggcccccacctcagatacatactgccatgaaagaaagctcacctttatttgatgatg

SEQ ID NO: 495976 - DNA, 100 bp, Homo sapiens
cttgtggcagttgtggtcagtttcgctttgattgctaccctggtatatgcacttttcagagatgcccgagtggtaaaagacatggcaacaggaaagtcta

SEQ ID NO: 495977 - DNA, 74 bp, Homo sapiens
gtcccatcactccaaggagagaaggaaaccactggactttgggaaaaccatgtggcagagtcgggaccacaaac

SEQ ID NO: 495978 - DNA, 90 bp, Homo sapiens
gcagaggggtccatacggcgttgttctggtgcccaccagaagtatgtccgacaagcctggcagaaggcagacatcaatacaaaatgggca

SEQ ID NO: 495979 - DNA, 75 bp, Homo sapiens
gccgggcgcctaccccaaactcatggaaattgatcagactctatcaagaagaatatctaatccgtaccttgaaca

SEQ ID NO: 495980 - DNA, 99 bp, Homo sapiens
gcggcagtaccgcctccttcccagccgcgcggcttcctccagacctctcggcgcggaggtggaggagacactgaagcgactgcagagccagaagggagt

SEQ ID NO: 495981 - DNA, 100 bp, Homo sapiens
cctggcaccaagaaggttcatgtcatcttcaactacaagggcaagaacgtgctgatcaacaaggacatccgttgcaagatctgatgagacgacaggaaga

SEQ ID NO: 495982 - DNA, 75 bp, Homo sapiens
aatcccagcactttgggagcccgaggtactccagcgtctcattcgctcccgggggaagtcacagatgaagcacct

SEQ ID NO: 495983 - DNA, 100 bp, Homo sapiens
cagtttcaactttatcagaggttaaaatttgaaagagtgcagctgtctgcttcagaaagtgagggctccaggaatgaggagaatcttcaagaacttcctc

SEQ ID NO: 495984 - DNA, 90 bp, Homo sapiens
gaaagctagaagaaaaggtgtacttgcaagaaacctcaggacttgagtaacagcaacatggttatgatgtgattgctcaagcccaatctg

SEQ ID NO: 495985 - DNA, 100 bp, Homo sapiens
gcaataaaatagaacttccaactactgatatctcttccaaacgcatgatgaaggaggtcttgtcaacagggcaaggcaatacagaagtgatccacacagg

SEQ ID NO: 495986 - DNA, 74 bp, Homo sapiens
ccataatcatggacacagccccaggatgtgcagggacagagcgggatgccaccagcttgtccaaagggaagttc

SEQ ID NO: 495987 - DNA, 96 bp, Homo sapiens
gctggccggatggaaatcctaatgacagtctccaaattcgcctccatctgtaccatgaccaatgatgcgagctcagagtcaatagcatccttctct

SEQ ID NO: 495988 - DNA, 83 bp, Homo sapiens
ggacgcagacgccaaggcccctccggccagggccgggagccgggccggcctagccagtgctgggctttgacaaacttcctctg

SEQ ID NO: 495989 - DNA, 96 bp, Homo sapiens
gggagttacaccgccaccgccagtaaggagctgtggcctgtgatggataaatggataaaatacagaaaaggacatgcaaacattgcgtatactcct

SEQ ID NO: 495990 - DNA, 100 bp, Homo sapiens
ggaaactcccagggcccgcccaggacccccaagccgccgcggacgcaggtgtcagttgtacccgaggcgttctcagcagcagcaagtacctgtggtggat

SEQ ID NO: 495991 - DNA, 90 bp, Homo sapiens
gttattgaagctgtgattgacatttttctcataatgaatcctctcaggacattgtgtagcctatgctgagatgagtgaactgagtgtggc

SEQ ID NO: 495992 - DNA, 90 bp, Homo sapiens
ctctcctgcattgtgctgtttggggcctgcattgaaggcgtggtcttacgagataagctggagtgcaatggtgccatctcagctcaccgc

SEQ ID NO: 495993 - DNA, 75 bp, Homo sapiens
cagatgccagcgtagctgaatccagtaccaaaaacgtcaacaacagttttacggaataggatgagtgataatcca

SEQ ID NO: 495994 - DNA, 76 bp, Homo sapiens
tggtttgaatatgaaggcacaccactgaaatgtagccggatcgagctgggagatgtgacaccacacaatattaaac

SEQ ID NO: 495995 - DNA, 80 bp, Homo sapiens
gtctgactctgactctcggactgagaaacgcaagcgaggaagaaaggacccggtttcaggagctgctggccagtccggcc

SEQ ID NO: 495996 - DNA, 82 bp, Homo sapiens
gttggtgcggaaagcggcggactatgtccgaagcaaggatttccgggactacctcatgagagtattgttacaatcacatttg

SEQ ID NO: 495997 - DNA, 101 bp, Homo sapiens
gaccatcaagaactcaggacttcggagcattcagcccagagcctttgccaagaacccccatttgcgttatatgtagtgtgccagtatttgaaaaatcccaa

SEQ ID NO: 495998 - DNA, 113 bp, Homo sapiens
gtgaagaagctgcgccagtacatcagcgtgaagacgcagagggagacagacagaacaatggcagcccgagtacttataattggcagtggaggaagggaacatacgctggcctg

SEQ ID NO: 495999 - DNA, 87 bp, Homo sapiens
cggcgacagcagccaggagtcatgagcgacagcggcgagcagaactacggcgagcggagagcctccttttcacctgaccagaagagg

SEQ ID NO: 496000 - DNA, 50 bp, Homo sapiens
taatcattggcaaaaatcccttttctggtggatgagaatggcaaaattag

SEQ ID NO: 496001 - DNA, 75 bp, Homo sapiens
cgatgtttcaatattggaagcgctttgatttacagcagctgcaggcattcagatttgggagaagtagccccagaa

SEQ ID NO: 496002 - DNA, 75 bp, Homo sapiens
gtaaggccatcgattgttggtgccagttggaaagaaccttttccagatatgggccctcacattttccaaacctgt

SEQ ID NO: 496003 - DNA, 95 bp, Homo sapiens
ggtgcttttggtgaagtgcagttgaggactactgagcccagccaggctgtatgccattgctgccaaagaaaaagatattcaagaggagtccactt

SEQ ID NO: 496004 - DNA, 75 bp, Homo sapiens
ttcaagtggaaaaccgtcacggttgtgtatgatgacagcactggatagtttcccagcgcgatttggaggaattca

SEQ ID NO: 496005 - DNA, 100 bp, Homo sapiens
gagtgtatgaccacaaacagccatcaagagtgtgaacatggctacgcctcttcattcccgtccatgccgagcccccgactgcagcattcaaagcccccac

SEQ ID NO: 496006 - DNA, 75 bp, Homo sapiens
ttcacggacaacctcagaggacaacgaagtgttcggtgccagtcacgaattgcccgaacattacctgctgatcag

SEQ ID NO: 496007 - DNA, 74 bp, Homo sapiens
ccagagccaataccacattctgaacacaggagccacgggaaagaggtgctggagctggcaggtaatgcttctaa

SEQ ID NO: 496008 - DNA, 72 bp, Homo sapiens
caaagatctcgtacaagatccttctttgaatcattaaccaatggcaacaggaatccaaggataaagtgattt

SEQ ID NO: 496009 - DNA, 51 bp, Homo sapiens
cgggacggtgctgatccagtttgagaaaaagcttgagtctccacccccatc

SEQ ID NO: 496010 - DNA, 74 bp, Homo sapiens
agaaagtcagggggactgcaaaggccaatgttggtgctggcaaaaaggcatccgtgtacaagatttgcagagaa

SEQ ID NO: 496011 - DNA, 100 bp, Homo sapiens
gacctggatctatatgatggcacatacataactttggagagcaaagacatcagtgttgggtggtgaattcctcaagtacatggaggcctttaaacccttc

SEQ ID NO: 496012 - DNA, 100 bp, Homo sapiens
attttctttctcagaaagcagaggctcagagcttggagacagacgatgagctgcttcagaaagagcaaaactattcagatgacgtcttggccaacatgat

SEQ ID NO: 496013 - DNA, 50 bp, Homo sapiens
aagctcaagaatgaacttctaaacattgttggaaactgttactacatttt

SEQ ID NO: 496014 - DNA, 100 bp, Homo sapiens
ctactgcagaaatatcagctagaaccatgcagtcaatatctggagtccatctttcaccatcttctcctgagattgtactggaccgtgaccactcttcttc

SEQ ID NO: 496015 - DNA, 75 bp, Homo sapiens
ttatgggaccgcaccttcagtcttttccagcagctcattcagagggcagagcggcttgggtaaatccaccttaat

SEQ ID NO: 496016 - DNA, 100 bp, Homo sapiens
gatgtgaagtagatgataaagatgatgatatccttctcaaccttgtgggatgtgaaaactctgttactgaagtgaatatcacctctgccaggcaattaac

SEQ ID NO: 496017 - DNA, 100 bp, Homo sapiens
aagaaattttatcttttgaaacacgttctgattaaccaagggttctccgcatccagaacattctatctgagaagcctacagtgactacagtttatgccaa

SEQ ID NO: 496018 - DNA, 100 bp, Homo sapiens
cagttccagcagcagcaactgcagatgaacaagcttaaagaaagtggttattgtacaggtcatgaaccagattccctggagttcagtactgtaggaggat

SEQ ID NO: 496019 - DNA, 100 bp, Homo sapiens
ggaagaagtatatgcaggaaattttgtggaagtcgcgtctccttcttcacctcggggtccgagaacctacaccgcgtggagaaggtccactggggcaccc

SEQ ID NO: 496020 - DNA, 51 bp, Homo sapiens
ctttccctctcccaacatggcggcctcaggaactttatattgctgttggaa

SEQ ID NO: 496021 - DNA, 80 bp, Homo sapiens
aaatttttggatgatgatggatccatttctcctattgaggagtcaacgtatgcagaatctgtgggagcaaaacattatca

SEQ ID NO: 496022 - DNA, 75 bp, Homo sapiens
ccaacttcagagatttgtccaaggcttaagcaggtaaagcagtcactgtgaagaaaataacattttaagaaactt

SEQ ID NO: 496023 - DNA, 89 bp, Homo sapiens
catgctcacatcttcaggtgcctcattcacatacgtcaaggaaattgagtgacaacactgcagctgaaggaggagttgctggatggaga

SEQ ID NO: 496024 - DNA, 97 bp, Homo sapiens
gtgcggcctcaccatacaggaacagggcagacgttagcgtgagtgatcactctcaatcccgggaaaatcaggaaaatgtttccaacctggtgattga

SEQ ID NO: 496025 - DNA, 74 bp, Homo sapiens
gcgtttccacttcagagatctgcatcaattcctgaagattgccaagcccctctccagcctcactccactgattg

SEQ ID NO: 496026 - DNA, 100 bp, Homo sapiens
ataagcccgtgctggtgcggaagactgtgctattgaagtggcgcgttgcaaagcagtgggagacatttagtgaacgctcttcaagctcacaaactctgac

SEQ ID NO: 496027 - DNA, 143 bp, Homo sapiens
gcgctgccggcattggtgggacttttcagtttggctataacctctctatcatcaatgccccgaccttgagaagttgatgacgcctgagatgttttcagaaatcctctgtgacgatctggatttgaacccgctgacgtttgtgc

SEQ ID NO: 496028 - DNA, 82 bp, Homo sapiens
ggcccgagcgcgccccaagcccgggcgccaccgctgccacctccgcgagcggggatctgacgagcttttctctacttgtgtc

SEQ ID NO: 496029 - DNA, 100 bp, Homo sapiens
ccgcccttgaccttcggccccgcgagctctaaccctacagcgcaggaagatcggccgccgcggccaggcaaggagagcctcatcactgacagtggaaagc

SEQ ID NO: 496030 - DNA, 96 bp, Homo sapiens
gtggaggtggccgcagccattgctggctatgtgtttagagataaggtgatgtcagtgttggcattaagtgtgatgcccgggtgttaagtgaagatg

SEQ ID NO: 496031 - DNA, 114 bp, Homo sapiens
tcctaaatatttgtcacagcaatgggctaaagcctctggaagaggtgaagttgggaaactgcggattgccaatcgacagaggtacgttcttggagacacagcaatgcagaagat

SEQ ID NO: 496032 - DNA, 100 bp, Homo sapiens
gttttgccaggtgtttgttaccttgataaacaggggtcacatgacgacagaagccaagagggctgcaaagatggaaaagaagatgaaaattttgcttggg

SEQ ID NO: 496033 - DNA, 100 bp, Homo sapiens
cgccaagatccattcgttgccgccggaggggaagcttgggatcatgatccatctgtgtgtgctgtggaattcaggatacttgggcattgcctactatgat

SEQ ID NO: 496034 - DNA, 98 bp, Homo sapiens
ccagttcgcagtagcagtggaatgggaggaagaggccgttaattaaggaaaagttgagccagggcgtgaccctcgtcgtggacagatacgcattttct

SEQ ID NO: 496035 - DNA, 83 bp, Homo sapiens
ctgcggagtcgtccggagccgctgcgcggtgaaatgacaatggatgctctgttggctcgattgaaacttctgaatccagatga

SEQ ID NO: 496036 - DNA, 120 bp, Homo sapiens
cttcagtggggctattggactgacttttcttatgctgggatgtgccttagaggattatgggctctgccgacttccagttctggaacaagatggttaaactcatttttccctgctctgctc

SEQ ID NO: 496037 - DNA, 100 bp, Homo sapiens
tgagtgacaagatgggggtgttccaaagagaccatggcagcctgcagctaggactttaatggcccagtcatatatgcacagttagaccactccggcggac

SEQ ID NO: 496038 - DNA, 51 bp, Homo sapiens
gaagattctacagataaatcaggatcaactcactatcctgaaggtccattc

SEQ ID NO: 496039 - DNA, 83 bp, Homo sapiens
gaaataactttaccaaaggaaagctattttgcgaactatcttctccagcggagatggccaattttagattttgaagaatgtgc

SEQ ID NO: 496040 - DNA, 82 bp, Homo sapiens
agggacctcaaggaagcttatgacaggcgctttgacttccgtccaaaacctgatccttattgtcaagctaagtatactttct

SEQ ID NO: 496041 - DNA, 87 bp, Homo sapiens
atatgctgccaaaattatcaacaccaaaaagctttctgctagggtttcagaatggcttcggttattgcctttccttggtgtactcgc

SEQ ID NO: 496042 - DNA, 100 bp, Homo sapiens
gtgacttcggggtgagcggccagctcatcgactccatggccaactccttcgtgggcacgcgctcctacatggctgccgccatggcatcagatgaaggcaa

SEQ ID NO: 496043 - DNA, 100 bp, Homo sapiens
cagcgctgccggagccgcctgaggtatttgactggaatggttgacaaaaggacgcttgaaaagtatgaaagagaagctaaagagaaaaacagagaaactt

SEQ ID NO: 496044 - DNA, 83 bp, Homo sapiens
atccgtcctaccggaaacctaggaaaaggttcccagtctaagtgggtgactttccaagatagaggcagatcatttctccgtca

SEQ ID NO: 496045 - DNA, 83 bp, Homo sapiens
cgggtccgtgcgcccagcgtcccagggcccaggccgagcaggaccatgaatggcacctacaacacctgtggctccagcgacct

SEQ ID NO: 496046 - DNA, 100 bp, Homo sapiens
gttagagaagaattttccaaatgaatttgcaaaacttactgtagacaagccatctatgatgcatttgaccgcttcctccataaatacgctaactagttgg

SEQ ID NO: 496047 - DNA, 82 bp, Homo sapiens
gtttgctccagatgacggtggaatctagaaaatatatgcagatgatgaacattcttaagccaattgcctttgatgttattca

SEQ ID NO: 496048 - DNA, 75 bp, Homo sapiens
cagtgacagacctggagactgcagttctctatccttcacacaggtgaaaaaccttttgaatgtccaaattgtcat

SEQ ID NO: 496049 - DNA, 90 bp, Homo sapiens
gcgagaaattgctcaggactttaaaacagatctgcgcttccagagcgcagctatcggtgctttgcaggagagaattgccaaaagccacgg

SEQ ID NO: 496050 - DNA, 90 bp, Homo sapiens
gtgcataaacgaggcgcagcgggtgaaggaattgaatgatctggcacgggaccctccagcacagtgttcagcaggtcctgttggagatga

SEQ ID NO: 496051 - DNA, 101 bp, Homo sapiens
cgagagcctaactttgcaaccattggtctgcaggacatcactttagatgatgaggtcctgtaataaagagggatccgaacaagctcagaaagaaaatgaat

SEQ ID NO: 496052 - DNA, 83 bp, Homo sapiens
ctggatgcacagccccggcgctgaaagaagatgctgatatgctacaacacggatgaacctggaggacgtggtgcagtgaaata

SEQ ID NO: 496053 - DNA, 75 bp, Homo sapiens
acaagtcctgcgcttggggatcctctgtacgcccgttcactgagtggagactgctgcacggactctggaaccatg

SEQ ID NO: 496054 - DNA, 90 bp, Homo sapiens
tgacattacacagtgttaacaatgcatccacagagttttctggatatgccgcagaaggatccgtgccagaagcaagcctgtgagatacag

SEQ ID NO: 496055 - DNA, 75 bp, Homo sapiens
atatcctggggaatttaagatgccaaagcagctcattcacatacagcgtgaagttaaaatgaactatttgggcaa

SEQ ID NO: 496056 - DNA, 81 bp, Homo sapiens
ggccaaagcctgcccagacggctcacctgtgcgggatggaacaaaagacaatgcagatcttcgtgaagactctgactggta

SEQ ID NO: 496057 - DNA, 82 bp, Homo sapiens
caattcatggatgaggctgacatcttggctgagagaaaaggaacagttccgtaagctctttattggtggcttaagctttgaa

SEQ ID NO: 496058 - DNA, 75 bp, Homo sapiens
ctgtaaagcacgaacaggaatacatggaagtccgggagagaatacacagagccaatggagtctcgctttgttgcc

SEQ ID NO: 496059 - DNA, 75 bp, Homo sapiens
ttccggggcccaatggctgccatctccttcccccgctaaactgctcttttcagatggagaaaaagtaatacccag

SEQ ID NO: 496060 - DNA, 90 bp, Homo sapiens
gacgcacggagaggtgcagctggctcccgtggaagtcgctgaccagcatcattgagtactactacatgtggaagaccaccgacagatacg

SEQ ID NO: 496061 - DNA, 75 bp, Homo sapiens
ctgccgtgatggcatcaaccgctacgactgtgtctgccaacctggcttcacaggactcagaattcatgattgaag

SEQ ID NO: 496062 - DNA, 100 bp, Homo sapiens
caatccaagccctgaccttggcacctgccatccgtgacaaactggacatccttggggctgctgagacaggagagcacagaatggggattcaacacctcgg

SEQ ID NO: 496063 - DNA, 51 bp, Homo sapiens
gtatagtacggcaaaaaactgtcggcttctggagttacagtgaatgatgaa

SEQ ID NO: 496064 - DNA, 100 bp, Homo sapiens
cgtgctttccacgacggtgacacgcttccctggattgggtgccacacctccctggatgatccaagatgaagaatacattgctgggaaccaagaaatagga

SEQ ID NO: 496065 - DNA, 74 bp, Homo sapiens
gaaggaatgagtcctagtgagaagccagcatgggccaaggaggaacctgcgcaagggacccagtggcctggctg

SEQ ID NO: 496066 - DNA, 75 bp, Homo sapiens
cgacggctcaggtgccggacgctggcggatgtgcgagcgagatccctaaagaagtggctgacatctttaacgccc

SEQ ID NO: 496067 - DNA, 100 bp, Homo sapiens
cccgctccgccggccttgcgcggcgcgcccagggaaggcatttccagcccgcccacccaggcagccagtgtgctacataatgttcatggcttgaaagaag

SEQ ID NO: 496068 - DNA, 97 bp, Homo sapiens
aaagcacagctcggaaaggcagagcccagctgcagctccagcaggtggcgctgcagcagcagcagcaacagcagcagttccagcagcagcagcaggc

SEQ ID NO: 496069 - DNA, 100 bp, Homo sapiens
cctggatgggctccacaatgaactacaaaccattggcttccagggtctggaacagaatctgacagtgatgaatcagtaccagagcttgaagaacaggatt

SEQ ID NO: 496070 - DNA, 100 bp, Homo sapiens
caagctcatctacaacgagtactgtgggcctggagccaagcccctcttcaggagtaagctgaagtctatatcggcatcgggaagcctgcagaagccacag

SEQ ID NO: 496071 - DNA, 100 bp, Homo sapiens
gaagatatgatacccacagtgggcttcaacatgaggaagggcggcgactggcggcgcgatggacctgaccgggctcctgctggacgaagaaggcaccttc

SEQ ID NO: 496072 - DNA, 100 bp, Homo sapiens
ctcatattggtggggttaatattgtgctgcttgaagggattacaccaaatatacagttaggattttaaacaagaagatcgattttagcaaagttcagtcc

SEQ ID NO: 496073 - DNA, 97 bp, Homo sapiens
aaatgctaaactctactgtaatcggggtacggttaattccaagctgattgggcagaaagtggcccatgctctggcagagggactcggagtaatcgcc

SEQ ID NO: 496074 - DNA, 75 bp, Homo sapiens
tgagcgaggttggtcatgtgctcggtgccaacaatatgcccaagcaggtggaagtgcgaatgcacgacagtcatc

SEQ ID NO: 496075 - DNA, 82 bp, Homo sapiens
tgtccatccagttgggagctatgagtcctctgaaatgaacagcatagatttttgtgagcatggaacaaagtctgggttaaac

SEQ ID NO: 496076 - DNA, 98 bp, Homo sapiens
gccccgctcactcgcggatcccgaccgcccatctccgcctcgcttccagcccagcttcggaaccaaaaagaagcttcccagagccggggccaggagcc

SEQ ID NO: 496077 - DNA, 83 bp, Homo sapiens
cacggccctgcagaagctggaggaggcagaaaaagctgcagatgagagtgagagacaatgcagatcttcgtgaagactctgac

SEQ ID NO: 496078 - DNA, 100 bp, Homo sapiens
aggacttgaaaagctgagatatgatgattttgaagtcatttcacatcgaagccatgatttaaatatcggcgttaagtttctattccaaggacaatgaagg

SEQ ID NO: 496079 - DNA, 100 bp, Homo sapiens
gcaatagtcctgaacctcagaaggctgtagaacaggagaaattccaacagaatgggtttcctgaaacggatttgcaggaattcctgaaggaatgcagtag

SEQ ID NO: 496080 - DNA, 98 bp, Homo sapiens
gcgccatcatcatgccccacaacatctacctgcactcggccctggtcaagacacctggatttcattagcatcatgacctacgattttcatggagcctg

SEQ ID NO: 496081 - DNA, 75 bp, Homo sapiens
cttggatcattaccagaagagataggtcagctcaaacagttaatggagctgtccaaggtttacactcgcacacca

SEQ ID NO: 496082 - DNA, 51 bp, Homo sapiens
tacatttagccaacaccacactttcagacacttggattggacttaatctta

SEQ ID NO: 496083 - DNA, 100 bp, Homo sapiens
gtggtcgcacttggagggtctcgccgccagtggaaggagccaccgcccccgcccgaccatggccgaggtgctgtgatttgggcttccatgccagcctggc

SEQ ID NO: 496084 - DNA, 87 bp, Homo sapiens
gggagttcagcttttagagcaggtgtatgatcttttggaggaggaggatgaatttgatagagagccatccagtccaatggatcagat

SEQ ID NO: 496085 - DNA, 83 bp, Homo sapiens
ctcgcgcccgtaagggcaacacgctccggaagggtggtcagcgccgtggaggagttggatccttatgactatgaaatgattga

SEQ ID NO: 496086 - DNA, 75 bp, Homo sapiens
tcaccccaataaaggagctcttcacagcacctgctggacggcagtctggaaacgaccaatgagatcttggactct

SEQ ID NO: 496087 - DNA, 115 bp, Homo sapiens
caaacttaccttgtctgtctttgtacatcatcaccaaatggaaagttaatcgaagagcagtgtatgtatgaggaagtgcccacaggagtgtgcctccgggatgaagcaaagcaac

SEQ ID NO: 496088 - DNA, 50 bp, Homo sapiens
cgattcttaaaaactctgcttctgttggtcctaggcctacttacaagcct

SEQ ID NO: 496089 - DNA, 52 bp, Homo sapiens
cctccactcatgcctgtaaaataaagattcttctacagcttctcaggatcac

SEQ ID NO: 496090 - DNA, 124 bp, Homo sapiens
gcgggaggtaggggtcgctgggtccctcctccggcttcccgcaatgaggagggcccttcacagaaccggggcaactttttcctgtacctgtgaggagcagtacgtgggtactttctgtgaagaa

SEQ ID NO: 496091 - DNA, 78 bp, Homo sapiens
acacactgggaaacatcattaaatcagattttatcaaaccttcacaattcctcatcagatgtgtcttatgtctctgat

SEQ ID NO: 496092 - DNA, 100 bp, Homo sapiens
caaggtgcagctgagggatggagacagcaactgtgttgctgatcatctgggctgtgatccacaaacccggttctttgtccctcctaatatcaaacagtgg

SEQ ID NO: 496093 - DNA, 100 bp, Homo sapiens
gagtcatccctactcccaacatctggaggggaaaggcatctctcgggacaactggcacaagcgccgcaaaaccgggggcaagagaaagccctaccacaag

SEQ ID NO: 496094 - DNA, 100 bp, Homo sapiens
gcgcctgcggacctaactagctccaggttaggccgagctttgcgggaaagcagcggtttttcgttggaatatacgttgcacatttatggcgattctgagt

SEQ ID NO: 496095 - DNA, 96 bp, Homo sapiens
aagcggcttttcagattgctgcagaaaacttctttcttcaggataattggacagcacttatatctgcatcgaaagaagggcatgtgcacatcgtag

SEQ ID NO: 496096 - DNA, 75 bp, Homo sapiens
gtgggtgtaatacatcatgaactgcaggagccctctttgggacagatgcagaagcccccattaagcagtgcccag

SEQ ID NO: 496097 - DNA, 98 bp, Homo sapiens
ctcatctcctcctcaactcagagtggggcctatgtggtcactcccttccactgcaccgacctgggctctgcagtccttcatccaagcctacgccacct

SEQ ID NO: 496098 - DNA, 100 bp, Homo sapiens
attttaaccaaggcagttggtggaaatgagagtgaattactggaactgaaacggcagcagcaagagcaagaaagagccaaaatccaccagactgaacaca

SEQ ID NO: 496099 - DNA, 73 bp, Homo sapiens
cagcgaggagctcagcggcgggaggatcaaggttattcagcttctcaaggctggaaaagcgaaggaagtttcc

SEQ ID NO: 496100 - DNA, 100 bp, Homo sapiens
tgctgtcccgggcctaccccctggactccctggagaagcagatggaaaagcttcctgcctgacacagctcacttcaagaagtgcacaatgtcagaacgtg

SEQ ID NO: 496101 - DNA, 83 bp, Homo sapiens
cctgaagtcggcgtgggcgtttgaggaagctggggcgaagctgtgctcaggcccgggctggacgcagagccagagctgtcccc

SEQ ID NO: 496102 - DNA, 98 bp, Homo sapiens
acagctgaaggatgaaggagccagtttggctgaaaataaaaggtgttgacttcaaaatcaaaactgtagagctaagaggaaagaaaattagattacag

SEQ ID NO: 496103 - DNA, 100 bp, Homo sapiens
gcgccccccagagagagccctcaacaggaaggcatgcatgtgacacctcagggagaagcaaagttgttgaaagatgggaaagtcttcagagtggtgcgag

SEQ ID NO: 496104 - DNA, 75 bp, Homo sapiens
gcaagtattgctgtgggtgctgggacttcccgtccgcggcgtggagggtgaaaggtgtagcagtcactcggccta

SEQ ID NO: 496105 - DNA, 74 bp, Homo sapiens
aaaatgggactggttgaccaactggtggaacccctggcatcagaagagctaacaattgctggaatgacctttac

SEQ ID NO: 496106 - DNA, 75 bp, Homo sapiens
tggaaattgaacaagcgtcacttgacaagcctatagaatcgaagctgcacacatacatgtaagagaagcaaaaat

SEQ ID NO: 496107 - DNA, 75 bp, Homo sapiens
ggcactggacacagatggacaagagtatgctgctgctgttccgctttgcgtcctcgctacaaacgcctggtggac

SEQ ID NO: 496108 - DNA, 100 bp, Homo sapiens
cggaggcggctccgctcggccggcgcggcgcagaagaaacccgcggcgaccacagccaaagcgggcggatcgcttacacctgagacgaactacagaacag

SEQ ID NO: 496109 - DNA, 71 bp, Homo sapiens
accgtggtgacattgtatcattggtaaaagtcctccatacattttctccccaattccattccttgggcatg

SEQ ID NO: 496110 - DNA, 82 bp, Homo sapiens
gaaccttcgaccttggacttctcagcctccagaatggtctcgtcagcctatctcggcccctctcttttcatgtcctgacaaa

SEQ ID NO: 496111 - DNA, 100 bp, Homo sapiens
gccgtgcagtacaacgagcctctcaaagtctttctccacctggctgacatctacgccaagtcagagaaattccaggcagccaagaacttgatgaatgctg

SEQ ID NO: 496112 - DNA, 75 bp, Homo sapiens
gtctgagagagggaagtcgcctctgtgctcgtaagaatgattgatgttggctgatattggagtgctcattcacat

SEQ ID NO: 496113 - DNA, 76 bp, Homo sapiens
agtggacgaggtgttggcggaagggccgtgcaggcctgcccagctgccagcggtggcccccatagctgcctcctcc

SEQ ID NO: 496114 - DNA, 98 bp, Homo sapiens
cagtgtcgacttaaagaccctctgcattagtcctcgggagcactgctgggttctctatgtggatgtgctgaaagaatcttcaagagggagacataggg

SEQ ID NO: 496115 - DNA, 83 bp, Homo sapiens
caagcgcctctactacctctggatgtgagcagtgaggagaatgaataccttccaagaccagagtggcagctccagtaatagag

SEQ ID NO: 496116 - DNA, 76 bp, Homo sapiens
atgaagtgcagaggtttttttctggtgctcatggaaacaacctcattgctgttctagccaaatacatctaccacaa

SEQ ID NO: 496117 - DNA, 100 bp, Homo sapiens
gagtggaggcatgtgaccccagcccagatagactgctttggggagtatgtggaaccgcaggactgcagggtctctccagtgtgacagtgacagtgaccag

SEQ ID NO: 496118 - DNA, 74 bp, Homo sapiens
gataaccatgtttgtacagcgacagcacgtgcagcacatccgcatcgatggctccacctcatcagctgagcggg

SEQ ID NO: 496119 - DNA, 75 bp, Homo sapiens
cctcactgaagtgaagaaggacgtgtgtggaggtcattgcaaaggaaggacaaaacctgaaagagctatatttgg

SEQ ID NO: 496120 - DNA, 97 bp, Homo sapiens
ttttaaagcttcaaaatcctaagactcagcactgttgcgggcagaagatggctgtgccacccacgtatgccgatcttggcaaatctgccagggatgt

SEQ ID NO: 496121 - DNA, 100 bp, Homo sapiens
agatgcagctaacctactgaatgatgccttggctattcgtgagaaaactttgggcaaagatcatcctgcgatctcggtgccggtagcgggggcagttcac

SEQ ID NO: 496122 - DNA, 100 bp, Homo sapiens
ccagcctcagaacccaccggcccagccggcacccaatgcctggcaggtcatcaaaggtgtgctgtttagagacccccaacacagcaggcgcaggggccac

SEQ ID NO: 496123 - DNA, 75 bp, Homo sapiens
ggaaaagagccctggaatatgaagcaacatgagatggtggatgaacccacagttgactatattgtggagtatgac

SEQ ID NO: 496124 - DNA, 97 bp, Homo sapiens
ggaagatggcgggacggctgccggcctgtgtggtggactgtggcacggggttccttgttccgaaactgcacacaggatggctggtcagaaaccttcc

SEQ ID NO: 496125 - DNA, 118 bp, Homo sapiens
gtgtgccctggcactgagcggccgcggccatggcgtacgcctatctcttcaagtacatcataatcggcgacacagtcctaccctggtccaagcctggaaagtgaagacttcaacattc

SEQ ID NO: 496126 - DNA, 83 bp, Homo sapiens
atggcgtctgctagtagggtcgttcaggcctccggtgtggctgtctctgatggtgtcatcaaggtgttcaacgacatgaaggt

SEQ ID NO: 496127 - DNA, 82 bp, Homo sapiens
cgtcccccgcgggtctgctctgtgtgccatggacgggctggcctgccactcctcctgctatgatgcctgggcagatcccgga

SEQ ID NO: 496128 - DNA, 75 bp, Homo sapiens
gaatcctaaagcgtttcctcgcttgcattcagctcctctgtgtttgccgcctggaaataagcgggttttgaaaac

SEQ ID NO: 496129 - DNA, 82 bp, Homo sapiens
gagctgcagcagagggagcttgccttgaaggacaagaacagcgccgtcaccagcagctcggagcccaagatcctcttctcct

SEQ ID NO: 496130 - DNA, 90 bp, Homo sapiens
atggccttgatcctcctgccttagcctcccaagcagctggtattacagactgtttgtctgtgggatataaacgcaggaccaaaagaaggc

SEQ ID NO: 496131 - DNA, 100 bp, Homo sapiens
agccccggctctgggctacggactatgggcgaatagctctgaccacccggcgaagactgcctgcgctgctgacttaaggccccaacaccaaacacagaag

SEQ ID NO: 496132 - DNA, 75 bp, Homo sapiens
gctttgctctgtggacccgtgagcaagcataagctgccaaaccaagatccagcctccatcccaccacttctcccc

SEQ ID NO: 496133 - DNA, 75 bp, Homo sapiens
tagagaatcaaccttctgaattcaggaggatagaatctccactgaaacatcaggacaggaagatgtcacccaagc

SEQ ID NO: 496134 - DNA, 51 bp, Homo sapiens
gcccgcctgcggctgctccggggtttgaacataatctttcatgtagctttg

SEQ ID NO: 496135 - DNA, 90 bp, Homo sapiens
gttcctgctccttctacatctgcagataaagtggagaggtcacacagcggcagtgataaagagcacagggatgtggagagatctcaagaa

SEQ ID NO: 496136 - DNA, 100 bp, Homo sapiens
ccggctggccgccaggaagcgccctacagctccggctgggcattgccggtggtggtgtgcacattgagccccggtatagacagttcccccagctgaccag

SEQ ID NO: 496137 - DNA, 75 bp, Homo sapiens
aacaatgattgctcaagacttctttgtggctttgctaaaggacaggtttccatgctgagctcctgcccatcttca

SEQ ID NO: 496138 - DNA, 126 bp, Homo sapiens
tcctccagcaaattctactgaccctgcagcatctaccgctcactgtagaccatctcaagcaggaatcagagatcattgatttcttcctgggggcctctctcaaggatgaggttttgaagattatgc

SEQ ID NO: 496139 - DNA, 83 bp, Homo sapiens
aggcgctgcgccgcaacgccgagcgcaccgacatctgcctgctcaaaggccggctggatcctgcaggcagctgtagccgttcc

SEQ ID NO: 496140 - DNA, 97 bp, Homo sapiens
gaggaacaaacagatagccatgggaagaaagaaattcaacatggatcccaaaaagaacgtgaaggatgatggacagcacgtgtggcgactgaagcac

SEQ ID NO: 496141 - DNA, 100 bp, Homo sapiens
aggaaggggagcccgggacccccgggggcgcaggtaatctatttaaagaagacaccagaagaagcctacagagcactcctgtctggctcaaaccccccct

SEQ ID NO: 496142 - DNA, 100 bp, Homo sapiens
tcggaagtggaaacttctcccaagtgaagcttgggattcactccctaaccaaagatggagtctcactttgtcagtcagactggagtgcagtagcacgatc

SEQ ID NO: 496143 - DNA, 100 bp, Homo sapiens
cgaggacaatgattgcggagcccgctcacttttacctgtttggattaatatgtctctgttcagaaaacctcggatcaattctcagctggtggcacaacaa

SEQ ID NO: 496144 - DNA, 82 bp, Homo sapiens
taaaataaccgtccccgccagtcagaagttgagaactcccccactggaaaggattctgaaagaaatgaagtcagccctcaga

SEQ ID NO: 496145 - DNA, 100 bp, Homo sapiens
acggggctgccgcaggcccagctgctctggcgcaagatccggacgctgcggctgaagatcttggcagacgcagcagctgagggggtcccggtgcgtgggg

SEQ ID NO: 496146 - DNA, 90 bp, Homo sapiens
gaacgttactgtggagaaccaaccaagggtgctgataagactgtgaaaggcccagatggactgaccgcctttgaagccactgacaaccag

SEQ ID NO: 496147 - DNA, 98 bp, Homo sapiens
caataatgactactttgaagaccttaaaaagtactgtttccacagattattcagagctgggagagcttcccccacgatctcctttagaaccagtttgt

SEQ ID NO: 496148 - DNA, 75 bp, Homo sapiens
gcctagaatttttggctccaataaatggtacgtgccctggaggaggccaatgctgacctggaggtgaagatccat

SEQ ID NO: 496149 - DNA, 82 bp, Homo sapiens
accgttggttctgacgaggcacagcgtttcttgcaagaatgggagctcttggataagcacaagaatacagagagcatggtgg

SEQ ID NO: 496150 - DNA, 98 bp, Homo sapiens
gtgacagctaatcccagcataattcggcaaagcatcgagagtaaacatgaggttacgatcctgggaggacttaatgaatttgtagtgaagttttatgg

SEQ ID NO: 496151 - DNA, 100 bp, Homo sapiens
gtccccgaaggctatttcgccgctggcgtcaggactattttcacgttttaatgccgagaggtctctgtgacgattttgtgaacagagtatctgtcaggca

SEQ ID NO: 496152 - DNA, 50 bp, Homo sapiens
tggcatggtcctcaagaagttcctaaaagcaatggctgccatccggaaga

SEQ ID NO: 496153 - DNA, 108 bp, Homo sapiens
gggaaggagacagccaaagagctggctcagagaggcctcattgctacgatttcagagtaccctggtaatagctgagcatgcaaatgattccctagcacccattacttt

SEQ ID NO: 496154 - DNA, 157 bp, Homo sapiens
ccgccccttcgatagctcatctttgcgcgtcgcagtcgcgcggagcccggcttccgacgtgcagcctggcagtgcagtgctcttttatcttcctgccaagaagaatgtggattccattcttgaggattatgcaaattacaagaaatctcgtggaaac

SEQ ID NO: 496155 - DNA, 75 bp, Homo sapiens
tggggttgacgacctagctggcaatggtggatgtgatctttgctgatgtggcccagccagaccagacccggattg

SEQ ID NO: 496156 - DNA, 100 bp, Homo sapiens
acaattggaatacatgcgaaatatgataaagcatgccgaaatggagaggacatctgtcttagagaaacaaggtaagaaggtggatggctctgtaaatgcc

SEQ ID NO: 496157 - DNA, 97 bp, Homo sapiens
gtccggcttccagatcaacctcaacccgctcaaggagccactcggcttcatcaaggtcctcgagtggagacgagttgtactgctgtcacaggaaatg

SEQ ID NO: 496158 - DNA, 100 bp, Homo sapiens
gttggcagcaggtctggtgtgctggtgtttggggcacgtccagcctctttggagagtgggttcagatggctccaactctattttctaaatttattccaaa

SEQ ID NO: 496159 - DNA, 75 bp, Homo sapiens
ctccactgaggtcacacagccggctggccagctaaactatgtggatccagctactggctatgtggtgctcacaca

SEQ ID NO: 496160 - DNA, 97 bp, Homo sapiens
tcccgacggtcacccgaatcgcagggagtcgccgctggagaggggctcggcgcccggcggggactgcaggtgtgagcgccactttgaagggcatcca

SEQ ID NO: 496161 - DNA, 75 bp, Homo sapiens
caaagagcagatgccaaatctggacctaaagggagcatcgttaccgacagcaggcaggtgcgccttgccacaggc

SEQ ID NO: 496162 - DNA, 95 bp, Homo sapiens
gtgaaagagactcggtgacagatacaggtgacggccacccacggactctgtcacttgctgggattcacacacggcacggaggcagagtggcagca

SEQ ID NO: 496163 - DNA, 50 bp, Homo sapiens
actcattcaaggttacccagttggtggtataagttgaaatccaaaccagg

SEQ ID NO: 496164 - DNA, 96 bp, Homo sapiens
gcggtgttctggtgcacccccagtgggtcctcacagctgcccactgcatcaggaagttggccgactgcgatgtgagtgacagcagctgcagcagcc

SEQ ID NO: 496165 - DNA, 75 bp, Homo sapiens
ggagggagttctcttctggccctgggggccgcaggaagctatgaagcagataacccagctcctaccagaggacct

SEQ ID NO: 496166 - DNA, 100 bp, Homo sapiens
tcccgtgtgcttagaggtgtacgagaagccggtacaggtgccctgcggacacgtagtgatggtgtgcaacaaacaacctacctcgcccagcagtactgcc

SEQ ID NO: 496167 - DNA, 100 bp, Homo sapiens
agcatgatgtgtacaaaggcctacttccagctggcagcctgttatcgactacattgatagtaaatttgaggactacctaaatgcagaatcacgagtgaac

SEQ ID NO: 496168 - DNA, 90 bp, Homo sapiens
cctgaagccatggtttcttccctgccagaaatgaaggttcagttatgaggcaaccctctaggtcaaattattatgtgaccaaaaaaagaa

SEQ ID NO: 496169 - DNA, 101 bp, Homo sapiens
tggggtccggactgcgagatggaggaggggcggcgctgcggccacccggcagataacaattggtgtatatgatccctgtaacttagcccagtaccctggat

SEQ ID NO: 496170 - DNA, 100 bp, Homo sapiens
atgctcgcccagccacccccaggacgccttctgcaactccgacatcggtgcagctaaatcaagtccagcagctaaaccaggatccacaccttctcgaccc

SEQ ID NO: 496171 - DNA, 50 bp, Homo sapiens
aaatccgggggcaaggccaaaaagaagatcacttaggaaaatggctgttg

SEQ ID NO: 496172 - DNA, 100 bp, Homo sapiens
gccagttgctactgctcctattcctggtactccatgctcctggaatgaggccgcccatgggaggccatatgccaatgatgcctgggcccccaatgatgag

SEQ ID NO: 496173 - DNA, 74 bp, Homo sapiens
cctgcgctgccgccgctctgaggagttaaaggttcaaaccttgtactactcagctgatcacaagctgcttgatg

SEQ ID NO: 496174 - DNA, 100 bp, Homo sapiens
gacctaaagccacagtcttcaagagcccacggacaccacctcaacgaagtggcaatgcattgaggatacatctggcaagcttcgaattcacaagtgtaaa

SEQ ID NO: 496175 - DNA, 75 bp, Homo sapiens
caatgaaggggaacaaagatttgggagcatctactttgtgccaggtggggaccaaggcatactgaacacattttt

SEQ ID NO: 496176 - DNA, 83 bp, Homo sapiens
ggaaattattttgggtcttcttcttaatcccatatctggacatctggaacatccatgctacctgtactacagaaacatggaat

SEQ ID NO: 496177 - DNA, 100 bp, Homo sapiens
actgcaagttcaaagggcaggagtgcggccaccaagacttcaccacatccttttcagtggagagggaactacaggataacagcagttaccccgacgaacc

SEQ ID NO: 496178 - DNA, 98 bp, Homo sapiens
acgcggagagcacgccatgaaggcctcgggcacgacgcatcttctctccagactgccgatcccagaaagccaggtgatcaccattaaccccgagctgc

SEQ ID NO: 496179 - DNA, 83 bp, Homo sapiens
actccttgggggtcgagcacataacggggttcgggtgtctcgtgtgtgaacatcacagtaatagctcttcaagtctgcaataa

SEQ ID NO: 496180 - DNA, 80 bp, Homo sapiens
cctctggatgaaacgtcaggaatttactacacaggcctttggacaagcacacacaaaccacaagaaggtggctgctgacg

SEQ ID NO: 496181 - DNA, 100 bp, Homo sapiens
ccgcctggagccgctgcggggggagcccaaccccgtgcccaactttatccactgcagggcgaccattgacgaggtggagacggacgtggtggagattgag

SEQ ID NO: 496182 - DNA, 100 bp, Homo sapiens
cttcgtgctgctcgacgtgctgtgcttactggtcggtgtggatgtggaagcagccaagcgggcagaagaggaattgctccttcatgacacgaggtgctgg

SEQ ID NO: 496183 - DNA, 75 bp, Homo sapiens
ccaagcttaacttttccaatgtggaatcctgggccttcattggctgataccatgttaaagatgggttttcaacaa

SEQ ID NO: 496184 - DNA, 76 bp, Homo sapiens
ttgtttgtggatcgctgtgatcgtcacttgtctcctggaggaggactccgaggaggagggagacttgtgtcgcatc

SEQ ID NO: 496185 - DNA, 97 bp, Homo sapiens
ggaggcgcgcgcggaggccgcgacggacgcaagatggcgacggcgaccatagctctcgaaacattggcaaatttggagcgacagatctatgcttttg

SEQ ID NO: 496186 - DNA, 120 bp, Homo sapiens
aggagtccacctggggctcccctgacagccacctgcccactttgtgatcagagccgtgttcggggagtctttcagctctggctttctggatctgtgcttctctggtagaggaaccctgag

SEQ ID NO: 496187 - DNA, 75 bp, Homo sapiens
ctttatgtgcctgtaaaagaatacccagattttgccttctgccgggaatgtaaagaagcgtaccatgaaggggag

SEQ ID NO: 496188 - DNA, 125 bp, Homo sapiens
gcatgactcggtggtcatggtcacccaggagagtgacagcagctttctggtcaaggccaggcctcatggggcgtctccagtccccaggacgtgcagggtgtgaaggggtcttgcctgcttatccc

SEQ ID NO: 496189 - DNA, 98 bp, Homo sapiens
gggggaattgcaggcccatacgatttgagccaccaatgctggatttccatgaacagtaatactgcattgcatgattgtgcagaatctggaagtttgga

SEQ ID NO: 496190 - DNA, 100 bp, Homo sapiens
gtccgggattcccagccatggcagattcctccgggcagcaggctcggggagtacagacagtgaggaaagtacagactctgaagaagaagatggagcaaag

SEQ ID NO: 496191 - DNA, 90 bp, Homo sapiens
cagcctcccaagtggctgggattacggagttcacagtccccacaagaggctttctcaccgacacttgaaggtgtccactgcctccctgac

SEQ ID NO: 496192 - DNA, 101 bp, Homo sapiens
ctccggcgcggaccccgcgtgcgccttgctcgcccgcagccccgagaccgcagatccagacatttaatgtggatgcaccatgccagaccgtggaagattta

SEQ ID NO: 496193 - DNA, 75 bp, Homo sapiens
ccagcgggcctggactgtgggctggtgtgtggaactgcatgcatatgcgctagaacttctatttgatcagttgca

SEQ ID NO: 496194 - DNA, 46 bp, Homo sapiens
acgttaacatttccaacatggcagtgagctggaagaatctctactt

SEQ ID NO: 496195 - DNA, 75 bp, Homo sapiens
cggctctagggaccccccccgcgcctgcacttagccccgcgcccgagttagggcctagtcaaaattttgaagctg

SEQ ID NO: 496196 - DNA, 98 bp, Homo sapiens
tttggacatggtcctcaaatgtctccgttgaagaacaagagaggcaggaaaggaatagaggccaacagccccccaaagagggtggtgaagagagtgca

SEQ ID NO: 496197 - DNA, 114 bp, Homo sapiens
atggaagcacctgactacgaagtgctatccgtgcgagaacagctattccacgagaggatccgcgagtgtattggaagacatctttggcacatcaatttgtggaaggcgagttct

SEQ ID NO: 496198 - DNA, 87 bp, Homo sapiens
acatcaaacttactaaagacggcaatgtgctgcttcacgaaatgacgagtacgtgtcttcctcccgctcgctcggcctccccatcgc

SEQ ID NO: 496199 - DNA, 74 bp, Homo sapiens
ctgcagcagacattacttcaggacaacctcttgggcagggccatggtaggggaggagtgtgtaggtgccatcgt

SEQ ID NO: 496200 - DNA, 83 bp, Homo sapiens
gatcaaccgtgagcagtggatccagatccagacatttaatgtggatgcaccatgccagaccgtggaagatttaacgaatgggg

SEQ ID NO: 496201 - DNA, 100 bp, Homo sapiens
gccagcctaatccaaagactgtggaacttttaagtggagtggtggatcagaccaaagatgggtttgcctgcaatgagatttcattctctacatttaaagg

SEQ ID NO: 496202 - DNA, 100 bp, Homo sapiens
atggatgcacttttgaacaacagcctgcccccaccccacccaggtctgtgacagccttgggcggcgacacatgtctacctgtgccctctgtgacttctgc

SEQ ID NO: 496203 - DNA, 98 bp, Homo sapiens
gagctgaggagaacgactgggttcgcctgcccagcaaatgcgaagggccgcctgggcagaatgtcacgatggacgagggcggcacgcccctgctcccc

SEQ ID NO: 496204 - DNA, 82 bp, Homo sapiens
ctgagaacaacgtgggccttatcacactggctaatttttgaatcagagccgacaggcacttgaattgaaaatggaaaaccct

SEQ ID NO: 496205 - DNA, 82 bp, Homo sapiens
ccggaccgagcgcctcgacctcggtctgaggatgtgtgaacctattgggtactgtacaacttcaagcctcgaaatcagatag

SEQ ID NO: 496206 - DNA, 75 bp, Homo sapiens
cagcaccatcaacagatgcccctgataaaggatacgttgctgaaccttcacctagccccaggattacaaggaaaa

SEQ ID NO: 496207 - DNA, 82 bp, Homo sapiens
ataccagtccccagtgagggtgtacaaatacccctttgaattaattatggctgataaagatggaaagccactcctgccaaaa

SEQ ID NO: 496208 - DNA, 89 bp, Homo sapiens
ctcgaaggctgtgcggtctgccaggagctgcggccccgtccggcccgggctgctaaagatgtgattaaagagattgaagactttgacag

SEQ ID NO: 496209 - DNA, 75 bp, Homo sapiens
aagactcctgccgcgtataccaggcatccagccccgatgagattatttgcaggtgtcttccctcgaatggcagcc

SEQ ID NO: 496210 - DNA, 74 bp, Homo sapiens
tgtgtgacaccaagataagtaacaaggtgacaaagtacaatttgaagaatttgcaaaagtagtaaggaatatgc

SEQ ID NO: 496211 - DNA, 102 bp, Homo sapiens
gttgaaaacgttaaatttgattcctaaaaggactcaagcggaaggtgctctaccagcgtgcacccaggaatatccaccgccatgtgatcctctctgagatca

SEQ ID NO: 496212 - DNA, 83 bp, Homo sapiens
accctggccgccccgagcggagcctggagtggatgaggatcgcagtacggaacctgaccgattgcaggtgtttcacaagagag

SEQ ID NO: 496213 - DNA, 82 bp, Homo sapiens
agccaagaggaggacagttcgctacacagcaatgcatcgagctgatcttgcatctttaatggataaaacatttgagagaaag

SEQ ID NO: 496214 - DNA, 98 bp, Homo sapiens
tacacgtgggcccgaggaagaggttatgaagacagtatggagtttccagaccatagtagacatttgctacagtgtctgagcgagcagagacaccaggg

SEQ ID NO: 496215 - DNA, 98 bp, Homo sapiens
gagaatacagagagaaaattgagacggagctaagagatatctgcaatgatgtactgatgagaacacagacattgctgaaaacctctatcagaaagtta

SEQ ID NO: 496216 - DNA, 85 bp, Homo sapiens
aaaacaaaatctgttccaaaatgtacggaccccacttacaatgaaattggacccactactggcgtctggacaccagccgggatgg

SEQ ID NO: 496217 - DNA, 50 bp, Homo sapiens
aaaatgatgcttaatatcgatggtgatttgtggagctatgatttcttcag

SEQ ID NO: 496218 - DNA, 100 bp, Homo sapiens
aaactgatccagagcattgtcagacaggttgctccttgagggcaggacagttcttatggctttatccgttgcgtaagcacagagaggtctgcgaggtcaa

SEQ ID NO: 496219 - DNA, 80 bp, Homo sapiens
ctgcctcagtacaaggagagggaagttcgatacaagaggctgttttcctagcgtggcttgctgcctttggtaagaacatg

SEQ ID NO: 496220 - DNA, 75 bp, Homo sapiens
gcggagtcccaatgaaacgggcagccatggccctccacagcccgcagcaaggaccagactggcttgagctctctg

SEQ ID NO: 496221 - DNA, 100 bp, Homo sapiens
aaaagtttctccaaatgagctcatcctgggctggtaacatctgccggcacctgctgccccgggtccagtgccccgccttgattgtgcacggtgagaagga

SEQ ID NO: 496222 - DNA, 90 bp, Homo sapiens
tgcagccaccctcgctccctctgctcttcctcccttcgctcgcaccatggtttacccaaggtccagcctagcccctaggcaccatgtcgg

SEQ ID NO: 496223 - DNA, 97 bp, Homo sapiens
accgatggagacgcagtaagcgaggtatgaacgctgccgtccgtgccgtggtgcgcatgggtatctacgtgggggccaaggtgtacttcatctacga

SEQ ID NO: 496224 - DNA, 50 bp, Homo sapiens
atggagttggctaatggatgctggagatgagtatgatgtatgtgccattt

SEQ ID NO: 496225 - DNA, 50 bp, Homo sapiens
caggagaagatggcggtctccacagataatgagcttcagtccccaagatc

SEQ ID NO: 496226 - DNA, 82 bp, Homo sapiens
cttcggcagtccacccaccgccgccgcctcccagatttggtgcttccagatgtgagttatcaggtggaatccagtgaggagg

SEQ ID NO: 496227 - DNA, 75 bp, Homo sapiens
ctgtgactgcagtcgtgttcgtcgcacttggaacatcagtgccaggtatttttaaacacactctctccatctcaa

SEQ ID NO: 496228 - DNA, 75 bp, Homo sapiens
ccgccacttccggaagactcctggcccgggattatgccaagaaaccagggatcgtgggactttaccagatcggtt

SEQ ID NO: 496229 - DNA, 75 bp, Homo sapiens
gagcagtagatgatgatgtagcagaagggtgaaaaccaagacagctgccaaatatggcctttctgcccagccccg

SEQ ID NO: 496230 - DNA, 106 bp, Homo sapiens
aaacctcaggacttgagtaacagcaacatgaatgctgcttctaaattacttgggcaaaattgggtccaaaacgcctttgatggcagctgcaactttttccgttggt

SEQ ID NO: 496231 - DNA, 100 bp, Homo sapiens
gcctgcgctgcgcactcgagcctggcgggccggcacggtgcgggccatgagcggggcggtgccccaggacctagcggaattgaatgatctggcacgggac

SEQ ID NO: 496232 - DNA, 82 bp, Homo sapiens
ggcgggaccctggtctccgcgtacggataacgaaggaggcccaacttcattcaataaggagcctgacggatttatcccagac

SEQ ID NO: 496233 - DNA, 98 bp, Homo sapiens
accaacaacagcaacagcaagaagaagagcccagctagcaccttcgccctctccagccaggtacctggctactacaaagttctgggaaagggaaagct

SEQ ID NO: 496234 - DNA, 75 bp, Homo sapiens
ttgggatcccccagttccaaagtgtcttaaagaagttgattcaagtcagttgagacgccagttgtgtggaggaag

SEQ ID NO: 496235 - DNA, 82 bp, Homo sapiens
tggaagcaggactgcgccgcgtcttcctcaaggccctgggcagtgacggggttcgggtgaccatggagagtgcgctcaccgc

SEQ ID NO: 496236 - DNA, 90 bp, Homo sapiens
ggccctcacagcaaccagcaccagatgaaggagcattcctcttggtacagtgctgtggataccaatccactttctctgtatgtcatgcat

SEQ ID NO: 496237 - DNA, 75 bp, Homo sapiens
cttgaatagcccagtgaattcatctaaacagctgattgggcagaaagtggcccatgctctggcagagggactcgg

SEQ ID NO: 496238 - DNA, 82 bp, Homo sapiens
cgaaaaagctcaatgcctcagaaattcattgcagacgacgttcccgaagcaaaagtccattcagaaaagacaagagccctgt

SEQ ID NO: 496239 - DNA, 90 bp, Homo sapiens
cctggtcctgctgctcggggtccgcgcggcctccgcggagccaggttatgatgtgattgctcaagcccaatctgggactgggaaaacggc

SEQ ID NO: 496240 - DNA, 110 bp, Homo sapiens
ccggcagttttgtgaaaccaggcctgggctggagtgttacattcagttcctggactccgtgatctttaatctcatgaagtacgacagctacagccgcttcttaaagtctg

SEQ ID NO: 496241 - DNA, 75 bp, Homo sapiens
gccagctaggagcgctctgtggtgcctggggctgaacgcggctttctggcacagtggacagtttggcacaatcaa

SEQ ID NO: 496242 - DNA, 90 bp, Homo sapiens
accggctggacctgttcgagatcagccagccgaccgagatcaatgtccgagttaccaccatggatgcagagctggagtttgcaatccagc

SEQ ID NO: 496243 - DNA, 110 bp, Homo sapiens
ggacctaaggaggtacccactggatgaacaaaactgcaccttggaaattgagagctgtagttcttcctttgccagcaaacccaccacaccaactggattgggtggaggat

SEQ ID NO: 496244 - DNA, 83 bp, Homo sapiens
gaagaacccatcgggcagctacacatcttgaaagagaagctcttcctgtgaggtgagaatgagatggtgatcatgagacctgg

SEQ ID NO: 496245 - DNA, 100 bp, Homo sapiens
gagagtcagtggagctgtttggcaaagtgacaggcactcagcccatcacctgtacctggatgaagttccgaaagcagggtgaatctcctaatggctcaag

SEQ ID NO: 496246 - DNA, 51 bp, Homo sapiens
atacttcccatgataaacttaaggaggagatgttaaagtaacccatcttgc

SEQ ID NO: 496247 - DNA, 74 bp, Homo sapiens
cgcacgccgaccggcgccgggagatcctggacaatgcagatcttcgtgaagactctgactggtaagaccatcac

SEQ ID NO: 496248 - DNA, 88 bp, Homo sapiens
ggattcttcaaaaacttcacctgaagcacttttcaggattagaagaggctgtgtatagaaacatacaagcttgcaaggagcttgccca

SEQ ID NO: 496249 - DNA, 100 bp, Homo sapiens
ggtcagtcaacccagaggatccccagtatgcatctcaagatgtggtggccaccgagtactaaattcacttgggaataaaagaaaaacataagaaaattat

SEQ ID NO: 496250 - DNA, 100 bp, Homo sapiens
tgaacgaagattcgaaaagccacttgaagaaaagggtgaaggaggcgaattttcagttgataggacaagactgatacactggaacacgaactaagaagag

SEQ ID NO: 496251 - DNA, 82 bp, Homo sapiens
ttgcagatcctgattgtaggtggtgtccagctccagactgtggatccagctatgggacacagcaggacaagaacgattcaga

SEQ ID NO: 496252 - DNA, 113 bp, Homo sapiens
gatattggccgacaaggaagtgaagaaggcgcatcactcccagctgcgcaaagcttgcgaggtggcgttaggtatcattgcccagtgcctaagatcttttatgttcagctcac

SEQ ID NO: 496253 - DNA, 96 bp, Homo sapiens
gtcctgtcctccccacccagaggcacagtcagcttaagacagcaactctggaaagtggcttctaactcggcgcattttcttagtggatgcagtaag

SEQ ID NO: 496254 - DNA, 97 bp, Homo sapiens
cagcctggtgagggtgatgttcgggaggaggccttgtccacagtgtggaagtaattcgtctaggacacagttattttataaactgggaccggaagat

SEQ ID NO: 496255 - DNA, 83 bp, Homo sapiens
gctgagccgcgctgcgcagccgacgcgggaatgaagcgggcgctgggcaggtagacgaagttcctgatggagctgtaaagcca

SEQ ID NO: 496256 - DNA, 100 bp, Homo sapiens
gtggaaagaagatacacagcagttgtcttaaacagcccttctgttacagtggatgatctgaagaaccttttcatagaagctggatgttcagtgaaggctt

SEQ ID NO: 496257 - DNA, 75 bp, Homo sapiens
cggatcctggaggagcgccatagtatccacttcatcattaagagctggctccaaggctgcatctctccactggac

SEQ ID NO: 496258 - DNA, 98 bp, Homo sapiens
cccaaaagcacaagaactggaggtttcagaagacgaggcagacgtggctcctgctgcacatgtatgacagtgacaagctggagatggagctgaagatg

SEQ ID NO: 496259 - DNA, 75 bp, Homo sapiens
ccgggtcttccagagcgtgaagatcaagatcggttacgggcaggacttgagtggcttcggacagggcttctcaga

SEQ ID NO: 496260 - DNA, 75 bp, Homo sapiens
aatctattgggagatatttatgagatgtacagacctcttcccagatttctcgaatgctggcagccaaaaccgttt

SEQ ID NO: 496261 - DNA, 90 bp, Homo sapiens
taagagaagctcaaggccgaagccgagcagaggatctaaatacaagagtggcctattggctgctttgtaccgcctcagtggagactggaa

SEQ ID NO: 496262 - DNA, 50 bp, Homo sapiens
tgaagacagatgcaccaacgagaagaacatgagctgcctgtggacatgga

SEQ ID NO: 496263 - DNA, 90 bp, Homo sapiens
gcttcagcagaagaaacacttcctataaatctcgcccaaacaggaaaggatcagttcttaagagcagccccggtaactggaggaatggga

SEQ ID NO: 496264 - DNA, 75 bp, Homo sapiens
taatgactgtctcacattggccggcaacttgttccaggtgtgcggcgacatccatggacaattctatgacctcaa

SEQ ID NO: 496265 - DNA, 105 bp, Homo sapiens
gtgaagagacaggaggcagtagccaaacacccagcctttctgagaaaagtctacagcattctttctctgcaggttctcttaactacagtgacttcaacagttttt

SEQ ID NO: 496266 - DNA, 101 bp, Homo sapiens
gaaggagagaaaatggcgtccacgggtttttcgttggaatatacgttgcacatttatggcgattctgagtgtgagggcagacttctgccaggctcagcaca

SEQ ID NO: 496267 - DNA, 75 bp, Homo sapiens
attcgttgttgtaaggctctgacaggcattgatctaagtgtgtgcacacaatggcttgaagtagaaaatgccatg

SEQ ID NO: 496268 - DNA, 82 bp, Homo sapiens
tgacacggctttggaaacgacgtcatgtgttaggtcaaaatgcagatcttcgtgaaaacccttaccggcaagaccatcaccc

SEQ ID NO: 496269 - DNA, 75 bp, Homo sapiens
gtgcaactttcagaagtggtcccagatgactcctcctctgagagtggcagcggcaatggctcctccaccctgaac

SEQ ID NO: 496270 - DNA, 100 bp, Homo sapiens
agctgtgtattccggctggagttcctcccatcaaagacatcttaaagccagaaataatggaggagattgtgatggaaacacgccagaggcttttggaaca

SEQ ID NO: 496271 - DNA, 75 bp, Homo sapiens
agttcattaatgttggagaaaaggcatattcatgtgctttgaaggttgtaaataagacagacttgaaggtggatt

SEQ ID NO: 496272 - DNA, 50 bp, Homo sapiens
cctggcacttatgtcctccctgggtgccacttcggataaaccctttggac

SEQ ID NO: 496273 - DNA, 98 bp, Homo sapiens
tgaaggaagaaaacacaggagccggagcagaagcaaagagacggtcctaaaatctctacacttgccaaaaaacaacagtctttatgtccttacaccag

SEQ ID NO: 496274 - DNA, 95 bp, Homo sapiens
attttaatggaagccagattgtcagccctctataaattggagagtgactatgagatccttgaaagattggcccaagagagagaagcagcaaaagc

SEQ ID NO: 496275 - DNA, 78 bp, Homo sapiens
gggatgtgtcagtcaaagcagcctctgaacttctcatgaaactctcagtacttcctcctgtgctggttccaagacaca

SEQ ID NO: 496276 - DNA, 75 bp, Homo sapiens
tggatctgcgatctgtttgtgattgcttatgcccgtatagagggggatatgatagtctgcgcagcgtatgcacac

SEQ ID NO: 496277 - DNA, 49 bp, Homo sapiens
ccggcctggagctcccagggccgaggcgtaacctgatgatggaaggtgc

SEQ ID NO: 496278 - DNA, 90 bp, Homo sapiens
tggtgcaactgcccaaagaaattcggagggcagcactgtgaaataggggctgataggatgtcttcatttggtgattttgttgcattgtcc

SEQ ID NO: 496279 - DNA, 90 bp, Homo sapiens
ccctcacatccgatgcaccctttttgtcagattatcaggatgagggtgtcctggggaagtgtcgctacgtttactatgggaaaaactcag

SEQ ID NO: 496280 - DNA, 89 bp, Homo sapiens
ttcagagtgatagtttgtggcttgtagaattctatgctccatgatgccctccaaatccttggttatggaatatttggctcatcccagta

SEQ ID NO: 496281 - DNA, 90 bp, Homo sapiens
cccacccgcccggtgcggagctcgccatggcggccaccgacctggagcgcttctcgatcaagtgttccctccaaagtgcaacatagggaa

SEQ ID NO: 496282 - DNA, 75 bp, Homo sapiens
cgagtgaggccgcagcccagcgggcctcgggcgggtgaggtggctttgaccccgggttgcccggccagcacgacc

SEQ ID NO: 496283 - DNA, 100 bp, Homo sapiens
gatcctcagttccttacctacatggcactagaagaacgcttagcccaggctatggagccctacctgaacccatccttccatccctccaaaaaatttaccc

SEQ ID NO: 496284 - DNA, 75 bp, Homo sapiens
tcaaagctttgcgcaacgccaacctcaggcgagatggaaagtgaagtttcaggtctgctgaggctgagatcaacc

SEQ ID NO: 496285 - DNA, 100 bp, Homo sapiens
ggtctcatcaaggtgaacgggcggcccctggagatgattgagccgcgcacgctacagtacaagatttcttccagggcaagcacttctttctttacgggga

SEQ ID NO: 496286 - DNA, 100 bp, Homo sapiens
tgcccaaactggaacttatgctgtagacatttctttgtggtttatctaaaaaccaaagttggttgaatctggcgatgtggaacccatggatatggagggc

SEQ ID NO: 496287 - DNA, 82 bp, Homo sapiens
ttgattgctaaagtgctacatcttcaaaagcagtggactgtcttttggattcaaagtgggcaaaggccaagaaaggagagga

SEQ ID NO: 496288 - DNA, 76 bp, Homo sapiens
atcaaacatcttccaccacagcttagagttccagggtcacccccgagaggacaacaggcatctggaagtgctctct

SEQ ID NO: 496289 - DNA, 75 bp, Homo sapiens
ctatggccttgatcctcctgccttagcctcccaagcagctggtattacagaagtctgggccaacggtcacaaaag

SEQ ID NO: 496290 - DNA, 82 bp, Homo sapiens
gaagaccaagtacctgcagatcctgacctctctgatgagatggatcggtcagcccaaggctgccccctcggtcactctgttc

SEQ ID NO: 496291 - DNA, 83 bp, Homo sapiens
gtggcagtggaaaatgcgctcgggctggaccagcagcacaacagctccagctggcagcatcacttcccgccaatttatccaac

SEQ ID NO: 496292 - DNA, 100 bp, Homo sapiens
caaggattttggatgaagaagtttttgagatgaccttgaatgatgccatgaggaacaaggcaaggctgtcaattacaggaagtactggagaaaatggacg

SEQ ID NO: 496293 - DNA, 80 bp, Homo sapiens
cttggatcttcattaatgagaagacattcataaccagattattcagagctgggagagcttcccccacgatctcctttaga

SEQ ID NO: 496294 - DNA, 51 bp, Homo sapiens
cacttcatcgcacgggacccctgacgagaagctcactgtgacccaggacct

SEQ ID NO: 496295 - DNA, 90 bp, Homo sapiens
gcacggggcgctgagacccccgcgtcgctgcccagcccggtccggcgcgccacgccgagccattgagacccagagcagcagttctgaaga

SEQ ID NO: 496296 - DNA, 83 bp, Homo sapiens
ttccaagtggagtacgcgcaggaggccgtcaagaagggctcgaccgcgctggaagacctgaacttccctgagatcaaacgaag

SEQ ID NO: 496297 - DNA, 119 bp, Homo sapiens
ggacgcgccgcggccgggcagggaggagaccggcacccagacaggtggcgacggcagaggatgaacacctacctcttcatgatgcaagcccaaggcattctgatccgggacaacgtgag

SEQ ID NO: 496298 - DNA, 75 bp, Homo sapiens
tgtcaccctcatgaatcccaacaccctcatgtcccatggtgtgccacattatctgcataccagaggtactacagt

SEQ ID NO: 496299 - DNA, 100 bp, Homo sapiens
ttattcaacaccgaaaataagcttctgctacagcaaagatcagatgctaagattacctttccagaatcatattctaagaactcagccactcaggtatcca

SEQ ID NO: 496300 - DNA, 50 bp, Homo sapiens
ggccgctgctcaagttccagatttgctgctcctatcagtgacaaatcagc

SEQ ID NO: 496301 - DNA, 75 bp, Homo sapiens
tttggtgtcctgtaaaatcacagattatggggtgctacatccattgtgtacagatgcaaacagaaggggacccag

SEQ ID NO: 496302 - DNA, 83 bp, Homo sapiens
gtgggttcttggtctcactgacttcaagaatgaagctgcggaccctcgcgcactttcttatgcaaggagctaaacagtgatta

SEQ ID NO: 496303 - DNA, 95 bp, Homo sapiens
ctgtggaggaagaacatgcatatttgggtccaactgtgaagccagatgataaggtgactctgacatcattagaagcatgccagaacagactggtg

SEQ ID NO: 496304 - DNA, 100 bp, Homo sapiens
cttcttcgagtatttgtagaaggtgagaaagatcagtctaaagaaaaggagaagaaagtgaaaaaaacaattccttcctgggctaccctttctgccagcc

SEQ ID NO: 496305 - DNA, 75 bp, Homo sapiens
ggaggtcgctgagagctgggaagaggcggcagacagcggggtaaacattggagaactgatggcatcagcaatgta

SEQ ID NO: 496306 - DNA, 50 bp, Homo sapiens
ccgagggcttccacctccacgggggaactctaatgatccaggacaaagaa

SEQ ID NO: 496307 - DNA, 101 bp, Homo sapiens
tgagaactccttggactctttgcacaggatgtggagtcctcaggacaggaagtacaacagcccgcccacacagtgacttcaacgcaggagccatcaagaat

SEQ ID NO: 496308 - DNA, 90 bp, Homo sapiens
agagattcgagtaggaaaccggtaccaggcagacatcaccgacttgttaaaagaaggaatgggtaccacagaccatgtcatcgtcctggc

SEQ ID NO: 496309 - DNA, 97 bp, Homo sapiens
aatgtttcagtttgggaaatctggatgccaaacgagattggggccatgccaaggactatgtggagccatggcaatgacaggctcaacaccttgctca

SEQ ID NO: 496310 - DNA, 82 bp, Homo sapiens
caagcatgtggtgtttggagaggtcaccgaaggcctagatgtcttgcggcaaattgagagatgccctgtatccaagcccaat

SEQ ID NO: 496311 - DNA, 75 bp, Homo sapiens
tataatgaacctcatgaaagcagaaccaactcggatattgttgaggaatgaatctgaagtctgctgcagtaaaac

SEQ ID NO: 496312 - DNA, 90 bp, Homo sapiens
ggaaactaggtcgatggtcggcggcgcccggatgggcagctgagtttaagatccttaatgtacccatgtcctctcaacttgctgcaaatc

SEQ ID NO: 496313 - DNA, 100 bp, Homo sapiens
catagaggcaagtgggggaggagcgttccttgtcctccctctgcacaaggtgctacctttttacccacacttaagtgacgcaaaatgcccttcaatggcg

SEQ ID NO: 496314 - DNA, 75 bp, Homo sapiens
tgaagatggcggctgctgtaggacggttgctccgagcgtcggaaacatgtttcctaccattggtgacgtccacct

SEQ ID NO: 496315 - DNA, 95 bp, Homo sapiens
tctatgcttacggttttgagaagccttccgctattcagcagagagctattattccctgtattaaagactgctgagaaggaagaatttgaacatca
